United States Patent Application Publication US 2005/0244851 A1 - sequence listing, part 105

SEQ ID NO: 4093675 - DNA, 25 bp, Homo sapien
cagaggaagaaggattgtttgagcc

SEQ ID NO: 4093676 - DNA, 25 bp, Homo sapien
tttgagcccaggtggtcgaagttac

SEQ ID NO: 4093677 - DNA, 25 bp, Homo sapien
gatgcctagggtcttgcatcctggg

SEQ ID NO: 4093678 - DNA, 25 bp, Homo sapien
ctagggtcttgcatcctgggtcctg

SEQ ID NO: 4093679 - DNA, 25 bp, Homo sapien
gggatgcctagggtcttgcatcctg

SEQ ID NO: 4093680 - DNA, 25 bp, Homo sapien
tgcctagggtcttgcatcctgggtc

SEQ ID NO: 4093681 - DNA, 25 bp, Homo sapien
gtagattgtgcggtcctgccgctgt

SEQ ID NO: 4093682 - DNA, 25 bp, Homo sapien
tagattgtgcggtcctgccgctgtc

SEQ ID NO: 4093683 - DNA, 25 bp, Homo sapien
agttgtagattgtgcggtcctgccg

SEQ ID NO: 4093684 - DNA, 25 bp, Homo sapien
tccagttgtagattgtgcggtcctg

SEQ ID NO: 4093685 - DNA, 25 bp, Homo sapien
tccgccagctcttgtcgtgtgtcat

SEQ ID NO: 4093686 - DNA, 25 bp, Homo sapien
cccgagagcgtttggcccggcgatt

SEQ ID NO: 4093687 - DNA, 25 bp, Homo sapien
ctcccgagagcgtttggcccggcga

SEQ ID NO: 4093688 - DNA, 25 bp, Homo sapien
ccgagagcgtttggcccggcgattc

SEQ ID NO: 4093689 - DNA, 25 bp, Homo sapien
tcccgagagcgtttggcccggcgat

SEQ ID NO: 4093690 - DNA, 25 bp, Homo sapien
ggatgctgctgctgaggatgctgct

SEQ ID NO: 4093691 - DNA, 25 bp, Homo sapien
tgctgaggatgcttctggagctgct

SEQ ID NO: 4093692 - DNA, 25 bp, Homo sapien
ggatgctgctgctgaggatgcttct

SEQ ID NO: 4093693 - DNA, 25 bp, Homo sapien
tgctgctgctgaggatgcttctgga

SEQ ID NO: 4093694 - DNA, 25 bp, Homo sapien
ctgctgctagagctgctactggggc

SEQ ID NO: 4093695 - DNA, 25 bp, Homo sapien
tgctgctactactggggctgctgtt

SEQ ID NO: 4093696 - DNA, 25 bp, Homo sapien
tgctgctagagctgctactggggct

SEQ ID NO: 4093697 - DNA, 25 bp, Homo sapien
tgctggagctgctactggagttgct

SEQ ID NO: 4093698 - DNA, 25 bp, Homo sapien
tgctgggactgctggtgctggagct

SEQ ID NO: 4093699 - DNA, 25 bp, Homo sapien
tgctgggactgctgctgctgggact

SEQ ID NO: 4093700 - DNA, 25 bp, Homo sapien
ctgctgggactgctgctgctgggac

SEQ ID NO: 4093701 - DNA, 25 bp, Homo sapien
tgctgctgggactgctggtgctgga

SEQ ID NO: 4093702 - DNA, 25 bp, Homo sapien
caaagctactcaaggcctggtggag

SEQ ID NO: 4093703 - DNA, 25 bp, Homo sapien
tgcagattgtgggagaatacccacg

SEQ ID NO: 4093704 - DNA, 25 bp, Homo sapien
caagaaattggaggcataagtgctc

SEQ ID NO: 4093705 - DNA, 25 bp, Homo sapien
ccttggcttttgagtgggcctggaa

SEQ ID NO: 4093706 - DNA, 25 bp, Homo sapien
gagaccaaggattcctcgaactggt

SEQ ID NO: 4093707 - DNA, 25 bp, Homo sapien
actgagatgtcgtggtggagaccaa

SEQ ID NO: 4093708 - DNA, 25 bp, Homo sapien
gccatccccctcttggtactgagat

SEQ ID NO: 4093709 - DNA, 25 bp, Homo sapien
cgtggtggagaccaaggattcctcg

SEQ ID NO: 4093710 - DNA, 25 bp, Homo sapien
catcagggaagccataagccattgg

SEQ ID NO: 4093711 - DNA, 25 bp, Homo sapien
caggtccactggtatccgcaggact

SEQ ID NO: 4093712 - DNA, 25 bp, Homo sapien
tagcagagctagtcgtgatggccac

SEQ ID NO: 4093713 - DNA, 25 bp, Homo sapien
cagctgcgaaatgctcaggctcaac

SEQ ID NO: 4093714 - DNA, 25 bp, Homo sapien
agaagcagattgaggagccaggtga

SEQ ID NO: 4093715 - DNA, 25 bp, Homo sapien
tcaggtggtcctggccaaagtaaag

SEQ ID NO: 4093716 - DNA, 25 bp, Homo sapien
ggccaaagtaaagttgtggacagag

SEQ ID NO: 4093717 - DNA, 25 bp, Homo sapien
tggtcctggccaaagtaaagttgtg

SEQ ID NO: 4093718 - DNA, 25 bp, Homo sapien
gaatgacgtgctgagaccggaaacc

SEQ ID NO: 4093719 - DNA, 25 bp, Homo sapien
aagaaatgggtgaccatgaggacgc

SEQ ID NO: 4093720 - DNA, 25 bp, Homo sapien
catgaggacgctgcaacttatgaat

SEQ ID NO: 4093721 - DNA, 25 bp, Homo sapien
caacttatgaatgacgtgctgagac

SEQ ID NO: 4093722 - DNA, 25 bp, Homo sapien
ccagcatgatggtgcaagctggatc

SEQ ID NO: 4093723 - DNA, 25 bp, Homo sapien
gcatgatggtgcaagctggatcact

SEQ ID NO: 4093724 - DNA, 25 bp, Homo sapien
atgatgctacttggcccccagcatg

SEQ ID NO: 4093725 - DNA, 25 bp, Homo sapien
ttcctttatgatgctacttggcccc

SEQ ID NO: 4093726 - DNA, 25 bp, Homo sapien
tctgtacctcacttcgcattcctgt

SEQ ID NO: 4093727 - DNA, 25 bp, Homo sapien
aagcggaggttccagcaactcccag

SEQ ID NO: 4093728 - DNA, 25 bp, Homo sapien
catgaactgttcattgctcaactaa

SEQ ID NO: 4093729 - DNA, 25 bp, Homo sapien
tcccaggagcactgaatgaacacac

SEQ ID NO: 4093730 - DNA, 25 bp, Homo sapien
tctgctgcccgctgtaggagacaaa

SEQ ID NO: 4093731 - DNA, 25 bp, Homo sapien
caagtgctccagatttctgatgagg

SEQ ID NO: 4093732 - DNA, 25 bp, Homo sapien
gacaaactttgttgcttggcatgtg

SEQ ID NO: 4093733 - DNA, 25 bp, Homo sapien
ggttggcagccacagatcaagtgct

SEQ ID NO: 4093734 - DNA, 25 bp, Homo sapien
tagatgtcctctgttcagtacagga

SEQ ID NO: 4093735 - DNA, 25 bp, Homo sapien
gtcctctgttcagtacaggaagtca

SEQ ID NO: 4093736 - DNA, 25 bp, Homo sapien
gatgtcctctgttcagtacaggaag

SEQ ID NO: 4093737 - DNA, 25 bp, Homo sapien
aaatagatgtcctctgttcagtaca

SEQ ID NO: 4093738 - DNA, 25 bp, Homo sapien
gcgcctggccttgttccaagtctta

SEQ ID NO: 4093739 - DNA, 25 bp, Homo sapien
caagtcttaagaggaatgccatttg

SEQ ID NO: 4093740 - DNA, 25 bp, Homo sapien
taagaggaatgccatttggtatcat

SEQ ID NO: 4093741 - DNA, 25 bp, Homo sapien
ggccttgttccaagtcttaagagga

SEQ ID NO: 4093742 - DNA, 25 bp, Homo sapien
tgtcctaggtaccatgaactatgaa

SEQ ID NO: 4093743 - DNA, 25 bp, Homo sapien
tataaacctacatgaacaccacatg

SEQ ID NO: 4093744 - DNA, 25 bp, Homo sapien
tggattagtttctcgacattctgat

SEQ ID NO: 4093745 - DNA, 25 bp, Homo sapien
ggattctgtgtcttcctatgcatga

SEQ ID NO: 4093746 - DNA, 25 bp, Homo sapien
taagaagtgctgatgaactacagct

SEQ ID NO: 4093747 - DNA, 25 bp, Homo sapien
tcaaaggagccttgtttacatgttc

SEQ ID NO: 4093748 - DNA, 25 bp, Homo sapien
gcagatgtagccattatactgtgta

SEQ ID NO: 4093749 - DNA, 25 bp, Homo sapien
caactttccaggaatgaatccagaa

SEQ ID NO: 4093750 - DNA, 25 bp, Homo sapien
tggatgatgaagatttggacccttc

SEQ ID NO: 4093751 - DNA, 25 bp, Homo sapien
ggctctcagtctagtcaggtgcaat

SEQ ID NO: 4093752 - DNA, 25 bp, Homo sapien
cccatcttgaccttgagtatgtgaa

SEQ ID NO: 4093753 - DNA, 25 bp, Homo sapien
ccatatctactagcagaggccagat

SEQ ID NO: 4093754 - DNA, 25 bp, Homo sapien
tttgaattctcagattgccctgaat

SEQ ID NO: 4093755 - DNA, 25 bp, Homo sapien
tgtgtcctacccaaacctgtggccg

SEQ ID NO: 4093756 - DNA, 25 bp, Homo sapien
tgaattctcagattgccctgaattt

SEQ ID NO: 4093757 - DNA, 25 bp, Homo sapien
tgtatgtgtgtcctacccaaacctg

SEQ ID NO: 4093758 - DNA, 25 bp, Homo sapien
taatggtatgccaccagcttctcat

SEQ ID NO: 4093759 - DNA, 25 bp, Homo sapien
ctaatggtatgccaccagcttctca

SEQ ID NO: 4093760 - DNA, 25 bp, Homo sapien
agtacataaggagcaacctcctcct

SEQ ID NO: 4093761 - DNA, 25 bp, Homo sapien
tacataaggagcaacctcctccttt

SEQ ID NO: 4093762 - DNA, 25 bp, Homo sapien
cagcttcgaaaatccgcgtggactc

SEQ ID NO: 4093763 - DNA, 25 bp, Homo sapien
cccagtgtttctgcgcatgcgcgcg

SEQ ID NO: 4093764 - DNA, 25 bp, Homo sapien
tccgggacattgcagtacctcattg

SEQ ID NO: 4093765 - DNA, 25 bp, Homo sapien
cgcggcgagacgtcctggaaactat

SEQ ID NO: 4093766 - DNA, 25 bp, Homo sapien
cataatgcgcaagtttcagggcccc

SEQ ID NO: 4093767 - DNA, 25 bp, Homo sapien
gagaggcgtacaagcagatcccagt

SEQ ID NO: 4093768 - DNA, 25 bp, Homo sapien
ggccccgacagtagagaaatgctcc

SEQ ID NO: 4093769 - DNA, 25 bp, Homo sapien
gactcggtttacagagactccctag

SEQ ID NO: 4093770 - DNA, 25 bp, Homo sapien
gggtctatcacaggccagcccacag

SEQ ID NO: 4093771 - DNA, 25 bp, Homo sapien
cacaggcaagcccaaagagcgggat

SEQ ID NO: 4093772 - DNA, 25 bp, Homo sapien
gcaagcccaaagagcgggatgtcat

SEQ ID NO: 4093773 - DNA, 25 bp, Homo sapien
agcccacaggcaagcccaaagagcg

SEQ ID NO: 4093774 - DNA, 25 bp, Homo sapien
gaatatacctaggagtacaactgct

SEQ ID NO: 4093775 - DNA, 25 bp, Homo sapien
tatcttgacagcttccaggttttgg

SEQ ID NO: 4093776 - DNA, 25 bp, Homo sapien
tacaactgctggctcgtgaagaaga

SEQ ID NO: 4093777 - DNA, 25 bp, Homo sapien
ccagcttcttggactcagagcactg

SEQ ID NO: 4093778 - DNA, 25 bp, Homo sapien
ctcattggtgaaaattaggtagaag

SEQ ID NO: 4093779 - DNA, 25 bp, Homo sapien
gctgggagctggttttaactttgac

SEQ ID NO: 4093780 - DNA, 25 bp, Homo sapien
tcgctcagccgttccaggaagcctg

SEQ ID NO: 4093781 - DNA, 25 bp, Homo sapien
tgttctctccgggtactggtactgg

SEQ ID NO: 4093782 - DNA, 25 bp, Homo sapien
taaggcgccaatgatgtgcaccagc

SEQ ID NO: 4093783 - DNA, 25 bp, Homo sapien
ggatgctgtcgggagacaccacaag

SEQ ID NO: 4093784 - DNA, 25 bp, Homo sapien
tgaggttgccgtcttcaatgcgcgg

SEQ ID NO: 4093785 - DNA, 25 bp, Homo sapien
ggatgtccgtaaggcgccaatgatg

SEQ ID NO: 4093786 - DNA, 25 bp, Homo sapien
gaagatggaccccatagtttggatc

SEQ ID NO: 4093787 - DNA, 25 bp, Homo sapien
gtgcctccgcagtttcacagccgga

SEQ ID NO: 4093788 - DNA, 25 bp, Homo sapien
cgcagtttcacagccggaagatgga

SEQ ID NO: 4093789 - DNA, 25 bp, Homo sapien
gtacatctccacgtgcctccgcagt

SEQ ID NO: 4093790 - DNA, 25 bp, Homo sapien
aggaatacctcgtctccttcttcac

SEQ ID NO: 4093791 - DNA, 25 bp, Homo sapien
tcacctgcccatcctcggtgtactc

SEQ ID NO: 4093792 - DNA, 25 bp, Homo sapien
tgtaggaatacctcgtctccttctt

SEQ ID NO: 4093793 - DNA, 25 bp, Homo sapien
cttcacctgcccatcctcggtgtac

SEQ ID NO: 4093794 - DNA, 25 bp, Homo sapien
ggcagagaccacgtaaggggcccag

SEQ ID NO: 4093795 - DNA, 25 bp, Homo sapien
tgggcagagaccacgtaaggggccc

SEQ ID NO: 4093796 - DNA, 25 bp, Homo sapien
agagaccacgtaaggggcccagcac

SEQ ID NO: 4093797 - DNA, 25 bp, Homo sapien
catgggcagagaccacgtaaggggc

SEQ ID NO: 4093798 - DNA, 25 bp, Homo sapien
agccctgctgtccagccaccactgt

SEQ ID NO: 4093799 - DNA, 25 bp, Homo sapien
caacagccctgctgtccagccacca

SEQ ID NO: 4093800 - DNA, 25 bp, Homo sapien
ctgctgtccagccaccactgtgggc

SEQ ID NO: 4093801 - DNA, 25 bp, Homo sapien
acagccctgctgtccagccaccact

SEQ ID NO: 4093802 - DNA, 25 bp, Homo sapien
gccaatctctcggtcgaagtttttg

SEQ ID NO: 4093803 - DNA, 25 bp, Homo sapien
tggccaatctctcggtcgaagtttt

SEQ ID NO: 4093804 - DNA, 25 bp, Homo sapien
tgtggccaatctctcggtcgaagtt

SEQ ID NO: 4093805 - DNA, 25 bp, Homo sapien
aatctctcggtcgaagtttttgctg

SEQ ID NO: 4093806 - DNA, 25 bp, Homo sapien
ggggctgttgccatgaatgactcca

SEQ ID NO: 4093807 - DNA, 25 bp, Homo sapien
gctgttgccatgaatgactccactg

SEQ ID NO: 4093808 - DNA, 25 bp, Homo sapien
caatttggacaaagggggctgttgc

SEQ ID NO: 4093809 - DNA, 25 bp, Homo sapien
cctgccaatttggacaaagggggct

SEQ ID NO: 4093810 - DNA, 25 bp, Homo sapien
tctccacggcgaatgatgtccacat

SEQ ID NO: 4093811 - DNA, 25 bp, Homo sapien
catgagggtcctccagcttggatag

SEQ ID NO: 4093812 - DNA, 25 bp, Homo sapien
gcttggataggctcagggacttgaa

SEQ ID NO: 4093813 - DNA, 25 bp, Homo sapien
ctctggatacttgggattttcgctg

SEQ ID NO: 4093814 - DNA, 25 bp, Homo sapien
gtcatcgccgctcagtccagcatag

SEQ ID NO: 4093815 - DNA, 25 bp, Homo sapien
gaaaaggagacacgcaagtctccca

SEQ ID NO: 4093816 - DNA, 25 bp, Homo sapien
caggtcagggtcatcgccgctcagt

SEQ ID NO: 4093817 - DNA, 25 bp, Homo sapien
agtccagcataggaaaaggagacac

SEQ ID NO: 4093818 - DNA, 25 bp, Homo sapien
cccgctgccgggcaatcacagtgac

SEQ ID NO: 4093819 - DNA, 25 bp, Homo sapien
gacttggtggagaatgggactagct

SEQ ID NO: 4093820 - DNA, 25 bp, Homo sapien
caggagcagtaaggtatccccagac

SEQ ID NO: 4093821 - DNA, 25 bp, Homo sapien
atgggactagctggtcaccccgctg

SEQ ID NO: 4093822 - DNA, 25 bp, Homo sapien
cattcactggctatgacccctggta

SEQ ID NO: 4093823 - DNA, 25 bp, Homo sapien
gaaggtgaaccctttcgtgcccaga

SEQ ID NO: 4093824 - DNA, 25 bp, Homo sapien
gaatgaaaaccccagcagtcctggt

SEQ ID NO: 4093825 - DNA, 25 bp, Homo sapien
gaaacactcctggtcaaacactttg

SEQ ID NO: 4093826 - DNA, 25 bp, Homo sapien
tcaaattcactcagtgaggtaggaa

SEQ ID NO: 4093827 - DNA, 25 bp, Homo sapien
gaccaaaccagttagggatgatgtg

SEQ ID NO: 4093828 - DNA, 25 bp, Homo sapien
aggaatacttacctccactttacag

SEQ ID NO: 4093829 - DNA, 25 bp, Homo sapien
gcccaaggtctcacctcaagcagtt

SEQ ID NO: 4093830 - DNA, 25 bp, Homo sapien
gatctctgtggaacgtacgggcctt

SEQ ID NO: 4093831 - DNA, 25 bp, Homo sapien
catctatgggaaagacatggctcgc

SEQ ID NO: 4093832 - DNA, 25 bp, Homo sapien
tgtccccagtccaggtcaagtgtcc

SEQ ID NO: 4093833 - DNA, 25 bp, Homo sapien
gcgcgtgggtttgctctgcctacaa

SEQ ID NO: 4093834 - DNA, 25 bp, Homo sapien
gaggcccatgaacatggccatccag

SEQ ID NO: 4093835 - DNA, 25 bp, Homo sapien
ggagttgctccttagttctctatga

SEQ ID NO: 4093836 - DNA, 25 bp, Homo sapien
tccgtgtcataaggttgaggcccat

SEQ ID NO: 4093837 - DNA, 25 bp, Homo sapien
ccaaggtgtagaggatccgtgtcat

SEQ ID NO: 4093838 - DNA, 25 bp, Homo sapien
caggtctcggaaaacaggaaaccag

SEQ ID NO: 4093839 - DNA, 25 bp, Homo sapien
ccgtgtccgagcaacaaggatgggc

SEQ ID NO: 4093840 - DNA, 25 bp, Homo sapien
aggccaatgttgaccaggtctcgga

SEQ ID NO: 4093841 - DNA, 25 bp, Homo sapien
cagccgccacggtcagcagggtcag

SEQ ID NO: 4093842 - DNA, 25 bp, Homo sapien
aggtgtcgggcgggtgccagggtct

SEQ ID NO: 4093843 - DNA, 25 bp, Homo sapien
caggtgtcgggcgggtgccagggtc

SEQ ID NO: 4093844 - DNA, 25 bp, Homo sapien
gcaggtgtcgggcgggtgccagggt

SEQ ID NO: 4093845 - DNA, 25 bp, Homo sapien
agaggagagggagtgcagagtccaa

SEQ ID NO: 4093846 - DNA, 25 bp, Homo sapien
gagtgcagagtccaaaattgaccgg

SEQ ID NO: 4093847 - DNA, 25 bp, Homo sapien
agtccaaaattgaccggggctcctg

SEQ ID NO: 4093848 - DNA, 25 bp, Homo sapien
caaaattgaccggggctcctgctct

SEQ ID NO: 4093849 - DNA, 25 bp, Homo sapien
gtgcacatgctgccaagtctggccc

SEQ ID NO: 4093850 - DNA, 25 bp, Homo sapien
ggtgcacatgctgccaagtctggcc

SEQ ID NO: 4093851 - DNA, 25 bp, Homo sapien
tggtgcacatgctgccaagtctggc

SEQ ID NO: 4093852 - DNA, 25 bp, Homo sapien
ctggtgcacatgctgccaagtctgg

SEQ ID NO: 4093853 - DNA, 25 bp, Homo sapien
ggaagacatgagctggtgaacacca

SEQ ID NO: 4093854 - DNA, 25 bp, Homo sapien
tgtggggaagacatgagctggtgaa

SEQ ID NO: 4093855 - DNA, 25 bp, Homo sapien
tggggaagacatgagctggtgaaca

SEQ ID NO: 4093856 - DNA, 25 bp, Homo sapien
aagacatgagctggtgaacaccaac

SEQ ID NO: 4093857 - DNA, 25 bp, Homo sapien
tggccgtacccactcagtccaagag

SEQ ID NO: 4093858 - DNA, 25 bp, Homo sapien
ggctgagtggctggccgtacccact

SEQ ID NO: 4093859 - DNA, 25 bp, Homo sapien
tacccactcagtccaagagaggaag

SEQ ID NO: 4093860 - DNA, 25 bp, Homo sapien
agtggctggccgtacccactcagtc

SEQ ID NO: 4093861 - DNA, 25 bp, Homo sapien
tcagcagtaatgactaacggccgcc

SEQ ID NO: 4093862 - DNA, 25 bp, Homo sapien
tctgccaagccataagataagtgtg

SEQ ID NO: 4093863 - DNA, 25 bp, Homo sapien
gtgtgaagcccagtatatgtccagc

SEQ ID NO: 4093864 - DNA, 25 bp, Homo sapien
tccgatgccagaggatgaaagcaag

SEQ ID NO: 4093865 - DNA, 25 bp, Homo sapien
cttgattgtggttgacggggcgtca

SEQ ID NO: 4093866 - DNA, 25 bp, Homo sapien
gttgacggggcgtcaccatgaagga

SEQ ID NO: 4093867 - DNA, 25 bp, Homo sapien
gcccatttagtataaagcttccaac

SEQ ID NO: 4093868 - DNA, 25 bp, Homo sapien
acggggcgtcaccatgaaggagccc

SEQ ID NO: 4093869 - DNA, 25 bp, Homo sapien
gaagactaaagctatggacacaaca

SEQ ID NO: 4093870 - DNA, 25 bp, Homo sapien
ggacacaacacgtgaaagaaccact

SEQ ID NO: 4093871 - DNA, 25 bp, Homo sapien
ccaggcaggcgtgggcattgtacaa

SEQ ID NO: 4093872 - DNA, 25 bp, Homo sapien
accactcagaagcagccctaggaag

SEQ ID NO: 4093873 - DNA, 25 bp, Homo sapien
ggtatacagcgtgttttccgaaagc

SEQ ID NO: 4093874 - DNA, 25 bp, Homo sapien
taagaacacttttgaagtcggcagt

SEQ ID NO: 4093875 - DNA, 25 bp, Homo sapien
cccaggccaatagagatgattacag

SEQ ID NO: 4093876 - DNA, 25 bp, Homo sapien
cagcaggcacaaaacggtttctgaa

SEQ ID NO: 4093877 - DNA, 25 bp, Homo sapien
tactgtcttgcgcaggctggactcc

SEQ ID NO: 4093878 - DNA, 25 bp, Homo sapien
tgactcatatgtggcaagaggctgg

SEQ ID NO: 4093879 - DNA, 25 bp, Homo sapien
taagtcggtaataacacccaggtga

SEQ ID NO: 4093880 - DNA, 25 bp, Homo sapien
tgttcgggaaacagtcccagctcct

SEQ ID NO: 4093881 - DNA, 25 bp, Homo sapien
cctgccttctgcacggaggatgtgg

SEQ ID NO: 4093882 - DNA, 25 bp, Homo sapien
caggctagtgagcaaaaaacagtca

SEQ ID NO: 4093883 - DNA, 25 bp, Homo sapien
caggtttagggactcacaggctagt

SEQ ID NO: 4093884 - DNA, 25 bp, Homo sapien
caggatgttacactggatttgcaaa

SEQ ID NO: 4093885 - DNA, 25 bp, Homo sapien
tcatgcggtatttatagtcacatcg

SEQ ID NO: 4093886 - DNA, 25 bp, Homo sapien
tctgagtgtgcctactatagggacc

SEQ ID NO: 4093887 - DNA, 25 bp, Homo sapien
tatagggacccatgtaggtggaatc

SEQ ID NO: 4093888 - DNA, 25 bp, Homo sapien
tgtacagcctacagcattaagcaca

SEQ ID NO: 4093889 - DNA, 25 bp, Homo sapien
cttttcttctgatctcgtggagcaa

SEQ ID NO: 4093890 - DNA, 25 bp, Homo sapien
ctgatctcgtggagcaaaccccaga

SEQ ID NO: 4093891 - DNA, 25 bp, Homo sapien
tcttctgatctcgtggagcaaaccc

SEQ ID NO: 4093892 - DNA, 25 bp, Homo sapien
ctcgtggagcaaaccccagacatgg

SEQ ID NO: 4093893 - DNA, 25 bp, Homo sapien
cagtagtcggaagagttggacagcc

SEQ ID NO: 4093894 - DNA, 25 bp, Homo sapien
ctggtgagaaggagccaaagagcct

SEQ ID NO: 4093895 - DNA, 25 bp, Homo sapien
tacagaatgtcccaggccgaggttt

SEQ ID NO: 4093896 - DNA, 25 bp, Homo sapien
gaaatagctggcttgcagacggact

SEQ ID NO: 4093897 - DNA, 25 bp, Homo sapien
gcttcccgcagttttttagtggcca

SEQ ID NO: 4093898 - DNA, 25 bp, Homo sapien
tctcgcgagaacacaagagcaacgt

SEQ ID NO: 4093899 - DNA, 25 bp, Homo sapien
cactcgcgaagtggaatttgcccag

SEQ ID NO: 4093900 - DNA, 25 bp, Homo sapien
tacaccggaaatagagagaaacctg

SEQ ID NO: 4093901 - DNA, 25 bp, Homo sapien
gggctcctctacagtgttggtagtt

SEQ ID NO: 4093902 - DNA, 25 bp, Homo sapien
ttcacataaattcgctcatctaggc

SEQ ID NO: 4093903 - DNA, 25 bp, Homo sapien
acataaattcgctcatctaggctga

SEQ ID NO: 4093904 - DNA, 25 bp, Homo sapien
taggctgagcctgataagatccagg

SEQ ID NO: 4093905 - DNA, 25 bp, Homo sapien
gcttatgtgatatgggtgactttcc

SEQ ID NO: 4093906 - DNA, 25 bp, Homo sapien
tctgatttcaaggtaacttgataaa

SEQ ID NO: 4093907 - DNA, 25 bp, Homo sapien
cctttcactctggacaggttttaca

SEQ ID NO: 4093908 - DNA, 25 bp, Homo sapien
tccttcaaaataccctttcactctg

SEQ ID NO: 4093909 - DNA, 25 bp, Homo sapien
tctcccaagatcatatttaaatgtt

SEQ ID NO: 4093910 - DNA, 25 bp, Homo sapien
ttgagtcaacctgcaatgaaatctg

SEQ ID NO: 4093911 - DNA, 25 bp, Homo sapien
tttattctgcaggtatactcccaca

SEQ ID NO: 4093912 - DNA, 25 bp, Homo sapien
tattatgatgggcagtagacgcaga

SEQ ID NO: 4093913 - DNA, 25 bp, Homo sapien
tagagtgcccattatgtgtcaggta

SEQ ID NO: 4093914 - DNA, 25 bp, Homo sapien
ccatctccccggacaaagagcattg

SEQ ID NO: 4093915 - DNA, 25 bp, Homo sapien
gcattggaatattccgtttcgttga

SEQ ID NO: 4093916 - DNA, 25 bp, Homo sapien
aagagcattggaatattccgtttcg

SEQ ID NO: 4093917 - DNA, 25 bp, Homo sapien
gacaacgccatctccccggacaaag

SEQ ID NO: 4093918 - DNA, 25 bp, Homo sapien
ctgcaaatcaactcatttcaggagt

SEQ ID NO: 4093919 - DNA, 25 bp, Homo sapien
gcaaatcaactcatttcaggagtgg

SEQ ID NO: 4093920 - DNA, 25 bp, Homo sapien
atcaactcatttcaggagtggaaga

SEQ ID NO: 4093921 - DNA, 25 bp, Homo sapien
caaatcaactcatttcaggagtgga

SEQ ID NO: 4093922 - DNA, 25 bp, Homo sapien
tggttcccagcactcaaacctggtg

SEQ ID NO: 4093923 - DNA, 25 bp, Homo sapien
aacctggtgcctcaaacacagtagg

SEQ ID NO: 4093924 - DNA, 25 bp, Homo sapien
tggagcaaaagaagtcctgaaagag

SEQ ID NO: 4093925 - DNA, 25 bp, Homo sapien
cacaagacagaagaccgcacttaaa

SEQ ID NO: 4093926 - DNA, 25 bp, Homo sapien
taatggccaatgatccaagagtgga

SEQ ID NO: 4093927 - DNA, 25 bp, Homo sapien
gatcaagctgaacgtctgaccttag

SEQ ID NO: 4093928 - DNA, 25 bp, Homo sapien
cactgagacatgttgtttgagaccc

SEQ ID NO: 4093929 - DNA, 25 bp, Homo sapien
ccatagcggaggatgtcaggttcta

SEQ ID NO: 4093930 - DNA, 25 bp, Homo sapien
tgtgtcaccgcacccactttagctg

SEQ ID NO: 4093931 - DNA, 25 bp, Homo sapien
cttagtgtgaagagggatagtactc

SEQ ID NO: 4093932 - DNA, 25 bp, Homo sapien
tacattgaacacagctgagcattac

SEQ ID NO: 4093933 - DNA, 25 bp, Homo sapien
cctggcagcaggctaaaagcaatat

SEQ ID NO: 4093934 - DNA, 25 bp, Homo sapien
acagagccagcgcagcaaaacccat

SEQ ID NO: 4093935 - DNA, 25 bp, Homo sapien
aaaagggatctgctcaacaggatgg

SEQ ID NO: 4093936 - DNA, 25 bp, Homo sapien
gaaagctctgtccacccattattca

SEQ ID NO: 4093937 - DNA, 25 bp, Homo sapien
ttattcagccacgtgcacagagcca

SEQ ID NO: 4093938 - DNA, 25 bp, Homo sapien
tctcgtgatattggcggggtgacct

SEQ ID NO: 4093939 - DNA, 25 bp, Homo sapien
gaccttgttcatggagctggtttca

SEQ ID NO: 4093940 - DNA, 25 bp, Homo sapien
gccatgaggatgacctgccctttcc

SEQ ID NO: 4093941 - DNA, 25 bp, Homo sapien
cattttctcgtgatattggcggggt

SEQ ID NO: 4093942 - DNA, 25 bp, Homo sapien
tacgctgatagtataaagaagctaa

SEQ ID NO: 4093943 - DNA, 25 bp, Homo sapien
taagttgatcaattgatgcacatca

SEQ ID NO: 4093944 - DNA, 25 bp, Homo sapien
tacttcactaacacgaaagtgacag

SEQ ID NO: 4093945 - DNA, 25 bp, Homo sapien
tgatccttcaaggaaaagtaactta

SEQ ID NO: 4093946 - DNA, 25 bp, Homo sapien
ccaaggttgcagacatgcctccatc

SEQ ID NO: 4093947 - DNA, 25 bp, Homo sapien
cctccaaggttgcagacatgcctcc

SEQ ID NO: 4093948 - DNA, 25 bp, Homo sapien
gtcccctccaaggttgcagacatgc

SEQ ID NO: 4093949 - DNA, 25 bp, Homo sapien
ggtcccctccaaggttgcagacatg

SEQ ID NO: 4093950 - DNA, 25 bp, Homo sapien
ggtgggaaagtcaacgaggagaagc

SEQ ID NO: 4093951 - DNA, 25 bp, Homo sapien
tcaacgaggagaagcggggccaaac

SEQ ID NO: 4093952 - DNA, 25 bp, Homo sapien
tggtgctggtcaatgcactgttggt

SEQ ID NO: 4093953 - DNA, 25 bp, Homo sapien
ggccaaacggcctgaactgtgaagg

SEQ ID NO: 4093954 - DNA, 25 bp, Homo sapien
cactgggtcccttggtgtaagaaga

SEQ ID NO: 4093955 - DNA, 25 bp, Homo sapien
catacagcttttgccatgcactggg

SEQ ID NO: 4093956 - DNA, 25 bp, Homo sapien
tggaaaaacctgtctgttctgtggc

SEQ ID NO: 4093957 - DNA, 25 bp, Homo sapien
ttctgtggccatgtgcccactttca

SEQ ID NO: 4093958 - DNA, 25 bp, Homo sapien
ggactgttgcctgttcaagtgccac

SEQ ID NO: 4093959 - DNA, 25 bp, Homo sapien
caagtgccacttgtagcctgcatgg

SEQ ID NO: 4093960 - DNA, 25 bp, Homo sapien
tccctgtgttcggactgttgcctgt

SEQ ID NO: 4093961 - DNA, 25 bp, Homo sapien
ttatatccgctgctggcagacccgg

SEQ ID NO: 4093962 - DNA, 25 bp, Homo sapien
gcttgtatcagagggactgggccca

SEQ ID NO: 4093963 - DNA, 25 bp, Homo sapien
cattacgcatagaggtcctaagggc

SEQ ID NO: 4093964 - DNA, 25 bp, Homo sapien
tctatttctgctaccaaaggaggcg

SEQ ID NO: 4093965 - DNA, 25 bp, Homo sapien
taatgacctgcaagttaagccggct

SEQ ID NO: 4093966 - DNA, 25 bp, Homo sapien
aatgccgaatcctacgggccttcgg

SEQ ID NO: 4093967 - DNA, 25 bp, Homo sapien
gggcactttgcttctagtagacaag

SEQ ID NO: 4093968 - DNA, 25 bp, Homo sapien
tttgcttctagtagacaagggccct

SEQ ID NO: 4093969 - DNA, 25 bp, Homo sapien
ctccagtggaatgccgaatcctacg

SEQ ID NO: 4093970 - DNA, 25 bp, Homo sapien
tgagatgggcaataaacgaacaagc

SEQ ID NO: 4093971 - DNA, 25 bp, Homo sapien
gaaaaccaatggtgcaaagaccctg

SEQ ID NO: 4093972 - DNA, 25 bp, Homo sapien
tcaaggaaggtattatggagacgct

SEQ ID NO: 4093973 - DNA, 25 bp, Homo sapien
ggaactcaggttctagccggtgaga

SEQ ID NO: 4093974 - DNA, 25 bp, Homo sapien
aactgatagtcacagcactgactgg

SEQ ID NO: 4093975 - DNA, 25 bp, Homo sapien
gattccgggccagccagatatagcc

SEQ ID NO: 4093976 - DNA, 25 bp, Homo sapien
gaacataggcaagattccgggccag

SEQ ID NO: 4093977 - DNA, 25 bp, Homo sapien
gcctctggccattcatgctcagcag

SEQ ID NO: 4093978 - DNA, 25 bp, Homo sapien
aaacgtggcccatgagtccttctgt

SEQ ID NO: 4093979 - DNA, 25 bp, Homo sapien
tggtggtaaacgtggcccatgagtc

SEQ ID NO: 4093980 - DNA, 25 bp, Homo sapien
taggtggtggtaaacgtggcccatg

SEQ ID NO: 4093981 - DNA, 25 bp, Homo sapien
ggcccatgagtccttctgttttttc

SEQ ID NO: 4093982 - DNA, 25 bp, Homo sapien
tacacaaacagtaggtgggccaaca

SEQ ID NO: 4093983 - DNA, 25 bp, Homo sapien
gattctatcattggaccctctgtca

SEQ ID NO: 4093984 - DNA, 25 bp, Homo sapien
ggccaacatgacctgtgggctatag

SEQ ID NO: 4093985 - DNA, 25 bp, Homo sapien
gaataaaagccagctactaactggg

SEQ ID NO: 4093986 - DNA, 25 bp, Homo sapien
tgctgacatgggacaagcggggaat

SEQ ID NO: 4093987 - DNA, 25 bp, Homo sapien
gtggtgtgggcacgcttggcaatca

SEQ ID NO: 4093988 - DNA, 25 bp, Homo sapien
tcttgccgtctgctgggagtggtgt

SEQ ID NO: 4093989 - DNA, 25 bp, Homo sapien
ttggcaatcatgagcagctgctgac

SEQ ID NO: 4093990 - DNA, 25 bp, Homo sapien
cttccgtggaaccacagcaactctg

SEQ ID NO: 4093991 - DNA, 25 bp, Homo sapien
ttccgtggaaccacagcaactctgg

SEQ ID NO: 4093992 - DNA, 25 bp, Homo sapien
ctgctgctccactcccccaaggtgg

SEQ ID NO: 4093993 - DNA, 25 bp, Homo sapien
gctgctgctccactcccccaaggtg

SEQ ID NO: 4093994 - DNA, 25 bp, Homo sapien
gatctgctgctgctccactccccca

SEQ ID NO: 4093995 - DNA, 25 bp, Homo sapien
ctgctgctgctccactcccccaagg

SEQ ID NO: 4093996 - DNA, 25 bp, Homo sapien
tggccacagcacactgcccccaaag

SEQ ID NO: 4093997 - DNA, 25 bp, Homo sapien
tctggccacagcacactgcccccaa

SEQ ID NO: 4093998 - DNA, 25 bp, Homo sapien
gcagagtagctgcactctaccccag

SEQ ID NO: 4093999 - DNA, 25 bp, Homo sapien
gagtagctgcactctaccccagaac

SEQ ID NO: 4094000 - DNA, 25 bp, Homo sapien
tggccaaaataaggagcgaccaccg

SEQ ID NO: 4094001 - DNA, 25 bp, Homo sapien
tgaactggccgctatgggccctcag

SEQ ID NO: 4094002 - DNA, 25 bp, Homo sapien
gatttggcaacactgaactgtcatt

SEQ ID NO: 4094003 - DNA, 25 bp, Homo sapien
tgcagtccccgacatcctgaactgg

SEQ ID NO: 4094004 - DNA, 25 bp, Homo sapien
ttgtgccgtgaggatcagtgtttcc

SEQ ID NO: 4094005 - DNA, 25 bp, Homo sapien
tgtgccgtgaggatcagtgtttccc

SEQ ID NO: 4094006 - DNA, 25 bp, Homo sapien
gtgccgtgaggatcagtgtttccca

SEQ ID NO: 4094007 - DNA, 25 bp, Homo sapien
taggatgccagtgattgtcatgtct

SEQ ID NO: 4094008 - DNA, 25 bp, Homo sapien
gtcctgctgacagtctaggatgcca

SEQ ID NO: 4094009 - DNA, 25 bp, Homo sapien
tgctccagctgacgtttaaatgagt

SEQ ID NO: 4094010 - DNA, 25 bp, Homo sapien
tgagtttgcattcgcagagcccaca

SEQ ID NO: 4094011 - DNA, 25 bp, Homo sapien
ttcaaatgccaagaacttaagcatg

SEQ ID NO: 4094012 - DNA, 25 bp, Homo sapien
aacaaagcaatcaggagaacagaga

SEQ ID NO: 4094013 - DNA, 25 bp, Homo sapien
ggagatcttttaccccaatccttgc

SEQ ID NO: 4094014 - DNA, 25 bp, Homo sapien
tgccaagaacttaagcatgcaaagt

SEQ ID NO: 4094015 - DNA, 25 bp, Homo sapien
tctctctaaacaggatcactattga

SEQ ID NO: 4094016 - DNA, 25 bp, Homo sapien
gaatgatgagtcacagctctgcagc

SEQ ID NO: 4094017 - DNA, 25 bp, Homo sapien
tgtttctgagaccttgaatgatgag

SEQ ID NO: 4094018 - DNA, 25 bp, Homo sapien
aactcggagttggatacagtcagca

SEQ ID NO: 4094019 - DNA, 25 bp, Homo sapien
ccaggtgagaggtattgttgtcggc

SEQ ID NO: 4094020 - DNA, 25 bp, Homo sapien
gtgagaggtattgttgtcggctacc

SEQ ID NO: 4094021 - DNA, 25 bp, Homo sapien
gaggtattgttgtcggctaccaacg

SEQ ID NO: 4094022 - DNA, 25 bp, Homo sapien
ttgttgtcggctaccaacgccagcc

SEQ ID NO: 4094023 - DNA, 25 bp, Homo sapien
gttcagggcagcgaagccacgtgcc

SEQ ID NO: 4094024 - DNA, 25 bp, Homo sapien
aggagggcctgcacgtgttcgccca

SEQ ID NO: 4094025 - DNA, 25 bp, Homo sapien
cacgtgcccgatcacacagcgggat

SEQ ID NO: 4094026 - DNA, 25 bp, Homo sapien
tgcccatctgcgggcgtcagtgcct

SEQ ID NO: 4094027 - DNA, 25 bp, Homo sapien
taggagggtgctattaagcgcatgc

SEQ ID NO: 4094028 - DNA, 25 bp, Homo sapien
gctattaagcgcatgcatgatttta

SEQ ID NO: 4094029 - DNA, 25 bp, Homo sapien
gaataggagggtgctattaagcgca

SEQ ID NO: 4094030 - DNA, 25 bp, Homo sapien
gggtgctattaagcgcatgcatgat

SEQ ID NO: 4094031 - DNA, 25 bp, Homo sapien
ctagcagtcacccatttaagccaag

SEQ ID NO: 4094032 - DNA, 25 bp, Homo sapien
tattccgtgggtgatacagggaccg

SEQ ID NO: 4094033 - DNA, 25 bp, Homo sapien
tagaattggtggaggcctagcagtc

SEQ ID NO: 4094034 - DNA, 25 bp, Homo sapien
tatcttggtctcagagcgcccttgg

SEQ ID NO: 4094035 - DNA, 25 bp, Homo sapien
gccaggtcttgaattagagacagtt

SEQ ID NO: 4094036 - DNA, 25 bp, Homo sapien
tcactgccacgtgagggagacagag

SEQ ID NO: 4094037 - DNA, 25 bp, Homo sapien
ggagacagagctgccctatggacag

SEQ ID NO: 4094038 - DNA, 25 bp, Homo sapien
agagactgatagcacccctgcctgt

SEQ ID NO: 4094039 - DNA, 25 bp, Homo sapien
tttcagcccacgcactgcacaaggg

SEQ ID NO: 4094040 - DNA, 25 bp, Homo sapien
ctttcagcccacgcactgcacaagg

SEQ ID NO: 4094041 - DNA, 25 bp, Homo sapien
agcccacgcactgcacaagggctgt

SEQ ID NO: 4094042 - DNA, 25 bp, Homo sapien
ccacgcactgcacaagggctgtgtg

SEQ ID NO: 4094043 - DNA, 25 bp, Homo sapien
tacgtgcctacgtgcagaaaacatt

SEQ ID NO: 4094044 - DNA, 25 bp, Homo sapien
gtgcctacgtgcctacgtgcagaaa

SEQ ID NO: 4094045 - DNA, 25 bp, Homo sapien
cctacgtgcctacgtgcagaaaaca

SEQ ID NO: 4094046 - DNA, 25 bp, Homo sapien
cttgtgcctacgtgcctacgtgcag

SEQ ID NO: 4094047 - DNA, 25 bp, Homo sapien
aaagtgtctttcatattccgtgtag

SEQ ID NO: 4094048 - DNA, 25 bp, Homo sapien
tattccgtgtagatggctacatccg

SEQ ID NO: 4094049 - DNA, 25 bp, Homo sapien
ccgtgtagatggctacatccgacat

SEQ ID NO: 4094050 - DNA, 25 bp, Homo sapien
tttcatattccgtgtagatggctac

SEQ ID NO: 4094051 - DNA, 25 bp, Homo sapien
cgccccgggaagccctggaacaatg

SEQ ID NO: 4094052 - DNA, 25 bp, Homo sapien
acttcctgctccgaacctgctggga

SEQ ID NO: 4094053 - DNA, 25 bp, Homo sapien
gctccagttgagacatgaaggaatt

SEQ ID NO: 4094054 - DNA, 25 bp, Homo sapien
tggctgggtgaagaccttagctcca

SEQ ID NO: 4094055 - DNA, 25 bp, Homo sapien
tgagggcagcacgatgacttcacag

SEQ ID NO: 4094056 - DNA, 25 bp, Homo sapien
caccataacatgcttctggaggagc

SEQ ID NO: 4094057 - DNA, 25 bp, Homo sapien
gaagcagttagtattccccagctct

SEQ ID NO: 4094058 - DNA, 25 bp, Homo sapien
tctttcggatgaatgacgggcagca

SEQ ID NO: 4094059 - DNA, 25 bp, Homo sapien
ggagacattgggtagaagccttgta

SEQ ID NO: 4094060 - DNA, 25 bp, Homo sapien
gaggatgtgactggagaccttgaca

SEQ ID NO: 4094061 - DNA, 25 bp, Homo sapien
gacattgggtagaagccttgtaatt

SEQ ID NO: 4094062 - DNA, 25 bp, Homo sapien
gagacattgggtagaagccttgtaa

SEQ ID NO: 4094063 - DNA, 25 bp, Homo sapien
gctgtgtgcctcacgatgtgctggt

SEQ ID NO: 4094064 - DNA, 25 bp, Homo sapien
tcagtccatggcagtgaatttcccc

SEQ ID NO: 4094065 - DNA, 25 bp, Homo sapien
ctgggggtcctttcagtccatggca

SEQ ID NO: 4094066 - DNA, 25 bp, Homo sapien
tgatgatggaagaataccagtcgct

SEQ ID NO: 4094067 - DNA, 25 bp, Homo sapien
tccagaggaccaagtctcaggtccc

SEQ ID NO: 4094068 - DNA, 25 bp, Homo sapien
cagaggaccaagtctcaggtcccca

SEQ ID NO: 4094069 - DNA, 25 bp, Homo sapien
gagtccagaggaccaagtctcaggt

SEQ ID NO: 4094070 - DNA, 25 bp, Homo sapien
aggaccaagtctcaggtccccaggg

SEQ ID NO: 4094071 - DNA, 25 bp, Homo sapien
tcagagtctgcatttggctgaggtc

SEQ ID NO: 4094072 - DNA, 25 bp, Homo sapien
tctccttgctgaccgttggagcttt

SEQ ID NO: 4094073 - DNA, 25 bp, Homo sapien
tgaccgttggagctttccagaaatt

SEQ ID NO: 4094074 - DNA, 25 bp, Homo sapien
tggagaaattctatcccaagacctg

SEQ ID NO: 4094075 - DNA, 25 bp, Homo sapien
gcccactctaactgcgtggaggatg

SEQ ID NO: 4094076 - DNA, 25 bp, Homo sapien
atcaacagcccactctaactgcgtg

SEQ ID NO: 4094077 - DNA, 25 bp, Homo sapien
tctaactgcgtggaggatgctccca

SEQ ID NO: 4094078 - DNA, 25 bp, Homo sapien
ttcacagtccatacagacacatcaa

SEQ ID NO: 4094079 - DNA, 25 bp, Homo sapien
catgtccggcttggatccagtagga

SEQ ID NO: 4094080 - DNA, 25 bp, Homo sapien
accatgtccggcttggatccagtag

SEQ ID NO: 4094081 - DNA, 25 bp, Homo sapien
gtccggcttggatccagtaggaccc

SEQ ID NO: 4094082 - DNA, 25 bp, Homo sapien
caccatgtccggcttggatccagta

SEQ ID NO: 4094083 - DNA, 25 bp, Homo sapien
ttctcacttttgagagccccaaatg

SEQ ID NO: 4094084 - DNA, 25 bp, Homo sapien
gctataggaagtggggctgtgtctt

SEQ ID NO: 4094085 - DNA, 25 bp, Homo sapien
ctggctataggaagtggggctgtgt

SEQ ID NO: 4094086 - DNA, 25 bp, Homo sapien
gaagtggggctgtgtctttcctcct

SEQ ID NO: 4094087 - DNA, 25 bp, Homo sapien
taggaagtggggctgtgtctttcct

SEQ ID NO: 4094088 - DNA, 25 bp, Homo sapien
ttcaggctctgtggggactttctgc

SEQ ID NO: 4094089 - DNA, 25 bp, Homo sapien
tccatggctgtttcttcaggctctg

SEQ ID NO: 4094090 - DNA, 25 bp, Homo sapien
tttcctgaagatctccatggctgtt

SEQ ID NO: 4094091 - DNA, 25 bp, Homo sapien
ctcccagggtctttcctgaagatct

SEQ ID NO: 4094092 - DNA, 25 bp, Homo sapien
gcttagcttcacgagatcaggcacg

SEQ ID NO: 4094093 - DNA, 25 bp, Homo sapien
agatcaggcacgttcctggtagtat

SEQ ID NO: 4094094 - DNA, 25 bp, Homo sapien
ttcacgagatcaggcacgttcctgg

SEQ ID NO: 4094095 - DNA, 25 bp, Homo sapien
ttagcttcacgagatcaggcacgtt

SEQ ID NO: 4094096 - DNA, 25 bp, Homo sapien
tcgcgtgtctgttgtctgagcaggc

SEQ ID NO: 4094097 - DNA, 25 bp, Homo sapien
tgacccgctgggtgaacagctccag

SEQ ID NO: 4094098 - DNA, 25 bp, Homo sapien
cggcgcgaaggaagcggtaatttat

SEQ ID NO: 4094099 - DNA, 25 bp, Homo sapien
gcggtaatttataagcggcttcttc

SEQ ID NO: 4094100 - DNA, 25 bp, Homo sapien
tctggccattggaccctctaggcac

SEQ ID NO: 4094101 - DNA, 25 bp, Homo sapien
gacgagaatctcctactcaaaagag

SEQ ID NO: 4094102 - DNA, 25 bp, Homo sapien
tgcatgcacctatggagccacgctg

SEQ ID NO: 4094103 - DNA, 25 bp, Homo sapien
acctgcacaccacctatggagtgca

SEQ ID NO: 4094104 - DNA, 25 bp, Homo sapien
gcctgtgtaccggttaaatagcatg

SEQ ID NO: 4094105 - DNA, 25 bp, Homo sapien
caagttaatggcctgtgtaccggtt

SEQ ID NO: 4094106 - DNA, 25 bp, Homo sapien
agccagcaagttaatggcctgtgta

SEQ ID NO: 4094107 - DNA, 25 bp, Homo sapien
tgtaccggttaaatagcatgtccag

SEQ ID NO: 4094108 - DNA, 25 bp, Homo sapien
gtttaagcctagtagtttgacacca

SEQ ID NO: 4094109 - DNA, 25 bp, Homo sapien
gaggagcacaagacaactttctgag

SEQ ID NO: 4094110 - DNA, 25 bp, Homo sapien
catacaatgggagactactcagcga

SEQ ID NO: 4094111 - DNA, 25 bp, Homo sapien
ccgcaagggtggatcgtttaagcct

SEQ ID NO: 4094112 - DNA, 25 bp, Homo sapien
ttatcttcctgtgttgataagtgcc

SEQ ID NO: 4094113 - DNA, 25 bp, Homo sapien
tgtgttgataagtgcctcctttggg

SEQ ID NO: 4094114 - DNA, 25 bp, Homo sapien
cgcataggatggagggcagtagcga

SEQ ID NO: 4094115 - DNA, 25 bp, Homo sapien
gagggcagtagcgagatgttggctc

SEQ ID NO: 4094116 - DNA, 25 bp, Homo sapien
tcaagggggggttcacacaagcaat

SEQ ID NO: 4094117 - DNA, 25 bp, Homo sapien
caagggggggttcacacaagcaatg

SEQ ID NO: 4094118 - DNA, 25 bp, Homo sapien
tgtcaagggggggttcacacaagca

SEQ ID NO: 4094119 - DNA, 25 bp, Homo sapien
agggggggttcacacaagcaatgaa

SEQ ID NO: 4094120 - DNA, 25 bp, Homo sapien
ctcctgagcagccaaactgtaagga

SEQ ID NO: 4094121 - DNA, 25 bp, Homo sapien
tgaacaatatcaccgaaggtttgag

SEQ ID NO: 4094122 - DNA, 25 bp, Homo sapien
tttgcaattgatacagttttgccct

SEQ ID NO: 4094123 - DNA, 25 bp, Homo sapien
ccaggatgtgagagtcatgaacaat

SEQ ID NO: 4094124 - DNA, 25 bp, Homo sapien
ggctgttgtcttgggctggtgtgat

SEQ ID NO: 4094125 - DNA, 25 bp, Homo sapien
tgtcttgggctggtgtgatgtccac

SEQ ID NO: 4094126 - DNA, 25 bp, Homo sapien
gaggctgttgtcttgggctggtgtg

SEQ ID NO: 4094127 - DNA, 25 bp, Homo sapien
tgttgtcttgggctggtgtgatgtc

SEQ ID NO: 4094128 - DNA, 25 bp, Homo sapien
ccttaaaggagtcccgcaggaacag

SEQ ID NO: 4094129 - DNA, 25 bp, Homo sapien
gacagacagctccatgagggtacag

SEQ ID NO: 4094130 - DNA, 25 bp, Homo sapien
ttttgtctgacgtccatagccctgc

SEQ ID NO: 4094131 - DNA, 25 bp, Homo sapien
tcacttaggtcacagagcaagccag

SEQ ID NO: 4094132 - DNA, 25 bp, Homo sapien
aaagcagacggcgattacggagaat

SEQ ID NO: 4094133 - DNA, 25 bp, Homo sapien
cagcagaagaccacgacctctctgt

SEQ ID NO: 4094134 - DNA, 25 bp, Homo sapien
gtcctcaaagcagacggcgattacg

SEQ ID NO: 4094135 - DNA, 25 bp, Homo sapien
cggcgattacggagaatgcctgcgt

SEQ ID NO: 4094136 - DNA, 25 bp, Homo sapien
ggagctcctcagaagggctgtggtt

SEQ ID NO: 4094137 - DNA, 25 bp, Homo sapien
gtttgggagctcctcagaagggctg

SEQ ID NO: 4094138 - DNA, 25 bp, Homo sapien
agctcctcagaagggctgtggttct

SEQ ID NO: 4094139 - DNA, 25 bp, Homo sapien
ctcagaagggctgtggttctggttc

SEQ ID NO: 4094140 - DNA, 25 bp, Homo sapien
gctgacgtcgagtaggtcacctcca

SEQ ID NO: 4094141 - DNA, 25 bp, Homo sapien
aactattatgatgacgcctgtggag

SEQ ID NO: 4094142 - DNA, 25 bp, Homo sapien
agtatatgagcatgctgagtccagg

SEQ ID NO: 4094143 - DNA, 25 bp, Homo sapien
ccaggaagcggtagcaatcattatt

SEQ ID NO: 4094144 - DNA, 25 bp, Homo sapien
ctttgggttgacagagttaacacag

SEQ ID NO: 4094145 - DNA, 25 bp, Homo sapien
tctttgggttgacagagttaacaca

SEQ ID NO: 4094146 - DNA, 25 bp, Homo sapien
ttctttgggttgacagagttaacac

SEQ ID NO: 4094147 - DNA, 25 bp, Homo sapien
ggtgccactattgctccatttcagg

SEQ ID NO: 4094148 - DNA, 25 bp, Homo sapien
tattacggtcttgagccttctagga

SEQ ID NO: 4094149 - DNA, 25 bp, Homo sapien
gcttacaaagtgatgaggtcacccc

SEQ ID NO: 4094150 - DNA, 25 bp, Homo sapien
gagatttgaactagggactgcctga

SEQ ID NO: 4094151 - DNA, 25 bp, Homo sapien
agctttgccagacaaaaaagttcgg

SEQ ID NO: 4094152 - DNA, 25 bp, Homo sapien
gagaaactgtaaccagccaatttcc

SEQ ID NO: 4094153 - DNA, 25 bp, Homo sapien
caaaagaagttcactggcttcagct

SEQ ID NO: 4094154 - DNA, 25 bp, Homo sapien
gttcgggaaattggcggcacaacac

SEQ ID NO: 4094155 - DNA, 25 bp, Homo sapien
tcatcaacacgtatgcagcatctca

SEQ ID NO: 4094156 - DNA, 25 bp, Homo sapien
agcccacttcttgcttagaccaacg

SEQ ID NO: 4094157 - DNA, 25 bp, Homo sapien
ggctgtcactgatattaggccagag

SEQ ID NO: 4094158 - DNA, 25 bp, Homo sapien
ctaaagtcccgaaggcaggagctcc

SEQ ID NO: 4094159 - DNA, 25 bp, Homo sapien
tcatctcccccaaatgagaaaggct

SEQ ID NO: 4094160 - DNA, 25 bp, Homo sapien
tctcatctcccccaaatgagaaagg

SEQ ID NO: 4094161 - DNA, 25 bp, Homo sapien
gctggcagactgggggctgcttctc

SEQ ID NO: 4094162 - DNA, 25 bp, Homo sapien
catctcccccaaatgagaaaggctg

SEQ ID NO: 4094163 - DNA, 25 bp, Homo sapien
catcaggcccgttttgacagaggac

SEQ ID NO: 4094164 - DNA, 25 bp, Homo sapien
aagcccacagcgaggttaaacgatg

SEQ ID NO: 4094165 - DNA, 25 bp, Homo sapien
tttttcaacctcgagtctggcccag

SEQ ID NO: 4094166 - DNA, 25 bp, Homo sapien
ctcacaaccagagaagggagcttct

SEQ ID NO: 4094167 - DNA, 25 bp, Homo sapien
caaagatgtgggctaaatccaggct

SEQ ID NO: 4094168 - DNA, 25 bp, Homo sapien
aagtccctgtccatttctgaaaaag

SEQ ID NO: 4094169 - DNA, 25 bp, Homo sapien
ttgtccactgacttagaacacatgg

SEQ ID NO: 4094170 - DNA, 25 bp, Homo sapien
tccaagagccgagacgagaagatgc

SEQ ID NO: 4094171 - DNA, 25 bp, Homo sapien
ggtcctgatttgtagcatcttccca

SEQ ID NO: 4094172 - DNA, 25 bp, Homo sapien
gccatgagacttccagactcggcca

SEQ ID NO: 4094173 - DNA, 25 bp, Homo sapien
catgaccttaagctgggacgaccct

SEQ ID NO: 4094174 - DNA, 25 bp, Homo sapien
taacccagtagttatcatagggccc

SEQ ID NO: 4094175 - DNA, 25 bp, Homo sapien
tacggctcagaatcaataagcgact

SEQ ID NO: 4094176 - DNA, 25 bp, Homo sapien
ggaactacggctcagaatcaataag

SEQ ID NO: 4094177 - DNA, 25 bp, Homo sapien
gatgaggaactacggctcagaatca

SEQ ID NO: 4094178 - DNA, 25 bp, Homo sapien
tcagaatcaataagcgacttgaccg

SEQ ID NO: 4094179 - DNA, 25 bp, Homo sapien
caatctctgccaccttatttctcct

SEQ ID NO: 4094180 - DNA, 25 bp, Homo sapien
aatctctgccaccttatttctcctt

SEQ ID NO: 4094181 - DNA, 25 bp, Homo sapien
tgctgtcagcttcgctagcagccca

SEQ ID NO: 4094182 - DNA, 25 bp, Homo sapien
cagccctcagcctggttttgccgga

SEQ ID NO: 4094183 - DNA, 25 bp, Homo sapien
gcggggtagggtagaccatgagcct

SEQ ID NO: 4094184 - DNA, 25 bp, Homo sapien
tgtcactcttgctgtcagcttcgct

SEQ ID NO: 4094185 - DNA, 25 bp, Homo sapien
tgttggacttgctcttaaggctggg

SEQ ID NO: 4094186 - DNA, 25 bp, Homo sapien
ctgacctggggagtcgcgcactgtt

SEQ ID NO: 4094187 - DNA, 25 bp, Homo sapien
tgggtacttggaggcctgtttccac

SEQ ID NO: 4094188 - DNA, 25 bp, Homo sapien
ttgggtacttggaggcctgtttcca

SEQ ID NO: 4094189 - DNA, 25 bp, Homo sapien
agagtgccaccgtgccagttgcagg

SEQ ID NO: 4094190 - DNA, 25 bp, Homo sapien
caaggagagtgccaccgtgccagtt

SEQ ID NO: 4094191 - DNA, 25 bp, Homo sapien
gcagcaaggagagtgccaccgtgcc

SEQ ID NO: 4094192 - DNA, 25 bp, Homo sapien
aggagagtgccaccgtgccagttgc

SEQ ID NO: 4094193 - DNA, 25 bp, Homo sapien
aggtgaacataaggtctggggactg

SEQ ID NO: 4094194 - DNA, 25 bp, Homo sapien
aaaacattggcaggtgaacataagg

SEQ ID NO: 4094195 - DNA, 25 bp, Homo sapien
ataaaaacattggcaggtgaacata

SEQ ID NO: 4094196 - DNA, 25 bp, Homo sapien
ggtgaacataaggtctggggactgg

SEQ ID NO: 4094197 - DNA, 25 bp, Homo sapien
accagccagaccacgtagttcttct

SEQ ID NO: 4094198 - DNA, 25 bp, Homo sapien
gaccagccagaccacgtagttcttc

SEQ ID NO: 4094199 - DNA, 25 bp, Homo sapien
tggtgccaccctggggcaaggtgac

SEQ ID NO: 4094200 - DNA, 25 bp, Homo sapien
ttggtgccaccctggggcaaggtga

SEQ ID NO: 4094201 - DNA, 25 bp, Homo sapien
cttggtgccaccctggggcaaggtg

SEQ ID NO: 4094202 - DNA, 25 bp, Homo sapien
ggaacaaagccgaaacaatgagcaa

SEQ ID NO: 4094203 - DNA, 25 bp, Homo sapien
tggcttgtcccggtgaggtcatcca

SEQ ID NO: 4094204 - DNA, 25 bp, Homo sapien
caggcattgttttgcccggaacaaa

SEQ ID NO: 4094205 - DNA, 25 bp, Homo sapien
ggctggcctacagccctgatggctt

SEQ ID NO: 4094206 - DNA, 25 bp, Homo sapien
gaatgggctcgtgcggagatgctga

SEQ ID NO: 4094207 - DNA, 25 bp, Homo sapien
caaagggaagaatgggctcgtgcgg

SEQ ID NO: 4094208 - DNA, 25 bp, Homo sapien
aggtggccgtggcaaagggaagaat

SEQ ID NO: 4094209 - DNA, 25 bp, Homo sapien
ggtggccgtggcaaagggaagaatg

SEQ ID NO: 4094210 - DNA, 25 bp, Homo sapien
aaggctaactcaagcgtggcgagct

SEQ ID NO: 4094211 - DNA, 25 bp, Homo sapien
ctgttggttatctgctcccaaggaa

SEQ ID NO: 4094212 - DNA, 25 bp, Homo sapien
tcatgaggtctgtatctgttggtta

SEQ ID NO: 4094213 - DNA, 25 bp, Homo sapien
tgaaatctggtttatatgcacacac

SEQ ID NO: 4094214 - DNA, 25 bp, Homo sapien
taagcaaactgatcagcgggttggg

SEQ ID NO: 4094215 - DNA, 25 bp, Homo sapien
cccactaggcttgctgtggaatcaa

SEQ ID NO: 4094216 - DNA, 25 bp, Homo sapien
aactgaggcctaaacaactccctgc

SEQ ID NO: 4094217 - DNA, 25 bp, Homo sapien
tggcataaccactcaggagcttctg

SEQ ID NO: 4094218 - DNA, 25 bp, Homo sapien
ttgacttgcacagccccccgatggt

SEQ ID NO: 4094219 - DNA, 25 bp, Homo sapien
cccgatggttatcagggcagcccat

SEQ ID NO: 4094220 - DNA, 25 bp, Homo sapien
cgggattcgacaggccaatggctac

SEQ ID NO: 4094221 - DNA, 25 bp, Homo sapien
tcctagcagccagcattgttccagc

SEQ ID NO: 4094222 - DNA, 25 bp, Homo sapien
cttcctctccctggctcggggtggg

SEQ ID NO: 4094223 - DNA, 25 bp, Homo sapien
ctccttcctctccctggctcggggt

SEQ ID NO: 4094224 - DNA, 25 bp, Homo sapien
tccttcctctccctggctcggggtg

SEQ ID NO: 4094225 - DNA, 25 bp, Homo sapien
ccttcctctccctggctcggggtgg

SEQ ID NO: 4094226 - DNA, 25 bp, Homo sapien
agggttaccaagagcatcctgattt

SEQ ID NO: 4094227 - DNA, 25 bp, Homo sapien
tgcagaaggtggatacccctggctc

SEQ ID NO: 4094228 - DNA, 25 bp, Homo sapien
tctgagaactgacaagggttaccaa

SEQ ID NO: 4094229 - DNA, 25 bp, Homo sapien
agaaggtggatacccctggctctct

SEQ ID NO: 4094230 - DNA, 25 bp, Homo sapien
gggcctggcatccctgtctgtccaa

SEQ ID NO: 4094231 - DNA, 25 bp, Homo sapien
gcccgggcctgtggcaaggggcctg

SEQ ID NO: 4094232 - DNA, 25 bp, Homo sapien
gcctggcatccctgtctgtccaatg

SEQ ID NO: 4094233 - DNA, 25 bp, Homo sapien
ctgcccgggcctgtggcaaggggcc

SEQ ID NO: 4094234 - DNA, 25 bp, Homo sapien
cacagagagcacaaagtcgatcttg

SEQ ID NO: 4094235 - DNA, 25 bp, Homo sapien
acaaagtcgatcttgctagaccact

SEQ ID NO: 4094236 - DNA, 25 bp, Homo sapien
gcacaaagtcgatcttgctagacca

SEQ ID NO: 4094237 - DNA, 25 bp, Homo sapien
gagagcacaaagtcgatcttgctag

SEQ ID NO: 4094238 - DNA, 25 bp, Homo sapien
ccgcgcccggctgcctcagagcctt

SEQ ID NO: 4094239 - DNA, 25 bp, Homo sapien
gcgcccggctgcctcagagccttca

SEQ ID NO: 4094240 - DNA, 25 bp, Homo sapien
accgcgcccggctgcctcagagcct

SEQ ID NO: 4094241 - DNA, 25 bp, Homo sapien
caccgcgcccggctgcctcagagcc

SEQ ID NO: 4094242 - DNA, 25 bp, Homo sapien
gagaacaaggggcagatcttttccc

SEQ ID NO: 4094243 - DNA, 25 bp, Homo sapien
tcttttcccagcaggtgatgccccc

SEQ ID NO: 4094244 - DNA, 25 bp, Homo sapien
ataaaatacggtatgagaaacgcac

SEQ ID NO: 4094245 - DNA, 25 bp, Homo sapien
aataaaatacggtatgagaaacgca

SEQ ID NO: 4094246 - DNA, 25 bp, Homo sapien
tggaaaggtgaaacaacagatggtt

SEQ ID NO: 4094247 - DNA, 25 bp, Homo sapien
gaggcctttcaacagtgaccaccaa

SEQ ID NO: 4094248 - DNA, 25 bp, Homo sapien
tatttatagggtgaatggatggctg

SEQ ID NO: 4094249 - DNA, 25 bp, Homo sapien
caggttgggcaaatgagatgagtaa

SEQ ID NO: 4094250 - DNA, 25 bp, Homo sapien
tgtagtagacattcaggagggacac

SEQ ID NO: 4094251 - DNA, 25 bp, Homo sapien
caattacaacggaggcatagccgat

SEQ ID NO: 4094252 - DNA, 25 bp, Homo sapien
gagggacacaattacaacggaggca

SEQ ID NO: 4094253 - DNA, 25 bp, Homo sapien
ttcaggagggacacaattacaacgg

SEQ ID NO: 4094254 - DNA, 25 bp, Homo sapien
gagataaggaagtgggccatcctct

SEQ ID NO: 4094255 - DNA, 25 bp, Homo sapien
gaggagtggcttgcctaaggtcaaa

SEQ ID NO: 4094256 - DNA, 25 bp, Homo sapien
gcctcacagggtagtaatgattcat

SEQ ID NO: 4094257 - DNA, 25 bp, Homo sapien
gggattccagtcctgtctatggcca

SEQ ID NO: 4094258 - DNA, 25 bp, Homo sapien
gattgaccgtttcttgttcctagag

SEQ ID NO: 4094259 - DNA, 25 bp, Homo sapien
tacagttgcctgcagacacgtggag

SEQ ID NO: 4094260 - DNA, 25 bp, Homo sapien
tcctagagtgcttgcttagtggccg

SEQ ID NO: 4094261 - DNA, 25 bp, Homo sapien
gagctacccggaggacctacagttg

SEQ ID NO: 4094262 - DNA, 25 bp, Homo sapien
tggaccccattcaagtgagaaaaag

SEQ ID NO: 4094263 - DNA, 25 bp, Homo sapien
ccttggaccccattcaagtgagaaa

SEQ ID NO: 4094264 - DNA, 25 bp, Homo sapien
ctgtgccttggaccccattcaagtg

SEQ ID NO: 4094265 - DNA, 25 bp, Homo sapien
ggctgtgccttggaccccattcaag

SEQ ID NO: 4094266 - DNA, 25 bp, Homo sapien
ccagggacgtttgctttgatcaggc

SEQ ID NO: 4094267 - DNA, 25 bp, Homo sapien
catgggtggccagagacatagtacc

SEQ ID NO: 4094268 - DNA, 25 bp, Homo sapien
taacgggccacgtgaacatactagg

SEQ ID NO: 4094269 - DNA, 25 bp, Homo sapien
gacatgctccctaccgtgtaaagag

SEQ ID NO: 4094270 - DNA, 25 bp, Homo sapien
tcaaaccagtggtgcccaatactga

SEQ ID NO: 4094271 - DNA, 25 bp, Homo sapien
cagctgaccagctatggagtctaca

SEQ ID NO: 4094272 - DNA, 25 bp, Homo sapien
caatactgatgggaggctgccacac

SEQ ID NO: 4094273 - DNA, 25 bp, Homo sapien
caacaaagaaaatgagtcctccgcc

SEQ ID NO: 4094274 - DNA, 25 bp, Homo sapien
catgtcactgtaggaccgatccgtg

SEQ ID NO: 4094275 - DNA, 25 bp, Homo sapien
gctgatggacgaaataaaagctacc

SEQ ID NO: 4094276 - DNA, 25 bp, Homo sapien
gaatggactcaactgggaggacagc

SEQ ID NO: 4094277 - DNA, 25 bp, Homo sapien
gagtagaggccattcaccccatttt

SEQ ID NO: 4094278 - DNA, 25 bp, Homo sapien
cccagacattcttatggatgacagc

SEQ ID NO: 4094279 - DNA, 25 bp, Homo sapien
gatgcccagaagtggcacccatggt

SEQ ID NO: 4094280 - DNA, 25 bp, Homo sapien
ggcgatgcagggtactgacagccca

SEQ ID NO: 4094281 - DNA, 25 bp, Homo sapien
caggccatgaaacttgatgcccaga

SEQ ID NO: 4094282 - DNA, 25 bp, Homo sapien
tagccagactaaaagaaggcagaga

SEQ ID NO: 4094283 - DNA, 25 bp, Homo sapien
cagtggacctgacgcccttccagat

SEQ ID NO: 4094284 - DNA, 25 bp, Homo sapien
tccaggggacaagctcagcacgttg

SEQ ID NO: 4094285 - DNA, 25 bp, Homo sapien
gagcgaggtcccatttcagagagcc

SEQ ID NO: 4094286 - DNA, 25 bp, Homo sapien
ggctggaagccatggccagcgagca

SEQ ID NO: 4094287 - DNA, 25 bp, Homo sapien
gctggaagccatggccagcgagcag

SEQ ID NO: 4094288 - DNA, 25 bp, Homo sapien
gggctggaagccatggccagcgagc

SEQ ID NO: 4094289 - DNA, 25 bp, Homo sapien
ctggaagccatggccagcgagcagg

SEQ ID NO: 4094290 - DNA, 25 bp, Homo sapien
tggcgaacaatagctgctgacagca

SEQ ID NO: 4094291 - DNA, 25 bp, Homo sapien
tctccagagggcggccacttcaaag

SEQ ID NO: 4094292 - DNA, 25 bp, Homo sapien
acccgggctggcgaacaatagctgc

SEQ ID NO: 4094293 - DNA, 25 bp, Homo sapien
tttgtgggccacacccgggctggcg

SEQ ID NO: 4094294 - DNA, 25 bp, Homo sapien
actgcacagtcaatgcacccatttt

SEQ ID NO: 4094295 - DNA, 25 bp, Homo sapien
gaacaggacaaatgtgcccatggag

SEQ ID NO: 4094296 - DNA, 25 bp, Homo sapien
aatagtgacagagccccaaacctca

SEQ ID NO: 4094297 - DNA, 25 bp, Homo sapien
ccaagtatgtaacagacactgacca

SEQ ID NO: 4094298 - DNA, 25 bp, Homo sapien
gccaccttgaaacattgagactggt

SEQ ID NO: 4094299 - DNA, 25 bp, Homo sapien
gtggccaccttgaaacattgagact

SEQ ID NO: 4094300 - DNA, 25 bp, Homo sapien
ggtggccaccttgaaacattgagac

SEQ ID NO: 4094301 - DNA, 25 bp, Homo sapien
tggccaccttgaaacattgagactg

SEQ ID NO: 4094302 - DNA, 25 bp, Homo sapien
ttacttcgacatgcagaaagttcat

SEQ ID NO: 4094303 - DNA, 25 bp, Homo sapien
tttacttcgacatgcagaaagttca

SEQ ID NO: 4094304 - DNA, 25 bp, Homo sapien
gctttaaggacgtgcccagggcatc

SEQ ID NO: 4094305 - DNA, 25 bp, Homo sapien
gcactggctgagtaggaacgtccca

SEQ ID NO: 4094306 - DNA, 25 bp, Homo sapien
ttccagacaggccaagatcaggtgt

SEQ ID NO: 4094307 - DNA, 25 bp, Homo sapien
ccagggcatcaacggaatccaggat

SEQ ID NO: 4094308 - DNA, 25 bp, Homo sapien
caggcaccatctaagcacaaaatac

SEQ ID NO: 4094309 - DNA, 25 bp, Homo sapien
cattccagggcgtagaggtggaaaa

SEQ ID NO: 4094310 - DNA, 25 bp, Homo sapien
ctataaatagtttgtcccaggcacc

SEQ ID NO: 4094311 - DNA, 25 bp, Homo sapien
ccctgccttcgtggaactgacattc

SEQ ID NO: 4094312 - DNA, 25 bp, Homo sapien
cgggtgatgtcaggatacagataga

SEQ ID NO: 4094313 - DNA, 25 bp, Homo sapien
tcctcaaggcgggtgatgtcaggat

SEQ ID NO: 4094314 - DNA, 25 bp, Homo sapien
agaacttgatgcctgcgcccgcgcc

SEQ ID NO: 4094315 - DNA, 25 bp, Homo sapien
tgatgtcaggatacagatagaactt

SEQ ID NO: 4094316 - DNA, 25 bp, Homo sapien
cttgttgtagctccccagcgaggtc

SEQ ID NO: 4094317 - DNA, 25 bp, Homo sapien
acttgttgtagctccccagcgaggt

SEQ ID NO: 4094318 - DNA, 25 bp, Homo sapien
tgtagctccccagcgaggtcatagc

SEQ ID NO: 4094319 - DNA, 25 bp, Homo sapien
tgttgtagctccccagcgaggtcat

SEQ ID NO: 4094320 - DNA, 25 bp, Homo sapien
ttctctttttctttaaacatcatca

SEQ ID NO: 4094321 - DNA, 25 bp, Homo sapien
catcatcatcatttctaaagtccac

SEQ ID NO: 4094322 - DNA, 25 bp, Homo sapien
ctttttctttaaacatcatcatcat

SEQ ID NO: 4094323 - DNA, 25 bp, Homo sapien
tcatcatcatcatttctaaagtcca

SEQ ID NO: 4094324 - DNA, 25 bp, Homo sapien
gaaaaaattgcgaagccagacacaa

SEQ ID NO: 4094325 - DNA, 25 bp, Homo sapien
ttcaggcatcccagcagcatacagt

SEQ ID NO: 4094326 - DNA, 25 bp, Homo sapien
gaagcccaggatggaaaaaattgcg

SEQ ID NO: 4094327 - DNA, 25 bp, Homo sapien
accccttgctcttgtgccatgaagc

SEQ ID NO: 4094328 - DNA, 25 bp, Homo sapien
tgtgggcagcggcatcattgtcaca

SEQ ID NO: 4094329 - DNA, 25 bp, Homo sapien
cttttgggtaggcaatgaaggccag

SEQ ID NO: 4094330 - DNA, 25 bp, Homo sapien
ctatccagtccaagcaagagaagca

SEQ ID NO: 4094331 - DNA, 25 bp, Homo sapien
gcagcggcatcattgtcacagcttt

SEQ ID NO: 4094332 - DNA, 25 bp, Homo sapien
cgatgaagatttcccgacgataacc

SEQ ID NO: 4094333 - DNA, 25 bp, Homo sapien
gatgtgatctgtccttcaacttcaa

SEQ ID NO: 4094334 - DNA, 25 bp, Homo sapien
aaggatgtgatctgtccttcaactt

SEQ ID NO: 4094335 - DNA, 25 bp, Homo sapien
gaaggcgatgaagatttcccgacga

SEQ ID NO: 4094336 - DNA, 25 bp, Homo sapien
ctgctgcctccactatggccttgag

SEQ ID NO: 4094337 - DNA, 25 bp, Homo sapien
ctgcctccactatggccttgaggag

SEQ ID NO: 4094338 - DNA, 25 bp, Homo sapien
tgcctccactatggccttgaggagg

SEQ ID NO: 4094339 - DNA, 25 bp, Homo sapien
gctgctgcctccactatggccttga

SEQ ID NO: 4094340 - DNA, 25 bp, Homo sapien
catatatccaggcaataacaaaaca

SEQ ID NO: 4094341 - DNA, 25 bp, Homo sapien
caaagaatgcaacccacaaaaggca

SEQ ID NO: 4094342 - DNA, 25 bp, Homo sapien
tatccaggcaataacaaaacattca

SEQ ID NO: 4094343 - DNA, 25 bp, Homo sapien
ccaggcaataacaaaacattcaaag

SEQ ID NO: 4094344 - DNA, 25 bp, Homo sapien
ggcccgggccgatagccaatcatgt

SEQ ID NO: 4094345 - DNA, 25 bp, Homo sapien
cccgggccgatagccaatcatgtcc

SEQ ID NO: 4094346 - DNA, 25 bp, Homo sapien
gcccgggccgatagccaatcatgtc

SEQ ID NO: 4094347 - DNA, 25 bp, Homo sapien
agggcccgggccgatagccaatcat

SEQ ID NO: 4094348 - DNA, 25 bp, Homo sapien
ggtacgtacttgacgagcgagaaga

SEQ ID NO: 4094349 - DNA, 25 bp, Homo sapien
aaggaacggcccctcagtctggcag

SEQ ID NO: 4094350 - DNA, 25 bp, Homo sapien
cacgtatgttttgttgtaggtcagg

SEQ ID NO: 4094351 - DNA, 25 bp, Homo sapien
cggatgacgatgaccaagggaacgc

SEQ ID NO: 4094352 - DNA, 25 bp, Homo sapien
cctggccctgggcccaagcacttac

SEQ ID NO: 4094353 - DNA, 25 bp, Homo sapien
ccctggccctgggcccaagcactta

SEQ ID NO: 4094354 - DNA, 25 bp, Homo sapien
tcccctggccctgggcccaagcact

SEQ ID NO: 4094355 - DNA, 25 bp, Homo sapien
ctcccctggccctgggcccaagcac

SEQ ID NO: 4094356 - DNA, 25 bp, Homo sapien
acagagatctgggtttgccagaacc

SEQ ID NO: 4094357 - DNA, 25 bp, Homo sapien
ccctgaggggcacataaagaaagac

SEQ ID NO: 4094358 - DNA, 25 bp, Homo sapien
ggctctgcctacacaggaggctcag

SEQ ID NO: 4094359 - DNA, 25 bp, Homo sapien
gatggtggctcaactgccttcacag

SEQ ID NO: 4094360 - DNA, 25 bp, Homo sapien
gttgtaaggtgtggctccctcgcgc

SEQ ID NO: 4094361 - DNA, 25 bp, Homo sapien
ggtcggtttcacgagagcgccgttc

SEQ ID NO: 4094362 - DNA, 25 bp, Homo sapien
cgttcatgacggtgcgagagttgta

SEQ ID NO: 4094363 - DNA, 25 bp, Homo sapien
acagcccagcggttgggttcccttg

SEQ ID NO: 4094364 - DNA, 25 bp, Homo sapien
gagccaccgcatgggtccaggaatt

SEQ ID NO: 4094365 - DNA, 25 bp, Homo sapien
tacccgggtgatacaagagtgccct

SEQ ID NO: 4094366 - DNA, 25 bp, Homo sapien
tataaagctctgtaaacctggtcct

SEQ ID NO: 4094367 - DNA, 25 bp, Homo sapien
ttatatcctaggtcagcaccacggg

SEQ ID NO: 4094368 - DNA, 25 bp, Homo sapien
ggactcgtgtttgccttctatgctg

SEQ ID NO: 4094369 - DNA, 25 bp, Homo sapien
ggctctcttgctctgatgtgtctca

SEQ ID NO: 4094370 - DNA, 25 bp, Homo sapien
caagacaattatcccacatggccca

SEQ ID NO: 4094371 - DNA, 25 bp, Homo sapien
tctgttttttcagtccgaggactcg

SEQ ID NO: 4094372 - DNA, 25 bp, Homo sapien
tttccactgcgaccttcatagactg

SEQ ID NO: 4094373 - DNA, 25 bp, Homo sapien
gagatcttgtctgtgccccggtgtc

SEQ ID NO: 4094374 - DNA, 25 bp, Homo sapien
gaggcccttctctgtcgggagcatt

SEQ ID NO: 4094375 - DNA, 25 bp, Homo sapien
ttcatccggtgcagacagtggctct

SEQ ID NO: 4094376 - DNA, 25 bp, Homo sapien
ggcacagcgtcgaagcttcactcca

SEQ ID NO: 4094377 - DNA, 25 bp, Homo sapien
ccagccagctttctggcggaaaaca

SEQ ID NO: 4094378 - DNA, 25 bp, Homo sapien
cttgcgctgggcacagcgtcgaagc

SEQ ID NO: 4094379 - DNA, 25 bp, Homo sapien
agctttctggcggaaaacacgaatt

SEQ ID NO: 4094380 - DNA, 25 bp, Homo sapien
gcaaatgttgcaccagtgaggccat

SEQ ID NO: 4094381 - DNA, 25 bp, Homo sapien
aagagaagatagtgcccgcgaggtg

SEQ ID NO: 4094382 - DNA, 25 bp, Homo sapien
agcaaatgttgcaccagtgaggcca

SEQ ID NO: 4094383 - DNA, 25 bp, Homo sapien
atagtgcccgcgaggtgctcagcaa

SEQ ID NO: 4094384 - DNA, 25 bp, Homo sapien
tggccccttggggaaaatcaacagc

SEQ ID NO: 4094385 - DNA, 25 bp, Homo sapien
tctcctggagtatggctattcctca

SEQ ID NO: 4094386 - DNA, 25 bp, Homo sapien
ttaagggccacataatctcctggag

SEQ ID NO: 4094387 - DNA, 25 bp, Homo sapien
ccacataatctcctggagtatggct

SEQ ID NO: 4094388 - DNA, 25 bp, Homo sapien
taatctcctggagtatggctattcc

SEQ ID NO: 4094389 - DNA, 25 bp, Homo sapien
aatggtcgtaagttgtcctcgtttg

SEQ ID NO: 4094390 - DNA, 25 bp, Homo sapien
ttgattcttgcgttgccggaagcgg

SEQ ID NO: 4094391 - DNA, 25 bp, Homo sapien
gtgtgatgccttctgtccactggcc

SEQ ID NO: 4094392 - DNA, 25 bp, Homo sapien
tccactggcctggactgaacgaggc

SEQ ID NO: 4094393 - DNA, 25 bp, Homo sapien
taggagctctggacccacatggtga

SEQ ID NO: 4094394 - DNA, 25 bp, Homo sapien
cacacaaaacccatgttcagggtca

SEQ ID NO: 4094395 - DNA, 25 bp, Homo sapien
atcttgggagaactataggagctct

SEQ ID NO: 4094396 - DNA, 25 bp, Homo sapien
tcacacaaaacccatgttcagggtc

SEQ ID NO: 4094397 - DNA, 25 bp, Homo sapien
gcgcaaccccatgggcactgagatg

SEQ ID NO: 4094398 - DNA, 25 bp, Homo sapien
tctctggagatgtttagcgcaaccc

SEQ ID NO: 4094399 - DNA, 25 bp, Homo sapien
tccaggactcctcggcataaagtct

SEQ ID NO: 4094400 - DNA, 25 bp, Homo sapien
tccactgcatggactgccaacaaga

SEQ ID NO: 4094401 - DNA, 25 bp, Homo sapien
gagctgatcttgtttggtcaccaga

SEQ ID NO: 4094402 - DNA, 25 bp, Homo sapien
ccagagtcttcgcagtagtcaggga

SEQ ID NO: 4094403 - DNA, 25 bp, Homo sapien
gggcctaaagactcatgcccatagg

SEQ ID NO: 4094404 - DNA, 25 bp, Homo sapien
tgcccataggcactaacgctcctta

SEQ ID NO: 4094405 - DNA, 25 bp, Homo sapien
ccctgggacaatctgtgccaaggaa

SEQ ID NO: 4094406 - DNA, 25 bp, Homo sapien
gaaacttgtcagctagtacagcccc

SEQ ID NO: 4094407 - DNA, 25 bp, Homo sapien
actagggacgatctggaatgctggc

SEQ ID NO: 4094408 - DNA, 25 bp, Homo sapien
tgtttactcacatttactagggacg

SEQ ID NO: 4094409 - DNA, 25 bp, Homo sapien
gaggatgtgagtatccttgcatctt

SEQ ID NO: 4094410 - DNA, 25 bp, Homo sapien
gggaggatgtgagtatccttgcatc

SEQ ID NO: 4094411 - DNA, 25 bp, Homo sapien
aagcggccagacttactgctgccca

SEQ ID NO: 4094412 - DNA, 25 bp, Homo sapien
gtttgctgacaagcattgagaagcg

SEQ ID NO: 4094413 - DNA, 25 bp, Homo sapien
tgccccataggcctgggcgtgccat

SEQ ID NO: 4094414 - DNA, 25 bp, Homo sapien
ccaccagggcatggaggtatgaagc

SEQ ID NO: 4094415 - DNA, 25 bp, Homo sapien
catggaggtatgaagccagagtgac

SEQ ID NO: 4094416 - DNA, 25 bp, Homo sapien
ccaggttccgccacacaagcagtgt

SEQ ID NO: 4094417 - DNA, 25 bp, Homo sapien
tgtcccatgatgatacatcgtccac

SEQ ID NO: 4094418 - DNA, 25 bp, Homo sapien
tcccatgatgatacatcgtccacac

SEQ ID NO: 4094419 - DNA, 25 bp, Homo sapien
ttgtcccatgatgatacatcgtcca

SEQ ID NO: 4094420 - DNA, 25 bp, Homo sapien
attgtcccatgatgatacatcgtcc

SEQ ID NO: 4094421 - DNA, 25 bp, Homo sapien
actgggaaggaggtaacttcagagc

SEQ ID NO: 4094422 - DNA, 25 bp, Homo sapien
agaatgcttgcaaacatacagatcc

SEQ ID NO: 4094423 - DNA, 25 bp, Homo sapien
gagcttctagctgccatccgcagga

SEQ ID NO: 4094424 - DNA, 25 bp, Homo sapien
cctgcctgaaagaatgcttgcaaac

SEQ ID NO: 4094425 - DNA, 25 bp, Homo sapien
tgactcttctctgacttcatgtttt

SEQ ID NO: 4094426 - DNA, 25 bp, Homo sapien
tcactggtgtcttctcagcttctct

SEQ ID NO: 4094427 - DNA, 25 bp, Homo sapien
cctttattctggaaaatgactcttc

SEQ ID NO: 4094428 - DNA, 25 bp, Homo sapien
ctgccagtcctggtaacaaagagcc

SEQ ID NO: 4094429 - DNA, 25 bp, Homo sapien
aggaccataacagcggtggccgcct

SEQ ID NO: 4094430 - DNA, 25 bp, Homo sapien
agaaggaccataacagcggtggccg

SEQ ID NO: 4094431 - DNA, 25 bp, Homo sapien
cataacagcggtggccgcctccctc

SEQ ID NO: 4094432 - DNA, 25 bp, Homo sapien
ttctccaaagaaggaccataacagc

SEQ ID NO: 4094433 - DNA, 25 bp, Homo sapien
cccaggagacagggctcttggacct

SEQ ID NO: 4094434 - DNA, 25 bp, Homo sapien
tgcgggagcgcctaagctcgcagtc

SEQ ID NO: 4094435 - DNA, 25 bp, Homo sapien
gacagggctcttggacctgtctccc

SEQ ID NO: 4094436 - DNA, 25 bp, Homo sapien
cagcgatgcgggagcgcctaagctc

SEQ ID NO: 4094437 - DNA, 25 bp, Homo sapien
ttctacccgacacaggcctcgtaag

SEQ ID NO: 4094438 - DNA, 25 bp, Homo sapien
tcgtaagcctacctccgtcgcaacc

SEQ ID NO: 4094439 - DNA, 25 bp, Homo sapien
ccctttctacccgacacaggcctcg

SEQ ID NO: 4094440 - DNA, 25 bp, Homo sapien
gcctcgtaagcctacctccgtcgca

SEQ ID NO: 4094441 - DNA, 25 bp, Homo sapien
cgaggaggccgtgacgtccaaaggc

SEQ ID NO: 4094442 - DNA, 25 bp, Homo sapien
aggaggccgtgacgtccaaaggctt

SEQ ID NO: 4094443 - DNA, 25 bp, Homo sapien
gaggaggccgtgacgtccaaaggct

SEQ ID NO: 4094444 - DNA, 25 bp, Homo sapien
tcggaagagttcagccttaagatct

SEQ ID NO: 4094445 - DNA, 25 bp, Homo sapien
agagttcagccttaagatctaccaa

SEQ ID NO: 4094446 - DNA, 25 bp, Homo sapien
tgctttcggaagagttcagccttaa

SEQ ID NO: 4094447 - DNA, 25 bp, Homo sapien
ttcttcttgctttcggaagagttca

SEQ ID NO: 4094448 - DNA, 25 bp, Homo sapien
tctcagctcgatttgaaacgcctac

SEQ ID NO: 4094449 - DNA, 25 bp, Homo sapien
tttgaaacgcctacattctgtttgc

SEQ ID NO: 4094450 - DNA, 25 bp, Homo sapien
cagcatccttctcagctcgatttga

SEQ ID NO: 4094451 - DNA, 25 bp, Homo sapien
gctcgatttgaaacgcctacattct

SEQ ID NO: 4094452 - DNA, 25 bp, Homo sapien
tgctttgtctaaagtcttctgttct

SEQ ID NO: 4094453 - DNA, 25 bp, Homo sapien
cttgctttgtctaaagtcttctgtt

SEQ ID NO: 4094454 - DNA, 25 bp, Homo sapien
ttgctttgtctaaagtcttctgttc

SEQ ID NO: 4094455 - DNA, 25 bp, Homo sapien
catataatttggctttttcttccaa

SEQ ID NO: 4094456 - DNA, 25 bp, Homo sapien
tttcatataatttggctttttcttc

SEQ ID NO: 4094457 - DNA, 25 bp, Homo sapien
atataatttggctttttcttccaat

SEQ ID NO: 4094458 - DNA, 25 bp, Homo sapien
ttcatataatttggctttttcttcc

SEQ ID NO: 4094459 - DNA, 25 bp, Homo sapien
gtctatgatcttctgtgtgaaatcc

SEQ ID NO: 4094460 - DNA, 25 bp, Homo sapien
gcctccatttctttgcgcttgtcta

SEQ ID NO: 4094461 - DNA, 25 bp, Homo sapien
aaggtacatatcctctacttcttca

SEQ ID NO: 4094462 - DNA, 25 bp, Homo sapien
gaaatccacaaggtacatatcctct

SEQ ID NO: 4094463 - DNA, 25 bp, Homo sapien
gggaggagggatctctccctcagga

SEQ ID NO: 4094464 - DNA, 25 bp, Homo sapien
tggggaggagggatctctccctcag

SEQ ID NO: 4094465 - DNA, 25 bp, Homo sapien
tcctcatcgtcgtccctttctcctg

SEQ ID NO: 4094466 - DNA, 25 bp, Homo sapien
ctcaggaaggttttcctcatcgtcg

SEQ ID NO: 4094467 - DNA, 25 bp, Homo sapien
tcctctgagctaatccatgatgtta

SEQ ID NO: 4094468 - DNA, 25 bp, Homo sapien
cctctgagctaatccatgatgttac

SEQ ID NO: 4094469 - DNA, 25 bp, Homo sapien
gttcctctgagctaatccatgatgt

SEQ ID NO: 4094470 - DNA, 25 bp, Homo sapien
atgttcctctgagctaatccatgat

SEQ ID NO: 4094471 - DNA, 25 bp, Homo sapien
ctttctcatacagcgccgggaacgc

SEQ ID NO: 4094472 - DNA, 25 bp, Homo sapien
cagcgccgggaacgccccaaagagt

SEQ ID NO: 4094473 - DNA, 25 bp, Homo sapien
cgccccaaagagtccacgtaatcca

SEQ ID NO: 4094474 - DNA, 25 bp, Homo sapien
atcctttctcatacagcgccgggaa

SEQ ID NO: 4094475 - DNA, 25 bp, Homo sapien
gacttggacaaggtggagtttctcc

SEQ ID NO: 4094476 - DNA, 25 bp, Homo sapien
agtcaggttgttccccaagtgtgga

SEQ ID NO: 4094477 - DNA, 25 bp, Homo sapien
tcttaggccctgctgaaaaatctag

SEQ ID NO: 4094478 - DNA, 25 bp, Homo sapien
gcatttcagaccttggcagagctct

SEQ ID NO: 4094479 - DNA, 25 bp, Homo sapien
tttttcattagcaggactaataaaa

SEQ ID NO: 4094480 - DNA, 25 bp, Homo sapien
atcttcagataatagggttttttca

SEQ ID NO: 4094481 - DNA, 25 bp, Homo sapien
cttcagataatagggttttttcatt

SEQ ID NO: 4094482 - DNA, 25 bp, Homo sapien
gttttttcattagcaggactaataa

SEQ ID NO: 4094483 - DNA, 25 bp, Homo sapien
gtcttcataatgtacgggccccatg

SEQ ID NO: 4094484 - DNA, 25 bp, Homo sapien
cttcataatgtacgggccccatggg

SEQ ID NO: 4094485 - DNA, 25 bp, Homo sapien
atgtcttcataatgtacgggcccca

SEQ ID NO: 4094486 - DNA, 25 bp, Homo sapien
cataatgtacgggccccatgggcct

SEQ ID NO: 4094487 - DNA, 25 bp, Homo sapien
tcacgcagcatctctaaggttttca

SEQ ID NO: 4094488 - DNA, 25 bp, Homo sapien
tgtttctcaactctttgtctcgggc

SEQ ID NO: 4094489 - DNA, 25 bp, Homo sapien
caaaatacccaacaccaagttgccg

SEQ ID NO: 4094490 - DNA, 25 bp, Homo sapien
tgtctcgggcaaaggcaaaataccc

SEQ ID NO: 4094491 - DNA, 25 bp, Homo sapien
cagagcatcttgcaagccttaacac

SEQ ID NO: 4094492 - DNA, 25 bp, Homo sapien
tcttcaggccacctctaagaagctg

SEQ ID NO: 4094493 - DNA, 25 bp, Homo sapien
caaagtttcataagagttcacagag

SEQ ID NO: 4094494 - DNA, 25 bp, Homo sapien
gaagtactctcctatgaaccctctg

SEQ ID NO: 4094495 - DNA, 25 bp, Homo sapien
gatagcctttcgcttttcctttatg

SEQ ID NO: 4094496 - DNA, 25 bp, Homo sapien
ggcaagtcttgcctctaagatagcc

SEQ ID NO: 4094497 - DNA, 25 bp, Homo sapien
tttgtcgaagtttggcaagtcttgc

SEQ ID NO: 4094498 - DNA, 25 bp, Homo sapien
catctttttttgtcgaagtttggca

SEQ ID NO: 4094499 - DNA, 25 bp, Homo sapien
aggcagtggattaagtcttttgtat

SEQ ID NO: 4094500 - DNA, 25 bp, Homo sapien
ctaacatgtcccaggcagtggatta

SEQ ID NO: 4094501 - DNA, 25 bp, Homo sapien
gtatacaacaggtcatttaattctt

SEQ ID NO: 4094502 - DNA, 25 bp, Homo sapien
tttgtatacaacaggtcatttaatt

SEQ ID NO: 4094503 - DNA, 25 bp, Homo sapien
tggctccggtggcaaaggcccaata

SEQ ID NO: 4094504 - DNA, 25 bp, Homo sapien
cagcctctggctccggtggcaaagg

SEQ ID NO: 4094505 - DNA, 25 bp, Homo sapien
tccggtggcaaaggcccaataacat

SEQ ID NO: 4094506 - DNA, 25 bp, Homo sapien
acgtggggttggcacagcctctggc

SEQ ID NO: 4094507 - DNA, 25 bp, Homo sapien
cgcggtcccactcccggatgtgtgg

SEQ ID NO: 4094508 - DNA, 25 bp, Homo sapien
cactcccggatgtgtggcactccag

SEQ ID NO: 4094509 - DNA, 25 bp, Homo sapien
ccggatgtgtggcactccaggcttg

SEQ ID NO: 4094510 - DNA, 25 bp, Homo sapien
atgtgtggcactccaggcttggtgt

SEQ ID NO: 4094511 - DNA, 25 bp, Homo sapien
gaaagaaagttattagaactgatta

SEQ ID NO: 4094512 - DNA, 25 bp, Homo sapien
agaaagttattagaactgattaacg

SEQ ID NO: 4094513 - DNA, 25 bp, Homo sapien
aagaaagaaagttattagaactgat

SEQ ID NO: 4094514 - DNA, 25 bp, Homo sapien
gaaagttattagaactgattaacga

SEQ ID NO: 4094515 - DNA, 25 bp, Homo sapien
gaaaaaccagttctcttctgaccca

SEQ ID NO: 4094516 - DNA, 25 bp, Homo sapien
gacccacaaagtaatctgacggcgg

SEQ ID NO: 4094517 - DNA, 25 bp, Homo sapien
tcttcgaccagtatccaaaggaaaa

SEQ ID NO: 4094518 - DNA, 25 bp, Homo sapien
ggcggggcaaactcaggatctctct

SEQ ID NO: 4094519 - DNA, 25 bp, Homo sapien
gagtgggtgacgtatgttcagggct

SEQ ID NO: 4094520 - DNA, 25 bp, Homo sapien
tgggtgacgtatgttcagggctagg

SEQ ID NO: 4094521 - DNA, 25 bp, Homo sapien
gcaggagtgggtgacgtatgttcag

SEQ ID NO: 4094522 - DNA, 25 bp, Homo sapien
gacgtatgttcagggctaggtccgt

SEQ ID NO: 4094523 - DNA, 25 bp, Homo sapien
taggaaatcatgtcatccagagttt

SEQ ID NO: 4094524 - DNA, 25 bp, Homo sapien
catgtcatccagagttttgaaagta

SEQ ID NO: 4094525 - DNA, 25 bp, Homo sapien
gtttgtaataggaaatcatgtcatc

SEQ ID NO: 4094526 - DNA, 25 bp, Homo sapien
taataggaaatcatgtcatccagag

SEQ ID NO: 4094527 - DNA, 25 bp, Homo sapien
gtcaaagtacaaacccaagtcagcg

SEQ ID NO: 4094528 - DNA, 25 bp, Homo sapien
gctgatctggaagctgaacccttgg

SEQ ID NO: 4094529 - DNA, 25 bp, Homo sapien
gagaaattcctcgtgacctatggtc

SEQ ID NO: 4094530 - DNA, 25 bp, Homo sapien
gaagtctgtgcctcctagggaaagg

SEQ ID NO: 4094531 - DNA, 25 bp, Homo sapien
tattactaatgacacgggaacccac

SEQ ID NO: 4094532 - DNA, 25 bp, Homo sapien
gagacaatgccatcgcagaggacct

SEQ ID NO: 4094533 - DNA, 25 bp, Homo sapien
gcaattacccgattaggctgacaga

SEQ ID NO: 4094534 - DNA, 25 bp, Homo sapien
ttgtgtgcagctgtaggaaccctct

SEQ ID NO: 4094535 - DNA, 25 bp, Homo sapien
actaccacactgtgtagattatcgt

SEQ ID NO: 4094536 - DNA, 25 bp, Homo sapien
gtgaattttaagattagcttgtcaa

SEQ ID NO: 4094537 - DNA, 25 bp, Homo sapien
tagattatcgtagctttgtggtcaa

SEQ ID NO: 4094538 - DNA, 25 bp, Homo sapien
tcgtagctttgtggtcaatcttgaa

SEQ ID NO: 4094539 - DNA, 25 bp, Homo sapien
ggatggtcctggcaccactgtcaaa

SEQ ID NO: 4094540 - DNA, 25 bp, Homo sapien
ttgcatggaatattcacttgtccca

SEQ ID NO: 4094541 - DNA, 25 bp, Homo sapien
gaatattcacttgtcccagaaccat

SEQ ID NO: 4094542 - DNA, 25 bp, Homo sapien
gaggcagaagtccaaacccattctt

SEQ ID NO: 4094543 - DNA, 25 bp, Homo sapien
cagtgaccatgagccaacgagcata

SEQ ID NO: 4094544 - DNA, 25 bp, Homo sapien
ggtgtgtcaatactcaaagaactgg

SEQ ID NO: 4094545 - DNA, 25 bp, Homo sapien
tgctctgggttacacacacatcctc

SEQ ID NO: 4094546 - DNA, 25 bp, Homo sapien
gacaggcccgtgtcacagtaagact

SEQ ID NO: 4094547 - DNA, 25 bp, Homo sapien
tatagtcggaccataaagcgtgtaa

SEQ ID NO: 4094548 - DNA, 25 bp, Homo sapien
gcagcactagatgcatgggcccttt

SEQ ID NO: 4094549 - DNA, 25 bp, Homo sapien
taaaagcagatcacttagagccgct

SEQ ID NO: 4094550 - DNA, 25 bp, Homo sapien
tgggccctttgagcacctgaaataa

SEQ ID NO: 4094551 - DNA, 25 bp, Homo sapien
taaccgacttagttcaatttactga

SEQ ID NO: 4094552 - DNA, 25 bp, Homo sapien
gaactgcttgccgaataaccgactt

SEQ ID NO: 4094553 - DNA, 25 bp, Homo sapien
ctgacttaaaaggacacagtatggc

SEQ ID NO: 4094554 - DNA, 25 bp, Homo sapien
tggcatgggctactccaggttgtgt

SEQ ID NO: 4094555 - DNA, 25 bp, Homo sapien
taagaagacaatcaaactaagcctc

SEQ ID NO: 4094556 - DNA, 25 bp, Homo sapien
tacacagctgtatacttaagaagac

SEQ ID NO: 4094557 - DNA, 25 bp, Homo sapien
taagcctcctcaggttatctggtca

SEQ ID NO: 4094558 - DNA, 25 bp, Homo sapien
tttttggtcaaagtatacacagctg

SEQ ID NO: 4094559 - DNA, 25 bp, Homo sapien
tatgagggatgaccatggacgcagc

SEQ ID NO: 4094560 - DNA, 25 bp, Homo sapien
taaagtcagccacatagcctaaggg

SEQ ID NO: 4094561 - DNA, 25 bp, Homo sapien
tagaatcagatcttgcagggccttg

SEQ ID NO: 4094562 - DNA, 25 bp, Homo sapien
gatgttcccaatggccacgtgtgac

SEQ ID NO: 4094563 - DNA, 25 bp, Homo sapien
caccagtggcgttttgagaattcta

SEQ ID NO: 4094564 - DNA, 25 bp, Homo sapien
gaaacttcgcattaaaggtggccaa

SEQ ID NO: 4094565 - DNA, 25 bp, Homo sapien
cattttgagccacgaggttaccctg

SEQ ID NO: 4094566 - DNA, 25 bp, Homo sapien
catgtgactacatcctggcctgaga

SEQ ID NO: 4094567 - DNA, 25 bp, Homo sapien
ggcatggaattatccaacgtgtaca

SEQ ID NO: 4094568 - DNA, 25 bp, Homo sapien
cagaagctcctggtcgcaatgccaa

SEQ ID NO: 4094569 - DNA, 25 bp, Homo sapien
tcctggtcgcaatgccaagatgggc

SEQ ID NO: 4094570 - DNA, 25 bp, Homo sapien
cactggttcgctttggaagcaaggg

SEQ ID NO: 4094571 - DNA, 25 bp, Homo sapien
cttttgtagctagagatccgagggt

SEQ ID NO: 4094572 - DNA, 25 bp, Homo sapien
gctagagatccgagggtgaaagatc

SEQ ID NO: 4094573 - DNA, 25 bp, Homo sapien
gggtgaaagatctgcttgtggtcaa

SEQ ID NO: 4094574 - DNA, 25 bp, Homo sapien
gaaagatctgcttgtggtcaatcat

SEQ ID NO: 4094575 - DNA, 25 bp, Homo sapien
gatgtgctgaaacggcccttacagg

SEQ ID NO: 4094576 - DNA, 25 bp, Homo sapien
acagaatggatgtgctgaaacggcc

SEQ ID NO: 4094577 - DNA, 25 bp, Homo sapien
tccctacggtgaaggcttggagatg

SEQ ID NO: 4094578 - DNA, 25 bp, Homo sapien
ctctgagaggtgactgagagcaaaa

SEQ ID NO: 4094579 - DNA, 25 bp, Homo sapien
gtaggcactgaagggtcactgatga

SEQ ID NO: 4094580 - DNA, 25 bp, Homo sapien
tctaggttactcttgatgtaactca

SEQ ID NO: 4094581 - DNA, 25 bp, Homo sapien
gggccatggctgtgtattgctgata

SEQ ID NO: 4094582 - DNA, 25 bp, Homo sapien
gccttttggtacagaaatgcctgca

SEQ ID NO: 4094583 - DNA, 25 bp, Homo sapien
ctgcacaaaggtgggttccatgagc

SEQ ID NO: 4094584 - DNA, 25 bp, Homo sapien
gcacaaaggtgggttccatgagcac

SEQ ID NO: 4094585 - DNA, 25 bp, Homo sapien
tgcacaaaggtgggttccatgagca

SEQ ID NO: 4094586 - DNA, 25 bp, Homo sapien
gtggaggtagtggcttcttcagtgt

SEQ ID NO: 4094587 - DNA, 25 bp, Homo sapien
gaggtagtggcttcttcagtgtggg

SEQ ID NO: 4094588 - DNA, 25 bp, Homo sapien
tggaggtagtggcttcttcagtgtg

SEQ ID NO: 4094589 - DNA, 25 bp, Homo sapien
ggaggtagtggcttcttcagtgtgg

SEQ ID NO: 4094590 - DNA, 25 bp, Homo sapien
ctgaaacctgttcagggtctcctgg

SEQ ID NO: 4094591 - DNA, 25 bp, Homo sapien
tccgtcagcaggtggatggactgct

SEQ ID NO: 4094592 - DNA, 25 bp, Homo sapien
gctccgtcagcaggtggatggactg

SEQ ID NO: 4094593 - DNA, 25 bp, Homo sapien
cagtctgaggagctccgtcagcagg

SEQ ID NO: 4094594 - DNA, 25 bp, Homo sapien
tcagtctgaggagctccgtcagcag

SEQ ID NO: 4094595 - DNA, 25 bp, Homo sapien
caaagcgcctggtgatgtccaaggg

SEQ ID NO: 4094596 - DNA, 25 bp, Homo sapien
tttccacaactgtccgctgctgtag

SEQ ID NO: 4094597 - DNA, 25 bp, Homo sapien
tggctggcctccacaaagcgcctgg

SEQ ID NO: 4094598 - DNA, 25 bp, Homo sapien
tcccggctgtgctgatcaggcagtt

SEQ ID NO: 4094599 - DNA, 25 bp, Homo sapien
taagggttgaagctcaggtacccac

SEQ ID NO: 4094600 - DNA, 25 bp, Homo sapien
ctaagggttgaagctcaggtaccca

SEQ ID NO: 4094601 - DNA, 25 bp, Homo sapien
gaagagtggtagatcagctggtaag

SEQ ID NO: 4094602 - DNA, 25 bp, Homo sapien
gctggtaaggcgagttcaccccaat

SEQ ID NO: 4094603 - DNA, 25 bp, Homo sapien
agagagaaaagctcagacaggctgt

SEQ ID NO: 4094604 - DNA, 25 bp, Homo sapien
aaagctcagacaggctgtggaagag

SEQ ID NO: 4094605 - DNA, 25 bp, Homo sapien
gacatcttctgtagttctagatttg

SEQ ID NO: 4094606 - DNA, 25 bp, Homo sapien
ctgacatcttctgtagttctagatt

SEQ ID NO: 4094607 - DNA, 25 bp, Homo sapien
acatcttctgtagttctagatttgc

SEQ ID NO: 4094608 - DNA, 25 bp, Homo sapien
gctgacatcttctgtagttctagat

SEQ ID NO: 4094609 - DNA, 25 bp, Homo sapien
tcagggcaggggtcgctgaactcca

SEQ ID NO: 4094610 - DNA, 25 bp, Homo sapien
ccactcctcgatgcaggggcggcat

SEQ ID NO: 4094611 - DNA, 25 bp, Homo sapien
tgttggcaggggttcccactcctcg

SEQ ID NO: 4094612 - DNA, 25 bp, Homo sapien
atgtggcgacacaactcctgcagct

SEQ ID NO: 4094613 - DNA, 25 bp, Homo sapien
tcccctcttgacaatgctgactgaa

SEQ ID NO: 4094614 - DNA, 25 bp, Homo sapien
ggaggagccatcatagaaggtgtaa

SEQ ID NO: 4094615 - DNA, 25 bp, Homo sapien
acattagatgagagggcatctttgc

SEQ ID NO: 4094616 - DNA, 25 bp, Homo sapien
gagagtctcctttgcgggccaacat

SEQ ID NO: 4094617 - DNA, 25 bp, Homo sapien
tatctgacttcattgcacgtgacag

SEQ ID NO: 4094618 - DNA, 25 bp, Homo sapien
agcaattacagttgctccctctgaa

SEQ ID NO: 4094619 - DNA, 25 bp, Homo sapien
atactcgatacacatctgtgagtga

SEQ ID NO: 4094620 - DNA, 25 bp, Homo sapien
agtacaaatggtctattaacttcat

SEQ ID NO: 4094621 - DNA, 25 bp, Homo sapien
taactctagactgtgtaacctggaa

SEQ ID NO: 4094622 - DNA, 25 bp, Homo sapien
gaacatagggtacaaggtgacttcc

SEQ ID NO: 4094623 - DNA, 25 bp, Homo sapien
tccttttgtggcatacagtcagtca

SEQ ID NO: 4094624 - DNA, 25 bp, Homo sapien
ccctaaattgaggtaaggaggccat

SEQ ID NO: 4094625 - DNA, 25 bp, Homo sapien
gatctgacatacagcgacgtttcca

SEQ ID NO: 4094626 - DNA, 25 bp, Homo sapien
gggatctgacatacagcgacgtttc

SEQ ID NO: 4094627 - DNA, 25 bp, Homo sapien
tgacatacagcgacgtttccagagg

SEQ ID NO: 4094628 - DNA, 25 bp, Homo sapien
tacagcgacgtttccagagggatag

SEQ ID NO: 4094629 - DNA, 25 bp, Homo sapien
atgtcattaaagaggcaggtgatgg

SEQ ID NO: 4094630 - DNA, 25 bp, Homo sapien
tggtttttaggttgtagtgaacaca

SEQ ID NO: 4094631 - DNA, 25 bp, Homo sapien
tatgtcattaaagaggcaggtgatg

SEQ ID NO: 4094632 - DNA, 25 bp, Homo sapien
gagtagctgccaccgggcccctgaa

SEQ ID NO: 4094633 - DNA, 25 bp, Homo sapien
agatacagaagtgagtagctgccac

SEQ ID NO: 4094634 - DNA, 25 bp, Homo sapien
agagatacagaagtgagtagctgcc

SEQ ID NO: 4094635 - DNA, 25 bp, Homo sapien
ggagagatacagaagtgagtagctg

SEQ ID NO: 4094636 - DNA, 25 bp, Homo sapien
tcctcatccaagattaagacatatg

SEQ ID NO: 4094637 - DNA, 25 bp, Homo sapien
acttgtggactacatagccctgctg

SEQ ID NO: 4094638 - DNA, 25 bp, Homo sapien
gtcattggtggtcccaccttcctca

SEQ ID NO: 4094639 - DNA, 25 bp, Homo sapien
catccaagattaagacatatgggca

SEQ ID NO: 4094640 - DNA, 25 bp, Homo sapien
agtgttactgtctcattcagggagg

SEQ ID NO: 4094641 - DNA, 25 bp, Homo sapien
cgtttgtcatatgccattccatggg

SEQ ID NO: 4094642 - DNA, 25 bp, Homo sapien
caattgttggccgacacagtgagtg

SEQ ID NO: 4094643 - DNA, 25 bp, Homo sapien
tcctgtcccagtacctttagtttca

SEQ ID NO: 4094644 - DNA, 25 bp, Homo sapien
ccaagagatgcgaagatctggtgga

SEQ ID NO: 4094645 - DNA, 25 bp, Homo sapien
caagagatgcgaagatctggtggaa

SEQ ID NO: 4094646 - DNA, 25 bp, Homo sapien
gagatgcgaagatctggtggaatca

SEQ ID NO: 4094647 - DNA, 25 bp, Homo sapien
tgcgaagatctggtggaatcatttc

SEQ ID NO: 4094648 - DNA, 25 bp, Homo sapien
caagtgttctcttttgggatataca

SEQ ID NO: 4094649 - DNA, 25 bp, Homo sapien
tgagctttggttaccccatcttgtg

SEQ ID NO: 4094650 - DNA, 25 bp, Homo sapien
tacacagtaggatccatgatgaccc

SEQ ID NO: 4094651 - DNA, 25 bp, Homo sapien
cactcagggtgtagggactgtgtcc

SEQ ID NO: 4094652 - DNA, 25 bp, Homo sapien
tctgaaaccgcttcttgatctcagc

SEQ ID NO: 4094653 - DNA, 25 bp, Homo sapien
cagccagggctcggctcatcttata

SEQ ID NO: 4094654 - DNA, 25 bp, Homo sapien
ttatacaccttgtcgtccatgttgc

SEQ ID NO: 4094655 - DNA, 25 bp, Homo sapien
cagggctcggctcatcttatacacc

SEQ ID NO: 4094656 - DNA, 25 bp, Homo sapien
tccaggtggcctgactgagatcgta

SEQ ID NO: 4094657 - DNA, 25 bp, Homo sapien
tctgcaattgaggattccaggtggc

SEQ ID NO: 4094658 - DNA, 25 bp, Homo sapien
ggtcttccgaactgggctcacagga

SEQ ID NO: 4094659 - DNA, 25 bp, Homo sapien
ggatctcatcttgaaccgaacaaat

SEQ ID NO: 4094660 - DNA, 25 bp, Homo sapien
tcagttgaggacccgaagagctata

SEQ ID NO: 4094661 - DNA, 25 bp, Homo sapien
agttgaggacccgaagagctatatc

SEQ ID NO: 4094662 - DNA, 25 bp, Homo sapien
gttgaggacccgaagagctatatct

SEQ ID NO: 4094663 - DNA, 25 bp, Homo sapien
tgaggacccgaagagctatatctat

SEQ ID NO: 4094664 - DNA, 25 bp, Homo sapien
cagtgctggtgtagttctggcttga

SEQ ID NO: 4094665 - DNA, 25 bp, Homo sapien
cacttgcagccagcacgggtgtctt

SEQ ID NO: 4094666 - DNA, 25 bp, Homo sapien
gggcgccttcaccaggcacttgcag

SEQ ID NO: 4094667 - DNA, 25 bp, Homo sapien
ggcttgagatgatcccaaacaccag

SEQ ID NO: 4094668 - DNA, 25 bp, Homo sapien
gctgtccaggtcatactgcagcagg

SEQ ID NO: 4094669 - DNA, 25 bp, Homo sapien
gcagcaggcggtaggagtcataccg

SEQ ID NO: 4094670 - DNA, 25 bp, Homo sapien
ctgcagggggctgtccaggtcatac

SEQ ID NO: 4094671 - DNA, 25 bp, Homo sapien
accacagagttcttcttcaccatca

SEQ ID NO: 4094672 - DNA, 25 bp, Homo sapien
gcttgctgaggccatatccattcaa

SEQ ID NO: 4094673 - DNA, 25 bp, Homo sapien
gaggccatatccattcaaaacacgg

SEQ ID NO: 4094674 - DNA, 25 bp, Homo sapien
tgagaccggaagatctgtttcagca

SEQ ID NO: 4094675 - DNA, 25 bp, Homo sapien
caggaagtagcccatcttgtaatcc

SEQ ID NO: 4094676 - DNA, 25 bp, Homo sapien
cagtgagaagggcataagactccta

SEQ ID NO: 4094677 - DNA, 25 bp, Homo sapien
tgcagtgagaagggcataagactcc

SEQ ID NO: 4094678 - DNA, 25 bp, Homo sapien
gagaagggcataagactcctagaaa

SEQ ID NO: 4094679 - DNA, 25 bp, Homo sapien
gggcataagactcctagaaaactga

SEQ ID NO: 4094680 - DNA, 25 bp, Homo sapien
gtgggttgccccactcggacaaggc

SEQ ID NO: 4094681 - DNA, 25 bp, Homo sapien
aagtgggttgccccactcggacaag

SEQ ID NO: 4094682 - DNA, 25 bp, Homo sapien
tgggttgccccactcggacaaggcc

SEQ ID NO: 4094683 - DNA, 25 bp, Homo sapien
agtgggttgccccactcggacaagg

SEQ ID NO: 4094684 - DNA, 25 bp, Homo sapien
gattccaggcccacattgagaactc

SEQ ID NO: 4094685 - DNA, 25 bp, Homo sapien
tatggtccgactcctttgtgggttc

SEQ ID NO: 4094686 - DNA, 25 bp, Homo sapien
tccatggcggcttcacagattccag

SEQ ID NO: 4094687 - DNA, 25 bp, Homo sapien
gagaactctttctgtggccagctcc

SEQ ID NO: 4094688 - DNA, 25 bp, Homo sapien
cagtttgggtcacctttgtgtctta

SEQ ID NO: 4094689 - DNA, 25 bp, Homo sapien
tcagtttgggtcacctttgtgtctt

SEQ ID NO: 4094690 - DNA, 25 bp, Homo sapien
cttggtccaagcttctggcatccag

SEQ ID NO: 4094691 - DNA, 25 bp, Homo sapien
cagggccaatgaggagctgcttcct

SEQ ID NO: 4094692 - DNA, 25 bp, Homo sapien
ccagggccaatgaggagctgcttcc

SEQ ID NO: 4094693 - DNA, 25 bp, Homo sapien
tccttggatatcttctgactcggct

SEQ ID NO: 4094694 - DNA, 25 bp, Homo sapien
cttctgactcggctttcttgactga

SEQ ID NO: 4094695 - DNA, 25 bp, Homo sapien
ccaactagttatcttgctgtccctg

SEQ ID NO: 4094696 - DNA, 25 bp, Homo sapien
gaggatgtagctccacttcaggctc

SEQ ID NO: 4094697 - DNA, 25 bp, Homo sapien
ctgtccctgctgagaggatgtagct

SEQ ID NO: 4094698 - DNA, 25 bp, Homo sapien
ctgctgagaggatgtagctccactt

SEQ ID NO: 4094699 - DNA, 25 bp, Homo sapien
atgctggaggcccgctggtttatta

SEQ ID NO: 4094700 - DNA, 25 bp, Homo sapien
ctggaggcccgctggtttattatag

SEQ ID NO: 4094701 - DNA, 25 bp, Homo sapien
ccaatgctggaggcccgctggttta

SEQ ID NO: 4094702 - DNA, 25 bp, Homo sapien
gctggaggcccgctggtttattata

SEQ ID NO: 4094703 - DNA, 25 bp, Homo sapien
gttatcatctgctttcgtcaacacc

SEQ ID NO: 4094704 - DNA, 25 bp, Homo sapien
agaggcaggtaaagaccgccccaag

SEQ ID NO: 4094705 - DNA, 25 bp, Homo sapien
ctgggagttatcatctgctttcgtc

SEQ ID NO: 4094706 - DNA, 25 bp, Homo sapien
ctgctttcgtcaacaccttaatggc

SEQ ID NO: 4094707 - DNA, 25 bp, Homo sapien
cctaatctgagaatccctacatttt

SEQ ID NO: 4094708 - DNA, 25 bp, Homo sapien
agacaacatagagtcagatcttgta

SEQ ID NO: 4094709 - DNA, 25 bp, Homo sapien
taggttcatatttgcctggtatata

SEQ ID NO: 4094710 - DNA, 25 bp, Homo sapien
ttttgactgtctcaagtagacaaca

SEQ ID NO: 4094711 - DNA, 25 bp, Homo sapien
tcttgacattgtccgtcgtgggctg

SEQ ID NO: 4094712 - DNA, 25 bp, Homo sapien
gctgcagatgaatccatgggagaat

SEQ ID NO: 4094713 - DNA, 25 bp, Homo sapien
acggcaggctttgccccaggtttca

SEQ ID NO: 4094714 - DNA, 25 bp, Homo sapien
aatcatttgggaatacacggcaggc

SEQ ID NO: 4094715 - DNA, 25 bp, Homo sapien
tttctttttgcaacaatactggtgt

SEQ ID NO: 4094716 - DNA, 25 bp, Homo sapien
ttgatttctttttgcaacaatactg

SEQ ID NO: 4094717 - DNA, 25 bp, Homo sapien
ctttttgcaacaatactggtgtttt

SEQ ID NO: 4094718 - DNA, 25 bp, Homo sapien
gatttctttttgcaacaatactggt

SEQ ID NO: 4094719 - DNA, 25 bp, Homo sapien
tgcacacgcataagactgactgccg

SEQ ID NO: 4094720 - DNA, 25 bp, Homo sapien
ctgtaaaaccatatggacctgggtt

SEQ ID NO: 4094721 - DNA, 25 bp, Homo sapien
gcataagactgactgccgtttccat

SEQ ID NO: 4094722 - DNA, 25 bp, Homo sapien
cacgtgcacacgcataagactgact

SEQ ID NO: 4094723 - DNA, 25 bp, Homo sapien
ctgcagactggaagcagcccgcagt

SEQ ID NO: 4094724 - DNA, 25 bp, Homo sapien
gccacttaacccttgagggagctgc

SEQ ID NO: 4094725 - DNA, 25 bp, Homo sapien
cagccaagccacttaacccttgagg

SEQ ID NO: 4094726 - DNA, 25 bp, Homo sapien
ttggcccgcagccaagccacttaac

SEQ ID NO: 4094727 - DNA, 25 bp, Homo sapien
ctctttctcatatgtgagctgacag

SEQ ID NO: 4094728 - DNA, 25 bp, Homo sapien
agcagccgaaacaacccactctctt

SEQ ID NO: 4094729 - DNA, 25 bp, Homo sapien
tcatatgtgagctgacagcttcggg

SEQ ID NO: 4094730 - DNA, 25 bp, Homo sapien
gggccagcagccgaaacaacccact

SEQ ID NO: 4094731 - DNA, 25 bp, Homo sapien
tgggagcatcactcctttcacagga

SEQ ID NO: 4094732 - DNA, 25 bp, Homo sapien
ggagcatcactcctttcacaggaga

SEQ ID NO: 4094733 - DNA, 25 bp, Homo sapien
gctgggagcatcactcctttcacag

SEQ ID NO: 4094734 - DNA, 25 bp, Homo sapien
atgctgggagcatcactcctttcac

SEQ ID NO: 4094735 - DNA, 25 bp, Homo sapien
tttatagcgtacagcccctccagga

SEQ ID NO: 4094736 - DNA, 25 bp, Homo sapien
ctcctttatagcgtacagcccctcc

SEQ ID NO: 4094737 - DNA, 25 bp, Homo sapien
cttccctgagccgaggtcctgtccc

SEQ ID NO: 4094738 - DNA, 25 bp, Homo sapien
tccctgagccgaggtcctgtccctg

SEQ ID NO: 4094739 - DNA, 25 bp, Homo sapien
gctctcaggggtgtaggtcatttcc

SEQ ID NO: 4094740 - DNA, 25 bp, Homo sapien
ctctcaggggtgtaggtcatttcca

SEQ ID NO: 4094741 - DNA, 25 bp, Homo sapien
tctcaggggtgtaggtcatttccat

SEQ ID NO: 4094742 - DNA, 25 bp, Homo sapien
tcaggggtgtaggtcatttccatta

SEQ ID NO: 4094743 - DNA, 25 bp, Homo sapien
aaggtgagaaggcagggagtgcatc

SEQ ID NO: 4094744 - DNA, 25 bp, Homo sapien
tctggaggtccacagggtgatgcca

SEQ ID NO: 4094745 - DNA, 25 bp, Homo sapien
gaacaggcaggtctggaggtccaca

SEQ ID NO: 4094746 - DNA, 25 bp, Homo sapien
gggaacaggcaggtctggaggtcca

SEQ ID NO: 4094747 - DNA, 25 bp, Homo sapien
gtccacagggtgatgccagatccca

SEQ ID NO: 4094748 - DNA, 25 bp, Homo sapien
cagattgtggacttcagaaaagtta

SEQ ID NO: 4094749 - DNA, 25 bp, Homo sapien
aagttactagatctgtagaggtcag

SEQ ID NO: 4094750 - DNA, 25 bp, Homo sapien
gggctacagccgagaagacttaagg

SEQ ID NO: 4094751 - DNA, 25 bp, Homo sapien
taaggagtcacatgtgctgtcccag

SEQ ID NO: 4094752 - DNA, 25 bp, Homo sapien
tcctgttgctgattgtctccaagtt

SEQ ID NO: 4094753 - DNA, 25 bp, Homo sapien
ccaagttccagacctgcacaaactg

SEQ ID NO: 4094754 - DNA, 25 bp, Homo sapien
tcactgaaagctcccctcggatgac

SEQ ID NO: 4094755 - DNA, 25 bp, Homo sapien
gctcccctcggatgactttttcctg

SEQ ID NO: 4094756 - DNA, 25 bp, Homo sapien
ccaatacagattagtgtcccaaaag

SEQ ID NO: 4094757 - DNA, 25 bp, Homo sapien
catatcaccttatgtgtctatatgg

SEQ ID NO: 4094758 - DNA, 25 bp, Homo sapien
catccttgtacatatcaccttatgt

SEQ ID NO: 4094759 - DNA, 25 bp, Homo sapien
ccaccagccgcgtcaaaactgctca

SEQ ID NO: 4094760 - DNA, 25 bp, Homo sapien
cctaagggcttatcagaccagaact

SEQ ID NO: 4094761 - DNA, 25 bp, Homo sapien
aaactgtttgttgtcctgggcctag

SEQ ID NO: 4094762 - DNA, 25 bp, Homo sapien
gcagtactagtcacagaacagggaa

SEQ ID NO: 4094763 - DNA, 25 bp, Homo sapien
taccactgttgagagctggcatgca

SEQ ID NO: 4094764 - DNA, 25 bp, Homo sapien
ctctggggcttatcttcccctgaaa

SEQ ID NO: 4094765 - DNA, 25 bp, Homo sapien
gggaggacaaatctaagccagatac

SEQ ID NO: 4094766 - DNA, 25 bp, Homo sapien
cctctggggcttatcttcccctgaa

SEQ ID NO: 4094767 - DNA, 25 bp, Homo sapien
tcttggtccctgcagtctcagactg

SEQ ID NO: 4094768 - DNA, 25 bp, Homo sapien
cttggtccctgcagtctcagactgc

SEQ ID NO: 4094769 - DNA, 25 bp, Homo sapien
cattttccacgaggtccaccttttg

SEQ ID NO: 4094770 - DNA, 25 bp, Homo sapien
cagggtttgctttcccactgtgtgc

SEQ ID NO: 4094771 - DNA, 25 bp, Homo sapien
gcttcctgccccacgcagaaggggg

SEQ ID NO: 4094772 - DNA, 25 bp, Homo sapien
gtgaacctcagggtttgctttccca

SEQ ID NO: 4094773 - DNA, 25 bp, Homo sapien
ggcataactggaggacataatatac

SEQ ID NO: 4094774 - DNA, 25 bp, Homo sapien
catggcataactggaggacataata

SEQ ID NO: 4094775 - DNA, 25 bp, Homo sapien
atcatggcataactggaggacataa

SEQ ID NO: 4094776 - DNA, 25 bp, Homo sapien
gtagttgtggaaatcatggcataac

SEQ ID NO: 4094777 - DNA, 25 bp, Homo sapien
acagacacagacagatagttctgct

SEQ ID NO: 4094778 - DNA, 25 bp, Homo sapien
cagacacagacagatagttctgcta

SEQ ID NO: 4094779 - DNA, 25 bp, Homo sapien
cacagacagatagttctgctacccc

SEQ ID NO: 4094780 - DNA, 25 bp, Homo sapien
gacacagacagatagttctgctacc

SEQ ID NO: 4094781 - DNA, 25 bp, Homo sapien
agcctcctcggcgagaggaccccgg

SEQ ID NO: 4094782 - DNA, 25 bp, Homo sapien
cagcctcctcggcgagaggaccccg

SEQ ID NO: 4094783 - DNA, 25 bp, Homo sapien
gcctcctcggcgagaggaccccgga

SEQ ID NO: 4094784 - DNA, 25 bp, Homo sapien
cctcctcggcgagaggaccccggag

SEQ ID NO: 4094785 - DNA, 25 bp, Homo sapien
gggccagacgaagtcgcttttgcga

SEQ ID NO: 4094786 - DNA, 25 bp, Homo sapien
ttggggccagacgaagtcgcttttg

SEQ ID NO: 4094787 - DNA, 25 bp, Homo sapien
tcactccggggaacgccgtgcgagt

SEQ ID NO: 4094788 - DNA, 25 bp, Homo sapien
gcgtctttcttcgtcgtggaaggga

SEQ ID NO: 4094789 - DNA, 25 bp, Homo sapien
catagagcaggaacgcgatggactg

SEQ ID NO: 4094790 - DNA, 25 bp, Homo sapien
gagcgtccccttggcattgggtccc

SEQ ID NO: 4094791 - DNA, 25 bp, Homo sapien
ggaacctggagcggctcagcgcggc

SEQ ID NO: 4094792 - DNA, 25 bp, Homo sapien
atttcacggaatctctgaactgcag

SEQ ID NO: 4094793 - DNA, 25 bp, Homo sapien
caagcctcatgcaggaaaacgtggg

SEQ ID NO: 4094794 - DNA, 25 bp, Homo sapien
caacggctaagatttcctgggacca

SEQ ID NO: 4094795 - DNA, 25 bp, Homo sapien
aggaaggctgaacccaagagcgaca

SEQ ID NO: 4094796 - DNA, 25 bp, Homo sapien
tgtaggaaaaagctagcctggctct

SEQ ID NO: 4094797 - DNA, 25 bp, Homo sapien
tggtccagtgatccacgacagggca

SEQ ID NO: 4094798 - DNA, 25 bp, Homo sapien
gaagagcatgctcacgctcaggaag

SEQ ID NO: 4094799 - DNA, 25 bp, Homo sapien
tggaatgtccaagccaagcctgatg

SEQ ID NO: 4094800 - DNA, 25 bp, Homo sapien
catagggccgttgagaagttccgga

SEQ ID NO: 4094801 - DNA, 25 bp, Homo sapien
cgattttagatagagtgaccagcat

SEQ ID NO: 4094802 - DNA, 25 bp, Homo sapien
gaggagactcctgcaattatccaag

SEQ ID NO: 4094803 - DNA, 25 bp, Homo sapien
gaccagcataggcttcactgagagg

SEQ ID NO: 4094804 - DNA, 25 bp, Homo sapien
catccaagaaacagcgaagaggccg

SEQ ID NO: 4094805 - DNA, 25 bp, Homo sapien
ctgcctggccccctaagctcccttg

SEQ ID NO: 4094806 - DNA, 25 bp, Homo sapien
gcctggccccctaagctcccttgca

SEQ ID NO: 4094807 - DNA, 25 bp, Homo sapien
cctggccccctaagctcccttgcat

SEQ ID NO: 4094808 - DNA, 25 bp, Homo sapien
tgcctggccccctaagctcccttgc

SEQ ID NO: 4094809 - DNA, 25 bp, Homo sapien
tgccacatggatatctgtggatgct

SEQ ID NO: 4094810 - DNA, 25 bp, Homo sapien
ttgccacatggatatctgtggatgc

SEQ ID NO: 4094811 - DNA, 25 bp, Homo sapien
gcggtcactggcgtcagtggactgg

SEQ ID NO: 4094812 - DNA, 25 bp, Homo sapien
cagtggactggtagtctttggcttg

SEQ ID NO: 4094813 - DNA, 25 bp, Homo sapien
tctttggcttgggagcgacaggtgg

SEQ ID NO: 4094814 - DNA, 25 bp, Homo sapien
gcttgggagcgacaggtggttttgg

SEQ ID NO: 4094815 - DNA, 25 bp, Homo sapien
ggagtttggactgtgaagactctcg

SEQ ID NO: 4094816 - DNA, 25 bp, Homo sapien
cacactggctctccactcgtttggg

SEQ ID NO: 4094817 - DNA, 25 bp, Homo sapien
ctccactcgtttggggcagtcagcc

SEQ ID NO: 4094818 - DNA, 25 bp, Homo sapien
tcattcaggtacacactggctctcc

SEQ ID NO: 4094819 - DNA, 25 bp, Homo sapien
agctgtcattcaggtacacactggc

SEQ ID NO: 4094820 - DNA, 25 bp, Homo sapien
tcgggagacaccagggctttgttcc

SEQ ID NO: 4094821 - DNA, 25 bp, Homo sapien
acactgccctcgtccttgggttcat

SEQ ID NO: 4094822 - DNA, 25 bp, Homo sapien
ttcctcttccgcagaggactcggga

SEQ ID NO: 4094823 - DNA, 25 bp, Homo sapien
ttgggttcatcctccctcagcggaa

SEQ ID NO: 4094824 - DNA, 25 bp, Homo sapien
tgcacccggagcagcaggggccact

SEQ ID NO: 4094825 - DNA, 25 bp, Homo sapien
ctgcacccggagcagcaggggccac

SEQ ID NO: 4094826 - DNA, 25 bp, Homo sapien
ggagcagcaggggccactgaatcct

SEQ ID NO: 4094827 - DNA, 25 bp, Homo sapien
gcagcaggggccactgaatcctcac

SEQ ID NO: 4094828 - DNA, 25 bp, Homo sapien
tcggcggactcatcctgtgcatggt

SEQ ID NO: 4094829 - DNA, 25 bp, Homo sapien
aagagcaaggtctgtgccttcctca

SEQ ID NO: 4094830 - DNA, 25 bp, Homo sapien
ggtggttcactgaggtcaacctgtt

SEQ ID NO: 4094831 - DNA, 25 bp, Homo sapien
tgaggtcaacctgttccccacctgt

SEQ ID NO: 4094832 - DNA, 25 bp, Homo sapien
tgtgagggaagtcacgaagtcctcc

SEQ ID NO: 4094833 - DNA, 25 bp, Homo sapien
accatggggttctcctccgcacgca

SEQ ID NO: 4094834 - DNA, 25 bp, Homo sapien
tcggccgctccaccctgtagggagc

SEQ ID NO: 4094835 - DNA, 25 bp, Homo sapien
tccaccctgtagggagccacactgg

SEQ ID NO: 4094836 - DNA, 25 bp, Homo sapien
gctggtgttcttcctgtccgcggga

SEQ ID NO: 4094837 - DNA, 25 bp, Homo sapien
agggcttcccctccaatgacaaaag

SEQ ID NO: 4094838 - DNA, 25 bp, Homo sapien
tcttcagggacggtttctgggacat

SEQ ID NO: 4094839 - DNA, 25 bp, Homo sapien
tcaattcttctttcgagccataacc

SEQ ID NO: 4094840 - DNA, 25 bp, Homo sapien
tcaaacagcttcgtgaacgcgccag

SEQ ID NO: 4094841 - DNA, 25 bp, Homo sapien
gaggagccaattacacacgacagag

SEQ ID NO: 4094842 - DNA, 25 bp, Homo sapien
gcccgtggtagctggactctgaaga

SEQ ID NO: 4094843 - DNA, 25 bp, Homo sapien
ttaaacgtcagtgccaggaagcgct

SEQ ID NO: 4094844 - DNA, 25 bp, Homo sapien
ttggagtacagttgcgtgatctcag

SEQ ID NO: 4094845 - DNA, 25 bp, Homo sapien
ctcgctctattgccaggttggagta

SEQ ID NO: 4094846 - DNA, 25 bp, Homo sapien
gtgcatgccaccatgcccagctaat

SEQ ID NO: 4094847 - DNA, 25 bp, Homo sapien
cgctctattgccaggttggagtaca

SEQ ID NO: 4094848 - DNA, 25 bp, Homo sapien
atttagtttggcaagattccagaac

SEQ ID NO: 4094849 - DNA, 25 bp, Homo sapien
tgtgaaagatatttagtttggcaag

SEQ ID NO: 4094850 - DNA, 25 bp, Homo sapien
tagtttggcaagattccagaacctt

SEQ ID NO: 4094851 - DNA, 25 bp, Homo sapien
aagatatttagtttggcaagattcc

SEQ ID NO: 4094852 - DNA, 25 bp, Homo sapien
tgccccgggcgggtagaatcttctg

SEQ ID NO: 4094853 - DNA, 25 bp, Homo sapien
gctggcggagcagaatccttaactg

SEQ ID NO: 4094854 - DNA, 25 bp, Homo sapien
tcatacgcatgctgcacaacgtggc

SEQ ID NO: 4094855 - DNA, 25 bp, Homo sapien
gacggcatgctccaaaccgagaact

SEQ ID NO: 4094856 - DNA, 25 bp, Homo sapien
cagctggtcaaggagacctgctgct

SEQ ID NO: 4094857 - DNA, 25 bp, Homo sapien
tcctcaaggaatgcatggactacca

SEQ ID NO: 4094858 - DNA, 25 bp, Homo sapien
gaattatattcacacctcctacggg

SEQ ID NO: 4094859 - DNA, 25 bp, Homo sapien
gcacccggctcagaataggtacctg

SEQ ID NO: 4094860 - DNA, 25 bp, Homo sapien
taaactgcttcttacatgccccgcc

SEQ ID NO: 4094861 - DNA, 25 bp, Homo sapien
ttaaactgcttcttacatgccccgc

SEQ ID NO: 4094862 - DNA, 25 bp, Homo sapien
aaactgcttcttacatgccccgcct

SEQ ID NO: 4094863 - DNA, 25 bp, Homo sapien
gacggatggcaggacggaagggagc

SEQ ID NO: 4094864 - DNA, 25 bp, Homo sapien
ggaatgcctggatgagatactggaa

SEQ ID NO: 4094865 - DNA, 25 bp, Homo sapien
gatactggaatgactgacggatggc

SEQ ID NO: 4094866 - DNA, 25 bp, Homo sapien
tactggaatgactgacggatggcag

SEQ ID NO: 4094867 - DNA, 25 bp, Homo sapien
tctgctcttcatccgacgtaaggtc

SEQ ID NO: 4094868 - DNA, 25 bp, Homo sapien
agatgggacagactttgtagggctc

SEQ ID NO: 4094869 - DNA, 25 bp, Homo sapien
catccgacgtaaggtcctctttggg

SEQ ID NO: 4094870 - DNA, 25 bp, Homo sapien
cctctttgggggctgccgacgagat

SEQ ID NO: 4094871 - DNA, 25 bp, Homo sapien
cacagggtgaccactcctcaatcac

SEQ ID NO: 4094872 - DNA, 25 bp, Homo sapien
cacgtcccacacgatgtgactaggg

SEQ ID NO: 4094873 - DNA, 25 bp, Homo sapien
gacagaaaatcttgctcccacgtcc

SEQ ID NO: 4094874 - DNA, 25 bp, Homo sapien
cacgatgtgactagggcatggagat

SEQ ID NO: 4094875 - DNA, 25 bp, Homo sapien
taacatccagaatagcaaacacagg

SEQ ID NO: 4094876 - DNA, 25 bp, Homo sapien
ttgagtttgaagcatctatggggct

SEQ ID NO: 4094877 - DNA, 25 bp, Homo sapien
tgacacgtcaggaattcagatcttc

SEQ ID NO: 4094878 - DNA, 25 bp, Homo sapien
gatgagcttggtatgggatgtgttg

SEQ ID NO: 4094879 - DNA, 25 bp, Homo sapien
gaagtccaggcttcccatccctcat

SEQ ID NO: 4094880 - DNA, 25 bp, Homo sapien
ctgaagtccaggcttcccatccctc

SEQ ID NO: 4094881 - DNA, 25 bp, Homo sapien
tgaagtccaggcttcccatccctca

SEQ ID NO: 4094882 - DNA, 25 bp, Homo sapien
ctctgaagtccaggcttcccatccc

SEQ ID NO: 4094883 - DNA, 25 bp, Homo sapien
gacaggcttttggtagggtccagac

SEQ ID NO: 4094884 - DNA, 25 bp, Homo sapien
tgccatcattaccactgttacaatc

SEQ ID NO: 4094885 - DNA, 25 bp, Homo sapien
tgttacaatctccaagctgtcgagg

SEQ ID NO: 4094886 - DNA, 25 bp, Homo sapien
tagggtccagacacgggcccctctg

SEQ ID NO: 4094887 - DNA, 25 bp, Homo sapien
tagcagttcctgtgcgatgacaagg

SEQ ID NO: 4094888 - DNA, 25 bp, Homo sapien
tcctgtgcgatgacaagggctctgg

SEQ ID NO: 4094889 - DNA, 25 bp, Homo sapien
cagttcctgtgcgatgacaagggct

SEQ ID NO: 4094890 - DNA, 25 bp, Homo sapien
atagcagttcctgtgcgatgacaag

SEQ ID NO: 4094891 - DNA, 25 bp, Homo sapien
agatttaagtgctggagcatctcca

SEQ ID NO: 4094892 - DNA, 25 bp, Homo sapien
taagtgctggagcatctccacgtat

SEQ ID NO: 4094893 - DNA, 25 bp, Homo sapien
tttaagtgctggagcatctccacgt

SEQ ID NO: 4094894 - DNA, 25 bp, Homo sapien
cagatttaagtgctggagcatctcc

SEQ ID NO: 4094895 - DNA, 25 bp, Homo sapien
gcgagagctcaaaacaatgtctgct

SEQ ID NO: 4094896 - DNA, 25 bp, Homo sapien
gcaaagggacactctgcaagctgtc

SEQ ID NO: 4094897 - DNA, 25 bp, Homo sapien
ccagttcttgttatgcagcgagagc

SEQ ID NO: 4094898 - DNA, 25 bp, Homo sapien
actgcaaagggacactctgcaagct

SEQ ID NO: 4094899 - DNA, 25 bp, Homo sapien
gatgttgagtgctctggtacaccca

SEQ ID NO: 4094900 - DNA, 25 bp, Homo sapien
ggtgacattgctgacagggacctca

SEQ ID NO: 4094901 - DNA, 25 bp, Homo sapien
catggcaagagtgcaaatggcccag

SEQ ID NO: 4094902 - DNA, 25 bp, Homo sapien
gaacccagtgctcaaccatggcaag

SEQ ID NO: 4094903 - DNA, 25 bp, Homo sapien
gcttcaatgtctttccaactggcag

SEQ ID NO: 4094904 - DNA, 25 bp, Homo sapien
tcaatgtctttccaactggcaggaa

SEQ ID NO: 4094905 - DNA, 25 bp, Homo sapien
caggggcttcaatgtctttccaact

SEQ ID NO: 4094906 - DNA, 25 bp, Homo sapien
gggcttcaatgtctttccaactggc

SEQ ID NO: 4094907 - DNA, 25 bp, Homo sapien
atggagtaatgtaaattgtctgttc

SEQ ID NO: 4094908 - DNA, 25 bp, Homo sapien
tgttcacatactgatttctcctccc

SEQ ID NO: 4094909 - DNA, 25 bp, Homo sapien
tctgttcacatactgatttctcctc

SEQ ID NO: 4094910 - DNA, 25 bp, Homo sapien
gagtaatgtaaattgtctgttcaca

SEQ ID NO: 4094911 - DNA, 25 bp, Homo sapien
cctgctgatagcctgctctgccagg

SEQ ID NO: 4094912 - DNA, 25 bp, Homo sapien
ctgctgatagcctgctctgccagga

SEQ ID NO: 4094913 - DNA, 25 bp, Homo sapien
tgctgatagcctgctctgccaggaa

SEQ ID NO: 4094914 - DNA, 25 bp, Homo sapien
ctcctgctgatagcctgctctgcca

SEQ ID NO: 4094915 - DNA, 25 bp, Homo sapien
ggcatccaccctatggtatattaag

SEQ ID NO: 4094916 - DNA, 25 bp, Homo sapien
catagtgttcagcaatcaagaaggg

SEQ ID NO: 4094917 - DNA, 25 bp, Homo sapien
tctataacgaagcagaaggttttgc

SEQ ID NO: 4094918 - DNA, 25 bp, Homo sapien
tctcgttgtggccacgtggtgaaca

SEQ ID NO: 4094919 - DNA, 25 bp, Homo sapien
tgataggactgagcacaagtcctcc

SEQ ID NO: 4094920 - DNA, 25 bp, Homo sapien
tgttacccacaggttgataggactg

SEQ ID NO: 4094921 - DNA, 25 bp, Homo sapien
acaccaaaaggtctgttacccacag

SEQ ID NO: 4094922 - DNA, 25 bp, Homo sapien
tcctccttggcagatttcccctggg

SEQ ID NO: 4094923 - DNA, 25 bp, Homo sapien
ctccaggatgccttgatgaaggtcg

SEQ ID NO: 4094924 - DNA, 25 bp, Homo sapien
ggatggctgggagttcactcaggcc

SEQ ID NO: 4094925 - DNA, 25 bp, Homo sapien
tggatggctgggagttcactcaggc

SEQ ID NO: 4094926 - DNA, 25 bp, Homo sapien
ccttgatgaaggtcgtggatggctg

SEQ ID NO: 4094927 - DNA, 25 bp, Homo sapien
ggagagtggaggcaattctcactga

SEQ ID NO: 4094928 - DNA, 25 bp, Homo sapien
gagtggcgtggtgatcaaacccctg

SEQ ID NO: 4094929 - DNA, 25 bp, Homo sapien
aattctcactgagcagacctaggta

SEQ ID NO: 4094930 - DNA, 25 bp, Homo sapien
gacctaggtacctgtcgaactgcag

SEQ ID NO: 4094931 - DNA, 25 bp, Homo sapien
ccgatgcttcgcagtctggctgcct

SEQ ID NO: 4094932 - DNA, 25 bp, Homo sapien
agcagccgatgcttcgcagtctggc

SEQ ID NO: 4094933 - DNA, 25 bp, Homo sapien
cgcagcagccgatgcttcgcagtct

SEQ ID NO: 4094934 - DNA, 25 bp, Homo sapien
gccgatgcttcgcagtctggctgcc

SEQ ID NO: 4094935 - DNA, 25 bp, Homo sapien
tgtgttgtcgtactcggcggagtcc

SEQ ID NO: 4094936 - DNA, 25 bp, Homo sapien
tgttgtcgtactcggcggagtccgg

SEQ ID NO: 4094937 - DNA, 25 bp, Homo sapien
tgtgtgttgtcgtactcggcggagt

SEQ ID NO: 4094938 - DNA, 25 bp, Homo sapien
cctgtgtgttgtcgtactcggcgga

SEQ ID NO: 4094939 - DNA, 25 bp, Homo sapien
tccctccgcattcacgctggactca

SEQ ID NO: 4094940 - DNA, 25 bp, Homo sapien
ccctccgcattcacgctggactcac

SEQ ID NO: 4094941 - DNA, 25 bp, Homo sapien
tgctccatgctgtcgttggcacggt

SEQ ID NO: 4094942 - DNA, 25 bp, Homo sapien
gctgtcgttggcacggtctgtgact

SEQ ID NO: 4094943 - DNA, 25 bp, Homo sapien
cttgctccatgctgtcgttggcacg

SEQ ID NO: 4094944 - DNA, 25 bp, Homo sapien
tccatgctgtcgttggcacggtctg

SEQ ID NO: 4094945 - DNA, 25 bp, Homo sapien
tgtgctcaatgtggaccagcttctg

SEQ ID NO: 4094946 - DNA, 25 bp, Homo sapien
tggaggagatccccttggccccgga

SEQ ID NO: 4094947 - DNA, 25 bp, Homo sapien
cttggccccggacgctgtgctcaat

SEQ ID NO: 4094948 - DNA, 25 bp, Homo sapien
cggacgctgtgctcaatgtggacca

SEQ ID NO: 4094949 - DNA, 25 bp, Homo sapien
tgttactttcatcagcgtcccttcc

SEQ ID NO: 4094950 - DNA, 25 bp, Homo sapien
ttactttcatcagcgtcccttcctt

SEQ ID NO: 4094951 - DNA, 25 bp, Homo sapien
cagaaataggtgccggggccgtctg

SEQ ID NO: 4094952 - DNA, 25 bp, Homo sapien
tttcatcagcgtcccttccttcaga

SEQ ID NO: 4094953 - DNA, 25 bp, Homo sapien
ccaatgtgttcttcagccggtactt

SEQ ID NO: 4094954 - DNA, 25 bp, Homo sapien
gttggccacagccaatgtgttcttc

SEQ ID NO: 4094955 - DNA, 25 bp, Homo sapien
taggtgtacaggagcacatcgttca

SEQ ID NO: 4094956 - DNA, 25 bp, Homo sapien
ggataggtgtacaggagcacatcgt

SEQ ID NO: 4094957 - DNA, 25 bp, Homo sapien
tgagaaaggtgcttcctccttcccc

SEQ ID NO: 4094958 - DNA, 25 bp, Homo sapien
tgcagagcgtcatgctcagggccca

SEQ ID NO: 4094959 - DNA, 25 bp, Homo sapien
gtcatgttggacaagtacctgccag

SEQ ID NO: 4094960 - DNA, 25 bp, Homo sapien
aaccccaggtgcactgtcatgttgg

SEQ ID NO: 4094961 - DNA, 25 bp, Homo sapien
cctttttctaacaggctcctcggtg

SEQ ID NO: 4094962 - DNA, 25 bp, Homo sapien
ggactcggaagtctcaatctttaga

SEQ ID NO: 4094963 - DNA, 25 bp, Homo sapien
catcaggcaggactcggaagtctca

SEQ ID NO: 4094964 - DNA, 25 bp, Homo sapien
cgtagggcactttctccatcacagg

SEQ ID NO: 4094965 - DNA, 25 bp, Homo sapien
tctcaatctttagagcgtagggcac

SEQ ID NO: 4094966 - DNA, 25 bp, Homo sapien
tccaagcccccgagagcttgagctt

SEQ ID NO: 4094967 - DNA, 25 bp, Homo sapien
caagcccccgagagcttgagcttac

SEQ ID NO: 4094968 - DNA, 25 bp, Homo sapien
gtttccaagcccccgagagcttgag

SEQ ID NO: 4094969 - DNA, 25 bp, Homo sapien
tggtttccaagcccccgagagcttg

SEQ ID NO: 4094970 - DNA, 25 bp, Homo sapien
ggcaggagcagctctgcctcccacc

SEQ ID NO: 4094971 - DNA, 25 bp, Homo sapien
aaggcaggagcagctctgcctccca

SEQ ID NO: 4094972 - DNA, 25 bp, Homo sapien
ctggagtgagcaaaggcaggagcag

SEQ ID NO: 4094973 - DNA, 25 bp, Homo sapien
caaaggcaggagcagctctgcctcc

SEQ ID NO: 4094974 - DNA, 25 bp, Homo sapien
cctgggccttgtagtcctcagggag

SEQ ID NO: 4094975 - DNA, 25 bp, Homo sapien
cagccataccactcgtccctctctg

SEQ ID NO: 4094976 - DNA, 25 bp, Homo sapien
agccagcgcctgggccttgtagtcc

SEQ ID NO: 4094977 - DNA, 25 bp, Homo sapien
ctccacgctatggtggaatgcagcc

SEQ ID NO: 4094978 - DNA, 25 bp, Homo sapien
ggagaagtcgcagccgcagttcatg

SEQ ID NO: 4094979 - DNA, 25 bp, Homo sapien
tcatgcacatcatgacgtgtgtgac

SEQ ID NO: 4094980 - DNA, 25 bp, Homo sapien
cacatcatgacgtgtgtgacaggca

SEQ ID NO: 4094981 - DNA, 25 bp, Homo sapien
tgccacaggcgtgacagtgatgacg

SEQ ID NO: 4094982 - DNA, 25 bp, Homo sapien
cttcagcgggtacttgttccgcgaa

SEQ ID NO: 4094983 - DNA, 25 bp, Homo sapien
agcgggtacttgttccgcgaacagt

SEQ ID NO: 4094984 - DNA, 25 bp, Homo sapien
tccgcgaacagttccggcacacgat

SEQ ID NO: 4094985 - DNA, 25 bp, Homo sapien
tacttgttccgcgaacagttccggc

SEQ ID NO: 4094986 - DNA, 25 bp, Homo sapien
tccctctaggaatgtgagccatggg

SEQ ID NO: 4094987 - DNA, 25 bp, Homo sapien
gggacctgaaagtcaagcactcttc

SEQ ID NO: 4094988 - DNA, 25 bp, Homo sapien
ggacgcttttccagggcgctggaca

SEQ ID NO: 4094989 - DNA, 25 bp, Homo sapien
agaggcgtgcctgcggcttgtcttt

SEQ ID NO: 4094990 - DNA, 25 bp, Homo sapien
tgaaaaggcactgcccgagaagcgg

SEQ ID NO: 4094991 - DNA, 25 bp, Homo sapien
tggaagacggatgaaaaggcactgc

SEQ ID NO: 4094992 - DNA, 25 bp, Homo sapien
tgcttcttgaaggtcgaggggttaa

SEQ ID NO: 4094993 - DNA, 25 bp, Homo sapien
ggttaatgctctggaagacggatga

SEQ ID NO: 4094994 - DNA, 25 bp, Homo sapien
gatgggaaagatgtcgcctagcacc

SEQ ID NO: 4094995 - DNA, 25 bp, Homo sapien
tgtcaagtcggtcctcgtagctggg

SEQ ID NO: 4094996 - DNA, 25 bp, Homo sapien
caaatgccctacttcccacttgggt

SEQ ID NO: 4094997 - DNA, 25 bp, Homo sapien
ggtctgactccgtctacccaggatg

SEQ ID NO: 4094998 - DNA, 25 bp, Homo sapien
ccatgtaggtgtagagaactttgcc

SEQ ID NO: 4094999 - DNA, 25 bp, Homo sapien
ttgcccctcttacaccggctgagat

SEQ ID NO: 4095000 - DNA, 25 bp, Homo sapien
tttgcctttgatgacaaaccagagc

SEQ ID NO: 4095001 - DNA, 25 bp, Homo sapien
caccggctgagatagccactgatgg

SEQ ID NO: 4095002 - DNA, 25 bp, Homo sapien
tgtgacagtttatcagggaccaggc

SEQ ID NO: 4095003 - DNA, 25 bp, Homo sapien
gaaggaaagaaacgacactggctgg

SEQ ID NO: 4095004 - DNA, 25 bp, Homo sapien
tctgagatgcgtgaagagtgcctct

SEQ ID NO: 4095005 - DNA, 25 bp, Homo sapien
gatccagaatttgcactcatgacca

SEQ ID NO: 4095006 - DNA, 25 bp, Homo sapien
gctgaattggtatcttctgctttga

SEQ ID NO: 4095007 - DNA, 25 bp, Homo sapien
tggagcaatggtgaagcctagcaga

SEQ ID NO: 4095008 - DNA, 25 bp, Homo sapien
gaaaaataggtcctacttcactgct

SEQ ID NO: 4095009 - DNA, 25 bp, Homo sapien
gcctagcagaggcatactctccaag

SEQ ID NO: 4095010 - DNA, 25 bp, Homo sapien
tcgcatcttccatggcctcgatcca

SEQ ID NO: 4095011 - DNA, 25 bp, Homo sapien
cgcatcttccatggcctcgatccac

SEQ ID NO: 4095012 - DNA, 25 bp, Homo sapien
gagttgagccacagcttagcttcta

SEQ ID NO: 4095013 - DNA, 25 bp, Homo sapien
cacagaaaaggagaggtccataaat

SEQ ID NO: 4095014 - DNA, 25 bp, Homo sapien
gtcaggcctcattgctgaatccagg

SEQ ID NO: 4095015 - DNA, 25 bp, Homo sapien
gttatagcaaaaaaggtcaggcctc

SEQ ID NO: 4095016 - DNA, 25 bp, Homo sapien
taatacagcccaaggattaccgtgt

SEQ ID NO: 4095017 - DNA, 25 bp, Homo sapien
ggcgcagcccctctaaagtgatgtg

SEQ ID NO: 4095018 - DNA, 25 bp, Homo sapien
ttagtatacaggtcacaaggtcgac

SEQ ID NO: 4095019 - DNA, 25 bp, Homo sapien
gaataagcaacagtcaccctcagga

SEQ ID NO: 4095020 - DNA, 25 bp, Homo sapien
tgaaaatatttaatgcaagtaagtc

SEQ ID NO: 4095021 - DNA, 25 bp, Homo sapien
aagtccagagatggtgctttttaca

SEQ ID NO: 4095022 - DNA, 25 bp, Homo sapien
acagggcagcaacagaatggggaca

SEQ ID NO: 4095023 - DNA, 25 bp, Homo sapien
tgcaagtaagtccagagatggtgct

SEQ ID NO: 4095024 - DNA, 25 bp, Homo sapien
tgaaccattagttacatgtttaatg

SEQ ID NO: 4095025 - DNA, 25 bp, Homo sapien
aaccattagttacatgtttaatgca

SEQ ID NO: 4095026 - DNA, 25 bp, Homo sapien
accattagttacatgtttaatgcaa

SEQ ID NO: 4095027 - DNA, 25 bp, Homo sapien
gaaccattagttacatgtttaatgc

SEQ ID NO: 4095028 - DNA, 25 bp, Homo sapien
aatgattcagttggaattaagccct

SEQ ID NO: 4095029 - DNA, 25 bp, Homo sapien
aagaacactgtctaatcacttagtg

SEQ ID NO: 4095030 - DNA, 25 bp, Homo sapien
cagttggaattaagccctcaaaaat

SEQ ID NO: 4095031 - DNA, 25 bp, Homo sapien
aaattaacaagaacactgtctaatc

SEQ ID NO: 4095032 - DNA, 25 bp, Homo sapien
tcttcctgataaacatggcctttgc

SEQ ID NO: 4095033 - DNA, 25 bp, Homo sapien
tcatggctggtcatatccccagcat

SEQ ID NO: 4095034 - DNA, 25 bp, Homo sapien
tatgggggacttcgagcagcatctc

SEQ ID NO: 4095035 - DNA, 25 bp, Homo sapien
gcagcatctccgtggtgtcatggct

SEQ ID NO: 4095036 - DNA, 25 bp, Homo sapien
ctagctctcgtagaggaacagccag

SEQ ID NO: 4095037 - DNA, 25 bp, Homo sapien
agctctcgtagaggaacagccagag

SEQ ID NO: 4095038 - DNA, 25 bp, Homo sapien
gctctcgtagaggaacagccagaga

SEQ ID NO: 4095039 - DNA, 25 bp, Homo sapien
tagctctcgtagaggaacagccaga

SEQ ID NO: 4095040 - DNA, 25 bp, Homo sapien
ttttcctgaggtgagataagtgccc

SEQ ID NO: 4095041 - DNA, 25 bp, Homo sapien
gatcattcagagagacaggtcgttg

SEQ ID NO: 4095042 - DNA, 25 bp, Homo sapien
tagtcgtgcacatcagaactgccag

SEQ ID NO: 4095043 - DNA, 25 bp, Homo sapien
tgctccggagtgatacagatctggc

SEQ ID NO: 4095044 - DNA, 25 bp, Homo sapien
gaactcagcgttgactattctacgg

SEQ ID NO: 4095045 - DNA, 25 bp, Homo sapien
gctacttcatgaggctgcgacagga

SEQ ID NO: 4095046 - DNA, 25 bp, Homo sapien
tctacggtcattagggtcgttcagc

SEQ ID NO: 4095047 - DNA, 25 bp, Homo sapien
ttggtaagatgcaccgaaaactgca

SEQ ID NO: 4095048 - DNA, 25 bp, Homo sapien
tgaaatgttgaaacgccccagaacc

SEQ ID NO: 4095049 - DNA, 25 bp, Homo sapien
cctcgaaatttggaagtagtacatg

SEQ ID NO: 4095050 - DNA, 25 bp, Homo sapien
tagtaaacatacgatccagatcttg

SEQ ID NO: 4095051 - DNA, 25 bp, Homo sapien
tctggccatctcaggtgaaatgttg

SEQ ID NO: 4095052 - DNA, 25 bp, Homo sapien
cggaacgccgcagccggcgctcggt

SEQ ID NO: 4095053 - DNA, 25 bp, Homo sapien
acgccgcagccggcgctcggtccat

SEQ ID NO: 4095054 - DNA, 25 bp, Homo sapien
aacgccgcagccggcgctcggtcca

SEQ ID NO: 4095055 - DNA, 25 bp, Homo sapien
gaacgccgcagccggcgctcggtcc

SEQ ID NO: 4095056 - DNA, 25 bp, Homo sapien
aggaggagggcgaatgttcttcttc

SEQ ID NO: 4095057 - DNA, 25 bp, Homo sapien
taggaggagggcgaatgttcttctt

SEQ ID NO: 4095058 - DNA, 25 bp, Homo sapien
ggaggagggcgaatgttcttcttcc

SEQ ID NO: 4095059 - DNA, 25 bp, Homo sapien
ccgggctcccggtgtcggcggatgg

SEQ ID NO: 4095060 - DNA, 25 bp, Homo sapien
gtgtcggcggatggcgggagcccgg

SEQ ID NO: 4095061 - DNA, 25 bp, Homo sapien
cgagagacgagacgccgaggtggga

SEQ ID NO: 4095062 - DNA, 25 bp, Homo sapien
atttggcgccaaagcggcctcgaag

SEQ ID NO: 4095063 - DNA, 25 bp, Homo sapien
gggtgaaaatcccggcagagaagga

SEQ ID NO: 4095064 - DNA, 25 bp, Homo sapien
gaggggtgaaaatcccggcagagaa

SEQ ID NO: 4095065 - DNA, 25 bp, Homo sapien
ggcggttgggctgcgacggccgcca

SEQ ID NO: 4095066 - DNA, 25 bp, Homo sapien
ccgccaaaggcggactagaagcgga

SEQ ID NO: 4095067 - DNA, 25 bp, Homo sapien
tgttcctcagtactcattcgagacg

SEQ ID NO: 4095068 - DNA, 25 bp, Homo sapien
tactcattcgagacgcgttccaggc

SEQ ID NO: 4095069 - DNA, 25 bp, Homo sapien
cattcgagacgcgttccaggcggag

SEQ ID NO: 4095070 - DNA, 25 bp, Homo sapien
tcagtactcattcgagacgcgttcc

SEQ ID NO: 4095071 - DNA, 25 bp, Homo sapien
tccggcctggcaagaatgcgcatgc

SEQ ID NO: 4095072 - DNA, 25 bp, Homo sapien
tgactctgaagctcgcaaagtagcg

SEQ ID NO: 4095073 - DNA, 25 bp, Homo sapien
tgcgaaataacgagcaggagccctg

SEQ ID NO: 4095074 - DNA, 25 bp, Homo sapien
tgagtagagccccacaaacaatgct

SEQ ID NO: 4095075 - DNA, 25 bp, Homo sapien
gctatctgaattgccaaagaggctc

SEQ ID NO: 4095076 - DNA, 25 bp, Homo sapien
tatcccgaattaatggctacagaga

SEQ ID NO: 4095077 - DNA, 25 bp, Homo sapien
ccctgtgatggtgagacaaaaatca

SEQ ID NO: 4095078 - DNA, 25 bp, Homo sapien
aaagaggctcacacaaaaggtatcc

SEQ ID NO: 4095079 - DNA, 25 bp, Homo sapien
ggaaatgcagcatgaagcccgctag

SEQ ID NO: 4095080 - DNA, 25 bp, Homo sapien
caagaacgagtgtggtacaaatgac

SEQ ID NO: 4095081 - DNA, 25 bp, Homo sapien
tgcatcattacagacaccatagtgg

SEQ ID NO: 4095082 - DNA, 25 bp, Homo sapien
ttcactatacaacaaatacactggg

SEQ ID NO: 4095083 - DNA, 25 bp, Homo sapien
taatttttattctcgagaaagtaca

SEQ ID NO: 4095084 - DNA, 25 bp, Homo sapien
tttattctcgagaaagtacattgtt

SEQ ID NO: 4095085 - DNA, 25 bp, Homo sapien
taatccttagcataccttctgagta

SEQ ID NO: 4095086 - DNA, 25 bp, Homo sapien
tattagctcaccaatgaagatggaa

SEQ ID NO: 4095087 - DNA, 25 bp, Homo sapien
tcagtaagagccagggtagatggat

SEQ ID NO: 4095088 - DNA, 25 bp, Homo sapien
ttcttatcctaccaagagcccaagt

SEQ ID NO: 4095089 - DNA, 25 bp, Homo sapien
agagcttctctcactgctaccgcag

SEQ ID NO: 4095090 - DNA, 25 bp, Homo sapien
ctgagagcttctctcactgctaccg

SEQ ID NO: 4095091 - DNA, 25 bp, Homo sapien
gagagcttctctcactgctaccgca

SEQ ID NO: 4095092 - DNA, 25 bp, Homo sapien
gcttctctcactgctaccgcagcca

SEQ ID NO: 4095093 - DNA, 25 bp, Homo sapien
agcagcatcaggcatcatcaacagc

SEQ ID NO: 4095094 - DNA, 25 bp, Homo sapien
ttcagtataatctagacccaatttc

SEQ ID NO: 4095095 - DNA, 25 bp, Homo sapien
aaagctctcctgaatatttcctaag

SEQ ID NO: 4095096 - DNA, 25 bp, Homo sapien
tcttctggtcatgagaaagctctcc

SEQ ID NO: 4095097 - DNA, 25 bp, Homo sapien
aaaggctctaccacaaagaattcag

SEQ ID NO: 4095098 - DNA, 25 bp, Homo sapien
ccagcccctccatatttgtagccat

SEQ ID NO: 4095099 - DNA, 25 bp, Homo sapien
gctgaaccagcccctccatatttgt

SEQ ID NO: 4095100 - DNA, 25 bp, Homo sapien
gggtccccactctgtgctgaaccag

SEQ ID NO: 4095101 - DNA, 25 bp, Homo sapien
aaccagcccctccatatttgtagcc

SEQ ID NO: 4095102 - DNA, 25 bp, Homo sapien
caggacaggatccagccacctatca

SEQ ID NO: 4095103 - DNA, 25 bp, Homo sapien
tccagccacctatcaccctgaactg

SEQ ID NO: 4095104 - DNA, 25 bp, Homo sapien
taagtgggttgggaaatgaatacaa

SEQ ID NO: 4095105 - DNA, 25 bp, Homo sapien
actggaataagtgggttgggaaatg

SEQ ID NO: 4095106 - DNA, 25 bp, Homo sapien
gactactacaatctaataagggctt

SEQ ID NO: 4095107 - DNA, 25 bp, Homo sapien
gaatggactactacaatctaataag

SEQ ID NO: 4095108 - DNA, 25 bp, Homo sapien
caagaatggactactacaatctaat

SEQ ID NO: 4095109 - DNA, 25 bp, Homo sapien
cctacagctcaatgacaaaaaacct

SEQ ID NO: 4095110 - DNA, 25 bp, Homo sapien
atgctggattaagctatgtttgtgc

SEQ ID NO: 4095111 - DNA, 25 bp, Homo sapien
tgctggattaagctatgtttgtgcc

SEQ ID NO: 4095112 - DNA, 25 bp, Homo sapien
aacatcaatccttcttaaactcttc

SEQ ID NO: 4095113 - DNA, 25 bp, Homo sapien
tcaatccttcttaaactcttctaga

SEQ ID NO: 4095114 - DNA, 25 bp, Homo sapien
taccaaagccaaagacaccaaaaga

SEQ ID NO: 4095115 - DNA, 25 bp, Homo sapien
tccaaatagacctataaccagtaag

SEQ ID NO: 4095116 - DNA, 25 bp, Homo sapien
cacagtaagttcaaagagcaatcag

SEQ ID NO: 4095117 - DNA, 25 bp, Homo sapien
cagaggcttttagaaggaatgtttt

SEQ ID NO: 4095118 - DNA, 25 bp, Homo sapien
gactacagcaggaggtcagaggctt

SEQ ID NO: 4095119 - DNA, 25 bp, Homo sapien
gctgtgcacagtaagttcaaagagc

SEQ ID NO: 4095120 - DNA, 25 bp, Homo sapien
gaaagcttccataggaaagaaagga

SEQ ID NO: 4095121 - DNA, 25 bp, Homo sapien
taaatatggaccaacaatgaggatc

SEQ ID NO: 4095122 - DNA, 25 bp, Homo sapien
tactgtacccatgaagaaaaagttg

SEQ ID NO: 4095123 - DNA, 25 bp, Homo sapien
ttttgcccggctacattactcttaa

SEQ ID NO: 4095124 - DNA, 25 bp, Homo sapien
gaataaaagcttcatgcgaacagaa

SEQ ID NO: 4095125 - DNA, 25 bp, Homo sapien
ttaccaagccaccttaaacaatgag

SEQ ID NO: 4095126 - DNA, 25 bp, Homo sapien
ccctgaattccagttaagtacagaa

SEQ ID NO: 4095127 - DNA, 25 bp, Homo sapien
tcttgaaaactataacaatgcctag

SEQ ID NO: 4095128 - DNA, 25 bp, Homo sapien
tatcggtaggcttgtgattcaaccc

SEQ ID NO: 4095129 - DNA, 25 bp, Homo sapien
tttgcccaccatcaaggaagagagc

SEQ ID NO: 4095130 - DNA, 25 bp, Homo sapien
ggaatcttaacaactcagcccatga

SEQ ID NO: 4095131 - DNA, 25 bp, Homo sapien
ccaatgccggaaaagagtaggaatc

SEQ ID NO: 4095132 - DNA, 25 bp, Homo sapien
tagagacctgatgccagtgtaacag

SEQ ID NO: 4095133 - DNA, 25 bp, Homo sapien
tacagtgtttagcagtgccaaggca

SEQ ID NO: 4095134 - DNA, 25 bp, Homo sapien
ttctgggctcaggatatccgtctgc

SEQ ID NO: 4095135 - DNA, 25 bp, Homo sapien
gaaagctacagggaaccgtgtcaca

SEQ ID NO: 4095136 - DNA, 25 bp, Homo sapien
caactctggtgaaaatgaccaggga

SEQ ID NO: 4095137 - DNA, 25 bp, Homo sapien
ggctagagctatactcagaagacaa

SEQ ID NO: 4095138 - DNA, 25 bp, Homo sapien
cggatgagtctcaaataacttcgct

SEQ ID NO: 4095139 - DNA, 25 bp, Homo sapien
cctagggatagatgtggctagagct

SEQ ID NO: 4095140 - DNA, 25 bp, Homo sapien
gctctgcggaaggtcaagtacacta

SEQ ID NO: 4095141 - DNA, 25 bp, Homo sapien
agggctgtttaaagatgccctctct

SEQ ID NO: 4095142 - DNA, 25 bp, Homo sapien
ctgtttaaagatgccctctctgtga

SEQ ID NO: 4095143 - DNA, 25 bp, Homo sapien
ggaaggtcaagtacactatcactgc

SEQ ID NO: 4095144 - DNA, 25 bp, Homo sapien
ggctttgctaccttgcctgaggtac

SEQ ID NO: 4095145 - DNA, 25 bp, Homo sapien
caggttgggcgctgagactgctgtc

SEQ ID NO: 4095146 - DNA, 25 bp, Homo sapien
ctgaggtacagtttaaactccctgg

SEQ ID NO: 4095147 - DNA, 25 bp, Homo sapien
ggcgctgagactgctgtcccttggc

SEQ ID NO: 4095148 - DNA, 25 bp, Homo sapien
aagaatgaataggttgggtgtggca

SEQ ID NO: 4095149 - DNA, 25 bp, Homo sapien
gaatgaataggttgggtgtggcagc

SEQ ID NO: 4095150 - DNA, 25 bp, Homo sapien
atgaataggttgggtgtggcagctc

SEQ ID NO: 4095151 - DNA, 25 bp, Homo sapien
aatgaataggttgggtgtggcagct

SEQ ID NO: 4095152 - DNA, 25 bp, Homo sapien
ttctgaaattaggtattagcgatgg

SEQ ID NO: 4095153 - DNA, 25 bp, Homo sapien
taggtattagcgatggctgcacaat

SEQ ID NO: 4095154 - DNA, 25 bp, Homo sapien
aaattaggtattagcgatggctgca

SEQ ID NO: 4095155 - DNA, 25 bp, Homo sapien
ccttaaataggtgaactgccagcct

SEQ ID NO: 4095156 - DNA, 25 bp, Homo sapien
caagaagttttaaagccatcaacat

SEQ ID NO: 4095157 - DNA, 25 bp, Homo sapien
atttgcaagaagttttaaagccatc

SEQ ID NO: 4095158 - DNA, 25 bp, Homo sapien
tgcaagaagttttaaagccatcaac

SEQ ID NO: 4095159 - DNA, 25 bp, Homo sapien
ttatttgcaagaagttttaaagcca

SEQ ID NO: 4095160 - DNA, 25 bp, Homo sapien
ggtacaaggtgctgagtggtcacct

SEQ ID NO: 4095161 - DNA, 25 bp, Homo sapien
gtacaaggtgctgagtggtcacctg

SEQ ID NO: 4095162 - DNA, 25 bp, Homo sapien
aggtacaaggtgctgagtggtcacc

SEQ ID NO: 4095163 - DNA, 25 bp, Homo sapien
ggacccagaaggatgatgacaaagc

SEQ ID NO: 4095164 - DNA, 25 bp, Homo sapien
agtgatgaacttgtatggttctgag

SEQ ID NO: 4095165 - DNA, 25 bp, Homo sapien
aatgagatgttgctacaggatgccc

SEQ ID NO: 4095166 - DNA, 25 bp, Homo sapien
ggcctgaagaccacgcctcttgctt

SEQ ID NO: 4095167 - DNA, 25 bp, Homo sapien
cctggagattccggccgagaggtct

SEQ ID NO: 4095168 - DNA, 25 bp, Homo sapien
ttccggccgagaggtctgtgtacgt

SEQ ID NO: 4095169 - DNA, 25 bp, Homo sapien
gccgagaggtctgtgtacgtgttac

SEQ ID NO: 4095170 - DNA, 25 bp, Homo sapien
agattccggccgagaggtctgtgta

SEQ ID NO: 4095171 - DNA, 25 bp, Homo sapien
aatgcgctgaggtgaggctacagca

SEQ ID NO: 4095172 - DNA, 25 bp, Homo sapien
gctacagcagagtcggtggagatta

SEQ ID NO: 4095173 - DNA, 25 bp, Homo sapien
ctgaatgcgctgaggtgaggctaca

SEQ ID NO: 4095174 - DNA, 25 bp, Homo sapien
cagagtcggtggagattatctggat

SEQ ID NO: 4095175 - DNA, 25 bp, Homo sapien
tgcccaaaaggcacaactctttagt

SEQ ID NO: 4095176 - DNA, 25 bp, Homo sapien
cacaactctttagtgaaacccttag

SEQ ID NO: 4095177 - DNA, 25 bp, Homo sapien
gtactgtatttcatgcccaaaaggc

SEQ ID NO: 4095178 - DNA, 25 bp, Homo sapien
gttgccattggcaggttgcaggtac

SEQ ID NO: 4095179 - DNA, 25 bp, Homo sapien
gaaaacactcaatgggccagaggca

SEQ ID NO: 4095180 - DNA, 25 bp, Homo sapien
aaaacactcaatgggccagaggcag

SEQ ID NO: 4095181 - DNA, 25 bp, Homo sapien
tctctttgttcaaagatgtgaaaac

SEQ ID NO: 4095182 - DNA, 25 bp, Homo sapien
ttgttcaaagatgtgaaaacactca

SEQ ID NO: 4095183 - DNA, 25 bp, Homo sapien
tacaatgagaatcccttcaagggtt

SEQ ID NO: 4095184 - DNA, 25 bp, Homo sapien
gaacggccctgctgcgagtttggat

SEQ ID NO: 4095185 - DNA, 25 bp, Homo sapien
tgggaactgctatcaggcccacaga

SEQ ID NO: 4095186 - DNA, 25 bp, Homo sapien
agcatggcccaggaacctagagagg

SEQ ID NO: 4095187 - DNA, 25 bp, Homo sapien
tgccagggacgaggttgtctgaggt

SEQ ID NO: 4095188 - DNA, 25 bp, Homo sapien
cgtccactgcggtgactatctggat

SEQ ID NO: 4095189 - DNA, 25 bp, Homo sapien
agttgcttggcgctggatgtctctg

SEQ ID NO: 4095190 - DNA, 25 bp, Homo sapien
ttgtctgaggtggtgaatatgagtt

SEQ ID NO: 4095191 - DNA, 25 bp, Homo sapien
ccagtaaacgctccacagaggcaga

SEQ ID NO: 4095192 - DNA, 25 bp, Homo sapien
aacgctccacagaggcagaatccgt

SEQ ID NO: 4095193 - DNA, 25 bp, Homo sapien
gctggacgtccgtcttccccagtaa

SEQ ID NO: 4095194 - DNA, 25 bp, Homo sapien
ttccccagtaaacgctccacagagg

SEQ ID NO: 4095195 - DNA, 25 bp, Homo sapien
taatatcaggagacaatggcaccaa

SEQ ID NO: 4095196 - DNA, 25 bp, Homo sapien
tccctttgagtgacactaatatcag

SEQ ID NO: 4095197 - DNA, 25 bp, Homo sapien
gtgtgcatctggaataactcagtct

SEQ ID NO: 4095198 - DNA, 25 bp, Homo sapien
tccttgagttctctatccctttgag

SEQ ID NO: 4095199 - DNA, 25 bp, Homo sapien
gtacagtttgcatggtatctccaac

SEQ ID NO: 4095200 - DNA, 25 bp, Homo sapien
ctggaggtgatacctcatgtggtga

SEQ ID NO: 4095201 - DNA, 25 bp, Homo sapien
ttatagacatcctaactggaggtga

SEQ ID NO: 4095202 - DNA, 25 bp, Homo sapien
ttaagttcgctatatgttctgggta

SEQ ID NO: 4095203 - DNA, 25 bp, Homo sapien
gagacggttttaccatgttggccag

SEQ ID NO: 4095204 - DNA, 25 bp, Homo sapien
ttacaggaacccgctaccacaccca

SEQ ID NO: 4095205 - DNA, 25 bp, Homo sapien
gattacaggaacccgctaccacacc

SEQ ID NO: 4095206 - DNA, 25 bp, Homo sapien
agacggttttaccatgttggccagg

SEQ ID NO: 4095207 - DNA, 25 bp, Homo sapien
taaatagtcatgcagtaagcgtggg

SEQ ID NO: 4095208 - DNA, 25 bp, Homo sapien
cccctcctgagtcttggtgccatta

SEQ ID NO: 4095209 - DNA, 25 bp, Homo sapien
tgtaccagttggtcagtctttccca

SEQ ID NO: 4095210 - DNA, 25 bp, Homo sapien
tcaaatcagatagagtgaccatcac

SEQ ID NO: 4095211 - DNA, 25 bp, Homo sapien
caactgacagccccatagtgacggc

SEQ ID NO: 4095212 - DNA, 25 bp, Homo sapien
cttcacaactgacagccccatagtg

SEQ ID NO: 4095213 - DNA, 25 bp, Homo sapien
acaactgacagccccatagtgacgg

SEQ ID NO: 4095214 - DNA, 25 bp, Homo sapien
tcacaactgacagccccatagtgac

SEQ ID NO: 4095215 - DNA, 25 bp, Homo sapien
ttttcctcacactccttttgaagaa

SEQ ID NO: 4095216 - DNA, 25 bp, Homo sapien
taagcattttttcagccggcaaaac

SEQ ID NO: 4095217 - DNA, 25 bp, Homo sapien
atgcagtcttggttgctccggcagc

SEQ ID NO: 4095218 - DNA, 25 bp, Homo sapien
ctgacagcggttccggtgatgttta

SEQ ID NO: 4095219 - DNA, 25 bp, Homo sapien
cactagctagggaagtgacctccat

SEQ ID NO: 4095220 - DNA, 25 bp, Homo sapien
cacaaacgtgggagtagctatcagg

SEQ ID NO: 4095221 - DNA, 25 bp, Homo sapien
ttctcccgttgcacatcgaagggct

SEQ ID NO: 4095222 - DNA, 25 bp, Homo sapien
gcacaattgcttggtttctcccgtt

SEQ ID NO: 4095223 - DNA, 25 bp, Homo sapien
gaagggcttccgttcactctgcaca

SEQ ID NO: 4095224 - DNA, 25 bp, Homo sapien
ctgtaccatcctcacgtatcaaagg

SEQ ID NO: 4095225 - DNA, 25 bp, Homo sapien
agaatccgtggccaggagaactgta

SEQ ID NO: 4095226 - DNA, 25 bp, Homo sapien
aaaggctgctggatgttcacaagca

SEQ ID NO: 4095227 - DNA, 25 bp, Homo sapien
cttagaatccgtggccaggagaact

SEQ ID NO: 4095228 - DNA, 25 bp, Homo sapien
aatgtcctcgttgtgatactgtacc

SEQ ID NO: 4095229 - DNA, 25 bp, Homo sapien
tgacataaccactgggaggacctgg

SEQ ID NO: 4095230 - DNA, 25 bp, Homo sapien
tgggagctctgtaatagcactgtac

SEQ ID NO: 4095231 - DNA, 25 bp, Homo sapien
tctgaaagtagcttcctgtgggtgc

SEQ ID NO: 4095232 - DNA, 25 bp, Homo sapien
tggctggatttctgaagtgtcaccg

SEQ ID NO: 4095233 - DNA, 25 bp, Homo sapien
cgagttatctcacttgcagactggt

SEQ ID NO: 4095234 - DNA, 25 bp, Homo sapien
caaagattcacttaggttggcaagg

SEQ ID NO: 4095235 - DNA, 25 bp, Homo sapien
gaggtcactacatttgccagtgtgc

SEQ ID NO: 4095236 - DNA, 25 bp, Homo sapien
tccttagttaaatacagcacaggta

SEQ ID NO: 4095237 - DNA, 25 bp, Homo sapien
tagttaaatacagcacaggtaccaa

SEQ ID NO: 4095238 - DNA, 25 bp, Homo sapien
cctcacaatagagggagggtgtcca

SEQ ID NO: 4095239 - DNA, 25 bp, Homo sapien
aaatgctgttttccaccctcacaat

SEQ ID NO: 4095240 - DNA, 25 bp, Homo sapien
caacctcaatgatgggtgtcgactg

SEQ ID NO: 4095241 - DNA, 25 bp, Homo sapien
catctgccaagcttggagaagagga

SEQ ID NO: 4095242 - DNA, 25 bp, Homo sapien
ctgtggtattaagtgctttagctaa

SEQ ID NO: 4095243 - DNA, 25 bp, Homo sapien
ctctgctgatgacgtggatgctccc

SEQ ID NO: 4095244 - DNA, 25 bp, Homo sapien
aggaaaagcagacgggatgcagact

SEQ ID NO: 4095245 - DNA, 25 bp, Homo sapien
ccgagcccagtgcattgagaggaaa

SEQ ID NO: 4095246 - DNA, 25 bp, Homo sapien
gactcacagatgtagtgcacgttga

SEQ ID NO: 4095247 - DNA, 25 bp, Homo sapien
tgaaaggctgggattgaccgagccc

SEQ ID NO: 4095248 - DNA, 25 bp, Homo sapien
tgagaaccagggctactgcactggg

SEQ ID NO: 4095249 - DNA, 25 bp, Homo sapien
ccagttgccttaagtgtggcccagc

SEQ ID NO: 4095250 - DNA, 25 bp, Homo sapien
tgtctcaagatttcaggaggccgga

SEQ ID NO: 4095251 - DNA, 25 bp, Homo sapien
tctagcccggactgagaaactctgt

SEQ ID NO: 4095252 - DNA, 25 bp, Homo sapien
gcatccaggcactaagtcccagcat

SEQ ID NO: 4095253 - DNA, 25 bp, Homo sapien
aagtgtttattgaagtgctatccag

SEQ ID NO: 4095254 - DNA, 25 bp, Homo sapien
ctaggaatatagaaaggagtctgag

SEQ ID NO: 4095255 - DNA, 25 bp, Homo sapien
aaaggatgaagtctatgaataagtc

SEQ ID NO: 4095256 - DNA, 25 bp, Homo sapien
cttcctggatgctgttctgcaggtg

SEQ ID NO: 4095257 - DNA, 25 bp, Homo sapien
cctggatgctgttctgcaggtggtt

SEQ ID NO: 4095258 - DNA, 25 bp, Homo sapien
cagcaggcccgcacaaggctggtgt

SEQ ID NO: 4095259 - DNA, 25 bp, Homo sapien
cacaaggctggtgttgcagtcctgc

SEQ ID NO: 4095260 - DNA, 25 bp, Homo sapien
gggctaaagagaactatagctttaa

SEQ ID NO: 4095261 - DNA, 25 bp, Homo sapien
gccatctatatccagcttcgccatg

SEQ ID NO: 4095262 - DNA, 25 bp, Homo sapien
tatagctttaaggtatgcatactca

SEQ ID NO: 4095263 - DNA, 25 bp, Homo sapien
taaggtatgcatactcatagccatc

SEQ ID NO: 4095264 - DNA, 25 bp, Homo sapien
catgcatccccaccgcatatcttac

SEQ ID NO: 4095265 - DNA, 25 bp, Homo sapien
tcatgcatccccaccgcatatctta

SEQ ID NO: 4095266 - DNA, 25 bp, Homo sapien
tattcagtgcgtgacatcatcaggc

SEQ ID NO: 4095267 - DNA, 25 bp, Homo sapien
aaaagaaaggacatcgggtggcagc

SEQ ID NO: 4095268 - DNA, 25 bp, Homo sapien
cagtctgtgggcaaacaagtggaac

SEQ ID NO: 4095269 - DNA, 25 bp, Homo sapien
tgtgtccaaccccttactgtgaggt

SEQ ID NO: 4095270 - DNA, 25 bp, Homo sapien
tctggcttgtgctggtcaaacctgg

SEQ ID NO: 4095271 - DNA, 25 bp, Homo sapien
gtaggtgtcttctgagtaggttttc

SEQ ID NO: 4095272 - DNA, 25 bp, Homo sapien
tggaatttttcaatctggcttgtgc

SEQ ID NO: 4095273 - DNA, 25 bp, Homo sapien
catagtcctgcaactccatctgtgc

SEQ ID NO: 4095274 - DNA, 25 bp, Homo sapien
cctttggcagatctgaacaattttc

SEQ ID NO: 4095275 - DNA, 25 bp, Homo sapien
aaagcagcactcttccatccttggc

SEQ ID NO: 4095276 - DNA, 25 bp, Homo sapien
aatactttacttgaaagggtctcag

SEQ ID NO: 4095277 - DNA, 25 bp, Homo sapien
ggaaagcctgccaatgcattctgac

SEQ ID NO: 4095278 - DNA, 25 bp, Homo sapien
caacctgactgtatacctggctgga

SEQ ID NO: 4095279 - DNA, 25 bp, Homo sapien
tttgggctccaagtaacctgtcgtc

SEQ ID NO: 4095280 - DNA, 25 bp, Homo sapien
agaagcaggctcttgtctaccagca

SEQ ID NO: 4095281 - DNA, 25 bp, Homo sapien
tatgcaggtagcattccagcaccag

SEQ ID NO: 4095282 - DNA, 25 bp, Homo sapien
cattgccaatgagaccagtaaaaaa

SEQ ID NO: 4095283 - DNA, 25 bp, Homo sapien
tatgctgtctatcgaaacattgcca

SEQ ID NO: 4095284 - DNA, 25 bp, Homo sapien
tatagactggctccggtgatctggc

SEQ ID NO: 4095285 - DNA, 25 bp, Homo sapien
tctgttatgttggagctcatcagcc

SEQ ID NO: 4095286 - DNA, 25 bp, Homo sapien
tataagccctgtgaaagttggagcc

SEQ ID NO: 4095287 - DNA, 25 bp, Homo sapien
cagtcatcaaaggagaaccccaggt

SEQ ID NO: 4095288 - DNA, 25 bp, Homo sapien
gaaaattcgtccgagtagacctgga

SEQ ID NO: 4095289 - DNA, 25 bp, Homo sapien
tattcagtcataggacagtgcccca

SEQ ID NO: 4095290 - DNA, 25 bp, Homo sapien
tagtataaacctcatttaggtagta

SEQ ID NO: 4095291 - DNA, 25 bp, Homo sapien
atagtataaacctcatttaggtagt

SEQ ID NO: 4095292 - DNA, 25 bp, Homo sapien
agtataaacctcatttaggtagtag

SEQ ID NO: 4095293 - DNA, 25 bp, Homo sapien
ggaggatctcgagcctgcgagatca

SEQ ID NO: 4095294 - DNA, 25 bp, Homo sapien
gatctcgagcctgcgagatcaaggc

SEQ ID NO: 4095295 - DNA, 25 bp, Homo sapien
gtgggaggatctcgagcctgcgaga

SEQ ID NO: 4095296 - DNA, 25 bp, Homo sapien
aggatctcgagcctgcgagatcaag

SEQ ID NO: 4095297 - DNA, 25 bp, Homo sapien
caagaccttgtctctacaaaaagta

SEQ ID NO: 4095298 - DNA, 25 bp, Homo sapien
ttcgagaccagcctgggcaacatgg

SEQ ID NO: 4095299 - DNA, 25 bp, Homo sapien
gtgggcggatagttgagcccaggag

SEQ ID NO: 4095300 - DNA, 25 bp, Homo sapien
agaccttgtctctacaaaaagtaca

SEQ ID NO: 4095301 - DNA, 25 bp, Homo sapien
ccactgtgtgcattagcagggaggt

SEQ ID NO: 4095302 - DNA, 25 bp, Homo sapien
ggatggtgtctatagctggctctgc

SEQ ID NO: 4095303 - DNA, 25 bp, Homo sapien
cagttgattacccttgcctgctggg

SEQ ID NO: 4095304 - DNA, 25 bp, Homo sapien
aaggcaacccttcgtgcagtgctca

SEQ ID NO: 4095305 - DNA, 25 bp, Homo sapien
gaatgagtgagttgtttggtttgac

SEQ ID NO: 4095306 - DNA, 25 bp, Homo sapien
catggagcacatcagaaaaatcttg

SEQ ID NO: 4095307 - DNA, 25 bp, Homo sapien
gagcaataaggagatcatggagcac

SEQ ID NO: 4095308 - DNA, 25 bp, Homo sapien
ggagatcatggagcacatcagaaaa

SEQ ID NO: 4095309 - DNA, 25 bp, Homo sapien
gctgagtgcgctgtgagttctgttt

SEQ ID NO: 4095310 - DNA, 25 bp, Homo sapien
tctgccactaaaagcaagtcccaaa

SEQ ID NO: 4095311 - DNA, 25 bp, Homo sapien
tgccccgtgctttccgtttccagat

SEQ ID NO: 4095312 - DNA, 25 bp, Homo sapien
ttttgaggctgagtgcgctgtgagt

SEQ ID NO: 4095313 - DNA, 25 bp, Homo sapien
aattatcttggtatctttgctgaaa

SEQ ID NO: 4095314 - DNA, 25 bp, Homo sapien
cgccatttgttgaaacgattatctt

SEQ ID NO: 4095315 - DNA, 25 bp, Homo sapien
ttgaaacgattatctttcttcattg

SEQ ID NO: 4095316 - DNA, 25 bp, Homo sapien
ctgaaaagcaattgaccttacaaat

SEQ ID NO: 4095317 - DNA, 25 bp, Homo sapien
caaaaaacatttagccagtgtggtg

SEQ ID NO: 4095318 - DNA, 25 bp, Homo sapien
gaccaacatgggcaacatgataaaa

SEQ ID NO: 4095319 - DNA, 25 bp, Homo sapien
aggctgaagatggtggatctcttga

SEQ ID NO: 4095320 - DNA, 25 bp, Homo sapien
ccaacatgggcaacatgataaaacc

SEQ ID NO: 4095321 - DNA, 25 bp, Homo sapien
tcctctgaggactgcgtgcacttac

SEQ ID NO: 4095322 - DNA, 25 bp, Homo sapien
tttggctccacgctggaaaacgagg

SEQ ID NO: 4095323 - DNA, 25 bp, Homo sapien
cacgatgctgttcatgtttggacca

SEQ ID NO: 4095324 - DNA, 25 bp, Homo sapien
gtaacacatgttccctaggaccagg

SEQ ID NO: 4095325 - DNA, 25 bp, Homo sapien
cttgatatggcatagcagatctccc

SEQ ID NO: 4095326 - DNA, 25 bp, Homo sapien
tacagagatgggttgacagcaggca

SEQ ID NO: 4095327 - DNA, 25 bp, Homo sapien
tcgcagaattcatgcaggcacaaag

SEQ ID NO: 4095328 - DNA, 25 bp, Homo sapien
tcacctcaggtagcaatctgtaagt

SEQ ID NO: 4095329 - DNA, 25 bp, Homo sapien
taaactgttggtcaattaaggccag

SEQ ID NO: 4095330 - DNA, 25 bp, Homo sapien
cacaacccaggatcgtgctggtagc

SEQ ID NO: 4095331 - DNA, 25 bp, Homo sapien
gctggtagcaccacagtacttaaac

SEQ ID NO: 4095332 - DNA, 25 bp, Homo sapien
gtgcccgccctgatgagatatttta

SEQ ID NO: 4095333 - DNA, 25 bp, Homo sapien
ccttatgcagtattatagggcagcc

SEQ ID NO: 4095334 - DNA, 25 bp, Homo sapien
taccgagatataactaaatgcagct

SEQ ID NO: 4095335 - DNA, 25 bp, Homo sapien
tcttgggtccatttgctactgccta

SEQ ID NO: 4095336 - DNA, 25 bp, Homo sapien
tgacagagaatctgcgggagctgaa

SEQ ID NO: 4095337 - DNA, 25 bp, Homo sapien
gcaccgtggagaatggagagttttc

SEQ ID NO: 4095338 - DNA, 25 bp, Homo sapien
gcgaggtgggttctagatgcaaaac

SEQ ID NO: 4095339 - DNA, 25 bp, Homo sapien
tggcactattttcttccggtcagct

SEQ ID NO: 4095340 - DNA, 25 bp, Homo sapien
tgggcatagtagcaagcacaagtac

SEQ ID NO: 4095341 - DNA, 25 bp, Homo sapien
tctctagagaggtgcaaaggacatg

SEQ ID NO: 4095342 - DNA, 25 bp, Homo sapien
tagagactaggctccctcagagaaa

SEQ ID NO: 4095343 - DNA, 25 bp, Homo sapien
tccctctaggtgctgtgagaagcca

SEQ ID NO: 4095344 - DNA, 25 bp, Homo sapien
ccttaagagaatggcccaggttgac

SEQ ID NO: 4095345 - DNA, 25 bp, Homo sapien
ggttacatagtatttcccactggag

SEQ ID NO: 4095346 - DNA, 25 bp, Homo sapien
tatggttacatagtatttcccactg

SEQ ID NO: 4095347 - DNA, 25 bp, Homo sapien
ccactggagttagtgatcttattaa

SEQ ID NO: 4095348 - DNA, 25 bp, Homo sapien
tttcccactggagttagtgatctta

SEQ ID NO: 4095349 - DNA, 25 bp, Homo sapien
cccattgttactgcgtatatttgca

SEQ ID NO: 4095350 - DNA, 25 bp, Homo sapien
gtaggagtggcttaatggtccgata

SEQ ID NO: 4095351 - DNA, 25 bp, Homo sapien
tagtccttgtgtatatagcccccat

SEQ ID NO: 4095352 - DNA, 25 bp, Homo sapien
tggcttaatggtccgataaaatcca

SEQ ID NO: 4095353 - DNA, 25 bp, Homo sapien
gctaacaggaatgtgctccgtgtct

SEQ ID NO: 4095354 - DNA, 25 bp, Homo sapien
gtagctaacaggaatgtgctccgtg

SEQ ID NO: 4095355 - DNA, 25 bp, Homo sapien
caggaatgtgctccgtgtcttcttc

SEQ ID NO: 4095356 - DNA, 25 bp, Homo sapien
tcaaaggaccgtccaccaacctgcg

SEQ ID NO: 4095357 - DNA, 25 bp, Homo sapien
tatgctctccacgttatctgcagca

SEQ ID NO: 4095358 - DNA, 25 bp, Homo sapien
ctccctttttgccaccttccataag

SEQ ID NO: 4095359 - DNA, 25 bp, Homo sapien
tttttgccaccttccataaggcact

SEQ ID NO: 4095360 - DNA, 25 bp, Homo sapien
tccataaggcacttgttcttaacaa

SEQ ID NO: 4095361 - DNA, 25 bp, Homo sapien
ttccataaggcacttgttcttaaca

SEQ ID NO: 4095362 - DNA, 25 bp, Homo sapien
tactgatctttcttagagaatggac

SEQ ID NO: 4095363 - DNA, 25 bp, Homo sapien
ctttcttagagaatggaccaactac

SEQ ID NO: 4095364 - DNA, 25 bp, Homo sapien
gatctttcttagagaatggaccaac

SEQ ID NO: 4095365 - DNA, 25 bp, Homo sapien
actgatctttcttagagaatggacc

SEQ ID NO: 4095366 - DNA, 25 bp, Homo sapien
cttatattgaacatagcaggtgctt

SEQ ID NO: 4095367 - DNA, 25 bp, Homo sapien
tatattgaacatagcaggtgctttc

SEQ ID NO: 4095368 - DNA, 25 bp, Homo sapien
tattgaacatagcaggtgctttcac

SEQ ID NO: 4095369 - DNA, 25 bp, Homo sapien
ttatattgaacatagcaggtgcttt

SEQ ID NO: 4095370 - DNA, 25 bp, Homo sapien
gtcctggtgacgaagtctttccaat

SEQ ID NO: 4095371 - DNA, 25 bp, Homo sapien
cttgggtcctggtgacgaagtcttt

SEQ ID NO: 4095372 - DNA, 25 bp, Homo sapien
tgggtcctggtgacgaagtctttcc

SEQ ID NO: 4095373 - DNA, 25 bp, Homo sapien
ggtcctggtgacgaagtctttccaa

SEQ ID NO: 4095374 - DNA, 25 bp, Homo sapien
tcatttcaaacacaagacccttgag

SEQ ID NO: 4095375 - DNA, 25 bp, Homo sapien
actcatttcaaacacaagacccttg

SEQ ID NO: 4095376 - DNA, 25 bp, Homo sapien
gactcatttcaaacacaagaccctt

SEQ ID NO: 4095377 - DNA, 25 bp, Homo sapien
atttcaaacacaagacccttgagac

SEQ ID NO: 4095378 - DNA, 25 bp, Homo sapien
gcttcaatcattgttgaacattttt

SEQ ID NO: 4095379 - DNA, 25 bp, Homo sapien
tcattgttgaacatttttcaacctt

SEQ ID NO: 4095380 - DNA, 25 bp, Homo sapien
ttgaacatttttcaaccttggaaca

SEQ ID NO: 4095381 - DNA, 25 bp, Homo sapien
gaacatttttcaaccttggaacata

SEQ ID NO: 4095382 - DNA, 25 bp, Homo sapien
gaggtcttcggtatcagattgttgt

SEQ ID NO: 4095383 - DNA, 25 bp, Homo sapien
gcataagaggtcttcggtatcagat

SEQ ID NO: 4095384 - DNA, 25 bp, Homo sapien
aagaggtcttcggtatcagattgtt

SEQ ID NO: 4095385 - DNA, 25 bp, Homo sapien
ggtcttcggtatcagattgttgtgt

SEQ ID NO: 4095386 - DNA, 25 bp, Homo sapien
acgcaggacggctcttcgcggactg

SEQ ID NO: 4095387 - DNA, 25 bp, Homo sapien
tactttggacggtggaggagagctc

SEQ ID NO: 4095388 - DNA, 25 bp, Homo sapien
aggagagctcgccttcccgttgccg

SEQ ID NO: 4095389 - DNA, 25 bp, Homo sapien
cgcggaaggagcggcaaagtttact

SEQ ID NO: 4095390 - DNA, 25 bp, Homo sapien
gctgaaccgccagacgggcgaactg

SEQ ID NO: 4095391 - DNA, 25 bp, Homo sapien
tagcggccttcgtggtcgcgctgaa

SEQ ID NO: 4095392 - DNA, 25 bp, Homo sapien
acagcgtcccgctccagtgctgtgg

SEQ ID NO: 4095393 - DNA, 25 bp, Homo sapien
taaaacaccgcctcggagtagcggc

SEQ ID NO: 4095394 - DNA, 25 bp, Homo sapien
cacttaaatccaataaacggaatgt

SEQ ID NO: 4095395 - DNA, 25 bp, Homo sapien
aaagatatgacttccttagattcta

SEQ ID NO: 4095396 - DNA, 25 bp, Homo sapien
tatattgccccttcagttatcttgt

SEQ ID NO: 4095397 - DNA, 25 bp, Homo sapien
agaggaggaaagtataactttacat

SEQ ID NO: 4095398 - DNA, 25 bp, Homo sapien
cttctctgcagtaacccaagcgtgt

SEQ ID NO: 4095399 - DNA, 25 bp, Homo sapien
gatgccatctactgaacatcacttt

SEQ ID NO: 4095400 - DNA, 25 bp, Homo sapien
tgaatccagttgtttgagcaggagt

SEQ ID NO: 4095401 - DNA, 25 bp, Homo sapien
gcgtgtacacttcatgggtcatcat

SEQ ID NO: 4095402 - DNA, 25 bp, Homo sapien
aaaagattacaggagattacacagg

SEQ ID NO: 4095403 - DNA, 25 bp, Homo sapien
ggttaaatatctcacagtaaaagga

SEQ ID NO: 4095404 - DNA, 25 bp, Homo sapien
tatgaattcacgcataaggaactga

SEQ ID NO: 4095405 - DNA, 25 bp, Homo sapien
gccttcaaagcattaaaacgagtaa

SEQ ID NO: 4095406 - DNA, 25 bp, Homo sapien
tgatgatgctctaccgaaggagcta

SEQ ID NO: 4095407 - DNA, 25 bp, Homo sapien
cacattaaaagtctgatgatgctct

SEQ ID NO: 4095408 - DNA, 25 bp, Homo sapien
gatgatgctctaccgaaggagctat

SEQ ID NO: 4095409 - DNA, 25 bp, Homo sapien
tctgatgatgctctaccgaaggagc

SEQ ID NO: 4095410 - DNA, 25 bp, Homo sapien
attaggtgctaaaagccacaggaca

SEQ ID NO: 4095411 - DNA, 25 bp, Homo sapien
gaattaggtgctaaaagccacagga

SEQ ID NO: 4095412 - DNA, 25 bp, Homo sapien
cagaattaggtgctaaaagccacag

SEQ ID NO: 4095413 - DNA, 25 bp, Homo sapien
aattaggtgctaaaagccacaggac

SEQ ID NO: 4095414 - DNA, 25 bp, Homo sapien
cataaattaaggcttgtgcagcttc

SEQ ID NO: 4095415 - DNA, 25 bp, Homo sapien
ccatctcagcataaattaaggcttg

SEQ ID NO: 4095416 - DNA, 25 bp, Homo sapien
ctgctgaatgtagagcttgaactct

SEQ ID NO: 4095417 - DNA, 25 bp, Homo sapien
tattttctaggcttgatcctgccat

SEQ ID NO: 4095418 - DNA, 25 bp, Homo sapien
cacaactctgggaataggctaaaaa

SEQ ID NO: 4095419 - DNA, 25 bp, Homo sapien
aaaagggccatgttttggatgattc

SEQ ID NO: 4095420 - DNA, 25 bp, Homo sapien
gaaacaacaagattagtggtggcta

SEQ ID NO: 4095421 - DNA, 25 bp, Homo sapien
ttaaatacacggtctcactaggttg

SEQ ID NO: 4095422 - DNA, 25 bp, Homo sapien
caaggaaatgagcacgctctaagtc

SEQ ID NO: 4095423 - DNA, 25 bp, Homo sapien
caaaagcttgtgtaacaaggaaatg

SEQ ID NO: 4095424 - DNA, 25 bp, Homo sapien
gttttcagacagagatccacagctt

SEQ ID NO: 4095425 - DNA, 25 bp, Homo sapien
cagcttctgtgtacaattctatagc

SEQ ID NO: 4095426 - DNA, 25 bp, Homo sapien
ttgcaggactttatcagcagtttca

SEQ ID NO: 4095427 - DNA, 25 bp, Homo sapien
tgcctgtcgagccaactgtttcagt

SEQ ID NO: 4095428 - DNA, 25 bp, Homo sapien
gtttattttgcaggactttatcagc

SEQ ID NO: 4095429 - DNA, 25 bp, Homo sapien
ctgtctagtgcctgtcgagccaact

SEQ ID NO: 4095430 - DNA, 25 bp, Homo sapien
ggctttggcttaacacttgttgaac

SEQ ID NO: 4095431 - DNA, 25 bp, Homo sapien
taacacttgttgaactgattttgcc

SEQ ID NO: 4095432 - DNA, 25 bp, Homo sapien
gattttgccaactggcttggtcaaa

SEQ ID NO: 4095433 - DNA, 25 bp, Homo sapien
ggtcaaaggctcactcagcgcttct

SEQ ID NO: 4095434 - DNA, 25 bp, Homo sapien
catgactgaggacttataaatgact

SEQ ID NO: 4095435 - DNA, 25 bp, Homo sapien
aaatgactgaggtctttcaaggaag

SEQ ID NO: 4095436 - DNA, 25 bp, Homo sapien
gggattagcgcccagtggaaaatgt

SEQ ID NO: 4095437 - DNA, 25 bp, Homo sapien
tctttcaaggaagggattagcgccc

SEQ ID NO: 4095438 - DNA, 25 bp, Homo sapien
ttggataggcaaaacgttctctcag

SEQ ID NO: 4095439 - DNA, 25 bp, Homo sapien
aaggcattggataggcaaaacgttc

SEQ ID NO: 4095440 - DNA, 25 bp, Homo sapien
cagaaaggcattggataggcaaaac

SEQ ID NO: 4095441 - DNA, 25 bp, Homo sapien
taggcaaaacgttctctcaggtcaa

SEQ ID NO: 4095442 - DNA, 25 bp, Homo sapien
aaaatatgttaactggctttgtgat

SEQ ID NO: 4095443 - DNA, 25 bp, Homo sapien
tgttctttacagagccttcatattc

SEQ ID NO: 4095444 - DNA, 25 bp, Homo sapien
tctttacagagccttcatattctat

SEQ ID NO: 4095445 - DNA, 25 bp, Homo sapien
gctttgtgatacctaacccttggca

SEQ ID NO: 4095446 - DNA, 25 bp, Homo sapien
tcacagaaccactagtattccaggt

SEQ ID NO: 4095447 - DNA, 25 bp, Homo sapien
cattgaaggacacctctagacttta

SEQ ID NO: 4095448 - DNA, 25 bp, Homo sapien
taataccaggagctaactgtaaaca

SEQ ID NO: 4095449 - DNA, 25 bp, Homo sapien
tggtcaagtatgatctacaaactcc

SEQ ID NO: 4095450 - DNA, 25 bp, Homo sapien
tctttatagagtccagtcaacctga

SEQ ID NO: 4095451 - DNA, 25 bp, Homo sapien
cattcaaaaggacctaggaagctaa

SEQ ID NO: 4095452 - DNA, 25 bp, Homo sapien
tccacttggcaaggctaataatgag

SEQ ID NO: 4095453 - DNA, 25 bp, Homo sapien
taaccttctggtcaaatctggctct

SEQ ID NO: 4095454 - DNA, 25 bp, Homo sapien
cattgtaggattgttggtgaggtct

SEQ ID NO: 4095455 - DNA, 25 bp, Homo sapien
gtgataatggtagcttgccccatct

SEQ ID NO: 4095456 - DNA, 25 bp, Homo sapien
gaggtcttctggtcgtacccacttg

SEQ ID NO: 4095457 - DNA, 25 bp, Homo sapien
aactggacacagtatatatcattgt

SEQ ID NO: 4095458 - DNA, 25 bp, Homo sapien
ttaaaacgtctttcataagctgcac

SEQ ID NO: 4095459 - DNA, 25 bp, Homo sapien
cataagctgcactgatggccagtga

SEQ ID NO: 4095460 - DNA, 25 bp, Homo sapien
cagtgatgccacaaaggagcaatcc

SEQ ID NO: 4095461 - DNA, 25 bp, Homo sapien
caaaggagcaatccgatactattgt

SEQ ID NO: 4095462 - DNA, 25 bp, Homo sapien
cactggccctaagaagtaaagacca

SEQ ID NO: 4095463 - DNA, 25 bp, Homo sapien
tagttgaaactaaggactgcgtcta

SEQ ID NO: 4095464 - DNA, 25 bp, Homo sapien
caggtatatactaccgtcttggcaa

SEQ ID NO: 4095465 - DNA, 25 bp, Homo sapien
cctacaataggcctagaaaatgaac

SEQ ID NO: 4095466 - DNA, 25 bp, Homo sapien
ttgaggtgaagttttaccatatact

SEQ ID NO: 4095467 - DNA, 25 bp, Homo sapien
ctttcttgggacaccattgaggtga

SEQ ID NO: 4095468 - DNA, 25 bp, Homo sapien
taccatatacttcccacatggattg

SEQ ID NO: 4095469 - DNA, 25 bp, Homo sapien
acttcccacatggattgtattctgg

SEQ ID NO: 4095470 - DNA, 25 bp, Homo sapien
ttcttaggtgcacaaaatatcttaa

SEQ ID NO: 4095471 - DNA, 25 bp, Homo sapien
taaccttcttaggtgcacaaaatat

SEQ ID NO: 4095472 - DNA, 25 bp, Homo sapien
cattaaccttcttaggtgcacaaaa

SEQ ID NO: 4095473 - DNA, 25 bp, Homo sapien
gaacattaaccttcttaggtgcaca

SEQ ID NO: 4095474 - DNA, 25 bp, Homo sapien
gctttttctatgagagaaacccata

SEQ ID NO: 4095475 - DNA, 25 bp, Homo sapien
gatcctggaaaatcatatcctccca

SEQ ID NO: 4095476 - DNA, 25 bp, Homo sapien
gcaattctcccttgtgatcaacagg

SEQ ID NO: 4095477 - DNA, 25 bp, Homo sapien
gatcaacaggtaactggtcatcaat

SEQ ID NO: 4095478 - DNA, 25 bp, Homo sapien
tccagccagtcagtgcatgaagatc

SEQ ID NO: 4095479 - DNA, 25 bp, Homo sapien
ctgaaagtttggctatctgaatgca

SEQ ID NO: 4095480 - DNA, 25 bp, Homo sapien
gccagtcagtgcatgaagatcaata

SEQ ID NO: 4095481 - DNA, 25 bp, Homo sapien
tggctatctgaatgcatagcaattc

SEQ ID NO: 4095482 - DNA, 25 bp, Homo sapien
tccagttgacgcagtgatgaggaca

SEQ ID NO: 4095483 - DNA, 25 bp, Homo sapien
tgtgtgggaaccagaccccacttct

SEQ ID NO: 4095484 - DNA, 25 bp, Homo sapien
gatgaggacatctcctttgtgaaat

SEQ ID NO: 4095485 - DNA, 25 bp, Homo sapien
tccaaaacagcatatgcgtgtgtgg

SEQ ID NO: 4095486 - DNA, 25 bp, Homo sapien
ttcctttccaacgtaaatgactcca

SEQ ID NO: 4095487 - DNA, 25 bp, Homo sapien
tattttctgagctgttcggggatca

SEQ ID NO: 4095488 - DNA, 25 bp, Homo sapien
tgactccaaggatttttcaactgga

SEQ ID NO: 4095489 - DNA, 25 bp, Homo sapien
tctggagtccagttttttacatcat

SEQ ID NO: 4095490 - DNA, 25 bp, Homo sapien
tggcagagatcatcccaggaaatcc

SEQ ID NO: 4095491 - DNA, 25 bp, Homo sapien
tacatgttgattctttaaaaagacc

SEQ ID NO: 4095492 - DNA, 25 bp, Homo sapien
gaatacatgttgattctttaaaaag

SEQ ID NO: 4095493 - DNA, 25 bp, Homo sapien
ctgtgaatacatgttgattctttaa

SEQ ID NO: 4095494 - DNA, 25 bp, Homo sapien
aaagcatactctgcaatgtgcaaaa

SEQ ID NO: 4095495 - DNA, 25 bp, Homo sapien
tattataaagcatactctgcaatgt

SEQ ID NO: 4095496 - DNA, 25 bp, Homo sapien
tataaagcatactctgcaatgtgca

SEQ ID NO: 4095497 - DNA, 25 bp, Homo sapien
gctattataaagcatactctgcaat

SEQ ID NO: 4095498 - DNA, 25 bp, Homo sapien
ggctataggcatctttcacaggtcc

SEQ ID NO: 4095499 - DNA, 25 bp, Homo sapien
tgttggccaggctataggcatcttt

SEQ ID NO: 4095500 - DNA, 25 bp, Homo sapien
ggcatctttcacaggtccttgctta

SEQ ID NO: 4095501 - DNA, 25 bp, Homo sapien
ctttcacaggtccttgcttagcatc

SEQ ID NO: 4095502 - DNA, 25 bp, Homo sapien
gcaaaacccaaactgcagcaccccc

SEQ ID NO: 4095503 - DNA, 25 bp, Homo sapien
tctgttatgtgtctactaagcaaaa

SEQ ID NO: 4095504 - DNA, 25 bp, Homo sapien
tttcccatcagtcttgtatacaacc

SEQ ID NO: 4095505 - DNA, 25 bp, Homo sapien
attctcgattattcgcaaaatcatc

SEQ ID NO: 4095506 - DNA, 25 bp, Homo sapien
ccatcagtcttgtatacaaccattg

SEQ ID NO: 4095507 - DNA, 25 bp, Homo sapien
ttgtgataaattctcgattattcgc

SEQ ID NO: 4095508 - DNA, 25 bp, Homo sapien
taactcgatatttgtcactggacct

SEQ ID NO: 4095509 - DNA, 25 bp, Homo sapien
tattgactagcaagactcagtgcct

SEQ ID NO: 4095510 - DNA, 25 bp, Homo sapien
ttatgacaagccaaagactctccga

SEQ ID NO: 4095511 - DNA, 25 bp, Homo sapien
cattccagaacgcagggatattgac

SEQ ID NO: 4095512 - DNA, 25 bp, Homo sapien
acaaagaatgctgcctaatatatta

SEQ ID NO: 4095513 - DNA, 25 bp, Homo sapien
tgatagtcccatcagtcaagcctga

SEQ ID NO: 4095514 - DNA, 25 bp, Homo sapien
aaagagctatgttgttctatacaga

SEQ ID NO: 4095515 - DNA, 25 bp, Homo sapien
tagacttgaatacaaacgtacccac

SEQ ID NO: 4095516 - DNA, 25 bp, Homo sapien
aatagtacttgctatttgctctgtg

SEQ ID NO: 4095517 - DNA, 25 bp, Homo sapien
aattcctactatttgttctgtgttg

SEQ ID NO: 4095518 - DNA, 25 bp, Homo sapien
agtataatagtacttgctatttgct

SEQ ID NO: 4095519 - DNA, 25 bp, Homo sapien
ataatagtacttgctatttgctctg

SEQ ID NO: 4095520 - DNA, 25 bp, Homo sapien
gggctgttaattcgaattccatcaa

SEQ ID NO: 4095521 - DNA, 25 bp, Homo sapien
ccgaaccgtgtaatggattgtgttc

SEQ ID NO: 4095522 - DNA, 25 bp, Homo sapien
tagtcaaataatgagggctgttaat

SEQ ID NO: 4095523 - DNA, 25 bp, Homo sapien
tattgagaaaccactaatgtaaagg

SEQ ID NO: 4095524 - DNA, 25 bp, Homo sapien
caatgaccttcccagctagatgaga

SEQ ID NO: 4095525 - DNA, 25 bp, Homo sapien
caaattgagccgcttatctagagca

SEQ ID NO: 4095526 - DNA, 25 bp, Homo sapien
gctagtaactgtatgcctcaggaca

SEQ ID NO: 4095527 - DNA, 25 bp, Homo sapien
taggcagcctagtatcaggtcaggt

SEQ ID NO: 4095528 - DNA, 25 bp, Homo sapien
gaaaaagtaaagctgcatgctgaat

SEQ ID NO: 4095529 - DNA, 25 bp, Homo sapien
ttgaaaaagtaaagctgcatgctga

SEQ ID NO: 4095530 - DNA, 25 bp, Homo sapien
aggtgtatggtgaaggaatctttga

SEQ ID NO: 4095531 - DNA, 25 bp, Homo sapien
ccgttttgataaggtgtatggtgaa

SEQ ID NO: 4095532 - DNA, 25 bp, Homo sapien
catttccaattccacttaaagacaa

SEQ ID NO: 4095533 - DNA, 25 bp, Homo sapien
tagtattaacaaaatttcatttcca

SEQ ID NO: 4095534 - DNA, 25 bp, Homo sapien
ttcatttccaattccacttaaagac

SEQ ID NO: 4095535 - DNA, 25 bp, Homo sapien
atttcatttccaattccacttaaag

SEQ ID NO: 4095536 - DNA, 25 bp, Homo sapien
cttggtcctcgtagctcaatcagta

SEQ ID NO: 4095537 - DNA, 25 bp, Homo sapien
gcactctgaccactccactttccat

SEQ ID NO: 4095538 - DNA, 25 bp, Homo sapien
tttctatatggaattggtagatggg

SEQ ID NO: 4095539 - DNA, 25 bp, Homo sapien
tcagtaacggcccagtcttttctat

SEQ ID NO: 4095540 - DNA, 25 bp, Homo sapien
tcatttgtaatagaacatcattaat

SEQ ID NO: 4095541 - DNA, 25 bp, Homo sapien
catttgtaatagaacatcattaatt

SEQ ID NO: 4095542 - DNA, 25 bp, Homo sapien
aatttaagaaagttactcatcacaa

SEQ ID NO: 4095543 - DNA, 25 bp, Homo sapien
tgatgtgaaacagggttctaattac

SEQ ID NO: 4095544 - DNA, 25 bp, Homo sapien
catctagaagctgtattgttttgcc

SEQ ID NO: 4095545 - DNA, 25 bp, Homo sapien
tcctcactccactataatgccattg

SEQ ID NO: 4095546 - DNA, 25 bp, Homo sapien
tacacatggatactcaattattcca

SEQ ID NO: 4095547 - DNA, 25 bp, Homo sapien
cacagaagtagaatcacatggtatg

SEQ ID NO: 4095548 - DNA, 25 bp, Homo sapien
tactaccttagtgtgcatccttaca

SEQ ID NO: 4095549 - DNA, 25 bp, Homo sapien
ccctcgacagagcttttatagtaat

SEQ ID NO: 4095550 - DNA, 25 bp, Homo sapien
aattgcaactcctgtccctcgacag

SEQ ID NO: 4095551 - DNA, 25 bp, Homo sapien
ataattaaaaatattgtcattggcc

SEQ ID NO: 4095552 - DNA, 25 bp, Homo sapien
aattaaaaatattgtcattggccag

SEQ ID NO: 4095553 - DNA, 25 bp, Homo sapien
ttaaaaatattgtcattggccaggc

SEQ ID NO: 4095554 - DNA, 25 bp, Homo sapien
aaaatattgtcattggccaggcgcg

SEQ ID NO: 4095555 - DNA, 25 bp, Homo sapien
cagtagaaacatacacactctattt

SEQ ID NO: 4095556 - DNA, 25 bp, Homo sapien
tctgaagtgcagatgtcatactaag

SEQ ID NO: 4095557 - DNA, 25 bp, Homo sapien
tatatattctcaaacgtgatttaaa

SEQ ID NO: 4095558 - DNA, 25 bp, Homo sapien
gaagccttaaagattaacaccagat

SEQ ID NO: 4095559 - DNA, 25 bp, Homo sapien
gagtagaaactgttacaacctcaaa

SEQ ID NO: 4095560 - DNA, 25 bp, Homo sapien
tgttacaacctcaaatccaacgcta

SEQ ID NO: 4095561 - DNA, 25 bp, Homo sapien
aacctcaaatccaacgctatattgc

SEQ ID NO: 4095562 - DNA, 25 bp, Homo sapien
aactgttacaacctcaaatccaacg

SEQ ID NO: 4095563 - DNA, 25 bp, Homo sapien
ctatagtcaccactagatttcctca

SEQ ID NO: 4095564 - DNA, 25 bp, Homo sapien
tagtcaccactagatttcctcagaa

SEQ ID NO: 4095565 - DNA, 25 bp, Homo sapien
tatagtcaccactagatttcctcag

SEQ ID NO: 4095566 - DNA, 25 bp, Homo sapien
atagtcaccactagatttcctcaga

SEQ ID NO: 4095567 - DNA, 25 bp, Homo sapien
tgaagatcccagaaggtatattttc

SEQ ID NO: 4095568 - DNA, 25 bp, Homo sapien
ttaggcaaaaaggtactaggaatga

SEQ ID NO: 4095569 - DNA, 25 bp, Homo sapien
aaaggtactaggaatgatattgaag

SEQ ID NO: 4095570 - DNA, 25 bp, Homo sapien
tgtgtgatcttgatggggataatac

SEQ ID NO: 4095571 - DNA, 25 bp, Homo sapien
ttccattctgattgttctgcttact

SEQ ID NO: 4095572 - DNA, 25 bp, Homo sapien
agtataaaagccagtaacttgagat

SEQ ID NO: 4095573 - DNA, 25 bp, Homo sapien
gaagaactgatgtttggtaagtata

SEQ ID NO: 4095574 - DNA, 25 bp, Homo sapien
actgtcctgaagatttgcgtcctta

SEQ ID NO: 4095575 - DNA, 25 bp, Homo sapien
tctagcccactattccactcaagga

SEQ ID NO: 4095576 - DNA, 25 bp, Homo sapien
agttcttaccaaacaccctgacaag

SEQ ID NO: 4095577 - DNA, 25 bp, Homo sapien
ccatgtaaacggtacctctaggtga

SEQ ID NO: 4095578 - DNA, 25 bp, Homo sapien
tcttagcaaaggcatctcacagtga

SEQ ID NO: 4095579 - DNA, 25 bp, Homo sapien
cacaagagactgaacgatacagcaa

SEQ ID NO: 4095580 - DNA, 25 bp, Homo sapien
tagttgcccaagatgtatagtagaa

SEQ ID NO: 4095581 - DNA, 25 bp, Homo sapien
gagacaatgaaaaatcccaccctat

SEQ ID NO: 4095582 - DNA, 25 bp, Homo sapien
tattctttcataacacctgggcaac

SEQ ID NO: 4095583 - DNA, 25 bp, Homo sapien
tcaaggtccaagttaaagtatcaat

SEQ ID NO: 4095584 - DNA, 25 bp, Homo sapien
tacactggtggcatgtttttagagc

SEQ ID NO: 4095585 - DNA, 25 bp, Homo sapien
tacatgaaacacgacagatgaaatc

SEQ ID NO: 4095586 - DNA, 25 bp, Homo sapien
cactcaatggtcagtaacctgtctt

SEQ ID NO: 4095587 - DNA, 25 bp, Homo sapien
cagggctcagggaagaaggcttgtg

SEQ ID NO: 4095588 - DNA, 25 bp, Homo sapien
ggtgccattagacacacacagcagc

SEQ ID NO: 4095589 - DNA, 25 bp, Homo sapien
tcagggctcagggaagaaggcttgt

SEQ ID NO: 4095590 - DNA, 25 bp, Homo sapien
gtgggtgccattagacacacacagc

SEQ ID NO: 4095591 - DNA, 25 bp, Homo sapien
gaaatttctaggtacttctcgcaga

SEQ ID NO: 4095592 - DNA, 25 bp, Homo sapien
ccgtataacggcattgtggaagcaa

SEQ ID NO: 4095593 - DNA, 25 bp, Homo sapien
taagaacattaaacagccggctggg

SEQ ID NO: 4095594 - DNA, 25 bp, Homo sapien
tccccgagggaattcaaatgtgcat

SEQ ID NO: 4095595 - DNA, 25 bp, Homo sapien
tagttcaggaccaacaagcccgtct

SEQ ID NO: 4095596 - DNA, 25 bp, Homo sapien
taacagtgggacttctacagggctg

SEQ ID NO: 4095597 - DNA, 25 bp, Homo sapien
tctctgataggcacggtaggtaaca

SEQ ID NO: 4095598 - DNA, 25 bp, Homo sapien
cttggagaaccggatgaagcagctc

SEQ ID NO: 4095599 - DNA, 25 bp, Homo sapien
tgagagtcaaagtatacatttgaac

SEQ ID NO: 4095600 - DNA, 25 bp, Homo sapien
gaaaatgttacaccttcactcctct

SEQ ID NO: 4095601 - DNA, 25 bp, Homo sapien
attgggaaaatgttacaccttcact

SEQ ID NO: 4095602 - DNA, 25 bp, Homo sapien
cctctttgagagtcaaagtatacat

SEQ ID NO: 4095603 - DNA, 25 bp, Homo sapien
caaagtactatgtgcagctcgaggt

SEQ ID NO: 4095604 - DNA, 25 bp, Homo sapien
tgcagagtccccaagatatgtgtgt

SEQ ID NO: 4095605 - DNA, 25 bp, Homo sapien
ttcattaggagagcagatccaggcc

SEQ ID NO: 4095606 - DNA, 25 bp, Homo sapien
gactgtggatgacctgcaggccaaa

SEQ ID NO: 4095607 - DNA, 25 bp, Homo sapien
taatgttcaggcaccaaagttccta

SEQ ID NO: 4095608 - DNA, 25 bp, Homo sapien
gaaccaagggaactgctaggacgct

SEQ ID NO: 4095609 - DNA, 25 bp, Homo sapien
cttgagagcttcatggagggtgaac

SEQ ID NO: 4095610 - DNA, 25 bp, Homo sapien
tcttgggcccattatgtggctgagt

SEQ ID NO: 4095611 - DNA, 25 bp, Homo sapien
tagatcgtagtcttgggtggctcct

SEQ ID NO: 4095612 - DNA, 25 bp, Homo sapien
tcctgtctgcccaaaggttaaaatg

SEQ ID NO: 4095613 - DNA, 25 bp, Homo sapien
gaagagtacagggatagatcgtagt

SEQ ID NO: 4095614 - DNA, 25 bp, Homo sapien
ctgtgccctccgatgcccattcaca

SEQ ID NO: 4095615 - DNA, 25 bp, Homo sapien
gggctgatctcctgagagctaagta

SEQ ID NO: 4095616 - DNA, 25 bp, Homo sapien
gaatatggtgggtcttttctcaaaa

SEQ ID NO: 4095617 - DNA, 25 bp, Homo sapien
ctaagtagtagacgtgtatatggca

SEQ ID NO: 4095618 - DNA, 25 bp, Homo sapien
tcaaaagaccccgaattcacactgc

SEQ ID NO: 4095619 - DNA, 25 bp, Homo sapien
taaactatcctagggctgattgtgg

SEQ ID NO: 4095620 - DNA, 25 bp, Homo sapien
gctacttagatcgaggaacctgaga

SEQ ID NO: 4095621 - DNA, 25 bp, Homo sapien
tctgagagagctgactagtgaccat

SEQ ID NO: 4095622 - DNA, 25 bp, Homo sapien
ccaaacaatggaagtcatggctgct

SEQ ID NO: 4095623 - DNA, 25 bp, Homo sapien
tggactattacaagggcagtcagta

SEQ ID NO: 4095624 - DNA, 25 bp, Homo sapien
caagagtgcctcaatgaattaccaa

SEQ ID NO: 4095625 - DNA, 25 bp, Homo sapien
taaggagggatctaacagtgatgtt

SEQ ID NO: 4095626 - DNA, 25 bp, Homo sapien
ggcagtcagtaatccactgcatctg

SEQ ID NO: 4095627 - DNA, 25 bp, Homo sapien
gcacctggctgggattaatcacatt

SEQ ID NO: 4095628 - DNA, 25 bp, Homo sapien
cattttgaacaatcagtagacacat

SEQ ID NO: 4095629 - DNA, 25 bp, Homo sapien
aacaatcagtagacacatgtagtgg

SEQ ID NO: 4095630 - DNA, 25 bp, Homo sapien
cctggctgggattaatcacattttg

SEQ ID NO: 4095631 - DNA, 25 bp, Homo sapien
aatgtgggcgcacccttctggctag

SEQ ID NO: 4095632 - DNA, 25 bp, Homo sapien
gacaggtcatagacatcagtcggct

SEQ ID NO: 4095633 - DNA, 25 bp, Homo sapien
cagtcgattctctagccggtggcac

SEQ ID NO: 4095634 - DNA, 25 bp, Homo sapien
ccggtggcacactgctagagcatga

SEQ ID NO: 4095635 - DNA, 25 bp, Homo sapien
tagaaggtatctacagtgggccctt

SEQ ID NO: 4095636 - DNA, 25 bp, Homo sapien
tgggccctttattgagagcagctgt

SEQ ID NO: 4095637 - DNA, 25 bp, Homo sapien
tatggcctaaacacacaaggattcc

SEQ ID NO: 4095638 - DNA, 25 bp, Homo sapien
taaggccagcttagtgaaggttctc

SEQ ID NO: 4095639 - DNA, 25 bp, Homo sapien
tgttccgagaagctcttgttccaag

SEQ ID NO: 4095640 - DNA, 25 bp, Homo sapien
ggctcagtgacgttcttccctgtgg

SEQ ID NO: 4095641 - DNA, 25 bp, Homo sapien
ggactttaacatcacagaccttgcg

SEQ ID NO: 4095642 - DNA, 25 bp, Homo sapien
taactgagaagctcttgttccgaga

SEQ ID NO: 4095643 - DNA, 25 bp, Homo sapien
tgaatgtggacagcactggcactgg

SEQ ID NO: 4095644 - DNA, 25 bp, Homo sapien
gaggtgaccgtgaggatgcggtcat

SEQ ID NO: 4095645 - DNA, 25 bp, Homo sapien
ggaggtgaccgtgaggatgcggtca

SEQ ID NO: 4095646 - DNA, 25 bp, Homo sapien
gggaggtgaccgtgaggatgcggtc

SEQ ID NO: 4095647 - DNA, 25 bp, Homo sapien
tcagtgatgaactagcaccagaaaa

SEQ ID NO: 4095648 - DNA, 25 bp, Homo sapien
cagtgatgaactagcaccagaaaat

SEQ ID NO: 4095649 - DNA, 25 bp, Homo sapien
agtgatgaactagcaccagaaaatc

SEQ ID NO: 4095650 - DNA, 25 bp, Homo sapien
catggttgtgcaggggccgtgctag

SEQ ID NO: 4095651 - DNA, 25 bp, Homo sapien
tcatggttgtgcaggggccgtgcta

SEQ ID NO: 4095652 - DNA, 25 bp, Homo sapien
atgtcatggttgtgcaggggccgtg

SEQ ID NO: 4095653 - DNA, 25 bp, Homo sapien
tcttctctgtatcattccaatttta

SEQ ID NO: 4095654 - DNA, 25 bp, Homo sapien
cccgttcctgaagttaagtagagca

SEQ ID NO: 4095655 - DNA, 25 bp, Homo sapien
gggtgctatcctccatgcagtcact

SEQ ID NO: 4095656 - DNA, 25 bp, Homo sapien
ctttaggatagaccgagccaccgta

SEQ ID NO: 4095657 - DNA, 25 bp, Homo sapien
ggaatgttatttctcgcacaggtaa

SEQ ID NO: 4095658 - DNA, 25 bp, Homo sapien
ttcagttttccaggtgagagtgtgc

SEQ ID NO: 4095659 - DNA, 25 bp, Homo sapien
gttcagttttccaggtgagagtgtg

SEQ ID NO: 4095660 - DNA, 25 bp, Homo sapien
ggcagagagccgctgaaatgcaaag

SEQ ID NO: 4095661 - DNA, 25 bp, Homo sapien
cagagagccgctgaaatgcaaagtg

SEQ ID NO: 4095662 - DNA, 25 bp, Homo sapien
gagagccgctgaaatgcaaagtgca

SEQ ID NO: 4095663 - DNA, 25 bp, Homo sapien
agagagccgctgaaatgcaaagtgc

SEQ ID NO: 4095664 - DNA, 25 bp, Homo sapien
tgcattacgggatgcttgaatttct

SEQ ID NO: 4095665 - DNA, 25 bp, Homo sapien
cttgaatttctcaaggccaatgctg

SEQ ID NO: 4095666 - DNA, 25 bp, Homo sapien
tttctcaaggccaatgctgctctta

SEQ ID NO: 4095667 - DNA, 25 bp, Homo sapien
cattacgggatgcttgaatttctca

SEQ ID NO: 4095668 - DNA, 25 bp, Homo sapien
catggatacactgcttcagacaagt

SEQ ID NO: 4095669 - DNA, 25 bp, Homo sapien
ctgcttcagacaagtttgccctttc

SEQ ID NO: 4095670 - DNA, 25 bp, Homo sapien
aacggtacttccttaatccatggat

SEQ ID NO: 4095671 - DNA, 25 bp, Homo sapien
taatccatggatacactgcttcaga

SEQ ID NO: 4095672 - DNA, 25 bp, Homo sapien
aggcagtgattgtcgtggtagtggc

SEQ ID NO: 4095673 - DNA, 25 bp, Homo sapien
aaaggcagtgattgtcgtggtagtg

SEQ ID NO: 4095674 - DNA, 25 bp, Homo sapien
ggcagtgattgtcgtggtagtggca

SEQ ID NO: 4095675 - DNA, 25 bp, Homo sapien
gaaaggcagtgattgtcgtggtagt

SEQ ID NO: 4095676 - DNA, 25 bp, Homo sapien
tcaatagcatgaacaggtgggctct

SEQ ID NO: 4095677 - DNA, 25 bp, Homo sapien
aatagcatgaacaggtgggctcttg

SEQ ID NO: 4095678 - DNA, 25 bp, Homo sapien
tcagtaggtatagtaggcaattgtg

SEQ ID NO: 4095679 - DNA, 25 bp, Homo sapien
caattgtgggccttgcaatggtagg

SEQ ID NO: 4095680 - DNA, 25 bp, Homo sapien
aagatggtccacacaggatgaagtg

SEQ ID NO: 4095681 - DNA, 25 bp, Homo sapien
gatgaagtgaagaaaccggtggaaa

SEQ ID NO: 4095682 - DNA, 25 bp, Homo sapien
gggtgtctgacaacatgttcattag

SEQ ID NO: 4095683 - DNA, 25 bp, Homo sapien
ccggtggaaaccagcagatggcgac

SEQ ID NO: 4095684 - DNA, 25 bp, Homo sapien
ggataatagtcatagtggttctgta

SEQ ID NO: 4095685 - DNA, 25 bp, Homo sapien
ctcacactgtgcgtgctgggtgttg

SEQ ID NO: 4095686 - DNA, 25 bp, Homo sapien
caatcagaataaatcctggctcctg

SEQ ID NO: 4095687 - DNA, 25 bp, Homo sapien
tcttgagtacatgactggactgcac

SEQ ID NO: 4095688 - DNA, 25 bp, Homo sapien
cgacccttgggaaacgatgacctca

SEQ ID NO: 4095689 - DNA, 25 bp, Homo sapien
aaattaacgcgggtcggctagccat

SEQ ID NO: 4095690 - DNA, 25 bp, Homo sapien
gaaatgagcccacccaggcttagct

SEQ ID NO: 4095691 - DNA, 25 bp, Homo sapien
cgcgggcaccgaaaattgaggaata

SEQ ID NO: 4095692 - DNA, 25 bp, Homo sapien
acaaggagagccgagccggcaccca

SEQ ID NO: 4095693 - DNA, 25 bp, Homo sapien
aagacaaggagagccgagccggcac

SEQ ID NO: 4095694 - DNA, 25 bp, Homo sapien
agacaaggagagccgagccggcacc

SEQ ID NO: 4095695 - DNA, 25 bp, Homo sapien
ggaagacaaggagagccgagccggc

SEQ ID NO: 4095696 - DNA, 25 bp, Homo sapien
atccgagcttctggcgctggcgtct

SEQ ID NO: 4095697 - DNA, 25 bp, Homo sapien
tgcctcgcacccagatcggcgctct

SEQ ID NO: 4095698 - DNA, 25 bp, Homo sapien
cggtgcagccgcgatccgagcttct

SEQ ID NO: 4095699 - DNA, 25 bp, Homo sapien
gccgcgatccgagcttctggcgctg

SEQ ID NO: 4095700 - DNA, 25 bp, Homo sapien
agcagcgggtttgcggtcccattca

SEQ ID NO: 4095701 - DNA, 25 bp, Homo sapien
ttcctcgcggtccagcagcgggttt

SEQ ID NO: 4095702 - DNA, 25 bp, Homo sapien
gagcctcaggcaatgttcctcgcgg

SEQ ID NO: 4095703 - DNA, 25 bp, Homo sapien
tcaggcaatgttcctcgcggtccag

SEQ ID NO: 4095704 - DNA, 25 bp, Homo sapien
gtctatagatgctggtttaaaatca

SEQ ID NO: 4095705 - DNA, 25 bp, Homo sapien
tgaagctctccttcacaggaagtgt

SEQ ID NO: 4095706 - DNA, 25 bp, Homo sapien
cacaggaagtgtctatagatgctgg

SEQ ID NO: 4095707 - DNA, 25 bp, Homo sapien
tatgtggcagtgtaattgtgacttc

SEQ ID NO: 4095708 - DNA, 25 bp, Homo sapien
tgcctagcatgaagtccaccccacc

SEQ ID NO: 4095709 - DNA, 25 bp, Homo sapien
taggaagtttaaattgcaataatat

SEQ ID NO: 4095710 - DNA, 25 bp, Homo sapien
gattcattgtgatcttacattaaaa

SEQ ID NO: 4095711 - DNA, 25 bp, Homo sapien
aagacaaagattcattgtgatctta

SEQ ID NO: 4095712 - DNA, 25 bp, Homo sapien
aatgctgctactgagtttttccagc

SEQ ID NO: 4095713 - DNA, 25 bp, Homo sapien
tgctgctactgagtttttccagcac

SEQ ID NO: 4095714 - DNA, 25 bp, Homo sapien
atgctgctactgagtttttccagca

SEQ ID NO: 4095715 - DNA, 25 bp, Homo sapien
gagttcctaaataaagtagctccta

SEQ ID NO: 4095716 - DNA, 25 bp, Homo sapien
catgcatcccttaacaatgagggta

SEQ ID NO: 4095717 - DNA, 25 bp, Homo sapien
tatgtaggtcactactgaccaaaac

SEQ ID NO: 4095718 - DNA, 25 bp, Homo sapien
agggtaagtcctgagaactgcatca

SEQ ID NO: 4095719 - DNA, 25 bp, Homo sapien
cagaagtctctgtagaaccccatgt

SEQ ID NO: 4095720 - DNA, 25 bp, Homo sapien
tagcagggcaaaaatagtggttctc

SEQ ID NO: 4095721 - DNA, 25 bp, Homo sapien
catgttctttccagaccacttcaaa

SEQ ID NO: 4095722 - DNA, 25 bp, Homo sapien
gagtgtctactgtaatccagtacta

SEQ ID NO: 4095723 - DNA, 25 bp, Homo sapien
tttgatgtcatccaactgaggttca

SEQ ID NO: 4095724 - DNA, 25 bp, Homo sapien
cattcgggcctggattttactgctg

SEQ ID NO: 4095725 - DNA, 25 bp, Homo sapien
ttgggtccaactggaggcttcgttg

SEQ ID NO: 4095726 - DNA, 25 bp, Homo sapien
tcgttggagctctgaatggcatagg

SEQ ID NO: 4095727 - DNA, 25 bp, Homo sapien
catggatccagaaaatgttctctac

SEQ ID NO: 4095728 - DNA, 25 bp, Homo sapien
tcatggatccagaaaatgttctcta

SEQ ID NO: 4095729 - DNA, 25 bp, Homo sapien
cattggcaacggcaggcctactgtt

SEQ ID NO: 4095730 - DNA, 25 bp, Homo sapien
tgtggccggctggttccattggcaa

SEQ ID NO: 4095731 - DNA, 25 bp, Homo sapien
gctatcgtcatcacttcccgaagag

SEQ ID NO: 4095732 - DNA, 25 bp, Homo sapien
aataatgtcaacttcagccctcagc

SEQ ID NO: 4095733 - DNA, 25 bp, Homo sapien
tgccagactcactcaactgcaagtc

SEQ ID NO: 4095734 - DNA, 25 bp, Homo sapien
gtcatcactgtcactgccagactca

SEQ ID NO: 4095735 - DNA, 25 bp, Homo sapien
cagactcactcaactgcaagtcatt

SEQ ID NO: 4095736 - DNA, 25 bp, Homo sapien
gactcactcaactgcaagtcatttc

SEQ ID NO: 4095737 - DNA, 25 bp, Homo sapien
tggagtcacatgcatcagcacagtg

SEQ ID NO: 4095738 - DNA, 25 bp, Homo sapien
acaaatcggtcagggagtcaggtac

SEQ ID NO: 4095739 - DNA, 25 bp, Homo sapien
ttgatgtccgctgaaccaaagtgga

SEQ ID NO: 4095740 - DNA, 25 bp, Homo sapien
tggcacactgtagaaggcaatcttg

SEQ ID NO: 4095741 - DNA, 25 bp, Homo sapien
aacaagtccggtttggctggcagga

SEQ ID NO: 4095742 - DNA, 25 bp, Homo sapien
tgaagccgtgctagagaaaaaccat

SEQ ID NO: 4095743 - DNA, 25 bp, Homo sapien
taatgaaagcccctatgacagacca

SEQ ID NO: 4095744 - DNA, 25 bp, Homo sapien
ttaaggagctcataccgaccagagt

SEQ ID NO: 4095745 - DNA, 25 bp, Homo sapien
cattgatttctaaaagaaaatgaaa

SEQ ID NO: 4095746 - DNA, 25 bp, Homo sapien
tatattgctcattgatttctaaaag

SEQ ID NO: 4095747 - DNA, 25 bp, Homo sapien
gaaaatgaaacccaccaagacaaga

SEQ ID NO: 4095748 - DNA, 25 bp, Homo sapien
agaaaatgaaacccaccaagacaag

SEQ ID NO: 4095749 - DNA, 25 bp, Homo sapien
ggtctcccacaggtgacatcaacct

SEQ ID NO: 4095750 - DNA, 25 bp, Homo sapien
tgttcccttcgcctctactgcgagg

SEQ ID NO: 4095751 - DNA, 25 bp, Homo sapien
gcgtctttagagacaggcacatggg

SEQ ID NO: 4095752 - DNA, 25 bp, Homo sapien
atgctgcttccaccatcacactggg

SEQ ID NO: 4095753 - DNA, 25 bp, Homo sapien
aagaaattcctgactgcttcaagct

SEQ ID NO: 4095754 - DNA, 25 bp, Homo sapien
taagacagagctgatatgatgacca

SEQ ID NO: 4095755 - DNA, 25 bp, Homo sapien
gaagagttgtcttccccttttatga

SEQ ID NO: 4095756 - DNA, 25 bp, Homo sapien
aaaattaagtatggcagcttctctg

SEQ ID NO: 4095757 - DNA, 25 bp, Homo sapien
tgaagaccaccagcacacctgattg

SEQ ID NO: 4095758 - DNA, 25 bp, Homo sapien
gacacttctggctcttttgggtgcc

SEQ ID NO: 4095759 - DNA, 25 bp, Homo sapien
ttagctggctgaggcgacacttctg

SEQ ID NO: 4095760 - DNA, 25 bp, Homo sapien
gattgaaccctctctgtggtcggga

SEQ ID NO: 4095761 - DNA, 25 bp, Homo sapien
agcaatcaagacagggagacaaccc

SEQ ID NO: 4095762 - DNA, 25 bp, Homo sapien
tgtaccgcctacaatatgcttggct

SEQ ID NO: 4095763 - DNA, 25 bp, Homo sapien
aatgaccagtatttattgtaccgcc

SEQ ID NO: 4095764 - DNA, 25 bp, Homo sapien
agtcagactctaccacttacctggg

SEQ ID NO: 4095765 - DNA, 25 bp, Homo sapien
tgacaaaggcagaatcgcagagtgg

SEQ ID NO: 4095766 - DNA, 25 bp, Homo sapien
ccatggttggagaagcgctctggca

SEQ ID NO: 4095767 - DNA, 25 bp, Homo sapien
gctctggcatagacacaagactctg

SEQ ID NO: 4095768 - DNA, 25 bp, Homo sapien
gtaacagttatagctcagcagccct

SEQ ID NO: 4095769 - DNA, 25 bp, Homo sapien
tatttatataaaaggccatgtagcg

SEQ ID NO: 4095770 - DNA, 25 bp, Homo sapien
taggacattggttacataagtgatg

SEQ ID NO: 4095771 - DNA, 25 bp, Homo sapien
catgtagcgtagttttatttaggaa

SEQ ID NO: 4095772 - DNA, 25 bp, Homo sapien
gcttatttgggaatatatcctgaag

SEQ ID NO: 4095773 - DNA, 25 bp, Homo sapien
ttgattctcagtgtaggctggccac

SEQ ID NO: 4095774 - DNA, 25 bp, Homo sapien
cctgcctcaatatgggaatgcctat

SEQ ID NO: 4095775 - DNA, 25 bp, Homo sapien
gattactgtgaatggaagaggaccc

SEQ ID NO: 4095776 - DNA, 25 bp, Homo sapien
gaatgcctatatctgtgcctgtgtc

SEQ ID NO: 4095777 - DNA, 25 bp, Homo sapien
ttctggcgcgcgaatggaggagccg

SEQ ID NO: 4095778 - DNA, 25 bp, Homo sapien
ctggcattctggcgcgcgaatggag

SEQ ID NO: 4095779 - DNA, 25 bp, Homo sapien
cattctggcgcgcgaatggaggagc

SEQ ID NO: 4095780 - DNA, 25 bp, Homo sapien
tggcgcgcgaatggaggagccgaga

SEQ ID NO: 4095781 - DNA, 25 bp, Homo sapien
gctttgcataggcagcaatctcctg

SEQ ID NO: 4095782 - DNA, 25 bp, Homo sapien
aggcagcaatctcctgctagtcccg

SEQ ID NO: 4095783 - DNA, 25 bp, Homo sapien
gcataggcagcaatctcctgctagt

SEQ ID NO: 4095784 - DNA, 25 bp, Homo sapien
tttgcataggcagcaatctcctgct

SEQ ID NO: 4095785 - DNA, 25 bp, Homo sapien
gaaaacgctccagctggccgactcg

SEQ ID NO: 4095786 - DNA, 25 bp, Homo sapien
ctcggagacaatggcgagaggcctc

SEQ ID NO: 4095787 - DNA, 25 bp, Homo sapien
tccagctggccgactcggagacaat

SEQ ID NO: 4095788 - DNA, 25 bp, Homo sapien
gaggcctcagagttcggcttcttac

SEQ ID NO: 4095789 - DNA, 25 bp, Homo sapien
cgccctgaatatgcgcatgcgccat

SEQ ID NO: 4095790 - DNA, 25 bp, Homo sapien
ttagcgcgccttccgccctgaatat

SEQ ID NO: 4095791 - DNA, 25 bp, Homo sapien
ctcttagcgcgccttccgccctgaa

SEQ ID NO: 4095792 - DNA, 25 bp, Homo sapien
gccttccgccctgaatatgcgcatg

SEQ ID NO: 4095793 - DNA, 25 bp, Homo sapien
cacaaagcgtgtaagtaaatgccta

SEQ ID NO: 4095794 - DNA, 25 bp, Homo sapien
aaaccacaaggttatgagagcgtaa

SEQ ID NO: 4095795 - DNA, 25 bp, Homo sapien
taacgtgcgctacaataatttaagg

SEQ ID NO: 4095796 - DNA, 25 bp, Homo sapien
catcgcttgtgacccaatggctgaa

SEQ ID NO: 4095797 - DNA, 25 bp, Homo sapien
ctctaggtcacagggtacctgggaa

SEQ ID NO: 4095798 - DNA, 25 bp, Homo sapien
acctgggaaaactcccagtgtctgt

SEQ ID NO: 4095799 - DNA, 25 bp, Homo sapien
gaaaactcccagtgtctgtcagctg

SEQ ID NO: 4095800 - DNA, 25 bp, Homo sapien
caaagctaaaacaagggaacaacat

SEQ ID NO: 4095801 - DNA, 25 bp, Homo sapien
agtagctgggactgaaaaatatatt

SEQ ID NO: 4095802 - DNA, 25 bp, Homo sapien
catagaagaaatagttatcaaacaa

SEQ ID NO: 4095803 - DNA, 25 bp, Homo sapien
aaaactaaaccatgccaacaatcat

SEQ ID NO: 4095804 - DNA, 25 bp, Homo sapien
tgccaacaatcatagaagaaatagt

SEQ ID NO: 4095805 - DNA, 25 bp, Homo sapien
agtacaggattgggtaatggaggtt

SEQ ID NO: 4095806 - DNA, 25 bp, Homo sapien
tacaggattgggtaatggaggtttc

SEQ ID NO: 4095807 - DNA, 25 bp, Homo sapien
cagcgtctgcgtggggaaatctgtc

SEQ ID NO: 4095808 - DNA, 25 bp, Homo sapien
gacacacagcgtctgcgtggggaaa

SEQ ID NO: 4095809 - DNA, 25 bp, Homo sapien
cacacagcgtctgcgtggggaaatc

SEQ ID NO: 4095810 - DNA, 25 bp, Homo sapien
ctgtgacacacagcgtctgcgtggg

SEQ ID NO: 4095811 - DNA, 25 bp, Homo sapien
ggatgtaaaaagtgacgctgcccat

SEQ ID NO: 4095812 - DNA, 25 bp, Homo sapien
cacactcccacgatggcatcttttt

SEQ ID NO: 4095813 - DNA, 25 bp, Homo sapien
ccacgatggcatctttttgaatttg

SEQ ID NO: 4095814 - DNA, 25 bp, Homo sapien
tcatacaatatgactggatgtaaaa

SEQ ID NO: 4095815 - DNA, 25 bp, Homo sapien
ccgtgaggttatgcacgggacgact

SEQ ID NO: 4095816 - DNA, 25 bp, Homo sapien
tacagcagctgacccatctttagag

SEQ ID NO: 4095817 - DNA, 25 bp, Homo sapien
tggcaaggactctgaagggttcagc

SEQ ID NO: 4095818 - DNA, 25 bp, Homo sapien
gaaaaagtaaatagggcctgtggca

SEQ ID NO: 4095819 - DNA, 25 bp, Homo sapien
tctgggacactgtaaacaatgtttt

SEQ ID NO: 4095820 - DNA, 25 bp, Homo sapien
tagctcttttcgtcaacagactaag

SEQ ID NO: 4095821 - DNA, 25 bp, Homo sapien
gatttgttgccattcatctgggaca

SEQ ID NO: 4095822 - DNA, 25 bp, Homo sapien
caaggagtctttgagtgagcagtca

SEQ ID NO: 4095823 - DNA, 25 bp, Homo sapien
gtcatgaccctaataacacagcttg

SEQ ID NO: 4095824 - DNA, 25 bp, Homo sapien
tcagcaagactgtagtgcgtcacta

SEQ ID NO: 4095825 - DNA, 25 bp, Homo sapien
tacaggtcagccatccgtaatgtct

SEQ ID NO: 4095826 - DNA, 25 bp, Homo sapien
tgatactgcggctcaaagagtttgt

SEQ ID NO: 4095827 - DNA, 25 bp, Homo sapien
gggctcccagggcaaccacgtaaca

SEQ ID NO: 4095828 - DNA, 25 bp, Homo sapien
cgcagaggaaaagagcaagcttact

SEQ ID NO: 4095829 - DNA, 25 bp, Homo sapien
tctggctccagacataatgcagacc

SEQ ID NO: 4095830 - DNA, 25 bp, Homo sapien
tcgtgatggtcagccacgctctcct

SEQ ID NO: 4095831 - DNA, 25 bp, Homo sapien
ctgttcatagatgtcaaggttctgg

SEQ ID NO: 4095832 - DNA, 25 bp, Homo sapien
ccagagggttcagactcaggatgga

SEQ ID NO: 4095833 - DNA, 25 bp, Homo sapien
gatggatgctcatacacggcagcca

SEQ ID NO: 4095834 - DNA, 25 bp, Homo sapien
tggttcatgagctccaaggcctctt

SEQ ID NO: 4095835 - DNA, 25 bp, Homo sapien
tggtcaccctgccaccagagttaca

SEQ ID NO: 4095836 - DNA, 25 bp, Homo sapien
ggttctgccctttaagttcacagag

SEQ ID NO: 4095837 - DNA, 25 bp, Homo sapien
caggaaagtgttgctcacaatgagt

SEQ ID NO: 4095838 - DNA, 25 bp, Homo sapien
tcagttctatctgggcgaaggtctc

SEQ ID NO: 4095839 - DNA, 25 bp, Homo sapien
tgttcttgtaaagttgaatccatga

SEQ ID NO: 4095840 - DNA, 25 bp, Homo sapien
atgaagtccaaaaatggataaatgg

SEQ ID NO: 4095841 - DNA, 25 bp, Homo sapien
tcattgaagcggtgaggctccaggc

SEQ ID NO: 4095842 - DNA, 25 bp, Homo sapien
tggggagacggcatgaagtccaaaa

SEQ ID NO: 4095843 - DNA, 25 bp, Homo sapien
tcagcctactgaggaaaaaggcagg

SEQ ID NO: 4095844 - DNA, 25 bp, Homo sapien
cctactgaggaaaaaggcaggaatc

SEQ ID NO: 4095845 - DNA, 25 bp, Homo sapien
cctcagcctactgaggaaaaaggca

SEQ ID NO: 4095846 - DNA, 25 bp, Homo sapien
tactgaggaaaaaggcaggaatcac

SEQ ID NO: 4095847 - DNA, 25 bp, Homo sapien
agcttctggtccctgacttagatca

SEQ ID NO: 4095848 - DNA, 25 bp, Homo sapien
caatcttagttaacatgtcacagct

SEQ ID NO: 4095849 - DNA, 25 bp, Homo sapien
catgtggcacatggatctttgggag

SEQ ID NO: 4095850 - DNA, 25 bp, Homo sapien
cctgacttagatcacctctgtgtac

SEQ ID NO: 4095851 - DNA, 25 bp, Homo sapien
tatacattcctgtatttattgtgta

SEQ ID NO: 4095852 - DNA, 25 bp, Homo sapien
gtatacattcctgtatttattgtgt

SEQ ID NO: 4095853 - DNA, 25 bp, Homo sapien
tacattcctgtatttattgtgtaat

SEQ ID NO: 4095854 - DNA, 25 bp, Homo sapien
atacattcctgtatttattgtgtaa

SEQ ID NO: 4095855 - DNA, 25 bp, Homo sapien
aaaaaagcaaccactactgaaaatg

SEQ ID NO: 4095856 - DNA, 25 bp, Homo sapien
gatgctcaatctcattagtgagaga

SEQ ID NO: 4095857 - DNA, 25 bp, Homo sapien
aaggatataaacaggtgattcacag

SEQ ID NO: 4095858 - DNA, 25 bp, Homo sapien
gcaccattgtacttggctctcacaa

SEQ ID NO: 4095859 - DNA, 25 bp, Homo sapien
tcatccaggcagttgggtacacaac

SEQ ID NO: 4095860 - DNA, 25 bp, Homo sapien
aactgggtggtggacattagctgcc

SEQ ID NO: 4095861 - DNA, 25 bp, Homo sapien
tggccatacaactcaggcgctggag

SEQ ID NO: 4095862 - DNA, 25 bp, Homo sapien
cggtagcggtcaacaagggttccat

SEQ ID NO: 4095863 - DNA, 25 bp, Homo sapien
gaggagcattcacgttccacttggt

SEQ ID NO: 4095864 - DNA, 25 bp, Homo sapien
tacagctctttggataaggtgggcc

SEQ ID NO: 4095865 - DNA, 25 bp, Homo sapien
gaacagacgtggagatagccttcct

SEQ ID NO: 4095866 - DNA, 25 bp, Homo sapien
tgtccacaggtgtcgaagccaagac

SEQ ID NO: 4095867 - DNA, 25 bp, Homo sapien
atacaagcgcccatagagagccgcc

SEQ ID NO: 4095868 - DNA, 25 bp, Homo sapien
gggacttctagggtcatccctgagg

SEQ ID NO: 4095869 - DNA, 25 bp, Homo sapien
ggaaatagtggtcattctcccagcc

SEQ ID NO: 4095870 - DNA, 25 bp, Homo sapien
aggacagcctacttttcctcaggaa

SEQ ID NO: 4095871 - DNA, 25 bp, Homo sapien
gaatctggtgccacagaagtgggct

SEQ ID NO: 4095872 - DNA, 25 bp, Homo sapien
caaggctgtcaacatgatggccaga

SEQ ID NO: 4095873 - DNA, 25 bp, Homo sapien
gaagtgggctcctgcccttaaggca

SEQ ID NO: 4095874 - DNA, 25 bp, Homo sapien
gcttgagaccaatcgcatactgaga

SEQ ID NO: 4095875 - DNA, 25 bp, Homo sapien
ctggtcgaccagaatgggaaggttc

SEQ ID NO: 4095876 - DNA, 25 bp, Homo sapien
cccacaagggccatttctaattgag

SEQ ID NO: 4095877 - DNA, 25 bp, Homo sapien
catgtcctgggtgtcacttgatcaa

SEQ ID NO: 4095878 - DNA, 25 bp, Homo sapien
ctaattgagcttttgctttgagagc

SEQ ID NO: 4095879 - DNA, 25 bp, Homo sapien
caagtctgtatttagcgctggcctc

SEQ ID NO: 4095880 - DNA, 25 bp, Homo sapien
gactcatcccagacctttccgaggg

SEQ ID NO: 4095881 - DNA, 25 bp, Homo sapien
aaagcgaactccgtcatctggtggg

SEQ ID NO: 4095882 - DNA, 25 bp, Homo sapien
taaatgcatgactaaagtgggccac

SEQ ID NO: 4095883 - DNA, 25 bp, Homo sapien
tgaggagctgagaccttttgctagc

SEQ ID NO: 4095884 - DNA, 25 bp, Homo sapien
tccctatggaaagacccaagtggtg

SEQ ID NO: 4095885 - DNA, 25 bp, Homo sapien
taagggcccagttactctagtgtga

SEQ ID NO: 4095886 - DNA, 25 bp, Homo sapien
gaggacactcagctatccctatgga

SEQ ID NO: 4095887 - DNA, 25 bp, Homo sapien
tcagcagtcagcaagcatagagcag

SEQ ID NO: 4095888 - DNA, 25 bp, Homo sapien
tagagcagattttgtaagccaagac

SEQ ID NO: 4095889 - DNA, 25 bp, Homo sapien
aagacagtgccatgctgaacgctgc

SEQ ID NO: 4095890 - DNA, 25 bp, Homo sapien
ccgtggagtcacgataaagatgcaa

SEQ ID NO: 4095891 - DNA, 25 bp, Homo sapien
caaatgggtctgtccatagggatcc

SEQ ID NO: 4095892 - DNA, 25 bp, Homo sapien
ggttggcgacgttgaaacactggct

SEQ ID NO: 4095893 - DNA, 25 bp, Homo sapien
tatgcaccgcattagacagtgggct

SEQ ID NO: 4095894 - DNA, 25 bp, Homo sapien
tgaggttgcagtcgtttcccagggc

SEQ ID NO: 4095895 - DNA, 25 bp, Homo sapien
gcttggatatgaggtgtgactgact

SEQ ID NO: 4095896 - DNA, 25 bp, Homo sapien
agtgcccaatgttgccttactggcc

SEQ ID NO: 4095897 - DNA, 25 bp, Homo sapien
aacctgtcatcagccagaagaatca

SEQ ID NO: 4095898 - DNA, 25 bp, Homo sapien
atgctgtctgcccacataaacccta

SEQ ID NO: 4095899 - DNA, 25 bp, Homo sapien
aaatctgttttgtgacatatgtccc

SEQ ID NO: 4095900 - DNA, 25 bp, Homo sapien
ccaagccagcgcattcaaaatctgg

SEQ ID NO: 4095901 - DNA, 25 bp, Homo sapien
tgtaaatttgtaggaataaatctgt

SEQ ID NO: 4095902 - DNA, 25 bp, Homo sapien
ccttttactattcaatatacactgc

SEQ ID NO: 4095903 - DNA, 25 bp, Homo sapien
catgtagtcccctcttttacagaga

SEQ ID NO: 4095904 - DNA, 25 bp, Homo sapien
gaaaaagcataatttacaactagaa

SEQ ID NO: 4095905 - DNA, 25 bp, Homo sapien
gaccttaggccttgagaggcacagg

SEQ ID NO: 4095906 - DNA, 25 bp, Homo sapien
caacaaagtattctctgtcatacat

SEQ ID NO: 4095907 - DNA, 25 bp, Homo sapien
gctgacctgactggctacttggaaa

SEQ ID NO: 4095908 - DNA, 25 bp, Homo sapien
tcaagattgcaagagcacaaagaac

SEQ ID NO: 4095909 - DNA, 25 bp, Homo sapien
ctataataataacaaagtaggctgg

SEQ ID NO: 4095910 - DNA, 25 bp, Homo sapien
ccttaatgcaatccctacctctgtg

SEQ ID NO: 4095911 - DNA, 25 bp, Homo sapien
ccataggcacaatcttctgagccca

SEQ ID NO: 4095912 - DNA, 25 bp, Homo sapien
taacttgtccataggacactgtgga

SEQ ID NO: 4095913 - DNA, 25 bp, Homo sapien
tgtggacaggagcaccagtgtaact

SEQ ID NO: 4095914 - DNA, 25 bp, Homo sapien
tgttccacgcagaacagggctttgt

SEQ ID NO: 4095915 - DNA, 25 bp, Homo sapien
tagctgtgccatctgtaacttgtcc

SEQ ID NO: 4095916 - DNA, 25 bp, Homo sapien
catggcacccaaacgttccattgtc

SEQ ID NO: 4095917 - DNA, 25 bp, Homo sapien
gattgccttggtactaatttccatg

SEQ ID NO: 4095918 - DNA, 25 bp, Homo sapien
taatttccatggcacccaaacgttc

SEQ ID NO: 4095919 - DNA, 25 bp, Homo sapien
ctatacccgagtgcctggcaagatt

SEQ ID NO: 4095920 - DNA, 25 bp, Homo sapien
cagcttgtgtgggtaactgcttcaa

SEQ ID NO: 4095921 - DNA, 25 bp, Homo sapien
tctctggctgggctttactacctgc

SEQ ID NO: 4095922 - DNA, 25 bp, Homo sapien
ggctgacatcagcttgtgtgggtaa

SEQ ID NO: 4095923 - DNA, 25 bp, Homo sapien
tctggctgggctttactacctgctg

SEQ ID NO: 4095924 - DNA, 25 bp, Homo sapien
gattagataatagaagtgagaacaa

SEQ ID NO: 4095925 - DNA, 25 bp, Homo sapien
tataaataggcgatgggaggaacag

SEQ ID NO: 4095926 - DNA, 25 bp, Homo sapien
tacaagagagctaattggaaacacg

SEQ ID NO: 4095927 - DNA, 25 bp, Homo sapien
taataatagaaaatgcctatgcagc

SEQ ID NO: 4095928 - DNA, 25 bp, Homo sapien
gactaggtgcggacattgagaatca

SEQ ID NO: 4095929 - DNA, 25 bp, Homo sapien
cctgctgtatacttgggagtgggaa

SEQ ID NO: 4095930 - DNA, 25 bp, Homo sapien
cacattgggagggaagatcagaaca

SEQ ID NO: 4095931 - DNA, 25 bp, Homo sapien
aacagatggagaagggtgcaaaccc

SEQ ID NO: 4095932 - DNA, 25 bp, Homo sapien
gaaaggcatttctgtattgggcaag

SEQ ID NO: 4095933 - DNA, 25 bp, Homo sapien
tgcattttaatgacagtggactaca

SEQ ID NO: 4095934 - DNA, 25 bp, Homo sapien
gcagttgcctgccaaattgaagact

SEQ ID NO: 4095935 - DNA, 25 bp, Homo sapien
catatacattgagggtcttacaggt

SEQ ID NO: 4095936 - DNA, 25 bp, Homo sapien
cgtggatgagctcaacgactccgat

SEQ ID NO: 4095937 - DNA, 25 bp, Homo sapien
gaatcttgaaatagacctgactgag

SEQ ID NO: 4095938 - DNA, 25 bp, Homo sapien
ggaatgaacctagctcctattgcag

SEQ ID NO: 4095939 - DNA, 25 bp, Homo sapien
gatcccacagtgagccaatgttaag

SEQ ID NO: 4095940 - DNA, 25 bp, Homo sapien
ctccaccttgttacctttctgatat

SEQ ID NO: 4095941 - DNA, 25 bp, Homo sapien
ggccccactcatagttcttaaaatg

SEQ ID NO: 4095942 - DNA, 25 bp, Homo sapien
cactataagtatgcatcaccaggcc

SEQ ID NO: 4095943 - DNA, 25 bp, Homo sapien
taggccctacatgatgtgtcctcca

SEQ ID NO: 4095944 - DNA, 25 bp, Homo sapien
tgtgtgtctgtaagccaataaggtt

SEQ ID NO: 4095945 - DNA, 25 bp, Homo sapien
gagatcttacatcagtgtctctcat

SEQ ID NO: 4095946 - DNA, 25 bp, Homo sapien
acttgaaactaacaataaatgaggt

SEQ ID NO: 4095947 - DNA, 25 bp, Homo sapien
agccaacctccagatagactgacag

SEQ ID NO: 4095948 - DNA, 25 bp, Homo sapien
aaatgacaacgaaggtgctgctgag

SEQ ID NO: 4095949 - DNA, 25 bp, Homo sapien
caccattgctgtgagaatgatcacc

SEQ ID NO: 4095950 - DNA, 25 bp, Homo sapien
gcattgtgccgtgtaagtaaagcca

SEQ ID NO: 4095951 - DNA, 25 bp, Homo sapien
tgatcaccttgttaccttacacagg

SEQ ID NO: 4095952 - DNA, 25 bp, Homo sapien
tttacattgaattaagttgtaagta

SEQ ID NO: 4095953 - DNA, 25 bp, Homo sapien
gcatttacattgaattaagttgtaa

SEQ ID NO: 4095954 - DNA, 25 bp, Homo sapien
tacattgaattaagttgtaagtaat

SEQ ID NO: 4095955 - DNA, 25 bp, Homo sapien
tagcatttacattgaattaagttgt

SEQ ID NO: 4095956 - DNA, 25 bp, Homo sapien
gctgatgggcaaaatccacttgaaa

SEQ ID NO: 4095957 - DNA, 25 bp, Homo sapien
tgattgttgcaagggactctccagt

SEQ ID NO: 4095958 - DNA, 25 bp, Homo sapien
cactatgacgttttgggccagatga

SEQ ID NO: 4095959 - DNA, 25 bp, Homo sapien
actagatgccagttgcactgcccca

SEQ ID NO: 4095960 - DNA, 25 bp, Homo sapien
taccttaaatttcaagtagatccta

SEQ ID NO: 4095961 - DNA, 25 bp, Homo sapien
ggaacactacaagttcagttattca

SEQ ID NO: 4095962 - DNA, 25 bp, Homo sapien
ggatgtatccttaatttaatgtgga

SEQ ID NO: 4095963 - DNA, 25 bp, Homo sapien
gatcctaatctagcttcctgtacag

SEQ ID NO: 4095964 - DNA, 25 bp, Homo sapien
aaagtattcctacagacttgcaggc

SEQ ID NO: 4095965 - DNA, 25 bp, Homo sapien
tgttagagataatgcttacccagag

SEQ ID NO: 4095966 - DNA, 25 bp, Homo sapien
ctctgaattcggcaccaaggaaggc

SEQ ID NO: 4095967 - DNA, 25 bp, Homo sapien
ttattaccttagagccagacgtggg

SEQ ID NO: 4095968 - DNA, 25 bp, Homo sapien
tcaggtaagtgtaacctttgcagcc

SEQ ID NO: 4095969 - DNA, 25 bp, Homo sapien
taactttaggcgtggcatacatgga

SEQ ID NO: 4095970 - DNA, 25 bp, Homo sapien
aatagctggctaataagttatgccc

SEQ ID NO: 4095971 - DNA, 25 bp, Homo sapien
tggcagccttaagcggcttttcaga

SEQ ID NO: 4095972 - DNA, 25 bp, Homo sapien
gagtataaaataccacgtagctgta

SEQ ID NO: 4095973 - DNA, 25 bp, Homo sapien
gtaaaaacatccaccaaatgaatgg

SEQ ID NO: 4095974 - DNA, 25 bp, Homo sapien
taaattaatatcaggcaagctaaac

SEQ ID NO: 4095975 - DNA, 25 bp, Homo sapien
gaggaattgtcatcgcattttgtgt

SEQ ID NO: 4095976 - DNA, 25 bp, Homo sapien
tatcaatctgatagggttgtgagaa

SEQ ID NO: 4095977 - DNA, 25 bp, Homo sapien
cacttattagctatgagacctagta

SEQ ID NO: 4095978 - DNA, 25 bp, Homo sapien
gctatgagacctagtaaaatcactt

SEQ ID NO: 4095979 - DNA, 25 bp, Homo sapien
aataaataaaggactcatcacttat

SEQ ID NO: 4095980 - DNA, 25 bp, Homo sapien
tatgtgccgctagttatgtactggg

SEQ ID NO: 4095981 - DNA, 25 bp, Homo sapien
tacatggtaagcagagtgcatcagt

SEQ ID NO: 4095982 - DNA, 25 bp, Homo sapien
tcaagacaggaacaaccaggttatg

SEQ ID NO: 4095983 - DNA, 25 bp, Homo sapien
ggtgtggcttactcttcaagacagg

SEQ ID NO: 4095984 - DNA, 25 bp, Homo sapien
cctgaagtaatctgtagttagcaaa

SEQ ID NO: 4095985 - DNA, 25 bp, Homo sapien
gcctcagaaggcaatcccagatcag

SEQ ID NO: 4095986 - DNA, 25 bp, Homo sapien
cacaaccaaagtgagcatgctgatt

SEQ ID NO: 4095987 - DNA, 25 bp, Homo sapien
aaggttcttcagtagttcgtaagag

SEQ ID NO: 4095988 - DNA, 25 bp, Homo sapien
tagttcccacttatctacagaggat

SEQ ID NO: 4095989 - DNA, 25 bp, Homo sapien
gaagaacctttgaagccaacttgtc

SEQ ID NO: 4095990 - DNA, 25 bp, Homo sapien
tatgtgtacaccaaagatttagaga

SEQ ID NO: 4095991 - DNA, 25 bp, Homo sapien
gctaggtgtcatagcaaagattggg

SEQ ID NO: 4095992 - DNA, 25 bp, Homo sapien
aaactctgtctcctgatcagcacgg

SEQ ID NO: 4095993 - DNA, 25 bp, Homo sapien
agaccagttgtctgctcacaaactc

SEQ ID NO: 4095994 - DNA, 25 bp, Homo sapien
cagttgtctgctcacaaactctgtc

SEQ ID NO: 4095995 - DNA, 25 bp, Homo sapien
actctgtctcctgatcagcacggga

SEQ ID NO: 4095996 - DNA, 25 bp, Homo sapien
gttccctcatgtccgttttcagtct

SEQ ID NO: 4095997 - DNA, 25 bp, Homo sapien
agttccctcatgtccgttttcagtc

SEQ ID NO: 4095998 - DNA, 25 bp, Homo sapien
ttccctcatgtccgttttcagtctt

SEQ ID NO: 4095999 - DNA, 25 bp, Homo sapien
aaagtagtgctaagtggaaagttca

SEQ ID NO: 4096000 - DNA, 25 bp, Homo sapien
gataggccacacaacaagtctcagt

SEQ ID NO: 4096001 - DNA, 25 bp, Homo sapien
aaggccatacctcacagaactggag

SEQ ID NO: 4096002 - DNA, 25 bp, Homo sapien
cctgagtgatcgttgggtcaacaag

SEQ ID NO: 4096003 - DNA, 25 bp, Homo sapien
cattcctgtagggtttctttatgca

SEQ ID NO: 4096004 - DNA, 25 bp, Homo sapien
tcattgttgccctcagatatagccc

SEQ ID NO: 4096005 - DNA, 25 bp, Homo sapien
taaagttgcattactaccctagtac

SEQ ID NO: 4096006 - DNA, 25 bp, Homo sapien
tactgcttcttttggcatactcaaa

SEQ ID NO: 4096007 - DNA, 25 bp, Homo sapien
tgaatggacgcagatcatcataaac

SEQ ID NO: 4096008 - DNA, 25 bp, Homo sapien
tagaacttcgcagaaagagtgccct

SEQ ID NO: 4096009 - DNA, 25 bp, Homo sapien
gggtcagctgtaattgaggttcaaa

SEQ ID NO: 4096010 - DNA, 25 bp, Homo sapien
gggatactcctaatagaattgctga

SEQ ID NO: 4096011 - DNA, 25 bp, Homo sapien
cactgcactgttaggtagccaaaga

SEQ ID NO: 4096012 - DNA, 25 bp, Homo sapien
tactctgagcctgaaaaccgaatct

SEQ ID NO: 4096013 - DNA, 25 bp, Homo sapien
taaagactatttgctggccactgag

SEQ ID NO: 4096014 - DNA, 25 bp, Homo sapien
gctagaggcagaattcagatccagg

SEQ ID NO: 4096015 - DNA, 25 bp, Homo sapien
ttttagggattttaggacacagcag

SEQ ID NO: 4096016 - DNA, 25 bp, Homo sapien
tgtgaattacccagacagctctaga

SEQ ID NO: 4096017 - DNA, 25 bp, Homo sapien
gttgctgaggcccaagttaaactga

SEQ ID NO: 4096018 - DNA, 25 bp, Homo sapien
ccttggccctttaagtgatgtggaa

SEQ ID NO: 4096019 - DNA, 25 bp, Homo sapien
gcacctccatgatcttttgaagttt

SEQ ID NO: 4096020 - DNA, 25 bp, Homo sapien
cacctccatgatcttttgaagttta

SEQ ID NO: 4096021 - DNA, 25 bp, Homo sapien
ggatgaattcaattgttctcagttc

SEQ ID NO: 4096022 - DNA, 25 bp, Homo sapien
attttggatgaattcaattgttctc

SEQ ID NO: 4096023 - DNA, 25 bp, Homo sapien
aatgttttatcagtgtaaagaggta

SEQ ID NO: 4096024 - DNA, 25 bp, Homo sapien
agaggtaatatagctcatgtagcta

SEQ ID NO: 4096025 - DNA, 25 bp, Homo sapien
gatgcagaaatcattgaacttctta

SEQ ID NO: 4096026 - DNA, 25 bp, Homo sapien
tgaacttcttattttatctggtatg

SEQ ID NO: 4096027 - DNA, 25 bp, Homo sapien
gagatgcagaaatcattgaacttct

SEQ ID NO: 4096028 - DNA, 25 bp, Homo sapien
cttattttatctggtatggtaacct

SEQ ID NO: 4096029 - DNA, 25 bp, Homo sapien
aagatgacctggaagttgtgcccat

SEQ ID NO: 4096030 - DNA, 25 bp, Homo sapien
ggaggtccatgaagcatgcattaga

SEQ ID NO: 4096031 - DNA, 25 bp, Homo sapien
tctctcactgggtggctaagtgacc

SEQ ID NO: 4096032 - DNA, 25 bp, Homo sapien
caacaacttcaagggaggccaggaa

SEQ ID NO: 4096033 - DNA, 25 bp, Homo sapien
ggatcacaccacttgagatcgtcaa

SEQ ID NO: 4096034 - DNA, 25 bp, Homo sapien
tcaaacgatattggttaatggccat

SEQ ID NO: 4096035 - DNA, 25 bp, Homo sapien
caccacttgagatcgtcaaacgata

SEQ ID NO: 4096036 - DNA, 25 bp, Homo sapien
cttgagatcgtcaaacgatattggt

SEQ ID NO: 4096037 - DNA, 25 bp, Homo sapien
tcaaattggagtgaatcgggtcaca

SEQ ID NO: 4096038 - DNA, 25 bp, Homo sapien
ttcttcaaattggagtgaatcgggt

SEQ ID NO: 4096039 - DNA, 25 bp, Homo sapien
gaatcgggtcacattcaggattcat

SEQ ID NO: 4096040 - DNA, 25 bp, Homo sapien
ggagtgaatcgggtcacattcagga

SEQ ID NO: 4096041 - DNA, 25 bp, Homo sapien
gcctttcttcagatacttgaatatt

SEQ ID NO: 4096042 - DNA, 25 bp, Homo sapien
taaaagtaaggattgtacatcttta

SEQ ID NO: 4096043 - DNA, 25 bp, Homo sapien
aaagtaaggattgtacatctttaca

SEQ ID NO: 4096044 - DNA, 25 bp, Homo sapien
gtaaggattgtacatctttacattt

SEQ ID NO: 4096045 - DNA, 25 bp, Homo sapien
tatttctaccagtctgtcctcctgc

SEQ ID NO: 4096046 - DNA, 25 bp, Homo sapien
tgaaaattttgctagtgattgccag

SEQ ID NO: 4096047 - DNA, 25 bp, Homo sapien
gattgccagttgcacagaggctgta

SEQ ID NO: 4096048 - DNA, 25 bp, Homo sapien
cagaggctgtatcaatgtatatttc

SEQ ID NO: 4096049 - DNA, 25 bp, Homo sapien
tgaacaagtgcagcgtggtgcaaac

SEQ ID NO: 4096050 - DNA, 25 bp, Homo sapien
gtgaacaagtgcagcgtggtgcaaa

SEQ ID NO: 4096051 - DNA, 25 bp, Homo sapien
ctataatctgacaacatagaatgct

SEQ ID NO: 4096052 - DNA, 25 bp, Homo sapien
ttacgagttcaagccatgtgcagcc

SEQ ID NO: 4096053 - DNA, 25 bp, Homo sapien
tatttatttgtgataaggatatagg

SEQ ID NO: 4096054 - DNA, 25 bp, Homo sapien
tgcacccagtcatgaagtagtatct

SEQ ID NO: 4096055 - DNA, 25 bp, Homo sapien
ccatgcccggcgtaagttgacattc

SEQ ID NO: 4096056 - DNA, 25 bp, Homo sapien
tgacattcttattggtaagggttta

SEQ ID NO: 4096057 - DNA, 25 bp, Homo sapien
gggtttactcgtctagatttatcta

SEQ ID NO: 4096058 - DNA, 25 bp, Homo sapien
tctagcacaagacagttaaaatact

SEQ ID NO: 4096059 - DNA, 25 bp, Homo sapien
gcagcggcacgatcttggcgcattg

SEQ ID NO: 4096060 - DNA, 25 bp, Homo sapien
aacctctgcctccctagttcaagca

SEQ ID NO: 4096061 - DNA, 25 bp, Homo sapien
tgcagcggcacgatcttggcgcatt

SEQ ID NO: 4096062 - DNA, 25 bp, Homo sapien
cagcggcacgatcttggcgcattgc

SEQ ID NO: 4096063 - DNA, 25 bp, Homo sapien
tgagggaggcgtccgcgctccacct

SEQ ID NO: 4096064 - DNA, 25 bp, Homo sapien
gggaggcgtccgcgctccacctcca

SEQ ID NO: 4096065 - DNA, 25 bp, Homo sapien
ggaggcgtccgcgctccacctccac

SEQ ID NO: 4096066 - DNA, 25 bp, Homo sapien
ggctgagggaggcgtccgcgctcca

SEQ ID NO: 4096067 - DNA, 25 bp, Homo sapien
cagcgtgcggctggctaagaaagaa

SEQ ID NO: 4096068 - DNA, 25 bp, Homo sapien
aagaaaagccgtttcagagctgcgg

SEQ ID NO: 4096069 - DNA, 25 bp, Homo sapien
tctgatagtcctgacgaagatctcc

SEQ ID NO: 4096070 - DNA, 25 bp, Homo sapien
cacacgagcctggaatggcaacagc

SEQ ID NO: 4096071 - DNA, 25 bp, Homo sapien
gaacacgactggatatggcacattg

SEQ ID NO: 4096072 - DNA, 25 bp, Homo sapien
tcctaggccaagatagaacacgact

SEQ ID NO: 4096073 - DNA, 25 bp, Homo sapien
tcaacatccatagtgcttaacaggc

SEQ ID NO: 4096074 - DNA, 25 bp, Homo sapien
ggagaactcaagtgctttcacgaca

SEQ ID NO: 4096075 - DNA, 25 bp, Homo sapien
gattaaccgcacaaacaagagccaa

SEQ ID NO: 4096076 - DNA, 25 bp, Homo sapien
tgaagaagggacaagacgatgtcaa

SEQ ID NO: 4096077 - DNA, 25 bp, Homo sapien
tgtatcctaattgaagaagactgac

SEQ ID NO: 4096078 - DNA, 25 bp, Homo sapien
gccactgtgtctcgctggatttcaa

SEQ ID NO: 4096079 - DNA, 25 bp, Homo sapien
tactggcaacaattaagttcctggc

SEQ ID NO: 4096080 - DNA, 25 bp, Homo sapien
gccccattggcttcgatgatacggt

SEQ ID NO: 4096081 - DNA, 25 bp, Homo sapien
caagaccttgcagtagtgattggct

SEQ ID NO: 4096082 - DNA, 25 bp, Homo sapien
taaaacgtggtgtggctgcctagct

SEQ ID NO: 4096083 - DNA, 25 bp, Homo sapien
cacagaattgacactgatcctggga

SEQ ID NO: 4096084 - DNA, 25 bp, Homo sapien
tacccaggatagaattgcgaactca

SEQ ID NO: 4096085 - DNA, 25 bp, Homo sapien
gaatgtgaggatacaagctctgcag

SEQ ID NO: 4096086 - DNA, 25 bp, Homo sapien
tcttgcggttagaatgcaggcctgt

SEQ ID NO: 4096087 - DNA, 25 bp, Homo sapien
cagagcacatgctttgtacaatcac

SEQ ID NO: 4096088 - DNA, 25 bp, Homo sapien
gagacttgttttgggctctatcaca

SEQ ID NO: 4096089 - DNA, 25 bp, Homo sapien
catcatctcacatcgtgtgtggcac

SEQ ID NO: 4096090 - DNA, 25 bp, Homo sapien
tgtggcactcacattttgtgtggca

SEQ ID NO: 4096091 - DNA, 25 bp, Homo sapien
tgctggtgatcaggtagtccgccat

SEQ ID NO: 4096092 - DNA, 25 bp, Homo sapien
gtgagcccatccctgggcacgtagc

SEQ ID NO: 4096093 - DNA, 25 bp, Homo sapien
ctggaagaatcaggaagtcgttgtg

SEQ ID NO: 4096094 - DNA, 25 bp, Homo sapien
gtcgttgtgggtgaggccgtcagcg

SEQ ID NO: 4096095 - DNA, 25 bp, Homo sapien
tcttgatcttctgtacctccttggc

SEQ ID NO: 4096096 - DNA, 25 bp, Homo sapien
aaacttcttgatcttctgtacctcc

SEQ ID NO: 4096097 - DNA, 25 bp, Homo sapien
aacttcttgatcttctgtacctcct

SEQ ID NO: 4096098 - DNA, 25 bp, Homo sapien
cttcttgatcttctgtacctccttg

SEQ ID NO: 4096099 - DNA, 25 bp, Homo sapien
ccatgccgcatcttggcctccagca

SEQ ID NO: 4096100 - DNA, 25 bp, Homo sapien
aagccatgccgcatcttggcctcca

SEQ ID NO: 4096101 - DNA, 25 bp, Homo sapien
ctagtgatggggatgccagagaagc

SEQ ID NO: 4096102 - DNA, 25 bp, Homo sapien
ccagagaagccatgccgcatcttgg

SEQ ID NO: 4096103 - DNA, 25 bp, Homo sapien
gaaagtcagtgtctcgggaggtgac

SEQ ID NO: 4096104 - DNA, 25 bp, Homo sapien
tcagtgtctcgggaggtgacgatgc

SEQ ID NO: 4096105 - DNA, 25 bp, Homo sapien
agaaagtcagtgtctcgggaggtga

SEQ ID NO: 4096106 - DNA, 25 bp, Homo sapien
aagtcagtgtctcgggaggtgacga

SEQ ID NO: 4096107 - DNA, 25 bp, Homo sapien
ggagccaccaccagctcaatccttg

SEQ ID NO: 4096108 - DNA, 25 bp, Homo sapien
ctggagccaccaccagctcaatcct

SEQ ID NO: 4096109 - DNA, 25 bp, Homo sapien
caccaccagctcaatccttggcgtc

SEQ ID NO: 4096110 - DNA, 25 bp, Homo sapien
gccaccaccagctcaatccttggcg

SEQ ID NO: 4096111 - DNA, 25 bp, Homo sapien
gatgatggccaccagttaatcgcga

SEQ ID NO: 4096112 - DNA, 25 bp, Homo sapien
ttctcgctacacttaggatctcttt

SEQ ID NO: 4096113 - DNA, 25 bp, Homo sapien
tttctcgctacacttaggatctctt

SEQ ID NO: 4096114 - DNA, 25 bp, Homo sapien
ctttctcgctacacttaggatctct

SEQ ID NO: 4096115 - DNA, 25 bp, Homo sapien
tggaagagcaggtccaggcagtatt

SEQ ID NO: 4096116 - DNA, 25 bp, Homo sapien
gaggccagagggtagtctctgttct

SEQ ID NO: 4096117 - DNA, 25 bp, Homo sapien
cctgcacagcagctgcttgtgggaa

SEQ ID NO: 4096118 - DNA, 25 bp, Homo sapien
ggcagtatttgtcatcctcacgggt

SEQ ID NO: 4096119 - DNA, 25 bp, Homo sapien
acttttgtttgatgtaatgcaccat

SEQ ID NO: 4096120 - DNA, 25 bp, Homo sapien
ggtacttttgtttgatgtaatgcac

SEQ ID NO: 4096121 - DNA, 25 bp, Homo sapien
ggggtacttttgtttgatgtaatgc

SEQ ID NO: 4096122 - DNA, 25 bp, Homo sapien
tacttttgtttgatgtaatgcacca

SEQ ID NO: 4096123 - DNA, 25 bp, Homo sapien
gctgtcaccatgttccccccagtca

SEQ ID NO: 4096124 - DNA, 25 bp, Homo sapien
agcgtcaggttcttggcctgggctg

SEQ ID NO: 4096125 - DNA, 25 bp, Homo sapien
gcctgggctgctgtcaccatgttcc

SEQ ID NO: 4096126 - DNA, 25 bp, Homo sapien
cagcgtcaggttcttggcctgggct

SEQ ID NO: 4096127 - DNA, 25 bp, Homo sapien
tgatgcagatagagccacagcccgt

SEQ ID NO: 4096128 - DNA, 25 bp, Homo sapien
tgcagatagagccacagcccgtgcc

SEQ ID NO: 4096129 - DNA, 25 bp, Homo sapien
gatgcagatagagccacagcccgtg

SEQ ID NO: 4096130 - DNA, 25 bp, Homo sapien
atgcagatagagccacagcccgtgc

SEQ ID NO: 4096131 - DNA, 25 bp, Homo sapien
tggggccgaccacaggccatcactt

SEQ ID NO: 4096132 - DNA, 25 bp, Homo sapien
ggggccgaccacaggccatcacttc

SEQ ID NO: 4096133 - DNA, 25 bp, Homo sapien
ctggggccgaccacaggccatcact

SEQ ID NO: 4096134 - DNA, 25 bp, Homo sapien
cacgatctggatgccaccattgaat

SEQ ID NO: 4096135 - DNA, 25 bp, Homo sapien
catgtgctccacgatctggatgcca

SEQ ID NO: 4096136 - DNA, 25 bp, Homo sapien
atgtgctccacgatctggatgccac

SEQ ID NO: 4096137 - DNA, 25 bp, Homo sapien
gctccacgatctggatgccaccatt

SEQ ID NO: 4096138 - DNA, 25 bp, Homo sapien
aggctccaagggccagggccttgac

SEQ ID NO: 4096139 - DNA, 25 bp, Homo sapien
gtggaggctccaagggccagggcct

SEQ ID NO: 4096140 - DNA, 25 bp, Homo sapien
cactgtggaggctccaagggccagg

SEQ ID NO: 4096141 - DNA, 25 bp, Homo sapien
ctgtggaggctccaagggccagggc

SEQ ID NO: 4096142 - DNA, 25 bp, Homo sapien
agaagtactcaccgggggcctccat

SEQ ID NO: 4096143 - DNA, 25 bp, Homo sapien
gccacaccccatctgagaagaagta

SEQ ID NO: 4096144 - DNA, 25 bp, Homo sapien
tccatggtggcagccaacagggagc

SEQ ID NO: 4096145 - DNA, 25 bp, Homo sapien
tggcagccaacagggagcccgtcat

SEQ ID NO: 4096146 - DNA, 25 bp, Homo sapien
agtttgagacatcctgcgcgatctt

SEQ ID NO: 4096147 - DNA, 25 bp, Homo sapien
gtttgagacatcctgcgcgatcttc

SEQ ID NO: 4096148 - DNA, 25 bp, Homo sapien
tttgagacatcctgcgcgatcttca

SEQ ID NO: 4096149 - DNA, 25 bp, Homo sapien
tcccaaagtatgcaaagttaaagcc

SEQ ID NO: 4096150 - DNA, 25 bp, Homo sapien
gggcagagaccactccttggtctag

SEQ ID NO: 4096151 - DNA, 25 bp, Homo sapien
tccttggtctaggtcaggagctaag

SEQ ID NO: 4096152 - DNA, 25 bp, Homo sapien
gagaccactccttggtctaggtcag

SEQ ID NO: 4096153 - DNA, 25 bp, Homo sapien
cttctggaacagcttgaggatttgc

SEQ ID NO: 4096154 - DNA, 25 bp, Homo sapien
ggaaagcactcattttgcctgtacg

SEQ ID NO: 4096155 - DNA, 25 bp, Homo sapien
gagttttgattatccactaggcagg

SEQ ID NO: 4096156 - DNA, 25 bp, Homo sapien
ataacttcactaaacacgttcgtcg

SEQ ID NO: 4096157 - DNA, 25 bp, Homo sapien
tctcacatcttgatgtggtagcttc

SEQ ID NO: 4096158 - DNA, 25 bp, Homo sapien
actggcatctctacagctggcgtgt

SEQ ID NO: 4096159 - DNA, 25 bp, Homo sapien
gtagcttctgacaccatccctggtc

SEQ ID NO: 4096160 - DNA, 25 bp, Homo sapien
cttcactacctcagcaatgaaacaa

SEQ ID NO: 4096161 - DNA, 25 bp, Homo sapien
cgccacgcccagcctaaaaaattct

SEQ ID NO: 4096162 - DNA, 25 bp, Homo sapien
tcttttttacagagactggggtctc

SEQ ID NO: 4096163 - DNA, 25 bp, Homo sapien
tcagccaccatgcttgaccctcaga

SEQ ID NO: 4096164 - DNA, 25 bp, Homo sapien
ttataggcatgcactactgcaccca

SEQ ID NO: 4096165 - DNA, 25 bp, Homo sapien
cactttttcgcagaattcttcactg

SEQ ID NO: 4096166 - DNA, 25 bp, Homo sapien
tatgagttccactttttcgcagaat

SEQ ID NO: 4096167 - DNA, 25 bp, Homo sapien
gagttccactttttcgcagaattct

SEQ ID NO: 4096168 - DNA, 25 bp, Homo sapien
tggctatgagttccactttttcgca

SEQ ID NO: 4096169 - DNA, 25 bp, Homo sapien
gccattcattccagtcatcttctca

SEQ ID NO: 4096170 - DNA, 25 bp, Homo sapien
ctatatagccattcattccagtcat

SEQ ID NO: 4096171 - DNA, 25 bp, Homo sapien
agccattcattccagtcatcttctc

SEQ ID NO: 4096172 - DNA, 25 bp, Homo sapien
attcattccagtcatcttctcatct

SEQ ID NO: 4096173 - DNA, 25 bp, Homo sapien
tcctgtcctttatgatctgatattt

SEQ ID NO: 4096174 - DNA, 25 bp, Homo sapien
taatggtctgtctacgattttatcc

SEQ ID NO: 4096175 - DNA, 25 bp, Homo sapien
gattttatcctcttcagaattcctg

SEQ ID NO: 4096176 - DNA, 25 bp, Homo sapien
ccaactcctttggtaatggtctgtc

SEQ ID NO: 4096177 - DNA, 25 bp, Homo sapien
cactcattggttgccccaggaagct

SEQ ID NO: 4096178 - DNA, 25 bp, Homo sapien
gaagagagttgcaagtaagggccat

SEQ ID NO: 4096179 - DNA, 25 bp, Homo sapien
tgggatagacagctgcatgcataaa

SEQ ID NO: 4096180 - DNA, 25 bp, Homo sapien
agtatacttctgtgtagaccactca

SEQ ID NO: 4096181 - DNA, 25 bp, Homo sapien
cacatcaacagtaaggctgtttcac

SEQ ID NO: 4096182 - DNA, 25 bp, Homo sapien
ttgactaactggtgtaagaggctta

SEQ ID NO: 4096183 - DNA, 25 bp, Homo sapien
tccaatagaagcctgtatgtctaca

SEQ ID NO: 4096184 - DNA, 25 bp, Homo sapien
catactgatatcatgtcctttgaac

SEQ ID NO: 4096185 - DNA, 25 bp, Homo sapien
tggttgatcaaacctgctgcttgtt

SEQ ID NO: 4096186 - DNA, 25 bp, Homo sapien
tggtaggtttcttgctctgagaaga

SEQ ID NO: 4096187 - DNA, 25 bp, Homo sapien
tctgagaagaatggttgatcaaacc

SEQ ID NO: 4096188 - DNA, 25 bp, Homo sapien
cagtatggtaggtttcttgctctga

SEQ ID NO: 4096189 - DNA, 25 bp, Homo sapien
tcttcacatgatagcaggaagaaat

SEQ ID NO: 4096190 - DNA, 25 bp, Homo sapien
aacacgttcttcttcacatgatagc

SEQ ID NO: 4096191 - DNA, 25 bp, Homo sapien
acgttcttcttcacatgatagcagg

SEQ ID NO: 4096192 - DNA, 25 bp, Homo sapien
cttcacatgatagcaggaagaaatg

SEQ ID NO: 4096193 - DNA, 25 bp, Homo sapien
tactggtgattttgatgggcagaca

SEQ ID NO: 4096194 - DNA, 25 bp, Homo sapien
ctactggtgattttgatgggcagac

SEQ ID NO: 4096195 - DNA, 25 bp, Homo sapien
gaaggagatgcctcacttagcaaac

SEQ ID NO: 4096196 - DNA, 25 bp, Homo sapien
gactgactcttcttgcttgctaatt

SEQ ID NO: 4096197 - DNA, 25 bp, Homo sapien
tatccgcagggagtaaataaagctc

SEQ ID NO: 4096198 - DNA, 25 bp, Homo sapien
aataaagctcctcagtccgtcacag

SEQ ID NO: 4096199 - DNA, 25 bp, Homo sapien
ctctgtcaacgatccaggccacttt

SEQ ID NO: 4096200 - DNA, 25 bp, Homo sapien
tctgtcaacgatccaggccactttc

SEQ ID NO: 4096201 - DNA, 25 bp, Homo sapien
gccattatagtctcagataagacat

SEQ ID NO: 4096202 - DNA, 25 bp, Homo sapien
gactcctttaacctctgaagagtga

SEQ ID NO: 4096203 - DNA, 25 bp, Homo sapien
tatccattagcggtcattagtacgt

SEQ ID NO: 4096204 - DNA, 25 bp, Homo sapien
gggtcacttgatagagccattatag

SEQ ID NO: 4096205 - DNA, 25 bp, Homo sapien
ttcctttatgggagctggaaccaca

SEQ ID NO: 4096206 - DNA, 25 bp, Homo sapien
gagttcctgcccaaggcgaagagga

SEQ ID NO: 4096207 - DNA, 25 bp, Homo sapien
gacaagctgctaatggagttcctgc

SEQ ID NO: 4096208 - DNA, 25 bp, Homo sapien
caaggtggttctctgcaagtaaggc

SEQ ID NO: 4096209 - DNA, 25 bp, Homo sapien
tcttttatccctcacattttcttta

SEQ ID NO: 4096210 - DNA, 25 bp, Homo sapien
tgggatcactggatcaaatggtaca

SEQ ID NO: 4096211 - DNA, 25 bp, Homo sapien
taagtcctttagtggtgacttctgg

SEQ ID NO: 4096212 - DNA, 25 bp, Homo sapien
tagatacttagtagtgggatcactg

SEQ ID NO: 4096213 - DNA, 25 bp, Homo sapien
gccgagtgctattgaacatgtgagg

SEQ ID NO: 4096214 - DNA, 25 bp, Homo sapien
tgcccatgtgtaaatccatacccag

SEQ ID NO: 4096215 - DNA, 25 bp, Homo sapien
gactgatcatcaaggagcaaactaa

SEQ ID NO: 4096216 - DNA, 25 bp, Homo sapien
tcaggcgggcctcaaatgagtgtgc

SEQ ID NO: 4096217 - DNA, 25 bp, Homo sapien
gcttttgcaaaagactcccagcgct

SEQ ID NO: 4096218 - DNA, 25 bp, Homo sapien
ccctgcaaagataggcaagcctgat

SEQ ID NO: 4096219 - DNA, 25 bp, Homo sapien
tcccagcgctctaggcaacaaagaa

SEQ ID NO: 4096220 - DNA, 25 bp, Homo sapien
tagtcataagccttgggatggcacc

SEQ ID NO: 4096221 - DNA, 25 bp, Homo sapien
tatttgcttacaccactgtaggtgg

SEQ ID NO: 4096222 - DNA, 25 bp, Homo sapien
aaaatctgtctcctgtgaaacctga

SEQ ID NO: 4096223 - DNA, 25 bp, Homo sapien
taattttcaggtggtaacatgccca

SEQ ID NO: 4096224 - DNA, 25 bp, Homo sapien
cagtgagaccttgggtaagccggtt

SEQ ID NO: 4096225 - DNA, 25 bp, Homo sapien
ggtgctggccccttactctgaaggc

SEQ ID NO: 4096226 - DNA, 25 bp, Homo sapien
ggtccaggctaattacaggcaagtg

SEQ ID NO: 4096227 - DNA, 25 bp, Homo sapien
gatcaatatcacaagagccaccaca

SEQ ID NO: 4096228 - DNA, 25 bp, Homo sapien
tcattatctaaacagtccagggaac

SEQ ID NO: 4096229 - DNA, 25 bp, Homo sapien
caatctttggttgagagctattcca

SEQ ID NO: 4096230 - DNA, 25 bp, Homo sapien
caatcaagggtgtattcgtaaacca

SEQ ID NO: 4096231 - DNA, 25 bp, Homo sapien
tattccagaggaagggtgacattaa

SEQ ID NO: 4096232 - DNA, 25 bp, Homo sapien
cagggaaggcgcatcttcaatcaag

SEQ ID NO: 4096233 - DNA, 25 bp, Homo sapien
gagttgtagatacctagcatcctga

SEQ ID NO: 4096234 - DNA, 25 bp, Homo sapien
cccaaaagactgatcagctgtaagt

SEQ ID NO: 4096235 - DNA, 25 bp, Homo sapien
tagacacatacagcaacacagctac

SEQ ID NO: 4096236 - DNA, 25 bp, Homo sapien
gcaacatcttagctaatgatgccta

SEQ ID NO: 4096237 - DNA, 25 bp, Homo sapien
ctcaataaagttttatgctggtcct

SEQ ID NO: 4096238 - DNA, 25 bp, Homo sapien
ctctcaataaagttttatgctggtc

SEQ ID NO: 4096239 - DNA, 25 bp, Homo sapien
tctcaataaagttttatgctggtcc

SEQ ID NO: 4096240 - DNA, 25 bp, Homo sapien
gaaatcttgatgcatctgtggtctc

SEQ ID NO: 4096241 - DNA, 25 bp, Homo sapien
taaaatggcctaaataatgcacagc

SEQ ID NO: 4096242 - DNA, 25 bp, Homo sapien
ctgaggtggtcaaatgggagccaaa

SEQ ID NO: 4096243 - DNA, 25 bp, Homo sapien
tgagatacgtgaattatccaggcat

SEQ ID NO: 4096244 - DNA, 25 bp, Homo sapien
cataggttcaatatgcatataatgc

SEQ ID NO: 4096245 - DNA, 25 bp, Homo sapien
tcatgtttgcataggttcaatatgc

SEQ ID NO: 4096246 - DNA, 25 bp, Homo sapien
taatgcaactcaatcctaaatatat

SEQ ID NO: 4096247 - DNA, 25 bp, Homo sapien
aaaatatattatgggtccagctgca

SEQ ID NO: 4096248 - DNA, 25 bp, Homo sapien
taggcgttcacggattcccccaggc

SEQ ID NO: 4096249 - DNA, 25 bp, Homo sapien
caaagggctgaggtaaacagttgtc

SEQ ID NO: 4096250 - DNA, 25 bp, Homo sapien
gaaaagaatgtttgtgtcaaccacc

SEQ ID NO: 4096251 - DNA, 25 bp, Homo sapien
caataccatctcaaagcacactggg

SEQ ID NO: 4096252 - DNA, 25 bp, Homo sapien
ggtgccgatgcacgtggctgcaaca

SEQ ID NO: 4096253 - DNA, 25 bp, Homo sapien
caagtggtaaagggaacatgaggct

SEQ ID NO: 4096254 - DNA, 25 bp, Homo sapien
aaagaaaagacggaataagatgctc

SEQ ID NO: 4096255 - DNA, 25 bp, Homo sapien
gatgctcttaacctgtgcatctctc

SEQ ID NO: 4096256 - DNA, 25 bp, Homo sapien
acatgaggctggctctagtccaggc

SEQ ID NO: 4096257 - DNA, 25 bp, Homo sapien
tggttcaggaatgggtatgtgtcca

SEQ ID NO: 4096258 - DNA, 25 bp, Homo sapien
ccctcggcagttattggttcaggaa

SEQ ID NO: 4096259 - DNA, 25 bp, Homo sapien
tccatgttctggcaacagaatacga

SEQ ID NO: 4096260 - DNA, 25 bp, Homo sapien
ccatgttctggcaacagaatacgag

SEQ ID NO: 4096261 - DNA, 25 bp, Homo sapien
tttataggattgtgaaaactgacta

SEQ ID NO: 4096262 - DNA, 25 bp, Homo sapien
tctttataggattgtgaaaactgac

SEQ ID NO: 4096263 - DNA, 25 bp, Homo sapien
ctttataggattgtgaaaactgact

SEQ ID NO: 4096264 - DNA, 25 bp, Homo sapien
gttctttataggattgtgaaaactg

SEQ ID NO: 4096265 - DNA, 25 bp, Homo sapien
ccaaatggacagctgagagcactca

SEQ ID NO: 4096266 - DNA, 25 bp, Homo sapien
gaaacagccacttgattggaagact

SEQ ID NO: 4096267 - DNA, 25 bp, Homo sapien
aaggttgaactgtcttgggaagcca

SEQ ID NO: 4096268 - DNA, 25 bp, Homo sapien
ggacaattccgaaggatgggctatg

SEQ ID NO: 4096269 - DNA, 25 bp, Homo sapien
tggtttcagaaaatggtccacacct

SEQ ID NO: 4096270 - DNA, 25 bp, Homo sapien
cttccaatatgagctggtgccttaa

SEQ ID NO: 4096271 - DNA, 25 bp, Homo sapien
gaaaatggtccacaccttcacaaag

SEQ ID NO: 4096272 - DNA, 25 bp, Homo sapien
tgccttaagttggtttcagaaaatg

SEQ ID NO: 4096273 - DNA, 25 bp, Homo sapien
cctgctttagtctaacaagtagctg

SEQ ID NO: 4096274 - DNA, 25 bp, Homo sapien
agttctcctgctttagtctaacaag

SEQ ID NO: 4096275 - DNA, 25 bp, Homo sapien
tcctgctttagtctaacaagtagct

SEQ ID NO: 4096276 - DNA, 25 bp, Homo sapien
tctcctgctttagtctaacaagtag

SEQ ID NO: 4096277 - DNA, 25 bp, Homo sapien
agaggagctctctactgtgtgccaa

SEQ ID NO: 4096278 - DNA, 25 bp, Homo sapien
tgtagtagacgctgtttgagttccc

SEQ ID NO: 4096279 - DNA, 25 bp, Homo sapien
gctcagtgccctcgttctgtatgaa

SEQ ID NO: 4096280 - DNA, 25 bp, Homo sapien
taaattgcataacctcttccaaggc

SEQ ID NO: 4096281 - DNA, 25 bp, Homo sapien
catttcagagggtcctggttttgtc

SEQ ID NO: 4096282 - DNA, 25 bp, Homo sapien
gaagagaagagtgatgaagttccat

SEQ ID NO: 4096283 - DNA, 25 bp, Homo sapien
caactgtagtagaaagctttgaaga

SEQ ID NO: 4096284 - DNA, 25 bp, Homo sapien
agttccatttcagagggtcctggtt

SEQ ID NO: 4096285 - DNA, 25 bp, Homo sapien
gggtaccaagcatagctctgaaaat

SEQ ID NO: 4096286 - DNA, 25 bp, Homo sapien
tgaactccccttagggttgtaggca

SEQ ID NO: 4096287 - DNA, 25 bp, Homo sapien
gaaacggtttgatggctgaactccc

SEQ ID NO: 4096288 - DNA, 25 bp, Homo sapien
cagaagaacaggttagtagctggtc

SEQ ID NO: 4096289 - DNA, 25 bp, Homo sapien
gatgcggtctccaaatgctctctct

SEQ ID NO: 4096290 - DNA, 25 bp, Homo sapien
tgcggtctccaaatgctctctctag

SEQ ID NO: 4096291 - DNA, 25 bp, Homo sapien
ctggatgcggtctccaaatgctctc

SEQ ID NO: 4096292 - DNA, 25 bp, Homo sapien
ggtctccaaatgctctctctaggca

SEQ ID NO: 4096293 - DNA, 25 bp, Homo sapien
gatcgattctgtgattgggctcctg

SEQ ID NO: 4096294 - DNA, 25 bp, Homo sapien
tgggtcaggagatatggatcgattc

SEQ ID NO: 4096295 - DNA, 25 bp, Homo sapien
aagaacagacttctgagtggagtac

SEQ ID NO: 4096296 - DNA, 25 bp, Homo sapien
ggatgtttactttcacggatcagaa

SEQ ID NO: 4096297 - DNA, 25 bp, Homo sapien
aggctggcggtctaagatcaaagtg

SEQ ID NO: 4096298 - DNA, 25 bp, Homo sapien
aaagtgccatcatgattgggttctt

SEQ ID NO: 4096299 - DNA, 25 bp, Homo sapien
agtgccatcatgattgggttcttgt

SEQ ID NO: 4096300 - DNA, 25 bp, Homo sapien
ggtctaagatcaaagtgccatcatg

SEQ ID NO: 4096301 - DNA, 25 bp, Homo sapien
ttacaatgcttctgaggtggtgtct

SEQ ID NO: 4096302 - DNA, 25 bp, Homo sapien
tgtctggccacatcacattggcatt

SEQ ID NO: 4096303 - DNA, 25 bp, Homo sapien
gtggtgtctggccacatcacattgg

SEQ ID NO: 4096304 - DNA, 25 bp, Homo sapien
tgaggtggtgtctggccacatcaca

SEQ ID NO: 4096305 - DNA, 25 bp, Homo sapien
ggttctcagtcaagcagggctgaca

SEQ ID NO: 4096306 - DNA, 25 bp, Homo sapien
ggacgcttccagtcaggtcagatca

SEQ ID NO: 4096307 - DNA, 25 bp, Homo sapien
tcaacagatgtaaagccggcaggca

SEQ ID NO: 4096308 - DNA, 25 bp, Homo sapien
tcaggcaaactaggttggactctcc

SEQ ID NO: 4096309 - DNA, 25 bp, Homo sapien
cctgggttgcttgttccacctggaa

SEQ ID NO: 4096310 - DNA, 25 bp, Homo sapien
aagcttgcagcagaacctgggttgc

SEQ ID NO: 4096311 - DNA, 25 bp, Homo sapien
acaggtcatgttcaagttagctttc

SEQ ID NO: 4096312 - DNA, 25 bp, Homo sapien
tggtcctgacatttgccaacagcgt

SEQ ID NO: 4096313 - DNA, 25 bp, Homo sapien
catggtctgtgcctgtatcgcttcc

SEQ ID NO: 4096314 - DNA, 25 bp, Homo sapien
ggtctgtgcctgtatcgcttcctta

SEQ ID NO: 4096315 - DNA, 25 bp, Homo sapien
gcctgtatcgcttccttaggagcat

SEQ ID NO: 4096316 - DNA, 25 bp, Homo sapien
ctgtgcctgtatcgcttccttagga

SEQ ID NO: 4096317 - DNA, 25 bp, Homo sapien
tcccgcagtgagataaagggtggca

SEQ ID NO: 4096318 - DNA, 25 bp, Homo sapien
ggagggtgcaacatcgccaccatca

SEQ ID NO: 4096319 - DNA, 25 bp, Homo sapien
cagagggctgtactcttcaccctca

SEQ ID NO: 4096320 - DNA, 25 bp, Homo sapien
tccttggctgcttgatgaggcggta

SEQ ID NO: 4096321 - DNA, 25 bp, Homo sapien
taaaactccagggtgcaaggagggc

SEQ ID NO: 4096322 - DNA, 25 bp, Homo sapien
caaggagggcacaaaactagaatgg

SEQ ID NO: 4096323 - DNA, 25 bp, Homo sapien
taacaagctgccttgctccctggat

SEQ ID NO: 4096324 - DNA, 25 bp, Homo sapien
gagatgttcactcccggctgctgac

SEQ ID NO: 4096325 - DNA, 25 bp, Homo sapien
tcctgatgtcctagcgctctgctgg

SEQ ID NO: 4096326 - DNA, 25 bp, Homo sapien
gggcccgcatactgcaggcacttaa

SEQ ID NO: 4096327 - DNA, 25 bp, Homo sapien
ggatgtgtggctggcgatagcacgg

SEQ ID NO: 4096328 - DNA, 25 bp, Homo sapien
gggtaggagccgaagagtcctgtca

SEQ ID NO: 4096329 - DNA, 25 bp, Homo sapien
ttgcagtaactccatcaccttaagt

SEQ ID NO: 4096330 - DNA, 25 bp, Homo sapien
ttacttcctgtgtaaacttgcagta

SEQ ID NO: 4096331 - DNA, 25 bp, Homo sapien
cttcctgtgtaaacttgcagtaact

SEQ ID NO: 4096332 - DNA, 25 bp, Homo sapien
ccatcaccttaagtgacttgagcat

SEQ ID NO: 4096333 - DNA, 25 bp, Homo sapien
tcttacttctgatagttgttcaata

SEQ ID NO: 4096334 - DNA, 25 bp, Homo sapien
ttcttacttctgatagttgttcaat

SEQ ID NO: 4096335 - DNA, 25 bp, Homo sapien
cttacttctgatagttgttcaatag

SEQ ID NO: 4096336 - DNA, 25 bp, Homo sapien
gcttacagggagtcgtgcttgtcat

SEQ ID NO: 4096337 - DNA, 25 bp, Homo sapien
gctgccttacaaatgtgcttacagg

SEQ ID NO: 4096338 - DNA, 25 bp, Homo sapien
tgtgcttacagggagtcgtgcttgt

SEQ ID NO: 4096339 - DNA, 25 bp, Homo sapien
cctcagtcttggctgccttacaaat

SEQ ID NO: 4096340 - DNA, 25 bp, Homo sapien
gatgatctccttcaggaaggccctg

SEQ ID NO: 4096341 - DNA, 25 bp, Homo sapien
tgtgtcgaggatgctgtgtacagtc

SEQ ID NO: 4096342 - DNA, 25 bp, Homo sapien
tgtacagtccgcaggagagtggacc

SEQ ID NO: 4096343 - DNA, 25 bp, Homo sapien
tcatggaaacagaggatgacgctgg

SEQ ID NO: 4096344 - DNA, 25 bp, Homo sapien
agacgagcctggaggaaagccgtgg

SEQ ID NO: 4096345 - DNA, 25 bp, Homo sapien
gagcctggaggaaagccgtggctac

SEQ ID NO: 4096346 - DNA, 25 bp, Homo sapien
acgagcctggaggaaagccgtggct

SEQ ID NO: 4096347 - DNA, 25 bp, Homo sapien
ccagacgagcctggaggaaagccgt

SEQ ID NO: 4096348 - DNA, 25 bp, Homo sapien
aacagggttgtggtcagtggaatga

SEQ ID NO: 4096349 - DNA, 25 bp, Homo sapien
caaccgatgagattgtgactaagac

SEQ ID NO: 4096350 - DNA, 25 bp, Homo sapien
taagacaatcgtcagcaactctctt

SEQ ID NO: 4096351 - DNA, 25 bp, Homo sapien
ggaatgacaaatgccacaaccgatg

SEQ ID NO: 4096352 - DNA, 25 bp, Homo sapien
cacatattcgctgagagcagacttg

SEQ ID NO: 4096353 - DNA, 25 bp, Homo sapien
agcacatccccggtggctctggtgg

SEQ ID NO: 4096354 - DNA, 25 bp, Homo sapien
agcctggccacatattcgctgagag

SEQ ID NO: 4096355 - DNA, 25 bp, Homo sapien
ggcactcgcagtgggcatccatgaa

SEQ ID NO: 4096356 - DNA, 25 bp, Homo sapien
caggtcctttgaggggtaatactgg

SEQ ID NO: 4096357 - DNA, 25 bp, Homo sapien
tatcaccggagataccactcggctc

SEQ ID NO: 4096358 - DNA, 25 bp, Homo sapien
ttccagtccaacaccccacgctgca

SEQ ID NO: 4096359 - DNA, 25 bp, Homo sapien
cagtcaatcacatctatcaccggag

SEQ ID NO: 4096360 - DNA, 25 bp, Homo sapien
gagagtcatacgctccagtgttttg

SEQ ID NO: 4096361 - DNA, 25 bp, Homo sapien
cctcgcagcgacataagagagtcat

SEQ ID NO: 4096362 - DNA, 25 bp, Homo sapien
ggaagtaatgtctgtccatggccac

SEQ ID NO: 4096363 - DNA, 25 bp, Homo sapien
gaaagacagttcgaggttttcacca

SEQ ID NO: 4096364 - DNA, 25 bp, Homo sapien
ctctgtcctcccttggtccaggaca

SEQ ID NO: 4096365 - DNA, 25 bp, Homo sapien
ctgtcctcccttggtccaggacata

SEQ ID NO: 4096366 - DNA, 25 bp, Homo sapien
tctgtcctcccttggtccaggacat

SEQ ID NO: 4096367 - DNA, 25 bp, Homo sapien
tgtcctcccttggtccaggacatac

SEQ ID NO: 4096368 - DNA, 25 bp, Homo sapien
gcagggaaggatttcaacagagcca

SEQ ID NO: 4096369 - DNA, 25 bp, Homo sapien
tacccgagagcagggaaggatttca

SEQ ID NO: 4096370 - DNA, 25 bp, Homo sapien
ctacccgagagcagggaaggatttc

SEQ ID NO: 4096371 - DNA, 25 bp, Homo sapien
ggaaggatttcaacagagccaccac

SEQ ID NO: 4096372 - DNA, 25 bp, Homo sapien
caggtctcagcaatgcgaaccctgt

SEQ ID NO: 4096373 - DNA, 25 bp, Homo sapien
gggctatgcttgtagaaggtttctt

SEQ ID NO: 4096374 - DNA, 25 bp, Homo sapien
gcaatgcgaaccctgttcctcaggg

SEQ ID NO: 4096375 - DNA, 25 bp, Homo sapien
ctgggctatgcttgtagaaggtttc

SEQ ID NO: 4096376 - DNA, 25 bp, Homo sapien
ctgaaattggtgatcagcttcccga

SEQ ID NO: 4096377 - DNA, 25 bp, Homo sapien
gctcagggtagacattagccagaaa

SEQ ID NO: 4096378 - DNA, 25 bp, Homo sapien
tagccagaaaccagtggaatgtccg

SEQ ID NO: 4096379 - DNA, 25 bp, Homo sapien
gttcagatgggtacagctcagggta

SEQ ID NO: 4096380 - DNA, 25 bp, Homo sapien
tgcaagcgttccatgcagtctggct

SEQ ID NO: 4096381 - DNA, 25 bp, Homo sapien
cacacaggagtgaattccagattcc

SEQ ID NO: 4096382 - DNA, 25 bp, Homo sapien
acacaggagtgaattccagattcca

SEQ ID NO: 4096383 - DNA, 25 bp, Homo sapien
cacacacacaggagtgaattccaga

SEQ ID NO: 4096384 - DNA, 25 bp, Homo sapien
cacacacaggagtgaattccagatt

SEQ ID NO: 4096385 - DNA, 25 bp, Homo sapien
caggatgtccccttctgcctggcag

SEQ ID NO: 4096386 - DNA, 25 bp, Homo sapien
aggatgtccccttctgcctggcagt

SEQ ID NO: 4096387 - DNA, 25 bp, Homo sapien
ccaggatgtccccttctgcctggca

SEQ ID NO: 4096388 - DNA, 25 bp, Homo sapien
gatgtccccttctgcctggcagtct

SEQ ID NO: 4096389 - DNA, 25 bp, Homo sapien
caaaccgagctatgtctgactgcaa

SEQ ID NO: 4096390 - DNA, 25 bp, Homo sapien
tgagagagctcagattcaaaccgag

SEQ ID NO: 4096391 - DNA, 25 bp, Homo sapien
ttatgtctgcatcccttgtgccagg

SEQ ID NO: 4096392 - DNA, 25 bp, Homo sapien
tgccaggtgtgaatgcctatcagta

SEQ ID NO: 4096393 - DNA, 25 bp, Homo sapien
tgtgggctgccaaagtgaatctcct

SEQ ID NO: 4096394 - DNA, 25 bp, Homo sapien
caggtgctgtgggctgccaaagtga

SEQ ID NO: 4096395 - DNA, 25 bp, Homo sapien
gctcctgcctgacagcaaagcacag

SEQ ID NO: 4096396 - DNA, 25 bp, Homo sapien
caaagtgaatctccttcctgctggt

SEQ ID NO: 4096397 - DNA, 25 bp, Homo sapien
ggatggccaggccttcctccgtgca

SEQ ID NO: 4096398 - DNA, 25 bp, Homo sapien
caggccttcctccgtgcagttctga

SEQ ID NO: 4096399 - DNA, 25 bp, Homo sapien
cctccgtgcagttctgaagaatcac

SEQ ID NO: 4096400 - DNA, 25 bp, Homo sapien
tcccagtgctgctggtggatggcca

SEQ ID NO: 4096401 - DNA, 25 bp, Homo sapien
ccgccatgtaaggacggggcttgct

SEQ ID NO: 4096402 - DNA, 25 bp, Homo sapien
gccatgtaaggacggggcttgcttc

SEQ ID NO: 4096403 - DNA, 25 bp, Homo sapien
ctccgccatgtaaggacggggcttg

SEQ ID NO: 4096404 - DNA, 25 bp, Homo sapien
ttgctccgccatgtaaggacggggc

SEQ ID NO: 4096405 - DNA, 25 bp, Homo sapien
cacggacgcaggtacaaatctttat

SEQ ID NO: 4096406 - DNA, 25 bp, Homo sapien
ggcgggcttttccatcacacggacg

SEQ ID NO: 4096407 - DNA, 25 bp, Homo sapien
gaaagaatgtggacaatcatcccat

SEQ ID NO: 4096408 - DNA, 25 bp, Homo sapien
tggtcaaaacgccactgctggcggg

SEQ ID NO: 4096409 - DNA, 25 bp, Homo sapien
tcacttggagctggattttgatggc

SEQ ID NO: 4096410 - DNA, 25 bp, Homo sapien
gcagccagcagtcaatgaaataagg

SEQ ID NO: 4096411 - DNA, 25 bp, Homo sapien
tgaagacaacggtacaatggatcct

SEQ ID NO: 4096412 - DNA, 25 bp, Homo sapien
caatccaagttaaggccatttgaag

SEQ ID NO: 4096413 - DNA, 25 bp, Homo sapien
tctgctccagtcagtgcaaaccctg

SEQ ID NO: 4096414 - DNA, 25 bp, Homo sapien
gaattgggccaaagtgctcttgcat

SEQ ID NO: 4096415 - DNA, 25 bp, Homo sapien
cagacagttatatgggctcagagat

SEQ ID NO: 4096416 - DNA, 25 bp, Homo sapien
tgtaacagggcatcaggagagtttc

SEQ ID NO: 4096417 - DNA, 25 bp, Homo sapien
ggcaactcttacagctaattcaggt

SEQ ID NO: 4096418 - DNA, 25 bp, Homo sapien
gaaagtcatttagctcttactagcc

SEQ ID NO: 4096419 - DNA, 25 bp, Homo sapien
gccaagtcatagcaaggaaagtcat

SEQ ID NO: 4096420 - DNA, 25 bp, Homo sapien
ccagatgagccgtgttcttcccaca

SEQ ID NO: 4096421 - DNA, 25 bp, Homo sapien
tccatgctcgccaatacagtagaag

SEQ ID NO: 4096422 - DNA, 25 bp, Homo sapien
gaagatttctaagctgaccatgtgg

SEQ ID NO: 4096423 - DNA, 25 bp, Homo sapien
tacacggtcgccatctgagaatttg

SEQ ID NO: 4096424 - DNA, 25 bp, Homo sapien
tagaagtagaccctagccacaggtg

SEQ ID NO: 4096425 - DNA, 25 bp, Homo sapien
cagccagggactgagttgacagcca

SEQ ID NO: 4096426 - DNA, 25 bp, Homo sapien
taatcgaggcaggacttgtaggtgc

SEQ ID NO: 4096427 - DNA, 25 bp, Homo sapien
taagtagagttgtgcccagcaaggc

SEQ ID NO: 4096428 - DNA, 25 bp, Homo sapien
gaattctggaaatagcacctccttg

SEQ ID NO: 4096429 - DNA, 25 bp, Homo sapien
cccctcaacaggccctggtgtgatg

SEQ ID NO: 4096430 - DNA, 25 bp, Homo sapien
cacccctcaacaggccctggtgtga

SEQ ID NO: 4096431 - DNA, 25 bp, Homo sapien
ctcaacaggccctggtgtgatgttc

SEQ ID NO: 4096432 - DNA, 25 bp, Homo sapien
cctcaacaggccctggtgtgatgtt

SEQ ID NO: 4096433 - DNA, 25 bp, Homo sapien
ctatcaacctgtcaacccatcatct

SEQ ID NO: 4096434 - DNA, 25 bp, Homo sapien
acctatcaacctgtcaacccatcat

SEQ ID NO: 4096435 - DNA, 25 bp, Homo sapien
ctgcacctatcaacctgtcaaccca

SEQ ID NO: 4096436 - DNA, 25 bp, Homo sapien
gcacctatcaacctgtcaacccatc

SEQ ID NO: 4096437 - DNA, 25 bp, Homo sapien
gagcttataaactatcaccctaggg

SEQ ID NO: 4096438 - DNA, 25 bp, Homo sapien
tgagctagctgaacagtttgggaat

SEQ ID NO: 4096439 - DNA, 25 bp, Homo sapien
ttagcatttgtcataggtactggaa

SEQ ID NO: 4096440 - DNA, 25 bp, Homo sapien
gaatgtccattgactatgagctagc

SEQ ID NO: 4096441 - DNA, 25 bp, Homo sapien
tgctgaaaagttaaaggcctttgat

SEQ ID NO: 4096442 - DNA, 25 bp, Homo sapien
gaatgaagcaaatgatgtcctaccc

SEQ ID NO: 4096443 - DNA, 25 bp, Homo sapien
cccttgatctgtgcctagaggagag

SEQ ID NO: 4096444 - DNA, 25 bp, Homo sapien
aaggcctttgataagcttcagcagc

SEQ ID NO: 4096445 - DNA, 25 bp, Homo sapien
tagacgataatagctggggtcagca

SEQ ID NO: 4096446 - DNA, 25 bp, Homo sapien
agccttggatatgccaatactgaca

SEQ ID NO: 4096447 - DNA, 25 bp, Homo sapien
tgcctcaggccatttgttttatctg

SEQ ID NO: 4096448 - DNA, 25 bp, Homo sapien
caaagtagatgtagggctggagagc

SEQ ID NO: 4096449 - DNA, 25 bp, Homo sapien
tattgcagatgtttcggtgtccagt

SEQ ID NO: 4096450 - DNA, 25 bp, Homo sapien
cctttgttggttggctcttattgca

SEQ ID NO: 4096451 - DNA, 25 bp, Homo sapien
gggcctccttggatatcagccccag

SEQ ID NO: 4096452 - DNA, 25 bp, Homo sapien
tgtccagtgtcgcatccttgggcct

SEQ ID NO: 4096453 - DNA, 25 bp, Homo sapien
ctcaggttcaaccatgagcatcgca

SEQ ID NO: 4096454 - DNA, 25 bp, Homo sapien
ggttcaaccatgagcatcgcactgt

SEQ ID NO: 4096455 - DNA, 25 bp, Homo sapien
aaccatgagcatcgcactgtgagtc

SEQ ID NO: 4096456 - DNA, 25 bp, Homo sapien
tcactcaggttcaaccatgagcatc

SEQ ID NO: 4096457 - DNA, 25 bp, Homo sapien
gagttttcgccaccaaatgaccgca

SEQ ID NO: 4096458 - DNA, 25 bp, Homo sapien
tgtgcatgccacttcgttcctggga

SEQ ID NO: 4096459 - DNA, 25 bp, Homo sapien
gaagcctggagtgccacatgtgcat

SEQ ID NO: 4096460 - DNA, 25 bp, Homo sapien
tcctcagtgctaaaaaggtgctggg

SEQ ID NO: 4096461 - DNA, 25 bp, Homo sapien
ttccaggggcctatcaatgtcatcc

SEQ ID NO: 4096462 - DNA, 25 bp, Homo sapien
tgcccttgccaatgtgagaacgccc

SEQ ID NO: 4096463 - DNA, 25 bp, Homo sapien
tatcaatgtcatccctgatccactc

SEQ ID NO: 4096464 - DNA, 25 bp, Homo sapien
aggccagaagaagccagcagttctg

SEQ ID NO: 4096465 - DNA, 25 bp, Homo sapien
tctgcctttcaaaccttgcaccaat

SEQ ID NO: 4096466 - DNA, 25 bp, Homo sapien
tctgagcttgcagccgagcatcggt

SEQ ID NO: 4096467 - DNA, 25 bp, Homo sapien
tacactgtagcgctctccagtcaca

SEQ ID NO: 4096468 - DNA, 25 bp, Homo sapien
caggaaagacggaagatgaaagcca

SEQ ID NO: 4096469 - DNA, 25 bp, Homo sapien
gcacaggtggacaagttcgaacttt

SEQ ID NO: 4096470 - DNA, 25 bp, Homo sapien
gaaaaaaggcacgtcctcttcaagc

SEQ ID NO: 4096471 - DNA, 25 bp, Homo sapien
tgaagaagtctggaagggtctttgc

SEQ ID NO: 4096472 - DNA, 25 bp, Homo sapien
ttggaagttaggaatgtccagctgc

SEQ ID NO: 4096473 - DNA, 25 bp, Homo sapien
gaagtacctgtcacatgctaggcac

SEQ ID NO: 4096474 - DNA, 25 bp, Homo sapien
cccaaggaaacaaaccaggtgatgt

SEQ ID NO: 4096475 - DNA, 25 bp, Homo sapien
taatttggctcatgagtctggcgcc

SEQ ID NO: 4096476 - DNA, 25 bp, Homo sapien
tagtggaactagaagagacagaagc

SEQ ID NO: 4096477 - DNA, 25 bp, Homo sapien
tttgaatcttagttcctccactgtg

SEQ ID NO: 4096478 - DNA, 25 bp, Homo sapien
tgtgaaatctggatcatagtacctc

SEQ ID NO: 4096479 - DNA, 25 bp, Homo sapien
tacctctttgacagggttgctgtgt

SEQ ID NO: 4096480 - DNA, 25 bp, Homo sapien
aattcttggagtggtttcagagccc

SEQ ID NO: 4096481 - DNA, 25 bp, Homo sapien
ctgtaggagaacacatcaagattga

SEQ ID NO: 4096482 - DNA, 25 bp, Homo sapien
agtcagtgactgatgataatgctgc

SEQ ID NO: 4096483 - DNA, 25 bp, Homo sapien
ggaagaaaagttgccaggttcacac

SEQ ID NO: 4096484 - DNA, 25 bp, Homo sapien
caagattgaatcctgtgttaagcag

SEQ ID NO: 4096485 - DNA, 25 bp, Homo sapien
tccagtttctataccaagccagtct

SEQ ID NO: 4096486 - DNA, 25 bp, Homo sapien
aattacttcggtatctgacaacagc

SEQ ID NO: 4096487 - DNA, 25 bp, Homo sapien
gaatggacatgttctgttcagcgtg

SEQ ID NO: 4096488 - DNA, 25 bp, Homo sapien
gcatcatctacctcagtcattagga

SEQ ID NO: 4096489 - DNA, 25 bp, Homo sapien
gctcaaggtcactcggtgaagcgaa

SEQ ID NO: 4096490 - DNA, 25 bp, Homo sapien
cagacccggccacgtttagttgcag

SEQ ID NO: 4096491 - DNA, 25 bp, Homo sapien
ttaaagcagacgataagaagcaggg

SEQ ID NO: 4096492 - DNA, 25 bp, Homo sapien
ggaattaacaagctgaccgtcgccc

SEQ ID NO: 4096493 - DNA, 25 bp, Homo sapien
gagtcattaagtatatggtcagctg

SEQ ID NO: 4096494 - DNA, 25 bp, Homo sapien
agaagtccacgagattttaggagtc

SEQ ID NO: 4096495 - DNA, 25 bp, Homo sapien
tacagcagttggaacatggacagct

SEQ ID NO: 4096496 - DNA, 25 bp, Homo sapien
cctgctattacactgagacttttgg

SEQ ID NO: 4096497 - DNA, 25 bp, Homo sapien
ctggttagagtaaggtggcgcaaag

SEQ ID NO: 4096498 - DNA, 25 bp, Homo sapien
acagagcaccgcaacaacccaggaa

SEQ ID NO: 4096499 - DNA, 25 bp, Homo sapien
tgagtgtcaatctcagtgacgcagc

SEQ ID NO: 4096500 - DNA, 25 bp, Homo sapien
agtgacgcagcctcaatacggatgg

SEQ ID NO: 4096501 - DNA, 25 bp, Homo sapien
cacttgcagttctctccatgtgatc

SEQ ID NO: 4096502 - DNA, 25 bp, Homo sapien
acacttgcagttctctccatgtgat

SEQ ID NO: 4096503 - DNA, 25 bp, Homo sapien
tttctcccttgatgaaataagttgc

SEQ ID NO: 4096504 - DNA, 25 bp, Homo sapien
tcagatgttagtgctttctcccttg

SEQ ID NO: 4096505 - DNA, 25 bp, Homo sapien
tgctttctcccttgatgaaataagt

SEQ ID NO: 4096506 - DNA, 25 bp, Homo sapien
ttctcccttgatgaaataagttgct

SEQ ID NO: 4096507 - DNA, 25 bp, Homo sapien
aaatctgtacattagaagggtaaca

SEQ ID NO: 4096508 - DNA, 25 bp, Homo sapien
tatgccctagaatgacaagtaaact

SEQ ID NO: 4096509 - DNA, 25 bp, Homo sapien
tatgctggttaacactatgccctag

SEQ ID NO: 4096510 - DNA, 25 bp, Homo sapien
ggatctcccacctcatgtaacatgt

SEQ ID NO: 4096511 - DNA, 25 bp, Homo sapien
aaaggctaacctgtccacctgggct

SEQ ID NO: 4096512 - DNA, 25 bp, Homo sapien
gacatttatttagtagaactggtat

SEQ ID NO: 4096513 - DNA, 25 bp, Homo sapien
gagaatcatcagaggtctctattac

SEQ ID NO: 4096514 - DNA, 25 bp, Homo sapien
catgtttaaaagtatgggagagttc

SEQ ID NO: 4096515 - DNA, 25 bp, Homo sapien
caaagacaagtaatgagaatcatca

SEQ ID NO: 4096516 - DNA, 25 bp, Homo sapien
cactgatgcattctccttgtctgga

SEQ ID NO: 4096517 - DNA, 25 bp, Homo sapien
tctctgaatttggtattttccacac

SEQ ID NO: 4096518 - DNA, 25 bp, Homo sapien
attttccacactgatgcattctcct

SEQ ID NO: 4096519 - DNA, 25 bp, Homo sapien
cattctccttgtctggaacagccat

SEQ ID NO: 4096520 - DNA, 25 bp, Homo sapien
tgatgctcaccttaaccacaggtaa

SEQ ID NO: 4096521 - DNA, 25 bp, Homo sapien
taccagtgcaaacgtaaaagccata

SEQ ID NO: 4096522 - DNA, 25 bp, Homo sapien
ccacaggtaacctagcttcggtgtt

SEQ ID NO: 4096523 - DNA, 25 bp, Homo sapien
atggacaacaagaaactgcagtgtg

SEQ ID NO: 4096524 - DNA, 25 bp, Homo sapien
agtcttgatcagcaacaagcaagcg

SEQ ID NO: 4096525 - DNA, 25 bp, Homo sapien
cacacaccttagctgctgacacaat

SEQ ID NO: 4096526 - DNA, 25 bp, Homo sapien
tcactgacggtgactcactggcagc

SEQ ID NO: 4096527 - DNA, 25 bp, Homo sapien
caagcggaggctcttcactgacggt

SEQ ID NO: 4096528 - DNA, 25 bp, Homo sapien
acatggctgttactaccaagctgat

SEQ ID NO: 4096529 - DNA, 25 bp, Homo sapien
cctaggtgcgcggtgaagcagtgga

SEQ ID NO: 4096530 - DNA, 25 bp, Homo sapien
acccaatgagtgagtgtatgcagaa

SEQ ID NO: 4096531 - DNA, 25 bp, Homo sapien
cagaaggagcctaggtgcgcggtga

SEQ ID NO: 4096532 - DNA, 25 bp, Homo sapien
acatccaaccatgacacaccaggca

SEQ ID NO: 4096533 - DNA, 25 bp, Homo sapien
cactcttggagccatgagttaaagc

SEQ ID NO: 4096534 - DNA, 25 bp, Homo sapien
tggagccatgagttaaagcccttac

SEQ ID NO: 4096535 - DNA, 25 bp, Homo sapien
gatgagcactcttggagccatgagt

SEQ ID NO: 4096536 - DNA, 25 bp, Homo sapien
ttgcaggatgagcactcttggagcc

SEQ ID NO: 4096537 - DNA, 25 bp, Homo sapien
gcaggagggtggttcgtatatttca

SEQ ID NO: 4096538 - DNA, 25 bp, Homo sapien
tctctcttgttctagcagtctggga

SEQ ID NO: 4096539 - DNA, 25 bp, Homo sapien
tttcactgccaattctatcactctc

SEQ ID NO: 4096540 - DNA, 25 bp, Homo sapien
ggagcatattgaaaacccaccaacc

SEQ ID NO: 4096541 - DNA, 25 bp, Homo sapien
tctgtaggattgtgttgagccctgt

SEQ ID NO: 4096542 - DNA, 25 bp, Homo sapien
tagtaggtaatgacaggcagcttct

SEQ ID NO: 4096543 - DNA, 25 bp, Homo sapien
gagccctgtggtgaaataagagtta

SEQ ID NO: 4096544 - DNA, 25 bp, Homo sapien
gaatcccgagtgaagagctttccag

SEQ ID NO: 4096545 - DNA, 25 bp, Homo sapien
atgaactggattgaggaaagaggca

SEQ ID NO: 4096546 - DNA, 25 bp, Homo sapien
gaaagaggcaatggactcaaaggca

SEQ ID NO: 4096547 - DNA, 25 bp, Homo sapien
caaaggcagggtacagctctgaagt

SEQ ID NO: 4096548 - DNA, 25 bp, Homo sapien
acttcttaggcgatgaactggattg

SEQ ID NO: 4096549 - DNA, 25 bp, Homo sapien
ctgcaatcaacacgaggtttctaga

SEQ ID NO: 4096550 - DNA, 25 bp, Homo sapien
cgcaggctgagggtcaaagaagaac

SEQ ID NO: 4096551 - DNA, 25 bp, Homo sapien
cacgaggtttctagaggcatccgca

SEQ ID NO: 4096552 - DNA, 25 bp, Homo sapien
tttctagaggcatccgcaggctgag

SEQ ID NO: 4096553 - DNA, 25 bp, Homo sapien
caggagttcgctggtattttttgca

SEQ ID NO: 4096554 - DNA, 25 bp, Homo sapien
cactgtagaatagttttattgttcc

SEQ ID NO: 4096555 - DNA, 25 bp, Homo sapien
tctgaggagatctgctgcgtgccgc

SEQ ID NO: 4096556 - DNA, 25 bp, Homo sapien
agcagagggttaattccgactcctc

SEQ ID NO: 4096557 - DNA, 25 bp, Homo sapien
ctggaatgtcaaacatatttggtca

SEQ ID NO: 4096558 - DNA, 25 bp, Homo sapien
ggaatgtcaaacatatttggtcaca

SEQ ID NO: 4096559 - DNA, 25 bp, Homo sapien
tggaatgtcaaacatatttggtcac

SEQ ID NO: 4096560 - DNA, 25 bp, Homo sapien
caaactgcatgcaatcttctcagga

SEQ ID NO: 4096561 - DNA, 25 bp, Homo sapien
gagttccgcattgatttgtgtagtc

SEQ ID NO: 4096562 - DNA, 25 bp, Homo sapien
tctgttttgtaacatgcaaactgca

SEQ ID NO: 4096563 - DNA, 25 bp, Homo sapien
cgtgatgtatggcttgagttccgca

SEQ ID NO: 4096564 - DNA, 25 bp, Homo sapien
ttggaggtgggccacaaatatagaa

SEQ ID NO: 4096565 - DNA, 25 bp, Homo sapien
cttatctccttctccgttattcttc

SEQ ID NO: 4096566 - DNA, 25 bp, Homo sapien
aagtctgtcattggaggtgggccac

SEQ ID NO: 4096567 - DNA, 25 bp, Homo sapien
ggtgggccacaaatatagaacaaag

SEQ ID NO: 4096568 - DNA, 25 bp, Homo sapien
atgtgttctttgggtacatggttgt

SEQ ID NO: 4096569 - DNA, 25 bp, Homo sapien
tgtgttctttgggtacatggttgtt

SEQ ID NO: 4096570 - DNA, 25 bp, Homo sapien
ctctttattttttctgcctttgtct

SEQ ID NO: 4096571 - DNA, 25 bp, Homo sapien
tattttttctgcctttgtctgcctc

SEQ ID NO: 4096572 - DNA, 25 bp, Homo sapien
tttattttttctgcctttgtctgcc

SEQ ID NO: 4096573 - DNA, 25 bp, Homo sapien
ctttattttttctgcctttgtctgc

SEQ ID NO: 4096574 - DNA, 25 bp, Homo sapien
gcagtttcatcagagcagctttggg

SEQ ID NO: 4096575 - DNA, 25 bp, Homo sapien
gaatctcaactggagctcctaggtc

SEQ ID NO: 4096576 - DNA, 25 bp, Homo sapien
tcctacagcgttaaggcagacagcc

SEQ ID NO: 4096577 - DNA, 25 bp, Homo sapien
ttatcatttaagtctgccagctggc

SEQ ID NO: 4096578 - DNA, 25 bp, Homo sapien
tcaggtcccatgaatcatatctgtt

SEQ ID NO: 4096579 - DNA, 25 bp, Homo sapien
gaatcatatctgttcaagcccacaa

SEQ ID NO: 4096580 - DNA, 25 bp, Homo sapien
gctagagtcaccttcaggtcccatg

SEQ ID NO: 4096581 - DNA, 25 bp, Homo sapien
tcaaaactgggcagaagctagagtc

SEQ ID NO: 4096582 - DNA, 25 bp, Homo sapien
gcaagaggacattctcggctagacc

SEQ ID NO: 4096583 - DNA, 25 bp, Homo sapien
ctatcatgtaggtaggtaggcagca

SEQ ID NO: 4096584 - DNA, 25 bp, Homo sapien
accagttagtagacgtgccccttga

SEQ ID NO: 4096585 - DNA, 25 bp, Homo sapien
tctctgacagtagcaggcacacagc

SEQ ID NO: 4096586 - DNA, 25 bp, Homo sapien
tattagcagcatgacacagctagcc

SEQ ID NO: 4096587 - DNA, 25 bp, Homo sapien
cagttgccaaatcaatagccactca

SEQ ID NO: 4096588 - DNA, 25 bp, Homo sapien
aaggatatagaggaaccctgtcttg

SEQ ID NO: 4096589 - DNA, 25 bp, Homo sapien
gagaactttttgcacgttaagagcc

SEQ ID NO: 4096590 - DNA, 25 bp, Homo sapien
cctccagagcatgggtgcagccttt

SEQ ID NO: 4096591 - DNA, 25 bp, Homo sapien
gacatagttgtataggtacccacag

SEQ ID NO: 4096592 - DNA, 25 bp, Homo sapien
tatggcacattaggaggtatctaca

SEQ ID NO: 4096593 - DNA, 25 bp, Homo sapien
taagatgaaataacggctctcaggt

SEQ ID NO: 4096594 - DNA, 25 bp, Homo sapien
caactgtcttggttctgacgggcag

SEQ ID NO: 4096595 - DNA, 25 bp, Homo sapien
cctggttgtcaactgtagggactgg

SEQ ID NO: 4096596 - DNA, 25 bp, Homo sapien
aagccctgagccaggaattggtgga

SEQ ID NO: 4096597 - DNA, 25 bp, Homo sapien
catgtgggagtacaaagggaaccaa

SEQ ID NO: 4096598 - DNA, 25 bp, Homo sapien
gaaatgtggcattcctacgatgttg

SEQ ID NO: 4096599 - DNA, 25 bp, Homo sapien
ctgaatccagattctttcactggga

SEQ ID NO: 4096600 - DNA, 25 bp, Homo sapien
gcattcctacgatgttgtggctgaa

SEQ ID NO: 4096601 - DNA, 25 bp, Homo sapien
caggtggttatcaggtgattgaaat

SEQ ID NO: 4096602 - DNA, 25 bp, Homo sapien
ttaattgacatttatgttggctgta

SEQ ID NO: 4096603 - DNA, 25 bp, Homo sapien
aattgacatttatgttggctgtatt

SEQ ID NO: 4096604 - DNA, 25 bp, Homo sapien
ttgacatttatgttggctgtatttg

SEQ ID NO: 4096605 - DNA, 25 bp, Homo sapien
taattgacatttatgttggctgtat

SEQ ID NO: 4096606 - DNA, 25 bp, Homo sapien
tcacttcagggcatcgggactggct

SEQ ID NO: 4096607 - DNA, 25 bp, Homo sapien
gatgcaactggcgaaccttggagag

SEQ ID NO: 4096608 - DNA, 25 bp, Homo sapien
gagggaatgctgattgtcttgacca

SEQ ID NO: 4096609 - DNA, 25 bp, Homo sapien
tatatcgtccagaaagtattaaggc

SEQ ID NO: 4096610 - DNA, 25 bp, Homo sapien
ccctgggctacaaaccaaggctgct

SEQ ID NO: 4096611 - DNA, 25 bp, Homo sapien
cctccagggagcattcgggtcaaat

SEQ ID NO: 4096612 - DNA, 25 bp, Homo sapien
cccagtgttagaatgcaagaggtca

SEQ ID NO: 4096613 - DNA, 25 bp, Homo sapien
caagaggtcaggttattctagccct

SEQ ID NO: 4096614 - DNA, 25 bp, Homo sapien
tgcctgacctgctcggctcctcact

SEQ ID NO: 4096615 - DNA, 25 bp, Homo sapien
gcttggttcctcatgttctttggac

SEQ ID NO: 4096616 - DNA, 25 bp, Homo sapien
tgaggccacattctcggcagggcct

SEQ ID NO: 4096617 - DNA, 25 bp, Homo sapien
actcctgcattcctcacgcttggtt

SEQ ID NO: 4096618 - DNA, 25 bp, Homo sapien
catctcaggctgctaaaacgggaca

SEQ ID NO: 4096619 - DNA, 25 bp, Homo sapien
tattgtaagatacgagtcgcccctc

SEQ ID NO: 4096620 - DNA, 25 bp, Homo sapien
gagtgtatccaccaagcagattgtc

SEQ ID NO: 4096621 - DNA, 25 bp, Homo sapien
tatcatctttagaggcagctccagg

SEQ ID NO: 4096622 - DNA, 25 bp, Homo sapien
agacagactacgtgcccctgctgaa

SEQ ID NO: 4096623 - DNA, 25 bp, Homo sapien
tgctgaactcgctggcggcctatgg

SEQ ID NO: 4096624 - DNA, 25 bp, Homo sapien
gtgctaccaactcccgtcgtcaaga

SEQ ID NO: 4096625 - DNA, 25 bp, Homo sapien
ggcagctcacctgtgtgctaccaac

SEQ ID NO: 4096626 - DNA, 25 bp, Homo sapien
cagacagttcttggctcctggtcct

SEQ ID NO: 4096627 - DNA, 25 bp, Homo sapien
aggacagacagttcttggctcctgg

SEQ ID NO: 4096628 - DNA, 25 bp, Homo sapien
gacagttcttggctcctggtcctgg

SEQ ID NO: 4096629 - DNA, 25 bp, Homo sapien
gacagacagttcttggctcctggtc

SEQ ID NO: 4096630 - DNA, 25 bp, Homo sapien
cacgtgagattgaaccttcagctct

SEQ ID NO: 4096631 - DNA, 25 bp, Homo sapien
gccagaaattaacacgtgagattga

SEQ ID NO: 4096632 - DNA, 25 bp, Homo sapien
gaaattaacacgtgagattgaacct

SEQ ID NO: 4096633 - DNA, 25 bp, Homo sapien
taacacgtgagattgaaccttcagc

SEQ ID NO: 4096634 - DNA, 25 bp, Homo sapien
tagaggcaaactgtccccagtcact

SEQ ID NO: 4096635 - DNA, 25 bp, Homo sapien
gaaaggcaaggtctcagtcctgtgg

SEQ ID NO: 4096636 - DNA, 25 bp, Homo sapien
caggtatggagaacaccccagaagt

SEQ ID NO: 4096637 - DNA, 25 bp, Homo sapien
ctgtggatgtcaggaatagaggcaa

SEQ ID NO: 4096638 - DNA, 25 bp, Homo sapien
tacaacctggacgagaagggtgcca

SEQ ID NO: 4096639 - DNA, 25 bp, Homo sapien
gaagataaagtagaagatgagtgat

SEQ ID NO: 4096640 - DNA, 25 bp, Homo sapien
ggaatctaactaatttagcaaaatg

SEQ ID NO: 4096641 - DNA, 25 bp, Homo sapien
caacaaatttttagatagatggaaa

SEQ ID NO: 4096642 - DNA, 25 bp, Homo sapien
aataccagtgagctttgttcaggca

SEQ ID NO: 4096643 - DNA, 25 bp, Homo sapien
tatgggcaatggttcaatagtcact

SEQ ID NO: 4096644 - DNA, 25 bp, Homo sapien
tagcccctatgcatagtgctgaagt

SEQ ID NO: 4096645 - DNA, 25 bp, Homo sapien
aaactgttgcgaccagatgcttcca

SEQ ID NO: 4096646 - DNA, 25 bp, Homo sapien
gattatactgggcacacctggataa

SEQ ID NO: 4096647 - DNA, 25 bp, Homo sapien
tgtatgccccggctcaacacatgag

SEQ ID NO: 4096648 - DNA, 25 bp, Homo sapien
caaactcagggtgtctagaatagaa

SEQ ID NO: 4096649 - DNA, 25 bp, Homo sapien
tgttaccgaccattgccagcttctg

SEQ ID NO: 4096650 - DNA, 25 bp, Homo sapien
agtccttgctgtcggccacttccct

SEQ ID NO: 4096651 - DNA, 25 bp, Homo sapien
tcctctgcactagcagctgccacca

SEQ ID NO: 4096652 - DNA, 25 bp, Homo sapien
cctctgcactagcagctgccaccag

SEQ ID NO: 4096653 - DNA, 25 bp, Homo sapien
ccaccagtccttgctgtcggccact

SEQ ID NO: 4096654 - DNA, 25 bp, Homo sapien
gagtgccgctatagccagcgtgtgc

SEQ ID NO: 4096655 - DNA, 25 bp, Homo sapien
tcgagtgccgctatagccagcgtgt

SEQ ID NO: 4096656 - DNA, 25 bp, Homo sapien
tgccgctatagccagcgtgtgctga

SEQ ID NO: 4096657 - DNA, 25 bp, Homo sapien
cctcgagtgccgctatagccagcgt

SEQ ID NO: 4096658 - DNA, 25 bp, Homo sapien
aggtagaggtgaagtggcccttctt

SEQ ID NO: 4096659 - DNA, 25 bp, Homo sapien
agggagaggtagaggtgaagtggcc

SEQ ID NO: 4096660 - DNA, 25 bp, Homo sapien
agaggtagaggtgaagtggcccttc

SEQ ID NO: 4096661 - DNA, 25 bp, Homo sapien
ctagggagaggtagaggtgaagtgg

SEQ ID NO: 4096662 - DNA, 25 bp, Homo sapien
ggcttcccaagtggcacagacagag

SEQ ID NO: 4096663 - DNA, 25 bp, Homo sapien
tgggctccactggatgggaaccatg

SEQ ID NO: 4096664 - DNA, 25 bp, Homo sapien
gaacagtgataccaggcatagccct

SEQ ID NO: 4096665 - DNA, 25 bp, Homo sapien
gccaggctgactgaatgtgagattc

SEQ ID NO: 4096666 - DNA, 25 bp, Homo sapien
actctattatgttgtcctgattaca

SEQ ID NO: 4096667 - DNA, 25 bp, Homo sapien
gaaagcctaagttgtctaaaatgag

SEQ ID NO: 4096668 - DNA, 25 bp, Homo sapien
aacaacatctctagccggccagcgt

SEQ ID NO: 4096669 - DNA, 25 bp, Homo sapien
cggccagcgtgcctgtccctccctc

SEQ ID NO: 4096670 - DNA, 25 bp, Homo sapien
cagggcaacatctcgagctaggacg

SEQ ID NO: 4096671 - DNA, 25 bp, Homo sapien
tccggcctggagcaaataagggcta

SEQ ID NO: 4096672 - DNA, 25 bp, Homo sapien
tcctcatggcgtaggcagggttcct

SEQ ID NO: 4096673 - DNA, 25 bp, Homo sapien
tagagaaaccgcatgtaccaggacc

SEQ ID NO: 4096674 - DNA, 25 bp, Homo sapien
gtggcagctttgtgttgcttaacca

SEQ ID NO: 4096675 - DNA, 25 bp, Homo sapien
taaccacagtcagaactgcagtgcc

SEQ ID NO: 4096676 - DNA, 25 bp, Homo sapien
tgtgctattgcatacgtggtcccga

SEQ ID NO: 4096677 - DNA, 25 bp, Homo sapien
tcagcttctagaggacaggagccct

SEQ ID NO: 4096678 - DNA, 25 bp, Homo sapien
gaggtggactgcaggacttgtaaca

SEQ ID NO: 4096679 - DNA, 25 bp, Homo sapien
tcagaagccctatcagagctgggtc

SEQ ID NO: 4096680 - DNA, 25 bp, Homo sapien
tgtcccgtggtaggtctcagtgcag

SEQ ID NO: 4096681 - DNA, 25 bp, Homo sapien
tagaggaccccaaataggattggcc

SEQ ID NO: 4096682 - DNA, 25 bp, Homo sapien
catgtctcattttaggcatgattta

SEQ ID NO: 4096683 - DNA, 25 bp, Homo sapien
cagcaattttgataagactttgaga

SEQ ID NO: 4096684 - DNA, 25 bp, Homo sapien
tttgagagtacaagacaatggtggc

SEQ ID NO: 4096685 - DNA, 25 bp, Homo sapien
caatggtggcagaacctacccacaa

SEQ ID NO: 4096686 - DNA, 25 bp, Homo sapien
aaactgtcttctgtagtggctgtac

SEQ ID NO: 4096687 - DNA, 25 bp, Homo sapien
tcctcaccggcattaagtattgtca

SEQ ID NO: 4096688 - DNA, 25 bp, Homo sapien
cccaccacagtgaacgagagttgct

SEQ ID NO: 4096689 - DNA, 25 bp, Homo sapien
gctgtactattttgcgtccccacca

SEQ ID NO: 4096690 - DNA, 25 bp, Homo sapien
tacaggccaagaatgtctctactgc

SEQ ID NO: 4096691 - DNA, 25 bp, Homo sapien
aactccttgagtcagggaccagcca

SEQ ID NO: 4096692 - DNA, 25 bp, Homo sapien
gacttagagtcttaggttccaccat

SEQ ID NO: 4096693 - DNA, 25 bp, Homo sapien
cagcagactctagggtacaggtgaa

SEQ ID NO: 4096694 - DNA, 25 bp, Homo sapien
gcagtcaggcggtgttaattcagcc

SEQ ID NO: 4096695 - DNA, 25 bp, Homo sapien
gaagatggacgttcctgttcaagca

SEQ ID NO: 4096696 - DNA, 25 bp, Homo sapien
cagaggcctgagagctagcagctga

SEQ ID NO: 4096697 - DNA, 25 bp, Homo sapien
ttaagggctcaatgtgataacaggg

SEQ ID NO: 4096698 - DNA, 25 bp, Homo sapien
tgtaactgaaacctactctggcctg

SEQ ID NO: 4096699 - DNA, 25 bp, Homo sapien
aaagtgtgctggctacaatgcccag

SEQ ID NO: 4096700 - DNA, 25 bp, Homo sapien
tacatgaaaggctcgatgacacact

SEQ ID NO: 4096701 - DNA, 25 bp, Homo sapien
tctcaatggcaaacagactggatca

SEQ ID NO: 4096702 - DNA, 25 bp, Homo sapien
tgggctagggaacctgtagagtcaa

SEQ ID NO: 4096703 - DNA, 25 bp, Homo sapien
ctaaaagcacagaggaggttgggct

SEQ ID NO: 4096704 - DNA, 25 bp, Homo sapien
cattgccttcgttttatgctaaaag

SEQ ID NO: 4096705 - DNA, 25 bp, Homo sapien
tacagtctagtatgtgagcagaaag

SEQ ID NO: 4096706 - DNA, 25 bp, Homo sapien
gctatgatgctattgtggttgaaca

SEQ ID NO: 4096707 - DNA, 25 bp, Homo sapien
ctattgtggttgaacaatggacagt

SEQ ID NO: 4096708 - DNA, 25 bp, Homo sapien
gtttccacagaagatagcaaaacca

SEQ ID NO: 4096709 - DNA, 25 bp, Homo sapien
caaaaccatacagggctatgatgct

SEQ ID NO: 4096710 - DNA, 25 bp, Homo sapien
cacttccggaaaggaggcatgctgg

SEQ ID NO: 4096711 - DNA, 25 bp, Homo sapien
ggaattcacagtccttgggtggccc

SEQ ID NO: 4096712 - DNA, 25 bp, Homo sapien
gacagtgagcggtttggacgccaac

SEQ ID NO: 4096713 - DNA, 25 bp, Homo sapien
gttagagcacatgagcgaccacttc

SEQ ID NO: 4096714 - DNA, 25 bp, Homo sapien
taagtattatgggttcagccccagg

SEQ ID NO: 4096715 - DNA, 25 bp, Homo sapien
aatgaggctttattatctggcaaca

SEQ ID NO: 4096716 - DNA, 25 bp, Homo sapien
gccccaggaaacactactgcagttt

SEQ ID NO: 4096717 - DNA, 25 bp, Homo sapien
tgagttcaggagtgtacaaggttcc

SEQ ID NO: 4096718 - DNA, 25 bp, Homo sapien
tgtagcgagtggtgctatggcccat

SEQ ID NO: 4096719 - DNA, 25 bp, Homo sapien
tttgcatttgtgcttgactgtagca

SEQ ID NO: 4096720 - DNA, 25 bp, Homo sapien
aattcatttgcatttgtgcttgact

SEQ ID NO: 4096721 - DNA, 25 bp, Homo sapien
gactgtagcaggctgtagcgagtgg

SEQ ID NO: 4096722 - DNA, 25 bp, Homo sapien
gaggctcttcgttccaacactgttt

SEQ ID NO: 4096723 - DNA, 25 bp, Homo sapien
gctgctgatgctttggaggctcttc

SEQ ID NO: 4096724 - DNA, 25 bp, Homo sapien
tgatgctttggaggctcttcgttcc

SEQ ID NO: 4096725 - DNA, 25 bp, Homo sapien
gctttggaggctcttcgttccaaca

SEQ ID NO: 4096726 - DNA, 25 bp, Homo sapien
caaccccttggaggtgcatgaagag

SEQ ID NO: 4096727 - DNA, 25 bp, Homo sapien
tgagcaagacactggatggaccgga

SEQ ID NO: 4096728 - DNA, 25 bp, Homo sapien
gatcacgcgtcactggagaatgaga

SEQ ID NO: 4096729 - DNA, 25 bp, Homo sapien
tctactgccaacagcaccgaggatg

SEQ ID NO: 4096730 - DNA, 25 bp, Homo sapien
aactgtaagagtcgtggcccctaga

SEQ ID NO: 4096731 - DNA, 25 bp, Homo sapien
tccaaggccatatgtgatccggtcc

SEQ ID NO: 4096732 - DNA, 25 bp, Homo sapien
tgcattggaatcactcggaggactt

SEQ ID NO: 4096733 - DNA, 25 bp, Homo sapien
tctgcagagtaggtcccaaataggt

SEQ ID NO: 4096734 - DNA, 25 bp, Homo sapien
ctttgtgaaacaaggcccatgggta

SEQ ID NO: 4096735 - DNA, 25 bp, Homo sapien
gctctcatccagctaggaaaaccag

SEQ ID NO: 4096736 - DNA, 25 bp, Homo sapien
ttaagagatggactgaaaacccacg

SEQ ID NO: 4096737 - DNA, 25 bp, Homo sapien
gttttttgggacctacattgcctca

SEQ ID NO: 4096738 - DNA, 25 bp, Homo sapien
catttcacatggtatcaactgggct

SEQ ID NO: 4096739 - DNA, 25 bp, Homo sapien
gctaggttctaagagcaagcatccc

SEQ ID NO: 4096740 - DNA, 25 bp, Homo sapien
tggttgaggccgtcataaggaccca

SEQ ID NO: 4096741 - DNA, 25 bp, Homo sapien
tgtaggcctctcgacagactgctta

SEQ ID NO: 4096742 - DNA, 25 bp, Homo sapien
ctctgaagaggtcccgggtgcaaaa

SEQ ID NO: 4096743 - DNA, 25 bp, Homo sapien
taccgctctatttttcaaggtgaga

SEQ ID NO: 4096744 - DNA, 25 bp, Homo sapien
gagagagaccgagaccaaataccta

SEQ ID NO: 4096745 - DNA, 25 bp, Homo sapien
tctataccatagcacatacttcgga

SEQ ID NO: 4096746 - DNA, 25 bp, Homo sapien
gggatccggaaggtacttggagctg

SEQ ID NO: 4096747 - DNA, 25 bp, Homo sapien
aacagggaacagtgtacatgagggc

SEQ ID NO: 4096748 - DNA, 25 bp, Homo sapien
gagtgttaccagcagaagtggccgg

SEQ ID NO: 4096749 - DNA, 25 bp, Homo sapien
gggtgtctttggggatgcggctgtg

SEQ ID NO: 4096750 - DNA, 25 bp, Homo sapien
gaaactcatcccagagttcattaag

SEQ ID NO: 4096751 - DNA, 25 bp, Homo sapien
gattgctgttcctccttagaccacc

SEQ ID NO: 4096752 - DNA, 25 bp, Homo sapien
tgaaggctacatcttggaattagat

SEQ ID NO: 4096753 - DNA, 25 bp, Homo sapien
gaaaactgatcttcacaatgaaggc

SEQ ID NO: 4096754 - DNA, 25 bp, Homo sapien
gcagccgccggtttattcccagaga

SEQ ID NO: 4096755 - DNA, 25 bp, Homo sapien
tgattgatgcgtgctactgtgatgg

SEQ ID NO: 4096756 - DNA, 25 bp, Homo sapien
catgtgggtcgttattttggattcc

SEQ ID NO: 4096757 - DNA, 25 bp, Homo sapien
gctgcccctcgtttctggtgtggta

SEQ ID NO: 4096758 - DNA, 25 bp, Homo sapien
gccatcctgatcaagaaaaccgaca

SEQ ID NO: 4096759 - DNA, 25 bp, Homo sapien
ttcgtgcagcccacccatgagcggg

SEQ ID NO: 4096760 - DNA, 25 bp, Homo sapien
gagcacatctttagagccatcctga

SEQ ID NO: 4096761 - DNA, 25 bp, Homo sapien
tcctggagctgtaccagcagggctt

SEQ ID NO: 4096762 - DNA, 25 bp, Homo sapien
gaacctcctcaagtctttcctgtgg

SEQ ID NO: 4096763 - DNA, 25 bp, Homo sapien
aaaatgaggctcaagtgacgtctgc

SEQ ID NO: 4096764 - DNA, 25 bp, Homo sapien
tgttaagataaaaccaggctccgga

SEQ ID NO: 4096765 - DNA, 25 bp, Homo sapien
acagcggcgttggttgttgacgtca

SEQ ID NO: 4096766 - DNA, 25 bp, Homo sapien
tagcagagcttattccttgtcaaag

SEQ ID NO: 4096767 - DNA, 25 bp, Homo sapien
ggcactggcccatattgtcatggca

SEQ ID NO: 4096768 - DNA, 25 bp, Homo sapien
tattgagccccactgtaatgtctat

SEQ ID NO: 4096769 - DNA, 25 bp, Homo sapien
tatatgcttcccagttaaaccacct

SEQ ID NO: 4096770 - DNA, 25 bp, Homo sapien
atagaaagacccttaattgtgttcg

SEQ ID NO: 4096771 - DNA, 25 bp, Homo sapien
caaggtgactgccaaaattccccaa

SEQ ID NO: 4096772 - DNA, 25 bp, Homo sapien
ttccaaggtgactgccaaaattccc

SEQ ID NO: 4096773 - DNA, 25 bp, Homo sapien
ttgtgttcgctgagacacctccctt

SEQ ID NO: 4096774 - DNA, 25 bp, Homo sapien
ggatgagaggacgatgcaagttaaa

SEQ ID NO: 4096775 - DNA, 25 bp, Homo sapien
ttgcaagagcaggacgtgctaggca

SEQ ID NO: 4096776 - DNA, 25 bp, Homo sapien
tgttctttgttgcaagagcaggacg

SEQ ID NO: 4096777 - DNA, 25 bp, Homo sapien
ggacgatgcaagttaaaagtgttct

SEQ ID NO: 4096778 - DNA, 25 bp, Homo sapien
cgcaggtaacaggttggaagaaact

SEQ ID NO: 4096779 - DNA, 25 bp, Homo sapien
ctggcagtcttgtttggcagacagg

SEQ ID NO: 4096780 - DNA, 25 bp, Homo sapien
gaggtatgattttgaaattcgcagg

SEQ ID NO: 4096781 - DNA, 25 bp, Homo sapien
tctgcctgtaaagaaggttggtttc

SEQ ID NO: 4096782 - DNA, 25 bp, Homo sapien
tggaatgttgtggatggcactggag

SEQ ID NO: 4096783 - DNA, 25 bp, Homo sapien
tgtgtggaatgttgtggatggcact

SEQ ID NO: 4096784 - DNA, 25 bp, Homo sapien
aatgttgtggatggcactggagcag

SEQ ID NO: 4096785 - DNA, 25 bp, Homo sapien
ctgtgtggaatgttgtggatggcac

SEQ ID NO: 4096786 - DNA, 25 bp, Homo sapien
gaatgagtcaagtgtctggatccag

SEQ ID NO: 4096787 - DNA, 25 bp, Homo sapien
gagatgaggatgagtggcgggcagc

SEQ ID NO: 4096788 - DNA, 25 bp, Homo sapien
catgtttgaggatcacgaatgagtc

SEQ ID NO: 4096789 - DNA, 25 bp, Homo sapien
gatcacgaatgagtcaagtgtctgg

SEQ ID NO: 4096790 - DNA, 25 bp, Homo sapien
caccagccgtgggatataaatatag

SEQ ID NO: 4096791 - DNA, 25 bp, Homo sapien
cagacagcatctaagggagccctac

SEQ ID NO: 4096792 - DNA, 25 bp, Homo sapien
taccggaaactcgagacagaatgca

SEQ ID NO: 4096793 - DNA, 25 bp, Homo sapien
gagccacataaattaagccgacgga

SEQ ID NO: 4096794 - DNA, 25 bp, Homo sapien
accaggcatctgtggaaggtcgtgc

SEQ ID NO: 4096795 - DNA, 25 bp, Homo sapien
atgctccccagtgcggcatcctgga

SEQ ID NO: 4096796 - DNA, 25 bp, Homo sapien
ggaaggtcgtgcacctgcctttgca

SEQ ID NO: 4096797 - DNA, 25 bp, Homo sapien
taaccagtggcccagatttgtccag

SEQ ID NO: 4096798 - DNA, 25 bp, Homo sapien
ggcccaaggccgtcctctgtggaag

SEQ ID NO: 4096799 - DNA, 25 bp, Homo sapien
caaggccgtcctctgtggaagtcct

SEQ ID NO: 4096800 - DNA, 25 bp, Homo sapien
aaaaagaagtagcttcatgttcaag

SEQ ID NO: 4096801 - DNA, 25 bp, Homo sapien
tcatgttcaaggtgagcaagcatcc

SEQ ID NO: 4096802 - DNA, 25 bp, Homo sapien
tagcaccctgtgtaacttgggattg

SEQ ID NO: 4096803 - DNA, 25 bp, Homo sapien
tgaggtaggttggacagatattgaa

SEQ ID NO: 4096804 - DNA, 25 bp, Homo sapien
tttagcaaacaagcagttggactcc

SEQ ID NO: 4096805 - DNA, 25 bp, Homo sapien
gaggtagtgtatgtgaaactttcca

SEQ ID NO: 4096806 - DNA, 25 bp, Homo sapien
tccatttcgaacaggaagtcacgtt

SEQ ID NO: 4096807 - DNA, 25 bp, Homo sapien
acctggtatcatggagtctggccca

SEQ ID NO: 4096808 - DNA, 25 bp, Homo sapien
tgcctcagctttcggtcgtgtaaca

SEQ ID NO: 4096809 - DNA, 25 bp, Homo sapien
tatgtggacatttggcaccccacag

SEQ ID NO: 4096810 - DNA, 25 bp, Homo sapien
caagagacgaggaggtgccatgctc

SEQ ID NO: 4096811 - DNA, 25 bp, Homo sapien
caggagcttccaaacattgtgcaag

SEQ ID NO: 4096812 - DNA, 25 bp, Homo sapien
tttcgtgagggatccgcccctatga

SEQ ID NO: 4096813 - DNA, 25 bp, Homo sapien
ttacctcgaaggaggacagcaagcc

SEQ ID NO: 4096814 - DNA, 25 bp, Homo sapien
ctcaatcaaacgagcttcctggggg

SEQ ID NO: 4096815 - DNA, 25 bp, Homo sapien
tcaatcaaacgagcttcctgggggt

SEQ ID NO: 4096816 - DNA, 25 bp, Homo sapien
caatcaaacgagcttcctgggggtg

SEQ ID NO: 4096817 - DNA, 25 bp, Homo sapien
gccaatatcgggacttttcctgtgc

SEQ ID NO: 4096818 - DNA, 25 bp, Homo sapien
tgtgctgaatatagactcctccttt

SEQ ID NO: 4096819 - DNA, 25 bp, Homo sapien
tggatggctgccacttagtcccagt

SEQ ID NO: 4096820 - DNA, 25 bp, Homo sapien
ggccaagtctgagcttgagtatgtg

SEQ ID NO: 4096821 - DNA, 25 bp, Homo sapien
cgcagcttgcactgaggtcttccga

SEQ ID NO: 4096822 - DNA, 25 bp, Homo sapien
gtcttccgactccatgtgccctgtg

SEQ ID NO: 4096823 - DNA, 25 bp, Homo sapien
taagggtcatgctgcccatgacctg

SEQ ID NO: 4096824 - DNA, 25 bp, Homo sapien
gagtctctgagggtccggagccaca

SEQ ID NO: 4096825 - DNA, 25 bp, Homo sapien
aagtctagagatgttttttgttctg

SEQ ID NO: 4096826 - DNA, 25 bp, Homo sapien
gcctgacaaatagggtggtcttgtc

SEQ ID NO: 4096827 - DNA, 25 bp, Homo sapien
atagggagcctgacaaatagggtgg

SEQ ID NO: 4096828 - DNA, 25 bp, Homo sapien
ggagcctgacaaatagggtggtctt

SEQ ID NO: 4096829 - DNA, 25 bp, Homo sapien
cttcatggcagaaaggctgttctgc

SEQ ID NO: 4096830 - DNA, 25 bp, Homo sapien
tcttcatggcagaaaggctgttctg

SEQ ID NO: 4096831 - DNA, 25 bp, Homo sapien
ttcatggcagaaaggctgttctgcc

SEQ ID NO: 4096832 - DNA, 25 bp, Homo sapien
gggaggctcctcctcgtacagtcct

SEQ ID NO: 4096833 - DNA, 25 bp, Homo sapien
ggtgctttacaggggagcccaacat

SEQ ID NO: 4096834 - DNA, 25 bp, Homo sapien
tgctttacaggggagcccaacatcg

SEQ ID NO: 4096835 - DNA, 25 bp, Homo sapien
ctttacaggggagcccaacatcgta

SEQ ID NO: 4096836 - DNA, 25 bp, Homo sapien
gggtgctttacaggggagcccaaca

SEQ ID NO: 4096837 - DNA, 25 bp, Homo sapien
taagacattcccatgacacgcatta

SEQ ID NO: 4096838 - DNA, 25 bp, Homo sapien
gattttcgggatgttttcttcgaca

SEQ ID NO: 4096839 - DNA, 25 bp, Homo sapien
aatttcgaggatcattccacactgc

SEQ ID NO: 4096840 - DNA, 25 bp, Homo sapien
gcattttacaaattcccatctttgt

SEQ ID NO: 4096841 - DNA, 25 bp, Homo sapien
cacgactctgagtgctggtgagtac

SEQ ID NO: 4096842 - DNA, 25 bp, Homo sapien
cgtgatgaaaaacggcctgggaata

SEQ ID NO: 4096843 - DNA, 25 bp, Homo sapien
cagctgctgaaatgggttgcggatt

SEQ ID NO: 4096844 - DNA, 25 bp, Homo sapien
tatgaataccgcttcctggagttca

SEQ ID NO: 4096845 - DNA, 25 bp, Homo sapien
tgaatgtcctccctcttgtagtagc

SEQ ID NO: 4096846 - DNA, 25 bp, Homo sapien
gaatgagtgacttggcgagcctttg

SEQ ID NO: 4096847 - DNA, 25 bp, Homo sapien
tagtagcctaacctccttgagggca

SEQ ID NO: 4096848 - DNA, 25 bp, Homo sapien
taacagtgcacatcttgacgggcta

SEQ ID NO: 4096849 - DNA, 25 bp, Homo sapien
tctcagtgggccagaaccaaagagc

SEQ ID NO: 4096850 - DNA, 25 bp, Homo sapien
gaaaatcaggtgacattctgcagtg

SEQ ID NO: 4096851 - DNA, 25 bp, Homo sapien
aaatcactctcagtgggccagaacc

SEQ ID NO: 4096852 - DNA, 25 bp, Homo sapien
agtgggccagaaccaaagagctgga

SEQ ID NO: 4096853 - DNA, 25 bp, Homo sapien
gggacgctgggtggtgtcagtgagt

SEQ ID NO: 4096854 - DNA, 25 bp, Homo sapien
tagggacgctgggtggtgtcagtga

SEQ ID NO: 4096855 - DNA, 25 bp, Homo sapien
gacgctgggtggtgtcagtgagttt

SEQ ID NO: 4096856 - DNA, 25 bp, Homo sapien
ctagggacgctgggtggtgtcagtg

SEQ ID NO: 4096857 - DNA, 25 bp, Homo sapien
ttctctagactcaagggacgccagg

SEQ ID NO: 4096858 - DNA, 25 bp, Homo sapien
gagagtccccagcactgaaaacggg

SEQ ID NO: 4096859 - DNA, 25 bp, Homo sapien
caaggttgtagaaccaggcacgctc

SEQ ID NO: 4096860 - DNA, 25 bp, Homo sapien
caagaaccgcgtggaggccaaggtt

SEQ ID NO: 4096861 - DNA, 25 bp, Homo sapien
tccttgggacgcctggatcttgggc

SEQ ID NO: 4096862 - DNA, 25 bp, Homo sapien
agaggcacttcggagcagcctgttg

SEQ ID NO: 4096863 - DNA, 25 bp, Homo sapien
cctggagcgatgtagggagaggcac

SEQ ID NO: 4096864 - DNA, 25 bp, Homo sapien
tccctgcaggttgctctttgccggg

SEQ ID NO: 4096865 - DNA, 25 bp, Homo sapien
acggaacacgctgcctcagggagcc

SEQ ID NO: 4096866 - DNA, 25 bp, Homo sapien
ttcctcccgggacggaacacgctgc

SEQ ID NO: 4096867 - DNA, 25 bp, Homo sapien
ctctgtatggcacaaactttcctcc

SEQ ID NO: 4096868 - DNA, 25 bp, Homo sapien
gcgccgcctcctctgtatggcacaa

SEQ ID NO: 4096869 - DNA, 25 bp, Homo sapien
gccggagggacagacacacgaccac

SEQ ID NO: 4096870 - DNA, 25 bp, Homo sapien
gatcgccggagggacagacacacga

SEQ ID NO: 4096871 - DNA, 25 bp, Homo sapien
gagggacagacacacgaccacgcgg

SEQ ID NO: 4096872 - DNA, 25 bp, Homo sapien
gggacagacacacgaccacgcggcg

SEQ ID NO: 4096873 - DNA, 25 bp, Homo sapien
tgctgccatcaacatattccctgtg

SEQ ID NO: 4096874 - DNA, 25 bp, Homo sapien
atatgctgcgggacactggttctgc

SEQ ID NO: 4096875 - DNA, 25 bp, Homo sapien
cactgtgtcctaccagttgctgcca

SEQ ID NO: 4096876 - DNA, 25 bp, Homo sapien
aaaggagatatgctgcgggacactg

SEQ ID NO: 4096877 - DNA, 25 bp, Homo sapien
ggtctataatgctcctcctgcacaa

SEQ ID NO: 4096878 - DNA, 25 bp, Homo sapien
tactgaaggtctataatgctcctcc

SEQ ID NO: 4096879 - DNA, 25 bp, Homo sapien
gaaggtctataatgctcctcctgca

SEQ ID NO: 4096880 - DNA, 25 bp, Homo sapien
agcgtcaatgggaaggatgaacagc

SEQ ID NO: 4096881 - DNA, 25 bp, Homo sapien
tctggtaatcactttccgattttcc

SEQ ID NO: 4096882 - DNA, 25 bp, Homo sapien
tatttttcctgtctggtcttatccc

SEQ ID NO: 4096883 - DNA, 25 bp, Homo sapien
gtctggtcttatcccacttctggta

SEQ ID NO: 4096884 - DNA, 25 bp, Homo sapien
tcccacttctggtaatcactttccg

SEQ ID NO: 4096885 - DNA, 25 bp, Homo sapien
cttcagaccttaggtccacatcatt

SEQ ID NO: 4096886 - DNA, 25 bp, Homo sapien
catccttcagaccttaggtccacat

SEQ ID NO: 4096887 - DNA, 25 bp, Homo sapien
tcatccttcagaccttaggtccaca

SEQ ID NO: 4096888 - DNA, 25 bp, Homo sapien
tccttcagaccttaggtccacatca

SEQ ID NO: 4096889 - DNA, 25 bp, Homo sapien
ccgcgtagcctggatgcagagcact

SEQ ID NO: 4096890 - DNA, 25 bp, Homo sapien
catggaacagagttactatcacgct

SEQ ID NO: 4096891 - DNA, 25 bp, Homo sapien
tatcacgctttggaaggatgtctct

SEQ ID NO: 4096892 - DNA, 25 bp, Homo sapien
gatgcacggctcctgtaacatgcag

SEQ ID NO: 4096893 - DNA, 25 bp, Homo sapien
catagtcctaaatagctgctctagc

SEQ ID NO: 4096894 - DNA, 25 bp, Homo sapien
tggcggctccgtggtcatcaagtac

SEQ ID NO: 4096895 - DNA, 25 bp, Homo sapien
ggtcatcaagtacccaagatttcta

SEQ ID NO: 4096896 - DNA, 25 bp, Homo sapien
tatagtccagagtttgtatggcggc

SEQ ID NO: 4096897 - DNA, 25 bp, Homo sapien
aaatgtataaagatccactgctttc

SEQ ID NO: 4096898 - DNA, 25 bp, Homo sapien
tataaagatccactgctttcctaag

SEQ ID NO: 4096899 - DNA, 25 bp, Homo sapien
actgctttcctaagtcgaggttcag

SEQ ID NO: 4096900 - DNA, 25 bp, Homo sapien
ctgtgctaggatgcattctttgcag

SEQ ID NO: 4096901 - DNA, 25 bp, Homo sapien
aaaaatttgagccaagaaaccatgg

SEQ ID NO: 4096902 - DNA, 25 bp, Homo sapien
tggttagtgcccatatccagcctgg

SEQ ID NO: 4096903 - DNA, 25 bp, Homo sapien
tttcaaacgaatgaaccagagatgg

SEQ ID NO: 4096904 - DNA, 25 bp, Homo sapien
taaagacgtatgtgcttgtcagtgg

SEQ ID NO: 4096905 - DNA, 25 bp, Homo sapien
tcagctctatctgtgctaaccaagt

SEQ ID NO: 4096906 - DNA, 25 bp, Homo sapien
gaagtgattgcaacaccaatggcta

SEQ ID NO: 4096907 - DNA, 25 bp, Homo sapien
ggatgctgacattcttaaccttgga

SEQ ID NO: 4096908 - DNA, 25 bp, Homo sapien
gactaattatgaatgcaactctgcc

SEQ ID NO: 4096909 - DNA, 25 bp, Homo sapien
taattcctctacagaaagtggtttg

SEQ ID NO: 4096910 - DNA, 25 bp, Homo sapien
tttcagcaacaggagcattcatgcc

SEQ ID NO: 4096911 - DNA, 25 bp, Homo sapien
gcctgtctcgatctagaattcctga

SEQ ID NO: 4096912 - DNA, 25 bp, Homo sapien
aatacactttatctgcgtgcagctg

SEQ ID NO: 4096913 - DNA, 25 bp, Homo sapien
gaaagaacaacttgagaggtggcca

SEQ ID NO: 4096914 - DNA, 25 bp, Homo sapien
tatcagattggtaggatctgaattc

SEQ ID NO: 4096915 - DNA, 25 bp, Homo sapien
tccttcccctatgtgagctcttgta

SEQ ID NO: 4096916 - DNA, 25 bp, Homo sapien
cacattgatcattcgcaggctgcct

SEQ ID NO: 4096917 - DNA, 25 bp, Homo sapien
tttttggtgctataacattctgaca

SEQ ID NO: 4096918 - DNA, 25 bp, Homo sapien
tgttggagtgaagcatttaaaagag

SEQ ID NO: 4096919 - DNA, 25 bp, Homo sapien
aattattccaatatgaccttaagga

SEQ ID NO: 4096920 - DNA, 25 bp, Homo sapien
caagagggctttattacacctcaga

SEQ ID NO: 4096921 - DNA, 25 bp, Homo sapien
cactaccaataggtaatgtattgtg

SEQ ID NO: 4096922 - DNA, 25 bp, Homo sapien
taatgtattgtgtagttactgatac

SEQ ID NO: 4096923 - DNA, 25 bp, Homo sapien
gcagcttcgaaccactaccaatagg

SEQ ID NO: 4096924 - DNA, 25 bp, Homo sapien
attcaaagcagcttcgaaccactac

SEQ ID NO: 4096925 - DNA, 25 bp, Homo sapien
tctgcctgtgtctcatttatatcaa

SEQ ID NO: 4096926 - DNA, 25 bp, Homo sapien
ttggtcccctagatgtaacaaaggc

SEQ ID NO: 4096927 - DNA, 25 bp, Homo sapien
aatcaaacgttcagcttttacagcc

SEQ ID NO: 4096928 - DNA, 25 bp, Homo sapien
gaaagtgacacactaggggctcccc

SEQ ID NO: 4096929 - DNA, 25 bp, Homo sapien
tcatcagcacagtgcctcagcattc

SEQ ID NO: 4096930 - DNA, 25 bp, Homo sapien
catcagcacagtgcctcagcattct

SEQ ID NO: 4096931 - DNA, 25 bp, Homo sapien
acttctgccaaaggtacagtccctc

SEQ ID NO: 4096932 - DNA, 25 bp, Homo sapien
tgctacttctgccaaaggtacagtc

SEQ ID NO: 4096933 - DNA, 25 bp, Homo sapien
cacattgcagaaacttggtaggcct

SEQ ID NO: 4096934 - DNA, 25 bp, Homo sapien
ctacatgcaaagtggaatcctggat

SEQ ID NO: 4096935 - DNA, 25 bp, Homo sapien
tacccattggtgaggtgtgcccaga

SEQ ID NO: 4096936 - DNA, 25 bp, Homo sapien
taagacatactggtaccatgtaccc

SEQ ID NO: 4096937 - DNA, 25 bp, Homo sapien
gccagtaacgatttctggatcctct

SEQ ID NO: 4096938 - DNA, 25 bp, Homo sapien
tattaggacaggtttcagagctgcc

SEQ ID NO: 4096939 - DNA, 25 bp, Homo sapien
cctggaggatacagcgtgtgccagt

SEQ ID NO: 4096940 - DNA, 25 bp, Homo sapien
gccttgtagtgtagcttctttatta

SEQ ID NO: 4096941 - DNA, 25 bp, Homo sapien
tcctgagtcccaacctgcttgcttt

SEQ ID NO: 4096942 - DNA, 25 bp, Homo sapien
tgtaggagccaacaggattgaacag

SEQ ID NO: 4096943 - DNA, 25 bp, Homo sapien
tctctcgtatccaatgtggtccagc

SEQ ID NO: 4096944 - DNA, 25 bp, Homo sapien
ccaacaggattgaacagtgtttctc

SEQ ID NO: 4096945 - DNA, 25 bp, Homo sapien
cagggagcctccaagcaatcagggt

SEQ ID NO: 4096946 - DNA, 25 bp, Homo sapien
gaggtcttgccctttgtcaccccaa

SEQ ID NO: 4096947 - DNA, 25 bp, Homo sapien
cccagcctgataaatgatctgtgag

SEQ ID NO: 4096948 - DNA, 25 bp, Homo sapien
aacagaagccctgtttccacagcgg

SEQ ID NO: 4096949 - DNA, 25 bp, Homo sapien
agcctgtggtaaaggtctggtagcc

SEQ ID NO: 4096950 - DNA, 25 bp, Homo sapien
tctggtagcccaggtattttggccc

SEQ ID NO: 4096951 - DNA, 25 bp, Homo sapien
aatccgaagcccttgtgtgccgcaa

SEQ ID NO: 4096952 - DNA, 25 bp, Homo sapien
tgtgccgcaacatgaagatggagtt

SEQ ID NO: 4096953 - DNA, 25 bp, Homo sapien
gtccaggaagttgagagtggctgta

SEQ ID NO: 4096954 - DNA, 25 bp, Homo sapien
ggaccccaggggagctatgagtcca

SEQ ID NO: 4096955 - DNA, 25 bp, Homo sapien
gtgtgggcacagacaatttcttgtt

SEQ ID NO: 4096956 - DNA, 25 bp, Homo sapien
tgaaaaacaatcagccccataaagt

SEQ ID NO: 4096957 - DNA, 25 bp, Homo sapien
gagaaggcgagccagcaatgaactc

SEQ ID NO: 4096958 - DNA, 25 bp, Homo sapien
caccaagcagcagtggcgtagtgct

SEQ ID NO: 4096959 - DNA, 25 bp, Homo sapien
gtggcgtagtgctgacagtgtttct

SEQ ID NO: 4096960 - DNA, 25 bp, Homo sapien
aggcgagccagcaatgaactcagtg

SEQ ID NO: 4096961 - DNA, 25 bp, Homo sapien
gagtctcctaaagaccgtcaggtca

SEQ ID NO: 4096962 - DNA, 25 bp, Homo sapien
aaagttctcagaagcgtcctcagga

SEQ ID NO: 4096963 - DNA, 25 bp, Homo sapien
ggacaaactgtacctagcagctgct

SEQ ID NO: 4096964 - DNA, 25 bp, Homo sapien
taaaactgaggtgtggctgcttggt

SEQ ID NO: 4096965 - DNA, 25 bp, Homo sapien
tgtgcagaggttcccacgtaaagtc

SEQ ID NO: 4096966 - DNA, 25 bp, Homo sapien
tcttataagggtgatttgctctgcc

SEQ ID NO: 4096967 - DNA, 25 bp, Homo sapien
ttccattggttaccaggctgctccc

SEQ ID NO: 4096968 - DNA, 25 bp, Homo sapien
cctcttaagaggtcaccatagcata

SEQ ID NO: 4096969 - DNA, 25 bp, Homo sapien
tctttccatctgtccggaagattga

SEQ ID NO: 4096970 - DNA, 25 bp, Homo sapien
tacttattgagttatgtcagatgtg

SEQ ID NO: 4096971 - DNA, 25 bp, Homo sapien
tcccagcacagtttggcaatgattg

SEQ ID NO: 4096972 - DNA, 25 bp, Homo sapien
gagggcccattatcgctttgaatta

SEQ ID NO: 4096973 - DNA, 25 bp, Homo sapien
tagtgacgggtaacgaaccacagac

SEQ ID NO: 4096974 - DNA, 25 bp, Homo sapien
caatcgtgtgtagtggatccatggc

SEQ ID NO: 4096975 - DNA, 25 bp, Homo sapien
ttttaatagcacttgatcaccgggc

SEQ ID NO: 4096976 - DNA, 25 bp, Homo sapien
gatgtccaccagtttcagtgctgaa

SEQ ID NO: 4096977 - DNA, 25 bp, Homo sapien
ctgtcagtgtgctcccattcactgt

SEQ ID NO: 4096978 - DNA, 25 bp, Homo sapien
tgtcagtgtgctcccattcactgtc

SEQ ID NO: 4096979 - DNA, 25 bp, Homo sapien
agctttgccacaggcaatcttccaa

SEQ ID NO: 4096980 - DNA, 25 bp, Homo sapien
tagctgctagttctcctgcagctcc

SEQ ID NO: 4096981 - DNA, 25 bp, Homo sapien
catttatgcatgtgagtcgtggggg

SEQ ID NO: 4096982 - DNA, 25 bp, Homo sapien
ctccacttccaatattactgggacc

SEQ ID NO: 4096983 - DNA, 25 bp, Homo sapien
ttcctttttggagcccatacttctg

SEQ ID NO: 4096984 - DNA, 25 bp, Homo sapien
tttttggagcccatacttctgtcct

SEQ ID NO: 4096985 - DNA, 25 bp, Homo sapien
ttggagcccatacttctgtcctgca

SEQ ID NO: 4096986 - DNA, 25 bp, Homo sapien
tggagcccatacttctgtcctgcat

SEQ ID NO: 4096987 - DNA, 25 bp, Homo sapien
ctggcattttttcataagcctccat

SEQ ID NO: 4096988 - DNA, 25 bp, Homo sapien
aggcaaataagatagaaggtctgcc

SEQ ID NO: 4096989 - DNA, 25 bp, Homo sapien
gtaaaggcaaataagatagaaggtc

SEQ ID NO: 4096990 - DNA, 25 bp, Homo sapien
ggagacagcagatggtaaaggcaaa

SEQ ID NO: 4096991 - DNA, 25 bp, Homo sapien
agacagcagatggtaaaggcaaata

SEQ ID NO: 4096992 - DNA, 25 bp, Homo sapien
cttgtaagtcacctgtcccaacatc

SEQ ID NO: 4096993 - DNA, 25 bp, Homo sapien
gttagtgatcagaatctctaatgcc

SEQ ID NO: 4096994 - DNA, 25 bp, Homo sapien
tttgttagtgatcagaatctctaat

SEQ ID NO: 4096995 - DNA, 25 bp, Homo sapien
tgtaagccttgtaagtcacctgtcc

SEQ ID NO: 4096996 - DNA, 25 bp, Homo sapien
tggtggccaatcaaaccgggaccag

SEQ ID NO: 4096997 - DNA, 25 bp, Homo sapien
cctcttggtggccaatcaaaccggg

SEQ ID NO: 4096998 - DNA, 25 bp, Homo sapien
aaccgggaccagcaatggcatggca

SEQ ID NO: 4096999 - DNA, 25 bp, Homo sapien
aatcaaaccgggaccagcaatggca

SEQ ID NO: 4097000 - DNA, 25 bp, Homo sapien
gatttatcattgagaccttcccgat

SEQ ID NO: 4097001 - DNA, 25 bp, Homo sapien
acctcaaagccgagtggacgggagc

SEQ ID NO: 4097002 - DNA, 25 bp, Homo sapien
gattcccctaccagggatgccggct

SEQ ID NO: 4097003 - DNA, 25 bp, Homo sapien
ccagagctgctgcaactgtcagtca

SEQ ID NO: 4097004 - DNA, 25 bp, Homo sapien
tgctgtctcctcccgagctcggcgc

SEQ ID NO: 4097005 - DNA, 25 bp, Homo sapien
tgtctcctcccgagctcggcgctgc

SEQ ID NO: 4097006 - DNA, 25 bp, Homo sapien
gctgtctcctcccgagctcggcgct

SEQ ID NO: 4097007 - DNA, 25 bp, Homo sapien
ctgtctcctcccgagctcggcgctg

SEQ ID NO: 4097008 - DNA, 25 bp, Homo sapien
ctcagagccccgttaaggcccgcgg

SEQ ID NO: 4097009 - DNA, 25 bp, Homo sapien
tgccgcgtgccgagctctgtcacgt

SEQ ID NO: 4097010 - DNA, 25 bp, Homo sapien
gggtatgacaatcgccgtgcggccc

SEQ ID NO: 4097011 - DNA, 25 bp, Homo sapien
gacgcgtgggtctctccggacccta

SEQ ID NO: 4097012 - DNA, 25 bp, Homo sapien
cgaggtaacggggcgcccacgtcag

SEQ ID NO: 4097013 - DNA, 25 bp, Homo sapien
aaaacacgccccaacacacgcgcct

SEQ ID NO: 4097014 - DNA, 25 bp, Homo sapien
gaaaacacgccccaacacacgcgcc

SEQ ID NO: 4097015 - DNA, 25 bp, Homo sapien
aggaaaacacgccccaacacacgcg

SEQ ID NO: 4097016 - DNA, 25 bp, Homo sapien
ggaaaacacgccccaacacacgcgc

SEQ ID NO: 4097017 - DNA, 25 bp, Homo sapien
tgtttgtttcgagctctcgccttgc

SEQ ID NO: 4097018 - DNA, 25 bp, Homo sapien
tcgccttgcgcacggttaaagtcgc

SEQ ID NO: 4097019 - DNA, 25 bp, Homo sapien
aagtcgcggcggcagaattatcgga

SEQ ID NO: 4097020 - DNA, 25 bp, Homo sapien
gaattatcggaagattcctgcaggg

SEQ ID NO: 4097021 - DNA, 25 bp, Homo sapien
cctggtagggctagcccgggcttcg

SEQ ID NO: 4097022 - DNA, 25 bp, Homo sapien
ttcgtccccggacacgccgaggctg

SEQ ID NO: 4097023 - DNA, 25 bp, Homo sapien
gttggaaaccccgccgctgtcatag

SEQ ID NO: 4097024 - DNA, 25 bp, Homo sapien
gcccgcccgtggacgaggcgacctc

SEQ ID NO: 4097025 - DNA, 25 bp, Homo sapien
cgcccggcttgctctcccgggggag

SEQ ID NO: 4097026 - DNA, 25 bp, Homo sapien
tttcaaacatgaccccaatgggctg

SEQ ID NO: 4097027 - DNA, 25 bp, Homo sapien
gaatcatggtgcaaagggcatcccc

SEQ ID NO: 4097028 - DNA, 25 bp, Homo sapien
tgagacgctccatccatatacaggc

SEQ ID NO: 4097029 - DNA, 25 bp, Homo sapien
gggcatcccctcgatagtgacagat

SEQ ID NO: 4097030 - DNA, 25 bp, Homo sapien
tgagagccaccaaataagccaaccc

SEQ ID NO: 4097031 - DNA, 25 bp, Homo sapien
ttcaggattactggccagcagactt

SEQ ID NO: 4097032 - DNA, 25 bp, Homo sapien
caaattgacaactgtgcgggcagtc

SEQ ID NO: 4097033 - DNA, 25 bp, Homo sapien
gcgggcagtcaacgcatcaaatgtt

SEQ ID NO: 4097034 - DNA, 25 bp, Homo sapien
caggtggatctggactattcttgcc

SEQ ID NO: 4097035 - DNA, 25 bp, Homo sapien
gaaagtcattaatgcagtcctgctg

SEQ ID NO: 4097036 - DNA, 25 bp, Homo sapien
taataggctccctgtatgctgtcgc

SEQ ID NO: 4097037 - DNA, 25 bp, Homo sapien
gaagatggttaatggtgccctggct

SEQ ID NO: 4097038 - DNA, 25 bp, Homo sapien
ggtggtggttataaagatcatgtta

SEQ ID NO: 4097039 - DNA, 25 bp, Homo sapien
aaaggtggtggttataaagatcatg

SEQ ID NO: 4097040 - DNA, 25 bp, Homo sapien
ctgattaatagaaaggtggtggtta

SEQ ID NO: 4097041 - DNA, 25 bp, Homo sapien
taaattagtgatattctgggaattt

SEQ ID NO: 4097042 - DNA, 25 bp, Homo sapien
cttaaagaacagttcaatctggacc

SEQ ID NO: 4097043 - DNA, 25 bp, Homo sapien
cttacttaaagaacagttcaatctg

SEQ ID NO: 4097044 - DNA, 25 bp, Homo sapien
ttcaatctggacccttcacaatcaa

SEQ ID NO: 4097045 - DNA, 25 bp, Homo sapien
tacttaaagaacagttcaatctgga

SEQ ID NO: 4097046 - DNA, 25 bp, Homo sapien
taaagggaatcgtgcacaaagaact

SEQ ID NO: 4097047 - DNA, 25 bp, Homo sapien
gaaaactccccaaatctgatgacaa

SEQ ID NO: 4097048 - DNA, 25 bp, Homo sapien
gaggaaacccacacattggatgtac

SEQ ID NO: 4097049 - DNA, 25 bp, Homo sapien
aataggagttccacaatgaaaggag

SEQ ID NO: 4097050 - DNA, 25 bp, Homo sapien
aagggatgacgattttgtttaacat

SEQ ID NO: 4097051 - DNA, 25 bp, Homo sapien
catttgtagcataatattatggagc

SEQ ID NO: 4097052 - DNA, 25 bp, Homo sapien
taaaggtagtgctaaaagggatgac

SEQ ID NO: 4097053 - DNA, 25 bp, Homo sapien
cagtttacaccatattgtgcatcag

SEQ ID NO: 4097054 - DNA, 25 bp, Homo sapien
aggtggcagcggtgtcttccctgcc

SEQ ID NO: 4097055 - DNA, 25 bp, Homo sapien
tttcctgagcagcaaccactgtaaa

SEQ ID NO: 4097056 - DNA, 25 bp, Homo sapien
ctgcccggtgatggagcacgtcaca

SEQ ID NO: 4097057 - DNA, 25 bp, Homo sapien
ttgcagtccttcactcaaatttcct

SEQ ID NO: 4097058 - DNA, 25 bp, Homo sapien
agttttaggaaatgtttagcttgct

SEQ ID NO: 4097059 - DNA, 25 bp, Homo sapien
tccagctaaatttctcctaaacaat

SEQ ID NO: 4097060 - DNA, 25 bp, Homo sapien
tataaacagtcctatcgccagattc

SEQ ID NO: 4097061 - DNA, 25 bp, Homo sapien
ctttgctttaatactgtggtcaagg

SEQ ID NO: 4097062 - DNA, 25 bp, Homo sapien
tgggaaccagggcttcgataaggag

SEQ ID NO: 4097063 - DNA, 25 bp, Homo sapien
ggaaccagggcttcgataaggagcc

SEQ ID NO: 4097064 - DNA, 25 bp, Homo sapien
accagggcttcgataaggagcccat

SEQ ID NO: 4097065 - DNA, 25 bp, Homo sapien
gaaccagggcttcgataaggagccc

SEQ ID NO: 4097066 - DNA, 25 bp, Homo sapien
tatcaaacagatacacatggcactc

SEQ ID NO: 4097067 - DNA, 25 bp, Homo sapien
caaaccacagagtttatcaaacaga

SEQ ID NO: 4097068 - DNA, 25 bp, Homo sapien
ctgaaagccaccaaactccacctca

SEQ ID NO: 4097069 - DNA, 25 bp, Homo sapien
ggcactctgggtggcctgaaagcca

SEQ ID NO: 4097070 - DNA, 25 bp, Homo sapien
cagcaaatcttatgcggccagcaca

SEQ ID NO: 4097071 - DNA, 25 bp, Homo sapien
gcaggtgggtgcttcatctgaattg

SEQ ID NO: 4097072 - DNA, 25 bp, Homo sapien
gaattggtcaaccatccatagaaag

SEQ ID NO: 4097073 - DNA, 25 bp, Homo sapien
catagaaagccgcaacagcaaatct

SEQ ID NO: 4097074 - DNA, 25 bp, Homo sapien
ttctttttagtaacaggcatctgtt

SEQ ID NO: 4097075 - DNA, 25 bp, Homo sapien
caggcatctgttggctaacaaaggg

SEQ ID NO: 4097076 - DNA, 25 bp, Homo sapien
taacaaagggatccgatgtgatggt

SEQ ID NO: 4097077 - DNA, 25 bp, Homo sapien
gagaaaagtagtgaaacgtatgaca

SEQ ID NO: 4097078 - DNA, 25 bp, Homo sapien
gaaagctggtgaacaaggtgcgctc

SEQ ID NO: 4097079 - DNA, 25 bp, Homo sapien
ttctgtggaattccgaagcgtccgc

SEQ ID NO: 4097080 - DNA, 25 bp, Homo sapien
caaaagtttctacataggtcggttg

SEQ ID NO: 4097081 - DNA, 25 bp, Homo sapien
tccgctaggcccaatgaagcactgg

SEQ ID NO: 4097082 - DNA, 25 bp, Homo sapien
ccaccccatggatgtgatgaaatac

SEQ ID NO: 4097083 - DNA, 25 bp, Homo sapien
gatgaaatactctccaaaagtgcaa

SEQ ID NO: 4097084 - DNA, 25 bp, Homo sapien
gcaggcagaggatattccgtttcta

SEQ ID NO: 4097085 - DNA, 25 bp, Homo sapien
tgctggatgatttagaaaggaggac

SEQ ID NO: 4097086 - DNA, 25 bp, Homo sapien
agagacagtccaatgaatacaaggg

SEQ ID NO: 4097087 - DNA, 25 bp, Homo sapien
taccagatatcgaaaaaccttgtga

SEQ ID NO: 4097088 - DNA, 25 bp, Homo sapien
cttggtatgcaagcctgttaagaaa

SEQ ID NO: 4097089 - DNA, 25 bp, Homo sapien
gacatatcttgtccctgtatgggaa

SEQ ID NO: 4097090 - DNA, 25 bp, Homo sapien
ggccaaattacctgacagatctaaa

SEQ ID NO: 4097091 - DNA, 25 bp, Homo sapien
gtagcactcaggaaaatttatagcc

SEQ ID NO: 4097092 - DNA, 25 bp, Homo sapien
gatcttgtattaggccacagagtag

SEQ ID NO: 4097093 - DNA, 25 bp, Homo sapien
aaaccactgagatggatatccaaac

SEQ ID NO: 4097094 - DNA, 25 bp, Homo sapien
acaaggtagtaaaatcattctgtac

SEQ ID NO: 4097095 - DNA, 25 bp, Homo sapien
gcattatatacaagctagacaaaag

SEQ ID NO: 4097096 - DNA, 25 bp, Homo sapien
catcctgttaagctgccctcggtaa

SEQ ID NO: 4097097 - DNA, 25 bp, Homo sapien
ttatttcgcaaaagatgcttccaac

SEQ ID NO: 4097098 - DNA, 25 bp, Homo sapien
gcagaattcagagggaacaagccag

SEQ ID NO: 4097099 - DNA, 25 bp, Homo sapien
cgcagagataggagcgtggaccacc

SEQ ID NO: 4097100 - DNA, 25 bp, Homo sapien
gagactaagaggcaagaggcacatg

SEQ ID NO: 4097101 - DNA, 25 bp, Homo sapien
catgatattacaacagggaagcctg

SEQ ID NO: 4097102 - DNA, 25 bp, Homo sapien
gaagagacactgtagtgggacatct

SEQ ID NO: 4097103 - DNA, 25 bp, Homo sapien
tgggacatctggttgaaaaagttct

SEQ ID NO: 4097104 - DNA, 25 bp, Homo sapien
aacacagatgggatatggtattgac

SEQ ID NO: 4097105 - DNA, 25 bp, Homo sapien
cttcttacacctaaagaattacagg

SEQ ID NO: 4097106 - DNA, 25 bp, Homo sapien
gctctgttcggtagccacagggcta

SEQ ID NO: 4097107 - DNA, 25 bp, Homo sapien
gatgcccactgggttatgcacatga

SEQ ID NO: 4097108 - DNA, 25 bp, Homo sapien
cagaggttaaatagtacccaggcag

SEQ ID NO: 4097109 - DNA, 25 bp, Homo sapien
cagggcaaggtgagtgtctccagca

SEQ ID NO: 4097110 - DNA, 25 bp, Homo sapien
ttctccaatctcagctcttgcctct

SEQ ID NO: 4097111 - DNA, 25 bp, Homo sapien
ttggacactctaattcagattctcc

SEQ ID NO: 4097112 - DNA, 25 bp, Homo sapien
aattcagattctccaatctcagctc

SEQ ID NO: 4097113 - DNA, 25 bp, Homo sapien
ctttggacactctaattcagattct

SEQ ID NO: 4097114 - DNA, 25 bp, Homo sapien
cataatactcacatgcattaaccat

SEQ ID NO: 4097115 - DNA, 25 bp, Homo sapien
gcataatactcacatgcattaacca

SEQ ID NO: 4097116 - DNA, 25 bp, Homo sapien
ctgtctttttccgttccctcttctg

SEQ ID NO: 4097117 - DNA, 25 bp, Homo sapien
gctgctgaatgagactgtctttttc

SEQ ID NO: 4097118 - DNA, 25 bp, Homo sapien
gaatgagactgtctttttccgttcc

SEQ ID NO: 4097119 - DNA, 25 bp, Homo sapien
gttccctcttctgttttgtaccatc

SEQ ID NO: 4097120 - DNA, 25 bp, Homo sapien
taaattacaggttcattgtccggcc

SEQ ID NO: 4097121 - DNA, 25 bp, Homo sapien
tatatcctgtgatgtcggagggacc

SEQ ID NO: 4097122 - DNA, 25 bp, Homo sapien
tgaacccgtctatggagagccagcc

SEQ ID NO: 4097123 - DNA, 25 bp, Homo sapien
tattggcgctgaagaaggagacctc

SEQ ID NO: 4097124 - DNA, 25 bp, Homo sapien
agttgttacgatcttcttcagaacc

SEQ ID NO: 4097125 - DNA, 25 bp, Homo sapien
tgtgttatcgggccccagaaagcgg

SEQ ID NO: 4097126 - DNA, 25 bp, Homo sapien
gctccttgaatgacaccaccgcatt

SEQ ID NO: 4097127 - DNA, 25 bp, Homo sapien
tcgctgagatttaggaccactaggg

SEQ ID NO: 4097128 - DNA, 25 bp, Homo sapien
tgtagactggccatgacacaggagt

SEQ ID NO: 4097129 - DNA, 25 bp, Homo sapien
caggaagacacactttaggcatgta

SEQ ID NO: 4097130 - DNA, 25 bp, Homo sapien
gctgtccgagacctttagtacattt

SEQ ID NO: 4097131 - DNA, 25 bp, Homo sapien
tatatttagagttacgggctgtccg

SEQ ID NO: 4097132 - DNA, 25 bp, Homo sapien
cagaaggtggcccaagtaggtgtca

SEQ ID NO: 4097133 - DNA, 25 bp, Homo sapien
ggcacttacaaacaaacccatgtct

SEQ ID NO: 4097134 - DNA, 25 bp, Homo sapien
tttttccagctcatgaccagggaca

SEQ ID NO: 4097135 - DNA, 25 bp, Homo sapien
ttagcacaccttactgccagaaggt

SEQ ID NO: 4097136 - DNA, 25 bp, Homo sapien
tcattaccaagcagcacaaccatgg

SEQ ID NO: 4097137 - DNA, 25 bp, Homo sapien
gtgctcaggcaacgataacagtctc

SEQ ID NO: 4097138 - DNA, 25 bp, Homo sapien
tgacgtagcatgcttgcctcacggg

SEQ ID NO: 4097139 - DNA, 25 bp, Homo sapien
taaactgagtgtggttagcacagcc

SEQ ID NO: 4097140 - DNA, 25 bp, Homo sapien
ttaaacctgactttatgaaatggag

SEQ ID NO: 4097141 - DNA, 25 bp, Homo sapien
ctttaaacctgactttatgaaatgg

SEQ ID NO: 4097142 - DNA, 25 bp, Homo sapien
tgaactttaaacctgactttatgaa

SEQ ID NO: 4097143 - DNA, 25 bp, Homo sapien
actttaaacctgactttatgaaatg

SEQ ID NO: 4097144 - DNA, 25 bp, Homo sapien
ctgaaagattattgctgtagaggtc

SEQ ID NO: 4097145 - DNA, 25 bp, Homo sapien
tgtgcgctacaattaaacccagctc

SEQ ID NO: 4097146 - DNA, 25 bp, Homo sapien
ggtctttggccagctgtgcgctaca

SEQ ID NO: 4097147 - DNA, 25 bp, Homo sapien
ctttccatctcacatggggagagca

SEQ ID NO: 4097148 - DNA, 25 bp, Homo sapien
tgcagtatacacctggccctaacca

SEQ ID NO: 4097149 - DNA, 25 bp, Homo sapien
ggtgcagtatacacctggccctaac

SEQ ID NO: 4097150 - DNA, 25 bp, Homo sapien
aaatggtgcagtatacacctggccc

SEQ ID NO: 4097151 - DNA, 25 bp, Homo sapien
aatggtgcagtatacacctggccct

SEQ ID NO: 4097152 - DNA, 25 bp, Homo sapien
cctgctcaacacagatgtggctact

SEQ ID NO: 4097153 - DNA, 25 bp, Homo sapien
gcacttgtagtgtaatggtatccat

SEQ ID NO: 4097154 - DNA, 25 bp, Homo sapien
tattctgaagctacagccctttggc

SEQ ID NO: 4097155 - DNA, 25 bp, Homo sapien
cctttggcaggatatttaatggtga

SEQ ID NO: 4097156 - DNA, 25 bp, Homo sapien
tatccatgttgacagccacagaagg

SEQ ID NO: 4097157 - DNA, 25 bp, Homo sapien
gtacgatcttttcatatacagcatc

SEQ ID NO: 4097158 - DNA, 25 bp, Homo sapien
aatcaacgccttgagggactgaatc

SEQ ID NO: 4097159 - DNA, 25 bp, Homo sapien
gccttctgacaatgtacgatctttt

SEQ ID NO: 4097160 - DNA, 25 bp, Homo sapien
ttcaatcaacgccttgagggactga

SEQ ID NO: 4097161 - DNA, 25 bp, Homo sapien
ttggttggaggtcttcacttctcag

SEQ ID NO: 4097162 - DNA, 25 bp, Homo sapien
tggttggaggtcttcacttctcagc

SEQ ID NO: 4097163 - DNA, 25 bp, Homo sapien
ttcctcttcccagtactaacatcag

SEQ ID NO: 4097164 - DNA, 25 bp, Homo sapien
gtactaacatcagcatagcatgttc

SEQ ID NO: 4097165 - DNA, 25 bp, Homo sapien
ggagcacttacagtatcaccagtgg

SEQ ID NO: 4097166 - DNA, 25 bp, Homo sapien
tcatataggtcccatggtgttactt

SEQ ID NO: 4097167 - DNA, 25 bp, Homo sapien
taatatgccgtaactgtgagagatc

SEQ ID NO: 4097168 - DNA, 25 bp, Homo sapien
tatcctgaaatagcagtcaactgca

SEQ ID NO: 4097169 - DNA, 25 bp, Homo sapien
aatcgttgcctaatccaatgcctgg

SEQ ID NO: 4097170 - DNA, 25 bp, Homo sapien
cactgtataatcttgacacccttgt

SEQ ID NO: 4097171 - DNA, 25 bp, Homo sapien
cctgcacgatttactgaagacactg

SEQ ID NO: 4097172 - DNA, 25 bp, Homo sapien
tggatatcccgttttccctgcacga

SEQ ID NO: 4097173 - DNA, 25 bp, Homo sapien
tgaccctttaatctacatgctgact

SEQ ID NO: 4097174 - DNA, 25 bp, Homo sapien
catgctgacttggagacattgtgct

SEQ ID NO: 4097175 - DNA, 25 bp, Homo sapien
tgttcaggcctccatgttgtacaac

SEQ ID NO: 4097176 - DNA, 25 bp, Homo sapien
cctttaaggcttgggcattagcagc

SEQ ID NO: 4097177 - DNA, 25 bp, Homo sapien
tcaatcacacagctggtgcatgcct

SEQ ID NO: 4097178 - DNA, 25 bp, Homo sapien
gtgcatgcctgagtctgagcagtca

SEQ ID NO: 4097179 - DNA, 25 bp, Homo sapien
agtctgagcagtcactcacactctc

SEQ ID NO: 4097180 - DNA, 25 bp, Homo sapien
catgcctgagtctgagcagtcactc

SEQ ID NO: 4097181 - DNA, 25 bp, Homo sapien
agatacgcaaccaagggaatcacaa

SEQ ID NO: 4097182 - DNA, 25 bp, Homo sapien
cagggcaaggacgaaagatacgcaa

SEQ ID NO: 4097183 - DNA, 25 bp, Homo sapien
ggaatcacaaggcaacttaccaggc

SEQ ID NO: 4097184 - DNA, 25 bp, Homo sapien
acatgcgagcgccagggcaaggacg

SEQ ID NO: 4097185 - DNA, 25 bp, Homo sapien
tattccaggtaaagctctccactgc

SEQ ID NO: 4097186 - DNA, 25 bp, Homo sapien
gatggtaatattccaggtaaagctc

SEQ ID NO: 4097187 - DNA, 25 bp, Homo sapien
tgcaagtgttcatggaattccatgg

SEQ ID NO: 4097188 - DNA, 25 bp, Homo sapien
aaccttccttggtgcctatgctgtg

SEQ ID NO: 4097189 - DNA, 25 bp, Homo sapien
cagcatcagaaacaactctatagat

SEQ ID NO: 4097190 - DNA, 25 bp, Homo sapien
agcatcagaaacaactctatagata

SEQ ID NO: 4097191 - DNA, 25 bp, Homo sapien
gcatcagaaacaactctatagatac

SEQ ID NO: 4097192 - DNA, 25 bp, Homo sapien
ataaccttacaaaggcctccaagtg

SEQ ID NO: 4097193 - DNA, 25 bp, Homo sapien
ggcctccctaatgacatgcaaagtt

SEQ ID NO: 4097194 - DNA, 25 bp, Homo sapien
gactgttccactggtcactctccat

SEQ ID NO: 4097195 - DNA, 25 bp, Homo sapien
accttgcgtcaagcaagtctacagt

SEQ ID NO: 4097196 - DNA, 25 bp, Homo sapien
catgatcccttgtgtgagccagcat

SEQ ID NO: 4097197 - DNA, 25 bp, Homo sapien
caggtttccgaacagcttgctattg

SEQ ID NO: 4097198 - DNA, 25 bp, Homo sapien
tccggtctccaagttccctgaggtc

SEQ ID NO: 4097199 - DNA, 25 bp, Homo sapien
tgtccctctcatgatcccttgtgtg

SEQ ID NO: 4097200 - DNA, 25 bp, Homo sapien
tgagccatgacctaagcacagaagg

SEQ ID NO: 4097201 - DNA, 25 bp, Homo sapien
tgctacagacctggccatgggaagg

SEQ ID NO: 4097202 - DNA, 25 bp, Homo sapien
ggagcccaaccatttagcagcatga

SEQ ID NO: 4097203 - DNA, 25 bp, Homo sapien
ggctaaattccaccatgcagtagga

SEQ ID NO: 4097204 - DNA, 25 bp, Homo sapien
tcctcggcagcaccacggaggaggc

SEQ ID NO: 4097205 - DNA, 25 bp, Homo sapien
gtgtctgaattggggaaactcaggg

SEQ ID NO: 4097206 - DNA, 25 bp, Homo sapien
tgtctgaattggggaaactcagggc

SEQ ID NO: 4097207 - DNA, 25 bp, Homo sapien
ttgggggctcctcggcagcaccacg

SEQ ID NO: 4097208 - DNA, 25 bp, Homo sapien
attttcccatggttgtgctcagagg

SEQ ID NO: 4097209 - DNA, 25 bp, Homo sapien
tatatttgggctgtcatcacattca

SEQ ID NO: 4097210 - DNA, 25 bp, Homo sapien
gccacactttttgcctatatttggg

SEQ ID NO: 4097211 - DNA, 25 bp, Homo sapien
aaattcagaatgaatgccttcatcc

SEQ ID NO: 4097212 - DNA, 25 bp, Homo sapien
tggttcgaggcagtgtcttgatgat

SEQ ID NO: 4097213 - DNA, 25 bp, Homo sapien
agtgtcttgatgatgaagggatagt

SEQ ID NO: 4097214 - DNA, 25 bp, Homo sapien
gatgatgaagggatagtgggctgca

SEQ ID NO: 4097215 - DNA, 25 bp, Homo sapien
ctgtggttcgaggcagtgtcttgat

SEQ ID NO: 4097216 - DNA, 25 bp, Homo sapien
catggaacatgagctgcaaatcagc

SEQ ID NO: 4097217 - DNA, 25 bp, Homo sapien
cccaaagggtgcaaagaagctgcca

SEQ ID NO: 4097218 - DNA, 25 bp, Homo sapien
caggagcggaaaggagagccctcta

SEQ ID NO: 4097219 - DNA, 25 bp, Homo sapien
gaaaggagagccctctaagcacagc

SEQ ID NO: 4097220 - DNA, 25 bp, Homo sapien
caggcttttgtacaggacgttaggc

SEQ ID NO: 4097221 - DNA, 25 bp, Homo sapien
tacagcaacaggacacaggcttttg

SEQ ID NO: 4097222 - DNA, 25 bp, Homo sapien
tagagagttgaaccccacagactgc

SEQ ID NO: 4097223 - DNA, 25 bp, Homo sapien
gctggctgagatcgtggcacattca

SEQ ID NO: 4097224 - DNA, 25 bp, Homo sapien
cctcaggtcaggagtacacggtgaa

SEQ ID NO: 4097225 - DNA, 25 bp, Homo sapien
ttacctgggattggatcagaggcca

SEQ ID NO: 4097226 - DNA, 25 bp, Homo sapien
ttaccaaggcgagacacaaaggact

SEQ ID NO: 4097227 - DNA, 25 bp, Homo sapien
gatccagtgcggcagctaagacttc

SEQ ID NO: 4097228 - DNA, 25 bp, Homo sapien
tctctttcttagttagcttgactaa

SEQ ID NO: 4097229 - DNA, 25 bp, Homo sapien
gcagaaaccagtgaacctatctgtg

SEQ ID NO: 4097230 - DNA, 25 bp, Homo sapien
ggcagatggtacctttcaaggaatt

SEQ ID NO: 4097231 - DNA, 25 bp, Homo sapien
gacattagtaatttgtatcatctct

SEQ ID NO: 4097232 - DNA, 25 bp, Homo sapien
tactagtcactgaactcacatgttg

SEQ ID NO: 4097233 - DNA, 25 bp, Homo sapien
taaatagatgttcccttgcgtagat

SEQ ID NO: 4097234 - DNA, 25 bp, Homo sapien
tgcgtagattaactaaaggagcttc

SEQ ID NO: 4097235 - DNA, 25 bp, Homo sapien
tatttcccttcacaagcagaattgc

SEQ ID NO: 4097236 - DNA, 25 bp, Homo sapien
caattttaaaccgtcatgaggccca

SEQ ID NO: 4097237 - DNA, 25 bp, Homo sapien
tataggtcagaaaacagtgggcgaa

SEQ ID NO: 4097238 - DNA, 25 bp, Homo sapien
tagtcaaatgtcagccactggtgag

SEQ ID NO: 4097239 - DNA, 25 bp, Homo sapien
gaatcggtgctgacaatgggccaat

SEQ ID NO: 4097240 - DNA, 25 bp, Homo sapien
taacttagtgttatacttcaacaat

SEQ ID NO: 4097241 - DNA, 25 bp, Homo sapien
gattccacaagaaggcataattatt

SEQ ID NO: 4097242 - DNA, 25 bp, Homo sapien
aattaaacagtattagatatgacat

SEQ ID NO: 4097243 - DNA, 25 bp, Homo sapien
acaatatctatctttcactgaaata

SEQ ID NO: 4097244 - DNA, 25 bp, Homo sapien
catcgtttgctttttcgggtatgac

SEQ ID NO: 4097245 - DNA, 25 bp, Homo sapien
gtatgacttccaagctccggcgtgg

SEQ ID NO: 4097246 - DNA, 25 bp, Homo sapien
tccggcgtggcttctggacatcagc

SEQ ID NO: 4097247 - DNA, 25 bp, Homo sapien
gacatcagcattttcggtgcctggt

SEQ ID NO: 4097248 - DNA, 25 bp, Homo sapien
tgactcggcatgtatcttcagccag

SEQ ID NO: 4097249 - DNA, 25 bp, Homo sapien
gagtttatttgccttcacacgcagg

SEQ ID NO: 4097250 - DNA, 25 bp, Homo sapien
ttagtgagtgcaaagcaaatgtccc

SEQ ID NO: 4097251 - DNA, 25 bp, Homo sapien
gtaattatggctcagcaagcatgcc

SEQ ID NO: 4097252 - DNA, 25 bp, Homo sapien
ggtcagccccgacaagcaacttatt

SEQ ID NO: 4097253 - DNA, 25 bp, Homo sapien
taaggcttcattaaacacatgtact

SEQ ID NO: 4097254 - DNA, 25 bp, Homo sapien
cacttaagagtagaatattttgagc

SEQ ID NO: 4097255 - DNA, 25 bp, Homo sapien
ctgttcaagtaagtggctacactta

SEQ ID NO: 4097256 - DNA, 25 bp, Homo sapien
taattcagaagcatcaagagggcag

SEQ ID NO: 4097257 - DNA, 25 bp, Homo sapien
ggagatggcgtaccttaacttaagc

SEQ ID NO: 4097258 - DNA, 25 bp, Homo sapien
cagattctgaggtgcacattactac

SEQ ID NO: 4097259 - DNA, 25 bp, Homo sapien
tagaactggaggaaagctacacctt

SEQ ID NO: 4097260 - DNA, 25 bp, Homo sapien
gaaacgctgaggctttgggaacaac

SEQ ID NO: 4097261 - DNA, 25 bp, Homo sapien
ggactgacatcaacataactgctgg

SEQ ID NO: 4097262 - DNA, 25 bp, Homo sapien
tctaacagactttttgacaccaggc

SEQ ID NO: 4097263 - DNA, 25 bp, Homo sapien
taaggcctccacagattcaatccag

SEQ ID NO: 4097264 - DNA, 25 bp, Homo sapien
accaccctaagaactctgctccatg

SEQ ID NO: 4097265 - DNA, 25 bp, Homo sapien
cctgcccggagatggtaagcatttg

SEQ ID NO: 4097266 - DNA, 25 bp, Homo sapien
gaagccatgcctgctaaagacagaa

SEQ ID NO: 4097267 - DNA, 25 bp, Homo sapien
cctgggtcacacctgcccggagatg

SEQ ID NO: 4097268 - DNA, 25 bp, Homo sapien
taattgtcagaagaatcaaaaccag

SEQ ID NO: 4097269 - DNA, 25 bp, Homo sapien
tatagcaacatgtagctcatgccta

SEQ ID NO: 4097270 - DNA, 25 bp, Homo sapien
tgacctgtcatctcaatggctacaa

SEQ ID NO: 4097271 - DNA, 25 bp, Homo sapien
agttctattttacagcactggtcca

SEQ ID NO: 4097272 - DNA, 25 bp, Homo sapien
gcttcagcttctgtacatacaaaat

SEQ ID NO: 4097273 - DNA, 25 bp, Homo sapien
cctctaggacttcgtacaattgttg

SEQ ID NO: 4097274 - DNA, 25 bp, Homo sapien
catcattaacatatagtagcctaca

SEQ ID NO: 4097275 - DNA, 25 bp, Homo sapien
tagtagtttcccagggcttatagtc

SEQ ID NO: 4097276 - DNA, 25 bp, Homo sapien
tgtcttgaattagctcatctccttc

SEQ ID NO: 4097277 - DNA, 25 bp, Homo sapien
tcagtgtccctgtgtcttgaattag

SEQ ID NO: 4097278 - DNA, 25 bp, Homo sapien
ctatcagtgtccctgtgtcttgaat

SEQ ID NO: 4097279 - DNA, 25 bp, Homo sapien
cagtgtccctgtgtcttgaattagc

SEQ ID NO: 4097280 - DNA, 25 bp, Homo sapien
ggaagcggagggcatcttctcagca

SEQ ID NO: 4097281 - DNA, 25 bp, Homo sapien
agcgtcagtgtcagcaggaagcgga

SEQ ID NO: 4097282 - DNA, 25 bp, Homo sapien
ttctggaagcgtcagtgtcagcagg

SEQ ID NO: 4097283 - DNA, 25 bp, Homo sapien
agcaggaagcggagggcatcttctc

SEQ ID NO: 4097284 - DNA, 25 bp, Homo sapien
tccagcctgggagctttcatcggca

SEQ ID NO: 4097285 - DNA, 25 bp, Homo sapien
ccagcctgggagctttcatcggcag

SEQ ID NO: 4097286 - DNA, 25 bp, Homo sapien
ctccaagaaacgtaacctccagcct

SEQ ID NO: 4097287 - DNA, 25 bp, Homo sapien
ccaagaaacgtaacctccagcctgg

SEQ ID NO: 4097288 - DNA, 25 bp, Homo sapien
ttgtactgacacagccaactcttcc

SEQ ID NO: 4097289 - DNA, 25 bp, Homo sapien
tcccacacttgaagaggtccgactt

SEQ ID NO: 4097290 - DNA, 25 bp, Homo sapien
gacgtggccccaggatggtgccatt

SEQ ID NO: 4097291 - DNA, 25 bp, Homo sapien
tgtgattaaattctcccacacttga

SEQ ID NO: 4097292 - DNA, 25 bp, Homo sapien
ccagtgaccctcttcaggtcacttg

SEQ ID NO: 4097293 - DNA, 25 bp, Homo sapien
acaggaacccaccacgtggccaggg

SEQ ID NO: 4097294 - DNA, 25 bp, Homo sapien
caccacgtggccagggccgtggaat

SEQ ID NO: 4097295 - DNA, 25 bp, Homo sapien
caggtcacttggctgcacaggaacc

SEQ ID NO: 4097296 - DNA, 25 bp, Homo sapien
aaaatataccacagttgttgtgccc

SEQ ID NO: 4097297 - DNA, 25 bp, Homo sapien
aaatataccacagttgttgtgccct

SEQ ID NO: 4097298 - DNA, 25 bp, Homo sapien
gacgggcacccatgttgcaggtcat

SEQ ID NO: 4097299 - DNA, 25 bp, Homo sapien
caaaggctggttcgctgtgcaagag

SEQ ID NO: 4097300 - DNA, 25 bp, Homo sapien
caatcggcataaagaaacctggagc

SEQ ID NO: 4097301 - DNA, 25 bp, Homo sapien
tgccccgagcctgggattaagtgtt

SEQ ID NO: 4097302 - DNA, 25 bp, Homo sapien
gactggcatccagtcgaacctgagc

SEQ ID NO: 4097303 - DNA, 25 bp, Homo sapien
ctggcatccagtcgaacctgagcct

SEQ ID NO: 4097304 - DNA, 25 bp, Homo sapien
ccagtcgaacctgagccttggtccc

SEQ ID NO: 4097305 - DNA, 25 bp, Homo sapien
agactggcatccagtcgaacctgag

SEQ ID NO: 4097306 - DNA, 25 bp, Homo sapien
tggggtatcccggagagaaaggcag

SEQ ID NO: 4097307 - DNA, 25 bp, Homo sapien
gccctgaggctgtggaaagacgttg

SEQ ID NO: 4097308 - DNA, 25 bp, Homo sapien
cctgaggctgtggaaagacgttggg

SEQ ID NO: 4097309 - DNA, 25 bp, Homo sapien
catcactgtgagctcctgatgcagc

SEQ ID NO: 4097310 - DNA, 25 bp, Homo sapien
tcctttagtccctacagctgctgtg

SEQ ID NO: 4097311 - DNA, 25 bp, Homo sapien
gaccctgggaccatggcaatgtgaa

SEQ ID NO: 4097312 - DNA, 25 bp, Homo sapien
tccccagatggcttagagattccag

SEQ ID NO: 4097313 - DNA, 25 bp, Homo sapien
gcttttgcagacatcgcctccttta

SEQ ID NO: 4097314 - DNA, 25 bp, Homo sapien
tgacattggggacactgaccccttt

SEQ ID NO: 4097315 - DNA, 25 bp, Homo sapien
cccaaagtgacattggggacactga

SEQ ID NO: 4097316 - DNA, 25 bp, Homo sapien
agtgacattggggacactgacccct

SEQ ID NO: 4097317 - DNA, 25 bp, Homo sapien
caaagtgacattggggacactgacc

SEQ ID NO: 4097318 - DNA, 25 bp, Homo sapien
gggaaatagccccataacttgtgac

SEQ ID NO: 4097319 - DNA, 25 bp, Homo sapien
gacaggtctgcaaaacacttctggg

SEQ ID NO: 4097320 - DNA, 25 bp, Homo sapien
cactcggccgcattcttgttgctga

SEQ ID NO: 4097321 - DNA, 25 bp, Homo sapien
gcctggtactcttctctcagaaaca

SEQ ID NO: 4097322 - DNA, 25 bp, Homo sapien
agcggtggtgcgtggcaaggctgcc

SEQ ID NO: 4097323 - DNA, 25 bp, Homo sapien
tcgcagcggtggtgcgtggcaaggc

SEQ ID NO: 4097324 - DNA, 25 bp, Homo sapien
ggtggtgcgtggcaaggctgccgct

SEQ ID NO: 4097325 - DNA, 25 bp, Homo sapien
agtgtcgcagcggtggtgcgtggca

SEQ ID NO: 4097326 - DNA, 25 bp, Homo sapien
ccagccattcagtgatagctaacag

SEQ ID NO: 4097327 - DNA, 25 bp, Homo sapien
gcagccaggcagttgcattttccca

SEQ ID NO: 4097328 - DNA, 25 bp, Homo sapien
cagagactgcataggctgtgccagc

SEQ ID NO: 4097329 - DNA, 25 bp, Homo sapien
atgccaccgacccatcatctgggat

SEQ ID NO: 4097330 - DNA, 25 bp, Homo sapien
tgggaggcccgggtcgcaccctgag

SEQ ID NO: 4097331 - DNA, 25 bp, Homo sapien
aggcccgggtcgcaccctgaggcag

SEQ ID NO: 4097332 - DNA, 25 bp, Homo sapien
ggcccgggtcgcaccctgaggcagc

SEQ ID NO: 4097333 - DNA, 25 bp, Homo sapien
ggaggcccgggtcgcaccctgaggc

SEQ ID NO: 4097334 - DNA, 25 bp, Homo sapien
gattgatggaatattcagtgacgcc

SEQ ID NO: 4097335 - DNA, 25 bp, Homo sapien
caggcttgagaccactttgatgtaa

SEQ ID NO: 4097336 - DNA, 25 bp, Homo sapien
gccggatacattgaggatggcacct

SEQ ID NO: 4097337 - DNA, 25 bp, Homo sapien
cagtgacgccatgtatgccctatcg

SEQ ID NO: 4097338 - DNA, 25 bp, Homo sapien
cctgccctgtgtgtctggaggaggg

SEQ ID NO: 4097339 - DNA, 25 bp, Homo sapien
cctgtgtgtctggaggaggggcact

SEQ ID NO: 4097340 - DNA, 25 bp, Homo sapien
cccctgccctgtgtgtctggaggag

SEQ ID NO: 4097341 - DNA, 25 bp, Homo sapien
tgccctgtgtgtctggaggaggggc

SEQ ID NO: 4097342 - DNA, 25 bp, Homo sapien
cattatagaacaggagtgtgtacgg

SEQ ID NO: 4097343 - DNA, 25 bp, Homo sapien
ctgtggcggctccaaccaattccat

SEQ ID NO: 4097344 - DNA, 25 bp, Homo sapien
tccccacatagagtggccgttctgt

SEQ ID NO: 4097345 - DNA, 25 bp, Homo sapien
ggaggacttaggtccccacatagag

SEQ ID NO: 4097346 - DNA, 25 bp, Homo sapien
gcagttggctgggtgtttaatagtc

SEQ ID NO: 4097347 - DNA, 25 bp, Homo sapien
tgccaataaggctctccgctggctc

SEQ ID NO: 4097348 - DNA, 25 bp, Homo sapien
agccctgctgcacactagaggcagg

SEQ ID NO: 4097349 - DNA, 25 bp, Homo sapien
tagaggcaggtcctctcggtcctct

SEQ ID NO: 4097350 - DNA, 25 bp, Homo sapien
cacctctgagtaagctgctgccaag

SEQ ID NO: 4097351 - DNA, 25 bp, Homo sapien
cagcgagtgaccttgcaactgtgca

SEQ ID NO: 4097352 - DNA, 25 bp, Homo sapien
taagaggtgtagagctgttcccacc

SEQ ID NO: 4097353 - DNA, 25 bp, Homo sapien
tgctgccaagcacatatccctatga

SEQ ID NO: 4097354 - DNA, 25 bp, Homo sapien
catgtaaggtgaataataactggtt

SEQ ID NO: 4097355 - DNA, 25 bp, Homo sapien
acatcagcatgtaaggtgaataata

SEQ ID NO: 4097356 - DNA, 25 bp, Homo sapien
ttttgccagacagcaggttgtctga

SEQ ID NO: 4097357 - DNA, 25 bp, Homo sapien
tcagcatgtaaggtgaataataact

SEQ ID NO: 4097358 - DNA, 25 bp, Homo sapien
ttaaactctagcagggaactctcct

SEQ ID NO: 4097359 - DNA, 25 bp, Homo sapien
ctctagcagggaactctcctcttac

SEQ ID NO: 4097360 - DNA, 25 bp, Homo sapien
taaactctagcagggaactctcctc

SEQ ID NO: 4097361 - DNA, 25 bp, Homo sapien
aactctagcagggaactctcctctt

SEQ ID NO: 4097362 - DNA, 25 bp, Homo sapien
tgcgcaggaattctaacaggagtgg

SEQ ID NO: 4097363 - DNA, 25 bp, Homo sapien
ccagggatgactagctctttgagcc

SEQ ID NO: 4097364 - DNA, 25 bp, Homo sapien
ttctctccttaaagaagatccctgg

SEQ ID NO: 4097365 - DNA, 25 bp, Homo sapien
cagcaccttaggaaaccatgatggg

SEQ ID NO: 4097366 - DNA, 25 bp, Homo sapien
catatcgcagagctaaatgcaatag

SEQ ID NO: 4097367 - DNA, 25 bp, Homo sapien
gaaccagaactagtggattccaggg

SEQ ID NO: 4097368 - DNA, 25 bp, Homo sapien
tgcaatagaatgaaccagaactagt

SEQ ID NO: 4097369 - DNA, 25 bp, Homo sapien
tttattcctgcattgggaagccata

SEQ ID NO: 4097370 - DNA, 25 bp, Homo sapien
cagaggcttaggtttgccacatgca

SEQ ID NO: 4097371 - DNA, 25 bp, Homo sapien
gagttagagctgagttacgtaccca

SEQ ID NO: 4097372 - DNA, 25 bp, Homo sapien
tctccccagctaagaatgtgtggca

SEQ ID NO: 4097373 - DNA, 25 bp, Homo sapien
cagccctttgaaaccccttagagag

SEQ ID NO: 4097374 - DNA, 25 bp, Homo sapien
tctgactgtacttcacaggcctctt

SEQ ID NO: 4097375 - DNA, 25 bp, Homo sapien
gctccagtcctgatgacgacagcag

SEQ ID NO: 4097376 - DNA, 25 bp, Homo sapien
ttcagaaacgccagggtgcactgat

SEQ ID NO: 4097377 - DNA, 25 bp, Homo sapien
cactgatagagggaattccgatgac

SEQ ID NO: 4097378 - DNA, 25 bp, Homo sapien
atttccctgtccaagcatccggtgc

SEQ ID NO: 4097379 - DNA, 25 bp, Homo sapien
tttccctgtccaagcatccggtgct

SEQ ID NO: 4097380 - DNA, 25 bp, Homo sapien
ttccctgtccaagcatccggtgctg

SEQ ID NO: 4097381 - DNA, 25 bp, Homo sapien
gtttctgcagattccccctttgtgc

SEQ ID NO: 4097382 - DNA, 25 bp, Homo sapien
tgccctatggatatgacctccaggg

SEQ ID NO: 4097383 - DNA, 25 bp, Homo sapien
aatgtcctgatgctcctgactccac

SEQ ID NO: 4097384 - DNA, 25 bp, Homo sapien
ctggcctctgccctatggatatgac

SEQ ID NO: 4097385 - DNA, 25 bp, Homo sapien
aaggtctagttaggagagcaaaaga

SEQ ID NO: 4097386 - DNA, 25 bp, Homo sapien
gagacaaaggtctagttaggagagc

SEQ ID NO: 4097387 - DNA, 25 bp, Homo sapien
caaaggtctagttaggagagcaaaa

SEQ ID NO: 4097388 - DNA, 25 bp, Homo sapien
gcaggagacaaaggtctagttagga

SEQ ID NO: 4097389 - DNA, 25 bp, Homo sapien
catgggccccgccattaccttgggg

SEQ ID NO: 4097390 - DNA, 25 bp, Homo sapien
ccatagactgtgacctaaaggccgt

SEQ ID NO: 4097391 - DNA, 25 bp, Homo sapien
actgactgccctgtgtgcccataga

SEQ ID NO: 4097392 - DNA, 25 bp, Homo sapien
ctgtgacctaaaggccgttggtcct

SEQ ID NO: 4097393 - DNA, 25 bp, Homo sapien
tttgcccttgtgtacaccacagctt

SEQ ID NO: 4097394 - DNA, 25 bp, Homo sapien
agcttcctccgaacatccgtggcct

SEQ ID NO: 4097395 - DNA, 25 bp, Homo sapien
cttcctccgaacatccgtggccttt

SEQ ID NO: 4097396 - DNA, 25 bp, Homo sapien
tgtgtacaccacagcttcctccgaa

SEQ ID NO: 4097397 - DNA, 25 bp, Homo sapien
tctgtgttgcatgcatgtaggcatt

SEQ ID NO: 4097398 - DNA, 25 bp, Homo sapien
gcattcctacgtgtagctgcgttca

SEQ ID NO: 4097399 - DNA, 25 bp, Homo sapien
cacacacggaatggaggtagctggc

SEQ ID NO: 4097400 - DNA, 25 bp, Homo sapien
atggatttggttatggaagtagccc

SEQ ID NO: 4097401 - DNA, 25 bp, Homo sapien
gaagtggtggaggagagttatctgg

SEQ ID NO: 4097402 - DNA, 25 bp, Homo sapien
tcagttgcggaagtggacattggaa

SEQ ID NO: 4097403 - DNA, 25 bp, Homo sapien
tgcggaagtggacattggaagggtt

SEQ ID NO: 4097404 - DNA, 25 bp, Homo sapien
tgaagctcagttgcggaagtggaca

SEQ ID NO: 4097405 - DNA, 25 bp, Homo sapien
agctcagttgcggaagtggacattg

SEQ ID NO: 4097406 - DNA, 25 bp, Homo sapien
gccactgcccacaactgtagattgg

SEQ ID NO: 4097407 - DNA, 25 bp, Homo sapien
agccactgcccacaactgtagattg

SEQ ID NO: 4097408 - DNA, 25 bp, Homo sapien
ctgcccacaactgtagattgggttg

SEQ ID NO: 4097409 - DNA, 25 bp, Homo sapien
cactgcccacaactgtagattgggt

SEQ ID NO: 4097410 - DNA, 25 bp, Homo sapien
ctaggacaggtagtagtggcggata

SEQ ID NO: 4097411 - DNA, 25 bp, Homo sapien
aaagtagttagaattgtatcaagtt

SEQ ID NO: 4097412 - DNA, 25 bp, Homo sapien
ggtagtcaacaataccttctatagg

SEQ ID NO: 4097413 - DNA, 25 bp, Homo sapien
tggcggatattgagcaggtagtcaa

SEQ ID NO: 4097414 - DNA, 25 bp, Homo sapien
ttgggggcagtgacactcatagagc

SEQ ID NO: 4097415 - DNA, 25 bp, Homo sapien
caaacgcatttgatagatgtacaaa

SEQ ID NO: 4097416 - DNA, 25 bp, Homo sapien
catagagctatcactcctgtggtaa

SEQ ID NO: 4097417 - DNA, 25 bp, Homo sapien
ttaaaaacggacacgcacattaggc

SEQ ID NO: 4097418 - DNA, 25 bp, Homo sapien
ggatatagctaaggcatatccactg

SEQ ID NO: 4097419 - DNA, 25 bp, Homo sapien
gcctccagcctgtaaaattctttat

SEQ ID NO: 4097420 - DNA, 25 bp, Homo sapien
taagccaacttcacgtttaaccaca

SEQ ID NO: 4097421 - DNA, 25 bp, Homo sapien
gccatgcatagcttaacaacaatga

SEQ ID NO: 4097422 - DNA, 25 bp, Homo sapien
tagcaacatctcacgttctcgctca

SEQ ID NO: 4097423 - DNA, 25 bp, Homo sapien
ccttttttagcaacatctcacgttc

SEQ ID NO: 4097424 - DNA, 25 bp, Homo sapien
ccaagcgttgagagtttgcctggag

SEQ ID NO: 4097425 - DNA, 25 bp, Homo sapien
gttcatctccaagcgttgagagttt

SEQ ID NO: 4097426 - DNA, 25 bp, Homo sapien
caggtcaagcccttctcatgtttga

SEQ ID NO: 4097427 - DNA, 25 bp, Homo sapien
catgagtgaaaccaaaaggtagttc

SEQ ID NO: 4097428 - DNA, 25 bp, Homo sapien
tactgtctgttaactgaggcccatt

SEQ ID NO: 4097429 - DNA, 25 bp, Homo sapien
gatagtgccaattaccaaaaccctg

SEQ ID NO: 4097430 - DNA, 25 bp, Homo sapien
tacaccaatgtaagctgagaacgaa

SEQ ID NO: 4097431 - DNA, 25 bp, Homo sapien
gaagataaggttgcccactcttgcc

SEQ ID NO: 4097432 - DNA, 25 bp, Homo sapien
cccaaggacatgaaaggtctctaca

SEQ ID NO: 4097433 - DNA, 25 bp, Homo sapien
gaaaaaaggtagtcagagtatctct

SEQ ID NO: 4097434 - DNA, 25 bp, Homo sapien
taaagccctaaagctcaagagtagc

SEQ ID NO: 4097435 - DNA, 25 bp, Homo sapien
gaaaaaagcatagtacgtatagggc

SEQ ID NO: 4097436 - DNA, 25 bp, Homo sapien
atatccacaccacataagctgcctg

SEQ ID NO: 4097437 - DNA, 25 bp, Homo sapien
ggtgactccctcatatacaagtaag

SEQ ID NO: 4097438 - DNA, 25 bp, Homo sapien
tgatccgcccatctcgccctctcaa

SEQ ID NO: 4097439 - DNA, 25 bp, Homo sapien
cgcccatctcgccctctcaaagtgc

SEQ ID NO: 4097440 - DNA, 25 bp, Homo sapien
atccgcccatctcgccctctcaaag

SEQ ID NO: 4097441 - DNA, 25 bp, Homo sapien
ttgtgatccgcccatctcgccctct

SEQ ID NO: 4097442 - DNA, 25 bp, Homo sapien
gatgggtctttctccttatggtgtg

SEQ ID NO: 4097443 - DNA, 25 bp, Homo sapien
tatggtgtggagtcactgattgcac

SEQ ID NO: 4097444 - DNA, 25 bp, Homo sapien
tttagtctggatgttgtggttctgc

SEQ ID NO: 4097445 - DNA, 25 bp, Homo sapien
agtggagtcagagatgggtctttct

SEQ ID NO: 4097446 - DNA, 25 bp, Homo sapien
caaaagcctactttggcagcaagat

SEQ ID NO: 4097447 - DNA, 25 bp, Homo sapien
taggcttcaagctttggcacaaaga

SEQ ID NO: 4097448 - DNA, 25 bp, Homo sapien
ctcattggacgagagcaggctcagt

SEQ ID NO: 4097449 - DNA, 25 bp, Homo sapien
gggttctagtcacactcttaaagtg

SEQ ID NO: 4097450 - DNA, 25 bp, Homo sapien
cttattatgttttctcgacagccac

SEQ ID NO: 4097451 - DNA, 25 bp, Homo sapien
gttgagcctgctatcagtgcacagt

SEQ ID NO: 4097452 - DNA, 25 bp, Homo sapien
caaagtgtagaactcatttggtaga

SEQ ID NO: 4097453 - DNA, 25 bp, Homo sapien
tggtagatcttcatccttattatgt

SEQ ID NO: 4097454 - DNA, 25 bp, Homo sapien
ggcttctcacatgttaaagctccat

SEQ ID NO: 4097455 - DNA, 25 bp, Homo sapien
ttatgcattaaaacagatttctcct

SEQ ID NO: 4097456 - DNA, 25 bp, Homo sapien
aggaaagtatatcagagttatcact

SEQ ID NO: 4097457 - DNA, 25 bp, Homo sapien
gctttcagcccgcatagcttaggaa

SEQ ID NO: 4097458 - DNA, 25 bp, Homo sapien
ccaaaggtgtagaggcaggcttagt

SEQ ID NO: 4097459 - DNA, 25 bp, Homo sapien
gaaaggtatgcaataagacatgcca

SEQ ID NO: 4097460 - DNA, 25 bp, Homo sapien
aaaatcaaaccttatgctcttggag

SEQ ID NO: 4097461 - DNA, 25 bp, Homo sapien
tattagcttgtaagatggcatcgag

SEQ ID NO: 4097462 - DNA, 25 bp, Homo sapien
ggcctccacttacagagtctgtatg

SEQ ID NO: 4097463 - DNA, 25 bp, Homo sapien
taaggtcaaggcctccacttacaga

SEQ ID NO: 4097464 - DNA, 25 bp, Homo sapien
ggtcaaggcctccacttacagagtc

SEQ ID NO: 4097465 - DNA, 25 bp, Homo sapien
tggaacttgggataaggtaaggtca

SEQ ID NO: 4097466 - DNA, 25 bp, Homo sapien
tcatataaactaagtaccagagatt

SEQ ID NO: 4097467 - DNA, 25 bp, Homo sapien
caatgggtttcctgtttattgtgca

SEQ ID NO: 4097468 - DNA, 25 bp, Homo sapien
gtgcacatctggtgcagtcactatg

SEQ ID NO: 4097469 - DNA, 25 bp, Homo sapien
catctggtgcagtcactatgcattt

SEQ ID NO: 4097470 - DNA, 25 bp, Homo sapien
acttctgaagcaattaatccccatg

SEQ ID NO: 4097471 - DNA, 25 bp, Homo sapien
tgtcttgtagataagtcgggataca

SEQ ID NO: 4097472 - DNA, 25 bp, Homo sapien
tcttcactgagtgtgcagaaaagaa

SEQ ID NO: 4097473 - DNA, 25 bp, Homo sapien
gaggataagtcctgctttggcaatc

SEQ ID NO: 4097474 - DNA, 25 bp, Homo sapien
cttgcagttctggtagtctcttgtg

SEQ ID NO: 4097475 - DNA, 25 bp, Homo sapien
tgcagttctggtagtctcttgtggc

SEQ ID NO: 4097476 - DNA, 25 bp, Homo sapien
cagttctggtagtctcttgtggcac

SEQ ID NO: 4097477 - DNA, 25 bp, Homo sapien
tccttgcagttctggtagtctcttg

SEQ ID NO: 4097478 - DNA, 25 bp, Homo sapien
agacatctcccagtatgggccgaca

SEQ ID NO: 4097479 - DNA, 25 bp, Homo sapien
acatctcccagtatgggccgacaga

SEQ ID NO: 4097480 - DNA, 25 bp, Homo sapien
ggagacatctcccagtatgggccga

SEQ ID NO: 4097481 - DNA, 25 bp, Homo sapien
atctcccagtatgggccgacagaca

SEQ ID NO: 4097482 - DNA, 25 bp, Homo sapien
cttttctgtctggctaccagcagga

SEQ ID NO: 4097483 - DNA, 25 bp, Homo sapien
gttactctgtatgccgtcttttctg

SEQ ID NO: 4097484 - DNA, 25 bp, Homo sapien
tgttactctgtatgccgtcttttct

SEQ ID NO: 4097485 - DNA, 25 bp, Homo sapien
ttctgtctggctaccagcaggagtt

SEQ ID NO: 4097486 - DNA, 25 bp, Homo sapien
ctgtctttttaaatttatcttcagg

SEQ ID NO: 4097487 - DNA, 25 bp, Homo sapien
ctttttaaatttatcttcaggctgg

SEQ ID NO: 4097488 - DNA, 25 bp, Homo sapien
ttaaatttatcttcaggctggtttc

SEQ ID NO: 4097489 - DNA, 25 bp, Homo sapien
ttatcttcaggctggtttccttcat

SEQ ID NO: 4097490 - DNA, 25 bp, Homo sapien
ctgatattcaaaggctttccaggta

SEQ ID NO: 4097491 - DNA, 25 bp, Homo sapien
gatattcaaaggctttccaggtaac

SEQ ID NO: 4097492 - DNA, 25 bp, Homo sapien
tgctgatattcaaaggctttccagg

SEQ ID NO: 4097493 - DNA, 25 bp, Homo sapien
ggttgctgatattcaaaggctttcc

SEQ ID NO: 4097494 - DNA, 25 bp, Homo sapien
ggctgtggaggcaaacattcttctg

SEQ ID NO: 4097495 - DNA, 25 bp, Homo sapien
tattcaggagccttaactggtacag

SEQ ID NO: 4097496 - DNA, 25 bp, Homo sapien
gattcctgtccaagctggattttcc

SEQ ID NO: 4097497 - DNA, 25 bp, Homo sapien
aaattgtcctcttcgtctcgctctg

SEQ ID NO: 4097498 - DNA, 25 bp, Homo sapien
ttgagcccttcttgtctgagaagtg

SEQ ID NO: 4097499 - DNA, 25 bp, Homo sapien
gtttttcactggttattgttctaga

SEQ ID NO: 4097500 - DNA, 25 bp, Homo sapien
tgggactctcgtattcccgatacat

SEQ ID NO: 4097501 - DNA, 25 bp, Homo sapien
ctttgcagctatgtaagtgggactc

SEQ ID NO: 4097502 - DNA, 25 bp, Homo sapien
tcataaagacaaacggtcagagaat

SEQ ID NO: 4097503 - DNA, 25 bp, Homo sapien
caaagggtgtggcaaagtattgatt

SEQ ID NO: 4097504 - DNA, 25 bp, Homo sapien
aaactactacaaaatttcatgatca

SEQ ID NO: 4097505 - DNA, 25 bp, Homo sapien
aactactgatatggaagaattaatg

SEQ ID NO: 4097506 - DNA, 25 bp, Homo sapien
tgatcagtttccctaatgtccccat

SEQ ID NO: 4097507 - DNA, 25 bp, Homo sapien
ctttctactttgatcaggagtacta

SEQ ID NO: 4097508 - DNA, 25 bp, Homo sapien
agtatgggaagtggtcctgatcagt

SEQ ID NO: 4097509 - DNA, 25 bp, Homo sapien
caggagtactatatgctttctacca

SEQ ID NO: 4097510 - DNA, 25 bp, Homo sapien
tctctggactccattgattctgccc

SEQ ID NO: 4097511 - DNA, 25 bp, Homo sapien
tattttctagatataccttgtctcc

SEQ ID NO: 4097512 - DNA, 25 bp, Homo sapien
ggaatggggaagcacctagtatgaa

SEQ ID NO: 4097513 - DNA, 25 bp, Homo sapien
gcacctagtatgaactcttctttct

SEQ ID NO: 4097514 - DNA, 25 bp, Homo sapien
tgttctctttcaggtcgggccgggc

SEQ ID NO: 4097515 - DNA, 25 bp, Homo sapien
gcccttctgcgccacaggtaaaata

SEQ ID NO: 4097516 - DNA, 25 bp, Homo sapien
cagtgcagccccacatgcagtcgtt

SEQ ID NO: 4097517 - DNA, 25 bp, Homo sapien
gatgatgatcgtaaaaaagcccaag

SEQ ID NO: 4097518 - DNA, 25 bp, Homo sapien
cccttctcagtccaaccctgggaag

SEQ ID NO: 4097519 - DNA, 25 bp, Homo sapien
ggtggatgtgaacctctgactaaga

SEQ ID NO: 4097520 - DNA, 25 bp, Homo sapien
aagatagttggtggatgtgaacctc

SEQ ID NO: 4097521 - DNA, 25 bp, Homo sapien
caaccctgggaagatagttggtgga

SEQ ID NO: 4097522 - DNA, 25 bp, Homo sapien
gcttgagtagggctggaaaatccac

SEQ ID NO: 4097523 - DNA, 25 bp, Homo sapien
acaattctgctatttgggcactggg

SEQ ID NO: 4097524 - DNA, 25 bp, Homo sapien
gactcttcacagtgtggtagtttca

SEQ ID NO: 4097525 - DNA, 25 bp, Homo sapien
ccaggtggcttggttagactcttca

SEQ ID NO: 4097526 - DNA, 25 bp, Homo sapien
tccagtctctgtttgcctctaatgt

SEQ ID NO: 4097527 - DNA, 25 bp, Homo sapien
actgcctggatttgctttccctttc

SEQ ID NO: 4097528 - DNA, 25 bp, Homo sapien
gtttgcctctaatgtctgcatccat

SEQ ID NO: 4097529 - DNA, 25 bp, Homo sapien
gtctctgtttgcctctaatgtctgc

SEQ ID NO: 4097530 - DNA, 25 bp, Homo sapien
gagtcaaagaaaagggtgacggaca

SEQ ID NO: 4097531 - DNA, 25 bp, Homo sapien
aagaaaagggtgacggacacacctg

SEQ ID NO: 4097532 - DNA, 25 bp, Homo sapien
agaaaagggtgacggacacacctgg

SEQ ID NO: 4097533 - DNA, 25 bp, Homo sapien
tcaaagaaaagggtgacggacacac

SEQ ID NO: 4097534 - DNA, 25 bp, Homo sapien
gaaagttctaggcatattggctatg

SEQ ID NO: 4097535 - DNA, 25 bp, Homo sapien
tctggaactatggtgccatccctca

SEQ ID NO: 4097536 - DNA, 25 bp, Homo sapien
tgcgaatttgttcccgtataaagga

SEQ ID NO: 4097537 - DNA, 25 bp, Homo sapien
attggaagcaaggtatgtgcaagag

SEQ ID NO: 4097538 - DNA, 25 bp, Homo sapien
aaatatgggtttagggtcaggcacg

SEQ ID NO: 4097539 - DNA, 25 bp, Homo sapien
caatgcctgtaatggtgacttgcac

SEQ ID NO: 4097540 - DNA, 25 bp, Homo sapien
taagatatgcttacacccgcacaca

SEQ ID NO: 4097541 - DNA, 25 bp, Homo sapien
ggctatactcaaaaccctgatcctg

SEQ ID NO: 4097542 - DNA, 25 bp, Homo sapien
tgtaacacgatctatttctctggtg

SEQ ID NO: 4097543 - DNA, 25 bp, Homo sapien
taacacgtctttgcaaaaatatccg

SEQ ID NO: 4097544 - DNA, 25 bp, Homo sapien
taagcacagctaaactcatggttct

SEQ ID NO: 4097545 - DNA, 25 bp, Homo sapien
gctgagaaaagtcctaattattcgt

SEQ ID NO: 4097546 - DNA, 25 bp, Homo sapien
tgccaaaaagcctctaacatcggac

SEQ ID NO: 4097547 - DNA, 25 bp, Homo sapien
gacttctcacttcccaccataactt

SEQ ID NO: 4097548 - DNA, 25 bp, Homo sapien
catcggaccatattctatggacttc

SEQ ID NO: 4097549 - DNA, 25 bp, Homo sapien
aagcctctaacatcggaccatattc

SEQ ID NO: 4097550 - DNA, 25 bp, Homo sapien
caggggcagaaacaagatcagccag

SEQ ID NO: 4097551 - DNA, 25 bp, Homo sapien
aatgcttggtcttgttgcaatataa

SEQ ID NO: 4097552 - DNA, 25 bp, Homo sapien
cagtgaggttgaggacagtcttgaa

SEQ ID NO: 4097553 - DNA, 25 bp, Homo sapien
ggtcttgttgcaatataagattgaa

SEQ ID NO: 4097554 - DNA, 25 bp, Homo sapien
tcaaggccaccattgtttggttggg

SEQ ID NO: 4097555 - DNA, 25 bp, Homo sapien
catccaatcaactctataaagtcgt

SEQ ID NO: 4097556 - DNA, 25 bp, Homo sapien
gtcgttaatagctctgtgccagtca

SEQ ID NO: 4097557 - DNA, 25 bp, Homo sapien
cactgttggtgttcacatccaatca

SEQ ID NO: 4097558 - DNA, 25 bp, Homo sapien
cttcataatcaagggtagtagttat

SEQ ID NO: 4097559 - DNA, 25 bp, Homo sapien
cagctgatggtaccttaactaatat

SEQ ID NO: 4097560 - DNA, 25 bp, Homo sapien
ctttgtctggtatagcagctgatgg

SEQ ID NO: 4097561 - DNA, 25 bp, Homo sapien
ggtaccttaactaatatgccttcat

SEQ ID NO: 4097562 - DNA, 25 bp, Homo sapien
gatggatcagaacacaggccaaacc

SEQ ID NO: 4097563 - DNA, 25 bp, Homo sapien
cggttctgaaaaacacactctggtg

SEQ ID NO: 4097564 - DNA, 25 bp, Homo sapien
tttgggacaggaaatcgcggttctg

SEQ ID NO: 4097565 - DNA, 25 bp, Homo sapien
ggctaaacagccagtaaacttctgg

SEQ ID NO: 4097566 - DNA, 25 bp, Homo sapien
gaactgggggaatccatccctacca

SEQ ID NO: 4097567 - DNA, 25 bp, Homo sapien
aactgggggaatccatccctaccat

SEQ ID NO: 4097568 - DNA, 25 bp, Homo sapien
ccacatagtccacgtgctcagtgag

SEQ ID NO: 4097569 - DNA, 25 bp, Homo sapien
tggccaaatgcactatttccttaca

SEQ ID NO: 4097570 - DNA, 25 bp, Homo sapien
catggtccacatagtccacgtgctc

SEQ ID NO: 4097571 - DNA, 25 bp, Homo sapien
tcctggattagatgcctgatctgtc

SEQ ID NO: 4097572 - DNA, 25 bp, Homo sapien
gcttctttgtgcacggggcatcctc

SEQ ID NO: 4097573 - DNA, 25 bp, Homo sapien
cagcacagcttctttgtgcacgggg

SEQ ID NO: 4097574 - DNA, 25 bp, Homo sapien
tctgactccttggaactgccagcag

SEQ ID NO: 4097575 - DNA, 25 bp, Homo sapien
tccctgtgccacatgaactttttct

SEQ ID NO: 4097576 - DNA, 25 bp, Homo sapien
cctatgaggccctaaaggagtttgc

SEQ ID NO: 4097577 - DNA, 25 bp, Homo sapien
cgtgattaatcctatgaggccctaa

SEQ ID NO: 4097578 - DNA, 25 bp, Homo sapien
tgtttgcaatggtaatgatattttg

SEQ ID NO: 4097579 - DNA, 25 bp, Homo sapien
tgaggccctaaaggagtttgcagtt

SEQ ID NO: 4097580 - DNA, 25 bp, Homo sapien
gcaattcacccttaggacaggattg

SEQ ID NO: 4097581 - DNA, 25 bp, Homo sapien
tgtcttgaagaatctgttgaaaaca

SEQ ID NO: 4097582 - DNA, 25 bp, Homo sapien
caaagtaatagggattgtcttgaag

SEQ ID NO: 4097583 - DNA, 25 bp, Homo sapien
aaaacaatctgctaagcgcaattca

SEQ ID NO: 4097584 - DNA, 25 bp, Homo sapien
taaaaacagtagaggcaaaatagga

SEQ ID NO: 4097585 - DNA, 25 bp, Homo sapien
tcagcacaatatgatgcacaaacat

SEQ ID NO: 4097586 - DNA, 25 bp, Homo sapien
tatttgtctagcagcatgaagttca

SEQ ID NO: 4097587 - DNA, 25 bp, Homo sapien
tctaacaaagagatggcattatttc

SEQ ID NO: 4097588 - DNA, 25 bp, Homo sapien
catttccgaagccaaaacgctcttg

SEQ ID NO: 4097589 - DNA, 25 bp, Homo sapien
caagccagggtttgctgtgaatcgg

SEQ ID NO: 4097590 - DNA, 25 bp, Homo sapien
tcggtgctgataggcctgaatctca

SEQ ID NO: 4097591 - DNA, 25 bp, Homo sapien
gctgtacctctgtgcgaaatagata

SEQ ID NO: 4097592 - DNA, 25 bp, Homo sapien
tgtaagtacctgattctttgccttt

SEQ ID NO: 4097593 - DNA, 25 bp, Homo sapien
cattctgaatgggttgtaagtacct

SEQ ID NO: 4097594 - DNA, 25 bp, Homo sapien
aaattgttacattctgaatgggttg

SEQ ID NO: 4097595 - DNA, 25 bp, Homo sapien
aaaataatgcagtttgcaaaaacag

SEQ ID NO: 4097596 - DNA, 25 bp, Homo sapien
tgtgtttaaattcgacaggtccaaa

SEQ ID NO: 4097597 - DNA, 25 bp, Homo sapien
cctaggtcactggtggtagcttttt

SEQ ID NO: 4097598 - DNA, 25 bp, Homo sapien
attggagtctcccagtgctcagtcc

SEQ ID NO: 4097599 - DNA, 25 bp, Homo sapien
tcacccatggtctttctatcaactg

SEQ ID NO: 4097600 - DNA, 25 bp, Homo sapien
tgccaatgtgccttggaacggcttt

SEQ ID NO: 4097601 - DNA, 25 bp, Homo sapien
gcctcgcgagtagccacaatgtttg

SEQ ID NO: 4097602 - DNA, 25 bp, Homo sapien
gatgaggctaaagaggtccatgctc

SEQ ID NO: 4097603 - DNA, 25 bp, Homo sapien
tgcagtgccacatgggtgccaatgt

SEQ ID NO: 4097604 - DNA, 25 bp, Homo sapien
tcctctggtttatctgggccatcat

SEQ ID NO: 4097605 - DNA, 25 bp, Homo sapien
gtcctctggtttatctgggccatca

SEQ ID NO: 4097606 - DNA, 25 bp, Homo sapien
cctctggtttatctgggccatcatt

SEQ ID NO: 4097607 - DNA, 25 bp, Homo sapien
agtcctctggtttatctgggccatc

SEQ ID NO: 4097608 - DNA, 25 bp, Homo sapien
gagtcacattgatggtgggctcctc

SEQ ID NO: 4097609 - DNA, 25 bp, Homo sapien
aatcatttccagattgcatgagggc

SEQ ID NO: 4097610 - DNA, 25 bp, Homo sapien
catgagggccagttcgtcctcctct

SEQ ID NO: 4097611 - DNA, 25 bp, Homo sapien
tctggaactccatgacacccatcac

SEQ ID NO: 4097612 - DNA, 25 bp, Homo sapien
agccgtagtccttgcacaaccacaa

SEQ ID NO: 4097613 - DNA, 25 bp, Homo sapien
tcaccgggaccagccgtagtccttg

SEQ ID NO: 4097614 - DNA, 25 bp, Homo sapien
tttgtttgagcctggttggcggttc

SEQ ID NO: 4097615 - DNA, 25 bp, Homo sapien
tttgagcctggttggcggttcaccg

SEQ ID NO: 4097616 - DNA, 25 bp, Homo sapien
gatgtcatgttctcagccactaggc

SEQ ID NO: 4097617 - DNA, 25 bp, Homo sapien
ctttggctgtaagcagtatcttcct

SEQ ID NO: 4097618 - DNA, 25 bp, Homo sapien
tctgctacctccaaaaaggactcct

SEQ ID NO: 4097619 - DNA, 25 bp, Homo sapien
gtaagcagtatcttcctcctgaaca

SEQ ID NO: 4097620 - DNA, 25 bp, Homo sapien
tgggctctcatttaagctgttcaga

SEQ ID NO: 4097621 - DNA, 25 bp, Homo sapien
gactgattgttaatggccaactagg

SEQ ID NO: 4097622 - DNA, 25 bp, Homo sapien
ctttgcagacgccacactgtggaaa

SEQ ID NO: 4097623 - DNA, 25 bp, Homo sapien
ggaaaacatactagcgaccaccatc

SEQ ID NO: 4097624 - DNA, 25 bp, Homo sapien
caaccaagatctcttgctatgctcc

SEQ ID NO: 4097625 - DNA, 25 bp, Homo sapien
aagatctcttgctatgctcctccat

SEQ ID NO: 4097626 - DNA, 25 bp, Homo sapien
accaagatctcttgctatgctcctc

SEQ ID NO: 4097627 - DNA, 25 bp, Homo sapien
ggccaaccaagatctcttgctatgc

SEQ ID NO: 4097628 - DNA, 25 bp, Homo sapien
gctacggctgatatcaggcttggat

SEQ ID NO: 4097629 - DNA, 25 bp, Homo sapien
gcgctattcatcaatgctacggctg

SEQ ID NO: 4097630 - DNA, 25 bp, Homo sapien
aggcgcctgtcagcgtgcacagcgc

SEQ ID NO: 4097631 - DNA, 25 bp, Homo sapien
gcgtgcacagcgctattcatcaatg

SEQ ID NO: 4097632 - DNA, 25 bp, Homo sapien
gctccaggcattgtcttccacatgg

SEQ ID NO: 4097633 - DNA, 25 bp, Homo sapien
ttactgatggtaagatgactgctgc

SEQ ID NO: 4097634 - DNA, 25 bp, Homo sapien
tctccaagcatgacatatgatcaag

SEQ ID NO: 4097635 - DNA, 25 bp, Homo sapien
gaaagcaaagagcaagatgccttct

SEQ ID NO: 4097636 - DNA, 25 bp, Homo sapien
gggaaacctgtgcttgtggcaaaat

SEQ ID NO: 4097637 - DNA, 25 bp, Homo sapien
tgtgcttgtggcaaaatcggaaggt

SEQ ID NO: 4097638 - DNA, 25 bp, Homo sapien
cttgtggcaaaatcggaaggtatct

SEQ ID NO: 4097639 - DNA, 25 bp, Homo sapien
acctgtgcttgtggcaaaatcggaa

SEQ ID NO: 4097640 - DNA, 25 bp, Homo sapien
tcacaaataagcatcttcatgtaca

SEQ ID NO: 4097641 - DNA, 25 bp, Homo sapien
ccaaggatgccaactctggaagctt

SEQ ID NO: 4097642 - DNA, 25 bp, Homo sapien
ttcacaaataagcatcttcatgtac

SEQ ID NO: 4097643 - DNA, 25 bp, Homo sapien
ttaacctccaaggatgccaactctg

SEQ ID NO: 4097644 - DNA, 25 bp, Homo sapien
gagaataattcccactcaacagcag

SEQ ID NO: 4097645 - DNA, 25 bp, Homo sapien
agaataattcccactcaacagcagg

SEQ ID NO: 4097646 - DNA, 25 bp, Homo sapien
caagagaataattcccactcaacag

SEQ ID NO: 4097647 - DNA, 25 bp, Homo sapien
aagagaataattcccactcaacagc

SEQ ID NO: 4097648 - DNA, 25 bp, Homo sapien
gcagtagacccggagtaaacagaca

SEQ ID NO: 4097649 - DNA, 25 bp, Homo sapien
agtagacccggagtaaacagacaag

SEQ ID NO: 4097650 - DNA, 25 bp, Homo sapien
ttcagcagtagacccggagtaaaca

SEQ ID NO: 4097651 - DNA, 25 bp, Homo sapien
actgtttcagcagtagacccggagt

SEQ ID NO: 4097652 - DNA, 25 bp, Homo sapien
gttctcatctgaccacactcgtggc

SEQ ID NO: 4097653 - DNA, 25 bp, Homo sapien
atgagcctgggctatctctcctcct

SEQ ID NO: 4097654 - DNA, 25 bp, Homo sapien
tagacacacatgagcctgggctatc

SEQ ID NO: 4097655 - DNA, 25 bp, Homo sapien
atgcagtgtctagacacacatgagc

SEQ ID NO: 4097656 - DNA, 25 bp, Homo sapien
cgattgataacatatgcatctctta

SEQ ID NO: 4097657 - DNA, 25 bp, Homo sapien
tgtcttctggtttagtcttcctgcc

SEQ ID NO: 4097658 - DNA, 25 bp, Homo sapien
tccacatggcaatcaaagtgatctt

SEQ ID NO: 4097659 - DNA, 25 bp, Homo sapien
tatctggactactgtgactgtcttc

SEQ ID NO: 4097660 - DNA, 25 bp, Homo sapien
gatataacctccctgtcaccaactt

SEQ ID NO: 4097661 - DNA, 25 bp, Homo sapien
gacgtccctgtggataggcaaacca

SEQ ID NO: 4097662 - DNA, 25 bp, Homo sapien
tgctccacggtttctatcttccagg

SEQ ID NO: 4097663 - DNA, 25 bp, Homo sapien
tgaaggatctccaaagtctgttcct

SEQ ID NO: 4097664 - DNA, 25 bp, Homo sapien
ctgtggaggcctcgcgaaactcaca

SEQ ID NO: 4097665 - DNA, 25 bp, Homo sapien
gcatggctgtggaggcctcgcgaaa

SEQ ID NO: 4097666 - DNA, 25 bp, Homo sapien
aagcatggctgtggaggcctcgcga

SEQ ID NO: 4097667 - DNA, 25 bp, Homo sapien
tggctgtggaggcctcgcgaaactc

SEQ ID NO: 4097668 - DNA, 25 bp, Homo sapien
gcatttgctgcaccatattgacacc

SEQ ID NO: 4097669 - DNA, 25 bp, Homo sapien
aaacatgagcttaaaatcagccaac

SEQ ID NO: 4097670 - DNA, 25 bp, Homo sapien
cccaggtataataggatggtgactc

SEQ ID NO: 4097671 - DNA, 25 bp, Homo sapien
gccaacattttatgcttaccatagc

SEQ ID NO: 4097672 - DNA, 25 bp, Homo sapien
tggatgaaatagcaacagacccttg

SEQ ID NO: 4097673 - DNA, 25 bp, Homo sapien
tccctgtgagttgttaaggcaccct

SEQ ID NO: 4097674 - DNA, 25 bp, Homo sapien
gatcttttgtcctagccttccatgg

SEQ ID NO: 4097675 - DNA, 25 bp, Homo sapien
ccagccatgtgtttgcttaagccaa

SEQ ID NO: 4097676 - DNA, 25 bp, Homo sapien
aagataactggcctgtctccaacca

SEQ ID NO: 4097677 - DNA, 25 bp, Homo sapien
aagaaattggtagagatgtcagcac

SEQ ID NO: 4097678 - DNA, 25 bp, Homo sapien
gaaatcattgttttaccttcacacc

SEQ ID NO: 4097679 - DNA, 25 bp, Homo sapien
cacaccatctttgagacatagccaa

SEQ ID NO: 4097680 - DNA, 25 bp, Homo sapien
gctgacaacccaacatacaatcaaa

SEQ ID NO: 4097681 - DNA, 25 bp, Homo sapien
tggtgtgtagctggctgacaaccca

SEQ ID NO: 4097682 - DNA, 25 bp, Homo sapien
gatatgtgtaactgcttctcagcca

SEQ ID NO: 4097683 - DNA, 25 bp, Homo sapien
tcttcccattgacattgaataattc

SEQ ID NO: 4097684 - DNA, 25 bp, Homo sapien
acttgaggaggcctgaaagcagatg

SEQ ID NO: 4097685 - DNA, 25 bp, Homo sapien
tgatgcaactcaatcctccttggga

SEQ ID NO: 4097686 - DNA, 25 bp, Homo sapien
caaccccacacgctttttataatca

SEQ ID NO: 4097687 - DNA, 25 bp, Homo sapien
tatgctgtaccattgatgcccaacc

SEQ ID NO: 4097688 - DNA, 25 bp, Homo sapien
attgttcagaagaagtaatatctaa

SEQ ID NO: 4097689 - DNA, 25 bp, Homo sapien
gagatgtaaagtagctgggtcatca

SEQ ID NO: 4097690 - DNA, 25 bp, Homo sapien
tccatccagagatgtaaagtagctg

SEQ ID NO: 4097691 - DNA, 25 bp, Homo sapien
gaagaagtaatatctaatcgaagac

SEQ ID NO: 4097692 - DNA, 25 bp, Homo sapien
ttgctggctccagttcaacacaaca

SEQ ID NO: 4097693 - DNA, 25 bp, Homo sapien
gagggttatgcatttcacaagtgga

SEQ ID NO: 4097694 - DNA, 25 bp, Homo sapien
tatatataaatacttttgctggctc

SEQ ID NO: 4097695 - DNA, 25 bp, Homo sapien
gccttaaacatataagtcacattga

SEQ ID NO: 4097696 - DNA, 25 bp, Homo sapien
tctcaaggctctgctatttcaacac

SEQ ID NO: 4097697 - DNA, 25 bp, Homo sapien
catacaaacttcaatgtgagttgag

SEQ ID NO: 4097698 - DNA, 25 bp, Homo sapien
tacagtaatccaaggatctcatctc

SEQ ID NO: 4097699 - DNA, 25 bp, Homo sapien
ggtggctctcttccatacagtaatc

SEQ ID NO: 4097700 - DNA, 25 bp, Homo sapien
gctccagccaatttggacctatttt

SEQ ID NO: 4097701 - DNA, 25 bp, Homo sapien
ggtatctctatgcacattctctgct

SEQ ID NO: 4097702 - DNA, 25 bp, Homo sapien
ctctgctccagccaatttggaccta

SEQ ID NO: 4097703 - DNA, 25 bp, Homo sapien
ctcagggtatctctatgcacattct

SEQ ID NO: 4097704 - DNA, 25 bp, Homo sapien
tacatggcttttatgcaggcagttc

SEQ ID NO: 4097705 - DNA, 25 bp, Homo sapien
tcttccaggtacagcttcaatgatt

SEQ ID NO: 4097706 - DNA, 25 bp, Homo sapien
tctcagcttggaacacaaagtgtgt

SEQ ID NO: 4097707 - DNA, 25 bp, Homo sapien
agcataaaggctggcgccatctgcc

SEQ ID NO: 4097708 - DNA, 25 bp, Homo sapien
catgagcactgtacaagtcaaagag

SEQ ID NO: 4097709 - DNA, 25 bp, Homo sapien
cattcagcggtctgtgaacatgagt

SEQ ID NO: 4097710 - DNA, 25 bp, Homo sapien
caacaggacattcagcggtctgtga

SEQ ID NO: 4097711 - DNA, 25 bp, Homo sapien
gcagattccaatatcagaggccaac

SEQ ID NO: 4097712 - DNA, 25 bp, Homo sapien
tgtgtttcgctgtcagaggcataat

SEQ ID NO: 4097713 - DNA, 25 bp, Homo sapien
aagtacaggtgtgtttcgctgtcag

SEQ ID NO: 4097714 - DNA, 25 bp, Homo sapien
tctctcgcacagcatctataaccag

SEQ ID NO: 4097715 - DNA, 25 bp, Homo sapien
taatgataaatcgacatcatttctc

SEQ ID NO: 4097716 - DNA, 25 bp, Homo sapien
tgtctccggcaaaggcatcaacatg

SEQ ID NO: 4097717 - DNA, 25 bp, Homo sapien
ctgtatgcacagtagctctctcaaa

SEQ ID NO: 4097718 - DNA, 25 bp, Homo sapien
ggcatcaacatgctttgtgcaaaat

SEQ ID NO: 4097719 - DNA, 25 bp, Homo sapien
tattcagcttcttcgctaatgtctc

SEQ ID NO: 4097720 - DNA, 25 bp, Homo sapien
aagatatgggggagacagtgtctta

SEQ ID NO: 4097721 - DNA, 25 bp, Homo sapien
ttccaggaagaaaatcggtactgct

SEQ ID NO: 4097722 - DNA, 25 bp, Homo sapien
gaagaaaatcggtactgctgaagaa

SEQ ID NO: 4097723 - DNA, 25 bp, Homo sapien
tgaagaatgggattgcccgtaaata

SEQ ID NO: 4097724 - DNA, 25 bp, Homo sapien
caaatgatgcccgtgcataaagagt

SEQ ID NO: 4097725 - DNA, 25 bp, Homo sapien
gctccacgggaagaactgactcagt

SEQ ID NO: 4097726 - DNA, 25 bp, Homo sapien
tgtagcaggtgaccaaaagcttccc

SEQ ID NO: 4097727 - DNA, 25 bp, Homo sapien
ttaacatgaagacccaggcttggcc

SEQ ID NO: 4097728 - DNA, 25 bp, Homo sapien
gaacttcagtgaatccagtgcctaa

SEQ ID NO: 4097729 - DNA, 25 bp, Homo sapien
ccgtgactgaggctaagggcataaa

SEQ ID NO: 4097730 - DNA, 25 bp, Homo sapien
caaaggaaatatgatcaggctggcc

SEQ ID NO: 4097731 - DNA, 25 bp, Homo sapien
taaaatttcacacctagctgaggac

SEQ ID NO: 4097732 - DNA, 25 bp, Homo sapien
caaggctttttgggcccttccacat

SEQ ID NO: 4097733 - DNA, 25 bp, Homo sapien
ggtgcctcgccttggatctctctga

SEQ ID NO: 4097734 - DNA, 25 bp, Homo sapien
gaatgtttaacagcccagtgaccca

SEQ ID NO: 4097735 - DNA, 25 bp, Homo sapien
aatgtaaacaacagatctagttttg

SEQ ID NO: 4097736 - DNA, 25 bp, Homo sapien
tcctgcctcaactgagtcaccttca

SEQ ID NO: 4097737 - DNA, 25 bp, Homo sapien
ttcctgcctcaactgagtcaccttc

SEQ ID NO: 4097738 - DNA, 25 bp, Homo sapien
cctgcctcaactgagtcaccttcag

SEQ ID NO: 4097739 - DNA, 25 bp, Homo sapien
tgcctcaactgagtcaccttcagct

SEQ ID NO: 4097740 - DNA, 25 bp, Homo sapien
gggagtgtggcccattctaagcccc

SEQ ID NO: 4097741 - DNA, 25 bp, Homo sapien
tcagagaaatgaaaaggacatggtc

SEQ ID NO: 4097742 - DNA, 25 bp, Homo sapien
taacgatgacacaagcctcagggca

SEQ ID NO: 4097743 - DNA, 25 bp, Homo sapien
taagccccacatccatataggcagc

SEQ ID NO: 4097744 - DNA, 25 bp, Homo sapien
aatagcatatgttttgggaggtggt

SEQ ID NO: 4097745 - DNA, 25 bp, Homo sapien
gagggaagattcgtgtttttacagc

SEQ ID NO: 4097746 - DNA, 25 bp, Homo sapien
gacatgtcgcttgggaaaaagtccc

SEQ ID NO: 4097747 - DNA, 25 bp, Homo sapien
cgtgtttttacagctgacatgtcgc

SEQ ID NO: 4097748 - DNA, 25 bp, Homo sapien
tctgagattccagcaaccagcatgg

SEQ ID NO: 4097749 - DNA, 25 bp, Homo sapien
aaccagcatggtgggagaagtaagc

SEQ ID NO: 4097750 - DNA, 25 bp, Homo sapien
tccagcaaccagcatggtgggagaa

SEQ ID NO: 4097751 - DNA, 25 bp, Homo sapien
tggcagcatgcaagttggaaagggc

SEQ ID NO: 4097752 - DNA, 25 bp, Homo sapien
tgctgctcctggaacgagtttggaa

SEQ ID NO: 4097753 - DNA, 25 bp, Homo sapien
tagtgcccacgctaagcagtttttc

SEQ ID NO: 4097754 - DNA, 25 bp, Homo sapien
tttgagtgtagagctcccaccgaca

SEQ ID NO: 4097755 - DNA, 25 bp, Homo sapien
tttggaatgcacagttgagagcgcc

SEQ ID NO: 4097756 - DNA, 25 bp, Homo sapien
tcagacaagatacatttgggagttt

SEQ ID NO: 4097757 - DNA, 25 bp, Homo sapien
tgtgctgtcacgatccattctatag

SEQ ID NO: 4097758 - DNA, 25 bp, Homo sapien
tccgaattaggagagtaaatgtcaa

SEQ ID NO: 4097759 - DNA, 25 bp, Homo sapien
tccctgaaatatcgcttgttggctg

SEQ ID NO: 4097760 - DNA, 25 bp, Homo sapien
tcctcttcctttctaacaacagaaa

SEQ ID NO: 4097761 - DNA, 25 bp, Homo sapien
ttcctcttcctttctaacaacagaa

SEQ ID NO: 4097762 - DNA, 25 bp, Homo sapien
catcaatgactttcaccttcctctt

SEQ ID NO: 4097763 - DNA, 25 bp, Homo sapien
tttagcatcaatgactttcaccttc

SEQ ID NO: 4097764 - DNA, 25 bp, Homo sapien
gaaatgaacctatcctgcagcttgg

SEQ ID NO: 4097765 - DNA, 25 bp, Homo sapien
tagtggcagtgtatattcccctgac

SEQ ID NO: 4097766 - DNA, 25 bp, Homo sapien
gcagtgtaccagttcaagcctagac

SEQ ID NO: 4097767 - DNA, 25 bp, Homo sapien
gcaatagctaactgacaaagactgg

SEQ ID NO: 4097768 - DNA, 25 bp, Homo sapien
agtttccatgaagaccacccacaga

SEQ ID NO: 4097769 - DNA, 25 bp, Homo sapien
catgaggctgatagagatttggtga

SEQ ID NO: 4097770 - DNA, 25 bp, Homo sapien
gatgatgagacaaaaccaggcatcc

SEQ ID NO: 4097771 - DNA, 25 bp, Homo sapien
aaaggtattactggaggcacagtca

SEQ ID NO: 4097772 - DNA, 25 bp, Homo sapien
tactagctcccagcataacatctgc

SEQ ID NO: 4097773 - DNA, 25 bp, Homo sapien
cagcataacatctgcttcagattct

SEQ ID NO: 4097774 - DNA, 25 bp, Homo sapien
tagctcccagcataacatctgcttc

SEQ ID NO: 4097775 - DNA, 25 bp, Homo sapien
ctctcttttttgtcgttttgtgagg

SEQ ID NO: 4097776 - DNA, 25 bp, Homo sapien
cattagataattcaatctgtctcca

SEQ ID NO: 4097777 - DNA, 25 bp, Homo sapien
gtctccacaggttcagtaatagaat

SEQ ID NO: 4097778 - DNA, 25 bp, Homo sapien
tccattagataattcaatctgtctc

SEQ ID NO: 4097779 - DNA, 25 bp, Homo sapien
attatccattagataattcaatctg

SEQ ID NO: 4097780 - DNA, 25 bp, Homo sapien
cagtgaacactgacaagagccatgg

SEQ ID NO: 4097781 - DNA, 25 bp, Homo sapien
ccatgggtaccctgtgttggcataa

SEQ ID NO: 4097782 - DNA, 25 bp, Homo sapien
cctgcaagctgtggaaatgaagtca

SEQ ID NO: 4097783 - DNA, 25 bp, Homo sapien
gaaagctttacatcatgggaccaag

SEQ ID NO: 4097784 - DNA, 25 bp, Homo sapien
cagaatggtgctatgggctggctgg

SEQ ID NO: 4097785 - DNA, 25 bp, Homo sapien
agaatggtgctatgggctggctggc

SEQ ID NO: 4097786 - DNA, 25 bp, Homo sapien
tgcaacaaatcttcgtaacgccaat

SEQ ID NO: 4097787 - DNA, 25 bp, Homo sapien
gagctgcaacaaatcttcgtaacgc

SEQ ID NO: 4097788 - DNA, 25 bp, Homo sapien
attacactgaatggagctgcaacaa

SEQ ID NO: 4097789 - DNA, 25 bp, Homo sapien
tgaatggagctgcaacaaatcttcg

SEQ ID NO: 4097790 - DNA, 25 bp, Homo sapien
tgagacagcaacatgaagaccagag

SEQ ID NO: 4097791 - DNA, 25 bp, Homo sapien
ctgagacagcaacatgaagaccaga

SEQ ID NO: 4097792 - DNA, 25 bp, Homo sapien
gagacagcaacatgaagaccagagt

SEQ ID NO: 4097793 - DNA, 25 bp, Homo sapien
tgctatcacagacataggctctggg

SEQ ID NO: 4097794 - DNA, 25 bp, Homo sapien
tgaaccactatacccaaaatgcttc

SEQ ID NO: 4097795 - DNA, 25 bp, Homo sapien
aatggtaactcttctgtgggaaagg

SEQ ID NO: 4097796 - DNA, 25 bp, Homo sapien
gaagcagactctgctggtgacctac

SEQ ID NO: 4097797 - DNA, 25 bp, Homo sapien
gctaaacattgagcatacatggaga

SEQ ID NO: 4097798 - DNA, 25 bp, Homo sapien
acactttcttacttacaactgggag

SEQ ID NO: 4097799 - DNA, 25 bp, Homo sapien
taggtgcagttggagaccataatcc

SEQ ID NO: 4097800 - DNA, 25 bp, Homo sapien
caatgttagtgggtattgtccagcc

SEQ ID NO: 4097801 - DNA, 25 bp, Homo sapien
catttactcatgtcaagggaactga

SEQ ID NO: 4097802 - DNA, 25 bp, Homo sapien
catttgtgggactaatgactgaaac

SEQ ID NO: 4097803 - DNA, 25 bp, Homo sapien
gagaagctgtaagtaaaccatgggc

SEQ ID NO: 4097804 - DNA, 25 bp, Homo sapien
agtttgggatcagctgaatgcgtgc

SEQ ID NO: 4097805 - DNA, 25 bp, Homo sapien
tgctgaaataggcaccatcttaggt

SEQ ID NO: 4097806 - DNA, 25 bp, Homo sapien
tgtatgtgttctatgcaccagaaat

SEQ ID NO: 4097807 - DNA, 25 bp, Homo sapien
catcttaggtgctgtccaagaagac

SEQ ID NO: 4097808 - DNA, 25 bp, Homo sapien
cagaaatgggcttctttgcaaagag

SEQ ID NO: 4097809 - DNA, 25 bp, Homo sapien
tgtgaaaaccgctttatatgaggaa

SEQ ID NO: 4097810 - DNA, 25 bp, Homo sapien
tcctaaaattgagagagagcttaag

SEQ ID NO: 4097811 - DNA, 25 bp, Homo sapien
tctttaagcactaggaactttccat

SEQ ID NO: 4097812 - DNA, 25 bp, Homo sapien
gatttgagtgctggaagagccatca

SEQ ID NO: 4097813 - DNA, 25 bp, Homo sapien
tcaccaaattctgcgttttctatca

SEQ ID NO: 4097814 - DNA, 25 bp, Homo sapien
tgattagagatgctagtaaccccat

SEQ ID NO: 4097815 - DNA, 25 bp, Homo sapien
gctagtaaccccatcctcaaaatct

SEQ ID NO: 4097816 - DNA, 25 bp, Homo sapien
tgtattcctgattagagatgctagt

SEQ ID NO: 4097817 - DNA, 25 bp, Homo sapien
gcacagcagcacaaggtgtattcat

SEQ ID NO: 4097818 - DNA, 25 bp, Homo sapien
gttgaaactcttcggcccacctcta

SEQ ID NO: 4097819 - DNA, 25 bp, Homo sapien
tggttgaaactcttcggcccacctc

SEQ ID NO: 4097820 - DNA, 25 bp, Homo sapien
tcttggttgaaactcttcggcccac

SEQ ID NO: 4097821 - DNA, 25 bp, Homo sapien
ttctcttggttgaaactcttcggcc

SEQ ID NO: 4097822 - DNA, 25 bp, Homo sapien
gaatgcaagtctctgatcacacctc

SEQ ID NO: 4097823 - DNA, 25 bp, Homo sapien
gacacccaagccacgtttcctatag

SEQ ID NO: 4097824 - DNA, 25 bp, Homo sapien
cagaagtcacgaatttcacagccca

SEQ ID NO: 4097825 - DNA, 25 bp, Homo sapien
cagcctagctttgtgaccaacgtca

SEQ ID NO: 4097826 - DNA, 25 bp, Homo sapien
tgagcttgtcacatgaaatccagcc

SEQ ID NO: 4097827 - DNA, 25 bp, Homo sapien
ggacaaagggccatcatctgagctt

SEQ ID NO: 4097828 - DNA, 25 bp, Homo sapien
gcttgtcacatgaaatccagccaat

SEQ ID NO: 4097829 - DNA, 25 bp, Homo sapien
tggacaaagggccatcatctgagct

SEQ ID NO: 4097830 - DNA, 25 bp, Homo sapien
taatcatttcagaatgtctggcaag

SEQ ID NO: 4097831 - DNA, 25 bp, Homo sapien
gtaggatgcgctgtcccaagaccat

SEQ ID NO: 4097832 - DNA, 25 bp, Homo sapien
aaatctactgtactccctttgggca

SEQ ID NO: 4097833 - DNA, 25 bp, Homo sapien
tggcaagtgcccctacaagagtttc

SEQ ID NO: 4097834 - DNA, 25 bp, Homo sapien
ataatcataaacaggtgctcttgaa

SEQ ID NO: 4097835 - DNA, 25 bp, Homo sapien
aatgggctgtttagagagagtttgc

SEQ ID NO: 4097836 - DNA, 25 bp, Homo sapien
ttaactaatgggctgtttagagaga

SEQ ID NO: 4097837 - DNA, 25 bp, Homo sapien
tttgtgtttctactcaagtgtttta

SEQ ID NO: 4097838 - DNA, 25 bp, Homo sapien
caagtgttttaactaatgggctgtt

SEQ ID NO: 4097839 - DNA, 25 bp, Homo sapien
accttgtttaccctctggagcttcg

SEQ ID NO: 4097840 - DNA, 25 bp, Homo sapien
taccctctggagcttcgagttttgt

SEQ ID NO: 4097841 - DNA, 25 bp, Homo sapien
ggagcttcgagttttgtctcaggca

SEQ ID NO: 4097842 - DNA, 25 bp, Homo sapien
gaagtctaataggatctggggtcag

SEQ ID NO: 4097843 - DNA, 25 bp, Homo sapien
accagtcggattcccaccagctgtc

SEQ ID NO: 4097844 - DNA, 25 bp, Homo sapien
tctaggaatacaggattgtcaccaa

SEQ ID NO: 4097845 - DNA, 25 bp, Homo sapien
tcttcctctaggaatacaggattgt

SEQ ID NO: 4097846 - DNA, 25 bp, Homo sapien
gaaacaccagtcggattcccaccag

SEQ ID NO: 4097847 - DNA, 25 bp, Homo sapien
tttgtcctgtccgtgctgatatcat

SEQ ID NO: 4097848 - DNA, 25 bp, Homo sapien
ctttgtcctgtccgtgctgatatca

SEQ ID NO: 4097849 - DNA, 25 bp, Homo sapien
tattcgtgggtttactgaagcacca

SEQ ID NO: 4097850 - DNA, 25 bp, Homo sapien
aaatcttgcctctaggagccaggcc

SEQ ID NO: 4097851 - DNA, 25 bp, Homo sapien
taggatatttcccaacctgcaggag

SEQ ID NO: 4097852 - DNA, 25 bp, Homo sapien
aataatccatgttagcacactgcgg

SEQ ID NO: 4097853 - DNA, 25 bp, Homo sapien
tatccgtccttataccacagggtct

SEQ ID NO: 4097854 - DNA, 25 bp, Homo sapien
cacaagcaatgagtctaaactgagc

SEQ ID NO: 4097855 - DNA, 25 bp, Homo sapien
gccctcaaaaatggtagcctagcaa

SEQ ID NO: 4097856 - DNA, 25 bp, Homo sapien
gttcttggaacttagtaggccctca

SEQ ID NO: 4097857 - DNA, 25 bp, Homo sapien
ccaggtgagaacaggtgtacaccac

SEQ ID NO: 4097858 - DNA, 25 bp, Homo sapien
gaaaatttaaagtggcagatcctct

SEQ ID NO: 4097859 - DNA, 25 bp, Homo sapien
taataaaatgccagttgcctgctga

SEQ ID NO: 4097860 - DNA, 25 bp, Homo sapien
tggaggcacagttctatgcaaaggt

SEQ ID NO: 4097861 - DNA, 25 bp, Homo sapien
tctgcaatctggtaaaggatcccaa

SEQ ID NO: 4097862 - DNA, 25 bp, Homo sapien
tagaaggtgctcatctattgcagct

SEQ ID NO: 4097863 - DNA, 25 bp, Homo sapien
ttcatcataacaactaaagggcagg

SEQ ID NO: 4097864 - DNA, 25 bp, Homo sapien
tcctgggttattctcaccatgcaca

SEQ ID NO: 4097865 - DNA, 25 bp, Homo sapien
cctacattagtttcagggcctgtga

SEQ ID NO: 4097866 - DNA, 25 bp, Homo sapien
tataaaatgcccctagttagccaac

SEQ ID NO: 4097867 - DNA, 25 bp, Homo sapien
tgatggcaacctagactggcaggtg

SEQ ID NO: 4097868 - DNA, 25 bp, Homo sapien
tctcaaagaatgtgagggacccagc

SEQ ID NO: 4097869 - DNA, 25 bp, Homo sapien
cagtgcaactaggtgatagtggccc

SEQ ID NO: 4097870 - DNA, 25 bp, Homo sapien
catgggcaatggcaatggcaatggc

SEQ ID NO: 4097871 - DNA, 25 bp, Homo sapien
cctcagtgatgggtagaatgtgcct

SEQ ID NO: 4097872 - DNA, 25 bp, Homo sapien
cttaaaagagaagctggcatggcat

SEQ ID NO: 4097873 - DNA, 25 bp, Homo sapien
gtctgccatctatgctcctgaagcc

SEQ ID NO: 4097874 - DNA, 25 bp, Homo sapien
agtctgccatctatgctcctgaagc

SEQ ID NO: 4097875 - DNA, 25 bp, Homo sapien
caccagtctctgatgtgtcatgaca

SEQ ID NO: 4097876 - DNA, 25 bp, Homo sapien
aagccaccagtctctgatgtgtcat

SEQ ID NO: 4097877 - DNA, 25 bp, Homo sapien
taaggaagctcgatgacaatacgaa

SEQ ID NO: 4097878 - DNA, 25 bp, Homo sapien
agttaaggaagctcgatgacaatac

SEQ ID NO: 4097879 - DNA, 25 bp, Homo sapien
gggagttaaggaagctcgatgacaa

SEQ ID NO: 4097880 - DNA, 25 bp, Homo sapien
aggaagctcgatgacaatacgaaac

SEQ ID NO: 4097881 - DNA, 25 bp, Homo sapien
gtttttgcactaattgctgtatcca

SEQ ID NO: 4097882 - DNA, 25 bp, Homo sapien
ggcaaaattgtttttgcactaattg

SEQ ID NO: 4097883 - DNA, 25 bp, Homo sapien
ctagaagtgttaatattcttggcaa

SEQ ID NO: 4097884 - DNA, 25 bp, Homo sapien
cccttctcgataaactctagaagtg

SEQ ID NO: 4097885 - DNA, 25 bp, Homo sapien
tccaactggcagagtccagcaaact

SEQ ID NO: 4097886 - DNA, 25 bp, Homo sapien
taaacactgaagttgatacaggcat

SEQ ID NO: 4097887 - DNA, 25 bp, Homo sapien
gggtgtatgcctcaagacatagaaa

SEQ ID NO: 4097888 - DNA, 25 bp, Homo sapien
taaattaatccacactccaactggc

SEQ ID NO: 4097889 - DNA, 25 bp, Homo sapien
tggtattttgaggtgttacttttca

SEQ ID NO: 4097890 - DNA, 25 bp, Homo sapien
caaggtggtattttgaggtgttact

SEQ ID NO: 4097891 - DNA, 25 bp, Homo sapien
caacattccatggtggattaaagaa

SEQ ID NO: 4097892 - DNA, 25 bp, Homo sapien
attaagcaacattccatggtggatt

SEQ ID NO: 4097893 - DNA, 25 bp, Homo sapien
tgagataccattttgcaattgcccc

SEQ ID NO: 4097894 - DNA, 25 bp, Homo sapien
cctgatgagcttattggtaggcaac

SEQ ID NO: 4097895 - DNA, 25 bp, Homo sapien
tgctaatggtcacaggattgaggcc

SEQ ID NO: 4097896 - DNA, 25 bp, Homo sapien
cacagctaagctcctctgaaggcag

SEQ ID NO: 4097897 - DNA, 25 bp, Homo sapien
ttatgagtttatggctatgaaaaca

SEQ ID NO: 4097898 - DNA, 25 bp, Homo sapien
tataagtgtatcacaattttcttta

SEQ ID NO: 4097899 - DNA, 25 bp, Homo sapien
tgcagaaatgttctgactaggagtg

SEQ ID NO: 4097900 - DNA, 25 bp, Homo sapien
tctgactaggagtggttattgactg

SEQ ID NO: 4097901 - DNA, 25 bp, Homo sapien
aaaatttgtgttcacgggatgcacc

SEQ ID NO: 4097902 - DNA, 25 bp, Homo sapien
cagccccaggtgaagcatcaaggat

SEQ ID NO: 4097903 - DNA, 25 bp, Homo sapien
taccccgtaagcatgaaaccagtgt

SEQ ID NO: 4097904 - DNA, 25 bp, Homo sapien
ttccggagcctcaaacaagcattat

SEQ ID NO: 4097905 - DNA, 25 bp, Homo sapien
ggtactatctcaagcaccacggcaa

SEQ ID NO: 4097906 - DNA, 25 bp, Homo sapien
tctttcagaaccagcggtactatct

SEQ ID NO: 4097907 - DNA, 25 bp, Homo sapien
tgtaccctgacgaagaggccatcca

SEQ ID NO: 4097908 - DNA, 25 bp, Homo sapien
gagtttcatacaagacgtgggcctg

SEQ ID NO: 4097909 - DNA, 25 bp, Homo sapien
tgcttacggtagcaagacatttgca

SEQ ID NO: 4097910 - DNA, 25 bp, Homo sapien
gggagcactgtgattgattgcaaca

SEQ ID NO: 4097911 - DNA, 25 bp, Homo sapien
gattgcaacagctcaaggcgtgatt

SEQ ID NO: 4097912 - DNA, 25 bp, Homo sapien
gcttattcagcgtccatgccagttt

SEQ ID NO: 4097913 - DNA, 25 bp, Homo sapien
ctaggaacccctgtggtagtgactg

SEQ ID NO: 4097914 - DNA, 25 bp, Homo sapien
tacacaacgcgggtacttctgaaac

SEQ ID NO: 4097915 - DNA, 25 bp, Homo sapien
tctgaaacacctctaatggaaacct

SEQ ID NO: 4097916 - DNA, 25 bp, Homo sapien
tgaagtgtgtctatacgtacgtgtg

SEQ ID NO: 4097917 - DNA, 25 bp, Homo sapien
ctgaaaggaactagagggcatggct

SEQ ID NO: 4097918 - DNA, 25 bp, Homo sapien
acaacttgtacatgaattgcatcat

SEQ ID NO: 4097919 - DNA, 25 bp, Homo sapien
caccgatgttttacctaacaacttg

SEQ ID NO: 4097920 - DNA, 25 bp, Homo sapien
tacctaatttgcaaactcaccgatg

SEQ ID NO: 4097921 - DNA, 25 bp, Homo sapien
tcatcatcattgttgaagtcatcag

SEQ ID NO: 4097922 - DNA, 25 bp, Homo sapien
gaagtcatcagtatcatttgcagtg

SEQ ID NO: 4097923 - DNA, 25 bp, Homo sapien
tttcatcatcattgttgaagtcatc

SEQ ID NO: 4097924 - DNA, 25 bp, Homo sapien
agtatcatttgcagtgtagcctaag

SEQ ID NO: 4097925 - DNA, 25 bp, Homo sapien
caaactttatcttgccccaactgaa

SEQ ID NO: 4097926 - DNA, 25 bp, Homo sapien
tccaggtccctatctaataagaaga

SEQ ID NO: 4097927 - DNA, 25 bp, Homo sapien
catttgtctgttaacaagtcaccga

SEQ ID NO: 4097928 - DNA, 25 bp, Homo sapien
caattgctattcttcagtgctctca

SEQ ID NO: 4097929 - DNA, 25 bp, Homo sapien
gatgtatcctgtaaatcttgaatgc

SEQ ID NO: 4097930 - DNA, 25 bp, Homo sapien
taacaggcgattagacagtttaacc

SEQ ID NO: 4097931 - DNA, 25 bp, Homo sapien
tgcagtgctagattgataacaggcg

SEQ ID NO: 4097932 - DNA, 25 bp, Homo sapien
gaaaaccacatgtggtgtaactaaa

SEQ ID NO: 4097933 - DNA, 25 bp, Homo sapien
tattattcctcaggataaactctct

SEQ ID NO: 4097934 - DNA, 25 bp, Homo sapien
cgagtgtggctgcattggaaatatt

SEQ ID NO: 4097935 - DNA, 25 bp, Homo sapien
gctaccagcacaaccagatgtagtg

SEQ ID NO: 4097936 - DNA, 25 bp, Homo sapien
ttcaatttaactgccgctaccagca

SEQ ID NO: 4097937 - DNA, 25 bp, Homo sapien
cagataacacagactgcaaaatttt

SEQ ID NO: 4097938 - DNA, 25 bp, Homo sapien
tgaaatgatgcttaaactggaacca

SEQ ID NO: 4097939 - DNA, 25 bp, Homo sapien
gaaaaacacgttatagagcacttga

SEQ ID NO: 4097940 - DNA, 25 bp, Homo sapien
tgtcttgtagcagttgaaataatga

SEQ ID NO: 4097941 - DNA, 25 bp, Homo sapien
caggtttcgaccaacacagaggtgt

SEQ ID NO: 4097942 - DNA, 25 bp, Homo sapien
tgtcttccgaaatctaccagtgggt

SEQ ID NO: 4097943 - DNA, 25 bp, Homo sapien
tatcagtcctcaattggtcaaccag

SEQ ID NO: 4097944 - DNA, 25 bp, Homo sapien
taagcctttggagcaacaggtttcg

SEQ ID NO: 4097945 - DNA, 25 bp, Homo sapien
ttctaatagtagtgtggccggtgct

SEQ ID NO: 4097946 - DNA, 25 bp, Homo sapien
cattggaagtctgacagtgcgctgc

SEQ ID NO: 4097947 - DNA, 25 bp, Homo sapien
tgcgctgcataaacaccttgagtac

SEQ ID NO: 4097948 - DNA, 25 bp, Homo sapien
tccagaggacagagcttatagaggc

SEQ ID NO: 4097949 - DNA, 25 bp, Homo sapien
taatattgcaagtgacagccagaag

SEQ ID NO: 4097950 - DNA, 25 bp, Homo sapien
tggccttcccaatgcgcgttattcg

SEQ ID NO: 4097951 - DNA, 25 bp, Homo sapien
cacagtgtacagctcataacgggtt

SEQ ID NO: 4097952 - DNA, 25 bp, Homo sapien
cagcgagggcagaatcaaaagtggc

SEQ ID NO: 4097953 - DNA, 25 bp, Homo sapien
gaaacgatgcagaaatcggtcctga

SEQ ID NO: 4097954 - DNA, 25 bp, Homo sapien
gttgtaatgatgtcggtcacagata

SEQ ID NO: 4097955 - DNA, 25 bp, Homo sapien
tcggtcctgacatcccagacagaca

SEQ ID NO: 4097956 - DNA, 25 bp, Homo sapien
aagaagcgtgcaatgtttacaggat

SEQ ID NO: 4097957 - DNA, 25 bp, Homo sapien
cagtctgctggcaaacattagcatt

SEQ ID NO: 4097958 - DNA, 25 bp, Homo sapien
tcttaaatattaacaacctaagcat

SEQ ID NO: 4097959 - DNA, 25 bp, Homo sapien
gaatagcatgaataggcatcttaaa

SEQ ID NO: 4097960 - DNA, 25 bp, Homo sapien
tgacaaatgtgcagacaggaatagc

SEQ ID NO: 4097961 - DNA, 25 bp, Homo sapien
agggagcccgggagcggtgcgcagc

SEQ ID NO: 4097962 - DNA, 25 bp, Homo sapien
cgccaacccccgtgtgcgccccctg

SEQ ID NO: 4097963 - DNA, 25 bp, Homo sapien
gggagcccgggagcggtgcgcagca

SEQ ID NO: 4097964 - DNA, 25 bp, Homo sapien
tgtcttccgcgccaacccccgtgtg

SEQ ID NO: 4097965 - DNA, 25 bp, Homo sapien
tttggagccacacaactaatcctgg

SEQ ID NO: 4097966 - DNA, 25 bp, Homo sapien
tctttattgctcagactggccgaca

SEQ ID NO: 4097967 - DNA, 25 bp, Homo sapien
tactgttgggtacaagataggctgc

SEQ ID NO: 4097968 - DNA, 25 bp, Homo sapien
caatgtttccctctaagctggtggc

SEQ ID NO: 4097969 - DNA, 25 bp, Homo sapien
cataaaattgataagaggccacact

SEQ ID NO: 4097970 - DNA, 25 bp, Homo sapien
gatttcactttaatatggacacata

SEQ ID NO: 4097971 - DNA, 25 bp, Homo sapien
tcaaagagacagtagagagtaaaag

SEQ ID NO: 4097972 - DNA, 25 bp, Homo sapien
gaagtcacacaatgtgttgcaggaa

SEQ ID NO: 4097973 - DNA, 25 bp, Homo sapien
gcaatctggttcaaatctttgcccc

SEQ ID NO: 4097974 - DNA, 25 bp, Homo sapien
cacagaccaggtatactgcacttat

SEQ ID NO: 4097975 - DNA, 25 bp, Homo sapien
taatgttcactagcaccatagattg

SEQ ID NO: 4097976 - DNA, 25 bp, Homo sapien
tgctaaaagggttcagaatgttcac

SEQ ID NO: 4097977 - DNA, 25 bp, Homo sapien
acatcacatcagaagtatttgccat

SEQ ID NO: 4097978 - DNA, 25 bp, Homo sapien
tacatcacatcagaagtatttgcca

SEQ ID NO: 4097979 - DNA, 25 bp, Homo sapien
atacatcacatcagaagtatttgcc

SEQ ID NO: 4097980 - DNA, 25 bp, Homo sapien
actgccatcaaccttttgggatatt

SEQ ID NO: 4097981 - DNA, 25 bp, Homo sapien
taactgccatcaaccttttgggata

SEQ ID NO: 4097982 - DNA, 25 bp, Homo sapien
aactgccatcaaccttttgggatat

SEQ ID NO: 4097983 - DNA, 25 bp, Homo sapien
ataactgccatcaaccttttgggat

SEQ ID NO: 4097984 - DNA, 25 bp, Homo sapien
tgctctgatctaatacatgctacta

SEQ ID NO: 4097985 - DNA, 25 bp, Homo sapien
catctaataagagatgacacaggca

SEQ ID NO: 4097986 - DNA, 25 bp, Homo sapien
gtcaataacttgtccctggtcatac

SEQ ID NO: 4097987 - DNA, 25 bp, Homo sapien
caggcagtctgagcccatgctctga

SEQ ID NO: 4097988 - DNA, 25 bp, Homo sapien
taatagatgtgcccatctgaggacc

SEQ ID NO: 4097989 - DNA, 25 bp, Homo sapien
aatagatgtgcccatctgaggacca

SEQ ID NO: 4097990 - DNA, 25 bp, Homo sapien
tgggttctgcagctaacttcttaca

SEQ ID NO: 4097991 - DNA, 25 bp, Homo sapien
agctaacttcttacaagagcagagg

SEQ ID NO: 4097992 - DNA, 25 bp, Homo sapien
ctacaaggattcacatgtgggttct

SEQ ID NO: 4097993 - DNA, 25 bp, Homo sapien
tacaaggattcacatgtgggttctg

SEQ ID NO: 4097994 - DNA, 25 bp, Homo sapien
cttagaaggtaaatctgtcttaata

SEQ ID NO: 4097995 - DNA, 25 bp, Homo sapien
gaatttcactactaccagactctgg

SEQ ID NO: 4097996 - DNA, 25 bp, Homo sapien
accacttgctgtttgaatcctttga

SEQ ID NO: 4097997 - DNA, 25 bp, Homo sapien
ggttcttcatgtgaccggttatttc

SEQ ID NO: 4097998 - DNA, 25 bp, Homo sapien
aagagcttccacatctaagctccca

SEQ ID NO: 4097999 - DNA, 25 bp, Homo sapien
aaagagcttccacatctaagctccc

SEQ ID NO: 4098000 - DNA, 25 bp, Homo sapien
gagcttccacatctaagctcccatt

SEQ ID NO: 4098001 - DNA, 25 bp, Homo sapien
agagcttccacatctaagctcccat

SEQ ID NO: 4098002 - DNA, 25 bp, Homo sapien
ttttcctccatgtagtgtgctctcc

SEQ ID NO: 4098003 - DNA, 25 bp, Homo sapien
catctccttcccaactgacccatga

SEQ ID NO: 4098004 - DNA, 25 bp, Homo sapien
taaatgtttccctgcggctcttcat

SEQ ID NO: 4098005 - DNA, 25 bp, Homo sapien
tcccaactgacccatgatatctctg

SEQ ID NO: 4098006 - DNA, 25 bp, Homo sapien
aagcataacccatttcccagcccac

SEQ ID NO: 4098007 - DNA, 25 bp, Homo sapien
ctaagcataacccatttcccagccc

SEQ ID NO: 4098008 - DNA, 25 bp, Homo sapien
taagcataacccatttcccagccca

SEQ ID NO: 4098009 - DNA, 25 bp, Homo sapien
ttttcctataagagaccgtgtcatc

SEQ ID NO: 4098010 - DNA, 25 bp, Homo sapien
aaatgttcagaactacggcagtagc

SEQ ID NO: 4098011 - DNA, 25 bp, Homo sapien
ttatttagagggtagtgcatgatcc

SEQ ID NO: 4098012 - DNA, 25 bp, Homo sapien
cagtagcagtaagggcaagcacaca

SEQ ID NO: 4098013 - DNA, 25 bp, Homo sapien
aaagaggccatggggcctttttgat

SEQ ID NO: 4098014 - DNA, 25 bp, Homo sapien
aagaggccatggggcctttttgatg

SEQ ID NO: 4098015 - DNA, 25 bp, Homo sapien
agagtgttggtggactggcagaggt

SEQ ID NO: 4098016 - DNA, 25 bp, Homo sapien
cactgagagtgttggtggactggca

SEQ ID NO: 4098017 - DNA, 25 bp, Homo sapien
ctgagagtgttggtggactggcaga

SEQ ID NO: 4098018 - DNA, 25 bp, Homo sapien
tgagagtgttggtggactggcagag

SEQ ID NO: 4098019 - DNA, 25 bp, Homo sapien
actcaggaggtacagaggtgacagc

SEQ ID NO: 4098020 - DNA, 25 bp, Homo sapien
gatatatcggacttagaaagcatct

SEQ ID NO: 4098021 - DNA, 25 bp, Homo sapien
cagaaagtgggtagatatatcggac

SEQ ID NO: 4098022 - DNA, 25 bp, Homo sapien
tcagcaccacattccatgtgactca

SEQ ID NO: 4098023 - DNA, 25 bp, Homo sapien
aaggtataagctgcctccaacattc

SEQ ID NO: 4098024 - DNA, 25 bp, Homo sapien
ttaagaatcagctaaggtataagct

SEQ ID NO: 4098025 - DNA, 25 bp, Homo sapien
gaatcagctaaggtataagctgcct

SEQ ID NO: 4098026 - DNA, 25 bp, Homo sapien
gctaaggtataagctgcctccaaca

SEQ ID NO: 4098027 - DNA, 25 bp, Homo sapien
ctttagaaaggaccccagactcttg

SEQ ID NO: 4098028 - DNA, 25 bp, Homo sapien
gaagtgtggtatatctcctatgtct

SEQ ID NO: 4098029 - DNA, 25 bp, Homo sapien
tttaaatctctgaccagtaagcact

SEQ ID NO: 4098030 - DNA, 25 bp, Homo sapien
tctgactgtatagaggagagaggaa

SEQ ID NO: 4098031 - DNA, 25 bp, Homo sapien
ggttgtgaatagaatgtcagattgg

SEQ ID NO: 4098032 - DNA, 25 bp, Homo sapien
gaatgtcagattggatgtatcttca

SEQ ID NO: 4098033 - DNA, 25 bp, Homo sapien
ctttgtggttgtgaatagaatgtca

SEQ ID NO: 4098034 - DNA, 25 bp, Homo sapien
aatatatgccatgctgtgataaaca

SEQ ID NO: 4098035 - DNA, 25 bp, Homo sapien
ccttgatcatttggctaatgtggtg

SEQ ID NO: 4098036 - DNA, 25 bp, Homo sapien
ttcacaggaaagataccacagaggt

SEQ ID NO: 4098037 - DNA, 25 bp, Homo sapien
tcacagtacctgttgtcagtatgtc

SEQ ID NO: 4098038 - DNA, 25 bp, Homo sapien
gtatttcaaatattgggtctcctag

SEQ ID NO: 4098039 - DNA, 25 bp, Homo sapien
tgccaagcccatagaagtgttaccc

SEQ ID NO: 4098040 - DNA, 25 bp, Homo sapien
gcataaggcgcacatctttgacacc

SEQ ID NO: 4098041 - DNA, 25 bp, Homo sapien
caattgtggcccctagcataaggcg

SEQ ID NO: 4098042 - DNA, 25 bp, Homo sapien
ttggatcccacaactacaaagagtg

SEQ ID NO: 4098043 - DNA, 25 bp, Homo sapien
gcagtcattagatcagcctatagac

SEQ ID NO: 4098044 - DNA, 25 bp, Homo sapien
tatagactgcacataatctccaagt

SEQ ID NO: 4098045 - DNA, 25 bp, Homo sapien
taactctccataaggcattacggta

SEQ ID NO: 4098046 - DNA, 25 bp, Homo sapien
gacacaggccgtacatgttgcaagt

SEQ ID NO: 4098047 - DNA, 25 bp, Homo sapien
tgcataattctttggcaccccaggc

SEQ ID NO: 4098048 - DNA, 25 bp, Homo sapien
ttccccgcagggttttattcgtgca

SEQ ID NO: 4098049 - DNA, 25 bp, Homo sapien
cccgcagggttttattcgtgcataa

SEQ ID NO: 4098050 - DNA, 25 bp, Homo sapien
gcataattctttggcaccccaggca

SEQ ID NO: 4098051 - DNA, 25 bp, Homo sapien
gcccaaactgtcatgctctccttag

SEQ ID NO: 4098052 - DNA, 25 bp, Homo sapien
cataactacatgcacactgaatttc

SEQ ID NO: 4098053 - DNA, 25 bp, Homo sapien
tggacttcagcccaaactgtcatgc

SEQ ID NO: 4098054 - DNA, 25 bp, Homo sapien
ccataactacatgcacactgaattt

SEQ ID NO: 4098055 - DNA, 25 bp, Homo sapien
cggccattgtaaacgcaagcagatg

SEQ ID NO: 4098056 - DNA, 25 bp, Homo sapien
gccggagcaggggaaaacaacattc

SEQ ID NO: 4098057 - DNA, 25 bp, Homo sapien
taaacgcaagcagatgccggagcag

SEQ ID NO: 4098058 - DNA, 25 bp, Homo sapien
gtaaagaaaaacactgcggccattg

SEQ ID NO: 4098059 - DNA, 25 bp, Homo sapien
taaagtacaactggagagcagactg

SEQ ID NO: 4098060 - DNA, 25 bp, Homo sapien
ttttacaacagatctgctgcttgat

SEQ ID NO: 4098061 - DNA, 25 bp, Homo sapien
gagcagactgttagcaataaggcca

SEQ ID NO: 4098062 - DNA, 25 bp, Homo sapien
aacagcagttgaagcactgtgggca

SEQ ID NO: 4098063 - DNA, 25 bp, Homo sapien
tcagtatagaccagtttagacaact

SEQ ID NO: 4098064 - DNA, 25 bp, Homo sapien
ttctgcttcgctgatttcatcacac

SEQ ID NO: 4098065 - DNA, 25 bp, Homo sapien
ttttctgcttcgctgatttcatcac

SEQ ID NO: 4098066 - DNA, 25 bp, Homo sapien
caactttattactcagtatagacca

SEQ ID NO: 4098067 - DNA, 25 bp, Homo sapien
cacggatacatagtgcagctggagc

SEQ ID NO: 4098068 - DNA, 25 bp, Homo sapien
gagacatgagaatccaacaactgag

SEQ ID NO: 4098069 - DNA, 25 bp, Homo sapien
gctggagcgggaagagaaaagttga

SEQ ID NO: 4098070 - DNA, 25 bp, Homo sapien
atccaacaactgagagccaagcacg

SEQ ID NO: 4098071 - DNA, 25 bp, Homo sapien
cgtttgctatctaaacagtcattga

SEQ ID NO: 4098072 - DNA, 25 bp, Homo sapien
tcaaagtccattccgtttgctatct

SEQ ID NO: 4098073 - DNA, 25 bp, Homo sapien
tgactctgtgccacattgttgcatc

SEQ ID NO: 4098074 - DNA, 25 bp, Homo sapien
aaaatgctcttttacatatacataa

SEQ ID NO: 4098075 - DNA, 25 bp, Homo sapien
gctaaggagaacttctgcttcctgt

SEQ ID NO: 4098076 - DNA, 25 bp, Homo sapien
tgttctggtgttaaagaacccagta

SEQ ID NO: 4098077 - DNA, 25 bp, Homo sapien
gaacccagtataaggcaagaagaaa

SEQ ID NO: 4098078 - DNA, 25 bp, Homo sapien
agaaaaatcagctaaggagaacttc

SEQ ID NO: 4098079 - DNA, 25 bp, Homo sapien
aacgggtgttggatgagaaagttca

SEQ ID NO: 4098080 - DNA, 25 bp, Homo sapien
tcctccgacttgaacgggtgttgga

SEQ ID NO: 4098081 - DNA, 25 bp, Homo sapien
tgaaattgatacctttccatcatga

SEQ ID NO: 4098082 - DNA, 25 bp, Homo sapien
gaaattgatacctttccatcatgaa

SEQ ID NO: 4098083 - DNA, 25 bp, Homo sapien
gtcagcctgggtctttgagttatag

SEQ ID NO: 4098084 - DNA, 25 bp, Homo sapien
ccatgtttgagatggtagctattcc

SEQ ID NO: 4098085 - DNA, 25 bp, Homo sapien
gcatcacgccatgtttgagatggta

SEQ ID NO: 4098086 - DNA, 25 bp, Homo sapien
gagttatagaatccacagaggtctc

SEQ ID NO: 4098087 - DNA, 25 bp, Homo sapien
agtagctctgggcaatcacttgtga

SEQ ID NO: 4098088 - DNA, 25 bp, Homo sapien
ggcaatcacttgtgagtggaagtaa

SEQ ID NO: 4098089 - DNA, 25 bp, Homo sapien
tctgggcaatcacttgtgagtggaa

SEQ ID NO: 4098090 - DNA, 25 bp, Homo sapien
agccaggtaagtagctctgggcaat

SEQ ID NO: 4098091 - DNA, 25 bp, Homo sapien
ttttttattcgccagatgaatgcca

SEQ ID NO: 4098092 - DNA, 25 bp, Homo sapien
gaaaattagcacctaatctactgca

SEQ ID NO: 4098093 - DNA, 25 bp, Homo sapien
ttttctattccttcaatggccacat

SEQ ID NO: 4098094 - DNA, 25 bp, Homo sapien
aacttttgactccttttatgccatt

SEQ ID NO: 4098095 - DNA, 25 bp, Homo sapien
ccgtaggggatgatgttaaaccatt

SEQ ID NO: 4098096 - DNA, 25 bp, Homo sapien
tcactatgcaaggacagggccgtag

SEQ ID NO: 4098097 - DNA, 25 bp, Homo sapien
cattcctgagaaattcacccccata

SEQ ID NO: 4098098 - DNA, 25 bp, Homo sapien
tcacacatcacatagcaaaagcagg

SEQ ID NO: 4098099 - DNA, 25 bp, Homo sapien
cctctgtgtaggagtccattgtcaa

SEQ ID NO: 4098100 - DNA, 25 bp, Homo sapien
tgtcctagaccatgatcatcctctg

SEQ ID NO: 4098101 - DNA, 25 bp, Homo sapien
ctcagggaaggtatataattggtca

SEQ ID NO: 4098102 - DNA, 25 bp, Homo sapien
gtcaacataaatgccatccagccag

SEQ ID NO: 4098103 - DNA, 25 bp, Homo sapien
cggctggagggtcttcagggtgacc

SEQ ID NO: 4098104 - DNA, 25 bp, Homo sapien
ctgcggctggagggtcttcagggtg

SEQ ID NO: 4098105 - DNA, 25 bp, Homo sapien
tggagggtcttcagggtgacctgca

SEQ ID NO: 4098106 - DNA, 25 bp, Homo sapien
agggtcttcagggtgacctgcatgg

SEQ ID NO: 4098107 - DNA, 25 bp, Homo sapien
caatgtctatcttgcaggtcaaggt

SEQ ID NO: 4098108 - DNA, 25 bp, Homo sapien
ttaatgtttgacctgctaccagaga

SEQ ID NO: 4098109 - DNA, 25 bp, Homo sapien
tcaatgtctatcttgcaggtcaagg

SEQ ID NO: 4098110 - DNA, 25 bp, Homo sapien
tgtttgacctgctaccagagaggca

SEQ ID NO: 4098111 - DNA, 25 bp, Homo sapien
tggacactgctttgggttcggtcac

SEQ ID NO: 4098112 - DNA, 25 bp, Homo sapien
gtgtggacactgctttgggttcggt

SEQ ID NO: 4098113 - DNA, 25 bp, Homo sapien
tagtgctggtgtggacactgctttg

SEQ ID NO: 4098114 - DNA, 25 bp, Homo sapien
ctagtgctggtgtggacactgcttt

SEQ ID NO: 4098115 - DNA, 25 bp, Homo sapien
atgagttgatgtcaggctagtagcc

SEQ ID NO: 4098116 - DNA, 25 bp, Homo sapien
agttgcaggttcagaggacactgtc

SEQ ID NO: 4098117 - DNA, 25 bp, Homo sapien
tatcgtaagactgacccatcacaag

SEQ ID NO: 4098118 - DNA, 25 bp, Homo sapien
gaagaatctcctgatgtactatgag

SEQ ID NO: 4098119 - DNA, 25 bp, Homo sapien
tatctccagggattcccattaaaag

SEQ ID NO: 4098120 - DNA, 25 bp, Homo sapien
actccactgccctgtcagggttgtt

SEQ ID NO: 4098121 - DNA, 25 bp, Homo sapien
tcccattaaaaggtactccactgcc

SEQ ID NO: 4098122 - DNA, 25 bp, Homo sapien
agggttgttggaactggctcttggg

SEQ ID NO: 4098123 - DNA, 25 bp, Homo sapien
gaggagccccagtactagctgcttg

SEQ ID NO: 4098124 - DNA, 25 bp, Homo sapien
aatctatctactgtagtaacactgg

SEQ ID NO: 4098125 - DNA, 25 bp, Homo sapien
ttgaggattctctcaatctatctac

SEQ ID NO: 4098126 - DNA, 25 bp, Homo sapien
gattctctcaatctatctactgtag

SEQ ID NO: 4098127 - DNA, 25 bp, Homo sapien
tatctactgtagtaacactggaaga

SEQ ID NO: 4098128 - DNA, 25 bp, Homo sapien
tttacgtactgtgtggagttgcagc

SEQ ID NO: 4098129 - DNA, 25 bp, Homo sapien
gaacaagctggtgtaatgcactagt

SEQ ID NO: 4098130 - DNA, 25 bp, Homo sapien
ggtgtaatgcactagtgcgaagtgt

SEQ ID NO: 4098131 - DNA, 25 bp, Homo sapien
aaatcggcacccaaattcttattct

SEQ ID NO: 4098132 - DNA, 25 bp, Homo sapien
aactatgaataatgcaccaacatcc

SEQ ID NO: 4098133 - DNA, 25 bp, Homo sapien
tccttaggaaggaccagttgtttca

SEQ ID NO: 4098134 - DNA, 25 bp, Homo sapien
gaataatgcaccaacatccttagga

SEQ ID NO: 4098135 - DNA, 25 bp, Homo sapien
aacatccttaggaaggaccagttgt

SEQ ID NO: 4098136 - DNA, 25 bp, Homo sapien
tagttctagtgccaaggtaccttta

SEQ ID NO: 4098137 - DNA, 25 bp, Homo sapien
tagtgccaaggtacctttatctaag

SEQ ID NO: 4098138 - DNA, 25 bp, Homo sapien
gccaaggtacctttatctaagatgc

SEQ ID NO: 4098139 - DNA, 25 bp, Homo sapien
aggtacctttatctaagatgctgcc

SEQ ID NO: 4098140 - DNA, 25 bp, Homo sapien
ttcaggtagacttctggctctagca

SEQ ID NO: 4098141 - DNA, 25 bp, Homo sapien
gttttgctttcttcaaatgcaattt

SEQ ID NO: 4098142 - DNA, 25 bp, Homo sapien
atgcaatttcttctatggccaagag

SEQ ID NO: 4098143 - DNA, 25 bp, Homo sapien
ttctggctctagcagtgttttgctt

SEQ ID NO: 4098144 - DNA, 25 bp, Homo sapien
catcacgttaccacctgtgcttcgt

SEQ ID NO: 4098145 - DNA, 25 bp, Homo sapien
tgcttcgtgtgttcctgtgactcct

SEQ ID NO: 4098146 - DNA, 25 bp, Homo sapien
gcatggcgtttcagagtttctctga

SEQ ID NO: 4098147 - DNA, 25 bp, Homo sapien
aaatgcaatgcatggcgtttcagag

SEQ ID NO: 4098148 - DNA, 25 bp, Homo sapien
atctgctactgtgtagtacattgca

SEQ ID NO: 4098149 - DNA, 25 bp, Homo sapien
cctcctccaagagctttgttaactt

SEQ ID NO: 4098150 - DNA, 25 bp, Homo sapien
tgtagtacattgcagaagaacagat

SEQ ID NO: 4098151 - DNA, 25 bp, Homo sapien
actgtgtagtacattgcagaagaac

SEQ ID NO: 4098152 - DNA, 25 bp, Homo sapien
gctgaggaatctggtggtgcacaca

SEQ ID NO: 4098153 - DNA, 25 bp, Homo sapien
caataatgaagtgaggaacgggatg

SEQ ID NO: 4098154 - DNA, 25 bp, Homo sapien
cacacatcctgatggtccaggatag

SEQ ID NO: 4098155 - DNA, 25 bp, Homo sapien
tggtggtgcacacattcccgggaca

SEQ ID NO: 4098156 - DNA, 25 bp, Homo sapien
aataatgagaaaaccccttggtgag

SEQ ID NO: 4098157 - DNA, 25 bp, Homo sapien
ataatgagaaaaccccttggtgagg

SEQ ID NO: 4098158 - DNA, 25 bp, Homo sapien
aatttaagatatgggagacacgttc

SEQ ID NO: 4098159 - DNA, 25 bp, Homo sapien
actgagagagatagaatttaagata

SEQ ID NO: 4098160 - DNA, 25 bp, Homo sapien
gatagaatttaagatatgggagaca

SEQ ID NO: 4098161 - DNA, 25 bp, Homo sapien
atatgggagacacgttcatgagtac

SEQ ID NO: 4098162 - DNA, 25 bp, Homo sapien
ggtggttctgatatcttcttcttcc

SEQ ID NO: 4098163 - DNA, 25 bp, Homo sapien
tctgaaaggtacttgtaatgtttcc

SEQ ID NO: 4098164 - DNA, 25 bp, Homo sapien
tgaaaggtacttgtaatgtttcctc

SEQ ID NO: 4098165 - DNA, 25 bp, Homo sapien
gctctgaaaggtacttgtaatgttt

SEQ ID NO: 4098166 - DNA, 25 bp, Homo sapien
cagctctgaaaggtacttgtaatgt

SEQ ID NO: 4098167 - DNA, 25 bp, Homo sapien
tatagggcaccactgttttcttaca

SEQ ID NO: 4098168 - DNA, 25 bp, Homo sapien
tttcatcatccctcaacgtccttgg

SEQ ID NO: 4098169 - DNA, 25 bp, Homo sapien
cctggttgcaaagttatagggcacc

SEQ ID NO: 4098170 - DNA, 25 bp, Homo sapien
ccttggcttatggtacctggttgca

SEQ ID NO: 4098171 - DNA, 25 bp, Homo sapien
agacagaggccttagcgaccaggta

SEQ ID NO: 4098172 - DNA, 25 bp, Homo sapien
gaaaagtttagttgctaaggagaca

SEQ ID NO: 4098173 - DNA, 25 bp, Homo sapien
tagcgaccaggtaacaaggcctctg

SEQ ID NO: 4098174 - DNA, 25 bp, Homo sapien
gaaggcattaaaacagcttcaaggc

SEQ ID NO: 4098175 - DNA, 25 bp, Homo sapien
tgattgtaattccttgcagctttcc

SEQ ID NO: 4098176 - DNA, 25 bp, Homo sapien
gatctaatgagggactggaaaagcc

SEQ ID NO: 4098177 - DNA, 25 bp, Homo sapien
tcccactcaactgtaagacaatggc

SEQ ID NO: 4098178 - DNA, 25 bp, Homo sapien
tctgctgaattagcggcatcgtgcc

SEQ ID NO: 4098179 - DNA, 25 bp, Homo sapien
gagatgacacttgaattttcgcaga

SEQ ID NO: 4098180 - DNA, 25 bp, Homo sapien
tgtttccataatcctaatttcaaat

SEQ ID NO: 4098181 - DNA, 25 bp, Homo sapien
ctgaatgagcccaaattgagatgac

SEQ ID NO: 4098182 - DNA, 25 bp, Homo sapien
cttgaattttcgcagatgtttccat

SEQ ID NO: 4098183 - DNA, 25 bp, Homo sapien
tgttcctcagtgtgtgcactgtcct

SEQ ID NO: 4098184 - DNA, 25 bp, Homo sapien
cctcagtgtgtgcactgtcctgaga

SEQ ID NO: 4098185 - DNA, 25 bp, Homo sapien
tggtaccgagattctgcctgctctg

SEQ ID NO: 4098186 - DNA, 25 bp, Homo sapien
tgagagactggctggtaccgagatt

SEQ ID NO: 4098187 - DNA, 25 bp, Homo sapien
cctgtgtctttaattactggtaact

SEQ ID NO: 4098188 - DNA, 25 bp, Homo sapien
tctgatttcatgactacgacgggcc

SEQ ID NO: 4098189 - DNA, 25 bp, Homo sapien
cacaaaaggaagatcaaaactttct

SEQ ID NO: 4098190 - DNA, 25 bp, Homo sapien
gaggcaagtggtccccgttcactag

SEQ ID NO: 4098191 - DNA, 25 bp, Homo sapien
acttccagctatggctgagcacgtg

SEQ ID NO: 4098192 - DNA, 25 bp, Homo sapien
ttaatttgcaccgactgctttgcct

SEQ ID NO: 4098193 - DNA, 25 bp, Homo sapien
ctgggaagttcgctctaggtccact

SEQ ID NO: 4098194 - DNA, 25 bp, Homo sapien
tgagcacgtggagatacccaatcct

SEQ ID NO: 4098195 - DNA, 25 bp, Homo sapien
aactttgttaactgcacagttaatc

SEQ ID NO: 4098196 - DNA, 25 bp, Homo sapien
actgcacagttcatctgccccaaaa

SEQ ID NO: 4098197 - DNA, 25 bp, Homo sapien
aactgcacagttaatctgcccttta

SEQ ID NO: 4098198 - DNA, 25 bp, Homo sapien
aagtctgttaactgcacagttcatc

SEQ ID NO: 4098199 - DNA, 25 bp, Homo sapien
gtcctctccagtatcctcaaaggtg

SEQ ID NO: 4098200 - DNA, 25 bp, Homo sapien
gaccaaaaggctgcaacagaatgag

SEQ ID NO: 4098201 - DNA, 25 bp, Homo sapien
gcagctgcttaaaagtggactggat

SEQ ID NO: 4098202 - DNA, 25 bp, Homo sapien
gccagtgagtaagaagtgttcaacc

SEQ ID NO: 4098203 - DNA, 25 bp, Homo sapien
gaaaactatctttccattatcgcca

SEQ ID NO: 4098204 - DNA, 25 bp, Homo sapien
tgtagatctagttgccgtgccctct

SEQ ID NO: 4098205 - DNA, 25 bp, Homo sapien
cattatcgccaacagatttggtgga

SEQ ID NO: 4098206 - DNA, 25 bp, Homo sapien
caacagatttggtggaatgtagatc

SEQ ID NO: 4098207 - DNA, 25 bp, Homo sapien
ctgagcttatagtgaacttcttctt

SEQ ID NO: 4098208 - DNA, 25 bp, Homo sapien
gagcttatagtgaacttcttcttcc

SEQ ID NO: 4098209 - DNA, 25 bp, Homo sapien
tgagcttatagtgaacttcttcttc

SEQ ID NO: 4098210 - DNA, 25 bp, Homo sapien
taaccatacggaatctggaaaatgc

SEQ ID NO: 4098211 - DNA, 25 bp, Homo sapien
caatatagtaagcagtgaagacagg

SEQ ID NO: 4098212 - DNA, 25 bp, Homo sapien
gaacaactagacttcagagacttgg

SEQ ID NO: 4098213 - DNA, 25 bp, Homo sapien
tgttggagtgttgggtcaaaacaca

SEQ ID NO: 4098214 - DNA, 25 bp, Homo sapien
gaaacattccactgctttccctgca

SEQ ID NO: 4098215 - DNA, 25 bp, Homo sapien
gccatcgtttttcactgtacttctt

SEQ ID NO: 4098216 - DNA, 25 bp, Homo sapien
tattggaaatgagcattctgtggtc

SEQ ID NO: 4098217 - DNA, 25 bp, Homo sapien
cagggaacaaagagtcaaagtaaag

SEQ ID NO: 4098218 - DNA, 25 bp, Homo sapien
gaccagtctggatgctatagagtaa

SEQ ID NO: 4098219 - DNA, 25 bp, Homo sapien
tctggatgctatagagtaaggtcat

SEQ ID NO: 4098220 - DNA, 25 bp, Homo sapien
tagggaccttgaccagtctggatgc

SEQ ID NO: 4098221 - DNA, 25 bp, Homo sapien
ggttttctcattatagggaccttga

SEQ ID NO: 4098222 - DNA, 25 bp, Homo sapien
cgtcccttcgtgactgttccttctt

SEQ ID NO: 4098223 - DNA, 25 bp, Homo sapien
gacgatacattacttatgacaagct

SEQ ID NO: 4098224 - DNA, 25 bp, Homo sapien
ttcttcattctcgacgatacattac

SEQ ID NO: 4098225 - DNA, 25 bp, Homo sapien
tacttatgacaagctttaacctcat

SEQ ID NO: 4098226 - DNA, 25 bp, Homo sapien
ggctaggtggatgcacacttggttt

SEQ ID NO: 4098227 - DNA, 25 bp, Homo sapien
aaggagaggctaggtggatgcacac

SEQ ID NO: 4098228 - DNA, 25 bp, Homo sapien
agaaaggagaggctaggtggatgca

SEQ ID NO: 4098229 - DNA, 25 bp, Homo sapien
agaggctaggtggatgcacacttgg

SEQ ID NO: 4098230 - DNA, 25 bp, Homo sapien
cctgaaggtcttttccactgtagac

SEQ ID NO: 4098231 - DNA, 25 bp, Homo sapien
taacctgaaggtcttttccactgta

SEQ ID NO: 4098232 - DNA, 25 bp, Homo sapien
aacctgaaggtcttttccactgtag

SEQ ID NO: 4098233 - DNA, 25 bp, Homo sapien
gaaggtcttttccactgtagacacg

SEQ ID NO: 4098234 - DNA, 25 bp, Homo sapien
tgtctctcccgtcatttgttgttgt

SEQ ID NO: 4098235 - DNA, 25 bp, Homo sapien
tttcttgacaagttccacccactca

SEQ ID NO: 4098236 - DNA, 25 bp, Homo sapien
tctgtctctcccgtcatttgttgtt

SEQ ID NO: 4098237 - DNA, 25 bp, Homo sapien
tctctcccgtcatttgttgttgtgg

SEQ ID NO: 4098238 - DNA, 25 bp, Homo sapien
caaaatctgcattcgtataagatct

SEQ ID NO: 4098239 - DNA, 25 bp, Homo sapien
atcaaaatctgcattcgtataagat

SEQ ID NO: 4098240 - DNA, 25 bp, Homo sapien
aatgcagactgtcgggcccatccaa

SEQ ID NO: 4098241 - DNA, 25 bp, Homo sapien
tcgggcccatccaagacctccagaa

SEQ ID NO: 4098242 - DNA, 25 bp, Homo sapien
tatcctgctcgggttggatattttt

SEQ ID NO: 4098243 - DNA, 25 bp, Homo sapien
aaattaactccaagggcaatatcct

SEQ ID NO: 4098244 - DNA, 25 bp, Homo sapien
gcttggggtttgtgtcttatgatgt

SEQ ID NO: 4098245 - DNA, 25 bp, Homo sapien
aattaactccaagggcaatatcctc

SEQ ID NO: 4098246 - DNA, 25 bp, Homo sapien
cagttgcttggggtttgtgtcttat

SEQ ID NO: 4098247 - DNA, 25 bp, Homo sapien
catttagtgccaatctgtggtaggt

SEQ ID NO: 4098248 - DNA, 25 bp, Homo sapien
aaggctgtagaaaccacctgggcaa

SEQ ID NO: 4098249 - DNA, 25 bp, Homo sapien
ccaagttgtcctagtcctactgttg

SEQ ID NO: 4098250 - DNA, 25 bp, Homo sapien
ggtctgttcacatgatcccaagttg

SEQ ID NO: 4098251 - DNA, 25 bp, Homo sapien
tgatggtgtcacacagtaccagtga

SEQ ID NO: 4098252 - DNA, 25 bp, Homo sapien
accagtgacatcttgctgatttgca

SEQ ID NO: 4098253 - DNA, 25 bp, Homo sapien
tgacatcttgctgatttgcacaagc

SEQ ID NO: 4098254 - DNA, 25 bp, Homo sapien
catgccagcgaagaaatgttctgtg

SEQ ID NO: 4098255 - DNA, 25 bp, Homo sapien
gaaagggccttgtggagttactatg

SEQ ID NO: 4098256 - DNA, 25 bp, Homo sapien
ggttcagtttcaccctggctctcgg

SEQ ID NO: 4098257 - DNA, 25 bp, Homo sapien
tgaccataatgaaaagagccacctg

SEQ ID NO: 4098258 - DNA, 25 bp, Homo sapien
tggctctcggccagtgataactgag

SEQ ID NO: 4098259 - DNA, 25 bp, Homo sapien
acagctaattgtacctccctggtgg

SEQ ID NO: 4098260 - DNA, 25 bp, Homo sapien
acagtgcagcctaagatatgctgaa

SEQ ID NO: 4098261 - DNA, 25 bp, Homo sapien
ggccacttcaagtggaataagccct

SEQ ID NO: 4098262 - DNA, 25 bp, Homo sapien
tacctccctggtggccacttcaagt

SEQ ID NO: 4098263 - DNA, 25 bp, Homo sapien
tattacaaagttgattttcttccca

SEQ ID NO: 4098264 - DNA, 25 bp, Homo sapien
attacaaagttgattttcttcccat

SEQ ID NO: 4098265 - DNA, 25 bp, Homo sapien
caaagttgattttcttcccatttca

SEQ ID NO: 4098266 - DNA, 25 bp, Homo sapien
aaagttgattttcttcccatttcat

SEQ ID NO: 4098267 - DNA, 25 bp, Homo sapien
ggatgaattcagaggtggctctcat

SEQ ID NO: 4098268 - DNA, 25 bp, Homo sapien
aagtacttaatgtgtgtctcagcag

SEQ ID NO: 4098269 - DNA, 25 bp, Homo sapien
ctttgaagtacttaatgtgtgtctc

SEQ ID NO: 4098270 - DNA, 25 bp, Homo sapien
tttacagacaacaagagtgagatgt

SEQ ID NO: 4098271 - DNA, 25 bp, Homo sapien
gagatgtgcaagaaccttcttgtgc

SEQ ID NO: 4098272 - DNA, 25 bp, Homo sapien
agtagtgatagcagctcctgctttg

SEQ ID NO: 4098273 - DNA, 25 bp, Homo sapien
tggcagtagtgatagcagctcctgc

SEQ ID NO: 4098274 - DNA, 25 bp, Homo sapien
gcagtagtgatagcagctcctgctt

SEQ ID NO: 4098275 - DNA, 25 bp, Homo sapien
ggcagtagtgatagcagctcctgct

SEQ ID NO: 4098276 - DNA, 25 bp, Homo sapien
ggaactcagagagtgggcatctctg

SEQ ID NO: 4098277 - DNA, 25 bp, Homo sapien
ctctgggaccagcagatatctgtgt

SEQ ID NO: 4098278 - DNA, 25 bp, Homo sapien
ttttgaagcctctgtccgattagac

SEQ ID NO: 4098279 - DNA, 25 bp, Homo sapien
gatatctgtgtgtacatcattcagc

SEQ ID NO: 4098280 - DNA, 25 bp, Homo sapien
tgagatgctccactcaagcaaatgc

SEQ ID NO: 4098281 - DNA, 25 bp, Homo sapien
tgcgaacagctttgagtagagcctg

SEQ ID NO: 4098282 - DNA, 25 bp, Homo sapien
aatttagtgctgtaccttgagtggc

SEQ ID NO: 4098283 - DNA, 25 bp, Homo sapien
tgagtggcataagctgcaaccaggc

SEQ ID NO: 4098284 - DNA, 25 bp, Homo sapien
cttatatgggttattgcctcgttca

SEQ ID NO: 4098285 - DNA, 25 bp, Homo sapien
ttatatgggttattgcctcgttcat

SEQ ID NO: 4098286 - DNA, 25 bp, Homo sapien
cctgctgacaaggacgttaacagac

SEQ ID NO: 4098287 - DNA, 25 bp, Homo sapien
gggcaccccaataaggcaaactgat

SEQ ID NO: 4098288 - DNA, 25 bp, Homo sapien
gtgacggacactcaacgcagggaga

SEQ ID NO: 4098289 - DNA, 25 bp, Homo sapien
tatcttgcagccaccctacttagca

SEQ ID NO: 4098290 - DNA, 25 bp, Homo sapien
caactacagtcagaagtaaaccagt

SEQ ID NO: 4098291 - DNA, 25 bp, Homo sapien
tacaactacagtcagaagtaaacca

SEQ ID NO: 4098292 - DNA, 25 bp, Homo sapien
agatacaactacagtcagaagtaaa

SEQ ID NO: 4098293 - DNA, 25 bp, Homo sapien
actacagtcagaagtaaaccagtac

SEQ ID NO: 4098294 - DNA, 25 bp, Homo sapien
aactctggatatagtttaaaagtga

SEQ ID NO: 4098295 - DNA, 25 bp, Homo sapien
tcaccaactctggatatagtttaaa

SEQ ID NO: 4098296 - DNA, 25 bp, Homo sapien
ccaactctggatatagtttaaaagt

SEQ ID NO: 4098297 - DNA, 25 bp, Homo sapien
caccaactctggatatagtttaaaa

SEQ ID NO: 4098298 - DNA, 25 bp, Homo sapien
tatttatatccccatggctctgcat

SEQ ID NO: 4098299 - DNA, 25 bp, Homo sapien
aaatttatatttatatccccatggc

SEQ ID NO: 4098300 - DNA, 25 bp, Homo sapien
tttatatttatatccccatggctct

SEQ ID NO: 4098301 - DNA, 25 bp, Homo sapien
atatttatatccccatggctctgca

SEQ ID NO: 4098302 - DNA, 25 bp, Homo sapien
aaactgctgaagagtttcctatagt

SEQ ID NO: 4098303 - DNA, 25 bp, Homo sapien
ccttggcagtcaaaacttaatttgg

SEQ ID NO: 4098304 - DNA, 25 bp, Homo sapien
agagtttcctatagtaccttcagat

SEQ ID NO: 4098305 - DNA, 25 bp, Homo sapien
taacccatgaaagtaagattttcta

SEQ ID NO: 4098306 - DNA, 25 bp, Homo sapien
ttttttaagcagtcgatgaaaataa

SEQ ID NO: 4098307 - DNA, 25 bp, Homo sapien
tgtagatttaatttctccaccctct

SEQ ID NO: 4098308 - DNA, 25 bp, Homo sapien
ttaagcagtcgatgaaaataaattt

SEQ ID NO: 4098309 - DNA, 25 bp, Homo sapien
tatatcaaacttagatctactgtag

SEQ ID NO: 4098310 - DNA, 25 bp, Homo sapien
cacggtatgggaggaatttgctgta

SEQ ID NO: 4098311 - DNA, 25 bp, Homo sapien
tccaggactttgatgctaaacagag

SEQ ID NO: 4098312 - DNA, 25 bp, Homo sapien
gaacagaggtagcatgaaatccaac

SEQ ID NO: 4098313 - DNA, 25 bp, Homo sapien
ctagagctgcaaggcacactcatgg

SEQ ID NO: 4098314 - DNA, 25 bp, Homo sapien
gctccaatatcttcccaacacctga

SEQ ID NO: 4098315 - DNA, 25 bp, Homo sapien
ggctccaatatcttcccaacacctg

SEQ ID NO: 4098316 - DNA, 25 bp, Homo sapien
tttggctccaatatcttcccaacac

SEQ ID NO: 4098317 - DNA, 25 bp, Homo sapien
tggctccaatatcttcccaacacct

SEQ ID NO: 4098318 - DNA, 25 bp, Homo sapien
gaagggaatacactggcggccgcat

SEQ ID NO: 4098319 - DNA, 25 bp, Homo sapien
agggaatacactggcggccgcatcc

SEQ ID NO: 4098320 - DNA, 25 bp, Homo sapien
ttgctccaacagaaagtgccagaga

SEQ ID NO: 4098321 - DNA, 25 bp, Homo sapien
ggacccgtgttgctccaacagaaag

SEQ ID NO: 4098322 - DNA, 25 bp, Homo sapien
ctttttgaagactctattataaatt

SEQ ID NO: 4098323 - DNA, 25 bp, Homo sapien
ttcctttttgaagactctattataa

SEQ ID NO: 4098324 - DNA, 25 bp, Homo sapien
tcctttttgaagactctattataaa

SEQ ID NO: 4098325 - DNA, 25 bp, Homo sapien
taaaatagagtttgatgttcctcat

SEQ ID NO: 4098326 - DNA, 25 bp, Homo sapien
aggccagtgggtgcacgcaccgtgc

SEQ ID NO: 4098327 - DNA, 25 bp, Homo sapien
gcaggccagtgggtgcacgcaccgt

SEQ ID NO: 4098328 - DNA, 25 bp, Homo sapien
ggccagtgggtgcacgcaccgtgcg

SEQ ID NO: 4098329 - DNA, 25 bp, Homo sapien
gcgcaggccagtgggtgcacgcacc

SEQ ID NO: 4098330 - DNA, 25 bp, Homo sapien
atggagggatctggatgcccactca

SEQ ID NO: 4098331 - DNA, 25 bp, Homo sapien
cagtcgggccaaatgagtcacagtg

SEQ ID NO: 4098332 - DNA, 25 bp, Homo sapien
tctgccacaatcgtggacgtccaaa

SEQ ID NO: 4098333 - DNA, 25 bp, Homo sapien
ggtctgtcagccagtcgggccaaat

SEQ ID NO: 4098334 - DNA, 25 bp, Homo sapien
aatacttctggtctcatttgacctg

SEQ ID NO: 4098335 - DNA, 25 bp, Homo sapien
tcatttgacctgtccgcatggtgca

SEQ ID NO: 4098336 - DNA, 25 bp, Homo sapien
caggaaacagtcctgattagcattg

SEQ ID NO: 4098337 - DNA, 25 bp, Homo sapien
tagcattggttcataatacttctgg

SEQ ID NO: 4098338 - DNA, 25 bp, Homo sapien
atgcacaggtaacctgccccaagtg

SEQ ID NO: 4098339 - DNA, 25 bp, Homo sapien
agcctgatcctcacactgtgctcaa

SEQ ID NO: 4098340 - DNA, 25 bp, Homo sapien
aagtccaggttaggtggcagttcca

SEQ ID NO: 4098341 - DNA, 25 bp, Homo sapien
taacctgccccaagtgcattcacaa

SEQ ID NO: 4098342 - DNA, 25 bp, Homo sapien
gctgtgttgaatcttgcacagaaaa

SEQ ID NO: 4098343 - DNA, 25 bp, Homo sapien
atgctgtgttgaatcttgcacagaa

SEQ ID NO: 4098344 - DNA, 25 bp, Homo sapien
catgctgtgttgaatcttgcacaga

SEQ ID NO: 4098345 - DNA, 25 bp, Homo sapien
tgctgtgttgaatcttgcacagaaa

SEQ ID NO: 4098346 - DNA, 25 bp, Homo sapien
gacaagtacgaatgctttcattctt

SEQ ID NO: 4098347 - DNA, 25 bp, Homo sapien
tgaagtgtactgaaacacatcgcat

SEQ ID NO: 4098348 - DNA, 25 bp, Homo sapien
ttgaaaatggcttgacaagtacgaa

SEQ ID NO: 4098349 - DNA, 25 bp, Homo sapien
gaattttgaagtgtactgaaacaca

SEQ ID NO: 4098350 - DNA, 25 bp, Homo sapien
cacagaaatcatgtccgtttccatc

SEQ ID NO: 4098351 - DNA, 25 bp, Homo sapien
tcttgcttcttgacgactagctctc

SEQ ID NO: 4098352 - DNA, 25 bp, Homo sapien
aatcatgtccgtttccatcccgaac

SEQ ID NO: 4098353 - DNA, 25 bp, Homo sapien
tcaccctccttcgacacacagaaat

SEQ ID NO: 4098354 - DNA, 25 bp, Homo sapien
gcccatcgggattattcaaactagt

SEQ ID NO: 4098355 - DNA, 25 bp, Homo sapien
gataaaacgtctggcctaggcttcc

SEQ ID NO: 4098356 - DNA, 25 bp, Homo sapien
taacaccaaggtgtgcaatcctgag

SEQ ID NO: 4098357 - DNA, 25 bp, Homo sapien
tagagaccactcctatagcccaaag

SEQ ID NO: 4098358 - DNA, 25 bp, Homo sapien
ggagggctcagtgcttcttggttcc

SEQ ID NO: 4098359 - DNA, 25 bp, Homo sapien
catacatccaaaagctaaagggttc

SEQ ID NO: 4098360 - DNA, 25 bp, Homo sapien
cagcaggacggtttaatggcttaaa

SEQ ID NO: 4098361 - DNA, 25 bp, Homo sapien
gcatccattcttcgaaatgcagcag

SEQ ID NO: 4098362 - DNA, 25 bp, Homo sapien
cttttgaacacctttgattcaatca

SEQ ID NO: 4098363 - DNA, 25 bp, Homo sapien
ctccttttgaacacctttgattcaa

SEQ ID NO: 4098364 - DNA, 25 bp, Homo sapien
ccttttgaacacctttgattcaatc

SEQ ID NO: 4098365 - DNA, 25 bp, Homo sapien
cctccttttgaacacctttgattca

SEQ ID NO: 4098366 - DNA, 25 bp, Homo sapien
aatgcagctttagattgctgagaaa

SEQ ID NO: 4098367 - DNA, 25 bp, Homo sapien
cattttgagaattgactgtctgcga

SEQ ID NO: 4098368 - DNA, 25 bp, Homo sapien
gaattgactgtctgcgaatcctcat

SEQ ID NO: 4098369 - DNA, 25 bp, Homo sapien
ttaaactcgtagaatcattttgaga

SEQ ID NO: 4098370 - DNA, 25 bp, Homo sapien
tgaaagcagcaaagagtccataact

SEQ ID NO: 4098371 - DNA, 25 bp, Homo sapien
gagttaaccacctgatagttcggcc

SEQ ID NO: 4098372 - DNA, 25 bp, Homo sapien
caagctgaggtctttggtaaccaag

SEQ ID NO: 4098373 - DNA, 25 bp, Homo sapien
gagaaatgattgataccagaccttg

SEQ ID NO: 4098374 - DNA, 25 bp, Homo sapien
tgcaacagaccttgggcaatagttc

SEQ ID NO: 4098375 - DNA, 25 bp, Homo sapien
ttcagtagtagattccaagaggtac

SEQ ID NO: 4098376 - DNA, 25 bp, Homo sapien
caatagttcagtagtagattccaag

SEQ ID NO: 4098377 - DNA, 25 bp, Homo sapien
ctgcaacagaccttgggcaatagtt

SEQ ID NO: 4098378 - DNA, 25 bp, Homo sapien
ttctccatcaaagtttgtccagaag

SEQ ID NO: 4098379 - DNA, 25 bp, Homo sapien
tttccagcgtggtgtgaaattctcc

SEQ ID NO: 4098380 - DNA, 25 bp, Homo sapien
ggatggttcgaaaggaaagtgccaa

SEQ ID NO: 4098381 - DNA, 25 bp, Homo sapien
tgtccagaaggatggttcgaaagga

SEQ ID NO: 4098382 - DNA, 25 bp, Homo sapien
ggtgttttgcggcgccagtaatcct

SEQ ID NO: 4098383 - DNA, 25 bp, Homo sapien
tgttttgcggcgccagtaatccttt

SEQ ID NO: 4098384 - DNA, 25 bp, Homo sapien
gttttgcggcgccagtaatcctttc

SEQ ID NO: 4098385 - DNA, 25 bp, Homo sapien
ttttgcggcgccagtaatcctttca

SEQ ID NO: 4098386 - DNA, 25 bp, Homo sapien
aattccagcaaaccctcaattcttt

SEQ ID NO: 4098387 - DNA, 25 bp, Homo sapien
cagcaaaccctcaattctttttctt

SEQ ID NO: 4098388 - DNA, 25 bp, Homo sapien
tgggatttctccaatcaagttcact

SEQ ID NO: 4098389 - DNA, 25 bp, Homo sapien
ctgaattccagcaaaccctcaattc

SEQ ID NO: 4098390 - DNA, 25 bp, Homo sapien
tgctgtccccaagcctactgtccat

SEQ ID NO: 4098391 - DNA, 25 bp, Homo sapien
tgactttcaaagaacctactgattt

SEQ ID NO: 4098392 - DNA, 25 bp, Homo sapien
tcaccatccttgatttgactttcaa

SEQ ID NO: 4098393 - DNA, 25 bp, Homo sapien
gaacctactgattttcttattgctg

SEQ ID NO: 4098394 - DNA, 25 bp, Homo sapien
gttttaatgctgattaaactagttc

SEQ ID NO: 4098395 - DNA, 25 bp, Homo sapien
ctattccagaaggttttaatgctga

SEQ ID NO: 4098396 - DNA, 25 bp, Homo sapien
gaaggttttaatgctgattaaacta

SEQ ID NO: 4098397 - DNA, 25 bp, Homo sapien
tattccagaaggttttaatgctgat

SEQ ID NO: 4098398 - DNA, 25 bp, Homo sapien
tcagcaagcaaaggtattttgtctc

SEQ ID NO: 4098399 - DNA, 25 bp, Homo sapien
aagtattcccccctcagcaagcaaa

SEQ ID NO: 4098400 - DNA, 25 bp, Homo sapien
tattttgtctcccttaacgacgcca

SEQ ID NO: 4098401 - DNA, 25 bp, Homo sapien
ttcccccctcagcaagcaaaggtat

SEQ ID NO: 4098402 - DNA, 25 bp, Homo sapien
tggagtctgacaaaggcaaatcctt

SEQ ID NO: 4098403 - DNA, 25 bp, Homo sapien
gcaaatcctttccaggtagttcctg

SEQ ID NO: 4098404 - DNA, 25 bp, Homo sapien
tgcagctgtacttctgtacttctgt

SEQ ID NO: 4098405 - DNA, 25 bp, Homo sapien
ctgaattatctttgccagagctcct

SEQ ID NO: 4098406 - DNA, 25 bp, Homo sapien
ttctgtgtcaagaaggctgaggaga

SEQ ID NO: 4098407 - DNA, 25 bp, Homo sapien
ttttgaccttgatactggagtagac

SEQ ID NO: 4098408 - DNA, 25 bp, Homo sapien
aggagagactatggccatgctgaag

SEQ ID NO: 4098409 - DNA, 25 bp, Homo sapien
agacttcactagatgtcctcctacc

SEQ ID NO: 4098410 - DNA, 25 bp, Homo sapien
ggtagagctccaattagaatgctgg

SEQ ID NO: 4098411 - DNA, 25 bp, Homo sapien
tgaaacagataatgggcgtgcagac

SEQ ID NO: 4098412 - DNA, 25 bp, Homo sapien
ccaagccagtaacagcagggtatgt

SEQ ID NO: 4098413 - DNA, 25 bp, Homo sapien
tcaaggaactgggaaggtagagctc

SEQ ID NO: 4098414 - DNA, 25 bp, Homo sapien
ccaatcctgttgataactgtttcct

SEQ ID NO: 4098415 - DNA, 25 bp, Homo sapien
ttccttgagaacagtgctctaactg

SEQ ID NO: 4098416 - DNA, 25 bp, Homo sapien
aagcatcggcgtcctggatctggcc

SEQ ID NO: 4098417 - DNA, 25 bp, Homo sapien
tactgctgcaatctcagagccaaat

SEQ ID NO: 4098418 - DNA, 25 bp, Homo sapien
cagagtactttgtggttactttagg

SEQ ID NO: 4098419 - DNA, 25 bp, Homo sapien
tccagtgaagccagagaaatgtctc

SEQ ID NO: 4098420 - DNA, 25 bp, Homo sapien
tgtctctcagagtactttgtggtta

SEQ ID NO: 4098421 - DNA, 25 bp, Homo sapien
ccagagaaatgtctctcagagtact

SEQ ID NO: 4098422 - DNA, 25 bp, Homo sapien
gaaatggtccactctagcagtgtga

SEQ ID NO: 4098423 - DNA, 25 bp, Homo sapien
tggttgagagaaaccttcaccatta

SEQ ID NO: 4098424 - DNA, 25 bp, Homo sapien
tcaccgaaatggtccactctagcag

SEQ ID NO: 4098425 - DNA, 25 bp, Homo sapien
gatgatgtcaccgaaatggtccact

SEQ ID NO: 4098426 - DNA, 25 bp, Homo sapien
ctcccacaatctcataccattttat

SEQ ID NO: 4098427 - DNA, 25 bp, Homo sapien
tcccacaatctcataccattttata

SEQ ID NO: 4098428 - DNA, 25 bp, Homo sapien
tcaacaaagacaacgtttgtatccc

SEQ ID NO: 4098429 - DNA, 25 bp, Homo sapien
gacaacgtttgtatcccttgtgata

SEQ ID NO: 4098430 - DNA, 25 bp, Homo sapien
acatgcaggttcaacaaagacaacg

SEQ ID NO: 4098431 - DNA, 25 bp, Homo sapien
gtatcccttgtgatattgaacacag

SEQ ID NO: 4098432 - DNA, 25 bp, Homo sapien
cagttgctcattggtttcaacccca

SEQ ID NO: 4098433 - DNA, 25 bp, Homo sapien
taagaacttgcagctacaactcttc

SEQ ID NO: 4098434 - DNA, 25 bp, Homo sapien
cagaagccatcggaacagtagacta

SEQ ID NO: 4098435 - DNA, 25 bp, Homo sapien
catgacttcagttcgggcaaatcca

SEQ ID NO: 4098436 - DNA, 25 bp, Homo sapien
cagtgagcacgaaagaaagccaact

SEQ ID NO: 4098437 - DNA, 25 bp, Homo sapien
tctccagtgagcacgaaagaaagcc

SEQ ID NO: 4098438 - DNA, 25 bp, Homo sapien
tactctccagtgagcacgaaagaaa

SEQ ID NO: 4098439 - DNA, 25 bp, Homo sapien
tgagcacgaaagaaagccaactcac

SEQ ID NO: 4098440 - DNA, 25 bp, Homo sapien
aggttgaaagaagacggcctctcac

SEQ ID NO: 4098441 - DNA, 25 bp, Homo sapien
ctaggttgaaagaagacggcctctc

SEQ ID NO: 4098442 - DNA, 25 bp, Homo sapien
taggttgaaagaagacggcctctca

SEQ ID NO: 4098443 - DNA, 25 bp, Homo sapien
gatgtagttctttaaaggcataaaa

SEQ ID NO: 4098444 - DNA, 25 bp, Homo sapien
tatgttaactattcattgacattga

SEQ ID NO: 4098445 - DNA, 25 bp, Homo sapien
gagaaatactcctggataaaagtta

SEQ ID NO: 4098446 - DNA, 25 bp, Homo sapien
tattatacataacgtatattttaag

SEQ ID NO: 4098447 - DNA, 25 bp, Homo sapien
actttctcaaccctttgcctttctg

SEQ ID NO: 4098448 - DNA, 25 bp, Homo sapien
tttgaagttgtcttccataaatgca

SEQ ID NO: 4098449 - DNA, 25 bp, Homo sapien
tgcctttctgctaccatgactttga

SEQ ID NO: 4098450 - DNA, 25 bp, Homo sapien
cttcagtgcacgtactttctcaacc

SEQ ID NO: 4098451 - DNA, 25 bp, Homo sapien
gcattacaaagcgaaagatatgtaa

SEQ ID NO: 4098452 - DNA, 25 bp, Homo sapien
agcgaaagatatgtaaatcatgagt

SEQ ID NO: 4098453 - DNA, 25 bp, Homo sapien
ctgcattacaaagcgaaagatatgt

SEQ ID NO: 4098454 - DNA, 25 bp, Homo sapien
tacaaagcgaaagatatgtaaatca

SEQ ID NO: 4098455 - DNA, 25 bp, Homo sapien
ttgaaatccatgagcggaagctgct

SEQ ID NO: 4098456 - DNA, 25 bp, Homo sapien
tagagggatctctgataaggctttt

SEQ ID NO: 4098457 - DNA, 25 bp, Homo sapien
tgaaaaatagggttggccaccaatg

SEQ ID NO: 4098458 - DNA, 25 bp, Homo sapien
gccaccaatggcctagagggatctc

SEQ ID NO: 4098459 - DNA, 25 bp, Homo sapien
tttaagagttgggactagacctcaa

SEQ ID NO: 4098460 - DNA, 25 bp, Homo sapien
ggttaaggatctcatgacaattctc

SEQ ID NO: 4098461 - DNA, 25 bp, Homo sapien
aaaggaatcattatcacaggagtga

SEQ ID NO: 4098462 - DNA, 25 bp, Homo sapien
tcatgagctttctgccaaaacacag

SEQ ID NO: 4098463 - DNA, 25 bp, Homo sapien
ctttatgggaacaatatccagtagg

SEQ ID NO: 4098464 - DNA, 25 bp, Homo sapien
caatatccagtaggcaccaaaatgg

SEQ ID NO: 4098465 - DNA, 25 bp, Homo sapien
tcttctggagtaatcttcacttttg

SEQ ID NO: 4098466 - DNA, 25 bp, Homo sapien
tgttatatctttgaacgaggccaga

SEQ ID NO: 4098467 - DNA, 25 bp, Homo sapien
ttactccatctgtcaatgttttctg

SEQ ID NO: 4098468 - DNA, 25 bp, Homo sapien
tcaatgttttctgaaaacggtacaa

SEQ ID NO: 4098469 - DNA, 25 bp, Homo sapien
tgtcaatgttttctgaaaacggtac

SEQ ID NO: 4098470 - DNA, 25 bp, Homo sapien
tcaaaatgttactccatctgtcaat

SEQ ID NO: 4098471 - DNA, 25 bp, Homo sapien
gcagctctactagtgcgacatgcta

SEQ ID NO: 4098472 - DNA, 25 bp, Homo sapien
gattactttgttattggttgcacag

SEQ ID NO: 4098473 - DNA, 25 bp, Homo sapien
caagagatagtctttacattgtaca

SEQ ID NO: 4098474 - DNA, 25 bp, Homo sapien
tccaaatgacaggtgtaatctttca

SEQ ID NO: 4098475 - DNA, 25 bp, Homo sapien
cagcttctagaaggactaacagcca

SEQ ID NO: 4098476 - DNA, 25 bp, Homo sapien
gttatgagaagtaaatgaagtcacc

SEQ ID NO: 4098477 - DNA, 25 bp, Homo sapien
catgaagcagagactcaataagagc

SEQ ID NO: 4098478 - DNA, 25 bp, Homo sapien
tatgccctgtgctacgtgaattgca

SEQ ID NO: 4098479 - DNA, 25 bp, Homo sapien
catccacggattcaaccaagtgtgg

SEQ ID NO: 4098480 - DNA, 25 bp, Homo sapien
cctataagacatgaatagaaacctc

SEQ ID NO: 4098481 - DNA, 25 bp, Homo sapien
gaccctcatgtctatttgcctataa

SEQ ID NO: 4098482 - DNA, 25 bp, Homo sapien
tagaaacctcaaacagtagacccaa

SEQ ID NO: 4098483 - DNA, 25 bp, Homo sapien
cagaacgaatgcaatccacgagagt

SEQ ID NO: 4098484 - DNA, 25 bp, Homo sapien
cacgagagtattttgactggctgca

SEQ ID NO: 4098485 - DNA, 25 bp, Homo sapien
tcagaaagttttgtccgaggatcac

SEQ ID NO: 4098486 - DNA, 25 bp, Homo sapien
gaatgacttggtgaagcatgccatg

SEQ ID NO: 4098487 - DNA, 25 bp, Homo sapien
tatgctggtgtcttcaattggacct

SEQ ID NO: 4098488 - DNA, 25 bp, Homo sapien
gcaagtctcttttgggacatcccta

SEQ ID NO: 4098489 - DNA, 25 bp, Homo sapien
cttaaacgactgtgagattgcgact

SEQ ID NO: 4098490 - DNA, 25 bp, Homo sapien
tctcatgcactacccagaaccaggg

SEQ ID NO: 4098491 - DNA, 25 bp, Homo sapien
tctttttgactgtagggtatccttg

SEQ ID NO: 4098492 - DNA, 25 bp, Homo sapien
tcttgggctcctaatactttgtctt

SEQ ID NO: 4098493 - DNA, 25 bp, Homo sapien
cttggaccacctgcatagacttgga

SEQ ID NO: 4098494 - DNA, 25 bp, Homo sapien
ccagtttcaagtctgcacaatcctg

SEQ ID NO: 4098495 - DNA, 25 bp, Homo sapien
aataaaactcattagacacacatgc

SEQ ID NO: 4098496 - DNA, 25 bp, Homo sapien
taaaactcattagacacacatgcat

SEQ ID NO: 4098497 - DNA, 25 bp, Homo sapien
ataaaactcattagacacacatgca

SEQ ID NO: 4098498 - DNA, 25 bp, Homo sapien
aaagtgggtccctgctcttgatctt

SEQ ID NO: 4098499 - DNA, 25 bp, Homo sapien
tttgcaggtgcccagagatgtgata

SEQ ID NO: 4098500 - DNA, 25 bp, Homo sapien
tcgactccgtctccgggctgagtca

SEQ ID NO: 4098501 - DNA, 25 bp, Homo sapien
gataaaggactgctcgactccgtct

SEQ ID NO: 4098502 - DNA, 25 bp, Homo sapien
ggaggacaaatgattcaaaacatct

SEQ ID NO: 4098503 - DNA, 25 bp, Homo sapien
cacggacatggttgatggtccttgg

SEQ ID NO: 4098504 - DNA, 25 bp, Homo sapien
tggtccttggaggacaaatgattca

SEQ ID NO: 4098505 - DNA, 25 bp, Homo sapien
cagcacggacatggttgatggtcct

SEQ ID NO: 4098506 - DNA, 25 bp, Homo sapien
tgacacagatgcactctgacatggg

SEQ ID NO: 4098507 - DNA, 25 bp, Homo sapien
cagatgcactctgacatgggccaga

SEQ ID NO: 4098508 - DNA, 25 bp, Homo sapien
gatgcactctgacatgggccagaca

SEQ ID NO: 4098509 - DNA, 25 bp, Homo sapien
cacagatgcactctgacatgggcca

SEQ ID NO: 4098510 - DNA, 25 bp, Homo sapien
tgtcactgacggttgtgctccgagt

SEQ ID NO: 4098511 - DNA, 25 bp, Homo sapien
cagaaactttatactccggaaatgc

SEQ ID NO: 4098512 - DNA, 25 bp, Homo sapien
caaacgttgtaaggtacagtcacag

SEQ ID NO: 4098513 - DNA, 25 bp, Homo sapien
ggacaggtcgtcattgccaataaag

SEQ ID NO: 4098514 - DNA, 25 bp, Homo sapien
caaatatcgtaggaaagcagctgtt

SEQ ID NO: 4098515 - DNA, 25 bp, Homo sapien
tcatatgcaaatatcgtaggaaagc

SEQ ID NO: 4098516 - DNA, 25 bp, Homo sapien
tcgtaggaaagcagctgtttgttct

SEQ ID NO: 4098517 - DNA, 25 bp, Homo sapien
taggaaagcagctgtttgttcttac

SEQ ID NO: 4098518 - DNA, 25 bp, Homo sapien
caatgttaataacgatgccaagcca

SEQ ID NO: 4098519 - DNA, 25 bp, Homo sapien
gacagcagaggtcctatcaaggctc

SEQ ID NO: 4098520 - DNA, 25 bp, Homo sapien
gaaaacgcactctagcctcaaagat

SEQ ID NO: 4098521 - DNA, 25 bp, Homo sapien
taaaattgccgtctgcctaactaga

SEQ ID NO: 4098522 - DNA, 25 bp, Homo sapien
gcaggtgcaggaaagtttccctgac

SEQ ID NO: 4098523 - DNA, 25 bp, Homo sapien
tttatgaagactcctgtgtgtatgg

SEQ ID NO: 4098524 - DNA, 25 bp, Homo sapien
tcccatgagacaggtgctttcccca

SEQ ID NO: 4098525 - DNA, 25 bp, Homo sapien
tgagatgaatctggacaaaccaatc

SEQ ID NO: 4098526 - DNA, 25 bp, Homo sapien
ttgtgcctttcaggcctcttcagag

SEQ ID NO: 4098527 - DNA, 25 bp, Homo sapien
cccagttgtgcctttcaggcctctt

SEQ ID NO: 4098528 - DNA, 25 bp, Homo sapien
gttgtgcctttcaggcctcttcaga

SEQ ID NO: 4098529 - DNA, 25 bp, Homo sapien
cagttgtgcctttcaggcctcttca

SEQ ID NO: 4098530 - DNA, 25 bp, Homo sapien
ttgccttcagtatccaagtcagtat

SEQ ID NO: 4098531 - DNA, 25 bp, Homo sapien
tgctgtgtacccatcgaatgacctt

SEQ ID NO: 4098532 - DNA, 25 bp, Homo sapien
gttccactccagtgtattttgagtc

SEQ ID NO: 4098533 - DNA, 25 bp, Homo sapien
gagttgcttcttgtttagtatccca

SEQ ID NO: 4098534 - DNA, 25 bp, Homo sapien
tgttcactattggtctcccaaaaag

SEQ ID NO: 4098535 - DNA, 25 bp, Homo sapien
ttttcttcagtgttaaaatagattg

SEQ ID NO: 4098536 - DNA, 25 bp, Homo sapien
cttcagtgttaaaatagattgtggt

SEQ ID NO: 4098537 - DNA, 25 bp, Homo sapien
tcagtgttaaaatagattgtggtac

SEQ ID NO: 4098538 - DNA, 25 bp, Homo sapien
ttcttcagtgttaaaatagattgtg

SEQ ID NO: 4098539 - DNA, 25 bp, Homo sapien
gatgaaccaggttgtgacatagtgg

SEQ ID NO: 4098540 - DNA, 25 bp, Homo sapien
ggcagggcagcgattaaatcaatga

SEQ ID NO: 4098541 - DNA, 25 bp, Homo sapien
tacagaagatcaaaaggcagggcag

SEQ ID NO: 4098542 - DNA, 25 bp, Homo sapien
gataacttggccagacttgctgaca

SEQ ID NO: 4098543 - DNA, 25 bp, Homo sapien
caaaagacgcaagaggcgcactgtc

SEQ ID NO: 4098544 - DNA, 25 bp, Homo sapien
gaatagcggtctaacttctgcagca

SEQ ID NO: 4098545 - DNA, 25 bp, Homo sapien
gatacacgccatccagtgtgcaagg

SEQ ID NO: 4098546 - DNA, 25 bp, Homo sapien
tccaatgacgtaccagatacacgcc

SEQ ID NO: 4098547 - DNA, 25 bp, Homo sapien
tatcgtagtgatagaccataggcca

SEQ ID NO: 4098548 - DNA, 25 bp, Homo sapien
ttaagttatcgtagtgatagaccat

SEQ ID NO: 4098549 - DNA, 25 bp, Homo sapien
agttatcgtagtgatagaccatagg

SEQ ID NO: 4098550 - DNA, 25 bp, Homo sapien
cgtagtgatagaccataggccagtt

SEQ ID NO: 4098551 - DNA, 25 bp, Homo sapien
gaaggtccacttaatcatcctcgtg

SEQ ID NO: 4098552 - DNA, 25 bp, Homo sapien
cgtggacttcattaggatgagaggt

SEQ ID NO: 4098553 - DNA, 25 bp, Homo sapien
aatcatcctcgtggacttcattagg

SEQ ID NO: 4098554 - DNA, 25 bp, Homo sapien
tccacaattctgaaggtccacttaa

SEQ ID NO: 4098555 - DNA, 25 bp, Homo sapien
tattagcagagacgttcccaaaacc

SEQ ID NO: 4098556 - DNA, 25 bp, Homo sapien
caatataggcacttcggatcgacgg

SEQ ID NO: 4098557 - DNA, 25 bp, Homo sapien
ccccaaggtattgttgccatagtat

SEQ ID NO: 4098558 - DNA, 25 bp, Homo sapien
tgctcagcgtgaagtacagagcggc

SEQ ID NO: 4098559 - DNA, 25 bp, Homo sapien
ttgcaccaggacatttgctcaataa

SEQ ID NO: 4098560 - DNA, 25 bp, Homo sapien
gagcactgattttgcaccaggacat

SEQ ID NO: 4098561 - DNA, 25 bp, Homo sapien
gacattatcagattatttcccacat

SEQ ID NO: 4098562 - DNA, 25 bp, Homo sapien
gccttgtgatcagtgtcgcacctac

SEQ ID NO: 4098563 - DNA, 25 bp, Homo sapien
gatggacacggatgaaatctttcag

SEQ ID NO: 4098564 - DNA, 25 bp, Homo sapien
tgaaaatattcgagcatcctctgct

SEQ ID NO: 4098565 - DNA, 25 bp, Homo sapien
gggaccatctggagtacatcctctg

SEQ ID NO: 4098566 - DNA, 25 bp, Homo sapien
tattccattgttgactgaccaggtt

SEQ ID NO: 4098567 - DNA, 25 bp, Homo sapien
ccggctggcacattcaaaaagggac

SEQ ID NO: 4098568 - DNA, 25 bp, Homo sapien
catagtgatgtcagaacgcagttca

SEQ ID NO: 4098569 - DNA, 25 bp, Homo sapien
gcatccccttgacgcagcagatact

SEQ ID NO: 4098570 - DNA, 25 bp, Homo sapien
gagcccgagcatacaaagtagatgg

SEQ ID NO: 4098571 - DNA, 25 bp, Homo sapien
tggagatcacagtaggttaaagcct

SEQ ID NO: 4098572 - DNA, 25 bp, Homo sapien
gttaaagcctttacatctgcattgg

SEQ ID NO: 4098573 - DNA, 25 bp, Homo sapien
catattctgggtaaaggtctagcac

SEQ ID NO: 4098574 - DNA, 25 bp, Homo sapien
cctttgaggatgatacactggagat

SEQ ID NO: 4098575 - DNA, 25 bp, Homo sapien
ctttgattttcaaaacaattgtcat

SEQ ID NO: 4098576 - DNA, 25 bp, Homo sapien
ttgattttcaaaacaattgtcattt

SEQ ID NO: 4098577 - DNA, 25 bp, Homo sapien
gattttcaaaacaattgtcatttta

SEQ ID NO: 4098578 - DNA, 25 bp, Homo sapien
ttttcaaaacaattgtcattttatg

SEQ ID NO: 4098579 - DNA, 25 bp, Homo sapien
tcctgtgtgactggatatttttggt

SEQ ID NO: 4098580 - DNA, 25 bp, Homo sapien
tccacaaagcctttaaccacagaaa

SEQ ID NO: 4098581 - DNA, 25 bp, Homo sapien
ttaaccacagaaaatcctgtgtgac

SEQ ID NO: 4098582 - DNA, 25 bp, Homo sapien
tgtgtgactggatatttttggtttt

SEQ ID NO: 4098583 - DNA, 25 bp, Homo sapien
ccatagaggccgctgtcttcaggac

SEQ ID NO: 4098584 - DNA, 25 bp, Homo sapien
tagaggccgctgtcttcaggacttt

SEQ ID NO: 4098585 - DNA, 25 bp, Homo sapien
tggccatagaggccgctgtcttcag

SEQ ID NO: 4098586 - DNA, 25 bp, Homo sapien
gaggccgctgtcttcaggactttct

SEQ ID NO: 4098587 - DNA, 25 bp, Homo sapien
cattcataatttcgaggtacttcag

SEQ ID NO: 4098588 - DNA, 25 bp, Homo sapien
tgccgctcttttggcatcctggcat

SEQ ID NO: 4098589 - DNA, 25 bp, Homo sapien
gctgtttcctccactcaaagctgcc

SEQ ID NO: 4098590 - DNA, 25 bp, Homo sapien
gagttgtcatcaccacatgctggcc

SEQ ID NO: 4098591 - DNA, 25 bp, Homo sapien
aatgaagcgtactcacaaataaacc

SEQ ID NO: 4098592 - DNA, 25 bp, Homo sapien
cgactctcatagttaaaatgtctac

SEQ ID NO: 4098593 - DNA, 25 bp, Homo sapien
gacagcaacataaccagtattggtg

SEQ ID NO: 4098594 - DNA, 25 bp, Homo sapien
gagaatatgaatgaagcgtactcac

SEQ ID NO: 4098595 - DNA, 25 bp, Homo sapien
cctggcaaagatttcacgaaaaaga

SEQ ID NO: 4098596 - DNA, 25 bp, Homo sapien
aggataggaacagccacttttcaga

SEQ ID NO: 4098597 - DNA, 25 bp, Homo sapien
gaatacatacaagtggctagaaaac

SEQ ID NO: 4098598 - DNA, 25 bp, Homo sapien
agaagaatacatacaagtggctaga

SEQ ID NO: 4098599 - DNA, 25 bp, Homo sapien
cttctctttttgcctgaacgctcat

SEQ ID NO: 4098600 - DNA, 25 bp, Homo sapien
tctctttttgcctgaacgctcatag

SEQ ID NO: 4098601 - DNA, 25 bp, Homo sapien
gcatgagctatcctttctgttccac

SEQ ID NO: 4098602 - DNA, 25 bp, Homo sapien
ttaatctcattacttctatttattc

SEQ ID NO: 4098603 - DNA, 25 bp, Homo sapien
ctgaaagaacaaacagaagtattaa

SEQ ID NO: 4098604 - DNA, 25 bp, Homo sapien
aagaacaaacagaagtattaatcat

SEQ ID NO: 4098605 - DNA, 25 bp, Homo sapien
tgaaagaacaaacagaagtattaat

SEQ ID NO: 4098606 - DNA, 25 bp, Homo sapien
gaaagaacaaacagaagtattaatc

SEQ ID NO: 4098607 - DNA, 25 bp, Homo sapien
gaccatagatttgtttgatagtctt

SEQ ID NO: 4098608 - DNA, 25 bp, Homo sapien
gtgagaccatagatttgtttgatag

SEQ ID NO: 4098609 - DNA, 25 bp, Homo sapien
gagaccatagatttgtttgatagtc

SEQ ID NO: 4098610 - DNA, 25 bp, Homo sapien
ccatagatttgtttgatagtcttga

SEQ ID NO: 4098611 - DNA, 25 bp, Homo sapien
actactggactcttgactgggatca

SEQ ID NO: 4098612 - DNA, 25 bp, Homo sapien
aaatagtcttgccaaaacccatcct

SEQ ID NO: 4098613 - DNA, 25 bp, Homo sapien
caaaacccatcctgtaactactgga

SEQ ID NO: 4098614 - DNA, 25 bp, Homo sapien
gactgggatcattcaactgtgtaga

SEQ ID NO: 4098615 - DNA, 25 bp, Homo sapien
gagtcgcttgttgatgttgccattt

SEQ ID NO: 4098616 - DNA, 25 bp, Homo sapien
cttccacaatggatgggagtcgctt

SEQ ID NO: 4098617 - DNA, 25 bp, Homo sapien
atgttgccatttcccttgggctctg

SEQ ID NO: 4098618 - DNA, 25 bp, Homo sapien
caatggatgggagtcgcttgttgat

SEQ ID NO: 4098619 - DNA, 25 bp, Homo sapien
cccgaggccagttgctttaagctta

SEQ ID NO: 4098620 - DNA, 25 bp, Homo sapien
gcaccgttcccgaggccagttgctt

SEQ ID NO: 4098621 - DNA, 25 bp, Homo sapien
gcttaagcccaggtaggctttattg

SEQ ID NO: 4098622 - DNA, 25 bp, Homo sapien
taggcgagtgaaagggcaccgttcc

SEQ ID NO: 4098623 - DNA, 25 bp, Homo sapien
gaaagttgcaatttcaagttcttct

SEQ ID NO: 4098624 - DNA, 25 bp, Homo sapien
ggggtccagcattattcaaagttga

SEQ ID NO: 4098625 - DNA, 25 bp, Homo sapien
tattcaaagttgaaagttgcaattt

SEQ ID NO: 4098626 - DNA, 25 bp, Homo sapien
tctgggggtccagcattattcaaag

SEQ ID NO: 4098627 - DNA, 25 bp, Homo sapien
tgattcgttcagagccaaaatcaaa

SEQ ID NO: 4098628 - DNA, 25 bp, Homo sapien
gggctctgatctgattcgttcagag

SEQ ID NO: 4098629 - DNA, 25 bp, Homo sapien
ctctgatctgattcgttcagagcca

SEQ ID NO: 4098630 - DNA, 25 bp, Homo sapien
tgatctgattcgttcagagccaaaa

SEQ ID NO: 4098631 - DNA, 25 bp, Homo sapien
tgatgaagagaacagcagctccaat

SEQ ID NO: 4098632 - DNA, 25 bp, Homo sapien
taggcatgaccaaagaaagagctcc

SEQ ID NO: 4098633 - DNA, 25 bp, Homo sapien
ttaggcatgaccaaagaaagagctc

SEQ ID NO: 4098634 - DNA, 25 bp, Homo sapien
ggcatgaccaaagaaagagctccat

SEQ ID NO: 4098635 - DNA, 25 bp, Homo sapien
catgaccaaagaaagagctccatac

SEQ ID NO: 4098636 - DNA, 25 bp, Homo sapien
gcagggaagtgatatttctttcggt

SEQ ID NO: 4098637 - DNA, 25 bp, Homo sapien
ctatgtggatagagcaaagtgaaag

SEQ ID NO: 4098638 - DNA, 25 bp, Homo sapien
catagtagtgaccacatttcagaga

SEQ ID NO: 4098639 - DNA, 25 bp, Homo sapien
aagacaatagttagaggtgcatagt

SEQ ID NO: 4098640 - DNA, 25 bp, Homo sapien
gaaatggactgcagaggcgtcaacg

SEQ ID NO: 4098641 - DNA, 25 bp, Homo sapien
gaatctgaatgtggagagatgcacc

SEQ ID NO: 4098642 - DNA, 25 bp, Homo sapien
caaaggttttgtagaagctgatgcc

SEQ ID NO: 4098643 - DNA, 25 bp, Homo sapien
tgtgcttgggtataagcagccccgc

SEQ ID NO: 4098644 - DNA, 25 bp, Homo sapien
aaattagctgctgcatcatgggcac

SEQ ID NO: 4098645 - DNA, 25 bp, Homo sapien
aaagtgctgacccattgcaagctgg

SEQ ID NO: 4098646 - DNA, 25 bp, Homo sapien
aataggaatggaaacaactgcgctg

SEQ ID NO: 4098647 - DNA, 25 bp, Homo sapien
taacgtgcgaatagctaaccactgg

SEQ ID NO: 4098648 - DNA, 25 bp, Homo sapien
gagcagccatgggtctatcaatcat

SEQ ID NO: 4098649 - DNA, 25 bp, Homo sapien
ccaaagatcaacaagcatgcgtgtg

SEQ ID NO: 4098650 - DNA, 25 bp, Homo sapien
gcccctcattgttcagtggtcaatt

SEQ ID NO: 4098651 - DNA, 25 bp, Homo sapien
tgtaattattagtaaagaagttcca

SEQ ID NO: 4098652 - DNA, 25 bp, Homo sapien
gctgcagctccatgcaggtcaggga

SEQ ID NO: 4098653 - DNA, 25 bp, Homo sapien
agctccatgcaggtcagggagcttg

SEQ ID NO: 4098654 - DNA, 25 bp, Homo sapien
tgcagctccatgcaggtcagggagc

SEQ ID NO: 4098655 - DNA, 25 bp, Homo sapien
ccatgcaggtcagggagcttgttct

SEQ ID NO: 4098656 - DNA, 25 bp, Homo sapien
gcccttctgtttaacaccagaaaga

SEQ ID NO: 4098657 - DNA, 25 bp, Homo sapien
acagcccttctgtttaacaccagaa

SEQ ID NO: 4098658 - DNA, 25 bp, Homo sapien
ccagaaagagtcaggtgaagtaact

SEQ ID NO: 4098659 - DNA, 25 bp, Homo sapien
tgaagtaactgatccggaatcagtc

SEQ ID NO: 4098660 - DNA, 25 bp, Homo sapien
gatattgataatggtcctttagtcc

SEQ ID NO: 4098661 - DNA, 25 bp, Homo sapien
tcaagtatggctgaacgctgggtcc

SEQ ID NO: 4098662 - DNA, 25 bp, Homo sapien
actttgattctatgtacatcatttc

SEQ ID NO: 4098663 - DNA, 25 bp, Homo sapien
ttaagaagcctagaagttctggata

SEQ ID NO: 4098664 - DNA, 25 bp, Homo sapien
aaagggacacctcttgtatcagggg

SEQ ID NO: 4098665 - DNA, 25 bp, Homo sapien
ttggtttccgtgacaccaaagtcat

SEQ ID NO: 4098666 - DNA, 25 bp, Homo sapien
agggacacctcttgtatcaggggtt

SEQ ID NO: 4098667 - DNA, 25 bp, Homo sapien
cataattggtttccgtgacaccaaa

SEQ ID NO: 4098668 - DNA, 25 bp, Homo sapien
gtagtagttctccagattgcttggt

SEQ ID NO: 4098669 - DNA, 25 bp, Homo sapien
ccttcactgaagtatgggtataatc

SEQ ID NO: 4098670 - DNA, 25 bp, Homo sapien
tcatggtctgctctataatacaaac

SEQ ID NO: 4098671 - DNA, 25 bp, Homo sapien
taccacaatgtaggaatcataaagt

SEQ ID NO: 4098672 - DNA, 25 bp, Homo sapien
aacgtaatctagatgtgggtttact

SEQ ID NO: 4098673 - DNA, 25 bp, Homo sapien
tagatgtgggtttactttgtgtgcc

SEQ ID NO: 4098674 - DNA, 25 bp, Homo sapien
tttagtgaaaaacgtaatctagatg

SEQ ID NO: 4098675 - DNA, 25 bp, Homo sapien
gtgggtttactttgtgtgccactct

SEQ ID NO: 4098676 - DNA, 25 bp, Homo sapien
ctttcctttctagctctatctgttt

SEQ ID NO: 4098677 - DNA, 25 bp, Homo sapien
ttgtttttcaactctatctttgcct

SEQ ID NO: 4098678 - DNA, 25 bp, Homo sapien
cctttcctttctagctctatctgtt

SEQ ID NO: 4098679 - DNA, 25 bp, Homo sapien
ccagaactgaagaggccttgcaatt

SEQ ID NO: 4098680 - DNA, 25 bp, Homo sapien
gccttgcaattgtgaagagaaaaat

SEQ ID NO: 4098681 - DNA, 25 bp, Homo sapien
tttaaagtcaatggccacaatttcc

SEQ ID NO: 4098682 - DNA, 25 bp, Homo sapien
ttgttacttctttgcaagttttgcc

SEQ ID NO: 4098683 - DNA, 25 bp, Homo sapien
catcaatcaatttagctgcttttct

SEQ ID NO: 4098684 - DNA, 25 bp, Homo sapien
gctgcttttcttgggtttttctcta

SEQ ID NO: 4098685 - DNA, 25 bp, Homo sapien
ttcttgggtttttctctatgttcat

SEQ ID NO: 4098686 - DNA, 25 bp, Homo sapien
tgcttttcttgggtttttctctatg

SEQ ID NO: 4098687 - DNA, 25 bp, Homo sapien
agatatattcctgtcaagtcgttca

SEQ ID NO: 4098688 - DNA, 25 bp, Homo sapien
catgagctcggccagtgaaatgcag

SEQ ID NO: 4098689 - DNA, 25 bp, Homo sapien
tgtcaagtcgttcatggattctaag

SEQ ID NO: 4098690 - DNA, 25 bp, Homo sapien
gactgtatcaagctccctgttttag

SEQ ID NO: 4098691 - DNA, 25 bp, Homo sapien
tttagagtctagcctgatttccact

SEQ ID NO: 4098692 - DNA, 25 bp, Homo sapien
ctttagagtctagcctgatttccac

SEQ ID NO: 4098693 - DNA, 25 bp, Homo sapien
gcaaagaatttgcaaatgccttgaa

SEQ ID NO: 4098694 - DNA, 25 bp, Homo sapien
cttcatccccatgagtttgccagaa

SEQ ID NO: 4098695 - DNA, 25 bp, Homo sapien
tgcattaggatgtgcaaggtctaat

SEQ ID NO: 4098696 - DNA, 25 bp, Homo sapien
caagtcctagttgctttggtagctc

SEQ ID NO: 4098697 - DNA, 25 bp, Homo sapien
aaggcttctgctacaaccctgtgtg

SEQ ID NO: 4098698 - DNA, 25 bp, Homo sapien
tctgctacaaccctgtgtgtgccca

SEQ ID NO: 4098699 - DNA, 25 bp, Homo sapien
gcttctgctacaaccctgtgtgtgc

SEQ ID NO: 4098700 - DNA, 25 bp, Homo sapien
gccaaggcttctgctacaaccctgt

SEQ ID NO: 4098701 - DNA, 25 bp, Homo sapien
ctcatgtagactttaatcaccacct

SEQ ID NO: 4098702 - DNA, 25 bp, Homo sapien
tgctttgaggcatctcatgtagact

SEQ ID NO: 4098703 - DNA, 25 bp, Homo sapien
ttcacaagagccataaccgcagaag

SEQ ID NO: 4098704 - DNA, 25 bp, Homo sapien
ggcctcagtgatgactgctttgagg

SEQ ID NO: 4098705 - DNA, 25 bp, Homo sapien
tggccaagccaattctttagttaac

SEQ ID NO: 4098706 - DNA, 25 bp, Homo sapien
caagccaattctttagttaactctt

SEQ ID NO: 4098707 - DNA, 25 bp, Homo sapien
gccaagccaattctttagttaactc

SEQ ID NO: 4098708 - DNA, 25 bp, Homo sapien
ccaagccaattctttagttaactct

SEQ ID NO: 4098709 - DNA, 25 bp, Homo sapien
tagaatcacgaacattaagaagacc

SEQ ID NO: 4098710 - DNA, 25 bp, Homo sapien
gggctgtgaccatcagttattcatc

SEQ ID NO: 4098711 - DNA, 25 bp, Homo sapien
aaaactccctatttcatcgttccag

SEQ ID NO: 4098712 - DNA, 25 bp, Homo sapien
ccttgactgctataatagggacccc

SEQ ID NO: 4098713 - DNA, 25 bp, Homo sapien
tcgctgcacgcagcgaactgcgcca

SEQ ID NO: 4098714 - DNA, 25 bp, Homo sapien
agcgaactgcgccacttcgtcactt

SEQ ID NO: 4098715 - DNA, 25 bp, Homo sapien
cacgcagcgaactgcgccacttcgt

SEQ ID NO: 4098716 - DNA, 25 bp, Homo sapien
ccgccacgtcgctgcacgcagcgaa

SEQ ID NO: 4098717 - DNA, 25 bp, Homo sapien
gccggcgctggagttccgactaatt

SEQ ID NO: 4098718 - DNA, 25 bp, Homo sapien
gccggctccttcacgaaccaaaaca

SEQ ID NO: 4098719 - DNA, 25 bp, Homo sapien
gctggagttccgactaattcttcct

SEQ ID NO: 4098720 - DNA, 25 bp, Homo sapien
ggctccttcacgaaccaaaacacaa

SEQ ID NO: 4098721 - DNA, 25 bp, Homo sapien
agagtgtatctatggcggtggtggt

SEQ ID NO: 4098722 - DNA, 25 bp, Homo sapien
cagcaaggcccaggcgtggcccgta

SEQ ID NO: 4098723 - DNA, 25 bp, Homo sapien
ggcgtcgcctgctcttagcgccgct

SEQ ID NO: 4098724 - DNA, 25 bp, Homo sapien
tgagaccgcagcaagccgagctgcg

SEQ ID NO: 4098725 - DNA, 25 bp, Homo sapien
agggccgcggacaggctggggaccg

SEQ ID NO: 4098726 - DNA, 25 bp, Homo sapien
tccaggcccccgctgcgcaggagga

SEQ ID NO: 4098727 - DNA, 25 bp, Homo sapien
caggcccccgctgcgcaggaggagg

SEQ ID NO: 4098728 - DNA, 25 bp, Homo sapien
acaggctggggaccgcggataacct

SEQ ID NO: 4098729 - DNA, 25 bp, Homo sapien
agtacactttccacggcgccatctt

SEQ ID NO: 4098730 - DNA, 25 bp, Homo sapien
gctggcagaacaagacgccgggttc

SEQ ID NO: 4098731 - DNA, 25 bp, Homo sapien
tacagatcgcctggataagcagcac

SEQ ID NO: 4098732 - DNA, 25 bp, Homo sapien
ttcgatagttctctggtccagggca

SEQ ID NO: 4098733 - DNA, 25 bp, Homo sapien
aattcaaggggccaatattcttctt

SEQ ID NO: 4098734 - DNA, 25 bp, Homo sapien
agactcttcaatgaacttccagaat

SEQ ID NO: 4098735 - DNA, 25 bp, Homo sapien
cagaattcaaggggccaatattctt

SEQ ID NO: 4098736 - DNA, 25 bp, Homo sapien
tttgaaataagtccctaatttcaga

SEQ ID NO: 4098737 - DNA, 25 bp, Homo sapien
ggactctcccagaagtactagtttg

SEQ ID NO: 4098738 - DNA, 25 bp, Homo sapien
atttggcccgttgggtcttgttgcg

SEQ ID NO: 4098739 - DNA, 25 bp, Homo sapien
cccgttgggtcttgttgcgcctcga

SEQ ID NO: 4098740 - DNA, 25 bp, Homo sapien
gtcttgttgcgcctcgactagccat

SEQ ID NO: 4098741 - DNA, 25 bp, Homo sapien
ttgtcagtgcctactctttcccttc

SEQ ID NO: 4098742 - DNA, 25 bp, Homo sapien
tttcctgttatgtccctttccatta

SEQ ID NO: 4098743 - DNA, 25 bp, Homo sapien
gtcccaccataaccacccttgtcag

SEQ ID NO: 4098744 - DNA, 25 bp, Homo sapien
gttatgtccctttccattaatcact

SEQ ID NO: 4098745 - DNA, 25 bp, Homo sapien
tattgtgaatctcaaaccgtgtggc

SEQ ID NO: 4098746 - DNA, 25 bp, Homo sapien
cacacgtggatgtactttcagggaa

SEQ ID NO: 4098747 - DNA, 25 bp, Homo sapien
caaaggccaggaggtagtagacttc

SEQ ID NO: 4098748 - DNA, 25 bp, Homo sapien
taagctcttgcaaagctccccagga

SEQ ID NO: 4098749 - DNA, 25 bp, Homo sapien
agattaacagaaagttgggccaggg

SEQ ID NO: 4098750 - DNA, 25 bp, Homo sapien
tatggccctttcaggttgatcatga

SEQ ID NO: 4098751 - DNA, 25 bp, Homo sapien
cctaaaggtgaagagctatgagtac

SEQ ID NO: 4098752 - DNA, 25 bp, Homo sapien
gcataaaagaatagtgtccacagct

SEQ ID NO: 4098753 - DNA, 25 bp, Homo sapien
cctgggccacgtagtgaaattccgt

SEQ ID NO: 4098754 - DNA, 25 bp, Homo sapien
tcaggtaacttctaccacatgacag

SEQ ID NO: 4098755 - DNA, 25 bp, Homo sapien
tccagaatccacaaatcaagagtgt

SEQ ID NO: 4098756 - DNA, 25 bp, Homo sapien
tatgatatccaccttcgaacacaat

SEQ ID NO: 4098757 - DNA, 25 bp, Homo sapien
ttaaacccatacaaacaagctagaa

SEQ ID NO: 4098758 - DNA, 25 bp, Homo sapien
tacggcacgcaatttcatcagaagt

SEQ ID NO: 4098759 - DNA, 25 bp, Homo sapien
tctctaaattgctaaatctacggca

SEQ ID NO: 4098760 - DNA, 25 bp, Homo sapien
caagctagaattctctaaattgcta

SEQ ID NO: 4098761 - DNA, 25 bp, Homo sapien
ctaaatcaaacgctatgcactaggt

SEQ ID NO: 4098762 - DNA, 25 bp, Homo sapien
tatgcacacgtgtagtactttagcc

SEQ ID NO: 4098763 - DNA, 25 bp, Homo sapien
gcaccaacagtgagatctgtcccta

SEQ ID NO: 4098764 - DNA, 25 bp, Homo sapien
caaataacacagttgggctgggcac

SEQ ID NO: 4098765 - DNA, 25 bp, Homo sapien
tgaggtcccaaccaatagccagcac

SEQ ID NO: 4098766 - DNA, 25 bp, Homo sapien
tgaatctgtacaggcctgtgactag

SEQ ID NO: 4098767 - DNA, 25 bp, Homo sapien
gattcttgccccgtaatgaactgca

SEQ ID NO: 4098768 - DNA, 25 bp, Homo sapien
taggtgtgttctagctaacagcccc

SEQ ID NO: 4098769 - DNA, 25 bp, Homo sapien
gcccaagctattttgcataccagga

SEQ ID NO: 4098770 - DNA, 25 bp, Homo sapien
tgtcaaatgtgcaaggatagcgccc

SEQ ID NO: 4098771 - DNA, 25 bp, Homo sapien
caaagtgattctttcatgcttggca

SEQ ID NO: 4098772 - DNA, 25 bp, Homo sapien
gcactttgggattcctgtctcagga

SEQ ID NO: 4098773 - DNA, 25 bp, Homo sapien
agattagatttacgtaacaggaacg

SEQ ID NO: 4098774 - DNA, 25 bp, Homo sapien
cagattagatttacgtaacaggaac

SEQ ID NO: 4098775 - DNA, 25 bp, Homo sapien
tcaccaagtggcataatcctaagaa

SEQ ID NO: 4098776 - DNA, 25 bp, Homo sapien
taagaccctgtgattgcctcaccaa

SEQ ID NO: 4098777 - DNA, 25 bp, Homo sapien
caaacctgatctccctagaataaac

SEQ ID NO: 4098778 - DNA, 25 bp, Homo sapien
cagtatgggcgccttcagggctaag

SEQ ID NO: 4098779 - DNA, 25 bp, Homo sapien
cacacccggctaacactaggtattt

SEQ ID NO: 4098780 - DNA, 25 bp, Homo sapien
tgaaaattaatcttagggccgggca

SEQ ID NO: 4098781 - DNA, 25 bp, Homo sapien
acatactgatgcacattgtttgaaa

SEQ ID NO: 4098782 - DNA, 25 bp, Homo sapien
acactaggtatttctaacatactga

SEQ ID NO: 4098783 - DNA, 25 bp, Homo sapien
ggcatacatccaaaagtagtgaaag

SEQ ID NO: 4098784 - DNA, 25 bp, Homo sapien
cagcaattcctcttacgggcataca

SEQ ID NO: 4098785 - DNA, 25 bp, Homo sapien
agaaactggaactgctttgcagctg

SEQ ID NO: 4098786 - DNA, 25 bp, Homo sapien
ggctatgatcaaaccaagagaaaaa

SEQ ID NO: 4098787 - DNA, 25 bp, Homo sapien
aacaaagctgcgttgagatgtgggt

SEQ ID NO: 4098788 - DNA, 25 bp, Homo sapien
taggctccctctgagctacgtgatc

SEQ ID NO: 4098789 - DNA, 25 bp, Homo sapien
tacgtgatcagctcctatttgcaag

SEQ ID NO: 4098790 - DNA, 25 bp, Homo sapien
ctgtgtacgcgatgacaagtagaga

SEQ ID NO: 4098791 - DNA, 25 bp, Homo sapien
aaacagcttttatcacttcgagagt

SEQ ID NO: 4098792 - DNA, 25 bp, Homo sapien
gaaacagcttttatcacttcgagag

SEQ ID NO: 4098793 - DNA, 25 bp, Homo sapien
aagaaacagcttttatcacttcgag

SEQ ID NO: 4098794 - DNA, 25 bp, Homo sapien
acagcttttatcacttcgagagtta

SEQ ID NO: 4098795 - DNA, 25 bp, Homo sapien
cactcttagaccgcttcattttctc

SEQ ID NO: 4098796 - DNA, 25 bp, Homo sapien
actcttagaccgcttcattttctct

SEQ ID NO: 4098797 - DNA, 25 bp, Homo sapien
atcactcttagaccgcttcattttc

SEQ ID NO: 4098798 - DNA, 25 bp, Homo sapien
tcactcttagaccgcttcattttct

SEQ ID NO: 4098799 - DNA, 25 bp, Homo sapien
tatccaaaacgtctattttctggct

SEQ ID NO: 4098800 - DNA, 25 bp, Homo sapien
tccaaaacgtctattttctggctaa

SEQ ID NO: 4098801 - DNA, 25 bp, Homo sapien
atttatccaaaacgtctattttctg

SEQ ID NO: 4098802 - DNA, 25 bp, Homo sapien
caaaacgtctattttctggctaaga

SEQ ID NO: 4098803 - DNA, 25 bp, Homo sapien
tcatgctgaacaggaatggatccca

SEQ ID NO: 4098804 - DNA, 25 bp, Homo sapien
gattcttccttatggcaaaacaggg

SEQ ID NO: 4098805 - DNA, 25 bp, Homo sapien
tacttgagcaatgaccacaggttaa

SEQ ID NO: 4098806 - DNA, 25 bp, Homo sapien
tcaagccagttaaagacacaagagg

SEQ ID NO: 4098807 - DNA, 25 bp, Homo sapien
accactgcactccatcctggcaaca

SEQ ID NO: 4098808 - DNA, 25 bp, Homo sapien
gcactccatcctggcaacagagact

SEQ ID NO: 4098809 - DNA, 25 bp, Homo sapien
gagagtcgtttgaacccatgaggca

SEQ ID NO: 4098810 - DNA, 25 bp, Homo sapien
agaggttgcagtgagctgagatcgc

SEQ ID NO: 4098811 - DNA, 25 bp, Homo sapien
ttttaacactaggaaagtagcatta

SEQ ID NO: 4098812 - DNA, 25 bp, Homo sapien
ggatctgtactttccctgattctaa

SEQ ID NO: 4098813 - DNA, 25 bp, Homo sapien
taattttaacactaggaaagtagca

SEQ ID NO: 4098814 - DNA, 25 bp, Homo sapien
ttttggatctgtactttccctgatt

SEQ ID NO: 4098815 - DNA, 25 bp, Homo sapien
cagttgattcaatatttgctcctac

SEQ ID NO: 4098816 - DNA, 25 bp, Homo sapien
gtagtcattattaccttaacctaga

SEQ ID NO: 4098817 - DNA, 25 bp, Homo sapien
aaacattgtgacactttaattgtgg

SEQ ID NO: 4098818 - DNA, 25 bp, Homo sapien
accgtaccaggcctcttgctatatt

SEQ ID NO: 4098819 - DNA, 25 bp, Homo sapien
catatagggcctttgtagtgaaatc

SEQ ID NO: 4098820 - DNA, 25 bp, Homo sapien
aatgtcacactgtaccccgtaagta

SEQ ID NO: 4098821 - DNA, 25 bp, Homo sapien
gacagattgcatacccacagctgat

SEQ ID NO: 4098822 - DNA, 25 bp, Homo sapien
gcccagcgaagactgcatttcaaaa

SEQ ID NO: 4098823 - DNA, 25 bp, Homo sapien
ggtatcgttcttgaccagctgtatc

SEQ ID NO: 4098824 - DNA, 25 bp, Homo sapien
ttggtgctaggctatggtatcgttc

SEQ ID NO: 4098825 - DNA, 25 bp, Homo sapien
tgtcatcaagacatacagtttgggt

SEQ ID NO: 4098826 - DNA, 25 bp, Homo sapien
actttactgtagtgtcatcaagaca

SEQ ID NO: 4098827 - DNA, 25 bp, Homo sapien
tgttaggacttgcttgcctctgaag

SEQ ID NO: 4098828 - DNA, 25 bp, Homo sapien
aatgttaggacttgcttgcctctga

SEQ ID NO: 4098829 - DNA, 25 bp, Homo sapien
caatgttaggacttgcttgcctctg

SEQ ID NO: 4098830 - DNA, 25 bp, Homo sapien
acaatgttaggacttgcttgcctct

SEQ ID NO: 4098831 - DNA, 25 bp, Homo sapien
gttttagcggatgtctccatgaata

SEQ ID NO: 4098832 - DNA, 25 bp, Homo sapien
tacattcattgatgttttagcggat

SEQ ID NO: 4098833 - DNA, 25 bp, Homo sapien
gatgttttagcggatgtctccatga

SEQ ID NO: 4098834 - DNA, 25 bp, Homo sapien
cattgatgttttagcggatgtctcc

SEQ ID NO: 4098835 - DNA, 25 bp, Homo sapien
tacttatgtgtcatgttcttctgag

SEQ ID NO: 4098836 - DNA, 25 bp, Homo sapien
gaagctgcctaaactgacagtatta

SEQ ID NO: 4098837 - DNA, 25 bp, Homo sapien
gagacagtcaaaccaaatatgcttc

SEQ ID NO: 4098838 - DNA, 25 bp, Homo sapien
actatcaggttaagaggttaaggct

SEQ ID NO: 4098839 - DNA, 25 bp, Homo sapien
taacaacttaggttccagattgagt

SEQ ID NO: 4098840 - DNA, 25 bp, Homo sapien
gtatccctttagcatgttccctaag

SEQ ID NO: 4098841 - DNA, 25 bp, Homo sapien
tttacaagcaaagccccagaaatgt

SEQ ID NO: 4098842 - DNA, 25 bp, Homo sapien
gtaggctgctttctaactcgaaaaa

SEQ ID NO: 4098843 - DNA, 25 bp, Homo sapien
tagaatcctagatgctgggttgggc

SEQ ID NO: 4098844 - DNA, 25 bp, Homo sapien
cattccattctacatcagcatcaat

SEQ ID NO: 4098845 - DNA, 25 bp, Homo sapien
gaaagccttcaattgggccacttct

SEQ ID NO: 4098846 - DNA, 25 bp, Homo sapien
ggttgggcaatggatttgggagcca

SEQ ID NO: 4098847 - DNA, 25 bp, Homo sapien
gatgcctgcatgtgtcaaaacttag

SEQ ID NO: 4098848 - DNA, 25 bp, Homo sapien
tacaccttgcagagtaaccatcagc

SEQ ID NO: 4098849 - DNA, 25 bp, Homo sapien
gaaggacagataacacccaagttag

SEQ ID NO: 4098850 - DNA, 25 bp, Homo sapien
gcagtcctgagttccaaagtgagat

SEQ ID NO: 4098851 - DNA, 25 bp, Homo sapien
tgtgtgggttcggtaaggtctactc

SEQ ID NO: 4098852 - DNA, 25 bp, Homo sapien
catactgggctggttaaatgctcca

SEQ ID NO: 4098853 - DNA, 25 bp, Homo sapien
ttgaaacattagtgagagggaccca

SEQ ID NO: 4098854 - DNA, 25 bp, Homo sapien
tcctagtgatgagaaattattcccc

SEQ ID NO: 4098855 - DNA, 25 bp, Homo sapien
gagggacccatgcatgttattaaaa

SEQ ID NO: 4098856 - DNA, 25 bp, Homo sapien
tggttctagccatggaggaacaact

SEQ ID NO: 4098857 - DNA, 25 bp, Homo sapien
cagtacagctgaagatcgaatttaa

SEQ ID NO: 4098858 - DNA, 25 bp, Homo sapien
ggtgaaccgttttcctaattctgca

SEQ ID NO: 4098859 - DNA, 25 bp, Homo sapien
gatatggagactacaatgcagtacc

SEQ ID NO: 4098860 - DNA, 25 bp, Homo sapien
caactagtgtaaatgatgtggcaac

SEQ ID NO: 4098861 - DNA, 25 bp, Homo sapien
taagagtttctatgaaggcgcagct

SEQ ID NO: 4098862 - DNA, 25 bp, Homo sapien
gcgcagctgagtatgttagccatga

SEQ ID NO: 4098863 - DNA, 25 bp, Homo sapien
gactcatcgtaaaccttgcagtgaa

SEQ ID NO: 4098864 - DNA, 25 bp, Homo sapien
agttcaaatgaaccatacgggcttg

SEQ ID NO: 4098865 - DNA, 25 bp, Homo sapien
ttgtagctactaatggactttggga

SEQ ID NO: 4098866 - DNA, 25 bp, Homo sapien
taaacgtacttttacatagcctgct

SEQ ID NO: 4098867 - DNA, 25 bp, Homo sapien
actacacgaggacttggatttcatg

SEQ ID NO: 4098868 - DNA, 25 bp, Homo sapien
ccttatgtgcaaccgtacaagagac

SEQ ID NO: 4098869 - DNA, 25 bp, Homo sapien
tgtgcaaccgtacaagagacattcc

SEQ ID NO: 4098870 - DNA, 25 bp, Homo sapien
ctcatcctaaaaggcctgggggtgc

SEQ ID NO: 4098871 - DNA, 25 bp, Homo sapien
atttcatcccttatgtgcaaccgta

SEQ ID NO: 4098872 - DNA, 25 bp, Homo sapien
ttagcaataatcacaacgtggctaa

SEQ ID NO: 4098873 - DNA, 25 bp, Homo sapien
tgtattacaagtcgtcacggtgagc

SEQ ID NO: 4098874 - DNA, 25 bp, Homo sapien
acaacgtggctaaacctcactggct

SEQ ID NO: 4098875 - DNA, 25 bp, Homo sapien
cacggtgagctatggggaaaagttt

SEQ ID NO: 4098876 - DNA, 25 bp, Homo sapien
gaatggtcgagttctccggatgaaa

SEQ ID NO: 4098877 - DNA, 25 bp, Homo sapien
ctgagaccgtaggagaaagatggct

SEQ ID NO: 4098878 - DNA, 25 bp, Homo sapien
gagtcgcacattacccagaaggaaa

SEQ ID NO: 4098879 - DNA, 25 bp, Homo sapien
gagcttcagaagctgatcctcacaa

SEQ ID NO: 4098880 - DNA, 25 bp, Homo sapien
cttggccaggaaacgcttaatcctg

SEQ ID NO: 4098881 - DNA, 25 bp, Homo sapien
tttcttggccaggaaacgcttaatc

SEQ ID NO: 4098882 - DNA, 25 bp, Homo sapien
gccaggaaacgcttaatcctgaagg

SEQ ID NO: 4098883 - DNA, 25 bp, Homo sapien
caggaaacgcttaatcctgaaggtt

SEQ ID NO: 4098884 - DNA, 25 bp, Homo sapien
ttgaagttctactgattttattacc

SEQ ID NO: 4098885 - DNA, 25 bp, Homo sapien
tgaagttctactgattttattacca

SEQ ID NO: 4098886 - DNA, 25 bp, Homo sapien
tctccttttgaagttctactgattt

SEQ ID NO: 4098887 - DNA, 25 bp, Homo sapien
caatgtctccttttgaagttctact

SEQ ID NO: 4098888 - DNA, 25 bp, Homo sapien
cagtgccttcatagcacacacagaa

SEQ ID NO: 4098889 - DNA, 25 bp, Homo sapien
tgccttcatagcacacacagaaaga

SEQ ID NO: 4098890 - DNA, 25 bp, Homo sapien
aaccagtgccttcatagcacacaca

SEQ ID NO: 4098891 - DNA, 25 bp, Homo sapien
ccagccaaccagtgccttcatagca

SEQ ID NO: 4098892 - DNA, 25 bp, Homo sapien
gggcgcggtgacctgtgcctataat

SEQ ID NO: 4098893 - DNA, 25 bp, Homo sapien
gccgggcgcggtgacctgtgcctat

SEQ ID NO: 4098894 - DNA, 25 bp, Homo sapien
cgcgcctggcctaaattggtttatt

SEQ ID NO: 4098895 - DNA, 25 bp, Homo sapien
taagattaaaatgtgtaggccgggc

SEQ ID NO: 4098896 - DNA, 25 bp, Homo sapien
gactaggtgtgcgtgccggcggctg

SEQ ID NO: 4098897 - DNA, 25 bp, Homo sapien
ttcctcgggactgcggactaggtgt

SEQ ID NO: 4098898 - DNA, 25 bp, Homo sapien
gccctggctgcggacatgttcctcg

SEQ ID NO: 4098899 - DNA, 25 bp, Homo sapien
cggacatgttcctcgggactgcgga

SEQ ID NO: 4098900 - DNA, 25 bp, Homo sapien
ttcttcacggcgattcgggccgagc

SEQ ID NO: 4098901 - DNA, 25 bp, Homo sapien
gagcggagcgtagttgcgctttctt

SEQ ID NO: 4098902 - DNA, 25 bp, Homo sapien
tttctccagtttcttggcccgcgga

SEQ ID NO: 4098903 - DNA, 25 bp, Homo sapien
cttgcaggcggagtacactccgagt

SEQ ID NO: 4098904 - DNA, 25 bp, Homo sapien
cagtaaggactcaccaatacggact

SEQ ID NO: 4098905 - DNA, 25 bp, Homo sapien
gacatactaccagcagtgacatcat

SEQ ID NO: 4098906 - DNA, 25 bp, Homo sapien
ggactcaccaatacggactccaggg

SEQ ID NO: 4098907 - DNA, 25 bp, Homo sapien
gaaggagctatgcaggctagacata

SEQ ID NO: 4098908 - DNA, 25 bp, Homo sapien
tatgtgcaaggtatgatccacccga

SEQ ID NO: 4098909 - DNA, 25 bp, Homo sapien
cgtagcctaggctggatcaccaact

SEQ ID NO: 4098910 - DNA, 25 bp, Homo sapien
tgtttctcctatgggctgaggcctt

SEQ ID NO: 4098911 - DNA, 25 bp, Homo sapien
tgggctccatgaacccaaatctccg

SEQ ID NO: 4098912 - DNA, 25 bp, Homo sapien
ctgcctgccgtggcctcccaaagtg

SEQ ID NO: 4098913 - DNA, 25 bp, Homo sapien
gctgagattattgcccaccaacaca

SEQ ID NO: 4098914 - DNA, 25 bp, Homo sapien
agctgagattattgcccaccaacac

SEQ ID NO: 4098915 - DNA, 25 bp, Homo sapien
caccaacacacccagctaatttttg

SEQ ID NO: 4098916 - DNA, 25 bp, Homo sapien
caacaggatccagggttagaggtca

SEQ ID NO: 4098917 - DNA, 25 bp, Homo sapien
taaattagtgtcaaggatgtcccac

SEQ ID NO: 4098918 - DNA, 25 bp, Homo sapien
ggataaacaagtagtcacaacccag

SEQ ID NO: 4098919 - DNA, 25 bp, Homo sapien
gagctcacagttcacgcagtgttaa

SEQ ID NO: 4098920 - DNA, 25 bp, Homo sapien
tctcactatgagacagaccagggtc

SEQ ID NO: 4098921 - DNA, 25 bp, Homo sapien
ccagggtctcactataagccaaaga

SEQ ID NO: 4098922 - DNA, 25 bp, Homo sapien
caaaaggagtgtggcccagatgaca

SEQ ID NO: 4098923 - DNA, 25 bp, Homo sapien
ggattgccaagcaccaccagatgct

SEQ ID NO: 4098924 - DNA, 25 bp, Homo sapien
attctctgtaatgaaccatccacct

SEQ ID NO: 4098925 - DNA, 25 bp, Homo sapien
tcttcagaggttgcaaagatctcag

SEQ ID NO: 4098926 - DNA, 25 bp, Homo sapien
taatgaaccatccacctcttcagag

SEQ ID NO: 4098927 - DNA, 25 bp, Homo sapien
tgtaatgaaccatccacctcttcag

SEQ ID NO: 4098928 - DNA, 25 bp, Homo sapien
ccccagtgagtagctcaagtgaccg

SEQ ID NO: 4098929 - DNA, 25 bp, Homo sapien
gggccaggagaagcacctacatcag

SEQ ID NO: 4098930 - DNA, 25 bp, Homo sapien
tgtctaggcatcaggaaggcccaac

SEQ ID NO: 4098931 - DNA, 25 bp, Homo sapien
caagtgaccgtcttttgtctaggca

SEQ ID NO: 4098932 - DNA, 25 bp, Homo sapien
ccagctttagaaatgaagagggctt

SEQ ID NO: 4098933 - DNA, 25 bp, Homo sapien
tctgtgagctcccagctttagaaat

SEQ ID NO: 4098934 - DNA, 25 bp, Homo sapien
acttgcaggctcctccaagacttct

SEQ ID NO: 4098935 - DNA, 25 bp, Homo sapien
tgagctcccagctttagaaatgaag

SEQ ID NO: 4098936 - DNA, 25 bp, Homo sapien
caatgtacactaattatatgacagc

SEQ ID NO: 4098937 - DNA, 25 bp, Homo sapien
aattatatgacagctatcccctcac

SEQ ID NO: 4098938 - DNA, 25 bp, Homo sapien
tgtcgtctgccatatacacaagaga

SEQ ID NO: 4098939 - DNA, 25 bp, Homo sapien
tatttaacaggcagccgtggactga

SEQ ID NO: 4098940 - DNA, 25 bp, Homo sapien
ttctgttagactgacaattatttgc

SEQ ID NO: 4098941 - DNA, 25 bp, Homo sapien
acaattatttgctgcaggtcggctc

SEQ ID NO: 4098942 - DNA, 25 bp, Homo sapien
ggctacaactccgacaggattctgt

SEQ ID NO: 4098943 - DNA, 25 bp, Homo sapien
ccgacaggattctgttagactgaca

SEQ ID NO: 4098944 - DNA, 25 bp, Homo sapien
gcattcaaatttggtgaacccacag

SEQ ID NO: 4098945 - DNA, 25 bp, Homo sapien
tctcatacagaggtacacagcattc

SEQ ID NO: 4098946 - DNA, 25 bp, Homo sapien
gagtctcacgctacaatgaactcgt

SEQ ID NO: 4098947 - DNA, 25 bp, Homo sapien
gcatttgtctctcacgagaagccct

SEQ ID NO: 4098948 - DNA, 25 bp, Homo sapien
taactagctcgattgtcatgtttca

SEQ ID NO: 4098949 - DNA, 25 bp, Homo sapien
ctaactagctcgattgtcatgtttc

SEQ ID NO: 4098950 - DNA, 25 bp, Homo sapien
actagctcgattgtcatgtttcatc

SEQ ID NO: 4098951 - DNA, 25 bp, Homo sapien
cttatttggcaatcccccagtccaa

SEQ ID NO: 4098952 - DNA, 25 bp, Homo sapien
cagttggttgaggtttcaaccctga

SEQ ID NO: 4098953 - DNA, 25 bp, Homo sapien
ccagttggttgaggtttcaaccctg

SEQ ID NO: 4098954 - DNA, 25 bp, Homo sapien
gaagataaaatgaagcaccccagaa

SEQ ID NO: 4098955 - DNA, 25 bp, Homo sapien
agttggttgaggtttcaaccctgag

SEQ ID NO: 4098956 - DNA, 25 bp, Homo sapien
caacttttatctactcaaacaacac

SEQ ID NO: 4098957 - DNA, 25 bp, Homo sapien
ctaattcctcaacttttatctactc

SEQ ID NO: 4098958 - DNA, 25 bp, Homo sapien
ggaaagtaagaatagtctaagattc

SEQ ID NO: 4098959 - DNA, 25 bp, Homo sapien
gtctaagattcttcgtggactgaaa

SEQ ID NO: 4098960 - DNA, 25 bp, Homo sapien
tgctatgtccttgcagtcacggaca

SEQ ID NO: 4098961 - DNA, 25 bp, Homo sapien
gcagtcacggacagcaaactggcct

SEQ ID NO: 4098962 - DNA, 25 bp, Homo sapien
ctgcccagtgagtgctatgtccttg

SEQ ID NO: 4098963 - DNA, 25 bp, Homo sapien
tccttgcagtcacggacagcaaact

SEQ ID NO: 4098964 - DNA, 25 bp, Homo sapien
catgctaaccttggaggcgacacca

SEQ ID NO: 4098965 - DNA, 25 bp, Homo sapien
aatgatggcataagaagtcacccac

SEQ ID NO: 4098966 - DNA, 25 bp, Homo sapien
tttcagacgacctaacaccatgcta

SEQ ID NO: 4098967 - DNA, 25 bp, Homo sapien
gcgacaccatttcttgtaagcagga

SEQ ID NO: 4098968 - DNA, 25 bp, Homo sapien
aaacttcagagttaaacacataaca

SEQ ID NO: 4098969 - DNA, 25 bp, Homo sapien
atcctgaaccaatactcacagggac

SEQ ID NO: 4098970 - DNA, 25 bp, Homo sapien
tcctgaaccaatactcacagggaca

SEQ ID NO: 4098971 - DNA, 25 bp, Homo sapien
aaacacataacaggcacaagctcct

SEQ ID NO: 4098972 - DNA, 25 bp, Homo sapien
cactattgtgggactgtgcccttaa

SEQ ID NO: 4098973 - DNA, 25 bp, Homo sapien
tcataacctgggacttgcaattggc

SEQ ID NO: 4098974 - DNA, 25 bp, Homo sapien
ccgaaatgaattatgggacctccag

SEQ ID NO: 4098975 - DNA, 25 bp, Homo sapien
tatagccggtaggtcagaagcaaag

SEQ ID NO: 4098976 - DNA, 25 bp, Homo sapien
gaacatggagcagcctgatggccaa

SEQ ID NO: 4098977 - DNA, 25 bp, Homo sapien
ctcaatgaactgaacctgcttgctc

SEQ ID NO: 4098978 - DNA, 25 bp, Homo sapien
gtatcatcactttatgggaaagcca

SEQ ID NO: 4098979 - DNA, 25 bp, Homo sapien
agatcacccttcactctgaggataa

SEQ ID NO: 4098980 - DNA, 25 bp, Homo sapien
gtccccacggcctattttagcttga

SEQ ID NO: 4098981 - DNA, 25 bp, Homo sapien
ctgcaaagtccccacggcctatttt

SEQ ID NO: 4098982 - DNA, 25 bp, Homo sapien
aacatcctccgtgatccagctgcaa

SEQ ID NO: 4098983 - DNA, 25 bp, Homo sapien
gacattcaacatcctccgtgatcca

SEQ ID NO: 4098984 - DNA, 25 bp, Homo sapien
cattctccaggtgggaaacatgagc

SEQ ID NO: 4098985 - DNA, 25 bp, Homo sapien
cttcctctgacacattctccaggtg

SEQ ID NO: 4098986 - DNA, 25 bp, Homo sapien
cctctgacacattctccaggtggga

SEQ ID NO: 4098987 - DNA, 25 bp, Homo sapien
tgacacattctccaggtgggaaaca

SEQ ID NO: 4098988 - DNA, 25 bp, Homo sapien
caggtaaagagatattccacatcca

SEQ ID NO: 4098989 - DNA, 25 bp, Homo sapien
aaacttgtttggtatctgcatcttc

SEQ ID NO: 4098990 - DNA, 25 bp, Homo sapien
aatagatagaaataaacttgtttgg

SEQ ID NO: 4098991 - DNA, 25 bp, Homo sapien
tccaatactattcccaggagtctgt

SEQ ID NO: 4098992 - DNA, 25 bp, Homo sapien
ctgttcaatgctaggtttttcaaat

SEQ ID NO: 4098993 - DNA, 25 bp, Homo sapien
gttcaatgctaggtttttcaaatgg

SEQ ID NO: 4098994 - DNA, 25 bp, Homo sapien
caatgctaggtttttcaaatggggg

SEQ ID NO: 4098995 - DNA, 25 bp, Homo sapien
tttccaaagagccttcaaccacagg

SEQ ID NO: 4098996 - DNA, 25 bp, Homo sapien
gctaaaaaagtgatgctaatgagag

SEQ ID NO: 4098997 - DNA, 25 bp, Homo sapien
tttccaggaatcataatgtagcagg

SEQ ID NO: 4098998 - DNA, 25 bp, Homo sapien
aaggattctggtatcatgacttcag

SEQ ID NO: 4098999 - DNA, 25 bp, Homo sapien
gacttcagtagtcattctcatcaaa

SEQ ID NO: 4099000 - DNA, 25 bp, Homo sapien
gccaactcaactattgtttgccttt

SEQ ID NO: 4099001 - DNA, 25 bp, Homo sapien
ttttgccaactcaactattgtttgc

SEQ ID NO: 4099002 - DNA, 25 bp, Homo sapien
cttttgctggcaggtgactaaattt

SEQ ID NO: 4099003 - DNA, 25 bp, Homo sapien
ttttgctggcaggtgactaaatttg

SEQ ID NO: 4099004 - DNA, 25 bp, Homo sapien
ccaatagttgatgcggtttaggaac

SEQ ID NO: 4099005 - DNA, 25 bp, Homo sapien
tgtatccagaaatatcatcattggg

SEQ ID NO: 4099006 - DNA, 25 bp, Homo sapien
cagtcttcgttgagatggtgcctcc

SEQ ID NO: 4099007 - DNA, 25 bp, Homo sapien
catcattgggagatcgcagtcttcg

SEQ ID NO: 4099008 - DNA, 25 bp, Homo sapien
caacttgattgttctagtaggactc

SEQ ID NO: 4099009 - DNA, 25 bp, Homo sapien
tctatgtctctgctatccaatacag

SEQ ID NO: 4099010 - DNA, 25 bp, Homo sapien
tacacactggatttggccgggtgca

SEQ ID NO: 4099011 - DNA, 25 bp, Homo sapien
tagccaccagccattggtaactatt

SEQ ID NO: 4099012 - DNA, 25 bp, Homo sapien
tagactgtcgcagaactgtggcacg

SEQ ID NO: 4099013 - DNA, 25 bp, Homo sapien
tccaggagttgtcgcctcataacag

SEQ ID NO: 4099014 - DNA, 25 bp, Homo sapien
tcataacagtgaagaccgagcgaag

SEQ ID NO: 4099015 - DNA, 25 bp, Homo sapien
tgtggcacgttgcagtaacacagcc

SEQ ID NO: 4099016 - DNA, 25 bp, Homo sapien
tgtaccttgactcagagacagaatg

SEQ ID NO: 4099017 - DNA, 25 bp, Homo sapien
actgaaatacatgagtgtgccctaa

SEQ ID NO: 4099018 - DNA, 25 bp, Homo sapien
ttgggagcaacatccaaactgcagt

SEQ ID NO: 4099019 - DNA, 25 bp, Homo sapien
ggtgtttggccaaagcccatcagaa

SEQ ID NO: 4099020 - DNA, 25 bp, Homo sapien
ctgtttggatgcctagctggctggt

SEQ ID NO: 4099021 - DNA, 25 bp, Homo sapien
tttggatgcctagctggctggttct

SEQ ID NO: 4099022 - DNA, 25 bp, Homo sapien
gatgggagagttttgactatatact

SEQ ID NO: 4099023 - DNA, 25 bp, Homo sapien
gatcccagatgggagagttttgact

SEQ ID NO: 4099024 - DNA, 25 bp, Homo sapien
ctgctcaagggaagatgaggttgaa

SEQ ID NO: 4099025 - DNA, 25 bp, Homo sapien
ggttgaattgtatgaaattgtccca

SEQ ID NO: 4099026 - DNA, 25 bp, Homo sapien
tgctccctgcgtttggctgctcaag

SEQ ID NO: 4099027 - DNA, 25 bp, Homo sapien
attgtatgaaattgtcccagccaca

SEQ ID NO: 4099028 - DNA, 25 bp, Homo sapien
ttccttcatctgcaaatgcaaaggg

SEQ ID NO: 4099029 - DNA, 25 bp, Homo sapien
tgtatggatatcagtaagagcctta

SEQ ID NO: 4099030 - DNA, 25 bp, Homo sapien
gacaccaaaacgtcaaaatggattg

SEQ ID NO: 4099031 - DNA, 25 bp, Homo sapien
tgtgagctcacaataactgccaacc

SEQ ID NO: 4099032 - DNA, 25 bp, Homo sapien
ccgtgatggtagacataacctcgtt

SEQ ID NO: 4099033 - DNA, 25 bp, Homo sapien
tcctccagaacatgagaatcagtca

SEQ ID NO: 4099034 - DNA, 25 bp, Homo sapien
gcctcctccagaacatgagaatcag

SEQ ID NO: 4099035 - DNA, 25 bp, Homo sapien
tgattaattccatcggaatatcccc

SEQ ID NO: 4099036 - DNA, 25 bp, Homo sapien
tgttaactctcagcattagcatccc

SEQ ID NO: 4099037 - DNA, 25 bp, Homo sapien
taaaaagctgggaatgatgccttca

SEQ ID NO: 4099038 - DNA, 25 bp, Homo sapien
tgcaaaccagggtagcataacatgt

SEQ ID NO: 4099039 - DNA, 25 bp, Homo sapien
ttctgcaacatttatgagggcttga

SEQ ID NO: 4099040 - DNA, 25 bp, Homo sapien
tgcaccatgagtataagttccctga

SEQ ID NO: 4099041 - DNA, 25 bp, Homo sapien
gaaggaaggccctaactggtgacac

SEQ ID NO: 4099042 - DNA, 25 bp, Homo sapien
gatgtagtttgaatgtgtgacccct

SEQ ID NO: 4099043 - DNA, 25 bp, Homo sapien
tgtgcattccagtacaagccagctc

SEQ ID NO: 4099044 - DNA, 25 bp, Homo sapien
tacacagagctattctctcaagaca

SEQ ID NO: 4099045 - DNA, 25 bp, Homo sapien
tgggacacatccaagcttctcatct

SEQ ID NO: 4099046 - DNA, 25 bp, Homo sapien
aaaattacacagagctattctctca

SEQ ID NO: 4099047 - DNA, 25 bp, Homo sapien
cagagtcctaaatacacatgtgtgc

SEQ ID NO: 4099048 - DNA, 25 bp, Homo sapien
caaagacgagccgtgtgatgtattc

SEQ ID NO: 4099049 - DNA, 25 bp, Homo sapien
gaaaacgttctgtaggccaaccagc

SEQ ID NO: 4099050 - DNA, 25 bp, Homo sapien
ccctggccgagtgtgctgacagaaa

SEQ ID NO: 4099051 - DNA, 25 bp, Homo sapien
ggttgagggaattgccaaccacgtg

SEQ ID NO: 4099052 - DNA, 25 bp, Homo sapien
taacacggccatctttaattaaagc

SEQ ID NO: 4099053 - DNA, 25 bp, Homo sapien
gaacatacggaaacagataccacca

SEQ ID NO: 4099054 - DNA, 25 bp, Homo sapien
tgacttgctcatttgaggttacagc

SEQ ID NO: 4099055 - DNA, 25 bp, Homo sapien
gaatccttgagatgggaacatacgg

SEQ ID NO: 4099056 - DNA, 25 bp, Homo sapien
tcctaggaccaagcataataataag

SEQ ID NO: 4099057 - DNA, 25 bp, Homo sapien
ggacggtatgtctagtaaacagaac

SEQ ID NO: 4099058 - DNA, 25 bp, Homo sapien
tattcaacagagtagacactagcct

SEQ ID NO: 4099059 - DNA, 25 bp, Homo sapien
tccttgaggagacgatagtaaaatg

SEQ ID NO: 4099060 - DNA, 25 bp, Homo sapien
aatatattaacaccctttcttgcgt

SEQ ID NO: 4099061 - DNA, 25 bp, Homo sapien
catcaggaaatgatggtgaattcag

SEQ ID NO: 4099062 - DNA, 25 bp, Homo sapien
taaagatcacttgctgaatagtaat

SEQ ID NO: 4099063 - DNA, 25 bp, Homo sapien
gaatgaaatatattaacaccctttc

SEQ ID NO: 4099064 - DNA, 25 bp, Homo sapien
ctgtgtggaagttagtatacaaaca

SEQ ID NO: 4099065 - DNA, 25 bp, Homo sapien
aagttagtatacaaacaaatacatt

SEQ ID NO: 4099066 - DNA, 25 bp, Homo sapien
tgtgtggaagttagtatacaaacaa

SEQ ID NO: 4099067 - DNA, 25 bp, Homo sapien
ttagtatacaaacaaatacattaga

SEQ ID NO: 4099068 - DNA, 25 bp, Homo sapien
tcttaaagtatccaattgcatattc

SEQ ID NO: 4099069 - DNA, 25 bp, Homo sapien
aggaagttcaggatgtcatgcttta

SEQ ID NO: 4099070 - DNA, 25 bp, Homo sapien
gttcaggatgtcatgctttatgtga

SEQ ID NO: 4099071 - DNA, 25 bp, Homo sapien
aagtatccaattgcatattcatctg

SEQ ID NO: 4099072 - DNA, 25 bp, Homo sapien
aataatatgcagtcaaagaatagtc

SEQ ID NO: 4099073 - DNA, 25 bp, Homo sapien
tcctcaaaaagctgagctgaaaact

SEQ ID NO: 4099074 - DNA, 25 bp, Homo sapien
gaatagtcctcaaaaagctgagctg

SEQ ID NO: 4099075 - DNA, 25 bp, Homo sapien
tatgcagtcaaagaatagtcctcaa

SEQ ID NO: 4099076 - DNA, 25 bp, Homo sapien
gaaaattctgtgtacgggatccgtg

SEQ ID NO: 4099077 - DNA, 25 bp, Homo sapien
catcccattaaagtggctccttcat

SEQ ID NO: 4099078 - DNA, 25 bp, Homo sapien
tagccaacatatttggttttaggta

SEQ ID NO: 4099079 - DNA, 25 bp, Homo sapien
ccgtggatttagctcacatcccatt

SEQ ID NO: 4099080 - DNA, 25 bp, Homo sapien
tataggaatctgtcgaactccatct

SEQ ID NO: 4099081 - DNA, 25 bp, Homo sapien
ttctataggaatctgtcgaactcca

SEQ ID NO: 4099082 - DNA, 25 bp, Homo sapien
cttttcgaatttgtgcctgttttct

SEQ ID NO: 4099083 - DNA, 25 bp, Homo sapien
gaatctgtcgaactccatctttaaa

SEQ ID NO: 4099084 - DNA, 25 bp, Homo sapien
gggctgatcaccctgtaaaagagtt

SEQ ID NO: 4099085 - DNA, 25 bp, Homo sapien
ctgagagacgactgaaattaatggc

SEQ ID NO: 4099086 - DNA, 25 bp, Homo sapien
caccaacctttcagtggagagcata

SEQ ID NO: 4099087 - DNA, 25 bp, Homo sapien
tctctgttctatttggctaaggccc

SEQ ID NO: 4099088 - DNA, 25 bp, Homo sapien
ttttccactcggtttccagcctgtc

SEQ ID NO: 4099089 - DNA, 25 bp, Homo sapien
ttctcttttccactcggtttccagc

SEQ ID NO: 4099090 - DNA, 25 bp, Homo sapien
tcttttccactcggtttccagcctg

SEQ ID NO: 4099091 - DNA, 25 bp, Homo sapien
ttccactcggtttccagcctgtctc

SEQ ID NO: 4099092 - DNA, 25 bp, Homo sapien
ctcttgagcgtgctgtaaagctggt

SEQ ID NO: 4099093 - DNA, 25 bp, Homo sapien
atgctcttgagcgtgctgtaaagct

SEQ ID NO: 4099094 - DNA, 25 bp, Homo sapien
gaggatgctcttgagcgtgctgtaa

SEQ ID NO: 4099095 - DNA, 25 bp, Homo sapien
ggatgctcttgagcgtgctgtaaag

SEQ ID NO: 4099096 - DNA, 25 bp, Homo sapien
acttcataatatcctggagcttctg

SEQ ID NO: 4099097 - DNA, 25 bp, Homo sapien
gaaccttataacttcataatatcct

SEQ ID NO: 4099098 - DNA, 25 bp, Homo sapien
ccatgaagggccaagcgctttgatg

SEQ ID NO: 4099099 - DNA, 25 bp, Homo sapien
catgaagggccaagcgctttgatgg

SEQ ID NO: 4099100 - DNA, 25 bp, Homo sapien
ctagtgtcgttaagctcatgtgggc

SEQ ID NO: 4099101 - DNA, 25 bp, Homo sapien
gaatacctatttacgacagacgcaa

SEQ ID NO: 4099102 - DNA, 25 bp, Homo sapien
gacattaacagtacccatcaagggc

SEQ ID NO: 4099103 - DNA, 25 bp, Homo sapien
ctaagcagaggagtacaaatcaacc

SEQ ID NO: 4099104 - DNA, 25 bp, Homo sapien
aatacatctgtgaacacaccagtgc

SEQ ID NO: 4099105 - DNA, 25 bp, Homo sapien
cactgtcaggactaatttaaggaat

SEQ ID NO: 4099106 - DNA, 25 bp, Homo sapien
taagccttgtgagactattgcaaag

SEQ ID NO: 4099107 - DNA, 25 bp, Homo sapien
tgcagattagaatagacgctaacat

SEQ ID NO: 4099108 - DNA, 25 bp, Homo sapien
agactcgctgtaagtctgccatgaa

SEQ ID NO: 4099109 - DNA, 25 bp, Homo sapien
ttgaggcgttcactcatggttttca

SEQ ID NO: 4099110 - DNA, 25 bp, Homo sapien
tgtactctttgcaattggtaaagac

SEQ ID NO: 4099111 - DNA, 25 bp, Homo sapien
taatttcttagacacgtagtaccta

SEQ ID NO: 4099112 - DNA, 25 bp, Homo sapien
tcagcagatccggtacaaagcactg

SEQ ID NO: 4099113 - DNA, 25 bp, Homo sapien
tatcttttggaacttatggcctgca

SEQ ID NO: 4099114 - DNA, 25 bp, Homo sapien
tagtgttgagaccatcaagatggcc

SEQ ID NO: 4099115 - DNA, 25 bp, Homo sapien
gaccctggacgcatatactaatgtg

SEQ ID NO: 4099116 - DNA, 25 bp, Homo sapien
cacactcggctaaatgttttctgtt

SEQ ID NO: 4099117 - DNA, 25 bp, Homo sapien
tggtacaatcaaggctcacatagcc

SEQ ID NO: 4099118 - DNA, 25 bp, Homo sapien
ggaccaccactgtgcaccaccacac

SEQ ID NO: 4099119 - DNA, 25 bp, Homo sapien
ttttgattgatagagatacggtctc

SEQ ID NO: 4099120 - DNA, 25 bp, Homo sapien
cttggttatgggaatctatgcagca

SEQ ID NO: 4099121 - DNA, 25 bp, Homo sapien
tcatgctgcaacaaactaggaccat

SEQ ID NO: 4099122 - DNA, 25 bp, Homo sapien
gctgtagcattgcatagcactgaag

SEQ ID NO: 4099123 - DNA, 25 bp, Homo sapien
aataggaactatggttggtagcctc

SEQ ID NO: 4099124 - DNA, 25 bp, Homo sapien
aaattctacatctgcggcctctcca

SEQ ID NO: 4099125 - DNA, 25 bp, Homo sapien
caacaaggtctatccattctggctg

SEQ ID NO: 4099126 - DNA, 25 bp, Homo sapien
gaagtttcatcctacacatgcatgg

SEQ ID NO: 4099127 - DNA, 25 bp, Homo sapien
ccccagtacgaagatgtgaagcatc

SEQ ID NO: 4099128 - DNA, 25 bp, Homo sapien
gggataaatccatcactcggtcata

SEQ ID NO: 4099129 - DNA, 25 bp, Homo sapien
tcagagtaataataccagcctcata

SEQ ID NO: 4099130 - DNA, 25 bp, Homo sapien
tgaatgtttgacacactagtgagac

SEQ ID NO: 4099131 - DNA, 25 bp, Homo sapien
ctagtgagactatttgtgctaggac

SEQ ID NO: 4099132 - DNA, 25 bp, Homo sapien
agtgtcctttgatgtacaatagttc

SEQ ID NO: 4099133 - DNA, 25 bp, Homo sapien
tatgtgatttccaaatgtcctcccc

SEQ ID NO: 4099134 - DNA, 25 bp, Homo sapien
agttctgaaattttattgaatccaa

SEQ ID NO: 4099135 - DNA, 25 bp, Homo sapien
cttctgttgtcttctaagtcataat

SEQ ID NO: 4099136 - DNA, 25 bp, Homo sapien
tggctatgtttcctaggccagtctt

SEQ ID NO: 4099137 - DNA, 25 bp, Homo sapien
aatcgtccaatcttacctcccaaag

SEQ ID NO: 4099138 - DNA, 25 bp, Homo sapien
acccattgaacaatcactctctctt

SEQ ID NO: 4099139 - DNA, 25 bp, Homo sapien
gatggggactggctatgtttcctag

SEQ ID NO: 4099140 - DNA, 25 bp, Homo sapien
ggtgttctaggtgagttaatcctta

SEQ ID NO: 4099141 - DNA, 25 bp, Homo sapien
tcttcactattctcatccttggaca

SEQ ID NO: 4099142 - DNA, 25 bp, Homo sapien
tatcaaaaatagagtatctctctgt

SEQ ID NO: 4099143 - DNA, 25 bp, Homo sapien
tctgtgtaatctcccagttcatgat

SEQ ID NO: 4099144 - DNA, 25 bp, Homo sapien
taattataagcttctggcatctcta

SEQ ID NO: 4099145 - DNA, 25 bp, Homo sapien
gaaactctgtgtagtattcgagtaa

SEQ ID NO: 4099146 - DNA, 25 bp, Homo sapien
tattgtggatcttttgaaactctgt

SEQ ID NO: 4099147 - DNA, 25 bp, Homo sapien
ggatcttttgaaactctttagtaca

SEQ ID NO: 4099148 - DNA, 25 bp, Homo sapien
taaggtgcgaaacaagggcgtagtg

SEQ ID NO: 4099149 - DNA, 25 bp, Homo sapien
aaacaagggcgtagtgatccctgtt

SEQ ID NO: 4099150 - DNA, 25 bp, Homo sapien
gacttcccttcggttttcagtatca

SEQ ID NO: 4099151 - DNA, 25 bp, Homo sapien
gggcgtagtgatccctgtttgactt

SEQ ID NO: 4099152 - DNA, 25 bp, Homo sapien
aaggtatcgttctggacgcgcctgc

SEQ ID NO: 4099153 - DNA, 25 bp, Homo sapien
gaaaatttcgaatgtggcggcggta

SEQ ID NO: 4099154 - DNA, 25 bp, Homo sapien
tgcagaagtagtggccaaggtatcg

SEQ ID NO: 4099155 - DNA, 25 bp, Homo sapien
cttgagcgaatgtgcgtcacgtgac

SEQ ID NO: 4099156 - DNA, 25 bp, Homo sapien
atcgtgtgaccgactggacgggcaa

SEQ ID NO: 4099157 - DNA, 25 bp, Homo sapien
cattaaggacgatttctcaggcttc

SEQ ID NO: 4099158 - DNA, 25 bp, Homo sapien
gagttaaagagccagagatagccgg

SEQ ID NO: 4099159 - DNA, 25 bp, Homo sapien
cggtcagagtgggtactagtgcaat

SEQ ID NO: 4099160 - DNA, 25 bp, Homo sapien
ccccactccccgcaacccacaacag

SEQ ID NO: 4099161 - DNA, 25 bp, Homo sapien
caatgctaaccctccccactccccg

SEQ ID NO: 4099162 - DNA, 25 bp, Homo sapien
ccactccccgcaacccacaacagtc

SEQ ID NO: 4099163 - DNA, 25 bp, Homo sapien
tgctaaccctccccactccccgcaa

SEQ ID NO: 4099164 - DNA, 25 bp, Homo sapien
gactcatacacgtgggaaacaccat

SEQ ID NO: 4099165 - DNA, 25 bp, Homo sapien
actcatacacgtgggaaacaccatt

SEQ ID NO: 4099166 - DNA, 25 bp, Homo sapien
ctcatacacgtgggaaacaccattc

SEQ ID NO: 4099167 - DNA, 25 bp, Homo sapien
cagggttcctgacgtcattgttgca

SEQ ID NO: 4099168 - DNA, 25 bp, Homo sapien
taatagtagacacacttggccctgg

SEQ ID NO: 4099169 - DNA, 25 bp, Homo sapien
gagactgtccctcatgcatgctgtg

SEQ ID NO: 4099170 - DNA, 25 bp, Homo sapien
ggtgtgctgagtcccaaacctgtgc

SEQ ID NO: 4099171 - DNA, 25 bp, Homo sapien
tgacttcttggagttagaaggtgga

SEQ ID NO: 4099172 - DNA, 25 bp, Homo sapien
tagaaggtggaggtatgtagaggag

SEQ ID NO: 4099173 - DNA, 25 bp, Homo sapien
tttgacttcttggagttagaaggtg

SEQ ID NO: 4099174 - DNA, 25 bp, Homo sapien
gagttagaaggtggaggtatgtaga

SEQ ID NO: 4099175 - DNA, 25 bp, Homo sapien
gtctgatcaatatggtgagacttca

SEQ ID NO: 4099176 - DNA, 25 bp, Homo sapien
ccagtctgatcaatatggtgagact

SEQ ID NO: 4099177 - DNA, 25 bp, Homo sapien
tctgatcaatatggtgagacttcat

SEQ ID NO: 4099178 - DNA, 25 bp, Homo sapien
gaggagggaagatcatttgaagcca

SEQ ID NO: 4099179 - DNA, 25 bp, Homo sapien
gacagagagacttacagaaattggc

SEQ ID NO: 4099180 - DNA, 25 bp, Homo sapien
gaatgcatttattgggcatccacta

SEQ ID NO: 4099181 - DNA, 25 bp, Homo sapien
gcatccactatcaatcatggtgtgt

SEQ ID NO: 4099182 - DNA, 25 bp, Homo sapien
tgtgtgtgtatattagccaaggttc

SEQ ID NO: 4099183 - DNA, 25 bp, Homo sapien
aagtattgactttggggtatcatca

SEQ ID NO: 4099184 - DNA, 25 bp, Homo sapien
taattgccttgagcccgcaacaatt

SEQ ID NO: 4099185 - DNA, 25 bp, Homo sapien
agatgtcagcttggggccccttgtc

SEQ ID NO: 4099186 - DNA, 25 bp, Homo sapien
tgtaggaataattgccttgagcccg

SEQ ID NO: 4099187 - DNA, 25 bp, Homo sapien
gaattcatagcacaaatacaacagt

SEQ ID NO: 4099188 - DNA, 25 bp, Homo sapien
ttcatagcacaaatacaacagttta

SEQ ID NO: 4099189 - DNA, 25 bp, Homo sapien
atgaattcatagcacaaatacaaca

SEQ ID NO: 4099190 - DNA, 25 bp, Homo sapien
tagcacaaatacaacagtttaaggc

SEQ ID NO: 4099191 - DNA, 25 bp, Homo sapien
caccgtgcccaacctatcaataatc

SEQ ID NO: 4099192 - DNA, 25 bp, Homo sapien
gattactaaatttacatgaactaaa

SEQ ID NO: 4099193 - DNA, 25 bp, Homo sapien
aatcacctgacctcatgaccgcctg

SEQ ID NO: 4099194 - DNA, 25 bp, Homo sapien
accgtgcccaacctatcaataatct

SEQ ID NO: 4099195 - DNA, 25 bp, Homo sapien
cctgattgactgcaaggagccttgg

SEQ ID NO: 4099196 - DNA, 25 bp, Homo sapien
ttggcatactgcatagaacctgtgg

SEQ ID NO: 4099197 - DNA, 25 bp, Homo sapien
tgccaatagagaggatagatgctcg

SEQ ID NO: 4099198 - DNA, 25 bp, Homo sapien
aatttgggatgatagtgcctgcctc

SEQ ID NO: 4099199 - DNA, 25 bp, Homo sapien
attaacctccggtcagcctctcctc

SEQ ID NO: 4099200 - DNA, 25 bp, Homo sapien
tattcctgttcttcggttttcaagc

SEQ ID NO: 4099201 - DNA, 25 bp, Homo sapien
ctcctggaagtctcttagcttcctt

SEQ ID NO: 4099202 - DNA, 25 bp, Homo sapien
tggaagtctcttagcttccttgatc

SEQ ID NO: 4099203 - DNA, 25 bp, Homo sapien
gtgctgcaagggtaccacccgatgt

SEQ ID NO: 4099204 - DNA, 25 bp, Homo sapien
taatgtagagtgctgcaagggtacc

SEQ ID NO: 4099205 - DNA, 25 bp, Homo sapien
cttaatctccttgttatgagggcag

SEQ ID NO: 4099206 - DNA, 25 bp, Homo sapien
taataacttgtcatgagggcagtaa

SEQ ID NO: 4099207 - DNA, 25 bp, Homo sapien
gtggtgttcaccctatagatatgca

SEQ ID NO: 4099208 - DNA, 25 bp, Homo sapien
caaacaagtggtgttcaccctatag

SEQ ID NO: 4099209 - DNA, 25 bp, Homo sapien
ccctatagatatgcagccccaaaac

SEQ ID NO: 4099210 - DNA, 25 bp, Homo sapien
tcttactgctattaagttgtttgtg

SEQ ID NO: 4099211 - DNA, 25 bp, Homo sapien
tcatcatcactgctaaggctatttc

SEQ ID NO: 4099212 - DNA, 25 bp, Homo sapien
gaatctttctccaagtaactcattg

SEQ ID NO: 4099213 - DNA, 25 bp, Homo sapien
ggctatttcacatacaacctggaaa

SEQ ID NO: 4099214 - DNA, 25 bp, Homo sapien
tctttttagatgaacagctctttgg

SEQ ID NO: 4099215 - DNA, 25 bp, Homo sapien
tcagcacccactcagatctcggagg

SEQ ID NO: 4099216 - DNA, 25 bp, Homo sapien
taaagattggttctgacggcagcag

SEQ ID NO: 4099217 - DNA, 25 bp, Homo sapien
ggcacgcctctagaccctggtgtct

SEQ ID NO: 4099218 - DNA, 25 bp, Homo sapien
cagcagcggcccatctagaatggcc

SEQ ID NO: 4099219 - DNA, 25 bp, Homo sapien
cacgacatggatctgcaagttgaaa

SEQ ID NO: 4099220 - DNA, 25 bp, Homo sapien
ccttagatgcaattccatgggcact

SEQ ID NO: 4099221 - DNA, 25 bp, Homo sapien
catcagcattagtgtcaggttgcaa

SEQ ID NO: 4099222 - DNA, 25 bp, Homo sapien
gttgaaaaaccagccccttagatgc

SEQ ID NO: 4099223 - DNA, 25 bp, Homo sapien
tatggggcttaactcaaaactctca

SEQ ID NO: 4099224 - DNA, 25 bp, Homo sapien
atatggggcttaactcaaaactctc

SEQ ID NO: 4099225 - DNA, 25 bp, Homo sapien
ttatatggggcttaactcaaaactc

SEQ ID NO: 4099226 - DNA, 25 bp, Homo sapien
tatatggggcttaactcaaaactct

SEQ ID NO: 4099227 - DNA, 25 bp, Homo sapien
tgaataccactgattcgtgcatatg

SEQ ID NO: 4099228 - DNA, 25 bp, Homo sapien
cattcaagcatttgattctggcatt

SEQ ID NO: 4099229 - DNA, 25 bp, Homo sapien
cgtgcatatgctgctcattcaagca

SEQ ID NO: 4099230 - DNA, 25 bp, Homo sapien
tgttgcaagttccacctgagctaag

SEQ ID NO: 4099231 - DNA, 25 bp, Homo sapien
tggcagcgtttttgcctctcagaaa

SEQ ID NO: 4099232 - DNA, 25 bp, Homo sapien
tccttcaagtacaacaatgaccgtc

SEQ ID NO: 4099233 - DNA, 25 bp, Homo sapien
aatgaccgtctgttctccaatgaca

SEQ ID NO: 4099234 - DNA, 25 bp, Homo sapien
tccacctgagccgaagttcaaagac

SEQ ID NO: 4099235 - DNA, 25 bp, Homo sapien
gggtgtctctattaataaggagact

SEQ ID NO: 4099236 - DNA, 25 bp, Homo sapien
tccatagttgccacaaatttctgaa

SEQ ID NO: 4099237 - DNA, 25 bp, Homo sapien
caagtgatccccagtaataaaccaa

SEQ ID NO: 4099238 - DNA, 25 bp, Homo sapien
agatgggtgtctctattaataagga

SEQ ID NO: 4099239 - DNA, 25 bp, Homo sapien
gaacctgtatcaacaaggacgaagt

SEQ ID NO: 4099240 - DNA, 25 bp, Homo sapien
ggacgaagtgaatctgtttgtagtc

SEQ ID NO: 4099241 - DNA, 25 bp, Homo sapien
tatcaacaaggacgaagtgaatctg

SEQ ID NO: 4099242 - DNA, 25 bp, Homo sapien
tccttctggtgaacctgtatcaaca

SEQ ID NO: 4099243 - DNA, 25 bp, Homo sapien
ggcacaatatggcagggtctttcaa

SEQ ID NO: 4099244 - DNA, 25 bp, Homo sapien
tatggcacaatatggcagggtcttt

SEQ ID NO: 4099245 - DNA, 25 bp, Homo sapien
caatatggcagggtctttcaaccag

SEQ ID NO: 4099246 - DNA, 25 bp, Homo sapien
tggtatggcacaatatggcagggtc

SEQ ID NO: 4099247 - DNA, 25 bp, Homo sapien
aacgctgagaaagttaactgtggag

SEQ ID NO: 4099248 - DNA, 25 bp, Homo sapien
ctagctaccagtgttctctgatgag

SEQ ID NO: 4099249 - DNA, 25 bp, Homo sapien
tctctgatgagctccggttctttga

SEQ ID NO: 4099250 - DNA, 25 bp, Homo sapien
gctccggttctttgaaacgctgaga

SEQ ID NO: 4099251 - DNA, 25 bp, Homo sapien
tcttcccctactttgaggagggctg

SEQ ID NO: 4099252 - DNA, 25 bp, Homo sapien
ccttggagaccgttgatgtagctag

SEQ ID NO: 4099253 - DNA, 25 bp, Homo sapien
tggatagctctactgtctcagaagc

SEQ ID NO: 4099254 - DNA, 25 bp, Homo sapien
caactgaggcataaatggatagctc

SEQ ID NO: 4099255 - DNA, 25 bp, Homo sapien
gagattcttaccagaacccaaaggc

SEQ ID NO: 4099256 - DNA, 25 bp, Homo sapien
catataatcttttgccattgggccc

SEQ ID NO: 4099257 - DNA, 25 bp, Homo sapien
ttttgccttgaaatgcccagctcta

SEQ ID NO: 4099258 - DNA, 25 bp, Homo sapien
ggtaaaacctaggatgtctgcccca

SEQ ID NO: 4099259 - DNA, 25 bp, Homo sapien
tcttcacctccccatttcaaacgat

SEQ ID NO: 4099260 - DNA, 25 bp, Homo sapien
tgcaatcttcacctccccatttcaa

SEQ ID NO: 4099261 - DNA, 25 bp, Homo sapien
gcaatcttcacctccccatttcaaa

SEQ ID NO: 4099262 - DNA, 25 bp, Homo sapien
aatcttcacctccccatttcaaacg

SEQ ID NO: 4099263 - DNA, 25 bp, Homo sapien
gtgtcatgaacaagggtgaggggag

SEQ ID NO: 4099264 - DNA, 25 bp, Homo sapien
acaagcagtgtcatgaacaagggtg

SEQ ID NO: 4099265 - DNA, 25 bp, Homo sapien
agcacaagcagtgtcatgaacaagg

SEQ ID NO: 4099266 - DNA, 25 bp, Homo sapien
gcagtgtcatgaacaagggtgaggg

SEQ ID NO: 4099267 - DNA, 25 bp, Homo sapien
gccaatgcatgcatagtctgcctct

SEQ ID NO: 4099268 - DNA, 25 bp, Homo sapien
atgcatgcatagtctgcctctgtct

SEQ ID NO: 4099269 - DNA, 25 bp, Homo sapien
ggccaatgcatgcatagtctgcctc

SEQ ID NO: 4099270 - DNA, 25 bp, Homo sapien
ccaatgcatgcatagtctgcctctg

SEQ ID NO: 4099271 - DNA, 25 bp, Homo sapien
gctgtggcccattcatgtgagaaca

SEQ ID NO: 4099272 - DNA, 25 bp, Homo sapien
ctgtggcccattcatgtgagaacat

SEQ ID NO: 4099273 - DNA, 25 bp, Homo sapien
aagggaagcaccaaatggctcaccc

SEQ ID NO: 4099274 - DNA, 25 bp, Homo sapien
ctggggtgacaatgactctggggtg

SEQ ID NO: 4099275 - DNA, 25 bp, Homo sapien
tgacaatgactctggggtgacagtg

SEQ ID NO: 4099276 - DNA, 25 bp, Homo sapien
gacagtgtctctggggtgacaatga

SEQ ID NO: 4099277 - DNA, 25 bp, Homo sapien
ggtgacaatgactctggggtgacag

SEQ ID NO: 4099278 - DNA, 25 bp, Homo sapien
tctgagctgacaatgactcgggtga

SEQ ID NO: 4099279 - DNA, 25 bp, Homo sapien
ctgagctgacaatgactcgggtgac

SEQ ID NO: 4099280 - DNA, 25 bp, Homo sapien
tcaaatgaaagtggtagatacgtgt

SEQ ID NO: 4099281 - DNA, 25 bp, Homo sapien
gactcaaacaggtcccgaaggcaca

SEQ ID NO: 4099282 - DNA, 25 bp, Homo sapien
acaggtcccgaaggcacaagtaagt

SEQ ID NO: 4099283 - DNA, 25 bp, Homo sapien
ggtagatacgtgtttggactcaaac

SEQ ID NO: 4099284 - DNA, 25 bp, Homo sapien
caatgcacactctgagctgatgtac

SEQ ID NO: 4099285 - DNA, 25 bp, Homo sapien
cagaagcagtcctagatgtcattgg

SEQ ID NO: 4099286 - DNA, 25 bp, Homo sapien
cttgtcatttgtagtccttgtggga

SEQ ID NO: 4099287 - DNA, 25 bp, Homo sapien
tgtcattggtagctcgtggaccttc

SEQ ID NO: 4099288 - DNA, 25 bp, Homo sapien
ctaatctcaggtgatctaccacctc

SEQ ID NO: 4099289 - DNA, 25 bp, Homo sapien
ctcctaatctcaggtgatctaccac

SEQ ID NO: 4099290 - DNA, 25 bp, Homo sapien
caagctgattttgaactcctaatct

SEQ ID NO: 4099291 - DNA, 25 bp, Homo sapien
gccaagctgattttgaactcctaat

SEQ ID NO: 4099292 - DNA, 25 bp, Homo sapien
tgcagcagcctagataaccttccaa

SEQ ID NO: 4099293 - DNA, 25 bp, Homo sapien
ctagataaccttccaatccacgggt

SEQ ID NO: 4099294 - DNA, 25 bp, Homo sapien
actttatgtacttctctgtgcacag

SEQ ID NO: 4099295 - DNA, 25 bp, Homo sapien
cactttatgtacttctctgtgcaca

SEQ ID NO: 4099296 - DNA, 25 bp, Homo sapien
agcagaatttctctggtagagattc

SEQ ID NO: 4099297 - DNA, 25 bp, Homo sapien
agagcagaatttctctggtagagat

SEQ ID NO: 4099298 - DNA, 25 bp, Homo sapien
tatgtgtcagttgagtcccttgagg

SEQ ID NO: 4099299 - DNA, 25 bp, Homo sapien
tctgtcttggagaacgaatgctaca

SEQ ID NO: 4099300 - DNA, 25 bp, Homo sapien
tgggtatagttaagtccactgtgtc

SEQ ID NO: 4099301 - DNA, 25 bp, Homo sapien
gacctgtcttgtgctttcagtagag

SEQ ID NO: 4099302 - DNA, 25 bp, Homo sapien
gctgtatataagctggctttgctca

SEQ ID NO: 4099303 - DNA, 25 bp, Homo sapien
tcccaaatagccttacgtgagaagc

SEQ ID NO: 4099304 - DNA, 25 bp, Homo sapien
aaggtgtcccaaatagccttacgtg

SEQ ID NO: 4099305 - DNA, 25 bp, Homo sapien
aatagccttacgtgagaagcagagc

SEQ ID NO: 4099306 - DNA, 25 bp, Homo sapien
gttgaattttgtactcagctgaatg

SEQ ID NO: 4099307 - DNA, 25 bp, Homo sapien
tgaatgtcgtgcacatgaccttctt

SEQ ID NO: 4099308 - DNA, 25 bp, Homo sapien
ttttgtactcagctgaatgtcgtgc

SEQ ID NO: 4099309 - DNA, 25 bp, Homo sapien
cttctaacatccttcagtctgcatc

SEQ ID NO: 4099310 - DNA, 25 bp, Homo sapien
ggtgtcagaccatgcagcgatgcct

SEQ ID NO: 4099311 - DNA, 25 bp, Homo sapien
tctctcctgactgaggttgtcccct

SEQ ID NO: 4099312 - DNA, 25 bp, Homo sapien
tgtgtaccgaaaactctggcaccgg

SEQ ID NO: 4099313 - DNA, 25 bp, Homo sapien
gtgccctgaccttgtatctctgtgc

SEQ ID NO: 4099314 - DNA, 25 bp, Homo sapien
tgtgaagggatcaaaaatatgggtt

SEQ ID NO: 4099315 - DNA, 25 bp, Homo sapien
tcttatgctgttcatatggatccaa

SEQ ID NO: 4099316 - DNA, 25 bp, Homo sapien
gatatctccaggcattggtttcctt

SEQ ID NO: 4099317 - DNA, 25 bp, Homo sapien
ggatccaaatcacagtagtctctct

SEQ ID NO: 4099318 - DNA, 25 bp, Homo sapien
tgttgttggcctgcacatgcattct

SEQ ID NO: 4099319 - DNA, 25 bp, Homo sapien
atggaatgctttttggccaagcggg

SEQ ID NO: 4099320 - DNA, 25 bp, Homo sapien
cttcctagcgccgagggacctgctg

SEQ ID NO: 4099321 - DNA, 25 bp, Homo sapien
catcagatggattttatttaacgtt

SEQ ID NO: 4099322 - DNA, 25 bp, Homo sapien
acatttaatttgtaccttcctcagg

SEQ ID NO: 4099323 - DNA, 25 bp, Homo sapien
ttgtaccttcctcagggtgctatac

SEQ ID NO: 4099324 - DNA, 25 bp, Homo sapien
ttagacaccgaacaccagacacttc

SEQ ID NO: 4099325 - DNA, 25 bp, Homo sapien
cgaacaccagacacttctcacattt

SEQ ID NO: 4099326 - DNA, 25 bp, Homo sapien
caatgccaggtagttctagaggaaa

SEQ ID NO: 4099327 - DNA, 25 bp, Homo sapien
tgcttcactttgtacatctgctgag

SEQ ID NO: 4099328 - DNA, 25 bp, Homo sapien
tgggtatagaaaggacatgtggctg

SEQ ID NO: 4099329 - DNA, 25 bp, Homo sapien
ccagagaattattgcttgcttcact

SEQ ID NO: 4099330 - DNA, 25 bp, Homo sapien
tctgtaagactggatctgtgttata

SEQ ID NO: 4099331 - DNA, 25 bp, Homo sapien
ctgtaagactggatctgtgttatac

SEQ ID NO: 4099332 - DNA, 25 bp, Homo sapien
gcagcaggtcggcatatctgtaaga

SEQ ID NO: 4099333 - DNA, 25 bp, Homo sapien
caggtcggcatatctgtaagactgg

SEQ ID NO: 4099334 - DNA, 25 bp, Homo sapien
gtagtccacaggatacagatgctgt

SEQ ID NO: 4099335 - DNA, 25 bp, Homo sapien
ggcagtgtatagagccctggaacag

SEQ ID NO: 4099336 - DNA, 25 bp, Homo sapien
catcattgacctcagtgctatcagg

SEQ ID NO: 4099337 - DNA, 25 bp, Homo sapien
tgcaaggtacacattcatagatcct

SEQ ID NO: 4099338 - DNA, 25 bp, Homo sapien
tattctcactgcctgagtaatggga

SEQ ID NO: 4099339 - DNA, 25 bp, Homo sapien
cttgaagatctacgtgttgggtaat

SEQ ID NO: 4099340 - DNA, 25 bp, Homo sapien
ttgtaactccaagcctcagaatcag

SEQ ID NO: 4099341 - DNA, 25 bp, Homo sapien
caaacctgcaggtgtagtctttaac

SEQ ID NO: 4099342 - DNA, 25 bp, Homo sapien
ggcttataatagatgtgcactggca

SEQ ID NO: 4099343 - DNA, 25 bp, Homo sapien
tattttgcctgtaagtacgagtcac

SEQ ID NO: 4099344 - DNA, 25 bp, Homo sapien
tgcatttcagacttaagcacacttg

SEQ ID NO: 4099345 - DNA, 25 bp, Homo sapien
agcacacttgcatcacagtctggga

SEQ ID NO: 4099346 - DNA, 25 bp, Homo sapien
cttctcttggggtcagaattaggac

SEQ ID NO: 4099347 - DNA, 25 bp, Homo sapien
ctggtaacagggtgacatcagtgaa

SEQ ID NO: 4099348 - DNA, 25 bp, Homo sapien
tttcttgcacgagatttaaggacct

SEQ ID NO: 4099349 - DNA, 25 bp, Homo sapien
cacgagatttaaggaccttctcttg

SEQ ID NO: 4099350 - DNA, 25 bp, Homo sapien
cagtaatggcaggtccatgaaagta

SEQ ID NO: 4099351 - DNA, 25 bp, Homo sapien
gcaggtccatgaaagtaatgtctcc

SEQ ID NO: 4099352 - DNA, 25 bp, Homo sapien
taatggcaggtccatgaaagtaatg

SEQ ID NO: 4099353 - DNA, 25 bp, Homo sapien
tctgaggattggcacagtaatggca

SEQ ID NO: 4099354 - DNA, 25 bp, Homo sapien
ctattctaagcctggtccttgtgga

SEQ ID NO: 4099355 - DNA, 25 bp, Homo sapien
tattctaagcctggtccttgtggag

SEQ ID NO: 4099356 - DNA, 25 bp, Homo sapien
acttctattagtctaccttggcaag

SEQ ID NO: 4099357 - DNA, 25 bp, Homo sapien
ccttggcaagatgtagccctttaac

SEQ ID NO: 4099358 - DNA, 25 bp, Homo sapien
tagccctttaactggcggctttcag

SEQ ID NO: 4099359 - DNA, 25 bp, Homo sapien
tttgacttctattagtctaccttgg

SEQ ID NO: 4099360 - DNA, 25 bp, Homo sapien
ccggcagcaggtttagtttaggaat

SEQ ID NO: 4099361 - DNA, 25 bp, Homo sapien
cggcagcaggtttagtttaggaatt

SEQ ID NO: 4099362 - DNA, 25 bp, Homo sapien
caacgatactcaataaaagactagc

SEQ ID NO: 4099363 - DNA, 25 bp, Homo sapien
cctaactcattctaggacaccagca

SEQ ID NO: 4099364 - DNA, 25 bp, Homo sapien
cattctgtaccaaaacctatcagag

SEQ ID NO: 4099365 - DNA, 25 bp, Homo sapien
cagccaagttctatcatatgtataa

SEQ ID NO: 4099366 - DNA, 25 bp, Homo sapien
tctatatgaatatgtttccattccc

SEQ ID NO: 4099367 - DNA, 25 bp, Homo sapien
gagcttctatatgaatatgtttcca

SEQ ID NO: 4099368 - DNA, 25 bp, Homo sapien
tgaatatgtttccattcccaaaaca

SEQ ID NO: 4099369 - DNA, 25 bp, Homo sapien
gaaggggagcttctatatgaatatg

SEQ ID NO: 4099370 - DNA, 25 bp, Homo sapien
cctgaatggaagtataaggggaaga

SEQ ID NO: 4099371 - DNA, 25 bp, Homo sapien
tgatggagtcattgataaaggccat

SEQ ID NO: 4099372 - DNA, 25 bp, Homo sapien
ctttttgatgccctgaatggaagta

SEQ ID NO: 4099373 - DNA, 25 bp, Homo sapien
cagaaaggacatagatgatggagtc

SEQ ID NO: 4099374 - DNA, 25 bp, Homo sapien
tcgttcttttcttaaaccctgtgca

SEQ ID NO: 4099375 - DNA, 25 bp, Homo sapien
gcatgcttgaaagtgatcacccctt

SEQ ID NO: 4099376 - DNA, 25 bp, Homo sapien
gtgatcacccctttcactttgaaag

SEQ ID NO: 4099377 - DNA, 25 bp, Homo sapien
gcatccagtattcccttgtcgttct

SEQ ID NO: 4099378 - DNA, 25 bp, Homo sapien
agcaatgtattgtttctccgaacca

SEQ ID NO: 4099379 - DNA, 25 bp, Homo sapien
cactgagtcctcctaaatttaccag

SEQ ID NO: 4099380 - DNA, 25 bp, Homo sapien
tttaccagcgctgacaatgggctac

SEQ ID NO: 4099381 - DNA, 25 bp, Homo sapien
aatgggctacaacaacactctgata

SEQ ID NO: 4099382 - DNA, 25 bp, Homo sapien
tgaagtcagcctttgtatgaataat

SEQ ID NO: 4099383 - DNA, 25 bp, Homo sapien
gtagtgctcagcatccacctagtgt

SEQ ID NO: 4099384 - DNA, 25 bp, Homo sapien
tgtttcctcagtaggcaatcaggga

SEQ ID NO: 4099385 - DNA, 25 bp, Homo sapien
tcagggaaaaggctaaatagaatca

SEQ ID NO: 4099386 - DNA, 25 bp, Homo sapien
cattggtcccattagctgcacttca

SEQ ID NO: 4099387 - DNA, 25 bp, Homo sapien
tgtctctgccgtagaagcctggcta

SEQ ID NO: 4099388 - DNA, 25 bp, Homo sapien
tcaccttcttaggagagttcagggc

SEQ ID NO: 4099389 - DNA, 25 bp, Homo sapien
ctgcacttcatgaggggacacattc

SEQ ID NO: 4099390 - DNA, 25 bp, Homo sapien
caaagggagagtactttgcatcttc

SEQ ID NO: 4099391 - DNA, 25 bp, Homo sapien
ccttgatgaccaccaaggcttttct

SEQ ID NO: 4099392 - DNA, 25 bp, Homo sapien
ccttgggtgatagaaaccttgatga

SEQ ID NO: 4099393 - DNA, 25 bp, Homo sapien
tgtactcagtagaaatcgtccatgg

SEQ ID NO: 4099394 - DNA, 25 bp, Homo sapien
caattagcctaggtcccgtgctgta

SEQ ID NO: 4099395 - DNA, 25 bp, Homo sapien
gaaacagtgctttacttcagtggaa

SEQ ID NO: 4099396 - DNA, 25 bp, Homo sapien
caagtttactgccagctgtgtgcaa

SEQ ID NO: 4099397 - DNA, 25 bp, Homo sapien
tactagcaccttagcaggagacctt

SEQ ID NO: 4099398 - DNA, 25 bp, Homo sapien
gtgtagacagtctcgacacctgaat

SEQ ID NO: 4099399 - DNA, 25 bp, Homo sapien
tcaatatgtgagtttcagtcctcct

SEQ ID NO: 4099400 - DNA, 25 bp, Homo sapien
cacctgaatatgcactggttttcca

SEQ ID NO: 4099401 - DNA, 25 bp, Homo sapien
tactactgaatccttgggttgtggg

SEQ ID NO: 4099402 - DNA, 25 bp, Homo sapien
tttctttggcgatgaccaagggagc

SEQ ID NO: 4099403 - DNA, 25 bp, Homo sapien
tagacatggtttctgggcaccaggg

SEQ ID NO: 4099404 - DNA, 25 bp, Homo sapien
tttgcgacaaaaatctgagtgttcc

SEQ ID NO: 4099405 - DNA, 25 bp, Homo sapien
gaacatgttctatggaatagacacc

SEQ ID NO: 4099406 - DNA, 25 bp, Homo sapien
ccatttccaggttggaagaatcatt

SEQ ID NO: 4099407 - DNA, 25 bp, Homo sapien
tccatttccaggttggaagaatcat

SEQ ID NO: 4099408 - DNA, 25 bp, Homo sapien
ttgatgtaactggatgaaggttctc

SEQ ID NO: 4099409 - DNA, 25 bp, Homo sapien
tgatgtaactggatgaaggttctca

SEQ ID NO: 4099410 - DNA, 25 bp, Homo sapien
cttgatgtaactggatgaaggttct

SEQ ID NO: 4099411 - DNA, 25 bp, Homo sapien
gatgtaactggatgaaggttctcat

SEQ ID NO: 4099412 - DNA, 25 bp, Homo sapien
aatgtttagaggttcttcagcccga

SEQ ID NO: 4099413 - DNA, 25 bp, Homo sapien
gagtcctattggctgggtgcccaag

SEQ ID NO: 4099414 - DNA, 25 bp, Homo sapien
caatccaacctgtgaaagtcaaggg

SEQ ID NO: 4099415 - DNA, 25 bp, Homo sapien
gggaggttcctttatggatctacac

SEQ ID NO: 4099416 - DNA, 25 bp, Homo sapien
tcttcaagctttcttactccttccg

SEQ ID NO: 4099417 - DNA, 25 bp, Homo sapien
tagttctaggagtttataaagacca

SEQ ID NO: 4099418 - DNA, 25 bp, Homo sapien
ctaggagtttataaagaccacacat

SEQ ID NO: 4099419 - DNA, 25 bp, Homo sapien
caagctttcttactccttccggtag

SEQ ID NO: 4099420 - DNA, 25 bp, Homo sapien
tacagaacactggaatactgtcact

SEQ ID NO: 4099421 - DNA, 25 bp, Homo sapien
gaatactgtcactactgtgatcagg

SEQ ID NO: 4099422 - DNA, 25 bp, Homo sapien
taaaagagctgctagttctgacatc

SEQ ID NO: 4099423 - DNA, 25 bp, Homo sapien
gacatcttttcacagccttccttta

SEQ ID NO: 4099424 - DNA, 25 bp, Homo sapien
cagtcctctccggcgcatgcagatt

SEQ ID NO: 4099425 - DNA, 25 bp, Homo sapien
gagctagcctccttggtactgacag

SEQ ID NO: 4099426 - DNA, 25 bp, Homo sapien
tgcagatttgacgagctagcctcct

SEQ ID NO: 4099427 - DNA, 25 bp, Homo sapien
ctccttggtactgacagcctgaggg

SEQ ID NO: 4099428 - DNA, 25 bp, Homo sapien
ggcctcttgatccatttgtcggaga

SEQ ID NO: 4099429 - DNA, 25 bp, Homo sapien
gccagggcctcttgatccatttgtc

SEQ ID NO: 4099430 - DNA, 25 bp, Homo sapien
tgatccatttgtcggagaccccaga

SEQ ID NO: 4099431 - DNA, 25 bp, Homo sapien
cagaagatggtgagtggaaagcagg

SEQ ID NO: 4099432 - DNA, 25 bp, Homo sapien
agggctggtcccagcttatgcgcac

SEQ ID NO: 4099433 - DNA, 25 bp, Homo sapien
ggaggcgtttcctcaaatgcatccc

SEQ ID NO: 4099434 - DNA, 25 bp, Homo sapien
ggcatgtagtcggaggcgtttcctc

SEQ ID NO: 4099435 - DNA, 25 bp, Homo sapien
tgtgggaggcatgtagtcggaggcg

SEQ ID NO: 4099436 - DNA, 25 bp, Homo sapien
tgccgccacgatgtaaacagaacag

SEQ ID NO: 4099437 - DNA, 25 bp, Homo sapien
gaacagctgagtcctccgggtaggc

SEQ ID NO: 4099438 - DNA, 25 bp, Homo sapien
gccgccacgatgtaaacagaacagc

SEQ ID NO: 4099439 - DNA, 25 bp, Homo sapien
aacagctgagtcctccgggtaggcg

SEQ ID NO: 4099440 - DNA, 25 bp, Homo sapien
gctgtttgctccttactaaattcca

SEQ ID NO: 4099441 - DNA, 25 bp, Homo sapien
gcagcaacactgttccagacttccg

SEQ ID NO: 4099442 - DNA, 25 bp, Homo sapien
aacactgttccagacttccgcgctt

SEQ ID NO: 4099443 - DNA, 25 bp, Homo sapien
agctcctggacccattcggaccgcc

SEQ ID NO: 4099444 - DNA, 25 bp, Homo sapien
ccttgggtgagagaaagcgagccag

SEQ ID NO: 4099445 - DNA, 25 bp, Homo sapien
atctgtaggcatcagcggacaagac

SEQ ID NO: 4099446 - DNA, 25 bp, Homo sapien
cattctagagggccctgtcttcaag

SEQ ID NO: 4099447 - DNA, 25 bp, Homo sapien
tgctcagggtcccaggtgtgtgcct

SEQ ID NO: 4099448 - DNA, 25 bp, Homo sapien
gatatttgggctggaatgtaatcac

SEQ ID NO: 4099449 - DNA, 25 bp, Homo sapien
agatatttgggctggaatgtaatca

SEQ ID NO: 4099450 - DNA, 25 bp, Homo sapien
tagtctggggaaacttctcctgcca

SEQ ID NO: 4099451 - DNA, 25 bp, Homo sapien
ctcaatcctgtagtctggggaaact

SEQ ID NO: 4099452 - DNA, 25 bp, Homo sapien
tgtggatagagacattcctttaggt

SEQ ID NO: 4099453 - DNA, 25 bp, Homo sapien
gatagagacattcctttaggtttcc

SEQ ID NO: 4099454 - DNA, 25 bp, Homo sapien
ctgtttgcaagcacatttatcatct

SEQ ID NO: 4099455 - DNA, 25 bp, Homo sapien
tgtttgcaagcacatttatcatctt

SEQ ID NO: 4099456 - DNA, 25 bp, Homo sapien
gcacatttatcatcttttgataaca

SEQ ID NO: 4099457 - DNA, 25 bp, Homo sapien
gcaagcacatttatcatcttttgat

SEQ ID NO: 4099458 - DNA, 25 bp, Homo sapien
tcttccacggctttcctgcaatatt

SEQ ID NO: 4099459 - DNA, 25 bp, Homo sapien
ctcttccacggctttcctgcaatat

SEQ ID NO: 4099460 - DNA, 25 bp, Homo sapien
tttccactagaggcacaccttgttt

SEQ ID NO: 4099461 - DNA, 25 bp, Homo sapien
cttccacggctttcctgcaatattt

SEQ ID NO: 4099462 - DNA, 25 bp, Homo sapien
gcccagctgtgcttatccgagttag

SEQ ID NO: 4099463 - DNA, 25 bp, Homo sapien
ccgagttagcagcatgggtaaaagc

SEQ ID NO: 4099464 - DNA, 25 bp, Homo sapien
gatttctttccaacagctgctgtaa

SEQ ID NO: 4099465 - DNA, 25 bp, Homo sapien
gggtaaaagcactactccagctctc

SEQ ID NO: 4099466 - DNA, 25 bp, Homo sapien
gtttcttcagtaagcaacttcctaa

SEQ ID NO: 4099467 - DNA, 25 bp, Homo sapien
accaggactgagtattttctaagac

SEQ ID NO: 4099468 - DNA, 25 bp, Homo sapien
taactctggcagttgccatgcgatg

SEQ ID NO: 4099469 - DNA, 25 bp, Homo sapien
ctttgtagatgttgctgaaaaccca

SEQ ID NO: 4099470 - DNA, 25 bp, Homo sapien
ttatagtggatccaggcttttctta

SEQ ID NO: 4099471 - DNA, 25 bp, Homo sapien
taagcatattgctagagtcctccat

SEQ ID NO: 4099472 - DNA, 25 bp, Homo sapien
cataatactttttctggtcatggac

SEQ ID NO: 4099473 - DNA, 25 bp, Homo sapien
tcatggacattagttttatagtgga

SEQ ID NO: 4099474 - DNA, 25 bp, Homo sapien
aagagccccaacgttgcacgccaag

SEQ ID NO: 4099475 - DNA, 25 bp, Homo sapien
cagggttttatcgagtgaaagtcgg

SEQ ID NO: 4099476 - DNA, 25 bp, Homo sapien
tgaagactgggttcttgtccgtccc

SEQ ID NO: 4099477 - DNA, 25 bp, Homo sapien
cgttgcacgccaagaatgttgcagg

SEQ ID NO: 4099478 - DNA, 25 bp, Homo sapien
gactcttcgaatcaggctttgatcc

SEQ ID NO: 4099479 - DNA, 25 bp, Homo sapien
caggactcttcgaatcaggctttga

SEQ ID NO: 4099480 - DNA, 25 bp, Homo sapien
tcatttcaggactcttcgaatcagg

SEQ ID NO: 4099481 - DNA, 25 bp, Homo sapien
tttcaggactcttcgaatcaggctt

SEQ ID NO: 4099482 - DNA, 25 bp, Homo sapien
tcttccccaccgaagaaagcaaatc

SEQ ID NO: 4099483 - DNA, 25 bp, Homo sapien
tatcatgcaacatttgccagttgag

SEQ ID NO: 4099484 - DNA, 25 bp, Homo sapien
cagatggacccgattcagaaagctg

SEQ ID NO: 4099485 - DNA, 25 bp, Homo sapien
gctgttctaatcttgcaggagaaaa

SEQ ID NO: 4099486 - DNA, 25 bp, Homo sapien
tttcaacatttgacccacgtttcag

SEQ ID NO: 4099487 - DNA, 25 bp, Homo sapien
catcacagtacagtagctttcaaca

SEQ ID NO: 4099488 - DNA, 25 bp, Homo sapien
gaaccagatgcactgtggaattctg

SEQ ID NO: 4099489 - DNA, 25 bp, Homo sapien
tgtctaggacattccttgaaaatag

SEQ ID NO: 4099490 - DNA, 25 bp, Homo sapien
gatgttttcagccactgagtttgca

SEQ ID NO: 4099491 - DNA, 25 bp, Homo sapien
aggatgttcccctacaggtttcaga

SEQ ID NO: 4099492 - DNA, 25 bp, Homo sapien
gaagcatggatttgacagcacctgg

SEQ ID NO: 4099493 - DNA, 25 bp, Homo sapien
tgatgtacctatgagacaaagggca

SEQ ID NO: 4099494 - DNA, 25 bp, Homo sapien
gggatcacaaaattctttgaggcta

SEQ ID NO: 4099495 - DNA, 25 bp, Homo sapien
taaaattggtcacgtccagaacagg

SEQ ID NO: 4099496 - DNA, 25 bp, Homo sapien
tctgaacactttaattccttgagct

SEQ ID NO: 4099497 - DNA, 25 bp, Homo sapien
cagtctggttagtaaagatctgcca

SEQ ID NO: 4099498 - DNA, 25 bp, Homo sapien
tcacatggcactagaatttataggg

SEQ ID NO: 4099499 - DNA, 25 bp, Homo sapien
gactgtattagctttgccgactcta

SEQ ID NO: 4099500 - DNA, 25 bp, Homo sapien
gctggaaacaattgcatttggaggg

SEQ ID NO: 4099501 - DNA, 25 bp, Homo sapien
gattgacaatcgactagggtggctg

SEQ ID NO: 4099502 - DNA, 25 bp, Homo sapien
taaacgtgtaaatgggccgggtgca

SEQ ID NO: 4099503 - DNA, 25 bp, Homo sapien
tctggaacaatgagttgcagttaaa

SEQ ID NO: 4099504 - DNA, 25 bp, Homo sapien
tgtcacattatccagccagcagaca

SEQ ID NO: 4099505 - DNA, 25 bp, Homo sapien
gaacaagccaagatttgtagtattg

SEQ ID NO: 4099506 - DNA, 25 bp, Homo sapien
tcaggctcctttgttggatcttttt

SEQ ID NO: 4099507 - DNA, 25 bp, Homo sapien
caggctcctttgttggatctttttt

SEQ ID NO: 4099508 - DNA, 25 bp, Homo sapien
ccacaaaggatagagtaagagccat

SEQ ID NO: 4099509 - DNA, 25 bp, Homo sapien
aatcgtggaactttgtccacaaagg

SEQ ID NO: 4099510 - DNA, 25 bp, Homo sapien
tagaaaatatgttaatcgtggaact

SEQ ID NO: 4099511 - DNA, 25 bp, Homo sapien
actcgtatagaaaatatgttaatcg

SEQ ID NO: 4099512 - DNA, 25 bp, Homo sapien
ttcctctccaccattaactttgaca

SEQ ID NO: 4099513 - DNA, 25 bp, Homo sapien
cattaactttgacagtatttcttac

SEQ ID NO: 4099514 - DNA, 25 bp, Homo sapien
tcctctccaccattaactttgacag

SEQ ID NO: 4099515 - DNA, 25 bp, Homo sapien
tccaccattaactttgacagtattt

SEQ ID NO: 4099516 - DNA, 25 bp, Homo sapien
gaggtctcttcaagaaccaaaggat

SEQ ID NO: 4099517 - DNA, 25 bp, Homo sapien
caagaactaacagaacctaaaccag

SEQ ID NO: 4099518 - DNA, 25 bp, Homo sapien
tgggctgcagcctaagcttccccag

SEQ ID NO: 4099519 - DNA, 25 bp, Homo sapien
taaaccagtatctgcaaaacacaga

SEQ ID NO: 4099520 - DNA, 25 bp, Homo sapien
ttactagcttttcctgtcccaacat

SEQ ID NO: 4099521 - DNA, 25 bp, Homo sapien
gatgtgcagttgtcctcctctgtct

SEQ ID NO: 4099522 - DNA, 25 bp, Homo sapien
cttactagcttttcctgtcccaaca

SEQ ID NO: 4099523 - DNA, 25 bp, Homo sapien
gagatgtgcagttgtcctcctctgt

SEQ ID NO: 4099524 - DNA, 25 bp, Homo sapien
catcttttcattacggttatttggc

SEQ ID NO: 4099525 - DNA, 25 bp, Homo sapien
taattaagcatcttaaaaggatggg

SEQ ID NO: 4099526 - DNA, 25 bp, Homo sapien
gatgggaccagaaagctatcaggga

SEQ ID NO: 4099527 - DNA, 25 bp, Homo sapien
gaataaggggacatctcatgaaaac

SEQ ID NO: 4099528 - DNA, 25 bp, Homo sapien
caactggattgggaactactttcat

SEQ ID NO: 4099529 - DNA, 25 bp, Homo sapien
actactttcatttgtagacgaattt

SEQ ID NO: 4099530 - DNA, 25 bp, Homo sapien
catttgtagacgaattttgacttct

SEQ ID NO: 4099531 - DNA, 25 bp, Homo sapien
ttatttcacaactggattgggaact

SEQ ID NO: 4099532 - DNA, 25 bp, Homo sapien
tgaacaaacttgatgcctgattaca

SEQ ID NO: 4099533 - DNA, 25 bp, Homo sapien
gaaagttgtctgttcccatcctagg

SEQ ID NO: 4099534 - DNA, 25 bp, Homo sapien
tagattagcttggtatgccttttcc

SEQ ID NO: 4099535 - DNA, 25 bp, Homo sapien
taagatagtttagccacctgcaacc

SEQ ID NO: 4099536 - DNA, 25 bp, Homo sapien
agtctcttctctggactgtaaaatg

SEQ ID NO: 4099537 - DNA, 25 bp, Homo sapien
tttattagcaggttgagtctcttct

SEQ ID NO: 4099538 - DNA, 25 bp, Homo sapien
cttttattagcaggttgagtctctt

SEQ ID NO: 4099539 - DNA, 25 bp, Homo sapien
gagtctcttctctggactgtaaaat

SEQ ID NO: 4099540 - DNA, 25 bp, Homo sapien
gcagtttcccagctgcccggatttc

SEQ ID NO: 4099541 - DNA, 25 bp, Homo sapien
ctggaaagttgggaagccagcagtt

SEQ ID NO: 4099542 - DNA, 25 bp, Homo sapien
agtttcccagctgcccggatttcca

SEQ ID NO: 4099543 - DNA, 25 bp, Homo sapien
ggaaagttgggaagccagcagtttc

SEQ ID NO: 4099544 - DNA, 25 bp, Homo sapien
ttctaggtaggcactcaaagtttct

SEQ ID NO: 4099545 - DNA, 25 bp, Homo sapien
tccttcctaagttctaggtaggcac

SEQ ID NO: 4099546 - DNA, 25 bp, Homo sapien
ggcactaagtctgcatgctgcttga

SEQ ID NO: 4099547 - DNA, 25 bp, Homo sapien
caactgactcaacgttttcctggaa

SEQ ID NO: 4099548 - DNA, 25 bp, Homo sapien
gaaggccaaaaatctttagcaccgc

SEQ ID NO: 4099549 - DNA, 25 bp, Homo sapien
taaaagtctcatgtcatccttcctg

SEQ ID NO: 4099550 - DNA, 25 bp, Homo sapien
cctgattgtcctcctttggatcatt

SEQ ID NO: 4099551 - DNA, 25 bp, Homo sapien
gcaccgctggtttaggaactttcca

SEQ ID NO: 4099552 - DNA, 25 bp, Homo sapien
tggcaggaaacttggctgacagcga

SEQ ID NO: 4099553 - DNA, 25 bp, Homo sapien
tgttggcaggaaacttggctgacag

SEQ ID NO: 4099554 - DNA, 25 bp, Homo sapien
ggaaacttggctgacagcgagccat

SEQ ID NO: 4099555 - DNA, 25 bp, Homo sapien
caggaaacttggctgacagcgagcc

SEQ ID NO: 4099556 - DNA, 25 bp, Homo sapien
gcccagaatgcaggtttaatacatt

SEQ ID NO: 4099557 - DNA, 25 bp, Homo sapien
actggaagggtctgtacaggcctct

SEQ ID NO: 4099558 - DNA, 25 bp, Homo sapien
taatacattcccagatgatataagg

SEQ ID NO: 4099559 - DNA, 25 bp, Homo sapien
tttgtgaccgaatgtatgaaagcca

SEQ ID NO: 4099560 - DNA, 25 bp, Homo sapien
tgtgttaaactcattgatttctaac

SEQ ID NO: 4099561 - DNA, 25 bp, Homo sapien
aaaatgatgaggaaaatctcaatgc

SEQ ID NO: 4099562 - DNA, 25 bp, Homo sapien
gaggaaaatctcaatgcttgtgtta

SEQ ID NO: 4099563 - DNA, 25 bp, Homo sapien
tctaacttcattagaaagtgttgag

SEQ ID NO: 4099564 - DNA, 25 bp, Homo sapien
tcaattctttatagtattcatcaac

SEQ ID NO: 4099565 - DNA, 25 bp, Homo sapien
ctattttgtgtaagtccataaaggc

SEQ ID NO: 4099566 - DNA, 25 bp, Homo sapien
tgtgtaagtccataaaggctgtcat

SEQ ID NO: 4099567 - DNA, 25 bp, Homo sapien
tcatcaactattttgtgtaagtcca

SEQ ID NO: 4099568 - DNA, 25 bp, Homo sapien
gcaaggatccatgggcatataagcc

SEQ ID NO: 4099569 - DNA, 25 bp, Homo sapien
ctgggcactgttggcaaggatccat

SEQ ID NO: 4099570 - DNA, 25 bp, Homo sapien
gctgactgtctctgtaactgtggac

SEQ ID NO: 4099571 - DNA, 25 bp, Homo sapien
aaggctaaatctatcagagccccag

SEQ ID NO: 4099572 - DNA, 25 bp, Homo sapien
catggtcatctctagaaatggacga

SEQ ID NO: 4099573 - DNA, 25 bp, Homo sapien
gaaatggacgatgatttctttctgg

SEQ ID NO: 4099574 - DNA, 25 bp, Homo sapien
tgaagattcatagactgccatggtc

SEQ ID NO: 4099575 - DNA, 25 bp, Homo sapien
ctgccatggtcatctctagaaatgg

SEQ ID NO: 4099576 - DNA, 25 bp, Homo sapien
catttggtttcaacatccatcaggt

SEQ ID NO: 4099577 - DNA, 25 bp, Homo sapien
gagccatgctattcagagcccttga

SEQ ID NO: 4099578 - DNA, 25 bp, Homo sapien
gttggagcaagaccgcatgtgctgc

SEQ ID NO: 4099579 - DNA, 25 bp, Homo sapien
tgaagcggctctttggtgccaatac

SEQ ID NO: 4099580 - DNA, 25 bp, Homo sapien
agagtgcagcaagggtgtgatcagc

SEQ ID NO: 4099581 - DNA, 25 bp, Homo sapien
gctggaaaaatacactggcgctgga

SEQ ID NO: 4099582 - DNA, 25 bp, Homo sapien
gcagctcaagctggaaaaatacact

SEQ ID NO: 4099583 - DNA, 25 bp, Homo sapien
cacaaagtgactggtgtcaagtagg

SEQ ID NO: 4099584 - DNA, 25 bp, Homo sapien
gaatgaagacatgcactctttggga

SEQ ID NO: 4099585 - DNA, 25 bp, Homo sapien
tataggaagacgaatgaagacatgc

SEQ ID NO: 4099586 - DNA, 25 bp, Homo sapien
cttctaaggagaatataggaagacg

SEQ ID NO: 4099587 - DNA, 25 bp, Homo sapien
tgggagggataggtgttctgcgtgc

SEQ ID NO: 4099588 - DNA, 25 bp, Homo sapien
tacaaagttgtctgtgtgatgctag

SEQ ID NO: 4099589 - DNA, 25 bp, Homo sapien
ttgtacccattgtaggcaaggagtt

SEQ ID NO: 4099590 - DNA, 25 bp, Homo sapien
gttatccctcattgaggtatcagaa

SEQ ID NO: 4099591 - DNA, 25 bp, Homo sapien
gagataccctttgtacccattgtag

SEQ ID NO: 4099592 - DNA, 25 bp, Homo sapien
tcacagaaggtttggtagagggtca

SEQ ID NO: 4099593 - DNA, 25 bp, Homo sapien
tgtctcacagaaggtttggtagagg

SEQ ID NO: 4099594 - DNA, 25 bp, Homo sapien
tctcacagaaggtttggtagagggt

SEQ ID NO: 4099595 - DNA, 25 bp, Homo sapien
ctgtctcacagaaggtttggtagag

SEQ ID NO: 4099596 - DNA, 25 bp, Homo sapien
ggaattgagctactgggtactgcag

SEQ ID NO: 4099597 - DNA, 25 bp, Homo sapien
tgtgagtggaacagcaaaatccacc

SEQ ID NO: 4099598 - DNA, 25 bp, Homo sapien
cattgatcgagtcatgctttcttcc

SEQ ID NO: 4099599 - DNA, 25 bp, Homo sapien
aaaatccacctcgaatgcaaacagt

SEQ ID NO: 4099600 - DNA, 25 bp, Homo sapien
gcttctaaggatcggactggcgcta

SEQ ID NO: 4099601 - DNA, 25 bp, Homo sapien
gatacctttgcttgagtgagctcaa

SEQ ID NO: 4099602 - DNA, 25 bp, Homo sapien
gagagttccagtcgggctgcttcta

SEQ ID NO: 4099603 - DNA, 25 bp, Homo sapien
taaaattaaagtgcgcgtgctctct

SEQ ID NO: 4099604 - DNA, 25 bp, Homo sapien
tcctgagtcttggaacgtacagagt

SEQ ID NO: 4099605 - DNA, 25 bp, Homo sapien
cactgacgctggctgagacctttta

SEQ ID NO: 4099606 - DNA, 25 bp, Homo sapien
aatcttaaatggactgactggttcc

SEQ ID NO: 4099607 - DNA, 25 bp, Homo sapien
gggactcatagacaaccagtatagc

SEQ ID NO: 4099608 - DNA, 25 bp, Homo sapien
tctgacttaaaatgtgaggcttggc

SEQ ID NO: 4099609 - DNA, 25 bp, Homo sapien
gctccagactccatgatgatcctta

SEQ ID NO: 4099610 - DNA, 25 bp, Homo sapien
tctctttaagataggatactgttac

SEQ ID NO: 4099611 - DNA, 25 bp, Homo sapien
tttccataaagtatagcatttcacg

SEQ ID NO: 4099612 - DNA, 25 bp, Homo sapien
ccacatctaatctattctttgtcat

SEQ ID NO: 4099613 - DNA, 25 bp, Homo sapien
ggccacatctaatctattctttgtc

SEQ ID NO: 4099614 - DNA, 25 bp, Homo sapien
gccacatctaatctattctttgtca

SEQ ID NO: 4099615 - DNA, 25 bp, Homo sapien
gctgatgagggaaagtggttgtagc

SEQ ID NO: 4099616 - DNA, 25 bp, Homo sapien
tgatgagggaaagtggttgtagcag

SEQ ID NO: 4099617 - DNA, 25 bp, Homo sapien
ctgatgagggaaagtggttgtagca

SEQ ID NO: 4099618 - DNA, 25 bp, Homo sapien
gatgagggaaagtggttgtagcaga

SEQ ID NO: 4099619 - DNA, 25 bp, Homo sapien
ctcacagaaaatgctgtctgcccca

SEQ ID NO: 4099620 - DNA, 25 bp, Homo sapien
gccaaggtcagaaaggaaattcgca

SEQ ID NO: 4099621 - DNA, 25 bp, Homo sapien
tcgcagcagtatcaggattgatgct

SEQ ID NO: 4099622 - DNA, 25 bp, Homo sapien
acagaaaatgctgtctgccccacag

SEQ ID NO: 4099623 - DNA, 25 bp, Homo sapien
ttttttgcccacatgtaatatcaca

SEQ ID NO: 4099624 - DNA, 25 bp, Homo sapien
ctttttttgcccacatgtaatatca

SEQ ID NO: 4099625 - DNA, 25 bp, Homo sapien
ttttgcccacatgtaatatcacatt

SEQ ID NO: 4099626 - DNA, 25 bp, Homo sapien
tttgcccacatgtaatatcacattt

SEQ ID NO: 4099627 - DNA, 25 bp, Homo sapien
cattcagtatttgctggtttttctt

SEQ ID NO: 4099628 - DNA, 25 bp, Homo sapien
tcagtatttgctggtttttcttgtt

SEQ ID NO: 4099629 - DNA, 25 bp, Homo sapien
attcagtatttgctggtttttcttg

SEQ ID NO: 4099630 - DNA, 25 bp, Homo sapien
tcattcagtatttgctggtttttct

SEQ ID NO: 4099631 - DNA, 25 bp, Homo sapien
cagaagctcctaggttctcacagat

SEQ ID NO: 4099632 - DNA, 25 bp, Homo sapien
gaagctgctaagtcgctcccttgag

SEQ ID NO: 4099633 - DNA, 25 bp, Homo sapien
tatgaaagcatctctcaggcacagc

SEQ ID NO: 4099634 - DNA, 25 bp, Homo sapien
caggtaaaggtcagggtgtgaacca

SEQ ID NO: 4099635 - DNA, 25 bp, Homo sapien
tacagctgaccccagatgaactgac

SEQ ID NO: 4099636 - DNA, 25 bp, Homo sapien
acagctgaccccagatgaactgact

SEQ ID NO: 4099637 - DNA, 25 bp, Homo sapien
ctacagctgaccccagatgaactga

SEQ ID NO: 4099638 - DNA, 25 bp, Homo sapien
agaacatcatgattgaatatctccg

SEQ ID NO: 4099639 - DNA, 25 bp, Homo sapien
gggagacctgacagctcggagccat

SEQ ID NO: 4099640 - DNA, 25 bp, Homo sapien
aacatcatgattgaatatctccggg

SEQ ID NO: 4099641 - DNA, 25 bp, Homo sapien
gaagaacatcatgattgaatatctc

SEQ ID NO: 4099642 - DNA, 25 bp, Homo sapien
tattttcttttcgaagtaatgacac

SEQ ID NO: 4099643 - DNA, 25 bp, Homo sapien
atagaaacccttgtgaggcttttat

SEQ ID NO: 4099644 - DNA, 25 bp, Homo sapien
acggtgttcttcgtgcatgcagaga

SEQ ID NO: 4099645 - DNA, 25 bp, Homo sapien
tgttacggtgttcttcgtgcatgca

SEQ ID NO: 4099646 - DNA, 25 bp, Homo sapien
tgtgcttctgttacggtgttcttcg

SEQ ID NO: 4099647 - DNA, 25 bp, Homo sapien
gttcttcgtgcatgcagagaagtca

SEQ ID NO: 4099648 - DNA, 25 bp, Homo sapien
gagactgataagcacgtgtgtgaga

SEQ ID NO: 4099649 - DNA, 25 bp, Homo sapien
tagtctggcaatgctgataacactg

SEQ ID NO: 4099650 - DNA, 25 bp, Homo sapien
cttacaggagactgataagcacgtg

SEQ ID NO: 4099651 - DNA, 25 bp, Homo sapien
tgactgcctgctgaattagtctggc

SEQ ID NO: 4099652 - DNA, 25 bp, Homo sapien
tgaggcctacagcaactgtgtacat

SEQ ID NO: 4099653 - DNA, 25 bp, Homo sapien
tgagtccatagcctgtcactgctgt

SEQ ID NO: 4099654 - DNA, 25 bp, Homo sapien
tcttcgttattagaggtccaatggg

SEQ ID NO: 4099655 - DNA, 25 bp, Homo sapien
gtgtctggcagtggccactaataaa

SEQ ID NO: 4099656 - DNA, 25 bp, Homo sapien
catcttgtagtctattgcaggtaag

SEQ ID NO: 4099657 - DNA, 25 bp, Homo sapien
tgtagtctattgcaggtaagtagaa

SEQ ID NO: 4099658 - DNA, 25 bp, Homo sapien
cttgtagtctattgcaggtaagtag

SEQ ID NO: 4099659 - DNA, 25 bp, Homo sapien
ttgccatcttgtagtctattgcagg

SEQ ID NO: 4099660 - DNA, 25 bp, Homo sapien
tagggtaagcaactaggtaactatg

SEQ ID NO: 4099661 - DNA, 25 bp, Homo sapien
ggtaagcaactaggtaactatgaca

SEQ ID NO: 4099662 - DNA, 25 bp, Homo sapien
tgcagactttgaatttagggtaagc

SEQ ID NO: 4099663 - DNA, 25 bp, Homo sapien
tgaatttagggtaagcaactaggta

SEQ ID NO: 4099664 - DNA, 25 bp, Homo sapien
ttggattcacttaatgcagagcaga

SEQ ID NO: 4099665 - DNA, 25 bp, Homo sapien
aaagaatctggagtcatagcttcta

SEQ ID NO: 4099666 - DNA, 25 bp, Homo sapien
ggattcacttaatgcagagcagaga

SEQ ID NO: 4099667 - DNA, 25 bp, Homo sapien
caaagaatctggagtcatagcttct

SEQ ID NO: 4099668 - DNA, 25 bp, Homo sapien
gcaaagagggtcaacagcgttcttt

SEQ ID NO: 4099669 - DNA, 25 bp, Homo sapien
agtccacccagtagctctatggcca

SEQ ID NO: 4099670 - DNA, 25 bp, Homo sapien
ttccggcaggagaggaataattgac

SEQ ID NO: 4099671 - DNA, 25 bp, Homo sapien
aggcacaagcacttgcaaggcaaag

SEQ ID NO: 4099672 - DNA, 25 bp, Homo sapien
cccatggagtgtgaggccatatatc

SEQ ID NO: 4099673 - DNA, 25 bp, Homo sapien
ccatatatcttattaccctttctca

SEQ ID NO: 4099674 - DNA, 25 bp, Homo sapien
catatatcttattaccctttctcat

SEQ ID NO: 4099675 - DNA, 25 bp, Homo sapien
ggagtgtgaggccatatatcttatt

SEQ ID NO: 4099676 - DNA, 25 bp, Homo sapien
acatagcaacgcttgacttcatccc

SEQ ID NO: 4099677 - DNA, 25 bp, Homo sapien
ctattgactgtgtgcaaaattatca

SEQ ID NO: 4099678 - DNA, 25 bp, Homo sapien
ttgactgtgtgcaaaattatcacct

SEQ ID NO: 4099679 - DNA, 25 bp, Homo sapien
ccagaaaattcatctgaacatagca

SEQ ID NO: 4099680 - DNA, 25 bp, Homo sapien
attgaccaacccagattggatacat

SEQ ID NO: 4099681 - DNA, 25 bp, Homo sapien
tctcttgaatacttgagctgcccat

SEQ ID NO: 4099682 - DNA, 25 bp, Homo sapien
ctgcttctcttgaatacttgagctg

SEQ ID NO: 4099683 - DNA, 25 bp, Homo sapien
tgaatacttgagctgcccattttgc

SEQ ID NO: 4099684 - DNA, 25 bp, Homo sapien
aatacttgagctgcccattttgcca

SEQ ID NO: 4099685 - DNA, 25 bp, Homo sapien
tcctggtagaggtcactttatatct

SEQ ID NO: 4099686 - DNA, 25 bp, Homo sapien
tagaggtcactttatatcttgactc

SEQ ID NO: 4099687 - DNA, 25 bp, Homo sapien
agctcctggtagaggtcactttata

SEQ ID NO: 4099688 - DNA, 25 bp, Homo sapien
cactttatatcttgactcttcagag

SEQ ID NO: 4099689 - DNA, 25 bp, Homo sapien
ctgcttttacactggaatttgatga

SEQ ID NO: 4099690 - DNA, 25 bp, Homo sapien
caccttttctgcttttacactggaa

SEQ ID NO: 4099691 - DNA, 25 bp, Homo sapien
ctggctgttattagtcaccttttct

SEQ ID NO: 4099692 - DNA, 25 bp, Homo sapien
ccttttctgcttttacactggaatt

SEQ ID NO: 4099693 - DNA, 25 bp, Homo sapien
cacttcatcacagatgccccaattg

SEQ ID NO: 4099694 - DNA, 25 bp, Homo sapien
gcacttcatcacagatgccccaatt

SEQ ID NO: 4099695 - DNA, 25 bp, Homo sapien
ccctcccgttcttcctgtgtcagta

SEQ ID NO: 4099696 - DNA, 25 bp, Homo sapien
tactgacacaggaagaacgggaggg

SEQ ID NO: 4099697 - DNA, 25 bp, Homo sapien
ttattatagcaatcatgttaccacg

SEQ ID NO: 4099698 - DNA, 25 bp, Homo sapien
tatagcaatcatgttaccacgggcc

SEQ ID NO: 4099699 - DNA, 25 bp, Homo sapien
tagcaatcatgttaccacgggccat

SEQ ID NO: 4099700 - DNA, 25 bp, Homo sapien
ggttccttattatagcaatcatgtt

SEQ ID NO: 4099701 - DNA, 25 bp, Homo sapien
caaagggtataaacccaattgtcag

SEQ ID NO: 4099702 - DNA, 25 bp, Homo sapien
tgaaagcttgactgcccaaagggta

SEQ ID NO: 4099703 - DNA, 25 bp, Homo sapien
gcttgactgcccaaagggtataaac

SEQ ID NO: 4099704 - DNA, 25 bp, Homo sapien
ctatgaaagcttgactgcccaaagg

SEQ ID NO: 4099705 - DNA, 25 bp, Homo sapien
agttctcagaatcatggctagaggt

SEQ ID NO: 4099706 - DNA, 25 bp, Homo sapien
gttctcagaatcatggctagaggtg

SEQ ID NO: 4099707 - DNA, 25 bp, Homo sapien
gggaacaacactcgggcacactggc

SEQ ID NO: 4099708 - DNA, 25 bp, Homo sapien
tcagggaggataaagattagtctgc

SEQ ID NO: 4099709 - DNA, 25 bp, Homo sapien
acactggcggtgatcttgagaagca

SEQ ID NO: 4099710 - DNA, 25 bp, Homo sapien
tgcccattgcagtgaattgtaacag

SEQ ID NO: 4099711 - DNA, 25 bp, Homo sapien
tgtttcatttatcttcaatgatttc

SEQ ID NO: 4099712 - DNA, 25 bp, Homo sapien
tgaaaaaatatacttgtagatggat

SEQ ID NO: 4099713 - DNA, 25 bp, Homo sapien
ggcataaaatgtaatacaatgtttc

SEQ ID NO: 4099714 - DNA, 25 bp, Homo sapien
aatacaatgtttcatttatcttcaa

SEQ ID NO: 4099715 - DNA, 25 bp, Homo sapien
tttcattgcaaatagaacaattcaa

SEQ ID NO: 4099716 - DNA, 25 bp, Homo sapien
atagaacaattcaatagttacttca

SEQ ID NO: 4099717 - DNA, 25 bp, Homo sapien
agaacaattcaatagttacttcata

SEQ ID NO: 4099718 - DNA, 25 bp, Homo sapien
gagccagtagttacaaagattctct

SEQ ID NO: 4099719 - DNA, 25 bp, Homo sapien
taagtaggaaatgatgataaccacc

SEQ ID NO: 4099720 - DNA, 25 bp, Homo sapien
cagtttttagcgaatgaaggagaca

SEQ ID NO: 4099721 - DNA, 25 bp, Homo sapien
aaaggaccaactgtagagccagtag

SEQ ID NO: 4099722 - DNA, 25 bp, Homo sapien
cctgattggtgaatgtacatttgca

SEQ ID NO: 4099723 - DNA, 25 bp, Homo sapien
caagtgcctgattggtgaatgtaca

SEQ ID NO: 4099724 - DNA, 25 bp, Homo sapien
tgcctgattggtgaatgtacatttg

SEQ ID NO: 4099725 - DNA, 25 bp, Homo sapien
agtgcctgattggtgaatgtacatt

SEQ ID NO: 4099726 - DNA, 25 bp, Homo sapien
ctctgctgagatacaatatctgaaa

SEQ ID NO: 4099727 - DNA, 25 bp, Homo sapien
tcgtctttattatttgccgtttcaa

SEQ ID NO: 4099728 - DNA, 25 bp, Homo sapien
tctgaaaagtagtcgtctttattat

SEQ ID NO: 4099729 - DNA, 25 bp, Homo sapien
aatatctgaaaagtagtcgtcttta

SEQ ID NO: 4099730 - DNA, 25 bp, Homo sapien
gacccatatttttccatcctggtgc

SEQ ID NO: 4099731 - DNA, 25 bp, Homo sapien
gcaagacccatatttttccatcctg

SEQ ID NO: 4099732 - DNA, 25 bp, Homo sapien
gttcatttggtgaaggcaagaccca

SEQ ID NO: 4099733 - DNA, 25 bp, Homo sapien
ggtgaaggcaagacccatatttttc

SEQ ID NO: 4099734 - DNA, 25 bp, Homo sapien
tttcccatctgagttagcaataagt

SEQ ID NO: 4099735 - DNA, 25 bp, Homo sapien
catctgagttagcaataagtgtttc

SEQ ID NO: 4099736 - DNA, 25 bp, Homo sapien
gagttagcaataagtgtttcagctc

SEQ ID NO: 4099737 - DNA, 25 bp, Homo sapien
caataagtgtttcagctcatacagt

SEQ ID NO: 4099738 - DNA, 25 bp, Homo sapien
tgctcccacagaatgctccacagaa

SEQ ID NO: 4099739 - DNA, 25 bp, Homo sapien
gaacgtgggcacaacagtccaaggt

SEQ ID NO: 4099740 - DNA, 25 bp, Homo sapien
caaggtgccatcttgcagatgcagc

SEQ ID NO: 4099741 - DNA, 25 bp, Homo sapien
aagcataagcatgaatccaagccag

SEQ ID NO: 4099742 - DNA, 25 bp, Homo sapien
acatcagtcaaatggacatccttag

SEQ ID NO: 4099743 - DNA, 25 bp, Homo sapien
cattacatagtgagagcccatagct

SEQ ID NO: 4099744 - DNA, 25 bp, Homo sapien
ttctggctcgttcacatggtctgca

SEQ ID NO: 4099745 - DNA, 25 bp, Homo sapien
tcagatcactacataaattacaagg

SEQ ID NO: 4099746 - DNA, 25 bp, Homo sapien
tataaatggactaaattctgcaatt

SEQ ID NO: 4099747 - DNA, 25 bp, Homo sapien
ttaaatataaatggactaaattctg

SEQ ID NO: 4099748 - DNA, 25 bp, Homo sapien
taaatataaatggactaaattctgc

SEQ ID NO: 4099749 - DNA, 25 bp, Homo sapien
aatataaatggactaaattctgcaa

SEQ ID NO: 4099750 - DNA, 25 bp, Homo sapien
tacgctccatccttctattggtatc

SEQ ID NO: 4099751 - DNA, 25 bp, Homo sapien
atccttctattggtatccccgccat

SEQ ID NO: 4099752 - DNA, 25 bp, Homo sapien
gcttcagctctccttacgctccatc

SEQ ID NO: 4099753 - DNA, 25 bp, Homo sapien
gctctccttacgctccatccttcta

SEQ ID NO: 4099754 - DNA, 25 bp, Homo sapien
aagaccccaatcaggatgtacccac

SEQ ID NO: 4099755 - DNA, 25 bp, Homo sapien
ctttacaaagaccccaatcaggatg

SEQ ID NO: 4099756 - DNA, 25 bp, Homo sapien
tacaaagaccccaatcaggatgtac

SEQ ID NO: 4099757 - DNA, 25 bp, Homo sapien
caaagaccccaatcaggatgtaccc

SEQ ID NO: 4099758 - DNA, 25 bp, Homo sapien
cccactccctgctagtgtgaatgct

SEQ ID NO: 4099759 - DNA, 25 bp, Homo sapien
cctgctagtgtgaatgcttggcttc

SEQ ID NO: 4099760 - DNA, 25 bp, Homo sapien
gctagtgtgaatgcttggcttctga

SEQ ID NO: 4099761 - DNA, 25 bp, Homo sapien
actccctgctagtgtgaatgcttgg

SEQ ID NO: 4099762 - DNA, 25 bp, Homo sapien
caactatggtaaggcatagtttgcc

SEQ ID NO: 4099763 - DNA, 25 bp, Homo sapien
agtcacccccctcaactatggtaag

SEQ ID NO: 4099764 - DNA, 25 bp, Homo sapien
cccctcaactatggtaaggcatagt

SEQ ID NO: 4099765 - DNA, 25 bp, Homo sapien
ggtaaggcatagtttgccattctga

SEQ ID NO: 4099766 - DNA, 25 bp, Homo sapien
cagacaatggactttcaggtagtat

SEQ ID NO: 4099767 - DNA, 25 bp, Homo sapien
gactcttttgatttcagacaatgga

SEQ ID NO: 4099768 - DNA, 25 bp, Homo sapien
cagtaaaacattgaccgttcttcag

SEQ ID NO: 4099769 - DNA, 25 bp, Homo sapien
tcactcaagttcagagactcttttg

SEQ ID NO: 4099770 - DNA, 25 bp, Homo sapien
atttcagggccctgcggatgtgttg

SEQ ID NO: 4099771 - DNA, 25 bp, Homo sapien
ctttattgtgtttgatgcagttcac

SEQ ID NO: 4099772 - DNA, 25 bp, Homo sapien
tttattgtgtttgatgcagttcaca

SEQ ID NO: 4099773 - DNA, 25 bp, Homo sapien
gggccctgcggatgtgttgtggtca

SEQ ID NO: 4099774 - DNA, 25 bp, Homo sapien
gactgggctgaagaacaattatctc

SEQ ID NO: 4099775 - DNA, 25 bp, Homo sapien
cagtgctcggttcattaaaggtgtc

SEQ ID NO: 4099776 - DNA, 25 bp, Homo sapien
tagagaaaactttaacccagtgctc

SEQ ID NO: 4099777 - DNA, 25 bp, Homo sapien
ggtgtcactaagtcgtggcaagaat

SEQ ID NO: 4099778 - DNA, 25 bp, Homo sapien
attgtacacagtatttcatcacaca

SEQ ID NO: 4099779 - DNA, 25 bp, Homo sapien
ctccaccctcgaaaagaccccaatg

SEQ ID NO: 4099780 - DNA, 25 bp, Homo sapien
gaccccaatgtgtattgttctcctc

SEQ ID NO: 4099781 - DNA, 25 bp, Homo sapien
cattgtacacagtatttcatcacac

SEQ ID NO: 4099782 - DNA, 25 bp, Homo sapien
tttctcttgacacgttgttggacat

SEQ ID NO: 4099783 - DNA, 25 bp, Homo sapien
tattttctcttgacacgttgttgga

SEQ ID NO: 4099784 - DNA, 25 bp, Homo sapien
cttattttctcttgacacgttgttg

SEQ ID NO: 4099785 - DNA, 25 bp, Homo sapien
ttttctcttgacacgttgttggaca

SEQ ID NO: 4099786 - DNA, 25 bp, Homo sapien
tgcttataattcttgtgtccagctg

SEQ ID NO: 4099787 - DNA, 25 bp, Homo sapien
ttatgactctaagattccactggtc

SEQ ID NO: 4099788 - DNA, 25 bp, Homo sapien
tccactggtctgtcgtgctgaggcc

SEQ ID NO: 4099789 - DNA, 25 bp, Homo sapien
gcatccaagtgcgtttatctctgtt

SEQ ID NO: 4099790 - DNA, 25 bp, Homo sapien
taaacttcctgctagtacaagccac

SEQ ID NO: 4099791 - DNA, 25 bp, Homo sapien
gcgatgtcacattagtctctctcag

SEQ ID NO: 4099792 - DNA, 25 bp, Homo sapien
tcatggcttcatttcagggtttacg

SEQ ID NO: 4099793 - DNA, 25 bp, Homo sapien
caggatgcagtttagaataccatgc

SEQ ID NO: 4099794 - DNA, 25 bp, Homo sapien
ctctagcacaaattgtagaaatcac

SEQ ID NO: 4099795 - DNA, 25 bp, Homo sapien
gctcctctagcacaaattgtagaaa

SEQ ID NO: 4099796 - DNA, 25 bp, Homo sapien
cagctcctctagcacaaattgtaga

SEQ ID NO: 4099797 - DNA, 25 bp, Homo sapien
ccacagctcctctagcacaaattgt

SEQ ID NO: 4099798 - DNA, 25 bp, Homo sapien
catggcattatctcatcaacttcct

SEQ ID NO: 4099799 - DNA, 25 bp, Homo sapien
ggcattatctcatcaacttcctcca

SEQ ID NO: 4099800 - DNA, 25 bp, Homo sapien
tctcatcaacttcctccaaagccat

SEQ ID NO: 4099801 - DNA, 25 bp, Homo sapien
atctcatcaacttcctccaaagcca

SEQ ID NO: 4099802 - DNA, 25 bp, Homo sapien
tagtctttgccatgcaacacagccc

SEQ ID NO: 4099803 - DNA, 25 bp, Homo sapien
gcgttctgccctaagacccatctgt

SEQ ID NO: 4099804 - DNA, 25 bp, Homo sapien
ccctgccactgatcaattgtcttgg

SEQ ID NO: 4099805 - DNA, 25 bp, Homo sapien
ctttcagtgggattggcgttctgcc

SEQ ID NO: 4099806 - DNA, 25 bp, Homo sapien
tgaccacagtgtaccatttgagctg

SEQ ID NO: 4099807 - DNA, 25 bp, Homo sapien
gagggcaattttgggtgctttcaca

SEQ ID NO: 4099808 - DNA, 25 bp, Homo sapien
tttcacaaagtgaagggaggagtaa

SEQ ID NO: 4099809 - DNA, 25 bp, Homo sapien
atagaaatccatttaggcaattgag

SEQ ID NO: 4099810 - DNA, 25 bp, Homo sapien
atggagatgcaaatactctgtggac

SEQ ID NO: 4099811 - DNA, 25 bp, Homo sapien
cttgtatcaccgatggtgaaatgca

SEQ ID NO: 4099812 - DNA, 25 bp, Homo sapien
gcattggagtcccatccataagcag

SEQ ID NO: 4099813 - DNA, 25 bp, Homo sapien
tggagtcccatccataagcagcaaa

SEQ ID NO: 4099814 - DNA, 25 bp, Homo sapien
cattttgccaattttctctgatcct

SEQ ID NO: 4099815 - DNA, 25 bp, Homo sapien
aacacattttgccaattttctctga

SEQ ID NO: 4099816 - DNA, 25 bp, Homo sapien
taaaacacattttgccaattttctc

SEQ ID NO: 4099817 - DNA, 25 bp, Homo sapien
cacattttgccaattttctctgatc

SEQ ID NO: 4099818 - DNA, 25 bp, Homo sapien
agtaaacccagaccccacaagatag

SEQ ID NO: 4099819 - DNA, 25 bp, Homo sapien
cccagaccccacaagatagccagca

SEQ ID NO: 4099820 - DNA, 25 bp, Homo sapien
ccagaccccacaagatagccagcat

SEQ ID NO: 4099821 - DNA, 25 bp, Homo sapien
tccagtaaacccagaccccacaaga

SEQ ID NO: 4099822 - DNA, 25 bp, Homo sapien
aaaactgcaggtagcatttagaaaa

SEQ ID NO: 4099823 - DNA, 25 bp, Homo sapien
tagcatttagaaaaggtcacgtcaa

SEQ ID NO: 4099824 - DNA, 25 bp, Homo sapien
gtcacgtcaagccaatttcccatac

SEQ ID NO: 4099825 - DNA, 25 bp, Homo sapien
ttagaaaaggtcacgtcaagccaat

SEQ ID NO: 4099826 - DNA, 25 bp, Homo sapien
gctgcctatcaggtaagggaaccca

SEQ ID NO: 4099827 - DNA, 25 bp, Homo sapien
taagagggctgcctatcaggtaagg

SEQ ID NO: 4099828 - DNA, 25 bp, Homo sapien
agggctgcctatcaggtaagggaac

SEQ ID NO: 4099829 - DNA, 25 bp, Homo sapien
cctatcaggtaagggaacccagcga

SEQ ID NO: 4099830 - DNA, 25 bp, Homo sapien
taacatttctgtgtaggaagtggac

SEQ ID NO: 4099831 - DNA, 25 bp, Homo sapien
gaagtggacgccatagaatgtagaa

SEQ ID NO: 4099832 - DNA, 25 bp, Homo sapien
agaagggctaggtccaaatttctag

SEQ ID NO: 4099833 - DNA, 25 bp, Homo sapien
tatgacaggatgtgtaacatttctg

SEQ ID NO: 4099834 - DNA, 25 bp, Homo sapien
ttcctggtcagccttagcatgattg

SEQ ID NO: 4099835 - DNA, 25 bp, Homo sapien
tctcccactgcatagacggcagtgt

SEQ ID NO: 4099836 - DNA, 25 bp, Homo sapien
tgttctcttgattatgaaggttgtt

SEQ ID NO: 4099837 - DNA, 25 bp, Homo sapien
ttatgaaggttgttatttaatggag

SEQ ID NO: 4099838 - DNA, 25 bp, Homo sapien
cttgggcaacttcaatttctttcat

SEQ ID NO: 4099839 - DNA, 25 bp, Homo sapien
cacttgggcaacttcaatttctttc

SEQ ID NO: 4099840 - DNA, 25 bp, Homo sapien
acttgggcaacttcaatttctttca

SEQ ID NO: 4099841 - DNA, 25 bp, Homo sapien
gcacttgggcaacttcaatttcttt

SEQ ID NO: 4099842 - DNA, 25 bp, Homo sapien
gtcacttgttcaactcttggtcctg

SEQ ID NO: 4099843 - DNA, 25 bp, Homo sapien
tttggcttccacagtagaaaattcc

SEQ ID NO: 4099844 - DNA, 25 bp, Homo sapien
ataaagaggaagtatgtgtggacac

SEQ ID NO: 4099845 - DNA, 25 bp, Homo sapien
ttatctttggtggaataaggaacca

SEQ ID NO: 4099846 - DNA, 25 bp, Homo sapien
tatctttggtggaataaggaaccat

SEQ ID NO: 4099847 - DNA, 25 bp, Homo sapien
ggcactgacttcatgagtgcgtctg

SEQ ID NO: 4099848 - DNA, 25 bp, Homo sapien
tatggatgggagtataatgtgtgca

SEQ ID NO: 4099849 - DNA, 25 bp, Homo sapien
tcatgagtgcgtctgtgtatggatg

SEQ ID NO: 4099850 - DNA, 25 bp, Homo sapien
gatactgccaagtactgtgcaatct

SEQ ID NO: 4099851 - DNA, 25 bp, Homo sapien
tgtgatttcaaacgagtgatgcgtg

SEQ ID NO: 4099852 - DNA, 25 bp, Homo sapien
ctggaaccttgaactgactgagaac

SEQ ID NO: 4099853 - DNA, 25 bp, Homo sapien
tgcagcctccaaaatggtgtcaccc

SEQ ID NO: 4099854 - DNA, 25 bp, Homo sapien
tgctgatgagtgctttagcccgagc

SEQ ID NO: 4099855 - DNA, 25 bp, Homo sapien
tggaccaccttttcggtatcccgca

SEQ ID NO: 4099856 - DNA, 25 bp, Homo sapien
tggagggtctcaggtcacagctcat

SEQ ID NO: 4099857 - DNA, 25 bp, Homo sapien
tgccaaggagaagagatgtgaggtt

SEQ ID NO: 4099858 - DNA, 25 bp, Homo sapien
agcctcttctcggtgccaaggagaa

SEQ ID NO: 4099859 - DNA, 25 bp, Homo sapien
agcccgtgccggagggacagcacgc

SEQ ID NO: 4099860 - DNA, 25 bp, Homo sapien
cacctgggctgacgccggctcggga

SEQ ID NO: 4099861 - DNA, 25 bp, Homo sapien
ggcagaggcgcgctgactgccacct

SEQ ID NO: 4099862 - DNA, 25 bp, Homo sapien
ggactcgtgcggagcgccgcgagcg

SEQ ID NO: 4099863 - DNA, 25 bp, Homo sapien
cccctcccttcgcgcgggctcgcac

SEQ ID NO: 4099864 - DNA, 25 bp, Homo sapien
aaggtatttcatccctagggtactg

SEQ ID NO: 4099865 - DNA, 25 bp, Homo sapien
atttcatccctagggtactgtagtg

SEQ ID NO: 4099866 - DNA, 25 bp, Homo sapien
tgtgcgtgcgtgtgatttcatccct

SEQ ID NO: 4099867 - DNA, 25 bp, Homo sapien
atttcatccctagggtaccgtagtg

SEQ ID NO: 4099868 - DNA, 25 bp, Homo sapien
gatgtataaggatctccacctgaac

SEQ ID NO: 4099869 - DNA, 25 bp, Homo sapien
atctcccgcagacctttgactacag

SEQ ID NO: 4099870 - DNA, 25 bp, Homo sapien
gctaatacaggctctaatgcagaac

SEQ ID NO: 4099871 - DNA, 25 bp, Homo sapien
gcagaaccatttccatagagcaaag

SEQ ID NO: 4099872 - DNA, 25 bp, Homo sapien
cgctgtctctatggagctcaatgta

SEQ ID NO: 4099873 - DNA, 25 bp, Homo sapien
gagtcgcccagtgcccgtccggctc

SEQ ID NO: 4099874 - DNA, 25 bp, Homo sapien
cttgccccggcgctgtctctatgga

SEQ ID NO: 4099875 - DNA, 25 bp, Homo sapien
cccggcgctgtctctatggagctca

SEQ ID NO: 4099876 - DNA, 25 bp, Homo sapien
gcagaagaggaagaaggccgaagga

SEQ ID NO: 4099877 - DNA, 25 bp, Homo sapien
gaagaggaagaaggccgaaggaagc

SEQ ID NO: 4099878 - DNA, 25 bp, Homo sapien
aggaagaaggccgaaggaagcctct

SEQ ID NO: 4099879 - DNA, 25 bp, Homo sapien
agaggaagaaggccgaaggaagcct

SEQ ID NO: 4099880 - DNA, 25 bp, Homo sapien
catcttcctcctcttccttcttttt

SEQ ID NO: 4099881 - DNA, 25 bp, Homo sapien
ctcatcttcctcctcttccttcttt

SEQ ID NO: 4099882 - DNA, 25 bp, Homo sapien
cctcatcctcttcatcttcctcatc

SEQ ID NO: 4099883 - DNA, 25 bp, Homo sapien
ctcctcatcctcttcatcttcctca

SEQ ID NO: 4099884 - DNA, 25 bp, Homo sapien
tcagaatgtcaacaaaacagctgca

SEQ ID NO: 4099885 - DNA, 25 bp, Homo sapien
attcagaatgtcaacaaaacagctg

SEQ ID NO: 4099886 - DNA, 25 bp, Homo sapien
cattcagaatgtcaacaaaacagct

SEQ ID NO: 4099887 - DNA, 25 bp, Homo sapien
ttcagaatgtcaacaaaacagctgc

SEQ ID NO: 4099888 - DNA, 25 bp, Homo sapien
gcttagatgacaagtggaaactgca

SEQ ID NO: 4099889 - DNA, 25 bp, Homo sapien
taaatcgcctctcatccagagtgaa

SEQ ID NO: 4099890 - DNA, 25 bp, Homo sapien
cattcaaccggtgagagatgttcag

SEQ ID NO: 4099891 - DNA, 25 bp, Homo sapien
gaaactgcaattctagccatgtgcc

SEQ ID NO: 4099892 - DNA, 25 bp, Homo sapien
tacttgcataaatctgccaatcaga

SEQ ID NO: 4099893 - DNA, 25 bp, Homo sapien
aaggttcagtatgagtcactctagt

SEQ ID NO: 4099894 - DNA, 25 bp, Homo sapien
cactctagtacttgcataaatctgc

SEQ ID NO: 4099895 - DNA, 25 bp, Homo sapien
cagtatgagtcactctagtacttgc

SEQ ID NO: 4099896 - DNA, 25 bp, Homo sapien
ccatgatgactgaatttgtttttaa

SEQ ID NO: 4099897 - DNA, 25 bp, Homo sapien
caaccatgatgactgaatttgtttt

SEQ ID NO: 4099898 - DNA, 25 bp, Homo sapien
aaccatgatgactgaatttgttttt

SEQ ID NO: 4099899 - DNA, 25 bp, Homo sapien
accatgatgactgaatttgttttta

SEQ ID NO: 4099900 - DNA, 25 bp, Homo sapien
agctaaatcatcagtgtgaagaagt

SEQ ID NO: 4099901 - DNA, 25 bp, Homo sapien
taccttatattcatatgacaacacc

SEQ ID NO: 4099902 - DNA, 25 bp, Homo sapien
cagctatagtaccatcttggtcgga

SEQ ID NO: 4099903 - DNA, 25 bp, Homo sapien
ccttattgttgtgttgagctaaatc

SEQ ID NO: 4099904 - DNA, 25 bp, Homo sapien
taaaatgctttgtactctgattttt

SEQ ID NO: 4099905 - DNA, 25 bp, Homo sapien
tcagtaaggctcttttaatggtaaa

SEQ ID NO: 4099906 - DNA, 25 bp, Homo sapien
agagttaaacaaggcattccaattg

SEQ ID NO: 4099907 - DNA, 25 bp, Homo sapien
ttaaaatgttggtgggatctgagtg

SEQ ID NO: 4099908 - DNA, 25 bp, Homo sapien
gattaaaatgttggtgggatctgag

SEQ ID NO: 4099909 - DNA, 25 bp, Homo sapien
gtggattaaaatgttggtgggatct

SEQ ID NO: 4099910 - DNA, 25 bp, Homo sapien
tctcaataatttcagacaccgaagc

SEQ ID NO: 4099911 - DNA, 25 bp, Homo sapien
agacaccgaagcgaacttctcaacc

SEQ ID NO: 4099912 - DNA, 25 bp, Homo sapien
tttcagacaccgaagcgaacttctc

SEQ ID NO: 4099913 - DNA, 25 bp, Homo sapien
taatttcagacaccgaagcgaactt

SEQ ID NO: 4099914 - DNA, 25 bp, Homo sapien
actgttgccagctgatcaaactgct

SEQ ID NO: 4099915 - DNA, 25 bp, Homo sapien
caaactgctgcgtgaaggagccaat

SEQ ID NO: 4099916 - DNA, 25 bp, Homo sapien
ttgtaagtccatttctgtagctttg

SEQ ID NO: 4099917 - DNA, 25 bp, Homo sapien
cgtgaaggagccaatttgtaagtcc

SEQ ID NO: 4099918 - DNA, 25 bp, Homo sapien
gagaaaaaaatactggaccagttga

SEQ ID NO: 4099919 - DNA, 25 bp, Homo sapien
tgaagagagaaaaaaatactggacc

SEQ ID NO: 4099920 - DNA, 25 bp, Homo sapien
gaagagagaaaaaaatactggacca

SEQ ID NO: 4099921 - DNA, 25 bp, Homo sapien
agagagaaaaaaatactggaccagt

SEQ ID NO: 4099922 - DNA, 25 bp, Homo sapien
accaattctcaaggcagcgtctggg

SEQ ID NO: 4099923 - DNA, 25 bp, Homo sapien
taaggaccttggacgtccctctgga

SEQ ID NO: 4099924 - DNA, 25 bp, Homo sapien
gccagtgatagcaattgcaaatgta

SEQ ID NO: 4099925 - DNA, 25 bp, Homo sapien
gtttatagactcaccaattctcaag

SEQ ID NO: 4099926 - DNA, 25 bp, Homo sapien
gggctttgccattgccagaccagtt

SEQ ID NO: 4099927 - DNA, 25 bp, Homo sapien
cctcagtctccaaggagggctttgc

SEQ ID NO: 4099928 - DNA, 25 bp, Homo sapien
tctttgagacttttgtgatacagaa

SEQ ID NO: 4099929 - DNA, 25 bp, Homo sapien
ttaattcacagcaaagatttctggt

SEQ ID NO: 4099930 - DNA, 25 bp, Homo sapien
tctagatgcaggaaattggaagcta

SEQ ID NO: 4099931 - DNA, 25 bp, Homo sapien
tagggattgagaaacgctcaaggga

SEQ ID NO: 4099932 - DNA, 25 bp, Homo sapien
gggacaaatctagatgcaggaaatt

SEQ ID NO: 4099933 - DNA, 25 bp, Homo sapien
ggcaggtcctcacaataccaagaca

SEQ ID NO: 4099934 - DNA, 25 bp, Homo sapien
ctgacttgcctttagtgtgcatata

SEQ ID NO: 4099935 - DNA, 25 bp, Homo sapien
tgcatatatttatgctgatcttcac

SEQ ID NO: 4099936 - DNA, 25 bp, Homo sapien
tgtgattcctttcaggtgaggtgcc

SEQ ID NO: 4099937 - DNA, 25 bp, Homo sapien
gtgaggtgcctgttcgtatcttcat

SEQ ID NO: 4099938 - DNA, 25 bp, Homo sapien
cagatatgattagccattttagtgg

SEQ ID NO: 4099939 - DNA, 25 bp, Homo sapien
tccactgaggtattcagaggccctc

SEQ ID NO: 4099940 - DNA, 25 bp, Homo sapien
gctggatggctgcttgcacatagca

SEQ ID NO: 4099941 - DNA, 25 bp, Homo sapien
cagcttcccttgtgtgtgttgctcc

SEQ ID NO: 4099942 - DNA, 25 bp, Homo sapien
tactattttgtgctccgaaggacat

SEQ ID NO: 4099943 - DNA, 25 bp, Homo sapien
gctgtagctacaatattcctttgca

SEQ ID NO: 4099944 - DNA, 25 bp, Homo sapien
ccatcagggagctggttttactatt

SEQ ID NO: 4099945 - DNA, 25 bp, Homo sapien
cagctcttgctgaaacaaagcattc

SEQ ID NO: 4099946 - DNA, 25 bp, Homo sapien
agctttcagtctgtccttgtgtaac

SEQ ID NO: 4099947 - DNA, 25 bp, Homo sapien
tactttctcagtccaggtaacctgt

SEQ ID NO: 4099948 - DNA, 25 bp, Homo sapien
tcctgggctccatgagtctagctgg

SEQ ID NO: 4099949 - DNA, 25 bp, Homo sapien
caggtttggtttctagctcagtgac

SEQ ID NO: 4099950 - DNA, 25 bp, Homo sapien
tccttcaagtgtctctgcaatgcca

SEQ ID NO: 4099951 - DNA, 25 bp, Homo sapien
cctccttcaagtgtctctgcaatgc

SEQ ID NO: 4099952 - DNA, 25 bp, Homo sapien
ctcctccttcaagtgtctctgcaat

SEQ ID NO: 4099953 - DNA, 25 bp, Homo sapien
ccttcaagtgtctctgcaatgccat

SEQ ID NO: 4099954 - DNA, 25 bp, Homo sapien
ttctgccaccaaatacccgttgctg

SEQ ID NO: 4099955 - DNA, 25 bp, Homo sapien
caccaaatacccgttgctgatttga

SEQ ID NO: 4099956 - DNA, 25 bp, Homo sapien
aaatacccgttgctgatttgagaac

SEQ ID NO: 4099957 - DNA, 25 bp, Homo sapien
aatcaccactgccattctgccacca

SEQ ID NO: 4099958 - DNA, 25 bp, Homo sapien
tacagaattggtccatccacagatg

SEQ ID NO: 4099959 - DNA, 25 bp, Homo sapien
actggtgtgtgttgaccctgttcac

SEQ ID NO: 4099960 - DNA, 25 bp, Homo sapien
ggaatggccagagtaaaccacagcc

SEQ ID NO: 4099961 - DNA, 25 bp, Homo sapien
gaatttctgagtaccttaactggtg

SEQ ID NO: 4099962 - DNA, 25 bp, Homo sapien
tgtagttgctgttgttgaagttcat

SEQ ID NO: 4099963 - DNA, 25 bp, Homo sapien
gcgtgtgctgtttgtagttgctgtt

SEQ ID NO: 4099964 - DNA, 25 bp, Homo sapien
gtttgtagttgctgttgttgaagtt

SEQ ID NO: 4099965 - DNA, 25 bp, Homo sapien
tgcgtgtgctgtttgtagttgctgt

SEQ ID NO: 4099966 - DNA, 25 bp, Homo sapien
ggagaccaagtagtggaagatcaga

SEQ ID NO: 4099967 - DNA, 25 bp, Homo sapien
ggaggacgttaagaacatccaagaa

SEQ ID NO: 4099968 - DNA, 25 bp, Homo sapien
tcagaatggcctggtggatgatgca

SEQ ID NO: 4099969 - DNA, 25 bp, Homo sapien
tgatgcagaggcctactgaaggcca

SEQ ID NO: 4099970 - DNA, 25 bp, Homo sapien
ggagagtggatagggtggctaatag

SEQ ID NO: 4099971 - DNA, 25 bp, Homo sapien
ggatagggtggctaatagcccccat

SEQ ID NO: 4099972 - DNA, 25 bp, Homo sapien
agagtggatagggtggctaatagcc

SEQ ID NO: 4099973 - DNA, 25 bp, Homo sapien
agtggatagggtggctaatagcccc

SEQ ID NO: 4099974 - DNA, 25 bp, Homo sapien
ttctatcatcaatagaacctgcctc

SEQ ID NO: 4099975 - DNA, 25 bp, Homo sapien
tctatcatcaatagaacctgcctca

SEQ ID NO: 4099976 - DNA, 25 bp, Homo sapien
acagagacgcctcgatgtccccgtg

SEQ ID NO: 4099977 - DNA, 25 bp, Homo sapien
agacgcctcgatgtccccgtgactt

SEQ ID NO: 4099978 - DNA, 25 bp, Homo sapien
cacagagacgcctcgatgtccccgt

SEQ ID NO: 4099979 - DNA, 25 bp, Homo sapien
agagacgcctcgatgtccccgtgac

SEQ ID NO: 4099980 - DNA, 25 bp, Homo sapien
gaaagcaggaggacgttcctcaagg

SEQ ID NO: 4099981 - DNA, 25 bp, Homo sapien
ttttggagattcatcacatgcttct

SEQ ID NO: 4099982 - DNA, 25 bp, Homo sapien
tacacattctaccagccagcagtga

SEQ ID NO: 4099983 - DNA, 25 bp, Homo sapien
cagtggtcgtaatccagtggccttg

SEQ ID NO: 4099984 - DNA, 25 bp, Homo sapien
tctaagtagtctggagctatggtcc

SEQ ID NO: 4099985 - DNA, 25 bp, Homo sapien
gcagtaattctaagtagtctggagc

SEQ ID NO: 4099986 - DNA, 25 bp, Homo sapien
ctgagaagaagcagtaattctaagt

SEQ ID NO: 4099987 - DNA, 25 bp, Homo sapien
tctggagctatggtccacatgcctg

SEQ ID NO: 4099988 - DNA, 25 bp, Homo sapien
tctcaggctccaaatttagtgtatt

SEQ ID NO: 4099989 - DNA, 25 bp, Homo sapien
tttccaatccagtgtccatatgcat

SEQ ID NO: 4099990 - DNA, 25 bp, Homo sapien
tagtgtatttaaggcgtatctttcc

SEQ ID NO: 4099991 - DNA, 25 bp, Homo sapien
gcgtatctttccaatccagtgtcca

SEQ ID NO: 4099992 - DNA, 25 bp, Homo sapien
ggtggcactggtaccactgaagagc

SEQ ID NO: 4099993 - DNA, 25 bp, Homo sapien
gtggcactggtaccactgaagagca

SEQ ID NO: 4099994 - DNA, 25 bp, Homo sapien
ggcactggtaccactgaagagcaag

SEQ ID NO: 4099995 - DNA, 25 bp, Homo sapien
tggcactggtaccactgaagagcaa

SEQ ID NO: 4099996 - DNA, 25 bp, Homo sapien
ccaactgaatcaggcccgtaaagac

SEQ ID NO: 4099997 - DNA, 25 bp, Homo sapien
tgaatcaggcccgtaaagacaagtc

SEQ ID NO: 4099998 - DNA, 25 bp, Homo sapien
atcaggcccgtaaagacaagtccac

SEQ ID NO: 4099999 - DNA, 25 bp, Homo sapien
catatccaactgaatcaggcccgta

SEQ ID NO: 4100000 - DNA, 25 bp, Homo sapien
tacttccagctgtgcttggtgcaaa

SEQ ID NO: 4100001 - DNA, 25 bp, Homo sapien
tggtgcaaacaagaagctcagaaaa

SEQ ID NO: 4100002 - DNA, 25 bp, Homo sapien
ccttttccagcctgccggtgtgctt

SEQ ID NO: 4100003 - DNA, 25 bp, Homo sapien
gccggtgtgcttcctacatctgtac

SEQ ID NO: 4100004 - DNA, 25 bp, Homo sapien
gagctcttctatctgggcagaattc

SEQ ID NO: 4100005 - DNA, 25 bp, Homo sapien
aaagggctagcgtcctgttcccgat

SEQ ID NO: 4100006 - DNA, 25 bp, Homo sapien
gtcctgttcccgatccctggagagg

SEQ ID NO: 4100007 - DNA, 25 bp, Homo sapien
cagttgctctttcaaagggctagcg

SEQ ID NO: 4100008 - DNA, 25 bp, Homo sapien
cagtttcttcctaggtagagtgcta

SEQ ID NO: 4100009 - DNA, 25 bp, Homo sapien
gctcttctatagctactcctttgac

SEQ ID NO: 4100010 - DNA, 25 bp, Homo sapien
ctacttcgaagattctggtataaga

SEQ ID NO: 4100011 - DNA, 25 bp, Homo sapien
gagtgctagtacaaagctgctcttc

SEQ ID NO: 4100012 - DNA, 25 bp, Homo sapien
actggcgtctgatcattagctgctt

SEQ ID NO: 4100013 - DNA, 25 bp, Homo sapien
tttgccagtagagttgctgtggcta

SEQ ID NO: 4100014 - DNA, 25 bp, Homo sapien
agatgggatttcccctagaggactg

SEQ ID NO: 4100015 - DNA, 25 bp, Homo sapien
gctgtggctagctttggatcagtct

SEQ ID NO: 4100016 - DNA, 25 bp, Homo sapien
tgttgactagcatgtaagatctgag

SEQ ID NO: 4100017 - DNA, 25 bp, Homo sapien
taagatctgagatgggagtatgact

SEQ ID NO: 4100018 - DNA, 25 bp, Homo sapien
tctgagatgggagtatgactgaatt

SEQ ID NO: 4100019 - DNA, 25 bp, Homo sapien
gaacctcagtgttgactagcatgta

SEQ ID NO: 4100020 - DNA, 25 bp, Homo sapien
tactgcactgacaatgcaaagcccc

SEQ ID NO: 4100021 - DNA, 25 bp, Homo sapien
ctgcactgacaatgcaaagcccctt

SEQ ID NO: 4100022 - DNA, 25 bp, Homo sapien
gatactgcactgacaatgcaaagcc

SEQ ID NO: 4100023 - DNA, 25 bp, Homo sapien
cactgacaatgcaaagccccttcat

SEQ ID NO: 4100024 - DNA, 25 bp, Homo sapien
gagatggagcctgccatcttgtgct

SEQ ID NO: 4100025 - DNA, 25 bp, Homo sapien
ctttcttcaggagatggtttctggg

SEQ ID NO: 4100026 - DNA, 25 bp, Homo sapien
tccactttcttcaggagatggtttc

SEQ ID NO: 4100027 - DNA, 25 bp, Homo sapien
catcttgtgctgactccattggctc

SEQ ID NO: 4100028 - DNA, 25 bp, Homo sapien
tcctagccttgcttagaacaggcat

SEQ ID NO: 4100029 - DNA, 25 bp, Homo sapien
ctggagcaaaatctggggccagacc

SEQ ID NO: 4100030 - DNA, 25 bp, Homo sapien
ctctcctagccttgcttagaacagg

SEQ ID NO: 4100031 - DNA, 25 bp, Homo sapien
ggggccagacctgtaatatgtgtca

SEQ ID NO: 4100032 - DNA, 25 bp, Homo sapien
ttttccaaatgagcaggtcccttag

SEQ ID NO: 4100033 - DNA, 25 bp, Homo sapien
caacctaggagcctcgtagtcgaag

SEQ ID NO: 4100034 - DNA, 25 bp, Homo sapien
ggtgctgacaactccagatgaaggt

SEQ ID NO: 4100035 - DNA, 25 bp, Homo sapien
tgttcagacctagatttgcgggcct

SEQ ID NO: 4100036 - DNA, 25 bp, Homo sapien
tctgatcccaggtagacagaaacag

SEQ ID NO: 4100037 - DNA, 25 bp, Homo sapien
taataaatttgactgctggtagccg

SEQ ID NO: 4100038 - DNA, 25 bp, Homo sapien
cactgtgctgcgctccaagggtgaa

SEQ ID NO: 4100039 - DNA, 25 bp, Homo sapien
tctgtccagtgaattaaggctttgt

SEQ ID NO: 4100040 - DNA, 25 bp, Homo sapien
cccggtggcattccaatgggtgctg

SEQ ID NO: 4100041 - DNA, 25 bp, Homo sapien
gtggcattccaatgggtgctgcagc

SEQ ID NO: 4100042 - DNA, 25 bp, Homo sapien
ggcattccaatgggtgctgcagctg

SEQ ID NO: 4100043 - DNA, 25 bp, Homo sapien
ccggtggcattccaatgggtgctgc

SEQ ID NO: 4100044 - DNA, 25 bp, Homo sapien
tgccactgatttggtcaagatcaca

SEQ ID NO: 4100045 - DNA, 25 bp, Homo sapien
gcttgatgggcaaatatagtcagca

SEQ ID NO: 4100046 - DNA, 25 bp, Homo sapien
tccttcattgcctgccactgatttg

SEQ ID NO: 4100047 - DNA, 25 bp, Homo sapien
tcacagttgcttgatgggcaaatat

SEQ ID NO: 4100048 - DNA, 25 bp, Homo sapien
cacatgaaggaggtgcagcagattt

SEQ ID NO: 4100049 - DNA, 25 bp, Homo sapien
gaacttagaaggagatgtcgtgaaa

SEQ ID NO: 4100050 - DNA, 25 bp, Homo sapien
caaggtgaaaaagcagctgatggcc

SEQ ID NO: 4100051 - DNA, 25 bp, Homo sapien
gggatacctcgaaccaagccatgag

SEQ ID NO: 4100052 - DNA, 25 bp, Homo sapien
tgtgtatcacagtggagcggcttca

SEQ ID NO: 4100053 - DNA, 25 bp, Homo sapien
aaatgaaggctaaatattgcttgct

SEQ ID NO: 4100054 - DNA, 25 bp, Homo sapien
gctaaatattgcttgcttacacaca

SEQ ID NO: 4100055 - DNA, 25 bp, Homo sapien
cacaactgtgtatcacagtggagcg

SEQ ID NO: 4100056 - DNA, 25 bp, Homo sapien
ttctttgaagtgttctgtctcccca

SEQ ID NO: 4100057 - DNA, 25 bp, Homo sapien
tgtgaaatccggagagcaggtttct

SEQ ID NO: 4100058 - DNA, 25 bp, Homo sapien
atccggagagcaggtttcttgcttc

SEQ ID NO: 4100059 - DNA, 25 bp, Homo sapien
ctgctgtgaaatccggagagcaggt

SEQ ID NO: 4100060 - DNA, 25 bp, Homo sapien
gcttcaagggagaacttctcctggg

SEQ ID NO: 4100061 - DNA, 25 bp, Homo sapien
ggataagcttcaagggagaacttct

SEQ ID NO: 4100062 - DNA, 25 bp, Homo sapien
gggctctctgccgatatctgccagg

SEQ ID NO: 4100063 - DNA, 25 bp, Homo sapien
ctgccgatatctgccagggaaaaca

SEQ ID NO: 4100064 - DNA, 25 bp, Homo sapien
atgacaaagacagtagaagagggga

SEQ ID NO: 4100065 - DNA, 25 bp, Homo sapien
gagggtttgtttctgaacgcacagg

SEQ ID NO: 4100066 - DNA, 25 bp, Homo sapien
gtttctgaacgcacaggttgtgtcc

SEQ ID NO: 4100067 - DNA, 25 bp, Homo sapien
ggtttgtttctgaacgcacaggttg

SEQ ID NO: 4100068 - DNA, 25 bp, Homo sapien
cccctgagataaggccggagggctg

SEQ ID NO: 4100069 - DNA, 25 bp, Homo sapien
gaaagccagggtcccctgagataag

SEQ ID NO: 4100070 - DNA, 25 bp, Homo sapien
gtcttagcagcagtaggtagcagag

SEQ ID NO: 4100071 - DNA, 25 bp, Homo sapien
tagcaggtcattggcagtagcagag

SEQ ID NO: 4100072 - DNA, 25 bp, Homo sapien
cattctcagtccattagcaaaattt

SEQ ID NO: 4100073 - DNA, 25 bp, Homo sapien
cttgcttctaacattctcagtccat

SEQ ID NO: 4100074 - DNA, 25 bp, Homo sapien
gcttctaacattctcagtccattag

SEQ ID NO: 4100075 - DNA, 25 bp, Homo sapien
ctaacattctcagtccattagcaaa

SEQ ID NO: 4100076 - DNA, 25 bp, Homo sapien
tgagcaaactcagcgcatcaatgga

SEQ ID NO: 4100077 - DNA, 25 bp, Homo sapien
gctgagcaaactcagcgcatcaatg

SEQ ID NO: 4100078 - DNA, 25 bp, Homo sapien
gcaaactcagcgcatcaatggacat

SEQ ID NO: 4100079 - DNA, 25 bp, Homo sapien
gagcaaactcagcgcatcaatggac

SEQ ID NO: 4100080 - DNA, 25 bp, Homo sapien
caaaactcctatagctttcaacatt

SEQ ID NO: 4100081 - DNA, 25 bp, Homo sapien
aaactcctatagctttcaacattct

SEQ ID NO: 4100082 - DNA, 25 bp, Homo sapien
cacaaaactcctatagctttcaaca

SEQ ID NO: 4100083 - DNA, 25 bp, Homo sapien
aaaactcctatagctttcaacattc

SEQ ID NO: 4100084 - DNA, 25 bp, Homo sapien
aagagcaggcatggctacaaacttc

SEQ ID NO: 4100085 - DNA, 25 bp, Homo sapien
aggcatggctacaaacttcaggctg

SEQ ID NO: 4100086 - DNA, 25 bp, Homo sapien
cagtgagcttcttagcaggccagag

SEQ ID NO: 4100087 - DNA, 25 bp, Homo sapien
cttcagtgagcttcttagcaggcca

SEQ ID NO: 4100088 - DNA, 25 bp, Homo sapien
cttctcatccaggagagcagttgtc

SEQ ID NO: 4100089 - DNA, 25 bp, Homo sapien
taaatcatgctcatattgcactgcc

SEQ ID NO: 4100090 - DNA, 25 bp, Homo sapien
catgctcatattgcactgccaaagc

SEQ ID NO: 4100091 - DNA, 25 bp, Homo sapien
gcaacctctaaatcatgctcatatt

SEQ ID NO: 4100092 - DNA, 25 bp, Homo sapien
taaacatattccaatttgcactcca

SEQ ID NO: 4100093 - DNA, 25 bp, Homo sapien
acatttgggcttgccttcttgagct

SEQ ID NO: 4100094 - DNA, 25 bp, Homo sapien
ccagattgagacaggtagtcataat

SEQ ID NO: 4100095 - DNA, 25 bp, Homo sapien
caatgtaggccccagattgagacag

SEQ ID NO: 4100096 - DNA, 25 bp, Homo sapien
tagacaactttgatttcttggactg

SEQ ID NO: 4100097 - DNA, 25 bp, Homo sapien
agtagacaactttgatttcttggac

SEQ ID NO: 4100098 - DNA, 25 bp, Homo sapien
ctgggattctgcatgtttgtgggcc

SEQ ID NO: 4100099 - DNA, 25 bp, Homo sapien
tctgcatgtttgtgggccaagcagt

SEQ ID NO: 4100100 - DNA, 25 bp, Homo sapien
tatgtgtttaagtcccacacttcaa

SEQ ID NO: 4100101 - DNA, 25 bp, Homo sapien
gcttctttatcgcttttcagagaga

SEQ ID NO: 4100102 - DNA, 25 bp, Homo sapien
gaccacacactgtgcaaagcgtgta

SEQ ID NO: 4100103 - DNA, 25 bp, Homo sapien
acttcaatatgcttgcaggcccgcc

SEQ ID NO: 4100104 - DNA, 25 bp, Homo sapien
ccttgatttgtttaacagcaaattc

SEQ ID NO: 4100105 - DNA, 25 bp, Homo sapien
catagcatgaacataatcagacaca

SEQ ID NO: 4100106 - DNA, 25 bp, Homo sapien
gctgactagaattttcatagcatga

SEQ ID NO: 4100107 - DNA, 25 bp, Homo sapien
gatgactgagagcaccatttctcct

SEQ ID NO: 4100108 - DNA, 25 bp, Homo sapien
aagggctagtacaattggtgacagg

SEQ ID NO: 4100109 - DNA, 25 bp, Homo sapien
ggtgacaggtatctgctcattgttt

SEQ ID NO: 4100110 - DNA, 25 bp, Homo sapien
taagaagggctagtacaattggtga

SEQ ID NO: 4100111 - DNA, 25 bp, Homo sapien
tcgtaagaagggctagtacaattgg

SEQ ID NO: 4100112 - DNA, 25 bp, Homo sapien
cccttgggatgaccatgcactgcca

SEQ ID NO: 4100113 - DNA, 25 bp, Homo sapien
tccccttgggatgaccatgcactgc

SEQ ID NO: 4100114 - DNA, 25 bp, Homo sapien
ctccccttgggatgaccatgcactg

SEQ ID NO: 4100115 - DNA, 25 bp, Homo sapien
ccttgggatgaccatgcactgccac

SEQ ID NO: 4100116 - DNA, 25 bp, Homo sapien
acagtgatgtatctgttacaagtga

SEQ ID NO: 4100117 - DNA, 25 bp, Homo sapien
caacaaacagtgatgtatctgttac

SEQ ID NO: 4100118 - DNA, 25 bp, Homo sapien
tcaacaaacagtgatgtatctgtta

SEQ ID NO: 4100119 - DNA, 25 bp, Homo sapien
caaacagtgatgtatctgttacaag

SEQ ID NO: 4100120 - DNA, 25 bp, Homo sapien
gaagagccaattcctaccatcaagt

SEQ ID NO: 4100121 - DNA, 25 bp, Homo sapien
catgttcccctgaactcttgtaggg

SEQ ID NO: 4100122 - DNA, 25 bp, Homo sapien
gctggtaggagacatgacattctga

SEQ ID NO: 4100123 - DNA, 25 bp, Homo sapien
aagattaccggagcaagccactgcg

SEQ ID NO: 4100124 - DNA, 25 bp, Homo sapien
aattacactggtggctatagatgga

SEQ ID NO: 4100125 - DNA, 25 bp, Homo sapien
ctaattacactggtggctatagatg

SEQ ID NO: 4100126 - DNA, 25 bp, Homo sapien
ttacactggtggctatagatggatg

SEQ ID NO: 4100127 - DNA, 25 bp, Homo sapien
cactggtggctatagatggatgttg

SEQ ID NO: 4100128 - DNA, 25 bp, Homo sapien
atatttgccctctacggcagaaatt

SEQ ID NO: 4100129 - DNA, 25 bp, Homo sapien
gatatttgccctctacggcagaaat

SEQ ID NO: 4100130 - DNA, 25 bp, Homo sapien
tatttgccctctacggcagaaattc

SEQ ID NO: 4100131 - DNA, 25 bp, Homo sapien
gtctgcgaacttggggattggccac

SEQ ID NO: 4100132 - DNA, 25 bp, Homo sapien
tcgtcctcctcggagatgatgtgct

SEQ ID NO: 4100133 - DNA, 25 bp, Homo sapien
cggagatgatgtgctgggctatccc

SEQ ID NO: 4100134 - DNA, 25 bp, Homo sapien
aacttggggattggccactgcggct

SEQ ID NO: 4100135 - DNA, 25 bp, Homo sapien
agctgatttacagggccttcgtcct

SEQ ID NO: 4100136 - DNA, 25 bp, Homo sapien
tctcctcccctcgaagctgatttac

SEQ ID NO: 4100137 - DNA, 25 bp, Homo sapien
ctcatagacatgcgtctcctcccct

SEQ ID NO: 4100138 - DNA, 25 bp, Homo sapien
atagacatgcgtctcctcccctcga

SEQ ID NO: 4100139 - DNA, 25 bp, Homo sapien
gtcttctgaaggcaccgggccctca

SEQ ID NO: 4100140 - DNA, 25 bp, Homo sapien
cttctgaaggcaccgggccctcatt

SEQ ID NO: 4100141 - DNA, 25 bp, Homo sapien
ggtggctcagtacagactcgaggaa

SEQ ID NO: 4100142 - DNA, 25 bp, Homo sapien
tacagactcgaggaagtcttctgaa

SEQ ID NO: 4100143 - DNA, 25 bp, Homo sapien
gtcctggggtgcctgtctttaagta

SEQ ID NO: 4100144 - DNA, 25 bp, Homo sapien
ttatgtcctggggtgcctgtcttta

SEQ ID NO: 4100145 - DNA, 25 bp, Homo sapien
atgtcctggggtgcctgtctttaag

SEQ ID NO: 4100146 - DNA, 25 bp, Homo sapien
ctttgggtgtatagcttatgtcctg

SEQ ID NO: 4100147 - DNA, 25 bp, Homo sapien
acctgtgggacacgtggccgcccaa

SEQ ID NO: 4100148 - DNA, 25 bp, Homo sapien
cagacccgaggacgcacagcgctgg

SEQ ID NO: 4100149 - DNA, 25 bp, Homo sapien
tctcccatccggctgcagagtggga

SEQ ID NO: 4100150 - DNA, 25 bp, Homo sapien
tgcttgagcacccacgggatcctgt

SEQ ID NO: 4100151 - DNA, 25 bp, Homo sapien
ctgcggagaaaggccgctggcagag

SEQ ID NO: 4100152 - DNA, 25 bp, Homo sapien
tgcggagaaaggccgctggcagagt

SEQ ID NO: 4100153 - DNA, 25 bp, Homo sapien
cggagaaaggccgctggcagagtac

SEQ ID NO: 4100154 - DNA, 25 bp, Homo sapien
gcggagaaaggccgctggcagagta

SEQ ID NO: 4100155 - DNA, 25 bp, Homo sapien
actgcctcgtcttcgggtttgccca

SEQ ID NO: 4100156 - DNA, 25 bp, Homo sapien
tggtcccacacttatgatgcttgtc

SEQ ID NO: 4100157 - DNA, 25 bp, Homo sapien
tccctcggagatgtccggcggcttc

SEQ ID NO: 4100158 - DNA, 25 bp, Homo sapien
tatgatgcttgtcgaggactgcctc

SEQ ID NO: 4100159 - DNA, 25 bp, Homo sapien
gggttggctgggcttggataaatgt

SEQ ID NO: 4100160 - DNA, 25 bp, Homo sapien
gtgccagaacccagactttgtcagc

SEQ ID NO: 4100161 - DNA, 25 bp, Homo sapien
ggcttggataaatgtggaagagcgc

SEQ ID NO: 4100162 - DNA, 25 bp, Homo sapien
tgccagaacccagactttgtcagct

SEQ ID NO: 4100163 - DNA, 25 bp, Homo sapien
tgcttggggatggtgctgatggtcc

SEQ ID NO: 4100164 - DNA, 25 bp, Homo sapien
ggatggtgctgatggtccaactgac

SEQ ID NO: 4100165 - DNA, 25 bp, Homo sapien
aaagggcttgcttggggatggtgct

SEQ ID NO: 4100166 - DNA, 25 bp, Homo sapien
agggcttgcttggggatggtgctga

SEQ ID NO: 4100167 - DNA, 25 bp, Homo sapien
ttcctcccacactcccataggctgg

SEQ ID NO: 4100168 - DNA, 25 bp, Homo sapien
ctagcggtgcgttcctcccacactc

SEQ ID NO: 4100169 - DNA, 25 bp, Homo sapien
tcccacactcccataggctgggcct

SEQ ID NO: 4100170 - DNA, 25 bp, Homo sapien
ggcctcccagcagggctgcactaac

SEQ ID NO: 4100171 - DNA, 25 bp, Homo sapien
tctttggacctattagagccatggt

SEQ ID NO: 4100172 - DNA, 25 bp, Homo sapien
ccatggcaggccaagtgactgttcg

SEQ ID NO: 4100173 - DNA, 25 bp, Homo sapien
acaacaggcttcttgcagtgtgcac

SEQ ID NO: 4100174 - DNA, 25 bp, Homo sapien
gtggtaaaggctcgcccataaatgc

SEQ ID NO: 4100175 - DNA, 25 bp, Homo sapien
agagtggaacatggccactctggac

SEQ ID NO: 4100176 - DNA, 25 bp, Homo sapien
gttccacacagcaggtacacgctca

SEQ ID NO: 4100177 - DNA, 25 bp, Homo sapien
tactggttccacacagcaggtacac

SEQ ID NO: 4100178 - DNA, 25 bp, Homo sapien
gagagtggaacatggccactctgga

SEQ ID NO: 4100179 - DNA, 25 bp, Homo sapien
acaccggtgtttgggatgggtcagt

SEQ ID NO: 4100180 - DNA, 25 bp, Homo sapien
gtcagcactgatgcctcgttgggag

SEQ ID NO: 4100181 - DNA, 25 bp, Homo sapien
ccacgtcagcactgatgcctcgttg

SEQ ID NO: 4100182 - DNA, 25 bp, Homo sapien
acgtcagcactgatgcctcgttggg

SEQ ID NO: 4100183 - DNA, 25 bp, Homo sapien
tctctcttcccctggtgtgcgcaga

SEQ ID NO: 4100184 - DNA, 25 bp, Homo sapien
ctcttcccctggtgtgcgcagatgg

SEQ ID NO: 4100185 - DNA, 25 bp, Homo sapien
ttcccctggtgtgcgcagatggcat

SEQ ID NO: 4100186 - DNA, 25 bp, Homo sapien
tctcttcccctggtgtgcgcagatg

SEQ ID NO: 4100187 - DNA, 25 bp, Homo sapien
ctttgaaagcctttcttgggaccat

SEQ ID NO: 4100188 - DNA, 25 bp, Homo sapien
tattgtgggctgctttgaaagcctt

SEQ ID NO: 4100189 - DNA, 25 bp, Homo sapien
cacatatattgtgggctgctttgaa

SEQ ID NO: 4100190 - DNA, 25 bp, Homo sapien
ctgatggacttgacacatatattgt

SEQ ID NO: 4100191 - DNA, 25 bp, Homo sapien
ggacgttagtgaacctccagactaa

SEQ ID NO: 4100192 - DNA, 25 bp, Homo sapien
tggcgtatggccaagaggcaaatac

SEQ ID NO: 4100193 - DNA, 25 bp, Homo sapien
taaccaatcttgaaggcctgctgcg

SEQ ID NO: 4100194 - DNA, 25 bp, Homo sapien
tcttgagaggaaatctgacactgtg

SEQ ID NO: 4100195 - DNA, 25 bp, Homo sapien
taatccattaggtcctgtgcatccg

SEQ ID NO: 4100196 - DNA, 25 bp, Homo sapien
gtttaggccaatggagtccgcatta

SEQ ID NO: 4100197 - DNA, 25 bp, Homo sapien
cctctaggcctacatgaaatccagc

SEQ ID NO: 4100198 - DNA, 25 bp, Homo sapien
tgtgcatccgcagtgctcagtctgt

SEQ ID NO: 4100199 - DNA, 25 bp, Homo sapien
gaactggggttgtccattcttgtaa

SEQ ID NO: 4100200 - DNA, 25 bp, Homo sapien
cctgttctagctgaaaattgggaat

SEQ ID NO: 4100201 - DNA, 25 bp, Homo sapien
gagtcctgttctagctgaaaattgg

SEQ ID NO: 4100202 - DNA, 25 bp, Homo sapien
cctgagtcctgttctagctgaaaat

SEQ ID NO: 4100203 - DNA, 25 bp, Homo sapien
tagtggatggaggatttctgtgcaa

SEQ ID NO: 4100204 - DNA, 25 bp, Homo sapien
ggtggtgctggatttaccatcttca

SEQ ID NO: 4100205 - DNA, 25 bp, Homo sapien
catcaaccttgtgtatgtgatgtca

SEQ ID NO: 4100206 - DNA, 25 bp, Homo sapien
cagcaagtgattttacccatcaacc

SEQ ID NO: 4100207 - DNA, 25 bp, Homo sapien
ggttttgtctacagcgttgggcaag

SEQ ID NO: 4100208 - DNA, 25 bp, Homo sapien
ggaggaatacggcaccattcgtcta

SEQ ID NO: 4100209 - DNA, 25 bp, Homo sapien
ctgtgggctgggttagagacatgca

SEQ ID NO: 4100210 - DNA, 25 bp, Homo sapien
caagacctgtcgcattagttggtgg

SEQ ID NO: 4100211 - DNA, 25 bp, Homo sapien
ccttgtggaggcagttcccctgtcc

SEQ ID NO: 4100212 - DNA, 25 bp, Homo sapien
tggttccatcaaatttagggagcat

SEQ ID NO: 4100213 - DNA, 25 bp, Homo sapien
cccttgtggaggcagttcccctgtc

SEQ ID NO: 4100214 - DNA, 25 bp, Homo sapien
cctggttccatcaaatttagggagc

SEQ ID NO: 4100215 - DNA, 25 bp, Homo sapien
gctctactccaaattccttccctca

SEQ ID NO: 4100216 - DNA, 25 bp, Homo sapien
tctgctctactccaaattccttccc

SEQ ID NO: 4100217 - DNA, 25 bp, Homo sapien
ctctactccaaattccttccctcat

SEQ ID NO: 4100218 - DNA, 25 bp, Homo sapien
tgctctactccaaattccttccctc

SEQ ID NO: 4100219 - DNA, 25 bp, Homo sapien
ctgcacggcttgaccttcaactgct

SEQ ID NO: 4100220 - DNA, 25 bp, Homo sapien
tgcacggcttgaccttcaactgctc

SEQ ID NO: 4100221 - DNA, 25 bp, Homo sapien
gcacggcttgaccttcaactgctct

SEQ ID NO: 4100222 - DNA, 25 bp, Homo sapien
acggcttgaccttcaactgctctag

SEQ ID NO: 4100223 - DNA, 25 bp, Homo sapien
ccttctcgtccgtcccggtgtagtg

SEQ ID NO: 4100224 - DNA, 25 bp, Homo sapien
cttctcgtccgtcccggtgtagtgc

SEQ ID NO: 4100225 - DNA, 25 bp, Homo sapien
ccgtcccggtgtagtgcctcccgtg

SEQ ID NO: 4100226 - DNA, 25 bp, Homo sapien
ccggtgtagtgcctcccgtgtccgg

SEQ ID NO: 4100227 - DNA, 25 bp, Homo sapien
tctgtagaggatactccaatttatt

SEQ ID NO: 4100228 - DNA, 25 bp, Homo sapien
tccttctgtagaggatactccaatt

SEQ ID NO: 4100229 - DNA, 25 bp, Homo sapien
ccaatttatttgctgaggattcctc

SEQ ID NO: 4100230 - DNA, 25 bp, Homo sapien
caatttatttgctgaggattcctct

SEQ ID NO: 4100231 - DNA, 25 bp, Homo sapien
ccgtaaatggctatctggaatttga

SEQ ID NO: 4100232 - DNA, 25 bp, Homo sapien
cgtaaatggctatctggaatttgac

SEQ ID NO: 4100233 - DNA, 25 bp, Homo sapien
tctggattagctggtgcagtgagct

SEQ ID NO: 4100234 - DNA, 25 bp, Homo sapien
tcttcttcggaactagcatgctctt

SEQ ID NO: 4100235 - DNA, 25 bp, Homo sapien
tgatggccctgactgagctaatggg

SEQ ID NO: 4100236 - DNA, 25 bp, Homo sapien
gggtataacacaggcaggttcagga

SEQ ID NO: 4100237 - DNA, 25 bp, Homo sapien
cccttctactttcttgtttctcttg

SEQ ID NO: 4100238 - DNA, 25 bp, Homo sapien
tactttcttgtttctcttgaactca

SEQ ID NO: 4100239 - DNA, 25 bp, Homo sapien
tctactttcttgtttctcttgaact

SEQ ID NO: 4100240 - DNA, 25 bp, Homo sapien
ctttcttgtttctcttgaactcagt

SEQ ID NO: 4100241 - DNA, 25 bp, Homo sapien
ttctccaaaagctccggttctgaaa

SEQ ID NO: 4100242 - DNA, 25 bp, Homo sapien
aagctccggttctgaaatagttctc

SEQ ID NO: 4100243 - DNA, 25 bp, Homo sapien
tctctgatatcattactcgcgcttt

SEQ ID NO: 4100244 - DNA, 25 bp, Homo sapien
tgatatcattactcgcgctttgcat

SEQ ID NO: 4100245 - DNA, 25 bp, Homo sapien
tttagattcctgaggtagggtctga

SEQ ID NO: 4100246 - DNA, 25 bp, Homo sapien
tggattccagacatgtgggtgtcag

SEQ ID NO: 4100247 - DNA, 25 bp, Homo sapien
tgagtagtcctagaagggcactttt

SEQ ID NO: 4100248 - DNA, 25 bp, Homo sapien
tcagggtcagacttgtgagtagtcc

SEQ ID NO: 4100249 - DNA, 25 bp, Homo sapien
cccagactatagaattgtggagatg

SEQ ID NO: 4100250 - DNA, 25 bp, Homo sapien
tccccagactatagaattgtggaga

SEQ ID NO: 4100251 - DNA, 25 bp, Homo sapien
cagactatagaattgtggagatggg

SEQ ID NO: 4100252 - DNA, 25 bp, Homo sapien
ttccccagactatagaattgtggag

SEQ ID NO: 4100253 - DNA, 25 bp, Homo sapien
cgttggcaacggggtgtccagggat

SEQ ID NO: 4100254 - DNA, 25 bp, Homo sapien
ggaatgctgggtcgttggcaacggg

SEQ ID NO: 4100255 - DNA, 25 bp, Homo sapien
acggaatgctgggtcgttggcaacg

SEQ ID NO: 4100256 - DNA, 25 bp, Homo sapien
caacggaatgctgggtcgttggcaa

SEQ ID NO: 4100257 - DNA, 25 bp, Homo sapien
ccagaatgcgcaccagccggtagag

SEQ ID NO: 4100258 - DNA, 25 bp, Homo sapien
cgcaccagccggtagagaggagctt

SEQ ID NO: 4100259 - DNA, 25 bp, Homo sapien
caccagccggtagagaggagcttcg

SEQ ID NO: 4100260 - DNA, 25 bp, Homo sapien
agaatgcgcaccagccggtagagag

SEQ ID NO: 4100261 - DNA, 25 bp, Homo sapien
cagacactgcagcacgaaggccctt

SEQ ID NO: 4100262 - DNA, 25 bp, Homo sapien
gacactgcagcacgaaggcccttct

SEQ ID NO: 4100263 - DNA, 25 bp, Homo sapien
gcacgaaggcccttctgccttttgg

SEQ ID NO: 4100264 - DNA, 25 bp, Homo sapien
tgcagcacgaaggcccttctgcctt

SEQ ID NO: 4100265 - DNA, 25 bp, Homo sapien
gaagctttcgcaaagtagatacggg

SEQ ID NO: 4100266 - DNA, 25 bp, Homo sapien
ctaacccaaactcgcagacgcgtgg

SEQ ID NO: 4100267 - DNA, 25 bp, Homo sapien
ggctcgcatgtacccaagacaggaa

SEQ ID NO: 4100268 - DNA, 25 bp, Homo sapien
caggaaaacttcacgttggcctgga

SEQ ID NO: 4100269 - DNA, 25 bp, Homo sapien
tgctgcccgcggctgtcgctgtggc

SEQ ID NO: 4100270 - DNA, 25 bp, Homo sapien
gcgagtgcgcgtgcctgcgcgcccg

SEQ ID NO: 4100271 - DNA, 25 bp, Homo sapien
gcccgggagagaccgcgagagcgcg

SEQ ID NO: 4100272 - DNA, 25 bp, Homo sapien
cccctgagtcctggaaagtgaagcc

SEQ ID NO: 4100273 - DNA, 25 bp, Homo sapien
gggatgtcccctgcggaccgtctag

SEQ ID NO: 4100274 - DNA, 25 bp, Homo sapien
gtctagtcaccgaaagccggaccca

SEQ ID NO: 4100275 - DNA, 25 bp, Homo sapien
cctgcggaccgtctagtcaccgaaa

SEQ ID NO: 4100276 - DNA, 25 bp, Homo sapien
acgggatgtcccctgcggaccgtct

SEQ ID NO: 4100277 - DNA, 25 bp, Homo sapien
tcgcaggctcgagccgaagccctgg

SEQ ID NO: 4100278 - DNA, 25 bp, Homo sapien
gggtgtccgtgcaggtcgcaggctc

SEQ ID NO: 4100279 - DNA, 25 bp, Homo sapien
tgtccgtgcaggtcgcaggctcgag

SEQ ID NO: 4100280 - DNA, 25 bp, Homo sapien
gtgcaggtcgcaggctcgagccgaa

SEQ ID NO: 4100281 - DNA, 25 bp, Homo sapien
gcactagttgacaatttagcagcgg

SEQ ID NO: 4100282 - DNA, 25 bp, Homo sapien
ggaacttcctccactagtgcttgga

SEQ ID NO: 4100283 - DNA, 25 bp, Homo sapien
cactttcacgttgatctccatcgga

SEQ ID NO: 4100284 - DNA, 25 bp, Homo sapien
ggttcttgctgaacactttcacgtt

SEQ ID NO: 4100285 - DNA, 25 bp, Homo sapien
ggtccaatgtgatttctgcaagttc

SEQ ID NO: 4100286 - DNA, 25 bp, Homo sapien
atgcaaatggccaaagggtacatta

SEQ ID NO: 4100287 - DNA, 25 bp, Homo sapien
gcaaatggccaaagggtacattaaa

SEQ ID NO: 4100288 - DNA, 25 bp, Homo sapien
aagagttcaaacaacttgacagcaa

SEQ ID NO: 4100289 - DNA, 25 bp, Homo sapien
gttcaaacaacttgacagcaaatat

SEQ ID NO: 4100290 - DNA, 25 bp, Homo sapien
cagacacatggatcagtgaaacaga

SEQ ID NO: 4100291 - DNA, 25 bp, Homo sapien
gagaactcaggtataaatccacgca

SEQ ID NO: 4100292 - DNA, 25 bp, Homo sapien
gcatttacagccaccttatctttga

SEQ ID NO: 4100293 - DNA, 25 bp, Homo sapien
gacaaaggcatcaataacacgcaat

SEQ ID NO: 4100294 - DNA, 25 bp, Homo sapien
tatatatgtcaacagcaaataacct

SEQ ID NO: 4100295 - DNA, 25 bp, Homo sapien
atatatgtcaacagcaaataacctg

SEQ ID NO: 4100296 - DNA, 25 bp, Homo sapien
atttatatatgtcaacagcaaataa

SEQ ID NO: 4100297 - DNA, 25 bp, Homo sapien
ttatatatgtcaacagcaaataacc

SEQ ID NO: 4100298 - DNA, 25 bp, Homo sapien
ttgcagtgggctggtatggtgccac

SEQ ID NO: 4100299 - DNA, 25 bp, Homo sapien
agtgggctggtatggtgccactgca

SEQ ID NO: 4100300 - DNA, 25 bp, Homo sapien
cactccagtctgggcaacagagcaa

SEQ ID NO: 4100301 - DNA, 25 bp, Homo sapien
ggttgcagtgggctggtatggtgcc

SEQ ID NO: 4100302 - DNA, 25 bp, Homo sapien
ttaaacctcaaactacagcaactgg

SEQ ID NO: 4100303 - DNA, 25 bp, Homo sapien
acatgggaaggagggccaacctgtt

SEQ ID NO: 4100304 - DNA, 25 bp, Homo sapien
gccaagttcacatccctccttaaag

SEQ ID NO: 4100305 - DNA, 25 bp, Homo sapien
tctcttacgtaaagccatccctatt

SEQ ID NO: 4100306 - DNA, 25 bp, Homo sapien
tagaggccatagagacaaatccact

SEQ ID NO: 4100307 - DNA, 25 bp, Homo sapien
tgccaatagtatcaccattctagtc

SEQ ID NO: 4100308 - DNA, 25 bp, Homo sapien
tcaattttaagatccgtagaggcca

SEQ ID NO: 4100309 - DNA, 25 bp, Homo sapien
gagttgaggtttctacacaaaatgc

SEQ ID NO: 4100310 - DNA, 25 bp, Homo sapien
tcttggcagtaatgaaggagctcat

SEQ ID NO: 4100311 - DNA, 25 bp, Homo sapien
gagacagttgtcttcccttaataca

SEQ ID NO: 4100312 - DNA, 25 bp, Homo sapien
tagtcacttagtacacgcatttcca

SEQ ID NO: 4100313 - DNA, 25 bp, Homo sapien
cctatattggttgtacctcaggtga

SEQ ID NO: 4100314 - DNA, 25 bp, Homo sapien
gaaaaatggtcgatactcaggcaga

SEQ ID NO: 4100315 - DNA, 25 bp, Homo sapien
tgctgcctctacacaaatacggatt

SEQ ID NO: 4100316 - DNA, 25 bp, Homo sapien
tactaggcctcatcttccaaatagg

SEQ ID NO: 4100317 - DNA, 25 bp, Homo sapien
cggattgagatatacccttaaaggc

SEQ ID NO: 4100318 - DNA, 25 bp, Homo sapien
gatcatggataagaactcccaattt

SEQ ID NO: 4100319 - DNA, 25 bp, Homo sapien
caactcttctccaatgtacctcatg

SEQ ID NO: 4100320 - DNA, 25 bp, Homo sapien
tctccaatgtacctcatgatcatgg

SEQ ID NO: 4100321 - DNA, 25 bp, Homo sapien
tgtacctcatgatcatggataagaa

SEQ ID NO: 4100322 - DNA, 25 bp, Homo sapien
tcagcacttgcagctgaatctgtca

SEQ ID NO: 4100323 - DNA, 25 bp, Homo sapien
agcacttgcagctgaatctgtcacc

SEQ ID NO: 4100324 - DNA, 25 bp, Homo sapien
accttcttccagttcaccacttgca

SEQ ID NO: 4100325 - DNA, 25 bp, Homo sapien
tcaggcaaagatttcccttcagcac

SEQ ID NO: 4100326 - DNA, 25 bp, Homo sapien
taacctgtgacaaactcttaccgct

SEQ ID NO: 4100327 - DNA, 25 bp, Homo sapien
taccgcttaacaacatgataacatg

SEQ ID NO: 4100328 - DNA, 25 bp, Homo sapien
catggagactattcttaacctgtga

SEQ ID NO: 4100329 - DNA, 25 bp, Homo sapien
aacatgtatccaaccctaattcaag

SEQ ID NO: 4100330 - DNA, 25 bp, Homo sapien
actgacatgctaccagcaataactt

SEQ ID NO: 4100331 - DNA, 25 bp, Homo sapien
gctagacacatgtaaactgacatgc

SEQ ID NO: 4100332 - DNA, 25 bp, Homo sapien
tgggagctagacacatgtaaactga

SEQ ID NO: 4100333 - DNA, 25 bp, Homo sapien
aactgacatgctaccagcaataact

SEQ ID NO: 4100334 - DNA, 25 bp, Homo sapien
tagcggcagcagagtgatcaagaga

SEQ ID NO: 4100335 - DNA, 25 bp, Homo sapien
actctcaaaggccattgtaatggga

SEQ ID NO: 4100336 - DNA, 25 bp, Homo sapien
agtgcagagaccctaagatggaagc

SEQ ID NO: 4100337 - DNA, 25 bp, Homo sapien
tgggaacacaaggagtaatatgatc

SEQ ID NO: 4100338 - DNA, 25 bp, Homo sapien
gcctggccgataactattttcaagc

SEQ ID NO: 4100339 - DNA, 25 bp, Homo sapien
tatggcatgttataagaaatttggg

SEQ ID NO: 4100340 - DNA, 25 bp, Homo sapien
aagcaattatggcatgttataagaa

SEQ ID NO: 4100341 - DNA, 25 bp, Homo sapien
gcaattatggcatgttataagaaat

SEQ ID NO: 4100342 - DNA, 25 bp, Homo sapien
ggtaaaagaacgatcctaaggcatc

SEQ ID NO: 4100343 - DNA, 25 bp, Homo sapien
tatggagtggcaactaaaactcccg

SEQ ID NO: 4100344 - DNA, 25 bp, Homo sapien
cagttaatctaaccaacgcttgaga

SEQ ID NO: 4100345 - DNA, 25 bp, Homo sapien
cattaggtggaacaaactctgctgc

SEQ ID NO: 4100346 - DNA, 25 bp, Homo sapien
ggtgtgctcaataacatggtctcat

SEQ ID NO: 4100347 - DNA, 25 bp, Homo sapien
caataacatggtctcatcttgcata

SEQ ID NO: 4100348 - DNA, 25 bp, Homo sapien
cttcggtgtgctcaataacatggtc

SEQ ID NO: 4100349 - DNA, 25 bp, Homo sapien
tcatcttgcatatttagttgccatt

SEQ ID NO: 4100350 - DNA, 25 bp, Homo sapien
gctggcaaaattccagaagagcttt

SEQ ID NO: 4100351 - DNA, 25 bp, Homo sapien
acaccaaggcggaggactgcatgaa

SEQ ID NO: 4100352 - DNA, 25 bp, Homo sapien
ccaggagttggctgcaatgggctat

SEQ ID NO: 4100353 - DNA, 25 bp, Homo sapien
gcttaaacattgtaccctgaaacca

SEQ ID NO: 4100354 - DNA, 25 bp, Homo sapien
tctcgacagcaaaacataggtaatg

SEQ ID NO: 4100355 - DNA, 25 bp, Homo sapien
tattagtcaccacggataccctgta

SEQ ID NO: 4100356 - DNA, 25 bp, Homo sapien
gagtcaaactcacggtccagctata

SEQ ID NO: 4100357 - DNA, 25 bp, Homo sapien
gatcatgtacccgactcatagtaag

SEQ ID NO: 4100358 - DNA, 25 bp, Homo sapien
gcactctacccatgaagagctctaa

SEQ ID NO: 4100359 - DNA, 25 bp, Homo sapien
gtcccattggaaggtgagaactgat

SEQ ID NO: 4100360 - DNA, 25 bp, Homo sapien
ggcagactgtgatccttcccagcta

SEQ ID NO: 4100361 - DNA, 25 bp, Homo sapien
ggtgcccagagtagttgagattctc

SEQ ID NO: 4100362 - DNA, 25 bp, Homo sapien
cagttggttgtaaacaccacactgc

SEQ ID NO: 4100363 - DNA, 25 bp, Homo sapien
aaacaccacactgcacttgaaccag

SEQ ID NO: 4100364 - DNA, 25 bp, Homo sapien
gctgtgatcagttggttgtaaacac

SEQ ID NO: 4100365 - DNA, 25 bp, Homo sapien
gtaaacaccacactgcacttgaacc

SEQ ID NO: 4100366 - DNA, 25 bp, Homo sapien
tttccagttaaagtggcaccagtgt

SEQ ID NO: 4100367 - DNA, 25 bp, Homo sapien
taaagtggcaccagtgtgatcctga

SEQ ID NO: 4100368 - DNA, 25 bp, Homo sapien
ggcaccagtgtgatcctgatccatg

SEQ ID NO: 4100369 - DNA, 25 bp, Homo sapien
gatcctgatccatgtcaacacttct

SEQ ID NO: 4100370 - DNA, 25 bp, Homo sapien
ttcaaatcaaaacgacaataaagta

SEQ ID NO: 4100371 - DNA, 25 bp, Homo sapien
ctagctattcgagtggctgagaaac

SEQ ID NO: 4100372 - DNA, 25 bp, Homo sapien
taatcctcctagctattcgagtggc

SEQ ID NO: 4100373 - DNA, 25 bp, Homo sapien
atcctcctagctattcgagtggctg

SEQ ID NO: 4100374 - DNA, 25 bp, Homo sapien
agtatccttaatgatcactaatgca

SEQ ID NO: 4100375 - DNA, 25 bp, Homo sapien
ccaattcattccgtgaggccattat

SEQ ID NO: 4100376 - DNA, 25 bp, Homo sapien
ccttaatgatcactaatgcaaaaat

SEQ ID NO: 4100377 - DNA, 25 bp, Homo sapien
aatgcaaactacaggccagtatcct

SEQ ID NO: 4100378 - DNA, 25 bp, Homo sapien
gggagggatagcacagtaatttgtt

SEQ ID NO: 4100379 - DNA, 25 bp, Homo sapien
acatcaggtgagtggtaacagtacc

SEQ ID NO: 4100380 - DNA, 25 bp, Homo sapien
ggacagtcttgaactgccaatgcca

SEQ ID NO: 4100381 - DNA, 25 bp, Homo sapien
gcatcttcatgagaattaaacatca

SEQ ID NO: 4100382 - DNA, 25 bp, Homo sapien
aatgtaatgtcactggtagacacca

SEQ ID NO: 4100383 - DNA, 25 bp, Homo sapien
taatgtaatgtcactggtagacacc

SEQ ID NO: 4100384 - DNA, 25 bp, Homo sapien
atgtaatgtcactggtagacaccat

SEQ ID NO: 4100385 - DNA, 25 bp, Homo sapien
tttaatgtaatgtcactggtagaca

SEQ ID NO: 4100386 - DNA, 25 bp, Homo sapien
cttggaccctttgcagcgtcaccag

SEQ ID NO: 4100387 - DNA, 25 bp, Homo sapien
gcttagcagggtaaacacatcattt

SEQ ID NO: 4100388 - DNA, 25 bp, Homo sapien
ccagcttcaagaatggtccacaaac

SEQ ID NO: 4100389 - DNA, 25 bp, Homo sapien
gctgctacctcatagttaccaatct

SEQ ID NO: 4100390 - DNA, 25 bp, Homo sapien
caactatgataagcttgtcctttgc

SEQ ID NO: 4100391 - DNA, 25 bp, Homo sapien
tgtcctttgctattcaaagagctgg

SEQ ID NO: 4100392 - DNA, 25 bp, Homo sapien
aaagagctggtccttaactgggcac

SEQ ID NO: 4100393 - DNA, 25 bp, Homo sapien
acttgaacggaagagttggagacca

SEQ ID NO: 4100394 - DNA, 25 bp, Homo sapien
taccaagtaggtagtagcggcagcc

SEQ ID NO: 4100395 - DNA, 25 bp, Homo sapien
caatctctacactggaaggtggtgc

SEQ ID NO: 4100396 - DNA, 25 bp, Homo sapien
tcagagtcgaccctaaaccagtatg

SEQ ID NO: 4100397 - DNA, 25 bp, Homo sapien
tggcattcgagataagagactaccc

SEQ ID NO: 4100398 - DNA, 25 bp, Homo sapien
aaaaacagtatgttagactgggagg

SEQ ID NO: 4100399 - DNA, 25 bp, Homo sapien
tgaactcagcttagatacaaattat

SEQ ID NO: 4100400 - DNA, 25 bp, Homo sapien
gatatagactatgaagctttacaga

SEQ ID NO: 4100401 - DNA, 25 bp, Homo sapien
cacagagatagttaccatcttaaga

SEQ ID NO: 4100402 - DNA, 25 bp, Homo sapien
gttttactgaaccacgtatgttgtg

SEQ ID NO: 4100403 - DNA, 25 bp, Homo sapien
caagacttttgtattccctagaaga

SEQ ID NO: 4100404 - DNA, 25 bp, Homo sapien
taagtactaccatgactaaccagta

SEQ ID NO: 4100405 - DNA, 25 bp, Homo sapien
agctgtccaacctaccttcataagg

SEQ ID NO: 4100406 - DNA, 25 bp, Homo sapien
ccaaaaatccaattgagaattgaat

SEQ ID NO: 4100407 - DNA, 25 bp, Homo sapien
tccaaaaatccaattgagaattgaa

SEQ ID NO: 4100408 - DNA, 25 bp, Homo sapien
caccttctggtactgcagctaataa

SEQ ID NO: 4100409 - DNA, 25 bp, Homo sapien
gaaatggtctacaggtagctggtaa

SEQ ID NO: 4100410 - DNA, 25 bp, Homo sapien
tcataattcataaggaatacggtcc

SEQ ID NO: 4100411 - DNA, 25 bp, Homo sapien
tctgggataggcaagagtttagcta

SEQ ID NO: 4100412 - DNA, 25 bp, Homo sapien
gattttcatattagatcacaaaaaa

SEQ ID NO: 4100413 - DNA, 25 bp, Homo sapien
cactgctctgtttatggtaataaga

SEQ ID NO: 4100414 - DNA, 25 bp, Homo sapien
cataagtatacttattgtatactgc

SEQ ID NO: 4100415 - DNA, 25 bp, Homo sapien
tatatatcatgaccactgctctgtt

SEQ ID NO: 4100416 - DNA, 25 bp, Homo sapien
ggcataatggcacagcacttgtagt

SEQ ID NO: 4100417 - DNA, 25 bp, Homo sapien
gcataatggcacagcacttgtagtc

SEQ ID NO: 4100418 - DNA, 25 bp, Homo sapien
caggcataatggcacagcacttgta

SEQ ID NO: 4100419 - DNA, 25 bp, Homo sapien
ccaggcataatggcacagcacttgt

SEQ ID NO: 4100420 - DNA, 25 bp, Homo sapien
ctgtaaaacgaaacgtatagctgta

SEQ ID NO: 4100421 - DNA, 25 bp, Homo sapien
tgtaaaacgaaacgtatagctgtat

SEQ ID NO: 4100422 - DNA, 25 bp, Homo sapien
tcaagatgcattaatatagacactg

SEQ ID NO: 4100423 - DNA, 25 bp, Homo sapien
tgaactacgccaatgaaagccaggg

SEQ ID NO: 4100424 - DNA, 25 bp, Homo sapien
cagaattgaccagcactaataaaat

SEQ ID NO: 4100425 - DNA, 25 bp, Homo sapien
cccgaaaatgccttatatgtctgtg

SEQ ID NO: 4100426 - DNA, 25 bp, Homo sapien
gaaatcttaagtaatcttttctcat

SEQ ID NO: 4100427 - DNA, 25 bp, Homo sapien
ttggtgatagcaacaccaggaagaa

SEQ ID NO: 4100428 - DNA, 25 bp, Homo sapien
agaaatcttaagtaatcttttctca

SEQ ID NO: 4100429 - DNA, 25 bp, Homo sapien
ggtgatagcaacaccaggaagaaat

SEQ ID NO: 4100430 - DNA, 25 bp, Homo sapien
tattatagtgctcaaagtgtcccta

SEQ ID NO: 4100431 - DNA, 25 bp, Homo sapien
cctggcacttaaacccaagatctgg

SEQ ID NO: 4100432 - DNA, 25 bp, Homo sapien
caagatctggtactgggtgtattga

SEQ ID NO: 4100433 - DNA, 25 bp, Homo sapien
tattgactggagctatgatgtcact

SEQ ID NO: 4100434 - DNA, 25 bp, Homo sapien
taaggaatctaaaactctcccactg

SEQ ID NO: 4100435 - DNA, 25 bp, Homo sapien
taagcagaatttctaaggaatctaa

SEQ ID NO: 4100436 - DNA, 25 bp, Homo sapien
tctcccactggtgttggtgcctcat

SEQ ID NO: 4100437 - DNA, 25 bp, Homo sapien
ttatataagcagaatttctaaggaa

SEQ ID NO: 4100438 - DNA, 25 bp, Homo sapien
caaacctttagcttgtggtcttgaa

SEQ ID NO: 4100439 - DNA, 25 bp, Homo sapien
tcaaacctttagcttgtggtcttga

SEQ ID NO: 4100440 - DNA, 25 bp, Homo sapien
gagtttttcatgtcagaccactagt

SEQ ID NO: 4100441 - DNA, 25 bp, Homo sapien
tagcagttaaagacccaatataggg

SEQ ID NO: 4100442 - DNA, 25 bp, Homo sapien
gaccactagttatgctaccaaaaga

SEQ ID NO: 4100443 - DNA, 25 bp, Homo sapien
gcacagcaacaataacagcagaagt

SEQ ID NO: 4100444 - DNA, 25 bp, Homo sapien
gaagctttcaagagtcggaggctag

SEQ ID NO: 4100445 - DNA, 25 bp, Homo sapien
cctttagggacgcaactcggagaga

SEQ ID NO: 4100446 - DNA, 25 bp, Homo sapien
cacatgagccttcggttgcccaata

SEQ ID NO: 4100447 - DNA, 25 bp, Homo sapien
tacattaatgactgaggcgcaaggt

SEQ ID NO: 4100448 - DNA, 25 bp, Homo sapien
caactgatggactgcttgcagacct

SEQ ID NO: 4100449 - DNA, 25 bp, Homo sapien
gcaaaatctgtacccagtagactag

SEQ ID NO: 4100450 - DNA, 25 bp, Homo sapien
gaaagtcatgccttaacaggtgaga

SEQ ID NO: 4100451 - DNA, 25 bp, Homo sapien
gatattaacgattcaactaagggca

SEQ ID NO: 4100452 - DNA, 25 bp, Homo sapien
tagtgacctccttaagtagcccctg

SEQ ID NO: 4100453 - DNA, 25 bp, Homo sapien
ggttttgcaggccatacccagagaa

SEQ ID NO: 4100454 - DNA, 25 bp, Homo sapien
agagaaaccctagcaacagcctgca

SEQ ID NO: 4100455 - DNA, 25 bp, Homo sapien
catgcagcaggagcatttatgcaga

SEQ ID NO: 4100456 - DNA, 25 bp, Homo sapien
acaagaaatctgcatagagctgcct

SEQ ID NO: 4100457 - DNA, 25 bp, Homo sapien
gcaggcaagctgtgccagtagttgc

SEQ ID NO: 4100458 - DNA, 25 bp, Homo sapien
tagttgcagagagatgtccaatctc

SEQ ID NO: 4100459 - DNA, 25 bp, Homo sapien
agaaatctgcatagagctgcctcct

SEQ ID NO: 4100460 - DNA, 25 bp, Homo sapien
gctgaacttttctggatgactatgg

SEQ ID NO: 4100461 - DNA, 25 bp, Homo sapien
ggaatactttggaacatcgtgtcac

SEQ ID NO: 4100462 - DNA, 25 bp, Homo sapien
cgcataccatgtcaggaagatttca

SEQ ID NO: 4100463 - DNA, 25 bp, Homo sapien
tcaccatgaacctgaagctagtcct

SEQ ID NO: 4100464 - DNA, 25 bp, Homo sapien
tatatctagcactcccttcaagaca

SEQ ID NO: 4100465 - DNA, 25 bp, Homo sapien
tttatccaagctgtcattctgtgcc

SEQ ID NO: 4100466 - DNA, 25 bp, Homo sapien
gaggatacagttcgatcttgcttct

SEQ ID NO: 4100467 - DNA, 25 bp, Homo sapien
tgttagctggttatcacacagactt

SEQ ID NO: 4100468 - DNA, 25 bp, Homo sapien
gaatagtaccagcttttccttacac

SEQ ID NO: 4100469 - DNA, 25 bp, Homo sapien
tcctgggatttttgtgattggcagg

SEQ ID NO: 4100470 - DNA, 25 bp, Homo sapien
ccttacacattcagtagtttggctg

SEQ ID NO: 4100471 - DNA, 25 bp, Homo sapien
cagcttttccttacacattcagtag

SEQ ID NO: 4100472 - DNA, 25 bp, Homo sapien
atgagcacacacatgcgtctttgtg

SEQ ID NO: 4100473 - DNA, 25 bp, Homo sapien
tgagcacacacatgcgtctttgtgg

SEQ ID NO: 4100474 - DNA, 25 bp, Homo sapien
gatgagcacacacatgcgtctttgt

SEQ ID NO: 4100475 - DNA, 25 bp, Homo sapien
tgatgagcacacacatgcgtctttg

SEQ ID NO: 4100476 - DNA, 25 bp, Homo sapien
attgaggtgtcctttgatagccttc

SEQ ID NO: 4100477 - DNA, 25 bp, Homo sapien
ttgaggtgtcctttgatagccttca

SEQ ID NO: 4100478 - DNA, 25 bp, Homo sapien
tgaggtgtcctttgatagccttcat

SEQ ID NO: 4100479 - DNA, 25 bp, Homo sapien
cattgaggtgtcctttgatagcctt

SEQ ID NO: 4100480 - DNA, 25 bp, Homo sapien
attaagattccaaaactaggtattg

SEQ ID NO: 4100481 - DNA, 25 bp, Homo sapien
cttatttgtggttggctttgagtat

SEQ ID NO: 4100482 - DNA, 25 bp, Homo sapien
ggtggtgattatgtgtgccctcata

SEQ ID NO: 4100483 - DNA, 25 bp, Homo sapien
tttaatatctctcagctgtagtcat

SEQ ID NO: 4100484 - DNA, 25 bp, Homo sapien
tcagaatttcaacgtaaaggtcacc

SEQ ID NO: 4100485 - DNA, 25 bp, Homo sapien
cctcagagaggtgtctttctaacat

SEQ ID NO: 4100486 - DNA, 25 bp, Homo sapien
tactctgagtttgtctaacggacca

SEQ ID NO: 4100487 - DNA, 25 bp, Homo sapien
tggttagtcactaccacaagagtat

SEQ ID NO: 4100488 - DNA, 25 bp, Homo sapien
cttcttctgagacacttcataaact

SEQ ID NO: 4100489 - DNA, 25 bp, Homo sapien
taaactaatgccatatgatcaaatg

SEQ ID NO: 4100490 - DNA, 25 bp, Homo sapien
tgccatatgatcaaatgacattttt

SEQ ID NO: 4100491 - DNA, 25 bp, Homo sapien
gagacacttcataaactaatgccat

SEQ ID NO: 4100492 - DNA, 25 bp, Homo sapien
cgggatgctatatgacactattgaa

SEQ ID NO: 4100493 - DNA, 25 bp, Homo sapien
gagcaagccctggagtctagccaat

SEQ ID NO: 4100494 - DNA, 25 bp, Homo sapien
gctgtggcatggtgatctaaaatag

SEQ ID NO: 4100495 - DNA, 25 bp, Homo sapien
catccttgaaaccatgcgggatgct

SEQ ID NO: 4100496 - DNA, 25 bp, Homo sapien
tttcatcagcatcagctgtgagata

SEQ ID NO: 4100497 - DNA, 25 bp, Homo sapien
agcagtttcatcagcatcagctgtg

SEQ ID NO: 4100498 - DNA, 25 bp, Homo sapien
agtttcatcagcatcagctgtgaga

SEQ ID NO: 4100499 - DNA, 25 bp, Homo sapien
catcagcatcagctgtgagatacac

SEQ ID NO: 4100500 - DNA, 25 bp, Homo sapien
ccctcaagaagctgatcaaaacaga

SEQ ID NO: 4100501 - DNA, 25 bp, Homo sapien
ccatgatgtaggactttgaggactc

SEQ ID NO: 4100502 - DNA, 25 bp, Homo sapien
tacagatgtaatgtgctcaagtgca

SEQ ID NO: 4100503 - DNA, 25 bp, Homo sapien
tggctctgctaaagatcatatctga

SEQ ID NO: 4100504 - DNA, 25 bp, Homo sapien
cttaggcagccatctcagttaccag

SEQ ID NO: 4100505 - DNA, 25 bp, Homo sapien
gaacatatccccacgtataaagggc

SEQ ID NO: 4100506 - DNA, 25 bp, Homo sapien
tgcccagtgcatctacattgtgtac

SEQ ID NO: 4100507 - DNA, 25 bp, Homo sapien
gagaaatgtgtttcaaccgacagca

SEQ ID NO: 4100508 - DNA, 25 bp, Homo sapien
ggacttactcaaggatacatactga

SEQ ID NO: 4100509 - DNA, 25 bp, Homo sapien
tgggttagaccccagcaattcctac

SEQ ID NO: 4100510 - DNA, 25 bp, Homo sapien
ttataaggaaaggattgacacttgg

SEQ ID NO: 4100511 - DNA, 25 bp, Homo sapien
taatgtcatcagaactgggttagac

SEQ ID NO: 4100512 - DNA, 25 bp, Homo sapien
gattaggtctcatgactcgtcaccc

SEQ ID NO: 4100513 - DNA, 25 bp, Homo sapien
cagctgtgtcaagtctaccaatgaa

SEQ ID NO: 4100514 - DNA, 25 bp, Homo sapien
tagtgtgggacattaatttgcagga

SEQ ID NO: 4100515 - DNA, 25 bp, Homo sapien
ggaactgcagaaaatagggctaaga

SEQ ID NO: 4100516 - DNA, 25 bp, Homo sapien
tagcgcaggtactataacacacacc

SEQ ID NO: 4100517 - DNA, 25 bp, Homo sapien
aatacgcatgaagggaaagtctcag

SEQ ID NO: 4100518 - DNA, 25 bp, Homo sapien
tttgcagtgcacaggaagaatacgc

SEQ ID NO: 4100519 - DNA, 25 bp, Homo sapien
caattctagggttaagacatggagg

SEQ ID NO: 4100520 - DNA, 25 bp, Homo sapien
cacaaaatgggctaataatggacag

SEQ ID NO: 4100521 - DNA, 25 bp, Homo sapien
gaaatacaatgcgttttcgctgaaa

SEQ ID NO: 4100522 - DNA, 25 bp, Homo sapien
tatacatctggattgaggaatggag

SEQ ID NO: 4100523 - DNA, 25 bp, Homo sapien
gatgtgggttccaaagcacttgagg

SEQ ID NO: 4100524 - DNA, 25 bp, Homo sapien
tttggctggcatgatctgaccactt

SEQ ID NO: 4100525 - DNA, 25 bp, Homo sapien
gactgaaacatttaggctgatctta

SEQ ID NO: 4100526 - DNA, 25 bp, Homo sapien
gaaagatttctgttcacgcgtatga

SEQ ID NO: 4100527 - DNA, 25 bp, Homo sapien
gatagccgggtacaatggcccatgc

SEQ ID NO: 4100528 - DNA, 25 bp, Homo sapien
gatgcttcagaatacccaagtgaca

SEQ ID NO: 4100529 - DNA, 25 bp, Homo sapien
tgcaagtcggtgtaaaaaccccagc

SEQ ID NO: 4100530 - DNA, 25 bp, Homo sapien
gatagatgctcacttcacaggtaca

SEQ ID NO: 4100531 - DNA, 25 bp, Homo sapien
tgccaaccttgcagggtggatatta

SEQ ID NO: 4100532 - DNA, 25 bp, Homo sapien
cagttcttgccttgtactctatggc

SEQ ID NO: 4100533 - DNA, 25 bp, Homo sapien
cacataggtacatctgacagttccc

SEQ ID NO: 4100534 - DNA, 25 bp, Homo sapien
ccaatttcacataggtacatctgac

SEQ ID NO: 4100535 - DNA, 25 bp, Homo sapien
gttgacgctgctttggattccccac

SEQ ID NO: 4100536 - DNA, 25 bp, Homo sapien
gaatcacaccatatagacctgtctg

SEQ ID NO: 4100537 - DNA, 25 bp, Homo sapien
gaagatatggttagattcctacctg

SEQ ID NO: 4100538 - DNA, 25 bp, Homo sapien
cagaagatcaactgtggcatcaaat

SEQ ID NO: 4100539 - DNA, 25 bp, Homo sapien
tacctggtaggtcaaacattctggc

SEQ ID NO: 4100540 - DNA, 25 bp, Homo sapien
cactgtagatattgtacttcaatga

SEQ ID NO: 4100541 - DNA, 25 bp, Homo sapien
aaaagtgtcggaacataactgtcca

SEQ ID NO: 4100542 - DNA, 25 bp, Homo sapien
cccacttcaaacagagggggctcac

SEQ ID NO: 4100543 - DNA, 25 bp, Homo sapien
agtgtcggaacataactgtccaggg

SEQ ID NO: 4100544 - DNA, 25 bp, Homo sapien
gcttcaggagtttttaaggcccaga

SEQ ID NO: 4100545 - DNA, 25 bp, Homo sapien
ggcccagactgctttagcactatca

SEQ ID NO: 4100546 - DNA, 25 bp, Homo sapien
ctacttcaagtagcttccttcagtg

SEQ ID NO: 4100547 - DNA, 25 bp, Homo sapien
gacagcatttgttctggaagacaac

SEQ ID NO: 4100548 - DNA, 25 bp, Homo sapien
ccatggaaacagtaagagtttctct

SEQ ID NO: 4100549 - DNA, 25 bp, Homo sapien
tccttgacctctgcacttataccat

SEQ ID NO: 4100550 - DNA, 25 bp, Homo sapien
gacctctgcacttataccatggaaa

SEQ ID NO: 4100551 - DNA, 25 bp, Homo sapien
tctgcacttataccatggaaacagt

SEQ ID NO: 4100552 - DNA, 25 bp, Homo sapien
tacgcctatggaacaagagtccaag

SEQ ID NO: 4100553 - DNA, 25 bp, Homo sapien
ttatgataaccaattgagcaattcc

SEQ ID NO: 4100554 - DNA, 25 bp, Homo sapien
gaatgactagtctgatccctttgct

SEQ ID NO: 4100555 - DNA, 25 bp, Homo sapien
atttcaaagttagaaggacctctgg

SEQ ID NO: 4100556 - DNA, 25 bp, Homo sapien
ccaatatagttgacctccattcata

SEQ ID NO: 4100557 - DNA, 25 bp, Homo sapien
gaacacccctccttcatagacagat

SEQ ID NO: 4100558 - DNA, 25 bp, Homo sapien
tagtctggtgaaaaggtaatgtcaa

SEQ ID NO: 4100559 - DNA, 25 bp, Homo sapien
tcctgggggtcccaatatagttgac

SEQ ID NO: 4100560 - DNA, 25 bp, Homo sapien
cattcagaactaggataagcccaca

SEQ ID NO: 4100561 - DNA, 25 bp, Homo sapien
caacagatactccaggtgacataag

SEQ ID NO: 4100562 - DNA, 25 bp, Homo sapien
gcatcctttactgtagaggctgaga

SEQ ID NO: 4100563 - DNA, 25 bp, Homo sapien
caatagcctggtctgagttttcctc

SEQ ID NO: 4100564 - DNA, 25 bp, Homo sapien
tcattcacattccacggcttccaaa

SEQ ID NO: 4100565 - DNA, 25 bp, Homo sapien
agatcacaccttggctgttaatatt

SEQ ID NO: 4100566 - DNA, 25 bp, Homo sapien
gtcctttaagatgtccagacagatc

SEQ ID NO: 4100567 - DNA, 25 bp, Homo sapien
attacagtgatagattcttgttcgg

SEQ ID NO: 4100568 - DNA, 25 bp, Homo sapien
gatagattcttgttcggaaggtaac

SEQ ID NO: 4100569 - DNA, 25 bp, Homo sapien
gaaatctggtatctaggtagccaac

SEQ ID NO: 4100570 - DNA, 25 bp, Homo sapien
gacagaagttgacagaagacaagcc

SEQ ID NO: 4100571 - DNA, 25 bp, Homo sapien
gcatctgagtaagcctatgggaaac

SEQ ID NO: 4100572 - DNA, 25 bp, Homo sapien
gaagttagctatatgttgtgccacg

SEQ ID NO: 4100573 - DNA, 25 bp, Homo sapien
tacgatcacatcactggcaaacaga

SEQ ID NO: 4100574 - DNA, 25 bp, Homo sapien
gcttggctgttgctgatatacagca

SEQ ID NO: 4100575 - DNA, 25 bp, Homo sapien
ctaggtatacgatcacatcactggc

SEQ ID NO: 4100576 - DNA, 25 bp, Homo sapien
ttgcagctattgtaagaggaaatga

SEQ ID NO: 4100577 - DNA, 25 bp, Homo sapien
ggaaatttgtgagagaccaggcaca

SEQ ID NO: 4100578 - DNA, 25 bp, Homo sapien
ggacacagtcactactgatactgcc

SEQ ID NO: 4100579 - DNA, 25 bp, Homo sapien
tgggacacagtcactactgatactg

SEQ ID NO: 4100580 - DNA, 25 bp, Homo sapien
ttgggacacagtcactactgatact

SEQ ID NO: 4100581 - DNA, 25 bp, Homo sapien
caactggctaatgcttgacacaaga

SEQ ID NO: 4100582 - DNA, 25 bp, Homo sapien
agaccactaaatccctatcagcaat

SEQ ID NO: 4100583 - DNA, 25 bp, Homo sapien
cagcaataagggtgtgttgcttttt

SEQ ID NO: 4100584 - DNA, 25 bp, Homo sapien
tcctgtgttcatcaaagtagcactt

SEQ ID NO: 4100585 - DNA, 25 bp, Homo sapien
gacccctactaagagagtcagcctg

SEQ ID NO: 4100586 - DNA, 25 bp, Homo sapien
ccagctacattagacccctactaag

SEQ ID NO: 4100587 - DNA, 25 bp, Homo sapien
tccagctataaatgtcctagattgg

SEQ ID NO: 4100588 - DNA, 25 bp, Homo sapien
tattcagtacgtcatattaaaaaag

SEQ ID NO: 4100589 - DNA, 25 bp, Homo sapien
caaacaaaaaaccacgtgatcatct

SEQ ID NO: 4100590 - DNA, 25 bp, Homo sapien
gaacaagactaaaagggatcgatgg

SEQ ID NO: 4100591 - DNA, 25 bp, Homo sapien
tgtgattcattgcataaacaacgca

SEQ ID NO: 4100592 - DNA, 25 bp, Homo sapien
tagactttaactttgggatgcaagg

SEQ ID NO: 4100593 - DNA, 25 bp, Homo sapien
aggaaaaaggctcagacaactccca

SEQ ID NO: 4100594 - DNA, 25 bp, Homo sapien
gatggagctacactgggtaccctgg

SEQ ID NO: 4100595 - DNA, 25 bp, Homo sapien
tgcctctttaatggatggagctaca

SEQ ID NO: 4100596 - DNA, 25 bp, Homo sapien
ttttgagatctgtggtatgtgcacc

SEQ ID NO: 4100597 - DNA, 25 bp, Homo sapien
gcccagggggtcgtgattacagtga

SEQ ID NO: 4100598 - DNA, 25 bp, Homo sapien
aagagcgagaccgtctttccagaaa

SEQ ID NO: 4100599 - DNA, 25 bp, Homo sapien
cgaaagagcgagaccgtctttccag

SEQ ID NO: 4100600 - DNA, 25 bp, Homo sapien
gagcgagaccgtctttccagaaaaa

SEQ ID NO: 4100601 - DNA, 25 bp, Homo sapien
aagcagagttgggagtcagtaaata

SEQ ID NO: 4100602 - DNA, 25 bp, Homo sapien
cagagttgggagtcagtaaatacca

SEQ ID NO: 4100603 - DNA, 25 bp, Homo sapien
agcagagttgggagtcagtaaatac

SEQ ID NO: 4100604 - DNA, 25 bp, Homo sapien
gcagagttgggagtcagtaaatacc

SEQ ID NO: 4100605 - DNA, 25 bp, Homo sapien
tctgttggtcatgtactgtgtggcg

SEQ ID NO: 4100606 - DNA, 25 bp, Homo sapien
cactgtctggccatccggtcatgct

SEQ ID NO: 4100607 - DNA, 25 bp, Homo sapien
tggccatccggtcatgctctgctct

SEQ ID NO: 4100608 - DNA, 25 bp, Homo sapien
tgtgtggcgatgctgcccaccagag

SEQ ID NO: 4100609 - DNA, 25 bp, Homo sapien
aaagttcccatctatgatgaggtgg

SEQ ID NO: 4100610 - DNA, 25 bp, Homo sapien
gaaggctagtgataaacagagtctc

SEQ ID NO: 4100611 - DNA, 25 bp, Homo sapien
cagggctaccgatgcacttggtgaa

SEQ ID NO: 4100612 - DNA, 25 bp, Homo sapien
acttgttcccagtagcatgcaccca

SEQ ID NO: 4100613 - DNA, 25 bp, Homo sapien
caagtgtacatcaactgatccacag

SEQ ID NO: 4100614 - DNA, 25 bp, Homo sapien
actgatccacagtcaaaagtggcag

SEQ ID NO: 4100615 - DNA, 25 bp, Homo sapien
gatccacagtcaaaagtggcaggtc

SEQ ID NO: 4100616 - DNA, 25 bp, Homo sapien
atacaagtgtacatcaactgatcca

SEQ ID NO: 4100617 - DNA, 25 bp, Homo sapien
ggacacaaagcaaatgtcgggttac

SEQ ID NO: 4100618 - DNA, 25 bp, Homo sapien
cacgtagggctacagcggtcaccag

SEQ ID NO: 4100619 - DNA, 25 bp, Homo sapien
caaagcaaatgtcgggttaccagaa

SEQ ID NO: 4100620 - DNA, 25 bp, Homo sapien
acgtagggctacagcggtcaccagg

SEQ ID NO: 4100621 - DNA, 25 bp, Homo sapien
ataaaatcatcaggctactgacagc

SEQ ID NO: 4100622 - DNA, 25 bp, Homo sapien
tgtaattgaattagacaagcctcac

SEQ ID NO: 4100623 - DNA, 25 bp, Homo sapien
acatgctaagcaactcaactccaaa

SEQ ID NO: 4100624 - DNA, 25 bp, Homo sapien
tccaaagaaatattagaggtttgag

SEQ ID NO: 4100625 - DNA, 25 bp, Homo sapien
tatagctgcacactaaaatagcctg

SEQ ID NO: 4100626 - DNA, 25 bp, Homo sapien
cagcaagtcagcgtgttttagaaac

SEQ ID NO: 4100627 - DNA, 25 bp, Homo sapien
ggagtttccactacgctttgttaca

SEQ ID NO: 4100628 - DNA, 25 bp, Homo sapien
cctgaaggtgaagccagacagacac

SEQ ID NO: 4100629 - DNA, 25 bp, Homo sapien
caaatcccatgcctatggtggtaaa

SEQ ID NO: 4100630 - DNA, 25 bp, Homo sapien
tgtggctccctctactacaactaga

SEQ ID NO: 4100631 - DNA, 25 bp, Homo sapien
gcatcagagaccatacagtgccctg

SEQ ID NO: 4100632 - DNA, 25 bp, Homo sapien
gattggcaaactacaacccatgggc

SEQ ID NO: 4100633 - DNA, 25 bp, Homo sapien
ggtggtgagcataaagtcagctgtt

SEQ ID NO: 4100634 - DNA, 25 bp, Homo sapien
tttggtggtgagcataaagtcagct

SEQ ID NO: 4100635 - DNA, 25 bp, Homo sapien
ggtgagcataaagtcagctgttggt

SEQ ID NO: 4100636 - DNA, 25 bp, Homo sapien
gtttggtggtgagcataaagtcagc

SEQ ID NO: 4100637 - DNA, 25 bp, Homo sapien
tatctttgcggttcttctgcaactg

SEQ ID NO: 4100638 - DNA, 25 bp, Homo sapien
ggttccttacaggataggcttcatc

SEQ ID NO: 4100639 - DNA, 25 bp, Homo sapien
tctgcaactgtacgtggtctaggga

SEQ ID NO: 4100640 - DNA, 25 bp, Homo sapien
tcacagtatcagacagatccggttc

SEQ ID NO: 4100641 - DNA, 25 bp, Homo sapien
cggcaaactcttggcgatcaggcat

SEQ ID NO: 4100642 - DNA, 25 bp, Homo sapien
ggtgtcggcaaactcttggcgatca

SEQ ID NO: 4100643 - DNA, 25 bp, Homo sapien
ctgggtgtcggcaaactcttggcga

SEQ ID NO: 4100644 - DNA, 25 bp, Homo sapien
tgtcggcaaactcttggcgatcagg

SEQ ID NO: 4100645 - DNA, 25 bp, Homo sapien
tcttacggaggagatggacactggt

SEQ ID NO: 4100646 - DNA, 25 bp, Homo sapien
tgcttgatgcacatgggagagtctt

SEQ ID NO: 4100647 - DNA, 25 bp, Homo sapien
cagggttggcactctggtgctgcat

SEQ ID NO: 4100648 - DNA, 25 bp, Homo sapien
gagtcttaacatgcgtcttacggag

SEQ ID NO: 4100649 - DNA, 25 bp, Homo sapien
ttgttcacagtcttacctatacccc

SEQ ID NO: 4100650 - DNA, 25 bp, Homo sapien
gtcatcaatgcgtggattcctccag

SEQ ID NO: 4100651 - DNA, 25 bp, Homo sapien
cagggatctaggttcagtgtcagga

SEQ ID NO: 4100652 - DNA, 25 bp, Homo sapien
caggaatccatggatcaacgtcatc

SEQ ID NO: 4100653 - DNA, 25 bp, Homo sapien
atgaagctgcttaggaaagtcactg

SEQ ID NO: 4100654 - DNA, 25 bp, Homo sapien
gaatcttctagagtttacagaccca

SEQ ID NO: 4100655 - DNA, 25 bp, Homo sapien
agggaaccgtgtgaaatgaagctgc

SEQ ID NO: 4100656 - DNA, 25 bp, Homo sapien
gacttggtggattagaaactgaaac

SEQ ID NO: 4100657 - DNA, 25 bp, Homo sapien
tgtttccacccagcgcttctaccag

SEQ ID NO: 4100658 - DNA, 25 bp, Homo sapien
taccagctcagtcatggcccgcact

SEQ ID NO: 4100659 - DNA, 25 bp, Homo sapien
ctgtttccacccagcgcttctacca

SEQ ID NO: 4100660 - DNA, 25 bp, Homo sapien
cttctaccagctcagtcatggcccg

SEQ ID NO: 4100661 - DNA, 25 bp, Homo sapien
tctctttctctataagcgagtgggc

SEQ ID NO: 4100662 - DNA, 25 bp, Homo sapien
tctataagcgagtgggctgccatca

SEQ ID NO: 4100663 - DNA, 25 bp, Homo sapien
gtttgtgtgcctcgacaagccattg

SEQ ID NO: 4100664 - DNA, 25 bp, Homo sapien
catcatttcagatctgtgcctgtgg

SEQ ID NO: 4100665 - DNA, 25 bp, Homo sapien
ctttattaagcagcagggcaccgga

SEQ ID NO: 4100666 - DNA, 25 bp, Homo sapien
tattaagcagcagggcaccggatgt

SEQ ID NO: 4100667 - DNA, 25 bp, Homo sapien
tttattaagcagcagggcaccggat

SEQ ID NO: 4100668 - DNA, 25 bp, Homo sapien
taagcagcagggcaccggatgtcat

SEQ ID NO: 4100669 - DNA, 25 bp, Homo sapien
gatccctggcttcagacacatagag

SEQ ID NO: 4100670 - DNA, 25 bp, Homo sapien
cagacacatagagctgtctgtccac

SEQ ID NO: 4100671 - DNA, 25 bp, Homo sapien
tagagctgtctgtccacacttcctg

SEQ ID NO: 4100672 - DNA, 25 bp, Homo sapien
tgtctgtccacacttcctggcactg

SEQ ID NO: 4100673 - DNA, 25 bp, Homo sapien
ccaggcttcggctttcgcaagagaa

SEQ ID NO: 4100674 - DNA, 25 bp, Homo sapien
gcagtcgcgcagcttctattaataa

SEQ ID NO: 4100675 - DNA, 25 bp, Homo sapien
aggcccgccacactgcaagtgcagt

SEQ ID NO: 4100676 - DNA, 25 bp, Homo sapien
ttgtttaagaaaagtctgcgctggc

SEQ ID NO: 4100677 - DNA, 25 bp, Homo sapien
aggcacacgcggatggccaggatcc

SEQ ID NO: 4100678 - DNA, 25 bp, Homo sapien
ggtctctggagcagagttcgccacc

SEQ ID NO: 4100679 - DNA, 25 bp, Homo sapien
ccacgttctgggctagtgctcagag

SEQ ID NO: 4100680 - DNA, 25 bp, Homo sapien
tcagaggcgtcctcgcaagcctcag

SEQ ID NO: 4100681 - DNA, 25 bp, Homo sapien
ctaaagggggcagagcttcgcggtc

SEQ ID NO: 4100682 - DNA, 25 bp, Homo sapien
aagggggcagagcttcgcggtccct

SEQ ID NO: 4100683 - DNA, 25 bp, Homo sapien
taaagggggcagagcttcgcggtcc

SEQ ID NO: 4100684 - DNA, 25 bp, Homo sapien
gggggcagagcttcgcggtccctgg

SEQ ID NO: 4100685 - DNA, 25 bp, Homo sapien
ccaacacccaagactgagttgagag

SEQ ID NO: 4100686 - DNA, 25 bp, Homo sapien
cactggcaaaccaagatcccaatct

SEQ ID NO: 4100687 - DNA, 25 bp, Homo sapien
taactgcagtttatgaagatggtca

SEQ ID NO: 4100688 - DNA, 25 bp, Homo sapien
aatctacgtgacagggactgtggac

SEQ ID NO: 4100689 - DNA, 25 bp, Homo sapien
gagtgcacagaactggccgcctcac

SEQ ID NO: 4100690 - DNA, 25 bp, Homo sapien
gtgagtgcacagaactggccgcctc

SEQ ID NO: 4100691 - DNA, 25 bp, Homo sapien
cagggtgagtgcacagaactggccg

SEQ ID NO: 4100692 - DNA, 25 bp, Homo sapien
ggtgagtgcacagaactggccgcct

SEQ ID NO: 4100693 - DNA, 25 bp, Homo sapien
ggttaaggagatctggcttcagaag

SEQ ID NO: 4100694 - DNA, 25 bp, Homo sapien
cagggataagtgtgaacttaaaggg

SEQ ID NO: 4100695 - DNA, 25 bp, Homo sapien
ctaggacagggataagtgtgaactt

SEQ ID NO: 4100696 - DNA, 25 bp, Homo sapien
cttaaagggttaaggagatctggct

SEQ ID NO: 4100697 - DNA, 25 bp, Homo sapien
tttctcagatctccacaagtgcagt

SEQ ID NO: 4100698 - DNA, 25 bp, Homo sapien
ggcttaggacttcacaaacctggaa

SEQ ID NO: 4100699 - DNA, 25 bp, Homo sapien
ggcaaagcagccagaacatttatgc

SEQ ID NO: 4100700 - DNA, 25 bp, Homo sapien
taatgaaaatctcggtgcctgggtc

SEQ ID NO: 4100701 - DNA, 25 bp, Homo sapien
gctggctctgggcattaggtccacg

SEQ ID NO: 4100702 - DNA, 25 bp, Homo sapien
tgcagcagtgtcagcctccaaaact

SEQ ID NO: 4100703 - DNA, 25 bp, Homo sapien
taggtccacgaggaaatgacatgtg

SEQ ID NO: 4100704 - DNA, 25 bp, Homo sapien
gagctcagagttccgacaagctaag

SEQ ID NO: 4100705 - DNA, 25 bp, Homo sapien
tgttgaccagaatagtctaaaactc

SEQ ID NO: 4100706 - DNA, 25 bp, Homo sapien
aggtactcaggagggcggatcccct

SEQ ID NO: 4100707 - DNA, 25 bp, Homo sapien
gtgaaagggatctgtgcatttctcc

SEQ ID NO: 4100708 - DNA, 25 bp, Homo sapien
ccttgttgggagaagcggacagctg

SEQ ID NO: 4100709 - DNA, 25 bp, Homo sapien
tgcatttctcctcatgccagcatgc

SEQ ID NO: 4100710 - DNA, 25 bp, Homo sapien
aagctccctggttggccttgttggg

SEQ ID NO: 4100711 - DNA, 25 bp, Homo sapien
cagcttgaggccagtagttacagac

SEQ ID NO: 4100712 - DNA, 25 bp, Homo sapien
gaagacagcttgaggccagtagtta

SEQ ID NO: 4100713 - DNA, 25 bp, Homo sapien
aggaagacagcttgaggccagtagt

SEQ ID NO: 4100714 - DNA, 25 bp, Homo sapien
gacagcttgaggccagtagttacag

SEQ ID NO: 4100715 - DNA, 25 bp, Homo sapien
cataagtagctgtagattaatgcat

SEQ ID NO: 4100716 - DNA, 25 bp, Homo sapien
aagactgatacctcccaggccatag

SEQ ID NO: 4100717 - DNA, 25 bp, Homo sapien
gccagaacagcctaatcataagtag

SEQ ID NO: 4100718 - DNA, 25 bp, Homo sapien
gtgccttgggagtatgaaagatgtc

SEQ ID NO: 4100719 - DNA, 25 bp, Homo sapien
gctgttaataattactcagggacaa

SEQ ID NO: 4100720 - DNA, 25 bp, Homo sapien
cacttgagaatgttaagagaagagc

SEQ ID NO: 4100721 - DNA, 25 bp, Homo sapien
gaagagcaggtcattcctcttagac

SEQ ID NO: 4100722 - DNA, 25 bp, Homo sapien
cccatagaacggatgattgaggtat

SEQ ID NO: 4100723 - DNA, 25 bp, Homo sapien
cttgcctgacgtgcttaaactgtgg

SEQ ID NO: 4100724 - DNA, 25 bp, Homo sapien
tggcttattcattagaacgtgcaca

SEQ ID NO: 4100725 - DNA, 25 bp, Homo sapien
aagttttcttgcctgacgtgcttaa

SEQ ID NO: 4100726 - DNA, 25 bp, Homo sapien
tcattagaacgtgcacatcagccat

SEQ ID NO: 4100727 - DNA, 25 bp, Homo sapien
ctttgaattgaggaaagcgaaaata

SEQ ID NO: 4100728 - DNA, 25 bp, Homo sapien
tccacaattgtccctttgaattgag

SEQ ID NO: 4100729 - DNA, 25 bp, Homo sapien
gagaaaaaggagtgcgctgggtctg

SEQ ID NO: 4100730 - DNA, 25 bp, Homo sapien
tgaattgaggaaagcgaaaataaag

SEQ ID NO: 4100731 - DNA, 25 bp, Homo sapien
acatgttagcgcctccacgggcctg

SEQ ID NO: 4100732 - DNA, 25 bp, Homo sapien
tgttggctgcgtgtgctaaaaataa

SEQ ID NO: 4100733 - DNA, 25 bp, Homo sapien
actgggggacatgttagcgcctcca

SEQ ID NO: 4100734 - DNA, 25 bp, Homo sapien
tccacgggcctgctgagctctgttg

SEQ ID NO: 4100735 - DNA, 25 bp, Homo sapien
tcagtgtctctagcgagctggtgga

SEQ ID NO: 4100736 - DNA, 25 bp, Homo sapien
tccaagccctgttcgttcagtgtct

SEQ ID NO: 4100737 - DNA, 25 bp, Homo sapien
ttgagcagacctctcttgcacaggc

SEQ ID NO: 4100738 - DNA, 25 bp, Homo sapien
cagcctcccttagaaggagcatatt

SEQ ID NO: 4100739 - DNA, 25 bp, Homo sapien
gtgaccttcctgaggagcagaatgg

SEQ ID NO: 4100740 - DNA, 25 bp, Homo sapien
tcacaaggaatccttgaggcgtgac

SEQ ID NO: 4100741 - DNA, 25 bp, Homo sapien
tgatgctacctggattcacaaggaa

SEQ ID NO: 4100742 - DNA, 25 bp, Homo sapien
caagtctgtggaagtatagtcactg

SEQ ID NO: 4100743 - DNA, 25 bp, Homo sapien
ccacccgctccttccatctgtggaa

SEQ ID NO: 4100744 - DNA, 25 bp, Homo sapien
atcttgcagaaaagacataatgtgc

SEQ ID NO: 4100745 - DNA, 25 bp, Homo sapien
cataatgtgccagaaagtttgtaaa

SEQ ID NO: 4100746 - DNA, 25 bp, Homo sapien
tgtaaatggatgctccctctctgtg

SEQ ID NO: 4100747 - DNA, 25 bp, Homo sapien
tccgctctccattcatcctcctcca

SEQ ID NO: 4100748 - DNA, 25 bp, Homo sapien
cttccgctctccattcatcctcctc

SEQ ID NO: 4100749 - DNA, 25 bp, Homo sapien
ttccgctctccattcatcctcctcc

SEQ ID NO: 4100750 - DNA, 25 bp, Homo sapien
ggcaatggcttcccccagccacaca

SEQ ID NO: 4100751 - DNA, 25 bp, Homo sapien
aatggcttcccccagccacacacgc

SEQ ID NO: 4100752 - DNA, 25 bp, Homo sapien
atggcttcccccagccacacacgct

SEQ ID NO: 4100753 - DNA, 25 bp, Homo sapien
ctattaaacaggcaatggcttcccc

SEQ ID NO: 4100754 - DNA, 25 bp, Homo sapien
gagaagcggaagtgcagcaacagca

SEQ ID NO: 4100755 - DNA, 25 bp, Homo sapien
agaagcggaagtgcagcaacagcaa

SEQ ID NO: 4100756 - DNA, 25 bp, Homo sapien
agagaagcggaagtgcagcaacagc

SEQ ID NO: 4100757 - DNA, 25 bp, Homo sapien
ggagagaagcggaagtgcagcaaca

SEQ ID NO: 4100758 - DNA, 25 bp, Homo sapien
ggctcctccgtgccgccgcggcggc

SEQ ID NO: 4100759 - DNA, 25 bp, Homo sapien
ctgggcctggccactcgtgtctctc

SEQ ID NO: 4100760 - DNA, 25 bp, Homo sapien
cagccagtgtaaataaggaactcgg

SEQ ID NO: 4100761 - DNA, 25 bp, Homo sapien
cacacaaaccatgcagccagtgtaa

SEQ ID NO: 4100762 - DNA, 25 bp, Homo sapien
aaataaggaactcgggtgctgtcag

SEQ ID NO: 4100763 - DNA, 25 bp, Homo sapien
cacaaaccatgcagccagtgtaaat

SEQ ID NO: 4100764 - DNA, 25 bp, Homo sapien
ctggccctcgaatcgtcatccgaca

SEQ ID NO: 4100765 - DNA, 25 bp, Homo sapien
tgctggccctcgaatcgtcatccga

SEQ ID NO: 4100766 - DNA, 25 bp, Homo sapien
tggccctcgaatcgtcatccgacat

SEQ ID NO: 4100767 - DNA, 25 bp, Homo sapien
gtgctggccctcgaatcgtcatccg

SEQ ID NO: 4100768 - DNA, 25 bp, Homo sapien
cttggcgctggtggagaggagtttg

SEQ ID NO: 4100769 - DNA, 25 bp, Homo sapien
gctcatgctgactttactctccttc

SEQ ID NO: 4100770 - DNA, 25 bp, Homo sapien
ttggcgctggtggagaggagtttgg

SEQ ID NO: 4100771 - DNA, 25 bp, Homo sapien
ctcatgctgactttactctccttct

SEQ ID NO: 4100772 - DNA, 25 bp, Homo sapien
caagaaatgcgagaggcaagccgca

SEQ ID NO: 4100773 - DNA, 25 bp, Homo sapien
cattgggaggcagaccaaatgcagc

SEQ ID NO: 4100774 - DNA, 25 bp, Homo sapien
gagcgtttaagctatcctcattggg

SEQ ID NO: 4100775 - DNA, 25 bp, Homo sapien
gcaagccgcaacagctgcatgtgag

SEQ ID NO: 4100776 - DNA, 25 bp, Homo sapien
taacaactgcctaactctgagagca

SEQ ID NO: 4100777 - DNA, 25 bp, Homo sapien
taaaaagtagctacctccagaggct

SEQ ID NO: 4100778 - DNA, 25 bp, Homo sapien
accgcttaggatggcagggataaaa

SEQ ID NO: 4100779 - DNA, 25 bp, Homo sapien
gattttgagggtcatggcgatcaga

SEQ ID NO: 4100780 - DNA, 25 bp, Homo sapien
cagttagcagcctgttagtctgcca

SEQ ID NO: 4100781 - DNA, 25 bp, Homo sapien
tagaaaccactttccaacatgcagt

SEQ ID NO: 4100782 - DNA, 25 bp, Homo sapien
cttccaattctatgggcaacaccta

SEQ ID NO: 4100783 - DNA, 25 bp, Homo sapien
cactcctactcctggtgaatgtgcc

SEQ ID NO: 4100784 - DNA, 25 bp, Homo sapien
ccacttccttcatggtccgctctct

SEQ ID NO: 4100785 - DNA, 25 bp, Homo sapien
cacttccttcatggtccgctctcta

SEQ ID NO: 4100786 - DNA, 25 bp, Homo sapien
cagtgacgaagccaacatggccgct

SEQ ID NO: 4100787 - DNA, 25 bp, Homo sapien
gccgaaggtccgaggcctcgctcaa

SEQ ID NO: 4100788 - DNA, 25 bp, Homo sapien
ccgacaggccgaaggtccgaggcct

SEQ ID NO: 4100789 - DNA, 25 bp, Homo sapien
ccgcccggagtcctcagtgacgaag

SEQ ID NO: 4100790 - DNA, 25 bp, Homo sapien
ggtctaaagtgatgtccgccagctc

SEQ ID NO: 4100791 - DNA, 25 bp, Homo sapien
ctgcaattaggtggagggtctaaag

SEQ ID NO: 4100792 - DNA, 25 bp, Homo sapien
caattaggtggagggtctaaagtga

SEQ ID NO: 4100793 - DNA, 25 bp, Homo sapien
tggagggtctaaagtgatgtccgcc

SEQ ID NO: 4100794 - DNA, 25 bp, Homo sapien
tccccagaatgattaagtgttccaa

SEQ ID NO: 4100795 - DNA, 25 bp, Homo sapien
taggagacacacaataccaagcagg

SEQ ID NO: 4100796 - DNA, 25 bp, Homo sapien
caagcaggagcaataactagacagc

SEQ ID NO: 4100797 - DNA, 25 bp, Homo sapien
aaacaaccaagggaagctacaggct

SEQ ID NO: 4100798 - DNA, 25 bp, Homo sapien
gaggtattggaatgccagaaaaaca

SEQ ID NO: 4100799 - DNA, 25 bp, Homo sapien
tgaaccatgatgagcagcctgggac

SEQ ID NO: 4100800 - DNA, 25 bp, Homo sapien
tcacagaaactacgtggaagtatac

SEQ ID NO: 4100801 - DNA, 25 bp, Homo sapien
ccattaccaccaattcgaggaggta

SEQ ID NO: 4100802 - DNA, 25 bp, Homo sapien
taaaggtatacacactgcaatggtg

SEQ ID NO: 4100803 - DNA, 25 bp, Homo sapien
ttttgatcgtgctgaaaccccagtc

SEQ ID NO: 4100804 - DNA, 25 bp, Homo sapien
gatgatctaattcccaacagcctga

SEQ ID NO: 4100805 - DNA, 25 bp, Homo sapien
gacttcctgctcatttgaaaggcaa

SEQ ID NO: 4100806 - DNA, 25 bp, Homo sapien
taagcattgcatgtgatcaacgaag

SEQ ID NO: 4100807 - DNA, 25 bp, Homo sapien
ttctgttaatgcaccaccaacttcc

SEQ ID NO: 4100808 - DNA, 25 bp, Homo sapien
cagaagaacccgactccttttcaag

SEQ ID NO: 4100809 - DNA, 25 bp, Homo sapien
caagtcctccatatcgaaatcagtg

SEQ ID NO: 4100810 - DNA, 25 bp, Homo sapien
tcaatcgagcctgcagcagagatca

SEQ ID NO: 4100811 - DNA, 25 bp, Homo sapien
aactgcttgggtgccaactcagaaa

SEQ ID NO: 4100812 - DNA, 25 bp, Homo sapien
actcagaaagactgccagcaatgga

SEQ ID NO: 4100813 - DNA, 25 bp, Homo sapien
gattgcaggaaggtcaaaattgcca

SEQ ID NO: 4100814 - DNA, 25 bp, Homo sapien
gaaagcaatgaaaattggactataa

SEQ ID NO: 4100815 - DNA, 25 bp, Homo sapien
tgaaaattggactataacaaaccat

SEQ ID NO: 4100816 - DNA, 25 bp, Homo sapien
ttggactataacaaaccattaactg

SEQ ID NO: 4100817 - DNA, 25 bp, Homo sapien
gactataacaaaccattaactgcag

SEQ ID NO: 4100818 - DNA, 25 bp, Homo sapien
taggtatactgagatccaacatagc

SEQ ID NO: 4100819 - DNA, 25 bp, Homo sapien
gcaagactgttattaggtatactga

SEQ ID NO: 4100820 - DNA, 25 bp, Homo sapien
gtcagaaatgcatgagtaaactgac

SEQ ID NO: 4100821 - DNA, 25 bp, Homo sapien
gaggaagcacaccagaatgggagaa

SEQ ID NO: 4100822 - DNA, 25 bp, Homo sapien
aatacaagacggagaaactgcccct

SEQ ID NO: 4100823 - DNA, 25 bp, Homo sapien
caactgcttcgattagcactggtaa

SEQ ID NO: 4100824 - DNA, 25 bp, Homo sapien
ggcatcttctggtgttaggtacaag

SEQ ID NO: 4100825 - DNA, 25 bp, Homo sapien
tgagacaaatctgaggaaaacactg

SEQ ID NO: 4100826 - DNA, 25 bp, Homo sapien
caaagtccccatttctaaccgctct

SEQ ID NO: 4100827 - DNA, 25 bp, Homo sapien
tatcaactcacaaatttgctgaagg

SEQ ID NO: 4100828 - DNA, 25 bp, Homo sapien
cagagccaatcaatccatgcttatc

SEQ ID NO: 4100829 - DNA, 25 bp, Homo sapien
catttctaaccgctcttctagaccc

SEQ ID NO: 4100830 - DNA, 25 bp, Homo sapien
ctctactgagaggtacgttatggaa

SEQ ID NO: 4100831 - DNA, 25 bp, Homo sapien
tcactgtcaagaaaggcacatacca

SEQ ID NO: 4100832 - DNA, 25 bp, Homo sapien
gagacaaatatatggagactgagga

SEQ ID NO: 4100833 - DNA, 25 bp, Homo sapien
tcattaatgtagcaccttccaaagg

SEQ ID NO: 4100834 - DNA, 25 bp, Homo sapien
tagtcaaaccaaaagttacaccaca

SEQ ID NO: 4100835 - DNA, 25 bp, Homo sapien
tgagattccactgcccattatagtc

SEQ ID NO: 4100836 - DNA, 25 bp, Homo sapien
cattatagtcaaaccaaaagttaca

SEQ ID NO: 4100837 - DNA, 25 bp, Homo sapien
tctgagattccactgcccattatag

SEQ ID NO: 4100838 - DNA, 25 bp, Homo sapien
gtatagatacctgactcaaaagagc

SEQ ID NO: 4100839 - DNA, 25 bp, Homo sapien
aaggatggacccgaagggacagaca

SEQ ID NO: 4100840 - DNA, 25 bp, Homo sapien
ttaaagccacaaggagctgctactt

SEQ ID NO: 4100841 - DNA, 25 bp, Homo sapien
tgagaatcctaacctgtcagtggac

SEQ ID NO: 4100842 - DNA, 25 bp, Homo sapien
cctgctaatctgtcagggcccagaa

SEQ ID NO: 4100843 - DNA, 25 bp, Homo sapien
caaatcaacaggagttcccattgga

SEQ ID NO: 4100844 - DNA, 25 bp, Homo sapien
ggtgatcggctgcactcaactccat

SEQ ID NO: 4100845 - DNA, 25 bp, Homo sapien
gaagggtttagatacgtgaggtcca

SEQ ID NO: 4100846 - DNA, 25 bp, Homo sapien
tctcgacgtccatccacctgtgtat

SEQ ID NO: 4100847 - DNA, 25 bp, Homo sapien
gcaacatttggacgtgaaggctgga

SEQ ID NO: 4100848 - DNA, 25 bp, Homo sapien
tggcataccagaagaataggatcac

SEQ ID NO: 4100849 - DNA, 25 bp, Homo sapien
tttgtgtcattccaccagtcgatgg

SEQ ID NO: 4100850 - DNA, 25 bp, Homo sapien
tatagattcaccacataattcaggg

SEQ ID NO: 4100851 - DNA, 25 bp, Homo sapien
cagagaggaccttacatgcctgcta

SEQ ID NO: 4100852 - DNA, 25 bp, Homo sapien
gccagggacatatagttcattgcac

SEQ ID NO: 4100853 - DNA, 25 bp, Homo sapien
aaatgatcatctacttggtccccag

SEQ ID NO: 4100854 - DNA, 25 bp, Homo sapien
tggcaccactacatgccaacctggg

SEQ ID NO: 4100855 - DNA, 25 bp, Homo sapien
atggcaccactacatgccaacctgg

SEQ ID NO: 4100856 - DNA, 25 bp, Homo sapien
ggcaccactacatgccaacctgggt

SEQ ID NO: 4100857 - DNA, 25 bp, Homo sapien
aaatgtgaggtcaacccctgcctga

SEQ ID NO: 4100858 - DNA, 25 bp, Homo sapien
gctcagaagttaggttggtcccaca

SEQ ID NO: 4100859 - DNA, 25 bp, Homo sapien
tgggaggtccagcagtcattagaat

SEQ ID NO: 4100860 - DNA, 25 bp, Homo sapien
gaatgacctgcactgaaatgtgagg

SEQ ID NO: 4100861 - DNA, 25 bp, Homo sapien
taagagactacaaaacctgcaccag

SEQ ID NO: 4100862 - DNA, 25 bp, Homo sapien
tgcaccagtataaatgaaagggctc

SEQ ID NO: 4100863 - DNA, 25 bp, Homo sapien
aaagtaccctaacacaattgcagag

SEQ ID NO: 4100864 - DNA, 25 bp, Homo sapien
gctcaagtgtactccaacagcagga

SEQ ID NO: 4100865 - DNA, 25 bp, Homo sapien
tgaccaaaactgagacatcactgaa

SEQ ID NO: 4100866 - DNA, 25 bp, Homo sapien
caggaaaagaccaacagatctgact

SEQ ID NO: 4100867 - DNA, 25 bp, Homo sapien
tggataaagtacacaggcagttctc

SEQ ID NO: 4100868 - DNA, 25 bp, Homo sapien
aaataactggacacgtgcatgtgac

SEQ ID NO: 4100869 - DNA, 25 bp, Homo sapien
atttgaaggataaagatgccttcag

SEQ ID NO: 4100870 - DNA, 25 bp, Homo sapien
agagatactgggtgaaagctgcctt

SEQ ID NO: 4100871 - DNA, 25 bp, Homo sapien
gagatactgggtgaaagctgccttc

SEQ ID NO: 4100872 - DNA, 25 bp, Homo sapien
cagagatactgggtgaaagctgcct

SEQ ID NO: 4100873 - DNA, 25 bp, Homo sapien
gaagaaaaacgttgtggcaacagaa

SEQ ID NO: 4100874 - DNA, 25 bp, Homo sapien
aaatgtagtgcgtcttaaagtggtc

SEQ ID NO: 4100875 - DNA, 25 bp, Homo sapien
gccctcctgggtgctactgaagctt

SEQ ID NO: 4100876 - DNA, 25 bp, Homo sapien
gacaaatgcagtgtgtctacagcct

SEQ ID NO: 4100877 - DNA, 25 bp, Homo sapien
gctggatcacctacgaagagaagtt

SEQ ID NO: 4100878 - DNA, 25 bp, Homo sapien
cttatagctggatcacctacgaaga

SEQ ID NO: 4100879 - DNA, 25 bp, Homo sapien
gaagggaaggatggttagtcttata

SEQ ID NO: 4100880 - DNA, 25 bp, Homo sapien
ggatggttagtcttatagctggatc

SEQ ID NO: 4100881 - DNA, 25 bp, Homo sapien
cacctccccagatgttaggacagac

SEQ ID NO: 4100882 - DNA, 25 bp, Homo sapien
acctccccagatgttaggacagacg

SEQ ID NO: 4100883 - DNA, 25 bp, Homo sapien
gtgcccacggacaggtatcagagca

SEQ ID NO: 4100884 - DNA, 25 bp, Homo sapien
ctccctggtgcccacggacaggtat

SEQ ID NO: 4100885 - DNA, 25 bp, Homo sapien
gtcttcacctgagcacttattttaa

SEQ ID NO: 4100886 - DNA, 25 bp, Homo sapien
taattgggattctctaaactgggtc

SEQ ID NO: 4100887 - DNA, 25 bp, Homo sapien
ggtcatctcagttttgtgtaacatg

SEQ ID NO: 4100888 - DNA, 25 bp, Homo sapien
ttgcattaagtctaccctgtcttca

SEQ ID NO: 4100889 - DNA, 25 bp, Homo sapien
taacaactctataagaaggccagtg

SEQ ID NO: 4100890 - DNA, 25 bp, Homo sapien
gatctgctggtctacaaagtgggca

SEQ ID NO: 4100891 - DNA, 25 bp, Homo sapien
aaatgactgaccaggtttgccctca

SEQ ID NO: 4100892 - DNA, 25 bp, Homo sapien
gaggctgttcaagcatcccacctat

SEQ ID NO: 4100893 - DNA, 25 bp, Homo sapien
gatgttatcgcctttgggaccagca

SEQ ID NO: 4100894 - DNA, 25 bp, Homo sapien
cctggaggccctagaatggttgatc

SEQ ID NO: 4100895 - DNA, 25 bp, Homo sapien
cattcatagatgttatcgcctttgg

SEQ ID NO: 4100896 - DNA, 25 bp, Homo sapien
gatatcgagaaagaatacaccaccc

SEQ ID NO: 4100897 - DNA, 25 bp, Homo sapien
gatagattcttgtccgaaatgtaac

SEQ ID NO: 4100898 - DNA, 25 bp, Homo sapien
ttagaaatggttagtgctggactcc

SEQ ID NO: 4100899 - DNA, 25 bp, Homo sapien
tatgtccaagcaaataacaccttga

SEQ ID NO: 4100900 - DNA, 25 bp, Homo sapien
ggttagtgctggactccaattatct

SEQ ID NO: 4100901 - DNA, 25 bp, Homo sapien
aaagcccaaggcaaacttacgtcag

SEQ ID NO: 4100902 - DNA, 25 bp, Homo sapien
cctttacgctggttaaagagccagg

SEQ ID NO: 4100903 - DNA, 25 bp, Homo sapien
tctcagtgaccagctatgggacaca

SEQ ID NO: 4100904 - DNA, 25 bp, Homo sapien
gccaggcagatgactcgacatttag

SEQ ID NO: 4100905 - DNA, 25 bp, Homo sapien
tactgagtggcaatacttcccacca

SEQ ID NO: 4100906 - DNA, 25 bp, Homo sapien
catatactgagtggcaatacttccc

SEQ ID NO: 4100907 - DNA, 25 bp, Homo sapien
ttggtcatatactgagtggcaatac

SEQ ID NO: 4100908 - DNA, 25 bp, Homo sapien
ggtcatatactgagtggcaatactt

SEQ ID NO: 4100909 - DNA, 25 bp, Homo sapien
ttatgtagcgtatctcttggtccac

SEQ ID NO: 4100910 - DNA, 25 bp, Homo sapien
taagtagtccacaacatagaaccaa

SEQ ID NO: 4100911 - DNA, 25 bp, Homo sapien
aatggccatatgtgtaacctgtacc

SEQ ID NO: 4100912 - DNA, 25 bp, Homo sapien
taccaattctgtctactgtagcaag

SEQ ID NO: 4100913 - DNA, 25 bp, Homo sapien
gactacaagcaactgaacccaaatg

SEQ ID NO: 4100914 - DNA, 25 bp, Homo sapien
tagcatgagttgaggtaccaggtag

SEQ ID NO: 4100915 - DNA, 25 bp, Homo sapien
tggcaagactcaagcaatgtggctg

SEQ ID NO: 4100916 - DNA, 25 bp, Homo sapien
gatagaccagatacttgagggcaaa

SEQ ID NO: 4100917 - DNA, 25 bp, Homo sapien
ggttcatcacgctctaaggccgttt

SEQ ID NO: 4100918 - DNA, 25 bp, Homo sapien
tcttgtgtaatctttacgggcacta

SEQ ID NO: 4100919 - DNA, 25 bp, Homo sapien
gttcttgctgcccattgtctactgt

SEQ ID NO: 4100920 - DNA, 25 bp, Homo sapien
ctcagagaggcctttgacagttctt

SEQ ID NO: 4100921 - DNA, 25 bp, Homo sapien
gtgtaatctttacgggcactatctg

SEQ ID NO: 4100922 - DNA, 25 bp, Homo sapien
aggtatgcgatatctcattacagag

SEQ ID NO: 4100923 - DNA, 25 bp, Homo sapien
gaagggcaccaaaggtatgcgatat

SEQ ID NO: 4100924 - DNA, 25 bp, Homo sapien
tctcttctaattgcgtatcttactg

SEQ ID NO: 4100925 - DNA, 25 bp, Homo sapien
gaaacaatatggtcatcaggtgaaa

SEQ ID NO: 4100926 - DNA, 25 bp, Homo sapien
ttgtatgctaatgggagaaaattga

SEQ ID NO: 4100927 - DNA, 25 bp, Homo sapien
tttgtatgctaatgggagaaaattg

SEQ ID NO: 4100928 - DNA, 25 bp, Homo sapien
tgtttgtatgctaatgggagaaaat

SEQ ID NO: 4100929 - DNA, 25 bp, Homo sapien
gtttgtatgctaatgggagaaaatt

SEQ ID NO: 4100930 - DNA, 25 bp, Homo sapien
atcctgtggctatagatgtatcatc

SEQ ID NO: 4100931 - DNA, 25 bp, Homo sapien
catcctgtggctatagatgtatcat

SEQ ID NO: 4100932 - DNA, 25 bp, Homo sapien
cccaagaaatacaggtctgactgaa

SEQ ID NO: 4100933 - DNA, 25 bp, Homo sapien
acccaagaaatacaggtctgactga

SEQ ID NO: 4100934 - DNA, 25 bp, Homo sapien
ggagacagggtattaccgcgttggc

SEQ ID NO: 4100935 - DNA, 25 bp, Homo sapien
gtggagacagggtattaccgcgttg

SEQ ID NO: 4100936 - DNA, 25 bp, Homo sapien
tgtagcggtctcttcttgttggtct

SEQ ID NO: 4100937 - DNA, 25 bp, Homo sapien
tggtttctctgtagcggtctcttct

SEQ ID NO: 4100938 - DNA, 25 bp, Homo sapien
tctctgtagcggtctcttcttgttg

SEQ ID NO: 4100939 - DNA, 25 bp, Homo sapien
ggtttctctgtagcggtctcttctt

SEQ ID NO: 4100940 - DNA, 25 bp, Homo sapien
tctacctgggacgtagtcgtgaccc

SEQ ID NO: 4100941 - DNA, 25 bp, Homo sapien
ttgtacagtagaacagaacatccag

SEQ ID NO: 4100942 - DNA, 25 bp, Homo sapien
tgatgatggccttcaacatgccctc

SEQ ID NO: 4100943 - DNA, 25 bp, Homo sapien
gatgggtatggaactctaggtcaaa

SEQ ID NO: 4100944 - DNA, 25 bp, Homo sapien
aacaggtttgtttcacgcaccgcgg

SEQ ID NO: 4100945 - DNA, 25 bp, Homo sapien
ggacatgtagttccggcatcgcgcc

SEQ ID NO: 4100946 - DNA, 25 bp, Homo sapien
cgcaagattcgagcctgagcggcct

SEQ ID NO: 4100947 - DNA, 25 bp, Homo sapien
ctttccggtggaaagctgcggcctc

SEQ ID NO: 4100948 - DNA, 25 bp, Homo sapien
atggaagagcaaagatcctcaacgc

SEQ ID NO: 4100949 - DNA, 25 bp, Homo sapien
cgatcaaaggcggatggaagagcaa

SEQ ID NO: 4100950 - DNA, 25 bp, Homo sapien
gagcaaagatcctcaacgcagccta

SEQ ID NO: 4100951 - DNA, 25 bp, Homo sapien
aagaggaagacgatcaaaggcggat

SEQ ID NO: 4100952 - DNA, 25 bp, Homo sapien
gagggagacctatctccgaggacgc

SEQ ID NO: 4100953 - DNA, 25 bp, Homo sapien
cacaggagggagacctatctccgag

SEQ ID NO: 4100954 - DNA, 25 bp, Homo sapien
tctccgaggacgcagggtccccgga

SEQ ID NO: 4100955 - DNA, 25 bp, Homo sapien
agacctatctccgaggacgcagggt

SEQ ID NO: 4100956 - DNA, 25 bp, Homo sapien
taactctcgaggaaaatgcatctac

SEQ ID NO: 4100957 - DNA, 25 bp, Homo sapien
actttaggctgccttgtcccgggcg

SEQ ID NO: 4100958 - DNA, 25 bp, Homo sapien
gacctgaaaggagatgccgctgaca

SEQ ID NO: 4100959 - DNA, 25 bp, Homo sapien
tcacaggacaaggtactgctgcggc

SEQ ID NO: 4100960 - DNA, 25 bp, Homo sapien
ccttgtagcccagtcggcgcgcttt

SEQ ID NO: 4100961 - DNA, 25 bp, Homo sapien
cagtcggcgcgctttatcaggccgg

SEQ ID NO: 4100962 - DNA, 25 bp, Homo sapien
tggccttgtagcccagtcggcgcgc

SEQ ID NO: 4100963 - DNA, 25 bp, Homo sapien
ccagtcggcgcgctttatcaggccg

SEQ ID NO: 4100964 - DNA, 25 bp, Homo sapien
caagcatccacgcagtcgatcacgt

SEQ ID NO: 4100965 - DNA, 25 bp, Homo sapien
agcatccacgcagtcgatcacgtac

SEQ ID NO: 4100966 - DNA, 25 bp, Homo sapien
tatccaagcatccacgcagtcgatc

SEQ ID NO: 4100967 - DNA, 25 bp, Homo sapien
tccaagcatccacgcagtcgatcac

SEQ ID NO: 4100968 - DNA, 25 bp, Homo sapien
cagtgcatacagtaactgaccagtg

SEQ ID NO: 4100969 - DNA, 25 bp, Homo sapien
accagtgttgctagcttttttctgc

SEQ ID NO: 4100970 - DNA, 25 bp, Homo sapien
tttgctttagtctgaactcattcag

SEQ ID NO: 4100971 - DNA, 25 bp, Homo sapien
tacagtaactgaccagtgttgctag

SEQ ID NO: 4100972 - DNA, 25 bp, Homo sapien
tataggaagccgtaaggcttaagac

SEQ ID NO: 4100973 - DNA, 25 bp, Homo sapien
cttcaacagtaagttaatgctatct

SEQ ID NO: 4100974 - DNA, 25 bp, Homo sapien
caaacacacacgaaattagtgattt

SEQ ID NO: 4100975 - DNA, 25 bp, Homo sapien
agactcaatggcttgtcactaatac

SEQ ID NO: 4100976 - DNA, 25 bp, Homo sapien
ctctgcaacggactgaaggcttcga

SEQ ID NO: 4100977 - DNA, 25 bp, Homo sapien
cgaacacgaatcctatatataacgt

SEQ ID NO: 4100978 - DNA, 25 bp, Homo sapien
tgggcgttttcggccaccacggcga

SEQ ID NO: 4100979 - DNA, 25 bp, Homo sapien
tgcaacggactgaaggcttcgagca

SEQ ID NO: 4100980 - DNA, 25 bp, Homo sapien
gccgctttaaagcttaggttccaca

SEQ ID NO: 4100981 - DNA, 25 bp, Homo sapien
ggcccaaggtcaatctcccacattg

SEQ ID NO: 4100982 - DNA, 25 bp, Homo sapien
ttaatactccattcctgactagggc

SEQ ID NO: 4100983 - DNA, 25 bp, Homo sapien
tgttttatatacgagacagctcacc

SEQ ID NO: 4100984 - DNA, 25 bp, Homo sapien
ccacgcatctccctgtgcttgtgga

SEQ ID NO: 4100985 - DNA, 25 bp, Homo sapien
ctttccaaggccacggctctttcgg

SEQ ID NO: 4100986 - DNA, 25 bp, Homo sapien
ggactggtttggtgatccactgggt

SEQ ID NO: 4100987 - DNA, 25 bp, Homo sapien
aggccacggctctttcggcctgcag

SEQ ID NO: 4100988 - DNA, 25 bp, Homo sapien
gccttctccaagctgcccggcgaga

SEQ ID NO: 4100989 - DNA, 25 bp, Homo sapien
cttctccaagctgcccggcgagagc

SEQ ID NO: 4100990 - DNA, 25 bp, Homo sapien
ctccaagctgcccggcgagagccac

SEQ ID NO: 4100991 - DNA, 25 bp, Homo sapien
cgccttctccaagctgcccggcgag

SEQ ID NO: 4100992 - DNA, 25 bp, Homo sapien
aggttcaagtcgacgccctctgcgg

SEQ ID NO: 4100993 - DNA, 25 bp, Homo sapien
ccgcagagggcgtcgacttgaacct

SEQ ID NO: 4100994 - DNA, 25 bp, Homo sapien
tttgacaaagcattcaagaaacatc

SEQ ID NO: 4100995 - DNA, 25 bp, Homo sapien
catcactccgataaagctgcaggtt

SEQ ID NO: 4100996 - DNA, 25 bp, Homo sapien
agcattgccatcactccgataaagc

SEQ ID NO: 4100997 - DNA, 25 bp, Homo sapien
aacacaccagtgtttaccattacca

SEQ ID NO: 4100998 - DNA, 25 bp, Homo sapien
ccattaccactaatcactgaatgcc

SEQ ID NO: 4100999 - DNA, 25 bp, Homo sapien
ttgacgtctaagctcacacttgaaa

SEQ ID NO: 4101000 - DNA, 25 bp, Homo sapien
ggttgacgtctaagctcacacttga

SEQ ID NO: 4101001 - DNA, 25 bp, Homo sapien
tagggttgacgtctaagctcacact

SEQ ID NO: 4101002 - DNA, 25 bp, Homo sapien
tattttagggttgacgtctaagctc

SEQ ID NO: 4101003 - DNA, 25 bp, Homo sapien
caaattgaccctggacaacagtagt

SEQ ID NO: 4101004 - DNA, 25 bp, Homo sapien
ggttggaaaccatgcgcttgtgact

SEQ ID NO: 4101005 - DNA, 25 bp, Homo sapien
caacagtagtctagtctcctggaag

SEQ ID NO: 4101006 - DNA, 25 bp, Homo sapien
caaagtgggtgcacaagtgatggtc

SEQ ID NO: 4101007 - DNA, 25 bp, Homo sapien
tgaagaaatttaggtctcaagaact

SEQ ID NO: 4101008 - DNA, 25 bp, Homo sapien
cagttgaacaacctctacacaatta

SEQ ID NO: 4101009 - DNA, 25 bp, Homo sapien
ttcctggaaatcaattaactgagtc

SEQ ID NO: 4101010 - DNA, 25 bp, Homo sapien
tgaacttgctatgagtacttcctgg

SEQ ID NO: 4101011 - DNA, 25 bp, Homo sapien
actgttgggtagcaaggacaggaac

SEQ ID NO: 4101012 - DNA, 25 bp, Homo sapien
tgatgcctttttgctggttagggca

SEQ ID NO: 4101013 - DNA, 25 bp, Homo sapien
cacacccagctgaacagttttagat

SEQ ID NO: 4101014 - DNA, 25 bp, Homo sapien
gacaatgctgacctttggcccgaac

SEQ ID NO: 4101015 - DNA, 25 bp, Homo sapien
tctgatgcggttgagcagctttcac

SEQ ID NO: 4101016 - DNA, 25 bp, Homo sapien
cataggagaaatgagctagcagctc

SEQ ID NO: 4101017 - DNA, 25 bp, Homo sapien
gctacagtaagttgtgaacgcgcca

SEQ ID NO: 4101018 - DNA, 25 bp, Homo sapien
tagggctaagctaggctatgctgcc

SEQ ID NO: 4101019 - DNA, 25 bp, Homo sapien
catatctggtactactggcatgcac

SEQ ID NO: 4101020 - DNA, 25 bp, Homo sapien
gggattggagagttactaagcacta

SEQ ID NO: 4101021 - DNA, 25 bp, Homo sapien
ttcctggctcagatgaactgtgtgt

SEQ ID NO: 4101022 - DNA, 25 bp, Homo sapien
ttaatgtcagttcaccaaagagtta

SEQ ID NO: 4101023 - DNA, 25 bp, Homo sapien
caacaatcaactcttcactcagctt

SEQ ID NO: 4101024 - DNA, 25 bp, Homo sapien
tgggtcccttttcaacaatcaactc

SEQ ID NO: 4101025 - DNA, 25 bp, Homo sapien
gcttcagtttatcaggagctctcct

SEQ ID NO: 4101026 - DNA, 25 bp, Homo sapien
caatacttagaggagacttagagac

SEQ ID NO: 4101027 - DNA, 25 bp, Homo sapien
gcgagggcggctgacggggagggca

SEQ ID NO: 4101028 - DNA, 25 bp, Homo sapien
agggcagccgcgaccatgtgacccg

SEQ ID NO: 4101029 - DNA, 25 bp, Homo sapien
ggcgagcggcgctcctcgctgggtc

SEQ ID NO: 4101030 - DNA, 25 bp, Homo sapien
tgcagccagcgcaccgcggcggcga

SEQ ID NO: 4101031 - DNA, 25 bp, Homo sapien
ccgggctggaagcagcggtggtcgc

SEQ ID NO: 4101032 - DNA, 25 bp, Homo sapien
gaagcagcggtggtcgcggggcccc

SEQ ID NO: 4101033 - DNA, 25 bp, Homo sapien
gccgccccgggctggaagcagcggt

SEQ ID NO: 4101034 - DNA, 25 bp, Homo sapien
ccgcccgcttcccgcagagggggca

SEQ ID NO: 4101035 - DNA, 25 bp, Homo sapien
tcgagcgtatcccttcgggaaagcc

SEQ ID NO: 4101036 - DNA, 25 bp, Homo sapien
tcacctcgcgaaaagagcgtgcggc

SEQ ID NO: 4101037 - DNA, 25 bp, Homo sapien
tcgggatcgaagcacctcagagctc

SEQ ID NO: 4101038 - DNA, 25 bp, Homo sapien
gcaaggtatgcagctaccagcctcc

SEQ ID NO: 4101039 - DNA, 25 bp, Homo sapien
caggtcgcgtcctagagcaaacggt

SEQ ID NO: 4101040 - DNA, 25 bp, Homo sapien
tgcacgctcagctgcgggtgtgacc

SEQ ID NO: 4101041 - DNA, 25 bp, Homo sapien
agtcatcctgaccatacgtgagctg

SEQ ID NO: 4101042 - DNA, 25 bp, Homo sapien
tggaaaactccagcccgaagggatc

SEQ ID NO: 4101043 - DNA, 25 bp, Homo sapien
tagaggcgcattgcaactcaaaaaa

SEQ ID NO: 4101044 - DNA, 25 bp, Homo sapien
taccctcaaaggctaagtaggccga

SEQ ID NO: 4101045 - DNA, 25 bp, Homo sapien
agggcaccctgttgttccgttgcaa

SEQ ID NO: 4101046 - DNA, 25 bp, Homo sapien
tcgaggcaagattcttagaggcgca

SEQ ID NO: 4101047 - DNA, 25 bp, Homo sapien
tcttattagacctcctgcttactga

SEQ ID NO: 4101048 - DNA, 25 bp, Homo sapien
gcttgtaacagctttgaacttaagg

SEQ ID NO: 4101049 - DNA, 25 bp, Homo sapien
aaacatggtgggtaacagcttgtaa

SEQ ID NO: 4101050 - DNA, 25 bp, Homo sapien
ctttgaacttaaggccaaatgaacg

SEQ ID NO: 4101051 - DNA, 25 bp, Homo sapien
taagatggtggcaacggcaccttcc

SEQ ID NO: 4101052 - DNA, 25 bp, Homo sapien
gacaggaccaccaagttgcgtataa

SEQ ID NO: 4101053 - DNA, 25 bp, Homo sapien
gactgatgaaactgggaggccctgc

SEQ ID NO: 4101054 - DNA, 25 bp, Homo sapien
taagccagcatgactaaagagagga

SEQ ID NO: 4101055 - DNA, 25 bp, Homo sapien
tggaagaactgatataggcaatcac

SEQ ID NO: 4101056 - DNA, 25 bp, Homo sapien
ctgagctggaagaactgatataggc

SEQ ID NO: 4101057 - DNA, 25 bp, Homo sapien
agaactgatataggcaatcacacct

SEQ ID NO: 4101058 - DNA, 25 bp, Homo sapien
gctggaagaactgatataggcaatc

SEQ ID NO: 4101059 - DNA, 25 bp, Homo sapien
gaggaggactggaaactattctcag

SEQ ID NO: 4101060 - DNA, 25 bp, Homo sapien
gaggaggaggactggaaactattct

SEQ ID NO: 4101061 - DNA, 25 bp, Homo sapien
gaggactggaaactattctcagaac

SEQ ID NO: 4101062 - DNA, 25 bp, Homo sapien
gactggaaactattctcagaaccct

SEQ ID NO: 4101063 - DNA, 25 bp, Homo sapien
ttgggattaccattggtatcagaat

SEQ ID NO: 4101064 - DNA, 25 bp, Homo sapien
tgggattaccattggtatcagaatt

SEQ ID NO: 4101065 - DNA, 25 bp, Homo sapien
cttgggattaccattggtatcagaa

SEQ ID NO: 4101066 - DNA, 25 bp, Homo sapien
tcaagatgccttcaatattggcgag

SEQ ID NO: 4101067 - DNA, 25 bp, Homo sapien
cactatgactttttgtcatcccagg

SEQ ID NO: 4101068 - DNA, 25 bp, Homo sapien
caatctattcgatcattcttcaaga

SEQ ID NO: 4101069 - DNA, 25 bp, Homo sapien
tcccaggtgcactcgatttgcttgt

SEQ ID NO: 4101070 - DNA, 25 bp, Homo sapien
ttacagccttcgcaagcatgaactc

SEQ ID NO: 4101071 - DNA, 25 bp, Homo sapien
acagccttcgcaagcatgaactcca

SEQ ID NO: 4101072 - DNA, 25 bp, Homo sapien
tagtggaatcctgacgccacatccc

SEQ ID NO: 4101073 - DNA, 25 bp, Homo sapien
tgaactccatagtggaatcctgacg

SEQ ID NO: 4101074 - DNA, 25 bp, Homo sapien
tacatgttctgtgataggtctccaa

SEQ ID NO: 4101075 - DNA, 25 bp, Homo sapien
gatctccagtttcatggtaccaggg

SEQ ID NO: 4101076 - DNA, 25 bp, Homo sapien
tacgtgccagcaacaggtaagtgtt

SEQ ID NO: 4101077 - DNA, 25 bp, Homo sapien
gacgtaataatagctcaccgcaact

SEQ ID NO: 4101078 - DNA, 25 bp, Homo sapien
ttcaggcacttcttgtactggatgt

SEQ ID NO: 4101079 - DNA, 25 bp, Homo sapien
ttgttgaatacttctccgaaagaaa

SEQ ID NO: 4101080 - DNA, 25 bp, Homo sapien
tgttgaatacttctccgaaagaaac

SEQ ID NO: 4101081 - DNA, 25 bp, Homo sapien
tttgttgaatacttctccgaaagaa

SEQ ID NO: 4101082 - DNA, 25 bp, Homo sapien
ccttggtaaccggtttatagctctg

SEQ ID NO: 4101083 - DNA, 25 bp, Homo sapien
accggtttatagctctggttcatga

SEQ ID NO: 4101084 - DNA, 25 bp, Homo sapien
ggttcatgatgaggaataaaagcca

SEQ ID NO: 4101085 - DNA, 25 bp, Homo sapien
aagccaagctccatacactttagga

SEQ ID NO: 4101086 - DNA, 25 bp, Homo sapien
tgaactgtccattgagatgctgctg

SEQ ID NO: 4101087 - DNA, 25 bp, Homo sapien
tacagggaaaatggctgctaagccc

SEQ ID NO: 4101088 - DNA, 25 bp, Homo sapien
cacgcttaggaatacgaccaaaccg

SEQ ID NO: 4101089 - DNA, 25 bp, Homo sapien
tcctccagtgttgcacaggtaacta

SEQ ID NO: 4101090 - DNA, 25 bp, Homo sapien
caagttagcatatctcccgaataaa

SEQ ID NO: 4101091 - DNA, 25 bp, Homo sapien
taaaggaccaattctgcatgaatca

SEQ ID NO: 4101092 - DNA, 25 bp, Homo sapien
aaagctttccctgatacaatgtaag

SEQ ID NO: 4101093 - DNA, 25 bp, Homo sapien
catgcttgtacctagctgggtgtga

SEQ ID NO: 4101094 - DNA, 25 bp, Homo sapien
catggtttaaactggaaatggtgtg

SEQ ID NO: 4101095 - DNA, 25 bp, Homo sapien
aactggaaatggtgtggtactgctg

SEQ ID NO: 4101096 - DNA, 25 bp, Homo sapien
caaaggacttcatggtttaaactgg

SEQ ID NO: 4101097 - DNA, 25 bp, Homo sapien
gtggtactgctgtttttggtgaaat

SEQ ID NO: 4101098 - DNA, 25 bp, Homo sapien
tgtcagtagaaaataccaagcacta

SEQ ID NO: 4101099 - DNA, 25 bp, Homo sapien
ctgtcagtagaaaataccaagcact

SEQ ID NO: 4101100 - DNA, 25 bp, Homo sapien
ccaccttatgctagtatatggtgtt

SEQ ID NO: 4101101 - DNA, 25 bp, Homo sapien
cagaagtcacaagcctaggcccaaa

SEQ ID NO: 4101102 - DNA, 25 bp, Homo sapien
ggtttagtgatttgtccaacacagc

SEQ ID NO: 4101103 - DNA, 25 bp, Homo sapien
caaggtgcctcattttgttgaaaag

SEQ ID NO: 4101104 - DNA, 25 bp, Homo sapien
taaaatctactgagatattagcact

SEQ ID NO: 4101105 - DNA, 25 bp, Homo sapien
atttgctgcccaccatactgtagaa

SEQ ID NO: 4101106 - DNA, 25 bp, Homo sapien
tactaagaggtggtaaagaaatgtc

SEQ ID NO: 4101107 - DNA, 25 bp, Homo sapien
aaaagcagcatctcaattatcagaa

SEQ ID NO: 4101108 - DNA, 25 bp, Homo sapien
cactgctggagtgaagctcatcgaa

SEQ ID NO: 4101109 - DNA, 25 bp, Homo sapien
tctgaacccaggaatacgctttgca

SEQ ID NO: 4101110 - DNA, 25 bp, Homo sapien
catgtcctgatttatgaggatccac

SEQ ID NO: 4101111 - DNA, 25 bp, Homo sapien
tatggagacttactcaatggacaaa

SEQ ID NO: 4101112 - DNA, 25 bp, Homo sapien
cctttaaaaggttgacctggtcatg

SEQ ID NO: 4101113 - DNA, 25 bp, Homo sapien
taagttggagggcatttagcttctc

SEQ ID NO: 4101114 - DNA, 25 bp, Homo sapien
tgcagataccaggacaacagctgta

SEQ ID NO: 4101115 - DNA, 25 bp, Homo sapien
ggtgacagtacgttcctttgcatca

SEQ ID NO: 4101116 - DNA, 25 bp, Homo sapien
tcaaataatgatgcgaaccgtacca

SEQ ID NO: 4101117 - DNA, 25 bp, Homo sapien
cgaatgagagtttcctgcaaagcct

SEQ ID NO: 4101118 - DNA, 25 bp, Homo sapien
taaggtccttagtgcacgaatgaga

SEQ ID NO: 4101119 - DNA, 25 bp, Homo sapien
gcctccacagagttgacgttttcta

SEQ ID NO: 4101120 - DNA, 25 bp, Homo sapien
gctcctcagagtgcatgttgtttaa

SEQ ID NO: 4101121 - DNA, 25 bp, Homo sapien
tggactcagaacatacacacgcacg

SEQ ID NO: 4101122 - DNA, 25 bp, Homo sapien
tctatcagggagatgcagtcaacgt

SEQ ID NO: 4101123 - DNA, 25 bp, Homo sapien
taagtgcgacacagctgattggtct

SEQ ID NO: 4101124 - DNA, 25 bp, Homo sapien
agtaggataccccacacatatggca

SEQ ID NO: 4101125 - DNA, 25 bp, Homo sapien
catgcttgggcaaatgagctagtga

SEQ ID NO: 4101126 - DNA, 25 bp, Homo sapien
tgcttgggcaaatgagctagtgaca

SEQ ID NO: 4101127 - DNA, 25 bp, Homo sapien
gctccatgcttgggcaaatgagcta

SEQ ID NO: 4101128 - DNA, 25 bp, Homo sapien
tccatgcttgggcaaatgagctagt

SEQ ID NO: 4101129 - DNA, 25 bp, Homo sapien
ctggaaagtgacaggctaccctgat

SEQ ID NO: 4101130 - DNA, 25 bp, Homo sapien
aaagatgttatgtgagtgtttctcc

SEQ ID NO: 4101131 - DNA, 25 bp, Homo sapien
cccaaaagatgttatgtgagtgttt

SEQ ID NO: 4101132 - DNA, 25 bp, Homo sapien
gacaggctaccctgatcccaaaaga

SEQ ID NO: 4101133 - DNA, 25 bp, Homo sapien
atttgtatcttctcccttgctgtca

SEQ ID NO: 4101134 - DNA, 25 bp, Homo sapien
ggatccccagtattgcttcaaagtc

SEQ ID NO: 4101135 - DNA, 25 bp, Homo sapien
tcatgctcagccagtcccacaccct

SEQ ID NO: 4101136 - DNA, 25 bp, Homo sapien
gtcatgctcagccagtcccacaccc

SEQ ID NO: 4101137 - DNA, 25 bp, Homo sapien
ctgcacccttaaaactgaactctgg

SEQ ID NO: 4101138 - DNA, 25 bp, Homo sapien
ctggttcttgcaaactgaggaccat

SEQ ID NO: 4101139 - DNA, 25 bp, Homo sapien
aaaactgaactctggttcttgcaaa

SEQ ID NO: 4101140 - DNA, 25 bp, Homo sapien
gaactctggttcttgcaaactgagg

SEQ ID NO: 4101141 - DNA, 25 bp, Homo sapien
accgattagcttcctgttccttttg

SEQ ID NO: 4101142 - DNA, 25 bp, Homo sapien
tcaccgattagcttcctgttccttt

SEQ ID NO: 4101143 - DNA, 25 bp, Homo sapien
caccgattagcttcctgttcctttt

SEQ ID NO: 4101144 - DNA, 25 bp, Homo sapien
gacccatagggtccttggaagctta

SEQ ID NO: 4101145 - DNA, 25 bp, Homo sapien
gcacttaaatgaggcgaatgggcag

SEQ ID NO: 4101146 - DNA, 25 bp, Homo sapien
ctttgtagctatatgcagagattcc

SEQ ID NO: 4101147 - DNA, 25 bp, Homo sapien
cttggaagcttaaccaagggcctga

SEQ ID NO: 4101148 - DNA, 25 bp, Homo sapien
gatttttacatagcttttgtatgca

SEQ ID NO: 4101149 - DNA, 25 bp, Homo sapien
ggcgtagataaactcataagcttaa

SEQ ID NO: 4101150 - DNA, 25 bp, Homo sapien
gcttttgtatgcagatataaaactg

SEQ ID NO: 4101151 - DNA, 25 bp, Homo sapien
taattatgaatatagtgggcgtaga

SEQ ID NO: 4101152 - DNA, 25 bp, Homo sapien
cccgctttgttcatacccttgctcg

SEQ ID NO: 4101153 - DNA, 25 bp, Homo sapien
ccccgctttgttcatacccttgctc

SEQ ID NO: 4101154 - DNA, 25 bp, Homo sapien
ttctccaactgccccgctttgttca

SEQ ID NO: 4101155 - DNA, 25 bp, Homo sapien
gagattaagcaccatctgcacacgg

SEQ ID NO: 4101156 - DNA, 25 bp, Homo sapien
tctgcacacgggcaatagctgaagc

SEQ ID NO: 4101157 - DNA, 25 bp, Homo sapien
aatgcaggtctggaaggcacaagag

SEQ ID NO: 4101158 - DNA, 25 bp, Homo sapien
aagctgtagacactgatggcttcac

SEQ ID NO: 4101159 - DNA, 25 bp, Homo sapien
tctatagtgtatctccattagatct

SEQ ID NO: 4101160 - DNA, 25 bp, Homo sapien
ctatagtgtatctccattagatctg

SEQ ID NO: 4101161 - DNA, 25 bp, Homo sapien
taataggggcaaagagcacattgtc

SEQ ID NO: 4101162 - DNA, 25 bp, Homo sapien
gggcaaagagcacattgtccacggt

SEQ ID NO: 4101163 - DNA, 25 bp, Homo sapien
cattgtccacggtctgaagactttt

SEQ ID NO: 4101164 - DNA, 25 bp, Homo sapien
gaacacctttctccataataggggc

SEQ ID NO: 4101165 - DNA, 25 bp, Homo sapien
ggaagtttaacgttgatgcctacta

SEQ ID NO: 4101166 - DNA, 25 bp, Homo sapien
cattcctctagatagggctgggaga

SEQ ID NO: 4101167 - DNA, 25 bp, Homo sapien
taaaattggtggcaaaggaccacta

SEQ ID NO: 4101168 - DNA, 25 bp, Homo sapien
gaaattatcttaggacaccatagca

SEQ ID NO: 4101169 - DNA, 25 bp, Homo sapien
tgagagctatggaagagcccttaca

SEQ ID NO: 4101170 - DNA, 25 bp, Homo sapien
tctgctgtaagcatcctaagtgaat

SEQ ID NO: 4101171 - DNA, 25 bp, Homo sapien
tacctatgcttctgtctgctgtaag

SEQ ID NO: 4101172 - DNA, 25 bp, Homo sapien
ttattttaacctgcatatacctatg

SEQ ID NO: 4101173 - DNA, 25 bp, Homo sapien
cggtttcacgttgtgctgggacact

SEQ ID NO: 4101174 - DNA, 25 bp, Homo sapien
ccaagtgtgccagtagctaatggga

SEQ ID NO: 4101175 - DNA, 25 bp, Homo sapien
aaaggcagcttgtttcggtttcacg

SEQ ID NO: 4101176 - DNA, 25 bp, Homo sapien
taagtggaatccaaagaaaggcagc

SEQ ID NO: 4101177 - DNA, 25 bp, Homo sapien
tctgaaaagtgttcacggccagccc

SEQ ID NO: 4101178 - DNA, 25 bp, Homo sapien
gaaagtacagccttgccatgcagga

SEQ ID NO: 4101179 - DNA, 25 bp, Homo sapien
ggtgtgtaaacttgctcctgggcca

SEQ ID NO: 4101180 - DNA, 25 bp, Homo sapien
gaaaatggccttacagcctgggaca

SEQ ID NO: 4101181 - DNA, 25 bp, Homo sapien
accagacattccctccgggaatcag

SEQ ID NO: 4101182 - DNA, 25 bp, Homo sapien
tcaaccagacattccctccgggaat

SEQ ID NO: 4101183 - DNA, 25 bp, Homo sapien
cagacattccctccgggaatcagtc

SEQ ID NO: 4101184 - DNA, 25 bp, Homo sapien
tgtcaaccagacattccctccggga

SEQ ID NO: 4101185 - DNA, 25 bp, Homo sapien
tggagagccctcttcaagactggtg

SEQ ID NO: 4101186 - DNA, 25 bp, Homo sapien
tcttcaagactggtggcctttccat

SEQ ID NO: 4101187 - DNA, 25 bp, Homo sapien
gagccctcttcaagactggtggcct

SEQ ID NO: 4101188 - DNA, 25 bp, Homo sapien
aattggagagccctcttcaagactg

SEQ ID NO: 4101189 - DNA, 25 bp, Homo sapien
aaactcaggacagtcaatccccagg

SEQ ID NO: 4101190 - DNA, 25 bp, Homo sapien
tccccaggccttaggactgattaca

SEQ ID NO: 4101191 - DNA, 25 bp, Homo sapien
tagatagatggacacgctcctggca

SEQ ID NO: 4101192 - DNA, 25 bp, Homo sapien
gcaacgatgcagaatgccaacacga

SEQ ID NO: 4101193 - DNA, 25 bp, Homo sapien
gaacttattctccagtagacctgag

SEQ ID NO: 4101194 - DNA, 25 bp, Homo sapien
tgtgtgtcgaggatgcagcctgacc

SEQ ID NO: 4101195 - DNA, 25 bp, Homo sapien
ggcaacagggcaggtcctcatagac

SEQ ID NO: 4101196 - DNA, 25 bp, Homo sapien
tagaatcaacccatgagctgtgagt

SEQ ID NO: 4101197 - DNA, 25 bp, Homo sapien
ttagaatattcaggagtggtagcat

SEQ ID NO: 4101198 - DNA, 25 bp, Homo sapien
catggcagcttccatgggttcagag

SEQ ID NO: 4101199 - DNA, 25 bp, Homo sapien
caggagtggtagcatgtgaaaacat

SEQ ID NO: 4101200 - DNA, 25 bp, Homo sapien
cagagggggtggttaatggcagcac

SEQ ID NO: 4101201 - DNA, 25 bp, Homo sapien
gatcccatgatttgctggtgagctc

SEQ ID NO: 4101202 - DNA, 25 bp, Homo sapien
ataccagagtcaaaggtttgatgta

SEQ ID NO: 4101203 - DNA, 25 bp, Homo sapien
taccagagtcaaaggtttgatgtat

SEQ ID NO: 4101204 - DNA, 25 bp, Homo sapien
aaggtttgatgtatagctctccctc

SEQ ID NO: 4101205 - DNA, 25 bp, Homo sapien
atattccccaaataccagagtcaaa

SEQ ID NO: 4101206 - DNA, 25 bp, Homo sapien
tactccccacagcaaggttaaatga

SEQ ID NO: 4101207 - DNA, 25 bp, Homo sapien
cactcaggatgctatagacttggga

SEQ ID NO: 4101208 - DNA, 25 bp, Homo sapien
taaatgaacatgcaaagtaaccttg

SEQ ID NO: 4101209 - DNA, 25 bp, Homo sapien
tatgatttgaaaacaccttgcctct

SEQ ID NO: 4101210 - DNA, 25 bp, Homo sapien
tttcctgctgtcagacgtttcctca

SEQ ID NO: 4101211 - DNA, 25 bp, Homo sapien
cgtttcctcaaactacctctgggct

SEQ ID NO: 4101212 - DNA, 25 bp, Homo sapien
ggagtgttcggagatgatagtccac

SEQ ID NO: 4101213 - DNA, 25 bp, Homo sapien
tctgggctgtcctcttaagagacta

SEQ ID NO: 4101214 - DNA, 25 bp, Homo sapien
aatggcacctttaggtcaaatgttg

SEQ ID NO: 4101215 - DNA, 25 bp, Homo sapien
cctttaggtcaaatgttgtggccat

SEQ ID NO: 4101216 - DNA, 25 bp, Homo sapien
tttaatggcacctttaggtcaaatg

SEQ ID NO: 4101217 - DNA, 25 bp, Homo sapien
ggcacctttaggtcaaatgttgtgg

SEQ ID NO: 4101218 - DNA, 25 bp, Homo sapien
tggcaacgtgctttggatagatcac

SEQ ID NO: 4101219 - DNA, 25 bp, Homo sapien
aagacatacacatgtggcctcgcag

SEQ ID NO: 4101220 - DNA, 25 bp, Homo sapien
tctgtaggcctgaggaagttgagca

SEQ ID NO: 4101221 - DNA, 25 bp, Homo sapien
caaggaagggtgacaagaggcacaa

SEQ ID NO: 4101222 - DNA, 25 bp, Homo sapien
cgagtgcccagaaaaaaacatttct

SEQ ID NO: 4101223 - DNA, 25 bp, Homo sapien
gtgcccagaaaaaaacatttcttca

SEQ ID NO: 4101224 - DNA, 25 bp, Homo sapien
tgcccagaaaaaaacatttcttcat

SEQ ID NO: 4101225 - DNA, 25 bp, Homo sapien
tcaggaacggacattctagaaaggt

SEQ ID NO: 4101226 - DNA, 25 bp, Homo sapien
ggtccaagtcttatcttcattactc

SEQ ID NO: 4101227 - DNA, 25 bp, Homo sapien
atttgctttacaagtttagccacac

SEQ ID NO: 4101228 - DNA, 25 bp, Homo sapien
caagtttagccacactcaggaacgg

SEQ ID NO: 4101229 - DNA, 25 bp, Homo sapien
gctgctagcattaagggaaagtttc

SEQ ID NO: 4101230 - DNA, 25 bp, Homo sapien
tgctagcattaagggaaagtttcct

SEQ ID NO: 4101231 - DNA, 25 bp, Homo sapien
ctgctagcattaagggaaagtttcc

SEQ ID NO: 4101232 - DNA, 25 bp, Homo sapien
gctgagagccagtgtattattagaa

SEQ ID NO: 4101233 - DNA, 25 bp, Homo sapien
tgaagacatctctatcctgtttgtt

SEQ ID NO: 4101234 - DNA, 25 bp, Homo sapien
gttttagcaccttggatgattgtgc

SEQ ID NO: 4101235 - DNA, 25 bp, Homo sapien
tcagtgaagacatctctatcctgtt

SEQ ID NO: 4101236 - DNA, 25 bp, Homo sapien
catttgtttatagggccttcataac

SEQ ID NO: 4101237 - DNA, 25 bp, Homo sapien
tgtttctgtaatgagtatgcatttg

SEQ ID NO: 4101238 - DNA, 25 bp, Homo sapien
tgtggatgccacgtaaggcaagtgc

SEQ ID NO: 4101239 - DNA, 25 bp, Homo sapien
ccttcataactcgtctgggtcatca

SEQ ID NO: 4101240 - DNA, 25 bp, Homo sapien
ggctggctagctgtgggctgattga

SEQ ID NO: 4101241 - DNA, 25 bp, Homo sapien
gatggcctctactagaacattggaa

SEQ ID NO: 4101242 - DNA, 25 bp, Homo sapien
gcctctactagaacattggaaaaac

SEQ ID NO: 4101243 - DNA, 25 bp, Homo sapien
gaggatggcctctactagaacattg

SEQ ID NO: 4101244 - DNA, 25 bp, Homo sapien
tctcactttctttgccggatgggca

SEQ ID NO: 4101245 - DNA, 25 bp, Homo sapien
ctcactttctttgccggatgggcaa

SEQ ID NO: 4101246 - DNA, 25 bp, Homo sapien
ctttctttgccggatgggcaaaatt

SEQ ID NO: 4101247 - DNA, 25 bp, Homo sapien
cactttctttgccggatgggcaaaa

SEQ ID NO: 4101248 - DNA, 25 bp, Homo sapien
tctgaaaatagatggttggaagagt

SEQ ID NO: 4101249 - DNA, 25 bp, Homo sapien
ctaatctaagatcaggttttctttg

SEQ ID NO: 4101250 - DNA, 25 bp, Homo sapien
agatcaggttttctttgtagcatgg

SEQ ID NO: 4101251 - DNA, 25 bp, Homo sapien
gctctggaaattctgaaaatagatg

SEQ ID NO: 4101252 - DNA, 25 bp, Homo sapien
cttgtgttagagtccctttccctga

SEQ ID NO: 4101253 - DNA, 25 bp, Homo sapien
ttgtgttagagtccctttccctgaa

SEQ ID NO: 4101254 - DNA, 25 bp, Homo sapien
tgtgttagagtccctttccctgaaa

SEQ ID NO: 4101255 - DNA, 25 bp, Homo sapien
ccttgtgttagagtccctttccctg

SEQ ID NO: 4101256 - DNA, 25 bp, Homo sapien
caattgcagctcttatatgttgaga

SEQ ID NO: 4101257 - DNA, 25 bp, Homo sapien
cacaggttcatatggcagtgcccca

SEQ ID NO: 4101258 - DNA, 25 bp, Homo sapien
atgttgagacctattccaggaacca

SEQ ID NO: 4101259 - DNA, 25 bp, Homo sapien
tacattcataccctgatgaggaacc

SEQ ID NO: 4101260 - DNA, 25 bp, Homo sapien
gaaaagcggcttgtcacttgccatg

SEQ ID NO: 4101261 - DNA, 25 bp, Homo sapien
caaaaattgtaggactgcagttagt

SEQ ID NO: 4101262 - DNA, 25 bp, Homo sapien
gagaagtgttcaccatatgattgca

SEQ ID NO: 4101263 - DNA, 25 bp, Homo sapien
gcacaatctagacagctccatggct

SEQ ID NO: 4101264 - DNA, 25 bp, Homo sapien
gaacccagatgttttccctgctaac

SEQ ID NO: 4101265 - DNA, 25 bp, Homo sapien
atttggggtagtgggaacccagatg

SEQ ID NO: 4101266 - DNA, 25 bp, Homo sapien
tgggaacccagatgttttccctgct

SEQ ID NO: 4101267 - DNA, 25 bp, Homo sapien
agtgggaacccagatgttttccctg

SEQ ID NO: 4101268 - DNA, 25 bp, Homo sapien
tatgtttacattggtgaataaagtc

SEQ ID NO: 4101269 - DNA, 25 bp, Homo sapien
ttgctcaggattggtcttttgtgga

SEQ ID NO: 4101270 - DNA, 25 bp, Homo sapien
agtcagagtactttagtcattttgc

SEQ ID NO: 4101271 - DNA, 25 bp, Homo sapien
tttcccctgctaagttgctcaggat

SEQ ID NO: 4101272 - DNA, 25 bp, Homo sapien
tattttcatagagggctcatcgagg

SEQ ID NO: 4101273 - DNA, 25 bp, Homo sapien
tatgatagtgtcatgccagcaagtg

SEQ ID NO: 4101274 - DNA, 25 bp, Homo sapien
tgttcaggcagccagaagtcatggc

SEQ ID NO: 4101275 - DNA, 25 bp, Homo sapien
catcgaggtctgtgtggcctatgat

SEQ ID NO: 4101276 - DNA, 25 bp, Homo sapien
ttcttgtggccatgatgcacatccc

SEQ ID NO: 4101277 - DNA, 25 bp, Homo sapien
ggccatgatgcacatccctgagcag

SEQ ID NO: 4101278 - DNA, 25 bp, Homo sapien
tcttgtggccatgatgcacatccct

SEQ ID NO: 4101279 - DNA, 25 bp, Homo sapien
tgtggccatgatgcacatccctgag

SEQ ID NO: 4101280 - DNA, 25 bp, Homo sapien
aatctgcctcagactttgctttctt

SEQ ID NO: 4101281 - DNA, 25 bp, Homo sapien
tcttttccttggctttggcagcctg

SEQ ID NO: 4101282 - DNA, 25 bp, Homo sapien
tgctttcttttccttggctttggca

SEQ ID NO: 4101283 - DNA, 25 bp, Homo sapien
ttaatctgcctcagactttgctttc

SEQ ID NO: 4101284 - DNA, 25 bp, Homo sapien
tatggatccaagtgtgaacctggtg

SEQ ID NO: 4101285 - DNA, 25 bp, Homo sapien
gcacgtgctcacacttgtactcaag

SEQ ID NO: 4101286 - DNA, 25 bp, Homo sapien
tgtcgaaatttggtgtgatcacaac

SEQ ID NO: 4101287 - DNA, 25 bp, Homo sapien
tcacaacagcagaatggtacaatat

SEQ ID NO: 4101288 - DNA, 25 bp, Homo sapien
tcgggtacctaaaacatgttcactg

SEQ ID NO: 4101289 - DNA, 25 bp, Homo sapien
acatgttcactgatgttttgaagaa

SEQ ID NO: 4101290 - DNA, 25 bp, Homo sapien
tatgacatttcgggtacctaaaaca

SEQ ID NO: 4101291 - DNA, 25 bp, Homo sapien
ggtacctaaaacatgttcactgatg

SEQ ID NO: 4101292 - DNA, 25 bp, Homo sapien
ttcatgcgtttaaatctgtagtcag

SEQ ID NO: 4101293 - DNA, 25 bp, Homo sapien
aatctgtagtcagggattggttcat

SEQ ID NO: 4101294 - DNA, 25 bp, Homo sapien
ggttcatgttttgagtcatcgtatt

SEQ ID NO: 4101295 - DNA, 25 bp, Homo sapien
gattggttcatgttttgagtcatcg

SEQ ID NO: 4101296 - DNA, 25 bp, Homo sapien
tgcctccagtagctagggtcgctga

SEQ ID NO: 4101297 - DNA, 25 bp, Homo sapien
ttagctgtctgcctccagtagctag

SEQ ID NO: 4101298 - DNA, 25 bp, Homo sapien
tccatgggcctttagctgtctgcct

SEQ ID NO: 4101299 - DNA, 25 bp, Homo sapien
tagctagggtcgctgacctgggata

SEQ ID NO: 4101300 - DNA, 25 bp, Homo sapien
caataccctgaaagttctttgcttg

SEQ ID NO: 4101301 - DNA, 25 bp, Homo sapien
taagtaagaggaaggataggaatga

SEQ ID NO: 4101302 - DNA, 25 bp, Homo sapien
agaatagaggagggatcttttatct

SEQ ID NO: 4101303 - DNA, 25 bp, Homo sapien
tcttttatctcaataccctgaaagt

SEQ ID NO: 4101304 - DNA, 25 bp, Homo sapien
ttggctttccatctggagagaggtc

SEQ ID NO: 4101305 - DNA, 25 bp, Homo sapien
ctagattggctttccatctggagag

SEQ ID NO: 4101306 - DNA, 25 bp, Homo sapien
gattggctttccatctggagagagg

SEQ ID NO: 4101307 - DNA, 25 bp, Homo sapien
tagattggctttccatctggagaga

SEQ ID NO: 4101308 - DNA, 25 bp, Homo sapien
tggatgcccttgtaaatgttgatga

SEQ ID NO: 4101309 - DNA, 25 bp, Homo sapien
tcaaggggcacacttcttaaagccc

SEQ ID NO: 4101310 - DNA, 25 bp, Homo sapien
taaaggcaaaatagctcttcttctc

SEQ ID NO: 4101311 - DNA, 25 bp, Homo sapien
tgggtcaccaccttgttaaaggcaa

SEQ ID NO: 4101312 - DNA, 25 bp, Homo sapien
cggaccatattgccacatttggcac

SEQ ID NO: 4101313 - DNA, 25 bp, Homo sapien
ggtctcagtacgtaagtgtcatttt

SEQ ID NO: 4101314 - DNA, 25 bp, Homo sapien
ctcagtacgtaagtgtcatttttaa

SEQ ID NO: 4101315 - DNA, 25 bp, Homo sapien
cctgaggtctcagtacgtaagtgtc

SEQ ID NO: 4101316 - DNA, 25 bp, Homo sapien
gaggtctcagtacgtaagtgtcatt

SEQ ID NO: 4101317 - DNA, 25 bp, Homo sapien
catcgaggcgtgtcttgtttactgc

SEQ ID NO: 4101318 - DNA, 25 bp, Homo sapien
tctgactccgtctttcatgatcaag

SEQ ID NO: 4101319 - DNA, 25 bp, Homo sapien
tgatcaagtcgtgcatcgaggcgtg

SEQ ID NO: 4101320 - DNA, 25 bp, Homo sapien
tactgctgtgcgtttgtaaactggg

SEQ ID NO: 4101321 - DNA, 25 bp, Homo sapien
atgcatagaaatgcattcctcagaa

SEQ ID NO: 4101322 - DNA, 25 bp, Homo sapien
tatgcatagaaatgcattcctcaga

SEQ ID NO: 4101323 - DNA, 25 bp, Homo sapien
ctatgcatagaaatgcattcctcag

SEQ ID NO: 4101324 - DNA, 25 bp, Homo sapien
tgcatagaaatgcattcctcagaat

SEQ ID NO: 4101325 - DNA, 25 bp, Homo sapien
tagatgtacgtgatcttccaggcca

SEQ ID NO: 4101326 - DNA, 25 bp, Homo sapien
agagcatttcgaagaagcttggccc

SEQ ID NO: 4101327 - DNA, 25 bp, Homo sapien
gcccaggtggttagatgtacgtgat

SEQ ID NO: 4101328 - DNA, 25 bp, Homo sapien
tcctggtaaatgagaagtgctcaga

SEQ ID NO: 4101329 - DNA, 25 bp, Homo sapien
cttgtgaagagcttgcaaaatagta

SEQ ID NO: 4101330 - DNA, 25 bp, Homo sapien
tgtgaagagcttgcaaaatagtagg

SEQ ID NO: 4101331 - DNA, 25 bp, Homo sapien
aagatattaagatgccgtcctgctt

SEQ ID NO: 4101332 - DNA, 25 bp, Homo sapien
ctgcttgtgaagagcttgcaaaata

SEQ ID NO: 4101333 - DNA, 25 bp, Homo sapien
tcctttgacaataacccagcatact

SEQ ID NO: 4101334 - DNA, 25 bp, Homo sapien
ccaggtttgatagagagatggcttc

SEQ ID NO: 4101335 - DNA, 25 bp, Homo sapien
atggaatgacaatttagcagcagca

SEQ ID NO: 4101336 - DNA, 25 bp, Homo sapien
tgttgtggccagactttgagtggaa

SEQ ID NO: 4101337 - DNA, 25 bp, Homo sapien
ctccaggactcagatcatagagttt

SEQ ID NO: 4101338 - DNA, 25 bp, Homo sapien
tccattaagcttgaaatcattcatt

SEQ ID NO: 4101339 - DNA, 25 bp, Homo sapien
taaatttccattaagcttgaaatca

SEQ ID NO: 4101340 - DNA, 25 bp, Homo sapien
catagagttttgctatatagtactt

SEQ ID NO: 4101341 - DNA, 25 bp, Homo sapien
caccaggtggtttatagcgccggtt

SEQ ID NO: 4101342 - DNA, 25 bp, Homo sapien
cttgagcaccaggtggtttatagcg

SEQ ID NO: 4101343 - DNA, 25 bp, Homo sapien
tgagcaccaggtggtttatagcgcc

SEQ ID NO: 4101344 - DNA, 25 bp, Homo sapien
ctgcttgagcaccaggtggtttata

SEQ ID NO: 4101345 - DNA, 25 bp, Homo sapien
ctgctcaggatctctaaagagagct

SEQ ID NO: 4101346 - DNA, 25 bp, Homo sapien
cccagtacaacagggtcttcagcct

SEQ ID NO: 4101347 - DNA, 25 bp, Homo sapien
tcttccgtggtcttttgtgcttcag

SEQ ID NO: 4101348 - DNA, 25 bp, Homo sapien
tgtgcttcagaactacccagtacaa

SEQ ID NO: 4101349 - DNA, 25 bp, Homo sapien
catggaggaacattctttccttcag

SEQ ID NO: 4101350 - DNA, 25 bp, Homo sapien
ctttccttcaggttgctgatacatt

SEQ ID NO: 4101351 - DNA, 25 bp, Homo sapien
tcaggttgctgatacatttgctgca

SEQ ID NO: 4101352 - DNA, 25 bp, Homo sapien
tcatggaggaacattctttccttca

SEQ ID NO: 4101353 - DNA, 25 bp, Homo sapien
tcccaggcttctgggtgactgctgc

SEQ ID NO: 4101354 - DNA, 25 bp, Homo sapien
tgaaaagcacctcgaggaaactcct

SEQ ID NO: 4101355 - DNA, 25 bp, Homo sapien
tggcatctgaagagcccactggctc

SEQ ID NO: 4101356 - DNA, 25 bp, Homo sapien
tctcagctgggtgccttgcccagat

SEQ ID NO: 4101357 - DNA, 25 bp, Homo sapien
attggctttgtgtaaaagccccttg

SEQ ID NO: 4101358 - DNA, 25 bp, Homo sapien
gataattggctttgtgtaaaagccc

SEQ ID NO: 4101359 - DNA, 25 bp, Homo sapien
ttgacttttccaagattggcagaga

SEQ ID NO: 4101360 - DNA, 25 bp, Homo sapien
tcagaaagtgtcaagctccatcgct

SEQ ID NO: 4101361 - DNA, 25 bp, Homo sapien
gcaataacttccttaggtgacaggt

SEQ ID NO: 4101362 - DNA, 25 bp, Homo sapien
tggcttacggcaaaaagacccagag

SEQ ID NO: 4101363 - DNA, 25 bp, Homo sapien
tcttttcactgataggaggaactca

SEQ ID NO: 4101364 - DNA, 25 bp, Homo sapien
ctttcctgatgttttgaccaaccac

SEQ ID NO: 4101365 - DNA, 25 bp, Homo sapien
actttcctgatgttttgaccaacca

SEQ ID NO: 4101366 - DNA, 25 bp, Homo sapien
tttcctgatgttttgaccaaccaca

SEQ ID NO: 4101367 - DNA, 25 bp, Homo sapien
ccacatgcaagctcttttcatataa

SEQ ID NO: 4101368 - DNA, 25 bp, Homo sapien
gctcaggaatgtttgtgatgaggaa

SEQ ID NO: 4101369 - DNA, 25 bp, Homo sapien
caggaatgtttgtgatgaggaatgt

SEQ ID NO: 4101370 - DNA, 25 bp, Homo sapien
gaggctcaggaatgtttgtgatgag

SEQ ID NO: 4101371 - DNA, 25 bp, Homo sapien
aatgtttgtgatgaggaatgttgac

SEQ ID NO: 4101372 - DNA, 25 bp, Homo sapien
gcagccctaagtggaccaaccagtg

SEQ ID NO: 4101373 - DNA, 25 bp, Homo sapien
aatggcagccctaagtggaccaacc

SEQ ID NO: 4101374 - DNA, 25 bp, Homo sapien
gcaatggcagccctaagtggaccaa

SEQ ID NO: 4101375 - DNA, 25 bp, Homo sapien
gccctaagtggaccaaccagtgcat

SEQ ID NO: 4101376 - DNA, 25 bp, Homo sapien
gaagacattgaccttcaactccctg

SEQ ID NO: 4101377 - DNA, 25 bp, Homo sapien
tgacatgttaccttgatccctggaa

SEQ ID NO: 4101378 - DNA, 25 bp, Homo sapien
tgccttgaatacatggaaatcctca

SEQ ID NO: 4101379 - DNA, 25 bp, Homo sapien
tcagcagaatctttatgagttccag

SEQ ID NO: 4101380 - DNA, 25 bp, Homo sapien
cagcgccgaacccagtggaagtttc

SEQ ID NO: 4101381 - DNA, 25 bp, Homo sapien
tgtgataccaattgtgccaactgtg

SEQ ID NO: 4101382 - DNA, 25 bp, Homo sapien
ggagtttggcatcctcagcgccgaa

SEQ ID NO: 4101383 - DNA, 25 bp, Homo sapien
attatcctggatgttggcgtgcgcc

SEQ ID NO: 4101384 - DNA, 25 bp, Homo sapien
cgccgcgcaagtcggacagccgtga

SEQ ID NO: 4101385 - DNA, 25 bp, Homo sapien
gcggcggggtgtgcgccaggaggcc

SEQ ID NO: 4101386 - DNA, 25 bp, Homo sapien
gcccggggcggtggcgatggctggc

SEQ ID NO: 4101387 - DNA, 25 bp, Homo sapien
gcggagccgggtttgcctgctcttg

SEQ ID NO: 4101388 - DNA, 25 bp, Homo sapien
gccgcctgcttggaacaagtggtgt

SEQ ID NO: 4101389 - DNA, 25 bp, Homo sapien
tccggggcagctttggagcaaagcc

SEQ ID NO: 4101390 - DNA, 25 bp, Homo sapien
tggtgtagacgccacagcttttctc

SEQ ID NO: 4101391 - DNA, 25 bp, Homo sapien
ccaaccaaaacattccggggcagct

SEQ ID NO: 4101392 - DNA, 25 bp, Homo sapien
gaagcccatgatccaccgtgttgaa

SEQ ID NO: 4101393 - DNA, 25 bp, Homo sapien
gtaatactaagctgttcacacgctg

SEQ ID NO: 4101394 - DNA, 25 bp, Homo sapien
taaaagttccagtaggccgagaagc

SEQ ID NO: 4101395 - DNA, 25 bp, Homo sapien
cacgctgtgaagaagacccgaagac

SEQ ID NO: 4101396 - DNA, 25 bp, Homo sapien
atcattaacattgcagtaaaactgc

SEQ ID NO: 4101397 - DNA, 25 bp, Homo sapien
cattgttactaccacagtctcatgg

SEQ ID NO: 4101398 - DNA, 25 bp, Homo sapien
gattgtttgaataatgccacgccct

SEQ ID NO: 4101399 - DNA, 25 bp, Homo sapien
ctagtagttcacgttatcattaaca

SEQ ID NO: 4101400 - DNA, 25 bp, Homo sapien
tccgagccctatgaggttctgtttc

SEQ ID NO: 4101401 - DNA, 25 bp, Homo sapien
tctgcccaatccgagccctatgagg

SEQ ID NO: 4101402 - DNA, 25 bp, Homo sapien
catcagcttaaaggtatagatcctg

SEQ ID NO: 4101403 - DNA, 25 bp, Homo sapien
tttcttacaccagtagttgctaaat

SEQ ID NO: 4101404 - DNA, 25 bp, Homo sapien
ctgacaggtgtgttaagggagcacc

SEQ ID NO: 4101405 - DNA, 25 bp, Homo sapien
cagattgtggcttactagttcccgc

SEQ ID NO: 4101406 - DNA, 25 bp, Homo sapien
tgtgatagagtttggcccggctgac

SEQ ID NO: 4101407 - DNA, 25 bp, Homo sapien
cacatggtggtaaaagactcttcca

SEQ ID NO: 4101408 - DNA, 25 bp, Homo sapien
tcatttgctattgccaaggtgatag

SEQ ID NO: 4101409 - DNA, 25 bp, Homo sapien
ttctcatttgctattgccaaggtga

SEQ ID NO: 4101410 - DNA, 25 bp, Homo sapien
cctataagccctgctttctcatttg

SEQ ID NO: 4101411 - DNA, 25 bp, Homo sapien
tgctttctcatttgctattgccaag

SEQ ID NO: 4101412 - DNA, 25 bp, Homo sapien
tatttagaatcaagcaccacgtgtc

SEQ ID NO: 4101413 - DNA, 25 bp, Homo sapien
ggagtttgaaaatgatagccccaca

SEQ ID NO: 4101414 - DNA, 25 bp, Homo sapien
tggccagccccgaaaaatcacaaaa

SEQ ID NO: 4101415 - DNA, 25 bp, Homo sapien
gagaactctatagcattatggccag

SEQ ID NO: 4101416 - DNA, 25 bp, Homo sapien
tgtgatactgttattgtcagtgttg

SEQ ID NO: 4101417 - DNA, 25 bp, Homo sapien
atttagattgaatttccccaaggtg

SEQ ID NO: 4101418 - DNA, 25 bp, Homo sapien
cagttaactccagatttagattgaa

SEQ ID NO: 4101419 - DNA, 25 bp, Homo sapien
tattgtcagtgttgtttcagttaac

SEQ ID NO: 4101420 - DNA, 25 bp, Homo sapien
gtgaggtagcctggtgttagataca

SEQ ID NO: 4101421 - DNA, 25 bp, Homo sapien
ctggtgttagatacacggtgagtcc

SEQ ID NO: 4101422 - DNA, 25 bp, Homo sapien
tagcctggtgttagatacacggtga

SEQ ID NO: 4101423 - DNA, 25 bp, Homo sapien
tattggtgaggtagcctggtgttag

SEQ ID NO: 4101424 - DNA, 25 bp, Homo sapien
tttgaactcccgcgcgacactggga

SEQ ID NO: 4101425 - DNA, 25 bp, Homo sapien
tcgctcgggctttacaccttcggtg

SEQ ID NO: 4101426 - DNA, 25 bp, Homo sapien
caggactgagactcgagctgctcgc

SEQ ID NO: 4101427 - DNA, 25 bp, Homo sapien
cctggctctacgagccggctgagag

SEQ ID NO: 4101428 - DNA, 25 bp, Homo sapien
gtcttggaacatgactgcgagctgc

SEQ ID NO: 4101429 - DNA, 25 bp, Homo sapien
tggaacatgactgcgagctgctgct

SEQ ID NO: 4101430 - DNA, 25 bp, Homo sapien
gcttctgtggccccccactttctgc

SEQ ID NO: 4101431 - DNA, 25 bp, Homo sapien
ctagtcttggaacatgactgcgagc

SEQ ID NO: 4101432 - DNA, 25 bp, Homo sapien
catgggttggtaaaggccttcagcg

SEQ ID NO: 4101433 - DNA, 25 bp, Homo sapien
ggctggctgtcaaatccccgagcat

SEQ ID NO: 4101434 - DNA, 25 bp, Homo sapien
tgccggctgagtgatatccatgaca

SEQ ID NO: 4101435 - DNA, 25 bp, Homo sapien
tcaagctggcttctagatcacaggc

SEQ ID NO: 4101436 - DNA, 25 bp, Homo sapien
ctatgagtctctccttattgactgt

SEQ ID NO: 4101437 - DNA, 25 bp, Homo sapien
aatgtatcagatgggcaaggttggt

SEQ ID NO: 4101438 - DNA, 25 bp, Homo sapien
tgggaatgtatcagatgggcaaggt

SEQ ID NO: 4101439 - DNA, 25 bp, Homo sapien
agtccttgttattgtcacagcaaac

SEQ ID NO: 4101440 - DNA, 25 bp, Homo sapien
aatctagttcttgggaatgtatcag

SEQ ID NO: 4101441 - DNA, 25 bp, Homo sapien
tgatgaatcctcaaaattctgattt

SEQ ID NO: 4101442 - DNA, 25 bp, Homo sapien
gaatctgaaacttgacatgacggcc

SEQ ID NO: 4101443 - DNA, 25 bp, Homo sapien
gcggccctacgcattcttactacat

SEQ ID NO: 4101444 - DNA, 25 bp, Homo sapien
tgagtaagagtcttggcggccctac

SEQ ID NO: 4101445 - DNA, 25 bp, Homo sapien
catgacggccacaacaatcacaagg

SEQ ID NO: 4101446 - DNA, 25 bp, Homo sapien
ctcataagttttgtcagtacaaatt

SEQ ID NO: 4101447 - DNA, 25 bp, Homo sapien
gattgctcataagttttgtcagtac

SEQ ID NO: 4101448 - DNA, 25 bp, Homo sapien
attgctcataagttttgtcagtaca

SEQ ID NO: 4101449 - DNA, 25 bp, Homo sapien
tgctcataagttttgtcagtacaaa

SEQ ID NO: 4101450 - DNA, 25 bp, Homo sapien
gaatgtgtccattatttttccgtga

SEQ ID NO: 4101451 - DNA, 25 bp, Homo sapien
ctgagtgagtttccactctttgcaa

SEQ ID NO: 4101452 - DNA, 25 bp, Homo sapien
tgcaaccgataaacaacccaaacca

SEQ ID NO: 4101453 - DNA, 25 bp, Homo sapien
tcccctttaactcaaacaagcctga

SEQ ID NO: 4101454 - DNA, 25 bp, Homo sapien
gaagcagctggcatacaagagcctt

SEQ ID NO: 4101455 - DNA, 25 bp, Homo sapien
tcccttgtgggcaataaatttcaca

SEQ ID NO: 4101456 - DNA, 25 bp, Homo sapien
tggatctgcacgcatattttatatc

SEQ ID NO: 4101457 - DNA, 25 bp, Homo sapien
caaagtccccatgattcagaggaga

SEQ ID NO: 4101458 - DNA, 25 bp, Homo sapien
tggcgccttacttcccctgctggtt

SEQ ID NO: 4101459 - DNA, 25 bp, Homo sapien
agcacatgggctttgtgtgtcccta

SEQ ID NO: 4101460 - DNA, 25 bp, Homo sapien
cactgtggaggagctttctgggatc

SEQ ID NO: 4101461 - DNA, 25 bp, Homo sapien
tatctctgcccctatttcttgactc

SEQ ID NO: 4101462 - DNA, 25 bp, Homo sapien
ggcgccaggaatcttccaggaggat

SEQ ID NO: 4101463 - DNA, 25 bp, Homo sapien
ttccttgtctctactctcttgctgc

SEQ ID NO: 4101464 - DNA, 25 bp, Homo sapien
caggaggatttgttaccatcagagc

SEQ ID NO: 4101465 - DNA, 25 bp, Homo sapien
attccgggcgggaggagtcaccaca

SEQ ID NO: 4101466 - DNA, 25 bp, Homo sapien
gcatggacaatggtgaaattcaggg

SEQ ID NO: 4101467 - DNA, 25 bp, Homo sapien
gctgcaaggcaatcgtggagagaaa

SEQ ID NO: 4101468 - DNA, 25 bp, Homo sapien
gaaattcagggtcggtccatgcctc

SEQ ID NO: 4101469 - DNA, 25 bp, Homo sapien
gcaaggcaatcgtggagagaaatcc

SEQ ID NO: 4101470 - DNA, 25 bp, Homo sapien
tagagtccgggaaagtacaccatac

SEQ ID NO: 4101471 - DNA, 25 bp, Homo sapien
ccaacactactagagtccgggaaag

SEQ ID NO: 4101472 - DNA, 25 bp, Homo sapien
cataccggcatgatgtgcattccct

SEQ ID NO: 4101473 - DNA, 25 bp, Homo sapien
tgtgcattccctgcttattttccca

SEQ ID NO: 4101474 - DNA, 25 bp, Homo sapien
tacctccgcaggaggaaatgcagat

SEQ ID NO: 4101475 - DNA, 25 bp, Homo sapien
atggcctgtacctccgcaggaggaa

SEQ ID NO: 4101476 - DNA, 25 bp, Homo sapien
ctccgcaggaggaaatgcagatggt

SEQ ID NO: 4101477 - DNA, 25 bp, Homo sapien
cctgtacctccgcaggaggaaatgc

SEQ ID NO: 4101478 - DNA, 25 bp, Homo sapien
tatctaatgtaagggtaaaatcttg

SEQ ID NO: 4101479 - DNA, 25 bp, Homo sapien
cattatctaatgtaagggtaaaatc

SEQ ID NO: 4101480 - DNA, 25 bp, Homo sapien
tctaatgtaagggtaaaatcttggc

SEQ ID NO: 4101481 - DNA, 25 bp, Homo sapien
attatctaatgtaagggtaaaatct

SEQ ID NO: 4101482 - DNA, 25 bp, Homo sapien
aaatgttctaaggtccctccttgtg

SEQ ID NO: 4101483 - DNA, 25 bp, Homo sapien
taaggttacacattcagatgtagga

SEQ ID NO: 4101484 - DNA, 25 bp, Homo sapien
tggtttcacacaataacacttaagt

SEQ ID NO: 4101485 - DNA, 25 bp, Homo sapien
tggaaggaggtggtctaaaatgttc

SEQ ID NO: 4101486 - DNA, 25 bp, Homo sapien
gtccatactcagttttctcaagagc

SEQ ID NO: 4101487 - DNA, 25 bp, Homo sapien
gaaggtgtagcgagtggagtcagaa

SEQ ID NO: 4101488 - DNA, 25 bp, Homo sapien
ccagtccatactcagttttctcaag

SEQ ID NO: 4101489 - DNA, 25 bp, Homo sapien
ttctcaagagctgaaggtgtagcga

SEQ ID NO: 4101490 - DNA, 25 bp, Homo sapien
agagctgccacattgcccaactcca

SEQ ID NO: 4101491 - DNA, 25 bp, Homo sapien
cgttcagtggccctgcgctgttgaa

SEQ ID NO: 4101492 - DNA, 25 bp, Homo sapien
caaacacagcagcggccagttatgc

SEQ ID NO: 4101493 - DNA, 25 bp, Homo sapien
gcggccagttatgccttgaacctcc

SEQ ID NO: 4101494 - DNA, 25 bp, Homo sapien
tctctaaggtttccaaatacctgaa

SEQ ID NO: 4101495 - DNA, 25 bp, Homo sapien
cttctctaaggtttccaaatacctg

SEQ ID NO: 4101496 - DNA, 25 bp, Homo sapien
ttctctaaggtttccaaatacctga

SEQ ID NO: 4101497 - DNA, 25 bp, Homo sapien
aagaaagtgggtccatgcagggaaa

SEQ ID NO: 4101498 - DNA, 25 bp, Homo sapien
ggaccagggtgtgttgggctgagta

SEQ ID NO: 4101499 - DNA, 25 bp, Homo sapien
aaagtgggtccatgcagggaaatcc

SEQ ID NO: 4101500 - DNA, 25 bp, Homo sapien
ccagggtgtgttgggctgagtaaga

SEQ ID NO: 4101501 - DNA, 25 bp, Homo sapien
catactctggcttcgataagacagc

SEQ ID NO: 4101502 - DNA, 25 bp, Homo sapien
taaggcgaatctcgtgagaagtcca

SEQ ID NO: 4101503 - DNA, 25 bp, Homo sapien
acagctggcatcatttcagggatca

SEQ ID NO: 4101504 - DNA, 25 bp, Homo sapien
ccaaatctttaaggcgaatctcgtg

SEQ ID NO: 4101505 - DNA, 25 bp, Homo sapien
actgcagttgcaaggtctctctgag

SEQ ID NO: 4101506 - DNA, 25 bp, Homo sapien
ggtctctctgagttacacccagtcc

SEQ ID NO: 4101507 - DNA, 25 bp, Homo sapien
tctctctgagttacacccagtcctc

SEQ ID NO: 4101508 - DNA, 25 bp, Homo sapien
gtctctctgagttacacccagtcct

SEQ ID NO: 4101509 - DNA, 25 bp, Homo sapien
tcacaccagggaaatgaatacagaa

SEQ ID NO: 4101510 - DNA, 25 bp, Homo sapien
cacaccagggaaatgaatacagaaa

SEQ ID NO: 4101511 - DNA, 25 bp, Homo sapien
tggtacccagtttgagagctccgtg

SEQ ID NO: 4101512 - DNA, 25 bp, Homo sapien
aattgctctgtttgcctggctccca

SEQ ID NO: 4101513 - DNA, 25 bp, Homo sapien
tgtttgggaacagtaatgtttccac

SEQ ID NO: 4101514 - DNA, 25 bp, Homo sapien
cattgaggcatacaagacaaacttg

SEQ ID NO: 4101515 - DNA, 25 bp, Homo sapien
gacatctcttcttcacacagctgac

SEQ ID NO: 4101516 - DNA, 25 bp, Homo sapien
aatcagacatctcttcttcacacag

SEQ ID NO: 4101517 - DNA, 25 bp, Homo sapien
agcagacgttcctaaggcactgagg

SEQ ID NO: 4101518 - DNA, 25 bp, Homo sapien
gcaggtggaggtgagaacacaaaca

SEQ ID NO: 4101519 - DNA, 25 bp, Homo sapien
gccactttagggacacatttgttcc

SEQ ID NO: 4101520 - DNA, 25 bp, Homo sapien
tcagtcctgcagttagctataaagc

SEQ ID NO: 4101521 - DNA, 25 bp, Homo sapien
ttttccggagaggaataagagctgc

SEQ ID NO: 4101522 - DNA, 25 bp, Homo sapien
acaaaaaggcaccatattgccactt

SEQ ID NO: 4101523 - DNA, 25 bp, Homo sapien
caattccttttatcctgtgcccaaa

SEQ ID NO: 4101524 - DNA, 25 bp, Homo sapien
tgtgcccaaagccaacaatgaagca

SEQ ID NO: 4101525 - DNA, 25 bp, Homo sapien
tgccaattacctctccttacatcat

SEQ ID NO: 4101526 - DNA, 25 bp, Homo sapien
cttccaggtgctgccaattacctct

SEQ ID NO: 4101527 - DNA, 25 bp, Homo sapien
aggactggtgactgtctttttatga

SEQ ID NO: 4101528 - DNA, 25 bp, Homo sapien
cagtcctccagatgagcaggactgg

SEQ ID NO: 4101529 - DNA, 25 bp, Homo sapien
tgaagattgtgagaacagtcctcca

SEQ ID NO: 4101530 - DNA, 25 bp, Homo sapien
actggtgactgtctttttatgatga

SEQ ID NO: 4101531 - DNA, 25 bp, Homo sapien
tcatcacatggctgtaaaacgaagt

SEQ ID NO: 4101532 - DNA, 25 bp, Homo sapien
tcacatggctgtaaaacgaagttcc

SEQ ID NO: 4101533 - DNA, 25 bp, Homo sapien
cacatggctgtaaaacgaagttcca

SEQ ID NO: 4101534 - DNA, 25 bp, Homo sapien
catggctgtaaaacgaagttccacc

SEQ ID NO: 4101535 - DNA, 25 bp, Homo sapien
gctgacaactctctcatgtcctgtt

SEQ ID NO: 4101536 - DNA, 25 bp, Homo sapien
aactctctcatgtcctgttaactgg

SEQ ID NO: 4101537 - DNA, 25 bp, Homo sapien
catgtcctgttaactggctgaagaa

SEQ ID NO: 4101538 - DNA, 25 bp, Homo sapien
caaccaagctgacaactctctcatg

SEQ ID NO: 4101539 - DNA, 25 bp, Homo sapien
ttatctgtaggtaatgaagggaccc

SEQ ID NO: 4101540 - DNA, 25 bp, Homo sapien
gggagacatgtatttctggaaaaac

SEQ ID NO: 4101541 - DNA, 25 bp, Homo sapien
gaatacattcgatggagacgagaga

SEQ ID NO: 4101542 - DNA, 25 bp, Homo sapien
gaagggaccctcagaacttgtcata

SEQ ID NO: 4101543 - DNA, 25 bp, Homo sapien
tgctgacacttcatagatgaattat

SEQ ID NO: 4101544 - DNA, 25 bp, Homo sapien
gctgacacttcatagatgaattatt

SEQ ID NO: 4101545 - DNA, 25 bp, Homo sapien
caattgatttaacaggaatgaaagg

SEQ ID NO: 4101546 - DNA, 25 bp, Homo sapien
tacaattgatttaacaggaatgaaa

SEQ ID NO: 4101547 - DNA, 25 bp, Homo sapien
acaattgatttaacaggaatgaaag

SEQ ID NO: 4101548 - DNA, 25 bp, Homo sapien
acagagctgctgcaagtcagtagtg

SEQ ID NO: 4101549 - DNA, 25 bp, Homo sapien
taaaccactgctggcaaaacccaaa

SEQ ID NO: 4101550 - DNA, 25 bp, Homo sapien
tcacagtaaaccactgctggcaaaa

SEQ ID NO: 4101551 - DNA, 25 bp, Homo sapien
caagaggcagaggtaaatactgaaa

SEQ ID NO: 4101552 - DNA, 25 bp, Homo sapien
ctctaggagaccaaatatctgaaca

SEQ ID NO: 4101553 - DNA, 25 bp, Homo sapien
tctaggagaccaaatatctgaacaa

SEQ ID NO: 4101554 - DNA, 25 bp, Homo sapien
taagatgaggactagtgtagcactc

SEQ ID NO: 4101555 - DNA, 25 bp, Homo sapien
tagactatgcgggaagagagttaag

SEQ ID NO: 4101556 - DNA, 25 bp, Homo sapien
tcctcgctgattgggtgctgagata

SEQ ID NO: 4101557 - DNA, 25 bp, Homo sapien
tagtctgggtagagggcattgctta

SEQ ID NO: 4101558 - DNA, 25 bp, Homo sapien
tacagagaggtttgctatctaagca

SEQ ID NO: 4101559 - DNA, 25 bp, Homo sapien
taaatggatagctcaaatacccggt

SEQ ID NO: 4101560 - DNA, 25 bp, Homo sapien
agttcagttttgcagtagatttccc

SEQ ID NO: 4101561 - DNA, 25 bp, Homo sapien
aagctgggccattatagtgaaatac

SEQ ID NO: 4101562 - DNA, 25 bp, Homo sapien
cagcaaatgtgtaactcagaaagac

SEQ ID NO: 4101563 - DNA, 25 bp, Homo sapien
taatgcaatcatagtccaaaaggga

SEQ ID NO: 4101564 - DNA, 25 bp, Homo sapien
tagtgtgtggtatgatccctcagca

SEQ ID NO: 4101565 - DNA, 25 bp, Homo sapien
ccacatgatagggttcgttaaacac

SEQ ID NO: 4101566 - DNA, 25 bp, Homo sapien
tgagcaagggttgaagcaacacaaa

SEQ ID NO: 4101567 - DNA, 25 bp, Homo sapien
tcagacacaaagtaacagagctgaa

SEQ ID NO: 4101568 - DNA, 25 bp, Homo sapien
cacttctgctgtgaaatcataacag

SEQ ID NO: 4101569 - DNA, 25 bp, Homo sapien
taacagactactgtatgagcaaggg

SEQ ID NO: 4101570 - DNA, 25 bp, Homo sapien
gctatctacgaagcgcttgcaccca

SEQ ID NO: 4101571 - DNA, 25 bp, Homo sapien
tagctgcctcggttaagactcttgg

SEQ ID NO: 4101572 - DNA, 25 bp, Homo sapien
tactctaacatatggcagtgccttc

SEQ ID NO: 4101573 - DNA, 25 bp, Homo sapien
aaaggtatgttttggatcctcagca

SEQ ID NO: 4101574 - DNA, 25 bp, Homo sapien
gatgtgccacacctttgaatgcaga

SEQ ID NO: 4101575 - DNA, 25 bp, Homo sapien
gagacgtgtctagattactgccaac

SEQ ID NO: 4101576 - DNA, 25 bp, Homo sapien
agaccaccgccaccatttaaaggag

SEQ ID NO: 4101577 - DNA, 25 bp, Homo sapien
tgtactacgaaaagatgaaacgatg

SEQ ID NO: 4101578 - DNA, 25 bp, Homo sapien
tggtcagcaaatactccaatacctt

SEQ ID NO: 4101579 - DNA, 25 bp, Homo sapien
ggtcaaatggtaaccagggctgaga

SEQ ID NO: 4101580 - DNA, 25 bp, Homo sapien
agtaggaagtgcagtgacgtttccc

SEQ ID NO: 4101581 - DNA, 25 bp, Homo sapien
cccaagttggtaggcagatgctgac

SEQ ID NO: 4101582 - DNA, 25 bp, Homo sapien
atctgaatttttatgccgatcacaa

SEQ ID NO: 4101583 - DNA, 25 bp, Homo sapien
gataaaagcagagatgtaagggcat

SEQ ID NO: 4101584 - DNA, 25 bp, Homo sapien
aggataaaagcagagatgtaagggc

SEQ ID NO: 4101585 - DNA, 25 bp, Homo sapien
ttatgccgatcacaattacccattt

SEQ ID NO: 4101586 - DNA, 25 bp, Homo sapien
ccagtaattgccagagtaggtatga

SEQ ID NO: 4101587 - DNA, 25 bp, Homo sapien
taaagtccactaaggacacaccaac

SEQ ID NO: 4101588 - DNA, 25 bp, Homo sapien
ctgctatgtggattataaagtccac

SEQ ID NO: 4101589 - DNA, 25 bp, Homo sapien
ccatctttaaaccagtaattgccag

SEQ ID NO: 4101590 - DNA, 25 bp, Homo sapien
ctgagcactatgtctctgtggcttg

SEQ ID NO: 4101591 - DNA, 25 bp, Homo sapien
tgagcactatgtctctgtggcttgg

SEQ ID NO: 4101592 - DNA, 25 bp, Homo sapien
gagcactatgtctctgtggcttggc

SEQ ID NO: 4101593 - DNA, 25 bp, Homo sapien
cctgagcactatgtctctgtggctt

SEQ ID NO: 4101594 - DNA, 25 bp, Homo sapien
agagtgttcagggtggtatggccat

SEQ ID NO: 4101595 - DNA, 25 bp, Homo sapien
agtgttcagggtggtatggccatat

SEQ ID NO: 4101596 - DNA, 25 bp, Homo sapien
gagatcagatgagattgagagtgtt

SEQ ID NO: 4101597 - DNA, 25 bp, Homo sapien
gatcagatgagattgagagtgttca

SEQ ID NO: 4101598 - DNA, 25 bp, Homo sapien
ttctatccttttctgaactatcggt

SEQ ID NO: 4101599 - DNA, 25 bp, Homo sapien
tctgaactatcggtgacttcggcat

SEQ ID NO: 4101600 - DNA, 25 bp, Homo sapien
ccttttctgaactatcggtgacttc

SEQ ID NO: 4101601 - DNA, 25 bp, Homo sapien
tatccttttctgaactatcggtgac

SEQ ID NO: 4101602 - DNA, 25 bp, Homo sapien
ttactttgaaggtagtatcagtgga

SEQ ID NO: 4101603 - DNA, 25 bp, Homo sapien
tcatttactttgaaggtagtatcag

SEQ ID NO: 4101604 - DNA, 25 bp, Homo sapien
tttactttgaaggtagtatcagtgg

SEQ ID NO: 4101605 - DNA, 25 bp, Homo sapien
catttactttgaaggtagtatcagt

SEQ ID NO: 4101606 - DNA, 25 bp, Homo sapien
caggcccagcggtttttttctccat

SEQ ID NO: 4101607 - DNA, 25 bp, Homo sapien
cacttttactactcctggcttctct

SEQ ID NO: 4101608 - DNA, 25 bp, Homo sapien
tgtgaccccacttttactactcctg

SEQ ID NO: 4101609 - DNA, 25 bp, Homo sapien
acttttactactcctggcttctctt

SEQ ID NO: 4101610 - DNA, 25 bp, Homo sapien
ctctcacttgtgaccccacttttac

SEQ ID NO: 4101611 - DNA, 25 bp, Homo sapien
gggattacaatgccctgtgatttca

SEQ ID NO: 4101612 - DNA, 25 bp, Homo sapien
tgggattacaatgccctgtgatttc

SEQ ID NO: 4101613 - DNA, 25 bp, Homo sapien
aatgggattacaatgccctgtgatt

SEQ ID NO: 4101614 - DNA, 25 bp, Homo sapien
tgaatgggattacaatgccctgtga

SEQ ID NO: 4101615 - DNA, 25 bp, Homo sapien
aaaccaagaactcctcaagagcaag

SEQ ID NO: 4101616 - DNA, 25 bp, Homo sapien
tgtactggaactgtgtccacatgga

SEQ ID NO: 4101617 - DNA, 25 bp, Homo sapien
gagcaaggacaatgacctgcgccag

SEQ ID NO: 4101618 - DNA, 25 bp, Homo sapien
ttagctttgatcaagctgtactgga

SEQ ID NO: 4101619 - DNA, 25 bp, Homo sapien
caggtatgggtcttagggcaagtta

SEQ ID NO: 4101620 - DNA, 25 bp, Homo sapien
cgaactccttgacatcattctccat

SEQ ID NO: 4101621 - DNA, 25 bp, Homo sapien
tactcctatgcacgaactccttgac

SEQ ID NO: 4101622 - DNA, 25 bp, Homo sapien
accattgccttactcctatgcacga

SEQ ID NO: 4101623 - DNA, 25 bp, Homo sapien
ttgccttactcctatgcacgaactc

SEQ ID NO: 4101624 - DNA, 25 bp, Homo sapien
gtttctgtgggctgtaaacataatg

SEQ ID NO: 4101625 - DNA, 25 bp, Homo sapien
cacttccagactgacagctaaatta

SEQ ID NO: 4101626 - DNA, 25 bp, Homo sapien
ttctgctcttttgccacttccagac

SEQ ID NO: 4101627 - DNA, 25 bp, Homo sapien
tgggctgtaaacataatgctgccac

SEQ ID NO: 4101628 - DNA, 25 bp, Homo sapien
ctttgtcataaagagatgtgtatct

SEQ ID NO: 4101629 - DNA, 25 bp, Homo sapien
cataaagagatgtgtatcttcgaac

SEQ ID NO: 4101630 - DNA, 25 bp, Homo sapien
cgaacctcagaaggcatccagacag

SEQ ID NO: 4101631 - DNA, 25 bp, Homo sapien
tgtgtatcttcgaacctcagaaggc

SEQ ID NO: 4101632 - DNA, 25 bp, Homo sapien
ctgagctcggaaagagggcagtagc

SEQ ID NO: 4101633 - DNA, 25 bp, Homo sapien
gagctcggaaagagggcagtagctt

SEQ ID NO: 4101634 - DNA, 25 bp, Homo sapien
gctcggaaagagggcagtagcttga

SEQ ID NO: 4101635 - DNA, 25 bp, Homo sapien
tcggaaagagggcagtagcttgaga

SEQ ID NO: 4101636 - DNA, 25 bp, Homo sapien
gaacttatctgagcaatagacaaga

SEQ ID NO: 4101637 - DNA, 25 bp, Homo sapien
tgagcaatagacaagaccgcctcct

SEQ ID NO: 4101638 - DNA, 25 bp, Homo sapien
gtgcctcgtcagcagatttctggag

SEQ ID NO: 4101639 - DNA, 25 bp, Homo sapien
cacttaacggatgggaaagattttg

SEQ ID NO: 4101640 - DNA, 25 bp, Homo sapien
ccaggtaaaagtggctaagctgccc

SEQ ID NO: 4101641 - DNA, 25 bp, Homo sapien
aggtaaaagtggctaagctgccctc

SEQ ID NO: 4101642 - DNA, 25 bp, Homo sapien
ggtaaaagtggctaagctgccctct

SEQ ID NO: 4101643 - DNA, 25 bp, Homo sapien
gtaaaagtggctaagctgccctctt

SEQ ID NO: 4101644 - DNA, 25 bp, Homo sapien
cggtccagtgcaccgcaaatcaagt

SEQ ID NO: 4101645 - DNA, 25 bp, Homo sapien
aagaagcggtccagtgcaccgcaaa

SEQ ID NO: 4101646 - DNA, 25 bp, Homo sapien
caagtcatgcgtgtattgtttagtt

SEQ ID NO: 4101647 - DNA, 25 bp, Homo sapien
tgcaccgcaaatcaagtcatgcgtg

SEQ ID NO: 4101648 - DNA, 25 bp, Homo sapien
gtttccctgcattaaattgttgtgt

SEQ ID NO: 4101649 - DNA, 25 bp, Homo sapien
cctgcattaaattgttgtgtacagt

SEQ ID NO: 4101650 - DNA, 25 bp, Homo sapien
tccctgcattaaattgttgtgtaca

SEQ ID NO: 4101651 - DNA, 25 bp, Homo sapien
tgcattaaattgttgtgtacagtca

SEQ ID NO: 4101652 - DNA, 25 bp, Homo sapien
tttcctcctgtcttggtggtcactg

SEQ ID NO: 4101653 - DNA, 25 bp, Homo sapien
gtggtcactggctgttgccagggaa

SEQ ID NO: 4101654 - DNA, 25 bp, Homo sapien
ctcctgtcttggtggtcactggctg

SEQ ID NO: 4101655 - DNA, 25 bp, Homo sapien
tcctcctgtcttggtggtcactggc

SEQ ID NO: 4101656 - DNA, 25 bp, Homo sapien
agagatactccacattccatcctgg

SEQ ID NO: 4101657 - DNA, 25 bp, Homo sapien
tggcagatcatgataaagtgacaaa

SEQ ID NO: 4101658 - DNA, 25 bp, Homo sapien
ctggaccacatcaggttgaacctga

SEQ ID NO: 4101659 - DNA, 25 bp, Homo sapien
cagggatcacacagacacaaggtgt

SEQ ID NO: 4101660 - DNA, 25 bp, Homo sapien
ttattcctgtcctgcacactcagga

SEQ ID NO: 4101661 - DNA, 25 bp, Homo sapien
tcaggatctcaggattaggcatacc

SEQ ID NO: 4101662 - DNA, 25 bp, Homo sapien
tgcacccatgcacactttattcctg

SEQ ID NO: 4101663 - DNA, 25 bp, Homo sapien
gcccttgttctacttcctgattgtc

SEQ ID NO: 4101664 - DNA, 25 bp, Homo sapien
tggttgaactgcacattcagaaaat

SEQ ID NO: 4101665 - DNA, 25 bp, Homo sapien
gaactgcacattcagaaaattatac

SEQ ID NO: 4101666 - DNA, 25 bp, Homo sapien
ggttgaactgcacattcagaaaatt

SEQ ID NO: 4101667 - DNA, 25 bp, Homo sapien
ttgaactgcacattcagaaaattat

SEQ ID NO: 4101668 - DNA, 25 bp, Homo sapien
cacagggtcagcaggatagacagtt

SEQ ID NO: 4101669 - DNA, 25 bp, Homo sapien
tatgttcctagttttccacagggtc

SEQ ID NO: 4101670 - DNA, 25 bp, Homo sapien
gccgtggctttctgtcaagggaaca

SEQ ID NO: 4101671 - DNA, 25 bp, Homo sapien
ccagacatgtggcattatgatcact

SEQ ID NO: 4101672 - DNA, 25 bp, Homo sapien
gctgttcttgatagaaaagaaacat

SEQ ID NO: 4101673 - DNA, 25 bp, Homo sapien
acaaatcctgtcagttgcttttgct

SEQ ID NO: 4101674 - DNA, 25 bp, Homo sapien
aaaataccaggctcagcacaaatcc

SEQ ID NO: 4101675 - DNA, 25 bp, Homo sapien
gcaaaaataccaggctcagcacaaa

SEQ ID NO: 4101676 - DNA, 25 bp, Homo sapien
cagcagcacaatcacagttccctgc

SEQ ID NO: 4101677 - DNA, 25 bp, Homo sapien
cacctgagcacaagcaatctttcca

SEQ ID NO: 4101678 - DNA, 25 bp, Homo sapien
agcctcaaacacctgagcacaagca

SEQ ID NO: 4101679 - DNA, 25 bp, Homo sapien
aaacacctgagcacaagcaatcttt

SEQ ID NO: 4101680 - DNA, 25 bp, Homo sapien
tccagaaaataagtgttttacaaga

SEQ ID NO: 4101681 - DNA, 25 bp, Homo sapien
gaagtaggctttatgtcaagtttct

SEQ ID NO: 4101682 - DNA, 25 bp, Homo sapien
aagagaagtaggctttatgtcaagt

SEQ ID NO: 4101683 - DNA, 25 bp, Homo sapien
agtaggctttatgtcaagtttctca

SEQ ID NO: 4101684 - DNA, 25 bp, Homo sapien
gagaagtaggctttatgtcaagttt

SEQ ID NO: 4101685 - DNA, 25 bp, Homo sapien
aaggtcttggatctaccagccaaga

SEQ ID NO: 4101686 - DNA, 25 bp, Homo sapien
catctggggttctttccttcaccac

SEQ ID NO: 4101687 - DNA, 25 bp, Homo sapien
tcaccacctcaggcaaggcaaacag

SEQ ID NO: 4101688 - DNA, 25 bp, Homo sapien
cttggatctaccagccaagagattc

SEQ ID NO: 4101689 - DNA, 25 bp, Homo sapien
ggatctgggtaaggttgagaacaat

SEQ ID NO: 4101690 - DNA, 25 bp, Homo sapien
tctgggtaaggttgagaacaatcac

SEQ ID NO: 4101691 - DNA, 25 bp, Homo sapien
agtaaggaagaaaacgagggatctg

SEQ ID NO: 4101692 - DNA, 25 bp, Homo sapien
cgagggatctgggtaaggttgagaa

SEQ ID NO: 4101693 - DNA, 25 bp, Homo sapien
tcactccaggtcttaaaccaaagtg

SEQ ID NO: 4101694 - DNA, 25 bp, Homo sapien
tggagcaggaacacatcactccagg

SEQ ID NO: 4101695 - DNA, 25 bp, Homo sapien
gctctggagcaggaacacatcactc

SEQ ID NO: 4101696 - DNA, 25 bp, Homo sapien
atcactccaggtcttaaaccaaagt

SEQ ID NO: 4101697 - DNA, 25 bp, Homo sapien
cactcggaggcggatgtccatgaag

SEQ ID NO: 4101698 - DNA, 25 bp, Homo sapien
gctggatagtgagtcatgtgtccgt

SEQ ID NO: 4101699 - DNA, 25 bp, Homo sapien
cagggaaagtcctccgatgacaggt

SEQ ID NO: 4101700 - DNA, 25 bp, Homo sapien
tcactgctgggaccggacatgcgtg

SEQ ID NO: 4101701 - DNA, 25 bp, Homo sapien
ctatgcaaagtctctcctaaacatt

SEQ ID NO: 4101702 - DNA, 25 bp, Homo sapien
ctctcctaaacattacttcattcag

SEQ ID NO: 4101703 - DNA, 25 bp, Homo sapien
tacttcattcagttctaactctggc

SEQ ID NO: 4101704 - DNA, 25 bp, Homo sapien
tcattcagttctaactctggcccca

SEQ ID NO: 4101705 - DNA, 25 bp, Homo sapien
ctggagaggcaatacagatgacccc

SEQ ID NO: 4101706 - DNA, 25 bp, Homo sapien
caatacagatgaccccgccagagtg

SEQ ID NO: 4101707 - DNA, 25 bp, Homo sapien
agatgaccccgccagagtgctcact

SEQ ID NO: 4101708 - DNA, 25 bp, Homo sapien
gagaggcaatacagatgaccccgcc

SEQ ID NO: 4101709 - DNA, 25 bp, Homo sapien
tctggtggtcccatgaagttcctca

SEQ ID NO: 4101710 - DNA, 25 bp, Homo sapien
tcatcatcgagagaaaggatcccct

SEQ ID NO: 4101711 - DNA, 25 bp, Homo sapien
tgatgggcaagctaccaggaaaggc

SEQ ID NO: 4101712 - DNA, 25 bp, Homo sapien
tcctttccatagacagaaggccaga

SEQ ID NO: 4101713 - DNA, 25 bp, Homo sapien
gctagagtgcacttcattacagcgt

SEQ ID NO: 4101714 - DNA, 25 bp, Homo sapien
ctcaaaagctagagtgcacttcatt

SEQ ID NO: 4101715 - DNA, 25 bp, Homo sapien
tatgttttatcatacaagtctttga

SEQ ID NO: 4101716 - DNA, 25 bp, Homo sapien
gagtgcacttcattacagcgtgtac

SEQ ID NO: 4101717 - DNA, 25 bp, Homo sapien
tcatggttaggaccaaggattttcc

SEQ ID NO: 4101718 - DNA, 25 bp, Homo sapien
aaaatgatcatccatggactcatgg

SEQ ID NO: 4101719 - DNA, 25 bp, Homo sapien
agatttaatgtgcttcgtccctcca

SEQ ID NO: 4101720 - DNA, 25 bp, Homo sapien
tgtcagtacaaaatgccttaaaggg

SEQ ID NO: 4101721 - DNA, 25 bp, Homo sapien
agggctggaaatcaaaccggagtct

SEQ ID NO: 4101722 - DNA, 25 bp, Homo sapien
tacttaaggcgttgagaacaggcct

SEQ ID NO: 4101723 - DNA, 25 bp, Homo sapien
tatctgaagaaattgctctggccac

SEQ ID NO: 4101724 - DNA, 25 bp, Homo sapien
gacttgatacttgtggctgacccag

SEQ ID NO: 4101725 - DNA, 25 bp, Homo sapien
gatatcgcattccttatctttgcca

SEQ ID NO: 4101726 - DNA, 25 bp, Homo sapien
ctttgccagtgagcagactttccct

SEQ ID NO: 4101727 - DNA, 25 bp, Homo sapien
gaaaggtgctatcctatcactgtct

SEQ ID NO: 4101728 - DNA, 25 bp, Homo sapien
gattcatgggcaatatgaaaccata

SEQ ID NO: 4101729 - DNA, 25 bp, Homo sapien
ggtaataaattagcccgtggacagc

SEQ ID NO: 4101730 - DNA, 25 bp, Homo sapien
caagctgctactagatgtgaatgtg

SEQ ID NO: 4101731 - DNA, 25 bp, Homo sapien
tggacagccatacaagctgctacta

SEQ ID NO: 4101732 - DNA, 25 bp, Homo sapien
aatattccaagttcagaacaaaagg

SEQ ID NO: 4101733 - DNA, 25 bp, Homo sapien
ggtaataggcattcttcccatcgtc

SEQ ID NO: 4101734 - DNA, 25 bp, Homo sapien
tctgatctggttgcgtgactgcaca

SEQ ID NO: 4101735 - DNA, 25 bp, Homo sapien
tctgcattggattctcagccacagg

SEQ ID NO: 4101736 - DNA, 25 bp, Homo sapien
cagccaggctgtgaataactaggag

SEQ ID NO: 4101737 - DNA, 25 bp, Homo sapien
tctgaactgtaatggcacctgtagg

SEQ ID NO: 4101738 - DNA, 25 bp, Homo sapien
caaatggtacgtggactagcgcggt

SEQ ID NO: 4101739 - DNA, 25 bp, Homo sapien
ggatcactatagctactgtgcagag

SEQ ID NO: 4101740 - DNA, 25 bp, Homo sapien
agggagggacatgacttgacttgca

SEQ ID NO: 4101741 - DNA, 25 bp, Homo sapien
caaggcccttttgaaactggagtgc

SEQ ID NO: 4101742 - DNA, 25 bp, Homo sapien
cataaccgaggtgctgacaagtcct

SEQ ID NO: 4101743 - DNA, 25 bp, Homo sapien
ttcaggcaggttcacggagaggaca

SEQ ID NO: 4101744 - DNA, 25 bp, Homo sapien
gattgaaccatcctgcataaccgag

SEQ ID NO: 4101745 - DNA, 25 bp, Homo sapien
ttttctatgaaacaagctgccgtat

SEQ ID NO: 4101746 - DNA, 25 bp, Homo sapien
tataaggtaatgacatcaataacac

SEQ ID NO: 4101747 - DNA, 25 bp, Homo sapien
ttcctggtttttctatgaaacaagc

SEQ ID NO: 4101748 - DNA, 25 bp, Homo sapien
gctgccgtattataaggtaatgaca

SEQ ID NO: 4101749 - DNA, 25 bp, Homo sapien
tggaatttagtgctgatggtgactg

SEQ ID NO: 4101750 - DNA, 25 bp, Homo sapien
ctaaaactgcactagctatcgtgat

SEQ ID NO: 4101751 - DNA, 25 bp, Homo sapien
ttagtgctgatggtgactgaactca

SEQ ID NO: 4101752 - DNA, 25 bp, Homo sapien
tgatggctgtgaactctgaatggaa

SEQ ID NO: 4101753 - DNA, 25 bp, Homo sapien
ttggcggaagcagtaccttactact

SEQ ID NO: 4101754 - DNA, 25 bp, Homo sapien
tttggcttggcggaagcagtacctt

SEQ ID NO: 4101755 - DNA, 25 bp, Homo sapien
ccttactactccatccaggtaaatg

SEQ ID NO: 4101756 - DNA, 25 bp, Homo sapien
tactactccatccaggtaaatgatc

SEQ ID NO: 4101757 - DNA, 25 bp, Homo sapien
tgcttgccctccttgaggatgagtt

SEQ ID NO: 4101758 - DNA, 25 bp, Homo sapien
caacaacttgtgtaccttcatgtca

SEQ ID NO: 4101759 - DNA, 25 bp, Homo sapien
tcttcaactcctctggtgtcaacaa

SEQ ID NO: 4101760 - DNA, 25 bp, Homo sapien
ctgacagtctggctgacatcaccca

SEQ ID NO: 4101761 - DNA, 25 bp, Homo sapien
agagggcgttatggcagtctttgtc

SEQ ID NO: 4101762 - DNA, 25 bp, Homo sapien
tttgcgtcacagagggcgttatggc

SEQ ID NO: 4101763 - DNA, 25 bp, Homo sapien
tcacagtttgcgtcacagagggcgt

SEQ ID NO: 4101764 - DNA, 25 bp, Homo sapien
tcctttgtctcacagtttgcgtcac

SEQ ID NO: 4101765 - DNA, 25 bp, Homo sapien
ggtcgttcttgacttccgcgtagca

SEQ ID NO: 4101766 - DNA, 25 bp, Homo sapien
ttctctgcaaaggtgcggtcgttct

SEQ ID NO: 4101767 - DNA, 25 bp, Homo sapien
aaggtgcggtcgttcttgacttccg

SEQ ID NO: 4101768 - DNA, 25 bp, Homo sapien
tcgttcttgacttccgcgtagcagt

SEQ ID NO: 4101769 - DNA, 25 bp, Homo sapien
gagatcctccctaaaattccttgcc

SEQ ID NO: 4101770 - DNA, 25 bp, Homo sapien
tccaaagcgagatcctccctaaaat

SEQ ID NO: 4101771 - DNA, 25 bp, Homo sapien
ctccctaaaattccttgccaggctt

SEQ ID NO: 4101772 - DNA, 25 bp, Homo sapien
tgctgaataaattgagacttgattt

SEQ ID NO: 4101773 - DNA, 25 bp, Homo sapien
ctggaatttctgacaacactatcaa

SEQ ID NO: 4101774 - DNA, 25 bp, Homo sapien
tgtgttcggaaacgggagcacaaag

SEQ ID NO: 4101775 - DNA, 25 bp, Homo sapien
ctctgtgttcggaaacgggagcaca

SEQ ID NO: 4101776 - DNA, 25 bp, Homo sapien
ggagcacaaagcctaattggccaaa

SEQ ID NO: 4101777 - DNA, 25 bp, Homo sapien
cggaaacgggagcacaaagcctaat

SEQ ID NO: 4101778 - DNA, 25 bp, Homo sapien
taggcaatgccacaaatatcacacc

SEQ ID NO: 4101779 - DNA, 25 bp, Homo sapien
aaatatcacacccatggatgaggct

SEQ ID NO: 4101780 - DNA, 25 bp, Homo sapien
tggatgaggctacccagtccatgtc

SEQ ID NO: 4101781 - DNA, 25 bp, Homo sapien
ggacataggcaatgccacaaatatc

SEQ ID NO: 4101782 - DNA, 25 bp, Homo sapien
ctcctgccacggtgagcttgtagca

SEQ ID NO: 4101783 - DNA, 25 bp, Homo sapien
cggtgagcttgtagcagagaaaaga

SEQ ID NO: 4101784 - DNA, 25 bp, Homo sapien
aatgttctcaggtgaggaggatgtc

SEQ ID NO: 4101785 - DNA, 25 bp, Homo sapien
tcaggtgaggaggatgtcagcctca

SEQ ID NO: 4101786 - DNA, 25 bp, Homo sapien
gatccagagaccaaacacgaacagg

SEQ ID NO: 4101787 - DNA, 25 bp, Homo sapien
gtcccttgaacccttgaaggatcca

SEQ ID NO: 4101788 - DNA, 25 bp, Homo sapien
ttctgtcccttgaacccttgaagga

SEQ ID NO: 4101789 - DNA, 25 bp, Homo sapien
gaccaaacacgaacaggcaatatag

SEQ ID NO: 4101790 - DNA, 25 bp, Homo sapien
catgtgacaaaatggaccttgttgg

SEQ ID NO: 4101791 - DNA, 25 bp, Homo sapien
tacccacagcaatgtacactaatgc

SEQ ID NO: 4101792 - DNA, 25 bp, Homo sapien
tgttgggtaaaagccacaataccca

SEQ ID NO: 4101793 - DNA, 25 bp, Homo sapien
atcactaaagaagcagcagaataat

SEQ ID NO: 4101794 - DNA, 25 bp, Homo sapien
taacttttatcgataataatgggag

SEQ ID NO: 4101795 - DNA, 25 bp, Homo sapien
tgttttgtcttagtgataccgtcta

SEQ ID NO: 4101796 - DNA, 25 bp, Homo sapien
taccgtctatctttgtgaaagctga

SEQ ID NO: 4101797 - DNA, 25 bp, Homo sapien
taatgggagttatgttggagcatcc

SEQ ID NO: 4101798 - DNA, 25 bp, Homo sapien
tggaaggaaaccgtcagggctttgc

SEQ ID NO: 4101799 - DNA, 25 bp, Homo sapien
atgtggaaggaaaccgtcagggctt

SEQ ID NO: 4101800 - DNA, 25 bp, Homo sapien
gccaggactgctcatcagtgagaag

SEQ ID NO: 4101801 - DNA, 25 bp, Homo sapien
aatgtggaaggaaaccgtcagggct

SEQ ID NO: 4101802 - DNA, 25 bp, Homo sapien
agctcctggtgtgatggtagtggct

SEQ ID NO: 4101803 - DNA, 25 bp, Homo sapien
tctgccatcctgctcgatactgtgc

SEQ ID NO: 4101804 - DNA, 25 bp, Homo sapien
tgatctggctttaaggcacacgccc

SEQ ID NO: 4101805 - DNA, 25 bp, Homo sapien
cctgctcgatactgtgcctgatctg

SEQ ID NO: 4101806 - DNA, 25 bp, Homo sapien
tctggacgtccaagggtcactgtct

SEQ ID NO: 4101807 - DNA, 25 bp, Homo sapien
cctgcatcttttgacttgctggaag

SEQ ID NO: 4101808 - DNA, 25 bp, Homo sapien
gttgcactgcccctctttgtccagg

SEQ ID NO: 4101809 - DNA, 25 bp, Homo sapien
gcagtccctacatggcctgttgcac

SEQ ID NO: 4101810 - DNA, 25 bp, Homo sapien
ctaattctgaacattaccagcggct

SEQ ID NO: 4101811 - DNA, 25 bp, Homo sapien
ttaccagcggcttctaaggaaaggc

SEQ ID NO: 4101812 - DNA, 25 bp, Homo sapien
caggcttaggcttgttctggctatg

SEQ ID NO: 4101813 - DNA, 25 bp, Homo sapien
tatatgaagttgattactgatgcat

SEQ ID NO: 4101814 - DNA, 25 bp, Homo sapien
aaacaccatgaatcatgctctgcaa

SEQ ID NO: 4101815 - DNA, 25 bp, Homo sapien
gtacagcaattacccactggacaat

SEQ ID NO: 4101816 - DNA, 25 bp, Homo sapien
tgtttctctggttttcgtacagcaa

SEQ ID NO: 4101817 - DNA, 25 bp, Homo sapien
tgctctgcaaacatgtttgaactgg

SEQ ID NO: 4101818 - DNA, 25 bp, Homo sapien
ctctccaggttctatgcagcatata

SEQ ID NO: 4101819 - DNA, 25 bp, Homo sapien
tctccaggttctatgcagcatatag

SEQ ID NO: 4101820 - DNA, 25 bp, Homo sapien
tccaggttctatgcagcatatagag

SEQ ID NO: 4101821 - DNA, 25 bp, Homo sapien
cctctccaggttctatgcagcatat

SEQ ID NO: 4101822 - DNA, 25 bp, Homo sapien
tggctgaattgactgcactcgtttg

SEQ ID NO: 4101823 - DNA, 25 bp, Homo sapien
ttgctctgcaatccagctttcgaga

SEQ ID NO: 4101824 - DNA, 25 bp, Homo sapien
tttgctctgcaatccagctttcgag

SEQ ID NO: 4101825 - DNA, 25 bp, Homo sapien
gactgcactcgtttgctctgcaatc

SEQ ID NO: 4101826 - DNA, 25 bp, Homo sapien
tacccgggctgctaaccttcaaatg

SEQ ID NO: 4101827 - DNA, 25 bp, Homo sapien
ttggaaaacggtgttccgcctgcgc

SEQ ID NO: 4101828 - DNA, 25 bp, Homo sapien
tatttgcggcggcttagcttggaaa

SEQ ID NO: 4101829 - DNA, 25 bp, Homo sapien
gcaagccctaaactgtagaacagag

SEQ ID NO: 4101830 - DNA, 25 bp, Homo sapien
ctctaggtgtggaggcaaatggcat

SEQ ID NO: 4101831 - DNA, 25 bp, Homo sapien
tgacagacaagccagctaaaagcct

SEQ ID NO: 4101832 - DNA, 25 bp, Homo sapien
gcaaaagtgcttatcctctaggtgt

SEQ ID NO: 4101833 - DNA, 25 bp, Homo sapien
tcccagccccgaatcatgaattatg

SEQ ID NO: 4101834 - DNA, 25 bp, Homo sapien
gcatgcaggaagacggactcgcagt

SEQ ID NO: 4101835 - DNA, 25 bp, Homo sapien
cattcggtttgggtcaatccactga

SEQ ID NO: 4101836 - DNA, 25 bp, Homo sapien
aatccaggatttgcccaggactcac

SEQ ID NO: 4101837 - DNA, 25 bp, Homo sapien
gactcgcagtgtagaaatccaggat

SEQ ID NO: 4101838 - DNA, 25 bp, Homo sapien
tattgcatgcaagagagacaatttt

SEQ ID NO: 4101839 - DNA, 25 bp, Homo sapien
atttccaacgtctttattgcatgca

SEQ ID NO: 4101840 - DNA, 25 bp, Homo sapien
ccaacgtctttattgcatgcaagag

SEQ ID NO: 4101841 - DNA, 25 bp, Homo sapien
tctttattgcatgcaagagagacaa

SEQ ID NO: 4101842 - DNA, 25 bp, Homo sapien
gcaaatcccttgtttaacttgtcca

SEQ ID NO: 4101843 - DNA, 25 bp, Homo sapien
ctagataaagcaaatcccttgttta

SEQ ID NO: 4101844 - DNA, 25 bp, Homo sapien
tgtttaacttgtccaagaacaaaca

SEQ ID NO: 4101845 - DNA, 25 bp, Homo sapien
tagataaagcaaatcccttgtttaa

SEQ ID NO: 4101846 - DNA, 25 bp, Homo sapien
tcaacacttcttgcttatcgggtag

SEQ ID NO: 4101847 - DNA, 25 bp, Homo sapien
cgggtagttttaggcgaatgacaca

SEQ ID NO: 4101848 - DNA, 25 bp, Homo sapien
gaatgacacattcaccgctcgctct

SEQ ID NO: 4101849 - DNA, 25 bp, Homo sapien
ttagctaaactttgctgttatcaac

SEQ ID NO: 4101850 - DNA, 25 bp, Homo sapien
tcaaactcttgtgaaactgaccaca

SEQ ID NO: 4101851 - DNA, 25 bp, Homo sapien
caataagaactaattgccctgctta

SEQ ID NO: 4101852 - DNA, 25 bp, Homo sapien
gaactaattgccctgcttacaaaaa

SEQ ID NO: 4101853 - DNA, 25 bp, Homo sapien
caaactcttgtgaaactgaccacaa

SEQ ID NO: 4101854 - DNA, 25 bp, Homo sapien
atcctgactttgaatgcttataaga

SEQ ID NO: 4101855 - DNA, 25 bp, Homo sapien
taatcctgactttgaatgcttataa

SEQ ID NO: 4101856 - DNA, 25 bp, Homo sapien
aatcctgactttgaatgcttataag

SEQ ID NO: 4101857 - DNA, 25 bp, Homo sapien
ctaatcctgactttgaatgcttata

SEQ ID NO: 4101858 - DNA, 25 bp, Homo sapien
gcactatgtgaaatcatccattcca

SEQ ID NO: 4101859 - DNA, 25 bp, Homo sapien
taaagccaatgaaagcattctgagg

SEQ ID NO: 4101860 - DNA, 25 bp, Homo sapien
tcatcattaaactgtaaccagtgca

SEQ ID NO: 4101861 - DNA, 25 bp, Homo sapien
cattaaagccaatgaaagcattctg

SEQ ID NO: 4101862 - DNA, 25 bp, Homo sapien
gaaattaggctttatacgaagtcca

SEQ ID NO: 4101863 - DNA, 25 bp, Homo sapien
ctcattgttacaggcctgggactgg

SEQ ID NO: 4101864 - DNA, 25 bp, Homo sapien
ctttttgagggcactaacctgtgtg

SEQ ID NO: 4101865 - DNA, 25 bp, Homo sapien
aatccaacccgtggaaaagcatccg

SEQ ID NO: 4101866 - DNA, 25 bp, Homo sapien
tgctaaatacttgccaggccccagg

SEQ ID NO: 4101867 - DNA, 25 bp, Homo sapien
tgtggagcacgggaatagacatcgt

SEQ ID NO: 4101868 - DNA, 25 bp, Homo sapien
aatgttgggagatactctgcccatc

SEQ ID NO: 4101869 - DNA, 25 bp, Homo sapien
taattcccgcccactgagattctgc

SEQ ID NO: 4101870 - DNA, 25 bp, Homo sapien
agcagctaagaccaagattccaaag

SEQ ID NO: 4101871 - DNA, 25 bp, Homo sapien
gcagtccaacggcgtgtggctgaac

SEQ ID NO: 4101872 - DNA, 25 bp, Homo sapien
ccaaaggcctctggcggcagtccaa

SEQ ID NO: 4101873 - DNA, 25 bp, Homo sapien
gcagctaagaccaagattccaaagg

SEQ ID NO: 4101874 - DNA, 25 bp, Homo sapien
tagggagagattcaaaggaaacgcc

SEQ ID NO: 4101875 - DNA, 25 bp, Homo sapien
tgtgcgcatgcgtgtatgaactcgt

SEQ ID NO: 4101876 - DNA, 25 bp, Homo sapien
tacagctcacatacattagggagag

SEQ ID NO: 4101877 - DNA, 25 bp, Homo sapien
tacggctggctaaaacgatgttgac

SEQ ID NO: 4101878 - DNA, 25 bp, Homo sapien
caaagtttatcagaggtccttttct

SEQ ID NO: 4101879 - DNA, 25 bp, Homo sapien
gatttgtcctggcagacgaagcagg

SEQ ID NO: 4101880 - DNA, 25 bp, Homo sapien
ttgggacgagttcctcagagctggt

SEQ ID NO: 4101881 - DNA, 25 bp, Homo sapien
catagtggtaccctgatgatttgtc

SEQ ID NO: 4101882 - DNA, 25 bp, Homo sapien
cgaagcagggtttgtacactcgagg

SEQ ID NO: 4101883 - DNA, 25 bp, Homo sapien
ggccttagaacctttgaccctcatc

SEQ ID NO: 4101884 - DNA, 25 bp, Homo sapien
tgaattcaccacacttatgggaggt

SEQ ID NO: 4101885 - DNA, 25 bp, Homo sapien
gaggtgatgttacacatccagccca

SEQ ID NO: 4101886 - DNA, 25 bp, Homo sapien
tttggaactgggtaggtcacctcca

SEQ ID NO: 4101887 - DNA, 25 bp, Homo sapien
ccagacggcatgttctaaagagaaa

SEQ ID NO: 4101888 - DNA, 25 bp, Homo sapien
gataaaactacagacaccagacggc

SEQ ID NO: 4101889 - DNA, 25 bp, Homo sapien
gcctccagtattccgtaggcaggaa

SEQ ID NO: 4101890 - DNA, 25 bp, Homo sapien
tagcaagtccctacaggctgaaaat

SEQ ID NO: 4101891 - DNA, 25 bp, Homo sapien
cagagatacatggtggagcctagcc

SEQ ID NO: 4101892 - DNA, 25 bp, Homo sapien
cagcctgatgggaatgagggatcac

SEQ ID NO: 4101893 - DNA, 25 bp, Homo sapien
tccaggtgaaccatgcagatgagtt

SEQ ID NO: 4101894 - DNA, 25 bp, Homo sapien
taaaatgccatggagtacctgtaac

SEQ ID NO: 4101895 - DNA, 25 bp, Homo sapien
ttaaattctgaccaccatcgtatgg

SEQ ID NO: 4101896 - DNA, 25 bp, Homo sapien
ttgttaaattctgaccaccatcgta

SEQ ID NO: 4101897 - DNA, 25 bp, Homo sapien
gcagccgctgaccattcattcccag

SEQ ID NO: 4101898 - DNA, 25 bp, Homo sapien
accattcattcccagagatggacca

SEQ ID NO: 4101899 - DNA, 25 bp, Homo sapien
tactagggtaatccagggaggctcc

SEQ ID NO: 4101900 - DNA, 25 bp, Homo sapien
ggctccatggagtagtagggtctta

SEQ ID NO: 4101901 - DNA, 25 bp, Homo sapien
tagggtcttaatgtgagccttgaag

SEQ ID NO: 4101902 - DNA, 25 bp, Homo sapien
gataaaacaaacgataggctgggag

SEQ ID NO: 4101903 - DNA, 25 bp, Homo sapien
tctgcgcccttgtggagaagacacg

SEQ ID NO: 4101904 - DNA, 25 bp, Homo sapien
taaaatgtgggtcacggagcctacc

SEQ ID NO: 4101905 - DNA, 25 bp, Homo sapien
aatgccccaggaatagtgctagcca

SEQ ID NO: 4101906 - DNA, 25 bp, Homo sapien
tggacaaaattagccctgagggact

SEQ ID NO: 4101907 - DNA, 25 bp, Homo sapien
cactaaccactcaatgtgtttttcc

SEQ ID NO: 4101908 - DNA, 25 bp, Homo sapien
gatttatatcaccaattaaggccat

SEQ ID NO: 4101909 - DNA, 25 bp, Homo sapien
gggtctgaggatttatatcaccaat

SEQ ID NO: 4101910 - DNA, 25 bp, Homo sapien
gaccactaaccactcaatgtgtttt

SEQ ID NO: 4101911 - DNA, 25 bp, Homo sapien
acatggttccatcccgaacctggag

SEQ ID NO: 4101912 - DNA, 25 bp, Homo sapien
tctcgcttatacatggttccatccc

SEQ ID NO: 4101913 - DNA, 25 bp, Homo sapien
tggaatttttctcgcttatacatgg

SEQ ID NO: 4101914 - DNA, 25 bp, Homo sapien
actggaatttttctcgcttatacat

SEQ ID NO: 4101915 - DNA, 25 bp, Homo sapien
gaactgctgacaccgtaatggtact

SEQ ID NO: 4101916 - DNA, 25 bp, Homo sapien
tctggaactgctgacaccgtaatgg

SEQ ID NO: 4101917 - DNA, 25 bp, Homo sapien
tgacaccgtaatggtactctttcat

SEQ ID NO: 4101918 - DNA, 25 bp, Homo sapien
tgctgacaccgtaatggtactcttt

SEQ ID NO: 4101919 - DNA, 25 bp, Homo sapien
cttttctctcttctgaatgcccaag

SEQ ID NO: 4101920 - DNA, 25 bp, Homo sapien
ttctctcttctgaatgcccaagaaa

SEQ ID NO: 4101921 - DNA, 25 bp, Homo sapien
ttttctctcttctgaatgcccaaga

SEQ ID NO: 4101922 - DNA, 25 bp, Homo sapien
ctctcttctgaatgcccaagaaaaa

SEQ ID NO: 4101923 - DNA, 25 bp, Homo sapien
tgcagacaatggatgatcaagtgat

SEQ ID NO: 4101924 - DNA, 25 bp, Homo sapien
ccgaatacacagatgaagggtatac

SEQ ID NO: 4101925 - DNA, 25 bp, Homo sapien
caagtgatgcttgccgaatacacag

SEQ ID NO: 4101926 - DNA, 25 bp, Homo sapien
agctttgcagacaatggatgatcaa

SEQ ID NO: 4101927 - DNA, 25 bp, Homo sapien
acaggcttagcttcataactggctc

SEQ ID NO: 4101928 - DNA, 25 bp, Homo sapien
cctccaaacaggcttagcttcataa

SEQ ID NO: 4101929 - DNA, 25 bp, Homo sapien
tccaaacaggcttagcttcataact

SEQ ID NO: 4101930 - DNA, 25 bp, Homo sapien
aaacaggcttagcttcataactggc

SEQ ID NO: 4101931 - DNA, 25 bp, Homo sapien
tctgaatacttctgcggaaaaagcc

SEQ ID NO: 4101932 - DNA, 25 bp, Homo sapien
ttctgaatacttctgcggaaaaagc

SEQ ID NO: 4101933 - DNA, 25 bp, Homo sapien
tcttctgaatacttctgcggaaaaa

SEQ ID NO: 4101934 - DNA, 25 bp, Homo sapien
cttctgaatacttctgcggaaaaag

SEQ ID NO: 4101935 - DNA, 25 bp, Homo sapien
cagttcttatctcggtgacaagtgt

SEQ ID NO: 4101936 - DNA, 25 bp, Homo sapien
tattggcatcgattcctggtgactt

SEQ ID NO: 4101937 - DNA, 25 bp, Homo sapien
taataacacagttcttatctcggtg

SEQ ID NO: 4101938 - DNA, 25 bp, Homo sapien
aaagcacttctggagtcgacagtat

SEQ ID NO: 4101939 - DNA, 25 bp, Homo sapien
aatcacagagataaggaaaacaggg

SEQ ID NO: 4101940 - DNA, 25 bp, Homo sapien
caagatttcgttagtgtcgtgtgtg

SEQ ID NO: 4101941 - DNA, 25 bp, Homo sapien
ccttggcaagatttcgttagtgtcg

SEQ ID NO: 4101942 - DNA, 25 bp, Homo sapien
cgtgtgtgaattccacatgactgtg

SEQ ID NO: 4101943 - DNA, 25 bp, Homo sapien
catgttcacgcatgcggctggaaca

SEQ ID NO: 4101944 - DNA, 25 bp, Homo sapien
taattgactgagtggatcccagctg

SEQ ID NO: 4101945 - DNA, 25 bp, Homo sapien
ggctttaattgactgagtggatccc

SEQ ID NO: 4101946 - DNA, 25 bp, Homo sapien
ctaggttacatgttcacgcatgcgg

SEQ ID NO: 4101947 - DNA, 25 bp, Homo sapien
cagaacaaaatgatcacagtgaacc

SEQ ID NO: 4101948 - DNA, 25 bp, Homo sapien
ctggtgaacagaacaaaatgatcac

SEQ ID NO: 4101949 - DNA, 25 bp, Homo sapien
gtgaacagaacaaaatgatcacagt

SEQ ID NO: 4101950 - DNA, 25 bp, Homo sapien
acagaacaaaatgatcacagtgaac

SEQ ID NO: 4101951 - DNA, 25 bp, Homo sapien
gatttgtgtgccacagagcaagaag

SEQ ID NO: 4101952 - DNA, 25 bp, Homo sapien
tcagggatttgtgtgccacagagca

SEQ ID NO: 4101953 - DNA, 25 bp, Homo sapien
agggatttgtgtgccacagagcaag

SEQ ID NO: 4101954 - DNA, 25 bp, Homo sapien
ggatttgtgtgccacagagcaagaa

SEQ ID NO: 4101955 - DNA, 25 bp, Homo sapien
gccacagctgcagactctgcttcta

SEQ ID NO: 4101956 - DNA, 25 bp, Homo sapien
ggccacagctgcagactctgcttct

SEQ ID NO: 4101957 - DNA, 25 bp, Homo sapien
acagctgcagactctgcttctattc

SEQ ID NO: 4101958 - DNA, 25 bp, Homo sapien
tcaggccacagctgcagactctgct

SEQ ID NO: 4101959 - DNA, 25 bp, Homo sapien
gatatcaataagacctaatgttttc

SEQ ID NO: 4101960 - DNA, 25 bp, Homo sapien
aatctcttaactcttggaagatcag

SEQ ID NO: 4101961 - DNA, 25 bp, Homo sapien
cactcatatggtgcaaagtgggaga

SEQ ID NO: 4101962 - DNA, 25 bp, Homo sapien
ttcactttaagttcacgtgttcaaa

SEQ ID NO: 4101963 - DNA, 25 bp, Homo sapien
gaaagaaataacctaaccatgacag

SEQ ID NO: 4101964 - DNA, 25 bp, Homo sapien
aaagaaataacctaaccatgacagt

SEQ ID NO: 4101965 - DNA, 25 bp, Homo sapien
agaaataacctaaccatgacagtta

SEQ ID NO: 4101966 - DNA, 25 bp, Homo sapien
aagaaataacctaaccatgacagtt

SEQ ID NO: 4101967 - DNA, 25 bp, Homo sapien
ctaattcatcagataattgctcaac

SEQ ID NO: 4101968 - DNA, 25 bp, Homo sapien
aattgctcaactctttgttttccag

SEQ ID NO: 4101969 - DNA, 25 bp, Homo sapien
gataattgctcaactctttgttttc

SEQ ID NO: 4101970 - DNA, 25 bp, Homo sapien
atctaattcatcagataattgctca

SEQ ID NO: 4101971 - DNA, 25 bp, Homo sapien
cagtactaaaagatgcctgtcttca

SEQ ID NO: 4101972 - DNA, 25 bp, Homo sapien
tttgcttggtcccagtactaaaaga

SEQ ID NO: 4101973 - DNA, 25 bp, Homo sapien
ttacgcttggtaaaatgaagtgtcg

SEQ ID NO: 4101974 - DNA, 25 bp, Homo sapien
cttggtaaaatgaagtgtcggaaca

SEQ ID NO: 4101975 - DNA, 25 bp, Homo sapien
cacaagccacacatgagagttccag

SEQ ID NO: 4101976 - DNA, 25 bp, Homo sapien
tgtttagctttaggagatactgcca

SEQ ID NO: 4101977 - DNA, 25 bp, Homo sapien
gggctttgcactccatagacctgga

SEQ ID NO: 4101978 - DNA, 25 bp, Homo sapien
cagccattctggtggagtaaagcac

SEQ ID NO: 4101979 - DNA, 25 bp, Homo sapien
tcagagatccccatataaaaaggtg

SEQ ID NO: 4101980 - DNA, 25 bp, Homo sapien
taatgaattacaggccagcagaacc

SEQ ID NO: 4101981 - DNA, 25 bp, Homo sapien
tagacgtgcactacccagagaggtt

SEQ ID NO: 4101982 - DNA, 25 bp, Homo sapien
gatactcttttatagcacgccatga

SEQ ID NO: 4101983 - DNA, 25 bp, Homo sapien
tgctggccatctgggcacactgtcc

SEQ ID NO: 4101984 - DNA, 25 bp, Homo sapien
caaatgctggccatctgggcacact

SEQ ID NO: 4101985 - DNA, 25 bp, Homo sapien
aacagctaaatcaaatgctggccat

SEQ ID NO: 4101986 - DNA, 25 bp, Homo sapien
gtttgacaagcttccttgaactcca

SEQ ID NO: 4101987 - DNA, 25 bp, Homo sapien
tactcctcctccagaggacactaag

SEQ ID NO: 4101988 - DNA, 25 bp, Homo sapien
tcacatggcaggaggggagtcctcc

SEQ ID NO: 4101989 - DNA, 25 bp, Homo sapien
gagtcctcccttccttctactcctc

SEQ ID NO: 4101990 - DNA, 25 bp, Homo sapien
cttctactcctcctccagaggacac

SEQ ID NO: 4101991 - DNA, 25 bp, Homo sapien
aaacatacattgctcttgggaggca

SEQ ID NO: 4101992 - DNA, 25 bp, Homo sapien
gaagttctcctaagagcagccctca

SEQ ID NO: 4101993 - DNA, 25 bp, Homo sapien
catgtggttcacaggtcttcggaat

SEQ ID NO: 4101994 - DNA, 25 bp, Homo sapien
tcattgcttctcatagttccccagg

SEQ ID NO: 4101995 - DNA, 25 bp, Homo sapien
aattactttcaatgccagtatagtg

SEQ ID NO: 4101996 - DNA, 25 bp, Homo sapien
gaagaatacataaatcttaattatc

SEQ ID NO: 4101997 - DNA, 25 bp, Homo sapien
caaaataagccctattaacattttg

SEQ ID NO: 4101998 - DNA, 25 bp, Homo sapien
ttatctatgtcctcaaaataagccc

SEQ ID NO: 4101999 - DNA, 25 bp, Homo sapien
tgtctaagaccttcccttggcactg

SEQ ID NO: 4102000 - DNA, 25 bp, Homo sapien
gaatctgaatgctggtcctcctgta

SEQ ID NO: 4102001 - DNA, 25 bp, Homo sapien
aaagttccattcagatcatcagcag

SEQ ID NO: 4102002 - DNA, 25 bp, Homo sapien
tctgtctctagggagaagcactcac

SEQ ID NO: 4102003 - DNA, 25 bp, Homo sapien
ccaagagctttaccctcaaatggga

SEQ ID NO: 4102004 - DNA, 25 bp, Homo sapien
tttccaagagctttaccctcaaatg

SEQ ID NO: 4102005 - DNA, 25 bp, Homo sapien
gagctttaccctcaaatgggatgcc

SEQ ID NO: 4102006 - DNA, 25 bp, Homo sapien
gatttttccaagagctttaccctca

SEQ ID NO: 4102007 - DNA, 25 bp, Homo sapien
catgtgcccgtcagttgtttggaga

SEQ ID NO: 4102008 - DNA, 25 bp, Homo sapien
tttggagagcttgggctcacccagg

SEQ ID NO: 4102009 - DNA, 25 bp, Homo sapien
gaccccggcagagagctaggtttgt

SEQ ID NO: 4102010 - DNA, 25 bp, Homo sapien
cagagtcttggcttgttgtgagaga

SEQ ID NO: 4102011 - DNA, 25 bp, Homo sapien
tgagcttttcggatcttctctgtga

SEQ ID NO: 4102012 - DNA, 25 bp, Homo sapien
tctgtgcattcttgcttcgaagtct

SEQ ID NO: 4102013 - DNA, 25 bp, Homo sapien
tgtatttacccagctggcagagtga

SEQ ID NO: 4102014 - DNA, 25 bp, Homo sapien
gtgagatcgtccaactcagctgtca

SEQ ID NO: 4102015 - DNA, 25 bp, Homo sapien
aaggtttccacactcccagcagcct

SEQ ID NO: 4102016 - DNA, 25 bp, Homo sapien
gcagcctggggcaggagtatctctt

SEQ ID NO: 4102017 - DNA, 25 bp, Homo sapien
agcctggggcaggagtatctcttac

SEQ ID NO: 4102018 - DNA, 25 bp, Homo sapien
cagcagcctggggcaggagtatctc

SEQ ID NO: 4102019 - DNA, 25 bp, Homo sapien
tttcaggaagacctccccactctca

SEQ ID NO: 4102020 - DNA, 25 bp, Homo sapien
ttcaggaagacctccccactctcat

SEQ ID NO: 4102021 - DNA, 25 bp, Homo sapien
tctttcaggaagacctccccactct

SEQ ID NO: 4102022 - DNA, 25 bp, Homo sapien
cctctttcaggaagacctccccact

SEQ ID NO: 4102023 - DNA, 25 bp, Homo sapien
catctgctgccgactgagagtctgg

SEQ ID NO: 4102024 - DNA, 25 bp, Homo sapien
tcataggcatgaggcttcaaatggc

SEQ ID NO: 4102025 - DNA, 25 bp, Homo sapien
catatatggagggtcgcgcccatgg

SEQ ID NO: 4102026 - DNA, 25 bp, Homo sapien
tccagctgcggcaaatggagagccc

SEQ ID NO: 4102027 - DNA, 25 bp, Homo sapien
aatttggtctgcgatggtcaagcca

SEQ ID NO: 4102028 - DNA, 25 bp, Homo sapien
tcggactcgatggtcagcactggaa

SEQ ID NO: 4102029 - DNA, 25 bp, Homo sapien
gcaggcggccttcagcagggtaatt

SEQ ID NO: 4102030 - DNA, 25 bp, Homo sapien
ggcagacgtttagcaaactccacga

SEQ ID NO: 4102031 - DNA, 25 bp, Homo sapien
ttcctggagagcctcggctgcgtgt

SEQ ID NO: 4102032 - DNA, 25 bp, Homo sapien
ctgcgtgtcccgcagctgaccgcat

SEQ ID NO: 4102033 - DNA, 25 bp, Homo sapien
ctcatgattctgaatcaacccttcc

SEQ ID NO: 4102034 - DNA, 25 bp, Homo sapien
gattctgaatcaacccttcctggag

SEQ ID NO: 4102035 - DNA, 25 bp, Homo sapien
ctggggtatacctggtgcaaattct

SEQ ID NO: 4102036 - DNA, 25 bp, Homo sapien
tcttgttctggggtatacctggtgc

SEQ ID NO: 4102037 - DNA, 25 bp, Homo sapien
tgtcttgttctggggtatacctggt

SEQ ID NO: 4102038 - DNA, 25 bp, Homo sapien
tgttctggggtatacctggtgcaaa

SEQ ID NO: 4102039 - DNA, 25 bp, Homo sapien
ccaaatccagcattgtgcatctgag

SEQ ID NO: 4102040 - DNA, 25 bp, Homo sapien
tctgagttcgatttagggtaaggcc

SEQ ID NO: 4102041 - DNA, 25 bp, Homo sapien
ggtgaacacaaggtcagtcagagga

SEQ ID NO: 4102042 - DNA, 25 bp, Homo sapien
acacaaggtcagtcagaggaccaaa

SEQ ID NO: 4102043 - DNA, 25 bp, Homo sapien
tgtgtcatccatttccaaaggcagg

SEQ ID NO: 4102044 - DNA, 25 bp, Homo sapien
tccacagattaagcagatggcactg

SEQ ID NO: 4102045 - DNA, 25 bp, Homo sapien
gatggcactgagaaggcctgtttct

SEQ ID NO: 4102046 - DNA, 25 bp, Homo sapien
ctgagaaggcctgtttctgtgtcat

SEQ ID NO: 4102047 - DNA, 25 bp, Homo sapien
tcatggaatttcatgaggcttttct

SEQ ID NO: 4102048 - DNA, 25 bp, Homo sapien
tgaggcttttctacatagttggtac

SEQ ID NO: 4102049 - DNA, 25 bp, Homo sapien
ggaatttcatgaggcttttctacat

SEQ ID NO: 4102050 - DNA, 25 bp, Homo sapien
catggaatttcatgaggcttttcta

SEQ ID NO: 4102051 - DNA, 25 bp, Homo sapien
ggcttgctgggtcgtctttttctga

SEQ ID NO: 4102052 - DNA, 25 bp, Homo sapien
cttttgtcggttcctcaaggtcctg

SEQ ID NO: 4102053 - DNA, 25 bp, Homo sapien
gcactgatgctacggagatctgtga

SEQ ID NO: 4102054 - DNA, 25 bp, Homo sapien
tctttggaaacatgtgaggcttgct

SEQ ID NO: 4102055 - DNA, 25 bp, Homo sapien
taaggccctcaagtccactgtgtga

SEQ ID NO: 4102056 - DNA, 25 bp, Homo sapien
ctacagtactgagagcacgaagaca

SEQ ID NO: 4102057 - DNA, 25 bp, Homo sapien
gagttccaagactttaaaagcagcc

SEQ ID NO: 4102058 - DNA, 25 bp, Homo sapien
aagcaacacaacctggtaaggccct

SEQ ID NO: 4102059 - DNA, 25 bp, Homo sapien
aggtggcattgatccaggaatttcc

SEQ ID NO: 4102060 - DNA, 25 bp, Homo sapien
gtgagatgctaggactgtgctctgc

SEQ ID NO: 4102061 - DNA, 25 bp, Homo sapien
catttcttgaatgagaggtggcatt

SEQ ID NO: 4102062 - DNA, 25 bp, Homo sapien
ggtgactgactgaccccactgtttt

SEQ ID NO: 4102063 - DNA, 25 bp, Homo sapien
cctggaactgaaggtactggggaat

SEQ ID NO: 4102064 - DNA, 25 bp, Homo sapien
gtactggggaatgtttgaagtagct

SEQ ID NO: 4102065 - DNA, 25 bp, Homo sapien
cttgcattttaaatcctggaactga

SEQ ID NO: 4102066 - DNA, 25 bp, Homo sapien
aatcctggaactgaaggtactgggg

SEQ ID NO: 4102067 - DNA, 25 bp, Homo sapien
tctcaatgtacaaacagagccagtg

SEQ ID NO: 4102068 - DNA, 25 bp, Homo sapien
ccaggagactccatggaaaaaggta

SEQ ID NO: 4102069 - DNA, 25 bp, Homo sapien
gaccagcctgctaattatcccatga

SEQ ID NO: 4102070 - DNA, 25 bp, Homo sapien
tagccccttggcatcaagaaggctg

SEQ ID NO: 4102071 - DNA, 25 bp, Homo sapien
tgccacgaaccggtcgggctaggaa

SEQ ID NO: 4102072 - DNA, 25 bp, Homo sapien
tatagactgccgtgcattagcacag

SEQ ID NO: 4102073 - DNA, 25 bp, Homo sapien
tcatggttacaaactacagacctgc

SEQ ID NO: 4102074 - DNA, 25 bp, Homo sapien
cacgtactgtctgattggcttgtag

SEQ ID NO: 4102075 - DNA, 25 bp, Homo sapien
ggtccagtatgattacagtgatagc

SEQ ID NO: 4102076 - DNA, 25 bp, Homo sapien
tgttactgtgcttattggcctagag

SEQ ID NO: 4102077 - DNA, 25 bp, Homo sapien
tggcctagagccagggtgtctaacc

SEQ ID NO: 4102078 - DNA, 25 bp, Homo sapien
tatgaagccttcctagcaattctac

SEQ ID NO: 4102079 - DNA, 25 bp, Homo sapien
ggtagcgttgtgtgctttcatcagg

SEQ ID NO: 4102080 - DNA, 25 bp, Homo sapien
tcacttagtataggtgttgccagct

SEQ ID NO: 4102081 - DNA, 25 bp, Homo sapien
tgggtactagtacagctaaagaagc

SEQ ID NO: 4102082 - DNA, 25 bp, Homo sapien
cccagtcctggttccctatgataag

SEQ ID NO: 4102083 - DNA, 25 bp, Homo sapien
ccagtagtagaacacaaggtagaga

SEQ ID NO: 4102084 - DNA, 25 bp, Homo sapien
ggacagcttttaacatccagtaact

SEQ ID NO: 4102085 - DNA, 25 bp, Homo sapien
gaaattgtgcagttttggtgtgaga

SEQ ID NO: 4102086 - DNA, 25 bp, Homo sapien
ccttaagactgatagtacattgact

SEQ ID NO: 4102087 - DNA, 25 bp, Homo sapien
caaattagatagacatgagcctctg

SEQ ID NO: 4102088 - DNA, 25 bp, Homo sapien
cctgtgtgccctttagttcagttta

SEQ ID NO: 4102089 - DNA, 25 bp, Homo sapien
caataattgcagacttagaatagca

SEQ ID NO: 4102090 - DNA, 25 bp, Homo sapien
gaagagtagcctggaatacgaaagc

SEQ ID NO: 4102091 - DNA, 25 bp, Homo sapien
actttggcacttcgctaacaactct

SEQ ID NO: 4102092 - DNA, 25 bp, Homo sapien
tccaactttggcacttcgctaacaa

SEQ ID NO: 4102093 - DNA, 25 bp, Homo sapien
ctgcttccaactttggcacttcgct

SEQ ID NO: 4102094 - DNA, 25 bp, Homo sapien
gcttccaactttggcacttcgctaa

SEQ ID NO: 4102095 - DNA, 25 bp, Homo sapien
gaagtaaacttccttgtcgcacttg

SEQ ID NO: 4102096 - DNA, 25 bp, Homo sapien
aagtaaacttccttgtcgcacttgg

SEQ ID NO: 4102097 - DNA, 25 bp, Homo sapien
agtaaacttccttgtcgcacttggg

SEQ ID NO: 4102098 - DNA, 25 bp, Homo sapien
tgcagtagggcttgctttcgtgctc

SEQ ID NO: 4102099 - DNA, 25 bp, Homo sapien
caaacatggcggcatagcaagtggt

SEQ ID NO: 4102100 - DNA, 25 bp, Homo sapien
tagggcttgctttcgtgctcagcgt

SEQ ID NO: 4102101 - DNA, 25 bp, Homo sapien
catggcggcatagcaagtggttgca

SEQ ID NO: 4102102 - DNA, 25 bp, Homo sapien
ccaagattgcttagacttagggact

SEQ ID NO: 4102103 - DNA, 25 bp, Homo sapien
ttagacttagggacttctgagctca

SEQ ID NO: 4102104 - DNA, 25 bp, Homo sapien
gcttcaacttgtggggcaggttcca

SEQ ID NO: 4102105 - DNA, 25 bp, Homo sapien
ctgagtaccaagattgcttagactt

SEQ ID NO: 4102106 - DNA, 25 bp, Homo sapien
tcaaagttggacttggttgcatata

SEQ ID NO: 4102107 - DNA, 25 bp, Homo sapien
cttgatggttatacatgagtccatc

SEQ ID NO: 4102108 - DNA, 25 bp, Homo sapien
aaagttggacttggttgcatataac

SEQ ID NO: 4102109 - DNA, 25 bp, Homo sapien
caaagttggacttggttgcatataa

SEQ ID NO: 4102110 - DNA, 25 bp, Homo sapien
tccagaaatgttgagtgcctgatgg

SEQ ID NO: 4102111 - DNA, 25 bp, Homo sapien
tgttgagtgcctgatgggctgactc

SEQ ID NO: 4102112 - DNA, 25 bp, Homo sapien
agaaatgttgagtgcctgatgggct

SEQ ID NO: 4102113 - DNA, 25 bp, Homo sapien
aatgttgagtgcctgatgggctgac

SEQ ID NO: 4102114 - DNA, 25 bp, Homo sapien
tgaaattcagccttggctactcctg

SEQ ID NO: 4102115 - DNA, 25 bp, Homo sapien
tcctgtgtagatgcctttcttttca

SEQ ID NO: 4102116 - DNA, 25 bp, Homo sapien
tgcttcagccataacatctctttgt

SEQ ID NO: 4102117 - DNA, 25 bp, Homo sapien
ttcattcatacttgcttcagccata

SEQ ID NO: 4102118 - DNA, 25 bp, Homo sapien
tcaaaccatttctggatgggagaat

SEQ ID NO: 4102119 - DNA, 25 bp, Homo sapien
tattgtgaaagatcgttatgttcga

SEQ ID NO: 4102120 - DNA, 25 bp, Homo sapien
aaaagttgaaacagactggcacatg

SEQ ID NO: 4102121 - DNA, 25 bp, Homo sapien
ggcacatggtaacttaatgcataaa

SEQ ID NO: 4102122 - DNA, 25 bp, Homo sapien
tataatggatcctgccaaattgcct

SEQ ID NO: 4102123 - DNA, 25 bp, Homo sapien
caccacagtggagattcttgtaaac

SEQ ID NO: 4102124 - DNA, 25 bp, Homo sapien
ttatatgggaaacgccaaactctcc

SEQ ID NO: 4102125 - DNA, 25 bp, Homo sapien
ccctattgatggacatagaggttgt

SEQ ID NO: 4102126 - DNA, 25 bp, Homo sapien
tttttgacatatcagtcagactggt

SEQ ID NO: 4102127 - DNA, 25 bp, Homo sapien
ctatgaaccctgtcgtcaatacctc

SEQ ID NO: 4102128 - DNA, 25 bp, Homo sapien
cgccagttacacttaatttttgaca

SEQ ID NO: 4102129 - DNA, 25 bp, Homo sapien
accttctatgaaccctgtcgtcaat

SEQ ID NO: 4102130 - DNA, 25 bp, Homo sapien
tgttgctcccataactaatgttggg

SEQ ID NO: 4102131 - DNA, 25 bp, Homo sapien
tgctcccataactaatgttgggcat

SEQ ID NO: 4102132 - DNA, 25 bp, Homo sapien
ttttttgttgctcccataactaatg

SEQ ID NO: 4102133 - DNA, 25 bp, Homo sapien
tttgttgctcccataactaatgttg

SEQ ID NO: 4102134 - DNA, 25 bp, Homo sapien
gcacttcaagctccttgacgttgtg

SEQ ID NO: 4102135 - DNA, 25 bp, Homo sapien
cacttcaagctccttgacgttgtgg

SEQ ID NO: 4102136 - DNA, 25 bp, Homo sapien
gagcaatctcagcacagtaagtttt

SEQ ID NO: 4102137 - DNA, 25 bp, Homo sapien
tgtgagcaatctcagcacagtaagt

SEQ ID NO: 4102138 - DNA, 25 bp, Homo sapien
gctgggtggctctttccatgatggc

SEQ ID NO: 4102139 - DNA, 25 bp, Homo sapien
gccagctgggtggctctttccatga

SEQ ID NO: 4102140 - DNA, 25 bp, Homo sapien
ctgggtggctctttccatgatggct

SEQ ID NO: 4102141 - DNA, 25 bp, Homo sapien
cagctgggtggctctttccatgatg

SEQ ID NO: 4102142 - DNA, 25 bp, Homo sapien
tttaaacacaaaacatgcacatgag

SEQ ID NO: 4102143 - DNA, 25 bp, Homo sapien
taaacacaaaacatgcacatgagct

SEQ ID NO: 4102144 - DNA, 25 bp, Homo sapien
aacacaaaacatgcacatgagctgt

SEQ ID NO: 4102145 - DNA, 25 bp, Homo sapien
atttaaacacaaaacatgcacatga

SEQ ID NO: 4102146 - DNA, 25 bp, Homo sapien
gagcctattggtagtctttaactta

SEQ ID NO: 4102147 - DNA, 25 bp, Homo sapien
tggttcaagtgctgacccagttgct

SEQ ID NO: 4102148 - DNA, 25 bp, Homo sapien
cgttatccggagagagagcctattg

SEQ ID NO: 4102149 - DNA, 25 bp, Homo sapien
tttaacttagttggtcatttcatgg

SEQ ID NO: 4102150 - DNA, 25 bp, Homo sapien
taggagcgttcttgggaagtgccat

SEQ ID NO: 4102151 - DNA, 25 bp, Homo sapien
tggtttgtagtctgtgattcccata

SEQ ID NO: 4102152 - DNA, 25 bp, Homo sapien
gcatccctaggagcgttcttgggaa

SEQ ID NO: 4102153 - DNA, 25 bp, Homo sapien
tccctaggagcgttcttgggaagtg

SEQ ID NO: 4102154 - DNA, 25 bp, Homo sapien
cagacactgtttgtggggtcactat

SEQ ID NO: 4102155 - DNA, 25 bp, Homo sapien
taacagcaccaacagtcaatcgtag

SEQ ID NO: 4102156 - DNA, 25 bp, Homo sapien
gagaggtaaaaagatcagcacgaca

SEQ ID NO: 4102157 - DNA, 25 bp, Homo sapien
caatcgtagaactagcctcccttgg

SEQ ID NO: 4102158 - DNA, 25 bp, Homo sapien
tctgcactgttaaatctttggcttg

SEQ ID NO: 4102159 - DNA, 25 bp, Homo sapien
gaaaagcacattttgtgtgtttact

SEQ ID NO: 4102160 - DNA, 25 bp, Homo sapien
gattagaaatcatgctgtaaaagat

SEQ ID NO: 4102161 - DNA, 25 bp, Homo sapien
cctaaaacttaggtgctgctgtcag

SEQ ID NO: 4102162 - DNA, 25 bp, Homo sapien
taaggtaaaacgagaagatctagaa

SEQ ID NO: 4102163 - DNA, 25 bp, Homo sapien
ttcctaaattgagagatttggtaaa

SEQ ID NO: 4102164 - DNA, 25 bp, Homo sapien
tcctaaattgagagatttggtaaaa

SEQ ID NO: 4102165 - DNA, 25 bp, Homo sapien
cactgatgttgacgtttgccagtaa

SEQ ID NO: 4102166 - DNA, 25 bp, Homo sapien
actgatgttgacgtttgccagtaag

SEQ ID NO: 4102167 - DNA, 25 bp, Homo sapien
tcactgatgttgacgtttgccagta

SEQ ID NO: 4102168 - DNA, 25 bp, Homo sapien
tcagtggtcgtcagaataggcaatt

SEQ ID NO: 4102169 - DNA, 25 bp, Homo sapien
gaaaaactgagttgagctgccacac

SEQ ID NO: 4102170 - DNA, 25 bp, Homo sapien
taatagagtctagctacctgtctgt

SEQ ID NO: 4102171 - DNA, 25 bp, Homo sapien
tacagagactcaatagtcagtggtc

SEQ ID NO: 4102172 - DNA, 25 bp, Homo sapien
ctgtgtcaagaatatgtcttgggcc

SEQ ID NO: 4102173 - DNA, 25 bp, Homo sapien
cttttattgccatactgtctgtgtc

SEQ ID NO: 4102174 - DNA, 25 bp, Homo sapien
tttcatgtgctggttacttgtccca

SEQ ID NO: 4102175 - DNA, 25 bp, Homo sapien
tacttgtcccaagtgtactattcaa

SEQ ID NO: 4102176 - DNA, 25 bp, Homo sapien
atttgaggaactggatgtgactgtc

SEQ ID NO: 4102177 - DNA, 25 bp, Homo sapien
taatgtccctacagccctctaagtc

SEQ ID NO: 4102178 - DNA, 25 bp, Homo sapien
gtcaggcctttggtatcagtctata

SEQ ID NO: 4102179 - DNA, 25 bp, Homo sapien
aaataaaattgctcactgggcacgg

SEQ ID NO: 4102180 - DNA, 25 bp, Homo sapien
ctgccgctcttctcgtcgtttaacg

SEQ ID NO: 4102181 - DNA, 25 bp, Homo sapien
taggaaggcgtgcttcagacactgc

SEQ ID NO: 4102182 - DNA, 25 bp, Homo sapien
tcgtttaacggcctcagatatcggg

SEQ ID NO: 4102183 - DNA, 25 bp, Homo sapien
gatatcgggacacaacggtaaccgc

SEQ ID NO: 4102184 - DNA, 25 bp, Homo sapien
ggcgtccggcctgagcttcagaggg

SEQ ID NO: 4102185 - DNA, 25 bp, Homo sapien
tggttctgctcctaacgtccgagcc

SEQ ID NO: 4102186 - DNA, 25 bp, Homo sapien
gcggcaccttgttcggccagggact

SEQ ID NO: 4102187 - DNA, 25 bp, Homo sapien
cgacgcccggacagaccgggacctg

SEQ ID NO: 4102188 - DNA, 25 bp, Homo sapien
tcttgacccctgttctaaggtatgg

SEQ ID NO: 4102189 - DNA, 25 bp, Homo sapien
caagtattgtctgtggagcaacagc

SEQ ID NO: 4102190 - DNA, 25 bp, Homo sapien
tactcttgtgttaagcccctgaaaa

SEQ ID NO: 4102191 - DNA, 25 bp, Homo sapien
catagcttagggtcttgttcggaga

SEQ ID NO: 4102192 - DNA, 25 bp, Homo sapien
caaatgccatgcagccgtttaaaat

SEQ ID NO: 4102193 - DNA, 25 bp, Homo sapien
gtggaattaaccaaaatggccaaca

SEQ ID NO: 4102194 - DNA, 25 bp, Homo sapien
gctatagctcgcaacgttattagta

SEQ ID NO: 4102195 - DNA, 25 bp, Homo sapien
gagatgttgcgactatttgttagga

SEQ ID NO: 4102196 - DNA, 25 bp, Homo sapien
ggcgatgacgctctcgagcgcacgc

SEQ ID NO: 4102197 - DNA, 25 bp, Homo sapien
gggctaccccggacacttctccaca

SEQ ID NO: 4102198 - DNA, 25 bp, Homo sapien
gatgacgctctcgagcgcacgcgca

SEQ ID NO: 4102199 - DNA, 25 bp, Homo sapien
cacttctccacagtcgggggcgatg

SEQ ID NO: 4102200 - DNA, 25 bp, Homo sapien
tacactctgtgaccaagcttgcgat

SEQ ID NO: 4102201 - DNA, 25 bp, Homo sapien
gagtgtagccattccctgtatcgcc

SEQ ID NO: 4102202 - DNA, 25 bp, Homo sapien
gatacatgggttggcaatacactct

SEQ ID NO: 4102203 - DNA, 25 bp, Homo sapien
tagactgagcgtctggatacatggg

SEQ ID NO: 4102204 - DNA, 25 bp, Homo sapien
gctgctaatgaacacagggaaaatg

SEQ ID NO: 4102205 - DNA, 25 bp, Homo sapien
tgatatgagctgctaatgaacacag

SEQ ID NO: 4102206 - DNA, 25 bp, Homo sapien
catcaaactatctgtttaaacttac

SEQ ID NO: 4102207 - DNA, 25 bp, Homo sapien
caaggtgttcctttgggtgcttgat

SEQ ID NO: 4102208 - DNA, 25 bp, Homo sapien
ttaagattcagatgatcagaaacac

SEQ ID NO: 4102209 - DNA, 25 bp, Homo sapien
gattaagattcagatgatcagaaac

SEQ ID NO: 4102210 - DNA, 25 bp, Homo sapien
aagattcagatgatcagaaacacat

SEQ ID NO: 4102211 - DNA, 25 bp, Homo sapien
gattcagatgatcagaaacacattc

SEQ ID NO: 4102212 - DNA, 25 bp, Homo sapien
gacgagtgcttgtaattttcaggaa

SEQ ID NO: 4102213 - DNA, 25 bp, Homo sapien
aatcttgaacatagaagacgagtgc

SEQ ID NO: 4102214 - DNA, 25 bp, Homo sapien
tattggcacagttccgaaaaacttc

SEQ ID NO: 4102215 - DNA, 25 bp, Homo sapien
cttaactgttggcataatcttgaac

SEQ ID NO: 4102216 - DNA, 25 bp, Homo sapien
taagacgatcccaaaccaggtgagt

SEQ ID NO: 4102217 - DNA, 25 bp, Homo sapien
aggagtcactaagccaatgcctgta

SEQ ID NO: 4102218 - DNA, 25 bp, Homo sapien
gcagcaacactgcaagggatactct

SEQ ID NO: 4102219 - DNA, 25 bp, Homo sapien
gggatactcttatactcttcaccaa

SEQ ID NO: 4102220 - DNA, 25 bp, Homo sapien
aattgcaacaccagtagccacttga

SEQ ID NO: 4102221 - DNA, 25 bp, Homo sapien
tctaaatgagtctcccacagcatga

SEQ ID NO: 4102222 - DNA, 25 bp, Homo sapien
tcagcatcaccatgggctataaatc

SEQ ID NO: 4102223 - DNA, 25 bp, Homo sapien
tatatcgaatgctgacctggcctgc

SEQ ID NO: 4102224 - DNA, 25 bp, Homo sapien
caaaacttctgcatagatccgggct

SEQ ID NO: 4102225 - DNA, 25 bp, Homo sapien
gatccgggctcttctttgaacagca

SEQ ID NO: 4102226 - DNA, 25 bp, Homo sapien
gaaatggtcgacatgccaacttggg

SEQ ID NO: 4102227 - DNA, 25 bp, Homo sapien
tcacctgagagtccatagcccaaaa

SEQ ID NO: 4102228 - DNA, 25 bp, Homo sapien
tgtagtccttaaaccagcagtatca

SEQ ID NO: 4102229 - DNA, 25 bp, Homo sapien
acagaatctcaagcaccaccctaga

SEQ ID NO: 4102230 - DNA, 25 bp, Homo sapien
gaactacagaatctctcagcctggg

SEQ ID NO: 4102231 - DNA, 25 bp, Homo sapien
aactggtctcagtggcgcattcctg

SEQ ID NO: 4102232 - DNA, 25 bp, Homo sapien
tatggccctggctagatgcctattt

SEQ ID NO: 4102233 - DNA, 25 bp, Homo sapien
catttttaccaccagcaactactca

SEQ ID NO: 4102234 - DNA, 25 bp, Homo sapien
ttgaagtatgctgaaaggtttcctg

SEQ ID NO: 4102235 - DNA, 25 bp, Homo sapien
ggttgctaactctggctaatttaac

SEQ ID NO: 4102236 - DNA, 25 bp, Homo sapien
gaaaagacatttatcaggactaagt

SEQ ID NO: 4102237 - DNA, 25 bp, Homo sapien
gacatttatcaggactaagtttaat

SEQ ID NO: 4102238 - DNA, 25 bp, Homo sapien
acaaaagtctctttatctgtatggc

SEQ ID NO: 4102239 - DNA, 25 bp, Homo sapien
aacaaaagtctctttatctgtatgg

SEQ ID NO: 4102240 - DNA, 25 bp, Homo sapien
tataggatatctcctcaggctgcac

SEQ ID NO: 4102241 - DNA, 25 bp, Homo sapien
ctaatgtggtaaaagctgcctcgac

SEQ ID NO: 4102242 - DNA, 25 bp, Homo sapien
gcagcatctcccaatggtgtggaag

SEQ ID NO: 4102243 - DNA, 25 bp, Homo sapien
gatgtcctgttgctcccttagttga

SEQ ID NO: 4102244 - DNA, 25 bp, Homo sapien
tcagtatttaattacaaattatatg

SEQ ID NO: 4102245 - DNA, 25 bp, Homo sapien
cagtatttaattacaaattatatgt

SEQ ID NO: 4102246 - DNA, 25 bp, Homo sapien
aaggctcagtagggaaagaaaggct

SEQ ID NO: 4102247 - DNA, 25 bp, Homo sapien
tgtcatgctctgaactatcacactg

SEQ ID NO: 4102248 - DNA, 25 bp, Homo sapien
gtaaagtaaactctgacagctgcca

SEQ ID NO: 4102249 - DNA, 25 bp, Homo sapien
ctgtaaagtaaactctgacagctgc

SEQ ID NO: 4102250 - DNA, 25 bp, Homo sapien
gctctgaactatcacactgaccggg

SEQ ID NO: 4102251 - DNA, 25 bp, Homo sapien
ctaaactacattgtttctgagcaaa

SEQ ID NO: 4102252 - DNA, 25 bp, Homo sapien
tttctgagcaaaagctttctattca

SEQ ID NO: 4102253 - DNA, 25 bp, Homo sapien
cattgtttctgagcaaaagctttct

SEQ ID NO: 4102254 - DNA, 25 bp, Homo sapien
tgagcaaaagctttctattcaaatc

SEQ ID NO: 4102255 - DNA, 25 bp, Homo sapien
gggcaaacgggaagcctcctctgaa

SEQ ID NO: 4102256 - DNA, 25 bp, Homo sapien
agctgcctgggcaaacgggaagcct

SEQ ID NO: 4102257 - DNA, 25 bp, Homo sapien
ttgattgacactgtggtaagggcag

SEQ ID NO: 4102258 - DNA, 25 bp, Homo sapien
ggagctacagctgagctgatttgat

SEQ ID NO: 4102259 - DNA, 25 bp, Homo sapien
taaatacaactgtagttcagtggaa

SEQ ID NO: 4102260 - DNA, 25 bp, Homo sapien
ttaaatacaactgtagttcagtgga

SEQ ID NO: 4102261 - DNA, 25 bp, Homo sapien
aaatacaactgtagttcagtggaat

SEQ ID NO: 4102262 - DNA, 25 bp, Homo sapien
tcatctttttggctgatcttcacaa

SEQ ID NO: 4102263 - DNA, 25 bp, Homo sapien
tatcctgtgaggtacatagagcagg

SEQ ID NO: 4102264 - DNA, 25 bp, Homo sapien
gaagttcactggaaatatcaccacc

SEQ ID NO: 4102265 - DNA, 25 bp, Homo sapien
tattactaaataggcatcatggtga

SEQ ID NO: 4102266 - DNA, 25 bp, Homo sapien
tgttttcaatagagtagggccagtt

SEQ ID NO: 4102267 - DNA, 25 bp, Homo sapien
tatggtaagggatcttaacacctaa

SEQ ID NO: 4102268 - DNA, 25 bp, Homo sapien
acattcctgagcttgtaccccttca

SEQ ID NO: 4102269 - DNA, 25 bp, Homo sapien
gcatacttcagctgtatgactcgta

SEQ ID NO: 4102270 - DNA, 25 bp, Homo sapien
cattgcagatgggatctcaaagcca

SEQ ID NO: 4102271 - DNA, 25 bp, Homo sapien
tacattagaccaagcagctgatacc

SEQ ID NO: 4102272 - DNA, 25 bp, Homo sapien
gccaagtctctacatatgatacagg

SEQ ID NO: 4102273 - DNA, 25 bp, Homo sapien
tagtaagaggtatgtctatggaaac

SEQ ID NO: 4102274 - DNA, 25 bp, Homo sapien
aaccttgaactttgtatcttctgac

SEQ ID NO: 4102275 - DNA, 25 bp, Homo sapien
aacaggttgacacccctcaaccttg

SEQ ID NO: 4102276 - DNA, 25 bp, Homo sapien
gcaatggctctaacgccacatttta

SEQ ID NO: 4102277 - DNA, 25 bp, Homo sapien
tgcctgcctcaagtgcctctgccat

SEQ ID NO: 4102278 - DNA, 25 bp, Homo sapien
agtccttctcttgatagctgttacc

SEQ ID NO: 4102279 - DNA, 25 bp, Homo sapien
tagtccttctcttgatagctgttac

SEQ ID NO: 4102280 - DNA, 25 bp, Homo sapien
gtccttctcttgatagctgttacct

SEQ ID NO: 4102281 - DNA, 25 bp, Homo sapien
ctatatccaaatcttctactgaaaa

SEQ ID NO: 4102282 - DNA, 25 bp, Homo sapien
ttggcctatatccaaatcttctact

SEQ ID NO: 4102283 - DNA, 25 bp, Homo sapien
ggcctatatccaaatcttctactga

SEQ ID NO: 4102284 - DNA, 25 bp, Homo sapien
tatccaaatcttctactgaaaatgc

SEQ ID NO: 4102285 - DNA, 25 bp, Homo sapien
gccctcgcactcatgtcttggggct

SEQ ID NO: 4102286 - DNA, 25 bp, Homo sapien
ctgccctcgcactcatgtcttgggg

SEQ ID NO: 4102287 - DNA, 25 bp, Homo sapien
cctcgcactcatgtcttggggctct

SEQ ID NO: 4102288 - DNA, 25 bp, Homo sapien
cgcactcatgtcttggggctctgaa

SEQ ID NO: 4102289 - DNA, 25 bp, Homo sapien
tggctctttcatacaagttgttgtg

SEQ ID NO: 4102290 - DNA, 25 bp, Homo sapien
ggctctttcatacaagttgttgtga

SEQ ID NO: 4102291 - DNA, 25 bp, Homo sapien
cagattcccttctgggagtccccat

SEQ ID NO: 4102292 - DNA, 25 bp, Homo sapien
agtgcagattcccttctgggagtcc

SEQ ID NO: 4102293 - DNA, 25 bp, Homo sapien
ctttttatcagaagtgcagattccc

SEQ ID NO: 4102294 - DNA, 25 bp, Homo sapien
ctgcctttttatcagaagtgcagat

SEQ ID NO: 4102295 - DNA, 25 bp, Homo sapien
agatcctgcacaactgccttaactg

SEQ ID NO: 4102296 - DNA, 25 bp, Homo sapien
caactgccttaactgatttaaataa

SEQ ID NO: 4102297 - DNA, 25 bp, Homo sapien
tgcacaactgccttaactgatttaa

SEQ ID NO: 4102298 - DNA, 25 bp, Homo sapien
cagatcctgcacaactgccttaact

SEQ ID NO: 4102299 - DNA, 25 bp, Homo sapien
taattgcagttggcaccacaaaagc

SEQ ID NO: 4102300 - DNA, 25 bp, Homo sapien
aattgcagttggcaccacaaaagca

SEQ ID NO: 4102301 - DNA, 25 bp, Homo sapien
ccctgagagctccaatgtctttcag

SEQ ID NO: 4102302 - DNA, 25 bp, Homo sapien
attgcagttggcaccacaaaagcag

SEQ ID NO: 4102303 - DNA, 25 bp, Homo sapien
cattcccacagtagcatttgccatg

SEQ ID NO: 4102304 - DNA, 25 bp, Homo sapien
tcccacagtagcatttgccatgaat

SEQ ID NO: 4102305 - DNA, 25 bp, Homo sapien
attcccacagtagcatttgccatga

SEQ ID NO: 4102306 - DNA, 25 bp, Homo sapien
ttcccacagtagcatttgccatgaa

SEQ ID NO: 4102307 - DNA, 25 bp, Homo sapien
aatacagagcatatccctggtgtag

SEQ ID NO: 4102308 - DNA, 25 bp, Homo sapien
cctggtgtagcttcataccatcgta

SEQ ID NO: 4102309 - DNA, 25 bp, Homo sapien
taccatcgtacatgacctcgaagaa

SEQ ID NO: 4102310 - DNA, 25 bp, Homo sapien
cgaagaattcagcaactgcggcttt

SEQ ID NO: 4102311 - DNA, 25 bp, Homo sapien
gagtcgattatctggaggcacctgt

SEQ ID NO: 4102312 - DNA, 25 bp, Homo sapien
tgactgtcctaaagagcagggtccg

SEQ ID NO: 4102313 - DNA, 25 bp, Homo sapien
gcagggtccgtgttcgttacatcca

SEQ ID NO: 4102314 - DNA, 25 bp, Homo sapien
gaaggctttctaccatagtgtggcc

SEQ ID NO: 4102315 - DNA, 25 bp, Homo sapien
ttagtgcacagtgccaaatactcaa

SEQ ID NO: 4102316 - DNA, 25 bp, Homo sapien
tattagtgcacagtgccaaatactc

SEQ ID NO: 4102317 - DNA, 25 bp, Homo sapien
ttttattagtgcacagtgccaaata

SEQ ID NO: 4102318 - DNA, 25 bp, Homo sapien
caagatgaaaggtggtgtgctgatt

SEQ ID NO: 4102319 - DNA, 25 bp, Homo sapien
gagctcctacctctgcacccttatg

SEQ ID NO: 4102320 - DNA, 25 bp, Homo sapien
tatagtcttcgctcctcataatggc

SEQ ID NO: 4102321 - DNA, 25 bp, Homo sapien
cagacacagtcatgtgagctcctac

SEQ ID NO: 4102322 - DNA, 25 bp, Homo sapien
tttaacaggttgacacagatctata

SEQ ID NO: 4102323 - DNA, 25 bp, Homo sapien
ctggttcctggtctgtctgtggctt

SEQ ID NO: 4102324 - DNA, 25 bp, Homo sapien
tgtggctttgacacttttttgctta

SEQ ID NO: 4102325 - DNA, 25 bp, Homo sapien
cttggccattgcttctggttcctgg

SEQ ID NO: 4102326 - DNA, 25 bp, Homo sapien
cacttttttgcttaattcccctcat

SEQ ID NO: 4102327 - DNA, 25 bp, Homo sapien
gccaatttccccagcatatggggga

SEQ ID NO: 4102328 - DNA, 25 bp, Homo sapien
ttgcagccaatttccccagcatatg

SEQ ID NO: 4102329 - DNA, 25 bp, Homo sapien
ctatttgcagccaatttccccagca

SEQ ID NO: 4102330 - DNA, 25 bp, Homo sapien
gcagccaatttccccagcatatggg

SEQ ID NO: 4102331 - DNA, 25 bp, Homo sapien
actaaaacatgctcaatgtatgcaa

SEQ ID NO: 4102332 - DNA, 25 bp, Homo sapien
caaccaactataccacttttcatgt

SEQ ID NO: 4102333 - DNA, 25 bp, Homo sapien
accaactataccacttttcatgttt

SEQ ID NO: 4102334 - DNA, 25 bp, Homo sapien
cacttttcatgttttgcaaagggca

SEQ ID NO: 4102335 - DNA, 25 bp, Homo sapien
accacttttcatgttttgcaaaggg

SEQ ID NO: 4102336 - DNA, 25 bp, Homo sapien
tcttcgtggcttctgaaagctttat

SEQ ID NO: 4102337 - DNA, 25 bp, Homo sapien
gtcttcgtggcttctgaaagcttta

SEQ ID NO: 4102338 - DNA, 25 bp, Homo sapien
gataattggctttgtattgtcttcg

SEQ ID NO: 4102339 - DNA, 25 bp, Homo sapien
ttcttcaatttggagctttagagtt

SEQ ID NO: 4102340 - DNA, 25 bp, Homo sapien
catccagtgatgtcgtgaaaataaa

SEQ ID NO: 4102341 - DNA, 25 bp, Homo sapien
caggaaattacaccatggagcgagg

SEQ ID NO: 4102342 - DNA, 25 bp, Homo sapien
tcaatggacaggtaagcatccagtg

SEQ ID NO: 4102343 - DNA, 25 bp, Homo sapien
tcaagtatacctatggaggttcggt

SEQ ID NO: 4102344 - DNA, 25 bp, Homo sapien
tctaagctcaaggttttatcttcta

SEQ ID NO: 4102345 - DNA, 25 bp, Homo sapien
tcaactctaagctcaaggttttatc

SEQ ID NO: 4102346 - DNA, 25 bp, Homo sapien
tgtgtatattcaactctaagctcaa

SEQ ID NO: 4102347 - DNA, 25 bp, Homo sapien
tattcaactctaagctcaaggtttt

SEQ ID NO: 4102348 - DNA, 25 bp, Homo sapien
gctgctcacagacactgatctatgg

SEQ ID NO: 4102349 - DNA, 25 bp, Homo sapien
ccccagcttgattactgacacttta

SEQ ID NO: 4102350 - DNA, 25 bp, Homo sapien
taaattcaagctttgaacagctccc

SEQ ID NO: 4102351 - DNA, 25 bp, Homo sapien
tctatgggtcacagcataggatctg

SEQ ID NO: 4102352 - DNA, 25 bp, Homo sapien
ttcctaataacacaggaacatctgc

SEQ ID NO: 4102353 - DNA, 25 bp, Homo sapien
tctctctacccttgatttgaccaca

SEQ ID NO: 4102354 - DNA, 25 bp, Homo sapien
gctctattgagaaatgctctgttcc

SEQ ID NO: 4102355 - DNA, 25 bp, Homo sapien
ggcaactttctgatctatgagctct

SEQ ID NO: 4102356 - DNA, 25 bp, Homo sapien
ttgttggatacatagtttgccaatg

SEQ ID NO: 4102357 - DNA, 25 bp, Homo sapien
ttttgtccattttaggtcaatcttg

SEQ ID NO: 4102358 - DNA, 25 bp, Homo sapien
gttggatacatagtttgccaatgtt

SEQ ID NO: 4102359 - DNA, 25 bp, Homo sapien
gtccattttaggtcaatcttgtcaa

SEQ ID NO: 4102360 - DNA, 25 bp, Homo sapien
gcaccatgtgaggctcagtgctcct

SEQ ID NO: 4102361 - DNA, 25 bp, Homo sapien
caccatgtgaggctcagtgctcctc

SEQ ID NO: 4102362 - DNA, 25 bp, Homo sapien
tgcctttcgggtttctgaggtcacc

SEQ ID NO: 4102363 - DNA, 25 bp, Homo sapien
ttagcagacattttgcctttcgggt

SEQ ID NO: 4102364 - DNA, 25 bp, Homo sapien
catctggtttcaacttcttatgttc

SEQ ID NO: 4102365 - DNA, 25 bp, Homo sapien
cagacattttgcctttcgggtttct

SEQ ID NO: 4102366 - DNA, 25 bp, Homo sapien
ctcagataacttttgaaaattctta

SEQ ID NO: 4102367 - DNA, 25 bp, Homo sapien
tctcagataacttttgaaaattctt

SEQ ID NO: 4102368 - DNA, 25 bp, Homo sapien
ctctcagataacttttgaaaattct

SEQ ID NO: 4102369 - DNA, 25 bp, Homo sapien
tcagataacttttgaaaattcttaa

SEQ ID NO: 4102370 - DNA, 25 bp, Homo sapien
tatcttctcttttccaaactgtctt

SEQ ID NO: 4102371 - DNA, 25 bp, Homo sapien
ttctcttttccaaactgtctttcac

SEQ ID NO: 4102372 - DNA, 25 bp, Homo sapien
gagattttatcaaatttatcttctc

SEQ ID NO: 4102373 - DNA, 25 bp, Homo sapien
ttgagattttatcaaatttatcttc

SEQ ID NO: 4102374 - DNA, 25 bp, Homo sapien
agcaggccttatggacctttttctt

SEQ ID NO: 4102375 - DNA, 25 bp, Homo sapien
ctgcaacagagacgccaggttttgg

SEQ ID NO: 4102376 - DNA, 25 bp, Homo sapien
tctgcaacagagacgccaggttttg

SEQ ID NO: 4102377 - DNA, 25 bp, Homo sapien
catctgcaacagagacgccaggttt

SEQ ID NO: 4102378 - DNA, 25 bp, Homo sapien
cacatctgcaacagagacgccaggt

SEQ ID NO: 4102379 - DNA, 25 bp, Homo sapien
ccaagaggcgcctcgaagtgggttc

SEQ ID NO: 4102380 - DNA, 25 bp, Homo sapien
gagaaccagatcttgggtcagcctg

SEQ ID NO: 4102381 - DNA, 25 bp, Homo sapien
ggttctgcggtctgttgcatgttca

SEQ ID NO: 4102382 - DNA, 25 bp, Homo sapien
agcctgcctacatttcagtcctgga

SEQ ID NO: 4102383 - DNA, 25 bp, Homo sapien
gcttttttgtctcagggcttcctcc

SEQ ID NO: 4102384 - DNA, 25 bp, Homo sapien
tatgttgcacagcttctttctgctt

SEQ ID NO: 4102385 - DNA, 25 bp, Homo sapien
ggcttcctccatagctcaaaaactg

SEQ ID NO: 4102386 - DNA, 25 bp, Homo sapien
aaaaactgtgttagcccatatgcgg

SEQ ID NO: 4102387 - DNA, 25 bp, Homo sapien
ggtgagagccttaggactgatgatc

SEQ ID NO: 4102388 - DNA, 25 bp, Homo sapien
ggactgatgatcacaggcagcacag

SEQ ID NO: 4102389 - DNA, 25 bp, Homo sapien
ccttaggactgatgatcacaggcag

SEQ ID NO: 4102390 - DNA, 25 bp, Homo sapien
gagagccttaggactgatgatcaca

SEQ ID NO: 4102391 - DNA, 25 bp, Homo sapien
ggcagtcctatagggttccatcgta

SEQ ID NO: 4102392 - DNA, 25 bp, Homo sapien
ccatcgtaagtagaaggacattaac

SEQ ID NO: 4102393 - DNA, 25 bp, Homo sapien
tagcatttggagcaccttcactgtc

SEQ ID NO: 4102394 - DNA, 25 bp, Homo sapien
tgatgctcataaagggttggtcgcc

SEQ ID NO: 4102395 - DNA, 25 bp, Homo sapien
catggacacggaggacttgttctct

SEQ ID NO: 4102396 - DNA, 25 bp, Homo sapien
ccttttggtcaacagatggagtagt

SEQ ID NO: 4102397 - DNA, 25 bp, Homo sapien
cacggaggacttgttctcttgggct

SEQ ID NO: 4102398 - DNA, 25 bp, Homo sapien
cagatggagtagtcagtgggattcc

SEQ ID NO: 4102399 - DNA, 25 bp, Homo sapien
cccaggaactggtatgcaggtgaag

SEQ ID NO: 4102400 - DNA, 25 bp, Homo sapien
actagaaatggcatagtcctgagag

SEQ ID NO: 4102401 - DNA, 25 bp, Homo sapien
gaaatggcatagtcctgagagactg

SEQ ID NO: 4102402 - DNA, 25 bp, Homo sapien
actgtactcccaggaactggtatgc

SEQ ID NO: 4102403 - DNA, 25 bp, Homo sapien
gacttgggatgctcgctcaagcttg

SEQ ID NO: 4102404 - DNA, 25 bp, Homo sapien
aggtcgacttgggatgctcgctcaa

SEQ ID NO: 4102405 - DNA, 25 bp, Homo sapien
tcgacttgggatgctcgctcaagct

SEQ ID NO: 4102406 - DNA, 25 bp, Homo sapien
ctgaggtcgacttgggatgctcgct

SEQ ID NO: 4102407 - DNA, 25 bp, Homo sapien
cagccttgtccatgggttcctggag

SEQ ID NO: 4102408 - DNA, 25 bp, Homo sapien
tcttctcctgttcacatccgggcgg

SEQ ID NO: 4102409 - DNA, 25 bp, Homo sapien
gatgactttctaggaagggcgtccg

SEQ ID NO: 4102410 - DNA, 25 bp, Homo sapien
cgtatgtctggatcgcactggtgcc

SEQ ID NO: 4102411 - DNA, 25 bp, Homo sapien
cagcatcaagtaggttaagtcctca

SEQ ID NO: 4102412 - DNA, 25 bp, Homo sapien
tgccagagacgcctgtggctgggtt

SEQ ID NO: 4102413 - DNA, 25 bp, Homo sapien
aagtcctcatatatttctgtgccag

SEQ ID NO: 4102414 - DNA, 25 bp, Homo sapien
agcaaggagccaaacccctggctgg

SEQ ID NO: 4102415 - DNA, 25 bp, Homo sapien
ctgctcagtgccgatccacacctcc

SEQ ID NO: 4102416 - DNA, 25 bp, Homo sapien
tgctcagtgccgatccacacctcca

SEQ ID NO: 4102417 - DNA, 25 bp, Homo sapien
tcagtgccgatccacacctccaggc

SEQ ID NO: 4102418 - DNA, 25 bp, Homo sapien
aggcagctgctcagtgccgatccac

SEQ ID NO: 4102419 - DNA, 25 bp, Homo sapien
tcattattataaccatcaactaaac

SEQ ID NO: 4102420 - DNA, 25 bp, Homo sapien
tataaccatcaactaaacttagcag

SEQ ID NO: 4102421 - DNA, 25 bp, Homo sapien
actaaacttagcaggcaaaagccct

SEQ ID NO: 4102422 - DNA, 25 bp, Homo sapien
tcaatagtggtctctctcattatta

SEQ ID NO: 4102423 - DNA, 25 bp, Homo sapien
caccagcatggcacatgtatacata

SEQ ID NO: 4102424 - DNA, 25 bp, Homo sapien
tgtatacatatgtaactaacctgca

SEQ ID NO: 4102425 - DNA, 25 bp, Homo sapien
agatgacacattagtgggtgcagcg

SEQ ID NO: 4102426 - DNA, 25 bp, Homo sapien
ctaatgctagatgacacattagtgg

SEQ ID NO: 4102427 - DNA, 25 bp, Homo sapien
cttctttcagaccaagtgcaacaga

SEQ ID NO: 4102428 - DNA, 25 bp, Homo sapien
cttgcttctttcagaccaagtgcaa

SEQ ID NO: 4102429 - DNA, 25 bp, Homo sapien
ccaagtgcaacagatttgcacatat

SEQ ID NO: 4102430 - DNA, 25 bp, Homo sapien
gcttctttcagaccaagtgcaacag

SEQ ID NO: 4102431 - DNA, 25 bp, Homo sapien
tgaacaccaatgactgagaagtcct

SEQ ID NO: 4102432 - DNA, 25 bp, Homo sapien
cacaaaagcattgcctttttgtgaa

SEQ ID NO: 4102433 - DNA, 25 bp, Homo sapien
acaccaatgactgagaagtcctcac

SEQ ID NO: 4102434 - DNA, 25 bp, Homo sapien
caaaagcattgcctttttgtgaact

SEQ ID NO: 4102435 - DNA, 25 bp, Homo sapien
cttaaattgcatagtctgaccacag

SEQ ID NO: 4102436 - DNA, 25 bp, Homo sapien
gggccacatcctggaccaactgtaa

SEQ ID NO: 4102437 - DNA, 25 bp, Homo sapien
catcctggaccaactgtaatgttct

SEQ ID NO: 4102438 - DNA, 25 bp, Homo sapien
tgagcaactcttttctagggccaca

SEQ ID NO: 4102439 - DNA, 25 bp, Homo sapien
tcacttcagctatatgtgtcaataa

SEQ ID NO: 4102440 - DNA, 25 bp, Homo sapien
cttgttaccagttggcttgttaata

SEQ ID NO: 4102441 - DNA, 25 bp, Homo sapien
acttcagctatatgtgtcaataaac

SEQ ID NO: 4102442 - DNA, 25 bp, Homo sapien
ggcttgttaatatgaatcacttcag

SEQ ID NO: 4102443 - DNA, 25 bp, Homo sapien
tgcagaagatatggatatggactcc

SEQ ID NO: 4102444 - DNA, 25 bp, Homo sapien
atacgctcactttttctaaatttca

SEQ ID NO: 4102445 - DNA, 25 bp, Homo sapien
gactccgatctgttggaagtagaaa

SEQ ID NO: 4102446 - DNA, 25 bp, Homo sapien
aatttcaaagtgtgactcttctgga

SEQ ID NO: 4102447 - DNA, 25 bp, Homo sapien
cccactttttgttaaacagcgaatg

SEQ ID NO: 4102448 - DNA, 25 bp, Homo sapien
tgacttagcttcaagtctctgccct

SEQ ID NO: 4102449 - DNA, 25 bp, Homo sapien
cactttttgttaaacagcgaatgat

SEQ ID NO: 4102450 - DNA, 25 bp, Homo sapien
aatcctaatgacttagcttcaagtc

SEQ ID NO: 4102451 - DNA, 25 bp, Homo sapien
tccttagtagttctggttcatagtc

SEQ ID NO: 4102452 - DNA, 25 bp, Homo sapien
ccttagtagttctggttcatagtca

SEQ ID NO: 4102453 - DNA, 25 bp, Homo sapien
caggcaaatgatggctggctctgtc

SEQ ID NO: 4102454 - DNA, 25 bp, Homo sapien
cagcagggaaatgaatcccacaggg

SEQ ID NO: 4102455 - DNA, 25 bp, Homo sapien
catgatggcaggcaaatgatggctg

SEQ ID NO: 4102456 - DNA, 25 bp, Homo sapien
aatcccacaggggtgccgtcatcca

SEQ ID NO: 4102457 - DNA, 25 bp, Homo sapien
aaattgccgatatgttttccatagt

SEQ ID NO: 4102458 - DNA, 25 bp, Homo sapien
gacattcggtctttcgacgttgaac

SEQ ID NO: 4102459 - DNA, 25 bp, Homo sapien
ttccttttagtatagacattcggtc

SEQ ID NO: 4102460 - DNA, 25 bp, Homo sapien
caagttgttctggttcaattgtttc

SEQ ID NO: 4102461 - DNA, 25 bp, Homo sapien
tgaaccctttatcaggcctcttctt

SEQ ID NO: 4102462 - DNA, 25 bp, Homo sapien
tgcctggcaagctttgctgtagacc

SEQ ID NO: 4102463 - DNA, 25 bp, Homo sapien
gcaagctttgctgtagaccatgcaa

SEQ ID NO: 4102464 - DNA, 25 bp, Homo sapien
gctgcctggcaagctttgctgtaga

SEQ ID NO: 4102465 - DNA, 25 bp, Homo sapien
tggcaagctttgctgtagaccatgc

SEQ ID NO: 4102466 - DNA, 25 bp, Homo sapien
ttcagacactgctcaagccccagag

SEQ ID NO: 4102467 - DNA, 25 bp, Homo sapien
gatgacattcgcatatgagggcaaa

SEQ ID NO: 4102468 - DNA, 25 bp, Homo sapien
gacactgctcaagccccagaggagg

SEQ ID NO: 4102469 - DNA, 25 bp, Homo sapien
aaaccacagagtgctttgctgttgg

SEQ ID NO: 4102470 - DNA, 25 bp, Homo sapien
cactctgggaacaggctttctccat

SEQ ID NO: 4102471 - DNA, 25 bp, Homo sapien
ttctccatgagagtaaagggtgtca

SEQ ID NO: 4102472 - DNA, 25 bp, Homo sapien
tgatgcacccgggtaacactctggg

SEQ ID NO: 4102473 - DNA, 25 bp, Homo sapien
ctttctccatgagagtaaagggtgt

SEQ ID NO: 4102474 - DNA, 25 bp, Homo sapien
ccctgtacatgtgttctgtttttat

SEQ ID NO: 4102475 - DNA, 25 bp, Homo sapien
cgatgttgaactgggcactgccatc

SEQ ID NO: 4102476 - DNA, 25 bp, Homo sapien
tccgatgttgaactgggcactgcca

SEQ ID NO: 4102477 - DNA, 25 bp, Homo sapien
attttccgatgttgaactgggcact

SEQ ID NO: 4102478 - DNA, 25 bp, Homo sapien
ttcttgtaatattggattagagccc

SEQ ID NO: 4102479 - DNA, 25 bp, Homo sapien
tagagcccagtctaatgacctcatt

SEQ ID NO: 4102480 - DNA, 25 bp, Homo sapien
tcttggccagtagatgaccgccttc

SEQ ID NO: 4102481 - DNA, 25 bp, Homo sapien
taaaaggccaagatcaaagtttgac

SEQ ID NO: 4102482 - DNA, 25 bp, Homo sapien
gaaatgtgagccctgagtttgattc

SEQ ID NO: 4102483 - DNA, 25 bp, Homo sapien
tgtggatgtggcttgtgaacaacac

SEQ ID NO: 4102484 - DNA, 25 bp, Homo sapien
tcaggcaaacatgtcgcctttggca

SEQ ID NO: 4102485 - DNA, 25 bp, Homo sapien
tgaacaacacatggcagaggacgtt

SEQ ID NO: 4102486 - DNA, 25 bp, Homo sapien
tcctctagtctctcatatttatcca

SEQ ID NO: 4102487 - DNA, 25 bp, Homo sapien
cctctagtctctcatatttatccat

SEQ ID NO: 4102488 - DNA, 25 bp, Homo sapien
ctcctctagtctctcatatttatcc

SEQ ID NO: 4102489 - DNA, 25 bp, Homo sapien
gaattaacgtgacagtcagagccca

SEQ ID NO: 4102490 - DNA, 25 bp, Homo sapien
gcagggaattaacgtgacagtcaga

SEQ ID NO: 4102491 - DNA, 25 bp, Homo sapien
gcagcagggaattaacgtgacagtc

SEQ ID NO: 4102492 - DNA, 25 bp, Homo sapien
aaagcagcagggaattaacgtgaca

SEQ ID NO: 4102493 - DNA, 25 bp, Homo sapien
gcttgcccagagatgcagtcggctc

SEQ ID NO: 4102494 - DNA, 25 bp, Homo sapien
gcgccgtagccttgcaggaagagca

SEQ ID NO: 4102495 - DNA, 25 bp, Homo sapien
cagtcggctcagtcaatagagggaa

SEQ ID NO: 4102496 - DNA, 25 bp, Homo sapien
agcagacaaagacaggagagaggca

SEQ ID NO: 4102497 - DNA, 25 bp, Homo sapien
cacgacttggctcgcgttgctgcgg

SEQ ID NO: 4102498 - DNA, 25 bp, Homo sapien
ccgtgcggggcacgacttggctcgc

SEQ ID NO: 4102499 - DNA, 25 bp, Homo sapien
gccaccgagcgagggtgcggccccg

SEQ ID NO: 4102500 - DNA, 25 bp, Homo sapien
gcaggcagtgcgtggcgcggctggc

SEQ ID NO: 4102501 - DNA, 25 bp, Homo sapien
gcttggctcccggcgaaggcggcgg

SEQ ID NO: 4102502 - DNA, 25 bp, Homo sapien
ggctgctccatcctcgtggctcagg

SEQ ID NO: 4102503 - DNA, 25 bp, Homo sapien
cagggaggaggcgttgggtgcgtat

SEQ ID NO: 4102504 - DNA, 25 bp, Homo sapien
tcgtggctcagggaggaggcgttgg

SEQ ID NO: 4102505 - DNA, 25 bp, Homo sapien
gaggcgttgggtgcgtatgcttagg

SEQ ID NO: 4102506 - DNA, 25 bp, Homo sapien
aacaggagcgaagagggtcgactct

SEQ ID NO: 4102507 - DNA, 25 bp, Homo sapien
aaagtttgcagactattgtatagca

SEQ ID NO: 4102508 - DNA, 25 bp, Homo sapien
agagggtcgactctctctctccagg

SEQ ID NO: 4102509 - DNA, 25 bp, Homo sapien
tatagcagccggctgaacaggagcg

SEQ ID NO: 4102510 - DNA, 25 bp, Homo sapien
agccgcaagccactccaaaggtttc

SEQ ID NO: 4102511 - DNA, 25 bp, Homo sapien
ttgcagttcccacggcgcacagccg

SEQ ID NO: 4102512 - DNA, 25 bp, Homo sapien
ccaaaggtttcattgccgagttggg

SEQ ID NO: 4102513 - DNA, 25 bp, Homo sapien
actcccatcgcgctggacgaagctt

SEQ ID NO: 4102514 - DNA, 25 bp, Homo sapien
gagaagagagcagactatggtcctc

SEQ ID NO: 4102515 - DNA, 25 bp, Homo sapien
gagaagcatccctagtccacgatct

SEQ ID NO: 4102516 - DNA, 25 bp, Homo sapien
tgaaggagcgtagaagcaagcgggt

SEQ ID NO: 4102517 - DNA, 25 bp, Homo sapien
gccaacgcattcagattctcgcggg

SEQ ID NO: 4102518 - DNA, 25 bp, Homo sapien
caggtctaagagctgggtctcccct

SEQ ID NO: 4102519 - DNA, 25 bp, Homo sapien
aggtctaagagctgggtctcccctc

SEQ ID NO: 4102520 - DNA, 25 bp, Homo sapien
ggtctaagagctgggtctcccctca

SEQ ID NO: 4102521 - DNA, 25 bp, Homo sapien
cctcctgcattcgccagagcatctg

SEQ ID NO: 4102522 - DNA, 25 bp, Homo sapien
cctccccctcctgcattcgccagag

SEQ ID NO: 4102523 - DNA, 25 bp, Homo sapien
atctggagccacaagaagaatctac

SEQ ID NO: 4102524 - DNA, 25 bp, Homo sapien
gcattcgccagagcatctggagcca

SEQ ID NO: 4102525 - DNA, 25 bp, Homo sapien
ctcccgcaaacggtcttgcactcca

SEQ ID NO: 4102526 - DNA, 25 bp, Homo sapien
aaatagggggcttgatggataaaag

SEQ ID NO: 4102527 - DNA, 25 bp, Homo sapien
tgcctcttcgaaacagccgactaag

SEQ ID NO: 4102528 - DNA, 25 bp, Homo sapien
ccaccaggaaatagggggcttgatg

SEQ ID NO: 4102529 - DNA, 25 bp, Homo sapien
gggagagaagggttaagtgaggtgc

SEQ ID NO: 4102530 - DNA, 25 bp, Homo sapien
gagagaagggttaagtgaggtgctt

SEQ ID NO: 4102531 - DNA, 25 bp, Homo sapien
ggagagaagggttaagtgaggtgct

SEQ ID NO: 4102532 - DNA, 25 bp, Homo sapien
gagaagggttaagtgaggtgcttac

SEQ ID NO: 4102533 - DNA, 25 bp, Homo sapien
aatgtttccctatagggctactagg

SEQ ID NO: 4102534 - DNA, 25 bp, Homo sapien
ggctactaggaaccagggatccact

SEQ ID NO: 4102535 - DNA, 25 bp, Homo sapien
tccctatagggctactaggaaccag

SEQ ID NO: 4102536 - DNA, 25 bp, Homo sapien
ctccaaatgtttccctatagggcta

SEQ ID NO: 4102537 - DNA, 25 bp, Homo sapien
aaagtaagaaaagcctgcacgtgga

SEQ ID NO: 4102538 - DNA, 25 bp, Homo sapien
ctgtagggcacccgcggagaaagta

SEQ ID NO: 4102539 - DNA, 25 bp, Homo sapien
tagggcacccgcggagaaagtaaga

SEQ ID NO: 4102540 - DNA, 25 bp, Homo sapien
agaaagtaagaaaagcctgcacgtg

SEQ ID NO: 4102541 - DNA, 25 bp, Homo sapien
gagccctggcgagtcgacgtttcct

SEQ ID NO: 4102542 - DNA, 25 bp, Homo sapien
ttcctccgatgtggccaaggcgagg

SEQ ID NO: 4102543 - DNA, 25 bp, Homo sapien
gatttctcccgggagccctggcgag

SEQ ID NO: 4102544 - DNA, 25 bp, Homo sapien
ttttcccaactggtacaaggcagca

SEQ ID NO: 4102545 - DNA, 25 bp, Homo sapien
agggaatccccgttctgctccttgg

SEQ ID NO: 4102546 - DNA, 25 bp, Homo sapien
caggagcctgcgcacagggaatccc

SEQ ID NO: 4102547 - DNA, 25 bp, Homo sapien
gcctggtctgtgagggtgtggcctt

SEQ ID NO: 4102548 - DNA, 25 bp, Homo sapien
tggagtttgccaccgctaggcaggg

SEQ ID NO: 4102549 - DNA, 25 bp, Homo sapien
caggtatccaggtacttctgaagaa

SEQ ID NO: 4102550 - DNA, 25 bp, Homo sapien
ggtacttctgaagaagcccggctct

SEQ ID NO: 4102551 - DNA, 25 bp, Homo sapien
gtacttctgaagaagcccggctctc

SEQ ID NO: 4102552 - DNA, 25 bp, Homo sapien
tcaggtatccaggtacttctgaaga

SEQ ID NO: 4102553 - DNA, 25 bp, Homo sapien
tcctgtgataggaaaaattccctgt

SEQ ID NO: 4102554 - DNA, 25 bp, Homo sapien
tgcagaaggatgaagcaactcaatc

SEQ ID NO: 4102555 - DNA, 25 bp, Homo sapien
tcacaaatacctgggagtgcagaag

SEQ ID NO: 4102556 - DNA, 25 bp, Homo sapien
tgagccccaagtacagaaatatatt

SEQ ID NO: 4102557 - DNA, 25 bp, Homo sapien
ggacttttgatattgcaccacctag

SEQ ID NO: 4102558 - DNA, 25 bp, Homo sapien
cagacgtgtcatgtgggacttttga

SEQ ID NO: 4102559 - DNA, 25 bp, Homo sapien
aaagaatctccccagcagacgtgtc

SEQ ID NO: 4102560 - DNA, 25 bp, Homo sapien
tccatatcctttgtcttagagcata

SEQ ID NO: 4102561 - DNA, 25 bp, Homo sapien
atgttcaagcctatcagcttttgag

SEQ ID NO: 4102562 - DNA, 25 bp, Homo sapien
tcatatgtcattatcatgttgagat

SEQ ID NO: 4102563 - DNA, 25 bp, Homo sapien
cattctcatatgaaatggccatttc

SEQ ID NO: 4102564 - DNA, 25 bp, Homo sapien
cttactattaacttaccacctgtgg

SEQ ID NO: 4102565 - DNA, 25 bp, Homo sapien
gtcctcgccagaggacgtatttgtc

SEQ ID NO: 4102566 - DNA, 25 bp, Homo sapien
caggggaaagccatgagacctcatg

SEQ ID NO: 4102567 - DNA, 25 bp, Homo sapien
cagagctcaggttagaagactcagg

SEQ ID NO: 4102568 - DNA, 25 bp, Homo sapien
tagctttagagaactatgcactgtg

SEQ ID NO: 4102569 - DNA, 25 bp, Homo sapien
ttccttaaaagcctttatgatcaaa

SEQ ID NO: 4102570 - DNA, 25 bp, Homo sapien
tcatttccttaaaagcctttatgat

SEQ ID NO: 4102571 - DNA, 25 bp, Homo sapien
atttccttaaaagcctttatgatca

SEQ ID NO: 4102572 - DNA, 25 bp, Homo sapien
catttccttaaaagcctttatgatc

SEQ ID NO: 4102573 - DNA, 25 bp, Homo sapien
taaagtagattcctagtgccatgct

SEQ ID NO: 4102574 - DNA, 25 bp, Homo sapien
tcttcaattgaacaagacacagggt

SEQ ID NO: 4102575 - DNA, 25 bp, Homo sapien
tgaggaccactcgtaaaaagaatat

SEQ ID NO: 4102576 - DNA, 25 bp, Homo sapien
taggctctttgaatcacttagtggg

SEQ ID NO: 4102577 - DNA, 25 bp, Homo sapien
tgacttagctacgtgggaacatgtt

SEQ ID NO: 4102578 - DNA, 25 bp, Homo sapien
tgctgagtgtctaaaagggttctga

SEQ ID NO: 4102579 - DNA, 25 bp, Homo sapien
tataacccacatgaacaagacctct

SEQ ID NO: 4102580 - DNA, 25 bp, Homo sapien
tcctaagccaactgcagtggttttc

SEQ ID NO: 4102581 - DNA, 25 bp, Homo sapien
gatacaccttggtgcaggccttcat

SEQ ID NO: 4102582 - DNA, 25 bp, Homo sapien
gtctgctggtatccccacttgctgg

SEQ ID NO: 4102583 - DNA, 25 bp, Homo sapien
ctttctcccctaagctattacaagg

SEQ ID NO: 4102584 - DNA, 25 bp, Homo sapien
tctcctttcctgaagatacaccttg

SEQ ID NO: 4102585 - DNA, 25 bp, Homo sapien
aaagctgacttaaatgatgacactc

SEQ ID NO: 4102586 - DNA, 25 bp, Homo sapien
tctaaatttgatagtcagtactatg

SEQ ID NO: 4102587 - DNA, 25 bp, Homo sapien
tgttcagtggcttgagtaaagtcaa

SEQ ID NO: 4102588 - DNA, 25 bp, Homo sapien
taaatgatgacactctgcttggtgt

SEQ ID NO: 4102589 - DNA, 25 bp, Homo sapien
cccagatccttaattgtctgcagat

SEQ ID NO: 4102590 - DNA, 25 bp, Homo sapien
gctgtcctcttacagttaacaatcc

SEQ ID NO: 4102591 - DNA, 25 bp, Homo sapien
tgcagatccgcatacagctgtcctc

SEQ ID NO: 4102592 - DNA, 25 bp, Homo sapien
tttttcaggtaatttgttgcagtca

SEQ ID NO: 4102593 - DNA, 25 bp, Homo sapien
gtattatcaggtcctctgaaatctt

SEQ ID NO: 4102594 - DNA, 25 bp, Homo sapien
tattatcaggtcctctgaaatctta

SEQ ID NO: 4102595 - DNA, 25 bp, Homo sapien
tcacagaggtcagaacctgtaactc

SEQ ID NO: 4102596 - DNA, 25 bp, Homo sapien
gaagtgtcagagaccaactttgggt

SEQ ID NO: 4102597 - DNA, 25 bp, Homo sapien
ggtgttgatcctgagctggtagaat

SEQ ID NO: 4102598 - DNA, 25 bp, Homo sapien
gcaattcctgaccaccagtctttaa

SEQ ID NO: 4102599 - DNA, 25 bp, Homo sapien
ccagtttcacatgctgtttggcaaa

SEQ ID NO: 4102600 - DNA, 25 bp, Homo sapien
tctggctgaaggtagcaagtactcc

SEQ ID NO: 4102601 - DNA, 25 bp, Homo sapien
aacactcagtgaggcttcttcacac

SEQ ID NO: 4102602 - DNA, 25 bp, Homo sapien
gtgggtagttggcacagtgtgtgtc

SEQ ID NO: 4102603 - DNA, 25 bp, Homo sapien
accgcacccagtgaattccactact

SEQ ID NO: 4102604 - DNA, 25 bp, Homo sapien
acccagtgaattccactacttctcc

SEQ ID NO: 4102605 - DNA, 25 bp, Homo sapien
ccgcacccagtgaattccactactt

SEQ ID NO: 4102606 - DNA, 25 bp, Homo sapien
gcacccagtgaattccactacttct

SEQ ID NO: 4102607 - DNA, 25 bp, Homo sapien
ccaacaagcgtggtaaaggttccag

SEQ ID NO: 4102608 - DNA, 25 bp, Homo sapien
tgtcagcataatcacgagcccattc

SEQ ID NO: 4102609 - DNA, 25 bp, Homo sapien
aaggctgcagctaacacatgtgtct

SEQ ID NO: 4102610 - DNA, 25 bp, Homo sapien
cttcttgcgtgtttcaaaaggctgc

SEQ ID NO: 4102611 - DNA, 25 bp, Homo sapien
tgattggacgccatgctcctcagaa

SEQ ID NO: 4102612 - DNA, 25 bp, Homo sapien
gctgtagagtacagtcgcagtgcca

SEQ ID NO: 4102613 - DNA, 25 bp, Homo sapien
acaaaggtcagcgtcgttggcagca

SEQ ID NO: 4102614 - DNA, 25 bp, Homo sapien
caagtattcgaggtgtctccgggca

SEQ ID NO: 4102615 - DNA, 25 bp, Homo sapien
gagatggatctaactaatgttcaga

SEQ ID NO: 4102616 - DNA, 25 bp, Homo sapien
gcttactcagaaatataccatcggg

SEQ ID NO: 4102617 - DNA, 25 bp, Homo sapien
ggtggatcacctaaactcaaattat

SEQ ID NO: 4102618 - DNA, 25 bp, Homo sapien
tgtttgttaaaagttcagcagtggc

SEQ ID NO: 4102619 - DNA, 25 bp, Homo sapien
tccagcaacttgcaccaggattatt

SEQ ID NO: 4102620 - DNA, 25 bp, Homo sapien
gacagatgagtgataccactttggg

SEQ ID NO: 4102621 - DNA, 25 bp, Homo sapien
gggtcagacccaatcaacttgacag

SEQ ID NO: 4102622 - DNA, 25 bp, Homo sapien
caaatgtgtcgtaattgagattgcc

SEQ ID NO: 4102623 - DNA, 25 bp, Homo sapien
gaagaaatgcagacaatcccaagga

SEQ ID NO: 4102624 - DNA, 25 bp, Homo sapien
cgatgtcattagcacaacagattgc

SEQ ID NO: 4102625 - DNA, 25 bp, Homo sapien
catttcaggcctagcttttgaggtc

SEQ ID NO: 4102626 - DNA, 25 bp, Homo sapien
ggaagccggctttctgtgaattaac

SEQ ID NO: 4102627 - DNA, 25 bp, Homo sapien
taggactgaaggcacatgtggctgc

SEQ ID NO: 4102628 - DNA, 25 bp, Homo sapien
tcaggtgacttaggttgggttctcc

SEQ ID NO: 4102629 - DNA, 25 bp, Homo sapien
tgaaaggtgcaactcgccagcattc

SEQ ID NO: 4102630 - DNA, 25 bp, Homo sapien
aacgaaaggactaggcaatgtgaca

SEQ ID NO: 4102631 - DNA, 25 bp, Homo sapien
cattcagctagaggaaaagcaggaa

SEQ ID NO: 4102632 - DNA, 25 bp, Homo sapien
gctagaggaaaagcaggaaaggcca

SEQ ID NO: 4102633 - DNA, 25 bp, Homo sapien
ctagaggaaaagcaggaaaggccat

SEQ ID NO: 4102634 - DNA, 25 bp, Homo sapien
tcagctagaggaaaagcaggaaagg

SEQ ID NO: 4102635 - DNA, 25 bp, Homo sapien
aggtcagcaccaattgttgtcccct

SEQ ID NO: 4102636 - DNA, 25 bp, Homo sapien
ggtcagcaccaattgttgtcccctg

SEQ ID NO: 4102637 - DNA, 25 bp, Homo sapien
caggtcagcaccaattgttgtcccc

SEQ ID NO: 4102638 - DNA, 25 bp, Homo sapien
tcagcaccaattgttgtcccctgca

SEQ ID NO: 4102639 - DNA, 25 bp, Homo sapien
tggatttatatgaccaacatctcct

SEQ ID NO: 4102640 - DNA, 25 bp, Homo sapien
tcctcacacaagctttggctgcctt

SEQ ID NO: 4102641 - DNA, 25 bp, Homo sapien
ccatgagggctactggagtttggat

SEQ ID NO: 4102642 - DNA, 25 bp, Homo sapien
taggccttagacacaatatgactga

SEQ ID NO: 4102643 - DNA, 25 bp, Homo sapien
agcttcagtgtgtcaagtgtagaaa

SEQ ID NO: 4102644 - DNA, 25 bp, Homo sapien
taagtaggtgttagcttcagtgtgt

SEQ ID NO: 4102645 - DNA, 25 bp, Homo sapien
tagaaaggccatgaatgaagtccaa

SEQ ID NO: 4102646 - DNA, 25 bp, Homo sapien
aatggaaaggttcatgtagtgatct

SEQ ID NO: 4102647 - DNA, 25 bp, Homo sapien
gcacttctattgtagcgggtaaaga

SEQ ID NO: 4102648 - DNA, 25 bp, Homo sapien
tgcacttctattgtagcgggtaaag

SEQ ID NO: 4102649 - DNA, 25 bp, Homo sapien
tctggggagggctcccgtgtgctcc

SEQ ID NO: 4102650 - DNA, 25 bp, Homo sapien
ggaaaatagcagtgacattcagttc

SEQ ID NO: 4102651 - DNA, 25 bp, Homo sapien
gaataagtctgcattgccagtcact

SEQ ID NO: 4102652 - DNA, 25 bp, Homo sapien
aatagcagtgacattcagttcccct

SEQ ID NO: 4102653 - DNA, 25 bp, Homo sapien
cctgagtaagctcgagccaaaaagt

SEQ ID NO: 4102654 - DNA, 25 bp, Homo sapien
tcgagccaaaaagtgccctataagg

SEQ ID NO: 4102655 - DNA, 25 bp, Homo sapien
caaaaagtgccctataagggccgtg

SEQ ID NO: 4102656 - DNA, 25 bp, Homo sapien
taagctcgagccaaaaagtgcccta

SEQ ID NO: 4102657 - DNA, 25 bp, Homo sapien
tcttaactctatggtagaccctgag

SEQ ID NO: 4102658 - DNA, 25 bp, Homo sapien
ctctatggtagaccctgagggtata

SEQ ID NO: 4102659 - DNA, 25 bp, Homo sapien
caaagagtttcttaactctatggta

SEQ ID NO: 4102660 - DNA, 25 bp, Homo sapien
gggaatagtaaacaattcctgtgga

SEQ ID NO: 4102661 - DNA, 25 bp, Homo sapien
tcctccttcagggataatgtgagct

SEQ ID NO: 4102662 - DNA, 25 bp, Homo sapien
ctggaaaactctagatggtgaaatg

SEQ ID NO: 4102663 - DNA, 25 bp, Homo sapien
taatccgcagcccaacagtttttct

SEQ ID NO: 4102664 - DNA, 25 bp, Homo sapien
atttgtgttaggctctgcatctgga

SEQ ID NO: 4102665 - DNA, 25 bp, Homo sapien
cttttgcctgcaccttagtctccat

SEQ ID NO: 4102666 - DNA, 25 bp, Homo sapien
atcttttgcctgcaccttagtctcc

SEQ ID NO: 4102667 - DNA, 25 bp, Homo sapien
catcttttgcctgcaccttagtctc

SEQ ID NO: 4102668 - DNA, 25 bp, Homo sapien
tcttttgcctgcaccttagtctcca

SEQ ID NO: 4102669 - DNA, 25 bp, Homo sapien
tgacagctgcaacaatcaccagcat

SEQ ID NO: 4102670 - DNA, 25 bp, Homo sapien
agtttaattggaagagacctctcca

SEQ ID NO: 4102671 - DNA, 25 bp, Homo sapien
atttgtggtcatccttgacagctgc

SEQ ID NO: 4102672 - DNA, 25 bp, Homo sapien
gagatggtgtcaactcctgaaggca

SEQ ID NO: 4102673 - DNA, 25 bp, Homo sapien
tccaaagtctgcagtccagtagtaa

SEQ ID NO: 4102674 - DNA, 25 bp, Homo sapien
cctctctagagccttgataactgta

SEQ ID NO: 4102675 - DNA, 25 bp, Homo sapien
ttcactagtagcaaaccaagctcca

SEQ ID NO: 4102676 - DNA, 25 bp, Homo sapien
tttggcatcgatgctactgatcatc

SEQ ID NO: 4102677 - DNA, 25 bp, Homo sapien
tctggttctccccttgattcttgcc

SEQ ID NO: 4102678 - DNA, 25 bp, Homo sapien
ggttctccccttgattcttgcctca

SEQ ID NO: 4102679 - DNA, 25 bp, Homo sapien
ctggttctccccttgattcttgcct

SEQ ID NO: 4102680 - DNA, 25 bp, Homo sapien
tggttctccccttgattcttgcctc

SEQ ID NO: 4102681 - DNA, 25 bp, Homo sapien
ccttgggatcttggagcatctttag

SEQ ID NO: 4102682 - DNA, 25 bp, Homo sapien
gggcattatgaggtagaaagcatat

SEQ ID NO: 4102683 - DNA, 25 bp, Homo sapien
tagaaagcatatggtaaaggtctca

SEQ ID NO: 4102684 - DNA, 25 bp, Homo sapien
gaagaagcaaactctccttgggatc

SEQ ID NO: 4102685 - DNA, 25 bp, Homo sapien
ctgaaacttctatggttgaccggtg

SEQ ID NO: 4102686 - DNA, 25 bp, Homo sapien
tccccgttgatgagttcttgccttc

SEQ ID NO: 4102687 - DNA, 25 bp, Homo sapien
cagctggcattctgtcctcagcatt

SEQ ID NO: 4102688 - DNA, 25 bp, Homo sapien
tcccttagcctgaacactgaaactt

SEQ ID NO: 4102689 - DNA, 25 bp, Homo sapien
aatctactttttcgcatttgtttgc

SEQ ID NO: 4102690 - DNA, 25 bp, Homo sapien
tatacatttttcagcggctggacac

SEQ ID NO: 4102691 - DNA, 25 bp, Homo sapien
ctcttcattagacatcgttggtaaa

SEQ ID NO: 4102692 - DNA, 25 bp, Homo sapien
ctaggctcccagttcatttgtatga

SEQ ID NO: 4102693 - DNA, 25 bp, Homo sapien
tggcgatgtgaatgtcctttgtcct

SEQ ID NO: 4102694 - DNA, 25 bp, Homo sapien
ctggtgaaaaggtgtggcgatgtga

SEQ ID NO: 4102695 - DNA, 25 bp, Homo sapien
agggtgaaatgacactggtgaaaag

SEQ ID NO: 4102696 - DNA, 25 bp, Homo sapien
ccaggctgtggacaggttttcagct

SEQ ID NO: 4102697 - DNA, 25 bp, Homo sapien
agaaatctctttgcaagtctttttc

SEQ ID NO: 4102698 - DNA, 25 bp, Homo sapien
agcagagaaacaattttctgtaaag

SEQ ID NO: 4102699 - DNA, 25 bp, Homo sapien
gcagagaaacaattttctgtaaaga

SEQ ID NO: 4102700 - DNA, 25 bp, Homo sapien
tgtaaagaaatctctttgcaagtct

SEQ ID NO: 4102701 - DNA, 25 bp, Homo sapien
aagcctgaggggtcctttccacacg

SEQ ID NO: 4102702 - DNA, 25 bp, Homo sapien
aagtgatgctgtgagtaatccaagc

SEQ ID NO: 4102703 - DNA, 25 bp, Homo sapien
tcctttccacacgtttttctcattg

SEQ ID NO: 4102704 - DNA, 25 bp, Homo sapien
cttcaaatagatcataaagtgatgc

SEQ ID NO: 4102705 - DNA, 25 bp, Homo sapien
tcttggccaagttttggccacatgg

SEQ ID NO: 4102706 - DNA, 25 bp, Homo sapien
tatcccagggcattcattcccttgg

SEQ ID NO: 4102707 - DNA, 25 bp, Homo sapien
ttttggccacatggtcatactctag

SEQ ID NO: 4102708 - DNA, 25 bp, Homo sapien
tagcctgttgcaaaatctttctcag

SEQ ID NO: 4102709 - DNA, 25 bp, Homo sapien
gatgggtgcaagacgtaaacacttt

SEQ ID NO: 4102710 - DNA, 25 bp, Homo sapien
gagacggtatcctctaaagactcag

SEQ ID NO: 4102711 - DNA, 25 bp, Homo sapien
gaagctgctggaacacaatggtcag

SEQ ID NO: 4102712 - DNA, 25 bp, Homo sapien
tcttattgggttcctcagagacggt

SEQ ID NO: 4102713 - DNA, 25 bp, Homo sapien
tcactagggccactctctttttggg

SEQ ID NO: 4102714 - DNA, 25 bp, Homo sapien
ggatggcccagctctctgtagcgag

SEQ ID NO: 4102715 - DNA, 25 bp, Homo sapien
tgtgtcagtgtgtttgtctccagga

SEQ ID NO: 4102716 - DNA, 25 bp, Homo sapien
aatttcactgccttgcaatgtagac

SEQ ID NO: 4102717 - DNA, 25 bp, Homo sapien
ggacatcagcagcataacctgagca

SEQ ID NO: 4102718 - DNA, 25 bp, Homo sapien
cagctaaaatctgcctgctggtcca

SEQ ID NO: 4102719 - DNA, 25 bp, Homo sapien
tatcttgcggttgcaggacatcagc

SEQ ID NO: 4102720 - DNA, 25 bp, Homo sapien
agcatgagtacagcctggtgctgga

SEQ ID NO: 4102721 - DNA, 25 bp, Homo sapien
gctttgtgacactaactctgctgct

SEQ ID NO: 4102722 - DNA, 25 bp, Homo sapien
tgctggtcacaaggtccctaccagc

SEQ ID NO: 4102723 - DNA, 25 bp, Homo sapien
ctctaccaggccaactctgaggagc

SEQ ID NO: 4102724 - DNA, 25 bp, Homo sapien
tctaatcctctcagaacgggatggg

SEQ ID NO: 4102725 - DNA, 25 bp, Homo sapien
tttggtgattgccagttagcttcac

SEQ ID NO: 4102726 - DNA, 25 bp, Homo sapien
tgatctttttggtgattgccagtta

SEQ ID NO: 4102727 - DNA, 25 bp, Homo sapien
ccaggtgttggttgtatctttaata

SEQ ID NO: 4102728 - DNA, 25 bp, Homo sapien
tgattgccagttagcttcacagctt

SEQ ID NO: 4102729 - DNA, 25 bp, Homo sapien
tgctggtaccagatgatgaaaggga

SEQ ID NO: 4102730 - DNA, 25 bp, Homo sapien
tctgctggtaccagatgatgaaagg

SEQ ID NO: 4102731 - DNA, 25 bp, Homo sapien
gggagcaagggcgttactggcagag

SEQ ID NO: 4102732 - DNA, 25 bp, Homo sapien
caagggcgttactggcagaggacat

SEQ ID NO: 4102733 - DNA, 25 bp, Homo sapien
cagcaaaattactgcagttatcaag

SEQ ID NO: 4102734 - DNA, 25 bp, Homo sapien
cagaggcagcaaaattactgcagtt

SEQ ID NO: 4102735 - DNA, 25 bp, Homo sapien
gcaaaattactgcagttatcaagct

SEQ ID NO: 4102736 - DNA, 25 bp, Homo sapien
aattactgcagttatcaagcttttc

SEQ ID NO: 4102737 - DNA, 25 bp, Homo sapien
ggttcctttcgcatattagattgtt

SEQ ID NO: 4102738 - DNA, 25 bp, Homo sapien
tttcaggccgtacatgcaagacagg

SEQ ID NO: 4102739 - DNA, 25 bp, Homo sapien
tgtgaaactggttcctttcgcatat

SEQ ID NO: 4102740 - DNA, 25 bp, Homo sapien
tcaatactgcaagctctcagtagag

SEQ ID NO: 4102741 - DNA, 25 bp, Homo sapien
gaaatcattgccatggggcactggt

SEQ ID NO: 4102742 - DNA, 25 bp, Homo sapien
ccagtacttggtgtactggcctcct

SEQ ID NO: 4102743 - DNA, 25 bp, Homo sapien
agtacttggtgtactggcctcctgg

SEQ ID NO: 4102744 - DNA, 25 bp, Homo sapien
gtgtactggcctcctggtacagctc

SEQ ID NO: 4102745 - DNA, 25 bp, Homo sapien
acttggtgtactggcctcctggtac

SEQ ID NO: 4102746 - DNA, 25 bp, Homo sapien
gcccagagactgcatccgattcctt

SEQ ID NO: 4102747 - DNA, 25 bp, Homo sapien
tgcccagagactgcatccgattcct

SEQ ID NO: 4102748 - DNA, 25 bp, Homo sapien
agagactgcatccgattccttcctc

SEQ ID NO: 4102749 - DNA, 25 bp, Homo sapien
ccagagactgcatccgattccttcc

SEQ ID NO: 4102750 - DNA, 25 bp, Homo sapien
ctaggtgtgtggcccccagaacctt

SEQ ID NO: 4102751 - DNA, 25 bp, Homo sapien
ccccagaaccttggcgctcgcacac

SEQ ID NO: 4102752 - DNA, 25 bp, Homo sapien
gtgtggcccccagaaccttggcgct

SEQ ID NO: 4102753 - DNA, 25 bp, Homo sapien
gtgtgtggcccccagaaccttggcg

SEQ ID NO: 4102754 - DNA, 25 bp, Homo sapien
tggtggaatccgtaggacaggatcc

SEQ ID NO: 4102755 - DNA, 25 bp, Homo sapien
tgttgaacttttagccaggcaccgt

SEQ ID NO: 4102756 - DNA, 25 bp, Homo sapien
aacaagttgaccacccagagcggta

SEQ ID NO: 4102757 - DNA, 25 bp, Homo sapien
agagcggtagcaaaaggccccaaag

SEQ ID NO: 4102758 - DNA, 25 bp, Homo sapien
tctgatacacctcgtctgggaaaat

SEQ ID NO: 4102759 - DNA, 25 bp, Homo sapien
caggaattggtagggtggtaggaga

SEQ ID NO: 4102760 - DNA, 25 bp, Homo sapien
tatactctcctataaagactgccat

SEQ ID NO: 4102761 - DNA, 25 bp, Homo sapien
gagagaaccctcaggaatagactca

SEQ ID NO: 4102762 - DNA, 25 bp, Homo sapien
ggaagtggccataagctcccctgaa

SEQ ID NO: 4102763 - DNA, 25 bp, Homo sapien
caaggtacaagcaattcaggcccac

SEQ ID NO: 4102764 - DNA, 25 bp, Homo sapien
agacctttcgatacagccctggaag

SEQ ID NO: 4102765 - DNA, 25 bp, Homo sapien
ttgtcctggttggtagacctttcga

SEQ ID NO: 4102766 - DNA, 25 bp, Homo sapien
tgtcattggtgaaacgttctgtgtt

SEQ ID NO: 4102767 - DNA, 25 bp, Homo sapien
tggatctcctgtactaatggcaagg

SEQ ID NO: 4102768 - DNA, 25 bp, Homo sapien
taagactagaaccatccatacctgc

SEQ ID NO: 4102769 - DNA, 25 bp, Homo sapien
tttcagcagtagtgatggataagac

SEQ ID NO: 4102770 - DNA, 25 bp, Homo sapien
aagctgaaatggtaatcgtaagacc

SEQ ID NO: 4102771 - DNA, 25 bp, Homo sapien
ctgaaatggtaatcgtaagaccagc

SEQ ID NO: 4102772 - DNA, 25 bp, Homo sapien
gaaatggtaatcgtaagaccagcaa

SEQ ID NO: 4102773 - DNA, 25 bp, Homo sapien
gctgaaatggtaatcgtaagaccag

SEQ ID NO: 4102774 - DNA, 25 bp, Homo sapien
tagtaagctgctcgattaaatttcg

SEQ ID NO: 4102775 - DNA, 25 bp, Homo sapien
taacatgtgacttcatccgaccttg

SEQ ID NO: 4102776 - DNA, 25 bp, Homo sapien
tgagctgtaaaggacccaagcttgt

SEQ ID NO: 4102777 - DNA, 25 bp, Homo sapien
taagtgctccaatgcattcaaaaga

SEQ ID NO: 4102778 - DNA, 25 bp, Homo sapien
tggctgggttcttggtttacttcca

SEQ ID NO: 4102779 - DNA, 25 bp, Homo sapien
cacagtagtcacttagctatctcag

SEQ ID NO: 4102780 - DNA, 25 bp, Homo sapien
tagccccaaagcatcaaagtagtga

SEQ ID NO: 4102781 - DNA, 25 bp, Homo sapien
agtgcttctcttcaagtaaccctta

SEQ ID NO: 4102782 - DNA, 25 bp, Homo sapien
agtgatcaggtcaactgtcatggta

SEQ ID NO: 4102783 - DNA, 25 bp, Homo sapien
tctgcgcagtgtggtgaaatcttgc

SEQ ID NO: 4102784 - DNA, 25 bp, Homo sapien
ttctgcgcagtgtggtgaaatcttg

SEQ ID NO: 4102785 - DNA, 25 bp, Homo sapien
cattctgcgcagtgtggtgaaatct

SEQ ID NO: 4102786 - DNA, 25 bp, Homo sapien
ctgcgcagtgtggtgaaatcttgca

SEQ ID NO: 4102787 - DNA, 25 bp, Homo sapien
atggagacttgatacgttgcccagg

SEQ ID NO: 4102788 - DNA, 25 bp, Homo sapien
tggagacttgatacgttgcccaggc

SEQ ID NO: 4102789 - DNA, 25 bp, Homo sapien
aatcaagaagtatgagtccttcgtt

SEQ ID NO: 4102790 - DNA, 25 bp, Homo sapien
gccagtctcacacagtgttaattac

SEQ ID NO: 4102791 - DNA, 25 bp, Homo sapien
tgtgtcccgtgtgtttctagataaa

SEQ ID NO: 4102792 - DNA, 25 bp, Homo sapien
tcaatctatatgcatatccttatgc

SEQ ID NO: 4102793 - DNA, 25 bp, Homo sapien
aatccaacttattgatttggttgct

SEQ ID NO: 4102794 - DNA, 25 bp, Homo sapien
taagtgtgttcttctatgtgttctc

SEQ ID NO: 4102795 - DNA, 25 bp, Homo sapien
taattcttatatataggtctatgac

SEQ ID NO: 4102796 - DNA, 25 bp, Homo sapien
ttggaaagcagatatgtatcagata

SEQ ID NO: 4102797 - DNA, 25 bp, Homo sapien
gataatcctgggctatttaaggtca

SEQ ID NO: 4102798 - DNA, 25 bp, Homo sapien
taatagcttgaatgaccacattcag

SEQ ID NO: 4102799 - DNA, 25 bp, Homo sapien
tagcttgaatgaccacattcagata

SEQ ID NO: 4102800 - DNA, 25 bp, Homo sapien
ctgagtaatttatagtaatagcttg

SEQ ID NO: 4102801 - DNA, 25 bp, Homo sapien
tttcctctcttgttcagtcagtact

SEQ ID NO: 4102802 - DNA, 25 bp, Homo sapien
tctcttgttcagtcagtactgcagg

SEQ ID NO: 4102803 - DNA, 25 bp, Homo sapien
ttttcatgggtatctgttcctttcc

SEQ ID NO: 4102804 - DNA, 25 bp, Homo sapien
ttgttcagtcagtactgcagggtcc

SEQ ID NO: 4102805 - DNA, 25 bp, Homo sapien
ggccaggaccaccttctgtttccaa

SEQ ID NO: 4102806 - DNA, 25 bp, Homo sapien
ccaggaccaccttctgtttccaagt

SEQ ID NO: 4102807 - DNA, 25 bp, Homo sapien
cttctgtttccaagttccagtgcat

SEQ ID NO: 4102808 - DNA, 25 bp, Homo sapien
ctggccaggaccaccttctgtttcc

SEQ ID NO: 4102809 - DNA, 25 bp, Homo sapien
tggtcctcagcattgactatccaga

SEQ ID NO: 4102810 - DNA, 25 bp, Homo sapien
aagttaggatgcagggacaatctct

SEQ ID NO: 4102811 - DNA, 25 bp, Homo sapien
tatccagactccatcgcagagggag

SEQ ID NO: 4102812 - DNA, 25 bp, Homo sapien
cagtacagaggccaatagagacctt

SEQ ID NO: 4102813 - DNA, 25 bp, Homo sapien
ctcttgtgtatatctgcttctctgg

SEQ ID NO: 4102814 - DNA, 25 bp, Homo sapien
tgaagttattgaaagtgatggagct

SEQ ID NO: 4102815 - DNA, 25 bp, Homo sapien
cgtgaagattccgtattacaaggca

SEQ ID NO: 4102816 - DNA, 25 bp, Homo sapien
tagtccattccttgctgacgtgaag

SEQ ID NO: 4102817 - DNA, 25 bp, Homo sapien
agtacaaagggcgttggtatccaag

SEQ ID NO: 4102818 - DNA, 25 bp, Homo sapien
ctgcctgaacgggtaagtacaaagg

SEQ ID NO: 4102819 - DNA, 25 bp, Homo sapien
tcatctgcctgaacgggtaagtaca

SEQ ID NO: 4102820 - DNA, 25 bp, Homo sapien
gtatccaagaccaggttgttatgag

SEQ ID NO: 4102821 - DNA, 25 bp, Homo sapien
gtagcttccagccattaacttcgat

SEQ ID NO: 4102822 - DNA, 25 bp, Homo sapien
tgttactttctttatcccgtgctga

SEQ ID NO: 4102823 - DNA, 25 bp, Homo sapien
tagtgcccaaaatagcatgacgaag

SEQ ID NO: 4102824 - DNA, 25 bp, Homo sapien
taattattggcctggaaaaaatctc

SEQ ID NO: 4102825 - DNA, 25 bp, Homo sapien
tttgatagtggtaaacgcgatcccc

SEQ ID NO: 4102826 - DNA, 25 bp, Homo sapien
ttcgaagccaacagcaggacagtgt

SEQ ID NO: 4102827 - DNA, 25 bp, Homo sapien
cctgtgcttgtcattgcggcttcta

SEQ ID NO: 4102828 - DNA, 25 bp, Homo sapien
tagtttgagcaggaattcgaagcca

SEQ ID NO: 4102829 - DNA, 25 bp, Homo sapien
cgggagccagcttcactagacaaga

SEQ ID NO: 4102830 - DNA, 25 bp, Homo sapien
caacgatgcttcttggcgcttccat

SEQ ID NO: 4102831 - DNA, 25 bp, Homo sapien
gtgggaaagcgccatcaacgatgct

SEQ ID NO: 4102832 - DNA, 25 bp, Homo sapien
ctgtgccggcgagcagcttgagtca

SEQ ID NO: 4102833 - DNA, 25 bp, Homo sapien
tcaacgtgtaggagacctgttcaca

SEQ ID NO: 4102834 - DNA, 25 bp, Homo sapien
aagaatttgaaatcgtgcccggcac

SEQ ID NO: 4102835 - DNA, 25 bp, Homo sapien
cagggcccagtactcgaagaaatcg

SEQ ID NO: 4102836 - DNA, 25 bp, Homo sapien
tggttaagaccagactcgaagtagg

SEQ ID NO: 4102837 - DNA, 25 bp, Homo sapien
gattacatttaatagcttgttacct

SEQ ID NO: 4102838 - DNA, 25 bp, Homo sapien
cagaagggtctatgatcagtattac

SEQ ID NO: 4102839 - DNA, 25 bp, Homo sapien
taagtagtaggcgtaaataatcagg

SEQ ID NO: 4102840 - DNA, 25 bp, Homo sapien
tagttggtgcttactttcatttatg

SEQ ID NO: 4102841 - DNA, 25 bp, Homo sapien
tgattttaagtatgaacagagcact

SEQ ID NO: 4102842 - DNA, 25 bp, Homo sapien
gatactttcctattacttatgatgg

SEQ ID NO: 4102843 - DNA, 25 bp, Homo sapien
ttatgatggacaatcttgagcccca

SEQ ID NO: 4102844 - DNA, 25 bp, Homo sapien
catttgtaaactagttgccatcaca

SEQ ID NO: 4102845 - DNA, 25 bp, Homo sapien
acttccatggtttgtggctgcaaca

SEQ ID NO: 4102846 - DNA, 25 bp, Homo sapien
tgtcaataagtcatgtcaacagctt

SEQ ID NO: 4102847 - DNA, 25 bp, Homo sapien
cgtgaacagcgggttacagggctaa

SEQ ID NO: 4102848 - DNA, 25 bp, Homo sapien
caagtttttgggaattcgtgaacag

SEQ ID NO: 4102849 - DNA, 25 bp, Homo sapien
aaccgggttcttgtcatacggcagg

SEQ ID NO: 4102850 - DNA, 25 bp, Homo sapien
gatggagtcctgctaacaggctgcc

SEQ ID NO: 4102851 - DNA, 25 bp, Homo sapien
gttatgaacttagccggcgaaaaga

SEQ ID NO: 4102852 - DNA, 25 bp, Homo sapien
ccaggttactatcccggaacaggag

SEQ ID NO: 4102853 - DNA, 25 bp, Homo sapien
tattttcatttagcaggcaatattg

SEQ ID NO: 4102854 - DNA, 25 bp, Homo sapien
ctctattttcatttagcaggcaata

SEQ ID NO: 4102855 - DNA, 25 bp, Homo sapien
ttagcaggcaatattgtgtattttg

SEQ ID NO: 4102856 - DNA, 25 bp, Homo sapien
tcatttagcaggcaatattgtgtat

SEQ ID NO: 4102857 - DNA, 25 bp, Homo sapien
tgaagagctggttgaatctttcccc

SEQ ID NO: 4102858 - DNA, 25 bp, Homo sapien
tgttcggtgagttctccggccgcgt

SEQ ID NO: 4102859 - DNA, 25 bp, Homo sapien
ctccgcggtgcgctttgttcggtga

SEQ ID NO: 4102860 - DNA, 25 bp, Homo sapien
gctctttcgctgttgcctgccgggt

SEQ ID NO: 4102861 - DNA, 25 bp, Homo sapien
gtagcggccgtcacgggctggccgg

SEQ ID NO: 4102862 - DNA, 25 bp, Homo sapien
cgcgcggggcagtaccgtagcggcc

SEQ ID NO: 4102863 - DNA, 25 bp, Homo sapien
gggcagtaccgtagcggccgtcacg

SEQ ID NO: 4102864 - DNA, 25 bp, Homo sapien
agtaccgtagcggccgtcacgggct

SEQ ID NO: 4102865 - DNA, 25 bp, Homo sapien
tcggtccgccggttcgctcagttct

SEQ ID NO: 4102866 - DNA, 25 bp, Homo sapien
ccgccggttcgctcagttctagctt

SEQ ID NO: 4102867 - DNA, 25 bp, Homo sapien
tagcttcaggttccacgccgcggcc

SEQ ID NO: 4102868 - DNA, 25 bp, Homo sapien
cgaacccctcctcctacgcggctct

SEQ ID NO: 4102869 - DNA, 25 bp, Homo sapien
cacttggcttgacgtcaagagtgat

SEQ ID NO: 4102870 - DNA, 25 bp, Homo sapien
tgtcacttggcttgacgtcaagagt

SEQ ID NO: 4102871 - DNA, 25 bp, Homo sapien
gtgtcacttggcttgacgtcaagag

SEQ ID NO: 4102872 - DNA, 25 bp, Homo sapien
tggcttgacgtcaagagtgatggtc

SEQ ID NO: 4102873 - DNA, 25 bp, Homo sapien
ggatacctccttgtcttgaattttg

SEQ ID NO: 4102874 - DNA, 25 bp, Homo sapien
tggtcaggtgggatacctccttgtc

SEQ ID NO: 4102875 - DNA, 25 bp, Homo sapien
tcaggtgggatacctccttgtcttg

SEQ ID NO: 4102876 - DNA, 25 bp, Homo sapien
aggtgggatacctccttgtcttgaa

SEQ ID NO: 4102877 - DNA, 25 bp, Homo sapien
agctgtttgccagcaagtatcagat

SEQ ID NO: 4102878 - DNA, 25 bp, Homo sapien
agggtggactctttccagatgttgc

SEQ ID NO: 4102879 - DNA, 25 bp, Homo sapien
gtttgccagcaagtatcagatgctg

SEQ ID NO: 4102880 - DNA, 25 bp, Homo sapien
ttccagatgttgcagtctgagagag

SEQ ID NO: 4102881 - DNA, 25 bp, Homo sapien
caggcaagcatagcacttgcggcag

SEQ ID NO: 4102882 - DNA, 25 bp, Homo sapien
gggtgcaggcaagcatagcacttgc

SEQ ID NO: 4102883 - DNA, 25 bp, Homo sapien
ctcttgcagcagttgacagcacggg

SEQ ID NO: 4102884 - DNA, 25 bp, Homo sapien
tgcaggcaagcatagcacttgcggc

SEQ ID NO: 4102885 - DNA, 25 bp, Homo sapien
tgctgatccctgactaggccttttc

SEQ ID NO: 4102886 - DNA, 25 bp, Homo sapien
caactaaggtttgcatgtggatggc

SEQ ID NO: 4102887 - DNA, 25 bp, Homo sapien
cagctggtcagttttggcccatggg

SEQ ID NO: 4102888 - DNA, 25 bp, Homo sapien
tcacagtagtaacaggcctctgtag

SEQ ID NO: 4102889 - DNA, 25 bp, Homo sapien
cacttagggaatataagattctcca

SEQ ID NO: 4102890 - DNA, 25 bp, Homo sapien
tgtgagagatgagacaacatgatgg

SEQ ID NO: 4102891 - DNA, 25 bp, Homo sapien
ccttgactcagattactattgcatg

SEQ ID NO: 4102892 - DNA, 25 bp, Homo sapien
gactagagcaagaaatgccatgacc

SEQ ID NO: 4102893 - DNA, 25 bp, Homo sapien
tttgtgcacaggtagagcaggctcc

SEQ ID NO: 4102894 - DNA, 25 bp, Homo sapien
agagaggcacgtactgacagctgga

SEQ ID NO: 4102895 - DNA, 25 bp, Homo sapien
cgttagaagcttagccccaccgtga

SEQ ID NO: 4102896 - DNA, 25 bp, Homo sapien
tatggcaggtgtacgacacagggat

SEQ ID NO: 4102897 - DNA, 25 bp, Homo sapien
tgatgatggtatttcacctcctagg

SEQ ID NO: 4102898 - DNA, 25 bp, Homo sapien
tgatggtatttcacctcctaggtaa

SEQ ID NO: 4102899 - DNA, 25 bp, Homo sapien
gtgatgatggtatttcacctcctag

SEQ ID NO: 4102900 - DNA, 25 bp, Homo sapien
gatgatggtatttcacctcctaggt

SEQ ID NO: 4102901 - DNA, 25 bp, Homo sapien
tcctttccttcaatttcattgtttc

SEQ ID NO: 4102902 - DNA, 25 bp, Homo sapien
tccttcaatttcattgtttcttctg

SEQ ID NO: 4102903 - DNA, 25 bp, Homo sapien
cttcaatttcattgtttcttctgtc

SEQ ID NO: 4102904 - DNA, 25 bp, Homo sapien
cttagcgttcatcttcctttccttc

SEQ ID NO: 4102905 - DNA, 25 bp, Homo sapien
ggccacagtcaccctttcttattca

SEQ ID NO: 4102906 - DNA, 25 bp, Homo sapien
tcccaccaacctagtccaggaatag

SEQ ID NO: 4102907 - DNA, 25 bp, Homo sapien
tatgcctatattatgtcagacactg

SEQ ID NO: 4102908 - DNA, 25 bp, Homo sapien
tacaggaagagtcattatgcctata

SEQ ID NO: 4102909 - DNA, 25 bp, Homo sapien
tcaccaccgatgacagttcctgctg

SEQ ID NO: 4102910 - DNA, 25 bp, Homo sapien
ttccaaggcaccagtggtgccttca

SEQ ID NO: 4102911 - DNA, 25 bp, Homo sapien
gaggcagagtttggtcattaaaacc

SEQ ID NO: 4102912 - DNA, 25 bp, Homo sapien
cagtcagatgaaagtaatgaggcag

SEQ ID NO: 4102913 - DNA, 25 bp, Homo sapien
gcattttgagttcttattcatagtc

SEQ ID NO: 4102914 - DNA, 25 bp, Homo sapien
catatcttgtctatcaccaactggt

SEQ ID NO: 4102915 - DNA, 25 bp, Homo sapien
tacatctaatgtattcagctagatt

SEQ ID NO: 4102916 - DNA, 25 bp, Homo sapien
tttctgagacatgagtggtttaccc

SEQ ID NO: 4102917 - DNA, 25 bp, Homo sapien
catgagtggtttaccccggaagtga

SEQ ID NO: 4102918 - DNA, 25 bp, Homo sapien
aggttgctgtgagtcgaggtcagcc

SEQ ID NO: 4102919 - DNA, 25 bp, Homo sapien
ttgctgtgagtcgaggtcagcctgg

SEQ ID NO: 4102920 - DNA, 25 bp, Homo sapien
ggttgctgtgagtcgaggtcagcct

SEQ ID NO: 4102921 - DNA, 25 bp, Homo sapien
agaggttgctgtgagtcgaggtcag

SEQ ID NO: 4102922 - DNA, 25 bp, Homo sapien
catctggatgtgtaggtgcagatca

SEQ ID NO: 4102923 - DNA, 25 bp, Homo sapien
tgtaggtgcagatcacaggggatat

SEQ ID NO: 4102924 - DNA, 25 bp, Homo sapien
tggtggattatcattagctcttata

SEQ ID NO: 4102925 - DNA, 25 bp, Homo sapien
gtggtggattatcattagctcttat

SEQ ID NO: 4102926 - DNA, 25 bp, Homo sapien
tcactacaggtctttagcgatgcac

SEQ ID NO: 4102927 - DNA, 25 bp, Homo sapien
tgctataaaatcactacaggtcttt

SEQ ID NO: 4102928 - DNA, 25 bp, Homo sapien
ctttagcgatgcacaaattgtagct

SEQ ID NO: 4102929 - DNA, 25 bp, Homo sapien
tagcgatgcacaaattgtagctttg

SEQ ID NO: 4102930 - DNA, 25 bp, Homo sapien
tgtttgtgtttcaagagcattcggg

SEQ ID NO: 4102931 - DNA, 25 bp, Homo sapien
actttgtcttggaagggagctcctg

SEQ ID NO: 4102932 - DNA, 25 bp, Homo sapien
tcaaattggatcttgtagaacgcca

SEQ ID NO: 4102933 - DNA, 25 bp, Homo sapien
tgctcagtttggattacgtccagca

SEQ ID NO: 4102934 - DNA, 25 bp, Homo sapien
ggcagcggcggacgctcggctgggc

SEQ ID NO: 4102935 - DNA, 25 bp, Homo sapien
gctgcagggcctagatctggcgttt

SEQ ID NO: 4102936 - DNA, 25 bp, Homo sapien
ctgcgcggtcttacgcctcgtccgc

SEQ ID NO: 4102937 - DNA, 25 bp, Homo sapien
gcagggcctagatctggcgtttcac

SEQ ID NO: 4102938 - DNA, 25 bp, Homo sapien
ctgctgcagggcctagatctggcgt

SEQ ID NO: 4102939 - DNA, 25 bp, Homo sapien
tcaacgagctggatgcgtcggttga

SEQ ID NO: 4102940 - DNA, 25 bp, Homo sapien
cagattgttagtaacattcttgagt

SEQ ID NO: 4102941 - DNA, 25 bp, Homo sapien
ctcaacgagctggatgcgtcggttg

SEQ ID NO: 4102942 - DNA, 25 bp, Homo sapien
gatttcagattgttagtaacattct

SEQ ID NO: 4102943 - DNA, 25 bp, Homo sapien
gtaagcccacgttctcttctttggc

SEQ ID NO: 4102944 - DNA, 25 bp, Homo sapien
tgtctgatgtaagcccacgttctct

SEQ ID NO: 4102945 - DNA, 25 bp, Homo sapien
tccagttttgcaaccgttctctctg

SEQ ID NO: 4102946 - DNA, 25 bp, Homo sapien
tccagtgtctgatgtaagcccacgt

SEQ ID NO: 4102947 - DNA, 25 bp, Homo sapien
tcggaattgcaaactttagtcggcc

SEQ ID NO: 4102948 - DNA, 25 bp, Homo sapien
cctgccatgggaaacgataatatct

SEQ ID NO: 4102949 - DNA, 25 bp, Homo sapien
gatccatgccacacgagagtctagt

SEQ ID NO: 4102950 - DNA, 25 bp, Homo sapien
tcactgtcatacgaagaaggatcca

SEQ ID NO: 4102951 - DNA, 25 bp, Homo sapien
tagggtagtcactagccagttccag

SEQ ID NO: 4102952 - DNA, 25 bp, Homo sapien
taatctccctacaaagatgccctga

SEQ ID NO: 4102953 - DNA, 25 bp, Homo sapien
agaagagccgtgtgagtgatagaaa

SEQ ID NO: 4102954 - DNA, 25 bp, Homo sapien
cagaaatccagaatcctgaatgact

SEQ ID NO: 4102955 - DNA, 25 bp, Homo sapien
atccagaatcctgaatgactgcgtg

SEQ ID NO: 4102956 - DNA, 25 bp, Homo sapien
ctttgctgcttggttgtactttaac

SEQ ID NO: 4102957 - DNA, 25 bp, Homo sapien
cattgggtacaggatcagtaaaacc

SEQ ID NO: 4102958 - DNA, 25 bp, Homo sapien
ttgtactttaactctggctgctgag

SEQ ID NO: 4102959 - DNA, 25 bp, Homo sapien
gaccataagacattgggtacaggat

SEQ ID NO: 4102960 - DNA, 25 bp, Homo sapien
gagatgggggtgaggaaaccaaaca

SEQ ID NO: 4102961 - DNA, 25 bp, Homo sapien
ggtgaggaaaccaaacacttctatc

SEQ ID NO: 4102962 - DNA, 25 bp, Homo sapien
aaaccaaacacttctatccttgtca

SEQ ID NO: 4102963 - DNA, 25 bp, Homo sapien
gttgagatgggggtgaggaaaccaa

SEQ ID NO: 4102964 - DNA, 25 bp, Homo sapien
tttctcctcaacatggcttttcccc

SEQ ID NO: 4102965 - DNA, 25 bp, Homo sapien
cttggtctgtggtctggcatgctga

SEQ ID NO: 4102966 - DNA, 25 bp, Homo sapien
tccagcagggtaaagcaagtgtcaa

SEQ ID NO: 4102967 - DNA, 25 bp, Homo sapien
tacgatctgcttgtagtggagttcc

SEQ ID NO: 4102968 - DNA, 25 bp, Homo sapien
ctgagcatgcccaacaggctgccat

SEQ ID NO: 4102969 - DNA, 25 bp, Homo sapien
catgccactgtgtttaagcactcac

SEQ ID NO: 4102970 - DNA, 25 bp, Homo sapien
tcatgccactgtgtttaagcactca

SEQ ID NO: 4102971 - DNA, 25 bp, Homo sapien
aggaaaaagttcctgtgtgccttgt

SEQ ID NO: 4102972 - DNA, 25 bp, Homo sapien
gaaaaagttcctgtgtgccttgttc

SEQ ID NO: 4102973 - DNA, 25 bp, Homo sapien
gcaagtgattaagttgaaggtcagg

SEQ ID NO: 4102974 - DNA, 25 bp, Homo sapien
ctccttggtaggcaagtgattaagt

SEQ ID NO: 4102975 - DNA, 25 bp, Homo sapien
gtacagcatctactatcattagaat

SEQ ID NO: 4102976 - DNA, 25 bp, Homo sapien
aaaattatcttagacgtcctggaga

SEQ ID NO: 4102977 - DNA, 25 bp, Homo sapien
tcttaaaattatcttagacgtcctg

SEQ ID NO: 4102978 - DNA, 25 bp, Homo sapien
gcacctcttaaaattatcttagacg

SEQ ID NO: 4102979 - DNA, 25 bp, Homo sapien
tgttgctgagcacgattgagtccca

SEQ ID NO: 4102980 - DNA, 25 bp, Homo sapien
aatctctgcgggtgtcatggaaacg

SEQ ID NO: 4102981 - DNA, 25 bp, Homo sapien
ggaagcagcagattagcgcgccata

SEQ ID NO: 4102982 - DNA, 25 bp, Homo sapien
gagagaattcggagcaggaccttcc

SEQ ID NO: 4102983 - DNA, 25 bp, Homo sapien
ggtctcctagtatgcaccggtgcag

SEQ ID NO: 4102984 - DNA, 25 bp, Homo sapien
aaataaagatcaagggctcggcgcc

SEQ ID NO: 4102985 - DNA, 25 bp, Homo sapien
gagtggccccaattaacaccttatg

SEQ ID NO: 4102986 - DNA, 25 bp, Homo sapien
ggatgacaccgataaacaagcctct

SEQ ID NO: 4102987 - DNA, 25 bp, Homo sapien
aattagggcatgtccacaagctgga

SEQ ID NO: 4102988 - DNA, 25 bp, Homo sapien
gcggaaatggaaattagggcatgtc

SEQ ID NO: 4102989 - DNA, 25 bp, Homo sapien
ggattcgttagatcctcctgctcgg

SEQ ID NO: 4102990 - DNA, 25 bp, Homo sapien
cctgctcggcggtatgcttgtgcat

SEQ ID NO: 4102991 - DNA, 25 bp, Homo sapien
cattacgaaacagggcaggtgagcg

SEQ ID NO: 4102992 - DNA, 25 bp, Homo sapien
ggttccaggttctggcttccgtgcc

SEQ ID NO: 4102993 - DNA, 25 bp, Homo sapien
gtctacctgtgcaaccggcctctgt

SEQ ID NO: 4102994 - DNA, 25 bp, Homo sapien
aaattccaccgccaccaaactgaga

SEQ ID NO: 4102995 - DNA, 25 bp, Homo sapien
aggagctgccctccgccgctgcagc

SEQ ID NO: 4102996 - DNA, 25 bp, Homo sapien
gaggaggagctgccctccgccgctg

SEQ ID NO: 4102997 - DNA, 25 bp, Homo sapien
ggaggagctgccctccgccgctgca

SEQ ID NO: 4102998 - DNA, 25 bp, Homo sapien
ccgccgcggctgcggccactgcgcg

SEQ ID NO: 4102999 - DNA, 25 bp, Homo sapien
tgcttagtgacaccgacgccgggga

SEQ ID NO: 4103000 - DNA, 25 bp, Homo sapien
acgcatttgccagcgctgcggcagt

SEQ ID NO: 4103001 - DNA, 25 bp, Homo sapien
acgccggggacgcatttgccagcgc

SEQ ID NO: 4103002 - DNA, 25 bp, Homo sapien
gaagttttccggcagtctctcctgc

SEQ ID NO: 4103003 - DNA, 25 bp, Homo sapien
tcccctcggaagagggcgctggctc

SEQ ID NO: 4103004 - DNA, 25 bp, Homo sapien
ctcggaagagggcgctggctccccc

SEQ ID NO: 4103005 - DNA, 25 bp, Homo sapien
cttcccctcggaagagggcgctggc

SEQ ID NO: 4103006 - DNA, 25 bp, Homo sapien
cggaagagggcgctggctcccccat

SEQ ID NO: 4103007 - DNA, 25 bp, Homo sapien
cctggtagcctttaaagattcctgc

SEQ ID NO: 4103008 - DNA, 25 bp, Homo sapien
tcctggtagcctttaaagattcctg

SEQ ID NO: 4103009 - DNA, 25 bp, Homo sapien
tggtgaccggttaatgttggaatgt

SEQ ID NO: 4103010 - DNA, 25 bp, Homo sapien
cgctggtgaccggttaatgttggaa

SEQ ID NO: 4103011 - DNA, 25 bp, Homo sapien
cgaagcgctggtgaccggttaatgt

SEQ ID NO: 4103012 - DNA, 25 bp, Homo sapien
ccaggcgaagcgctggtgaccggtt

SEQ ID NO: 4103013 - DNA, 25 bp, Homo sapien
aagaaagggccatagataaatagta

SEQ ID NO: 4103014 - DNA, 25 bp, Homo sapien
aaagaaagggccatagataaatagt

SEQ ID NO: 4103015 - DNA, 25 bp, Homo sapien
agaaagggccatagataaatagtaa

SEQ ID NO: 4103016 - DNA, 25 bp, Homo sapien
tgtccccttaatttgcagatgccgc

SEQ ID NO: 4103017 - DNA, 25 bp, Homo sapien
tggacatccagttaagggtgccttc

SEQ ID NO: 4103018 - DNA, 25 bp, Homo sapien
tgcggtagatcttgctctgcacttg

SEQ ID NO: 4103019 - DNA, 25 bp, Homo sapien
tcgacagccgctctctgcggtagat

SEQ ID NO: 4103020 - DNA, 25 bp, Homo sapien
gaagccaatctggaatggatgtgta

SEQ ID NO: 4103021 - DNA, 25 bp, Homo sapien
cctgagtgccatccagactgcattt

SEQ ID NO: 4103022 - DNA, 25 bp, Homo sapien
gataagataaactggggcgctcgaa

SEQ ID NO: 4103023 - DNA, 25 bp, Homo sapien
cccgtatcttttcccagaagccaat

SEQ ID NO: 4103024 - DNA, 25 bp, Homo sapien
gggttccgcacacgcagcgcaaggg

SEQ ID NO: 4103025 - DNA, 25 bp, Homo sapien
ggcgcaaatctttcgaccctctgcg

SEQ ID NO: 4103026 - DNA, 25 bp, Homo sapien
ctgaccggggaaaggactgcagctt

SEQ ID NO: 4103027 - DNA, 25 bp, Homo sapien
aaaggactgcagcttgtgggcgcaa

SEQ ID NO: 4103028 - DNA, 25 bp, Homo sapien
aggacaaacaatgaaggagtctcag

SEQ ID NO: 4103029 - DNA, 25 bp, Homo sapien
cagaggacaaacaatgaaggagtct

SEQ ID NO: 4103030 - DNA, 25 bp, Homo sapien
gtctcagtgaaagggaaactctcac

SEQ ID NO: 4103031 - DNA, 25 bp, Homo sapien
ggagtctcagtgaaagggaaactct

SEQ ID NO: 4103032 - DNA, 25 bp, Homo sapien
ccctaagtttgtgaggctgtttgtg

SEQ ID NO: 4103033 - DNA, 25 bp, Homo sapien
tttcccaggtcccggagtgcctcca

SEQ ID NO: 4103034 - DNA, 25 bp, Homo sapien
tgtgaggctgtttgtgtgcctttcc

SEQ ID NO: 4103035 - DNA, 25 bp, Homo sapien
ttccttacagccctaagtttgtgag

SEQ ID NO: 4103036 - DNA, 25 bp, Homo sapien
tcttcagggccaaaccagcctgagc

SEQ ID NO: 4103037 - DNA, 25 bp, Homo sapien
tcaccctttctccatatcgactcat

SEQ ID NO: 4103038 - DNA, 25 bp, Homo sapien
agtaacagcccttaaaatctgtcat

SEQ ID NO: 4103039 - DNA, 25 bp, Homo sapien
aagtaacagcccttaaaatctgtca

SEQ ID NO: 4103040 - DNA, 25 bp, Homo sapien
caagtaacagcccttaaaatctgtc

SEQ ID NO: 4103041 - DNA, 25 bp, Homo sapien
tccattccctgcataaagcacatgg

SEQ ID NO: 4103042 - DNA, 25 bp, Homo sapien
caattgtcatcgctgatttttgcct

SEQ ID NO: 4103043 - DNA, 25 bp, Homo sapien
acatggctgtttcttatgacagcag

SEQ ID NO: 4103044 - DNA, 25 bp, Homo sapien
tgtttcttatgacagcagtgtgata

SEQ ID NO: 4103045 - DNA, 25 bp, Homo sapien
ccacctacaatgaatgtatcaccag

SEQ ID NO: 4103046 - DNA, 25 bp, Homo sapien
tatcaccagaaacaaacgtagtctt

SEQ ID NO: 4103047 - DNA, 25 bp, Homo sapien
gtatcaccagaaacaaacgtagtct

SEQ ID NO: 4103048 - DNA, 25 bp, Homo sapien
acccacccacctacaatgaatgtat

SEQ ID NO: 4103049 - DNA, 25 bp, Homo sapien
cagccagccgttcccttctgatact

SEQ ID NO: 4103050 - DNA, 25 bp, Homo sapien
ctgctgtgcaaagctgtagcacagg

SEQ ID NO: 4103051 - DNA, 25 bp, Homo sapien
tgcaaagctgtagcacaggaaagac

SEQ ID NO: 4103052 - DNA, 25 bp, Homo sapien
ccaattctggaagcctctgcaaagg

SEQ ID NO: 4103053 - DNA, 25 bp, Homo sapien
gagattgtctattgtcctctgtggg

SEQ ID NO: 4103054 - DNA, 25 bp, Homo sapien
gattgtctattgtcctctgtgggtc

SEQ ID NO: 4103055 - DNA, 25 bp, Homo sapien
agcaggagattgtctattgtcctct

SEQ ID NO: 4103056 - DNA, 25 bp, Homo sapien
caggagattgtctattgtcctctgt

SEQ ID NO: 4103057 - DNA, 25 bp, Homo sapien
gagtcagtcaaacctagatcataat

SEQ ID NO: 4103058 - DNA, 25 bp, Homo sapien
ctcatccaaattggctggcgggtag

SEQ ID NO: 4103059 - DNA, 25 bp, Homo sapien
tccaaattggctggcgggtagggct

SEQ ID NO: 4103060 - DNA, 25 bp, Homo sapien
ctagatcataattctatagagtttc

SEQ ID NO: 4103061 - DNA, 25 bp, Homo sapien
aaaactatatgtcgatgggatgcca

SEQ ID NO: 4103062 - DNA, 25 bp, Homo sapien
aaagcccaatttagtgtggcagaga

SEQ ID NO: 4103063 - DNA, 25 bp, Homo sapien
taggtcctgggaggtattcttccaa

SEQ ID NO: 4103064 - DNA, 25 bp, Homo sapien
tgggatgccatggaaccactattaa

SEQ ID NO: 4103065 - DNA, 25 bp, Homo sapien
tagggaaatgcctcctttggaccca

SEQ ID NO: 4103066 - DNA, 25 bp, Homo sapien
tgaacagaacgcaaaccagtatcat

SEQ ID NO: 4103067 - DNA, 25 bp, Homo sapien
gcaaaccagtatcattccagaagag

SEQ ID NO: 4103068 - DNA, 25 bp, Homo sapien
tcccaagttagcaaacttgtaggga

SEQ ID NO: 4103069 - DNA, 25 bp, Homo sapien
gcctacacgataaaacaggccatcg

SEQ ID NO: 4103070 - DNA, 25 bp, Homo sapien
caggccatcgaatgccctccacgat

SEQ ID NO: 4103071 - DNA, 25 bp, Homo sapien
aatatggagcctacacgataaaaca

SEQ ID NO: 4103072 - DNA, 25 bp, Homo sapien
gccctccacgatctcaataatttgg

SEQ ID NO: 4103073 - DNA, 25 bp, Homo sapien
tctttcatatctacccatgatctgg

SEQ ID NO: 4103074 - DNA, 25 bp, Homo sapien
catatctacccatgatctggccaca

SEQ ID NO: 4103075 - DNA, 25 bp, Homo sapien
ttcatatctacccatgatctggcca

SEQ ID NO: 4103076 - DNA, 25 bp, Homo sapien
ctttcatatctacccatgatctggc

SEQ ID NO: 4103077 - DNA, 25 bp, Homo sapien
tggggcaaggcgatacgggcaggtc

SEQ ID NO: 4103078 - DNA, 25 bp, Homo sapien
ggcaaggcgatacgggcaggtcgct

SEQ ID NO: 4103079 - DNA, 25 bp, Homo sapien
gtctgtggcctgacttctcggtggg

SEQ ID NO: 4103080 - DNA, 25 bp, Homo sapien
tctcggtggggcaaggcgatacggg

SEQ ID NO: 4103081 - DNA, 25 bp, Homo sapien
tgatatgcaagagcaaaccagtcac

SEQ ID NO: 4103082 - DNA, 25 bp, Homo sapien
catgatatgcaagagcaaaccagtc

SEQ ID NO: 4103083 - DNA, 25 bp, Homo sapien
aaaacatgatatgcaagagcaaacc

SEQ ID NO: 4103084 - DNA, 25 bp, Homo sapien
cggaaaacatgatatgcaagagcaa

SEQ ID NO: 4103085 - DNA, 25 bp, Homo sapien
gtaaacaaaacatgacagacgacca

SEQ ID NO: 4103086 - DNA, 25 bp, Homo sapien
gcataaggaaaactaactccaggct

SEQ ID NO: 4103087 - DNA, 25 bp, Homo sapien
gatagaactaaatctacacctgttc

SEQ ID NO: 4103088 - DNA, 25 bp, Homo sapien
cagacgaccaaaagtgtgaaagcca

SEQ ID NO: 4103089 - DNA, 25 bp, Homo sapien
cacaggtaagacctttgctcttgca

SEQ ID NO: 4103090 - DNA, 25 bp, Homo sapien
aggtaagacctttgctcttgcaaca

SEQ ID NO: 4103091 - DNA, 25 bp, Homo sapien
catctactcatatttcattgccaaa

SEQ ID NO: 4103092 - DNA, 25 bp, Homo sapien
ctactcatatttcattgccaaagca

SEQ ID NO: 4103093 - DNA, 25 bp, Homo sapien
gtggctgggtagctctgattctcct

SEQ ID NO: 4103094 - DNA, 25 bp, Homo sapien
tgtattaggtgacttgaatccaggc

SEQ ID NO: 4103095 - DNA, 25 bp, Homo sapien
tctcatactcataaatctgcaggtc

SEQ ID NO: 4103096 - DNA, 25 bp, Homo sapien
cagttaacgtagattgagtgtggct

SEQ ID NO: 4103097 - DNA, 25 bp, Homo sapien
tcggtggaacagtgtaaccagaaca

SEQ ID NO: 4103098 - DNA, 25 bp, Homo sapien
gggcacttcggtggaacagtgtaac

SEQ ID NO: 4103099 - DNA, 25 bp, Homo sapien
tggatagaaggcttgtagttctgag

SEQ ID NO: 4103100 - DNA, 25 bp, Homo sapien
gaacactggttaagaggattgtttg

SEQ ID NO: 4103101 - DNA, 25 bp, Homo sapien
aatgtagtcatccactttggtagat

SEQ ID NO: 4103102 - DNA, 25 bp, Homo sapien
ctaaatgtagtcatccactttggta

SEQ ID NO: 4103103 - DNA, 25 bp, Homo sapien
aaatgtagtcatccactttggtaga

SEQ ID NO: 4103104 - DNA, 25 bp, Homo sapien
taaatgtagtcatccactttggtag

SEQ ID NO: 4103105 - DNA, 25 bp, Homo sapien
cccagctgctaggatagatatgaag

SEQ ID NO: 4103106 - DNA, 25 bp, Homo sapien
ggatcagaagatagcacagcacact

SEQ ID NO: 4103107 - DNA, 25 bp, Homo sapien
tgcctcaagctgtgttagaactccc

SEQ ID NO: 4103108 - DNA, 25 bp, Homo sapien
cctctctctagctcaggatcagaag

SEQ ID NO: 4103109 - DNA, 25 bp, Homo sapien
ccatcagggagaatgcaatttttcc

SEQ ID NO: 4103110 - DNA, 25 bp, Homo sapien
gtctctgaaattcacactccttaac

SEQ ID NO: 4103111 - DNA, 25 bp, Homo sapien
gaaattcacactccttaactgccat

SEQ ID NO: 4103112 - DNA, 25 bp, Homo sapien
cactccttaactgccatcagggaga

SEQ ID NO: 4103113 - DNA, 25 bp, Homo sapien
tctcagtgtctgactcttccaaagc

SEQ ID NO: 4103114 - DNA, 25 bp, Homo sapien
tgtctgactcttccaaagctggagt

SEQ ID NO: 4103115 - DNA, 25 bp, Homo sapien
tcttccttgctttactaatctcagt

SEQ ID NO: 4103116 - DNA, 25 bp, Homo sapien
tccttgctttactaatctcagtgtc

SEQ ID NO: 4103117 - DNA, 25 bp, Homo sapien
ttttaggttcaattctgggcaagga

SEQ ID NO: 4103118 - DNA, 25 bp, Homo sapien
tccctcaagaaccactttgtgtgcc

SEQ ID NO: 4103119 - DNA, 25 bp, Homo sapien
atttttaggttcaattctgggcaag

SEQ ID NO: 4103120 - DNA, 25 bp, Homo sapien
cctcaagaaccactttgtgtgcctg

SEQ ID NO: 4103121 - DNA, 25 bp, Homo sapien
tgggccttggaactgcgatatcaca

SEQ ID NO: 4103122 - DNA, 25 bp, Homo sapien
tacttgtgctccattatttattaag

SEQ ID NO: 4103123 - DNA, 25 bp, Homo sapien
ctgccaagttggtccactgggcctt

SEQ ID NO: 4103124 - DNA, 25 bp, Homo sapien
cattatttattaaggccttgagtac

SEQ ID NO: 4103125 - DNA, 25 bp, Homo sapien
gatgggactttccaatgccaggcag

SEQ ID NO: 4103126 - DNA, 25 bp, Homo sapien
tgaaatctgtaacgagtttctcagt

SEQ ID NO: 4103127 - DNA, 25 bp, Homo sapien
aagatgggactttccaatgccaggc

SEQ ID NO: 4103128 - DNA, 25 bp, Homo sapien
gggactttccaatgccaggcaggca

SEQ ID NO: 4103129 - DNA, 25 bp, Homo sapien
cctgttcacactactctgccagatg

SEQ ID NO: 4103130 - DNA, 25 bp, Homo sapien
actggcagcctgttcacactactct

SEQ ID NO: 4103131 - DNA, 25 bp, Homo sapien
tgccagatgttgagccactggggcc

SEQ ID NO: 4103132 - DNA, 25 bp, Homo sapien
cagatgttgagccactggggcccaa

SEQ ID NO: 4103133 - DNA, 25 bp, Homo sapien
aagagggattctcatggctacgact

SEQ ID NO: 4103134 - DNA, 25 bp, Homo sapien
agggattctcatggctacgactgac

SEQ ID NO: 4103135 - DNA, 25 bp, Homo sapien
gggtcattgagtccgtaagacatgt

SEQ ID NO: 4103136 - DNA, 25 bp, Homo sapien
taagacatgtgacctgacttccagg

SEQ ID NO: 4103137 - DNA, 25 bp, Homo sapien
taaattccgctctttctgaaactgg

SEQ ID NO: 4103138 - DNA, 25 bp, Homo sapien
ggatagatttgatacccgaagacgt

SEQ ID NO: 4103139 - DNA, 25 bp, Homo sapien
gcatgtctgctttctaggatagatt

SEQ ID NO: 4103140 - DNA, 25 bp, Homo sapien
ccgaagacgttccagttgtagtcca

SEQ ID NO: 4103141 - DNA, 25 bp, Homo sapien
cagtaatgagctatttccacaaatc

SEQ ID NO: 4103142 - DNA, 25 bp, Homo sapien
aatgagctatttccacaaatcttca

SEQ ID NO: 4103143 - DNA, 25 bp, Homo sapien
ctccagtaatgagctatttccacaa

SEQ ID NO: 4103144 - DNA, 25 bp, Homo sapien
tcctccagtaatgagctatttccac

SEQ ID NO: 4103145 - DNA, 25 bp, Homo sapien
tctcgagttccttttagttagtgtc

SEQ ID NO: 4103146 - DNA, 25 bp, Homo sapien
taagtattttcttgcagcgcaattg

SEQ ID NO: 4103147 - DNA, 25 bp, Homo sapien
caacctgccaactctcgagttcctt

SEQ ID NO: 4103148 - DNA, 25 bp, Homo sapien
accaacctgccaactctcgagttcc

SEQ ID NO: 4103149 - DNA, 25 bp, Homo sapien
tcatacatagtgtgatgtaattaac

SEQ ID NO: 4103150 - DNA, 25 bp, Homo sapien
tacatagtgtgatgtaattaactcc

SEQ ID NO: 4103151 - DNA, 25 bp, Homo sapien
catacatagtgtgatgtaattaact

SEQ ID NO: 4103152 - DNA, 25 bp, Homo sapien
catagtgtgatgtaattaactccca

SEQ ID NO: 4103153 - DNA, 25 bp, Homo sapien
tgagcagctaaattggtaaggtctt

SEQ ID NO: 4103154 - DNA, 25 bp, Homo sapien
gatttaggcgagtgatgaaaggcaa

SEQ ID NO: 4103155 - DNA, 25 bp, Homo sapien
tgcctggtgttgataaggtagcaga

SEQ ID NO: 4103156 - DNA, 25 bp, Homo sapien
tgtaataatgcccagttggcctgga

SEQ ID NO: 4103157 - DNA, 25 bp, Homo sapien
gaaccaaacagtccacttttggcaa

SEQ ID NO: 4103158 - DNA, 25 bp, Homo sapien
aaccaaacagtccacttttggcaag

SEQ ID NO: 4103159 - DNA, 25 bp, Homo sapien
tgagaagcagttgttggattgcttg

SEQ ID NO: 4103160 - DNA, 25 bp, Homo sapien
tctgtgtgcacatcatctctcacct

SEQ ID NO: 4103161 - DNA, 25 bp, Homo sapien
ttcctcctcccatcaaactctgtgt

SEQ ID NO: 4103162 - DNA, 25 bp, Homo sapien
agaggtgactaaactgcctagggct

SEQ ID NO: 4103163 - DNA, 25 bp, Homo sapien
tagggcttcctgcaagcatttcttc

SEQ ID NO: 4103164 - DNA, 25 bp, Homo sapien
aaagaatcagcattgggcaaaacta

SEQ ID NO: 4103165 - DNA, 25 bp, Homo sapien
agaatcagcattgggcaaaactaat

SEQ ID NO: 4103166 - DNA, 25 bp, Homo sapien
atcagcattgggcaaaactaatatg

SEQ ID NO: 4103167 - DNA, 25 bp, Homo sapien
caaaagaatcagcattgggcaaaac

SEQ ID NO: 4103168 - DNA, 25 bp, Homo sapien
tttgccatattgtgtggtgataacc

SEQ ID NO: 4103169 - DNA, 25 bp, Homo sapien
tgccatattgtgtggtgataaccat

SEQ ID NO: 4103170 - DNA, 25 bp, Homo sapien
ttgccatattgtgtggtgataacca

SEQ ID NO: 4103171 - DNA, 25 bp, Homo sapien
ttcagctgaacacactgtgatcctc

SEQ ID NO: 4103172 - DNA, 25 bp, Homo sapien
ctttctgaaatggttatgtcggcat

SEQ ID NO: 4103173 - DNA, 25 bp, Homo sapien
cctttgtgacactatctccatctac

SEQ ID NO: 4103174 - DNA, 25 bp, Homo sapien
cacaaactgatgatgggcagtcttc

SEQ ID NO: 4103175 - DNA, 25 bp, Homo sapien
ttttactgacattttggaaattctc

SEQ ID NO: 4103176 - DNA, 25 bp, Homo sapien
tgggcttccccctcactgtctcttt

SEQ ID NO: 4103177 - DNA, 25 bp, Homo sapien
ctcttttgcttgaaatgttgatgct

SEQ ID NO: 4103178 - DNA, 25 bp, Homo sapien
aaatgttgatgcttttactgacatt

SEQ ID NO: 4103179 - DNA, 25 bp, Homo sapien
ttcatagccaagagctgtaatgagg

SEQ ID NO: 4103180 - DNA, 25 bp, Homo sapien
gagctgtaatgaggtctcctgcaag

SEQ ID NO: 4103181 - DNA, 25 bp, Homo sapien
agatttcatagccaagagctgtaat

SEQ ID NO: 4103182 - DNA, 25 bp, Homo sapien
ggtctcctgcaagtgcaactcccat

SEQ ID NO: 4103183 - DNA, 25 bp, Homo sapien
ggctggtgtcaggataagtgtcagg

SEQ ID NO: 4103184 - DNA, 25 bp, Homo sapien
caggataagtgtcagggagggagct

SEQ ID NO: 4103185 - DNA, 25 bp, Homo sapien
agattaccacagcaatacggccccg

SEQ ID NO: 4103186 - DNA, 25 bp, Homo sapien
ccagattaccacagcaatacggccc

SEQ ID NO: 4103187 - DNA, 25 bp, Homo sapien
tatattgaacttgtaagcaggacgc

SEQ ID NO: 4103188 - DNA, 25 bp, Homo sapien
catttggcaggttcaagtcttgctc

SEQ ID NO: 4103189 - DNA, 25 bp, Homo sapien
gctctgggtgtaatatttggtgact

SEQ ID NO: 4103190 - DNA, 25 bp, Homo sapien
gcgtgtgttgctgctgcatttggca

SEQ ID NO: 4103191 - DNA, 25 bp, Homo sapien
atcccttcaatgttactttccactt

SEQ ID NO: 4103192 - DNA, 25 bp, Homo sapien
tatcccagactaagccaactaagga

SEQ ID NO: 4103193 - DNA, 25 bp, Homo sapien
gagatgaacaattccctggcacttt

SEQ ID NO: 4103194 - DNA, 25 bp, Homo sapien
cataggttaagatctaggttttgct

SEQ ID NO: 4103195 - DNA, 25 bp, Homo sapien
aactctccaagggatattgtgagaa

SEQ ID NO: 4103196 - DNA, 25 bp, Homo sapien
tggtttcattgcttgcggccaaagt

SEQ ID NO: 4103197 - DNA, 25 bp, Homo sapien
gactctgatttcttgcaggaacacc

SEQ ID NO: 4103198 - DNA, 25 bp, Homo sapien
gaaaatacatgtggcctaacacgag

SEQ ID NO: 4103199 - DNA, 25 bp, Homo sapien
tttaactcaatagacatcaggctcc

SEQ ID NO: 4103200 - DNA, 25 bp, Homo sapien
ctatgaaggcgttttgaatacttca

SEQ ID NO: 4103201 - DNA, 25 bp, Homo sapien
tgctctatgaaggcgttttgaatac

SEQ ID NO: 4103202 - DNA, 25 bp, Homo sapien
ctctatgaaggcgttttgaatactt

SEQ ID NO: 4103203 - DNA, 25 bp, Homo sapien
ctgctctatgaaggcgttttgaata

SEQ ID NO: 4103204 - DNA, 25 bp, Homo sapien
tcttcttctgtgttcgaacagtgtc

SEQ ID NO: 4103205 - DNA, 25 bp, Homo sapien
tgccacttggtcaggtaaaaacacc

SEQ ID NO: 4103206 - DNA, 25 bp, Homo sapien
ccctacaagggttctatgttgcatg

SEQ ID NO: 4103207 - DNA, 25 bp, Homo sapien
tataactattgttgctcctcctctg

SEQ ID NO: 4103208 - DNA, 25 bp, Homo sapien
cttgggctcggacgcacgtgcgacc

SEQ ID NO: 4103209 - DNA, 25 bp, Homo sapien
cgggccgagaagaacgtagccgctt

SEQ ID NO: 4103210 - DNA, 25 bp, Homo sapien
gagcttcccgcaacagaaacacggg

SEQ ID NO: 4103211 - DNA, 25 bp, Homo sapien
gaaacacgggccctttgcaaagcac

SEQ ID NO: 4103212 - DNA, 25 bp, Homo sapien
gcccgcggcgtgagacccggggcga

SEQ ID NO: 4103213 - DNA, 25 bp, Homo sapien
cccgcggcgtgagacccggggcgag

SEQ ID NO: 4103214 - DNA, 25 bp, Homo sapien
ccgcggcgtgagacccggggcgagg

SEQ ID NO: 4103215 - DNA, 25 bp, Homo sapien
ctttcccaggtcggcatccagcccg

SEQ ID NO: 4103216 - DNA, 25 bp, Homo sapien
tttcccaggtcggcatccagcccgc

SEQ ID NO: 4103217 - DNA, 25 bp, Homo sapien
tcccaggtcggcatccagcccgcat

SEQ ID NO: 4103218 - DNA, 25 bp, Homo sapien
ttcccaggtcggcatccagcccgca

SEQ ID NO: 4103219 - DNA, 25 bp, Homo sapien
agcagccgccgggtatgaggagacg

SEQ ID NO: 4103220 - DNA, 25 bp, Homo sapien
tatgaggagacgctggtggaagcaa

SEQ ID NO: 4103221 - DNA, 25 bp, Homo sapien
tggtggaagcaatgctacccagagc

SEQ ID NO: 4103222 - DNA, 25 bp, Homo sapien
agcaatgctacccagagctctgcac

SEQ ID NO: 4103223 - DNA, 25 bp, Homo sapien
tctccagctccaaccactggaaatt

SEQ ID NO: 4103224 - DNA, 25 bp, Homo sapien
tcaaagcccagatcaactgctaact

SEQ ID NO: 4103225 - DNA, 25 bp, Homo sapien
ctaaacctttgctcatagggctgcc

SEQ ID NO: 4103226 - DNA, 25 bp, Homo sapien
caactgctaactgcttcataaccac

SEQ ID NO: 4103227 - DNA, 25 bp, Homo sapien
ttggagtactgcaacccaaatgttc

SEQ ID NO: 4103228 - DNA, 25 bp, Homo sapien
taaatgtaagggctagtactgttcc

SEQ ID NO: 4103229 - DNA, 25 bp, Homo sapien
taaacaccttctcatggaatgtcat

SEQ ID NO: 4103230 - DNA, 25 bp, Homo sapien
gatactctagagatatggcggcaat

SEQ ID NO: 4103231 - DNA, 25 bp, Homo sapien
tattcttgatctaaacaaaagtcag

SEQ ID NO: 4103232 - DNA, 25 bp, Homo sapien
ctccgttacctaaaaacttgcagtg

SEQ ID NO: 4103233 - DNA, 25 bp, Homo sapien
tatgcagtatgtggctgagatcaag

SEQ ID NO: 4103234 - DNA, 25 bp, Homo sapien
aacacaaaataaggagagttctgtt

SEQ ID NO: 4103235 - DNA, 25 bp, Homo sapien
ccaaattacatgcagttctagtgac

SEQ ID NO: 4103236 - DNA, 25 bp, Homo sapien
tatggattggccagggtaggtacaa

SEQ ID NO: 4103237 - DNA, 25 bp, Homo sapien
agctagcttaaagggaactctggcc

SEQ ID NO: 4103238 - DNA, 25 bp, Homo sapien
cagcagttcatgagtccttaccaaa

SEQ ID NO: 4103239 - DNA, 25 bp, Homo sapien
agacagtttggtgctactgtttact

SEQ ID NO: 4103240 - DNA, 25 bp, Homo sapien
ttgctcctgaagacagtttggtgct

SEQ ID NO: 4103241 - DNA, 25 bp, Homo sapien
gaagacagtttggtgctactgttta

SEQ ID NO: 4103242 - DNA, 25 bp, Homo sapien
tcctgaagacagtttggtgctactg

SEQ ID NO: 4103243 - DNA, 25 bp, Homo sapien
aatacttccatgtatatacgatcaa

SEQ ID NO: 4103244 - DNA, 25 bp, Homo sapien
gaaatacttccatgtatatacgatc

SEQ ID NO: 4103245 - DNA, 25 bp, Homo sapien
cttccatgtatatacgatcaattta

SEQ ID NO: 4103246 - DNA, 25 bp, Homo sapien
aatgacccggacttggtggcgggtg

SEQ ID NO: 4103247 - DNA, 25 bp, Homo sapien
ctaaatgcactctgatgaaatgtct

SEQ ID NO: 4103248 - DNA, 25 bp, Homo sapien
taaatgcactctgatgaaatgtctg

SEQ ID NO: 4103249 - DNA, 25 bp, Homo sapien
caaaacatctttttcgacatgtctg

SEQ ID NO: 4103250 - DNA, 25 bp, Homo sapien
tttttcgacatgtctgagatgctgg

SEQ ID NO: 4103251 - DNA, 25 bp, Homo sapien
ttgttcagaacacctctctttggcc

SEQ ID NO: 4103252 - DNA, 25 bp, Homo sapien
cttgaacttgttcagaacacctctc

SEQ ID NO: 4103253 - DNA, 25 bp, Homo sapien
gcaaatctatagctgtgagcaccaa

SEQ ID NO: 4103254 - DNA, 25 bp, Homo sapien
catttggactctgtgggctttatca

SEQ ID NO: 4103255 - DNA, 25 bp, Homo sapien
tagggtactcctcacatcaataggt

SEQ ID NO: 4103256 - DNA, 25 bp, Homo sapien
gatcaagtccaaagatccaacagcc

SEQ ID NO: 4103257 - DNA, 25 bp, Homo sapien
aaacaaataacccatgcttccttgt

SEQ ID NO: 4103258 - DNA, 25 bp, Homo sapien
agagctatatcccacttattggaca

SEQ ID NO: 4103259 - DNA, 25 bp, Homo sapien
cttattggacaacagatcataaaga

SEQ ID NO: 4103260 - DNA, 25 bp, Homo sapien
acaaacaaataacccatgcttcctt

SEQ ID NO: 4103261 - DNA, 25 bp, Homo sapien
gactgggtgctaatattcaatattc

SEQ ID NO: 4103262 - DNA, 25 bp, Homo sapien
actgggtgctaatattcaatattct

SEQ ID NO: 4103263 - DNA, 25 bp, Homo sapien
aagagactgggtgctaatattcaat

SEQ ID NO: 4103264 - DNA, 25 bp, Homo sapien
gagactgggtgctaatattcaatat

SEQ ID NO: 4103265 - DNA, 25 bp, Homo sapien
tactttgagtatgcatgcacacgca

SEQ ID NO: 4103266 - DNA, 25 bp, Homo sapien
ggttcttcagaccaacaagactgag

SEQ ID NO: 4103267 - DNA, 25 bp, Homo sapien
caatggagctactaggccatgccaa

SEQ ID NO: 4103268 - DNA, 25 bp, Homo sapien
tcaagagtttcagccaccctacctg

SEQ ID NO: 4103269 - DNA, 25 bp, Homo sapien
taagtctagtcaagtcaaatcggat

SEQ ID NO: 4103270 - DNA, 25 bp, Homo sapien
taattagccgtacttcaaggtccag

SEQ ID NO: 4103271 - DNA, 25 bp, Homo sapien
taatgcgtaggacacctgtaagaac

SEQ ID NO: 4103272 - DNA, 25 bp, Homo sapien
taaatgccacgggttatgccacagc

SEQ ID NO: 4103273 - DNA, 25 bp, Homo sapien
taagcaggcttctaacctagtgatc

SEQ ID NO: 4103274 - DNA, 25 bp, Homo sapien
ccaaggcatggtaggcaactatttt

SEQ ID NO: 4103275 - DNA, 25 bp, Homo sapien
gatgaagtaaactgccatgtggaaa

SEQ ID NO: 4103276 - DNA, 25 bp, Homo sapien
tagtgatctgcttctaaccaagagt

SEQ ID NO: 4103277 - DNA, 25 bp, Homo sapien
tagaaaaaccaccagggtatgccat

SEQ ID NO: 4103278 - DNA, 25 bp, Homo sapien
cacttaatagagaagataacccaaa

SEQ ID NO: 4103279 - DNA, 25 bp, Homo sapien
ttcagggatccacacttaatagaga

SEQ ID NO: 4103280 - DNA, 25 bp, Homo sapien
ctagaaaaaccaccagggtatgcca

SEQ ID NO: 4103281 - DNA, 25 bp, Homo sapien
tgacagagctcacttacattattgc

SEQ ID NO: 4103282 - DNA, 25 bp, Homo sapien
taaccactgagtaaggttctcctga

SEQ ID NO: 4103283 - DNA, 25 bp, Homo sapien
tatgtagctatataagttcgtccac

SEQ ID NO: 4103284 - DNA, 25 bp, Homo sapien
gcaactttagaagcctattccgtaa

SEQ ID NO: 4103285 - DNA, 25 bp, Homo sapien
tgcataattcctggcctgtttagtc

SEQ ID NO: 4103286 - DNA, 25 bp, Homo sapien
taattcctggcctgtttagtcttac

SEQ ID NO: 4103287 - DNA, 25 bp, Homo sapien
tcctggcctgtttagtcttacaaca

SEQ ID NO: 4103288 - DNA, 25 bp, Homo sapien
atatatgcataattcctggcctgtt

SEQ ID NO: 4103289 - DNA, 25 bp, Homo sapien
attcagctatcaaatagtttgtctg

SEQ ID NO: 4103290 - DNA, 25 bp, Homo sapien
cctcaggaagtctccaatggagcag

SEQ ID NO: 4103291 - DNA, 25 bp, Homo sapien
gctatcaaatagtttgtctgttgcc

SEQ ID NO: 4103292 - DNA, 25 bp, Homo sapien
gccctcaggaagtctccaatggagc

SEQ ID NO: 4103293 - DNA, 25 bp, Homo sapien
tgaggacgcaagaattaagcaaagt

SEQ ID NO: 4103294 - DNA, 25 bp, Homo sapien
catatccaatgagccatatgagtta

SEQ ID NO: 4103295 - DNA, 25 bp, Homo sapien
tcacagaaaaagtatgaggacgcaa

SEQ ID NO: 4103296 - DNA, 25 bp, Homo sapien
aaattcatatccaatgagccatatg

SEQ ID NO: 4103297 - DNA, 25 bp, Homo sapien
tacttgcaagtggtctacagcccat

SEQ ID NO: 4103298 - DNA, 25 bp, Homo sapien
catacttgcaagtggtctacagccc

SEQ ID NO: 4103299 - DNA, 25 bp, Homo sapien
ttttcatacttgcaagtggtctaca

SEQ ID NO: 4103300 - DNA, 25 bp, Homo sapien
ttcatacttgcaagtggtctacagc

SEQ ID NO: 4103301 - DNA, 25 bp, Homo sapien
gagcagcactctagactttaacgaa

SEQ ID NO: 4103302 - DNA, 25 bp, Homo sapien
taaaaacagggcaacgcagtactct

SEQ ID NO: 4103303 - DNA, 25 bp, Homo sapien
aagtcttcaggtgacagtatcccag

SEQ ID NO: 4103304 - DNA, 25 bp, Homo sapien
gaaacagactttcccctagaggctc

SEQ ID NO: 4103305 - DNA, 25 bp, Homo sapien
cgtctggcgagggagcattactgcc

SEQ ID NO: 4103306 - DNA, 25 bp, Homo sapien
tgaaaaaagtgcaccagtaaatctt

SEQ ID NO: 4103307 - DNA, 25 bp, Homo sapien
tcccggactgcagactggtactact

SEQ ID NO: 4103308 - DNA, 25 bp, Homo sapien
aaagagtaccacagacaattttcta

SEQ ID NO: 4103309 - DNA, 25 bp, Homo sapien
ctttgcttttacacaaccctgccat

SEQ ID NO: 4103310 - DNA, 25 bp, Homo sapien
ccggtggattcccacctgatggcag

SEQ ID NO: 4103311 - DNA, 25 bp, Homo sapien
ctggcaacaaaagccggtggattcc

SEQ ID NO: 4103312 - DNA, 25 bp, Homo sapien
ggcagcaaggcatccctttgctttt

SEQ ID NO: 4103313 - DNA, 25 bp, Homo sapien
gaaacagtacaatcatgggctgctt

SEQ ID NO: 4103314 - DNA, 25 bp, Homo sapien
tagcctaggctaaaacctgtaccat

SEQ ID NO: 4103315 - DNA, 25 bp, Homo sapien
tcgtggtccaaagatcagagtgtac

SEQ ID NO: 4103316 - DNA, 25 bp, Homo sapien
cagtgcacgactgtatattctagga

SEQ ID NO: 4103317 - DNA, 25 bp, Homo sapien
ttctttccggcattttactaccata

SEQ ID NO: 4103318 - DNA, 25 bp, Homo sapien
tctttccggcattttactaccataa

SEQ ID NO: 4103319 - DNA, 25 bp, Homo sapien
ttactaccataagaactccagagtt

SEQ ID NO: 4103320 - DNA, 25 bp, Homo sapien
tttccggcattttactaccataaga

SEQ ID NO: 4103321 - DNA, 25 bp, Homo sapien
aattatattaatccaacaaatcaca

SEQ ID NO: 4103322 - DNA, 25 bp, Homo sapien
ctttttatcatccatacgatttatc

SEQ ID NO: 4103323 - DNA, 25 bp, Homo sapien
atcacaaggctggaggaagtctcag

SEQ ID NO: 4103324 - DNA, 25 bp, Homo sapien
tatctcaactttctaggagttaaat

SEQ ID NO: 4103325 - DNA, 25 bp, Homo sapien
tcttggatgaatctgacaacatgtg

SEQ ID NO: 4103326 - DNA, 25 bp, Homo sapien
catgtggcagataggacaaaaggag

SEQ ID NO: 4103327 - DNA, 25 bp, Homo sapien
ggcaagatagccaataaactgttaa

SEQ ID NO: 4103328 - DNA, 25 bp, Homo sapien
gcaaaaatgatggaaggcgcaggcc

SEQ ID NO: 4103329 - DNA, 25 bp, Homo sapien
gcactgtcacagaatagagcaatga

SEQ ID NO: 4103330 - DNA, 25 bp, Homo sapien
tcaagtaaataatcctgcatgtgtt

SEQ ID NO: 4103331 - DNA, 25 bp, Homo sapien
cactgttaactttatgctaccaaac

SEQ ID NO: 4103332 - DNA, 25 bp, Homo sapien
tggttcatcaggctcaatctttaga

SEQ ID NO: 4103333 - DNA, 25 bp, Homo sapien
ctttgtaggaattccagtttttctg

SEQ ID NO: 4103334 - DNA, 25 bp, Homo sapien
ttccttcaggtattccattttgcat

SEQ ID NO: 4103335 - DNA, 25 bp, Homo sapien
tgcattcttcataaaaggctggatc

SEQ ID NO: 4103336 - DNA, 25 bp, Homo sapien
gcttgttggaagcttctgtagcctt

SEQ ID NO: 4103337 - DNA, 25 bp, Homo sapien
gcaaacatatatgcttgagtccatt

SEQ ID NO: 4103338 - DNA, 25 bp, Homo sapien
cttccatgaatattagagttcctga

SEQ ID NO: 4103339 - DNA, 25 bp, Homo sapien
ccatgaatattagagttcctgaatg

SEQ ID NO: 4103340 - DNA, 25 bp, Homo sapien
taaggactataaaatgacttccatg

SEQ ID NO: 4103341 - DNA, 25 bp, Homo sapien
tgtgcccctgtaggatgcagtgaag

SEQ ID NO: 4103342 - DNA, 25 bp, Homo sapien
tattagttctcaagagagcgggctg

SEQ ID NO: 4103343 - DNA, 25 bp, Homo sapien
gcagtatgaaaacccttgccagaag

SEQ ID NO: 4103344 - DNA, 25 bp, Homo sapien
gaataatatcaacagaggcacccat

SEQ ID NO: 4103345 - DNA, 25 bp, Homo sapien
actggatggaatgattagctgagcc

SEQ ID NO: 4103346 - DNA, 25 bp, Homo sapien
gctttttgtagctagagagactgag

SEQ ID NO: 4103347 - DNA, 25 bp, Homo sapien
tatgatgagacaagctaagaaggtc

SEQ ID NO: 4103348 - DNA, 25 bp, Homo sapien
ggtcaaacttcatacctctgagagg

SEQ ID NO: 4103349 - DNA, 25 bp, Homo sapien
aggaatcgaaactcggcggccttgg

SEQ ID NO: 4103350 - DNA, 25 bp, Homo sapien
gagcagctcccttcgctgtggaagc

SEQ ID NO: 4103351 - DNA, 25 bp, Homo sapien
ggaagcggcggtgtcttcgaagaaa

SEQ ID NO: 4103352 - DNA, 25 bp, Homo sapien
caaacactaaggaatcgaaactcgg

SEQ ID NO: 4103353 - DNA, 25 bp, Homo sapien
tccaatcactttccggagtgcttcc

SEQ ID NO: 4103354 - DNA, 25 bp, Homo sapien
ttttccggctgagagctcatccaca

SEQ ID NO: 4103355 - DNA, 25 bp, Homo sapien
tattgctgggtaacgggccttctct

SEQ ID NO: 4103356 - DNA, 25 bp, Homo sapien
gggctcctgccgagtcagaagaaat

SEQ ID NO: 4103357 - DNA, 25 bp, Homo sapien
gcctccgcctcctggcgtcccgcgg

SEQ ID NO: 4103358 - DNA, 25 bp, Homo sapien
ccgcctccgcctcctggcgtcccgc

SEQ ID NO: 4103359 - DNA, 25 bp, Homo sapien
tccgcctccgcctcctggcgtcccg

SEQ ID NO: 4103360 - DNA, 25 bp, Homo sapien
cgcctccgcctcctggcgtcccgcg

SEQ ID NO: 4103361 - DNA, 25 bp, Homo sapien
taaccaaggtggtggcaactccagg

SEQ ID NO: 4103362 - DNA, 25 bp, Homo sapien
tgagtgaaatccatcctattgggct

SEQ ID NO: 4103363 - DNA, 25 bp, Homo sapien
gcaattcgtcgagcttgtgcctcaa

SEQ ID NO: 4103364 - DNA, 25 bp, Homo sapien
tgtgactccacagctagggacggtc

SEQ ID NO: 4103365 - DNA, 25 bp, Homo sapien
cagtcagaagttgtactagggccca

SEQ ID NO: 4103366 - DNA, 25 bp, Homo sapien
caccgatggaatgacactgaagctg

SEQ ID NO: 4103367 - DNA, 25 bp, Homo sapien
tatctcgggtgcaccaaagcacagt

SEQ ID NO: 4103368 - DNA, 25 bp, Homo sapien
aagtttctgaaacaacaccgatgga

SEQ ID NO: 4103369 - DNA, 25 bp, Homo sapien
catttgcaagtgtaacgatttctgg

SEQ ID NO: 4103370 - DNA, 25 bp, Homo sapien
tgtgtgaactcataagttatatacc

SEQ ID NO: 4103371 - DNA, 25 bp, Homo sapien
ccctcattaggccatatacccaaaa

SEQ ID NO: 4103372 - DNA, 25 bp, Homo sapien
ttctggttatagcaataatcatttg

SEQ ID NO: 4103373 - DNA, 25 bp, Homo sapien
ttcttttgttcctagcaaaattcca

SEQ ID NO: 4103374 - DNA, 25 bp, Homo sapien
aagaaaatagactccaaaactccag

SEQ ID NO: 4103375 - DNA, 25 bp, Homo sapien
agaaaatagactccaaaactccaga

SEQ ID NO: 4103376 - DNA, 25 bp, Homo sapien
cttttgttcctagcaaaattccatg

SEQ ID NO: 4103377 - DNA, 25 bp, Homo sapien
tatttccttacattgagctttacct

SEQ ID NO: 4103378 - DNA, 25 bp, Homo sapien
tttacctttctctggtgactccctg

SEQ ID NO: 4103379 - DNA, 25 bp, Homo sapien
gctctgtcagacagaaggtctaggg

SEQ ID NO: 4103380 - DNA, 25 bp, Homo sapien
cattgctcatgagctagtgtgattt

SEQ ID NO: 4103381 - DNA, 25 bp, Homo sapien
ttctataagtgtgtccactgtttcc

SEQ ID NO: 4103382 - DNA, 25 bp, Homo sapien
tccactgtttcctgaagttttgatt

SEQ ID NO: 4103383 - DNA, 25 bp, Homo sapien
tctttgttggattggtttaatccaa

SEQ ID NO: 4103384 - DNA, 25 bp, Homo sapien
gtttaatccaaagaccttgtcttca

SEQ ID NO: 4103385 - DNA, 25 bp, Homo sapien
catatcttaccagggccactgcaaa

SEQ ID NO: 4103386 - DNA, 25 bp, Homo sapien
gtcacatatcttaccagggccactg

SEQ ID NO: 4103387 - DNA, 25 bp, Homo sapien
tacatttgtcacatatcttaccagg

SEQ ID NO: 4103388 - DNA, 25 bp, Homo sapien
tgctttagaaatttgtccatatatt

SEQ ID NO: 4103389 - DNA, 25 bp, Homo sapien
acaatattcaatcttaacatccaat

SEQ ID NO: 4103390 - DNA, 25 bp, Homo sapien
tacaatattcaatcttaacatccaa

SEQ ID NO: 4103391 - DNA, 25 bp, Homo sapien
gatgaagctgagactcttcagggaa

SEQ ID NO: 4103392 - DNA, 25 bp, Homo sapien
tcttaaatccacactgatgaagctg

SEQ ID NO: 4103393 - DNA, 25 bp, Homo sapien
gttcatgaagcagtaccatggttca

SEQ ID NO: 4103394 - DNA, 25 bp, Homo sapien
ggctgaatcctcacttgataacaat

SEQ ID NO: 4103395 - DNA, 25 bp, Homo sapien
gaggtggattgcaacaaaatctgca

SEQ ID NO: 4103396 - DNA, 25 bp, Homo sapien
aactgtgaggtggattgcaacaaaa

SEQ ID NO: 4103397 - DNA, 25 bp, Homo sapien
aatctgcaagtgttggaaaagtgtg

SEQ ID NO: 4103398 - DNA, 25 bp, Homo sapien
gccaaaactgtgaggtggattgcaa

SEQ ID NO: 4103399 - DNA, 25 bp, Homo sapien
ctgatatttgatcaataaggattgc

SEQ ID NO: 4103400 - DNA, 25 bp, Homo sapien
tactgtatcaagaccagggatagaa

SEQ ID NO: 4103401 - DNA, 25 bp, Homo sapien
ggattgctactgtatcaagaccagg

SEQ ID NO: 4103402 - DNA, 25 bp, Homo sapien
aaaggcctttcttatctgatatttg

SEQ ID NO: 4103403 - DNA, 25 bp, Homo sapien
ccaacgaatgttgcctttatccatg

SEQ ID NO: 4103404 - DNA, 25 bp, Homo sapien
taatgtgatactataatgtccaacg

SEQ ID NO: 4103405 - DNA, 25 bp, Homo sapien
gggatcgcccaggaattctatgtga

SEQ ID NO: 4103406 - DNA, 25 bp, Homo sapien
atttccatccgggtcataagttaca

SEQ ID NO: 4103407 - DNA, 25 bp, Homo sapien
tgtggtccgagataatactctgcct

SEQ ID NO: 4103408 - DNA, 25 bp, Homo sapien
ggtagagtgttttgtacatgcctgt

SEQ ID NO: 4103409 - DNA, 25 bp, Homo sapien
ggtggtctatccattactgagaatg

SEQ ID NO: 4103410 - DNA, 25 bp, Homo sapien
aaatgtgtatactagtcctgtcggg

SEQ ID NO: 4103411 - DNA, 25 bp, Homo sapien
ggcacacaccacatgcagatttggt

SEQ ID NO: 4103412 - DNA, 25 bp, Homo sapien
gtgctttcccaaccttctttgtata

SEQ ID NO: 4103413 - DNA, 25 bp, Homo sapien
tgggcacacaccacatgcagatttg

SEQ ID NO: 4103414 - DNA, 25 bp, Homo sapien
cacacaccacatgcagatttggtgc

SEQ ID NO: 4103415 - DNA, 25 bp, Homo sapien
tgtgtttgtaccttaaacaatttca

SEQ ID NO: 4103416 - DNA, 25 bp, Homo sapien
gcaacatgtggatataagtcataga

SEQ ID NO: 4103417 - DNA, 25 bp, Homo sapien
ggatataagtcatagatctcataat

SEQ ID NO: 4103418 - DNA, 25 bp, Homo sapien
tcttatatgtctgtagcaacatgtg

SEQ ID NO: 4103419 - DNA, 25 bp, Homo sapien
gcttcaaaaattcattggtatgatt

SEQ ID NO: 4103420 - DNA, 25 bp, Homo sapien
aatagatatatttcgttcaaggtgg

SEQ ID NO: 4103421 - DNA, 25 bp, Homo sapien
tttcgttcaaggtggcatgaaaaac

SEQ ID NO: 4103422 - DNA, 25 bp, Homo sapien
gagatgaaaatgaaaggctgctaca

SEQ ID NO: 4103423 - DNA, 25 bp, Homo sapien
gaatttcaaataataggagttgagt

SEQ ID NO: 4103424 - DNA, 25 bp, Homo sapien
gcagatgctgcagtgatgcgagatt

SEQ ID NO: 4103425 - DNA, 25 bp, Homo sapien
ggaggcagatgctgcagtgatgcga

SEQ ID NO: 4103426 - DNA, 25 bp, Homo sapien
aggcagatgctgcagtgatgcgaga

SEQ ID NO: 4103427 - DNA, 25 bp, Homo sapien
agatgctgcagtgatgcgagattgt

SEQ ID NO: 4103428 - DNA, 25 bp, Homo sapien
tctttgctcatgagaatatccatag

SEQ ID NO: 4103429 - DNA, 25 bp, Homo sapien
tgtagtgcacttttataccacttct

SEQ ID NO: 4103430 - DNA, 25 bp, Homo sapien
gctcatgagaatatccatagagtag

SEQ ID NO: 4103431 - DNA, 25 bp, Homo sapien
catagagtagacatgcttcttgtag

SEQ ID NO: 4103432 - DNA, 25 bp, Homo sapien
ttatacttatttggcagatctcctc

SEQ ID NO: 4103433 - DNA, 25 bp, Homo sapien
gatctcctctcttaaagttggctag

SEQ ID NO: 4103434 - DNA, 25 bp, Homo sapien
aaaaagtgcctatgttcctgttcaa

SEQ ID NO: 4103435 - DNA, 25 bp, Homo sapien
tcctcaagttggtgtctagtatatc

SEQ ID NO: 4103436 - DNA, 25 bp, Homo sapien
gcagcaactttgtcatgtgtttcgg

SEQ ID NO: 4103437 - DNA, 25 bp, Homo sapien
gcaactttgtcatgtgtttcggatt

SEQ ID NO: 4103438 - DNA, 25 bp, Homo sapien
gaccagtgcagcaactttgtcatgt

SEQ ID NO: 4103439 - DNA, 25 bp, Homo sapien
tttcttgaccagtgcagcaactttg

SEQ ID NO: 4103440 - DNA, 25 bp, Homo sapien
ttctgacagtccgataacattaata

SEQ ID NO: 4103441 - DNA, 25 bp, Homo sapien
tgttctaatttctgacagtccgata

SEQ ID NO: 4103442 - DNA, 25 bp, Homo sapien
gacagtccgataacattaatataag

SEQ ID NO: 4103443 - DNA, 25 bp, Homo sapien
ccgataacattaatataagtaacca

SEQ ID NO: 4103444 - DNA, 25 bp, Homo sapien
cttgatagctgaaaaggctacaagt

SEQ ID NO: 4103445 - DNA, 25 bp, Homo sapien
aaaggctacaagttccagaatgtag

SEQ ID NO: 4103446 - DNA, 25 bp, Homo sapien
tgaaaaggctacaagttccagaatg

SEQ ID NO: 4103447 - DNA, 25 bp, Homo sapien
gctgaaaaggctacaagttccagaa

SEQ ID NO: 4103448 - DNA, 25 bp, Homo sapien
ggtagattcttagcgttgactctca

SEQ ID NO: 4103449 - DNA, 25 bp, Homo sapien
tctggggtagattcttagcgttgac

SEQ ID NO: 4103450 - DNA, 25 bp, Homo sapien
tcacttcagcattgattatgcccag

SEQ ID NO: 4103451 - DNA, 25 bp, Homo sapien
tttcacttcagcattgattatgccc

SEQ ID NO: 4103452 - DNA, 25 bp, Homo sapien
caatattatttttagaagtctgctt

SEQ ID NO: 4103453 - DNA, 25 bp, Homo sapien
tctaaatttgggcttcttcttttca

SEQ ID NO: 4103454 - DNA, 25 bp, Homo sapien
tttcaatattatttttagaagtctg

SEQ ID NO: 4103455 - DNA, 25 bp, Homo sapien
tgggcttcttcttttcaatattatt

SEQ ID NO: 4103456 - DNA, 25 bp, Homo sapien
aggcatcatcagaataaacattttc

SEQ ID NO: 4103457 - DNA, 25 bp, Homo sapien
cctgttctcctttgataaggcatca

SEQ ID NO: 4103458 - DNA, 25 bp, Homo sapien
ccctgttctcctttgataaggcatc

SEQ ID NO: 4103459 - DNA, 25 bp, Homo sapien
cctttgataaggcatcatcagaata

SEQ ID NO: 4103460 - DNA, 25 bp, Homo sapien
agtaaaacttccgtctcacagacaa

SEQ ID NO: 4103461 - DNA, 25 bp, Homo sapien
catcaggtgtggctgtgggttgcag

SEQ ID NO: 4103462 - DNA, 25 bp, Homo sapien
tttagtaaaacttccgtctcacaga

SEQ ID NO: 4103463 - DNA, 25 bp, Homo sapien
tgtggctgtgggttgcagtgcttgc

SEQ ID NO: 4103464 - DNA, 25 bp, Homo sapien
cctcaatacattctccagcttttaa

SEQ ID NO: 4103465 - DNA, 25 bp, Homo sapien
tcccatcaattacaagatagtcctc

SEQ ID NO: 4103466 - DNA, 25 bp, Homo sapien
agtggttttcaaacagactgcctgc

SEQ ID NO: 4103467 - DNA, 25 bp, Homo sapien
tattagttatatcctcaatacattc

SEQ ID NO: 4103468 - DNA, 25 bp, Homo sapien
taatatctagacatgtgctgcctcc

SEQ ID NO: 4103469 - DNA, 25 bp, Homo sapien
gaattataatagcttggccagccat

SEQ ID NO: 4103470 - DNA, 25 bp, Homo sapien
gatgatacctccaaagacactgatt

SEQ ID NO: 4103471 - DNA, 25 bp, Homo sapien
accgctgtggtgatgctctcgtgca

SEQ ID NO: 4103472 - DNA, 25 bp, Homo sapien
taaaggtgcattcgtgagaagctca

SEQ ID NO: 4103473 - DNA, 25 bp, Homo sapien
tctgttgggagagctaatcacttgc

SEQ ID NO: 4103474 - DNA, 25 bp, Homo sapien
caaatagtgaactcagccttagcca

SEQ ID NO: 4103475 - DNA, 25 bp, Homo sapien
tggtgggcactaatggctttaacaa

SEQ ID NO: 4103476 - DNA, 25 bp, Homo sapien
gcaaagattgcattacttcactcca

SEQ ID NO: 4103477 - DNA, 25 bp, Homo sapien
taacaaactcactaactcagacaga

SEQ ID NO: 4103478 - DNA, 25 bp, Homo sapien
aaatctgagtaattgaggctctcaa

SEQ ID NO: 4103479 - DNA, 25 bp, Homo sapien
tgttagctattatccatatgaagga

SEQ ID NO: 4103480 - DNA, 25 bp, Homo sapien
aatgaagcgtcaaacactaagtgta

SEQ ID NO: 4103481 - DNA, 25 bp, Homo sapien
aaactttatgggtgccataaccttg

SEQ ID NO: 4103482 - DNA, 25 bp, Homo sapien
ttatgggtgccataaccttggccat

SEQ ID NO: 4103483 - DNA, 25 bp, Homo sapien
tgctttgcattctccatgaacacat

SEQ ID NO: 4103484 - DNA, 25 bp, Homo sapien
ttgcattctccatgaacacatggta

SEQ ID NO: 4103485 - DNA, 25 bp, Homo sapien
taaaggtcggcaacagagggtcgat

SEQ ID NO: 4103486 - DNA, 25 bp, Homo sapien
cgcggcgcgccggagtttggcgtaa

SEQ ID NO: 4103487 - DNA, 25 bp, Homo sapien
ggacagcgaggacgcgagtctcgcg

SEQ ID NO: 4103488 - DNA, 25 bp, Homo sapien
tgcctctggccaggtcgcaggttag

SEQ ID NO: 4103489 - DNA, 25 bp, Homo sapien
ctccccaacgcaaaggagccaagga

SEQ ID NO: 4103490 - DNA, 25 bp, Homo sapien
tccccaacgcaaaggagccaaggaa

SEQ ID NO: 4103491 - DNA, 25 bp, Homo sapien
gaaaggagggatctccgacctgtgc

SEQ ID NO: 4103492 - DNA, 25 bp, Homo sapien
tccgacctgtgcgaggtggtggcgg

SEQ ID NO: 4103493 - DNA, 25 bp, Homo sapien
caaccttctgaacaaagttgctgga

SEQ ID NO: 4103494 - DNA, 25 bp, Homo sapien
tggtcgccgggctttgcccggcgaa

SEQ ID NO: 4103495 - DNA, 25 bp, Homo sapien
tctgaacaaagttgctggaagaacc

SEQ ID NO: 4103496 - DNA, 25 bp, Homo sapien
acaaagttgctggaagaaccaacct

SEQ ID NO: 4103497 - DNA, 25 bp, Homo sapien
acttggcagcggcgcccggcagcta

SEQ ID NO: 4103498 - DNA, 25 bp, Homo sapien
actcagctgcccgtggcacgcatgg

SEQ ID NO: 4103499 - DNA, 25 bp, Homo sapien
tggagggcaagacaaaagcggagtg

SEQ ID NO: 4103500 - DNA, 25 bp, Homo sapien
acaaaagcggagtggagacttggca

SEQ ID NO: 4103501 - DNA, 25 bp, Homo sapien
tgggtctcgtctcgggatcgtcgct

SEQ ID NO: 4103502 - DNA, 25 bp, Homo sapien
actctcgccgggcagttcatcctga

SEQ ID NO: 4103503 - DNA, 25 bp, Homo sapien
tctctcctttctcgccgttgggtct

SEQ ID NO: 4103504 - DNA, 25 bp, Homo sapien
ggcgcggagaaactccctcaacatc

SEQ ID NO: 4103505 - DNA, 25 bp, Homo sapien
tcaaaaggtatcacagcgccaacac

SEQ ID NO: 4103506 - DNA, 25 bp, Homo sapien
aaaggtatcacagcgccaacactgt

SEQ ID NO: 4103507 - DNA, 25 bp, Homo sapien
gtatcacagcgccaacactgtggac

SEQ ID NO: 4103508 - DNA, 25 bp, Homo sapien
tcacagcgccaacactgtggaccta

SEQ ID NO: 4103509 - DNA, 25 bp, Homo sapien
atgccaggtcaggaggaggacctcc

SEQ ID NO: 4103510 - DNA, 25 bp, Homo sapien
ctagaaggaggatgccaggtcagga

SEQ ID NO: 4103511 - DNA, 25 bp, Homo sapien
ggatgccaggtcaggaggaggacct

SEQ ID NO: 4103512 - DNA, 25 bp, Homo sapien
gaggatgccaggtcaggaggaggac

SEQ ID NO: 4103513 - DNA, 25 bp, Homo sapien
gctgccaggcacttgatccctgccc

SEQ ID NO: 4103514 - DNA, 25 bp, Homo sapien
gcaagtagcagctatcccccggtct

SEQ ID NO: 4103515 - DNA, 25 bp, Homo sapien
cagcaagtagcagctatcccccggt

SEQ ID NO: 4103516 - DNA, 25 bp, Homo sapien
agctatcccccggtctacaatgaca

SEQ ID NO: 4103517 - DNA, 25 bp, Homo sapien
agtagcagctatcccccggtctaca

SEQ ID NO: 4103518 - DNA, 25 bp, Homo sapien
gacctgagaacatcttaaggaccac

SEQ ID NO: 4103519 - DNA, 25 bp, Homo sapien
agacctgagaacatcttaaggacca

SEQ ID NO: 4103520 - DNA, 25 bp, Homo sapien
cttctgcccaccaagacctgagaac

SEQ ID NO: 4103521 - DNA, 25 bp, Homo sapien
caagacctgagaacatcttaaggac

SEQ ID NO: 4103522 - DNA, 25 bp, Homo sapien
cctagtgtcttaggcatacttctgg

SEQ ID NO: 4103523 - DNA, 25 bp, Homo sapien
tgaaaagccgtaaatataatgtgca

SEQ ID NO: 4103524 - DNA, 25 bp, Homo sapien
tttgccacctaatcttcctgaaaag

SEQ ID NO: 4103525 - DNA, 25 bp, Homo sapien
tgtgcaaaagcagagtaatccattt

SEQ ID NO: 4103526 - DNA, 25 bp, Homo sapien
tacttgccaagttgtcccacatgcc

SEQ ID NO: 4103527 - DNA, 25 bp, Homo sapien
ttttacttgccaagttgtcccacat

SEQ ID NO: 4103528 - DNA, 25 bp, Homo sapien
ttacttgccaagttgtcccacatgc

SEQ ID NO: 4103529 - DNA, 25 bp, Homo sapien
acttgccaagttgtcccacatgccc

SEQ ID NO: 4103530 - DNA, 25 bp, Homo sapien
tccatgagtccattgattgaactga

SEQ ID NO: 4103531 - DNA, 25 bp, Homo sapien
tttaaggaatgttcttgctcagtgc

SEQ ID NO: 4103532 - DNA, 25 bp, Homo sapien
gatagtttaaggaatgttcttgctc

SEQ ID NO: 4103533 - DNA, 25 bp, Homo sapien
ctccatgagtccattgattgaactg

SEQ ID NO: 4103534 - DNA, 25 bp, Homo sapien
cctgaattattgcacacccaaaaat

SEQ ID NO: 4103535 - DNA, 25 bp, Homo sapien
tcctgaattattgcacacccaaaaa

SEQ ID NO: 4103536 - DNA, 25 bp, Homo sapien
ctgaattattgcacacccaaaaata

SEQ ID NO: 4103537 - DNA, 25 bp, Homo sapien
tgaattattgcacacccaaaaatat

SEQ ID NO: 4103538 - DNA, 25 bp, Homo sapien
tgggtgtcccatcaactacagacag

SEQ ID NO: 4103539 - DNA, 25 bp, Homo sapien
cagcccatgatttgatggcactggg

SEQ ID NO: 4103540 - DNA, 25 bp, Homo sapien
gattctctctctaaccgatgagggc

SEQ ID NO: 4103541 - DNA, 25 bp, Homo sapien
gctaaatgtattgtgacagctccta

SEQ ID NO: 4103542 - DNA, 25 bp, Homo sapien
tggacaaggtttataaatgattttc

SEQ ID NO: 4103543 - DNA, 25 bp, Homo sapien
tatgtggaaatgagttactggacac

SEQ ID NO: 4103544 - DNA, 25 bp, Homo sapien
cagacttcattaagctataagccca

SEQ ID NO: 4103545 - DNA, 25 bp, Homo sapien
cacatggcgtcaaccatattgcaat

SEQ ID NO: 4103546 - DNA, 25 bp, Homo sapien
taagcccaattactatcacatggcg

SEQ ID NO: 4103547 - DNA, 25 bp, Homo sapien
cttgaattctttgcccaccttctca

SEQ ID NO: 4103548 - DNA, 25 bp, Homo sapien
tcttgaattctttgcccaccttctc

SEQ ID NO: 4103549 - DNA, 25 bp, Homo sapien
ctcatgacaatcgtaatagggatca

SEQ ID NO: 4103550 - DNA, 25 bp, Homo sapien
gatgctttccataaattctcattag

SEQ ID NO: 4103551 - DNA, 25 bp, Homo sapien
cgtaatagggatcattctcccatgt

SEQ ID NO: 4103552 - DNA, 25 bp, Homo sapien
ctcattagttcctcatgacaatcgt

SEQ ID NO: 4103553 - DNA, 25 bp, Homo sapien
caggcagacctcttcactgtatcca

SEQ ID NO: 4103554 - DNA, 25 bp, Homo sapien
caaccacacaatcatgtttgacaag

SEQ ID NO: 4103555 - DNA, 25 bp, Homo sapien
gcacctcaaagagatgtgtgggaaa

SEQ ID NO: 4103556 - DNA, 25 bp, Homo sapien
gatctatgggcattaacttacaatg

SEQ ID NO: 4103557 - DNA, 25 bp, Homo sapien
tctttcatgcacctctcccacagcc

SEQ ID NO: 4103558 - DNA, 25 bp, Homo sapien
tcttctctctttcatgcacctctcc

SEQ ID NO: 4103559 - DNA, 25 bp, Homo sapien
ctctctttcatgcacctctcccaca

SEQ ID NO: 4103560 - DNA, 25 bp, Homo sapien
catgttgtctgactcattcactttc

SEQ ID NO: 4103561 - DNA, 25 bp, Homo sapien
ggccacctccatttgtagacgacat

SEQ ID NO: 4103562 - DNA, 25 bp, Homo sapien
caaataaacaataagaataagcctc

SEQ ID NO: 4103563 - DNA, 25 bp, Homo sapien
ccaaataaacaataagaataagcct

SEQ ID NO: 4103564 - DNA, 25 bp, Homo sapien
tgtccaaataaacaataagaataag

SEQ ID NO: 4103565 - DNA, 25 bp, Homo sapien
tccaaataaacaataagaataagcc

SEQ ID NO: 4103566 - DNA, 25 bp, Homo sapien
ggcctaagtaccataacatctccaa

SEQ ID NO: 4103567 - DNA, 25 bp, Homo sapien
aactcttccattccttaataccagg

SEQ ID NO: 4103568 - DNA, 25 bp, Homo sapien
taccaggcctaagtaccataacatc

SEQ ID NO: 4103569 - DNA, 25 bp, Homo sapien
ttaataccaggcctaagtaccataa

SEQ ID NO: 4103570 - DNA, 25 bp, Homo sapien
aagacacttccggtaaacataactg

SEQ ID NO: 4103571 - DNA, 25 bp, Homo sapien
ctgttggtgcacagaaaaaacagca

SEQ ID NO: 4103572 - DNA, 25 bp, Homo sapien
gaaagaagatgaagacacttccggt

SEQ ID NO: 4103573 - DNA, 25 bp, Homo sapien
aacataactgttggtgcacagaaaa

SEQ ID NO: 4103574 - DNA, 25 bp, Homo sapien
ccttatctgacagtccacgagcaac

SEQ ID NO: 4103575 - DNA, 25 bp, Homo sapien
cagccttatctgacagtccacgagc

SEQ ID NO: 4103576 - DNA, 25 bp, Homo sapien
tgtgtgcagccttatctgacagtcc

SEQ ID NO: 4103577 - DNA, 25 bp, Homo sapien
aatgtgtgcagccttatctgacagt

SEQ ID NO: 4103578 - DNA, 25 bp, Homo sapien
cctcagatcaacagccttggaggct

SEQ ID NO: 4103579 - DNA, 25 bp, Homo sapien
gttatcctgcctcagatcaacagcc

SEQ ID NO: 4103580 - DNA, 25 bp, Homo sapien
gcaccattatcgaaactatacacat

SEQ ID NO: 4103581 - DNA, 25 bp, Homo sapien
tcccaggcaccattatcgaaactat

SEQ ID NO: 4103582 - DNA, 25 bp, Homo sapien
acttcgatcaggcaatggttccaaa

SEQ ID NO: 4103583 - DNA, 25 bp, Homo sapien
agtgtattttccatacccgatttat

SEQ ID NO: 4103584 - DNA, 25 bp, Homo sapien
caacaatgagtaatacatcatcaac

SEQ ID NO: 4103585 - DNA, 25 bp, Homo sapien
agtgatgaagatgagtacatcaaca

SEQ ID NO: 4103586 - DNA, 25 bp, Homo sapien
aagggatgagatatcatctatgagc

SEQ ID NO: 4103587 - DNA, 25 bp, Homo sapien
cagattgaggtgagccttgaaataa

SEQ ID NO: 4103588 - DNA, 25 bp, Homo sapien
tatgagcttcgcagattgaggtgag

SEQ ID NO: 4103589 - DNA, 25 bp, Homo sapien
aaataaggctacaaggtctgccagc

SEQ ID NO: 4103590 - DNA, 25 bp, Homo sapien
tctctaaagaacttgacttcttttg

SEQ ID NO: 4103591 - DNA, 25 bp, Homo sapien
tgcccttgcataatagtcacttgac

SEQ ID NO: 4103592 - DNA, 25 bp, Homo sapien
gtcacttgactccagagaaagtaaa

SEQ ID NO: 4103593 - DNA, 25 bp, Homo sapien
ttttctgcccttgcataatagtcac

SEQ ID NO: 4103594 - DNA, 25 bp, Homo sapien
catgtgtcctaatctaaaccagcca

SEQ ID NO: 4103595 - DNA, 25 bp, Homo sapien
ctttgctacaatgccgacagccaga

SEQ ID NO: 4103596 - DNA, 25 bp, Homo sapien
caagtggattgagcagaatgagcct

SEQ ID NO: 4103597 - DNA, 25 bp, Homo sapien
tgttggttgcatcccaagcatccat

SEQ ID NO: 4103598 - DNA, 25 bp, Homo sapien
gcctttcaggccatacagtgtctgc

SEQ ID NO: 4103599 - DNA, 25 bp, Homo sapien
taaagtgaagaatgtggctcattca

SEQ ID NO: 4103600 - DNA, 25 bp, Homo sapien
gaatggaagacattccagactagat

SEQ ID NO: 4103601 - DNA, 25 bp, Homo sapien
gggaagagtaatatccagctgtaaa

SEQ ID NO: 4103602 - DNA, 25 bp, Homo sapien
tttccttgagcacaggttccatgga

SEQ ID NO: 4103603 - DNA, 25 bp, Homo sapien
tccttgagcacaggttccatggatg

SEQ ID NO: 4103604 - DNA, 25 bp, Homo sapien
ttccttgagcacaggttccatggat

SEQ ID NO: 4103605 - DNA, 25 bp, Homo sapien
ccttgagcacaggttccatggatgg

SEQ ID NO: 4103606 - DNA, 25 bp, Homo sapien
cttgtctctccatagcattctgcat

SEQ ID NO: 4103607 - DNA, 25 bp, Homo sapien
catagcattctgcatttgttttgat

SEQ ID NO: 4103608 - DNA, 25 bp, Homo sapien
tgttttgatttacagttttcacatc

SEQ ID NO: 4103609 - DNA, 25 bp, Homo sapien
ttttgatttacagttttcacatcat

SEQ ID NO: 4103610 - DNA, 25 bp, Homo sapien
gtgtggccccaggagttccaaagca

SEQ ID NO: 4103611 - DNA, 25 bp, Homo sapien
caggagttccaaagcattgccatct

SEQ ID NO: 4103612 - DNA, 25 bp, Homo sapien
cattgccatcttccatgtttttcac

SEQ ID NO: 4103613 - DNA, 25 bp, Homo sapien
ttttcacctttcttactgcacccat

SEQ ID NO: 4103614 - DNA, 25 bp, Homo sapien
tagaggcacctctgagcctagcagc

SEQ ID NO: 4103615 - DNA, 25 bp, Homo sapien
taatgtggcaaagaagcatgagtgc

SEQ ID NO: 4103616 - DNA, 25 bp, Homo sapien
tctactgaaactgaatgggccatca

SEQ ID NO: 4103617 - DNA, 25 bp, Homo sapien
gcatgagtgccttacacagacaaga

SEQ ID NO: 4103618 - DNA, 25 bp, Homo sapien
cctcacttagttcttgccagcatgg

SEQ ID NO: 4103619 - DNA, 25 bp, Homo sapien
cctctgttaaccagagaatgacccc

SEQ ID NO: 4103620 - DNA, 25 bp, Homo sapien
caaagaagtccagtgcctcacttag

SEQ ID NO: 4103621 - DNA, 25 bp, Homo sapien
cagtttttactcagatcctcaggtg

SEQ ID NO: 4103622 - DNA, 25 bp, Homo sapien
tgaccatcacctgaacaaaactgct

SEQ ID NO: 4103623 - DNA, 25 bp, Homo sapien
ccatcacctgaacaaaactgctaaa

SEQ ID NO: 4103624 - DNA, 25 bp, Homo sapien
atcaccaagcccatgaccatcacct

SEQ ID NO: 4103625 - DNA, 25 bp, Homo sapien
tcaatcaccaagcccatgaccatca

SEQ ID NO: 4103626 - DNA, 25 bp, Homo sapien
atcttcctgccctactctggaacac

SEQ ID NO: 4103627 - DNA, 25 bp, Homo sapien
tctttttcggcgttcattactccta

SEQ ID NO: 4103628 - DNA, 25 bp, Homo sapien
tcttctttttcggcgttcattactc

SEQ ID NO: 4103629 - DNA, 25 bp, Homo sapien
ttttcggcgttcattactcctagat

SEQ ID NO: 4103630 - DNA, 25 bp, Homo sapien
actcaaaaggagcaacatcggaatt

SEQ ID NO: 4103631 - DNA, 25 bp, Homo sapien
caaaaggagcaacatcggaattggg

SEQ ID NO: 4103632 - DNA, 25 bp, Homo sapien
ttcaactcaaaaggagcaacatcgg

SEQ ID NO: 4103633 - DNA, 25 bp, Homo sapien
ctatttcaactcaaaaggagcaaca

SEQ ID NO: 4103634 - DNA, 25 bp, Homo sapien
gatgtccacttgtcctgaaagtttg

SEQ ID NO: 4103635 - DNA, 25 bp, Homo sapien
cttgtcctgaaagtttgctcctcgc

SEQ ID NO: 4103636 - DNA, 25 bp, Homo sapien
gaaagtttgctcctcgccctatctg

SEQ ID NO: 4103637 - DNA, 25 bp, Homo sapien
gccctatctgcccaactgttcatag

SEQ ID NO: 4103638 - DNA, 25 bp, Homo sapien
gaaaactcatctcagggaacacaat

SEQ ID NO: 4103639 - DNA, 25 bp, Homo sapien
gaccttatggtacctcctgctttgg

SEQ ID NO: 4103640 - DNA, 25 bp, Homo sapien
ctcaatatggagaactgtcagtagc

SEQ ID NO: 4103641 - DNA, 25 bp, Homo sapien
tggtgtccccagaaggtttatagaa

SEQ ID NO: 4103642 - DNA, 25 bp, Homo sapien
tgtaagtactactcctaatctcagt

SEQ ID NO: 4103643 - DNA, 25 bp, Homo sapien
gacttcttgggacaatattactata

SEQ ID NO: 4103644 - DNA, 25 bp, Homo sapien
ctcagtatggttggctgtgtttgga

SEQ ID NO: 4103645 - DNA, 25 bp, Homo sapien
cctcacttattaaatggtaagggca

SEQ ID NO: 4103646 - DNA, 25 bp, Homo sapien
gaaggcttcagacaaaggatgagaa

SEQ ID NO: 4103647 - DNA, 25 bp, Homo sapien
ttgatgatatagtcaaagtggtctc

SEQ ID NO: 4103648 - DNA, 25 bp, Homo sapien
atgatatagtcaaagtggtctccaa

SEQ ID NO: 4103649 - DNA, 25 bp, Homo sapien
ggattcaggaagactagcaggcagc

SEQ ID NO: 4103650 - DNA, 25 bp, Homo sapien
aggtcattaaccatacaccaaaagg

SEQ ID NO: 4103651 - DNA, 25 bp, Homo sapien
accaaaaccatacaccagaagggct

SEQ ID NO: 4103652 - DNA, 25 bp, Homo sapien
gggctttaggtggtagatcagggaa

SEQ ID NO: 4103653 - DNA, 25 bp, Homo sapien
cagaagggctttaggtggtagatca

SEQ ID NO: 4103654 - DNA, 25 bp, Homo sapien
cagtttggggtgaactgggctacat

SEQ ID NO: 4103655 - DNA, 25 bp, Homo sapien
gctacatgagctagacagaccaatg

SEQ ID NO: 4103656 - DNA, 25 bp, Homo sapien
tgggctacatgagctagacagacca

SEQ ID NO: 4103657 - DNA, 25 bp, Homo sapien
ggtgaactgggctacatgagctaga

SEQ ID NO: 4103658 - DNA, 25 bp, Homo sapien
tctttcctgtaagttgataagatgc

SEQ ID NO: 4103659 - DNA, 25 bp, Homo sapien
ttcctgtaagttgataagatgctca

SEQ ID NO: 4103660 - DNA, 25 bp, Homo sapien
tctataattttacacgatgcctggt

SEQ ID NO: 4103661 - DNA, 25 bp, Homo sapien
ttacacgatgcctggtgtgatgctc

SEQ ID NO: 4103662 - DNA, 25 bp, Homo sapien
catagtggtattcatcaccttgtag

SEQ ID NO: 4103663 - DNA, 25 bp, Homo sapien
tagtgagctcatagtggtattcatc

SEQ ID NO: 4103664 - DNA, 25 bp, Homo sapien
cagaagggtggctttatgctttgta

SEQ ID NO: 4103665 - DNA, 25 bp, Homo sapien
atctttgagatcttgtagtgagctc

SEQ ID NO: 4103666 - DNA, 25 bp, Homo sapien
aggaggtggtctatcgtctggccaa

SEQ ID NO: 4103667 - DNA, 25 bp, Homo sapien
ctaaggaggtggtctatcgtctggc

SEQ ID NO: 4103668 - DNA, 25 bp, Homo sapien
ggtggtctatcgtctggccaaaact

SEQ ID NO: 4103669 - DNA, 25 bp, Homo sapien
gaggtggtctatcgtctggccaaaa

SEQ ID NO: 4103670 - DNA, 25 bp, Homo sapien
ggtgcttcttggttctagtttctgt

SEQ ID NO: 4103671 - DNA, 25 bp, Homo sapien
ctgggcatgagtccactttaggtgc

SEQ ID NO: 4103672 - DNA, 25 bp, Homo sapien
gctgggcatgagtccactttaggtg

SEQ ID NO: 4103673 - DNA, 25 bp, Homo sapien
tccactttaggtgcttcttggttct

SEQ ID NO: 4103674 - DNA, 25 bp, Homo sapien
gggcaggtgatagcaaaggaaaaac

SEQ ID NO: 4103675 - DNA, 25 bp, Homo sapien
tgtgtgttgggcaggtgatagcaaa

SEQ ID NO: 4103676 - DNA, 25 bp, Homo sapien
ccaggattgtgtgttgggcaggtga

SEQ ID NO: 4103677 - DNA, 25 bp, Homo sapien
tgttgggcaggtgatagcaaaggaa

SEQ ID NO: 4103678 - DNA, 25 bp, Homo sapien
tagtgtgcaagagccccaggtataa

SEQ ID NO: 4103679 - DNA, 25 bp, Homo sapien
ggacagatccacagacagacctgag

SEQ ID NO: 4103680 - DNA, 25 bp, Homo sapien
tagctaagcaaatgtgactcaggcc

SEQ ID NO: 4103681 - DNA, 25 bp, Homo sapien
gaaggtgttttattgcaaggcaggc

SEQ ID NO: 4103682 - DNA, 25 bp, Homo sapien
tctgtgataccatttgcagggtttt

SEQ ID NO: 4103683 - DNA, 25 bp, Homo sapien
cctacttgataatgaccatctctgc

SEQ ID NO: 4103684 - DNA, 25 bp, Homo sapien
tttaagtaccctcttaatgacaggc

SEQ ID NO: 4103685 - DNA, 25 bp, Homo sapien
gatggagacaagatgataagtgaac

SEQ ID NO: 4103686 - DNA, 25 bp, Homo sapien
tccccaagcattagaatcaagattc

SEQ ID NO: 4103687 - DNA, 25 bp, Homo sapien
tacaagattcacaggacaagtccat

SEQ ID NO: 4103688 - DNA, 25 bp, Homo sapien
caagatcagctcctacagtacaaga

SEQ ID NO: 4103689 - DNA, 25 bp, Homo sapien
caagtccatggtcactgcgtgtgta

SEQ ID NO: 4103690 - DNA, 25 bp, Homo sapien
tggacacatggcctgggtaaatttc

SEQ ID NO: 4103691 - DNA, 25 bp, Homo sapien
ctggccatagctcttgtatccatgg

SEQ ID NO: 4103692 - DNA, 25 bp, Homo sapien
tatccatggttgaacagttggacac

SEQ ID NO: 4103693 - DNA, 25 bp, Homo sapien
gctcttgtatccatggttgaacagt

SEQ ID NO: 4103694 - DNA, 25 bp, Homo sapien
ccccagatgtgctgaagtaattcat

SEQ ID NO: 4103695 - DNA, 25 bp, Homo sapien
gcaagatgcgatgacttcaggtggg

SEQ ID NO: 4103696 - DNA, 25 bp, Homo sapien
tggcaagatgcgatgacttcaggtg

SEQ ID NO: 4103697 - DNA, 25 bp, Homo sapien
caagatgcgatgacttcaggtgggg

SEQ ID NO: 4103698 - DNA, 25 bp, Homo sapien
tcctctgcagaggaaatgattccaa

SEQ ID NO: 4103699 - DNA, 25 bp, Homo sapien
tgcaaaaaggaggaactcttccctc

SEQ ID NO: 4103700 - DNA, 25 bp, Homo sapien
gaggaaatgattccaacaaattgca

SEQ ID NO: 4103701 - DNA, 25 bp, Homo sapien
ctctggccaacatttcctctgcaga

SEQ ID NO: 4103702 - DNA, 25 bp, Homo sapien
taacatgagtaaggatgtaatatct

SEQ ID NO: 4103703 - DNA, 25 bp, Homo sapien
taatatctgtctttagggcacttag

SEQ ID NO: 4103704 - DNA, 25 bp, Homo sapien
tagggcacttagattctagttggag

SEQ ID NO: 4103705 - DNA, 25 bp, Homo sapien
tagattctagttggagcaccaggga

SEQ ID NO: 4103706 - DNA, 25 bp, Homo sapien
agacaggaggcaagatgtttagctt

SEQ ID NO: 4103707 - DNA, 25 bp, Homo sapien
tccaaatgaaaagtcgcccttcctc

SEQ ID NO: 4103708 - DNA, 25 bp, Homo sapien
tgaaaagtcgcccttcctctatggg

SEQ ID NO: 4103709 - DNA, 25 bp, Homo sapien
cccttcctctatggggataggaggg

SEQ ID NO: 4103710 - DNA, 25 bp, Homo sapien
caacctgaaatgacaattaagagag

SEQ ID NO: 4103711 - DNA, 25 bp, Homo sapien
cctgaattcacaataattggctttc

SEQ ID NO: 4103712 - DNA, 25 bp, Homo sapien
taatagctatgatgaactctatact

SEQ ID NO: 4103713 - DNA, 25 bp, Homo sapien
gaactctatacttattccacacaaa

SEQ ID NO: 4103714 - DNA, 25 bp, Homo sapien
accactggcagttgtaacaaggctc

SEQ ID NO: 4103715 - DNA, 25 bp, Homo sapien
catttggccgtaggtaccgaggaga

SEQ ID NO: 4103716 - DNA, 25 bp, Homo sapien
gaatcatcctccatgctaactgtca

SEQ ID NO: 4103717 - DNA, 25 bp, Homo sapien
tgtcaggtaaaaactgccctcagtg

SEQ ID NO: 4103718 - DNA, 25 bp, Homo sapien
caagtaaaagtctgtagaaagccta

SEQ ID NO: 4103719 - DNA, 25 bp, Homo sapien
gaaagcctatagcatccagtgaatc

SEQ ID NO: 4103720 - DNA, 25 bp, Homo sapien
agtctgtagaaagcctatagcatcc

SEQ ID NO: 4103721 - DNA, 25 bp, Homo sapien
tgtagaaagcctatagcatccagtg

SEQ ID NO: 4103722 - DNA, 25 bp, Homo sapien
agcacctgaagacttgttggctgaa

SEQ ID NO: 4103723 - DNA, 25 bp, Homo sapien
tgtgaactggaccatctgctatagg

SEQ ID NO: 4103724 - DNA, 25 bp, Homo sapien
tgtggctgtgaactggaccatctgc

SEQ ID NO: 4103725 - DNA, 25 bp, Homo sapien
aggaaggagcacctgaagacttgtt

SEQ ID NO: 4103726 - DNA, 25 bp, Homo sapien
aagaatgaagtgcatatacaacagt

SEQ ID NO: 4103727 - DNA, 25 bp, Homo sapien
tatacaacagtaggtgtatcattca

SEQ ID NO: 4103728 - DNA, 25 bp, Homo sapien
aaaagaatgaagtgcatatacaaca

SEQ ID NO: 4103729 - DNA, 25 bp, Homo sapien
catatacaacagtaggtgtatcatt

SEQ ID NO: 4103730 - DNA, 25 bp, Homo sapien
cctgtaaatactcacacatttctaa

SEQ ID NO: 4103731 - DNA, 25 bp, Homo sapien
ttcaaagtgtggtgcttaatgatta

SEQ ID NO: 4103732 - DNA, 25 bp, Homo sapien
tattcaaagtgtggtgcttaatgat

SEQ ID NO: 4103733 - DNA, 25 bp, Homo sapien
aagtgtggtgcttaatgattatttg

SEQ ID NO: 4103734 - DNA, 25 bp, Homo sapien
caaagtgtggtgcttaatgattatt

SEQ ID NO: 4103735 - DNA, 25 bp, Homo sapien
gagatagagagggagctgtgtctgg

SEQ ID NO: 4103736 - DNA, 25 bp, Homo sapien
agctgtgtctggatgtgcagaacat

SEQ ID NO: 4103737 - DNA, 25 bp, Homo sapien
ggagctgtgtctggatgtgcagaac

SEQ ID NO: 4103738 - DNA, 25 bp, Homo sapien
ctggagatagagagggagctgtgtc

SEQ ID NO: 4103739 - DNA, 25 bp, Homo sapien
tgggtggtacgtccaggaatccgca

SEQ ID NO: 4103740 - DNA, 25 bp, Homo sapien
tccaggaatccgcaaagtggcttgt

SEQ ID NO: 4103741 - DNA, 25 bp, Homo sapien
tacgtccaggaatccgcaaagtggc

SEQ ID NO: 4103742 - DNA, 25 bp, Homo sapien
aggaatccgcaaagtggcttgtagg

SEQ ID NO: 4103743 - DNA, 25 bp, Homo sapien
gactgtggagcacaaatagagccac

SEQ ID NO: 4103744 - DNA, 25 bp, Homo sapien
gctcgaagactgtggagcacaaata

SEQ ID NO: 4103745 - DNA, 25 bp, Homo sapien
gggtcaggcaggctcgaagactgtg

SEQ ID NO: 4103746 - DNA, 25 bp, Homo sapien
gtggagcacaaatagagccacatac

SEQ ID NO: 4103747 - DNA, 25 bp, Homo sapien
ctgggaaaaggtaaaccaagcagat

SEQ ID NO: 4103748 - DNA, 25 bp, Homo sapien
ggaaaaggtaaaccaagcagataca

SEQ ID NO: 4103749 - DNA, 25 bp, Homo sapien
cagatacaatctcccaagacactga

SEQ ID NO: 4103750 - DNA, 25 bp, Homo sapien
taaaccaagcagatacaatctccca

SEQ ID NO: 4103751 - DNA, 25 bp, Homo sapien
aagagacctcaaagggtcttttctg

SEQ ID NO: 4103752 - DNA, 25 bp, Homo sapien
aaagggtcttttctgcgtcatatga

SEQ ID NO: 4103753 - DNA, 25 bp, Homo sapien
tgcgtcatatgacctagcacctctc

SEQ ID NO: 4103754 - DNA, 25 bp, Homo sapien
tttctgcgtcatatgacctagcacc

SEQ ID NO: 4103755 - DNA, 25 bp, Homo sapien
actcacagggaattaagagttttga

SEQ ID NO: 4103756 - DNA, 25 bp, Homo sapien
cagactcacagggaattaagagttt

SEQ ID NO: 4103757 - DNA, 25 bp, Homo sapien
aggtacatgactcagtctaatggga

SEQ ID NO: 4103758 - DNA, 25 bp, Homo sapien
caggtacatgactcagtctaatggg

SEQ ID NO: 4103759 - DNA, 25 bp, Homo sapien
tcaaggcaaactggcactttccgag

SEQ ID NO: 4103760 - DNA, 25 bp, Homo sapien
ctggcactttccgagaatgcatcat

SEQ ID NO: 4103761 - DNA, 25 bp, Homo sapien
ggcaaactggcactttccgagaatg

SEQ ID NO: 4103762 - DNA, 25 bp, Homo sapien
catcaaggcaaactggcactttccg

SEQ ID NO: 4103763 - DNA, 25 bp, Homo sapien
ttcccgcaccttccttgctcttaca

SEQ ID NO: 4103764 - DNA, 25 bp, Homo sapien
tgaataacagccctgtactcctgcg

SEQ ID NO: 4103765 - DNA, 25 bp, Homo sapien
ttgctcttacattgagcacaaacac

SEQ ID NO: 4103766 - DNA, 25 bp, Homo sapien
gaataacagccctgtactcctgcgc

SEQ ID NO: 4103767 - DNA, 25 bp, Homo sapien
gtgaggcaatcagcagcaggtaaag

SEQ ID NO: 4103768 - DNA, 25 bp, Homo sapien
gcggtgaacgaaagtgaggcaatca

SEQ ID NO: 4103769 - DNA, 25 bp, Homo sapien
tactgtatgtgctccttgttgctga

SEQ ID NO: 4103770 - DNA, 25 bp, Homo sapien
gctgcctcctatggtctgtgcggtg

SEQ ID NO: 4103771 - DNA, 25 bp, Homo sapien
cagtgcctcctattagtggtatcca

SEQ ID NO: 4103772 - DNA, 25 bp, Homo sapien
gatgcaaacttcaagggagcatgtg

SEQ ID NO: 4103773 - DNA, 25 bp, Homo sapien
ttccctatgtgatacagatcagagc

SEQ ID NO: 4103774 - DNA, 25 bp, Homo sapien
gcaagaagcagattcaaagagccat

SEQ ID NO: 4103775 - DNA, 25 bp, Homo sapien
tggttgagcggcattggcatcacct

SEQ ID NO: 4103776 - DNA, 25 bp, Homo sapien
caaactatggttatatggttgagcg

SEQ ID NO: 4103777 - DNA, 25 bp, Homo sapien
gggtaggcataattatactgagacc

SEQ ID NO: 4103778 - DNA, 25 bp, Homo sapien
caggccccaccttagttctactgta

SEQ ID NO: 4103779 - DNA, 25 bp, Homo sapien
ttctttgacacgagactatcactgc

SEQ ID NO: 4103780 - DNA, 25 bp, Homo sapien
gaaagcagtgtccatctgaacaggg

SEQ ID NO: 4103781 - DNA, 25 bp, Homo sapien
cattaaacatatgctcagcctttcc

SEQ ID NO: 4103782 - DNA, 25 bp, Homo sapien
tcagcctttccatcagtgttagaga

SEQ ID NO: 4103783 - DNA, 25 bp, Homo sapien
cccttccaattacacgcagttctga

SEQ ID NO: 4103784 - DNA, 25 bp, Homo sapien
tcagctatagagtaacatcgtattg

SEQ ID NO: 4103785 - DNA, 25 bp, Homo sapien
tcctccacgttcaaggaacagacta

SEQ ID NO: 4103786 - DNA, 25 bp, Homo sapien
tcgtattgccttgcacccttccaat

SEQ ID NO: 4103787 - DNA, 25 bp, Homo sapien
tgaaaccagattgaagttttctttc

SEQ ID NO: 4103788 - DNA, 25 bp, Homo sapien
cttgaaaccagattgaagttttctt

SEQ ID NO: 4103789 - DNA, 25 bp, Homo sapien
ccttgaaaccagattgaagttttct

SEQ ID NO: 4103790 - DNA, 25 bp, Homo sapien
caagtaggcacatggccaacagctc

SEQ ID NO: 4103791 - DNA, 25 bp, Homo sapien
tagtcatgagacaaaaggttggtcc

SEQ ID NO: 4103792 - DNA, 25 bp, Homo sapien
tatatgcagtccctcgtaagtgaaa

SEQ ID NO: 4103793 - DNA, 25 bp, Homo sapien
cttgtactggtagaggagctcctga

SEQ ID NO: 4103794 - DNA, 25 bp, Homo sapien
tttgacagatggatactctttatgg

SEQ ID NO: 4103795 - DNA, 25 bp, Homo sapien
gacagatggatactctttatggtaa

SEQ ID NO: 4103796 - DNA, 25 bp, Homo sapien
acagatggatactctttatggtaag

SEQ ID NO: 4103797 - DNA, 25 bp, Homo sapien
tgacagatggatactctttatggta

SEQ ID NO: 4103798 - DNA, 25 bp, Homo sapien
catcagccacgtgaggatgggtgac

SEQ ID NO: 4103799 - DNA, 25 bp, Homo sapien
gtgagacatcgagaatacaaagaag

SEQ ID NO: 4103800 - DNA, 25 bp, Homo sapien
gatgggactgcccacatgtaccatc

SEQ ID NO: 4103801 - DNA, 25 bp, Homo sapien
tctcagagggccaagtacatggccc

SEQ ID NO: 4103802 - DNA, 25 bp, Homo sapien
ccagaattgacatcatggaccgtga

SEQ ID NO: 4103803 - DNA, 25 bp, Homo sapien
gaagcccaggtatgcattcaggaag

SEQ ID NO: 4103804 - DNA, 25 bp, Homo sapien
tccagtggctcatagataaaatcaa

SEQ ID NO: 4103805 - DNA, 25 bp, Homo sapien
ggcaagagctcccactcggtgtctt

SEQ ID NO: 4103806 - DNA, 25 bp, Homo sapien
gattttaatcatggtggtcccttgc

SEQ ID NO: 4103807 - DNA, 25 bp, Homo sapien
gggcattagtctttcctcaatgatt

SEQ ID NO: 4103808 - DNA, 25 bp, Homo sapien
tcccaaggggcattagtctttcctc

SEQ ID NO: 4103809 - DNA, 25 bp, Homo sapien
taatcatggtggtcccttgcaaact

SEQ ID NO: 4103810 - DNA, 25 bp, Homo sapien
tcagtgatttaaacgctctaagtgg

SEQ ID NO: 4103811 - DNA, 25 bp, Homo sapien
gctctaagtgggccatttctctcac

SEQ ID NO: 4103812 - DNA, 25 bp, Homo sapien
gtgatttaaacgctctaagtgggcc

SEQ ID NO: 4103813 - DNA, 25 bp, Homo sapien
tctaagtgggccatttctctcacaa

SEQ ID NO: 4103814 - DNA, 25 bp, Homo sapien
cagtaggtatagctggcatgggact

SEQ ID NO: 4103815 - DNA, 25 bp, Homo sapien
gagtatgtattccaggctggttggc

SEQ ID NO: 4103816 - DNA, 25 bp, Homo sapien
gctggctcttggaaaggagtatgta

SEQ ID NO: 4103817 - DNA, 25 bp, Homo sapien
agccagggctcatggtcactcgtga

SEQ ID NO: 4103818 - DNA, 25 bp, Homo sapien
catccaattttcaaaatacagaaaa

SEQ ID NO: 4103819 - DNA, 25 bp, Homo sapien
tcatccaattttcaaaatacagaaa

SEQ ID NO: 4103820 - DNA, 25 bp, Homo sapien
cacttgggcactgtctcctcattag

SEQ ID NO: 4103821 - DNA, 25 bp, Homo sapien
tattaagtgggctacacttgggcac

SEQ ID NO: 4103822 - DNA, 25 bp, Homo sapien
ttgtctcccttattaagtgggctac

SEQ ID NO: 4103823 - DNA, 25 bp, Homo sapien
tcctcattagcctcagtggggtgaa

SEQ ID NO: 4103824 - DNA, 25 bp, Homo sapien
aacgtgattgatagaatttgccttc

SEQ ID NO: 4103825 - DNA, 25 bp, Homo sapien
tcatcaacgtgattgatagaatttg

SEQ ID NO: 4103826 - DNA, 25 bp, Homo sapien
ttaacagattgcattgaaagcctct

SEQ ID NO: 4103827 - DNA, 25 bp, Homo sapien
acagattgcattgaaagcctcttca

SEQ ID NO: 4103828 - DNA, 25 bp, Homo sapien
taaccaggctgtctgtagtgatgtc

SEQ ID NO: 4103829 - DNA, 25 bp, Homo sapien
tagcacaactccgaatccttgcaga

SEQ ID NO: 4103830 - DNA, 25 bp, Homo sapien
ttagttgctgctgtctccctcccag

SEQ ID NO: 4103831 - DNA, 25 bp, Homo sapien
tagtgatgtcaattgccagcgttcg

SEQ ID NO: 4103832 - DNA, 25 bp, Homo sapien
cacttgggatgaggcagtttgttct

SEQ ID NO: 4103833 - DNA, 25 bp, Homo sapien
agccttcccagatcttgcctggctt

SEQ ID NO: 4103834 - DNA, 25 bp, Homo sapien
cagctgccggggtccacttgggatg

SEQ ID NO: 4103835 - DNA, 25 bp, Homo sapien
cttcccagatcttgcctggcttccc

SEQ ID NO: 4103836 - DNA, 25 bp, Homo sapien
aaaagggcgaggagtgagatctgta

SEQ ID NO: 4103837 - DNA, 25 bp, Homo sapien
aaaaaaagggcgaggagtgagatct

SEQ ID NO: 4103838 - DNA, 25 bp, Homo sapien
aagggcgaggagtgagatctgtaga

SEQ ID NO: 4103839 - DNA, 25 bp, Homo sapien
ggcgaggagtgagatctgtagaaaa

SEQ ID NO: 4103840 - DNA, 25 bp, Homo sapien
gacagtcccggtgactgatgaggct

SEQ ID NO: 4103841 - DNA, 25 bp, Homo sapien
cgagcttcctcttaaaccactattc

SEQ ID NO: 4103842 - DNA, 25 bp, Homo sapien
gatgacagggtatagtgccccaggc

SEQ ID NO: 4103843 - DNA, 25 bp, Homo sapien
tatagtgccccaggccgagcttcct

SEQ ID NO: 4103844 - DNA, 25 bp, Homo sapien
ggaatctttatctccgaggcaggga

SEQ ID NO: 4103845 - DNA, 25 bp, Homo sapien
tggaatctttatctccgaggcaggg

SEQ ID NO: 4103846 - DNA, 25 bp, Homo sapien
gaatctttatctccgaggcagggaa

SEQ ID NO: 4103847 - DNA, 25 bp, Homo sapien
ttgtggctgatccaggcgtttgccc

SEQ ID NO: 4103848 - DNA, 25 bp, Homo sapien
tgtggctgatccaggcgtttgccca

SEQ ID NO: 4103849 - DNA, 25 bp, Homo sapien
gtggctgatccaggcgtttgcccat

SEQ ID NO: 4103850 - DNA, 25 bp, Homo sapien
taatgaggatagtagtaagtgtact

SEQ ID NO: 4103851 - DNA, 25 bp, Homo sapien
gagataatgaggatagtagtaagtg

SEQ ID NO: 4103852 - DNA, 25 bp, Homo sapien
gtttggagataatgaggatagtagt

SEQ ID NO: 4103853 - DNA, 25 bp, Homo sapien
cttggtttggagataatgaggatag

SEQ ID NO: 4103854 - DNA, 25 bp, Homo sapien
gagaaagctacaattccgggtttgc

SEQ ID NO: 4103855 - DNA, 25 bp, Homo sapien
gctttctaaaaaccgtgcccatctg

SEQ ID NO: 4103856 - DNA, 25 bp, Homo sapien
caagtgcagaacgataccacgctga

SEQ ID NO: 4103857 - DNA, 25 bp, Homo sapien
tgcccatctgcaaaagacgttcctg

SEQ ID NO: 4103858 - DNA, 25 bp, Homo sapien
tattccttaagcgaagtaatgttcc

SEQ ID NO: 4103859 - DNA, 25 bp, Homo sapien
taaaacttgctgattattctgggtg

SEQ ID NO: 4103860 - DNA, 25 bp, Homo sapien
ttatagatatgagtcagccactggg

SEQ ID NO: 4103861 - DNA, 25 bp, Homo sapien
tgggtgtcccttccaaacagcaaat

SEQ ID NO: 4103862 - DNA, 25 bp, Homo sapien
gaaattctgtttgggtccactagtc

SEQ ID NO: 4103863 - DNA, 25 bp, Homo sapien
acaatctgagtatcaccagccaaga

SEQ ID NO: 4103864 - DNA, 25 bp, Homo sapien
ggtccactagtctgaacctctttct

SEQ ID NO: 4103865 - DNA, 25 bp, Homo sapien
ctgagtatcaccagccaagaaattc

SEQ ID NO: 4103866 - DNA, 25 bp, Homo sapien
ttttaatgtggcaattctagtctcc

SEQ ID NO: 4103867 - DNA, 25 bp, Homo sapien
aatgtggcaattctagtctccttca

SEQ ID NO: 4103868 - DNA, 25 bp, Homo sapien
catgcataaccatttagctctgcac

SEQ ID NO: 4103869 - DNA, 25 bp, Homo sapien
aactcaactggtttagccaaacatg

SEQ ID NO: 4103870 - DNA, 25 bp, Homo sapien
gccaaaggtcaatccaatgtgtctg

SEQ ID NO: 4103871 - DNA, 25 bp, Homo sapien
tgagtgccaaaaggccacaatagtg

SEQ ID NO: 4103872 - DNA, 25 bp, Homo sapien
tattcatgtatgcaagatgtctcca

SEQ ID NO: 4103873 - DNA, 25 bp, Homo sapien
ggcacccagatctggaactcccagt

SEQ ID NO: 4103874 - DNA, 25 bp, Homo sapien
gacagcctcatcactaaaagctttg

SEQ ID NO: 4103875 - DNA, 25 bp, Homo sapien
tttggtaagactcacccctttgtgc

SEQ ID NO: 4103876 - DNA, 25 bp, Homo sapien
caaagctgattcattgcatctgctg

SEQ ID NO: 4103877 - DNA, 25 bp, Homo sapien
gctttgaggttcatcagactcttca

SEQ ID NO: 4103878 - DNA, 25 bp, Homo sapien
tacaccatactatacattgcagggc

SEQ ID NO: 4103879 - DNA, 25 bp, Homo sapien
cattcagagatcaaaactgtggtcc

SEQ ID NO: 4103880 - DNA, 25 bp, Homo sapien
ttaatgtgaaaaagataggacccca

SEQ ID NO: 4103881 - DNA, 25 bp, Homo sapien
ggtactagccaagtgacccatgtgc

SEQ ID NO: 4103882 - DNA, 25 bp, Homo sapien
gaattgtccccaaccatacaggtga

SEQ ID NO: 4103883 - DNA, 25 bp, Homo sapien
caagtaacgaatgctccctggtctg

SEQ ID NO: 4103884 - DNA, 25 bp, Homo sapien
cagggaggctcttctatagggacac

SEQ ID NO: 4103885 - DNA, 25 bp, Homo sapien
tactaccctggcatacaatttggcg

SEQ ID NO: 4103886 - DNA, 25 bp, Homo sapien
ggccacaccaccctaatatggtgac

SEQ ID NO: 4103887 - DNA, 25 bp, Homo sapien
tcctatatgggagttttaggatttc

SEQ ID NO: 4103888 - DNA, 25 bp, Homo sapien
ggctgttttgtgactggaaaactta

SEQ ID NO: 4103889 - DNA, 25 bp, Homo sapien
caccctaatatggtgacatttaaca

SEQ ID NO: 4103890 - DNA, 25 bp, Homo sapien
catggctagctctggagaccaatgc

SEQ ID NO: 4103891 - DNA, 25 bp, Homo sapien
gctagctctggagaccaatgctgtc

SEQ ID NO: 4103892 - DNA, 25 bp, Homo sapien
tggctagctctggagaccaatgctg

SEQ ID NO: 4103893 - DNA, 25 bp, Homo sapien
ggctagctctggagaccaatgctgt

SEQ ID NO: 4103894 - DNA, 25 bp, Homo sapien
tttgccgaaagtcaactgctaaact

SEQ ID NO: 4103895 - DNA, 25 bp, Homo sapien
tccttttgccgaaagtcaactgcta

SEQ ID NO: 4103896 - DNA, 25 bp, Homo sapien
ccttttgccgaaagtcaactgctaa

SEQ ID NO: 4103897 - DNA, 25 bp, Homo sapien
tcatcccgaattttccttttgccga

SEQ ID NO: 4103898 - DNA, 25 bp, Homo sapien
gctttgaccttcacagatgtacaaa

SEQ ID NO: 4103899 - DNA, 25 bp, Homo sapien
gttaccgccctcagctgaatatctc

SEQ ID NO: 4103900 - DNA, 25 bp, Homo sapien
taactcaggacttcagtagttaccg

SEQ ID NO: 4103901 - DNA, 25 bp, Homo sapien
tcagagaggacgagtgtgcccataa

SEQ ID NO: 4103902 - DNA, 25 bp, Homo sapien
taaatgacaatgcagtcaggagact

SEQ ID NO: 4103903 - DNA, 25 bp, Homo sapien
tgaaaatttctcacggccttaagtc

SEQ ID NO: 4103904 - DNA, 25 bp, Homo sapien
taaatttcaagtatgcagcatcccg

SEQ ID NO: 4103905 - DNA, 25 bp, Homo sapien
gataaagagaccctacactcagtaa

SEQ ID NO: 4103906 - DNA, 25 bp, Homo sapien
caaatgggaactaagcagtaagcca

SEQ ID NO: 4103907 - DNA, 25 bp, Homo sapien
cagtaagccagatgaggcataagtt

SEQ ID NO: 4103908 - DNA, 25 bp, Homo sapien
tatattttcccataaggaatcacct

SEQ ID NO: 4103909 - DNA, 25 bp, Homo sapien
gccagatgaggcataagttagaaaa

SEQ ID NO: 4103910 - DNA, 25 bp, Homo sapien
tgcccaaatgcatcgtaaaataaac

SEQ ID NO: 4103911 - DNA, 25 bp, Homo sapien
cataaagccttggattagagagtct

SEQ ID NO: 4103912 - DNA, 25 bp, Homo sapien
atttgtagtaaaggcactgagtcac

SEQ ID NO: 4103913 - DNA, 25 bp, Homo sapien
tattagatagtaaccagatcttgct

SEQ ID NO: 4103914 - DNA, 25 bp, Homo sapien
cacattgtatgttgctttcttaata

SEQ ID NO: 4103915 - DNA, 25 bp, Homo sapien
tagacactcacattgtatgttgctt

SEQ ID NO: 4103916 - DNA, 25 bp, Homo sapien
tatgttgctttcttaatatatccca

SEQ ID NO: 4103917 - DNA, 25 bp, Homo sapien
actcacacacgtagacactcacatt

SEQ ID NO: 4103918 - DNA, 25 bp, Homo sapien
tggagccactaaagaagaagtcaac

SEQ ID NO: 4103919 - DNA, 25 bp, Homo sapien
gctgctatagcaggaattgctcatt

SEQ ID NO: 4103920 - DNA, 25 bp, Homo sapien
tccccctgctttggtagaggctctg

SEQ ID NO: 4103921 - DNA, 25 bp, Homo sapien
gctcattaacttctaagaagtggag

SEQ ID NO: 4103922 - DNA, 25 bp, Homo sapien
aaatctcagtagttttctcttaact

SEQ ID NO: 4103923 - DNA, 25 bp, Homo sapien
agcaaccaatgctcaataagaggaa

SEQ ID NO: 4103924 - DNA, 25 bp, Homo sapien
gcagacagaggcaaattagagagaa

SEQ ID NO: 4103925 - DNA, 25 bp, Homo sapien
tgcccggcctgaaatagacaggtac

SEQ ID NO: 4103926 - DNA, 25 bp, Homo sapien
tctctagttaaagcaatagggcagg

SEQ ID NO: 4103927 - DNA, 25 bp, Homo sapien
gaggaatctggttcgacagccaaca

SEQ ID NO: 4103928 - DNA, 25 bp, Homo sapien
tagaagctgttcctatgctaggccc

SEQ ID NO: 4103929 - DNA, 25 bp, Homo sapien
aaaccaaccccatttctgtaggctg

SEQ ID NO: 4103930 - DNA, 25 bp, Homo sapien
ggctaaaacaatctacctggcttgg

SEQ ID NO: 4103931 - DNA, 25 bp, Homo sapien
ttagctactacaacacattgccagg

SEQ ID NO: 4103932 - DNA, 25 bp, Homo sapien
ggatagtcagagtccagatcgcaca

SEQ ID NO: 4103933 - DNA, 25 bp, Homo sapien
tatactggttgctcactatgggctg

SEQ ID NO: 4103934 - DNA, 25 bp, Homo sapien
atgggcgtggcttttgtctaagact

SEQ ID NO: 4103935 - DNA, 25 bp, Homo sapien
gactgtgactactttacaaattccc

SEQ ID NO: 4103936 - DNA, 25 bp, Homo sapien
gtgttaatgtccactacgcctccag

SEQ ID NO: 4103937 - DNA, 25 bp, Homo sapien
tacaaattccccatggtagccgtca

SEQ ID NO: 4103938 - DNA, 25 bp, Homo sapien
agcactctttaatgacatggttggc

SEQ ID NO: 4103939 - DNA, 25 bp, Homo sapien
catggttggccggagattctttgcc

SEQ ID NO: 4103940 - DNA, 25 bp, Homo sapien
gggtttctgccactatcgattccta

SEQ ID NO: 4103941 - DNA, 25 bp, Homo sapien
ccactatcgattcctagtctcttgg

SEQ ID NO: 4103942 - DNA, 25 bp, Homo sapien
ctgcctttgccatgcttgtattgga

SEQ ID NO: 4103943 - DNA, 25 bp, Homo sapien
ttgccatgcttgtattggataatat

SEQ ID NO: 4103944 - DNA, 25 bp, Homo sapien
caaattttttgagccaacattttat

SEQ ID NO: 4103945 - DNA, 25 bp, Homo sapien
cctttgccatgcttgtattggataa

SEQ ID NO: 4103946 - DNA, 25 bp, Homo sapien
caaatctggtttgtacactccacaa

SEQ ID NO: 4103947 - DNA, 25 bp, Homo sapien
cttccctggttgatagaaagatggc

SEQ ID NO: 4103948 - DNA, 25 bp, Homo sapien
caatattgcatcctacagccacatc

SEQ ID NO: 4103949 - DNA, 25 bp, Homo sapien
tggcaaagttagctatgcaagtggc

SEQ ID NO: 4103950 - DNA, 25 bp, Homo sapien
gtctgatctgccttatgattgggcc

SEQ ID NO: 4103951 - DNA, 25 bp, Homo sapien
tatgattgggcctaaagttggaggt

SEQ ID NO: 4103952 - DNA, 25 bp, Homo sapien
tcttccagtctgatctgccttatga

SEQ ID NO: 4103953 - DNA, 25 bp, Homo sapien
tttagaaatcccattgcttcttcca

SEQ ID NO: 4103954 - DNA, 25 bp, Homo sapien
gatgataccacataatccactcgag

SEQ ID NO: 4103955 - DNA, 25 bp, Homo sapien
catcagcccttttgggcccaggata

SEQ ID NO: 4103956 - DNA, 25 bp, Homo sapien
catcttcgatagtctgaggagcact

SEQ ID NO: 4103957 - DNA, 25 bp, Homo sapien
cccaggatactggtgtctgtacaga

SEQ ID NO: 4103958 - DNA, 25 bp, Homo sapien
tgattatcctacctagggcatggca

SEQ ID NO: 4103959 - DNA, 25 bp, Homo sapien
gaaaccaatgtattcagtttgcagg

SEQ ID NO: 4103960 - DNA, 25 bp, Homo sapien
tactttttcaccagaggtattggga

SEQ ID NO: 4103961 - DNA, 25 bp, Homo sapien
ccctaggcaagaagtgactaagcac

SEQ ID NO: 4103962 - DNA, 25 bp, Homo sapien
cagtgtaggtacttctcagaaaagc

SEQ ID NO: 4103963 - DNA, 25 bp, Homo sapien
tgtgaaaaagccctctagctcaggc

SEQ ID NO: 4103964 - DNA, 25 bp, Homo sapien
cttgctgtgcgacattaaaactgac

SEQ ID NO: 4103965 - DNA, 25 bp, Homo sapien
taaagtgtgcaagcatcctgactgc

SEQ ID NO: 4103966 - DNA, 25 bp, Homo sapien
tgtcacggaacgaacagatgggctt

SEQ ID NO: 4103967 - DNA, 25 bp, Homo sapien
gatgggcttccttgcctagactagc

SEQ ID NO: 4103968 - DNA, 25 bp, Homo sapien
tattcccacatgaggatctaggagg

SEQ ID NO: 4103969 - DNA, 25 bp, Homo sapien
tgatatttgttagaaggccagcagt

SEQ ID NO: 4103970 - DNA, 25 bp, Homo sapien
gcaacagctgacaagcactagctaa

SEQ ID NO: 4103971 - DNA, 25 bp, Homo sapien
ttgaaaaacacccagtgaataccat

SEQ ID NO: 4103972 - DNA, 25 bp, Homo sapien
gaaattgtatgttctctcctgtcaa

SEQ ID NO: 4103973 - DNA, 25 bp, Homo sapien
tgccaaaatatcaccgtgcccctgt

SEQ ID NO: 4103974 - DNA, 25 bp, Homo sapien
agaaactgcagggatgattcaacag

SEQ ID NO: 4103975 - DNA, 25 bp, Homo sapien
tgcagtaagaagcagacagctatcc

SEQ ID NO: 4103976 - DNA, 25 bp, Homo sapien
gaataaggaccatgtccctgatgca

SEQ ID NO: 4103977 - DNA, 25 bp, Homo sapien
tcccgcgcaaggagaaaatgatatc

SEQ ID NO: 4103978 - DNA, 25 bp, Homo sapien
tagggacagactctcgctctgttgc

SEQ ID NO: 4103979 - DNA, 25 bp, Homo sapien
agccaccgtgcctggccgataatag

SEQ ID NO: 4103980 - DNA, 25 bp, Homo sapien
ccaccgtgcctggccgataatagcc

SEQ ID NO: 4103981 - DNA, 25 bp, Homo sapien
tgagccaccgtgcctggccgataat

SEQ ID NO: 4103982 - DNA, 25 bp, Homo sapien
gccaactctggcttgtgtgatttaa

SEQ ID NO: 4103983 - DNA, 25 bp, Homo sapien
gataagctgatgacaagactctcag

SEQ ID NO: 4103984 - DNA, 25 bp, Homo sapien
gcactgagaataaaacctggcacac

SEQ ID NO: 4103985 - DNA, 25 bp, Homo sapien
taaggacatagatcctgcagacaca

SEQ ID NO: 4103986 - DNA, 25 bp, Homo sapien
tacaccctcctaagtagaatgaaga

SEQ ID NO: 4103987 - DNA, 25 bp, Homo sapien
gaatgaagaccaatggatgtagctt

SEQ ID NO: 4103988 - DNA, 25 bp, Homo sapien
gcagtgataagctacaatggatgta

SEQ ID NO: 4103989 - DNA, 25 bp, Homo sapien
ccagttgtgaaagtcatggcttcag

SEQ ID NO: 4103990 - DNA, 25 bp, Homo sapien
tgcctgctttcacgatgagctagaa

SEQ ID NO: 4103991 - DNA, 25 bp, Homo sapien
gggctagccaaccatgtcaatgtca

SEQ ID NO: 4103992 - DNA, 25 bp, Homo sapien
caggtcaccagaaactctttatgga

SEQ ID NO: 4103993 - DNA, 25 bp, Homo sapien
tgtttgtccaaggaatacctcagag

SEQ ID NO: 4103994 - DNA, 25 bp, Homo sapien
gtcagttctattgccggcatctggt

SEQ ID NO: 4103995 - DNA, 25 bp, Homo sapien
tggttttggagtagctctggactcc

SEQ ID NO: 4103996 - DNA, 25 bp, Homo sapien
cctgatgccaaactgcagtcagttc

SEQ ID NO: 4103997 - DNA, 25 bp, Homo sapien
gcaggatcctgaggcagttggtctg

SEQ ID NO: 4103998 - DNA, 25 bp, Homo sapien
acagcttgattaggtcctggtcagt

SEQ ID NO: 4103999 - DNA, 25 bp, Homo sapien
cgaatgtacaggttggttttactca

SEQ ID NO: 4104000 - DNA, 25 bp, Homo sapien
ggtgggaggcctcgaatgtacaggt

SEQ ID NO: 4104001 - DNA, 25 bp, Homo sapien
tactcaactgttccccgctgctgtt

SEQ ID NO: 4104002 - DNA, 25 bp, Homo sapien
gcccggccaggtctatgattcttaa

SEQ ID NO: 4104003 - DNA, 25 bp, Homo sapien
gtgttagccagaccgtgttagtcag

SEQ ID NO: 4104004 - DNA, 25 bp, Homo sapien
gccagaccgtgttagtcaggtctcg

SEQ ID NO: 4104005 - DNA, 25 bp, Homo sapien
tatgggaaggtgaacttaaatatgt

SEQ ID NO: 4104006 - DNA, 25 bp, Homo sapien
ataaattctgactgtgcccctgcca

SEQ ID NO: 4104007 - DNA, 25 bp, Homo sapien
cccatgaagctgaataaattctgac

SEQ ID NO: 4104008 - DNA, 25 bp, Homo sapien
caaaggttttttcagccatcaggtc

SEQ ID NO: 4104009 - DNA, 25 bp, Homo sapien
gccatcaggtcatacccatgaagct

SEQ ID NO: 4104010 - DNA, 25 bp, Homo sapien
cattctgtttcaagtggccttagca

SEQ ID NO: 4104011 - DNA, 25 bp, Homo sapien
tctgtttcaagtggccttagcagcg

SEQ ID NO: 4104012 - DNA, 25 bp, Homo sapien
tgcattctgtttcaagtggccttag

SEQ ID NO: 4104013 - DNA, 25 bp, Homo sapien
tttcaagtggccttagcagcggcat

SEQ ID NO: 4104014 - DNA, 25 bp, Homo sapien
agtggtaggtcccatgaaattgcta

SEQ ID NO: 4104015 - DNA, 25 bp, Homo sapien
aattgaaagcacagtggtaggtccc

SEQ ID NO: 4104016 - DNA, 25 bp, Homo sapien
gtggtaggtcccatgaaattgctag

SEQ ID NO: 4104017 - DNA, 25 bp, Homo sapien
aaagcacagtggtaggtcccatgaa

SEQ ID NO: 4104018 - DNA, 25 bp, Homo sapien
tgtcgccaaatagtaatcttggcat

SEQ ID NO: 4104019 - DNA, 25 bp, Homo sapien
gcttgtctggctgcttgtcgccaaa

SEQ ID NO: 4104020 - DNA, 25 bp, Homo sapien
ggattcgctgcaataaccagctgct

SEQ ID NO: 4104021 - DNA, 25 bp, Homo sapien
gcctcaggcacactgctcggattcg

SEQ ID NO: 4104022 - DNA, 25 bp, Homo sapien
cccagagaaagcctcaagggtttgg

SEQ ID NO: 4104023 - DNA, 25 bp, Homo sapien
ggaagagaacaaacccagagaaagc

SEQ ID NO: 4104024 - DNA, 25 bp, Homo sapien
cagagaaagcctcaagggtttggtt

SEQ ID NO: 4104025 - DNA, 25 bp, Homo sapien
ctggaagagaacaaacccagagaaa

SEQ ID NO: 4104026 - DNA, 25 bp, Homo sapien
tataagcatcctaattccagccaga

SEQ ID NO: 4104027 - DNA, 25 bp, Homo sapien
cagctcaggacgcatgcaggacaac

SEQ ID NO: 4104028 - DNA, 25 bp, Homo sapien
caagaaatctcttaactttacgtgg

SEQ ID NO: 4104029 - DNA, 25 bp, Homo sapien
ggacaacctgctggagacgaccctt

SEQ ID NO: 4104030 - DNA, 25 bp, Homo sapien
cactgtatcgaatcaaagaaaaggc

SEQ ID NO: 4104031 - DNA, 25 bp, Homo sapien
cctgaaactatgtatgtgactctgc

SEQ ID NO: 4104032 - DNA, 25 bp, Homo sapien
taaaagacacgattcatagaaagcg

SEQ ID NO: 4104033 - DNA, 25 bp, Homo sapien
tgtctgtgacctagatagccctgag

SEQ ID NO: 4104034 - DNA, 25 bp, Homo sapien
agtgccaggaagctaggatgcacct

SEQ ID NO: 4104035 - DNA, 25 bp, Homo sapien
tgttcaggtatcagttacagtgctt

SEQ ID NO: 4104036 - DNA, 25 bp, Homo sapien
tcagaggcttgtgggaatcttaccc

SEQ ID NO: 4104037 - DNA, 25 bp, Homo sapien
tggtaaagtgctctctagtgtgttc

SEQ ID NO: 4104038 - DNA, 25 bp, Homo sapien
caaaggtaagggtgagcaaggttct

SEQ ID NO: 4104039 - DNA, 25 bp, Homo sapien
tgtaatattaccaagatgcaggcca

SEQ ID NO: 4104040 - DNA, 25 bp, Homo sapien
cattcagtatacattgtccgccaga

SEQ ID NO: 4104041 - DNA, 25 bp, Homo sapien
tcaagagctcagtcctatacggtgt

SEQ ID NO: 4104042 - DNA, 25 bp, Homo sapien
gaccagtacgcctcttcgtagcact

SEQ ID NO: 4104043 - DNA, 25 bp, Homo sapien
aaagcttcttctagaccagtacgcc

SEQ ID NO: 4104044 - DNA, 25 bp, Homo sapien
tcgtagcactgtccctactatatgg

SEQ ID NO: 4104045 - DNA, 25 bp, Homo sapien
tgtccctactatatggtaagcgcat

SEQ ID NO: 4104046 - DNA, 25 bp, Homo sapien
tttgagatgcatgctaggtaaagct

SEQ ID NO: 4104047 - DNA, 25 bp, Homo sapien
aaatgtataagacgaagtacccaag

SEQ ID NO: 4104048 - DNA, 25 bp, Homo sapien
gtacccaagtgaaagagaccacagc

SEQ ID NO: 4104049 - DNA, 25 bp, Homo sapien
tggaactatactagggagcccattg

SEQ ID NO: 4104050 - DNA, 25 bp, Homo sapien
acttgttccttgaagcagcttatgg

SEQ ID NO: 4104051 - DNA, 25 bp, Homo sapien
ccgaatacgtaatggaaaacatagc

SEQ ID NO: 4104052 - DNA, 25 bp, Homo sapien
gcttatggcttcacaatatgtagca

SEQ ID NO: 4104053 - DNA, 25 bp, Homo sapien
gtgtatccaacatcaaccgaatacg

SEQ ID NO: 4104054 - DNA, 25 bp, Homo sapien
taatgggccactggttacagttcat

SEQ ID NO: 4104055 - DNA, 25 bp, Homo sapien
tacagttcatgtctgaactctcagg

SEQ ID NO: 4104056 - DNA, 25 bp, Homo sapien
ctctcaggatgacaaacaggtactt

SEQ ID NO: 4104057 - DNA, 25 bp, Homo sapien
ggatgacaaacaggtactttctgca

SEQ ID NO: 4104058 - DNA, 25 bp, Homo sapien
ctttgcactgatttgtgtttttgtc

SEQ ID NO: 4104059 - DNA, 25 bp, Homo sapien
ttgtcaagaattgcctttgtagata

SEQ ID NO: 4104060 - DNA, 25 bp, Homo sapien
gtttttgtcaagaattgcctttgta

SEQ ID NO: 4104061 - DNA, 25 bp, Homo sapien
tgcactgatttgtgtttttgtcaag

SEQ ID NO: 4104062 - DNA, 25 bp, Homo sapien
gatagcataggcaagatttcagggt

SEQ ID NO: 4104063 - DNA, 25 bp, Homo sapien
gaaccattaatcagatagcataggc

SEQ ID NO: 4104064 - DNA, 25 bp, Homo sapien
aagatttcagggtacggatgccctt

SEQ ID NO: 4104065 - DNA, 25 bp, Homo sapien
cagggtacggatgcccttacacata

SEQ ID NO: 4104066 - DNA, 25 bp, Homo sapien
gctcacccattctaccttgacttta

SEQ ID NO: 4104067 - DNA, 25 bp, Homo sapien
aggtgatatagtaatcctaataagg

SEQ ID NO: 4104068 - DNA, 25 bp, Homo sapien
tctcctctaacagtggtttgtcgat

SEQ ID NO: 4104069 - DNA, 25 bp, Homo sapien
tagataccgctgttacaccctcaca

SEQ ID NO: 4104070 - DNA, 25 bp, Homo sapien
tacggaatgaaagctgatgcagcca

SEQ ID NO: 4104071 - DNA, 25 bp, Homo sapien
tgtcatattatacggaatgaaagct

SEQ ID NO: 4104072 - DNA, 25 bp, Homo sapien
tgttgtcatattatacggaatgaaa

SEQ ID NO: 4104073 - DNA, 25 bp, Homo sapien
tattatacggaatgaaagctgatgc

SEQ ID NO: 4104074 - DNA, 25 bp, Homo sapien
tgcactaatgaaggttccaaagttc

SEQ ID NO: 4104075 - DNA, 25 bp, Homo sapien
gcactaatgaaggttccaaagttcc

SEQ ID NO: 4104076 - DNA, 25 bp, Homo sapien
atgcactaatgaaggttccaaagtt

SEQ ID NO: 4104077 - DNA, 25 bp, Homo sapien
gatgcactaatgaaggttccaaagt

SEQ ID NO: 4104078 - DNA, 25 bp, Homo sapien
catcaaagtggatattctttccgaa

SEQ ID NO: 4104079 - DNA, 25 bp, Homo sapien
tcaaagtggatattctttccgaact

SEQ ID NO: 4104080 - DNA, 25 bp, Homo sapien
aagtggatattctttccgaacttgg

SEQ ID NO: 4104081 - DNA, 25 bp, Homo sapien
caaagtggatattctttccgaactt

SEQ ID NO: 4104082 - DNA, 25 bp, Homo sapien
gcatcctcaatacttcggcaataat

SEQ ID NO: 4104083 - DNA, 25 bp, Homo sapien
gcaataatcctaactacctgggtcc

SEQ ID NO: 4104084 - DNA, 25 bp, Homo sapien
caatacttcggcaataatcctaact

SEQ ID NO: 4104085 - DNA, 25 bp, Homo sapien
ttcggcaataatcctaactacctgg

SEQ ID NO: 4104086 - DNA, 25 bp, Homo sapien
tgatggtcctatgagtagggtccat

SEQ ID NO: 4104087 - DNA, 25 bp, Homo sapien
ggtgaagtggttgagtaatattctc

SEQ ID NO: 4104088 - DNA, 25 bp, Homo sapien
ctttatgtatgatggtcctatgagt

SEQ ID NO: 4104089 - DNA, 25 bp, Homo sapien
gaagtggttgagtaatattctccaa

SEQ ID NO: 4104090 - DNA, 25 bp, Homo sapien
cctagatatcatggcctggtagaca

SEQ ID NO: 4104091 - DNA, 25 bp, Homo sapien
taggcagagtttagctgtccagcaa

SEQ ID NO: 4104092 - DNA, 25 bp, Homo sapien
ttgcttagaagaccagatgtgggcc

SEQ ID NO: 4104093 - DNA, 25 bp, Homo sapien
tattgtcactcgttgggtcctccta

SEQ ID NO: 4104094 - DNA, 25 bp, Homo sapien
aaatatctgagttccggccaactgc

SEQ ID NO: 4104095 - DNA, 25 bp, Homo sapien
taggactttacttgtttacatggca

SEQ ID NO: 4104096 - DNA, 25 bp, Homo sapien
ttgctcagcaaaaattcaggcccag

SEQ ID NO: 4104097 - DNA, 25 bp, Homo sapien
actagatctgaaaagaatggcctaa

SEQ ID NO: 4104098 - DNA, 25 bp, Homo sapien
tactatttcccagtggaatggccta

SEQ ID NO: 4104099 - DNA, 25 bp, Homo sapien
caaagtgcttatccccttgtctgaa

SEQ ID NO: 4104100 - DNA, 25 bp, Homo sapien
gatcctgtttatgagaaaacctctc

SEQ ID NO: 4104101 - DNA, 25 bp, Homo sapien
tataaaacgtgtatgcaaattgtgc

SEQ ID NO: 4104102 - DNA, 25 bp, Homo sapien
gcagaaacactttcataaagtatat

SEQ ID NO: 4104103 - DNA, 25 bp, Homo sapien
caccgtgccaggcagaaacactttc

SEQ ID NO: 4104104 - DNA, 25 bp, Homo sapien
gccaccgtgccaggcagaaacactt

SEQ ID NO: 4104105 - DNA, 25 bp, Homo sapien
gccaggcagaaacactttcataaag

SEQ ID NO: 4104106 - DNA, 25 bp, Homo sapien
tgctgcaacgtgacctttgtcccca

SEQ ID NO: 4104107 - DNA, 25 bp, Homo sapien
gagtttcaaagtagaatccagttgg

SEQ ID NO: 4104108 - DNA, 25 bp, Homo sapien
ccagttggtagtaaaggcttagctc

SEQ ID NO: 4104109 - DNA, 25 bp, Homo sapien
cttagctcaggatgttgctgcaacg

SEQ ID NO: 4104110 - DNA, 25 bp, Homo sapien
taagagccattccaacccatcagat

SEQ ID NO: 4104111 - DNA, 25 bp, Homo sapien
tattcactatcaggcctattcgcag

SEQ ID NO: 4104112 - DNA, 25 bp, Homo sapien
cagagctgcatcttgcattcaagga

SEQ ID NO: 4104113 - DNA, 25 bp, Homo sapien
gagatattgtgacagctcaggctct

SEQ ID NO: 4104114 - DNA, 25 bp, Homo sapien
cttccagctcttgatcgttttggtg

SEQ ID NO: 4104115 - DNA, 25 bp, Homo sapien
tcgttttggtgaatgtcagctgcca

SEQ ID NO: 4104116 - DNA, 25 bp, Homo sapien
cagctcttgatcgttttggtgaatg

SEQ ID NO: 4104117 - DNA, 25 bp, Homo sapien
cttgatcgttttggtgaatgtcagc

SEQ ID NO: 4104118 - DNA, 25 bp, Homo sapien
tatatgcacatgtgatggtacactg

SEQ ID NO: 4104119 - DNA, 25 bp, Homo sapien
gcctgggagatctattacaaaacaa

SEQ ID NO: 4104120 - DNA, 25 bp, Homo sapien
tacaaaacaaatcgagacattcata

SEQ ID NO: 4104121 - DNA, 25 bp, Homo sapien
gtttttctcaatctgagcctgggag

SEQ ID NO: 4104122 - DNA, 25 bp, Homo sapien
gacaacgctgattctaccactggac

SEQ ID NO: 4104123 - DNA, 25 bp, Homo sapien
cctccttgcagcttgacaacgctga

SEQ ID NO: 4104124 - DNA, 25 bp, Homo sapien
ttgtgtcccctccttgcagcttgac

SEQ ID NO: 4104125 - DNA, 25 bp, Homo sapien
gcagcttgacaacgctgattctacc

SEQ ID NO: 4104126 - DNA, 25 bp, Homo sapien
catttgggcttagcaatactctgtg

SEQ ID NO: 4104127 - DNA, 25 bp, Homo sapien
tccatttgggcttagcaatactctg

SEQ ID NO: 4104128 - DNA, 25 bp, Homo sapien
atttgggcttagcaatactctgtgg

SEQ ID NO: 4104129 - DNA, 25 bp, Homo sapien
cttccatttgggcttagcaatactc

SEQ ID NO: 4104130 - DNA, 25 bp, Homo sapien
tgctttccggtaactgctaaaatcc

SEQ ID NO: 4104131 - DNA, 25 bp, Homo sapien
taagggagattagttcagcttcagc

SEQ ID NO: 4104132 - DNA, 25 bp, Homo sapien
aagtggctgtaagcccacccgtctc

SEQ ID NO: 4104133 - DNA, 25 bp, Homo sapien
tacataattaagcttggcagcaggt

SEQ ID NO: 4104134 - DNA, 25 bp, Homo sapien
tctgtgcctgcacgccatttgcctt

SEQ ID NO: 4104135 - DNA, 25 bp, Homo sapien
taccgctttctgtgcggctgcagga

SEQ ID NO: 4104136 - DNA, 25 bp, Homo sapien
catttgccttgagagatgctaccgc

SEQ ID NO: 4104137 - DNA, 25 bp, Homo sapien
gagatgctaccgctttctgtgcggc

SEQ ID NO: 4104138 - DNA, 25 bp, Homo sapien
cagatatggtctgtatcagttcact

SEQ ID NO: 4104139 - DNA, 25 bp, Homo sapien
tgtcataaaggacaatgagttcacc

SEQ ID NO: 4104140 - DNA, 25 bp, Homo sapien
gacttgcaacaaaaggttaacagat

SEQ ID NO: 4104141 - DNA, 25 bp, Homo sapien
caaagtaatctatatgggaagtgac

SEQ ID NO: 4104142 - DNA, 25 bp, Homo sapien
tcataatggttccccagtagttata

SEQ ID NO: 4104143 - DNA, 25 bp, Homo sapien
ggattcaaggccaagtttacttctc

SEQ ID NO: 4104144 - DNA, 25 bp, Homo sapien
attaatcaattaccacttcctgggt

SEQ ID NO: 4104145 - DNA, 25 bp, Homo sapien
cacttcctgggtaacttgctattgg

SEQ ID NO: 4104146 - DNA, 25 bp, Homo sapien
ctatgctcctaaccactatgtatta

SEQ ID NO: 4104147 - DNA, 25 bp, Homo sapien
caagaaagcgggaaatcatatgact

SEQ ID NO: 4104148 - DNA, 25 bp, Homo sapien
gtatgtatgcatgtcacctttattg

SEQ ID NO: 4104149 - DNA, 25 bp, Homo sapien
tgtcatggatgctggatagccaagg

SEQ ID NO: 4104150 - DNA, 25 bp, Homo sapien
gcaaagaagtcgaaacactcatcat

SEQ ID NO: 4104151 - DNA, 25 bp, Homo sapien
tctacattgcgggaattcagacaga

SEQ ID NO: 4104152 - DNA, 25 bp, Homo sapien
gagataaccgagtcaccagatgcaa

SEQ ID NO: 4104153 - DNA, 25 bp, Homo sapien
caatcacagctttgaggtgggttct

SEQ ID NO: 4104154 - DNA, 25 bp, Homo sapien
tgggcctgttggagataaccgagtc

SEQ ID NO: 4104155 - DNA, 25 bp, Homo sapien
tgagattactcaaggactggctggt

SEQ ID NO: 4104156 - DNA, 25 bp, Homo sapien
atttggaatcgacagaaagcaaata

SEQ ID NO: 4104157 - DNA, 25 bp, Homo sapien
gatgtctgttaagcctgagattact

SEQ ID NO: 4104158 - DNA, 25 bp, Homo sapien
catgactgtttaatatgtagaccca

SEQ ID NO: 4104159 - DNA, 25 bp, Homo sapien
ccctgagagggagtgacttcttttc

SEQ ID NO: 4104160 - DNA, 25 bp, Homo sapien
tctgcggacatttcctctagaataa

SEQ ID NO: 4104161 - DNA, 25 bp, Homo sapien
ggcagtctggtagtacacctgatga

SEQ ID NO: 4104162 - DNA, 25 bp, Homo sapien
tttgggaactgtaatggcagtctgg

SEQ ID NO: 4104163 - DNA, 25 bp, Homo sapien
tgggacacttagtctcttttgtgat

SEQ ID NO: 4104164 - DNA, 25 bp, Homo sapien
tgtgattgcttaactgagatttact

SEQ ID NO: 4104165 - DNA, 25 bp, Homo sapien
tctggtctcaatctggttttctgcc

SEQ ID NO: 4104166 - DNA, 25 bp, Homo sapien
tacattatgcctttcaagctacttg

SEQ ID NO: 4104167 - DNA, 25 bp, Homo sapien
cctggccgatatttcttataggttg

SEQ ID NO: 4104168 - DNA, 25 bp, Homo sapien
ctggccgatatttcttataggttga

SEQ ID NO: 4104169 - DNA, 25 bp, Homo sapien
cacctggccgatatttcttataggt

SEQ ID NO: 4104170 - DNA, 25 bp, Homo sapien
gccgatatttcttataggttgaaaa

SEQ ID NO: 4104171 - DNA, 25 bp, Homo sapien
ccagcagtcatacaaccaatagttt

SEQ ID NO: 4104172 - DNA, 25 bp, Homo sapien
gcagtcatacaaccaatagttttct

SEQ ID NO: 4104173 - DNA, 25 bp, Homo sapien
tgtaacaccagcagtcatacaacca

SEQ ID NO: 4104174 - DNA, 25 bp, Homo sapien
taacaccagcagtcatacaaccaat

SEQ ID NO: 4104175 - DNA, 25 bp, Homo sapien
agagctcagcaagcgtggctcattg

SEQ ID NO: 4104176 - DNA, 25 bp, Homo sapien
ttgtccttgggatctaactgccaat

SEQ ID NO: 4104177 - DNA, 25 bp, Homo sapien
tgggatctaactgccaatagagagc

SEQ ID NO: 4104178 - DNA, 25 bp, Homo sapien
tgccaatagagagcacattcactat

SEQ ID NO: 4104179 - DNA, 25 bp, Homo sapien
actgaatttgcactgaagctggctt

SEQ ID NO: 4104180 - DNA, 25 bp, Homo sapien
attttgccctactgaatttgcactg

SEQ ID NO: 4104181 - DNA, 25 bp, Homo sapien
ttagcttaatgtttcttcattttgc

SEQ ID NO: 4104182 - DNA, 25 bp, Homo sapien
gaatttgcactgaagctggcttcct

SEQ ID NO: 4104183 - DNA, 25 bp, Homo sapien
tctgcccaccatgcttgccatgttt

SEQ ID NO: 4104184 - DNA, 25 bp, Homo sapien
gcatttacgcttcaagttacaaaca

SEQ ID NO: 4104185 - DNA, 25 bp, Homo sapien
tatatttacagagaacatgagatac

SEQ ID NO: 4104186 - DNA, 25 bp, Homo sapien
gttattattggctacagatacccta

SEQ ID NO: 4104187 - DNA, 25 bp, Homo sapien
tgattggaatgtggtcagtcctttc

SEQ ID NO: 4104188 - DNA, 25 bp, Homo sapien
gattggaatgtggtcagtcctttca

SEQ ID NO: 4104189 - DNA, 25 bp, Homo sapien
attggaatgtggtcagtcctttcaa

SEQ ID NO: 4104190 - DNA, 25 bp, Homo sapien
tggaatgtggtcagtcctttcaatc

SEQ ID NO: 4104191 - DNA, 25 bp, Homo sapien
tgaaatagtaactccaaaaatgatg

SEQ ID NO: 4104192 - DNA, 25 bp, Homo sapien
tccttttgccaattgtacagctgct

SEQ ID NO: 4104193 - DNA, 25 bp, Homo sapien
gggccttttgggaatcattagatca

SEQ ID NO: 4104194 - DNA, 25 bp, Homo sapien
gatcataaaggcagaaccctcatat

SEQ ID NO: 4104195 - DNA, 25 bp, Homo sapien
tgccagtccaatactgcagttgtca

SEQ ID NO: 4104196 - DNA, 25 bp, Homo sapien
tcattgaggtctgtgcttcctggtc

SEQ ID NO: 4104197 - DNA, 25 bp, Homo sapien
cattgacagtgccatactgccagtc

SEQ ID NO: 4104198 - DNA, 25 bp, Homo sapien
tacatatggatcaacagtctggacc

SEQ ID NO: 4104199 - DNA, 25 bp, Homo sapien
tacaagaagctagaaaggatcaagg

SEQ ID NO: 4104200 - DNA, 25 bp, Homo sapien
ccataggcctggacttgagaaagaa

SEQ ID NO: 4104201 - DNA, 25 bp, Homo sapien
tgagagtcagtcttatccataggcc

SEQ ID NO: 4104202 - DNA, 25 bp, Homo sapien
caaaatggtcctgcaagaagtggca

SEQ ID NO: 4104203 - DNA, 25 bp, Homo sapien
ttacaacagggacctctaaatgact

SEQ ID NO: 4104204 - DNA, 25 bp, Homo sapien
cagggacctctaaatgactcctttt

SEQ ID NO: 4104205 - DNA, 25 bp, Homo sapien
cagccgaatttgatcaggctgctgt

SEQ ID NO: 4104206 - DNA, 25 bp, Homo sapien
tatactgtgagcagaatacagccga

SEQ ID NO: 4104207 - DNA, 25 bp, Homo sapien
gctgcacggtaggtattttccaaaa

SEQ ID NO: 4104208 - DNA, 25 bp, Homo sapien
aataatcaccacttgttccagcaga

SEQ ID NO: 4104209 - DNA, 25 bp, Homo sapien
gaaattgacaacagggtcctcacca

SEQ ID NO: 4104210 - DNA, 25 bp, Homo sapien
tatcagacattcctcatagacgccc

SEQ ID NO: 4104211 - DNA, 25 bp, Homo sapien
tttactgccacaacaaagtagcatg

SEQ ID NO: 4104212 - DNA, 25 bp, Homo sapien
tacaaaatacaatgaggctctctac

SEQ ID NO: 4104213 - DNA, 25 bp, Homo sapien
acttggtattatgctgtcaggagac

SEQ ID NO: 4104214 - DNA, 25 bp, Homo sapien
aagtagcatgcttgaaccaggcatc

SEQ ID NO: 4104215 - DNA, 25 bp, Homo sapien
gatctgctgaccttgtgaaccgcct

SEQ ID NO: 4104216 - DNA, 25 bp, Homo sapien
actgcaaaagctccatctccctggt

SEQ ID NO: 4104217 - DNA, 25 bp, Homo sapien
tctccctggttcacgccatcctcct

SEQ ID NO: 4104218 - DNA, 25 bp, Homo sapien
tgaaccgcctgcctcggcgtcccaa

SEQ ID NO: 4104219 - DNA, 25 bp, Homo sapien
tgagaaaggcctagaattactccca

SEQ ID NO: 4104220 - DNA, 25 bp, Homo sapien
cactatgaggctcatgaagcccgtg

SEQ ID NO: 4104221 - DNA, 25 bp, Homo sapien
tgaggctcatgaagcccgtgcaggc

SEQ ID NO: 4104222 - DNA, 25 bp, Homo sapien
gagaaaggcctagaattactcccat

SEQ ID NO: 4104223 - DNA, 25 bp, Homo sapien
tatggatccgtgaatgtacccttcc

SEQ ID NO: 4104224 - DNA, 25 bp, Homo sapien
ccctgcagactgtgttacgctcctt

SEQ ID NO: 4104225 - DNA, 25 bp, Homo sapien
aaaatggcccacaaacaacggcgct

SEQ ID NO: 4104226 - DNA, 25 bp, Homo sapien
aatttgtccctgcacaagaaataag

SEQ ID NO: 4104227 - DNA, 25 bp, Homo sapien
ggattcagactaaccaagctgtgat

SEQ ID NO: 4104228 - DNA, 25 bp, Homo sapien
ggtagaagcggcatactgccactga

SEQ ID NO: 4104229 - DNA, 25 bp, Homo sapien
aatgctcccactccctgaatgtgtg

SEQ ID NO: 4104230 - DNA, 25 bp, Homo sapien
ttgctagaggctatttgggaagccc

SEQ ID NO: 4104231 - DNA, 25 bp, Homo sapien
gacatcatcaagacagaatcgcagg

SEQ ID NO: 4104232 - DNA, 25 bp, Homo sapien
tatctaacacgcattccgaatgagg

SEQ ID NO: 4104233 - DNA, 25 bp, Homo sapien
ttaaagacaacaggcagcagtatcc

SEQ ID NO: 4104234 - DNA, 25 bp, Homo sapien
aaatgagcctttggctggcatggca

SEQ ID NO: 4104235 - DNA, 25 bp, Homo sapien
cctgacaaggtttatgaagacacgg

SEQ ID NO: 4104236 - DNA, 25 bp, Homo sapien
tatcactgcgtgtctagccttaggc

SEQ ID NO: 4104237 - DNA, 25 bp, Homo sapien
tcaacgttctgtctatagaggcagc

SEQ ID NO: 4104238 - DNA, 25 bp, Homo sapien
gaacagttaccacctagaagcccat

SEQ ID NO: 4104239 - DNA, 25 bp, Homo sapien
cctgctccacgagaagtctttaggg

SEQ ID NO: 4104240 - DNA, 25 bp, Homo sapien
tatgagaccaccgtcacatatgtaa

SEQ ID NO: 4104241 - DNA, 25 bp, Homo sapien
tccacgcatatacagggtcaggttc

SEQ ID NO: 4104242 - DNA, 25 bp, Homo sapien
cattgtgctgtgatgttatggcaac

SEQ ID NO: 4104243 - DNA, 25 bp, Homo sapien
ggcataatctgctatacagctgggc

SEQ ID NO: 4104244 - DNA, 25 bp, Homo sapien
tgtgagggcctagaacatcgttgta

SEQ ID NO: 4104245 - DNA, 25 bp, Homo sapien
gagtgtacttagacacacctagacg

SEQ ID NO: 4104246 - DNA, 25 bp, Homo sapien
cagagatctggtctaacacatgcat

SEQ ID NO: 4104247 - DNA, 25 bp, Homo sapien
ctcaagtattttgcatcacgaagag

SEQ ID NO: 4104248 - DNA, 25 bp, Homo sapien
gccaggaatcgaatgattacattca

SEQ ID NO: 4104249 - DNA, 25 bp, Homo sapien
ttgccaggaatcgaatgattacatt

SEQ ID NO: 4104250 - DNA, 25 bp, Homo sapien
gcatcacgaagagtaattttttcct

SEQ ID NO: 4104251 - DNA, 25 bp, Homo sapien
cagtgattaattgtatcgttcaaag

SEQ ID NO: 4104252 - DNA, 25 bp, Homo sapien
tgattggttacttcttactcgattt

SEQ ID NO: 4104253 - DNA, 25 bp, Homo sapien
gtatcctatccatgaagaagctaat

SEQ ID NO: 4104254 - DNA, 25 bp, Homo sapien
tcttggtgaacatctcctatcctta

SEQ ID NO: 4104255 - DNA, 25 bp, Homo sapien
tgtaaaatatggatgcaagcagaga

SEQ ID NO: 4104256 - DNA, 25 bp, Homo sapien
catagtgcttccttacaaagcaagc

SEQ ID NO: 4104257 - DNA, 25 bp, Homo sapien
aatatggatgcaagcagagatttct

SEQ ID NO: 4104258 - DNA, 25 bp, Homo sapien
tctttcttagactaataactgagaa

SEQ ID NO: 4104259 - DNA, 25 bp, Homo sapien
catttaggacagtcacttgcacaga

SEQ ID NO: 4104260 - DNA, 25 bp, Homo sapien
tcccaagtaacccagaacagagtaa

SEQ ID NO: 4104261 - DNA, 25 bp, Homo sapien
tgtgaccacctacatccatatacgg

SEQ ID NO: 4104262 - DNA, 25 bp, Homo sapien
taaagcagatttcctcttatgacga

SEQ ID NO: 4104263 - DNA, 25 bp, Homo sapien
tgaggcaactgcgactttgagaggt

SEQ ID NO: 4104264 - DNA, 25 bp, Homo sapien
tataaaacaggcagtagtatcaccg

SEQ ID NO: 4104265 - DNA, 25 bp, Homo sapien
ccttggaacaccatgcggtaacagt

SEQ ID NO: 4104266 - DNA, 25 bp, Homo sapien
tgtgtaagggccaaaatgcatctgt

SEQ ID NO: 4104267 - DNA, 25 bp, Homo sapien
cctgcaatgtggccgtaatggttgg

SEQ ID NO: 4104268 - DNA, 25 bp, Homo sapien
caatgtggccgtaatggttggtaag

SEQ ID NO: 4104269 - DNA, 25 bp, Homo sapien
taggattgttattcaccgtggacat

SEQ ID NO: 4104270 - DNA, 25 bp, Homo sapien
tgcaatgtggccgtaatggttggta

SEQ ID NO: 4104271 - DNA, 25 bp, Homo sapien
tctttggtagacagctctcccctct

SEQ ID NO: 4104272 - DNA, 25 bp, Homo sapien
gatgtctttggtagacagctctccc

SEQ ID NO: 4104273 - DNA, 25 bp, Homo sapien
cttggagatgtctttggtagacagc

SEQ ID NO: 4104274 - DNA, 25 bp, Homo sapien
gagatgtctttggtagacagctctc

SEQ ID NO: 4104275 - DNA, 25 bp, Homo sapien
caccagttatcagccctgatgtgat

SEQ ID NO: 4104276 - DNA, 25 bp, Homo sapien
gctcagtatcaccagttatcagccc

SEQ ID NO: 4104277 - DNA, 25 bp, Homo sapien
gtatcaccagttatcagccctgatg

SEQ ID NO: 4104278 - DNA, 25 bp, Homo sapien
cagttatcagccctgatgtgatggt

SEQ ID NO: 4104279 - DNA, 25 bp, Homo sapien
ttttctggtgatagttactgcacct

SEQ ID NO: 4104280 - DNA, 25 bp, Homo sapien
tactgcacctctagatgagaactga

SEQ ID NO: 4104281 - DNA, 25 bp, Homo sapien
gatagttactgcacctctagatgag

SEQ ID NO: 4104282 - DNA, 25 bp, Homo sapien
gatgagaactgatggaagcctgctg

SEQ ID NO: 4104283 - DNA, 25 bp, Homo sapien
aaatgctcttgaaagtgctttcact

SEQ ID NO: 4104284 - DNA, 25 bp, Homo sapien
agtaacaaatatggtaagttctgag

SEQ ID NO: 4104285 - DNA, 25 bp, Homo sapien
aactgcaatctagataataatctcc

SEQ ID NO: 4104286 - DNA, 25 bp, Homo sapien
tgtgcagaatgtttatcatagacaa

SEQ ID NO: 4104287 - DNA, 25 bp, Homo sapien
gtttcagcatattctcaagctcctg

SEQ ID NO: 4104288 - DNA, 25 bp, Homo sapien
tgacatgtccaaagggtttcagcat

SEQ ID NO: 4104289 - DNA, 25 bp, Homo sapien
tgtataggtttgttgggtcttgctc

SEQ ID NO: 4104290 - DNA, 25 bp, Homo sapien
gctcctgctcatccatagaaatggg

SEQ ID NO: 4104291 - DNA, 25 bp, Homo sapien
tcagaaactttaagagtgggcccag

SEQ ID NO: 4104292 - DNA, 25 bp, Homo sapien
gagacagagtcaaagccaggaaggc

SEQ ID NO: 4104293 - DNA, 25 bp, Homo sapien
gaaaggtgtcacaagaagccagcta

SEQ ID NO: 4104294 - DNA, 25 bp, Homo sapien
tcttacactatcgtgcgggctggag

SEQ ID NO: 4104295 - DNA, 25 bp, Homo sapien
tatctaacgttgtaagccagtcatc

SEQ ID NO: 4104296 - DNA, 25 bp, Homo sapien
taacatgcagaggtagaaacgtact

SEQ ID NO: 4104297 - DNA, 25 bp, Homo sapien
taacagccgatacaattcccacagg

SEQ ID NO: 4104298 - DNA, 25 bp, Homo sapien
tcccacaggcaaattacgtcagatg

SEQ ID NO: 4104299 - DNA, 25 bp, Homo sapien
aaaatgttgaattaccacttcacat

SEQ ID NO: 4104300 - DNA, 25 bp, Homo sapien
taaaatgttgaattaccacttcaca

SEQ ID NO: 4104301 - DNA, 25 bp, Homo sapien
tgttgaattaccacttcacattttt

SEQ ID NO: 4104302 - DNA, 25 bp, Homo sapien
aatgttgaattaccacttcacattt

SEQ ID NO: 4104303 - DNA, 25 bp, Homo sapien
tcatagttgatggtttctgcattca

SEQ ID NO: 4104304 - DNA, 25 bp, Homo sapien
atcatagttgatggtttctgcattc

SEQ ID NO: 4104305 - DNA, 25 bp, Homo sapien
tccttatagactggtccgagttcaa

SEQ ID NO: 4104306 - DNA, 25 bp, Homo sapien
ttatagactggtccgagttcaaagc

SEQ ID NO: 4104307 - DNA, 25 bp, Homo sapien
ctattccttatagactggtccgagt

SEQ ID NO: 4104308 - DNA, 25 bp, Homo sapien
tagactggtccgagttcaaagccat

SEQ ID NO: 4104309 - DNA, 25 bp, Homo sapien
tcagtgagtttcagaggattaagcc

SEQ ID NO: 4104310 - DNA, 25 bp, Homo sapien
cagcccaaggtacaacaatatgtgc

SEQ ID NO: 4104311 - DNA, 25 bp, Homo sapien
ttaagccaaagaatgaagggccctg

SEQ ID NO: 4104312 - DNA, 25 bp, Homo sapien
tctgatctagatagtctggctccag

SEQ ID NO: 4104313 - DNA, 25 bp, Homo sapien
tgtgggcttccaggcgtgccccagg

SEQ ID NO: 4104314 - DNA, 25 bp, Homo sapien
gccccagtcttcagcgattacctga

SEQ ID NO: 4104315 - DNA, 25 bp, Homo sapien
ggtcatggaactgtgaagtggagca

SEQ ID NO: 4104316 - DNA, 25 bp, Homo sapien
ccaggatggtagctgagccagtaca

SEQ ID NO: 4104317 - DNA, 25 bp, Homo sapien
aagtatcatgactttttcaattcca

SEQ ID NO: 4104318 - DNA, 25 bp, Homo sapien
cagggattgacatgtagagcccaaa

SEQ ID NO: 4104319 - DNA, 25 bp, Homo sapien
aattccacagggattgacatgtaga

SEQ ID NO: 4104320 - DNA, 25 bp, Homo sapien
tatcatgactttttcaattccacag

SEQ ID NO: 4104321 - DNA, 25 bp, Homo sapien
gagggattgccttcaacttctaacc

SEQ ID NO: 4104322 - DNA, 25 bp, Homo sapien
tccttgagtcctcgaagtccattat

SEQ ID NO: 4104323 - DNA, 25 bp, Homo sapien
ggagtacaggtgcttttcggttaca

SEQ ID NO: 4104324 - DNA, 25 bp, Homo sapien
tctaaccagatgttactccagagcc

SEQ ID NO: 4104325 - DNA, 25 bp, Homo sapien
gaggaaatcaaggtcgcattggaag

SEQ ID NO: 4104326 - DNA, 25 bp, Homo sapien
tgttggttgactaataaatggtgca

SEQ ID NO: 4104327 - DNA, 25 bp, Homo sapien
tatcccaattcagtctccgtggagg

SEQ ID NO: 4104328 - DNA, 25 bp, Homo sapien
ttaggccaaataaggagtcacatta

SEQ ID NO: 4104329 - DNA, 25 bp, Homo sapien
tccttagtgtagtgaaggtttgcca

SEQ ID NO: 4104330 - DNA, 25 bp, Homo sapien
tcacataggaatttatcactctaaa

SEQ ID NO: 4104331 - DNA, 25 bp, Homo sapien
ccttagaaatgattttgctgcatcc

SEQ ID NO: 4104332 - DNA, 25 bp, Homo sapien
tgggcttagtttgttatgtttctag

SEQ ID NO: 4104333 - DNA, 25 bp, Homo sapien
caacagtcctcccagtgatcctccc

SEQ ID NO: 4104334 - DNA, 25 bp, Homo sapien
tttaagtggcctatttcagtattta

SEQ ID NO: 4104335 - DNA, 25 bp, Homo sapien
attcagaaggaataattagacttac

SEQ ID NO: 4104336 - DNA, 25 bp, Homo sapien
ggaataattagacttacagctacca

SEQ ID NO: 4104337 - DNA, 25 bp, Homo sapien
catagagtccccacatttccacaag

SEQ ID NO: 4104338 - DNA, 25 bp, Homo sapien
taactctgatttcaagtgaaactca

SEQ ID NO: 4104339 - DNA, 25 bp, Homo sapien
gaaagaattccaagtcataatccca

SEQ ID NO: 4104340 - DNA, 25 bp, Homo sapien
gaaactcatgttaaccaccctagga

SEQ ID NO: 4104341 - DNA, 25 bp, Homo sapien
tcaggctcatgtttacgcctatcct

SEQ ID NO: 4104342 - DNA, 25 bp, Homo sapien
tatcctttaggccaaaaactggtga

SEQ ID NO: 4104343 - DNA, 25 bp, Homo sapien
tatttataagtgtcaggctcatgtt

SEQ ID NO: 4104344 - DNA, 25 bp, Homo sapien
ccaaaaactggtgagggaatataca

SEQ ID NO: 4104345 - DNA, 25 bp, Homo sapien
tctttaccatcagcaggaataggga

SEQ ID NO: 4104346 - DNA, 25 bp, Homo sapien
tcagcaggaatagggaatgaagttt

SEQ ID NO: 4104347 - DNA, 25 bp, Homo sapien
tagggaatgaagtttgagcagttct

SEQ ID NO: 4104348 - DNA, 25 bp, Homo sapien
gcagttcttatgactgactttatca

SEQ ID NO: 4104349 - DNA, 25 bp, Homo sapien
gatcgaacttgattgtcctcttgga

SEQ ID NO: 4104350 - DNA, 25 bp, Homo sapien
ttacggctgtaagaacacattgacc

SEQ ID NO: 4104351 - DNA, 25 bp, Homo sapien
gaccagtggctacagaaaattctgg

SEQ ID NO: 4104352 - DNA, 25 bp, Homo sapien
gacccaatatggcatgagatcgaac

SEQ ID NO: 4104353 - DNA, 25 bp, Homo sapien
gaattggcccatacataagaacttt

SEQ ID NO: 4104354 - DNA, 25 bp, Homo sapien
cctacagtccatgcatgatgggcca

SEQ ID NO: 4104355 - DNA, 25 bp, Homo sapien
gtttgcactgtgtccatataagcag

SEQ ID NO: 4104356 - DNA, 25 bp, Homo sapien
ccagatttatttgtgagtcctacag

SEQ ID NO: 4104357 - DNA, 25 bp, Homo sapien
cacacacctgcagttgtaacaatac

SEQ ID NO: 4104358 - DNA, 25 bp, Homo sapien
tctttactacaactctatgaggcaa

SEQ ID NO: 4104359 - DNA, 25 bp, Homo sapien
tcagaatggtttagtggctcgctac

SEQ ID NO: 4104360 - DNA, 25 bp, Homo sapien
tatctgctaggtatcatccttgagg

SEQ ID NO: 4104361 - DNA, 25 bp, Homo sapien
gcttcttttgtcctccatcagcgaa

SEQ ID NO: 4104362 - DNA, 25 bp, Homo sapien
tttgtcctccatcagcgaatttgca

SEQ ID NO: 4104363 - DNA, 25 bp, Homo sapien
tctgtcgcttcttttgtcctccatc

SEQ ID NO: 4104364 - DNA, 25 bp, Homo sapien
ctccatcagcgaatttgcacagcaa

SEQ ID NO: 4104365 - DNA, 25 bp, Homo sapien
tttcatcatggcaccatacgtctgc

SEQ ID NO: 4104366 - DNA, 25 bp, Homo sapien
tcatggcaccatacgtctgccttgc

SEQ ID NO: 4104367 - DNA, 25 bp, Homo sapien
gacccaatttcatcatggcaccata

SEQ ID NO: 4104368 - DNA, 25 bp, Homo sapien
gtgttccatgggacccaatttcatc

SEQ ID NO: 4104369 - DNA, 25 bp, Homo sapien
atgcactatatcgtcacagtctttc

SEQ ID NO: 4104370 - DNA, 25 bp, Homo sapien
ttttgctaacgtagtgctatcaggc

SEQ ID NO: 4104371 - DNA, 25 bp, Homo sapien
tttttggcttttgctaacgtagtgc

SEQ ID NO: 4104372 - DNA, 25 bp, Homo sapien
cactatatcgtcacagtctttcttc

SEQ ID NO: 4104373 - DNA, 25 bp, Homo sapien
tcccatgacccatggtggaagctaa

SEQ ID NO: 4104374 - DNA, 25 bp, Homo sapien
gcctcagataagatgtcatagcctc

SEQ ID NO: 4104375 - DNA, 25 bp, Homo sapien
tgccactgaaggcattaactattgc

SEQ ID NO: 4104376 - DNA, 25 bp, Homo sapien
tggaagctaatatgaccatgctttg

SEQ ID NO: 4104377 - DNA, 25 bp, Homo sapien
ttttcctacggtgctcaaagagacc

SEQ ID NO: 4104378 - DNA, 25 bp, Homo sapien
ggaagccttccctagtcaactgcac

SEQ ID NO: 4104379 - DNA, 25 bp, Homo sapien
aaagagaccaatgctatctagcccc

SEQ ID NO: 4104380 - DNA, 25 bp, Homo sapien
aattgacatcagtagggtacagtgg

SEQ ID NO: 4104381 - DNA, 25 bp, Homo sapien
gcttctctcccctaatttatccaag

SEQ ID NO: 4104382 - DNA, 25 bp, Homo sapien
cacaggaaagggcagtcgtaaaagc

SEQ ID NO: 4104383 - DNA, 25 bp, Homo sapien
gcagtcgtaaaagctgtccatttgg

SEQ ID NO: 4104384 - DNA, 25 bp, Homo sapien
ttccctcttaggaacactaagcttc

SEQ ID NO: 4104385 - DNA, 25 bp, Homo sapien
gctatgaagagttttgtaaaggata

SEQ ID NO: 4104386 - DNA, 25 bp, Homo sapien
gtcctggctttgatagtgtactata

SEQ ID NO: 4104387 - DNA, 25 bp, Homo sapien
aaaggataagaaaccatagacattt

SEQ ID NO: 4104388 - DNA, 25 bp, Homo sapien
acaaaataccttgcctgtttgagtt

SEQ ID NO: 4104389 - DNA, 25 bp, Homo sapien
ggtcataggtcaaagccatgccagc

SEQ ID NO: 4104390 - DNA, 25 bp, Homo sapien
ggggtcataggtcaaagccatgcca

SEQ ID NO: 4104391 - DNA, 25 bp, Homo sapien
gctgtggggtcataggtcaaagcca

SEQ ID NO: 4104392 - DNA, 25 bp, Homo sapien
tgtggggtcataggtcaaagccatg

SEQ ID NO: 4104393 - DNA, 25 bp, Homo sapien
ctgcagcaactccaatagggtccag

SEQ ID NO: 4104394 - DNA, 25 bp, Homo sapien
agcaactccaatagggtccaggagt

SEQ ID NO: 4104395 - DNA, 25 bp, Homo sapien
gcagcaactccaatagggtccagga

SEQ ID NO: 4104396 - DNA, 25 bp, Homo sapien
actccaatagggtccaggagtggta

SEQ ID NO: 4104397 - DNA, 25 bp, Homo sapien
aagcaagagaggtagacgagagcaa

SEQ ID NO: 4104398 - DNA, 25 bp, Homo sapien
ccagaaagcaagagaggtagacgag

SEQ ID NO: 4104399 - DNA, 25 bp, Homo sapien
cagaaagcaagagaggtagacgaga

SEQ ID NO: 4104400 - DNA, 25 bp, Homo sapien
gaaagcaagagaggtagacgagagc

SEQ ID NO: 4104401 - DNA, 25 bp, Homo sapien
tgcaatactgtacggtgaagaataa

SEQ ID NO: 4104402 - DNA, 25 bp, Homo sapien
aatcatgcggttggttgcaatactg

SEQ ID NO: 4104403 - DNA, 25 bp, Homo sapien
gcagcaatgaatggcgtgatagatg

SEQ ID NO: 4104404 - DNA, 25 bp, Homo sapien
gatagatgtctgtggaatcatgcgg

SEQ ID NO: 4104405 - DNA, 25 bp, Homo sapien
tcagggatgtcctggcaagtaatga

SEQ ID NO: 4104406 - DNA, 25 bp, Homo sapien
agttgactgctaagactttctcttt

SEQ ID NO: 4104407 - DNA, 25 bp, Homo sapien
tatgtccaagtggtaaaagttgtgg

SEQ ID NO: 4104408 - DNA, 25 bp, Homo sapien
gttgtaacttcaaatgctcaagtga

SEQ ID NO: 4104409 - DNA, 25 bp, Homo sapien
tgttggttgcataacgtatggcgga

SEQ ID NO: 4104410 - DNA, 25 bp, Homo sapien
tggttgcataacgtatggcggatga

SEQ ID NO: 4104411 - DNA, 25 bp, Homo sapien
gatgaggcatccatgaagtactctg

SEQ ID NO: 4104412 - DNA, 25 bp, Homo sapien
ttgcataacgtatggcggatgaggc

SEQ ID NO: 4104413 - DNA, 25 bp, Homo sapien
gatctctagctatctattgtacatg

SEQ ID NO: 4104414 - DNA, 25 bp, Homo sapien
tatgcattccaaaagcttgtacttg

SEQ ID NO: 4104415 - DNA, 25 bp, Homo sapien
atagaaatattagcctcaggtgact

SEQ ID NO: 4104416 - DNA, 25 bp, Homo sapien
tatggctgcctgaacgagttacata

SEQ ID NO: 4104417 - DNA, 25 bp, Homo sapien
tcctgcataaagcagaaattcctca

SEQ ID NO: 4104418 - DNA, 25 bp, Homo sapien
gagttctgagttcctgcataaagca

SEQ ID NO: 4104419 - DNA, 25 bp, Homo sapien
agcagaaattcctcatgcataagaa

SEQ ID NO: 4104420 - DNA, 25 bp, Homo sapien
aaatttaattgtccggagttctgag

SEQ ID NO: 4104421 - DNA, 25 bp, Homo sapien
gcagacaactaccttcatatttgaa

SEQ ID NO: 4104422 - DNA, 25 bp, Homo sapien
aactgctatagttaattaacatgaa

SEQ ID NO: 4104423 - DNA, 25 bp, Homo sapien
taaattcatctattagcagacaact

SEQ ID NO: 4104424 - DNA, 25 bp, Homo sapien
aatatttacacaccttgccatctat

SEQ ID NO: 4104425 - DNA, 25 bp, Homo sapien
tccatgcaaagagacatctatcctt

SEQ ID NO: 4104426 - DNA, 25 bp, Homo sapien
tgcaaagagacatctatcctttctt

SEQ ID NO: 4104427 - DNA, 25 bp, Homo sapien
catgcaaagagacatctatcctttc

SEQ ID NO: 4104428 - DNA, 25 bp, Homo sapien
atccatgcaaagagacatctatcct

SEQ ID NO: 4104429 - DNA, 25 bp, Homo sapien
taaaatagcctgtacctaggtgaaa

SEQ ID NO: 4104430 - DNA, 25 bp, Homo sapien
tcaacagcacagaactactagatcc

SEQ ID NO: 4104431 - DNA, 25 bp, Homo sapien
actgtgtacatgcttgggctcctgt

SEQ ID NO: 4104432 - DNA, 25 bp, Homo sapien
tgagaggtaaaatagcctgtaccta

SEQ ID NO: 4104433 - DNA, 25 bp, Homo sapien
tcctggaagagatgctgtattcccc

SEQ ID NO: 4104434 - DNA, 25 bp, Homo sapien
gacttcctggaagagatgctgtatt

SEQ ID NO: 4104435 - DNA, 25 bp, Homo sapien
tctgacttcctggaagagatgctgt

SEQ ID NO: 4104436 - DNA, 25 bp, Homo sapien
cttcctggaagagatgctgtattcc

SEQ ID NO: 4104437 - DNA, 25 bp, Homo sapien
aatgtagttcaaggcaggattccct

SEQ ID NO: 4104438 - DNA, 25 bp, Homo sapien
cagccagggctgcataattttacag

SEQ ID NO: 4104439 - DNA, 25 bp, Homo sapien
tacagggaaatggaatccgcagcta

SEQ ID NO: 4104440 - DNA, 25 bp, Homo sapien
gattccctaggcctacaccatgaag

SEQ ID NO: 4104441 - DNA, 25 bp, Homo sapien
cattagggactttaacgaatcagga

SEQ ID NO: 4104442 - DNA, 25 bp, Homo sapien
gacacagctatagtgtgaactcaca

SEQ ID NO: 4104443 - DNA, 25 bp, Homo sapien
tacctgtggctttggaaaacaacaa

SEQ ID NO: 4104444 - DNA, 25 bp, Homo sapien
gatttcaccccatcctagtgacaca

SEQ ID NO: 4104445 - DNA, 25 bp, Homo sapien
tgcatctcccactgtaagttaaggg

SEQ ID NO: 4104446 - DNA, 25 bp, Homo sapien
cacagttgagccacaagacttgcat

SEQ ID NO: 4104447 - DNA, 25 bp, Homo sapien
tgggtccccaggaataagcctgaga

SEQ ID NO: 4104448 - DNA, 25 bp, Homo sapien
taagggactgtctatgttgagcaag

SEQ ID NO: 4104449 - DNA, 25 bp, Homo sapien
tcagccataaaactcagtcaggagt

SEQ ID NO: 4104450 - DNA, 25 bp, Homo sapien
tactgaccgaatcccatgtacctca

SEQ ID NO: 4104451 - DNA, 25 bp, Homo sapien
gagtcaagtcttgtcagaacatcac

SEQ ID NO: 4104452 - DNA, 25 bp, Homo sapien
tactatgtcccgctctgaatgctgt

SEQ ID NO: 4104453 - DNA, 25 bp, Homo sapien
ctgaatatttatggacctcatcttt

SEQ ID NO: 4104454 - DNA, 25 bp, Homo sapien
agaagtttcaagcacacatcggatg

SEQ ID NO: 4104455 - DNA, 25 bp, Homo sapien
agcacacatcggatgcagtactcag

SEQ ID NO: 4104456 - DNA, 25 bp, Homo sapien
ggttcccagaagacgtctgaatatt

SEQ ID NO: 4104457 - DNA, 25 bp, Homo sapien
tctctgatgactttaatggtatgtg

SEQ ID NO: 4104458 - DNA, 25 bp, Homo sapien
ctgatgactttaatggtatgtgaaa

SEQ ID NO: 4104459 - DNA, 25 bp, Homo sapien
tctgatgactttaatggtatgtgaa

SEQ ID NO: 4104460 - DNA, 25 bp, Homo sapien
gtctctgatgactttaatggtatgt

SEQ ID NO: 4104461 - DNA, 25 bp, Homo sapien
ggtatttgttgtgccagaccagaag

SEQ ID NO: 4104462 - DNA, 25 bp, Homo sapien
caggtatttgttgtgccagaccaga

SEQ ID NO: 4104463 - DNA, 25 bp, Homo sapien
ttcaggtatttgttgtgccagacca

SEQ ID NO: 4104464 - DNA, 25 bp, Homo sapien
tcaggtatttgttgtgccagaccag

SEQ ID NO: 4104465 - DNA, 25 bp, Homo sapien
cctgttgtgcccaacgaaaggtgat

SEQ ID NO: 4104466 - DNA, 25 bp, Homo sapien
gcccaacgaaaggtgattcatctgc

SEQ ID NO: 4104467 - DNA, 25 bp, Homo sapien
tgtgtcagtgggcccatcatgttgg

SEQ ID NO: 4104468 - DNA, 25 bp, Homo sapien
gctgcattgacatgggatggtccat

SEQ ID NO: 4104469 - DNA, 25 bp, Homo sapien
tagatctggcccctcagttgtgtat

SEQ ID NO: 4104470 - DNA, 25 bp, Homo sapien
taataatatagtagctgagctggta

SEQ ID NO: 4104471 - DNA, 25 bp, Homo sapien
ccctcagttgtgtataacctgctaa

SEQ ID NO: 4104472 - DNA, 25 bp, Homo sapien
atatagtagctgagctggtaagcag

SEQ ID NO: 4104473 - DNA, 25 bp, Homo sapien
cattgctatagggtaaaattcctga

SEQ ID NO: 4104474 - DNA, 25 bp, Homo sapien
gacagaaactacagggcttacgcaa

SEQ ID NO: 4104475 - DNA, 25 bp, Homo sapien
tactgaaggtgtcacatgagtggtt

SEQ ID NO: 4104476 - DNA, 25 bp, Homo sapien
caaagggacccatatatgatcaagt

SEQ ID NO: 4104477 - DNA, 25 bp, Homo sapien
tcagtggcttggagaacacaaacca

SEQ ID NO: 4104478 - DNA, 25 bp, Homo sapien
gcaacttggaggttctcataacaca

SEQ ID NO: 4104479 - DNA, 25 bp, Homo sapien
ccagtggtttctgctaaagcttaca

SEQ ID NO: 4104480 - DNA, 25 bp, Homo sapien
attctggtgacattgtaagccactg

SEQ ID NO: 4104481 - DNA, 25 bp, Homo sapien
tgacacaacagctggtggagtatca

SEQ ID NO: 4104482 - DNA, 25 bp, Homo sapien
acacaacagctggtggagtatcata

SEQ ID NO: 4104483 - DNA, 25 bp, Homo sapien
gacacaacagctggtggagtatcat

SEQ ID NO: 4104484 - DNA, 25 bp, Homo sapien
cacaacagctggtggagtatcataa

SEQ ID NO: 4104485 - DNA, 25 bp, Homo sapien
tgtgaagaaggatatatttccttca

SEQ ID NO: 4104486 - DNA, 25 bp, Homo sapien
gcaactctggaactgggtaacacgt

SEQ ID NO: 4104487 - DNA, 25 bp, Homo sapien
tctaggccacaaaatattcaagagg

SEQ ID NO: 4104488 - DNA, 25 bp, Homo sapien
tagtaaattggtactgtgtagtggg

SEQ ID NO: 4104489 - DNA, 25 bp, Homo sapien
caaaggatcatgctagggatgcagg

SEQ ID NO: 4104490 - DNA, 25 bp, Homo sapien
gaactggaagcaatgtgaagggcac

SEQ ID NO: 4104491 - DNA, 25 bp, Homo sapien
aatcctcttagctggtattgacacc

SEQ ID NO: 4104492 - DNA, 25 bp, Homo sapien
aggatttattctacaggcactgaga

SEQ ID NO: 4104493 - DNA, 25 bp, Homo sapien
atcgtgaatgccaatcatcccagtg

SEQ ID NO: 4104494 - DNA, 25 bp, Homo sapien
catgtcactcaagggatgagagacc

SEQ ID NO: 4104495 - DNA, 25 bp, Homo sapien
gagcgtcgagtgtccctactagggc

SEQ ID NO: 4104496 - DNA, 25 bp, Homo sapien
ctactagggcatggaaaggatggac

SEQ ID NO: 4104497 - DNA, 25 bp, Homo sapien
tgagatattttccttgagcgtcgag

SEQ ID NO: 4104498 - DNA, 25 bp, Homo sapien
caaacccggaaagtcaatgagaaca

SEQ ID NO: 4104499 - DNA, 25 bp, Homo sapien
caccacggtgttgtgtgaagaaaca

SEQ ID NO: 4104500 - DNA, 25 bp, Homo sapien
cagaggtattccacacttttgaggg

SEQ ID NO: 4104501 - DNA, 25 bp, Homo sapien
tttttcaggtcgcatcaaacccgga

SEQ ID NO: 4104502 - DNA, 25 bp, Homo sapien
taaccagtagagatttaatagtata

SEQ ID NO: 4104503 - DNA, 25 bp, Homo sapien
tgagattagctcagttcaatgtgtt

SEQ ID NO: 4104504 - DNA, 25 bp, Homo sapien
ttatattcagacaacctaattttct

SEQ ID NO: 4104505 - DNA, 25 bp, Homo sapien
tccaggcgagctaccttaaatactt

SEQ ID NO: 4104506 - DNA, 25 bp, Homo sapien
tgtgaactttgagctgcaaccagtg

SEQ ID NO: 4104507 - DNA, 25 bp, Homo sapien
gcatgtgaactttgagctgcaacca

SEQ ID NO: 4104508 - DNA, 25 bp, Homo sapien
catgtgaactttgagctgcaaccag

SEQ ID NO: 4104509 - DNA, 25 bp, Homo sapien
atgcatgtgaactttgagctgcaac

SEQ ID NO: 4104510 - DNA, 25 bp, Homo sapien
aaacagctgtcggaggcacaggcgt

SEQ ID NO: 4104511 - DNA, 25 bp, Homo sapien
ttcaatagaaacagctgtcggaggc

SEQ ID NO: 4104512 - DNA, 25 bp, Homo sapien
tactgaggaatgtaggtcccttgca

SEQ ID NO: 4104513 - DNA, 25 bp, Homo sapien
gcacaggcgtgtactgaggaatgta

SEQ ID NO: 4104514 - DNA, 25 bp, Homo sapien
tctatgtagtttatggccctgtcca

SEQ ID NO: 4104515 - DNA, 25 bp, Homo sapien
gctgagaaggaatgcacggtgacca

SEQ ID NO: 4104516 - DNA, 25 bp, Homo sapien
tgttagtaggcctaagaagagcacc

SEQ ID NO: 4104517 - DNA, 25 bp, Homo sapien
tttgagaaccagtgcattagtccag

SEQ ID NO: 4104518 - DNA, 25 bp, Homo sapien
tggggagaggtatcagcaacaacac

SEQ ID NO: 4104519 - DNA, 25 bp, Homo sapien
catgttcgttggatgtgtccactgc

SEQ ID NO: 4104520 - DNA, 25 bp, Homo sapien
tgtgtccactgctatctgttgctgc

SEQ ID NO: 4104521 - DNA, 25 bp, Homo sapien
tgttggtaagaatatgcaggtgcat

SEQ ID NO: 4104522 - DNA, 25 bp, Homo sapien
ccatgtgaattagcctgctggagga

SEQ ID NO: 4104523 - DNA, 25 bp, Homo sapien
tcctgtcaagatcagaagaaccatc

SEQ ID NO: 4104524 - DNA, 25 bp, Homo sapien
gctggaggatcagaaacatatggcc

SEQ ID NO: 4104525 - DNA, 25 bp, Homo sapien
cagctagcaacacccagaagcagag

SEQ ID NO: 4104526 - DNA, 25 bp, Homo sapien
taaaaaggatcttgccatttcaaag

SEQ ID NO: 4104527 - DNA, 25 bp, Homo sapien
aaagaactgaattcactcctgccga

SEQ ID NO: 4104528 - DNA, 25 bp, Homo sapien
acataatacttatggattgcactga

SEQ ID NO: 4104529 - DNA, 25 bp, Homo sapien
tctcctctgtcctagaataaatgtg

SEQ ID NO: 4104530 - DNA, 25 bp, Homo sapien
tattgcccacctcttgacatcaggt

SEQ ID NO: 4104531 - DNA, 25 bp, Homo sapien
gctttcattgggtaaggtataacac

SEQ ID NO: 4104532 - DNA, 25 bp, Homo sapien
cacatgaagaccatttgcacagcac

SEQ ID NO: 4104533 - DNA, 25 bp, Homo sapien
cgtctgtgcaaactggaagccaact

SEQ ID NO: 4104534 - DNA, 25 bp, Homo sapien
tcaacaagacgttgacagcttgcct

SEQ ID NO: 4104535 - DNA, 25 bp, Homo sapien
gcttgcctcgagagcctttgacgtc

SEQ ID NO: 4104536 - DNA, 25 bp, Homo sapien
aacttctgtgccagtgaaagccggc

SEQ ID NO: 4104537 - DNA, 25 bp, Homo sapien
agtgaaagccggcacagtatttcaa

SEQ ID NO: 4104538 - DNA, 25 bp, Homo sapien
gacaaagttcatgaaaagtcccagc

SEQ ID NO: 4104539 - DNA, 25 bp, Homo sapien
cttaagctaggttttgcaatgtgac

SEQ ID NO: 4104540 - DNA, 25 bp, Homo sapien
gcagttgccatggtttatcaacaaa

SEQ ID NO: 4104541 - DNA, 25 bp, Homo sapien
taatgcttttgctagcgatcacgct

SEQ ID NO: 4104542 - DNA, 25 bp, Homo sapien
catccataggctgaatttgatcaca

SEQ ID NO: 4104543 - DNA, 25 bp, Homo sapien
ctggactgtaatagggtgtcacttc

SEQ ID NO: 4104544 - DNA, 25 bp, Homo sapien
tataaaataggccatccataggctg

SEQ ID NO: 4104545 - DNA, 25 bp, Homo sapien
ctgtaatagggtgtcacttcatctt

SEQ ID NO: 4104546 - DNA, 25 bp, Homo sapien
aactggtccggccatgtcggtcaaa

SEQ ID NO: 4104547 - DNA, 25 bp, Homo sapien
cggccatgtcggtcaaataaatttt

SEQ ID NO: 4104548 - DNA, 25 bp, Homo sapien
agaaagaactggtccggccatgtcg

SEQ ID NO: 4104549 - DNA, 25 bp, Homo sapien
ggtccggccatgtcggtcaaataaa

SEQ ID NO: 4104550 - DNA, 25 bp, Homo sapien
tcttttggactaagacaggctcctg

SEQ ID NO: 4104551 - DNA, 25 bp, Homo sapien
ggaatttctctataacgcacactac

SEQ ID NO: 4104552 - DNA, 25 bp, Homo sapien
tcaactagcattttaaggacttccc

SEQ ID NO: 4104553 - DNA, 25 bp, Homo sapien
tattggtcctacatgcctcaaagaa

SEQ ID NO: 4104554 - DNA, 25 bp, Homo sapien
cacacatgaacacatcaaatgacag

SEQ ID NO: 4104555 - DNA, 25 bp, Homo sapien
gaaacaggaagttacctaggcacat

SEQ ID NO: 4104556 - DNA, 25 bp, Homo sapien
ctaggcacattcattagccacatgg

SEQ ID NO: 4104557 - DNA, 25 bp, Homo sapien
gccacatggtagctacctcttagcc

SEQ ID NO: 4104558 - DNA, 25 bp, Homo sapien
tatgtaatccgcaaaggacagccat

SEQ ID NO: 4104559 - DNA, 25 bp, Homo sapien
aatatgactgtaccaagagctaccg

SEQ ID NO: 4104560 - DNA, 25 bp, Homo sapien
cagaagtcgtgttgatccgtgctac

SEQ ID NO: 4104561 - DNA, 25 bp, Homo sapien
aaagctcaagtatgactcagtggcc

SEQ ID NO: 4104562 - DNA, 25 bp, Homo sapien
cagaaagcccaagggatgggggaga

SEQ ID NO: 4104563 - DNA, 25 bp, Homo sapien
gtttaaacctaacatccactgatct

SEQ ID NO: 4104564 - DNA, 25 bp, Homo sapien
gaaagcccaagggatgggggagatg

SEQ ID NO: 4104565 - DNA, 25 bp, Homo sapien
tttaaacctaacatccactgatcta

SEQ ID NO: 4104566 - DNA, 25 bp, Homo sapien
caagctagcttggattactctggtc

SEQ ID NO: 4104567 - DNA, 25 bp, Homo sapien
caagtagttggtagctgttaggcat

SEQ ID NO: 4104568 - DNA, 25 bp, Homo sapien
gacacttctgattttggttgacctg

SEQ ID NO: 4104569 - DNA, 25 bp, Homo sapien
cttgcagggatacaaaccataggtg

SEQ ID NO: 4104570 - DNA, 25 bp, Homo sapien
tatacacaacatattcttagagcct

SEQ ID NO: 4104571 - DNA, 25 bp, Homo sapien
atacacaacatattcttagagcctg

SEQ ID NO: 4104572 - DNA, 25 bp, Homo sapien
ctgccagtacaatgtgaactgatgt

SEQ ID NO: 4104573 - DNA, 25 bp, Homo sapien
tctgccagtacaatgtgaactgatg

SEQ ID NO: 4104574 - DNA, 25 bp, Homo sapien
gcataaagagacctggttgatcact

SEQ ID NO: 4104575 - DNA, 25 bp, Homo sapien
gtagtagcataaagagacctggttg

SEQ ID NO: 4104576 - DNA, 25 bp, Homo sapien
ctgggtagtagcataaagagacctg

SEQ ID NO: 4104577 - DNA, 25 bp, Homo sapien
gtagcataaagagacctggttgatc

SEQ ID NO: 4104578 - DNA, 25 bp, Homo sapien
gagcagaaccaggttctctttcttc

SEQ ID NO: 4104579 - DNA, 25 bp, Homo sapien
ttcacttctttgccagatactgaaa

SEQ ID NO: 4104580 - DNA, 25 bp, Homo sapien
tggacctcatacctaagcacctagc

SEQ ID NO: 4104581 - DNA, 25 bp, Homo sapien
aaaggacacagatgtctttttattt

SEQ ID NO: 4104582 - DNA, 25 bp, Homo sapien
tcaaagtggacctcatacctaagca

SEQ ID NO: 4104583 - DNA, 25 bp, Homo sapien
cagctgattcaaagtggacctcata

SEQ ID NO: 4104584 - DNA, 25 bp, Homo sapien
gcctctagtgcaagggacaatctca

SEQ ID NO: 4104585 - DNA, 25 bp, Homo sapien
gaggctccccgttgctcactgaata

SEQ ID NO: 4104586 - DNA, 25 bp, Homo sapien
tctcacgtggcaaatgctgtgggcg

SEQ ID NO: 4104587 - DNA, 25 bp, Homo sapien
catcctcctggaactagaagctacc

SEQ ID NO: 4104588 - DNA, 25 bp, Homo sapien
cttaaattgtatccaatccggattt

SEQ ID NO: 4104589 - DNA, 25 bp, Homo sapien
aattgtatccaatccggatttcctc

SEQ ID NO: 4104590 - DNA, 25 bp, Homo sapien
tccggatttcctccaaattgagtaa

SEQ ID NO: 4104591 - DNA, 25 bp, Homo sapien
aattgagtaatttccacagagccat

SEQ ID NO: 4104592 - DNA, 25 bp, Homo sapien
accatccttcacacagaaagacagg

SEQ ID NO: 4104593 - DNA, 25 bp, Homo sapien
tgagacacagcagttgcaaattctc

SEQ ID NO: 4104594 - DNA, 25 bp, Homo sapien
catatcaattcctttacaaccatcc

SEQ ID NO: 4104595 - DNA, 25 bp, Homo sapien
taggtcaaagtacttagttgtaatg

SEQ ID NO: 4104596 - DNA, 25 bp, Homo sapien
agcaagaaaccttcttcacaaggtg

SEQ ID NO: 4104597 - DNA, 25 bp, Homo sapien
caagaaaccttcttcacaaggtggc

SEQ ID NO: 4104598 - DNA, 25 bp, Homo sapien
gaaaccttcttcacaaggtggcagg

SEQ ID NO: 4104599 - DNA, 25 bp, Homo sapien
agaaaccttcttcacaaggtggcag

SEQ ID NO: 4104600 - DNA, 25 bp, Homo sapien
ctttccctcatctgtgatatatctg

SEQ ID NO: 4104601 - DNA, 25 bp, Homo sapien
ctatccagagtctccgggaaggtgg

SEQ ID NO: 4104602 - DNA, 25 bp, Homo sapien
tgaccactcagcctcaaagctgtgt

SEQ ID NO: 4104603 - DNA, 25 bp, Homo sapien
gagggcgctttcaggatttcgatga

SEQ ID NO: 4104604 - DNA, 25 bp, Homo sapien
gaaacaattagggtaactatccaga

SEQ ID NO: 4104605 - DNA, 25 bp, Homo sapien
aaatcagcacagctctggtactggt

SEQ ID NO: 4104606 - DNA, 25 bp, Homo sapien
ttaggacttagagatgacataaatc

SEQ ID NO: 4104607 - DNA, 25 bp, Homo sapien
gacttagagatgacataaatcagca

SEQ ID NO: 4104608 - DNA, 25 bp, Homo sapien
ggacttagagatgacataaatcagc

SEQ ID NO: 4104609 - DNA, 25 bp, Homo sapien
gctctctgatccgaagggcattttg

SEQ ID NO: 4104610 - DNA, 25 bp, Homo sapien
gcagctctctgatccgaagggcatt

SEQ ID NO: 4104611 - DNA, 25 bp, Homo sapien
tctctgatccgaagggcattttgcc

SEQ ID NO: 4104612 - DNA, 25 bp, Homo sapien
ctctgatccgaagggcattttgcct

SEQ ID NO: 4104613 - DNA, 25 bp, Homo sapien
agctgctgtcactgggctgtattct

SEQ ID NO: 4104614 - DNA, 25 bp, Homo sapien
ctgctgtcactgggctgtattcttg

SEQ ID NO: 4104615 - DNA, 25 bp, Homo sapien
gctgctgtcactgggctgtattctt

SEQ ID NO: 4104616 - DNA, 25 bp, Homo sapien
ccttctccggtcgtccccacacaag

SEQ ID NO: 4104617 - DNA, 25 bp, Homo sapien
ctgaaagtaactagaccttctccgg

SEQ ID NO: 4104618 - DNA, 25 bp, Homo sapien
ttctccggtcgtccccacacaagcc

SEQ ID NO: 4104619 - DNA, 25 bp, Homo sapien
ctgcctgctgggtagggtttttgcc

SEQ ID NO: 4104620 - DNA, 25 bp, Homo sapien
ctcgaaggaagaacaacacagcagg

SEQ ID NO: 4104621 - DNA, 25 bp, Homo sapien
cgaaggaagaacaacacagcaggtg

SEQ ID NO: 4104622 - DNA, 25 bp, Homo sapien
tcgaaggaagaacaacacagcaggt

SEQ ID NO: 4104623 - DNA, 25 bp, Homo sapien
cccatggacatcctagtaggcactg

SEQ ID NO: 4104624 - DNA, 25 bp, Homo sapien
ttctcaacaattcgcagctctttgg

SEQ ID NO: 4104625 - DNA, 25 bp, Homo sapien
ctttggagatggcaagctttgcatg

SEQ ID NO: 4104626 - DNA, 25 bp, Homo sapien
tggttattattggagcccatggaca

SEQ ID NO: 4104627 - DNA, 25 bp, Homo sapien
tgtggaaaacccatctgttgctcat

SEQ ID NO: 4104628 - DNA, 25 bp, Homo sapien
caggaggtaatgagccattgtggaa

SEQ ID NO: 4104629 - DNA, 25 bp, Homo sapien
cattgtggaaaacccatctgttgct

SEQ ID NO: 4104630 - DNA, 25 bp, Homo sapien
gccattgtggaaaacccatctgttg

SEQ ID NO: 4104631 - DNA, 25 bp, Homo sapien
tagccaagctgaagggacatccatc

SEQ ID NO: 4104632 - DNA, 25 bp, Homo sapien
catcttcattcccagtagggacacc

SEQ ID NO: 4104633 - DNA, 25 bp, Homo sapien
caaatttcacagagatggcctgtca

SEQ ID NO: 4104634 - DNA, 25 bp, Homo sapien
gcagcatcaccccagagatctgtag

SEQ ID NO: 4104635 - DNA, 25 bp, Homo sapien
tatctcaaccaacaccaaaggtttg

SEQ ID NO: 4104636 - DNA, 25 bp, Homo sapien
ccagaagcactgttacaaagcacac

SEQ ID NO: 4104637 - DNA, 25 bp, Homo sapien
tttgcttagctagcagtgtagcctg

SEQ ID NO: 4104638 - DNA, 25 bp, Homo sapien
cacctgctattcttatctcaaccaa

SEQ ID NO: 4104639 - DNA, 25 bp, Homo sapien
ggttctctgagattttctagaataa

SEQ ID NO: 4104640 - DNA, 25 bp, Homo sapien
tggttctctgagattttctagaata

SEQ ID NO: 4104641 - DNA, 25 bp, Homo sapien
ttctagaataattttcagacttgtc

SEQ ID NO: 4104642 - DNA, 25 bp, Homo sapien
gttctctgagattttctagaataat

SEQ ID NO: 4104643 - DNA, 25 bp, Homo sapien
cagccaactgaagaacagatttaat

SEQ ID NO: 4104644 - DNA, 25 bp, Homo sapien
agatttaataaaatctggattctcc

SEQ ID NO: 4104645 - DNA, 25 bp, Homo sapien
cagatttaataaaatctggattctc

SEQ ID NO: 4104646 - DNA, 25 bp, Homo sapien
ccaactgaagaacagatttaataaa

SEQ ID NO: 4104647 - DNA, 25 bp, Homo sapien
ctataactgcagtttgataaaacag

SEQ ID NO: 4104648 - DNA, 25 bp, Homo sapien
cagtgcgtgtactgttccacaattg

SEQ ID NO: 4104649 - DNA, 25 bp, Homo sapien
gttccacaattgagctataactgca

SEQ ID NO: 4104650 - DNA, 25 bp, Homo sapien
tcaggctattagagtccagtgcgtg

SEQ ID NO: 4104651 - DNA, 25 bp, Homo sapien
cattaacacttaggccatgaaagaa

SEQ ID NO: 4104652 - DNA, 25 bp, Homo sapien
taacacttaggccatgaaagaaaat

SEQ ID NO: 4104653 - DNA, 25 bp, Homo sapien
aatatttctatttgactgtctggct

SEQ ID NO: 4104654 - DNA, 25 bp, Homo sapien
gtgtcattaacacttaggccatgaa

SEQ ID NO: 4104655 - DNA, 25 bp, Homo sapien
tcatgctcaggttctcagtgcaaag

SEQ ID NO: 4104656 - DNA, 25 bp, Homo sapien
atcatgctcaggttctcagtgcaaa

SEQ ID NO: 4104657 - DNA, 25 bp, Homo sapien
caatctgttgagtgggagcaaggct

SEQ ID NO: 4104658 - DNA, 25 bp, Homo sapien
agcactgtcaatctgttgagtggga

SEQ ID NO: 4104659 - DNA, 25 bp, Homo sapien
ccagcagaggtgtttggtacaggca

SEQ ID NO: 4104660 - DNA, 25 bp, Homo sapien
cattccagcagaggtgtttggtaca

SEQ ID NO: 4104661 - DNA, 25 bp, Homo sapien
gtggcattgccaagagggaggtgac

SEQ ID NO: 4104662 - DNA, 25 bp, Homo sapien
ggcattgccaagagggaggtgacca

SEQ ID NO: 4104663 - DNA, 25 bp, Homo sapien
cccgcatttcctatcattggaaaca

SEQ ID NO: 4104664 - DNA, 25 bp, Homo sapien
ccgcatttcctatcattggaaacat

SEQ ID NO: 4104665 - DNA, 25 bp, Homo sapien
ttcccgcatttcctatcattggaaa

SEQ ID NO: 4104666 - DNA, 25 bp, Homo sapien
tcccgcatttcctatcattggaaac

SEQ ID NO: 4104667 - DNA, 25 bp, Homo sapien
ctaagtatgggcttgattagttgaa

SEQ ID NO: 4104668 - DNA, 25 bp, Homo sapien
ttagctaagtatgggcttgattagt

SEQ ID NO: 4104669 - DNA, 25 bp, Homo sapien
tagctaagtatgggcttgattagtt

SEQ ID NO: 4104670 - DNA, 25 bp, Homo sapien
gctaagtatgggcttgattagttga

SEQ ID NO: 4104671 - DNA, 25 bp, Homo sapien
tcatggaagcgtctgctaatggcat

SEQ ID NO: 4104672 - DNA, 25 bp, Homo sapien
acccattctgttatcacagattatg

SEQ ID NO: 4104673 - DNA, 25 bp, Homo sapien
agtgtccaagttccttcaaggaagt

SEQ ID NO: 4104674 - DNA, 25 bp, Homo sapien
agtacaaacccattctgttatcaca

SEQ ID NO: 4104675 - DNA, 25 bp, Homo sapien
tcaaggaagtacaaacccattctgt

SEQ ID NO: 4104676 - DNA, 25 bp, Homo sapien
ctgcttacttgagcaagaaaatgag

SEQ ID NO: 4104677 - DNA, 25 bp, Homo sapien
tgcttacttgagcaagaaaatgagg

SEQ ID NO: 4104678 - DNA, 25 bp, Homo sapien
cttccttgacagatgcttttgtggt

SEQ ID NO: 4104679 - DNA, 25 bp, Homo sapien
gaacacttctagaaatgggccacac

SEQ ID NO: 4104680 - DNA, 25 bp, Homo sapien
gcttttgtggtctcttgaacacttc

SEQ ID NO: 4104681 - DNA, 25 bp, Homo sapien
gggccacacattactttgtagccat

SEQ ID NO: 4104682 - DNA, 25 bp, Homo sapien
tgaattttgactcttggctcaccag

SEQ ID NO: 4104683 - DNA, 25 bp, Homo sapien
aggctcaggcagatccccaatagtg

SEQ ID NO: 4104684 - DNA, 25 bp, Homo sapien
ctgaagagaggtaaaacaaactggt

SEQ ID NO: 4104685 - DNA, 25 bp, Homo sapien
tcttggctcaccaggacaggctcag

SEQ ID NO: 4104686 - DNA, 25 bp, Homo sapien
tccaaacttgctacaatcctatcag

SEQ ID NO: 4104687 - DNA, 25 bp, Homo sapien
tgtgctatccaaacttgctacaatc

SEQ ID NO: 4104688 - DNA, 25 bp, Homo sapien
cttaatgtgctatccaaacttgcta

SEQ ID NO: 4104689 - DNA, 25 bp, Homo sapien
aacttgctacaatcctatcagcagg

SEQ ID NO: 4104690 - DNA, 25 bp, Homo sapien
gcaaggttgtctccgagtctgcata

SEQ ID NO: 4104691 - DNA, 25 bp, Homo sapien
tgtctccgagtctgcatatttagat

SEQ ID NO: 4104692 - DNA, 25 bp, Homo sapien
gctggcagcaaggttgtctccgagt

SEQ ID NO: 4104693 - DNA, 25 bp, Homo sapien
catatttagatgctgcctcaggaat

SEQ ID NO: 4104694 - DNA, 25 bp, Homo sapien
ccttcttaggtatcagctctggagc

SEQ ID NO: 4104695 - DNA, 25 bp, Homo sapien
ttctactctggtagtagctccggcc

SEQ ID NO: 4104696 - DNA, 25 bp, Homo sapien
caggtaactttgagtcttcatcagc

SEQ ID NO: 4104697 - DNA, 25 bp, Homo sapien
cattcagccagaggtcaggtaactt

SEQ ID NO: 4104698 - DNA, 25 bp, Homo sapien
tcattgtcgggttcgaggcttgctg

SEQ ID NO: 4104699 - DNA, 25 bp, Homo sapien
tcagcaggcgggagtctctctactg

SEQ ID NO: 4104700 - DNA, 25 bp, Homo sapien
gccgaaggcagaatccaagagtccg

SEQ ID NO: 4104701 - DNA, 25 bp, Homo sapien
tctctggaagccaaagccgaaggca

SEQ ID NO: 4104702 - DNA, 25 bp, Homo sapien
tagagggcccgttgacaggccactg

SEQ ID NO: 4104703 - DNA, 25 bp, Homo sapien
tgtgtgaacccaatgcctgtgcggc

SEQ ID NO: 4104704 - DNA, 25 bp, Homo sapien
ttcccaggtggctcggacatcacgt

SEQ ID NO: 4104705 - DNA, 25 bp, Homo sapien
gccactgggagtgcttatttggaaa

SEQ ID NO: 4104706 - DNA, 25 bp, Homo sapien
cttcgaaggcttgtttgagacccgt

SEQ ID NO: 4104707 - DNA, 25 bp, Homo sapien
cagtccagcttactattgatacagg

SEQ ID NO: 4104708 - DNA, 25 bp, Homo sapien
tgtttgagacccgttccagagaact

SEQ ID NO: 4104709 - DNA, 25 bp, Homo sapien
ccagagaacttggtaccagaacgtg

SEQ ID NO: 4104710 - DNA, 25 bp, Homo sapien
tccgtttccatatgcaattctggtc

SEQ ID NO: 4104711 - DNA, 25 bp, Homo sapien
tgtccgtttccatatgcaattctgg

SEQ ID NO: 4104712 - DNA, 25 bp, Homo sapien
gtccgtttccatatgcaattctggt

SEQ ID NO: 4104713 - DNA, 25 bp, Homo sapien
tattatattgtctggtctcaaccgt

SEQ ID NO: 4104714 - DNA, 25 bp, Homo sapien
gagtggccacttattatattgtctg

SEQ ID NO: 4104715 - DNA, 25 bp, Homo sapien
tggtctcaaccgttcattcccttct

SEQ ID NO: 4104716 - DNA, 25 bp, Homo sapien
tctccaacatcgtggttgtgaaagg

SEQ ID NO: 4104717 - DNA, 25 bp, Homo sapien
ttcagaagacaaaggactcaagcca

SEQ ID NO: 4104718 - DNA, 25 bp, Homo sapien
gcaagatgacgactttggagtcagg

SEQ ID NO: 4104719 - DNA, 25 bp, Homo sapien
tcaagccaaccgaagcaaagtagga

SEQ ID NO: 4104720 - DNA, 25 bp, Homo sapien
tgaagggagaatgacgcaagatgac

SEQ ID NO: 4104721 - DNA, 25 bp, Homo sapien
cagatgcagatagacggcttctgtt

SEQ ID NO: 4104722 - DNA, 25 bp, Homo sapien
tacagatgcagatagacggcttctg

SEQ ID NO: 4104723 - DNA, 25 bp, Homo sapien
ttacagatgcagatagacggcttct

SEQ ID NO: 4104724 - DNA, 25 bp, Homo sapien
agatgcagatagacggcttctgttc

SEQ ID NO: 4104725 - DNA, 25 bp, Homo sapien
tctgagatgatttcgaggcatttgc

SEQ ID NO: 4104726 - DNA, 25 bp, Homo sapien
ctctgagatgatttcgaggcatttg

SEQ ID NO: 4104727 - DNA, 25 bp, Homo sapien
tcgaggcatttgcttaacacaggaa

SEQ ID NO: 4104728 - DNA, 25 bp, Homo sapien
tttgcttaacacaggaagtaatgat

SEQ ID NO: 4104729 - DNA, 25 bp, Homo sapien
tcagagaatcaggtgttctaagtcc

SEQ ID NO: 4104730 - DNA, 25 bp, Homo sapien
ttttggccccgatgaaggttctgta

SEQ ID NO: 4104731 - DNA, 25 bp, Homo sapien
aaagctcacagtgtacacctcctgg

SEQ ID NO: 4104732 - DNA, 25 bp, Homo sapien
tactgcatggattggcaaaaagctc

SEQ ID NO: 4104733 - DNA, 25 bp, Homo sapien
cataggacgctctgataaaccttgg

SEQ ID NO: 4104734 - DNA, 25 bp, Homo sapien
gcagatgggcaaggcactcttcttt

SEQ ID NO: 4104735 - DNA, 25 bp, Homo sapien
tgtaccagatgcctgaatcaacctc

SEQ ID NO: 4104736 - DNA, 25 bp, Homo sapien
ctcctggcgccacttcttgatggct

SEQ ID NO: 4104737 - DNA, 25 bp, Homo sapien
acgatgaaactctggcagttatttg

SEQ ID NO: 4104738 - DNA, 25 bp, Homo sapien
cattgattcttgtacatacgatgaa

SEQ ID NO: 4104739 - DNA, 25 bp, Homo sapien
aaccataaaatgctacaacaattaa

SEQ ID NO: 4104740 - DNA, 25 bp, Homo sapien
tgacagaaaatactaatgctatgag

SEQ ID NO: 4104741 - DNA, 25 bp, Homo sapien
gccaagttagtaaaatgagctaggt

SEQ ID NO: 4104742 - DNA, 25 bp, Homo sapien
ccttcagcatggttgggcacagtca

SEQ ID NO: 4104743 - DNA, 25 bp, Homo sapien
tactgaaacagcatcgccaagttag

SEQ ID NO: 4104744 - DNA, 25 bp, Homo sapien
agtcacgtgatcacatgcattactg

SEQ ID NO: 4104745 - DNA, 25 bp, Homo sapien
taggcatatacaaactactgtggtt

SEQ ID NO: 4104746 - DNA, 25 bp, Homo sapien
caaagtctattcaaggatgcatcaa

SEQ ID NO: 4104747 - DNA, 25 bp, Homo sapien
tgagttctggcctaggtattcagcc

SEQ ID NO: 4104748 - DNA, 25 bp, Homo sapien
cttgacttgcaaggctgaaccatgg

SEQ ID NO: 4104749 - DNA, 25 bp, Homo sapien
gtagatggaagaatatgtaacattg

SEQ ID NO: 4104750 - DNA, 25 bp, Homo sapien
ttttagctttcctcttaactcatcc

SEQ ID NO: 4104751 - DNA, 25 bp, Homo sapien
tttttagctttcctcttaactcatc

SEQ ID NO: 4104752 - DNA, 25 bp, Homo sapien
gaagaatatgtaacattgtctccag

SEQ ID NO: 4104753 - DNA, 25 bp, Homo sapien
tgtggaggatggaaggaaaatgcca

SEQ ID NO: 4104754 - DNA, 25 bp, Homo sapien
ctgtggaggatggaaggaaaatgcc

SEQ ID NO: 4104755 - DNA, 25 bp, Homo sapien
gtggaggatggaaggaaaatgccat

SEQ ID NO: 4104756 - DNA, 25 bp, Homo sapien
ccctggcattgcagacacagattca

SEQ ID NO: 4104757 - DNA, 25 bp, Homo sapien
caggttcctgaggtccactcttcag

SEQ ID NO: 4104758 - DNA, 25 bp, Homo sapien
cttccctggcattgcagacacagat

SEQ ID NO: 4104759 - DNA, 25 bp, Homo sapien
tggcattgcagacacagattcagaa

SEQ ID NO: 4104760 - DNA, 25 bp, Homo sapien
tatgggtatccatagaatgccttct

SEQ ID NO: 4104761 - DNA, 25 bp, Homo sapien
atgccttgattttgtgcatcgtaat

SEQ ID NO: 4104762 - DNA, 25 bp, Homo sapien
aagattaaaaattatgggtatccat

SEQ ID NO: 4104763 - DNA, 25 bp, Homo sapien
aaattatgggtatccatagaatgcc

SEQ ID NO: 4104764 - DNA, 25 bp, Homo sapien
gagagagacctcctccaggcacagg

SEQ ID NO: 4104765 - DNA, 25 bp, Homo sapien
agagagacctcctccaggcacaggg

SEQ ID NO: 4104766 - DNA, 25 bp, Homo sapien
gagacctcctccaggcacagggcat

SEQ ID NO: 4104767 - DNA, 25 bp, Homo sapien
ctggagagagacctcctccaggcac

SEQ ID NO: 4104768 - DNA, 25 bp, Homo sapien
gttgctgccactccacacagttctt

SEQ ID NO: 4104769 - DNA, 25 bp, Homo sapien
ctcatgacagagataacacacttcc

SEQ ID NO: 4104770 - DNA, 25 bp, Homo sapien
tccagagagaggctctaatcttgct

SEQ ID NO: 4104771 - DNA, 25 bp, Homo sapien
atgacagagataacacacttcccac

SEQ ID NO: 4104772 - DNA, 25 bp, Homo sapien
gatgcactgatgacacttcttggat

SEQ ID NO: 4104773 - DNA, 25 bp, Homo sapien
tctatctgcttcctggctttgatgc

SEQ ID NO: 4104774 - DNA, 25 bp, Homo sapien
cctggctttgatgcactgatgacac

SEQ ID NO: 4104775 - DNA, 25 bp, Homo sapien
gctttgatgcactgatgacacttct

SEQ ID NO: 4104776 - DNA, 25 bp, Homo sapien
attctgtgcatccacgtgcagactt

SEQ ID NO: 4104777 - DNA, 25 bp, Homo sapien
cattctgtgcatccacgtgcagact

SEQ ID NO: 4104778 - DNA, 25 bp, Homo sapien
ttcattctgtgcatccacgtgcaga

SEQ ID NO: 4104779 - DNA, 25 bp, Homo sapien
tcattctgtgcatccacgtgcagac

SEQ ID NO: 4104780 - DNA, 25 bp, Homo sapien
tcacggcacttcaaagcagggttcc

SEQ ID NO: 4104781 - DNA, 25 bp, Homo sapien
tcaaagcagggttcctagtaagcat

SEQ ID NO: 4104782 - DNA, 25 bp, Homo sapien
tgaatttcacggcacttcaaagcag

SEQ ID NO: 4104783 - DNA, 25 bp, Homo sapien
agaatttgaatttcacggcacttca

SEQ ID NO: 4104784 - DNA, 25 bp, Homo sapien
ccacagggtcataacaaagacattc

SEQ ID NO: 4104785 - DNA, 25 bp, Homo sapien
gccataacccacagggtcataacaa

SEQ ID NO: 4104786 - DNA, 25 bp, Homo sapien
tacatttgccataacccacagggtc

SEQ ID NO: 4104787 - DNA, 25 bp, Homo sapien
aattacatttgccataacccacagg

SEQ ID NO: 4104788 - DNA, 25 bp, Homo sapien
gcaaagggaccatttgtgagtattc

SEQ ID NO: 4104789 - DNA, 25 bp, Homo sapien
tcttctagcaaagggaccatttgtg

SEQ ID NO: 4104790 - DNA, 25 bp, Homo sapien
gtgagtattctttgaaacctaatag

SEQ ID NO: 4104791 - DNA, 25 bp, Homo sapien
tgtgagtattctttgaaacctaata

SEQ ID NO: 4104792 - DNA, 25 bp, Homo sapien
aagagggccttcatctgttaccacg

SEQ ID NO: 4104793 - DNA, 25 bp, Homo sapien
tgcaaccttgcttcagtctgaggca

SEQ ID NO: 4104794 - DNA, 25 bp, Homo sapien
ttcccagaggccaatcaagttgttg

SEQ ID NO: 4104795 - DNA, 25 bp, Homo sapien
tgttaccacgatggtttcccagagg

SEQ ID NO: 4104796 - DNA, 25 bp, Homo sapien
tcttggcatgatatactcagagcta

SEQ ID NO: 4104797 - DNA, 25 bp, Homo sapien
cacaggctgctttagtggatttggc

SEQ ID NO: 4104798 - DNA, 25 bp, Homo sapien
tatcaatatccatcggcaggaaacc

SEQ ID NO: 4104799 - DNA, 25 bp, Homo sapien
tgtaggccacctagatatcaaaata

SEQ ID NO: 4104800 - DNA, 25 bp, Homo sapien
attttgctgcatgtggggctccttt

SEQ ID NO: 4104801 - DNA, 25 bp, Homo sapien
ttttcaattttgctgcatgtggggc

SEQ ID NO: 4104802 - DNA, 25 bp, Homo sapien
agtgggattgtccaccccttccaat

SEQ ID NO: 4104803 - DNA, 25 bp, Homo sapien
taagtgggattgtccaccccttcca

SEQ ID NO: 4104804 - DNA, 25 bp, Homo sapien
ttattcttcactggatgatacactt

SEQ ID NO: 4104805 - DNA, 25 bp, Homo sapien
cactggatgatacactttgtgttat

SEQ ID NO: 4104806 - DNA, 25 bp, Homo sapien
tcttcactggatgatacactttgtg

SEQ ID NO: 4104807 - DNA, 25 bp, Homo sapien
ttcttcactggatgatacactttgt

SEQ ID NO: 4104808 - DNA, 25 bp, Homo sapien
taaacttttccgcacattttctcca

SEQ ID NO: 4104809 - DNA, 25 bp, Homo sapien
agatggcactaaagggataaacttt

SEQ ID NO: 4104810 - DNA, 25 bp, Homo sapien
aattggagatggcactaaagggata

SEQ ID NO: 4104811 - DNA, 25 bp, Homo sapien
tggtgggataccaattctgcatgct

SEQ ID NO: 4104812 - DNA, 25 bp, Homo sapien
tatgtagagacccaagacctgagtc

SEQ ID NO: 4104813 - DNA, 25 bp, Homo sapien
taactgaagggcagacagctagatg

SEQ ID NO: 4104814 - DNA, 25 bp, Homo sapien
cattccccagaatccggaggaggca

SEQ ID NO: 4104815 - DNA, 25 bp, Homo sapien
gaggcaggactgattctgctcagta

SEQ ID NO: 4104816 - DNA, 25 bp, Homo sapien
cattcccgaaatgttgcaataggat

SEQ ID NO: 4104817 - DNA, 25 bp, Homo sapien
tgtagtgcatttgtgctgaagctct

SEQ ID NO: 4104818 - DNA, 25 bp, Homo sapien
tcttgcagacctcggcctggatctt

SEQ ID NO: 4104819 - DNA, 25 bp, Homo sapien
caatctgagatagcaaagaagagac

SEQ ID NO: 4104820 - DNA, 25 bp, Homo sapien
ggtcccactgaacttcagctgtttc

SEQ ID NO: 4104821 - DNA, 25 bp, Homo sapien
cccactgaacttcagctgtttccat

SEQ ID NO: 4104822 - DNA, 25 bp, Homo sapien
agaccataaggtggtcccactgaac

SEQ ID NO: 4104823 - DNA, 25 bp, Homo sapien
gaccataaggtggtcccactgaact

SEQ ID NO: 4104824 - DNA, 25 bp, Homo sapien
actgggtccaccatgtggctgtgaa

SEQ ID NO: 4104825 - DNA, 25 bp, Homo sapien
tgcttgggcgtgaattcaaggtatt

SEQ ID NO: 4104826 - DNA, 25 bp, Homo sapien
ggaagaatgcttgggcgtgaattca

SEQ ID NO: 4104827 - DNA, 25 bp, Homo sapien
aacaggaagaatgcttgggcgtgaa

SEQ ID NO: 4104828 - DNA, 25 bp, Homo sapien
ttcaggtttatgtgaacatcttttg

SEQ ID NO: 4104829 - DNA, 25 bp, Homo sapien
tttatgtgaacatcttttgctaaaa

SEQ ID NO: 4104830 - DNA, 25 bp, Homo sapien
ggtttatgtgaacatcttttgctaa

SEQ ID NO: 4104831 - DNA, 25 bp, Homo sapien
caggtttatgtgaacatcttttgct

SEQ ID NO: 4104832 - DNA, 25 bp, Homo sapien
ccacgtcctctttggctatattcat

SEQ ID NO: 4104833 - DNA, 25 bp, Homo sapien
gaaagaccacgtcctctttggctat

SEQ ID NO: 4104834 - DNA, 25 bp, Homo sapien
tggaggtgctgaaagaccacgtcct

SEQ ID NO: 4104835 - DNA, 25 bp, Homo sapien
tgctgaaagaccacgtcctctttgg

SEQ ID NO: 4104836 - DNA, 25 bp, Homo sapien
cttgagcctctaccagtcttctgaa

SEQ ID NO: 4104837 - DNA, 25 bp, Homo sapien
tgaaatgatgacaaaggctgggagt

SEQ ID NO: 4104838 - DNA, 25 bp, Homo sapien
caccattcagtaagacccctctgta

SEQ ID NO: 4104839 - DNA, 25 bp, Homo sapien
ccaacaagataccttggaggcgact

SEQ ID NO: 4104840 - DNA, 25 bp, Homo sapien
ggaggcgacttaaaccattccttca

SEQ ID NO: 4104841 - DNA, 25 bp, Homo sapien
cagggcagccaacattcccagacag

SEQ ID NO: 4104842 - DNA, 25 bp, Homo sapien
agggcagccaacattcccagacagc

SEQ ID NO: 4104843 - DNA, 25 bp, Homo sapien
aatgcaatgtcccattgaccctaag

SEQ ID NO: 4104844 - DNA, 25 bp, Homo sapien
ccattgaccctaagggctccaggtg

SEQ ID NO: 4104845 - DNA, 25 bp, Homo sapien
gatttcatattgtcgatgtagccca

SEQ ID NO: 4104846 - DNA, 25 bp, Homo sapien
cagatttcatattgtcgatgtagcc

SEQ ID NO: 4104847 - DNA, 25 bp, Homo sapien
ttcatattgtcgatgtagcccacat

SEQ ID NO: 4104848 - DNA, 25 bp, Homo sapien
tttcatattgtcgatgtagcccaca

SEQ ID NO: 4104849 - DNA, 25 bp, Homo sapien
atatagaaagcagttgaaccatcaa

SEQ ID NO: 4104850 - DNA, 25 bp, Homo sapien
tgaaccatcaagctacatgtcaagg

SEQ ID NO: 4104851 - DNA, 25 bp, Homo sapien
ttgaaccatcaagctacatgtcaag

SEQ ID NO: 4104852 - DNA, 25 bp, Homo sapien
gaaagtaccaatgaactgagattag

SEQ ID NO: 4104853 - DNA, 25 bp, Homo sapien
cactgtaatccggaagtaactttga

SEQ ID NO: 4104854 - DNA, 25 bp, Homo sapien
ttagaaaaatctccccataagccaa

SEQ ID NO: 4104855 - DNA, 25 bp, Homo sapien
taagccaaggacatagtctgaaagt

SEQ ID NO: 4104856 - DNA, 25 bp, Homo sapien
cctgtgggatctcattccattagaa

SEQ ID NO: 4104857 - DNA, 25 bp, Homo sapien
tctcaacttgtgtgaagatacagag

SEQ ID NO: 4104858 - DNA, 25 bp, Homo sapien
tccattagaaataaacgcttccgtc

SEQ ID NO: 4104859 - DNA, 25 bp, Homo sapien
tccacttgttctgtctgtactatgc

SEQ ID NO: 4104860 - DNA, 25 bp, Homo sapien
tctgcttggatttagaaccctgtac

SEQ ID NO: 4104861 - DNA, 25 bp, Homo sapien
tagattgtggggtcatcaggcctct

SEQ ID NO: 4104862 - DNA, 25 bp, Homo sapien
gctctgaatgtaggccaaaggctat

SEQ ID NO: 4104863 - DNA, 25 bp, Homo sapien
tatagtacaggaccatagattgtgg

SEQ ID NO: 4104864 - DNA, 25 bp, Homo sapien
tctgagagtgcaagtcccccaacaa

SEQ ID NO: 4104865 - DNA, 25 bp, Homo sapien
gagccctgagggcattgctatagca

SEQ ID NO: 4104866 - DNA, 25 bp, Homo sapien
caggtgagtcatccctccggtgagt

SEQ ID NO: 4104867 - DNA, 25 bp, Homo sapien
gcttcctatccagaaagggtccaga

SEQ ID NO: 4104868 - DNA, 25 bp, Homo sapien
taatctacacatacagaggagcccg

SEQ ID NO: 4104869 - DNA, 25 bp, Homo sapien
agcactgagactgtagttaatttgt

SEQ ID NO: 4104870 - DNA, 25 bp, Homo sapien
cattctcagctcttatctcttgacc

SEQ ID NO: 4104871 - DNA, 25 bp, Homo sapien
gtagttaatttgtgagggtcatcca

SEQ ID NO: 4104872 - DNA, 25 bp, Homo sapien
gctcttatctcttgaccaattttcc

SEQ ID NO: 4104873 - DNA, 25 bp, Homo sapien
gcttagagccttccccagtgtggac

SEQ ID NO: 4104874 - DNA, 25 bp, Homo sapien
caactcctggtcttcgtggattgaa

SEQ ID NO: 4104875 - DNA, 25 bp, Homo sapien
tttcgtgaatatgcctctgtaatcc

SEQ ID NO: 4104876 - DNA, 25 bp, Homo sapien
tcataacttctttgatgggcaagct

SEQ ID NO: 4104877 - DNA, 25 bp, Homo sapien
gctctctcgtagctgccaatcatgt

SEQ ID NO: 4104878 - DNA, 25 bp, Homo sapien
gaaacaggaaactcctcgccaacag

SEQ ID NO: 4104879 - DNA, 25 bp, Homo sapien
actcaacttcaactcagcgctgcgg

SEQ ID NO: 4104880 - DNA, 25 bp, Homo sapien
ccgtgcgcgcgagtgactcactcaa

SEQ ID NO: 4104881 - DNA, 25 bp, Homo sapien
ttcccggacccctggctgcgcctcc

SEQ ID NO: 4104882 - DNA, 25 bp, Homo sapien
atgtggcgcccgctcgccagccagg

SEQ ID NO: 4104883 - DNA, 25 bp, Homo sapien
gatgtgcgggccagatgtggcgccc

SEQ ID NO: 4104884 - DNA, 25 bp, Homo sapien
ccggcagcgcagatgtgcgggccag

SEQ ID NO: 4104885 - DNA, 25 bp, Homo sapien
gatcgtgctggcgatacgcgtccac

SEQ ID NO: 4104886 - DNA, 25 bp, Homo sapien
acttctgaacgtgcggtgggatcgt

SEQ ID NO: 4104887 - DNA, 25 bp, Homo sapien
ccgacttctgaacgtgcggtgggat

SEQ ID NO: 4104888 - DNA, 25 bp, Homo sapien
gtccacaggacgatgtgcagcggcc

SEQ ID NO: 4104889 - DNA, 25 bp, Homo sapien
tcgaacgcggccaacacaacgcctt

SEQ ID NO: 4104890 - DNA, 25 bp, Homo sapien
gctcgcctcgaacgcggccaacaca

SEQ ID NO: 4104891 - DNA, 25 bp, Homo sapien
ctcgaacgcggccaacacaacgcct

SEQ ID NO: 4104892 - DNA, 25 bp, Homo sapien
gtgggggctcgcctcgaacgcggcc

SEQ ID NO: 4104893 - DNA, 25 bp, Homo sapien
tcagtggagccagctaactttcttt

SEQ ID NO: 4104894 - DNA, 25 bp, Homo sapien
ttttgaacgggtggctcagaaagag

SEQ ID NO: 4104895 - DNA, 25 bp, Homo sapien
ccggccgccttcagataaccaactt

SEQ ID NO: 4104896 - DNA, 25 bp, Homo sapien
gcctgagggaaagcgtggccgtctc

SEQ ID NO: 4104897 - DNA, 25 bp, Homo sapien
cagcgatcaggtgggtagcctagtt

SEQ ID NO: 4104898 - DNA, 25 bp, Homo sapien
tcttgttccaggcaaaatctacagc

SEQ ID NO: 4104899 - DNA, 25 bp, Homo sapien
gagggattctcggtttcacctgagc

SEQ ID NO: 4104900 - DNA, 25 bp, Homo sapien
ctctagcacccagtaggcattcagt

SEQ ID NO: 4104901 - DNA, 25 bp, Homo sapien
cagtggatgggcagtcctattacag

SEQ ID NO: 4104902 - DNA, 25 bp, Homo sapien
cagctggggcagatgatttcatctt

SEQ ID NO: 4104903 - DNA, 25 bp, Homo sapien
gatgggcagtcctattacagctggg

SEQ ID NO: 4104904 - DNA, 25 bp, Homo sapien
tggatgggcagtcctattacagctg

SEQ ID NO: 4104905 - DNA, 25 bp, Homo sapien
aaagatgcccgtattcctgattagg

SEQ ID NO: 4104906 - DNA, 25 bp, Homo sapien
taaagagaagctgtccccataagaa

SEQ ID NO: 4104907 - DNA, 25 bp, Homo sapien
tcttatgatgggtggacaaaaccct

SEQ ID NO: 4104908 - DNA, 25 bp, Homo sapien
aaactacaggactgcagaaactggc

SEQ ID NO: 4104909 - DNA, 25 bp, Homo sapien
agcccctggaaggagttcagtgcct

SEQ ID NO: 4104910 - DNA, 25 bp, Homo sapien
ggtccaaggtggttcaaatactgcc

SEQ ID NO: 4104911 - DNA, 25 bp, Homo sapien
ggattttaaggtcaagaagagcatg

SEQ ID NO: 4104912 - DNA, 25 bp, Homo sapien
tgcctctatatggtgtgtggacaca

SEQ ID NO: 4104913 - DNA, 25 bp, Homo sapien
cggaacgaggtctggacagaaccta

SEQ ID NO: 4104914 - DNA, 25 bp, Homo sapien
caaactggcacttaaggctcccata

SEQ ID NO: 4104915 - DNA, 25 bp, Homo sapien
tctaggctactgtgtgcggaacgag

SEQ ID NO: 4104916 - DNA, 25 bp, Homo sapien
tgccagtgactcagagaatttagcc

SEQ ID NO: 4104917 - DNA, 25 bp, Homo sapien
caatttcttgtgatgtccagtgtaa

SEQ ID NO: 4104918 - DNA, 25 bp, Homo sapien
tgtgaactcgctcaatttcttgtga

SEQ ID NO: 4104919 - DNA, 25 bp, Homo sapien
ccagtggagttgtgaactcgctcaa

SEQ ID NO: 4104920 - DNA, 25 bp, Homo sapien
cagcaccagtggagttgtgaactcg

SEQ ID NO: 4104921 - DNA, 25 bp, Homo sapien
acgcctggcctgttactgcttttta

SEQ ID NO: 4104922 - DNA, 25 bp, Homo sapien
ctgctttttaaagggaatacacaca

SEQ ID NO: 4104923 - DNA, 25 bp, Homo sapien
tactgctttttaaagggaatacaca

SEQ ID NO: 4104924 - DNA, 25 bp, Homo sapien
accacgcctggcctgttactgcttt

SEQ ID NO: 4104925 - DNA, 25 bp, Homo sapien
cagaaagttgtgaggtacttttcca

SEQ ID NO: 4104926 - DNA, 25 bp, Homo sapien
ctgggccacagaaagttgtgaggta

SEQ ID NO: 4104927 - DNA, 25 bp, Homo sapien
gggccacagaaagttgtgaggtact

SEQ ID NO: 4104928 - DNA, 25 bp, Homo sapien
cacagaaagttgtgaggtacttttc

SEQ ID NO: 4104929 - DNA, 25 bp, Homo sapien
gaaacattaagcacttagaccgcat

SEQ ID NO: 4104930 - DNA, 25 bp, Homo sapien
gctagactaagaaacattaagcact

SEQ ID NO: 4104931 - DNA, 25 bp, Homo sapien
tgctagactaagaaacattaagcac

SEQ ID NO: 4104932 - DNA, 25 bp, Homo sapien
taagaaacattaagcacttagaccg

SEQ ID NO: 4104933 - DNA, 25 bp, Homo sapien
aaaggaggaaccgttgctggaggca

SEQ ID NO: 4104934 - DNA, 25 bp, Homo sapien
cgttgctggaggcacaagattttgc

SEQ ID NO: 4104935 - DNA, 25 bp, Homo sapien
aggaaccgttgctggaggcacaaga

SEQ ID NO: 4104936 - DNA, 25 bp, Homo sapien
tggaggcacaagattttgccgccat

SEQ ID NO: 4104937 - DNA, 25 bp, Homo sapien
gaaacttgactgcaccgttgttgtc

SEQ ID NO: 4104938 - DNA, 25 bp, Homo sapien
acagttgtggaaacttgactgcacc

SEQ ID NO: 4104939 - DNA, 25 bp, Homo sapien
tgcaccgttgttgtcagtgactatc

SEQ ID NO: 4104940 - DNA, 25 bp, Homo sapien
tcagtgactatcatgtcgttattaa

SEQ ID NO: 4104941 - DNA, 25 bp, Homo sapien
aatgaataatatggcctccagacag

SEQ ID NO: 4104942 - DNA, 25 bp, Homo sapien
agtgaagagattcattggaagcgag

SEQ ID NO: 4104943 - DNA, 25 bp, Homo sapien
gaataatatggcctccagacagaaa

SEQ ID NO: 4104944 - DNA, 25 bp, Homo sapien
ctagagtgaagagattcattggaag

SEQ ID NO: 4104945 - DNA, 25 bp, Homo sapien
ttcataatgcactttggagaagcag

SEQ ID NO: 4104946 - DNA, 25 bp, Homo sapien
tgtctctagtgttatgttctcgtca

SEQ ID NO: 4104947 - DNA, 25 bp, Homo sapien
tggcaaactgtctctagtgttatgt

SEQ ID NO: 4104948 - DNA, 25 bp, Homo sapien
catgaagaaagtctcaccaggcttt

SEQ ID NO: 4104949 - DNA, 25 bp, Homo sapien
gatgttgtcattgcactcatcagag

SEQ ID NO: 4104950 - DNA, 25 bp, Homo sapien
tgctaacagctaacagacagtgaca

SEQ ID NO: 4104951 - DNA, 25 bp, Homo sapien
gattaaagcaaagtgagcccctcca

SEQ ID NO: 4104952 - DNA, 25 bp, Homo sapien
cactggcccaacatagcagagctaa

SEQ ID NO: 4104953 - DNA, 25 bp, Homo sapien
cagtgacatgtcaggcaacgttgca

SEQ ID NO: 4104954 - DNA, 25 bp, Homo sapien
ttaaacatagacaggaaaccgcgtg

SEQ ID NO: 4104955 - DNA, 25 bp, Homo sapien
tcttatgtaagttgtgcagcctccc

SEQ ID NO: 4104956 - DNA, 25 bp, Homo sapien
gatgctaatgcaataggccccagag

SEQ ID NO: 4104957 - DNA, 25 bp, Homo sapien
caagtcctggtttctaagctagcaa

SEQ ID NO: 4104958 - DNA, 25 bp, Homo sapien
gctcctttgcaatcgattgtttgaa

SEQ ID NO: 4104959 - DNA, 25 bp, Homo sapien
tgcaatcgattgtttgaacctatat

SEQ ID NO: 4104960 - DNA, 25 bp, Homo sapien
tgctcctttgcaatcgattgtttga

SEQ ID NO: 4104961 - DNA, 25 bp, Homo sapien
cctttgcaatcgattgtttgaacct

SEQ ID NO: 4104962 - DNA, 25 bp, Homo sapien
gggagctccgcagtgtagaatttga

SEQ ID NO: 4104963 - DNA, 25 bp, Homo sapien
gacttacgctcaccatttagacatt

SEQ ID NO: 4104964 - DNA, 25 bp, Homo sapien
ttttccaggacttgctagagcagga

SEQ ID NO: 4104965 - DNA, 25 bp, Homo sapien
tacttcaagaagtccatggcacaga

SEQ ID NO: 4104966 - DNA, 25 bp, Homo sapien
gaactccatgagcttccgcgtcttg

SEQ ID NO: 4104967 - DNA, 25 bp, Homo sapien
tatagacctcagcaaagcgaccttt

SEQ ID NO: 4104968 - DNA, 25 bp, Homo sapien
gatcagccagtattgtttccccaac

SEQ ID NO: 4104969 - DNA, 25 bp, Homo sapien
gatggcacagtgctcgctgaactcc

SEQ ID NO: 4104970 - DNA, 25 bp, Homo sapien
ggtcatccacagacagagtagggtc

SEQ ID NO: 4104971 - DNA, 25 bp, Homo sapien
cgttcttcacgaggatattggagct

SEQ ID NO: 4104972 - DNA, 25 bp, Homo sapien
cacaggcagcaggttaggtcgttct

SEQ ID NO: 4104973 - DNA, 25 bp, Homo sapien
tccagacgcagggaaagcccaaagt

SEQ ID NO: 4104974 - DNA, 25 bp, Homo sapien
tcggtctgcttgaaggactcaacat

SEQ ID NO: 4104975 - DNA, 25 bp, Homo sapien
tcccactgcattacagcgagatgtc

SEQ ID NO: 4104976 - DNA, 25 bp, Homo sapien
gccatggagtagacatcggtctgct

SEQ ID NO: 4104977 - DNA, 25 bp, Homo sapien
tcatcctggattctaggacttctgg

SEQ ID NO: 4104978 - DNA, 25 bp, Homo sapien
cctgggaggctatgacagtgtgttc

SEQ ID NO: 4104979 - DNA, 25 bp, Homo sapien
tctaacagtgaaaaggactcagcat

SEQ ID NO: 4104980 - DNA, 25 bp, Homo sapien
catacaactgcagagaagacatagc

SEQ ID NO: 4104981 - DNA, 25 bp, Homo sapien
gcaccccagatgtttgttgcccatt

SEQ ID NO: 4104982 - DNA, 25 bp, Homo sapien
cccacgctggagaattggctatgca

SEQ ID NO: 4104983 - DNA, 25 bp, Homo sapien
tgttgggtagtttggaccagtgacc

SEQ ID NO: 4104984 - DNA, 25 bp, Homo sapien
tcagctagataggaagtgccatccc

SEQ ID NO: 4104985 - DNA, 25 bp, Homo sapien
agtggtgccaactgaatctgccttg

SEQ ID NO: 4104986 - DNA, 25 bp, Homo sapien
gaagtggccctgatccatgatccca

SEQ ID NO: 4104987 - DNA, 25 bp, Homo sapien
gcctttcatgtcacagaagtggccc

SEQ ID NO: 4104988 - DNA, 25 bp, Homo sapien
gtagctggctcgatgggtcagatca

SEQ ID NO: 4104989 - DNA, 25 bp, Homo sapien
ggcaggaccatacctcttgagcagg

SEQ ID NO: 4104990 - DNA, 25 bp, Homo sapien
tacgtgtcagcttctattcaaaggc

SEQ ID NO: 4104991 - DNA, 25 bp, Homo sapien
tggaagtcagtgtgcttgcaggcca

SEQ ID NO: 4104992 - DNA, 25 bp, Homo sapien
cagactgaaagcctgggacagagat

SEQ ID NO: 4104993 - DNA, 25 bp, Homo sapien
aacttgacaatacactaaggagccc

SEQ ID NO: 4104994 - DNA, 25 bp, Homo sapien
taccaatggtcgttcctaggatgag

SEQ ID NO: 4104995 - DNA, 25 bp, Homo sapien
gatattcaattgcagcgatcaggca

SEQ ID NO: 4104996 - DNA, 25 bp, Homo sapien
cagagatagcctgaaccctgcgaga

SEQ ID NO: 4104997 - DNA, 25 bp, Homo sapien
tgccagccaggtgggtaccaatggt

SEQ ID NO: 4104998 - DNA, 25 bp, Homo sapien
tattcccaagggatacaaggcctgc

SEQ ID NO: 4104999 - DNA, 25 bp, Homo sapien
taggtactctgtggatcaaagcaag

SEQ ID NO: 4105000 - DNA, 25 bp, Homo sapien
tccttgagactataaacgcagagcc

SEQ ID NO: 4105001 - DNA, 25 bp, Homo sapien
ggatcagaataaaccccagctgtca

SEQ ID NO: 4105002 - DNA, 25 bp, Homo sapien
tttctggtcgccctcgatctctcaa

SEQ ID NO: 4105003 - DNA, 25 bp, Homo sapien
tgctttcgacacaggggtgctcccg

SEQ ID NO: 4105004 - DNA, 25 bp, Homo sapien
ctgggaatttctggtcgccctcgat

SEQ ID NO: 4105005 - DNA, 25 bp, Homo sapien
tctcaacacgttgtccttcatgctt

SEQ ID NO: 4105006 - DNA, 25 bp, Homo sapien
cggaatagtttctctgcccctcaaa

SEQ ID NO: 4105007 - DNA, 25 bp, Homo sapien
tgcatgcatctatgaggtacatttg

SEQ ID NO: 4105008 - DNA, 25 bp, Homo sapien
tataactgatgaactaacactgacg

SEQ ID NO: 4105009 - DNA, 25 bp, Homo sapien
tccattcccctaaatttctggcagc

SEQ ID NO: 4105010 - DNA, 25 bp, Homo sapien
tctgggtcgtggtcccagcactcag

SEQ ID NO: 4105011 - DNA, 25 bp, Homo sapien
tgctccagctcactgaagcgttctg

SEQ ID NO: 4105012 - DNA, 25 bp, Homo sapien
cgagagcctgtccagatgctccagc

SEQ ID NO: 4105013 - DNA, 25 bp, Homo sapien
gtttagggagccgtcttcaggaatc

SEQ ID NO: 4105014 - DNA, 25 bp, Homo sapien
gtcttgtaatggtgtccggaccggg

SEQ ID NO: 4105015 - DNA, 25 bp, Homo sapien
cccggtccggacaccattacaagac

SEQ ID NO: 4105016 - DNA, 25 bp, Homo sapien
caagtggaatttctaggcgcctcta

SEQ ID NO: 4105017 - DNA, 25 bp, Homo sapien
tcctgaggaagtgctaacacagctt

SEQ ID NO: 4105018 - DNA, 25 bp, Homo sapien
cgtggactggagataactgaaaacc

SEQ ID NO: 4105019 - DNA, 25 bp, Homo sapien
tggtatcagcatgccctacggtgca

SEQ ID NO: 4105020 - DNA, 25 bp, Homo sapien
ctaggaatgggaacaggaggcagga

SEQ ID NO: 4105021 - DNA, 25 bp, Homo sapien
aataaccaaatgaggcaaatggatt

SEQ ID NO: 4105022 - DNA, 25 bp, Homo sapien
gtcagttgagaaagacagtatgaaa

SEQ ID NO: 4105023 - DNA, 25 bp, Homo sapien
ccaaatgaggcaaatggatttagct

SEQ ID NO: 4105024 - DNA, 25 bp, Homo sapien
ggactgtgagactgtcagttgagaa

SEQ ID NO: 4105025 - DNA, 25 bp, Homo sapien
gaaaagttctctgtcacctgaagac

SEQ ID NO: 4105026 - DNA, 25 bp, Homo sapien
cagcccggagcccatgtgcatttga

SEQ ID NO: 4105027 - DNA, 25 bp, Homo sapien
ccttaggaccagaccattagtgtgt

SEQ ID NO: 4105028 - DNA, 25 bp, Homo sapien
taaccccagcaaaacaaagcgtgga

SEQ ID NO: 4105029 - DNA, 25 bp, Homo sapien
tccagctttataacgtaggcagggc

SEQ ID NO: 4105030 - DNA, 25 bp, Homo sapien
ccagccgaccttgggtgatacacca

SEQ ID NO: 4105031 - DNA, 25 bp, Homo sapien
cattcacctggttgagaaagccctt

SEQ ID NO: 4105032 - DNA, 25 bp, Homo sapien
gatggtaatggagctagacaacccc

SEQ ID NO: 4105033 - DNA, 25 bp, Homo sapien
cctcaaatgaacaagggagagtctt

SEQ ID NO: 4105034 - DNA, 25 bp, Homo sapien
tggctaaagctttgcagtgggttga

SEQ ID NO: 4105035 - DNA, 25 bp, Homo sapien
agcagctctagggatctaatacgag

SEQ ID NO: 4105036 - DNA, 25 bp, Homo sapien
gagatctgtccatgccttagtcttc

SEQ ID NO: 4105037 - DNA, 25 bp, Homo sapien
gtgtcagaggctgttaaacacaggg

SEQ ID NO: 4105038 - DNA, 25 bp, Homo sapien
ctggaaaaatgatggatgttcaaag

SEQ ID NO: 4105039 - DNA, 25 bp, Homo sapien
gagtaccatggattgctcctacatt

SEQ ID NO: 4105040 - DNA, 25 bp, Homo sapien
tatgtgcaaacatttagataaagag

SEQ ID NO: 4105041 - DNA, 25 bp, Homo sapien
gctcatgtttaagacctgaactctg

SEQ ID NO: 4105042 - DNA, 25 bp, Homo sapien
aatggtgatcggagttcagtcctca

SEQ ID NO: 4105043 - DNA, 25 bp, Homo sapien
catgggtttaactgcctccctcggg

SEQ ID NO: 4105044 - DNA, 25 bp, Homo sapien
gaagcagggcctctaggtcataggt

SEQ ID NO: 4105045 - DNA, 25 bp, Homo sapien
gcatgactcagcgtagtccataggg

SEQ ID NO: 4105046 - DNA, 25 bp, Homo sapien
caaggtatggccacattaacagctt

SEQ ID NO: 4105047 - DNA, 25 bp, Homo sapien
ttgtgccaacaatggagacatttgt

SEQ ID NO: 4105048 - DNA, 25 bp, Homo sapien
gagctctgtcccaaatgtagggtct

SEQ ID NO: 4105049 - DNA, 25 bp, Homo sapien
gcccacactatgcacctgaataaat

SEQ ID NO: 4105050 - DNA, 25 bp, Homo sapien
cccacactatgcacctgaataaatt

SEQ ID NO: 4105051 - DNA, 25 bp, Homo sapien
ttgggggcatctgtttagcaattag

SEQ ID NO: 4105052 - DNA, 25 bp, Homo sapien
tgatgttgggggcatctgtttagca

SEQ ID NO: 4105053 - DNA, 25 bp, Homo sapien
gagaagattgttaaaccgtaatgga

SEQ ID NO: 4105054 - DNA, 25 bp, Homo sapien
tgttaaaccgtaatggaaacacagc

SEQ ID NO: 4105055 - DNA, 25 bp, Homo sapien
tctgggtaagtcatgctctgccgga

SEQ ID NO: 4105056 - DNA, 25 bp, Homo sapien
tctgccggaaatgaagggatgagaa

SEQ ID NO: 4105057 - DNA, 25 bp, Homo sapien
cttctctggcttcaagaataagtgg

SEQ ID NO: 4105058 - DNA, 25 bp, Homo sapien
ttctctggcttcaagaataagtgga

SEQ ID NO: 4105059 - DNA, 25 bp, Homo sapien
gcttcaagaataagtggacttttca

SEQ ID NO: 4105060 - DNA, 25 bp, Homo sapien
cttcaagaataagtggacttttcat

SEQ ID NO: 4105061 - DNA, 25 bp, Homo sapien
cagctagtgtggcatttctcataac

SEQ ID NO: 4105062 - DNA, 25 bp, Homo sapien
gcaatgttgtttgggcatctcggta

SEQ ID NO: 4105063 - DNA, 25 bp, Homo sapien
gcatttctcataaccttgcctttgc

SEQ ID NO: 4105064 - DNA, 25 bp, Homo sapien
ccttgcctttgcaatgttgtttggg

SEQ ID NO: 4105065 - DNA, 25 bp, Homo sapien
gaggcctgtcgaattgtggatttgc

SEQ ID NO: 4105066 - DNA, 25 bp, Homo sapien
actaaatccaaccagctccatcgtg

SEQ ID NO: 4105067 - DNA, 25 bp, Homo sapien
tgctccaatctgcagaggcctgtcg

SEQ ID NO: 4105068 - DNA, 25 bp, Homo sapien
ttgccttacgagatgccagcactaa

SEQ ID NO: 4105069 - DNA, 25 bp, Homo sapien
gtctctttggcatccaaagctctcc

SEQ ID NO: 4105070 - DNA, 25 bp, Homo sapien
tgtctctttggcatccaaagctctc

SEQ ID NO: 4105071 - DNA, 25 bp, Homo sapien
tcgaatcttgtctctttggcatcca

SEQ ID NO: 4105072 - DNA, 25 bp, Homo sapien
caatcgaatcttgtctctttggcat

SEQ ID NO: 4105073 - DNA, 25 bp, Homo sapien
gacatccagttctagaaatactggt

SEQ ID NO: 4105074 - DNA, 25 bp, Homo sapien
tataccctcgacatccagttctaga

SEQ ID NO: 4105075 - DNA, 25 bp, Homo sapien
agattataccctcgacatccagttc

SEQ ID NO: 4105076 - DNA, 25 bp, Homo sapien
cctcgacatccagttctagaaatac

SEQ ID NO: 4105077 - DNA, 25 bp, Homo sapien
tcttctgttttattatcagtcttag

SEQ ID NO: 4105078 - DNA, 25 bp, Homo sapien
tctgttttattatcagtcttagaca

SEQ ID NO: 4105079 - DNA, 25 bp, Homo sapien
tattatcagtcttagacagcaccat

SEQ ID NO: 4105080 - DNA, 25 bp, Homo sapien
gttttattatcagtcttagacagca

SEQ ID NO: 4105081 - DNA, 25 bp, Homo sapien
tggaggatcatccaaaactgactga

SEQ ID NO: 4105082 - DNA, 25 bp, Homo sapien
tatggaggatcatccaaaactgact

SEQ ID NO: 4105083 - DNA, 25 bp, Homo sapien
aaactgactgaacatgaacaagaca

SEQ ID NO: 4105084 - DNA, 25 bp, Homo sapien
ggtatggaggatcatccaaaactga

SEQ ID NO: 4105085 - DNA, 25 bp, Homo sapien
tcctgtggacggtaacgactcagcg

SEQ ID NO: 4105086 - DNA, 25 bp, Homo sapien
tttgcactggtgttctctccgcggc

SEQ ID NO: 4105087 - DNA, 25 bp, Homo sapien
caaatattaacagagagccgcgggc

SEQ ID NO: 4105088 - DNA, 25 bp, Homo sapien
ggcactggagccttggatagcaaag

SEQ ID NO: 4105089 - DNA, 25 bp, Homo sapien
gaagtaatcaatagtctacatgaga

SEQ ID NO: 4105090 - DNA, 25 bp, Homo sapien
gaggtgtcctgcacggctgaagtaa

SEQ ID NO: 4105091 - DNA, 25 bp, Homo sapien
acaggacagcagatcatgctgtaca

SEQ ID NO: 4105092 - DNA, 25 bp, Homo sapien
atagtctacatgagaaactggtctg

SEQ ID NO: 4105093 - DNA, 25 bp, Homo sapien
agcgtaagtacttctaaagacgtag

SEQ ID NO: 4105094 - DNA, 25 bp, Homo sapien
tgcaactgcccacatgaaatatccc

SEQ ID NO: 4105095 - DNA, 25 bp, Homo sapien
gaaggcttgcaactgcccacatgaa

SEQ ID NO: 4105096 - DNA, 25 bp, Homo sapien
aagacgtagtcccagaaggcttgca

SEQ ID NO: 4105097 - DNA, 25 bp, Homo sapien
aaatgtatgcaactttccctgaaac

SEQ ID NO: 4105098 - DNA, 25 bp, Homo sapien
tgtccttttcgtggcccaggataag

SEQ ID NO: 4105099 - DNA, 25 bp, Homo sapien
tcttgaacctgtgtttccttgtcaa

SEQ ID NO: 4105100 - DNA, 25 bp, Homo sapien
gatctgtgttttctcaccaccattt

SEQ ID NO: 4105101 - DNA, 25 bp, Homo sapien
cctgcctaggagagtatggtgagca

SEQ ID NO: 4105102 - DNA, 25 bp, Homo sapien
gccatgggctcctgcctaggagagt

SEQ ID NO: 4105103 - DNA, 25 bp, Homo sapien
tcctcagtggtcacgagcattgcca

SEQ ID NO: 4105104 - DNA, 25 bp, Homo sapien
cctcagtggtcacgagcattgccat

SEQ ID NO: 4105105 - DNA, 25 bp, Homo sapien
ttatcacagggatggtcagcaatcc

SEQ ID NO: 4105106 - DNA, 25 bp, Homo sapien
tgagcaccaaatttcttccctctgt

SEQ ID NO: 4105107 - DNA, 25 bp, Homo sapien
tgcatcatgagagcttcccattagg

SEQ ID NO: 4105108 - DNA, 25 bp, Homo sapien
tcacaatagaaagacctgtgcatca

SEQ ID NO: 4105109 - DNA, 25 bp, Homo sapien
tcttgtttccaatcagattgcagct

SEQ ID NO: 4105110 - DNA, 25 bp, Homo sapien
cttgtttccaatcagattgcagctt

SEQ ID NO: 4105111 - DNA, 25 bp, Homo sapien
tccaaatcctgaccccatgttatgt

SEQ ID NO: 4105112 - DNA, 25 bp, Homo sapien
gtcttgtttccaatcagattgcagc

SEQ ID NO: 4105113 - DNA, 25 bp, Homo sapien
ggaagatcagcagagtggtctccct

SEQ ID NO: 4105114 - DNA, 25 bp, Homo sapien
gagatatggtgtttcgttgtcgtag

SEQ ID NO: 4105115 - DNA, 25 bp, Homo sapien
aggagataggttcccgaggactgca

SEQ ID NO: 4105116 - DNA, 25 bp, Homo sapien
gatactgcaagatgacgtaggagga

SEQ ID NO: 4105117 - DNA, 25 bp, Homo sapien
tctgccttcgatcctgagggactgg

SEQ ID NO: 4105118 - DNA, 25 bp, Homo sapien
tgagatggagttagtgtctgccttc

SEQ ID NO: 4105119 - DNA, 25 bp, Homo sapien
tcgatcctgagggactggatgagca

SEQ ID NO: 4105120 - DNA, 25 bp, Homo sapien
ggactggatgagcagaccacctcca

SEQ ID NO: 4105121 - DNA, 25 bp, Homo sapien
gacatcggcatgatgggagcccatt

SEQ ID NO: 4105122 - DNA, 25 bp, Homo sapien
gagcccattgaatgttgtacaagca

SEQ ID NO: 4105123 - DNA, 25 bp, Homo sapien
gatgggagcccattgaatgttgtac

SEQ ID NO: 4105124 - DNA, 25 bp, Homo sapien
ccatgtagcaggaggacatcggcat

SEQ ID NO: 4105125 - DNA, 25 bp, Homo sapien
gagctaagaatcaatgcaaccccca

SEQ ID NO: 4105126 - DNA, 25 bp, Homo sapien
agctaagaatcaatgcaacccccat

SEQ ID NO: 4105127 - DNA, 25 bp, Homo sapien
gagagctaagaatcaatgcaacccc

SEQ ID NO: 4105128 - DNA, 25 bp, Homo sapien
agagctaagaatcaatgcaaccccc

SEQ ID NO: 4105129 - DNA, 25 bp, Homo sapien
tgctaatgcaagcagagaacggcat

SEQ ID NO: 4105130 - DNA, 25 bp, Homo sapien
gactgtagttgatattcctgtcagc

SEQ ID NO: 4105131 - DNA, 25 bp, Homo sapien
cctgtcagctcagtagaattagaac

SEQ ID NO: 4105132 - DNA, 25 bp, Homo sapien
ttgcataactctgcataacgctggg

SEQ ID NO: 4105133 - DNA, 25 bp, Homo sapien
tttctgaccattgcgactgggtgac

SEQ ID NO: 4105134 - DNA, 25 bp, Homo sapien
agcctgacagccttgtagtaatgct

SEQ ID NO: 4105135 - DNA, 25 bp, Homo sapien
gaggccgtttttctgaccattgcga

SEQ ID NO: 4105136 - DNA, 25 bp, Homo sapien
tgacagccttgtagtaatgctcagg

SEQ ID NO: 4105137 - DNA, 25 bp, Homo sapien
gctggttttctcagacaactcttat

SEQ ID NO: 4105138 - DNA, 25 bp, Homo sapien
tttccccagaatcagagcagctggt

SEQ ID NO: 4105139 - DNA, 25 bp, Homo sapien
atctcaatagccaatttttccccag

SEQ ID NO: 4105140 - DNA, 25 bp, Homo sapien
tcagagcagctggttttctcagaca

SEQ ID NO: 4105141 - DNA, 25 bp, Homo sapien
cctgtgtcctttcgagtaggtggag

SEQ ID NO: 4105142 - DNA, 25 bp, Homo sapien
cttaacaattctctgcaccccgtat

SEQ ID NO: 4105143 - DNA, 25 bp, Homo sapien
gacacagttctgagtcactggcttg

SEQ ID NO: 4105144 - DNA, 25 bp, Homo sapien
tctattagggcgatgtgaagttcca

SEQ ID NO: 4105145 - DNA, 25 bp, Homo sapien
gggaggcagggtgcgtgtggacaaa

SEQ ID NO: 4105146 - DNA, 25 bp, Homo sapien
ggccctcctactgcccattgcaggg

SEQ ID NO: 4105147 - DNA, 25 bp, Homo sapien
aatccgtggatttcctcagatttca

SEQ ID NO: 4105148 - DNA, 25 bp, Homo sapien
gtggacaaatccgtggatttcctca

SEQ ID NO: 4105149 - DNA, 25 bp, Homo sapien
gcctgagctaaataggaacaattgt

SEQ ID NO: 4105150 - DNA, 25 bp, Homo sapien
tgcttttcacgctcctgcccatgaa

SEQ ID NO: 4105151 - DNA, 25 bp, Homo sapien
aaatgattctctgaacacagagctc

SEQ ID NO: 4105152 - DNA, 25 bp, Homo sapien
gtgtgaattctaactgacaggcctg

SEQ ID NO: 4105153 - DNA, 25 bp, Homo sapien
gaaaaggcccattgtggagaatgag

SEQ ID NO: 4105154 - DNA, 25 bp, Homo sapien
cccattgtggagaatgagtttctct

SEQ ID NO: 4105155 - DNA, 25 bp, Homo sapien
agtcttctgcagcaatacagttgta

SEQ ID NO: 4105156 - DNA, 25 bp, Homo sapien
tcatccagttgcattaggaatgcct

SEQ ID NO: 4105157 - DNA, 25 bp, Homo sapien
cactatccatggaccatgtaatgaa

SEQ ID NO: 4105158 - DNA, 25 bp, Homo sapien
gaatgcaaagggaaacatatccagc

SEQ ID NO: 4105159 - DNA, 25 bp, Homo sapien
aagggaaacatatccagcatggtag

SEQ ID NO: 4105160 - DNA, 25 bp, Homo sapien
tgcaagggaagggtgccttccactg

SEQ ID NO: 4105161 - DNA, 25 bp, Homo sapien
ccgatgagtggttccgggacttctt

SEQ ID NO: 4105162 - DNA, 25 bp, Homo sapien
tgctggtgccagatcctaagaagct

SEQ ID NO: 4105163 - DNA, 25 bp, Homo sapien
tttccagatgcatccagggagccca

SEQ ID NO: 4105164 - DNA, 25 bp, Homo sapien
cagcaatgatccatggtaaggacca

SEQ ID NO: 4105165 - DNA, 25 bp, Homo sapien
catttctggggctaataagaacata

SEQ ID NO: 4105166 - DNA, 25 bp, Homo sapien
ctggagaccatggagggagctgact

SEQ ID NO: 4105167 - DNA, 25 bp, Homo sapien
tgcagataggatgctctgaaagatt

SEQ ID NO: 4105168 - DNA, 25 bp, Homo sapien
gagggagctgacttaaggctttctt

SEQ ID NO: 4105169 - DNA, 25 bp, Homo sapien
atactccacactgcttggtactttt

SEQ ID NO: 4105170 - DNA, 25 bp, Homo sapien
gaatactccacactgcttggtactt

SEQ ID NO: 4105171 - DNA, 25 bp, Homo sapien
tactccacactgcttggtactttta

SEQ ID NO: 4105172 - DNA, 25 bp, Homo sapien
aatactccacactgcttggtacttt

SEQ ID NO: 4105173 - DNA, 25 bp, Homo sapien
gtgaatgtttttgcactgtagcagc

SEQ ID NO: 4105174 - DNA, 25 bp, Homo sapien
aatgtttttgcactgtagcagctct

SEQ ID NO: 4105175 - DNA, 25 bp, Homo sapien
tcttttgggtggtgataagagtcgg

SEQ ID NO: 4105176 - DNA, 25 bp, Homo sapien
gaatgtttttgcactgtagcagctc

SEQ ID NO: 4105177 - DNA, 25 bp, Homo sapien
gctatatcaatgatgattcccactg

SEQ ID NO: 4105178 - DNA, 25 bp, Homo sapien
cagctatatcaatgatgattcccac

SEQ ID NO: 4105179 - DNA, 25 bp, Homo sapien
agctatatcaatgatgattcccact

SEQ ID NO: 4105180 - DNA, 25 bp, Homo sapien
tacagttgagtcatagggctcaagc

SEQ ID NO: 4105181 - DNA, 25 bp, Homo sapien
gaacagctggaaaagtaaaggtcac

SEQ ID NO: 4105182 - DNA, 25 bp, Homo sapien
taaccaagtaccacagactagtgat

SEQ ID NO: 4105183 - DNA, 25 bp, Homo sapien
acatgtattagtctgcgagggctgc

SEQ ID NO: 4105184 - DNA, 25 bp, Homo sapien
cctgtggatccatctcccttgcttt

SEQ ID NO: 4105185 - DNA, 25 bp, Homo sapien
gcaaccgtcacattttaggagctct

SEQ ID NO: 4105186 - DNA, 25 bp, Homo sapien
aaccgtcacattttaggagctctcc

SEQ ID NO: 4105187 - DNA, 25 bp, Homo sapien
actgctactgcaaccgtcacatttt

SEQ ID NO: 4105188 - DNA, 25 bp, Homo sapien
tactgcaaccgtcacattttaggag

SEQ ID NO: 4105189 - DNA, 25 bp, Homo sapien
catttgcatcaagaatgtgcttcct

SEQ ID NO: 4105190 - DNA, 25 bp, Homo sapien
gcctggacttctaatttgagccttt

SEQ ID NO: 4105191 - DNA, 25 bp, Homo sapien
gtgcttcctaaattgccataagaca

SEQ ID NO: 4105192 - DNA, 25 bp, Homo sapien
taatcttgtttaaagaaggcctgga

SEQ ID NO: 4105193 - DNA, 25 bp, Homo sapien
aggcgaggcacttgctcctgcatcc

SEQ ID NO: 4105194 - DNA, 25 bp, Homo sapien
ccagtagcctgctgtaaatcagagc

SEQ ID NO: 4105195 - DNA, 25 bp, Homo sapien
gacaaggcaaacagcgaaagcctcc

SEQ ID NO: 4105196 - DNA, 25 bp, Homo sapien
ccaattcctgtttgtgggccatgtc

SEQ ID NO: 4105197 - DNA, 25 bp, Homo sapien
catttggatattgggtgggtaagac

SEQ ID NO: 4105198 - DNA, 25 bp, Homo sapien
aagccagttctacctgcctctacgg

SEQ ID NO: 4105199 - DNA, 25 bp, Homo sapien
gccgaatgtcacctattccccaggg

SEQ ID NO: 4105200 - DNA, 25 bp, Homo sapien
tattccccagggtagaccaaagcca

SEQ ID NO: 4105201 - DNA, 25 bp, Homo sapien
agaagctggtgtaaagccgaatgtc

SEQ ID NO: 4105202 - DNA, 25 bp, Homo sapien
cagtgtgtcctgttggctttctata

SEQ ID NO: 4105203 - DNA, 25 bp, Homo sapien
cctcgagtgtgcctttgttctgtaa

SEQ ID NO: 4105204 - DNA, 25 bp, Homo sapien
gaatgggaatgccagtagatgagtc

SEQ ID NO: 4105205 - DNA, 25 bp, Homo sapien
ggctttctataccacttgggttcag

SEQ ID NO: 4105206 - DNA, 25 bp, Homo sapien
ccacctccatcactgaccgagatgc

SEQ ID NO: 4105207 - DNA, 25 bp, Homo sapien
ccattatccttttgcaacacccctc

SEQ ID NO: 4105208 - DNA, 25 bp, Homo sapien
caatccctgctccttccattatcct

SEQ ID NO: 4105209 - DNA, 25 bp, Homo sapien
ccatccttgctttcccaatccctgc

SEQ ID NO: 4105210 - DNA, 25 bp, Homo sapien
attacacccatcattgatttcattg

SEQ ID NO: 4105211 - DNA, 25 bp, Homo sapien
acacccatcattgatttcattggct

SEQ ID NO: 4105212 - DNA, 25 bp, Homo sapien
ttcttcatcttattacacccatcat

SEQ ID NO: 4105213 - DNA, 25 bp, Homo sapien
tcttcatcttattacacccatcatt

SEQ ID NO: 4105214 - DNA, 25 bp, Homo sapien
gatcagacgagattgggtaccttca

SEQ ID NO: 4105215 - DNA, 25 bp, Homo sapien
cgagattgggtaccttcagggtggt

SEQ ID NO: 4105216 - DNA, 25 bp, Homo sapien
cagacgagattgggtaccttcaggg

SEQ ID NO: 4105217 - DNA, 25 bp, Homo sapien
gagatcagacgagattgggtacctt

SEQ ID NO: 4105218 - DNA, 25 bp, Homo sapien
tgttagccctgatttgcctcaagga

SEQ ID NO: 4105219 - DNA, 25 bp, Homo sapien
ttgtggctggagtgttagccctgat

SEQ ID NO: 4105220 - DNA, 25 bp, Homo sapien
tcaaggattccaagggagattcatt

SEQ ID NO: 4105221 - DNA, 25 bp, Homo sapien
ctgaagagggtagtacaagggtgga

SEQ ID NO: 4105222 - DNA, 25 bp, Homo sapien
gaactgcgtctatgtgtaaatcaga

SEQ ID NO: 4105223 - DNA, 25 bp, Homo sapien
gaaagtccaatcctctccctagtat

SEQ ID NO: 4105224 - DNA, 25 bp, Homo sapien
ggactcacaccctaattcttcatgg

SEQ ID NO: 4105225 - DNA, 25 bp, Homo sapien
tctgactccatttctagctgttgct

SEQ ID NO: 4105226 - DNA, 25 bp, Homo sapien
tccagtgggagctggcaaagtaaac

SEQ ID NO: 4105227 - DNA, 25 bp, Homo sapien
cacatccagtgggagctggcaaagt

SEQ ID NO: 4105228 - DNA, 25 bp, Homo sapien
gggagctggcaaagtaaacaaccaa

SEQ ID NO: 4105229 - DNA, 25 bp, Homo sapien
ggaccacatccagtgggagctggca

SEQ ID NO: 4105230 - DNA, 25 bp, Homo sapien
cagtgtccattaaggttaacgggca

SEQ ID NO: 4105231 - DNA, 25 bp, Homo sapien
gggctgcttaatgcagtgtccatta

SEQ ID NO: 4105232 - DNA, 25 bp, Homo sapien
gaactacctgaaaagaatcaatacc

SEQ ID NO: 4105233 - DNA, 25 bp, Homo sapien
agaatcaatacccactggatgagtc

SEQ ID NO: 4105234 - DNA, 25 bp, Homo sapien
taattgtgtgatgctctacctgccg

SEQ ID NO: 4105235 - DNA, 25 bp, Homo sapien
cacgaacttggtggcggaagacaac

SEQ ID NO: 4105236 - DNA, 25 bp, Homo sapien
tagagtccaccctagtcaaggatga

SEQ ID NO: 4105237 - DNA, 25 bp, Homo sapien
gttctgaggctctggacggacatac

SEQ ID NO: 4105238 - DNA, 25 bp, Homo sapien
gcatcccatgcacaaggaagtttgg

SEQ ID NO: 4105239 - DNA, 25 bp, Homo sapien
gggcagcttttgcagccagctgctt

SEQ ID NO: 4105240 - DNA, 25 bp, Homo sapien
cattgtgggcagcttttgcagccag

SEQ ID NO: 4105241 - DNA, 25 bp, Homo sapien
cagccagctgcttccggtgctttac

SEQ ID NO: 4105242 - DNA, 25 bp, Homo sapien
agcttttgcagccagctgcttccgg

SEQ ID NO: 4105243 - DNA, 25 bp, Homo sapien
agcaccaggcctgtagccatgaggt

SEQ ID NO: 4105244 - DNA, 25 bp, Homo sapien
tgagagtaatttctcgcatcaaaac

SEQ ID NO: 4105245 - DNA, 25 bp, Homo sapien
caccagtagccgtgctctggaagcg

SEQ ID NO: 4105246 - DNA, 25 bp, Homo sapien
ctggaagcgcagatccttttgaagt

SEQ ID NO: 4105247 - DNA, 25 bp, Homo sapien
cttttgaagttgagagtaatttctc

SEQ ID NO: 4105248 - DNA, 25 bp, Homo sapien
ggacagcacacagaatggtgccttc

SEQ ID NO: 4105249 - DNA, 25 bp, Homo sapien
acagcacacagaatggtgccttcaa

SEQ ID NO: 4105250 - DNA, 25 bp, Homo sapien
gacagcacacagaatggtgccttca

SEQ ID NO: 4105251 - DNA, 25 bp, Homo sapien
cagcacacagaatggtgccttcaaa

SEQ ID NO: 4105252 - DNA, 25 bp, Homo sapien
caacttccacatgtccaccatctat

SEQ ID NO: 4105253 - DNA, 25 bp, Homo sapien
tccaacttccacatgtccaccatct

SEQ ID NO: 4105254 - DNA, 25 bp, Homo sapien
ctccaacttccacatgtccaccatc

SEQ ID NO: 4105255 - DNA, 25 bp, Homo sapien
aacttccacatgtccaccatctatc

SEQ ID NO: 4105256 - DNA, 25 bp, Homo sapien
ccctgatgctgcctgtgtgataaat

SEQ ID NO: 4105257 - DNA, 25 bp, Homo sapien
caaggacaccgtgaacccagtggct

SEQ ID NO: 4105258 - DNA, 25 bp, Homo sapien
cctgatgctgcctgtgtgataaatt

SEQ ID NO: 4105259 - DNA, 25 bp, Homo sapien
cagcaaggacaccgtgaacccagtg

SEQ ID NO: 4105260 - DNA, 25 bp, Homo sapien
gttgaatgatgtccatgggccatta

SEQ ID NO: 4105261 - DNA, 25 bp, Homo sapien
ctggttgactccctggtgggtgctt

SEQ ID NO: 4105262 - DNA, 25 bp, Homo sapien
aagcctggggatgttgaatgatgtc

SEQ ID NO: 4105263 - DNA, 25 bp, Homo sapien
attttcctggttgactccctggtgg

SEQ ID NO: 4105264 - DNA, 25 bp, Homo sapien
aaggtcctgccccatacccagattg

SEQ ID NO: 4105265 - DNA, 25 bp, Homo sapien
tccagtcatatttcgacacggctgt

SEQ ID NO: 4105266 - DNA, 25 bp, Homo sapien
tcctgtgtcacgtgaaactatcatc

SEQ ID NO: 4105267 - DNA, 25 bp, Homo sapien
tcgggttcttagcattagatcacac

SEQ ID NO: 4105268 - DNA, 25 bp, Homo sapien
ttctaactcacataatgtacatgtg

SEQ ID NO: 4105269 - DNA, 25 bp, Homo sapien
ctaactcacataatgtacatgtgaa

SEQ ID NO: 4105270 - DNA, 25 bp, Homo sapien
aactcacataatgtacatgtgaaag

SEQ ID NO: 4105271 - DNA, 25 bp, Homo sapien
tcttctaactcacataatgtacatg

SEQ ID NO: 4105272 - DNA, 25 bp, Homo sapien
ttcatcacccttaggagtccatgct

SEQ ID NO: 4105273 - DNA, 25 bp, Homo sapien
ttgctgatgaaggtccctcatagaa

SEQ ID NO: 4105274 - DNA, 25 bp, Homo sapien
atcacccttaggagtccatgctcca

SEQ ID NO: 4105275 - DNA, 25 bp, Homo sapien
gtccctcatagaaggaagttgtgtc

SEQ ID NO: 4105276 - DNA, 25 bp, Homo sapien
tctgcagttgctaagtatggacctg

SEQ ID NO: 4105277 - DNA, 25 bp, Homo sapien
cttggcacaactgagcacctgagtt

SEQ ID NO: 4105278 - DNA, 25 bp, Homo sapien
gctttcctatggattggctctgcag

SEQ ID NO: 4105279 - DNA, 25 bp, Homo sapien
cacacctcagttggtactcagccag

SEQ ID NO: 4105280 - DNA, 25 bp, Homo sapien
gcataatctgatgcatgtgtgcctg

SEQ ID NO: 4105281 - DNA, 25 bp, Homo sapien
tgtgcctgctgctgtgatggtgccc

SEQ ID NO: 4105282 - DNA, 25 bp, Homo sapien
cttgcataatctgatgcatgtgtgc

SEQ ID NO: 4105283 - DNA, 25 bp, Homo sapien
taatctgatgcatgtgtgcctgctg

SEQ ID NO: 4105284 - DNA, 25 bp, Homo sapien
ggtatatggctactcctggctgcag

SEQ ID NO: 4105285 - DNA, 25 bp, Homo sapien
tcaacagaatggagataggcatggg

SEQ ID NO: 4105286 - DNA, 25 bp, Homo sapien
tccattcaatgtgacaaagactctg

SEQ ID NO: 4105287 - DNA, 25 bp, Homo sapien
tcctttaggcagaacaagacaagct

SEQ ID NO: 4105288 - DNA, 25 bp, Homo sapien
tttcaaactacaaatgccattcact

SEQ ID NO: 4105289 - DNA, 25 bp, Homo sapien
gcctaaagtaagcttgatatcttat

SEQ ID NO: 4105290 - DNA, 25 bp, Homo sapien
actgctgtatacacttctctgatcc

SEQ ID NO: 4105291 - DNA, 25 bp, Homo sapien
gagctggtgtttacatcgtttcaaa

SEQ ID NO: 4105292 - DNA, 25 bp, Homo sapien
tttggtaaagagtctctgcagttca

SEQ ID NO: 4105293 - DNA, 25 bp, Homo sapien
taaagagtctctgcagttcactcct

SEQ ID NO: 4105294 - DNA, 25 bp, Homo sapien
cattccaaaggctcttaccgcagaa

SEQ ID NO: 4105295 - DNA, 25 bp, Homo sapien
ggctcttaccgcagaatagtttctt

SEQ ID NO: 4105296 - DNA, 25 bp, Homo sapien
ccctgcctagtgctttggaaactca

SEQ ID NO: 4105297 - DNA, 25 bp, Homo sapien
tccaccagtgtcagaatatcagatg

SEQ ID NO: 4105298 - DNA, 25 bp, Homo sapien
caccagacgtaaggacttcaaagca

SEQ ID NO: 4105299 - DNA, 25 bp, Homo sapien
tcagatgctgtgtctaagaagggca

SEQ ID NO: 4105300 - DNA, 25 bp, Homo sapien
tcctagatctgtggccatctcttga

SEQ ID NO: 4105301 - DNA, 25 bp, Homo sapien
tagatctgtggccatctcttgatca

SEQ ID NO: 4105302 - DNA, 25 bp, Homo sapien
gatttcctagatctgtggccatctc

SEQ ID NO: 4105303 - DNA, 25 bp, Homo sapien
ctgcctgatttcctagatctgtggc

SEQ ID NO: 4105304 - DNA, 25 bp, Homo sapien
tggttctaagtaactagtggtgacg

SEQ ID NO: 4105305 - DNA, 25 bp, Homo sapien
tcagttttgcctggtacatgagagt

SEQ ID NO: 4105306 - DNA, 25 bp, Homo sapien
gtggtgacgttcagtttaatggatc

SEQ ID NO: 4105307 - DNA, 25 bp, Homo sapien
ggtactgctgcatcctgaattggtt

SEQ ID NO: 4105308 - DNA, 25 bp, Homo sapien
gtgccacagactgtatgattatggc

SEQ ID NO: 4105309 - DNA, 25 bp, Homo sapien
tgtgagttagaattcctggcatgga

SEQ ID NO: 4105310 - DNA, 25 bp, Homo sapien
gactgtatgattatggcctgatgcc

SEQ ID NO: 4105311 - DNA, 25 bp, Homo sapien
cctggcctcatttgtacctttttgt

SEQ ID NO: 4105312 - DNA, 25 bp, Homo sapien
gaatgaccctgcaatcttgatttag

SEQ ID NO: 4105313 - DNA, 25 bp, Homo sapien
tcacagaagcatggatgaactatag

SEQ ID NO: 4105314 - DNA, 25 bp, Homo sapien
caagcatattgttatcattccctca

SEQ ID NO: 4105315 - DNA, 25 bp, Homo sapien
gtctagctttaactaaccatcacag

SEQ ID NO: 4105316 - DNA, 25 bp, Homo sapien
tcattgtttcccttcctcaattttc

SEQ ID NO: 4105317 - DNA, 25 bp, Homo sapien
gaacagtgattcgacttgcaccgga

SEQ ID NO: 4105318 - DNA, 25 bp, Homo sapien
cgtcaatttacgagtcaggatacac

SEQ ID NO: 4105319 - DNA, 25 bp, Homo sapien
tggccttagggaccgagacttccaa

SEQ ID NO: 4105320 - DNA, 25 bp, Homo sapien
tgaaccagagacagatggccttagg

SEQ ID NO: 4105321 - DNA, 25 bp, Homo sapien
ctccgttatactggccccatggata

SEQ ID NO: 4105322 - DNA, 25 bp, Homo sapien
ttatactggccccatggataaaagc

SEQ ID NO: 4105323 - DNA, 25 bp, Homo sapien
atactggccccatggataaaagcct

SEQ ID NO: 4105324 - DNA, 25 bp, Homo sapien
cctcctccgttatactggccccatg

SEQ ID NO: 4105325 - DNA, 25 bp, Homo sapien
gcccgtgtgcttgccggcaattctg

SEQ ID NO: 4105326 - DNA, 25 bp, Homo sapien
aacggcccgtgtgcttgccggcaat

SEQ ID NO: 4105327 - DNA, 25 bp, Homo sapien
ggatcttgaacggcccgtgtgcttg

SEQ ID NO: 4105328 - DNA, 25 bp, Homo sapien
cttgaacggcccgtgtgcttgccgg

SEQ ID NO: 4105329 - DNA, 25 bp, Homo sapien
ggcctcatctccctggttatccccg

SEQ ID NO: 4105330 - DNA, 25 bp, Homo sapien
ttgagaggtgcctccagagaatgtc

SEQ ID NO: 4105331 - DNA, 25 bp, Homo sapien
gcttcgagctctcagatgcttttgt

SEQ ID NO: 4105332 - DNA, 25 bp, Homo sapien
tggccatggcttcgagctctcagat

SEQ ID NO: 4105333 - DNA, 25 bp, Homo sapien
agaaactgctgaggcccctgatgca

SEQ ID NO: 4105334 - DNA, 25 bp, Homo sapien
cagaaactgctgaggcccctgatgc

SEQ ID NO: 4105335 - DNA, 25 bp, Homo sapien
aaactgctgaggcccctgatgcaga

SEQ ID NO: 4105336 - DNA, 25 bp, Homo sapien
actgctgaggcccctgatgcagaac

SEQ ID NO: 4105337 - DNA, 25 bp, Homo sapien
ctggagggggcttttgagagctgag

SEQ ID NO: 4105338 - DNA, 25 bp, Homo sapien
gagagctgagctttgctcccgagga

SEQ ID NO: 4105339 - DNA, 25 bp, Homo sapien
gggcttttgagagctgagctttgct

SEQ ID NO: 4105340 - DNA, 25 bp, Homo sapien
ttttgagagctgagctttgctcccg

SEQ ID NO: 4105341 - DNA, 25 bp, Homo sapien
agtggaggactaggttttggcacgg

SEQ ID NO: 4105342 - DNA, 25 bp, Homo sapien
tggtgtgtcccaggctgatactcag

SEQ ID NO: 4105343 - DNA, 25 bp, Homo sapien
tgtgtcccaggctgatactcagcac

SEQ ID NO: 4105344 - DNA, 25 bp, Homo sapien
aagaaccacggtcgaactgaacttg

SEQ ID NO: 4105345 - DNA, 25 bp, Homo sapien
tcagggaccaaagaaccacggtcga

SEQ ID NO: 4105346 - DNA, 25 bp, Homo sapien
atgtggagccaatggatggtaaatt

SEQ ID NO: 4105347 - DNA, 25 bp, Homo sapien
tgtggagccaatggatggtaaattc

SEQ ID NO: 4105348 - DNA, 25 bp, Homo sapien
tggagccaatggatggtaaattctt

SEQ ID NO: 4105349 - DNA, 25 bp, Homo sapien
gagccaatggatggtaaattcttac

SEQ ID NO: 4105350 - DNA, 25 bp, Homo sapien
catcacccaagtctgtgtcagagaa

SEQ ID NO: 4105351 - DNA, 25 bp, Homo sapien
tttccatcacccaagtctgtgtcag

SEQ ID NO: 4105352 - DNA, 25 bp, Homo sapien
ttttccatcacccaagtctgtgtca

SEQ ID NO: 4105353 - DNA, 25 bp, Homo sapien
tccatcacccaagtctgtgtcagag

SEQ ID NO: 4105354 - DNA, 25 bp, Homo sapien
ctgccccgaaaaggcttctcagaat

SEQ ID NO: 4105355 - DNA, 25 bp, Homo sapien
gttttgggagcaaaagaatcagatt

SEQ ID NO: 4105356 - DNA, 25 bp, Homo sapien
agttttgggagcaaaagaatcagat

SEQ ID NO: 4105357 - DNA, 25 bp, Homo sapien
cgaaaaggcttctcagaatcagttt

SEQ ID NO: 4105358 - DNA, 25 bp, Homo sapien
tctcaaagtcacttcggagcttatg

SEQ ID NO: 4105359 - DNA, 25 bp, Homo sapien
ttcggagcttatgccttttgagaga

SEQ ID NO: 4105360 - DNA, 25 bp, Homo sapien
cacttcggagcttatgccttttgag

SEQ ID NO: 4105361 - DNA, 25 bp, Homo sapien
aaagtcacttcggagcttatgcctt

SEQ ID NO: 4105362 - DNA, 25 bp, Homo sapien
atattttgggttcatcatcatcaaa

SEQ ID NO: 4105363 - DNA, 25 bp, Homo sapien
tattttgggttcatcatcatcaaac

SEQ ID NO: 4105364 - DNA, 25 bp, Homo sapien
ctggaggtgcatataccaggccctc

SEQ ID NO: 4105365 - DNA, 25 bp, Homo sapien
gccctcccatttgcctgacttctcc

SEQ ID NO: 4105366 - DNA, 25 bp, Homo sapien
aggccctcccatttgcctgacttct

SEQ ID NO: 4105367 - DNA, 25 bp, Homo sapien
ccaggccctcccatttgcctgactt

SEQ ID NO: 4105368 - DNA, 25 bp, Homo sapien
ttttggatctctctgggaaagactc

SEQ ID NO: 4105369 - DNA, 25 bp, Homo sapien
tttggatctctctgggaaagactcc

SEQ ID NO: 4105370 - DNA, 25 bp, Homo sapien
tctcaggcagaaagcccttgtgccc

SEQ ID NO: 4105371 - DNA, 25 bp, Homo sapien
tcagaaattcctctcaggcagaaag

SEQ ID NO: 4105372 - DNA, 25 bp, Homo sapien
tcaggcagaaagcccttgtgcccac

SEQ ID NO: 4105373 - DNA, 25 bp, Homo sapien
cctctcaggcagaaagcccttgtgc

SEQ ID NO: 4105374 - DNA, 25 bp, Homo sapien
agcttgtctcggctctcagaagtct

SEQ ID NO: 4105375 - DNA, 25 bp, Homo sapien
ggaaaagtctcctttcgcttccagc

SEQ ID NO: 4105376 - DNA, 25 bp, Homo sapien
ttcgcttccagcttgtctcggctct

SEQ ID NO: 4105377 - DNA, 25 bp, Homo sapien
tcctttcgcttccagcttgtctcgg

SEQ ID NO: 4105378 - DNA, 25 bp, Homo sapien
gccattgggtcgtgcaaagtcctca

SEQ ID NO: 4105379 - DNA, 25 bp, Homo sapien
gtccatccagacatcgccctgtgtc

SEQ ID NO: 4105380 - DNA, 25 bp, Homo sapien
catcgccctgtgtctctcgagtaat

SEQ ID NO: 4105381 - DNA, 25 bp, Homo sapien
ccaataagccattgggtcgtgcaaa

SEQ ID NO: 4105382 - DNA, 25 bp, Homo sapien
gcctgctcagttagtctctttaggt

SEQ ID NO: 4105383 - DNA, 25 bp, Homo sapien
ccgcctgctcagttagtctctttag

SEQ ID NO: 4105384 - DNA, 25 bp, Homo sapien
tgccgcctgctcagttagtctcttt

SEQ ID NO: 4105385 - DNA, 25 bp, Homo sapien
gccgcctgctcagttagtctcttta

SEQ ID NO: 4105386 - DNA, 25 bp, Homo sapien
gacgttcaatatcaaggctgagatc

SEQ ID NO: 4105387 - DNA, 25 bp, Homo sapien
caatatcaaggctgagatcaacagg

SEQ ID NO: 4105388 - DNA, 25 bp, Homo sapien
tcaaggctgagatcaacaggatcat

SEQ ID NO: 4105389 - DNA, 25 bp, Homo sapien
cgttcaatatcaaggctgagatcaa

SEQ ID NO: 4105390 - DNA, 25 bp, Homo sapien
ctcagctgaccttttcctcgagggc

SEQ ID NO: 4105391 - DNA, 25 bp, Homo sapien
cctgtctctcgatctctggtgcttc

SEQ ID NO: 4105392 - DNA, 25 bp, Homo sapien
acctgtctctcgatctctggtgctt

SEQ ID NO: 4105393 - DNA, 25 bp, Homo sapien
ctgtctctcgatctctggtgcttct

SEQ ID NO: 4105394 - DNA, 25 bp, Homo sapien
aatggaaaggttcctcgagctctgc

SEQ ID NO: 4105395 - DNA, 25 bp, Homo sapien
gctcaaaatggaaaggttcctcgag

SEQ ID NO: 4105396 - DNA, 25 bp, Homo sapien
ctggctcaaaatggaaaggttcctc

SEQ ID NO: 4105397 - DNA, 25 bp, Homo sapien
aaatggaaaggttcctcgagctctg

SEQ ID NO: 4105398 - DNA, 25 bp, Homo sapien
cttcaccttcatggtcatcatgcaa

SEQ ID NO: 4105399 - DNA, 25 bp, Homo sapien
tcaccttcatggtcatcatgcaagt

SEQ ID NO: 4105400 - DNA, 25 bp, Homo sapien
ttcaccttcatggtcatcatgcaag

SEQ ID NO: 4105401 - DNA, 25 bp, Homo sapien
ggccagcttaggtctggtacttgat

SEQ ID NO: 4105402 - DNA, 25 bp, Homo sapien
cagcttaggtctggtacttgatttc

SEQ ID NO: 4105403 - DNA, 25 bp, Homo sapien
atgggccagcttaggtctggtactt

SEQ ID NO: 4105404 - DNA, 25 bp, Homo sapien
gcttaggtctggtacttgatttctg

SEQ ID NO: 4105405 - DNA, 25 bp, Homo sapien
tcttagcagtctgcatctgatcagg

SEQ ID NO: 4105406 - DNA, 25 bp, Homo sapien
ttaaagtaggcgaaagatgcaatct

SEQ ID NO: 4105407 - DNA, 25 bp, Homo sapien
cccttgttaaagtaggcgaaagatg

SEQ ID NO: 4105408 - DNA, 25 bp, Homo sapien
gaaagatgcaatcttagcagtctgc

SEQ ID NO: 4105409 - DNA, 25 bp, Homo sapien
gtgtgatgttggcttctggtgtagg

SEQ ID NO: 4105410 - DNA, 25 bp, Homo sapien
gtgatgttggcttctggtgtaggcc

SEQ ID NO: 4105411 - DNA, 25 bp, Homo sapien
tgtgatgttggcttctggtgtaggc

SEQ ID NO: 4105412 - DNA, 25 bp, Homo sapien
ccctggatagccttaaaataattct

SEQ ID NO: 4105413 - DNA, 25 bp, Homo sapien
ctggatagccttaaaataattctcc

SEQ ID NO: 4105414 - DNA, 25 bp, Homo sapien
ggatagccttaaaataattctccat

SEQ ID NO: 4105415 - DNA, 25 bp, Homo sapien
cctggatagccttaaaataattctc

SEQ ID NO: 4105416 - DNA, 25 bp, Homo sapien
tgagtgaaactaacttaccctggac

SEQ ID NO: 4105417 - DNA, 25 bp, Homo sapien
taccctggacgttaagctgtttcca

SEQ ID NO: 4105418 - DNA, 25 bp, Homo sapien
gaacgaaggttcttgtgcacgtcta

SEQ ID NO: 4105419 - DNA, 25 bp, Homo sapien
ttgtccgctaaaataaagtgctacc

SEQ ID NO: 4105420 - DNA, 25 bp, Homo sapien
agaaatacattaacggctgcataca

SEQ ID NO: 4105421 - DNA, 25 bp, Homo sapien
gcagaaatacattaacggctgcata

SEQ ID NO: 4105422 - DNA, 25 bp, Homo sapien
gaaatacattaacggctgcatacat

SEQ ID NO: 4105423 - DNA, 25 bp, Homo sapien
cagaaatacattaacggctgcatac

SEQ ID NO: 4105424 - DNA, 25 bp, Homo sapien
ctagctccggcaggcaaaatgcgac

SEQ ID NO: 4105425 - DNA, 25 bp, Homo sapien
cgcgggaatccgagaatgtgagcaa

SEQ ID NO: 4105426 - DNA, 25 bp, Homo sapien
tccgaattgcgaaagtactgtatgt

SEQ ID NO: 4105427 - DNA, 25 bp, Homo sapien
aaactcgttggaaccggcaagcgcg

SEQ ID NO: 4105428 - DNA, 25 bp, Homo sapien
ggagtccgggcggagctcaagcaac

SEQ ID NO: 4105429 - DNA, 25 bp, Homo sapien
gcctgtcacaaagcgacaggtccgt

SEQ ID NO: 4105430 - DNA, 25 bp, Homo sapien
ccgattcgcccggagtggccgagct

SEQ ID NO: 4105431 - DNA, 25 bp, Homo sapien
gggcggagcttgacccaaccgtctc

SEQ ID NO: 4105432 - DNA, 25 bp, Homo sapien
gcggcggcgaaagccgacgggacga

SEQ ID NO: 4105433 - DNA, 25 bp, Homo sapien
gcggcggggagtctccgcctcagca

SEQ ID NO: 4105434 - DNA, 25 bp, Homo sapien
agccatccgtatccccagtgcagct

SEQ ID NO: 4105435 - DNA, 25 bp, Homo sapien
atcgccgctctctcaacccagatgg

SEQ ID NO: 4105436 - DNA, 25 bp, Homo sapien
ggaggagggaagagctctgcgcgct

SEQ ID NO: 4105437 - DNA, 25 bp, Homo sapien
gaggagggaagagctctgcgcgctc

SEQ ID NO: 4105438 - DNA, 25 bp, Homo sapien
agggaagagctctgcgcgctcccgc

SEQ ID NO: 4105439 - DNA, 25 bp, Homo sapien
ggagggaagagctctgcgcgctccc

SEQ ID NO: 4105440 - DNA, 25 bp, Homo sapien
cccggcggcgggtctagctctcctc

SEQ ID NO: 4105441 - DNA, 25 bp, Homo sapien
gccccggcggcgggtctagctctcc

SEQ ID NO: 4105442 - DNA, 25 bp, Homo sapien
tgccccggcggcgggtctagctctc

SEQ ID NO: 4105443 - DNA, 25 bp, Homo sapien
ccccggcggcgggtctagctctcct

SEQ ID NO: 4105444 - DNA, 25 bp, Homo sapien
tgagggacgacttgtgcttgctctc

SEQ ID NO: 4105445 - DNA, 25 bp, Homo sapien
cgtggtggccgtgccggctgtttcc

SEQ ID NO: 4105446 - DNA, 25 bp, Homo sapien
gggacgagttgagggacgacttgtg

SEQ ID NO: 4105447 - DNA, 25 bp, Homo sapien
cgggcccgtggtggccgtgccggct

SEQ ID NO: 4105448 - DNA, 25 bp, Homo sapien
aaggagagaagcgactgccacccag

SEQ ID NO: 4105449 - DNA, 25 bp, Homo sapien
ggctgcgacagccccccggacagcc

SEQ ID NO: 4105450 - DNA, 25 bp, Homo sapien
gctgcgacagccccccggacagccc

SEQ ID NO: 4105451 - DNA, 25 bp, Homo sapien
gagagaagcgactgccacccagccg

SEQ ID NO: 4105452 - DNA, 25 bp, Homo sapien
gaactcgtggatgatgctttcgaag

SEQ ID NO: 4105453 - DNA, 25 bp, Homo sapien
cacgggtcgaactcgtggatgatgc

SEQ ID NO: 4105454 - DNA, 25 bp, Homo sapien
ctttcgaagcggatgacggcgaaga

SEQ ID NO: 4105455 - DNA, 25 bp, Homo sapien
tgatgctttcgaagcggatgacggc

SEQ ID NO: 4105456 - DNA, 25 bp, Homo sapien
ggccgattccgtctgaactagcaaa

SEQ ID NO: 4105457 - DNA, 25 bp, Homo sapien
atgaaagaacgcgaaagcagcgggc

SEQ ID NO: 4105458 - DNA, 25 bp, Homo sapien
aacgcgcccgcaaatatgaaagaac

SEQ ID NO: 4105459 - DNA, 25 bp, Homo sapien
actcagcgaccaaagcgggctgcga

SEQ ID NO: 4105460 - DNA, 25 bp, Homo sapien
atccaccctcgtgtaacccaaagtg

SEQ ID NO: 4105461 - DNA, 25 bp, Homo sapien
atgatccaccctcgtgtaacccaaa

SEQ ID NO: 4105462 - DNA, 25 bp, Homo sapien
tgatccaccctcgtgtaacccaaag

SEQ ID NO: 4105463 - DNA, 25 bp, Homo sapien
catgatccaccctcgtgtaacccaa

SEQ ID NO: 4105464 - DNA, 25 bp, Homo sapien
tccaggcaagtcctctcacatcaaa

SEQ ID NO: 4105465 - DNA, 25 bp, Homo sapien
tgcctactctgtcactccaggcaag

SEQ ID NO: 4105466 - DNA, 25 bp, Homo sapien
ggcaagtcctctcacatcaaacgtc

SEQ ID NO: 4105467 - DNA, 25 bp, Homo sapien
tcacatcaaacgtcctcagtccact

SEQ ID NO: 4105468 - DNA, 25 bp, Homo sapien
aagggtcatacataattgttggttt

SEQ ID NO: 4105469 - DNA, 25 bp, Homo sapien
acaagggtcatacataattgttggt

SEQ ID NO: 4105470 - DNA, 25 bp, Homo sapien
caagggtcatacataattgttggtt

SEQ ID NO: 4105471 - DNA, 25 bp, Homo sapien
tacaagggtcatacataattgttgg

SEQ ID NO: 4105472 - DNA, 25 bp, Homo sapien
tcaaaatggaagaaacggtacactc

SEQ ID NO: 4105473 - DNA, 25 bp, Homo sapien
cacaaaccatagagggcaattccag

SEQ ID NO: 4105474 - DNA, 25 bp, Homo sapien
tgtctgcctgaggtagaagcactac

SEQ ID NO: 4105475 - DNA, 25 bp, Homo sapien
caatcctcagggtaatgccattagg

SEQ ID NO: 4105476 - DNA, 25 bp, Homo sapien
gatgatgtgttgatctatagttaaa

SEQ ID NO: 4105477 - DNA, 25 bp, Homo sapien
tattcttcctagtggataccatgct

SEQ ID NO: 4105478 - DNA, 25 bp, Homo sapien
ctattcttcctagtggataccatgc

SEQ ID NO: 4105479 - DNA, 25 bp, Homo sapien
tgagatgcaagatgatgtgttgatc

SEQ ID NO: 4105480 - DNA, 25 bp, Homo sapien
ctggaataatttggaatgtctccat

SEQ ID NO: 4105481 - DNA, 25 bp, Homo sapien
gaatataagctccagaatagcagga

SEQ ID NO: 4105482 - DNA, 25 bp, Homo sapien
tcagattcaatactaggtaccagtg

SEQ ID NO: 4105483 - DNA, 25 bp, Homo sapien
tactccataacagaaactacaaagg

SEQ ID NO: 4105484 - DNA, 25 bp, Homo sapien
tattaactgcctacgctcacaagaa

SEQ ID NO: 4105485 - DNA, 25 bp, Homo sapien
gtatgtactcttcatcattacattt

SEQ ID NO: 4105486 - DNA, 25 bp, Homo sapien
ttaatgtatgtactcttcatcatta

SEQ ID NO: 4105487 - DNA, 25 bp, Homo sapien
cattacattttgtttaccttacata

SEQ ID NO: 4105488 - DNA, 25 bp, Homo sapien
tcattacattttgtttaccttacat

SEQ ID NO: 4105489 - DNA, 25 bp, Homo sapien
tgaataaggccagcggttatcatca

SEQ ID NO: 4105490 - DNA, 25 bp, Homo sapien
aaatccaatgaataaggccagcggt

SEQ ID NO: 4105491 - DNA, 25 bp, Homo sapien
taaggccagcggttatcatcaaccc

SEQ ID NO: 4105492 - DNA, 25 bp, Homo sapien
gcggttatcatcaaccctgggtaaa

SEQ ID NO: 4105493 - DNA, 25 bp, Homo sapien
aagtagatatagatgtaaggccgct

SEQ ID NO: 4105494 - DNA, 25 bp, Homo sapien
tgtgaactgaagtgcaaaaatagca

SEQ ID NO: 4105495 - DNA, 25 bp, Homo sapien
tactgaccgagatatgtagcctggt

SEQ ID NO: 4105496 - DNA, 25 bp, Homo sapien
tatcaaaggatccagctactgaccg

SEQ ID NO: 4105497 - DNA, 25 bp, Homo sapien
ggcaacatcctactgcttggtatca

SEQ ID NO: 4105498 - DNA, 25 bp, Homo sapien
catgcttcaactttcctgggtaact

SEQ ID NO: 4105499 - DNA, 25 bp, Homo sapien
tatgctgccattcacctagctacct

SEQ ID NO: 4105500 - DNA, 25 bp, Homo sapien
taagtttaaatagcctggcagcagc

SEQ ID NO: 4105501 - DNA, 25 bp, Homo sapien
agcacattgtccaaaaaactgaccc

SEQ ID NO: 4105502 - DNA, 25 bp, Homo sapien
cattgtccaaaaaactgacccagtt

SEQ ID NO: 4105503 - DNA, 25 bp, Homo sapien
catatagaaataggataagcagcag

SEQ ID NO: 4105504 - DNA, 25 bp, Homo sapien
atatagaaataggataagcagcagc

SEQ ID NO: 4105505 - DNA, 25 bp, Homo sapien
ctccaccaaagcaggtgtatacagg

SEQ ID NO: 4105506 - DNA, 25 bp, Homo sapien
tccaccaaagcaggtgtatacagga

SEQ ID NO: 4105507 - DNA, 25 bp, Homo sapien
ccaccaaagcaggtgtatacaggac

SEQ ID NO: 4105508 - DNA, 25 bp, Homo sapien
taaatacataaccaccccaagcaga

SEQ ID NO: 4105509 - DNA, 25 bp, Homo sapien
aatacataaccaccccaagcagaga

SEQ ID NO: 4105510 - DNA, 25 bp, Homo sapien
aaatacataaccaccccaagcagag

SEQ ID NO: 4105511 - DNA, 25 bp, Homo sapien
atacataaccaccccaagcagagac

SEQ ID NO: 4105512 - DNA, 25 bp, Homo sapien
ccttaacaatctgtaaggtaactat

SEQ ID NO: 4105513 - DNA, 25 bp, Homo sapien
gacccatgaggacattaaggcctaa

SEQ ID NO: 4105514 - DNA, 25 bp, Homo sapien
tacacagtagtaagggagcaagaat

SEQ ID NO: 4105515 - DNA, 25 bp, Homo sapien
ggcctaaggacatcaaaggacatta

SEQ ID NO: 4105516 - DNA, 25 bp, Homo sapien
catgttgccactaaaaacgttttgg

SEQ ID NO: 4105517 - DNA, 25 bp, Homo sapien
gatttaaactacaggaaatcacaaa

SEQ ID NO: 4105518 - DNA, 25 bp, Homo sapien
tcctgttaccacaagtcatgttgcc

SEQ ID NO: 4105519 - DNA, 25 bp, Homo sapien
tcacaaatcctgttaccacaagtca

SEQ ID NO: 4105520 - DNA, 25 bp, Homo sapien
cctgtttttagcaaagtattaactg

SEQ ID NO: 4105521 - DNA, 25 bp, Homo sapien
gtgagacttgtgttgcattcctttc

SEQ ID NO: 4105522 - DNA, 25 bp, Homo sapien
agtttgttttgatctaccattagca

SEQ ID NO: 4105523 - DNA, 25 bp, Homo sapien
tagcaatcattcatacgactcaaga

SEQ ID NO: 4105524 - DNA, 25 bp, Homo sapien
tgataatattaaacccacaatgtag

SEQ ID NO: 4105525 - DNA, 25 bp, Homo sapien
cccacaatgtagaaagtgctatatg

SEQ ID NO: 4105526 - DNA, 25 bp, Homo sapien
aatattaaacccacaatgtagaaag

SEQ ID NO: 4105527 - DNA, 25 bp, Homo sapien
taaacccacaatgtagaaagtgcta

SEQ ID NO: 4105528 - DNA, 25 bp, Homo sapien
gattggctggaatcccacaaaaggt

SEQ ID NO: 4105529 - DNA, 25 bp, Homo sapien
ggctggaatcccacaaaaggtatct

SEQ ID NO: 4105530 - DNA, 25 bp, Homo sapien
ttctgattggctggaatcccacaaa

SEQ ID NO: 4105531 - DNA, 25 bp, Homo sapien
gttcacttgttctgattggctggaa

SEQ ID NO: 4105532 - DNA, 25 bp, Homo sapien
ccagtctgttgccattagatcgtac

SEQ ID NO: 4105533 - DNA, 25 bp, Homo sapien
tatacaaaactaaaggagtagtcgc

SEQ ID NO: 4105534 - DNA, 25 bp, Homo sapien
gagtagtcgcaaaaacggattctca

SEQ ID NO: 4105535 - DNA, 25 bp, Homo sapien
gatgtaagaatcctcaagcatctag

SEQ ID NO: 4105536 - DNA, 25 bp, Homo sapien
aaatttgtatcagggctcatgccaa

SEQ ID NO: 4105537 - DNA, 25 bp, Homo sapien
tctaaatttgtatcagggctcatgc

SEQ ID NO: 4105538 - DNA, 25 bp, Homo sapien
tgtatcagggctcatgccaaattat

SEQ ID NO: 4105539 - DNA, 25 bp, Homo sapien
tttgtatcagggctcatgccaaatt

SEQ ID NO: 4105540 - DNA, 25 bp, Homo sapien
gcacctgcagctagtgatacaccca

SEQ ID NO: 4105541 - DNA, 25 bp, Homo sapien
tgttaatcggtctctcagatactgc

SEQ ID NO: 4105542 - DNA, 25 bp, Homo sapien
gaaagcataagcttgcagcaatgca

SEQ ID NO: 4105543 - DNA, 25 bp, Homo sapien
tgacactaaggaacacagcacctgc

SEQ ID NO: 4105544 - DNA, 25 bp, Homo sapien
catttataggtgtcaacctatttca

SEQ ID NO: 4105545 - DNA, 25 bp, Homo sapien
gatagacaaactaatgttcaaagaa

SEQ ID NO: 4105546 - DNA, 25 bp, Homo sapien
ataggtgtcaacctatttcagacag

SEQ ID NO: 4105547 - DNA, 25 bp, Homo sapien
ttatagatagacaaactaatgttca

SEQ ID NO: 4105548 - DNA, 25 bp, Homo sapien
ctgccactccatggtgcaatgtaac

SEQ ID NO: 4105549 - DNA, 25 bp, Homo sapien
ccagtatcccacaatgaataaaacc

SEQ ID NO: 4105550 - DNA, 25 bp, Homo sapien
agtatcccacaatgaataaaacctg

SEQ ID NO: 4105551 - DNA, 25 bp, Homo sapien
aacctgccactccatggtgcaatgt

SEQ ID NO: 4105552 - DNA, 25 bp, Homo sapien
tatcataacaagataaagtaaaagg

SEQ ID NO: 4105553 - DNA, 25 bp, Homo sapien
cttagaagtgttgcccaagaactga

SEQ ID NO: 4105554 - DNA, 25 bp, Homo sapien
taaactagcatctttggtacttaga

SEQ ID NO: 4105555 - DNA, 25 bp, Homo sapien
gaatttaacatttactaaactagca

SEQ ID NO: 4105556 - DNA, 25 bp, Homo sapien
aaacggaaacaaggagttgcccatg

SEQ ID NO: 4105557 - DNA, 25 bp, Homo sapien
acggaaacaaggagttgcccatgca

SEQ ID NO: 4105558 - DNA, 25 bp, Homo sapien
aaacaaggagttgcccatgcagaac

SEQ ID NO: 4105559 - DNA, 25 bp, Homo sapien
ggaaacaaggagttgcccatgcaga

SEQ ID NO: 4105560 - DNA, 25 bp, Homo sapien
ggtatcacatcagaaagcatgtctg

SEQ ID NO: 4105561 - DNA, 25 bp, Homo sapien
caataatgccttgcttgacatgaag

SEQ ID NO: 4105562 - DNA, 25 bp, Homo sapien
ttcaaattcgttagtgatccacagg

SEQ ID NO: 4105563 - DNA, 25 bp, Homo sapien
tattactgaaacaccctgagattct

SEQ ID NO: 4105564 - DNA, 25 bp, Homo sapien
gcctgctgggaaggtacatacaaga

SEQ ID NO: 4105565 - DNA, 25 bp, Homo sapien
tgatgcagaaccaaaggcctgctgg

SEQ ID NO: 4105566 - DNA, 25 bp, Homo sapien
cccaagtcgtaggttgatgctcaga

SEQ ID NO: 4105567 - DNA, 25 bp, Homo sapien
aatatgtagatcaaagaagaaagac

SEQ ID NO: 4105568 - DNA, 25 bp, Homo sapien
cagagtcccgctctgattcccaggg

SEQ ID NO: 4105569 - DNA, 25 bp, Homo sapien
cccaggaaactgaactagatactta

SEQ ID NO: 4105570 - DNA, 25 bp, Homo sapien
tacacatccacagtttagaaaaatg

SEQ ID NO: 4105571 - DNA, 25 bp, Homo sapien
tgatactactgaacaactgattaat

SEQ ID NO: 4105572 - DNA, 25 bp, Homo sapien
aaatgtctcacaaacgatctaattg

SEQ ID NO: 4105573 - DNA, 25 bp, Homo sapien
tccagcaaagtagacagcactgatt

SEQ ID NO: 4105574 - DNA, 25 bp, Homo sapien
gcaaagtagacagcactgattgcat

SEQ ID NO: 4105575 - DNA, 25 bp, Homo sapien
cagcaaagtagacagcactgattgc

SEQ ID NO: 4105576 - DNA, 25 bp, Homo sapien
cactccagcaaagtagacagcactg

SEQ ID NO: 4105577 - DNA, 25 bp, Homo sapien
cacacgactggagtcaaagtcaaca

SEQ ID NO: 4105578 - DNA, 25 bp, Homo sapien
aaaggcaattgcagacagcatacac

SEQ ID NO: 4105579 - DNA, 25 bp, Homo sapien
agacagcatacacacgactggagtc

SEQ ID NO: 4105580 - DNA, 25 bp, Homo sapien
tcccccaaatagtgctcaaaaacat

SEQ ID NO: 4105581 - DNA, 25 bp, Homo sapien
gtaggcattgcttgtgacccaggta

SEQ ID NO: 4105582 - DNA, 25 bp, Homo sapien
gacccaggtacagtggacagcaaac

SEQ ID NO: 4105583 - DNA, 25 bp, Homo sapien
catcatgattgtatgaggccaggac

SEQ ID NO: 4105584 - DNA, 25 bp, Homo sapien
ggccaggactacacttggactagag

SEQ ID NO: 4105585 - DNA, 25 bp, Homo sapien
tgccttagccaaaagtaagcttctc

SEQ ID NO: 4105586 - DNA, 25 bp, Homo sapien
ctgtattttgccttagccaaaagta

SEQ ID NO: 4105587 - DNA, 25 bp, Homo sapien
aaaagtaagcttctctaaaatcatc

SEQ ID NO: 4105588 - DNA, 25 bp, Homo sapien
gccaaaagtaagcttctctaaaatc

SEQ ID NO: 4105589 - DNA, 25 bp, Homo sapien
ccaacgtagttctattagccattcc

SEQ ID NO: 4105590 - DNA, 25 bp, Homo sapien
gtggctgttattccaggtgttatta

SEQ ID NO: 4105591 - DNA, 25 bp, Homo sapien
tagccattccagctatctgatagcc

SEQ ID NO: 4105592 - DNA, 25 bp, Homo sapien
gttattatccaccaacgtagttcta

SEQ ID NO: 4105593 - DNA, 25 bp, Homo sapien
taatctacatctagagtcctcatga

SEQ ID NO: 4105594 - DNA, 25 bp, Homo sapien
tgatatcatcaccagaatagccaat

SEQ ID NO: 4105595 - DNA, 25 bp, Homo sapien
gtcctcatgattttataggctgctg

SEQ ID NO: 4105596 - DNA, 25 bp, Homo sapien
tcagctatcctaaccatccagagaa

SEQ ID NO: 4105597 - DNA, 25 bp, Homo sapien
actttacttttgaaccatatgagtg

SEQ ID NO: 4105598 - DNA, 25 bp, Homo sapien
cacagaaatttaggacttctgtaat

SEQ ID NO: 4105599 - DNA, 25 bp, Homo sapien
tgagtgtattatctattcacaaagt

SEQ ID NO: 4105600 - DNA, 25 bp, Homo sapien
tttgaatcacgtgaagggggtagac

SEQ ID NO: 4105601 - DNA, 25 bp, Homo sapien
ctccctgtggggtaaaatagtcact

SEQ ID NO: 4105602 - DNA, 25 bp, Homo sapien
tctccaaatctgtagtatgacattt

SEQ ID NO: 4105603 - DNA, 25 bp, Homo sapien
tttgtctacacggaattctccctgt

SEQ ID NO: 4105604 - DNA, 25 bp, Homo sapien
agtatgacattttatacataaggca

SEQ ID NO: 4105605 - DNA, 25 bp, Homo sapien
cagcattacgtgttcggtcaaaacc

SEQ ID NO: 4105606 - DNA, 25 bp, Homo sapien
gaaaatgttggtgactcgaggtttg

SEQ ID NO: 4105607 - DNA, 25 bp, Homo sapien
gccagtgttctgatgtaaaggcttc

SEQ ID NO: 4105608 - DNA, 25 bp, Homo sapien
tcgaggtttgtgatctaatgtctcc

SEQ ID NO: 4105609 - DNA, 25 bp, Homo sapien
tctgagctatgtaaacctaagcatc

SEQ ID NO: 4105610 - DNA, 25 bp, Homo sapien
cttggatatcttaggagtaactgct

SEQ ID NO: 4105611 - DNA, 25 bp, Homo sapien
gttcaacagccctctttttgcagaa

SEQ ID NO: 4105612 - DNA, 25 bp, Homo sapien
aattcctgcctataagctttgtcac

SEQ ID NO: 4105613 - DNA, 25 bp, Homo sapien
tcatgccggctttgcgatggctggt

SEQ ID NO: 4105614 - DNA, 25 bp, Homo sapien
gttatgtataccctcctcctccaaa

SEQ ID NO: 4105615 - DNA, 25 bp, Homo sapien
aagcattccttcatagtgttagtac

SEQ ID NO: 4105616 - DNA, 25 bp, Homo sapien
tggtaaactctcagaatggatgctg

SEQ ID NO: 4105617 - DNA, 25 bp, Homo sapien
cattcaaagtgaaaggactaggttc

SEQ ID NO: 4105618 - DNA, 25 bp, Homo sapien
tttagcctccaggaaattaggtgtg

SEQ ID NO: 4105619 - DNA, 25 bp, Homo sapien
tcaaccacaaagtgctgagctgtaa

SEQ ID NO: 4105620 - DNA, 25 bp, Homo sapien
caaattaccggaaatgcagtggtac

SEQ ID NO: 4105621 - DNA, 25 bp, Homo sapien
ttaaacagtcttcttagatattttc

SEQ ID NO: 4105622 - DNA, 25 bp, Homo sapien
taaacagtcttcttagatattttct

SEQ ID NO: 4105623 - DNA, 25 bp, Homo sapien
aaacagtcttcttagatattttctt

SEQ ID NO: 4105624 - DNA, 25 bp, Homo sapien
caggcattgccagaaaattttgtac

SEQ ID NO: 4105625 - DNA, 25 bp, Homo sapien
gctaaaggcaaagaccggttctcac

SEQ ID NO: 4105626 - DNA, 25 bp, Homo sapien
tgctgtgaaacacgacatgagctaa

SEQ ID NO: 4105627 - DNA, 25 bp, Homo sapien
ttttgtacattaacctggaccagtg

SEQ ID NO: 4105628 - DNA, 25 bp, Homo sapien
tagtttaccggttcaagaagctctc

SEQ ID NO: 4105629 - DNA, 25 bp, Homo sapien
tacctggtgaaaacgactgctaaca

SEQ ID NO: 4105630 - DNA, 25 bp, Homo sapien
tccgtcctggtaagcaacatcctgt

SEQ ID NO: 4105631 - DNA, 25 bp, Homo sapien
catgtgccagggaccaaattagagg

SEQ ID NO: 4105632 - DNA, 25 bp, Homo sapien
aatgacaaggtatcagaaatccaga

SEQ ID NO: 4105633 - DNA, 25 bp, Homo sapien
cagaaatccagacttcgttacactc

SEQ ID NO: 4105634 - DNA, 25 bp, Homo sapien
ttcccctacagtcaacaacttctct

SEQ ID NO: 4105635 - DNA, 25 bp, Homo sapien
tcagaaatccagacttcgttacact

SEQ ID NO: 4105636 - DNA, 25 bp, Homo sapien
cttggctatggaaactcaatacagg

SEQ ID NO: 4105637 - DNA, 25 bp, Homo sapien
tagtcctctggtcacttggtcatgg

SEQ ID NO: 4105638 - DNA, 25 bp, Homo sapien
tccacaactataaactcaagtaggt

SEQ ID NO: 4105639 - DNA, 25 bp, Homo sapien
ggtcatggcctagaatgcaaatgaa

SEQ ID NO: 4105640 - DNA, 25 bp, Homo sapien
atagttaagtccatcaaagcatttt

SEQ ID NO: 4105641 - DNA, 25 bp, Homo sapien
ccccacgttcttgaatgtttgttag

SEQ ID NO: 4105642 - DNA, 25 bp, Homo sapien
ggctctggtccatgtaaatcttagt

SEQ ID NO: 4105643 - DNA, 25 bp, Homo sapien
ttctcattaatagttaagtccatca

SEQ ID NO: 4105644 - DNA, 25 bp, Homo sapien
tctgtacagggtcatttaagattcc

SEQ ID NO: 4105645 - DNA, 25 bp, Homo sapien
tgtaagtagatctttctcagtttcc

SEQ ID NO: 4105646 - DNA, 25 bp, Homo sapien
gcatataaaagtgtaagtgccaggc

SEQ ID NO: 4105647 - DNA, 25 bp, Homo sapien
gacctcatttcgtaaaaaacacata

SEQ ID NO: 4105648 - DNA, 25 bp, Homo sapien
cagtgttttgtctgtccgcgcccaa

SEQ ID NO: 4105649 - DNA, 25 bp, Homo sapien
cgtctctcatggtcacagcgctagt

SEQ ID NO: 4105650 - DNA, 25 bp, Homo sapien
tggagcacctctgggacaactaaga

SEQ ID NO: 4105651 - DNA, 25 bp, Homo sapien
aatgaaggtgaactggcatggcccg

SEQ ID NO: 4105652 - DNA, 25 bp, Homo sapien
ccatctttacgacagccatgggaga

SEQ ID NO: 4105653 - DNA, 25 bp, Homo sapien
gatacccatcgagagggctgcttta

SEQ ID NO: 4105654 - DNA, 25 bp, Homo sapien
tgacggaggacttggaatgatcctc

SEQ ID NO: 4105655 - DNA, 25 bp, Homo sapien
gctgttagctgagtttagaatcgcc

SEQ ID NO: 4105656 - DNA, 25 bp, Homo sapien
ataagctagattctgtgtaagctgg

SEQ ID NO: 4105657 - DNA, 25 bp, Homo sapien
tagattctgtgtaagctggcttcag

SEQ ID NO: 4105658 - DNA, 25 bp, Homo sapien
ttcagcctagaagttggtatgtatg

SEQ ID NO: 4105659 - DNA, 25 bp, Homo sapien
gcctagaagttggtatgtatgtgaa

SEQ ID NO: 4105660 - DNA, 25 bp, Homo sapien
atttctaagagcctaagatcccaac

SEQ ID NO: 4105661 - DNA, 25 bp, Homo sapien
gggactgtccctccttccaagtgtc

SEQ ID NO: 4105662 - DNA, 25 bp, Homo sapien
ttcggatttctaagagcctaagatc

SEQ ID NO: 4105663 - DNA, 25 bp, Homo sapien
ttatttcggatttctaagagcctaa

SEQ ID NO: 4105664 - DNA, 25 bp, Homo sapien
tccctttctgtcctgttggcagcag

SEQ ID NO: 4105665 - DNA, 25 bp, Homo sapien
tgaggcgacacagttatgcgatctc

SEQ ID NO: 4105666 - DNA, 25 bp, Homo sapien
ctgtgtaaatctgtttcatgaggcg

SEQ ID NO: 4105667 - DNA, 25 bp, Homo sapien
agttatgcgatctccattctttctc

SEQ ID NO: 4105668 - DNA, 25 bp, Homo sapien
cacgcagcagcacggggtgtcatga

SEQ ID NO: 4105669 - DNA, 25 bp, Homo sapien
gccattcagactcatggcagcggtg

SEQ ID NO: 4105670 - DNA, 25 bp, Homo sapien
ggagcagtcacgcagcagcacgggg

SEQ ID NO: 4105671 - DNA, 25 bp, Homo sapien
cacggggtgtcatgaggtggagctg

SEQ ID NO: 4105672 - DNA, 25 bp, Homo sapien
tgtggtccccgaaggtctataaaca

SEQ ID NO: 4105673 - DNA, 25 bp, Homo sapien
gaagtcagggacaagctgggtctaa

SEQ ID NO: 4105674 - DNA, 25 bp, Homo sapien
actttctggctactagaagtcaggg

SEQ ID NO: 4105675 - DNA, 25 bp, Homo sapien
tgtgtactccgtatcatgcggctgg

SEQ ID NO: 4105676 - DNA, 25 bp, Homo sapien
ctgggctggctcatttgcaaaaatc

SEQ ID NO: 4105677 - DNA, 25 bp, Homo sapien
tataagtgaaaattcgcagagattc

SEQ ID NO: 4105678 - DNA, 25 bp, Homo sapien
accttgagagagttgttactgtttt

SEQ ID NO: 4105679 - DNA, 25 bp, Homo sapien
cagcagtatgaaaccgtttctcaca

SEQ ID NO: 4105680 - DNA, 25 bp, Homo sapien
gcccctgcatgtctgtgattcctgg

SEQ ID NO: 4105681 - DNA, 25 bp, Homo sapien
ccttgccatataggttttcaggaaa

SEQ ID NO: 4105682 - DNA, 25 bp, Homo sapien
ttaatccgtgctagagtagaccctc

SEQ ID NO: 4105683 - DNA, 25 bp, Homo sapien
tacttgggcataagatggctttagg

SEQ ID NO: 4105684 - DNA, 25 bp, Homo sapien
gaaggacagtaggttcatcaggatc

SEQ ID NO: 4105685 - DNA, 25 bp, Homo sapien
gggaaggacagtaggttcatcagga

SEQ ID NO: 4105686 - DNA, 25 bp, Homo sapien
ggaaggacagtaggttcatcaggat

SEQ ID NO: 4105687 - DNA, 25 bp, Homo sapien
acttctgaccaaagtggaacatcca

SEQ ID NO: 4105688 - DNA, 25 bp, Homo sapien
gacttctgaccaaagtggaacatcc

SEQ ID NO: 4105689 - DNA, 25 bp, Homo sapien
agctataccagacaccagctgaagg

SEQ ID NO: 4105690 - DNA, 25 bp, Homo sapien
gtgtccacagcttctgtcttcggca

SEQ ID NO: 4105691 - DNA, 25 bp, Homo sapien
cagctgaaggcatgtgtccacagct

SEQ ID NO: 4105692 - DNA, 25 bp, Homo sapien
cagctataccagacaccagctgaag

SEQ ID NO: 4105693 - DNA, 25 bp, Homo sapien
ctttggaagtggctccatgtagagg

SEQ ID NO: 4105694 - DNA, 25 bp, Homo sapien
ggatagtacgtgtgcaggagccttc

SEQ ID NO: 4105695 - DNA, 25 bp, Homo sapien
taaattcgccggtggcctttgaggc

SEQ ID NO: 4105696 - DNA, 25 bp, Homo sapien
cctttgaggcacagttggttgcctg

SEQ ID NO: 4105697 - DNA, 25 bp, Homo sapien
gcctctgggattctgcacgctggca

SEQ ID NO: 4105698 - DNA, 25 bp, Homo sapien
gctcattgagatgctgtaaagcacc

SEQ ID NO: 4105699 - DNA, 25 bp, Homo sapien
cagggtgtctttcagagctcttggc

SEQ ID NO: 4105700 - DNA, 25 bp, Homo sapien
gatgctaagcttgatttgcagcctc

SEQ ID NO: 4105701 - DNA, 25 bp, Homo sapien
gcttgggtggtgtcaatcagctttg

SEQ ID NO: 4105702 - DNA, 25 bp, Homo sapien
ttgggtggtgtcaatcagctttgag

SEQ ID NO: 4105703 - DNA, 25 bp, Homo sapien
agcttgggtggtgtcaatcagcttt

SEQ ID NO: 4105704 - DNA, 25 bp, Homo sapien
cttgggtggtgtcaatcagctttga

SEQ ID NO: 4105705 - DNA, 25 bp, Homo sapien
ctttcctaggtctggagaactcaag

SEQ ID NO: 4105706 - DNA, 25 bp, Homo sapien
tggttgctgggatactatctctgat

SEQ ID NO: 4105707 - DNA, 25 bp, Homo sapien
tatctctgattcactgcacttgctg

SEQ ID NO: 4105708 - DNA, 25 bp, Homo sapien
ggtctggagaactcaagtagctgtg

SEQ ID NO: 4105709 - DNA, 25 bp, Homo sapien
gaatgctgagaccatatcttaagca

SEQ ID NO: 4105710 - DNA, 25 bp, Homo sapien
atttctatcttcagtatctaatgtg

SEQ ID NO: 4105711 - DNA, 25 bp, Homo sapien
gaaagaaagatccatgtactccttc

SEQ ID NO: 4105712 - DNA, 25 bp, Homo sapien
cagtatctaatgtggtgctttgtta

SEQ ID NO: 4105713 - DNA, 25 bp, Homo sapien
gtcttccaaaactgctctcagtgcc

SEQ ID NO: 4105714 - DNA, 25 bp, Homo sapien
ccatcccctctgtgtgcaatcatat

SEQ ID NO: 4105715 - DNA, 25 bp, Homo sapien
catatcgttgcttacttaaccaacc

SEQ ID NO: 4105716 - DNA, 25 bp, Homo sapien
ccctctgtgtgcaatcatatcgttg

SEQ ID NO: 4105717 - DNA, 25 bp, Homo sapien
gaggagaaggaaggatgtcaaacat

SEQ ID NO: 4105718 - DNA, 25 bp, Homo sapien
aggagaaggaaggatgtcaaacatg

SEQ ID NO: 4105719 - DNA, 25 bp, Homo sapien
tcgtcttagctgttttctatttgcc

SEQ ID NO: 4105720 - DNA, 25 bp, Homo sapien
tctatttgcccatcgtgtttagtag

SEQ ID NO: 4105721 - DNA, 25 bp, Homo sapien
gctgagatgagaacggcccttttcc

SEQ ID NO: 4105722 - DNA, 25 bp, Homo sapien
acagttttgactagtccattttgcc

SEQ ID NO: 4105723 - DNA, 25 bp, Homo sapien
ggttcctttctcgagtgcacgcagg

SEQ ID NO: 4105724 - DNA, 25 bp, Homo sapien
acttgcaggtctcaagcctgggtga

SEQ ID NO: 4105725 - DNA, 25 bp, Homo sapien
gaggatggtgcgcaaaacaggaaag

SEQ ID NO: 4105726 - DNA, 25 bp, Homo sapien
aggtgtccgggaacttgcaggtctc

SEQ ID NO: 4105727 - DNA, 25 bp, Homo sapien
tatgtggtcaaaacctagggtgtgg

SEQ ID NO: 4105728 - DNA, 25 bp, Homo sapien
tgattgaagacttttgaacagagca

SEQ ID NO: 4105729 - DNA, 25 bp, Homo sapien
caagacagtgttaagaggaggcgtc

SEQ ID NO: 4105730 - DNA, 25 bp, Homo sapien
gaagaacactctggtggtgtggtac

SEQ ID NO: 4105731 - DNA, 25 bp, Homo sapien
agcctggacagcagagtgagacttt

SEQ ID NO: 4105732 - DNA, 25 bp, Homo sapien
gcctggacagcagagtgagactttg

SEQ ID NO: 4105733 - DNA, 25 bp, Homo sapien
gatgcattccatggaggttctgatt

SEQ ID NO: 4105734 - DNA, 25 bp, Homo sapien
tccccatcccgggtctgatgttact

SEQ ID NO: 4105735 - DNA, 25 bp, Homo sapien
tctgatttggaccttccgtccccat

SEQ ID NO: 4105736 - DNA, 25 bp, Homo sapien
ccatcccgggtctgatgttactggt

SEQ ID NO: 4105737 - DNA, 25 bp, Homo sapien
aattatcagggtagctctgttgctg

SEQ ID NO: 4105738 - DNA, 25 bp, Homo sapien
aagtcctgaaatcacctggtgcggc

SEQ ID NO: 4105739 - DNA, 25 bp, Homo sapien
ccaggtcagtgagcatccacaggtg

SEQ ID NO: 4105740 - DNA, 25 bp, Homo sapien
ggtagctgatttgcacagcacatcc

SEQ ID NO: 4105741 - DNA, 25 bp, Homo sapien
gagcatggtttacaaaggacctcca

SEQ ID NO: 4105742 - DNA, 25 bp, Homo sapien
catggtttacaaaggacctccacta

SEQ ID NO: 4105743 - DNA, 25 bp, Homo sapien
ggagcatggtttacaaaggacctcc

SEQ ID NO: 4105744 - DNA, 25 bp, Homo sapien
caaaggacctccactaataacttat

SEQ ID NO: 4105745 - DNA, 25 bp, Homo sapien
gtgctcctgatggtcactgactagg

SEQ ID NO: 4105746 - DNA, 25 bp, Homo sapien
agatgactcttgtgccctgcagaca

SEQ ID NO: 4105747 - DNA, 25 bp, Homo sapien
tcaattggttggacataaggtacaa

SEQ ID NO: 4105748 - DNA, 25 bp, Homo sapien
gaatacaggttccttgacggagcaa

SEQ ID NO: 4105749 - DNA, 25 bp, Homo sapien
tggtcagcgtcctggagctctccag

SEQ ID NO: 4105750 - DNA, 25 bp, Homo sapien
attcatccatggtcagcgtcctgga

SEQ ID NO: 4105751 - DNA, 25 bp, Homo sapien
gcagaagatgcttctatgaattggt

SEQ ID NO: 4105752 - DNA, 25 bp, Homo sapien
tccatggtcagcgtcctggagctct

SEQ ID NO: 4105753 - DNA, 25 bp, Homo sapien
gcttccgggagttccagtagaagta

SEQ ID NO: 4105754 - DNA, 25 bp, Homo sapien
gtggcttccgggagttccagtagaa

SEQ ID NO: 4105755 - DNA, 25 bp, Homo sapien
acctgttgagtgacatatgacttac

SEQ ID NO: 4105756 - DNA, 25 bp, Homo sapien
agtaaatttaacctgttgagtgaca

SEQ ID NO: 4105757 - DNA, 25 bp, Homo sapien
ttcatgactaaagggcatgcttcct

SEQ ID NO: 4105758 - DNA, 25 bp, Homo sapien
cgatgaggttcattggtagtattca

SEQ ID NO: 4105759 - DNA, 25 bp, Homo sapien
gtacgatgcatgtagcagatactct

SEQ ID NO: 4105760 - DNA, 25 bp, Homo sapien
tactcttaagtacgtaatgaatgaa

SEQ ID NO: 4105761 - DNA, 25 bp, Homo sapien
gagtgaggtatagctatcactgact

SEQ ID NO: 4105762 - DNA, 25 bp, Homo sapien
cactgacttatgatgattgaaaatc

SEQ ID NO: 4105763 - DNA, 25 bp, Homo sapien
tattgaatcctgtgataacctcaca

SEQ ID NO: 4105764 - DNA, 25 bp, Homo sapien
cctgtgataacctcacagagtttaa

SEQ ID NO: 4105765 - DNA, 25 bp, Homo sapien
aagacagggcatactttaacttcct

SEQ ID NO: 4105766 - DNA, 25 bp, Homo sapien
ttggtagtcctcaaagggatgatgc

SEQ ID NO: 4105767 - DNA, 25 bp, Homo sapien
aatattattcatagcggccaggcac

SEQ ID NO: 4105768 - DNA, 25 bp, Homo sapien
caatcatagtgcagtctagccttga

SEQ ID NO: 4105769 - DNA, 25 bp, Homo sapien
caacttgttacagcagagtgtgcac

SEQ ID NO: 4105770 - DNA, 25 bp, Homo sapien
gtgcacgccattgagtccctgccag

SEQ ID NO: 4105771 - DNA, 25 bp, Homo sapien
cagcagaagaaccttgtgcacgcca

SEQ ID NO: 4105772 - DNA, 25 bp, Homo sapien
tgctcctgaaagctacctctgctgc

SEQ ID NO: 4105773 - DNA, 25 bp, Homo sapien
tcaaaagaggacttctggccaggag

SEQ ID NO: 4105774 - DNA, 25 bp, Homo sapien
tcttaagtaatgacctggcttcttg

SEQ ID NO: 4105775 - DNA, 25 bp, Homo sapien
caaaagcaatcaaaagaggacttct

SEQ ID NO: 4105776 - DNA, 25 bp, Homo sapien
ccattcttaagtaatgacctggctt

SEQ ID NO: 4105777 - DNA, 25 bp, Homo sapien
tctgttgtcgggtatttatgccatt

SEQ ID NO: 4105778 - DNA, 25 bp, Homo sapien
tacatttgtgatgggcagaatactt

SEQ ID NO: 4105779 - DNA, 25 bp, Homo sapien
tctgaactgcacctagaaggcatgt

SEQ ID NO: 4105780 - DNA, 25 bp, Homo sapien
tgtagactgtgaaccaatctaggac

SEQ ID NO: 4105781 - DNA, 25 bp, Homo sapien
gaaatgctctgcttatatggtgcct

SEQ ID NO: 4105782 - DNA, 25 bp, Homo sapien
ggttcttcagcatcacgtcacagta

SEQ ID NO: 4105783 - DNA, 25 bp, Homo sapien
agctaggagcctcagcacaaccatg

SEQ ID NO: 4105784 - DNA, 25 bp, Homo sapien
aaatgacacttctctggcacccctt

SEQ ID NO: 4105785 - DNA, 25 bp, Homo sapien
tagcctcttgctggtgtaatcccaa

SEQ ID NO: 4105786 - DNA, 25 bp, Homo sapien
tctctacattgtgagtagcctcttg

SEQ ID NO: 4105787 - DNA, 25 bp, Homo sapien
ttgtgagtagcctcttgctggtgta

SEQ ID NO: 4105788 - DNA, 25 bp, Homo sapien
tgtcttctctacattgtgagtagcc

SEQ ID NO: 4105789 - DNA, 25 bp, Homo sapien
attcttcgcagctgtaatgagtctt

SEQ ID NO: 4105790 - DNA, 25 bp, Homo sapien
ttcttcgcagctgtaatgagtcttt

SEQ ID NO: 4105791 - DNA, 25 bp, Homo sapien
aacaagtgagtgagtagtgccgaaa

SEQ ID NO: 4105792 - DNA, 25 bp, Homo sapien
ttactgaaggtattacatttgctaa

SEQ ID NO: 4105793 - DNA, 25 bp, Homo sapien
cattcactgcacacgtaacatcctt

SEQ ID NO: 4105794 - DNA, 25 bp, Homo sapien
aaaagcttctggtggaacaagtgag

SEQ ID NO: 4105795 - DNA, 25 bp, Homo sapien
ctggtgatcagtgaggaggtgagac

SEQ ID NO: 4105796 - DNA, 25 bp, Homo sapien
aggtagaaggaagtgagacttcttg

SEQ ID NO: 4105797 - DNA, 25 bp, Homo sapien
gctccttctggctaagtaatttccc

SEQ ID NO: 4105798 - DNA, 25 bp, Homo sapien
tcttgtatgaacacgaagtgcagag

SEQ ID NO: 4105799 - DNA, 25 bp, Homo sapien
gtgaattcttgtatgaacacgaagt

SEQ ID NO: 4105800 - DNA, 25 bp, Homo sapien
actggagttacagcaaaggacttcc

SEQ ID NO: 4105801 - DNA, 25 bp, Homo sapien
ctggagttacagcaaaggacttccc

SEQ ID NO: 4105802 - DNA, 25 bp, Homo sapien
tataggagaaccatctgattttcta

SEQ ID NO: 4105803 - DNA, 25 bp, Homo sapien
ctataggagaaccatctgattttct

SEQ ID NO: 4105804 - DNA, 25 bp, Homo sapien
cattgcttcaccatgatactaggat

SEQ ID NO: 4105805 - DNA, 25 bp, Homo sapien
ctctcctgggcccttaggctcaggg

SEQ ID NO: 4105806 - DNA, 25 bp, Homo sapien
ctcagggaggttaaacggtttgcat

SEQ ID NO: 4105807 - DNA, 25 bp, Homo sapien
catgaggcgattgcattgggtctcc

SEQ ID NO: 4105808 - DNA, 25 bp, Homo sapien
taacctttcaggacacggacctaca

SEQ ID NO: 4105809 - DNA, 25 bp, Homo sapien
ttgtctgcagtgtgaacacggtcac

SEQ ID NO: 4105810 - DNA, 25 bp, Homo sapien
cacggtcacagctagagatttggtt

SEQ ID NO: 4105811 - DNA, 25 bp, Homo sapien
tttccttgcaatggacacaggtcct

SEQ ID NO: 4105812 - DNA, 25 bp, Homo sapien
gaagatggccagtaattttggacta

SEQ ID NO: 4105813 - DNA, 25 bp, Homo sapien
ctgtcctaatacgggtctccttcat

SEQ ID NO: 4105814 - DNA, 25 bp, Homo sapien
tggccagtaattttggactaagtaa

SEQ ID NO: 4105815 - DNA, 25 bp, Homo sapien
tctctccccttctgtcctaatacgg

SEQ ID NO: 4105816 - DNA, 25 bp, Homo sapien
catgggaatgcagtagagagagata

SEQ ID NO: 4105817 - DNA, 25 bp, Homo sapien
ctgtggatgagagcatgggaatgca

SEQ ID NO: 4105818 - DNA, 25 bp, Homo sapien
ttagtcattctttgagaccagcatt

SEQ ID NO: 4105819 - DNA, 25 bp, Homo sapien
gagagatacgactatatttagtcat

SEQ ID NO: 4105820 - DNA, 25 bp, Homo sapien
tgtttgaagccccatgagcttctgg

SEQ ID NO: 4105821 - DNA, 25 bp, Homo sapien
ctttcagctcataataaaagccatc

SEQ ID NO: 4105822 - DNA, 25 bp, Homo sapien
agccatcttctgtttgaagccccat

SEQ ID NO: 4105823 - DNA, 25 bp, Homo sapien
tctttcagctcataataaaagccat

SEQ ID NO: 4105824 - DNA, 25 bp, Homo sapien
gaagaaacttgctctcgactccgaa

SEQ ID NO: 4105825 - DNA, 25 bp, Homo sapien
taaggagtagccagatgaacactga

SEQ ID NO: 4105826 - DNA, 25 bp, Homo sapien
cacactcttttttgctgtcccgcat

SEQ ID NO: 4105827 - DNA, 25 bp, Homo sapien
gagggacgattctcctaagcaaagg

SEQ ID NO: 4105828 - DNA, 25 bp, Homo sapien
ttggaattgcaaggccccaagcaaa

SEQ ID NO: 4105829 - DNA, 25 bp, Homo sapien
agcaaatggtgtggatggaggatgc

SEQ ID NO: 4105830 - DNA, 25 bp, Homo sapien
tgaagtcacacttgacacttctggg

SEQ ID NO: 4105831 - DNA, 25 bp, Homo sapien
aataaagcatccaaaaggagtcttg

SEQ ID NO: 4105832 - DNA, 25 bp, Homo sapien
gctgctcgagtttctgcatcatctc

SEQ ID NO: 4105833 - DNA, 25 bp, Homo sapien
cagtctttagctctaaagttccaag

SEQ ID NO: 4105834 - DNA, 25 bp, Homo sapien
gctctaaagttccaaggcccattca

SEQ ID NO: 4105835 - DNA, 25 bp, Homo sapien
cattcatcaagcgtaggcttgctgc

SEQ ID NO: 4105836 - DNA, 25 bp, Homo sapien
aagtaattttgagtcattgcttcca

SEQ ID NO: 4105837 - DNA, 25 bp, Homo sapien
tttgagtcattgcttccagtatctc

SEQ ID NO: 4105838 - DNA, 25 bp, Homo sapien
gagtcattgcttccagtatctctca

SEQ ID NO: 4105839 - DNA, 25 bp, Homo sapien
cattgcttccagtatctctcagttt

SEQ ID NO: 4105840 - DNA, 25 bp, Homo sapien
cttctccatgtcttgaccacagttg

SEQ ID NO: 4105841 - DNA, 25 bp, Homo sapien
cagttgtgcgggattcctcttgaag

SEQ ID NO: 4105842 - DNA, 25 bp, Homo sapien
aatttgccttttgcaaagcacatgt

SEQ ID NO: 4105843 - DNA, 25 bp, Homo sapien
tgccttttgcaaagcacatgtctca

SEQ ID NO: 4105844 - DNA, 25 bp, Homo sapien
tgttttatagcgacattgcaaggca

SEQ ID NO: 4105845 - DNA, 25 bp, Homo sapien
tcaggaatggaagaaactcgagtat

SEQ ID NO: 4105846 - DNA, 25 bp, Homo sapien
tcttattccgtaaagtagatggagc

SEQ ID NO: 4105847 - DNA, 25 bp, Homo sapien
cattgcaaggcaagtaaatcaatac

SEQ ID NO: 4105848 - DNA, 25 bp, Homo sapien
ttggataactgctttgattttctgg

SEQ ID NO: 4105849 - DNA, 25 bp, Homo sapien
tgattttctggttttgaagccagtg

SEQ ID NO: 4105850 - DNA, 25 bp, Homo sapien
tttctggttttgaagccagtgtcat

SEQ ID NO: 4105851 - DNA, 25 bp, Homo sapien
tggataactgctttgattttctggt

SEQ ID NO: 4105852 - DNA, 25 bp, Homo sapien
gattggaggggagcatttactcttc

SEQ ID NO: 4105853 - DNA, 25 bp, Homo sapien
attggaggggagcatttactcttca

SEQ ID NO: 4105854 - DNA, 25 bp, Homo sapien
tgctggtctgggtaggactggcaga

SEQ ID NO: 4105855 - DNA, 25 bp, Homo sapien
tccctcatcccgctgtgggcagatg

SEQ ID NO: 4105856 - DNA, 25 bp, Homo sapien
tctgccatggtgtggaccgacagcg

SEQ ID NO: 4105857 - DNA, 25 bp, Homo sapien
tgaagtttgacagctcgtgtgagtc

SEQ ID NO: 4105858 - DNA, 25 bp, Homo sapien
ttattcccctgtgctctgtgttgca

SEQ ID NO: 4105859 - DNA, 25 bp, Homo sapien
cccctgtgctctgtgttgcactgac

SEQ ID NO: 4105860 - DNA, 25 bp, Homo sapien
ttcccctgtgctctgtgttgcactg

SEQ ID NO: 4105861 - DNA, 25 bp, Homo sapien
tattcccctgtgctctgtgttgcac

SEQ ID NO: 4105862 - DNA, 25 bp, Homo sapien
catcatcttgtattcttagctgctt

SEQ ID NO: 4105863 - DNA, 25 bp, Homo sapien
ctccatcatcttgtattcttagctg

SEQ ID NO: 4105864 - DNA, 25 bp, Homo sapien
tccatcatcttgtattcttagctgc

SEQ ID NO: 4105865 - DNA, 25 bp, Homo sapien
ccatcatcttgtattcttagctgct

SEQ ID NO: 4105866 - DNA, 25 bp, Homo sapien
taaatagtgattaatagtctctgtt

SEQ ID NO: 4105867 - DNA, 25 bp, Homo sapien
gggttctgtaagcagagcttctcca

SEQ ID NO: 4105868 - DNA, 25 bp, Homo sapien
cttgggttctgtaagcagagcttct

SEQ ID NO: 4105869 - DNA, 25 bp, Homo sapien
ggtggttggctgattagcagagcta

SEQ ID NO: 4105870 - DNA, 25 bp, Homo sapien
ctccaggatttcgtgaggcagcgtg

SEQ ID NO: 4105871 - DNA, 25 bp, Homo sapien
caggatttcgtgaggcagcgtggca

SEQ ID NO: 4105872 - DNA, 25 bp, Homo sapien
gatttcgtgaggcagcgtggcactg

SEQ ID NO: 4105873 - DNA, 25 bp, Homo sapien
catctccaggatttcgtgaggcagc

SEQ ID NO: 4105874 - DNA, 25 bp, Homo sapien
tgccaggaagaatagaacacagact

SEQ ID NO: 4105875 - DNA, 25 bp, Homo sapien
ctgccaggaagaatagaacacagac

SEQ ID NO: 4105876 - DNA, 25 bp, Homo sapien
aggaagaatagaacacagacttccc

SEQ ID NO: 4105877 - DNA, 25 bp, Homo sapien
ccaggaagaatagaacacagacttc

SEQ ID NO: 4105878 - DNA, 25 bp, Homo sapien
gaggtggagtcaccggggtatggga

SEQ ID NO: 4105879 - DNA, 25 bp, Homo sapien
tcatcctgtggtttccggtgttact

SEQ ID NO: 4105880 - DNA, 25 bp, Homo sapien
tccggtgttacttgaggtggagtca

SEQ ID NO: 4105881 - DNA, 25 bp, Homo sapien
ctgtggtttccggtgttacttgagg

SEQ ID NO: 4105882 - DNA, 25 bp, Homo sapien
gattggtttcctatttatagttctg

SEQ ID NO: 4105883 - DNA, 25 bp, Homo sapien
taggtagaattatatggcctttcac

SEQ ID NO: 4105884 - DNA, 25 bp, Homo sapien
tctgcaactggcaactgctgattgg

SEQ ID NO: 4105885 - DNA, 25 bp, Homo sapien
ttcacaacagacttctgttacttac

SEQ ID NO: 4105886 - DNA, 25 bp, Homo sapien
tagagcctggtgagaagccaactgg

SEQ ID NO: 4105887 - DNA, 25 bp, Homo sapien
gacaggcctctagttgctatggtga

SEQ ID NO: 4105888 - DNA, 25 bp, Homo sapien
gttcaatccactgtcgtagagcctg

SEQ ID NO: 4105889 - DNA, 25 bp, Homo sapien
gtgagtgattcccaaagcagcgcgc

SEQ ID NO: 4105890 - DNA, 25 bp, Homo sapien
acaccagaagcctcgaggagtcctg

SEQ ID NO: 4105891 - DNA, 25 bp, Homo sapien
ttatctggagccatagtgtccctga

SEQ ID NO: 4105892 - DNA, 25 bp, Homo sapien
tgtccctgagcgatgaagctcccca

SEQ ID NO: 4105893 - DNA, 25 bp, Homo sapien
cagtattttgtgaatgagcaaagca

SEQ ID NO: 4105894 - DNA, 25 bp, Homo sapien
tatagctgcgtgctcctaacagcag

SEQ ID NO: 4105895 - DNA, 25 bp, Homo sapien
actttgagatatagctgcgtgctcc

SEQ ID NO: 4105896 - DNA, 25 bp, Homo sapien
ccatttagaatgaaagctgtgactt

SEQ ID NO: 4105897 - DNA, 25 bp, Homo sapien
tggtttaatgaagcccgatccagaa

SEQ ID NO: 4105898 - DNA, 25 bp, Homo sapien
gagcccctcttggtaatagcagtaa

SEQ ID NO: 4105899 - DNA, 25 bp, Homo sapien
tggagcagatgcgtctcagaagata

SEQ ID NO: 4105900 - DNA, 25 bp, Homo sapien
tggccctggacttgaccatcttgtg

SEQ ID NO: 4105901 - DNA, 25 bp, Homo sapien
tcaccaggactaagaggagcctgag

SEQ ID NO: 4105902 - DNA, 25 bp, Homo sapien
aatcgggaaccacttctgctctgca

SEQ ID NO: 4105903 - DNA, 25 bp, Homo sapien
ccctttattttgtgtggcgtctcca

SEQ ID NO: 4105904 - DNA, 25 bp, Homo sapien
ctggactgtccctgcaatcgggaac

SEQ ID NO: 4105905 - DNA, 25 bp, Homo sapien
taatgtccgattgtcctggactgtc

SEQ ID NO: 4105906 - DNA, 25 bp, Homo sapien
tcagcccttgtgagaacttttaggg

SEQ ID NO: 4105907 - DNA, 25 bp, Homo sapien
tgtgagaacttttagggcggtagta

SEQ ID NO: 4105908 - DNA, 25 bp, Homo sapien
cttgtgagaacttttagggcggtag

SEQ ID NO: 4105909 - DNA, 25 bp, Homo sapien
ctgtcagcccttgtgagaactttta

SEQ ID NO: 4105910 - DNA, 25 bp, Homo sapien
caattagggcatttacgtggcaaaa

SEQ ID NO: 4105911 - DNA, 25 bp, Homo sapien
tacatccgacacaattagggcattt

SEQ ID NO: 4105912 - DNA, 25 bp, Homo sapien
tagtgaactacatccgacacaatta

SEQ ID NO: 4105913 - DNA, 25 bp, Homo sapien
gcatttacgtggcaaaaaacacctg

SEQ ID NO: 4105914 - DNA, 25 bp, Homo sapien
aaagaaaagctgatgtggtcgctga

SEQ ID NO: 4105915 - DNA, 25 bp, Homo sapien
cccatgggatgtgaagaacggccct

SEQ ID NO: 4105916 - DNA, 25 bp, Homo sapien
tcctaaaggcaaagtcgcatgtgtt

SEQ ID NO: 4105917 - DNA, 25 bp, Homo sapien
tcgctgagggttatgtcagtcacag

SEQ ID NO: 4105918 - DNA, 25 bp, Homo sapien
catccatcatgcttgtgagctccat

SEQ ID NO: 4105919 - DNA, 25 bp, Homo sapien
ccatcatgcttgtgagctccatcca

SEQ ID NO: 4105920 - DNA, 25 bp, Homo sapien
aatggattgagcaggccatgggagt

SEQ ID NO: 4105921 - DNA, 25 bp, Homo sapien
aaatggattgagcaggccatgggag

SEQ ID NO: 4105922 - DNA, 25 bp, Homo sapien
ccaaactctttagacacaaaactgc

SEQ ID NO: 4105923 - DNA, 25 bp, Homo sapien
cgccttactatctcattaacccttt

SEQ ID NO: 4105924 - DNA, 25 bp, Homo sapien
tgaggtgattttccattccaaactc

SEQ ID NO: 4105925 - DNA, 25 bp, Homo sapien
agtgatgaccgccttactatctcat

SEQ ID NO: 4105926 - DNA, 25 bp, Homo sapien
ttcactctgattagcatcaagctgt

SEQ ID NO: 4105927 - DNA, 25 bp, Homo sapien
gtcaacaccttttggtagcttcaag

SEQ ID NO: 4105928 - DNA, 25 bp, Homo sapien
taaacctagacctaataatagattg

SEQ ID NO: 4105929 - DNA, 25 bp, Homo sapien
ggatgtctctgcgatgctattgtgc

SEQ ID NO: 4105930 - DNA, 25 bp, Homo sapien
gctattgtgcaagtcagctctttta

SEQ ID NO: 4105931 - DNA, 25 bp, Homo sapien
tacaatgtgcttccatcaagagttc

SEQ ID NO: 4105932 - DNA, 25 bp, Homo sapien
ggctatgccttctcggatgagtaat

SEQ ID NO: 4105933 - DNA, 25 bp, Homo sapien
tcaagagttccaggtttcaaccaag

SEQ ID NO: 4105934 - DNA, 25 bp, Homo sapien
tcccaagaggttcagtacaaaggtg

SEQ ID NO: 4105935 - DNA, 25 bp, Homo sapien
ctgtgtcacagaaacaagggtgtca

SEQ ID NO: 4105936 - DNA, 25 bp, Homo sapien
aaagcagtataaacccctctggtca

SEQ ID NO: 4105937 - DNA, 25 bp, Homo sapien
tgtcacagaaacaagggtgtcagaa

SEQ ID NO: 4105938 - DNA, 25 bp, Homo sapien
tctggtcaagggctgctgacctctg

SEQ ID NO: 4105939 - DNA, 25 bp, Homo sapien
gcctcccgcaattgctctgttcaca

SEQ ID NO: 4105940 - DNA, 25 bp, Homo sapien
gctgtgcctcccgcaattgctctgt

SEQ ID NO: 4105941 - DNA, 25 bp, Homo sapien
gtgcctcccgcaattgctctgttca

SEQ ID NO: 4105942 - DNA, 25 bp, Homo sapien
tgtgcctcccgcaattgctctgttc

SEQ ID NO: 4105943 - DNA, 25 bp, Homo sapien
gcttttcgcaggtggatgccattac

SEQ ID NO: 4105944 - DNA, 25 bp, Homo sapien
gagggctcttgtgcttttcgcaggt

SEQ ID NO: 4105945 - DNA, 25 bp, Homo sapien
ttgtgcttttcgcaggtggatgcca

SEQ ID NO: 4105946 - DNA, 25 bp, Homo sapien
tcctgagggctcttgtgcttttcgc

SEQ ID NO: 4105947 - DNA, 25 bp, Homo sapien
aagatctgccattggtaatttggac

SEQ ID NO: 4105948 - DNA, 25 bp, Homo sapien
aaggtggcatatgcagaggccaaga

SEQ ID NO: 4105949 - DNA, 25 bp, Homo sapien
ttctgatgttggtgtaagatctgcc

SEQ ID NO: 4105950 - DNA, 25 bp, Homo sapien
tcagtgctgtcgcaggaattgtgga

SEQ ID NO: 4105951 - DNA, 25 bp, Homo sapien
tccagccatgattctgaagttctcc

SEQ ID NO: 4105952 - DNA, 25 bp, Homo sapien
tccagattgtacacactgtacagaa

SEQ ID NO: 4105953 - DNA, 25 bp, Homo sapien
catagaggtactctctaactccatc

SEQ ID NO: 4105954 - DNA, 25 bp, Homo sapien
ttccttcttgaatgtcttggtccag

SEQ ID NO: 4105955 - DNA, 25 bp, Homo sapien
taatttcgctactctggaatttact

SEQ ID NO: 4105956 - DNA, 25 bp, Homo sapien
ggaatttacttatttggccctgcat

SEQ ID NO: 4105957 - DNA, 25 bp, Homo sapien
gaatttacttatttggccctgcatt

SEQ ID NO: 4105958 - DNA, 25 bp, Homo sapien
tacaaagttaatttcgctactctgg

SEQ ID NO: 4105959 - DNA, 25 bp, Homo sapien
actattgtagatgggttcctgcccc

SEQ ID NO: 4105960 - DNA, 25 bp, Homo sapien
tggggactattgtagatgggttcct

SEQ ID NO: 4105961 - DNA, 25 bp, Homo sapien
gggactattgtagatgggttcctgc

SEQ ID NO: 4105962 - DNA, 25 bp, Homo sapien
cccatgctgtgcctgaaggtacagt

SEQ ID NO: 4105963 - DNA, 25 bp, Homo sapien
tgtgagtacaaatgtttggaggcat

SEQ ID NO: 4105964 - DNA, 25 bp, Homo sapien
ctgtgagtacaaatgtttggaggca

SEQ ID NO: 4105965 - DNA, 25 bp, Homo sapien
ttcagcagggcgtccctggtagaag

SEQ ID NO: 4105966 - DNA, 25 bp, Homo sapien
cttgggaataaagggcagaagtcgc

SEQ ID NO: 4105967 - DNA, 25 bp, Homo sapien
aagagaagagttcatcatgcagaca

SEQ ID NO: 4105968 - DNA, 25 bp, Homo sapien
gaggaagaccttctagaatgttgaa

SEQ ID NO: 4105969 - DNA, 25 bp, Homo sapien
tttggagaagattacgatgactctg

SEQ ID NO: 4105970 - DNA, 25 bp, Homo sapien
gattacgatgactctgtgcttgcaa

SEQ ID NO: 4105971 - DNA, 25 bp, Homo sapien
ggagaagattacgatgactctgtgc

SEQ ID NO: 4105972 - DNA, 25 bp, Homo sapien
agtggtttggagaagattacgatga

SEQ ID NO: 4105973 - DNA, 25 bp, Homo sapien
catctcagtgtcagggtttctattt

SEQ ID NO: 4105974 - DNA, 25 bp, Homo sapien
ctttgaacgatggctgagggtccat

SEQ ID NO: 4105975 - DNA, 25 bp, Homo sapien
ccataagcatcgtctgtaattgtta

SEQ ID NO: 4105976 - DNA, 25 bp, Homo sapien
tgtaattgttaacatctcagtgtca

SEQ ID NO: 4105977 - DNA, 25 bp, Homo sapien
aaaagcgttagcacgtccgctccga

SEQ ID NO: 4105978 - DNA, 25 bp, Homo sapien
ggtgaaaaagcgttagcacgtccgc

SEQ ID NO: 4105979 - DNA, 25 bp, Homo sapien
cgtccgctccgattacagtaattct

SEQ ID NO: 4105980 - DNA, 25 bp, Homo sapien
ttagcacgtccgctccgattacagt

SEQ ID NO: 4105981 - DNA, 25 bp, Homo sapien
gcggtttcccgcacgcctgaagaat

SEQ ID NO: 4105982 - DNA, 25 bp, Homo sapien
gtgctggtccccgtgctctgcttgt

SEQ ID NO: 4105983 - DNA, 25 bp, Homo sapien
ggcaggaggatcgtgctggtccccg

SEQ ID NO: 4105984 - DNA, 25 bp, Homo sapien
tgctctgcttgtccgcggtttcccg

SEQ ID NO: 4105985 - DNA, 25 bp, Homo sapien
gtgtgcgcgcgcgattgtgccttca

SEQ ID NO: 4105986 - DNA, 25 bp, Homo sapien
agtgatgcctcccaacggtgccctt

SEQ ID NO: 4105987 - DNA, 25 bp, Homo sapien
cgattgtgccttcagcgaacccagt

SEQ ID NO: 4105988 - DNA, 25 bp, Homo sapien
ggctggcagaacaggtaacgcgcca

SEQ ID NO: 4105989 - DNA, 25 bp, Homo sapien
ctgtgactttgctccgccggtgata

SEQ ID NO: 4105990 - DNA, 25 bp, Homo sapien
cagacaacgcggagggcctccctga

SEQ ID NO: 4105991 - DNA, 25 bp, Homo sapien
ttactgtgtaggagcgtctggcgca

SEQ ID NO: 4105992 - DNA, 25 bp, Homo sapien
cgcagcatcgtgtgcggaagaccga

SEQ ID NO: 4105993 - DNA, 25 bp, Homo sapien
gaaagagtatctttaggtaggaaga

SEQ ID NO: 4105994 - DNA, 25 bp, Homo sapien
catctatcaccttttgttttgtctg

SEQ ID NO: 4105995 - DNA, 25 bp, Homo sapien
tgaagtatttatctgcttgatgggt

SEQ ID NO: 4105996 - DNA, 25 bp, Homo sapien
ctttggacggagatcacctatcatc

SEQ ID NO: 4105997 - DNA, 25 bp, Homo sapien
tttaacactatgtaggcacctggaa

SEQ ID NO: 4105998 - DNA, 25 bp, Homo sapien
tcaaggtcataggttagaattcagc

SEQ ID NO: 4105999 - DNA, 25 bp, Homo sapien
tggtccaggcaagctcttttcagat

SEQ ID NO: 4106000 - DNA, 25 bp, Homo sapien
gaatggcttcaaatttggtccaggc

SEQ ID NO: 4106001 - DNA, 25 bp, Homo sapien
tcagaaggccttggttcagaatcaa

SEQ ID NO: 4106002 - DNA, 25 bp, Homo sapien
gccctctcagggtaatcttaatgga

SEQ ID NO: 4106003 - DNA, 25 bp, Homo sapien
tcttcccactggatggtaaggttgc

SEQ ID NO: 4106004 - DNA, 25 bp, Homo sapien
taaggttgcatgtacacgtcacagc

SEQ ID NO: 4106005 - DNA, 25 bp, Homo sapien
cacatggctgttagcaggtctcaga

SEQ ID NO: 4106006 - DNA, 25 bp, Homo sapien
gaccttcactgaggcgatctgcttc

SEQ ID NO: 4106007 - DNA, 25 bp, Homo sapien
taaggtgactgacacagtggctggc

SEQ ID NO: 4106008 - DNA, 25 bp, Homo sapien
ctgcctgggctatccattggtggcc

SEQ ID NO: 4106009 - DNA, 25 bp, Homo sapien
gatatccacagaatgcaggttcctg

SEQ ID NO: 4106010 - DNA, 25 bp, Homo sapien
ccttgcgctgttgatgagaacttct

SEQ ID NO: 4106011 - DNA, 25 bp, Homo sapien
gtctttctaatgtccctgtgtccac

SEQ ID NO: 4106012 - DNA, 25 bp, Homo sapien
tggaagagatatccacagaatgcag

SEQ ID NO: 4106013 - DNA, 25 bp, Homo sapien
gatgccttcgatcatatctgtcggt

SEQ ID NO: 4106014 - DNA, 25 bp, Homo sapien
ccttcgatcatatctgtcggtgcta

SEQ ID NO: 4106015 - DNA, 25 bp, Homo sapien
tcaactttttgatttgtgtcatagt

SEQ ID NO: 4106016 - DNA, 25 bp, Homo sapien
catatctgtcggtgctaccagtcaa

SEQ ID NO: 4106017 - DNA, 25 bp, Homo sapien
acgttagaactgaggaagcatcgtt

SEQ ID NO: 4106018 - DNA, 25 bp, Homo sapien
ttctttgggacgttagaactgagga

SEQ ID NO: 4106019 - DNA, 25 bp, Homo sapien
ggacgttagaactgaggaagcatcg

SEQ ID NO: 4106020 - DNA, 25 bp, Homo sapien
tttgggacgttagaactgaggaagc

SEQ ID NO: 4106021 - DNA, 25 bp, Homo sapien
atggcatgcaaggtatcgcttctga

SEQ ID NO: 4106022 - DNA, 25 bp, Homo sapien
caagatttgatttgcgactaaaaac

SEQ ID NO: 4106023 - DNA, 25 bp, Homo sapien
gtgtgaattctagtgtgttgtgtga

SEQ ID NO: 4106024 - DNA, 25 bp, Homo sapien
aattctagtgtgttgtgtgaggtgt

SEQ ID NO: 4106025 - DNA, 25 bp, Homo sapien
gtgaggtgtgaatcacgcctgaaag

SEQ ID NO: 4106026 - DNA, 25 bp, Homo sapien
tgcttgatggtgaataagtgttgac

SEQ ID NO: 4106027 - DNA, 25 bp, Homo sapien
gattgcttgatggtgaataagtgtt

SEQ ID NO: 4106028 - DNA, 25 bp, Homo sapien
atggattgcttgatggtgaataagt

SEQ ID NO: 4106029 - DNA, 25 bp, Homo sapien
catggattgcttgatggtgaataag

SEQ ID NO: 4106030 - DNA, 25 bp, Homo sapien
ctgaagactttgtgacaatcattac

SEQ ID NO: 4106031 - DNA, 25 bp, Homo sapien
actgaagactttgtgacaatcatta

SEQ ID NO: 4106032 - DNA, 25 bp, Homo sapien
tgaaggcctcgtcaaaatcatcaca

SEQ ID NO: 4106033 - DNA, 25 bp, Homo sapien
gaaggcctcgtcaaaatcatcacat

SEQ ID NO: 4106034 - DNA, 25 bp, Homo sapien
ttgactgaaggcctcgtcaaaatca

SEQ ID NO: 4106035 - DNA, 25 bp, Homo sapien
actgaaggcctcgtcaaaatcatca

SEQ ID NO: 4106036 - DNA, 25 bp, Homo sapien
tcacagagtcaactaaaatactact

SEQ ID NO: 4106037 - DNA, 25 bp, Homo sapien
aatcacagagtcaactaaaatacta

SEQ ID NO: 4106038 - DNA, 25 bp, Homo sapien
taaatagagatatgacccatattga

SEQ ID NO: 4106039 - DNA, 25 bp, Homo sapien
atcacagagtcaactaaaatactac

SEQ ID NO: 4106040 - DNA, 25 bp, Homo sapien
gtgtaagagttccaattactccaca

SEQ ID NO: 4106041 - DNA, 25 bp, Homo sapien
ccagcacttggtatcctcagttttg

SEQ ID NO: 4106042 - DNA, 25 bp, Homo sapien
tgtttccgggttttgatgattatga

SEQ ID NO: 4106043 - DNA, 25 bp, Homo sapien
attccccagttgagggatctttggg

SEQ ID NO: 4106044 - DNA, 25 bp, Homo sapien
tctctggatagggacttcctgtggc

SEQ ID NO: 4106045 - DNA, 25 bp, Homo sapien
cacagggcattttgtcaggtggcaa

SEQ ID NO: 4106046 - DNA, 25 bp, Homo sapien
tgcactgcattgatcacactaactg

SEQ ID NO: 4106047 - DNA, 25 bp, Homo sapien
tattaacagcggctttgcactgcat

SEQ ID NO: 4106048 - DNA, 25 bp, Homo sapien
gacagaagtttctctttacaggaac

SEQ ID NO: 4106049 - DNA, 25 bp, Homo sapien
gacttcagatcacacataggttggc

SEQ ID NO: 4106050 - DNA, 25 bp, Homo sapien
aagtcctctctagcaggttgtaaca

SEQ ID NO: 4106051 - DNA, 25 bp, Homo sapien
tctgaagataaaagccttaaggtcc

SEQ ID NO: 4106052 - DNA, 25 bp, Homo sapien
tgctcaacttcattggataccaaaa

SEQ ID NO: 4106053 - DNA, 25 bp, Homo sapien
ggaaatcaaaatggctaagattgct

SEQ ID NO: 4106054 - DNA, 25 bp, Homo sapien
tagacaaagatgacaactggcttac

SEQ ID NO: 4106055 - DNA, 25 bp, Homo sapien
gcttacagaaagggagatttttaca

SEQ ID NO: 4106056 - DNA, 25 bp, Homo sapien
taaaacggtgcagatatgttggcaa

SEQ ID NO: 4106057 - DNA, 25 bp, Homo sapien
gcagcaacgcggagaaaatacccac

SEQ ID NO: 4106058 - DNA, 25 bp, Homo sapien
gaaagcattcatgagcgtaagggag

SEQ ID NO: 4106059 - DNA, 25 bp, Homo sapien
gataacatctgtcctcatgacgttg

SEQ ID NO: 4106060 - DNA, 25 bp, Homo sapien
tgcccctaacacatgcaaacctggg

SEQ ID NO: 4106061 - DNA, 25 bp, Homo sapien
aaattgtggagtctgaagggtgacc

SEQ ID NO: 4106062 - DNA, 25 bp, Homo sapien
gaacccaatggctagttattttgaa

SEQ ID NO: 4106063 - DNA, 25 bp, Homo sapien
caatgaagtgttagggccatcatga

SEQ ID NO: 4106064 - DNA, 25 bp, Homo sapien
tgccagcagcatgctgggtcacatt

SEQ ID NO: 4106065 - DNA, 25 bp, Homo sapien
acttgtttctttaccacaatgccag

SEQ ID NO: 4106066 - DNA, 25 bp, Homo sapien
ccagcagcatgctgggtcacattgt

SEQ ID NO: 4106067 - DNA, 25 bp, Homo sapien
tgtttctttaccacaatgccagcag

SEQ ID NO: 4106068 - DNA, 25 bp, Homo sapien
tccttcacgcattttaggaagcgat

SEQ ID NO: 4106069 - DNA, 25 bp, Homo sapien
aaatgccatggcatcctatagagaa

SEQ ID NO: 4106070 - DNA, 25 bp, Homo sapien
tttggtcgcagtgttaagagctctt

SEQ ID NO: 4106071 - DNA, 25 bp, Homo sapien
caaatgccatggcatcctatagaga

SEQ ID NO: 4106072 - DNA, 25 bp, Homo sapien
tggtcgcagtgttaagagctcttgg

SEQ ID NO: 4106073 - DNA, 25 bp, Homo sapien
tcaagtgcagtattaagaagtcagg

SEQ ID NO: 4106074 - DNA, 25 bp, Homo sapien
caacctgtaactgagcaatcatttg

SEQ ID NO: 4106075 - DNA, 25 bp, Homo sapien
tggtcaagtgcagtattaagaagtc

SEQ ID NO: 4106076 - DNA, 25 bp, Homo sapien
tcaacctgtaactgagcaatcattt

SEQ ID NO: 4106077 - DNA, 25 bp, Homo sapien
ctggaccgtgcttccctggccggct

SEQ ID NO: 4106078 - DNA, 25 bp, Homo sapien
cgcccctttcgcctctccgccaatg

SEQ ID NO: 4106079 - DNA, 25 bp, Homo sapien
ctctccgccaatggtcgcggccacc

SEQ ID NO: 4106080 - DNA, 25 bp, Homo sapien
cgggccgaatgtagccgcctggacc

SEQ ID NO: 4106081 - DNA, 25 bp, Homo sapien
tgcacactttcaggggcgccgctgc

SEQ ID NO: 4106082 - DNA, 25 bp, Homo sapien
gatgcacactttcaggggcgccgct

SEQ ID NO: 4106083 - DNA, 25 bp, Homo sapien
ccccgagcccacgatgcacactttc

SEQ ID NO: 4106084 - DNA, 25 bp, Homo sapien
gagcccacgatgcacactttcaggg

SEQ ID NO: 4106085 - DNA, 25 bp, Homo sapien
ttggcaattccttcggtcttatctt

SEQ ID NO: 4106086 - DNA, 25 bp, Homo sapien
tgtttaaggaccgggactgtgtcca

SEQ ID NO: 4106087 - DNA, 25 bp, Homo sapien
gcaattccttcggtcttatcttcca

SEQ ID NO: 4106088 - DNA, 25 bp, Homo sapien
ttaaggaccgggactgtgtccagct

SEQ ID NO: 4106089 - DNA, 25 bp, Homo sapien
aggaggttggaccaggcacctgtgt

SEQ ID NO: 4106090 - DNA, 25 bp, Homo sapien
gaggaggttggaccaggcacctgtg

SEQ ID NO: 4106091 - DNA, 25 bp, Homo sapien
gcagcttgtgtccaggaagatattt

SEQ ID NO: 4106092 - DNA, 25 bp, Homo sapien
gatgtctgtcagttttctgccattc

SEQ ID NO: 4106093 - DNA, 25 bp, Homo sapien
caaagacccacatcttgactgtgga

SEQ ID NO: 4106094 - DNA, 25 bp, Homo sapien
accaattatttttgcaacagctgaa

SEQ ID NO: 4106095 - DNA, 25 bp, Homo sapien
ggattatatctcagtgaagcagttt

SEQ ID NO: 4106096 - DNA, 25 bp, Homo sapien
actgaattgtatggtctgtggatta

SEQ ID NO: 4106097 - DNA, 25 bp, Homo sapien
gagaggcaacggcaactatatttca

SEQ ID NO: 4106098 - DNA, 25 bp, Homo sapien
aatcctggtgtcactggctgaagct

SEQ ID NO: 4106099 - DNA, 25 bp, Homo sapien
cttgatgagggtgattcccagcgct

SEQ ID NO: 4106100 - DNA, 25 bp, Homo sapien
cagattctgtgaatgaactggtggg

SEQ ID NO: 4106101 - DNA, 25 bp, Homo sapien
tgcacagcctcgctaagatttgaca

SEQ ID NO: 4106102 - DNA, 25 bp, Homo sapien
gctttcttgggcactctcccagtga

SEQ ID NO: 4106103 - DNA, 25 bp, Homo sapien
tggctcccatcagcacactgatgtc

SEQ ID NO: 4106104 - DNA, 25 bp, Homo sapien
catcttctcacggatgatgtcagaa

SEQ ID NO: 4106105 - DNA, 25 bp, Homo sapien
cactgatgtcaatacccatcttctc

SEQ ID NO: 4106106 - DNA, 25 bp, Homo sapien
atgatgtcagaaatgagcttcagcc

SEQ ID NO: 4106107 - DNA, 25 bp, Homo sapien
gagaaggccgttctccattactttg

SEQ ID NO: 4106108 - DNA, 25 bp, Homo sapien
catcaaccacggtaattcgaaaatt

SEQ ID NO: 4106109 - DNA, 25 bp, Homo sapien
gtctgcatcatcaaccacggtaatt

SEQ ID NO: 4106110 - DNA, 25 bp, Homo sapien
tctttgaagagaaggccgttctcca

SEQ ID NO: 4106111 - DNA, 25 bp, Homo sapien
ctaacatttgccttgcttgatgaac

SEQ ID NO: 4106112 - DNA, 25 bp, Homo sapien
acatttgccttgcttgatgaactcc

SEQ ID NO: 4106113 - DNA, 25 bp, Homo sapien
aactcctcccctgaggctgacttta

SEQ ID NO: 4106114 - DNA, 25 bp, Homo sapien
gaactcctcccctgaggctgacttt

SEQ ID NO: 4106115 - DNA, 25 bp, Homo sapien
ctcttccctagatgctcaaatttct

SEQ ID NO: 4106116 - DNA, 25 bp, Homo sapien
tttgcaactcccatccaataaagac

SEQ ID NO: 4106117 - DNA, 25 bp, Homo sapien
gcatagacaggcattctttccacct

SEQ ID NO: 4106118 - DNA, 25 bp, Homo sapien
aaagacaggtgactggtggattgcc

SEQ ID NO: 4106119 - DNA, 25 bp, Homo sapien
tgagaaagcatagacaggcattctt

SEQ ID NO: 4106120 - DNA, 25 bp, Homo sapien
acatccagtcacttgaaaacagctt

SEQ ID NO: 4106121 - DNA, 25 bp, Homo sapien
catccagtcacttgaaaacagcttt

SEQ ID NO: 4106122 - DNA, 25 bp, Homo sapien
aaacatccagtcacttgaaaacagc

SEQ ID NO: 4106123 - DNA, 25 bp, Homo sapien
gctgagagtcttaaaacccgtgttc

SEQ ID NO: 4106124 - DNA, 25 bp, Homo sapien
tgtgatgaaagcaacatacggccat

SEQ ID NO: 4106125 - DNA, 25 bp, Homo sapien
catgggttcccattagcagaagctt

SEQ ID NO: 4106126 - DNA, 25 bp, Homo sapien
tcctgccagcaaaaatgaaagccat

SEQ ID NO: 4106127 - DNA, 25 bp, Homo sapien
ctgaacaacacagcgaggccccatc

SEQ ID NO: 4106128 - DNA, 25 bp, Homo sapien
ttagtcgggcatggcagcatgtgcc

SEQ ID NO: 4106129 - DNA, 25 bp, Homo sapien
ggaagactgcttgagttcacaagtt

SEQ ID NO: 4106130 - DNA, 25 bp, Homo sapien
aagactgcttgagttcacaagttca

SEQ ID NO: 4106131 - DNA, 25 bp, Homo sapien
agcttgagccaaggaacacaagacc

SEQ ID NO: 4106132 - DNA, 25 bp, Homo sapien
gcttgagccaaggaacacaagacct

SEQ ID NO: 4106133 - DNA, 25 bp, Homo sapien
catgagaattccttgaacctggaag

SEQ ID NO: 4106134 - DNA, 25 bp, Homo sapien
gcatgagaattccttgaacctggaa

SEQ ID NO: 4106135 - DNA, 25 bp, Homo sapien
gcagaggttgcagtaagctgagatc

SEQ ID NO: 4106136 - DNA, 25 bp, Homo sapien
tatcagaaaggtgatattggcaggg

SEQ ID NO: 4106137 - DNA, 25 bp, Homo sapien
aaaggtgatattggcagggtgtggt

SEQ ID NO: 4106138 - DNA, 25 bp, Homo sapien
aatctatcagaaaggtgatattggc

SEQ ID NO: 4106139 - DNA, 25 bp, Homo sapien
cagaaaggtgatattggcagggtgt

SEQ ID NO: 4106140 - DNA, 25 bp, Homo sapien
ggtcgcaccaatatgaagctgcctt

SEQ ID NO: 4106141 - DNA, 25 bp, Homo sapien
accaatatgaagctgccttagctgg

SEQ ID NO: 4106142 - DNA, 25 bp, Homo sapien
ctagtcggtcgcaccaatatgaagc

SEQ ID NO: 4106143 - DNA, 25 bp, Homo sapien
tcggtcgcaccaatatgaagctgcc

SEQ ID NO: 4106144 - DNA, 25 bp, Homo sapien
ttgggattactaaaggcaaggtgcc

SEQ ID NO: 4106145 - DNA, 25 bp, Homo sapien
tctcagtccaacaatccatccgact

SEQ ID NO: 4106146 - DNA, 25 bp, Homo sapien
aaggtgccacatattgtttgctgct

SEQ ID NO: 4106147 - DNA, 25 bp, Homo sapien
tcctcctgaggctagctgccaagag

SEQ ID NO: 4106148 - DNA, 25 bp, Homo sapien
cagcatagcagccagactaaggagg

SEQ ID NO: 4106149 - DNA, 25 bp, Homo sapien
acatgcagcgggtctgactgccgaa

SEQ ID NO: 4106150 - DNA, 25 bp, Homo sapien
ctaaggaggctacaaggagacggaa

SEQ ID NO: 4106151 - DNA, 25 bp, Homo sapien
tggacaagacttttcaaggcccttc

SEQ ID NO: 4106152 - DNA, 25 bp, Homo sapien
gggcctcctgaagtttctgtctact

SEQ ID NO: 4106153 - DNA, 25 bp, Homo sapien
ttgccctctcccacggggtgatgtg

SEQ ID NO: 4106154 - DNA, 25 bp, Homo sapien
aaacatccaattgggcctcctgaag

SEQ ID NO: 4106155 - DNA, 25 bp, Homo sapien
aagaccgaggcgcaaagatacttca

SEQ ID NO: 4106156 - DNA, 25 bp, Homo sapien
ttatctcctgtcaactggcactggg

SEQ ID NO: 4106157 - DNA, 25 bp, Homo sapien
cattggacagaaaatcagaacggct

SEQ ID NO: 4106158 - DNA, 25 bp, Homo sapien
tatgtgtgcagctcaaattccagcc

SEQ ID NO: 4106159 - DNA, 25 bp, Homo sapien
tccggtgactacgtgcaggcaatcc

SEQ ID NO: 4106160 - DNA, 25 bp, Homo sapien
ccatcttcaaaatactcaatgccgg

SEQ ID NO: 4106161 - DNA, 25 bp, Homo sapien
cacgggtatggatgccagaggtggt

SEQ ID NO: 4106162 - DNA, 25 bp, Homo sapien
atcttcaaaatactcaatgccgggc

SEQ ID NO: 4106163 - DNA, 25 bp, Homo sapien
cttcaaaatactcaatgccgggctc

SEQ ID NO: 4106164 - DNA, 25 bp, Homo sapien
tgcaaaggagatgacaaagcccaga

SEQ ID NO: 4106165 - DNA, 25 bp, Homo sapien
aaggagatgacaaagcccagatgcc

SEQ ID NO: 4106166 - DNA, 25 bp, Homo sapien
ggagatgacaaagcccagatgccgt

SEQ ID NO: 4106167 - DNA, 25 bp, Homo sapien
gatgacaaagcccagatgccgttac

SEQ ID NO: 4106168 - DNA, 25 bp, Homo sapien
tgttgtctccacagcggaggccgtc

SEQ ID NO: 4106169 - DNA, 25 bp, Homo sapien
gctgtagacacttggcctttgcaga

SEQ ID NO: 4106170 - DNA, 25 bp, Homo sapien
aatcatttccatgagtcccaggcgg

SEQ ID NO: 4106171 - DNA, 25 bp, Homo sapien
ccctccgtaacaggtggtgatcagg

SEQ ID NO: 4106172 - DNA, 25 bp, Homo sapien
gaggatgcggtacacttcagcagaa

SEQ ID NO: 4106173 - DNA, 25 bp, Homo sapien
tcccttctgtttgaggatgcggtac

SEQ ID NO: 4106174 - DNA, 25 bp, Homo sapien
gaagtctgcggtccttggagctttt

SEQ ID NO: 4106175 - DNA, 25 bp, Homo sapien
ggtacacttcagcagaagtctgcgg

SEQ ID NO: 4106176 - DNA, 25 bp, Homo sapien
ttatggtcctccacaatcatgctca

SEQ ID NO: 4106177 - DNA, 25 bp, Homo sapien
ctcagtaaatcggcaagagaaagtg

SEQ ID NO: 4106178 - DNA, 25 bp, Homo sapien
tccacaatcatgctcagtaaatcgg

SEQ ID NO: 4106179 - DNA, 25 bp, Homo sapien
ggtcctccacaatcatgctcagtaa

SEQ ID NO: 4106180 - DNA, 25 bp, Homo sapien
tagctggacagaaccttataatgat

SEQ ID NO: 4106181 - DNA, 25 bp, Homo sapien
tgagcttggcagaatcaatagagtc

SEQ ID NO: 4106182 - DNA, 25 bp, Homo sapien
caggtagacctaatcaactctgact

SEQ ID NO: 4106183 - DNA, 25 bp, Homo sapien
caatagagtcttgaaaggcaatcct

SEQ ID NO: 4106184 - DNA, 25 bp, Homo sapien
gatacactgcagtaaacaatggaaa

SEQ ID NO: 4106185 - DNA, 25 bp, Homo sapien
tgatacactgcagtaaacaatggaa

SEQ ID NO: 4106186 - DNA, 25 bp, Homo sapien
ctgatacactgcagtaaacaatgga

SEQ ID NO: 4106187 - DNA, 25 bp, Homo sapien
atacactgcagtaaacaatggaaac

SEQ ID NO: 4106188 - DNA, 25 bp, Homo sapien
aacatctcttgaactggtctgcttt

SEQ ID NO: 4106189 - DNA, 25 bp, Homo sapien
caacatctcttgaactggtctgctt

SEQ ID NO: 4106190 - DNA, 25 bp, Homo sapien
acaacatctcttgaactggtctgct

SEQ ID NO: 4106191 - DNA, 25 bp, Homo sapien
tccgtgatgagattacagtcaaaca

SEQ ID NO: 4106192 - DNA, 25 bp, Homo sapien
aaattcatacatatccgtgatgaga

SEQ ID NO: 4106193 - DNA, 25 bp, Homo sapien
gaacttcccccaacacgttgcatga

SEQ ID NO: 4106194 - DNA, 25 bp, Homo sapien
gagattacagtcaaacatcatgttg

SEQ ID NO: 4106195 - DNA, 25 bp, Homo sapien
taacaagaggactaacagtagcccc

SEQ ID NO: 4106196 - DNA, 25 bp, Homo sapien
aatgagtcggaggtcaaatcagccc

SEQ ID NO: 4106197 - DNA, 25 bp, Homo sapien
gaagccctcctatggcctcaggaaa

SEQ ID NO: 4106198 - DNA, 25 bp, Homo sapien
cacttgttgagaggatggcctgcat

SEQ ID NO: 4106199 - DNA, 25 bp, Homo sapien
agggaacacctggaataatcactgg

SEQ ID NO: 4106200 - DNA, 25 bp, Homo sapien
tcaagaggtgtacagacatagtgtt

SEQ ID NO: 4106201 - DNA, 25 bp, Homo sapien
gaggtgtacagacatagtgtttccc

SEQ ID NO: 4106202 - DNA, 25 bp, Homo sapien
tccagggaacacctggaataatcac

SEQ ID NO: 4106203 - DNA, 25 bp, Homo sapien
tagaaaaatgggttccactgatgta

SEQ ID NO: 4106204 - DNA, 25 bp, Homo sapien
aaatgggttccactgatgtataaac

SEQ ID NO: 4106205 - DNA, 25 bp, Homo sapien
gaaaaatgggttccactgatgtata

SEQ ID NO: 4106206 - DNA, 25 bp, Homo sapien
aatgggttccactgatgtataaaca

SEQ ID NO: 4106207 - DNA, 25 bp, Homo sapien
taatggtggcgctaaaactgctgaa

SEQ ID NO: 4106208 - DNA, 25 bp, Homo sapien
gagggtggatcctagcaaggcaaca

SEQ ID NO: 4106209 - DNA, 25 bp, Homo sapien
tcatcaaagattcacagcaggcctg

SEQ ID NO: 4106210 - DNA, 25 bp, Homo sapien
taaagttccctttgcacaccggcac

SEQ ID NO: 4106211 - DNA, 25 bp, Homo sapien
gtgacaagtttgattgggggcacat

SEQ ID NO: 4106212 - DNA, 25 bp, Homo sapien
cagatgttgtgacaagtttgattgg

SEQ ID NO: 4106213 - DNA, 25 bp, Homo sapien
gcagatgttgtgacaagtttgattg

SEQ ID NO: 4106214 - DNA, 25 bp, Homo sapien
tttgattgggggcacatctcataca

SEQ ID NO: 4106215 - DNA, 25 bp, Homo sapien
gttaagcacatgttataagtcctgg

SEQ ID NO: 4106216 - DNA, 25 bp, Homo sapien
gtcctggaacttgctggcattagtc

SEQ ID NO: 4106217 - DNA, 25 bp, Homo sapien
gaagacttctctgatgttaagcaca

SEQ ID NO: 4106218 - DNA, 25 bp, Homo sapien
gacatcttaaggacatcaccacctg

SEQ ID NO: 4106219 - DNA, 25 bp, Homo sapien
acaaaggtcccaagcaattccatcc

SEQ ID NO: 4106220 - DNA, 25 bp, Homo sapien
cacaaaggtcccaagcaattccatc

SEQ ID NO: 4106221 - DNA, 25 bp, Homo sapien
ctccccacaaaggtcccaagcaatt

SEQ ID NO: 4106222 - DNA, 25 bp, Homo sapien
cccacaaaggtcccaagcaattcca

SEQ ID NO: 4106223 - DNA, 25 bp, Homo sapien
cactgtgctgggcttagactcccgc

SEQ ID NO: 4106224 - DNA, 25 bp, Homo sapien
agagtgtcctcttgcttcctgcaca

SEQ ID NO: 4106225 - DNA, 25 bp, Homo sapien
ctgttgtccagagtgtcctcttgct

SEQ ID NO: 4106226 - DNA, 25 bp, Homo sapien
gctgggcttagactcccgcttcttc

SEQ ID NO: 4106227 - DNA, 25 bp, Homo sapien
tgaaatgtgaacttctgaagttcag

SEQ ID NO: 4106228 - DNA, 25 bp, Homo sapien
aatgaaatgtgaacttctgaagttc

SEQ ID NO: 4106229 - DNA, 25 bp, Homo sapien
aatgtgaacttctgaagttcaggcc

SEQ ID NO: 4106230 - DNA, 25 bp, Homo sapien
gaaatgtgaacttctgaagttcagg

SEQ ID NO: 4106231 - DNA, 25 bp, Homo sapien
acttaggacggcaggatcaatgaga

SEQ ID NO: 4106232 - DNA, 25 bp, Homo sapien
tcacacttaggacggcaggatcaat

SEQ ID NO: 4106233 - DNA, 25 bp, Homo sapien
ttgtcacacttaggacggcaggatc

SEQ ID NO: 4106234 - DNA, 25 bp, Homo sapien
ggttgtcacacttaggacggcagga

SEQ ID NO: 4106235 - DNA, 25 bp, Homo sapien
tgtgttttcttagaaacacaaacca

SEQ ID NO: 4106236 - DNA, 25 bp, Homo sapien
ttcacagggcttcagctgtgttttc

SEQ ID NO: 4106237 - DNA, 25 bp, Homo sapien
cagctgtgttttcttagaaacacaa

SEQ ID NO: 4106238 - DNA, 25 bp, Homo sapien
ccttcacagggcttcagctgtgttt

SEQ ID NO: 4106239 - DNA, 25 bp, Homo sapien
ccaagatgtccattcttattgtatt

SEQ ID NO: 4106240 - DNA, 25 bp, Homo sapien
tactctgttggcaggagtaaggaag

SEQ ID NO: 4106241 - DNA, 25 bp, Homo sapien
aagtagtagccattccaaatttgca

SEQ ID NO: 4106242 - DNA, 25 bp, Homo sapien
agaagtcacttttgggtaaacgctg

SEQ ID NO: 4106243 - DNA, 25 bp, Homo sapien
agtgacctcaatctggggcattact

SEQ ID NO: 4106244 - DNA, 25 bp, Homo sapien
gatgcacggtgcaaacaccacgcat

SEQ ID NO: 4106245 - DNA, 25 bp, Homo sapien
gataatggcaggatgcacggtgcaa

SEQ ID NO: 4106246 - DNA, 25 bp, Homo sapien
ctgtttcctttaactccaagagaag

SEQ ID NO: 4106247 - DNA, 25 bp, Homo sapien
tgaagtgtgaataggaattgctgat

SEQ ID NO: 4106248 - DNA, 25 bp, Homo sapien
agtgtgaataggaattgctgatgct

SEQ ID NO: 4106249 - DNA, 25 bp, Homo sapien
gtgtgaataggaattgctgatgctt

SEQ ID NO: 4106250 - DNA, 25 bp, Homo sapien
aagtgtgaataggaattgctgatgc

SEQ ID NO: 4106251 - DNA, 25 bp, Homo sapien
gagcaaatcttaacaggaggcacat

SEQ ID NO: 4106252 - DNA, 25 bp, Homo sapien
taagggtcacattcatggcgaaacc

SEQ ID NO: 4106253 - DNA, 25 bp, Homo sapien
ggacatatggtcatcccagttctga

SEQ ID NO: 4106254 - DNA, 25 bp, Homo sapien
gaaaaaagggtgctactgatactca

SEQ ID NO: 4106255 - DNA, 25 bp, Homo sapien
ttccttttatagacgtactgttcca

SEQ ID NO: 4106256 - DNA, 25 bp, Homo sapien
tccttttatagacgtactgttccat

SEQ ID NO: 4106257 - DNA, 25 bp, Homo sapien
ccggaaagctgcctggatctgattg

SEQ ID NO: 4106258 - DNA, 25 bp, Homo sapien
ggtcagcaattggagtggttccagc

SEQ ID NO: 4106259 - DNA, 25 bp, Homo sapien
gatctgattggtgaaggttccaggg

SEQ ID NO: 4106260 - DNA, 25 bp, Homo sapien
gcaattggagtggttccagcagcag

SEQ ID NO: 4106261 - DNA, 25 bp, Homo sapien
gcatgcgcagaacttcccgagccag

SEQ ID NO: 4106262 - DNA, 25 bp, Homo sapien
cgagccagcatccaccacatcagac

SEQ ID NO: 4106263 - DNA, 25 bp, Homo sapien
ctatgggtgttcacgggaaatggtg

SEQ ID NO: 4106264 - DNA, 25 bp, Homo sapien
gtgccacgcatgcgcagaacttccc

SEQ ID NO: 4106265 - DNA, 25 bp, Homo sapien
cagtccattcgccctgaagttcctt

SEQ ID NO: 4106266 - DNA, 25 bp, Homo sapien
gtccattcgccctgaagttccttct

SEQ ID NO: 4106267 - DNA, 25 bp, Homo sapien
cattcgccctgaagttccttcttgg

SEQ ID NO: 4106268 - DNA, 25 bp, Homo sapien
attcgccctgaagttccttcttggt

SEQ ID NO: 4106269 - DNA, 25 bp, Homo sapien
tctgctggataggcacagagggcac

SEQ ID NO: 4106270 - DNA, 25 bp, Homo sapien
gggatctgctggataggcacagagg

SEQ ID NO: 4106271 - DNA, 25 bp, Homo sapien
ctagtcttcagtagggatctgctgg

SEQ ID NO: 4106272 - DNA, 25 bp, Homo sapien
gatctgctggataggcacagagggc

SEQ ID NO: 4106273 - DNA, 25 bp, Homo sapien
tgggagctgtagaccagtcttccgt

SEQ ID NO: 4106274 - DNA, 25 bp, Homo sapien
ctgtagaccagtcttccgtggcatg

SEQ ID NO: 4106275 - DNA, 25 bp, Homo sapien
gcctgagcagtgggagctgtagacc

SEQ ID NO: 4106276 - DNA, 25 bp, Homo sapien
ggagctgtagaccagtcttccgtgg

SEQ ID NO: 4106277 - DNA, 25 bp, Homo sapien
ttattttccatcagccttatttcca

SEQ ID NO: 4106278 - DNA, 25 bp, Homo sapien
ttttccatcagccttatttccatgt

SEQ ID NO: 4106279 - DNA, 25 bp, Homo sapien
tattttccatcagccttatttccat

SEQ ID NO: 4106280 - DNA, 25 bp, Homo sapien
gtttattttccatcagccttatttc

SEQ ID NO: 4106281 - DNA, 25 bp, Homo sapien
tcagatttcacacggcctgctgatg

SEQ ID NO: 4106282 - DNA, 25 bp, Homo sapien
cattctacattgatagcagtgccgt

SEQ ID NO: 4106283 - DNA, 25 bp, Homo sapien
cacttggctgagaccttattaggga

SEQ ID NO: 4106284 - DNA, 25 bp, Homo sapien
aacggagacactttgtgggtggaca

SEQ ID NO: 4106285 - DNA, 25 bp, Homo sapien
cgaaataaggcagccagttaacacc

SEQ ID NO: 4106286 - DNA, 25 bp, Homo sapien
agctctaggcaaagcactgctagga

SEQ ID NO: 4106287 - DNA, 25 bp, Homo sapien
ggaagagccacccatgccaagtcag

SEQ ID NO: 4106288 - DNA, 25 bp, Homo sapien
tcaataccgcttcccgaaataaggc

SEQ ID NO: 4106289 - DNA, 25 bp, Homo sapien
cttgggtgagcgtgggagtccgcat

SEQ ID NO: 4106290 - DNA, 25 bp, Homo sapien
tgctggaaagcaaaaggccaccttc

SEQ ID NO: 4106291 - DNA, 25 bp, Homo sapien
gagtggtttccaattctgctgggcc

SEQ ID NO: 4106292 - DNA, 25 bp, Homo sapien
cttccagagtgcagcctgggagctg

SEQ ID NO: 4106293 - DNA, 25 bp, Homo sapien
tgaacagaagtttaggcccagcatg

SEQ ID NO: 4106294 - DNA, 25 bp, Homo sapien
agttgtcactgcctacacgtttgtg

SEQ ID NO: 4106295 - DNA, 25 bp, Homo sapien
cactgtcgtccagatagtagttgtc

SEQ ID NO: 4106296 - DNA, 25 bp, Homo sapien
taatgttttggtcagacttagtcca

SEQ ID NO: 4106297 - DNA, 25 bp, Homo sapien
tgtcatcatggttgtcccatcttgt

SEQ ID NO: 4106298 - DNA, 25 bp, Homo sapien
tgcttcccctttgacacattgtcat

SEQ ID NO: 4106299 - DNA, 25 bp, Homo sapien
tcatggttgtcccatcttgttaagc

SEQ ID NO: 4106300 - DNA, 25 bp, Homo sapien
acattgtcatcatggttgtcccatc

SEQ ID NO: 4106301 - DNA, 25 bp, Homo sapien
ggcagagccctgtgtattcaaacgg

SEQ ID NO: 4106302 - DNA, 25 bp, Homo sapien
agccgtggtagactcagaggccagc

SEQ ID NO: 4106303 - DNA, 25 bp, Homo sapien
ttttattaccctgaatctttatgca

SEQ ID NO: 4106304 - DNA, 25 bp, Homo sapien
atctttatgcatttaaatatcccaa

SEQ ID NO: 4106305 - DNA, 25 bp, Homo sapien
ggaccatgattggttcaggacagtt

SEQ ID NO: 4106306 - DNA, 25 bp, Homo sapien
ggctggaccatgattggttcaggac

SEQ ID NO: 4106307 - DNA, 25 bp, Homo sapien
ttcaggacagttgggggctatccca

SEQ ID NO: 4106308 - DNA, 25 bp, Homo sapien
gggctatcccacttccctttgccat

SEQ ID NO: 4106309 - DNA, 25 bp, Homo sapien
ctaaaattgatcgagggagatgttg

SEQ ID NO: 4106310 - DNA, 25 bp, Homo sapien
taaaattgatcgagggagatgttga

SEQ ID NO: 4106311 - DNA, 25 bp, Homo sapien
gagggagatgttgaaactcaaaacc

SEQ ID NO: 4106312 - DNA, 25 bp, Homo sapien
ctctctccctgaatgtcaatcatca

SEQ ID NO: 4106313 - DNA, 25 bp, Homo sapien
atgtcaatcatcaccccagtccagg

SEQ ID NO: 4106314 - DNA, 25 bp, Homo sapien
tcttgagtaataagaatcacgtttc

SEQ ID NO: 4106315 - DNA, 25 bp, Homo sapien
ttcttgagtaataagaatcacgttt

SEQ ID NO: 4106316 - DNA, 25 bp, Homo sapien
cccatgaatgactgtgtttgaggat

SEQ ID NO: 4106317 - DNA, 25 bp, Homo sapien
aacaggtcttgaaggggcccattca

SEQ ID NO: 4106318 - DNA, 25 bp, Homo sapien
tgagatggacattggttttagagaa

SEQ ID NO: 4106319 - DNA, 25 bp, Homo sapien
ctgaaacaggtcttgaaggggccca

SEQ ID NO: 4106320 - DNA, 25 bp, Homo sapien
aagaactgagctcggctgcgtgcgt

SEQ ID NO: 4106321 - DNA, 25 bp, Homo sapien
ggatgaatcagcgtaaccgtcccgt

SEQ ID NO: 4106322 - DNA, 25 bp, Homo sapien
tatcggctgtatgacccagagcgag

SEQ ID NO: 4106323 - DNA, 25 bp, Homo sapien
tgaggaaccaacttaatcgcttggc

SEQ ID NO: 4106324 - DNA, 25 bp, Homo sapien
tttacttctgtcaggccccgcctgg

SEQ ID NO: 4106325 - DNA, 25 bp, Homo sapien
gatgtggtacctcgaatgctgtgga

SEQ ID NO: 4106326 - DNA, 25 bp, Homo sapien
tagacccgagatcgatgagaggccg

SEQ ID NO: 4106327 - DNA, 25 bp, Homo sapien
aatggcaggaatgatgacccggccg

SEQ ID NO: 4106328 - DNA, 25 bp, Homo sapien
cgcggtgcccctagcgcctcggtgc

SEQ ID NO: 4106329 - DNA, 25 bp, Homo sapien
ggtgtccctctagtgcgcggtgccc

SEQ ID NO: 4106330 - DNA, 25 bp, Homo sapien
cgggggctgtccaggcgcggcgggt

SEQ ID NO: 4106331 - DNA, 25 bp, Homo sapien
tgcgctggggccctagaggaagagg

SEQ ID NO: 4106332 - DNA, 25 bp, Homo sapien
gtgactgtgtgcgagcgggcgcgct

SEQ ID NO: 4106333 - DNA, 25 bp, Homo sapien
aagccgggcagggtgcggaggaact

SEQ ID NO: 4106334 - DNA, 25 bp, Homo sapien
actcccggtcgtaggcgaagctgct

SEQ ID NO: 4106335 - DNA, 25 bp, Homo sapien
ggtggtgactgtgtgcgagcgggcg

SEQ ID NO: 4106336 - DNA, 25 bp, Homo sapien
ctcccacataggctcattttcaatt

SEQ ID NO: 4106337 - DNA, 25 bp, Homo sapien
taactcccacataggctcattttca

SEQ ID NO: 4106338 - DNA, 25 bp, Homo sapien
ctctaactcccacataggctcattt

SEQ ID NO: 4106339 - DNA, 25 bp, Homo sapien
tctaactcccacataggctcatttt

SEQ ID NO: 4106340 - DNA, 25 bp, Homo sapien
ggcgattccaataccttcagctttt

SEQ ID NO: 4106341 - DNA, 25 bp, Homo sapien
ttgaactcctaaaagctaggccctg

SEQ ID NO: 4106342 - DNA, 25 bp, Homo sapien
aagctaggccctgcaaggcgattcc

SEQ ID NO: 4106343 - DNA, 25 bp, Homo sapien
tgcaaggcgattccaataccttcag

SEQ ID NO: 4106344 - DNA, 25 bp, Homo sapien
ttgccgacatgtagtgagatagtac

SEQ ID NO: 4106345 - DNA, 25 bp, Homo sapien
cgacatgtagtgagatagtactttc

SEQ ID NO: 4106346 - DNA, 25 bp, Homo sapien
gctttgccgacatgtagtgagatag

SEQ ID NO: 4106347 - DNA, 25 bp, Homo sapien
tcaggctttgccgacatgtagtgag

SEQ ID NO: 4106348 - DNA, 25 bp, Homo sapien
gctggatgccagtagctgggcccct

SEQ ID NO: 4106349 - DNA, 25 bp, Homo sapien
ctggctggatgccagtagctgggcc

SEQ ID NO: 4106350 - DNA, 25 bp, Homo sapien
ctggatgccagtagctgggcccctg

SEQ ID NO: 4106351 - DNA, 25 bp, Homo sapien
cagagcccacggactggcagttgga

SEQ ID NO: 4106352 - DNA, 25 bp, Homo sapien
aggctgtgcgtggtctccttcccgc

SEQ ID NO: 4106353 - DNA, 25 bp, Homo sapien
ggctgtgcgtggtctccttcccgct

SEQ ID NO: 4106354 - DNA, 25 bp, Homo sapien
ctgtgcgtggtctccttcccgctct

SEQ ID NO: 4106355 - DNA, 25 bp, Homo sapien
caggctgtgcgtggtctccttcccg

SEQ ID NO: 4106356 - DNA, 25 bp, Homo sapien
gtcccttcaggggattttgctctcc

SEQ ID NO: 4106357 - DNA, 25 bp, Homo sapien
tccagttcacggtctccaggctctt

SEQ ID NO: 4106358 - DNA, 25 bp, Homo sapien
agttcacggtctccaggctcttcac

SEQ ID NO: 4106359 - DNA, 25 bp, Homo sapien
ggtcccttcaggggattttgctctc

SEQ ID NO: 4106360 - DNA, 25 bp, Homo sapien
ttgaagtaatggcccagtctctgac

SEQ ID NO: 4106361 - DNA, 25 bp, Homo sapien
cttgaagtaatggcccagtctctga

SEQ ID NO: 4106362 - DNA, 25 bp, Homo sapien
tatttgagaagacctgagccctcag

SEQ ID NO: 4106363 - DNA, 25 bp, Homo sapien
tttgagaagacctgagccctcaggt

SEQ ID NO: 4106364 - DNA, 25 bp, Homo sapien
cagtatttgagaagacctgagccct

SEQ ID NO: 4106365 - DNA, 25 bp, Homo sapien
tgagaagacctgagccctcaggtct

SEQ ID NO: 4106366 - DNA, 25 bp, Homo sapien
tcagcagcaagacaggcattgtcaa

SEQ ID NO: 4106367 - DNA, 25 bp, Homo sapien
atcagcagcaagacaggcattgtca

SEQ ID NO: 4106368 - DNA, 25 bp, Homo sapien
cagcagcaagacaggcattgtcaat

SEQ ID NO: 4106369 - DNA, 25 bp, Homo sapien
caatgaccttgaagagcccatgaat

SEQ ID NO: 4106370 - DNA, 25 bp, Homo sapien
catgaatgtcattctccaaagactg

SEQ ID NO: 4106371 - DNA, 25 bp, Homo sapien
ccatgaatgtcattctccaaagact

SEQ ID NO: 4106372 - DNA, 25 bp, Homo sapien
cttgaagagcccatgaatgtcattc

SEQ ID NO: 4106373 - DNA, 25 bp, Homo sapien
ctctcagttcttccgagccagctcg

SEQ ID NO: 4106374 - DNA, 25 bp, Homo sapien
ccagctcgtcatattgggcctggat

SEQ ID NO: 4106375 - DNA, 25 bp, Homo sapien
cagctcgtcatattgggcctggatg

SEQ ID NO: 4106376 - DNA, 25 bp, Homo sapien
cagttcttccgagccagctcgtcat

SEQ ID NO: 4106377 - DNA, 25 bp, Homo sapien
actgcatgtctcagctccgtgagtg

SEQ ID NO: 4106378 - DNA, 25 bp, Homo sapien
gcatgtctcagctccgtgagtggca

SEQ ID NO: 4106379 - DNA, 25 bp, Homo sapien
tctcagctccgtgagtggcatctca

SEQ ID NO: 4106380 - DNA, 25 bp, Homo sapien
agctccgtgagtggcatctcagcag

SEQ ID NO: 4106381 - DNA, 25 bp, Homo sapien
caacaggcgatggtagctggcgatc

SEQ ID NO: 4106382 - DNA, 25 bp, Homo sapien
ttccaacaggcgatggtagctggcg

SEQ ID NO: 4106383 - DNA, 25 bp, Homo sapien
catcttccaacaggcgatggtagct

SEQ ID NO: 4106384 - DNA, 25 bp, Homo sapien
acaggcgatggtagctggcgatctc

SEQ ID NO: 4106385 - DNA, 25 bp, Homo sapien
tgacctctgaactttttattggcct

SEQ ID NO: 4106386 - DNA, 25 bp, Homo sapien
tattggcctcctgatccccaaaggg

SEQ ID NO: 4106387 - DNA, 25 bp, Homo sapien
tggcctcctgatccccaaagggtac

SEQ ID NO: 4106388 - DNA, 25 bp, Homo sapien
ttattggcctcctgatccccaaagg

SEQ ID NO: 4106389 - DNA, 25 bp, Homo sapien
gtctcgctacgttgctcagtgtggt

SEQ ID NO: 4106390 - DNA, 25 bp, Homo sapien
attttagactgggaaagaccttgag

SEQ ID NO: 4106391 - DNA, 25 bp, Homo sapien
gagccactgtatccaaccttcatag

SEQ ID NO: 4106392 - DNA, 25 bp, Homo sapien
cttcatagcattttagactgggaaa

SEQ ID NO: 4106393 - DNA, 25 bp, Homo sapien
tgtacagaggatggacaagcaatcg

SEQ ID NO: 4106394 - DNA, 25 bp, Homo sapien
ccaggacccagcagacatgagagta

SEQ ID NO: 4106395 - DNA, 25 bp, Homo sapien
tcttaactgaaatagggcacgtcct

SEQ ID NO: 4106396 - DNA, 25 bp, Homo sapien
ggacatattactaggctggcaccat

SEQ ID NO: 4106397 - DNA, 25 bp, Homo sapien
atcatttacattgggtatgtcccct

SEQ ID NO: 4106398 - DNA, 25 bp, Homo sapien
ctcatcatttacattgggtatgtcc

SEQ ID NO: 4106399 - DNA, 25 bp, Homo sapien
tggcttggttcgaagtctttgctac

SEQ ID NO: 4106400 - DNA, 25 bp, Homo sapien
gcttggttcgaagtctttgctactg

SEQ ID NO: 4106401 - DNA, 25 bp, Homo sapien
cacaacaggccccgggttgtgacgt

SEQ ID NO: 4106402 - DNA, 25 bp, Homo sapien
ccttgaggactcttaagcttccagc

SEQ ID NO: 4106403 - DNA, 25 bp, Homo sapien
agaatcctgggagtcatcaaatgcc

SEQ ID NO: 4106404 - DNA, 25 bp, Homo sapien
cacctacttgctgtttctatgcatg

SEQ ID NO: 4106405 - DNA, 25 bp, Homo sapien
gtatgtaactaccacaactatccga

SEQ ID NO: 4106406 - DNA, 25 bp, Homo sapien
ggtcggtctgcattctctaaaagcc

SEQ ID NO: 4106407 - DNA, 25 bp, Homo sapien
gtacatacgagtggtaactcacacc

SEQ ID NO: 4106408 - DNA, 25 bp, Homo sapien
tacgggctctttgggaattaactga

SEQ ID NO: 4106409 - DNA, 25 bp, Homo sapien
gcttcttacggacaccagagatgga

SEQ ID NO: 4106410 - DNA, 25 bp, Homo sapien
actacagccttgaccaggctcatgt

SEQ ID NO: 4106411 - DNA, 25 bp, Homo sapien
acagccttgaccaggctcatgtgat

SEQ ID NO: 4106412 - DNA, 25 bp, Homo sapien
ctcatgtgatcctcccaagtagctg

SEQ ID NO: 4106413 - DNA, 25 bp, Homo sapien
gggctacaggtgtgcaccactacac

SEQ ID NO: 4106414 - DNA, 25 bp, Homo sapien
cagcttgatcaagtccaggtagaca

SEQ ID NO: 4106415 - DNA, 25 bp, Homo sapien
aggtagacagaggacccctcccaag

SEQ ID NO: 4106416 - DNA, 25 bp, Homo sapien
cagtgcaatgtcaccgatgccggga

SEQ ID NO: 4106417 - DNA, 25 bp, Homo sapien
gatttcaggaatccccagtgcaatg

SEQ ID NO: 4106418 - DNA, 25 bp, Homo sapien
tgacctaagatgtcgggaacaacca

SEQ ID NO: 4106419 - DNA, 25 bp, Homo sapien
ggaacaaccataaactgaacagcat

SEQ ID NO: 4106420 - DNA, 25 bp, Homo sapien
ggccaatcgccttttgggagccttg

SEQ ID NO: 4106421 - DNA, 25 bp, Homo sapien
acttctaaattcaaaagggcctctg

SEQ ID NO: 4106422 - DNA, 25 bp, Homo sapien
cctctcagatcattaaggctcgtag

SEQ ID NO: 4106423 - DNA, 25 bp, Homo sapien
gatataaccagctttgaaggcaggg

SEQ ID NO: 4106424 - DNA, 25 bp, Homo sapien
ctacttatagcctgctgtgccatct

SEQ ID NO: 4106425 - DNA, 25 bp, Homo sapien
ggaacacccagtatctcatacactg

SEQ ID NO: 4106426 - DNA, 25 bp, Homo sapien
tcccatgtgcaaggcacaaaggtcc

SEQ ID NO: 4106427 - DNA, 25 bp, Homo sapien
gctcatattaccatatgcttgttgg

SEQ ID NO: 4106428 - DNA, 25 bp, Homo sapien
ctgttttccagagcggcctcatcat

SEQ ID NO: 4106429 - DNA, 25 bp, Homo sapien
aatgactggtaatattgctcatatt

SEQ ID NO: 4106430 - DNA, 25 bp, Homo sapien
caagcaatgggttagatctagcgaa

SEQ ID NO: 4106431 - DNA, 25 bp, Homo sapien
aacaagctttctggtgatgcccgtg

SEQ ID NO: 4106432 - DNA, 25 bp, Homo sapien
gcaaggagctagatgaggaatcaca

SEQ ID NO: 4106433 - DNA, 25 bp, Homo sapien
ggtccacagaacatactgagcagca

SEQ ID NO: 4106434 - DNA, 25 bp, Homo sapien
gagcccttctgtttagcaagcatgg

SEQ ID NO: 4106435 - DNA, 25 bp, Homo sapien
tctgtttagcaagcatggcgaccat

SEQ ID NO: 4106436 - DNA, 25 bp, Homo sapien
atcccaggttcggagcccttctgtt

SEQ ID NO: 4106437 - DNA, 25 bp, Homo sapien
ggttcggagcccttctgtttagcaa

SEQ ID NO: 4106438 - DNA, 25 bp, Homo sapien
taggtgagactacaccaccacactc

SEQ ID NO: 4106439 - DNA, 25 bp, Homo sapien
gaaaatcaactcaccacttgcagct

SEQ ID NO: 4106440 - DNA, 25 bp, Homo sapien
gactacaagtgtaagtaggtgagac

SEQ ID NO: 4106441 - DNA, 25 bp, Homo sapien
gctgatttcaactgccctcctctgt

SEQ ID NO: 4106442 - DNA, 25 bp, Homo sapien
agttcttggctctgaatgcaaaaac

SEQ ID NO: 4106443 - DNA, 25 bp, Homo sapien
tattaacgcgagtgaagcctgctgt

SEQ ID NO: 4106444 - DNA, 25 bp, Homo sapien
tttttcattattaacgcgagtgaag

SEQ ID NO: 4106445 - DNA, 25 bp, Homo sapien
ttcttggctctgaatgcaaaaacgt

SEQ ID NO: 4106446 - DNA, 25 bp, Homo sapien
gactctgacaggtaatctatacaca

SEQ ID NO: 4106447 - DNA, 25 bp, Homo sapien
gacattctgttggatcagtaagact

SEQ ID NO: 4106448 - DNA, 25 bp, Homo sapien
cactaatgaggtttttggcccgaat

SEQ ID NO: 4106449 - DNA, 25 bp, Homo sapien
tccagaaagtgctaagcctcacact

SEQ ID NO: 4106450 - DNA, 25 bp, Homo sapien
gaagaagacggtgaggacccagtaa

SEQ ID NO: 4106451 - DNA, 25 bp, Homo sapien
aaatacagctacaaacatgacccag

SEQ ID NO: 4106452 - DNA, 25 bp, Homo sapien
ggacccggaagtactcagttccagc

SEQ ID NO: 4106453 - DNA, 25 bp, Homo sapien
agcaataagcgtccataccagcagc

SEQ ID NO: 4106454 - DNA, 25 bp, Homo sapien
ggattgactagtagaggactaatgc

SEQ ID NO: 4106455 - DNA, 25 bp, Homo sapien
ggcagagagacagtcttggattgac

SEQ ID NO: 4106456 - DNA, 25 bp, Homo sapien
ctaatgccatctaccgagtgggcac

SEQ ID NO: 4106457 - DNA, 25 bp, Homo sapien
agtgggcactggacaagaccaccac

SEQ ID NO: 4106458 - DNA, 25 bp, Homo sapien
taatgagcagctcctgtccctagtg

SEQ ID NO: 4106459 - DNA, 25 bp, Homo sapien
ggtgacatgacccaagacggtggct

SEQ ID NO: 4106460 - DNA, 25 bp, Homo sapien
tatctaaggcttaggcagccagagc

SEQ ID NO: 4106461 - DNA, 25 bp, Homo sapien
gagtttaaagacatagctacctagg

SEQ ID NO: 4106462 - DNA, 25 bp, Homo sapien
ggccttgtgcacgagcccatgtgga

SEQ ID NO: 4106463 - DNA, 25 bp, Homo sapien
gtttcagggctctcatgcatgtcta

SEQ ID NO: 4106464 - DNA, 25 bp, Homo sapien
cgacctgtgaacatgcaatgatccc

SEQ ID NO: 4106465 - DNA, 25 bp, Homo sapien
gactctctgagtctacgacctgtga

SEQ ID NO: 4106466 - DNA, 25 bp, Homo sapien
gcatctacaacagcggcagagaggt

SEQ ID NO: 4106467 - DNA, 25 bp, Homo sapien
tgaggccgcccagctgttgaagttg

SEQ ID NO: 4106468 - DNA, 25 bp, Homo sapien
cagagaggtacaagacgaaggcact

SEQ ID NO: 4106469 - DNA, 25 bp, Homo sapien
gaaggcactgccgttaaagcacagg

SEQ ID NO: 4106470 - DNA, 25 bp, Homo sapien
tttccagcgtagcagatggtgacca

SEQ ID NO: 4106471 - DNA, 25 bp, Homo sapien
ctggatctccatgctataaaactga

SEQ ID NO: 4106472 - DNA, 25 bp, Homo sapien
aaatatgtatttccagcgtagcaga

SEQ ID NO: 4106473 - DNA, 25 bp, Homo sapien
tggatctccatgctataaaactgaa

SEQ ID NO: 4106474 - DNA, 25 bp, Homo sapien
caacactttgcaaataagtatccag

SEQ ID NO: 4106475 - DNA, 25 bp, Homo sapien
ttaatcaaaaaagaatctggcatct

SEQ ID NO: 4106476 - DNA, 25 bp, Homo sapien
ggaatatacattatacctacagctg

SEQ ID NO: 4106477 - DNA, 25 bp, Homo sapien
aagagttcattataagctacaacac

SEQ ID NO: 4106478 - DNA, 25 bp, Homo sapien
cagttgcgggtggacaataaaattt

SEQ ID NO: 4106479 - DNA, 25 bp, Homo sapien
cacttgtacttagttccagccggca

SEQ ID NO: 4106480 - DNA, 25 bp, Homo sapien
caggttcccaaaacagagctctgtg

SEQ ID NO: 4106481 - DNA, 25 bp, Homo sapien
gcattgtccgatatcccgtcaggtt

SEQ ID NO: 4106482 - DNA, 25 bp, Homo sapien
gatttcgatgcgtatatgaccctgg

SEQ ID NO: 4106483 - DNA, 25 bp, Homo sapien
tatgaaaactatacctgcccaggct

SEQ ID NO: 4106484 - DNA, 25 bp, Homo sapien
gagtgatgagcaatccccatggcaa

SEQ ID NO: 4106485 - DNA, 25 bp, Homo sapien
gggagataccttaccctgtcaggga

SEQ ID NO: 4106486 - DNA, 25 bp, Homo sapien
cctgcggagtttgaatgtgaggcat

SEQ ID NO: 4106487 - DNA, 25 bp, Homo sapien
ctgatgatcctctgtcctgcggagt

SEQ ID NO: 4106488 - DNA, 25 bp, Homo sapien
ttagcaattgggacatagagagaag

SEQ ID NO: 4106489 - DNA, 25 bp, Homo sapien
tgcctagtaagagtgggagctccac

SEQ ID NO: 4106490 - DNA, 25 bp, Homo sapien
tgccaagtgcactgagatgtctaca

SEQ ID NO: 4106491 - DNA, 25 bp, Homo sapien
tctgctagatgtgaatagctgcccc

SEQ ID NO: 4106492 - DNA, 25 bp, Homo sapien
gcttcatagcccactttaaagatgt

SEQ ID NO: 4106493 - DNA, 25 bp, Homo sapien
tgggaaagcaaggtcttaggcaaag

SEQ ID NO: 4106494 - DNA, 25 bp, Homo sapien
ggctctatacccacaggcatgaagt

SEQ ID NO: 4106495 - DNA, 25 bp, Homo sapien
cacagtggagataacagggcatctt

SEQ ID NO: 4106496 - DNA, 25 bp, Homo sapien
gtccaattcagcagtcttctaacag

SEQ ID NO: 4106497 - DNA, 25 bp, Homo sapien
ggtgtgctgtgacatttctggctct

SEQ ID NO: 4106498 - DNA, 25 bp, Homo sapien
gccctcgtagatgcgcggaagttag

SEQ ID NO: 4106499 - DNA, 25 bp, Homo sapien
cttccagaaaggtagcggcagtccc

SEQ ID NO: 4106500 - DNA, 25 bp, Homo sapien
ctctggcgggatccctccggtgact

SEQ ID NO: 4106501 - DNA, 25 bp, Homo sapien
gggccagatacagagggcgggccgg

SEQ ID NO: 4106502 - DNA, 25 bp, Homo sapien
ccgctgctgcacgtggtgcggacga

SEQ ID NO: 4106503 - DNA, 25 bp, Homo sapien
gcacgtggtgcggacgagcccggct

SEQ ID NO: 4106504 - DNA, 25 bp, Homo sapien
tggtgcggacgagcccggctccgtg

SEQ ID NO: 4106505 - DNA, 25 bp, Homo sapien
ggacgagcccggctccgtgcgacat

SEQ ID NO: 4106506 - DNA, 25 bp, Homo sapien
ggtgcgggggtagctgaggtccagc

SEQ ID NO: 4106507 - DNA, 25 bp, Homo sapien
catttgcgccactttcagcagggcc

SEQ ID NO: 4106508 - DNA, 25 bp, Homo sapien
gccgcgtgggtgcgggggtagctga

SEQ ID NO: 4106509 - DNA, 25 bp, Homo sapien
atttgcgccactttcagcagggccg

SEQ ID NO: 4106510 - DNA, 25 bp, Homo sapien
ctgctttcccgggacgccctgtaga

SEQ ID NO: 4106511 - DNA, 25 bp, Homo sapien
gccctgtagaacctcggcctcgcgc

SEQ ID NO: 4106512 - DNA, 25 bp, Homo sapien
tgccgcgaactttagcgacgcggtg

SEQ ID NO: 4106513 - DNA, 25 bp, Homo sapien
cgcccgctgcgcgatgctccctggg

SEQ ID NO: 4106514 - DNA, 25 bp, Homo sapien
gaagaggtcgggtttcgctccctca

SEQ ID NO: 4106515 - DNA, 25 bp, Homo sapien
tttcagtcagtaggcgggtcaggct

SEQ ID NO: 4106516 - DNA, 25 bp, Homo sapien
gtggccggagaaacttgcgaccctg

SEQ ID NO: 4106517 - DNA, 25 bp, Homo sapien
ttcgagcgaaactgcacacagagca

SEQ ID NO: 4106518 - DNA, 25 bp, Homo sapien
tcttagggaggcaggaactcagcgc

SEQ ID NO: 4106519 - DNA, 25 bp, Homo sapien
tgctatagatgcacagacgtcctgt

SEQ ID NO: 4106520 - DNA, 25 bp, Homo sapien
aatgctcaggtaggatatgtctcac

SEQ ID NO: 4106521 - DNA, 25 bp, Homo sapien
ggaacaagagaatcggccaggcaac

SEQ ID NO: 4106522 - DNA, 25 bp, Homo sapien
gacgtgttggtagggccacaagccc

SEQ ID NO: 4106523 - DNA, 25 bp, Homo sapien
aatgaacaaatagataggacgtgtt

SEQ ID NO: 4106524 - DNA, 25 bp, Homo sapien
agggcaagaactttgtcacagtcat

SEQ ID NO: 4106525 - DNA, 25 bp, Homo sapien
atggagatgaatgtggcagttataa

SEQ ID NO: 4106526 - DNA, 25 bp, Homo sapien
ggaatactaacatctcatagggata

SEQ ID NO: 4106527 - DNA, 25 bp, Homo sapien
tgagctcctgcatgtaaaacaggcc

SEQ ID NO: 4106528 - DNA, 25 bp, Homo sapien
gatatggtaatgatgaatgagctcc

SEQ ID NO: 4106529 - DNA, 25 bp, Homo sapien
ggatgccaagagcaataacttaaca

SEQ ID NO: 4106530 - DNA, 25 bp, Homo sapien
gtgctattaccaaaggctttgtcaa

SEQ ID NO: 4106531 - DNA, 25 bp, Homo sapien
agtgctattaccaaaggctttgtca

SEQ ID NO: 4106532 - DNA, 25 bp, Homo sapien
gagtgctattaccaaaggctttgtc

SEQ ID NO: 4106533 - DNA, 25 bp, Homo sapien
tgctattaccaaaggctttgtcaaa

SEQ ID NO: 4106534 - DNA, 25 bp, Homo sapien
ctgcatctctatcgcaaactgtggg

SEQ ID NO: 4106535 - DNA, 25 bp, Homo sapien
cgcaggcttgaagatatgtgcccca

SEQ ID NO: 4106536 - DNA, 25 bp, Homo sapien
tcacaacaggctaacagctactacg

SEQ ID NO: 4106537 - DNA, 25 bp, Homo sapien
gagaagacccaagtctctcaagcac

SEQ ID NO: 4106538 - DNA, 25 bp, Homo sapien
gaaggcctttcagtccccatgaagc

SEQ ID NO: 4106539 - DNA, 25 bp, Homo sapien
ctttcagtccccatgaagcaggctc

SEQ ID NO: 4106540 - DNA, 25 bp, Homo sapien
aggcctttcagtccccatgaagcag

SEQ ID NO: 4106541 - DNA, 25 bp, Homo sapien
cctttcagtccccatgaagcaggct

SEQ ID NO: 4106542 - DNA, 25 bp, Homo sapien
ccggcctgcggggtcattctcaggc

SEQ ID NO: 4106543 - DNA, 25 bp, Homo sapien
cggcctgcggggtcattctcaggcc

SEQ ID NO: 4106544 - DNA, 25 bp, Homo sapien
ggcctgcggggtcattctcaggcct

SEQ ID NO: 4106545 - DNA, 25 bp, Homo sapien
aagttaccagtgcaaataccagcgc

SEQ ID NO: 4106546 - DNA, 25 bp, Homo sapien
gagcaggtctggtgcagtcaagcaa

SEQ ID NO: 4106547 - DNA, 25 bp, Homo sapien
gcttcattcaagagtagacaacgat

SEQ ID NO: 4106548 - DNA, 25 bp, Homo sapien
cagaccaaacgatgaggctctacat

SEQ ID NO: 4106549 - DNA, 25 bp, Homo sapien
gaggcaataggtgtaatctcagtgc

SEQ ID NO: 4106550 - DNA, 25 bp, Homo sapien
ggctactgccttttcacgttcttgg

SEQ ID NO: 4106551 - DNA, 25 bp, Homo sapien
tacttagtctcttatagacattgca

SEQ ID NO: 4106552 - DNA, 25 bp, Homo sapien
ttactagtggattggatatcttttc

SEQ ID NO: 4106553 - DNA, 25 bp, Homo sapien
caatctcattgacacccactggctg

SEQ ID NO: 4106554 - DNA, 25 bp, Homo sapien
atctcattgacacccactggctgag

SEQ ID NO: 4106555 - DNA, 25 bp, Homo sapien
aatctcattgacacccactggctga

SEQ ID NO: 4106556 - DNA, 25 bp, Homo sapien
gaagaggaatgtggtatgctcccaa

SEQ ID NO: 4106557 - DNA, 25 bp, Homo sapien
ttgcactgagtgtaaggagattcac

SEQ ID NO: 4106558 - DNA, 25 bp, Homo sapien
ttgtaaatgttagtgggcccataaa

SEQ ID NO: 4106559 - DNA, 25 bp, Homo sapien
gaaatccccaggagatgaaagccag

SEQ ID NO: 4106560 - DNA, 25 bp, Homo sapien
cactaagaaatatctcagcacgagt

SEQ ID NO: 4106561 - DNA, 25 bp, Homo sapien
ctaagaaatatctcagcacgagtga

SEQ ID NO: 4106562 - DNA, 25 bp, Homo sapien
gaaatatctcagcacgagtgaacat

SEQ ID NO: 4106563 - DNA, 25 bp, Homo sapien
gctcactaagaaatatctcagcacg

SEQ ID NO: 4106564 - DNA, 25 bp, Homo sapien
gctgtaggcgctgtagttggtccac

SEQ ID NO: 4106565 - DNA, 25 bp, Homo sapien
tagaagcggaagaggtggaccaggt

SEQ ID NO: 4106566 - DNA, 25 bp, Homo sapien
tggaccaggtaaaaggcgaggatca

SEQ ID NO: 4106567 - DNA, 25 bp, Homo sapien
atacaggtgagcacgcggtagaagc

SEQ ID NO: 4106568 - DNA, 25 bp, Homo sapien
aaccagcaggacatcaagcagagat

SEQ ID NO: 4106569 - DNA, 25 bp, Homo sapien
gccttcttgtagctggaaagtgagt

SEQ ID NO: 4106570 - DNA, 25 bp, Homo sapien
catcaagcagagatgtccaccaaac

SEQ ID NO: 4106571 - DNA, 25 bp, Homo sapien
cagagatgtccaccaaacaatagga

SEQ ID NO: 4106572 - DNA, 25 bp, Homo sapien
ccagctcggagaagcaaagtacctt

SEQ ID NO: 4106573 - DNA, 25 bp, Homo sapien
gcttcttgcaacttcccggctggag

SEQ ID NO: 4106574 - DNA, 25 bp, Homo sapien
tgcatcaggtaagccccagaggaat

SEQ ID NO: 4106575 - DNA, 25 bp, Homo sapien
tttcagtggcgagggaaagcttcca

SEQ ID NO: 4106576 - DNA, 25 bp, Homo sapien
gaagctgccacaatggaggcgatga

SEQ ID NO: 4106577 - DNA, 25 bp, Homo sapien
gcagggtaccgattaaatagtgcag

SEQ ID NO: 4106578 - DNA, 25 bp, Homo sapien
tccggctaccagtccgctctggttg

SEQ ID NO: 4106579 - DNA, 25 bp, Homo sapien
tctggttgtaactcttggaagctgc

SEQ ID NO: 4106580 - DNA, 25 bp, Homo sapien
gcaaatcagtgttggcccacaggcc

SEQ ID NO: 4106581 - DNA, 25 bp, Homo sapien
tgaggcagccaacgagcaaatgatc

SEQ ID NO: 4106582 - DNA, 25 bp, Homo sapien
tctgggactgtacgcctctgcttaa

SEQ ID NO: 4106583 - DNA, 25 bp, Homo sapien
tgtgtgaattaaaacccgcctggcc

SEQ ID NO: 4106584 - DNA, 25 bp, Homo sapien
tcagggtcatccagcgctcaagtgt

SEQ ID NO: 4106585 - DNA, 25 bp, Homo sapien
tagccgtattagagccagaagccga

SEQ ID NO: 4106586 - DNA, 25 bp, Homo sapien
ttgtgaacaacaccggcagctgcag

SEQ ID NO: 4106587 - DNA, 25 bp, Homo sapien
taccgggtgcctaggtgttctcaga

SEQ ID NO: 4106588 - DNA, 25 bp, Homo sapien
ggtttacatttacaagcaagctggg

SEQ ID NO: 4106589 - DNA, 25 bp, Homo sapien
ccagaaaggagcttggagagtcatc

SEQ ID NO: 4106590 - DNA, 25 bp, Homo sapien
tcacaggccatagggctaattactc

SEQ ID NO: 4106591 - DNA, 25 bp, Homo sapien
taattactcgggcaatcctgtctgc

SEQ ID NO: 4106592 - DNA, 25 bp, Homo sapien
tacacacgagatcttataggacagc

SEQ ID NO: 4106593 - DNA, 25 bp, Homo sapien
tggactgggttacacacgagatctt

SEQ ID NO: 4106594 - DNA, 25 bp, Homo sapien
cacacgagatcttataggacagcca

SEQ ID NO: 4106595 - DNA, 25 bp, Homo sapien
tgggttacacacgagatcttatagg

SEQ ID NO: 4106596 - DNA, 25 bp, Homo sapien
gcctttcctggtgcccaccagcctg

SEQ ID NO: 4106597 - DNA, 25 bp, Homo sapien
aggcctcgcctggagtacacgtcct

SEQ ID NO: 4106598 - DNA, 25 bp, Homo sapien
agagtttccggctggctcaggagct

SEQ ID NO: 4106599 - DNA, 25 bp, Homo sapien
cccaccagcctgacaggactttggc

SEQ ID NO: 4106600 - DNA, 25 bp, Homo sapien
caagctagataaattaggacagggc

SEQ ID NO: 4106601 - DNA, 25 bp, Homo sapien
cacatagtgtttctacaggcacgcc

SEQ ID NO: 4106602 - DNA, 25 bp, Homo sapien
tctctaagaccggactgacaagcta

SEQ ID NO: 4106603 - DNA, 25 bp, Homo sapien
ggcacgcctcacttcaggaaagagg

SEQ ID NO: 4106604 - DNA, 25 bp, Homo sapien
gcttccttagatcatcccagacaga

SEQ ID NO: 4106605 - DNA, 25 bp, Homo sapien
ggctccagatacaccacgggtgctg

SEQ ID NO: 4106606 - DNA, 25 bp, Homo sapien
tggtacacaggatcccctcccatca

SEQ ID NO: 4106607 - DNA, 25 bp, Homo sapien
agccgactgtgccagggtcagctca

SEQ ID NO: 4106608 - DNA, 25 bp, Homo sapien
catttcctgtcattctggtacctct

SEQ ID NO: 4106609 - DNA, 25 bp, Homo sapien
tcatttcctgtcattctggtacctc

SEQ ID NO: 4106610 - DNA, 25 bp, Homo sapien
agaaacccgccaactgacaccattt

SEQ ID NO: 4106611 - DNA, 25 bp, Homo sapien
aaaaggaatctttcttccaatgcag

SEQ ID NO: 4106612 - DNA, 25 bp, Homo sapien
ttgcttcagaaacccgccaactgac

SEQ ID NO: 4106613 - DNA, 25 bp, Homo sapien
gatccagtgagaagtagggtttgct

SEQ ID NO: 4106614 - DNA, 25 bp, Homo sapien
caggatccagggactatgaggttcc

SEQ ID NO: 4106615 - DNA, 25 bp, Homo sapien
gatccagggactatgaggttcccca

SEQ ID NO: 4106616 - DNA, 25 bp, Homo sapien
ctcccaggatccagggactatgagg

SEQ ID NO: 4106617 - DNA, 25 bp, Homo sapien
cagggactatgaggttccccacacc

SEQ ID NO: 4106618 - DNA, 25 bp, Homo sapien
cctgggttgaacagctcccagagag

SEQ ID NO: 4106619 - DNA, 25 bp, Homo sapien
tccccgctacactgtcctcaaagat

SEQ ID NO: 4106620 - DNA, 25 bp, Homo sapien
tgggggttctattgccacgggcctc

SEQ ID NO: 4106621 - DNA, 25 bp, Homo sapien
cggtctccccgctacactgtcctca

SEQ ID NO: 4106622 - DNA, 25 bp, Homo sapien
tcctcaaagattgggggttctattg

SEQ ID NO: 4106623 - DNA, 25 bp, Homo sapien
gggtggccttgcactgacggcggct

SEQ ID NO: 4106624 - DNA, 25 bp, Homo sapien
cactgacggcggctgcacgagctga

SEQ ID NO: 4106625 - DNA, 25 bp, Homo sapien
gccttgcactgacggcggctgcacg

SEQ ID NO: 4106626 - DNA, 25 bp, Homo sapien
tggccttgcactgacggcggctgca

SEQ ID NO: 4106627 - DNA, 25 bp, Homo sapien
ccacaatttggataagtaaggagat

SEQ ID NO: 4106628 - DNA, 25 bp, Homo sapien
gcagcttcacggtcagatttgttct

SEQ ID NO: 4106629 - DNA, 25 bp, Homo sapien
aaagcccacaatttggataagtaag

SEQ ID NO: 4106630 - DNA, 25 bp, Homo sapien
gcttcacggtcagatttgttctgct

SEQ ID NO: 4106631 - DNA, 25 bp, Homo sapien
agcggatgatcagatgcactgccca

SEQ ID NO: 4106632 - DNA, 25 bp, Homo sapien
gctgtctttcaaggctacccctgaa

SEQ ID NO: 4106633 - DNA, 25 bp, Homo sapien
aagccgttcaccactccctgagtct

SEQ ID NO: 4106634 - DNA, 25 bp, Homo sapien
agctttgcccattgggagtgtttcc

SEQ ID NO: 4106635 - DNA, 25 bp, Homo sapien
gtcatctggcccctgatgttgcaaa

SEQ ID NO: 4106636 - DNA, 25 bp, Homo sapien
gatgtcagtctgcattcatactagg

SEQ ID NO: 4106637 - DNA, 25 bp, Homo sapien
catattttagtctttgagtcccacc

SEQ ID NO: 4106638 - DNA, 25 bp, Homo sapien
tagagttgggtgtcctttctgcaag

SEQ ID NO: 4106639 - DNA, 25 bp, Homo sapien
tagtgttaagatgatgagcccgtgc

SEQ ID NO: 4106640 - DNA, 25 bp, Homo sapien
gcagctgtcacagataggcagggca

SEQ ID NO: 4106641 - DNA, 25 bp, Homo sapien
gggaaccctgcccagactaatactg

SEQ ID NO: 4106642 - DNA, 25 bp, Homo sapien
tcagggtcaccacccatgtattggg

SEQ ID NO: 4106643 - DNA, 25 bp, Homo sapien
gaagaaactgataccacacctaagg

SEQ ID NO: 4106644 - DNA, 25 bp, Homo sapien
tatcgcatctgtgggtcaatctaac

SEQ ID NO: 4106645 - DNA, 25 bp, Homo sapien
gaaagactttttgcccaagacagtg

SEQ ID NO: 4106646 - DNA, 25 bp, Homo sapien
tttaaatcacacagctcaacggttg

SEQ ID NO: 4106647 - DNA, 25 bp, Homo sapien
gacttaatgaatttggagctcagtt

SEQ ID NO: 4106648 - DNA, 25 bp, Homo sapien
taataaaaatcgtggagatagggag

SEQ ID NO: 4106649 - DNA, 25 bp, Homo sapien
gatgacttgtggtgatcagagacag

SEQ ID NO: 4106650 - DNA, 25 bp, Homo sapien
ggagactgcaacagactgtaagaga

SEQ ID NO: 4106651 - DNA, 25 bp, Homo sapien
gaatgccaggcttattgaaaagtta

SEQ ID NO: 4106652 - DNA, 25 bp, Homo sapien
gaagacctacaagcaaatcaatatg

SEQ ID NO: 4106653 - DNA, 25 bp, Homo sapien
tagagcctatagaatttgactgaat

SEQ ID NO: 4106654 - DNA, 25 bp, Homo sapien
gagattgctgcaattgtaagtacct

SEQ ID NO: 4106655 - DNA, 25 bp, Homo sapien
ttaaaaccctttggagtggctatca

SEQ ID NO: 4106656 - DNA, 25 bp, Homo sapien
gcctgagagagcacttggaaaccca

SEQ ID NO: 4106657 - DNA, 25 bp, Homo sapien
tatgagagccttgtgaggtaatgcc

SEQ ID NO: 4106658 - DNA, 25 bp, Homo sapien
caaagcattggagtgctctcagaga

SEQ ID NO: 4106659 - DNA, 25 bp, Homo sapien
tagtcactgagacttcccaaatctg

SEQ ID NO: 4106660 - DNA, 25 bp, Homo sapien
tcaaaaagccagtcttacagggaag

SEQ ID NO: 4106661 - DNA, 25 bp, Homo sapien
aattatccagtgtttaaatcaccag

SEQ ID NO: 4106662 - DNA, 25 bp, Homo sapien
tatacagaactgtgggtttaacttc

SEQ ID NO: 4106663 - DNA, 25 bp, Homo sapien
acgcacatgtctggagctaccatct

SEQ ID NO: 4106664 - DNA, 25 bp, Homo sapien
gttgagcctggtagcaacgcacatg

SEQ ID NO: 4106665 - DNA, 25 bp, Homo sapien
gcaacgcacatgtctggagctacca

SEQ ID NO: 4106666 - DNA, 25 bp, Homo sapien
tgagcctggtagcaacgcacatgtc

SEQ ID NO: 4106667 - DNA, 25 bp, Homo sapien
tctcatccacattgactgtctgtag

SEQ ID NO: 4106668 - DNA, 25 bp, Homo sapien
cattgactgtctgtagatttttgaa

SEQ ID NO: 4106669 - DNA, 25 bp, Homo sapien
tccacattgactgtctgtagatttt

SEQ ID NO: 4106670 - DNA, 25 bp, Homo sapien
cggtacataggtaaccaaagtatag

SEQ ID NO: 4106671 - DNA, 25 bp, Homo sapien
tgctaagaaaactatcagatagcgt

SEQ ID NO: 4106672 - DNA, 25 bp, Homo sapien
cagatagcgtttgatacactagtca

SEQ ID NO: 4106673 - DNA, 25 bp, Homo sapien
ccaccacacacggaatatgctaaga

SEQ ID NO: 4106674 - DNA, 25 bp, Homo sapien
agaaagcacactgcctaaatgtgta

SEQ ID NO: 4106675 - DNA, 25 bp, Homo sapien
ttggttgaagctagttccagttggg

SEQ ID NO: 4106676 - DNA, 25 bp, Homo sapien
tcaaattgcctttttggttgaagct

SEQ ID NO: 4106677 - DNA, 25 bp, Homo sapien
catcaaattgcctttttggttgaag

SEQ ID NO: 4106678 - DNA, 25 bp, Homo sapien
catgcccagccaagtctgcatgttt

SEQ ID NO: 4106679 - DNA, 25 bp, Homo sapien
gaatgcaagtggtctctggagtctc

SEQ ID NO: 4106680 - DNA, 25 bp, Homo sapien
cagcattcactctgtgctggtggag

SEQ ID NO: 4106681 - DNA, 25 bp, Homo sapien
aaattggcctggcacggcagctcct

SEQ ID NO: 4106682 - DNA, 25 bp, Homo sapien
gacatttcaccgtcacatatggcag

SEQ ID NO: 4106683 - DNA, 25 bp, Homo sapien
tctagtgaccggttagatgacccgc

SEQ ID NO: 4106684 - DNA, 25 bp, Homo sapien
gattatcctcgacttacactggcgg

SEQ ID NO: 4106685 - DNA, 25 bp, Homo sapien
ggtgtgattcccgaccaagatggcg

SEQ ID NO: 4106686 - DNA, 25 bp, Homo sapien
caatgacaatgcaggaattccgcgc

SEQ ID NO: 4106687 - DNA, 25 bp, Homo sapien
gctgggacgggaatttgaaactgaa

SEQ ID NO: 4106688 - DNA, 25 bp, Homo sapien
tcagaatggagcaggctagaaggtt

SEQ ID NO: 4106689 - DNA, 25 bp, Homo sapien
gattgaggcaaagggaatcttctga

SEQ ID NO: 4106690 - DNA, 25 bp, Homo sapien
ttcagaataaccaactcagaatgga

SEQ ID NO: 4106691 - DNA, 25 bp, Homo sapien
aagatcattgagaccaagcatgtga

SEQ ID NO: 4106692 - DNA, 25 bp, Homo sapien
gaaaagatcattgagaccaagcatg

SEQ ID NO: 4106693 - DNA, 25 bp, Homo sapien
aaaagatcattgagaccaagcatgt

SEQ ID NO: 4106694 - DNA, 25 bp, Homo sapien
aaagatcattgagaccaagcatgtg

SEQ ID NO: 4106695 - DNA, 25 bp, Homo sapien
ccaattccaggcacccaaagcaccc

SEQ ID NO: 4106696 - DNA, 25 bp, Homo sapien
caattccaggcacccaaagcacccc

SEQ ID NO: 4106697 - DNA, 25 bp, Homo sapien
cagtcagtatgcatgtagggcagat

SEQ ID NO: 4106698 - DNA, 25 bp, Homo sapien
agtcagtatgcatgtagggcagatg

SEQ ID NO: 4106699 - DNA, 25 bp, Homo sapien
tgaaggaatttcagtcagtatgcat

SEQ ID NO: 4106700 - DNA, 25 bp, Homo sapien
ctgcacgatgaggaccagaataaag

SEQ ID NO: 4106701 - DNA, 25 bp, Homo sapien
tgcacgatgaggaccagaataaagg

SEQ ID NO: 4106702 - DNA, 25 bp, Homo sapien
gcacgatgaggaccagaataaaggt

SEQ ID NO: 4106703 - DNA, 25 bp, Homo sapien
tccctacaagatcttccacaacgtg

SEQ ID NO: 4106704 - DNA, 25 bp, Homo sapien
tgtgtccgtcttccagtcaggcctg

SEQ ID NO: 4106705 - DNA, 25 bp, Homo sapien
gatcttccacaacgtgtgtccgtct

SEQ ID NO: 4106706 - DNA, 25 bp, Homo sapien
tccacaacgtgtgtccgtcttccag

SEQ ID NO: 4106707 - DNA, 25 bp, Homo sapien
gatgaatctgcttttttggaaggta

SEQ ID NO: 4106708 - DNA, 25 bp, Homo sapien
gcaggcttcagcgttgagaagaaca

SEQ ID NO: 4106709 - DNA, 25 bp, Homo sapien
gatttggataatgcgatagaagctg

SEQ ID NO: 4106710 - DNA, 25 bp, Homo sapien
ggtacttcgggtcgattgctcagca

SEQ ID NO: 4106711 - DNA, 25 bp, Homo sapien
tgaccccaacgagacacgggcggga

SEQ ID NO: 4106712 - DNA, 25 bp, Homo sapien
ggccttggcgaaggctgaccccaac

SEQ ID NO: 4106713 - DNA, 25 bp, Homo sapien
ccaagccccgacaagagtgcctggg

SEQ ID NO: 4106714 - DNA, 25 bp, Homo sapien
agaacagtcattctggcctgagccg

SEQ ID NO: 4106715 - DNA, 25 bp, Homo sapien
caccaaacctcgtggttcttccaag

SEQ ID NO: 4106716 - DNA, 25 bp, Homo sapien
tcttatgtgtagtcagctgatgaag

SEQ ID NO: 4106717 - DNA, 25 bp, Homo sapien
tttatttttgctccaaggcagtcca

SEQ ID NO: 4106718 - DNA, 25 bp, Homo sapien
ttccaagtgtaggaagagatagttt

SEQ ID NO: 4106719 - DNA, 25 bp, Homo sapien
ggcaagatctcagcctcctgcattt

SEQ ID NO: 4106720 - DNA, 25 bp, Homo sapien
tctcagcctcctgcatttaagcaat

SEQ ID NO: 4106721 - DNA, 25 bp, Homo sapien
aagatctcagcctcctgcatttaag

SEQ ID NO: 4106722 - DNA, 25 bp, Homo sapien
gatctcagcctcctgcatttaagca

SEQ ID NO: 4106723 - DNA, 25 bp, Homo sapien
ggcaggaacatggtggccgcaaaga

SEQ ID NO: 4106724 - DNA, 25 bp, Homo sapien
gcaggaacatggtggccgcaaagaa

SEQ ID NO: 4106725 - DNA, 25 bp, Homo sapien
tcctccacattgtgttcccgccttt

SEQ ID NO: 4106726 - DNA, 25 bp, Homo sapien
cattgtgttcccgccttttgaccat

SEQ ID NO: 4106727 - DNA, 25 bp, Homo sapien
ctccacattgtgttcccgccttttg

SEQ ID NO: 4106728 - DNA, 25 bp, Homo sapien
ccacattgtgttcccgccttttgac

SEQ ID NO: 4106729 - DNA, 25 bp, Homo sapien
ctacgtgaagacctgtatacactgg

SEQ ID NO: 4106730 - DNA, 25 bp, Homo sapien
gaacacattgctgccctctacgtga

SEQ ID NO: 4106731 - DNA, 25 bp, Homo sapien
aagctagagcctctgtgcagacaga

SEQ ID NO: 4106732 - DNA, 25 bp, Homo sapien
tctttatagagctcgtccaagctag

SEQ ID NO: 4106733 - DNA, 25 bp, Homo sapien
gtgttggcatcctgggaagtcactg

SEQ ID NO: 4106734 - DNA, 25 bp, Homo sapien
gaagcagagtgttggcatcctggga

SEQ ID NO: 4106735 - DNA, 25 bp, Homo sapien
aagcagagtgttggcatcctgggaa

SEQ ID NO: 4106736 - DNA, 25 bp, Homo sapien
cagagtgttggcatcctgggaagtc

SEQ ID NO: 4106737 - DNA, 25 bp, Homo sapien
tggactaccagatatccctatgcat

SEQ ID NO: 4106738 - DNA, 25 bp, Homo sapien
ttctgtctggactaccagatatccc

SEQ ID NO: 4106739 - DNA, 25 bp, Homo sapien
tgtctggactaccagatatccctat

SEQ ID NO: 4106740 - DNA, 25 bp, Homo sapien
gactaccagatatccctatgcatac

SEQ ID NO: 4106741 - DNA, 25 bp, Homo sapien
cgtcgtctagcaacagcaacagctt

SEQ ID NO: 4106742 - DNA, 25 bp, Homo sapien
acgagagctagttcccgtcgtctag

SEQ ID NO: 4106743 - DNA, 25 bp, Homo sapien
ctgaggaagtgacgagagctagttc

SEQ ID NO: 4106744 - DNA, 25 bp, Homo sapien
agcttccgcctcacggcgtcccggt

SEQ ID NO: 4106745 - DNA, 25 bp, Homo sapien
gcttcgactcgggttcttccctgca

SEQ ID NO: 4106746 - DNA, 25 bp, Homo sapien
ctgtcctggacctccgaggacaact

SEQ ID NO: 4106747 - DNA, 25 bp, Homo sapien
ttccctgcaggtggcgtggccctga

SEQ ID NO: 4106748 - DNA, 25 bp, Homo sapien
tggacctccgaggacaactctgtgc

SEQ ID NO: 4106749 - DNA, 25 bp, Homo sapien
tttgggccggagttattctgaagag

SEQ ID NO: 4106750 - DNA, 25 bp, Homo sapien
ggcgacttcaaatactgcacttgag

SEQ ID NO: 4106751 - DNA, 25 bp, Homo sapien
tgcgaagcggcaaaatacatttaag

SEQ ID NO: 4106752 - DNA, 25 bp, Homo sapien
gcaaaggcggccagtggcgacttca

SEQ ID NO: 4106753 - DNA, 25 bp, Homo sapien
tgcttttcccacgaagaagcggaaa

SEQ ID NO: 4106754 - DNA, 25 bp, Homo sapien
gtgctccagggtgactttctcttgt

SEQ ID NO: 4106755 - DNA, 25 bp, Homo sapien
tcagccacgcgatattataggcaga

SEQ ID NO: 4106756 - DNA, 25 bp, Homo sapien
cttgtctgcttttcccacgaagaag

SEQ ID NO: 4106757 - DNA, 25 bp, Homo sapien
tacaaagttaatttcacaggagtca

SEQ ID NO: 4106758 - DNA, 25 bp, Homo sapien
aagccacatgtggtcaaaacagccc

SEQ ID NO: 4106759 - DNA, 25 bp, Homo sapien
caaagttaatttcacaggagtcaat

SEQ ID NO: 4106760 - DNA, 25 bp, Homo sapien
aagttaatttcacaggagtcaatga

SEQ ID NO: 4106761 - DNA, 25 bp, Homo sapien
gagctctttgacccacaaaccttga

SEQ ID NO: 4106762 - DNA, 25 bp, Homo sapien
gctctttgacccacaaaccttgaca

SEQ ID NO: 4106763 - DNA, 25 bp, Homo sapien
cttctatgcgtacagagctctttga

SEQ ID NO: 4106764 - DNA, 25 bp, Homo sapien
ctctttgacccacaaaccttgacag

SEQ ID NO: 4106765 - DNA, 25 bp, Homo sapien
tgactttccttctactctggcctaa

SEQ ID NO: 4106766 - DNA, 25 bp, Homo sapien
ctctggcctaatgaacatggctgac

SEQ ID NO: 4106767 - DNA, 25 bp, Homo sapien
cttgactttccttctactctggcct

SEQ ID NO: 4106768 - DNA, 25 bp, Homo sapien
tctactctggcctaatgaacatggc

SEQ ID NO: 4106769 - DNA, 25 bp, Homo sapien
gacagagtctgcacataatcccaca

SEQ ID NO: 4106770 - DNA, 25 bp, Homo sapien
atttgcccaaaagtagtctccgttg

SEQ ID NO: 4106771 - DNA, 25 bp, Homo sapien
tgccaattgaaagagtatacgaccg

SEQ ID NO: 4106772 - DNA, 25 bp, Homo sapien
gagtatacgaccgttcacccataag

SEQ ID NO: 4106773 - DNA, 25 bp, Homo sapien
tgtgccttcatgtttctctgctccc

SEQ ID NO: 4106774 - DNA, 25 bp, Homo sapien
tgccttcatgtttctctgctccctg

SEQ ID NO: 4106775 - DNA, 25 bp, Homo sapien
ctgtgccttcatgtttctctgctcc

SEQ ID NO: 4106776 - DNA, 25 bp, Homo sapien
ccttcatgtttctctgctccctgat

SEQ ID NO: 4106777 - DNA, 25 bp, Homo sapien
ccttctcttgatcagtgatcccaga

SEQ ID NO: 4106778 - DNA, 25 bp, Homo sapien
tccttctcttgatcagtgatcccag

SEQ ID NO: 4106779 - DNA, 25 bp, Homo sapien
aaagcattggtggataactccttct

SEQ ID NO: 4106780 - DNA, 25 bp, Homo sapien
cattggtggataactccttctcttg

SEQ ID NO: 4106781 - DNA, 25 bp, Homo sapien
aaggtgttgtagacaggcatcataa

SEQ ID NO: 4106782 - DNA, 25 bp, Homo sapien
gctggttaagtgtttgtctcaaatt

SEQ ID NO: 4106783 - DNA, 25 bp, Homo sapien
taaaaaactcagctactgctgtatt

SEQ ID NO: 4106784 - DNA, 25 bp, Homo sapien
gtgttgtagacaggcatcataattt

SEQ ID NO: 4106785 - DNA, 25 bp, Homo sapien
tgccgcagatgataaagaatgactg

SEQ ID NO: 4106786 - DNA, 25 bp, Homo sapien
tggcttctgtatactgccgcagatg

SEQ ID NO: 4106787 - DNA, 25 bp, Homo sapien
gcttgattatagtacaacatgctgt

SEQ ID NO: 4106788 - DNA, 25 bp, Homo sapien
gtttttcaccaactgatatggcttc

SEQ ID NO: 4106789 - DNA, 25 bp, Homo sapien
aaacacactgcttgggcaaattttt

SEQ ID NO: 4106790 - DNA, 25 bp, Homo sapien
aaaacacactgcttgggcaaatttt

SEQ ID NO: 4106791 - DNA, 25 bp, Homo sapien
aaaaacacactgcttgggcaaattt

SEQ ID NO: 4106792 - DNA, 25 bp, Homo sapien
aaaaaacacactgcttgggcaaatt

SEQ ID NO: 4106793 - DNA, 25 bp, Homo sapien
gcttggtaggttaatatatacaggt

SEQ ID NO: 4106794 - DNA, 25 bp, Homo sapien
tttctaggacagcaagaagatgcaa

SEQ ID NO: 4106795 - DNA, 25 bp, Homo sapien
ctttctcagcttggtaggttaatat

SEQ ID NO: 4106796 - DNA, 25 bp, Homo sapien
gaagatgcaaagctttctcagcttg

SEQ ID NO: 4106797 - DNA, 25 bp, Homo sapien
cagtaaaccaacaagtagagagaat

SEQ ID NO: 4106798 - DNA, 25 bp, Homo sapien
agattttagtctgatcacctctaaa

SEQ ID NO: 4106799 - DNA, 25 bp, Homo sapien
ccagtaaaccaacaagtagagagaa

SEQ ID NO: 4106800 - DNA, 25 bp, Homo sapien
agtctgatcacctctaaagactcac

SEQ ID NO: 4106801 - DNA, 25 bp, Homo sapien
gccactttgtaaaacagtcttgtat

SEQ ID NO: 4106802 - DNA, 25 bp, Homo sapien
caatgtacatccttagtcattagga

SEQ ID NO: 4106803 - DNA, 25 bp, Homo sapien
taacaatgtggagaaattacaacct

SEQ ID NO: 4106804 - DNA, 25 bp, Homo sapien
tacaacctcacaagtggccggtggg

SEQ ID NO: 4106805 - DNA, 25 bp, Homo sapien
atttgtgggaaatggtggttcatgc

SEQ ID NO: 4106806 - DNA, 25 bp, Homo sapien
agaatttgtgggaaatggtggttca

SEQ ID NO: 4106807 - DNA, 25 bp, Homo sapien
aaaatgtagaatttgtgggaaatgg

SEQ ID NO: 4106808 - DNA, 25 bp, Homo sapien
tttgtgggaaatggtggttcatgcc

SEQ ID NO: 4106809 - DNA, 25 bp, Homo sapien
agctttatgattagatccatctttg

SEQ ID NO: 4106810 - DNA, 25 bp, Homo sapien
tgattttgcagcttctattagagct

SEQ ID NO: 4106811 - DNA, 25 bp, Homo sapien
ctttcagctttatgattagatccat

SEQ ID NO: 4106812 - DNA, 25 bp, Homo sapien
gcttctattagagctccactttcag

SEQ ID NO: 4106813 - DNA, 25 bp, Homo sapien
gctgtattcatgactgacttgattt

SEQ ID NO: 4106814 - DNA, 25 bp, Homo sapien
gacttgatttcccttttacatgctt

SEQ ID NO: 4106815 - DNA, 25 bp, Homo sapien
tgacttgatttcccttttacatgct

SEQ ID NO: 4106816 - DNA, 25 bp, Homo sapien
ccagctgtattcatgactgacttga

SEQ ID NO: 4106817 - DNA, 25 bp, Homo sapien
ggatgctcagcaatgtttgaactat

SEQ ID NO: 4106818 - DNA, 25 bp, Homo sapien
ttcgataattacctcttaagtactc

SEQ ID NO: 4106819 - DNA, 25 bp, Homo sapien
atttaatagcttcacggcttttcga

SEQ ID NO: 4106820 - DNA, 25 bp, Homo sapien
cctggatgctcagcaatgtttgaac

SEQ ID NO: 4106821 - DNA, 25 bp, Homo sapien
taatgtatatgcattgcatccacta

SEQ ID NO: 4106822 - DNA, 25 bp, Homo sapien
tatgcattgcatccactaatgaaat

SEQ ID NO: 4106823 - DNA, 25 bp, Homo sapien
gcatattaagtgaatagcaagaata

SEQ ID NO: 4106824 - DNA, 25 bp, Homo sapien
tgtagaaattagaaacaaggaagca

SEQ ID NO: 4106825 - DNA, 25 bp, Homo sapien
tgctcatggcaaaatggatgcaacc

SEQ ID NO: 4106826 - DNA, 25 bp, Homo sapien
atggatgcaaccaaggttattccag

SEQ ID NO: 4106827 - DNA, 25 bp, Homo sapien
gatcagtgctacctgcactgagctg

SEQ ID NO: 4106828 - DNA, 25 bp, Homo sapien
tattcccaaattgtgcttgctcatg

SEQ ID NO: 4106829 - DNA, 25 bp, Homo sapien
ttgcatgataaacctgaacagcttc

SEQ ID NO: 4106830 - DNA, 25 bp, Homo sapien
ttagtaacgtacacatgggtcttcc

SEQ ID NO: 4106831 - DNA, 25 bp, Homo sapien
tagccagaggcgaggatttgcatga

SEQ ID NO: 4106832 - DNA, 25 bp, Homo sapien
gacattcgaaggcagcaagaggcct

SEQ ID NO: 4106833 - DNA, 25 bp, Homo sapien
cctgcaggtggaatcccaagtagtt

SEQ ID NO: 4106834 - DNA, 25 bp, Homo sapien
gaacaaaccggagtcaatcaatatg

SEQ ID NO: 4106835 - DNA, 25 bp, Homo sapien
gatcgcttgacaccagggaggtcga

SEQ ID NO: 4106836 - DNA, 25 bp, Homo sapien
ccaagtgcggtcatgcatgcctata

SEQ ID NO: 4106837 - DNA, 25 bp, Homo sapien
ttgggtgcagcggtgttgtctcggc

SEQ ID NO: 4106838 - DNA, 25 bp, Homo sapien
tgccaagttgctgaggctggaaaat

SEQ ID NO: 4106839 - DNA, 25 bp, Homo sapien
tttctttaggcttgggtgcagcggt

SEQ ID NO: 4106840 - DNA, 25 bp, Homo sapien
aatttttctttaggcttgggtgcag

SEQ ID NO: 4106841 - DNA, 25 bp, Homo sapien
gccaaaactattttacgatgatagc

SEQ ID NO: 4106842 - DNA, 25 bp, Homo sapien
gatagccttgaccaacaatagactg

SEQ ID NO: 4106843 - DNA, 25 bp, Homo sapien
tctgtatagactgtgatgccaaaac

SEQ ID NO: 4106844 - DNA, 25 bp, Homo sapien
caatagactgtacaattcctttttt

SEQ ID NO: 4106845 - DNA, 25 bp, Homo sapien
gcaagtttcactgctttcgctgctc

SEQ ID NO: 4106846 - DNA, 25 bp, Homo sapien
ggtagcagcaacaaggcatttctga

SEQ ID NO: 4106847 - DNA, 25 bp, Homo sapien
ggctgcaaactccatactggctaca

SEQ ID NO: 4106848 - DNA, 25 bp, Homo sapien
gcatttctgagacatatggctgcaa

SEQ ID NO: 4106849 - DNA, 25 bp, Homo sapien
ttcctgttttctcaatggagaagaa

SEQ ID NO: 4106850 - DNA, 25 bp, Homo sapien
gttttctcaatggagaagaaggtgg

SEQ ID NO: 4106851 - DNA, 25 bp, Homo sapien
aaggtggagctggaatgaatttatc

SEQ ID NO: 4106852 - DNA, 25 bp, Homo sapien
ggagctggaatgaatttatctccat

SEQ ID NO: 4106853 - DNA, 25 bp, Homo sapien
caatatcttgactgtgatattgtac

SEQ ID NO: 4106854 - DNA, 25 bp, Homo sapien
aattgaatgtaatgaaaatattgta

SEQ ID NO: 4106855 - DNA, 25 bp, Homo sapien
atcttgactgtgatattgtactaaa

SEQ ID NO: 4106856 - DNA, 25 bp, Homo sapien
atatcttgactgtgatattgtacta

SEQ ID NO: 4106857 - DNA, 25 bp, Homo sapien
aggcacgcgctatcatgaccagact

SEQ ID NO: 4106858 - DNA, 25 bp, Homo sapien
aatacaggcacgcgctatcatgacc

SEQ ID NO: 4106859 - DNA, 25 bp, Homo sapien
acaggcacgcgctatcatgaccaga

SEQ ID NO: 4106860 - DNA, 25 bp, Homo sapien
ggcacgcgctatcatgaccagacta

SEQ ID NO: 4106861 - DNA, 25 bp, Homo sapien
gccggagctgctactgtcgtagtta

SEQ ID NO: 4106862 - DNA, 25 bp, Homo sapien
gctactgtcgtagttaccacctccg

SEQ ID NO: 4106863 - DNA, 25 bp, Homo sapien
gtcctcgtcgattagagtatccaag

SEQ ID NO: 4106864 - DNA, 25 bp, Homo sapien
gccatcctcgtagtcactgctgctg

SEQ ID NO: 4106865 - DNA, 25 bp, Homo sapien
gagtccacacatcagattctgggcc

SEQ ID NO: 4106866 - DNA, 25 bp, Homo sapien
tgagtccacacatcagattctgggc

SEQ ID NO: 4106867 - DNA, 25 bp, Homo sapien
cattctttgaacattcttgatcgta

SEQ ID NO: 4106868 - DNA, 25 bp, Homo sapien
cgtaagtgtaatgactacttgcgat

SEQ ID NO: 4106869 - DNA, 25 bp, Homo sapien
ctttgaacattcttgatcgtaagtg

SEQ ID NO: 4106870 - DNA, 25 bp, Homo sapien
tcttgatcgtaagtgtaatgactac

SEQ ID NO: 4106871 - DNA, 25 bp, Homo sapien
gactcccataaaggatctgttcatg

SEQ ID NO: 4106872 - DNA, 25 bp, Homo sapien
ggatgtaggtgctttacacctgcta

SEQ ID NO: 4106873 - DNA, 25 bp, Homo sapien
cctgctatgaattgttttggtgtag

SEQ ID NO: 4106874 - DNA, 25 bp, Homo sapien
tcaatcttggttgaaactactttaa

SEQ ID NO: 4106875 - DNA, 25 bp, Homo sapien
tgccaatttgtctacaataatccaa

SEQ ID NO: 4106876 - DNA, 25 bp, Homo sapien
gccaatttgtctacaataatccaaa

SEQ ID NO: 4106877 - DNA, 25 bp, Homo sapien
ccaatttgtctacaataatccaaaa

SEQ ID NO: 4106878 - DNA, 25 bp, Homo sapien
tagcgcatgcccctgtagtcccagc

SEQ ID NO: 4106879 - DNA, 25 bp, Homo sapien
tggtagcgcatgcccctgtagtccc

SEQ ID NO: 4106880 - DNA, 25 bp, Homo sapien
gcgcatgcccctgtagtcccagcta

SEQ ID NO: 4106881 - DNA, 25 bp, Homo sapien
ggtagcgcatgcccctgtagtccca

SEQ ID NO: 4106882 - DNA, 25 bp, Homo sapien
ccaaagccagagccacgtaggcact

SEQ ID NO: 4106883 - DNA, 25 bp, Homo sapien
caaagccagagccacgtaggcactg

SEQ ID NO: 4106884 - DNA, 25 bp, Homo sapien
aaagccagagccacgtaggcactgc

SEQ ID NO: 4106885 - DNA, 25 bp, Homo sapien
acccaaagccagagccacgtaggca

SEQ ID NO: 4106886 - DNA, 25 bp, Homo sapien
gacagcttgggctgctgaagaagtt

SEQ ID NO: 4106887 - DNA, 25 bp, Homo sapien
ttaagagatcctgacagcttgggct

SEQ ID NO: 4106888 - DNA, 25 bp, Homo sapien
taagagatcctgacagcttgggctg

SEQ ID NO: 4106889 - DNA, 25 bp, Homo sapien
agcttgggctgctgaagaagtttat

SEQ ID NO: 4106890 - DNA, 25 bp, Homo sapien
caccacaatctgaacaccagcatca

SEQ ID NO: 4106891 - DNA, 25 bp, Homo sapien
ctcataatggccgtatacaccacaa

SEQ ID NO: 4106892 - DNA, 25 bp, Homo sapien
ggcaatgataaggacggaaggtact

SEQ ID NO: 4106893 - DNA, 25 bp, Homo sapien
tgataaggacggaaggtactttaga

SEQ ID NO: 4106894 - DNA, 25 bp, Homo sapien
ctgcagcatataaatgtcccaaaaa

SEQ ID NO: 4106895 - DNA, 25 bp, Homo sapien
tgcagcatataaatgtcccaaaaac

SEQ ID NO: 4106896 - DNA, 25 bp, Homo sapien
gggttcaagtgagtaatggcatcag

SEQ ID NO: 4106897 - DNA, 25 bp, Homo sapien
ggtcctgctcatttgaagagatccc

SEQ ID NO: 4106898 - DNA, 25 bp, Homo sapien
atattctgtcgagagagatgagggc

SEQ ID NO: 4106899 - DNA, 25 bp, Homo sapien
ccctaaggagacatcagtgacattc

SEQ ID NO: 4106900 - DNA, 25 bp, Homo sapien
tcaggtctacttagcaaacaactgc

SEQ ID NO: 4106901 - DNA, 25 bp, Homo sapien
caccgcacccgacaattatttagaa

SEQ ID NO: 4106902 - DNA, 25 bp, Homo sapien
tggattttagaatcactccaaagga

SEQ ID NO: 4106903 - DNA, 25 bp, Homo sapien
gatgtgatcattaactctcaggtct

SEQ ID NO: 4106904 - DNA, 25 bp, Homo sapien
tcctcgggctcagaaggtagagggc

SEQ ID NO: 4106905 - DNA, 25 bp, Homo sapien
gcttcattttcacctttgtctgatc

SEQ ID NO: 4106906 - DNA, 25 bp, Homo sapien
aggattccattgcttcattttcacc

SEQ ID NO: 4106907 - DNA, 25 bp, Homo sapien
gattccattgcttcattttcacctt

SEQ ID NO: 4106908 - DNA, 25 bp, Homo sapien
ttgcttcattttcacctttgtctga

SEQ ID NO: 4106909 - DNA, 25 bp, Homo sapien
ccaatctatcgccttgaggagccac

SEQ ID NO: 4106910 - DNA, 25 bp, Homo sapien
tagacactggtgaagaggccgtgcc

SEQ ID NO: 4106911 - DNA, 25 bp, Homo sapien
gagccacttggcacagcagtattcc

SEQ ID NO: 4106912 - DNA, 25 bp, Homo sapien
gtattcctcaggcagaaaaacgaac

SEQ ID NO: 4106913 - DNA, 25 bp, Homo sapien
taagcgctgccaaggttgaacagca

SEQ ID NO: 4106914 - DNA, 25 bp, Homo sapien
tggtggagacactttcgggctttgt

SEQ ID NO: 4106915 - DNA, 25 bp, Homo sapien
tgtcatattcgctcctcaggcagta

SEQ ID NO: 4106916 - DNA, 25 bp, Homo sapien
tcctcaggcagtaagcgctgccaag

SEQ ID NO: 4106917 - DNA, 25 bp, Homo sapien
gtgttggctgctttacaaggttcag

SEQ ID NO: 4106918 - DNA, 25 bp, Homo sapien
tacaggtatggctcaatgcccatga

SEQ ID NO: 4106919 - DNA, 25 bp, Homo sapien
taaagagatccaatcaaaatcttcc

SEQ ID NO: 4106920 - DNA, 25 bp, Homo sapien
gattggcaggtgacctactaaagag

SEQ ID NO: 4106921 - DNA, 25 bp, Homo sapien
tacccagtcccctactacaggtatg

SEQ ID NO: 4106922 - DNA, 25 bp, Homo sapien
ataggatttctccatgttggtaagg

SEQ ID NO: 4106923 - DNA, 25 bp, Homo sapien
agataggatttctccatgttggtaa

SEQ ID NO: 4106924 - DNA, 25 bp, Homo sapien
gataggatttctccatgttggtaag

SEQ ID NO: 4106925 - DNA, 25 bp, Homo sapien
gagataggatttctccatgttggta

SEQ ID NO: 4106926 - DNA, 25 bp, Homo sapien
gcaagctgtataggcaagatcgtct

SEQ ID NO: 4106927 - DNA, 25 bp, Homo sapien
catgttgcccagagcatgtgcttct

SEQ ID NO: 4106928 - DNA, 25 bp, Homo sapien
taagcctagctttctaggcaagctg

SEQ ID NO: 4106929 - DNA, 25 bp, Homo sapien
tattcctctcgccacaacactgagg

SEQ ID NO: 4106930 - DNA, 25 bp, Homo sapien
tgagtaagagccatagcatcggcca

SEQ ID NO: 4106931 - DNA, 25 bp, Homo sapien
tatcaacttgtacttccccatctag

SEQ ID NO: 4106932 - DNA, 25 bp, Homo sapien
catgctgcccttagatctgagtaag

SEQ ID NO: 4106933 - DNA, 25 bp, Homo sapien
aatacttattgaacagaggtgggta

SEQ ID NO: 4106934 - DNA, 25 bp, Homo sapien
caaaacagaaagatgcccgtgaaaa

SEQ ID NO: 4106935 - DNA, 25 bp, Homo sapien
taagctagacatgtaatactctggg

SEQ ID NO: 4106936 - DNA, 25 bp, Homo sapien
cacgtgacttcctagggactacctg

SEQ ID NO: 4106937 - DNA, 25 bp, Homo sapien
aagtacatctgccaaccaacaaggt

SEQ ID NO: 4106938 - DNA, 25 bp, Homo sapien
gggcacctctttaggatggatcatt

SEQ ID NO: 4106939 - DNA, 25 bp, Homo sapien
cctcagggggcacctctttaggatg

SEQ ID NO: 4106940 - DNA, 25 bp, Homo sapien
agttcaaggtagactgccagcaaga

SEQ ID NO: 4106941 - DNA, 25 bp, Homo sapien
ctttaggatggatcattgaagccgc

SEQ ID NO: 4106942 - DNA, 25 bp, Homo sapien
caagggataaagtcctaaacagaga

SEQ ID NO: 4106943 - DNA, 25 bp, Homo sapien
gggataaagtcctaaacagagagaa

SEQ ID NO: 4106944 - DNA, 25 bp, Homo sapien
gataaagtcctaaacagagagaatt

SEQ ID NO: 4106945 - DNA, 25 bp, Homo sapien
ttcaagggataaagtcctaaacaga

SEQ ID NO: 4106946 - DNA, 25 bp, Homo sapien
ctctgcacagtggtgaaagccggca

SEQ ID NO: 4106947 - DNA, 25 bp, Homo sapien
catttggatgggctggatcgggtgg

SEQ ID NO: 4106948 - DNA, 25 bp, Homo sapien
gctgattccttttgatgatctgtaa

SEQ ID NO: 4106949 - DNA, 25 bp, Homo sapien
gatcgggtggacaggctgaaacact

SEQ ID NO: 4106950 - DNA, 25 bp, Homo sapien
attctgctgtgatacaactaaaatg

SEQ ID NO: 4106951 - DNA, 25 bp, Homo sapien
gctgtgatacaactaaaatggccag

SEQ ID NO: 4106952 - DNA, 25 bp, Homo sapien
tgctgtgatacaactaaaatggcca

SEQ ID NO: 4106953 - DNA, 25 bp, Homo sapien
tctgctgtgatacaactaaaatggc

SEQ ID NO: 4106954 - DNA, 25 bp, Homo sapien
ttaattgcctatggcatatattaca

SEQ ID NO: 4106955 - DNA, 25 bp, Homo sapien
caaatgtcaggggtagaattgactc

SEQ ID NO: 4106956 - DNA, 25 bp, Homo sapien
tggctcaaaattaatagtctggctg

SEQ ID NO: 4106957 - DNA, 25 bp, Homo sapien
atgatgacttagtaaatccttaatt

SEQ ID NO: 4106958 - DNA, 25 bp, Homo sapien
cggattcctattgccccaaatgagg

SEQ ID NO: 4106959 - DNA, 25 bp, Homo sapien
caattgtttgtcaccacacggattc

SEQ ID NO: 4106960 - DNA, 25 bp, Homo sapien
gggctaatgaacttcgctgcctcct

SEQ ID NO: 4106961 - DNA, 25 bp, Homo sapien
ctaaatcctccaggacaattgtttg

SEQ ID NO: 4106962 - DNA, 25 bp, Homo sapien
cggccgctgggtcagtccgcgcatt

SEQ ID NO: 4106963 - DNA, 25 bp, Homo sapien
tgcgcccgcgattaagtccgcccgg

SEQ ID NO: 4106964 - DNA, 25 bp, Homo sapien
tcagtccgcgcatttgcgctccggg

SEQ ID NO: 4106965 - DNA, 25 bp, Homo sapien
gctccgggcgcctgtgctcaagaga

SEQ ID NO: 4106966 - DNA, 25 bp, Homo sapien
gcttcggcgtttccgcggcgctctg

SEQ ID NO: 4106967 - DNA, 25 bp, Homo sapien
tgcgccgaccgtgccgccggtaggt

SEQ ID NO: 4106968 - DNA, 25 bp, Homo sapien
taggtggtgctctgggtcccgagcc

SEQ ID NO: 4106969 - DNA, 25 bp, Homo sapien
agtgcccctgggcttgacagcgttc

SEQ ID NO: 4106970 - DNA, 25 bp, Homo sapien
taaaataagtcacatgaaacggagt

SEQ ID NO: 4106971 - DNA, 25 bp, Homo sapien
ttaatgaagcaagctccgcggtggc

SEQ ID NO: 4106972 - DNA, 25 bp, Homo sapien
cacatgaaacggagttaatgaagca

SEQ ID NO: 4106973 - DNA, 25 bp, Homo sapien
gtggcagaaggagacgtgcgggtac

SEQ ID NO: 4106974 - DNA, 25 bp, Homo sapien
ttgaccttgaccacatctttgtcat

SEQ ID NO: 4106975 - DNA, 25 bp, Homo sapien
accttgaccacatctttgtcataga

SEQ ID NO: 4106976 - DNA, 25 bp, Homo sapien
tgaccttgaccacatctttgtcata

SEQ ID NO: 4106977 - DNA, 25 bp, Homo sapien
gaccttgaccacatctttgtcatag

SEQ ID NO: 4106978 - DNA, 25 bp, Homo sapien
gctggaatcagtggaaccggcaaca

SEQ ID NO: 4106979 - DNA, 25 bp, Homo sapien
cgcgggccgccctgaattattcatc

SEQ ID NO: 4106980 - DNA, 25 bp, Homo sapien
gtcgtgcaatgctatccgagctccg

SEQ ID NO: 4106981 - DNA, 25 bp, Homo sapien
agatattagatgtacccgctccgcg

SEQ ID NO: 4106982 - DNA, 25 bp, Homo sapien
attaggcctgcaatccgggagccgg

SEQ ID NO: 4106983 - DNA, 25 bp, Homo sapien
ccccgacactgcaggcattaaatgc

SEQ ID NO: 4106984 - DNA, 25 bp, Homo sapien
gacacagattcctccggataacttg

SEQ ID NO: 4106985 - DNA, 25 bp, Homo sapien
cattaaatgccactatccagcggcg

SEQ ID NO: 4106986 - DNA, 25 bp, Homo sapien
agcggcgccggcgagccgcacatct

SEQ ID NO: 4106987 - DNA, 25 bp, Homo sapien
gtggacgtctgcgaggaggacgacg

SEQ ID NO: 4106988 - DNA, 25 bp, Homo sapien
agttggaggagagcggcgccggcga

SEQ ID NO: 4106989 - DNA, 25 bp, Homo sapien
cgacgacgcggacgagttggaggag

SEQ ID NO: 4106990 - DNA, 25 bp, Homo sapien
ctggcagtcgaggcagcgcgaagaa

SEQ ID NO: 4106991 - DNA, 25 bp, Homo sapien
ggcagcgcgaagaagctgcgttgcc

SEQ ID NO: 4106992 - DNA, 25 bp, Homo sapien
cggcgggccgcgctcgatgtagtgg

SEQ ID NO: 4106993 - DNA, 25 bp, Homo sapien
gaagccgaggcgctcgggaaacact

SEQ ID NO: 4106994 - DNA, 25 bp, Homo sapien
ggacgcagttgtcgcacaggtgctc

SEQ ID NO: 4106995 - DNA, 25 bp, Homo sapien
gcgctggtgcgctcggacgcagttg

SEQ ID NO: 4106996 - DNA, 25 bp, Homo sapien
cgacctcggattcctcgccttggat

SEQ ID NO: 4106997 - DNA, 25 bp, Homo sapien
attccccgcccggatgccggctggg

SEQ ID NO: 4106998 - DNA, 25 bp, Homo sapien
gcctttcggactctggaggcacaga

SEQ ID NO: 4106999 - DNA, 25 bp, Homo sapien
gcctgcaggcctttcggactctgga

SEQ ID NO: 4107000 - DNA, 25 bp, Homo sapien
cggccgtgaataccccagcgggtgc

SEQ ID NO: 4107001 - DNA, 25 bp, Homo sapien
tccatgaccagagcggccgtgaata

SEQ ID NO: 4107002 - DNA, 25 bp, Homo sapien
accagagcggccgtgaataccccag

SEQ ID NO: 4107003 - DNA, 25 bp, Homo sapien
agagcggccgtgaataccccagcgg

SEQ ID NO: 4107004 - DNA, 25 bp, Homo sapien
gaatctaacctagaatcagagtgct

SEQ ID NO: 4107005 - DNA, 25 bp, Homo sapien
ggatgcagcagccaacagatgttta

SEQ ID NO: 4107006 - DNA, 25 bp, Homo sapien
tctcggagggcacagaccaaaatgt

SEQ ID NO: 4107007 - DNA, 25 bp, Homo sapien
taatagacacttgattaagactgcc

SEQ ID NO: 4107008 - DNA, 25 bp, Homo sapien
ctattaattaatgtggctctggccc

SEQ ID NO: 4107009 - DNA, 25 bp, Homo sapien
ctctggcccctgatacaccaattat

SEQ ID NO: 4107010 - DNA, 25 bp, Homo sapien
ttcaatgttatcaatcgtccacccc

SEQ ID NO: 4107011 - DNA, 25 bp, Homo sapien
cagactatccactctacaccggacc

SEQ ID NO: 4107012 - DNA, 25 bp, Homo sapien
actatccactctacaccggacctga

SEQ ID NO: 4107013 - DNA, 25 bp, Homo sapien
tatccactctacaccggacctgagc

SEQ ID NO: 4107014 - DNA, 25 bp, Homo sapien
ggcagacggcagacactcatgctct

SEQ ID NO: 4107015 - DNA, 25 bp, Homo sapien
ccccgctgcagacacattatccttt

SEQ ID NO: 4107016 - DNA, 25 bp, Homo sapien
tcaagacaacagagccccgctgcag

SEQ ID NO: 4107017 - DNA, 25 bp, Homo sapien
gccccgctgcagacacattatcctt

SEQ ID NO: 4107018 - DNA, 25 bp, Homo sapien
aagacaacagagccccgctgcagac

SEQ ID NO: 4107019 - DNA, 25 bp, Homo sapien
gtgctcaaatctgcagcccaaaccc

SEQ ID NO: 4107020 - DNA, 25 bp, Homo sapien
ttgactgagatagactgagtgcttg

SEQ ID NO: 4107021 - DNA, 25 bp, Homo sapien
gatagactgagtgcttgtgctcaaa

SEQ ID NO: 4107022 - DNA, 25 bp, Homo sapien
ctgagatagactgagtgcttgtgct

SEQ ID NO: 4107023 - DNA, 25 bp, Homo sapien
ttctcccaggcactcaagcaagcta

SEQ ID NO: 4107024 - DNA, 25 bp, Homo sapien
caaagtgcaaagcatggttctccca

SEQ ID NO: 4107025 - DNA, 25 bp, Homo sapien
caaaaagctagtggtaaggtcagcc

SEQ ID NO: 4107026 - DNA, 25 bp, Homo sapien
gcttaagtttctggaacgaaggcaa

SEQ ID NO: 4107027 - DNA, 25 bp, Homo sapien
gagagtttgccctgaatcttagctt

SEQ ID NO: 4107028 - DNA, 25 bp, Homo sapien
ttagcttcattatccagaaaagttg

SEQ ID NO: 4107029 - DNA, 25 bp, Homo sapien
agtggcctggatgtaagaatgtacc

SEQ ID NO: 4107030 - DNA, 25 bp, Homo sapien
cctagtctgatattagtggcctgga

SEQ ID NO: 4107031 - DNA, 25 bp, Homo sapien
tgcactcacgacagatgggtacaga

SEQ ID NO: 4107032 - DNA, 25 bp, Homo sapien
tgtgcactcacgacagatgggtaca

SEQ ID NO: 4107033 - DNA, 25 bp, Homo sapien
cactcacgacagatgggtacagagc

SEQ ID NO: 4107034 - DNA, 25 bp, Homo sapien
ctcacgacagatgggtacagagcaa

SEQ ID NO: 4107035 - DNA, 25 bp, Homo sapien
tgagtgcccgtgagtcctgcagtgc

SEQ ID NO: 4107036 - DNA, 25 bp, Homo sapien
tggtgagtgcccgtgagtcctgcag

SEQ ID NO: 4107037 - DNA, 25 bp, Homo sapien
ggtgagtgcccgtgagtcctgcagt

SEQ ID NO: 4107038 - DNA, 25 bp, Homo sapien
gtgagtgcccgtgagtcctgcagtg

SEQ ID NO: 4107039 - DNA, 25 bp, Homo sapien
acgagactgccagaacccctaaagg

SEQ ID NO: 4107040 - DNA, 25 bp, Homo sapien
ctgtccatgccacccgacagaaagg

SEQ ID NO: 4107041 - DNA, 25 bp, Homo sapien
gaatctgcccaattgtctgtccatg

SEQ ID NO: 4107042 - DNA, 25 bp, Homo sapien
gcagggatgtcacctgagctcattt

SEQ ID NO: 4107043 - DNA, 25 bp, Homo sapien
tccaaaagcccatactgtctctgtg

SEQ ID NO: 4107044 - DNA, 25 bp, Homo sapien
gcaagtagaaagctacagacaggct

SEQ ID NO: 4107045 - DNA, 25 bp, Homo sapien
caaacagcaatgaggcaaaacagac

SEQ ID NO: 4107046 - DNA, 25 bp, Homo sapien
gatctttggtgttaatcaggccact

SEQ ID NO: 4107047 - DNA, 25 bp, Homo sapien
ccagccagaacgaacaccaagtgca

SEQ ID NO: 4107048 - DNA, 25 bp, Homo sapien
ccaagtgcacactgggaatatcccc

SEQ ID NO: 4107049 - DNA, 25 bp, Homo sapien
gctgtgccccgtggtcagagaccat

SEQ ID NO: 4107050 - DNA, 25 bp, Homo sapien
cccgatctacctaaggagctgtgcc

SEQ ID NO: 4107051 - DNA, 25 bp, Homo sapien
gggtagtggctaatccatcctgctt

SEQ ID NO: 4107052 - DNA, 25 bp, Homo sapien
tgtgcgacagggtagtggctaatcc

SEQ ID NO: 4107053 - DNA, 25 bp, Homo sapien
aatccatcctgcttttgtcaaggca

SEQ ID NO: 4107054 - DNA, 25 bp, Homo sapien
tttgtcaaggcactggcaacacagc

SEQ ID NO: 4107055 - DNA, 25 bp, Homo sapien
acggctttgacctccgactgcacaa

SEQ ID NO: 4107056 - DNA, 25 bp, Homo sapien
gctttcttatgcctcgccgtcacgg

SEQ ID NO: 4107057 - DNA, 25 bp, Homo sapien
tccgactgcacaaccttcgccttca

SEQ ID NO: 4107058 - DNA, 25 bp, Homo sapien
tcacactcgcgttcctccagggctt

SEQ ID NO: 4107059 - DNA, 25 bp, Homo sapien
caaacagctggatccggtggttcct

SEQ ID NO: 4107060 - DNA, 25 bp, Homo sapien
tgtttaggaagacaccatcaggccc

SEQ ID NO: 4107061 - DNA, 25 bp, Homo sapien
tctcgggccagtaggatgtctagcg

SEQ ID NO: 4107062 - DNA, 25 bp, Homo sapien
ggaactggccctcgaacgtgaagat

SEQ ID NO: 4107063 - DNA, 25 bp, Homo sapien
tcagctttactacttgggtgcaaga

SEQ ID NO: 4107064 - DNA, 25 bp, Homo sapien
ttgtgcatatcatgccccacgcagg

SEQ ID NO: 4107065 - DNA, 25 bp, Homo sapien
catgcctgaaaaccctctctctgag

SEQ ID NO: 4107066 - DNA, 25 bp, Homo sapien
tcaagaaacgatgcagaagaggatg

SEQ ID NO: 4107067 - DNA, 25 bp, Homo sapien
gaaaagaaacccctagcactacaga

SEQ ID NO: 4107068 - DNA, 25 bp, Homo sapien
gatcctttatggtcaaaggccttgg

SEQ ID NO: 4107069 - DNA, 25 bp, Homo sapien
taaccatgaggtcctaaagcatggc

SEQ ID NO: 4107070 - DNA, 25 bp, Homo sapien
aacaacatgcactcgcgggtcaggg

SEQ ID NO: 4107071 - DNA, 25 bp, Homo sapien
tccttttctattgggataacagaaa

SEQ ID NO: 4107072 - DNA, 25 bp, Homo sapien
tccatttgttaatctgttctgctca

SEQ ID NO: 4107073 - DNA, 25 bp, Homo sapien
tctccttttctattgggataacaga

SEQ ID NO: 4107074 - DNA, 25 bp, Homo sapien
ctccttttctattgggataacagaa

SEQ ID NO: 4107075 - DNA, 25 bp, Homo sapien
ttcccaccctgtaacagcagctggg

SEQ ID NO: 4107076 - DNA, 25 bp, Homo sapien
tctacagtaaaaggagcttctaaca

SEQ ID NO: 4107077 - DNA, 25 bp, Homo sapien
tcagcaccaagttactccaaaatag

SEQ ID NO: 4107078 - DNA, 25 bp, Homo sapien
cattttggtcactcagaaaccctag

SEQ ID NO: 4107079 - DNA, 25 bp, Homo sapien
ttcagccatggagcgaaaatcttgg

SEQ ID NO: 4107080 - DNA, 25 bp, Homo sapien
aaatcttggcttttcgatcacatcc

SEQ ID NO: 4107081 - DNA, 25 bp, Homo sapien
ctagttactgttatgcaccaagaac

SEQ ID NO: 4107082 - DNA, 25 bp, Homo sapien
gatagttctagttgctctaagcctg

SEQ ID NO: 4107083 - DNA, 25 bp, Homo sapien
cagagaaagccgtagagctctggag

SEQ ID NO: 4107084 - DNA, 25 bp, Homo sapien
cttgccacaagtgaggtagaaactc

SEQ ID NO: 4107085 - DNA, 25 bp, Homo sapien
cctgtcagatgctaacatgaggtag

SEQ ID NO: 4107086 - DNA, 25 bp, Homo sapien
gcccttggccctatagaaaaccaga

SEQ ID NO: 4107087 - DNA, 25 bp, Homo sapien
gcctgcggcctgcaatagtaacatt

SEQ ID NO: 4107088 - DNA, 25 bp, Homo sapien
tggaccacagtgatacattcagaag

SEQ ID NO: 4107089 - DNA, 25 bp, Homo sapien
ccgagtcacatgttctgcagttaaa

SEQ ID NO: 4107090 - DNA, 25 bp, Homo sapien
tgggattcacattaccacggcagtg

SEQ ID NO: 4107091 - DNA, 25 bp, Homo sapien
tacatttttatcacatgtgcattcc

SEQ ID NO: 4107092 - DNA, 25 bp, Homo sapien
cctggcgtgctgctcttgtgtcagc

SEQ ID NO: 4107093 - DNA, 25 bp, Homo sapien
tgtgcattcctggttgcctggcgtg

SEQ ID NO: 4107094 - DNA, 25 bp, Homo sapien
gccatcaggaatactaggatactgc

SEQ ID NO: 4107095 - DNA, 25 bp, Homo sapien
catcaatgttgtggtgggtagctaa

SEQ ID NO: 4107096 - DNA, 25 bp, Homo sapien
gactggcctttagccagcgccttaa

SEQ ID NO: 4107097 - DNA, 25 bp, Homo sapien
gcgccttaaaactggttcaagacag

SEQ ID NO: 4107098 - DNA, 25 bp, Homo sapien
cagaggaggtccgaataaacagaca

SEQ ID NO: 4107099 - DNA, 25 bp, Homo sapien
tggcttcctgtgagcacgagttatc

SEQ ID NO: 4107100 - DNA, 25 bp, Homo sapien
gaagcacgatgctaagaaggacccg

SEQ ID NO: 4107101 - DNA, 25 bp, Homo sapien
tctgtgaggcaatgccaggcttgct

SEQ ID NO: 4107102 - DNA, 25 bp, Homo sapien
acccggtgcctttcaagggtgcgtg

SEQ ID NO: 4107103 - DNA, 25 bp, Homo sapien
tgaggggaagagcaaaggagatttc

SEQ ID NO: 4107104 - DNA, 25 bp, Homo sapien
ctaatgaggggaagagcaaaggaga

SEQ ID NO: 4107105 - DNA, 25 bp, Homo sapien
gaggggaagagcaaaggagatttct

SEQ ID NO: 4107106 - DNA, 25 bp, Homo sapien
aatgaggggaagagcaaaggagatt

SEQ ID NO: 4107107 - DNA, 25 bp, Homo sapien
tttttaactctacaggctcctcaag

SEQ ID NO: 4107108 - DNA, 25 bp, Homo sapien
ttttaactctacaggctcctcaagg

SEQ ID NO: 4107109 - DNA, 25 bp, Homo sapien
gtagccaaactggtgatgaccccat

SEQ ID NO: 4107110 - DNA, 25 bp, Homo sapien
cacgaagagcagatccgagatggca

SEQ ID NO: 4107111 - DNA, 25 bp, Homo sapien
tgctgcatagtagccccaaaaaggg

SEQ ID NO: 4107112 - DNA, 25 bp, Homo sapien
aaacaccgcgtgcacaattgccagg

SEQ ID NO: 4107113 - DNA, 25 bp, Homo sapien
ccaggaagggaggcgaacacagcca

SEQ ID NO: 4107114 - DNA, 25 bp, Homo sapien
aagggaggcgaacacagccactgac

SEQ ID NO: 4107115 - DNA, 25 bp, Homo sapien
aggaagggaggcgaacacagccact

SEQ ID NO: 4107116 - DNA, 25 bp, Homo sapien
gaagggaggcgaacacagccactga

SEQ ID NO: 4107117 - DNA, 25 bp, Homo sapien
tccaccagggtctctaggaagagca

SEQ ID NO: 4107118 - DNA, 25 bp, Homo sapien
tcagcagagtaaatttggaggagcc

SEQ ID NO: 4107119 - DNA, 25 bp, Homo sapien
ggagctgagaaccttccacgtcgtg

SEQ ID NO: 4107120 - DNA, 25 bp, Homo sapien
tatgttgtaaggtgtccagaaccca

SEQ ID NO: 4107121 - DNA, 25 bp, Homo sapien
tagttcacgtttggaaagcagacct

SEQ ID NO: 4107122 - DNA, 25 bp, Homo sapien
ccactgtgggtgtaagccttcctcc

SEQ ID NO: 4107123 - DNA, 25 bp, Homo sapien
cagcaaaaggtagcgatttactcca

SEQ ID NO: 4107124 - DNA, 25 bp, Homo sapien
gatgagaagctgtctttccactgtg

SEQ ID NO: 4107125 - DNA, 25 bp, Homo sapien
ttcaaaatgattaaggaggtattgt

SEQ ID NO: 4107126 - DNA, 25 bp, Homo sapien
tatttcaattgatagcaggcacttc

SEQ ID NO: 4107127 - DNA, 25 bp, Homo sapien
ttttatttcaattgatagcaggcac

SEQ ID NO: 4107128 - DNA, 25 bp, Homo sapien
tgattaaggaggtattgtcatactt

SEQ ID NO: 4107129 - DNA, 25 bp, Homo sapien
gaattggaagtctcccagattttgc

SEQ ID NO: 4107130 - DNA, 25 bp, Homo sapien
ctgtaaggacagagatagcaattta

SEQ ID NO: 4107131 - DNA, 25 bp, Homo sapien
ggttaactcagttgacagcttgcaa

SEQ ID NO: 4107132 - DNA, 25 bp, Homo sapien
gacagcatcaactttccctctttaa

SEQ ID NO: 4107133 - DNA, 25 bp, Homo sapien
tgcaagggcagacgcaacacagtgt

SEQ ID NO: 4107134 - DNA, 25 bp, Homo sapien
gaagcaagatccctgagttccccat

SEQ ID NO: 4107135 - DNA, 25 bp, Homo sapien
gggccacgtttccaatgtcaagctt

SEQ ID NO: 4107136 - DNA, 25 bp, Homo sapien
aaaggccctcgatagctccagtaag

SEQ ID NO: 4107137 - DNA, 25 bp, Homo sapien
tatcccagtgtgtaaaagatattct

SEQ ID NO: 4107138 - DNA, 25 bp, Homo sapien
ccccacctctgaatttctaataatt

SEQ ID NO: 4107139 - DNA, 25 bp, Homo sapien
aacctgtcccatctatattcctgaa

SEQ ID NO: 4107140 - DNA, 25 bp, Homo sapien
tattcctgaaatgacacatccttgc

SEQ ID NO: 4107141 - DNA, 25 bp, Homo sapien
gatgacttattcacaaggctgggca

SEQ ID NO: 4107142 - DNA, 25 bp, Homo sapien
gaatgcccggtatatgtgggtcccc

SEQ ID NO: 4107143 - DNA, 25 bp, Homo sapien
tcgtgagccggaagtgcctctgaaa

SEQ ID NO: 4107144 - DNA, 25 bp, Homo sapien
ccagtggatacaggtcagggagcaa

SEQ ID NO: 4107145 - DNA, 25 bp, Homo sapien
tgtatgatgatgaaagcctgtgtct

SEQ ID NO: 4107146 - DNA, 25 bp, Homo sapien
actatgtgctgtgacgttcgtggac

SEQ ID NO: 4107147 - DNA, 25 bp, Homo sapien
cagtgatgatccagaactatgtgct

SEQ ID NO: 4107148 - DNA, 25 bp, Homo sapien
tcgtggacaggccagttattggctc

SEQ ID NO: 4107149 - DNA, 25 bp, Homo sapien
tgtgatttgcgtcagctgcagagcc

SEQ ID NO: 4107150 - DNA, 25 bp, Homo sapien
ggacctgtcccaaaatatagagaaa

SEQ ID NO: 4107151 - DNA, 25 bp, Homo sapien
ttaacctcttatttctaagcaagcc

SEQ ID NO: 4107152 - DNA, 25 bp, Homo sapien
tgatggcttcagttctatttggacc

SEQ ID NO: 4107153 - DNA, 25 bp, Homo sapien
gccctctgttgtgcactttgaagat

SEQ ID NO: 4107154 - DNA, 25 bp, Homo sapien
tttccaatcataggagcacaatgcc

SEQ ID NO: 4107155 - DNA, 25 bp, Homo sapien
catgacttctgaggttggcaatgag

SEQ ID NO: 4107156 - DNA, 25 bp, Homo sapien
ctagcatacagagttcacggaggag

SEQ ID NO: 4107157 - DNA, 25 bp, Homo sapien
tatgctggccctctatgactgaagc

SEQ ID NO: 4107158 - DNA, 25 bp, Homo sapien
tatgactgaagctgacacagagccc

SEQ ID NO: 4107159 - DNA, 25 bp, Homo sapien
tggccctctatgactgaagctgaca

SEQ ID NO: 4107160 - DNA, 25 bp, Homo sapien
cactgcttgttatgctggccctcta

SEQ ID NO: 4107161 - DNA, 25 bp, Homo sapien
gctgtagtcatacaaaaagctaggt

SEQ ID NO: 4107162 - DNA, 25 bp, Homo sapien
tctgggtatggagcaggacccctct

SEQ ID NO: 4107163 - DNA, 25 bp, Homo sapien
tgaagtgggaaaccctcaaggcctg

SEQ ID NO: 4107164 - DNA, 25 bp, Homo sapien
caaggcctgcctcaacagattcttc

SEQ ID NO: 4107165 - DNA, 25 bp, Homo sapien
gctgtccatcttgatcccctctctg

SEQ ID NO: 4107166 - DNA, 25 bp, Homo sapien
aacaatgatgaactgtcttttaagt

SEQ ID NO: 4107167 - DNA, 25 bp, Homo sapien
tcaacaatgatgaactgtcttttaa

SEQ ID NO: 4107168 - DNA, 25 bp, Homo sapien
ctgtccatcttgatcccctctctgt

SEQ ID NO: 4107169 - DNA, 25 bp, Homo sapien
cagagttatactgaaggacctgaag

SEQ ID NO: 4107170 - DNA, 25 bp, Homo sapien
agagttatactgaaggacctgaaga

SEQ ID NO: 4107171 - DNA, 25 bp, Homo sapien
gttatactgaaggacctgaagacag

SEQ ID NO: 4107172 - DNA, 25 bp, Homo sapien
gagttatactgaaggacctgaagac

SEQ ID NO: 4107173 - DNA, 25 bp, Homo sapien
gtcactctgattggactgcagtggc

SEQ ID NO: 4107174 - DNA, 25 bp, Homo sapien
tgctctgtcactctgattggactgc

SEQ ID NO: 4107175 - DNA, 25 bp, Homo sapien
tctgtcactctgattggactgcagt

SEQ ID NO: 4107176 - DNA, 25 bp, Homo sapien
tttatagggatgggatctcattttg

SEQ ID NO: 4107177 - DNA, 25 bp, Homo sapien
cctgtggctgccatacctgaggccc

SEQ ID NO: 4107178 - DNA, 25 bp, Homo sapien
ctgtggctgccatacctgaggccca

SEQ ID NO: 4107179 - DNA, 25 bp, Homo sapien
ccctgtggctgccatacctgaggcc

SEQ ID NO: 4107180 - DNA, 25 bp, Homo sapien
tgatgtgagctcatcagtcttgtgc

SEQ ID NO: 4107181 - DNA, 25 bp, Homo sapien
aggaacaggtggacagggtcaatct

SEQ ID NO: 4107182 - DNA, 25 bp, Homo sapien
gctcatcagtcttgtgcagcgtcat

SEQ ID NO: 4107183 - DNA, 25 bp, Homo sapien
aggtggacagggtcaatctgtctga

SEQ ID NO: 4107184 - DNA, 25 bp, Homo sapien
tggttcccctaccccagtatgtaga

SEQ ID NO: 4107185 - DNA, 25 bp, Homo sapien
aactggggcacagttcaggagaaca

SEQ ID NO: 4107186 - DNA, 25 bp, Homo sapien
gggaaaggcagatcttaaccagtat

SEQ ID NO: 4107187 - DNA, 25 bp, Homo sapien
cagaaggcccgtaggaccttaggag

SEQ ID NO: 4107188 - DNA, 25 bp, Homo sapien
tttgcatcacacctgcggaaaggag

SEQ ID NO: 4107189 - DNA, 25 bp, Homo sapien
ggaaggacagcttcactcgctgcgt

SEQ ID NO: 4107190 - DNA, 25 bp, Homo sapien
agagtgggtagttgcaagctgctcc

SEQ ID NO: 4107191 - DNA, 25 bp, Homo sapien
gacaccgttgacttgtaagttacac

SEQ ID NO: 4107192 - DNA, 25 bp, Homo sapien
ccttgcagtgggaacattgggttat

SEQ ID NO: 4107193 - DNA, 25 bp, Homo sapien
cttgcagtgggaacattgggttatt

SEQ ID NO: 4107194 - DNA, 25 bp, Homo sapien
cccttgcagtgggaacattgggtta

SEQ ID NO: 4107195 - DNA, 25 bp, Homo sapien
ttgcagtgggaacattgggttattt

SEQ ID NO: 4107196 - DNA, 25 bp, Homo sapien
tacggggaggcattgctaggggaca

SEQ ID NO: 4107197 - DNA, 25 bp, Homo sapien
gggaggcattgctaggggacaggct

SEQ ID NO: 4107198 - DNA, 25 bp, Homo sapien
aggcattgctaggggacaggctggc

SEQ ID NO: 4107199 - DNA, 25 bp, Homo sapien
acggggaggcattgctaggggacag

SEQ ID NO: 4107200 - DNA, 25 bp, Homo sapien
agccgggaggctggtggtcatgccg

SEQ ID NO: 4107201 - DNA, 25 bp, Homo sapien
gggttcctggttcgcatcctccctc

SEQ ID NO: 4107202 - DNA, 25 bp, Homo sapien
tgcttctgggccctacgcgcggctt

SEQ ID NO: 4107203 - DNA, 25 bp, Homo sapien
ttagtcaagtgacgcgaagcggccg

SEQ ID NO: 4107204 - DNA, 25 bp, Homo sapien
tggtttccaaccttggccaattcac

SEQ ID NO: 4107205 - DNA, 25 bp, Homo sapien
ttggtttccaaccttggccaattca

SEQ ID NO: 4107206 - DNA, 25 bp, Homo sapien
cagctattcacaggctcagtcccac

SEQ ID NO: 4107207 - DNA, 25 bp, Homo sapien
caggctaaagtgcagcagctattca

SEQ ID NO: 4107208 - DNA, 25 bp, Homo sapien
aaaggaaagaggacggtgcgacgcg

SEQ ID NO: 4107209 - DNA, 25 bp, Homo sapien
aaggaaagaggacggtgcgacgcgg

SEQ ID NO: 4107210 - DNA, 25 bp, Homo sapien
gaaaggaaagaggacggtgcgacgc

SEQ ID NO: 4107211 - DNA, 25 bp, Homo sapien
tagcagcgccgcggccccccggcgc

SEQ ID NO: 4107212 - DNA, 25 bp, Homo sapien
ctagcagcgccgcggccccccggcg

SEQ ID NO: 4107213 - DNA, 25 bp, Homo sapien
agcagcgccgcggccccccggcgcc

SEQ ID NO: 4107214 - DNA, 25 bp, Homo sapien
gcagcgccgcggccccccggcgccc

SEQ ID NO: 4107215 - DNA, 25 bp, Homo sapien
tgcggaagctgtagcgttcgtattg

SEQ ID NO: 4107216 - DNA, 25 bp, Homo sapien
tcgagcggcatcagctcgtcccgtg

SEQ ID NO: 4107217 - DNA, 25 bp, Homo sapien
tcagctcgtcccgtgggaagctgcg

SEQ ID NO: 4107218 - DNA, 25 bp, Homo sapien
tgtagcgttcgtattgggcgcgccc

SEQ ID NO: 4107219 - DNA, 25 bp, Homo sapien
cagtgctcgccgctgtacttgtcca

SEQ ID NO: 4107220 - DNA, 25 bp, Homo sapien
cttgtccagcgcgtgccggtaggcc

SEQ ID NO: 4107221 - DNA, 25 bp, Homo sapien
tgtacttgtccagcgcgtgccggta

SEQ ID NO: 4107222 - DNA, 25 bp, Homo sapien
gccgctgtacttgtccagcgcgtgc

SEQ ID NO: 4107223 - DNA, 25 bp, Homo sapien
gcagccgcaggctgatctccaggta

SEQ ID NO: 4107224 - DNA, 25 bp, Homo sapien
gcggtgcagccgcaggctgatctcc

SEQ ID NO: 4107225 - DNA, 25 bp, Homo sapien
agccgcaggctgatctccaggtagc

SEQ ID NO: 4107226 - DNA, 25 bp, Homo sapien
ggtgcagccgcaggctgatctccag

SEQ ID NO: 4107227 - DNA, 25 bp, Homo sapien
ctgcggcgcggcgctgcagttgcgg

SEQ ID NO: 4107228 - DNA, 25 bp, Homo sapien
ggcgctgcagttgcggtggcagaag

SEQ ID NO: 4107229 - DNA, 25 bp, Homo sapien
gcgcggcgctgcagttgcggtggca

SEQ ID NO: 4107230 - DNA, 25 bp, Homo sapien
cggcgcggcgctgcagttgcggtgg

SEQ ID NO: 4107231 - DNA, 25 bp, Homo sapien
ctgggactggcggaaggctggcagg

SEQ ID NO: 4107232 - DNA, 25 bp, Homo sapien
gcttgaggcagtgcgcgcggcgcag

SEQ ID NO: 4107233 - DNA, 25 bp, Homo sapien
ctgcttgcagcgcttgaggcagtgc

SEQ ID NO: 4107234 - DNA, 25 bp, Homo sapien
ggcaggccctgcttgcagcgcttga

SEQ ID NO: 4107235 - DNA, 25 bp, Homo sapien
ggctcgcggcgctggaagtccgcca

SEQ ID NO: 4107236 - DNA, 25 bp, Homo sapien
gcaggaacttgtagggctcgcggcg

SEQ ID NO: 4107237 - DNA, 25 bp, Homo sapien
ggaacttgtagggctcgcggcgctg

SEQ ID NO: 4107238 - DNA, 25 bp, Homo sapien
gctcgcggcgctggaagtccgccag

SEQ ID NO: 4107239 - DNA, 25 bp, Homo sapien
tctctgttgggctagttctgggttc

SEQ ID NO: 4107240 - DNA, 25 bp, Homo sapien
caatctcagtggtacgtctatctcc

SEQ ID NO: 4107241 - DNA, 25 bp, Homo sapien
taaacgtcatattacaagagcacca

SEQ ID NO: 4107242 - DNA, 25 bp, Homo sapien
tggcctcaattaagagcctctctgt

SEQ ID NO: 4107243 - DNA, 25 bp, Homo sapien
catcatttcgtcatcaggatgcttc

SEQ ID NO: 4107244 - DNA, 25 bp, Homo sapien
ccaggcaggctcttataatatgcca

SEQ ID NO: 4107245 - DNA, 25 bp, Homo sapien
cttcagtagaaaggtgtgagcagcg

SEQ ID NO: 4107246 - DNA, 25 bp, Homo sapien
ttaatgtagtcctcggcaccaggca

SEQ ID NO: 4107247 - DNA, 25 bp, Homo sapien
tctttaacagtccaggttgccacta

SEQ ID NO: 4107248 - DNA, 25 bp, Homo sapien
gccactaactgccacataaaaatcc

SEQ ID NO: 4107249 - DNA, 25 bp, Homo sapien
acatttctttaacagtccaggttgc

SEQ ID NO: 4107250 - DNA, 25 bp, Homo sapien
gctgcttatggagagacatttcttt

SEQ ID NO: 4107251 - DNA, 25 bp, Homo sapien
cacatgccagatagtggaaacttca

SEQ ID NO: 4107252 - DNA, 25 bp, Homo sapien
gcagttaaacagaagtgccaccatg

SEQ ID NO: 4107253 - DNA, 25 bp, Homo sapien
cactagttactaggaagggcaacca

SEQ ID NO: 4107254 - DNA, 25 bp, Homo sapien
aggcaaacagggagccggcacttca

SEQ ID NO: 4107255 - DNA, 25 bp, Homo sapien
cagttctcaccgttgtatgcccgca

SEQ ID NO: 4107256 - DNA, 25 bp, Homo sapien
gcgagacactcgtaaaaggctttga

SEQ ID NO: 4107257 - DNA, 25 bp, Homo sapien
gccagctccatgtctgtgatggatg

SEQ ID NO: 4107258 - DNA, 25 bp, Homo sapien
ctgctatggaaaggtagaaatcctt

SEQ ID NO: 4107259 - DNA, 25 bp, Homo sapien
cacaaatttctcaaccggatagcct

SEQ ID NO: 4107260 - DNA, 25 bp, Homo sapien
aaccggatagcctcctataactggg

SEQ ID NO: 4107261 - DNA, 25 bp, Homo sapien
taactggggtgaggttctcttcaca

SEQ ID NO: 4107262 - DNA, 25 bp, Homo sapien
gcaagtaatgatacatggtagccac

SEQ ID NO: 4107263 - DNA, 25 bp, Homo sapien
gacagtaccttcagcatagggattt

SEQ ID NO: 4107264 - DNA, 25 bp, Homo sapien
ctgtgacagtaccttcagcataggg

SEQ ID NO: 4107265 - DNA, 25 bp, Homo sapien
catagggattttgcagggcttggga

SEQ ID NO: 4107266 - DNA, 25 bp, Homo sapien
gtgacagtaccttcagcatagggat

SEQ ID NO: 4107267 - DNA, 25 bp, Homo sapien
gatttggaaagtcgcctagttttgc

SEQ ID NO: 4107268 - DNA, 25 bp, Homo sapien
aagtcgcctagttttgccacctcct

SEQ ID NO: 4107269 - DNA, 25 bp, Homo sapien
tggaaagtcgcctagttttgccacc

SEQ ID NO: 4107270 - DNA, 25 bp, Homo sapien
gaaagtcgcctagttttgccacctc

SEQ ID NO: 4107271 - DNA, 25 bp, Homo sapien
agaggccccaagtgtccctgtggta

SEQ ID NO: 4107272 - DNA, 25 bp, Homo sapien
gctgcatgaccttgtcattctgatc

SEQ ID NO: 4107273 - DNA, 25 bp, Homo sapien
ctggaagtgctcatccgagaggccc

SEQ ID NO: 4107274 - DNA, 25 bp, Homo sapien
tgatcaaagagcagatagctgactg

SEQ ID NO: 4107275 - DNA, 25 bp, Homo sapien
gctaagtggtgagtttgcctatcaa

SEQ ID NO: 4107276 - DNA, 25 bp, Homo sapien
cctcagtggaagacaaacttatgaa

SEQ ID NO: 4107277 - DNA, 25 bp, Homo sapien
aatgatggtccatccgcaaaagaga

SEQ ID NO: 4107278 - DNA, 25 bp, Homo sapien
gagactaccagggagctgttaaagg

SEQ ID NO: 4107279 - DNA, 25 bp, Homo sapien
ttccttagcaaagtcatacagctcc

SEQ ID NO: 4107280 - DNA, 25 bp, Homo sapien
ccttagcaaagtcatacagctcctt

SEQ ID NO: 4107281 - DNA, 25 bp, Homo sapien
ggagtgtggtcacattaaagaactg

SEQ ID NO: 4107282 - DNA, 25 bp, Homo sapien
tctggagtgtggtcacattaaagaa

SEQ ID NO: 4107283 - DNA, 25 bp, Homo sapien
taaaacgggtataggaagagcagac

SEQ ID NO: 4107284 - DNA, 25 bp, Homo sapien
tagcttgcctctagataactgggaa

SEQ ID NO: 4107285 - DNA, 25 bp, Homo sapien
tctataaagcgaaggatcagaccag

SEQ ID NO: 4107286 - DNA, 25 bp, Homo sapien
tacagtgatgcaaaaatggcctaac

SEQ ID NO: 4107287 - DNA, 25 bp, Homo sapien
gcagtcttgacagggaggttacaca

SEQ ID NO: 4107288 - DNA, 25 bp, Homo sapien
cactagtaataagtgcccgaggcag

SEQ ID NO: 4107289 - DNA, 25 bp, Homo sapien
tgcgagatccgccaacatgctgtgt

SEQ ID NO: 4107290 - DNA, 25 bp, Homo sapien
tcctggcaacgaagaacgaatgaca

SEQ ID NO: 4107291 - DNA, 25 bp, Homo sapien
gttccaagaggtcatccacatattc

SEQ ID NO: 4107292 - DNA, 25 bp, Homo sapien
cagttccaagaggtcatccacatat

SEQ ID NO: 4107293 - DNA, 25 bp, Homo sapien
ttccaagaggtcatccacatattcc

SEQ ID NO: 4107294 - DNA, 25 bp, Homo sapien
agttccaagaggtcatccacatatt

SEQ ID NO: 4107295 - DNA, 25 bp, Homo sapien
tgaagataggaaaggcaggctcacc

SEQ ID NO: 4107296 - DNA, 25 bp, Homo sapien
ctgtgtttcctgaacgccaagagga

SEQ ID NO: 4107297 - DNA, 25 bp, Homo sapien
ctgaggtatcaacagcctgggctgt

SEQ ID NO: 4107298 - DNA, 25 bp, Homo sapien
aggctcacccctgatgacatgcagt

SEQ ID NO: 4107299 - DNA, 25 bp, Homo sapien
ggttgcagtgagctgagaacgtgcc

SEQ ID NO: 4107300 - DNA, 25 bp, Homo sapien
caggtactcgggaggctgatgcagc

SEQ ID NO: 4107301 - DNA, 25 bp, Homo sapien
gaattgcttgaacccaagaggcgga

SEQ ID NO: 4107302 - DNA, 25 bp, Homo sapien
aacgtgccattgcactccagcctgg

SEQ ID NO: 4107303 - DNA, 25 bp, Homo sapien
ggccaaggcagatggatcatctgaa

SEQ ID NO: 4107304 - DNA, 25 bp, Homo sapien
ggcagatggatcatctgaagtcaag

SEQ ID NO: 4107305 - DNA, 25 bp, Homo sapien
aaggcagatggatcatctgaagtca

SEQ ID NO: 4107306 - DNA, 25 bp, Homo sapien
ccaaggcagatggatcatctgaagt

SEQ ID NO: 4107307 - DNA, 25 bp, Homo sapien
tcctcaaatgggatcggccaaccgt

SEQ ID NO: 4107308 - DNA, 25 bp, Homo sapien
gactgcccttcaaaccaaaatggta

SEQ ID NO: 4107309 - DNA, 25 bp, Homo sapien
tatggcagctagaatgacccttgca

SEQ ID NO: 4107310 - DNA, 25 bp, Homo sapien
tctcacttagcagaagccaaggccc

SEQ ID NO: 4107311 - DNA, 25 bp, Homo sapien
tactcagagacaatctcagtggccc

SEQ ID NO: 4107312 - DNA, 25 bp, Homo sapien
gggcccaactacacaagtggcttat

SEQ ID NO: 4107313 - DNA, 25 bp, Homo sapien
cagacctgacctgagagaactctcc

SEQ ID NO: 4107314 - DNA, 25 bp, Homo sapien
tattccttcccaggctattgcagga

SEQ ID NO: 4107315 - DNA, 25 bp, Homo sapien
gtaataacactgactcctcgggcca

SEQ ID NO: 4107316 - DNA, 25 bp, Homo sapien
gcagtgggtcagtcaaggcaaagcc

SEQ ID NO: 4107317 - DNA, 25 bp, Homo sapien
tacagattttgtggacgtgggcaac

SEQ ID NO: 4107318 - DNA, 25 bp, Homo sapien
tatttacagactcaggaatcccgga

SEQ ID NO: 4107319 - DNA, 25 bp, Homo sapien
aaaactctggaatctatcttgtatc

SEQ ID NO: 4107320 - DNA, 25 bp, Homo sapien
tacataccacactaacccaaagagg

SEQ ID NO: 4107321 - DNA, 25 bp, Homo sapien
ggctgccaccctaaagtgggagata

SEQ ID NO: 4107322 - DNA, 25 bp, Homo sapien
gcaacggtctttggagtttggccta

SEQ ID NO: 4107323 - DNA, 25 bp, Homo sapien
tacggaagggcagctagcaaatcca

SEQ ID NO: 4107324 - DNA, 25 bp, Homo sapien
tcttgttggcatgtcccagtggcaa

SEQ ID NO: 4107325 - DNA, 25 bp, Homo sapien
gaccacggtatactctgctagggca

SEQ ID NO: 4107326 - DNA, 25 bp, Homo sapien
gctcagtaataggaaaggccctgca

SEQ ID NO: 4107327 - DNA, 25 bp, Homo sapien
tttcctctcagaagcagtggcctag

SEQ ID NO: 4107328 - DNA, 25 bp, Homo sapien
tttcagagggccgaacaccaggtta

SEQ ID NO: 4107329 - DNA, 25 bp, Homo sapien
caccaggttatcaagtatgggcaca

SEQ ID NO: 4107330 - DNA, 25 bp, Homo sapien
gctgagggcagatgaaccaagagcc

SEQ ID NO: 4107331 - DNA, 25 bp, Homo sapien
tccatccactttgcgtctctctagg

SEQ ID NO: 4107332 - DNA, 25 bp, Homo sapien
tttcagattctgtcaggaagaagca

SEQ ID NO: 4107333 - DNA, 25 bp, Homo sapien
tcccttgcacaatgtgaagtcttgc

SEQ ID NO: 4107334 - DNA, 25 bp, Homo sapien
tctctaggatttgctgactcccagg

SEQ ID NO: 4107335 - DNA, 25 bp, Homo sapien
aagggtttcagataactgcttgtcc

SEQ ID NO: 4107336 - DNA, 25 bp, Homo sapien
tgtggcaagggtttcagataactgc

SEQ ID NO: 4107337 - DNA, 25 bp, Homo sapien
catctgaatttgtggcaagggtttc

SEQ ID NO: 4107338 - DNA, 25 bp, Homo sapien
gataactgcttgtcccgaattgcca

SEQ ID NO: 4107339 - DNA, 25 bp, Homo sapien
tgatgtccctcacctgacagattac

SEQ ID NO: 4107340 - DNA, 25 bp, Homo sapien
cctctcagtctgatcaccttgatgt

SEQ ID NO: 4107341 - DNA, 25 bp, Homo sapien
aaaaaacgttatacaggtaatgcat

SEQ ID NO: 4107342 - DNA, 25 bp, Homo sapien
tctcccacttcgtatctggtccatc

SEQ ID NO: 4107343 - DNA, 25 bp, Homo sapien
gcgagcacgtgacccgcaggggcgg

SEQ ID NO: 4107344 - DNA, 25 bp, Homo sapien
gaggcggccattggtggtcggcgag

SEQ ID NO: 4107345 - DNA, 25 bp, Homo sapien
ctcggaggcggccattggtggtcgg

SEQ ID NO: 4107346 - DNA, 25 bp, Homo sapien
gccattggtggtcggcgagcacgtg

SEQ ID NO: 4107347 - DNA, 25 bp, Homo sapien
cggcgacgcccgttgtcctggtgac

SEQ ID NO: 4107348 - DNA, 25 bp, Homo sapien
ccggcgacgcccgttgtcctggtga

SEQ ID NO: 4107349 - DNA, 25 bp, Homo sapien
cgccggcgacgcccgttgtcctggt

SEQ ID NO: 4107350 - DNA, 25 bp, Homo sapien
ggcgccggcgacgcccgttgtcctg

SEQ ID NO: 4107351 - DNA, 25 bp, Homo sapien
gcgagcgagcccacagcccgaagtc

SEQ ID NO: 4107352 - DNA, 25 bp, Homo sapien
ggccgaagagccgcgagcgagccca

SEQ ID NO: 4107353 - DNA, 25 bp, Homo sapien
cgaagagccgcgagcgagcccacag

SEQ ID NO: 4107354 - DNA, 25 bp, Homo sapien
agcgagcccacagcccgaagtcaca

SEQ ID NO: 4107355 - DNA, 25 bp, Homo sapien
cccagcatccgaactcctattccaa

SEQ ID NO: 4107356 - DNA, 25 bp, Homo sapien
attccaatgtactaattgaaggccc

SEQ ID NO: 4107357 - DNA, 25 bp, Homo sapien
cctattccaatgtactaattgaagg

SEQ ID NO: 4107358 - DNA, 25 bp, Homo sapien
cagcaggacccttcttagctctctt

SEQ ID NO: 4107359 - DNA, 25 bp, Homo sapien
ctttttgttaataaggccttcatca

SEQ ID NO: 4107360 - DNA, 25 bp, Homo sapien
tgttaataaggccttcatcattgtt

SEQ ID NO: 4107361 - DNA, 25 bp, Homo sapien
aaggccttcatcattgtttgagaaa

SEQ ID NO: 4107362 - DNA, 25 bp, Homo sapien
ataaggccttcatcattgtttgaga

SEQ ID NO: 4107363 - DNA, 25 bp, Homo sapien
atttaacaacaagctgaacagcatt

SEQ ID NO: 4107364 - DNA, 25 bp, Homo sapien
tctggattagaccaagtaaaattta

SEQ ID NO: 4107365 - DNA, 25 bp, Homo sapien
ttagtacattctggattagaccaag

SEQ ID NO: 4107366 - DNA, 25 bp, Homo sapien
tacattctggattagaccaagtaaa

SEQ ID NO: 4107367 - DNA, 25 bp, Homo sapien
tacaaaaagaatccagaccaatgct

SEQ ID NO: 4107368 - DNA, 25 bp, Homo sapien
gaatccagaccaatgctatgtacat

SEQ ID NO: 4107369 - DNA, 25 bp, Homo sapien
aaaagaatccagaccaatgctatgt

SEQ ID NO: 4107370 - DNA, 25 bp, Homo sapien
cacattacaaaaagaatccagacca

SEQ ID NO: 4107371 - DNA, 25 bp, Homo sapien
cagaggcacaacaccatgccagcaa

SEQ ID NO: 4107372 - DNA, 25 bp, Homo sapien
acagaggcacaacaccatgccagca

SEQ ID NO: 4107373 - DNA, 25 bp, Homo sapien
gaggcacaacaccatgccagcaaat

SEQ ID NO: 4107374 - DNA, 25 bp, Homo sapien
ggcacaacaccatgccagcaaattt

SEQ ID NO: 4107375 - DNA, 25 bp, Homo sapien
tcatcatgttgtcatgtataccttg

SEQ ID NO: 4107376 - DNA, 25 bp, Homo sapien
gttataagattagttctgaggatct

SEQ ID NO: 4107377 - DNA, 25 bp, Homo sapien
taaagattagatcatcatcagagtt

SEQ ID NO: 4107378 - DNA, 25 bp, Homo sapien
catatattaaatcatcatgttgtca

SEQ ID NO: 4107379 - DNA, 25 bp, Homo sapien
attcagacaagggtacttggcagac

SEQ ID NO: 4107380 - DNA, 25 bp, Homo sapien
tttcacatgtaagaacaactgacat

SEQ ID NO: 4107381 - DNA, 25 bp, Homo sapien
gaattgagtatgtcacttcaaggaa

SEQ ID NO: 4107382 - DNA, 25 bp, Homo sapien
tgtttgcagtgcaagctaaactagc

SEQ ID NO: 4107383 - DNA, 25 bp, Homo sapien
taccttagcactaatcaagaaagtg

SEQ ID NO: 4107384 - DNA, 25 bp, Homo sapien
taaaactaccttagcactaatcaag

SEQ ID NO: 4107385 - DNA, 25 bp, Homo sapien
ctaatcaagaaagtgacaccatatc

SEQ ID NO: 4107386 - DNA, 25 bp, Homo sapien
tagcactaatcaagaaagtgacacc

SEQ ID NO: 4107387 - DNA, 25 bp, Homo sapien
taattggactatctgggtcggggga

SEQ ID NO: 4107388 - DNA, 25 bp, Homo sapien
tttaatgtctatttctctggtgatt

SEQ ID NO: 4107389 - DNA, 25 bp, Homo sapien
ccagagccctgagaagaaacaggga

SEQ ID NO: 4107390 - DNA, 25 bp, Homo sapien
gagccctgagaagaaacagggattt

SEQ ID NO: 4107391 - DNA, 25 bp, Homo sapien
cagagccctgagaagaaacagggat

SEQ ID NO: 4107392 - DNA, 25 bp, Homo sapien
gccctgagaagaaacagggatttct

SEQ ID NO: 4107393 - DNA, 25 bp, Homo sapien
gcattgaaagctcagtgactagatc

SEQ ID NO: 4107394 - DNA, 25 bp, Homo sapien
taagataggcaatttaaatacttcc

SEQ ID NO: 4107395 - DNA, 25 bp, Homo sapien
cactaaagaaaagtctcatccactg

SEQ ID NO: 4107396 - DNA, 25 bp, Homo sapien
taagagctgtaaaatggtgacattc

SEQ ID NO: 4107397 - DNA, 25 bp, Homo sapien
tttctaatcacagtactaccctcca

SEQ ID NO: 4107398 - DNA, 25 bp, Homo sapien
tttcttctaagtgtaggcaccatcc

SEQ ID NO: 4107399 - DNA, 25 bp, Homo sapien
taatcacagtactaccctccatttc

SEQ ID NO: 4107400 - DNA, 25 bp, Homo sapien
tctaagtgtaggcaccatcctgcca

SEQ ID NO: 4107401 - DNA, 25 bp, Homo sapien
aaacagccgtgtgcgcctcagcact

SEQ ID NO: 4107402 - DNA, 25 bp, Homo sapien
gagcaaacagccgtgtgcgcctcag

SEQ ID NO: 4107403 - DNA, 25 bp, Homo sapien
ccgtgtgcgcctcagcactgcagag

SEQ ID NO: 4107404 - DNA, 25 bp, Homo sapien
gtgagcaaacagccgtgtgcgcctc

SEQ ID NO: 4107405 - DNA, 25 bp, Homo sapien
gtaatgccttagaggaagcagtagc

SEQ ID NO: 4107406 - DNA, 25 bp, Homo sapien
gcctcgacattctggcagtcaagga

SEQ ID NO: 4107407 - DNA, 25 bp, Homo sapien
gactgagtgaagcctcgacattctg

SEQ ID NO: 4107408 - DNA, 25 bp, Homo sapien
tcttggttggcatcagtaatgcctt

SEQ ID NO: 4107409 - DNA, 25 bp, Homo sapien
tactatatccaagaaggaaaatatt

SEQ ID NO: 4107410 - DNA, 25 bp, Homo sapien
caaagttactatatccaagaaggaa

SEQ ID NO: 4107411 - DNA, 25 bp, Homo sapien
tgtgcacatcggcacaaagttacta

SEQ ID NO: 4107412 - DNA, 25 bp, Homo sapien
tcggcacaaagttactatatccaag

SEQ ID NO: 4107413 - DNA, 25 bp, Homo sapien
agttgcttccatccagggctaagat

SEQ ID NO: 4107414 - DNA, 25 bp, Homo sapien
gttgcttccatccagggctaagatg

SEQ ID NO: 4107415 - DNA, 25 bp, Homo sapien
cagttgcttccatccagggctaaga

SEQ ID NO: 4107416 - DNA, 25 bp, Homo sapien
ccagttgcttccatccagggctaag

SEQ ID NO: 4107417 - DNA, 25 bp, Homo sapien
tgtaagtattgtgctccactggttt

SEQ ID NO: 4107418 - DNA, 25 bp, Homo sapien
ggtttaagatgagaaccagagactc

SEQ ID NO: 4107419 - DNA, 25 bp, Homo sapien
agtattgtgctccactggtttaaga

SEQ ID NO: 4107420 - DNA, 25 bp, Homo sapien
aagatgagaaccagagactctcagg

SEQ ID NO: 4107421 - DNA, 25 bp, Homo sapien
cgcttcgagatattttccaccactc

SEQ ID NO: 4107422 - DNA, 25 bp, Homo sapien
gcttcgagatattttccaccactcg

SEQ ID NO: 4107423 - DNA, 25 bp, Homo sapien
cttcgagatattttccaccactcga

SEQ ID NO: 4107424 - DNA, 25 bp, Homo sapien
aacaccaatgcagcctcgcaagctg

SEQ ID NO: 4107425 - DNA, 25 bp, Homo sapien
aatgcagcctcgcaagctgagcttc

SEQ ID NO: 4107426 - DNA, 25 bp, Homo sapien
aggaggaatccccaacaccaatgca

SEQ ID NO: 4107427 - DNA, 25 bp, Homo sapien
tcaaggaggaatccccaacaccaat

SEQ ID NO: 4107428 - DNA, 25 bp, Homo sapien
tgagaatagaggcctagctccctgc

SEQ ID NO: 4107429 - DNA, 25 bp, Homo sapien
agaatagaggcctagctccctgctc

SEQ ID NO: 4107430 - DNA, 25 bp, Homo sapien
gagaatagaggcctagctccctgct

SEQ ID NO: 4107431 - DNA, 25 bp, Homo sapien
cctttacccacagcttggtgagtca

SEQ ID NO: 4107432 - DNA, 25 bp, Homo sapien
ctttacccacagcttggtgagtcat

SEQ ID NO: 4107433 - DNA, 25 bp, Homo sapien
tcctttacccacagcttggtgagtc

SEQ ID NO: 4107434 - DNA, 25 bp, Homo sapien
ctcctttacccacagcttggtgagt

SEQ ID NO: 4107435 - DNA, 25 bp, Homo sapien
attttaaagctccctgcaagttgct

SEQ ID NO: 4107436 - DNA, 25 bp, Homo sapien
aaacattttaaagctccctgcaagt

SEQ ID NO: 4107437 - DNA, 25 bp, Homo sapien
aatgttcaatgtttcggcagttctg

SEQ ID NO: 4107438 - DNA, 25 bp, Homo sapien
ccattgaggttcaaatgttcaatgt

SEQ ID NO: 4107439 - DNA, 25 bp, Homo sapien
tccattgaggttcaaatgttcaatg

SEQ ID NO: 4107440 - DNA, 25 bp, Homo sapien
caatgtttcggcagttctgtgcaaa

SEQ ID NO: 4107441 - DNA, 25 bp, Homo sapien
gctgtttgtaatagacacacaggag

SEQ ID NO: 4107442 - DNA, 25 bp, Homo sapien
agatccagatgtttcagcttggaac

SEQ ID NO: 4107443 - DNA, 25 bp, Homo sapien
gatccagatgtttcagcttggaaca

SEQ ID NO: 4107444 - DNA, 25 bp, Homo sapien
gatccccttcaaggagctgtttgta

SEQ ID NO: 4107445 - DNA, 25 bp, Homo sapien
tcaggtactccaggtttcggcagcc

SEQ ID NO: 4107446 - DNA, 25 bp, Homo sapien
tcacaccaagagaggttcaggtact

SEQ ID NO: 4107447 - DNA, 25 bp, Homo sapien
gatgccatccttcgtgatctgatca

SEQ ID NO: 4107448 - DNA, 25 bp, Homo sapien
gggctttcaggcctcgacaacctcg

SEQ ID NO: 4107449 - DNA, 25 bp, Homo sapien
caagctcatggcagtaattctgaat

SEQ ID NO: 4107450 - DNA, 25 bp, Homo sapien
aagctcatggcagtaattctgaatg

SEQ ID NO: 4107451 - DNA, 25 bp, Homo sapien
ctcatggcagtaattctgaatgtgt

SEQ ID NO: 4107452 - DNA, 25 bp, Homo sapien
gctcatggcagtaattctgaatgtg

SEQ ID NO: 4107453 - DNA, 25 bp, Homo sapien
tcgcggacagttcaaacccagggct

SEQ ID NO: 4107454 - DNA, 25 bp, Homo sapien
ggtgacagcccctgcatatctgcac

SEQ ID NO: 4107455 - DNA, 25 bp, Homo sapien
gaggttgctgcaacccgaaaggcag

SEQ ID NO: 4107456 - DNA, 25 bp, Homo sapien
agagagcctgtagccggtgacagcc

SEQ ID NO: 4107457 - DNA, 25 bp, Homo sapien
aaacctgcgtcagtcaaatgggagc

SEQ ID NO: 4107458 - DNA, 25 bp, Homo sapien
ggagcatcgggcagcctccaaaatt

SEQ ID NO: 4107459 - DNA, 25 bp, Homo sapien
taaaagtgtaaaacctgcgtcagtc

SEQ ID NO: 4107460 - DNA, 25 bp, Homo sapien
agtcaaatgggagcatcgggcagcc

SEQ ID NO: 4107461 - DNA, 25 bp, Homo sapien
caggatgcattcttcaagatccatc

SEQ ID NO: 4107462 - DNA, 25 bp, Homo sapien
ccatcttctccaattcgtggcaatt

SEQ ID NO: 4107463 - DNA, 25 bp, Homo sapien
gatccatcttctccaattcgtggca

SEQ ID NO: 4107464 - DNA, 25 bp, Homo sapien
tgcattcttcaagatccatcttctc

SEQ ID NO: 4107465 - DNA, 25 bp, Homo sapien
ttgcagtttaggacagtgaatggag

SEQ ID NO: 4107466 - DNA, 25 bp, Homo sapien
gctggatgagtgtgctgtcggttat

SEQ ID NO: 4107467 - DNA, 25 bp, Homo sapien
agtttaggacagtgaatggagagct

SEQ ID NO: 4107468 - DNA, 25 bp, Homo sapien
agctggatgagtgtgctgtcggtta

SEQ ID NO: 4107469 - DNA, 25 bp, Homo sapien
aaacagcttcttgttgtggtgggag

SEQ ID NO: 4107470 - DNA, 25 bp, Homo sapien
gcgcatgtttgtaatccccccgcaa

SEQ ID NO: 4107471 - DNA, 25 bp, Homo sapien
ggcgcatgtttgtaatccccccgca

SEQ ID NO: 4107472 - DNA, 25 bp, Homo sapien
catgtttgtaatccccccgcaaggc

SEQ ID NO: 4107473 - DNA, 25 bp, Homo sapien
gtggcgcatgtttgtaatccccccg

SEQ ID NO: 4107474 - DNA, 25 bp, Homo sapien
tgttacagatacttgcttctatgtt

SEQ ID NO: 4107475 - DNA, 25 bp, Homo sapien
gtgtctctggagtaaaccctgcttg

SEQ ID NO: 4107476 - DNA, 25 bp, Homo sapien
atattgctacattctatttgctaat

SEQ ID NO: 4107477 - DNA, 25 bp, Homo sapien
ccctgcttggccatggtattataat

SEQ ID NO: 4107478 - DNA, 25 bp, Homo sapien
ctgcctcagtcatgcatgcgccacc

SEQ ID NO: 4107479 - DNA, 25 bp, Homo sapien
tcctgcctcagtcatgcatgcgcca

SEQ ID NO: 4107480 - DNA, 25 bp, Homo sapien
tctcctgcctcagtcatgcatgcgc

SEQ ID NO: 4107481 - DNA, 25 bp, Homo sapien
ctcctgcctcagtcatgcatgcgcc

SEQ ID NO: 4107482 - DNA, 25 bp, Homo sapien
caaagagtttgttgtgtgcaaggcc

SEQ ID NO: 4107483 - DNA, 25 bp, Homo sapien
ggtaagggccagatcacagagttgt

SEQ ID NO: 4107484 - DNA, 25 bp, Homo sapien
aattgcacaaatagctgagacccag

SEQ ID NO: 4107485 - DNA, 25 bp, Homo sapien
ccccacgtgtgcaatgatgagtaaa

SEQ ID NO: 4107486 - DNA, 25 bp, Homo sapien
tgcacgggtaacctgctggcagtcg

SEQ ID NO: 4107487 - DNA, 25 bp, Homo sapien
tgaggaggcagttgtccaactccag

SEQ ID NO: 4107488 - DNA, 25 bp, Homo sapien
caggcctcggcagttctctaggtgt

SEQ ID NO: 4107489 - DNA, 25 bp, Homo sapien
tggcagtcgtacagctcgaggcgct

SEQ ID NO: 4107490 - DNA, 25 bp, Homo sapien
tctacagctgtagcaccctggatgg

SEQ ID NO: 4107491 - DNA, 25 bp, Homo sapien
agtgaatgttctctacagctgtagc

SEQ ID NO: 4107492 - DNA, 25 bp, Homo sapien
ccctggatggggctgttaaatgcag

SEQ ID NO: 4107493 - DNA, 25 bp, Homo sapien
gccctgtttacaaactaagtgaatg

SEQ ID NO: 4107494 - DNA, 25 bp, Homo sapien
cagagaatgacacagcacctgcaca

SEQ ID NO: 4107495 - DNA, 25 bp, Homo sapien
gcgtggactttgacatgagggagct

SEQ ID NO: 4107496 - DNA, 25 bp, Homo sapien
agagaatgacacagcacctgcacag

SEQ ID NO: 4107497 - DNA, 25 bp, Homo sapien
gggtgacgggagcaaagtaggcgtg

SEQ ID NO: 4107498 - DNA, 25 bp, Homo sapien
caatggagaatcaacagattgggtg

SEQ ID NO: 4107499 - DNA, 25 bp, Homo sapien
ttcccaatggagaatcaacagattg

SEQ ID NO: 4107500 - DNA, 25 bp, Homo sapien
gtgatggtggagtcggtcaggaaga

SEQ ID NO: 4107501 - DNA, 25 bp, Homo sapien
actcaggtcttctagaggaaaggat

SEQ ID NO: 4107502 - DNA, 25 bp, Homo sapien
tgctgtagcatacaccagagcttct

SEQ ID NO: 4107503 - DNA, 25 bp, Homo sapien
cccagttttacgagaggcatggaca

SEQ ID NO: 4107504 - DNA, 25 bp, Homo sapien
taggccactggcttaagtatcaggt

SEQ ID NO: 4107505 - DNA, 25 bp, Homo sapien
ggtttctggcatggtcctagctgca

SEQ ID NO: 4107506 - DNA, 25 bp, Homo sapien
taactaactgctatggtatccacac

SEQ ID NO: 4107507 - DNA, 25 bp, Homo sapien
accacagcagagagtagggtcattt

SEQ ID NO: 4107508 - DNA, 25 bp, Homo sapien
gatgtgtctgccataaaatcatagc

SEQ ID NO: 4107509 - DNA, 25 bp, Homo sapien
tttggaagggccagccaccatgaac

SEQ ID NO: 4107510 - DNA, 25 bp, Homo sapien
tcaatcatgtatagaaggctctggt

SEQ ID NO: 4107511 - DNA, 25 bp, Homo sapien
gccatggatcattgagcatcaagtc

SEQ ID NO: 4107512 - DNA, 25 bp, Homo sapien
caagtccaatagctgtgactgatga

SEQ ID NO: 4107513 - DNA, 25 bp, Homo sapien
gatgataggttgtatcctggctcaa

SEQ ID NO: 4107514 - DNA, 25 bp, Homo sapien
tgaacgtgagtttgtcccagtgaaa

SEQ ID NO: 4107515 - DNA, 25 bp, Homo sapien
tctgactaggtgttaagggatcttc

SEQ ID NO: 4107516 - DNA, 25 bp, Homo sapien
ttcctcatcaggttttagaagcggg

SEQ ID NO: 4107517 - DNA, 25 bp, Homo sapien
cccagacattggaaataggtgaccc

SEQ ID NO: 4107518 - DNA, 25 bp, Homo sapien
ttttattgcctgaaccttatgctga

SEQ ID NO: 4107519 - DNA, 25 bp, Homo sapien
tttattgcctgaaccttatgctgac

SEQ ID NO: 4107520 - DNA, 25 bp, Homo sapien
gcttttattgcctgaaccttatgct

SEQ ID NO: 4107521 - DNA, 25 bp, Homo sapien
ttggcttttattgcctgaaccttat

SEQ ID NO: 4107522 - DNA, 25 bp, Homo sapien
ggtgagctaagatccaaatccggtc

SEQ ID NO: 4107523 - DNA, 25 bp, Homo sapien
aaaagtcaggtgagctaagatccaa

SEQ ID NO: 4107524 - DNA, 25 bp, Homo sapien
tccggtcttagcacaaaagctgccc

SEQ ID NO: 4107525 - DNA, 25 bp, Homo sapien
taagatccaaatccggtcttagcac

SEQ ID NO: 4107526 - DNA, 25 bp, Homo sapien
gggctgtgtgcaaagaaaacacctg

SEQ ID NO: 4107527 - DNA, 25 bp, Homo sapien
cagtgggccatgtaggtgccatgca

SEQ ID NO: 4107528 - DNA, 25 bp, Homo sapien
gattagcatccccaggcaacgtggg

SEQ ID NO: 4107529 - DNA, 25 bp, Homo sapien
gaatatgaaactgtaaggcaaggct

SEQ ID NO: 4107530 - DNA, 25 bp, Homo sapien
ttaatcaggtttacagacagggtcc

SEQ ID NO: 4107531 - DNA, 25 bp, Homo sapien
gttgctcgaaaacttgcgctggtgt

SEQ ID NO: 4107532 - DNA, 25 bp, Homo sapien
cactctagggatagtggcaggcttt

SEQ ID NO: 4107533 - DNA, 25 bp, Homo sapien
aaatgattgcctcagaagttgctcg

SEQ ID NO: 4107534 - DNA, 25 bp, Homo sapien
taatgcttaactgggcgtgctggct

SEQ ID NO: 4107535 - DNA, 25 bp, Homo sapien
agggttctttttgtatattgctaga

SEQ ID NO: 4107536 - DNA, 25 bp, Homo sapien
tattgctagaaatacatgaagtata

SEQ ID NO: 4107537 - DNA, 25 bp, Homo sapien
tagtaggattactggatcaaaaact

SEQ ID NO: 4107538 - DNA, 25 bp, Homo sapien
agtgcctgcatgtaatagtcctaag

SEQ ID NO: 4107539 - DNA, 25 bp, Homo sapien
gaaaaattggaaggatagcatcact

SEQ ID NO: 4107540 - DNA, 25 bp, Homo sapien
cattcagagatgcagttatttgccc

SEQ ID NO: 4107541 - DNA, 25 bp, Homo sapien
cagtacgttatcttgggagggcttc

SEQ ID NO: 4107542 - DNA, 25 bp, Homo sapien
caggaaactgacattggcacaacgt

SEQ ID NO: 4107543 - DNA, 25 bp, Homo sapien
ggcacaacgtatgttatggtataga

SEQ ID NO: 4107544 - DNA, 25 bp, Homo sapien
caggattgtgccatcactacaagga

SEQ ID NO: 4107545 - DNA, 25 bp, Homo sapien
gagctagtacagtgatatttcggtg

SEQ ID NO: 4107546 - DNA, 25 bp, Homo sapien
gaagagggcaaaaggagcactagct

SEQ ID NO: 4107547 - DNA, 25 bp, Homo sapien
gtcagagccatgtttcaggtcacca

SEQ ID NO: 4107548 - DNA, 25 bp, Homo sapien
tcaccatgtgatgtcagatgttgct

SEQ ID NO: 4107549 - DNA, 25 bp, Homo sapien
cattcttaaatcttgataggtgcct

SEQ ID NO: 4107550 - DNA, 25 bp, Homo sapien
aaactgagtcctcagatccattggt

SEQ ID NO: 4107551 - DNA, 25 bp, Homo sapien
taaaccccagggctatagttagatg

SEQ ID NO: 4107552 - DNA, 25 bp, Homo sapien
tagttagatgtgatgcctttcttgt

SEQ ID NO: 4107553 - DNA, 25 bp, Homo sapien
tgagtcctcagatccattggttttt

SEQ ID NO: 4107554 - DNA, 25 bp, Homo sapien
caaaacaacaaatcctacagatttt

SEQ ID NO: 4107555 - DNA, 25 bp, Homo sapien
atcaaaacaacaaatcctacagatt

SEQ ID NO: 4107556 - DNA, 25 bp, Homo sapien
tcaaaacaacaaatcctacagattt

SEQ ID NO: 4107557 - DNA, 25 bp, Homo sapien
gatccaggttgacacctttaagcag

SEQ ID NO: 4107558 - DNA, 25 bp, Homo sapien
cagaatttactccacggaagcacgg

SEQ ID NO: 4107559 - DNA, 25 bp, Homo sapien
gatcatctacactcagctagctgcc

SEQ ID NO: 4107560 - DNA, 25 bp, Homo sapien
aagggagtgccctttaggatccagg

SEQ ID NO: 4107561 - DNA, 25 bp, Homo sapien
cgaatccaagccagttaaatgcggt

SEQ ID NO: 4107562 - DNA, 25 bp, Homo sapien
tgtgggaataattgacacaaggacg

SEQ ID NO: 4107563 - DNA, 25 bp, Homo sapien
ttctgtgggacccagcaaaacgcac

SEQ ID NO: 4107564 - DNA, 25 bp, Homo sapien
ttaaatgcggttgaatttctgtggg

SEQ ID NO: 4107565 - DNA, 25 bp, Homo sapien
agcatcataagggttgtattccatg

SEQ ID NO: 4107566 - DNA, 25 bp, Homo sapien
ttgtattccatgacagacggctaca

SEQ ID NO: 4107567 - DNA, 25 bp, Homo sapien
cagagcatcagcaacttgaaggatg

SEQ ID NO: 4107568 - DNA, 25 bp, Homo sapien
tggaatcgcccaggagacagacttc

SEQ ID NO: 4107569 - DNA, 25 bp, Homo sapien
catgaccattcagtgttctgaggaa

SEQ ID NO: 4107570 - DNA, 25 bp, Homo sapien
taacaaactttgacatccagaccaa

SEQ ID NO: 4107571 - DNA, 25 bp, Homo sapien
gcagttccctgaataggtggtagga

SEQ ID NO: 4107572 - DNA, 25 bp, Homo sapien
caaaattcagtgtccatcaaggcat

SEQ ID NO: 4107573 - DNA, 25 bp, Homo sapien
gaaattcggatgctggataatcgga

SEQ ID NO: 4107574 - DNA, 25 bp, Homo sapien
gtcagtcatatgaaattcggatgct

SEQ ID NO: 4107575 - DNA, 25 bp, Homo sapien
gatatgcctgagatcaatggaaaat

SEQ ID NO: 4107576 - DNA, 25 bp, Homo sapien
taatcggaaaatgggtgatatgcct

SEQ ID NO: 4107577 - DNA, 25 bp, Homo sapien
cattggatggtgaaacagagcaccc

SEQ ID NO: 4107578 - DNA, 25 bp, Homo sapien
ttttcaagcaggaagattccagcct

SEQ ID NO: 4107579 - DNA, 25 bp, Homo sapien
gagcacccaccctttcagtatgtga

SEQ ID NO: 4107580 - DNA, 25 bp, Homo sapien
tgatgtgtgctgcaacgtcaccagc

SEQ ID NO: 4107581 - DNA, 25 bp, Homo sapien
cgtgaacctaagtcggagtcgcgtt

SEQ ID NO: 4107582 - DNA, 25 bp, Homo sapien
ttgaagccagcgtccggccggcaga

SEQ ID NO: 4107583 - DNA, 25 bp, Homo sapien
cggaagcggcgcgtgaacctaagtc

SEQ ID NO: 4107584 - DNA, 25 bp, Homo sapien
tcggagtcgcgttgaagccagcgtc

SEQ ID NO: 4107585 - DNA, 25 bp, Homo sapien
tactgtggcacgtcctaatggttcg

SEQ ID NO: 4107586 - DNA, 25 bp, Homo sapien
tcaactcaggatagccaagctgctc

SEQ ID NO: 4107587 - DNA, 25 bp, Homo sapien
tgctctcggcaatgcaaccaatagg

SEQ ID NO: 4107588 - DNA, 25 bp, Homo sapien
aggagaccgcctgcccttaggatga

SEQ ID NO: 4107589 - DNA, 25 bp, Homo sapien
cagcgatagacgatggtctcaccac

SEQ ID NO: 4107590 - DNA, 25 bp, Homo sapien
gcgataggcgattgttttgctgctc

SEQ ID NO: 4107591 - DNA, 25 bp, Homo sapien
tgttttgctgctcagcgatagacga

SEQ ID NO: 4107592 - DNA, 25 bp, Homo sapien
tgcttggcgataggcgattgttttg

SEQ ID NO: 4107593 - DNA, 25 bp, Homo sapien
tgcaacaaaacttcaggacctcaaa

SEQ ID NO: 4107594 - DNA, 25 bp, Homo sapien
cacagacgctcgcagcgagtgtcac

SEQ ID NO: 4107595 - DNA, 25 bp, Homo sapien
ctctattatgactaaatactacaag

SEQ ID NO: 4107596 - DNA, 25 bp, Homo sapien
tttcatagtccactaaaaaccatca

SEQ ID NO: 4107597 - DNA, 25 bp, Homo sapien
tcaaaggtatatagctacatacgca

SEQ ID NO: 4107598 - DNA, 25 bp, Homo sapien
ggtgtagctaccacaatcaaaggta

SEQ ID NO: 4107599 - DNA, 25 bp, Homo sapien
ccaagtagagtgacttaagctgaac

SEQ ID NO: 4107600 - DNA, 25 bp, Homo sapien
tgacctctggtttaagatactgctt

SEQ ID NO: 4107601 - DNA, 25 bp, Homo sapien
taatacttttaactgagctgctgcc

SEQ ID NO: 4107602 - DNA, 25 bp, Homo sapien
aaaaaatcaagtgcgtgtgtgtcct

SEQ ID NO: 4107603 - DNA, 25 bp, Homo sapien
catgggagtgaccagcaccttttct

SEQ ID NO: 4107604 - DNA, 25 bp, Homo sapien
tgtgcagccgactcaaaaattacca

SEQ ID NO: 4107605 - DNA, 25 bp, Homo sapien
ttaaagagtctcaagaatctaatca

SEQ ID NO: 4107606 - DNA, 25 bp, Homo sapien
aagaatctaatcaacttggctgggt

SEQ ID NO: 4107607 - DNA, 25 bp, Homo sapien
atctaatcaacttggctgggtgtgg

SEQ ID NO: 4107608 - DNA, 25 bp, Homo sapien
gttatcaactgttaaagagtctcaa

SEQ ID NO: 4107609 - DNA, 25 bp, Homo sapien
taccttaagggtatattctgtcaaa

SEQ ID NO: 4107610 - DNA, 25 bp, Homo sapien
aactgtcagtttaaaggaagttcag

SEQ ID NO: 4107611 - DNA, 25 bp, Homo sapien
aatctaatccagtcttcagtttaac

SEQ ID NO: 4107612 - DNA, 25 bp, Homo sapien
gaagttcagagaatagagaagcatg

SEQ ID NO: 4107613 - DNA, 25 bp, Homo sapien
gatggaattgctcacttaaaggata

SEQ ID NO: 4107614 - DNA, 25 bp, Homo sapien
caaatagttgactgtctttctgagg

SEQ ID NO: 4107615 - DNA, 25 bp, Homo sapien
ggacatagcatgaaagtatccattg

SEQ ID NO: 4107616 - DNA, 25 bp, Homo sapien
ttacatctcagaatagttggctagt

SEQ ID NO: 4107617 - DNA, 25 bp, Homo sapien
tctctcaacactatcccatgattct

SEQ ID NO: 4107618 - DNA, 25 bp, Homo sapien
gtgtgtgtcaggcatcgtaagaaca

SEQ ID NO: 4107619 - DNA, 25 bp, Homo sapien
ttctttattcccataatgttgctgt

SEQ ID NO: 4107620 - DNA, 25 bp, Homo sapien
tataactatacacagataaacttga

SEQ ID NO: 4107621 - DNA, 25 bp, Homo sapien
aggaatgtaaggttagattaacatc

SEQ ID NO: 4107622 - DNA, 25 bp, Homo sapien
ggaatgtaaggttagattaacatcc

SEQ ID NO: 4107623 - DNA, 25 bp, Homo sapien
atgtaaggttagattaacatccaaa

SEQ ID NO: 4107624 - DNA, 25 bp, Homo sapien
gaatgtaaggttagattaacatcca

SEQ ID NO: 4107625 - DNA, 25 bp, Homo sapien
aaaaaaaattgggtgcattggcatg

SEQ ID NO: 4107626 - DNA, 25 bp, Homo sapien
aaaaaattgggtgcattggcatgca

SEQ ID NO: 4107627 - DNA, 25 bp, Homo sapien
aaaattgggtgcattggcatgcacc

SEQ ID NO: 4107628 - DNA, 25 bp, Homo sapien
taaaaaaaaattgggtgcattggca

SEQ ID NO: 4107629 - DNA, 25 bp, Homo sapien
atatttttggggtttctccatattg

SEQ ID NO: 4107630 - DNA, 25 bp, Homo sapien
cagtcactgagtagacaagacgtac

SEQ ID NO: 4107631 - DNA, 25 bp, Homo sapien
catattgtactgcaaaatggtaggc

SEQ ID NO: 4107632 - DNA, 25 bp, Homo sapien
gctgacccctgtcatatatgatcaa

SEQ ID NO: 4107633 - DNA, 25 bp, Homo sapien
tatgttcaggaacctatacccttgg

SEQ ID NO: 4107634 - DNA, 25 bp, Homo sapien
tttgtgtggccattgattgtccatc

SEQ ID NO: 4107635 - DNA, 25 bp, Homo sapien
gacatgtcaccatcctgtgccgagt

SEQ ID NO: 4107636 - DNA, 25 bp, Homo sapien
gaccataagggtctctatcccagct

SEQ ID NO: 4107637 - DNA, 25 bp, Homo sapien
tgaaggcacccttaacaggcaatga

SEQ ID NO: 4107638 - DNA, 25 bp, Homo sapien
tttaattgattctgggtcattcttg

SEQ ID NO: 4107639 - DNA, 25 bp, Homo sapien
gacccatttattggtatactgtcac

SEQ ID NO: 4107640 - DNA, 25 bp, Homo sapien
cagcaactgtaattaactgtagttt

SEQ ID NO: 4107641 - DNA, 25 bp, Homo sapien
gaagttccttattgtcaagaataaa

SEQ ID NO: 4107642 - DNA, 25 bp, Homo sapien
tgaattgggtgggatcatatttaac

SEQ ID NO: 4107643 - DNA, 25 bp, Homo sapien
ggtggcttacgtgtgtaatctagca

SEQ ID NO: 4107644 - DNA, 25 bp, Homo sapien
tatagtgggaattattgaaatcttt

SEQ ID NO: 4107645 - DNA, 25 bp, Homo sapien
ggcaggtcgatcacaggagtcaaga

SEQ ID NO: 4107646 - DNA, 25 bp, Homo sapien
tcaagtaacaagtagattccgtggg

SEQ ID NO: 4107647 - DNA, 25 bp, Homo sapien
gggctttctacttctgattctgtga

SEQ ID NO: 4107648 - DNA, 25 bp, Homo sapien
tcttatttgaacagagcccttattt

SEQ ID NO: 4107649 - DNA, 25 bp, Homo sapien
ggccctcttctgttggtatagtgaa

SEQ ID NO: 4107650 - DNA, 25 bp, Homo sapien
ttggatagagggtgctctgcgcccc

SEQ ID NO: 4107651 - DNA, 25 bp, Homo sapien
cgtgatttgtttacggcagccagaa

SEQ ID NO: 4107652 - DNA, 25 bp, Homo sapien
gatgggctgcctttgacgtgatttg

SEQ ID NO: 4107653 - DNA, 25 bp, Homo sapien
agtaagctttgttccgtgtggccct

SEQ ID NO: 4107654 - DNA, 25 bp, Homo sapien
gccattgtcaatgctatatgcttca

SEQ ID NO: 4107655 - DNA, 25 bp, Homo sapien
ctgtgccccatttatgaaatctttg

SEQ ID NO: 4107656 - DNA, 25 bp, Homo sapien
tgcttaccctaatgtatgaagacat

SEQ ID NO: 4107657 - DNA, 25 bp, Homo sapien
tatgttctgtatacaagccattgtc

SEQ ID NO: 4107658 - DNA, 25 bp, Homo sapien
ccgcagcatggagtacttctgcgcc

SEQ ID NO: 4107659 - DNA, 25 bp, Homo sapien
agcagaaggacgtcggcggccggct

SEQ ID NO: 4107660 - DNA, 25 bp, Homo sapien
cgccatctcggacctggaggaggac

SEQ ID NO: 4107661 - DNA, 25 bp, Homo sapien
tggagtacttctgcgcccaggtgca

SEQ ID NO: 4107662 - DNA, 25 bp, Homo sapien
gcgtgctgacgtcgcccgcggccgc

SEQ ID NO: 4107663 - DNA, 25 bp, Homo sapien
gcgcgtgctgacgtcgcccgcggcc

SEQ ID NO: 4107664 - DNA, 25 bp, Homo sapien
gtgctgacgtcgcccgcggccgcgg

SEQ ID NO: 4107665 - DNA, 25 bp, Homo sapien
cgcgtgctgacgtcgcccgcggccg

SEQ ID NO: 4107666 - DNA, 25 bp, Homo sapien
tccacaaccacagtgataccaccat

SEQ ID NO: 4107667 - DNA, 25 bp, Homo sapien
tggtccctgttcaattcgctcttcg

SEQ ID NO: 4107668 - DNA, 25 bp, Homo sapien
tcgttgaactgatgctgcctgagct

SEQ ID NO: 4107669 - DNA, 25 bp, Homo sapien
tgctgagagtgccccatagctctcc

SEQ ID NO: 4107670 - DNA, 25 bp, Homo sapien
tcaggctgtcagtaatctcagtaat

SEQ ID NO: 4107671 - DNA, 25 bp, Homo sapien
tctattttcactgtttcaaacttaa

SEQ ID NO: 4107672 - DNA, 25 bp, Homo sapien
ggctgtcagtaatctcagtaatttc

SEQ ID NO: 4107673 - DNA, 25 bp, Homo sapien
cagtaatttcaggtttttctgaata

SEQ ID NO: 4107674 - DNA, 25 bp, Homo sapien
gaacttagatgatgcaacttgagaa

SEQ ID NO: 4107675 - DNA, 25 bp, Homo sapien
aaaggctcctggaacttagatgatg

SEQ ID NO: 4107676 - DNA, 25 bp, Homo sapien
gctgagttgaaggttatcagggccc

SEQ ID NO: 4107677 - DNA, 25 bp, Homo sapien
tgaaggttatcagggccctactaaa

SEQ ID NO: 4107678 - DNA, 25 bp, Homo sapien
ctcttaagttgtcacggaggaggga

SEQ ID NO: 4107679 - DNA, 25 bp, Homo sapien
aatgtagtgtagtagggaagttcag

SEQ ID NO: 4107680 - DNA, 25 bp, Homo sapien
gagggagatacccacattgccttcc

SEQ ID NO: 4107681 - DNA, 25 bp, Homo sapien
cttccttgtaatgtagtgtagtagg

SEQ ID NO: 4107682 - DNA, 25 bp, Homo sapien
tgtaaccaaccaactttgagctgac

SEQ ID NO: 4107683 - DNA, 25 bp, Homo sapien
gggcataacagtcagctgtgccaaa

SEQ ID NO: 4107684 - DNA, 25 bp, Homo sapien
ttgagctgacaatccaaggggttgt

SEQ ID NO: 4107685 - DNA, 25 bp, Homo sapien
tctgcttttagaggtcccatccttg

SEQ ID NO: 4107686 - DNA, 25 bp, Homo sapien
cttagtctttgggaaaatttgctga

SEQ ID NO: 4107687 - DNA, 25 bp, Homo sapien
ctaaaggaagtgatcaggggtctca

SEQ ID NO: 4107688 - DNA, 25 bp, Homo sapien
cccagcagcctttgaacttcatgta

SEQ ID NO: 4107689 - DNA, 25 bp, Homo sapien
tgaacttcatgtaccaaagaaaatg

SEQ ID NO: 4107690 - DNA, 25 bp, Homo sapien
tgctgccaggattgttaagtccagg

SEQ ID NO: 4107691 - DNA, 25 bp, Homo sapien
gctgccacgtcaggtcagggccatt

SEQ ID NO: 4107692 - DNA, 25 bp, Homo sapien
gctagaaacttgttgttgctgccag

SEQ ID NO: 4107693 - DNA, 25 bp, Homo sapien
tccagtccagaggtgatatagcaat

SEQ ID NO: 4107694 - DNA, 25 bp, Homo sapien
catgtgtaccgtcttgcctgctgga

SEQ ID NO: 4107695 - DNA, 25 bp, Homo sapien
ggcaacaccctagatgacctcagac

SEQ ID NO: 4107696 - DNA, 25 bp, Homo sapien
gatcaactgagccaatctagaccag

SEQ ID NO: 4107697 - DNA, 25 bp, Homo sapien
cctgctggattatgagagacgtggt

SEQ ID NO: 4107698 - DNA, 25 bp, Homo sapien
ccatttcatagtaagttgcagtcat

SEQ ID NO: 4107699 - DNA, 25 bp, Homo sapien
tccatttcatagtaagttgcagtca

SEQ ID NO: 4107700 - DNA, 25 bp, Homo sapien
taacattttactatgcatgctttat

SEQ ID NO: 4107701 - DNA, 25 bp, Homo sapien
gctttatctcacatttgtccatcta

SEQ ID NO: 4107702 - DNA, 25 bp, Homo sapien
ttgtccatctaatcttccctctatc

SEQ ID NO: 4107703 - DNA, 25 bp, Homo sapien
tccctctatccacccataaatctac

SEQ ID NO: 4107704 - DNA, 25 bp, Homo sapien
gcagcacatagactactttcattat

SEQ ID NO: 4107705 - DNA, 25 bp, Homo sapien
cagcacatagactactttcattata

SEQ ID NO: 4107706 - DNA, 25 bp, Homo sapien
gcacatagactactttcattatagt

SEQ ID NO: 4107707 - DNA, 25 bp, Homo sapien
agcacatagactactttcattatag

SEQ ID NO: 4107708 - DNA, 25 bp, Homo sapien
tgttaagatcgcttggaggacccta

SEQ ID NO: 4107709 - DNA, 25 bp, Homo sapien
aactactgttgacgggctgctgtgc

SEQ ID NO: 4107710 - DNA, 25 bp, Homo sapien
cacagggaacctagtaggcaagacc

SEQ ID NO: 4107711 - DNA, 25 bp, Homo sapien
cgtgcagcttactgtcaggttgaca

SEQ ID NO: 4107712 - DNA, 25 bp, Homo sapien
taagagtattcctccactcgaacaa

SEQ ID NO: 4107713 - DNA, 25 bp, Homo sapien
gagcactttcacgtaagagtattcc

SEQ ID NO: 4107714 - DNA, 25 bp, Homo sapien
tgccgcagtggtgtactgagcactt

SEQ ID NO: 4107715 - DNA, 25 bp, Homo sapien
ccccggagaagtactggtgtcactg

SEQ ID NO: 4107716 - DNA, 25 bp, Homo sapien
ctgtccgcggtcacgtgaaggtgtc

SEQ ID NO: 4107717 - DNA, 25 bp, Homo sapien
gtcacgtgaaggtgtcgcggcggct

SEQ ID NO: 4107718 - DNA, 25 bp, Homo sapien
gcggctacgcccacctggacccagt

SEQ ID NO: 4107719 - DNA, 25 bp, Homo sapien
aaggtgtcgcggcggctacgcccac

SEQ ID NO: 4107720 - DNA, 25 bp, Homo sapien
gttcgggccaaacagaccgcggaca

SEQ ID NO: 4107721 - DNA, 25 bp, Homo sapien
accgcggacagcttacgagggccga

SEQ ID NO: 4107722 - DNA, 25 bp, Homo sapien
tggcggactgactggctgacagact

SEQ ID NO: 4107723 - DNA, 25 bp, Homo sapien
gagctccagcgcaggcgcactggat

SEQ ID NO: 4107724 - DNA, 25 bp, Homo sapien
ggatgaacttcaccagcggcttggc

SEQ ID NO: 4107725 - DNA, 25 bp, Homo sapien
tcgtgcttgtccagcggacgaccga

SEQ ID NO: 4107726 - DNA, 25 bp, Homo sapien
ccgcttgggtaagtctgctggatga

SEQ ID NO: 4107727 - DNA, 25 bp, Homo sapien
tcagctgcaccgagatgaatgtcgc

SEQ ID NO: 4107728 - DNA, 25 bp, Homo sapien
gctccgcccaggttacaggattgaa

SEQ ID NO: 4107729 - DNA, 25 bp, Homo sapien
gcggctccgcccaggttacaggatt

SEQ ID NO: 4107730 - DNA, 25 bp, Homo sapien
cccaggttacaggattgaaggaagg

SEQ ID NO: 4107731 - DNA, 25 bp, Homo sapien
tccgcccaggttacaggattgaagg

SEQ ID NO: 4107732 - DNA, 25 bp, Homo sapien
gaactgaggaagacggtccatttca

SEQ ID NO: 4107733 - DNA, 25 bp, Homo sapien
aggtatctgatccacggagccctcg

SEQ ID NO: 4107734 - DNA, 25 bp, Homo sapien
gatgagctgatcagacatttggtcc

SEQ ID NO: 4107735 - DNA, 25 bp, Homo sapien
gaagcttcagttagagacccaaaaa

SEQ ID NO: 4107736 - DNA, 25 bp, Homo sapien
gccaacgccaagcagaatatttact

SEQ ID NO: 4107737 - DNA, 25 bp, Homo sapien
taagtctgggcagcaataaagcatg

SEQ ID NO: 4107738 - DNA, 25 bp, Homo sapien
gactgagattataccatttagtgcc

SEQ ID NO: 4107739 - DNA, 25 bp, Homo sapien
tgagataatttgctgagtcaccaat

SEQ ID NO: 4107740 - DNA, 25 bp, Homo sapien
atgggaatttgggttcaatagaaca

SEQ ID NO: 4107741 - DNA, 25 bp, Homo sapien
tgggaatttgggttcaatagaacaa

SEQ ID NO: 4107742 - DNA, 25 bp, Homo sapien
gtaagattcaagctatacccgtgat

SEQ ID NO: 4107743 - DNA, 25 bp, Homo sapien
cagtacatccatcagcagctttagt

SEQ ID NO: 4107744 - DNA, 25 bp, Homo sapien
gcagattaatcagtcaacagatcct

SEQ ID NO: 4107745 - DNA, 25 bp, Homo sapien
ttttcaacatctagcctttaaggag

SEQ ID NO: 4107746 - DNA, 25 bp, Homo sapien
tggcactgggatatttcaaatggtc

SEQ ID NO: 4107747 - DNA, 25 bp, Homo sapien
caaatggtcattctgccttggtaat

SEQ ID NO: 4107748 - DNA, 25 bp, Homo sapien
gccttggtaatcataaacactatct

SEQ ID NO: 4107749 - DNA, 25 bp, Homo sapien
tattatctcctataaccacccaact

SEQ ID NO: 4107750 - DNA, 25 bp, Homo sapien
aagtgaacctttatcgaaagcatcc

SEQ ID NO: 4107751 - DNA, 25 bp, Homo sapien
gaacctttatcgaaagcatccttcc

SEQ ID NO: 4107752 - DNA, 25 bp, Homo sapien
ctttatcgaaagcatccttccaggt

SEQ ID NO: 4107753 - DNA, 25 bp, Homo sapien
aaaagtgaacctttatcgaaagcat

SEQ ID NO: 4107754 - DNA, 25 bp, Homo sapien
tgaggagtgtcccaaggagcccaat

SEQ ID NO: 4107755 - DNA, 25 bp, Homo sapien
tataccacactcgagttgcctggag

SEQ ID NO: 4107756 - DNA, 25 bp, Homo sapien
ttgcctggagtgcacaactcgaggg

SEQ ID NO: 4107757 - DNA, 25 bp, Homo sapien
attactctgagttctgtatgaggag

SEQ ID NO: 4107758 - DNA, 25 bp, Homo sapien
tcaaagatgcctttctaagtattta

SEQ ID NO: 4107759 - DNA, 25 bp, Homo sapien
ttttcaaaacgaaaataactcatga

SEQ ID NO: 4107760 - DNA, 25 bp, Homo sapien
tgtttcttacttgctctcttttaag

SEQ ID NO: 4107761 - DNA, 25 bp, Homo sapien
gacagagtttcgtctgttccccaag

SEQ ID NO: 4107762 - DNA, 25 bp, Homo sapien
tcccatcacccaaaacgctgaagaa

SEQ ID NO: 4107763 - DNA, 25 bp, Homo sapien
catcacccaaaacgctgaagaacag

SEQ ID NO: 4107764 - DNA, 25 bp, Homo sapien
tcacccaaaacgctgaagaacagta

SEQ ID NO: 4107765 - DNA, 25 bp, Homo sapien
cacccaaaacgctgaagaacagtaa

SEQ ID NO: 4107766 - DNA, 25 bp, Homo sapien
tccttcatcattatccaggttctgt

SEQ ID NO: 4107767 - DNA, 25 bp, Homo sapien
gttctgttctgctgcaatttggcta

SEQ ID NO: 4107768 - DNA, 25 bp, Homo sapien
tgcacaattgaacaacacacagctc

SEQ ID NO: 4107769 - DNA, 25 bp, Homo sapien
taatgtttagcagcgattttcaatc

SEQ ID NO: 4107770 - DNA, 25 bp, Homo sapien
ctggagatatgtccacggtcggctc

SEQ ID NO: 4107771 - DNA, 25 bp, Homo sapien
aaatacttcttgagcctgtgccagc

SEQ ID NO: 4107772 - DNA, 25 bp, Homo sapien
tgagggtcccaacagtatctggaga

SEQ ID NO: 4107773 - DNA, 25 bp, Homo sapien
tcggctctcgacttaaggcagataa

SEQ ID NO: 4107774 - DNA, 25 bp, Homo sapien
gaaagcatcaccaaaataatctgca

SEQ ID NO: 4107775 - DNA, 25 bp, Homo sapien
tttgtattgacactgtttgaaagca

SEQ ID NO: 4107776 - DNA, 25 bp, Homo sapien
caatttagctatgatggcatctttc

SEQ ID NO: 4107777 - DNA, 25 bp, Homo sapien
gagagtatctttgtattgacactgt

SEQ ID NO: 4107778 - DNA, 25 bp, Homo sapien
gaaagagttctagcttggaaaaaca

SEQ ID NO: 4107779 - DNA, 25 bp, Homo sapien
tgattcagaactacacaatgccttg

SEQ ID NO: 4107780 - DNA, 25 bp, Homo sapien
ttaaaagtgtgaatcatcaacatgc

SEQ ID NO: 4107781 - DNA, 25 bp, Homo sapien
gcttgtaccaaatcaccaatgattc

SEQ ID NO: 4107782 - DNA, 25 bp, Homo sapien
gctgttaatacccaagaatcctggg

SEQ ID NO: 4107783 - DNA, 25 bp, Homo sapien
gaatcctgggcaaatttctactagg

SEQ ID NO: 4107784 - DNA, 25 bp, Homo sapien
tatgtctgtttttgcgctttaaggc

SEQ ID NO: 4107785 - DNA, 25 bp, Homo sapien
ggtgtatcttaaatccccaggaatc

SEQ ID NO: 4107786 - DNA, 25 bp, Homo sapien
gaactaatggcccaacaggatgtaa

SEQ ID NO: 4107787 - DNA, 25 bp, Homo sapien
caggatgtaacggaacactgtgcag

SEQ ID NO: 4107788 - DNA, 25 bp, Homo sapien
gacaggactgaactaatggcccaac

SEQ ID NO: 4107789 - DNA, 25 bp, Homo sapien
tctccatgacaggactgaactaatg

SEQ ID NO: 4107790 - DNA, 25 bp, Homo sapien
tgccagttctcaaggtaaggctgga

SEQ ID NO: 4107791 - DNA, 25 bp, Homo sapien
tcctgtctcccagggaataatttcc

SEQ ID NO: 4107792 - DNA, 25 bp, Homo sapien
ctaccttcctggatcactacttgca

SEQ ID NO: 4107793 - DNA, 25 bp, Homo sapien
tttcaaactacactcatgccagttc

SEQ ID NO: 4107794 - DNA, 25 bp, Homo sapien
ccagcctgtagagttaactaaacca

SEQ ID NO: 4107795 - DNA, 25 bp, Homo sapien
gatccaaagacataaagcaggaaag

SEQ ID NO: 4107796 - DNA, 25 bp, Homo sapien
gaggaacacaaagcacagagcttta

SEQ ID NO: 4107797 - DNA, 25 bp, Homo sapien
ttcttatgagcccttacccagcctg

SEQ ID NO: 4107798 - DNA, 25 bp, Homo sapien
tggtactcagcattggcctgcatga

SEQ ID NO: 4107799 - DNA, 25 bp, Homo sapien
gctgttttgccaggatagactgatg

SEQ ID NO: 4107800 - DNA, 25 bp, Homo sapien
ttgccaggatagactgatggtactc

SEQ ID NO: 4107801 - DNA, 25 bp, Homo sapien
tagactgatggtactcagcattggc

SEQ ID NO: 4107802 - DNA, 25 bp, Homo sapien
gggccacataaactgcactgttcaa

SEQ ID NO: 4107803 - DNA, 25 bp, Homo sapien
tcaagaagtgcaactcatgagctgt

SEQ ID NO: 4107804 - DNA, 25 bp, Homo sapien
tttacaatcttgctaggtccctcat

SEQ ID NO: 4107805 - DNA, 25 bp, Homo sapien
ctgaagttagatgttataagccctc

SEQ ID NO: 4107806 - DNA, 25 bp, Homo sapien
acctcaaacggcctaactctcagtg

SEQ ID NO: 4107807 - DNA, 25 bp, Homo sapien
gcaggaacctcaaacggcctaactc

SEQ ID NO: 4107808 - DNA, 25 bp, Homo sapien
cctaactctcagtgaaagggtggat

SEQ ID NO: 4107809 - DNA, 25 bp, Homo sapien
aacggcctaactctcagtgaaaggg

SEQ ID NO: 4107810 - DNA, 25 bp, Homo sapien
gagaactgaaacaagggtctggaaa

SEQ ID NO: 4107811 - DNA, 25 bp, Homo sapien
catggagaactgaaacaagggtctg

SEQ ID NO: 4107812 - DNA, 25 bp, Homo sapien
ttctacatccaaagaattagcaatt

SEQ ID NO: 4107813 - DNA, 25 bp, Homo sapien
tctacatccaaagaattagcaatta

SEQ ID NO: 4107814 - DNA, 25 bp, Homo sapien
caagtgtggctttgccaataggatc

SEQ ID NO: 4107815 - DNA, 25 bp, Homo sapien
caagggcacgattgattttgtcaga

SEQ ID NO: 4107816 - DNA, 25 bp, Homo sapien
tctgactgatgggtacattgaccgg

SEQ ID NO: 4107817 - DNA, 25 bp, Homo sapien
ctttaaggtctggaactcgatcatg

SEQ ID NO: 4107818 - DNA, 25 bp, Homo sapien
tgacacgggaaccatcttctcaaac

SEQ ID NO: 4107819 - DNA, 25 bp, Homo sapien
cctctgattataggcagccaaagac

SEQ ID NO: 4107820 - DNA, 25 bp, Homo sapien
ggcagccaaagactgctgtactgac

SEQ ID NO: 4107821 - DNA, 25 bp, Homo sapien
agactgctgtactgacacgggaacc

SEQ ID NO: 4107822 - DNA, 25 bp, Homo sapien
tagactgaggtacagtgtctccaga

SEQ ID NO: 4107823 - DNA, 25 bp, Homo sapien
tgatcaacagtctggatgcctccct

SEQ ID NO: 4107824 - DNA, 25 bp, Homo sapien
gatttagtcaatatagactgaggta

SEQ ID NO: 4107825 - DNA, 25 bp, Homo sapien
tcaactgatcaacagtctggatgcc

SEQ ID NO: 4107826 - DNA, 25 bp, Homo sapien
gctcttaaaggcttatacagttcat

SEQ ID NO: 4107827 - DNA, 25 bp, Homo sapien
tcttaaaggcttatacagttcattg

SEQ ID NO: 4107828 - DNA, 25 bp, Homo sapien
ctgctcttaaaggcttatacagttc

SEQ ID NO: 4107829 - DNA, 25 bp, Homo sapien
tgctcttaaaggcttatacagttca

SEQ ID NO: 4107830 - DNA, 25 bp, Homo sapien
gtctttgctggattagcagaaggga

SEQ ID NO: 4107831 - DNA, 25 bp, Homo sapien
ggtctttgctggattagcagaaggg

SEQ ID NO: 4107832 - DNA, 25 bp, Homo sapien
agaagggatggcagcattcagctca

SEQ ID NO: 4107833 - DNA, 25 bp, Homo sapien
gaagggatggcagcattcagctcag

SEQ ID NO: 4107834 - DNA, 25 bp, Homo sapien
aatacatgttccttcctctggctag

SEQ ID NO: 4107835 - DNA, 25 bp, Homo sapien
tactcccagcagatgtaacactttg

SEQ ID NO: 4107836 - DNA, 25 bp, Homo sapien
aaccatagactggacttcaggccac

SEQ ID NO: 4107837 - DNA, 25 bp, Homo sapien
tagactcagccccatatacattagg

SEQ ID NO: 4107838 - DNA, 25 bp, Homo sapien
cataccattaagagttttaggccag

SEQ ID NO: 4107839 - DNA, 25 bp, Homo sapien
ggcaccatgctaaaacacttcagaa

SEQ ID NO: 4107840 - DNA, 25 bp, Homo sapien
ccaaagatagggataacgagtctca

SEQ ID NO: 4107841 - DNA, 25 bp, Homo sapien
ccagatgtagaggttcatgcctgca

SEQ ID NO: 4107842 - DNA, 25 bp, Homo sapien
tgagccagggctgtcaaaaacttgc

SEQ ID NO: 4107843 - DNA, 25 bp, Homo sapien
tagactcgatctagttcagtaacag

SEQ ID NO: 4107844 - DNA, 25 bp, Homo sapien
gttgtaagacctccatagactcgat

SEQ ID NO: 4107845 - DNA, 25 bp, Homo sapien
ttgcttgtcatgtcaaaattcacag

SEQ ID NO: 4107846 - DNA, 25 bp, Homo sapien
cttaagttagcttcattattagatt

SEQ ID NO: 4107847 - DNA, 25 bp, Homo sapien
tcttaagttagcttcattattagat

SEQ ID NO: 4107848 - DNA, 25 bp, Homo sapien
aagaatttctaaaggctctctggag

SEQ ID NO: 4107849 - DNA, 25 bp, Homo sapien
tcctctctatttggaaggctttgca

SEQ ID NO: 4107850 - DNA, 25 bp, Homo sapien
ttagagccgaagaactgagatctgc

SEQ ID NO: 4107851 - DNA, 25 bp, Homo sapien
tatacaatttactaggcccaacaac

SEQ ID NO: 4107852 - DNA, 25 bp, Homo sapien
tgtcttccgtgcaaaaactatatca

SEQ ID NO: 4107853 - DNA, 25 bp, Homo sapien
ggtattctctgagctattcatgctg

SEQ ID NO: 4107854 - DNA, 25 bp, Homo sapien
gagtcgtatgttaactggccctgct

SEQ ID NO: 4107855 - DNA, 25 bp, Homo sapien
catgttctatagctctagttttatg

SEQ ID NO: 4107856 - DNA, 25 bp, Homo sapien
tgtattgattactcagcaggaaatg

SEQ ID NO: 4107857 - DNA, 25 bp, Homo sapien
tcatggtcagatgtttgctcataat

SEQ ID NO: 4107858 - DNA, 25 bp, Homo sapien
gtttagctcatggtcagatgtttgc

SEQ ID NO: 4107859 - DNA, 25 bp, Homo sapien
tgtttttgtttagctcatggtcaga

SEQ ID NO: 4107860 - DNA, 25 bp, Homo sapien
tagctcatggtcagatgtttgctca

SEQ ID NO: 4107861 - DNA, 25 bp, Homo sapien
gggaccccggccttagaatgattgc

SEQ ID NO: 4107862 - DNA, 25 bp, Homo sapien
gtctgccacccacctcctactgtgc

SEQ ID NO: 4107863 - DNA, 25 bp, Homo sapien
gaccccggccttagaatgattgcct

SEQ ID NO: 4107864 - DNA, 25 bp, Homo sapien
aggccacgaaccagtaccagtccaa

SEQ ID NO: 4107865 - DNA, 25 bp, Homo sapien
gtaatgccagctacttaagaagctg

SEQ ID NO: 4107866 - DNA, 25 bp, Homo sapien
caagactgcaccactgcactccagc

SEQ ID NO: 4107867 - DNA, 25 bp, Homo sapien
gcagaagaactgcttgaacccggga

SEQ ID NO: 4107868 - DNA, 25 bp, Homo sapien
ccgggaggcagaggttgcagtgagc

SEQ ID NO: 4107869 - DNA, 25 bp, Homo sapien
ttataaaagctcaaaactggcaact

SEQ ID NO: 4107870 - DNA, 25 bp, Homo sapien
tggacagcagtgatttacaacattc

SEQ ID NO: 4107871 - DNA, 25 bp, Homo sapien
gccagtcatggaagagtacataata

SEQ ID NO: 4107872 - DNA, 25 bp, Homo sapien
tatgtcactgcatagtacttcacca

SEQ ID NO: 4107873 - DNA, 25 bp, Homo sapien
tcaaagacagagtgttaaaaattaa

SEQ ID NO: 4107874 - DNA, 25 bp, Homo sapien
gcactaggttctctggcaatgcttt

SEQ ID NO: 4107875 - DNA, 25 bp, Homo sapien
ggactgatacgcaggtgtaggaatt

SEQ ID NO: 4107876 - DNA, 25 bp, Homo sapien
catggttcttggcgctggagttgga

SEQ ID NO: 4107877 - DNA, 25 bp, Homo sapien
attgaaggagcactaggttctctgg

SEQ ID NO: 4107878 - DNA, 25 bp, Homo sapien
acaggtggtggaggcctggctgggg

SEQ ID NO: 4107879 - DNA, 25 bp, Homo sapien
aggtggtggaggcctggctgggggc

SEQ ID NO: 4107880 - DNA, 25 bp, Homo sapien
caggtggtggaggcctggctggggg

SEQ ID NO: 4107881 - DNA, 25 bp, Homo sapien
ggtggtggaggcctggctgggggct

SEQ ID NO: 4107882 - DNA, 25 bp, Homo sapien
tggtccctgcgcctgtggaggagga

SEQ ID NO: 4107883 - DNA, 25 bp, Homo sapien
ggagctgagccaggcgtttgtgatg

SEQ ID NO: 4107884 - DNA, 25 bp, Homo sapien
cgtttgtgatggagctggcgcagca

SEQ ID NO: 4107885 - DNA, 25 bp, Homo sapien
ccaggatatcctggataggtgggat

SEQ ID NO: 4107886 - DNA, 25 bp, Homo sapien
ggatatggcatattatactggccat

SEQ ID NO: 4107887 - DNA, 25 bp, Homo sapien
gccatacgcataaggattatagccc

SEQ ID NO: 4107888 - DNA, 25 bp, Homo sapien
tactgctgtggatagtaagactgct

SEQ ID NO: 4107889 - DNA, 25 bp, Homo sapien
caggactctggtgatacactggtgg

SEQ ID NO: 4107890 - DNA, 25 bp, Homo sapien
cattcagtccaggagagtacattac

SEQ ID NO: 4107891 - DNA, 25 bp, Homo sapien
gcaacagcagcaaatctcacatgtg

SEQ ID NO: 4107892 - DNA, 25 bp, Homo sapien
aaccagagcgtagagtttagtacac

SEQ ID NO: 4107893 - DNA, 25 bp, Homo sapien
gtaagtatctgatgtcccaaccatg

SEQ ID NO: 4107894 - DNA, 25 bp, Homo sapien
ggtacaacacacctgaatcacagag

SEQ ID NO: 4107895 - DNA, 25 bp, Homo sapien
gaactttagggacacaaggctctgt

SEQ ID NO: 4107896 - DNA, 25 bp, Homo sapien
gatcccactgtgatgttagacaact

SEQ ID NO: 4107897 - DNA, 25 bp, Homo sapien
gaaaaggtcagcgttgaaactcaga

SEQ ID NO: 4107898 - DNA, 25 bp, Homo sapien
tctgctcagcaaatctccaatgggc

SEQ ID NO: 4107899 - DNA, 25 bp, Homo sapien
ggtgaccctcacatctgaccagtgg

SEQ ID NO: 4107900 - DNA, 25 bp, Homo sapien
ttcaaactcagcttcgtcttcatcc

SEQ ID NO: 4107901 - DNA, 25 bp, Homo sapien
cccttcccaacagcggcttctgaga

SEQ ID NO: 4107902 - DNA, 25 bp, Homo sapien
ttgtctgaaatgctccactgcccag

SEQ ID NO: 4107903 - DNA, 25 bp, Homo sapien
tccacatgaaagcacacacagagag

SEQ ID NO: 4107904 - DNA, 25 bp, Homo sapien
ctgcccagccggcacaagcaccacc

SEQ ID NO: 4107905 - DNA, 25 bp, Homo sapien
ctctgaacccctcaacacatgcctc

SEQ ID NO: 4107906 - DNA, 25 bp, Homo sapien
tcttctaacagccactgtattcgtg

SEQ ID NO: 4107907 - DNA, 25 bp, Homo sapien
ctgtattcgtggaaaaccttcagct

SEQ ID NO: 4107908 - DNA, 25 bp, Homo sapien
cagccactgtattcgtggaaaacct

SEQ ID NO: 4107909 - DNA, 25 bp, Homo sapien
tctaacagccactgtattcgtggaa

SEQ ID NO: 4107910 - DNA, 25 bp, Homo sapien
ccacgtggacatctgctgcatttac

SEQ ID NO: 4107911 - DNA, 25 bp, Homo sapien
agaactgtgttctgtggccgcgact

SEQ ID NO: 4107912 - DNA, 25 bp, Homo sapien
gactgcagagctactcctccgtagg

SEQ ID NO: 4107913 - DNA, 25 bp, Homo sapien
ggctgccgccctttgcaattagaca

SEQ ID NO: 4107914 - DNA, 25 bp, Homo sapien
caggtcagcggggaagtcagttcta

SEQ ID NO: 4107915 - DNA, 25 bp, Homo sapien
tagccagagtctcagttgaccaagc

SEQ ID NO: 4107916 - DNA, 25 bp, Homo sapien
gatggcttaaagcaggacaggtcag

SEQ ID NO: 4107917 - DNA, 25 bp, Homo sapien
tggcttaaagcaggacaggtcagcg

SEQ ID NO: 4107918 - DNA, 25 bp, Homo sapien
gacatccctcccctgtggggagact

SEQ ID NO: 4107919 - DNA, 25 bp, Homo sapien
ctgtggggagactggtgtgtttaac

SEQ ID NO: 4107920 - DNA, 25 bp, Homo sapien
tggggagactggtgtgtttaacata

SEQ ID NO: 4107921 - DNA, 25 bp, Homo sapien
ctgacatccctcccctgtggggaga

SEQ ID NO: 4107922 - DNA, 25 bp, Homo sapien
tacccacgagcaccggggcagcatg

SEQ ID NO: 4107923 - DNA, 25 bp, Homo sapien
ggtgttacccacgagcaccggggca

SEQ ID NO: 4107924 - DNA, 25 bp, Homo sapien
tgttacccacgagcaccggggcagc

SEQ ID NO: 4107925 - DNA, 25 bp, Homo sapien
gttacccacgagcaccggggcagca

SEQ ID NO: 4107926 - DNA, 25 bp, Homo sapien
gacactggaacgtgcaggtagccct

SEQ ID NO: 4107927 - DNA, 25 bp, Homo sapien
tgccagaaggtgctagaagacactg

SEQ ID NO: 4107928 - DNA, 25 bp, Homo sapien
ttccagggaatgacactccatgcag

SEQ ID NO: 4107929 - DNA, 25 bp, Homo sapien
gcagcaagagattttgaaggaccct

SEQ ID NO: 4107930 - DNA, 25 bp, Homo sapien
tccggatgttccttgggccattgtt

SEQ ID NO: 4107931 - DNA, 25 bp, Homo sapien
ttgttatcactatccatttttcctt

SEQ ID NO: 4107932 - DNA, 25 bp, Homo sapien
tccttgggccattgttatcactatc

SEQ ID NO: 4107933 - DNA, 25 bp, Homo sapien
tgttccttgggccattgttatcact

SEQ ID NO: 4107934 - DNA, 25 bp, Homo sapien
agaatcaggagaccatgagaaaact

SEQ ID NO: 4107935 - DNA, 25 bp, Homo sapien
agaaaactgacccctatagagcagg

SEQ ID NO: 4107936 - DNA, 25 bp, Homo sapien
gaatcaggagaccatgagaaaactg

SEQ ID NO: 4107937 - DNA, 25 bp, Homo sapien
aggaagagacagagccaaattgaag

SEQ ID NO: 4107938 - DNA, 25 bp, Homo sapien
ctaatgcaaccacatctttgcctgc

SEQ ID NO: 4107939 - DNA, 25 bp, Homo sapien
aagagacagagccaaattgaagttt

SEQ ID NO: 4107940 - DNA, 25 bp, Homo sapien
tttgagggcagccaatctggtcgga

SEQ ID NO: 4107941 - DNA, 25 bp, Homo sapien
ggatggtgagtgtacctcacagcag

SEQ ID NO: 4107942 - DNA, 25 bp, Homo sapien
gcaggcaggtaagattaaactgtct

SEQ ID NO: 4107943 - DNA, 25 bp, Homo sapien
tttatactttgcaattctctgggat

SEQ ID NO: 4107944 - DNA, 25 bp, Homo sapien
tgtttatcagtgttaagagacaatt

SEQ ID NO: 4107945 - DNA, 25 bp, Homo sapien
gggctgggagacttcgtaaatagca

SEQ ID NO: 4107946 - DNA, 25 bp, Homo sapien
agaaataattattgtggggctggga

SEQ ID NO: 4107947 - DNA, 25 bp, Homo sapien
ggaggaagcaggtttcctgagccca

SEQ ID NO: 4107948 - DNA, 25 bp, Homo sapien
gacttcgtaaatagcattcgcctaa

SEQ ID NO: 4107949 - DNA, 25 bp, Homo sapien
tatgctggttctgctaaatttgcac

SEQ ID NO: 4107950 - DNA, 25 bp, Homo sapien
acacaattctgtcaattagctgagc

SEQ ID NO: 4107951 - DNA, 25 bp, Homo sapien
gctgagcatggcaattacctttctt

SEQ ID NO: 4107952 - DNA, 25 bp, Homo sapien
aaattctatgctggttctgctaaat

SEQ ID NO: 4107953 - DNA, 25 bp, Homo sapien
cacatttctgtctgagtctcaaaac

SEQ ID NO: 4107954 - DNA, 25 bp, Homo sapien
tcacatttctgtctgagtctcaaaa

SEQ ID NO: 4107955 - DNA, 25 bp, Homo sapien
acatttctgtctgagtctcaaaacc

SEQ ID NO: 4107956 - DNA, 25 bp, Homo sapien
catttctgtctgagtctcaaaacca

SEQ ID NO: 4107957 - DNA, 25 bp, Homo sapien
ccaggtcagcactgatttgcacata

SEQ ID NO: 4107958 - DNA, 25 bp, Homo sapien
gttagatcctccgatctccaggtca

SEQ ID NO: 4107959 - DNA, 25 bp, Homo sapien
cccatctctggggagttagatcctc

SEQ ID NO: 4107960 - DNA, 25 bp, Homo sapien
gcactgatttgcacatattggtgat

SEQ ID NO: 4107961 - DNA, 25 bp, Homo sapien
ctatgtccattctacaccaggaatt

SEQ ID NO: 4107962 - DNA, 25 bp, Homo sapien
tatgtccattctacaccaggaattc

SEQ ID NO: 4107963 - DNA, 25 bp, Homo sapien
tgaaacttcactgaacaccggaaat

SEQ ID NO: 4107964 - DNA, 25 bp, Homo sapien
gcctctcaaacaataactcaatgag

SEQ ID NO: 4107965 - DNA, 25 bp, Homo sapien
ggaaatttcgcagtgacttcattgg

SEQ ID NO: 4107966 - DNA, 25 bp, Homo sapien
tgttgcctctcaaacaataactcaa

SEQ ID NO: 4107967 - DNA, 25 bp, Homo sapien
tatacatctcaagacaaagaggatt

SEQ ID NO: 4107968 - DNA, 25 bp, Homo sapien
ttcgaagggatgatttatacatctc

SEQ ID NO: 4107969 - DNA, 25 bp, Homo sapien
ggaagatggatagcttcctgtaaag

SEQ ID NO: 4107970 - DNA, 25 bp, Homo sapien
tgaattgatacctcaaaggacttct

SEQ ID NO: 4107971 - DNA, 25 bp, Homo sapien
taccactgacatcgagtagaaaggt

SEQ ID NO: 4107972 - DNA, 25 bp, Homo sapien
attaccactgacatcgagtagaaag

SEQ ID NO: 4107973 - DNA, 25 bp, Homo sapien
tgacatcgagtagaaaggttgctgt

SEQ ID NO: 4107974 - DNA, 25 bp, Homo sapien
cactgacatcgagtagaaaggttgc

SEQ ID NO: 4107975 - DNA, 25 bp, Homo sapien
tgcaaaggtgaacaagaacttggtt

SEQ ID NO: 4107976 - DNA, 25 bp, Homo sapien
cttgcaaaggtgaacaagaacttgg

SEQ ID NO: 4107977 - DNA, 25 bp, Homo sapien
caaaggtgaacaagaacttggttgc

SEQ ID NO: 4107978 - DNA, 25 bp, Homo sapien
ggtgaacaagaacttggttgctgaa

SEQ ID NO: 4107979 - DNA, 25 bp, Homo sapien
gactgacagcagtcactcgtgcacc

SEQ ID NO: 4107980 - DNA, 25 bp, Homo sapien
cagaaggttcatcttcaaaagggcc

SEQ ID NO: 4107981 - DNA, 25 bp, Homo sapien
gcctttatgatttgcctgactgaca

SEQ ID NO: 4107982 - DNA, 25 bp, Homo sapien
aagggcctggttctctaactggaca

SEQ ID NO: 4107983 - DNA, 25 bp, Homo sapien
gggatggaagacgatccaccaagct

SEQ ID NO: 4107984 - DNA, 25 bp, Homo sapien
gacgatccaccaagctaatgggaaa

SEQ ID NO: 4107985 - DNA, 25 bp, Homo sapien
gataggatctaattcacacatgaca

SEQ ID NO: 4107986 - DNA, 25 bp, Homo sapien
taaccaacgaacatcataaagatag

SEQ ID NO: 4107987 - DNA, 25 bp, Homo sapien
cagtctccttcaggaaacaagagtc

SEQ ID NO: 4107988 - DNA, 25 bp, Homo sapien
gcatctccaggacatgctgaatgtg

SEQ ID NO: 4107989 - DNA, 25 bp, Homo sapien
tgtgttctatcaccaatgtttggca

SEQ ID NO: 4107990 - DNA, 25 bp, Homo sapien
tcaggaaacaagagtccccagcatc

SEQ ID NO: 4107991 - DNA, 25 bp, Homo sapien
ttctaccagataggccagcagatgc

SEQ ID NO: 4107992 - DNA, 25 bp, Homo sapien
cagcagatgcagtaagatcctggga

SEQ ID NO: 4107993 - DNA, 25 bp, Homo sapien
cagggacacttaagcaatactgtaa

SEQ ID NO: 4107994 - DNA, 25 bp, Homo sapien
ctttgtggacaaactctctggtggc

SEQ ID NO: 4107995 - DNA, 25 bp, Homo sapien
cttcatggataccaaactgctcagc

SEQ ID NO: 4107996 - DNA, 25 bp, Homo sapien
ccaaactgctcagcccatcttcacc

SEQ ID NO: 4107997 - DNA, 25 bp, Homo sapien
ttcctttgcaaagactctgtccctc

SEQ ID NO: 4107998 - DNA, 25 bp, Homo sapien
atgttcctttgcaaagactctgtcc

SEQ ID NO: 4107999 - DNA, 25 bp, Homo sapien
tgtcctcacttgacaccacccccat

SEQ ID NO: 4108000 - DNA, 25 bp, Homo sapien
gtgtcctcacttgacaccaccccca

SEQ ID NO: 4108001 - DNA, 25 bp, Homo sapien
catgctgcttatttcaagctccaga

SEQ ID NO: 4108002 - DNA, 25 bp, Homo sapien
ggctggcctgcattggtgacccatc

SEQ ID NO: 4108003 - DNA, 25 bp, Homo sapien
gagagatacaaagcatcctgtggta

SEQ ID NO: 4108004 - DNA, 25 bp, Homo sapien
ggcctgcattggtgacccatctctt

SEQ ID NO: 4108005 - DNA, 25 bp, Homo sapien
gtttaaggagatcctggatgaaaga

SEQ ID NO: 4108006 - DNA, 25 bp, Homo sapien
aatagtcacaggtcttgggcagtgc

SEQ ID NO: 4108007 - DNA, 25 bp, Homo sapien
acagctgtttaaggagatcctggat

SEQ ID NO: 4108008 - DNA, 25 bp, Homo sapien
gctgtttaaggagatcctggatgaa

SEQ ID NO: 4108009 - DNA, 25 bp, Homo sapien
taaactgacagcagactcttaccag

SEQ ID NO: 4108010 - DNA, 25 bp, Homo sapien
tacttgacccaaggagcatgtggaa

SEQ ID NO: 4108011 - DNA, 25 bp, Homo sapien
gaaacaccataaaagggatctgaga

SEQ ID NO: 4108012 - DNA, 25 bp, Homo sapien
caagaatcggatatagaaaacaggg

SEQ ID NO: 4108013 - DNA, 25 bp, Homo sapien
ccgtttcacagcttccacaacaagc

SEQ ID NO: 4108014 - DNA, 25 bp, Homo sapien
cccgtttcacagcttccacaacaag

SEQ ID NO: 4108015 - DNA, 25 bp, Homo sapien
acccgtttcacagcttccacaacaa

SEQ ID NO: 4108016 - DNA, 25 bp, Homo sapien
gcagccatgccctgggccacttcat

SEQ ID NO: 4108017 - DNA, 25 bp, Homo sapien
aaatataaacaaatccatgggcagc

SEQ ID NO: 4108018 - DNA, 25 bp, Homo sapien
ggaaaatataaacaaatccatgggc

SEQ ID NO: 4108019 - DNA, 25 bp, Homo sapien
tataaacaaatccatgggcagccat

SEQ ID NO: 4108020 - DNA, 25 bp, Homo sapien
ctcgggagtttccttggacctcagg

SEQ ID NO: 4108021 - DNA, 25 bp, Homo sapien
tcttatatttgccaacttcatagag

SEQ ID NO: 4108022 - DNA, 25 bp, Homo sapien
tagagtattcttgtgtggttgaagc

SEQ ID NO: 4108023 - DNA, 25 bp, Homo sapien
tctccctcatagacattctctgcag

SEQ ID NO: 4108024 - DNA, 25 bp, Homo sapien
gaaagaggttgaggctcattgctcc

SEQ ID NO: 4108025 - DNA, 25 bp, Homo sapien
gatgcaggcccttggttggtctatc

SEQ ID NO: 4108026 - DNA, 25 bp, Homo sapien
cactgttccagtaagttgagcttga

SEQ ID NO: 4108027 - DNA, 25 bp, Homo sapien
tgggccttcccaagatggacacagt

SEQ ID NO: 4108028 - DNA, 25 bp, Homo sapien
tcctccccacttctgagtccactgt

SEQ ID NO: 4108029 - DNA, 25 bp, Homo sapien
tgtctatctggtggatcccactcca

SEQ ID NO: 4108030 - DNA, 25 bp, Homo sapien
cacttctgagtccactgtctatctg

SEQ ID NO: 4108031 - DNA, 25 bp, Homo sapien
ccactgtctatctggtggatcccac

SEQ ID NO: 4108032 - DNA, 25 bp, Homo sapien
gggagatgagacaaatagcccatag

SEQ ID NO: 4108033 - DNA, 25 bp, Homo sapien
ctttggtccagcaatgggagatgag

SEQ ID NO: 4108034 - DNA, 25 bp, Homo sapien
tagcccataggtgcaactcccatct

SEQ ID NO: 4108035 - DNA, 25 bp, Homo sapien
agacaaatagcccataggtgcaact

SEQ ID NO: 4108036 - DNA, 25 bp, Homo sapien
actgcccgttccttctcaggtcgtt

SEQ ID NO: 4108037 - DNA, 25 bp, Homo sapien
cactttgcaggtagagttggcaaga

SEQ ID NO: 4108038 - DNA, 25 bp, Homo sapien
tggctgccagcaaggtaatagatgg

SEQ ID NO: 4108039 - DNA, 25 bp, Homo sapien
ggtcgttccgaatctgagtcacagt

SEQ ID NO: 4108040 - DNA, 25 bp, Homo sapien
tctcagagtgtctattccctcagca

SEQ ID NO: 4108041 - DNA, 25 bp, Homo sapien
cctcagcaggtttgttgtcaacctg

SEQ ID NO: 4108042 - DNA, 25 bp, Homo sapien
tctagtgtctaatggatgccagtca

SEQ ID NO: 4108043 - DNA, 25 bp, Homo sapien
gtcatcctctctacgaatcattttt

SEQ ID NO: 4108044 - DNA, 25 bp, Homo sapien
gcatctaactggctgtggaaatgtg

SEQ ID NO: 4108045 - DNA, 25 bp, Homo sapien
gtatgtgacacctgcattcttgatc

SEQ ID NO: 4108046 - DNA, 25 bp, Homo sapien
ctggctgtggaaatgtgtatgtgac

SEQ ID NO: 4108047 - DNA, 25 bp, Homo sapien
agagcctagattggcatctaactgg

SEQ ID NO: 4108048 - DNA, 25 bp, Homo sapien
gtgattaccaccttctagctctcca

SEQ ID NO: 4108049 - DNA, 25 bp, Homo sapien
gctctccaaagacatgtctaaccat

SEQ ID NO: 4108050 - DNA, 25 bp, Homo sapien
caaagaagtagaacaggtgtgaaca

SEQ ID NO: 4108051 - DNA, 25 bp, Homo sapien
tgtgaacattaaagtgattaccacc

SEQ ID NO: 4108052 - DNA, 25 bp, Homo sapien
tgactctggtcctcctgagacatca

SEQ ID NO: 4108053 - DNA, 25 bp, Homo sapien
agctgaagtgtgagcgcacaggtgg

SEQ ID NO: 4108054 - DNA, 25 bp, Homo sapien
gagaagctgaagtgtgagcgcacag

SEQ ID NO: 4108055 - DNA, 25 bp, Homo sapien
gactctggtcctcctgagacatcat

SEQ ID NO: 4108056 - DNA, 25 bp, Homo sapien
tcctggttgatctctcaacatctct

SEQ ID NO: 4108057 - DNA, 25 bp, Homo sapien
tcccacagtctcctggttgatctct

SEQ ID NO: 4108058 - DNA, 25 bp, Homo sapien
aatctcttgtatcacccagatgaaa

SEQ ID NO: 4108059 - DNA, 25 bp, Homo sapien
gaaatcgatttagaatataccctaa

SEQ ID NO: 4108060 - DNA, 25 bp, Homo sapien
tttttcactttgccccgacctgtga

SEQ ID NO: 4108061 - DNA, 25 bp, Homo sapien
cccgacctgtgaatcagacttctaa

SEQ ID NO: 4108062 - DNA, 25 bp, Homo sapien
actttgccccgacctgtgaatcaga

SEQ ID NO: 4108063 - DNA, 25 bp, Homo sapien
tgccccgacctgtgaatcagacttc

SEQ ID NO: 4108064 - DNA, 25 bp, Homo sapien
tcctgtttgtctaacagctcttgtc

SEQ ID NO: 4108065 - DNA, 25 bp, Homo sapien
gtcctgtttgtctaacagctcttgt

SEQ ID NO: 4108066 - DNA, 25 bp, Homo sapien
acagctcttgtcaacaacagctcca

SEQ ID NO: 4108067 - DNA, 25 bp, Homo sapien
tctaacagctcttgtcaacaacagc

SEQ ID NO: 4108068 - DNA, 25 bp, Homo sapien
tgggtcccggaagagcttactgact

SEQ ID NO: 4108069 - DNA, 25 bp, Homo sapien
catggcttgggtcccggaagagctt

SEQ ID NO: 4108070 - DNA, 25 bp, Homo sapien
gcttgggtcccggaagagcttactg

SEQ ID NO: 4108071 - DNA, 25 bp, Homo sapien
tcccggaagagcttactgacttgta

SEQ ID NO: 4108072 - DNA, 25 bp, Homo sapien
acccatgaaacagaggtctcagcag

SEQ ID NO: 4108073 - DNA, 25 bp, Homo sapien
catgaaacagaggtctcagcagtca

SEQ ID NO: 4108074 - DNA, 25 bp, Homo sapien
gaacccatgaaacagaggtctcagc

SEQ ID NO: 4108075 - DNA, 25 bp, Homo sapien
ccatgaaacagaggtctcagcagtc

SEQ ID NO: 4108076 - DNA, 25 bp, Homo sapien
ctgtgatttgtcttccttctttttc

SEQ ID NO: 4108077 - DNA, 25 bp, Homo sapien
tgtgatttgtcttccttctttttcc

SEQ ID NO: 4108078 - DNA, 25 bp, Homo sapien
tgccacaggttttaccggatcaaat

SEQ ID NO: 4108079 - DNA, 25 bp, Homo sapien
aacctggcccaaaagaatcggcagc

SEQ ID NO: 4108080 - DNA, 25 bp, Homo sapien
ctggcccaaaagaatcggcagcctc

SEQ ID NO: 4108081 - DNA, 25 bp, Homo sapien
ttaccggatcaaatctgcctggcat

SEQ ID NO: 4108082 - DNA, 25 bp, Homo sapien
gagataggctccagagaccattggg

SEQ ID NO: 4108083 - DNA, 25 bp, Homo sapien
gggagataggctccagagaccattg

SEQ ID NO: 4108084 - DNA, 25 bp, Homo sapien
caaggggagataggctccagagacc

SEQ ID NO: 4108085 - DNA, 25 bp, Homo sapien
cctgatacaccattttcaggggcct

SEQ ID NO: 4108086 - DNA, 25 bp, Homo sapien
tatgtactgccttacaagtttgctt

SEQ ID NO: 4108087 - DNA, 25 bp, Homo sapien
aatatgtactgccttacaagtttgc

SEQ ID NO: 4108088 - DNA, 25 bp, Homo sapien
ttacaagtttgcttaaagccaaaca

SEQ ID NO: 4108089 - DNA, 25 bp, Homo sapien
caaatatgtactgccttacaagttt

SEQ ID NO: 4108090 - DNA, 25 bp, Homo sapien
ataagtaacaactggcagctgttac

SEQ ID NO: 4108091 - DNA, 25 bp, Homo sapien
taagtaacaactggcagctgttact

SEQ ID NO: 4108092 - DNA, 25 bp, Homo sapien
gtaacaactggcagctgttacttct

SEQ ID NO: 4108093 - DNA, 25 bp, Homo sapien
agtaacaactggcagctgttacttc

SEQ ID NO: 4108094 - DNA, 25 bp, Homo sapien
cctccaggaccactacagggtgcac

SEQ ID NO: 4108095 - DNA, 25 bp, Homo sapien
cacctccaggaccactacagggtgc

SEQ ID NO: 4108096 - DNA, 25 bp, Homo sapien
gtcacctccaggaccactacagggt

SEQ ID NO: 4108097 - DNA, 25 bp, Homo sapien
gtgtcacctccaggaccactacagg

SEQ ID NO: 4108098 - DNA, 25 bp, Homo sapien
gaactgggagctccatccttgatga

SEQ ID NO: 4108099 - DNA, 25 bp, Homo sapien
tccttgatgagttgtccagaacggc

SEQ ID NO: 4108100 - DNA, 25 bp, Homo sapien
gacttcccaccaaaggcacctctct

SEQ ID NO: 4108101 - DNA, 25 bp, Homo sapien
cagaacggcctctgcatgggacttc

SEQ ID NO: 4108102 - DNA, 25 bp, Homo sapien
tgagtttacatgaggacagccaagc

SEQ ID NO: 4108103 - DNA, 25 bp, Homo sapien
caaaactcacagcaggagtgaccag

SEQ ID NO: 4108104 - DNA, 25 bp, Homo sapien
gcacattgttgtcaggcctttgaag

SEQ ID NO: 4108105 - DNA, 25 bp, Homo sapien
tctttggcgggctgacaacaactgt

SEQ ID NO: 4108106 - DNA, 25 bp, Homo sapien
agggtaactttgagtcataaagagg

SEQ ID NO: 4108107 - DNA, 25 bp, Homo sapien
tgtagacaagggtaactttgagtca

SEQ ID NO: 4108108 - DNA, 25 bp, Homo sapien
agtcataaagaggttgaccccagca

SEQ ID NO: 4108109 - DNA, 25 bp, Homo sapien
taaagaggttgaccccagcagtggt

SEQ ID NO: 4108110 - DNA, 25 bp, Homo sapien
gctgcccaattaaagcaccaaggga

SEQ ID NO: 4108111 - DNA, 25 bp, Homo sapien
tgttctgcatgccagcaacttgatg

SEQ ID NO: 4108112 - DNA, 25 bp, Homo sapien
gacctggttccttacagctgcccaa

SEQ ID NO: 4108113 - DNA, 25 bp, Homo sapien
caccaagggaggttttgtctggaga

SEQ ID NO: 4108114 - DNA, 25 bp, Homo sapien
tgggagctccttggcatatttgcat

SEQ ID NO: 4108115 - DNA, 25 bp, Homo sapien
tctcttgggagctccttggcatatt

SEQ ID NO: 4108116 - DNA, 25 bp, Homo sapien
tccttggcatatttgcatccctgga

SEQ ID NO: 4108117 - DNA, 25 bp, Homo sapien
gagctccttggcatatttgcatccc

SEQ ID NO: 4108118 - DNA, 25 bp, Homo sapien
ctggtcttgagctggggttacttcc

SEQ ID NO: 4108119 - DNA, 25 bp, Homo sapien
tggaccataccagaggagtttctgg

SEQ ID NO: 4108120 - DNA, 25 bp, Homo sapien
tcttgctggcaaagatctagcccac

SEQ ID NO: 4108121 - DNA, 25 bp, Homo sapien
aaagatctagcccacctggaccata

SEQ ID NO: 4108122 - DNA, 25 bp, Homo sapien
tcctggcatggtttcctctgagcag

SEQ ID NO: 4108123 - DNA, 25 bp, Homo sapien
ggtttcctctgagcagccaagctac

SEQ ID NO: 4108124 - DNA, 25 bp, Homo sapien
ctggcatggtttcctctgagcagcc

SEQ ID NO: 4108125 - DNA, 25 bp, Homo sapien
tcacaccagcttcctggcatggttt

SEQ ID NO: 4108126 - DNA, 25 bp, Homo sapien
ctgggtgaaattgcttcttggtgtc

SEQ ID NO: 4108127 - DNA, 25 bp, Homo sapien
ttttcttcagatcccccaaactgca

SEQ ID NO: 4108128 - DNA, 25 bp, Homo sapien
tctctctttctaatgttaattctgc

SEQ ID NO: 4108129 - DNA, 25 bp, Homo sapien
gatttcataacagaatgctttcctg

SEQ ID NO: 4108130 - DNA, 25 bp, Homo sapien
caacacagaaggaccctcatgctgc

SEQ ID NO: 4108131 - DNA, 25 bp, Homo sapien
cccacatagcgagctcttgaagaaa

SEQ ID NO: 4108132 - DNA, 25 bp, Homo sapien
gaaagagaatgtcaccaacacagaa

SEQ ID NO: 4108133 - DNA, 25 bp, Homo sapien
tttaatgccataggttagtgctgcc

SEQ ID NO: 4108134 - DNA, 25 bp, Homo sapien
ctctccaaattgacctctgatattc

SEQ ID NO: 4108135 - DNA, 25 bp, Homo sapien
cctctccaaattgacctctgatatt

SEQ ID NO: 4108136 - DNA, 25 bp, Homo sapien
tgagtcagacggacttttgacctct

SEQ ID NO: 4108137 - DNA, 25 bp, Homo sapien
cactcagcacaggtgagtcagacgg

SEQ ID NO: 4108138 - DNA, 25 bp, Homo sapien
gaagttagattagatggcattcaag

SEQ ID NO: 4108139 - DNA, 25 bp, Homo sapien
cttgaagttagattagatggcattc

SEQ ID NO: 4108140 - DNA, 25 bp, Homo sapien
ggtgaggcagctagttaggaactaa

SEQ ID NO: 4108141 - DNA, 25 bp, Homo sapien
tacaagaaacggaagataatgggtg

SEQ ID NO: 4108142 - DNA, 25 bp, Homo sapien
tatttgggccagtcttgaggattga

SEQ ID NO: 4108143 - DNA, 25 bp, Homo sapien
ctgaatatgtagtccggtcccacca

SEQ ID NO: 4108144 - DNA, 25 bp, Homo sapien
gatctggggtggcaagtataactct

SEQ ID NO: 4108145 - DNA, 25 bp, Homo sapien
ggtggcaagtataactctttctgat

SEQ ID NO: 4108146 - DNA, 25 bp, Homo sapien
aaagatctggggtggcaagtataac

SEQ ID NO: 4108147 - DNA, 25 bp, Homo sapien
tggggtggcaagtataactctttct

SEQ ID NO: 4108148 - DNA, 25 bp, Homo sapien
tcagtaaggtgatctgtgggccaac

SEQ ID NO: 4108149 - DNA, 25 bp, Homo sapien
tgctaactgagtcctgataatgaaa

SEQ ID NO: 4108150 - DNA, 25 bp, Homo sapien
ggatcatgctgtcagtgttggagct

SEQ ID NO: 4108151 - DNA, 25 bp, Homo sapien
gctagagtagaaacaaagggttgct

SEQ ID NO: 4108152 - DNA, 25 bp, Homo sapien
tgtcctcgtagggaacagtcctcat

SEQ ID NO: 4108153 - DNA, 25 bp, Homo sapien
tgtacaggaagaatcctcttgattt

SEQ ID NO: 4108154 - DNA, 25 bp, Homo sapien
tgagaactattcctctaccaggaca

SEQ ID NO: 4108155 - DNA, 25 bp, Homo sapien
taaggatgaggctactagtgtgcat

SEQ ID NO: 4108156 - DNA, 25 bp, Homo sapien
gcttcataagtatcactgctttgca

SEQ ID NO: 4108157 - DNA, 25 bp, Homo sapien
ctggagctgctctaactctgtgtaa

SEQ ID NO: 4108158 - DNA, 25 bp, Homo sapien
tgtgctccttttatcaggtccctgg

SEQ ID NO: 4108159 - DNA, 25 bp, Homo sapien
tggatgcttcataagtatcactgct

SEQ ID NO: 4108160 - DNA, 25 bp, Homo sapien
aatgagaatttctaatctggactct

SEQ ID NO: 4108161 - DNA, 25 bp, Homo sapien
atgagaatttctaatctggactctc

SEQ ID NO: 4108162 - DNA, 25 bp, Homo sapien
ctggttagcaggccctggagtaagt

SEQ ID NO: 4108163 - DNA, 25 bp, Homo sapien
gttagcaggccctggagtaagtaaa

SEQ ID NO: 4108164 - DNA, 25 bp, Homo sapien
ggttagcaggccctggagtaagtaa

SEQ ID NO: 4108165 - DNA, 25 bp, Homo sapien
ttagcaggccctggagtaagtaaag

SEQ ID NO: 4108166 - DNA, 25 bp, Homo sapien
atggagtccactgtgaccttgttgg

SEQ ID NO: 4108167 - DNA, 25 bp, Homo sapien
tggagtccactgtgaccttgttggc

SEQ ID NO: 4108168 - DNA, 25 bp, Homo sapien
accttgttggcaagtatcctgatga

SEQ ID NO: 4108169 - DNA, 25 bp, Homo sapien
ccttgttggcaagtatcctgatgat

SEQ ID NO: 4108170 - DNA, 25 bp, Homo sapien
ttacagtcccacatagcagcggtag

SEQ ID NO: 4108171 - DNA, 25 bp, Homo sapien
cagtcccacatagcagcggtagcaa

SEQ ID NO: 4108172 - DNA, 25 bp, Homo sapien
cacatagcagcggtagcaagatccc

SEQ ID NO: 4108173 - DNA, 25 bp, Homo sapien
cagcggtagcaagatcccataaaac

SEQ ID NO: 4108174 - DNA, 25 bp, Homo sapien
gctatagggaccatgaaatcaagtc

SEQ ID NO: 4108175 - DNA, 25 bp, Homo sapien
tgcagacaggattccacatatctgt

SEQ ID NO: 4108176 - DNA, 25 bp, Homo sapien
gcacagtgacaaatgaagccaacat

SEQ ID NO: 4108177 - DNA, 25 bp, Homo sapien
cataacttatgttcttgggctatag

SEQ ID NO: 4108178 - DNA, 25 bp, Homo sapien
tcagccaataagcaagtgaagccat

SEQ ID NO: 4108179 - DNA, 25 bp, Homo sapien
tcagatatgtgaattgagtccttgc

SEQ ID NO: 4108180 - DNA, 25 bp, Homo sapien
aggagaaagtctggactccaggtat

SEQ ID NO: 4108181 - DNA, 25 bp, Homo sapien
cagaccttcagccaataagcaagtg

SEQ ID NO: 4108182 - DNA, 25 bp, Homo sapien
ccaagtgtgggttgagtggccttcc

SEQ ID NO: 4108183 - DNA, 25 bp, Homo sapien
tacggagccgacctaatggcaaagg

SEQ ID NO: 4108184 - DNA, 25 bp, Homo sapien
gctagaactcagtcatacggagccg

SEQ ID NO: 4108185 - DNA, 25 bp, Homo sapien
gatgatttcaaaagtcgagctcgca

SEQ ID NO: 4108186 - DNA, 25 bp, Homo sapien
taaagacgtgtggactggtgaaaag

SEQ ID NO: 4108187 - DNA, 25 bp, Homo sapien
ctaaagacgtgtggactggtgaaaa

SEQ ID NO: 4108188 - DNA, 25 bp, Homo sapien
gtttggaggttatatagacatcatg

SEQ ID NO: 4108189 - DNA, 25 bp, Homo sapien
ggattcattccaagcatcagagaga

SEQ ID NO: 4108190 - DNA, 25 bp, Homo sapien
tataaaaaaatggtctttcggcaga

SEQ ID NO: 4108191 - DNA, 25 bp, Homo sapien
tccaagcatcagcattgattcagca

SEQ ID NO: 4108192 - DNA, 25 bp, Homo sapien
gtaccaaacaattgccctcaagaag

SEQ ID NO: 4108193 - DNA, 25 bp, Homo sapien
gtgagcgtaccaaacaattgccctc

SEQ ID NO: 4108194 - DNA, 25 bp, Homo sapien
gcgtaccaaacaattgccctcaaga

SEQ ID NO: 4108195 - DNA, 25 bp, Homo sapien
aacaattgccctcaagaagacaaaa

SEQ ID NO: 4108196 - DNA, 25 bp, Homo sapien
gatcgattactcatgccaaacagga

SEQ ID NO: 4108197 - DNA, 25 bp, Homo sapien
tgcacttagtgtgaagggctgcttc

SEQ ID NO: 4108198 - DNA, 25 bp, Homo sapien
tccaagaaacgttgagaagaccgtg

SEQ ID NO: 4108199 - DNA, 25 bp, Homo sapien
ccagaggattgggattcctgtaaca

SEQ ID NO: 4108200 - DNA, 25 bp, Homo sapien
gaaattggcatgttcatgcggtgtc

SEQ ID NO: 4108201 - DNA, 25 bp, Homo sapien
gtggtcttcttaaagtgcataaaaa

SEQ ID NO: 4108202 - DNA, 25 bp, Homo sapien
tggcatgttcatgcggtgtccaaac

SEQ ID NO: 4108203 - DNA, 25 bp, Homo sapien
aacacaggaaattggcatgttcatg

SEQ ID NO: 4108204 - DNA, 25 bp, Homo sapien
tactgagcacctctttcagaccagg

SEQ ID NO: 4108205 - DNA, 25 bp, Homo sapien
tccatcagccataggagaaggcact

SEQ ID NO: 4108206 - DNA, 25 bp, Homo sapien
gaccaggtgtgcgttggaaacttag

SEQ ID NO: 4108207 - DNA, 25 bp, Homo sapien
gaggatcaattacttaaagcacagg

SEQ ID NO: 4108208 - DNA, 25 bp, Homo sapien
taacaaccctcagaattttacttga

SEQ ID NO: 4108209 - DNA, 25 bp, Homo sapien
aaactctaatgtcttgcagataggg

SEQ ID NO: 4108210 - DNA, 25 bp, Homo sapien
tgcagataggggataacaaccctca

SEQ ID NO: 4108211 - DNA, 25 bp, Homo sapien
gataggggataacaaccctcagaat

SEQ ID NO: 4108212 - DNA, 25 bp, Homo sapien
ttctaactcctcggttttctccaca

SEQ ID NO: 4108213 - DNA, 25 bp, Homo sapien
tcttgctctggcctgtcatctgaag

SEQ ID NO: 4108214 - DNA, 25 bp, Homo sapien
tgtgcctctcctattagagaattac

SEQ ID NO: 4108215 - DNA, 25 bp, Homo sapien
aggaaaaagctggtatccattgctt

SEQ ID NO: 4108216 - DNA, 25 bp, Homo sapien
gtgtcgggaggatcaaagagactca

SEQ ID NO: 4108217 - DNA, 25 bp, Homo sapien
aacaatagtaagcagggtgtcggga

SEQ ID NO: 4108218 - DNA, 25 bp, Homo sapien
aaacaatagtaagcagggtgtcggg

SEQ ID NO: 4108219 - DNA, 25 bp, Homo sapien
caagcttgatccaatcaatgtgtta

SEQ ID NO: 4108220 - DNA, 25 bp, Homo sapien
cctacatattgatggagtgacaaaa

SEQ ID NO: 4108221 - DNA, 25 bp, Homo sapien
gatggagtgacaaaaatccgagttt

SEQ ID NO: 4108222 - DNA, 25 bp, Homo sapien
gacataccctcctcctacatattga

SEQ ID NO: 4108223 - DNA, 25 bp, Homo sapien
taccctcctcctacatattgatgga

SEQ ID NO: 4108224 - DNA, 25 bp, Homo sapien
aatgggtggctaaaatcagttcttt

SEQ ID NO: 4108225 - DNA, 25 bp, Homo sapien
tcttggaggtgtagaatgggtggct

SEQ ID NO: 4108226 - DNA, 25 bp, Homo sapien
tggctaaaatcagttctttgtcctc

SEQ ID NO: 4108227 - DNA, 25 bp, Homo sapien
ggtgtagaatgggtggctaaaatca

SEQ ID NO: 4108228 - DNA, 25 bp, Homo sapien
ggcggcaggcttccttttacagcat

SEQ ID NO: 4108229 - DNA, 25 bp, Homo sapien
tccttttacagcataaactgcagca

SEQ ID NO: 4108230 - DNA, 25 bp, Homo sapien
aactgcagcatatctggcccctctg

SEQ ID NO: 4108231 - DNA, 25 bp, Homo sapien
tgctggctcctagacatcctgtggc

SEQ ID NO: 4108232 - DNA, 25 bp, Homo sapien
agtttgcctcatctatactcagagc

SEQ ID NO: 4108233 - DNA, 25 bp, Homo sapien
gtttgcctcatctatactcagagct

SEQ ID NO: 4108234 - DNA, 25 bp, Homo sapien
gttagttctctttgattccgtgtag

SEQ ID NO: 4108235 - DNA, 25 bp, Homo sapien
tcggatggaactccttgcttgagaa

SEQ ID NO: 4108236 - DNA, 25 bp, Homo sapien
ccttctcggatggaactccttgctt

SEQ ID NO: 4108237 - DNA, 25 bp, Homo sapien
caaatgggactggaagtcgatgcag

SEQ ID NO: 4108238 - DNA, 25 bp, Homo sapien
tttgagagagccatggccctgccat

SEQ ID NO: 4108239 - DNA, 25 bp, Homo sapien
tggttttaagtctaacatgtaagtc

SEQ ID NO: 4108240 - DNA, 25 bp, Homo sapien
tttatggttttaagtctaacatgta

SEQ ID NO: 4108241 - DNA, 25 bp, Homo sapien
tttaagtctaacatgtaagtcttta

SEQ ID NO: 4108242 - DNA, 25 bp, Homo sapien
tatggttttaagtctaacatgtaag

SEQ ID NO: 4108243 - DNA, 25 bp, Homo sapien
ccagacttttgaagaagcaaacgat

SEQ ID NO: 4108244 - DNA, 25 bp, Homo sapien
agacttttgaagaagcaaacgattc

SEQ ID NO: 4108245 - DNA, 25 bp, Homo sapien
ccatgtctaggacctggacagcatg

SEQ ID NO: 4108246 - DNA, 25 bp, Homo sapien
ctaggacctggacagcatgaagtaa

SEQ ID NO: 4108247 - DNA, 25 bp, Homo sapien
ctaatacccctagcttcttcagcag

SEQ ID NO: 4108248 - DNA, 25 bp, Homo sapien
tctaatacccctagcttcttcagca

SEQ ID NO: 4108249 - DNA, 25 bp, Homo sapien
ttctaatacccctagcttcttcagc

SEQ ID NO: 4108250 - DNA, 25 bp, Homo sapien
tttctaatacccctagcttcttcag

SEQ ID NO: 4108251 - DNA, 25 bp, Homo sapien
tcatctttagactgcttcaccagcc

SEQ ID NO: 4108252 - DNA, 25 bp, Homo sapien
ttcatctttagactgcttcaccagc

SEQ ID NO: 4108253 - DNA, 25 bp, Homo sapien
taaagagagtgttccaatagggaga

SEQ ID NO: 4108254 - DNA, 25 bp, Homo sapien
tacatatctccaagggtatgtgccc

SEQ ID NO: 4108255 - DNA, 25 bp, Homo sapien
gtggttctgtccctggtacatatct

SEQ ID NO: 4108256 - DNA, 25 bp, Homo sapien
tctccaagggtatgtgccccagcat

SEQ ID NO: 4108257 - DNA, 25 bp, Homo sapien
cctggtacatatctccaagggtatg

SEQ ID NO: 4108258 - DNA, 25 bp, Homo sapien
ttcttatgaaagtgcttttttatgc

SEQ ID NO: 4108259 - DNA, 25 bp, Homo sapien
ttatgcagatagttgttaaatttgg

SEQ ID NO: 4108260 - DNA, 25 bp, Homo sapien
ttttttatgcagatagttgttaaat

SEQ ID NO: 4108261 - DNA, 25 bp, Homo sapien
tgcagatagttgttaaatttggtgt

SEQ ID NO: 4108262 - DNA, 25 bp, Homo sapien
tggaactgggcacaccaagagcttg

SEQ ID NO: 4108263 - DNA, 25 bp, Homo sapien
aactgggcacaccaagagcttggtg

SEQ ID NO: 4108264 - DNA, 25 bp, Homo sapien
ggaactgggcacaccaagagcttgg

SEQ ID NO: 4108265 - DNA, 25 bp, Homo sapien
cctggaactgggcacaccaagagct

SEQ ID NO: 4108266 - DNA, 25 bp, Homo sapien
gctttctctgtatccctgatgtgtt

SEQ ID NO: 4108267 - DNA, 25 bp, Homo sapien
gtactgctttctctgtatccctgat

SEQ ID NO: 4108268 - DNA, 25 bp, Homo sapien
gatgcatcatcgtggtatttatttg

SEQ ID NO: 4108269 - DNA, 25 bp, Homo sapien
tttaagatgcatcatcgtggtattt

SEQ ID NO: 4108270 - DNA, 25 bp, Homo sapien
gccacgagactttgagaaagctgaa

SEQ ID NO: 4108271 - DNA, 25 bp, Homo sapien
tcctgaggtagcttacactgacagc

SEQ ID NO: 4108272 - DNA, 25 bp, Homo sapien
gcctaagacatttaccaagtggaaa

SEQ ID NO: 4108273 - DNA, 25 bp, Homo sapien
gagtcagctatcaagagccacgaga

SEQ ID NO: 4108274 - DNA, 25 bp, Homo sapien
tccaaatggtcagtaagcatgagaa

SEQ ID NO: 4108275 - DNA, 25 bp, Homo sapien
gatatcattagcctcccatccaaaa

SEQ ID NO: 4108276 - DNA, 25 bp, Homo sapien
ctgaaaaagggctcttatctaaaat

SEQ ID NO: 4108277 - DNA, 25 bp, Homo sapien
ggtaagccacatagataacataatt

SEQ ID NO: 4108278 - DNA, 25 bp, Homo sapien
tagaattctgaaggtaacatttgct

SEQ ID NO: 4108279 - DNA, 25 bp, Homo sapien
tactagaattctgaaggtaacattt

SEQ ID NO: 4108280 - DNA, 25 bp, Homo sapien
ccttactagaattctgaaggtaaca

SEQ ID NO: 4108281 - DNA, 25 bp, Homo sapien
cttccttactagaattctgaaggta

SEQ ID NO: 4108282 - DNA, 25 bp, Homo sapien
caacttctggactacagctactaga

SEQ ID NO: 4108283 - DNA, 25 bp, Homo sapien
tcacattgaacattcttgtttggtg

SEQ ID NO: 4108284 - DNA, 25 bp, Homo sapien
tccaacttctggactacagctacta

SEQ ID NO: 4108285 - DNA, 25 bp, Homo sapien
aacattcttgtttggtgatcctaac

SEQ ID NO: 4108286 - DNA, 25 bp, Homo sapien
tgggctgcctctaaggtaggctctt

SEQ ID NO: 4108287 - DNA, 25 bp, Homo sapien
tctaaggtaggctctttgccaggaa

SEQ ID NO: 4108288 - DNA, 25 bp, Homo sapien
gcctctaaggtaggctctttgccag

SEQ ID NO: 4108289 - DNA, 25 bp, Homo sapien
aaggggaccaggtgtcagaacaatg

SEQ ID NO: 4108290 - DNA, 25 bp, Homo sapien
aggtcaacagcattggtagcacgga

SEQ ID NO: 4108291 - DNA, 25 bp, Homo sapien
tgagcccagtgtgaatattgattat

SEQ ID NO: 4108292 - DNA, 25 bp, Homo sapien
tcagttaaaggtcaacagcattggt

SEQ ID NO: 4108293 - DNA, 25 bp, Homo sapien
attggtagcacggatcgttgagctg

SEQ ID NO: 4108294 - DNA, 25 bp, Homo sapien
ccttcacagtagtcttcagtgtgac

SEQ ID NO: 4108295 - DNA, 25 bp, Homo sapien
cgagcaagccttagaagctgaggtc

SEQ ID NO: 4108296 - DNA, 25 bp, Homo sapien
tgtgacagttgtatgaggagaagaa

SEQ ID NO: 4108297 - DNA, 25 bp, Homo sapien
ttaaaatggaggagtggttttgcga

SEQ ID NO: 4108298 - DNA, 25 bp, Homo sapien
tatgctaggaaggtcgctaaaagcg

SEQ ID NO: 4108299 - DNA, 25 bp, Homo sapien
catcgaagaagaaaccttatgctag

SEQ ID NO: 4108300 - DNA, 25 bp, Homo sapien
aaagcgtgcttacagagagcagttc

SEQ ID NO: 4108301 - DNA, 25 bp, Homo sapien
taaccaagacatcgaagaagaaacc

SEQ ID NO: 4108302 - DNA, 25 bp, Homo sapien
gcctgatatgtcatgctggaggcag

SEQ ID NO: 4108303 - DNA, 25 bp, Homo sapien
agaagtgacacccacgtcctgatgc

SEQ ID NO: 4108304 - DNA, 25 bp, Homo sapien
cagcaaaaggccagtgacaacttcc

SEQ ID NO: 4108305 - DNA, 25 bp, Homo sapien
tttaattcagatgagaagtgacacc

SEQ ID NO: 4108306 - DNA, 25 bp, Homo sapien
tctggatagattctaagtttgctcc

SEQ ID NO: 4108307 - DNA, 25 bp, Homo sapien
tcctccgggctatgactaggttcat

SEQ ID NO: 4108308 - DNA, 25 bp, Homo sapien
taagtttgctcctccgggctatgac

SEQ ID NO: 4108309 - DNA, 25 bp, Homo sapien
tgctcctccgggctatgactaggtt

SEQ ID NO: 4108310 - DNA, 25 bp, Homo sapien
aatatgagccctgtttgaaacaata

SEQ ID NO: 4108311 - DNA, 25 bp, Homo sapien
tagcccaagactgacttctcagcag

SEQ ID NO: 4108312 - DNA, 25 bp, Homo sapien
atagcccaagactgacttctcagca

SEQ ID NO: 4108313 - DNA, 25 bp, Homo sapien
gtggaataaaaatatgagccctgtt

SEQ ID NO: 4108314 - DNA, 25 bp, Homo sapien
taagtcatgaggatggcctggagcc

SEQ ID NO: 4108315 - DNA, 25 bp, Homo sapien
acattgtgttcccttgatggtccca

SEQ ID NO: 4108316 - DNA, 25 bp, Homo sapien
gatggtcccagtgcccttctatcat

SEQ ID NO: 4108317 - DNA, 25 bp, Homo sapien
cttgtctggggagacattgtgttcc

SEQ ID NO: 4108318 - DNA, 25 bp, Homo sapien
tcatttcctgattttttggaattag

SEQ ID NO: 4108319 - DNA, 25 bp, Homo sapien
cagtggaatcatttcctgatttttt

SEQ ID NO: 4108320 - DNA, 25 bp, Homo sapien
acccaacaattactctggttttgtg

SEQ ID NO: 4108321 - DNA, 25 bp, Homo sapien
tcctgattttttggaattagtccaa

SEQ ID NO: 4108322 - DNA, 25 bp, Homo sapien
gagactctactggatttaatctggt

SEQ ID NO: 4108323 - DNA, 25 bp, Homo sapien
tggcccctttatggcatgttgtaag

SEQ ID NO: 4108324 - DNA, 25 bp, Homo sapien
ggtgactgtcattgagaacatggag

SEQ ID NO: 4108325 - DNA, 25 bp, Homo sapien
gatgcctggaagcatactatgcctt

SEQ ID NO: 4108326 - DNA, 25 bp, Homo sapien
agaaagttctttaatgtatttggtg

SEQ ID NO: 4108327 - DNA, 25 bp, Homo sapien
tcatccaccacttaggatgcctgca

SEQ ID NO: 4108328 - DNA, 25 bp, Homo sapien
ctgtaaacacatcataggttcctct

SEQ ID NO: 4108329 - DNA, 25 bp, Homo sapien
tctctcttgagaaagttctttaatg

SEQ ID NO: 4108330 - DNA, 25 bp, Homo sapien
ttgttaccctggtaatacaagtcat

SEQ ID NO: 4108331 - DNA, 25 bp, Homo sapien
agtagcctgactcaaagaggtactc

SEQ ID NO: 4108332 - DNA, 25 bp, Homo sapien
ttcactgtaaagtagcctgactcaa

SEQ ID NO: 4108333 - DNA, 25 bp, Homo sapien
gttaccctggtaatacaagtcataa

SEQ ID NO: 4108334 - DNA, 25 bp, Homo sapien
ttcgcaattctagtgtgctttctcc

SEQ ID NO: 4108335 - DNA, 25 bp, Homo sapien
cttcgcaattctagtgtgctttctc

SEQ ID NO: 4108336 - DNA, 25 bp, Homo sapien
tcttcttgcatagcccaccattgct

SEQ ID NO: 4108337 - DNA, 25 bp, Homo sapien
ggagagtacagaacatcagggactc

SEQ ID NO: 4108338 - DNA, 25 bp, Homo sapien
gaacttggtcaaagatacaaatgct

SEQ ID NO: 4108339 - DNA, 25 bp, Homo sapien
caccattgctaactccaagaggttg

SEQ ID NO: 4108340 - DNA, 25 bp, Homo sapien
ttgctgctctttattgttctgtgca

SEQ ID NO: 4108341 - DNA, 25 bp, Homo sapien
tgttctgtgcatgaagtgtttcctg

SEQ ID NO: 4108342 - DNA, 25 bp, Homo sapien
aatgagtctttagatattaataatg

SEQ ID NO: 4108343 - DNA, 25 bp, Homo sapien
aatactgagtagaatttaatgagtc

SEQ ID NO: 4108344 - DNA, 25 bp, Homo sapien
ttggaatccacatacatcgtcccct

SEQ ID NO: 4108345 - DNA, 25 bp, Homo sapien
tggaatccacatacatcgtcccctg

SEQ ID NO: 4108346 - DNA, 25 bp, Homo sapien
tttggaatccacatacatcgtcccc

SEQ ID NO: 4108347 - DNA, 25 bp, Homo sapien
agagcaggaagtccccggagaaagc

SEQ ID NO: 4108348 - DNA, 25 bp, Homo sapien
tctcctgctaacacagttaactctt

SEQ ID NO: 4108349 - DNA, 25 bp, Homo sapien
tgcaactcgcacaacacatcatttg

SEQ ID NO: 4108350 - DNA, 25 bp, Homo sapien
aagctgctatgtttgtctctcctgc

SEQ ID NO: 4108351 - DNA, 25 bp, Homo sapien
tgaacaaggctgttgccgattggtg

SEQ ID NO: 4108352 - DNA, 25 bp, Homo sapien
gatttggtcctgttgtgaacaaggc

SEQ ID NO: 4108353 - DNA, 25 bp, Homo sapien
tgttgccgattggtggagctctgct

SEQ ID NO: 4108354 - DNA, 25 bp, Homo sapien
tggtctgcatatccccatgcaatgt

SEQ ID NO: 4108355 - DNA, 25 bp, Homo sapien
tcctggattgggcaccatgttacct

SEQ ID NO: 4108356 - DNA, 25 bp, Homo sapien
tagatgtcttctgtatgaggctcaa

SEQ ID NO: 4108357 - DNA, 25 bp, Homo sapien
atgttacctcgtcccatgctttcct

SEQ ID NO: 4108358 - DNA, 25 bp, Homo sapien
acattaattggaatattctcatcac

SEQ ID NO: 4108359 - DNA, 25 bp, Homo sapien
tgtagtcaacaaagcagtgggtgag

SEQ ID NO: 4108360 - DNA, 25 bp, Homo sapien
gggtctcctctgttgatcacggata

SEQ ID NO: 4108361 - DNA, 25 bp, Homo sapien
gatagtggcacttaactcctgagaa

SEQ ID NO: 4108362 - DNA, 25 bp, Homo sapien
cagaaaagagaatggccgactcgct

SEQ ID NO: 4108363 - DNA, 25 bp, Homo sapien
gtgttatcgttggtaaatgctatca

SEQ ID NO: 4108364 - DNA, 25 bp, Homo sapien
gatatccagtttctacagcatttcg

SEQ ID NO: 4108365 - DNA, 25 bp, Homo sapien
tacagcatttcggtgttatcgttgg

SEQ ID NO: 4108366 - DNA, 25 bp, Homo sapien
aacttgagcgtactcgatatccagt

SEQ ID NO: 4108367 - DNA, 25 bp, Homo sapien
gtgagtgcaccaagtaagccagggc

SEQ ID NO: 4108368 - DNA, 25 bp, Homo sapien
tagattttcattaagaggctgctct

SEQ ID NO: 4108369 - DNA, 25 bp, Homo sapien
gaacactagattttcattaagaggc

SEQ ID NO: 4108370 - DNA, 25 bp, Homo sapien
ctggataggtgagtgcaccaagtaa

SEQ ID NO: 4108371 - DNA, 25 bp, Homo sapien
agtcaactctgtggagcacagctcg

SEQ ID NO: 4108372 - DNA, 25 bp, Homo sapien
cacagctgccagttggtgaagaatc

SEQ ID NO: 4108373 - DNA, 25 bp, Homo sapien
tgaagaatccgatctctctgcagac

SEQ ID NO: 4108374 - DNA, 25 bp, Homo sapien
ggatttacactgagcagacaactca

SEQ ID NO: 4108375 - DNA, 25 bp, Homo sapien
cttgaacttcaaacagccactccag

SEQ ID NO: 4108376 - DNA, 25 bp, Homo sapien
ttgaacttcaaacagccactccagc

SEQ ID NO: 4108377 - DNA, 25 bp, Homo sapien
cagctgatcgtataggagaactttc

SEQ ID NO: 4108378 - DNA, 25 bp, Homo sapien
cccattcagctgatcgtataggaga

SEQ ID NO: 4108379 - DNA, 25 bp, Homo sapien
tacaccccattcagctgatcgtata

SEQ ID NO: 4108380 - DNA, 25 bp, Homo sapien
gatcgtataggagaactttcacaaa

SEQ ID NO: 4108381 - DNA, 25 bp, Homo sapien
cttttacgtcgttcagattcttaat

SEQ ID NO: 4108382 - DNA, 25 bp, Homo sapien
ttcttttacgtcgttcagattctta

SEQ ID NO: 4108383 - DNA, 25 bp, Homo sapien
tcttttacgtcgttcagattcttaa

SEQ ID NO: 4108384 - DNA, 25 bp, Homo sapien
ttttacgtcgttcagattcttaata

SEQ ID NO: 4108385 - DNA, 25 bp, Homo sapien
tatgaggctccaagtatacatcaac

SEQ ID NO: 4108386 - DNA, 25 bp, Homo sapien
tgtccctgaaggtaagagtcaatgc

SEQ ID NO: 4108387 - DNA, 25 bp, Homo sapien
ggcttttgccacgttaacccatcat

SEQ ID NO: 4108388 - DNA, 25 bp, Homo sapien
cctacagggcaaattgaaaatggca

SEQ ID NO: 4108389 - DNA, 25 bp, Homo sapien
taacattaccaggagtgagacatac

SEQ ID NO: 4108390 - DNA, 25 bp, Homo sapien
tgagacataccaacacaacgtagcc

SEQ ID NO: 4108391 - DNA, 25 bp, Homo sapien
gatacaatgcactcagaaaagccta

SEQ ID NO: 4108392 - DNA, 25 bp, Homo sapien
tggtcacagtttggagaacgctaag

SEQ ID NO: 4108393 - DNA, 25 bp, Homo sapien
caaagaggagatatcttgatggaga

SEQ ID NO: 4108394 - DNA, 25 bp, Homo sapien
agaggagatatcttgatggagaatc

SEQ ID NO: 4108395 - DNA, 25 bp, Homo sapien
tcaaagaggagatatcttgatggag

SEQ ID NO: 4108396 - DNA, 25 bp, Homo sapien
ggagatatcttgatggagaatccat

SEQ ID NO: 4108397 - DNA, 25 bp, Homo sapien
gattgtcaaggatttgggttgcagg

SEQ ID NO: 4108398 - DNA, 25 bp, Homo sapien
tgaagaagattcaggggattgtcaa

SEQ ID NO: 4108399 - DNA, 25 bp, Homo sapien
gattcaggggattgtcaaggatttg

SEQ ID NO: 4108400 - DNA, 25 bp, Homo sapien
tggcatctttgtggcccatactgaa

SEQ ID NO: 4108401 - DNA, 25 bp, Homo sapien
ccattttaaagatgcacatacattc

SEQ ID NO: 4108402 - DNA, 25 bp, Homo sapien
gcacatacattctccaaaaagcatt

SEQ ID NO: 4108403 - DNA, 25 bp, Homo sapien
tgcacatacattctccaaaaagcat

SEQ ID NO: 4108404 - DNA, 25 bp, Homo sapien
ttaaagatgcacatacattctccaa

SEQ ID NO: 4108405 - DNA, 25 bp, Homo sapien
agtcctgaaataatccatggggcat

SEQ ID NO: 4108406 - DNA, 25 bp, Homo sapien
ccagtcctgaaataatccatggggc

SEQ ID NO: 4108407 - DNA, 25 bp, Homo sapien
cagtcctgaaataatccatggggca

SEQ ID NO: 4108408 - DNA, 25 bp, Homo sapien
ctcttctatcttgtttgactccaca

SEQ ID NO: 4108409 - DNA, 25 bp, Homo sapien
cacattccagtatctttctgagagg

SEQ ID NO: 4108410 - DNA, 25 bp, Homo sapien
cctcttctatcttgtttgactccac

SEQ ID NO: 4108411 - DNA, 25 bp, Homo sapien
ataaaaactgaagtaatgtcctcca

SEQ ID NO: 4108412 - DNA, 25 bp, Homo sapien
tataaaaactgaagtaatgtcctcc

SEQ ID NO: 4108413 - DNA, 25 bp, Homo sapien
taaaaactgaagtaatgtcctccat

SEQ ID NO: 4108414 - DNA, 25 bp, Homo sapien
tcctggggctcaaaactccaacaca

SEQ ID NO: 4108415 - DNA, 25 bp, Homo sapien
aacacacgctatccagatctccagg

SEQ ID NO: 4108416 - DNA, 25 bp, Homo sapien
ttgcttagaagtgagtctgacctcc

SEQ ID NO: 4108417 - DNA, 25 bp, Homo sapien
tattgcttagaagtgagtctgacct

SEQ ID NO: 4108418 - DNA, 25 bp, Homo sapien
cattacacagtcatttgggcacttg

SEQ ID NO: 4108419 - DNA, 25 bp, Homo sapien
cattgctacgcagcgacatatcttc

SEQ ID NO: 4108420 - DNA, 25 bp, Homo sapien
aaggtcatcattgctacgcagcgac

SEQ ID NO: 4108421 - DNA, 25 bp, Homo sapien
agtcttcattacacagtcatttggg

SEQ ID NO: 4108422 - DNA, 25 bp, Homo sapien
tatgtggagaaaaccgacggtcttc

SEQ ID NO: 4108423 - DNA, 25 bp, Homo sapien
taggcctccaatatcccatggtgcc

SEQ ID NO: 4108424 - DNA, 25 bp, Homo sapien
ttctaggcctccaatatcccatggt

SEQ ID NO: 4108425 - DNA, 25 bp, Homo sapien
ctattctaggcctccaatatcccat

SEQ ID NO: 4108426 - DNA, 25 bp, Homo sapien
ccacttttggtaggccagagcctct

SEQ ID NO: 4108427 - DNA, 25 bp, Homo sapien
cagctggcttgggtctgtgattgcc

SEQ ID NO: 4108428 - DNA, 25 bp, Homo sapien
tctgtgattgcctctgtgtaggcag

SEQ ID NO: 4108429 - DNA, 25 bp, Homo sapien
gactctgtggtcaggtgtagcagct

SEQ ID NO: 4108430 - DNA, 25 bp, Homo sapien
catcaacctgttttggaccacagag

SEQ ID NO: 4108431 - DNA, 25 bp, Homo sapien
tctggctcctcctaattcaccttta

SEQ ID NO: 4108432 - DNA, 25 bp, Homo sapien
tgaccattccaagtctacaaccaca

SEQ ID NO: 4108433 - DNA, 25 bp, Homo sapien
cttcatggagtagggataaagtgta

SEQ ID NO: 4108434 - DNA, 25 bp, Homo sapien
agagttgctggcaattgctgctttc

SEQ ID NO: 4108435 - DNA, 25 bp, Homo sapien
cttcatgttgtccctagagttgctg

SEQ ID NO: 4108436 - DNA, 25 bp, Homo sapien
cctagagttgctggcaattgctgct

SEQ ID NO: 4108437 - DNA, 25 bp, Homo sapien
ccctagagttgctggcaattgctgc

SEQ ID NO: 4108438 - DNA, 25 bp, Homo sapien
tgaagtctgcagatacacagagagc

SEQ ID NO: 4108439 - DNA, 25 bp, Homo sapien
tcagtctcagttgacatttgaagtc

SEQ ID NO: 4108440 - DNA, 25 bp, Homo sapien
tctctctctggagtcagtctcagtt

SEQ ID NO: 4108441 - DNA, 25 bp, Homo sapien
gaaagaagacacaatcagattctct

SEQ ID NO: 4108442 - DNA, 25 bp, Homo sapien
gaggcaccggtgtgaaacacagaaa

SEQ ID NO: 4108443 - DNA, 25 bp, Homo sapien
taaacaagtctgtgttccaaagtct

SEQ ID NO: 4108444 - DNA, 25 bp, Homo sapien
gaaggatgtatctggtctcagaggc

SEQ ID NO: 4108445 - DNA, 25 bp, Homo sapien
tacaacatccaggacgagaggcacc

SEQ ID NO: 4108446 - DNA, 25 bp, Homo sapien
gcttcatttctattgttaaaggcag

SEQ ID NO: 4108447 - DNA, 25 bp, Homo sapien
tggctagagcaatattttcaacatc

SEQ ID NO: 4108448 - DNA, 25 bp, Homo sapien
tcaaacgttttagagtcatcattaa

SEQ ID NO: 4108449 - DNA, 25 bp, Homo sapien
aggaattcccttatcttcacattgg

SEQ ID NO: 4108450 - DNA, 25 bp, Homo sapien
taaagatgagatactcagctgtctt

SEQ ID NO: 4108451 - DNA, 25 bp, Homo sapien
gatgagatactcagctgtcttgtcc

SEQ ID NO: 4108452 - DNA, 25 bp, Homo sapien
aaagctaaagatgagatactcagct

SEQ ID NO: 4108453 - DNA, 25 bp, Homo sapien
gctaaagatgagatactcagctgtc

SEQ ID NO: 4108454 - DNA, 25 bp, Homo sapien
tagacaccgataggaatatgtgctt

SEQ ID NO: 4108455 - DNA, 25 bp, Homo sapien
ggtacttcaaatgcaatatgctgtg

SEQ ID NO: 4108456 - DNA, 25 bp, Homo sapien
ccttttatcatacacttggcagcca

SEQ ID NO: 4108457 - DNA, 25 bp, Homo sapien
ttttcccggtacttcaaatgcaata

SEQ ID NO: 4108458 - DNA, 25 bp, Homo sapien
aatgttatcactaggagtcactggc

SEQ ID NO: 4108459 - DNA, 25 bp, Homo sapien
cctccaaggtaagcagtgagttgtg

SEQ ID NO: 4108460 - DNA, 25 bp, Homo sapien
ctgaggttgtcaattccaaggacaa

SEQ ID NO: 4108461 - DNA, 25 bp, Homo sapien
tccaaggacaagatttggcagcatt

SEQ ID NO: 4108462 - DNA, 25 bp, Homo sapien
tgccacatgaagtattaaatccctc

SEQ ID NO: 4108463 - DNA, 25 bp, Homo sapien
gattgccagggtgttctttcagatc

SEQ ID NO: 4108464 - DNA, 25 bp, Homo sapien
caaggaatggttctaggtcccacgc

SEQ ID NO: 4108465 - DNA, 25 bp, Homo sapien
ggtcccacgccacgatgatcagagt

SEQ ID NO: 4108466 - DNA, 25 bp, Homo sapien
gttccacttgtacactcacagaagc

SEQ ID NO: 4108467 - DNA, 25 bp, Homo sapien
cttcatttgagtgccattgaatttt

SEQ ID NO: 4108468 - DNA, 25 bp, Homo sapien
tactattccataaggctgtgatcat

SEQ ID NO: 4108469 - DNA, 25 bp, Homo sapien
ataaggctgtgatcatgtctgttgc

SEQ ID NO: 4108470 - DNA, 25 bp, Homo sapien
gccattgaattttagtgtcaaacat

SEQ ID NO: 4108471 - DNA, 25 bp, Homo sapien
ctcatatgatttgctaaccctggac

SEQ ID NO: 4108472 - DNA, 25 bp, Homo sapien
gatttgctaaccctggacactttcg

SEQ ID NO: 4108473 - DNA, 25 bp, Homo sapien
taaccctggacactttcgattgaag

SEQ ID NO: 4108474 - DNA, 25 bp, Homo sapien
cctggacactttcgattgaaggcca

SEQ ID NO: 4108475 - DNA, 25 bp, Homo sapien
cgcagagttccgtgcttctgctcaa

SEQ ID NO: 4108476 - DNA, 25 bp, Homo sapien
cttgccagtccgcagagttccgtgc

SEQ ID NO: 4108477 - DNA, 25 bp, Homo sapien
tgccagtccgcagagttccgtgctt

SEQ ID NO: 4108478 - DNA, 25 bp, Homo sapien
agtccgcagagttccgtgcttctgc

SEQ ID NO: 4108479 - DNA, 25 bp, Homo sapien
agggcggtagtagtgttgtgagtga

SEQ ID NO: 4108480 - DNA, 25 bp, Homo sapien
tttgaagggcggtagtagtgttgtg

SEQ ID NO: 4108481 - DNA, 25 bp, Homo sapien
aagcagtttgaagggcggtagtagt

SEQ ID NO: 4108482 - DNA, 25 bp, Homo sapien
aaagcagtttgaagggcggtagtag

SEQ ID NO: 4108483 - DNA, 25 bp, Homo sapien
gttagtatcagcacatgatcactgg

SEQ ID NO: 4108484 - DNA, 25 bp, Homo sapien
tgttagtatcagcacatgatcactg

SEQ ID NO: 4108485 - DNA, 25 bp, Homo sapien
gaaagtgtattctggtggattgcag

SEQ ID NO: 4108486 - DNA, 25 bp, Homo sapien
cacttaggaactctgtttcagggta

SEQ ID NO: 4108487 - DNA, 25 bp, Homo sapien
ccacagtcacatagacacttaggaa

SEQ ID NO: 4108488 - DNA, 25 bp, Homo sapien
tgcaggtctggaattattcttctct

SEQ ID NO: 4108489 - DNA, 25 bp, Homo sapien
catgggatcgtggagctgtgcaaaa

SEQ ID NO: 4108490 - DNA, 25 bp, Homo sapien
cgaagagccataaactttgcaaggg

SEQ ID NO: 4108491 - DNA, 25 bp, Homo sapien
tcctccatggagagacatgggatcg

SEQ ID NO: 4108492 - DNA, 25 bp, Homo sapien
tcagaataaatgatgcgaagagcca

SEQ ID NO: 4108493 - DNA, 25 bp, Homo sapien
tatgtatattgaaccggccttgaat

SEQ ID NO: 4108494 - DNA, 25 bp, Homo sapien
ttatgtatattgaaccggccttgaa

SEQ ID NO: 4108495 - DNA, 25 bp, Homo sapien
atgtatattgaaccggccttgaatc

SEQ ID NO: 4108496 - DNA, 25 bp, Homo sapien
gtttgtggtgtgcaggaatcagccc

SEQ ID NO: 4108497 - DNA, 25 bp, Homo sapien
cacataaagtagtagggccctccat

SEQ ID NO: 4108498 - DNA, 25 bp, Homo sapien
aaggtaagcatcaattctgctggca

SEQ ID NO: 4108499 - DNA, 25 bp, Homo sapien
ccctgtcctgtttgccacataaagt

SEQ ID NO: 4108500 - DNA, 25 bp, Homo sapien
tctgaacacttaatagtcattatag

SEQ ID NO: 4108501 - DNA, 25 bp, Homo sapien
gaacacttaatagtcattatagcac

SEQ ID NO: 4108502 - DNA, 25 bp, Homo sapien
acttaatagtcattatagcacagtg

SEQ ID NO: 4108503 - DNA, 25 bp, Homo sapien
gtctgttctgcaccacttattactg

SEQ ID NO: 4108504 - DNA, 25 bp, Homo sapien
agacacaaataataagcccacactg

SEQ ID NO: 4108505 - DNA, 25 bp, Homo sapien
gtgaataatcagttgccagcgcaga

SEQ ID NO: 4108506 - DNA, 25 bp, Homo sapien
agcccacactgatagaaatatcttc

SEQ ID NO: 4108507 - DNA, 25 bp, Homo sapien
tgccagcgcagacacaaataataag

SEQ ID NO: 4108508 - DNA, 25 bp, Homo sapien
agaatcagggacctcatctactagt

SEQ ID NO: 4108509 - DNA, 25 bp, Homo sapien
tcatctactagtcctgctaacagtg

SEQ ID NO: 4108510 - DNA, 25 bp, Homo sapien
tcagggacctcatctactagtcctg

SEQ ID NO: 4108511 - DNA, 25 bp, Homo sapien
gacctcatctactagtcctgctaac

SEQ ID NO: 4108512 - DNA, 25 bp, Homo sapien
tttcaattcatgcaaatagagaagc

SEQ ID NO: 4108513 - DNA, 25 bp, Homo sapien
ctaggtttcagtgtctcgtcttgtt

SEQ ID NO: 4108514 - DNA, 25 bp, Homo sapien
ttttcaattcatgcaaatagagaag

SEQ ID NO: 4108515 - DNA, 25 bp, Homo sapien
ggtttcagtgtctcgtcttgttgct

SEQ ID NO: 4108516 - DNA, 25 bp, Homo sapien
ggtaatgatgactttaacatcagtg

SEQ ID NO: 4108517 - DNA, 25 bp, Homo sapien
attggatctggtgattggtggtaat

SEQ ID NO: 4108518 - DNA, 25 bp, Homo sapien
gactttaacatcagtgttcgtcaat

SEQ ID NO: 4108519 - DNA, 25 bp, Homo sapien
gattggtggtaatgatgactttaac

SEQ ID NO: 4108520 - DNA, 25 bp, Homo sapien
ccttacagacaagaattttcaccag

SEQ ID NO: 4108521 - DNA, 25 bp, Homo sapien
gtccacaccttacagacaagaattt

SEQ ID NO: 4108522 - DNA, 25 bp, Homo sapien
cagtgatccctctttaaggttagat

SEQ ID NO: 4108523 - DNA, 25 bp, Homo sapien
gtgatccctctttaaggttagatgc

SEQ ID NO: 4108524 - DNA, 25 bp, Homo sapien
gttatcccgtggattgcacatccca

SEQ ID NO: 4108525 - DNA, 25 bp, Homo sapien
tatgagactccctgagtctcaagat

SEQ ID NO: 4108526 - DNA, 25 bp, Homo sapien
aaaacatttatgagactccctgagt

SEQ ID NO: 4108527 - DNA, 25 bp, Homo sapien
aaatttaggtgtagctcagttatcc

SEQ ID NO: 4108528 - DNA, 25 bp, Homo sapien
gactttcccacataagagtggtatt

SEQ ID NO: 4108529 - DNA, 25 bp, Homo sapien
taggctctggcaacccaaagataag

SEQ ID NO: 4108530 - DNA, 25 bp, Homo sapien
cccaaagataaggcattatcctcat

SEQ ID NO: 4108531 - DNA, 25 bp, Homo sapien
catctgctaggctctggcaacccaa

SEQ ID NO: 4108532 - DNA, 25 bp, Homo sapien
ttctagtcagttctgtgaactaggc

SEQ ID NO: 4108533 - DNA, 25 bp, Homo sapien
tgagttaagaaatgccctggtacat

SEQ ID NO: 4108534 - DNA, 25 bp, Homo sapien
aactcaccttacaagatattttcca

SEQ ID NO: 4108535 - DNA, 25 bp, Homo sapien
aaatgccctggtacattctagtcag

SEQ ID NO: 4108536 - DNA, 25 bp, Homo sapien
ggagctagggattggacattcttcc

SEQ ID NO: 4108537 - DNA, 25 bp, Homo sapien
gttagctgctatctctcgtccactg

SEQ ID NO: 4108538 - DNA, 25 bp, Homo sapien
ttgtgtcttacaacagttagctgct

SEQ ID NO: 4108539 - DNA, 25 bp, Homo sapien
cagttatccaggtagagagtttcac

SEQ ID NO: 4108540 - DNA, 25 bp, Homo sapien
cattctactccatgcagtgacggtt

SEQ ID NO: 4108541 - DNA, 25 bp, Homo sapien
tgacggttaaggaaaagccgctctg

SEQ ID NO: 4108542 - DNA, 25 bp, Homo sapien
gggcggaagtccaccaatgaagtga

SEQ ID NO: 4108543 - DNA, 25 bp, Homo sapien
tggtggaggaaatagcaagagccat

SEQ ID NO: 4108544 - DNA, 25 bp, Homo sapien
gaactgcccctttcacatgcctttc

SEQ ID NO: 4108545 - DNA, 25 bp, Homo sapien
gcagcatttctggtatcccctattc

SEQ ID NO: 4108546 - DNA, 25 bp, Homo sapien
ttgcttctgatcaggaagtagaact

SEQ ID NO: 4108547 - DNA, 25 bp, Homo sapien
aaaagagatagctgcgagtgggaag

SEQ ID NO: 4108548 - DNA, 25 bp, Homo sapien
agtaggacataataagacataggag

SEQ ID NO: 4108549 - DNA, 25 bp, Homo sapien
agaagcttgttggagaatgtccgaa

SEQ ID NO: 4108550 - DNA, 25 bp, Homo sapien
gcttgttggagaatgtccgaaaagg

SEQ ID NO: 4108551 - DNA, 25 bp, Homo sapien
taggagaagtttgttggagtgcata

SEQ ID NO: 4108552 - DNA, 25 bp, Homo sapien
gcttctgaaatgtagacactgaata

SEQ ID NO: 4108553 - DNA, 25 bp, Homo sapien
tggaattgccaaagctcattttgac

SEQ ID NO: 4108554 - DNA, 25 bp, Homo sapien
tatctggcgaaatgaacgccccatc

SEQ ID NO: 4108555 - DNA, 25 bp, Homo sapien
cattttgactatatccagcaattca

SEQ ID NO: 4108556 - DNA, 25 bp, Homo sapien
ggttgttattaatgtgcagcaaaat

SEQ ID NO: 4108557 - DNA, 25 bp, Homo sapien
ttgcaaggttgttattaatgtgcag

SEQ ID NO: 4108558 - DNA, 25 bp, Homo sapien
tattaatgtgcagcaaaattatagt

SEQ ID NO: 4108559 - DNA, 25 bp, Homo sapien
cttctttgcaaggttgttattaatg

SEQ ID NO: 4108560 - DNA, 25 bp, Homo sapien
gaacgtgcagcaccaagtgtactcc

SEQ ID NO: 4108561 - DNA, 25 bp, Homo sapien
gctgcccacctgatcgctgatttgg

SEQ ID NO: 4108562 - DNA, 25 bp, Homo sapien
caagactgaaagtccgaacgtgcag

SEQ ID NO: 4108563 - DNA, 25 bp, Homo sapien
cgaatgaatccgtagcctcagcgct

SEQ ID NO: 4108564 - DNA, 25 bp, Homo sapien
cgcagctccggatgcgtccggtccc

SEQ ID NO: 4108565 - DNA, 25 bp, Homo sapien
cgcgcgtgttgcacgtggctccaca

SEQ ID NO: 4108566 - DNA, 25 bp, Homo sapien
gcaacgcgcgtgttgcacgtggctc

SEQ ID NO: 4108567 - DNA, 25 bp, Homo sapien
cgcccgggctgagggcaacgcgcgt

SEQ ID NO: 4108568 - DNA, 25 bp, Homo sapien
cagtctgtgcgctggtctgtccgtc

SEQ ID NO: 4108569 - DNA, 25 bp, Homo sapien
gcgggattctcgctttgctgcgctc

SEQ ID NO: 4108570 - DNA, 25 bp, Homo sapien
ggagcacgcgagtgttgctgtctat

SEQ ID NO: 4108571 - DNA, 25 bp, Homo sapien
ctggccgcttcgctcggtaagagga

SEQ ID NO: 4108572 - DNA, 25 bp, Homo sapien
tctgctcttctgtccgtctgcacgt

SEQ ID NO: 4108573 - DNA, 25 bp, Homo sapien
gtctgcacgtctgtcagtccgaccg

SEQ ID NO: 4108574 - DNA, 25 bp, Homo sapien
acgtctgtcagtccgaccgtctgtg

SEQ ID NO: 4108575 - DNA, 25 bp, Homo sapien
tcagtccgaccgtctgtgggtccga

SEQ ID NO: 4108576 - DNA, 25 bp, Homo sapien
tatttaactgctagtaaaaggagct

SEQ ID NO: 4108577 - DNA, 25 bp, Homo sapien
tcggtcgcggcttgtgtccccgctg

SEQ ID NO: 4108578 - DNA, 25 bp, Homo sapien
gcagtgtcggctgggatcccacaca

SEQ ID NO: 4108579 - DNA, 25 bp, Homo sapien
gtctctgctccggacgcgctcagaa

SEQ ID NO: 4108580 - DNA, 25 bp, Homo sapien
tcttggtgccttgattggtttgatt

SEQ ID NO: 4108581 - DNA, 25 bp, Homo sapien
ggtgccttgattggtttgatttagt

SEQ ID NO: 4108582 - DNA, 25 bp, Homo sapien
tggatatcccccctgcgtcttggtg

SEQ ID NO: 4108583 - DNA, 25 bp, Homo sapien
cttgatcgaactgtggatatccccc

SEQ ID NO: 4108584 - DNA, 25 bp, Homo sapien
caaacctgaatagctgacagcaacc

SEQ ID NO: 4108585 - DNA, 25 bp, Homo sapien
cctacatcttcaggaggtgatcagg

SEQ ID NO: 4108586 - DNA, 25 bp, Homo sapien
taaattggcgattgcaatgaagcac

SEQ ID NO: 4108587 - DNA, 25 bp, Homo sapien
aaagagcattgcaaactttctacca

SEQ ID NO: 4108588 - DNA, 25 bp, Homo sapien
aagaaatataactgcccacccctat

SEQ ID NO: 4108589 - DNA, 25 bp, Homo sapien
caaaggatcaaaggagtaggtgtat

SEQ ID NO: 4108590 - DNA, 25 bp, Homo sapien
tctgtactctaaacacattcttagg

SEQ ID NO: 4108591 - DNA, 25 bp, Homo sapien
gcatttgaatgaaatcttatacaga

SEQ ID NO: 4108592 - DNA, 25 bp, Homo sapien
catgaatgcatagcaatccacgtat

SEQ ID NO: 4108593 - DNA, 25 bp, Homo sapien
tcatgcctggagaggataaatctaa

SEQ ID NO: 4108594 - DNA, 25 bp, Homo sapien
caaaacatagatagagctcttggct

SEQ ID NO: 4108595 - DNA, 25 bp, Homo sapien
tactgccaagatagtagattactcg

SEQ ID NO: 4108596 - DNA, 25 bp, Homo sapien
gtatccataaccatgcactgctctg

SEQ ID NO: 4108597 - DNA, 25 bp, Homo sapien
tggctaataccacagttctcaaggt

SEQ ID NO: 4108598 - DNA, 25 bp, Homo sapien
gaggcgctcgctccttcattaaata

SEQ ID NO: 4108599 - DNA, 25 bp, Homo sapien
tcaaggtaaccatactcaactggga

SEQ ID NO: 4108600 - DNA, 25 bp, Homo sapien
tctaagaactagtgaagaggtttac

SEQ ID NO: 4108601 - DNA, 25 bp, Homo sapien
tccctggttagtatgtccctcaagt

SEQ ID NO: 4108602 - DNA, 25 bp, Homo sapien
tagtctgcatgcaggaactccctgg

SEQ ID NO: 4108603 - DNA, 25 bp, Homo sapien
tcgcagaacgttttacaagctccaa

SEQ ID NO: 4108604 - DNA, 25 bp, Homo sapien
ggcaaaaatccagatcaactttgca

SEQ ID NO: 4108605 - DNA, 25 bp, Homo sapien
gtctaattagctttactctgaacaa

SEQ ID NO: 4108606 - DNA, 25 bp, Homo sapien
tatgactaacttccccatttaatag

SEQ ID NO: 4108607 - DNA, 25 bp, Homo sapien
tgcacattgttctaacagcttcatt

SEQ ID NO: 4108608 - DNA, 25 bp, Homo sapien
agaagaaatggctttcattgtcgac

SEQ ID NO: 4108609 - DNA, 25 bp, Homo sapien
gaagaaatggctttcattgtcgaca

SEQ ID NO: 4108610 - DNA, 25 bp, Homo sapien
gaactttccaggtgatataatatat

SEQ ID NO: 4108611 - DNA, 25 bp, Homo sapien
atacaagtccacagaaatgtagagc

SEQ ID NO: 4108612 - DNA, 25 bp, Homo sapien
tctagaatcataaagatcctttgtc

SEQ ID NO: 4108613 - DNA, 25 bp, Homo sapien
tgttttacaaatgcatcatcgctga

SEQ ID NO: 4108614 - DNA, 25 bp, Homo sapien
gggttatacaactgccaaaagacat

SEQ ID NO: 4108615 - DNA, 25 bp, Homo sapien
caattccaggatctatactggtgac

SEQ ID NO: 4108616 - DNA, 25 bp, Homo sapien
tgtttttgcaatatcccctccactg

SEQ ID NO: 4108617 - DNA, 25 bp, Homo sapien
gagagcaattcgatgcattcaaaca

SEQ ID NO: 4108618 - DNA, 25 bp, Homo sapien
agggccatgcgcctccttggtaaag

SEQ ID NO: 4108619 - DNA, 25 bp, Homo sapien
tcgtggagggccatgcgcctccttg

SEQ ID NO: 4108620 - DNA, 25 bp, Homo sapien
catgcgcctccttggtaaagccttc

SEQ ID NO: 4108621 - DNA, 25 bp, Homo sapien
ctgtagaatctcgtggagggccatg

SEQ ID NO: 4108622 - DNA, 25 bp, Homo sapien
tttcactcctgttgggtagcattag

SEQ ID NO: 4108623 - DNA, 25 bp, Homo sapien
tactttcagcgctaaagaacaaagc

SEQ ID NO: 4108624 - DNA, 25 bp, Homo sapien
taagaaactttctactaagttgcag

SEQ ID NO: 4108625 - DNA, 25 bp, Homo sapien
cagagttggatctgagcccaggtct

SEQ ID NO: 4108626 - DNA, 25 bp, Homo sapien
cttgctagatcctttgggcaaatct

SEQ ID NO: 4108627 - DNA, 25 bp, Homo sapien
tcttctcttgctagatcctttgggc

SEQ ID NO: 4108628 - DNA, 25 bp, Homo sapien
tctcttgctagatcctttgggcaaa

SEQ ID NO: 4108629 - DNA, 25 bp, Homo sapien
ctctcttctcttgctagatcctttg

SEQ ID NO: 4108630 - DNA, 25 bp, Homo sapien
gatagtcagtacatgtagagaaagc

SEQ ID NO: 4108631 - DNA, 25 bp, Homo sapien
tgtgactcaaaccacaactttacag

SEQ ID NO: 4108632 - DNA, 25 bp, Homo sapien
gaaagcaggaacaagctatcatttc

SEQ ID NO: 4108633 - DNA, 25 bp, Homo sapien
caatgctatagaatgtgacaaccct

SEQ ID NO: 4108634 - DNA, 25 bp, Homo sapien
tactttgaggaatgaagcagaccag

SEQ ID NO: 4108635 - DNA, 25 bp, Homo sapien
tatagaagcccctgttactgtagag

SEQ ID NO: 4108636 - DNA, 25 bp, Homo sapien
tactgtagagtggatgcacgaccac

SEQ ID NO: 4108637 - DNA, 25 bp, Homo sapien
tctaccaccatgctaggattcgggc

SEQ ID NO: 4108638 - DNA, 25 bp, Homo sapien
tctgtctccgatcaacacgggaggc

SEQ ID NO: 4108639 - DNA, 25 bp, Homo sapien
gatcaacacgggaggctgtgctttg

SEQ ID NO: 4108640 - DNA, 25 bp, Homo sapien
tctccgatcaacacgggaggctgtg

SEQ ID NO: 4108641 - DNA, 25 bp, Homo sapien
tccagatctgtctccgatcaacacg

SEQ ID NO: 4108642 - DNA, 25 bp, Homo sapien
tatggcccagcattactccggagga

SEQ ID NO: 4108643 - DNA, 25 bp, Homo sapien
cagtggaaatgcgagtatatggccc

SEQ ID NO: 4108644 - DNA, 25 bp, Homo sapien
agtgctattaagagatgttcctacc

SEQ ID NO: 4108645 - DNA, 25 bp, Homo sapien
gggtgagcgtgccacttcccagaac

SEQ ID NO: 4108646 - DNA, 25 bp, Homo sapien
tcagcacacattccaggtccaaatc

SEQ ID NO: 4108647 - DNA, 25 bp, Homo sapien
agcacacattccaggtccaaatcca

SEQ ID NO: 4108648 - DNA, 25 bp, Homo sapien
cacattccaggtccaaatccaattc

SEQ ID NO: 4108649 - DNA, 25 bp, Homo sapien
attccaggtccaaatccaattccca

SEQ ID NO: 4108650 - DNA, 25 bp, Homo sapien
taaagcggactgctgattcactcct

SEQ ID NO: 4108651 - DNA, 25 bp, Homo sapien
tgctccggagccaaacaaccaacaa

SEQ ID NO: 4108652 - DNA, 25 bp, Homo sapien
caaattcctgctcaattcgaaggga

SEQ ID NO: 4108653 - DNA, 25 bp, Homo sapien
attcactcctaggaacgcccgggct

SEQ ID NO: 4108654 - DNA, 25 bp, Homo sapien
tccagatgaagaatgccagcactag

SEQ ID NO: 4108655 - DNA, 25 bp, Homo sapien
taagttccttggacagagagggccc

SEQ ID NO: 4108656 - DNA, 25 bp, Homo sapien
cagagcaggagcactatcgatacca

SEQ ID NO: 4108657 - DNA, 25 bp, Homo sapien
caggagcctcacaacacattgatgg

SEQ ID NO: 4108658 - DNA, 25 bp, Homo sapien
cagcgaggtattattcttgcatgcc

SEQ ID NO: 4108659 - DNA, 25 bp, Homo sapien
cgagctctaaagtcagcgaggtatt

SEQ ID NO: 4108660 - DNA, 25 bp, Homo sapien
tcttgcatgcctgaatcataaagtc

SEQ ID NO: 4108661 - DNA, 25 bp, Homo sapien
caggacacgttttgaaatagcaccg

SEQ ID NO: 4108662 - DNA, 25 bp, Homo sapien
ttccagcaaatcacgttcacagctt

SEQ ID NO: 4108663 - DNA, 25 bp, Homo sapien
cagcaaatcacgttcacagcttgat

SEQ ID NO: 4108664 - DNA, 25 bp, Homo sapien
agcttccagcaaatcacgttcacag

SEQ ID NO: 4108665 - DNA, 25 bp, Homo sapien
tccagcaaatcacgttcacagcttg

SEQ ID NO: 4108666 - DNA, 25 bp, Homo sapien
caataatcatggtagggtgaaggat

SEQ ID NO: 4108667 - DNA, 25 bp, Homo sapien
gcaataatcatggtagggtgaagga

SEQ ID NO: 4108668 - DNA, 25 bp, Homo sapien
cttacacagtgtgacacatcgtcaa

SEQ ID NO: 4108669 - DNA, 25 bp, Homo sapien
ttacacagtgtgacacatcgtcaac

SEQ ID NO: 4108670 - DNA, 25 bp, Homo sapien
gtccccattaacagttcggaatgcc

SEQ ID NO: 4108671 - DNA, 25 bp, Homo sapien
taacagttcggaatgcccatctcca

SEQ ID NO: 4108672 - DNA, 25 bp, Homo sapien
cccattaacagttcggaatgcccat

SEQ ID NO: 4108673 - DNA, 25 bp, Homo sapien
tcggaatgcccatctccatgcgatt

SEQ ID NO: 4108674 - DNA, 25 bp, Homo sapien
tctgtcgttctacgccaggaaaatc

SEQ ID NO: 4108675 - DNA, 25 bp, Homo sapien
tcttggcgacttactagcggcttct

SEQ ID NO: 4108676 - DNA, 25 bp, Homo sapien
tactagcggcttctgtcgttctacg

SEQ ID NO: 4108677 - DNA, 25 bp, Homo sapien
tcctgctgtaggtcttggcgactta

SEQ ID NO: 4108678 - DNA, 25 bp, Homo sapien
ctttgagggtcaacatttccaggct

SEQ ID NO: 4108679 - DNA, 25 bp, Homo sapien
ctttggcaggcagctctagtgaagc

SEQ ID NO: 4108680 - DNA, 25 bp, Homo sapien
tccaggcttcgaactgacagctaca

SEQ ID NO: 4108681 - DNA, 25 bp, Homo sapien
tcagttgctggtgcgacaagatcct

SEQ ID NO: 4108682 - DNA, 25 bp, Homo sapien
caaaatgggtcgacaaatcttagag

SEQ ID NO: 4108683 - DNA, 25 bp, Homo sapien
tcgacttctgactcaagatgtggca

SEQ ID NO: 4108684 - DNA, 25 bp, Homo sapien
gacatgcttccctaggtataaagaa

SEQ ID NO: 4108685 - DNA, 25 bp, Homo sapien
tgcaggttccaaacatagacatgct

SEQ ID NO: 4108686 - DNA, 25 bp, Homo sapien
taaagtcagtgcaaggtatttacta

SEQ ID NO: 4108687 - DNA, 25 bp, Homo sapien
ataaagtcagtgcaaggtatttact

SEQ ID NO: 4108688 - DNA, 25 bp, Homo sapien
agtcagtgcaaggtatttactatca

SEQ ID NO: 4108689 - DNA, 25 bp, Homo sapien
aagtcagtgcaaggtatttactatc

SEQ ID NO: 4108690 - DNA, 25 bp, Homo sapien
tgcaaattaaaataacaagatttta

SEQ ID NO: 4108691 - DNA, 25 bp, Homo sapien
tctcccagatgcaaattaaaataac

SEQ ID NO: 4108692 - DNA, 25 bp, Homo sapien
tcccagatgcaaattaaaataacaa

SEQ ID NO: 4108693 - DNA, 25 bp, Homo sapien
gatgcaaattaaaataacaagattt

SEQ ID NO: 4108694 - DNA, 25 bp, Homo sapien
tgcctgattcaggtctccttgctca

SEQ ID NO: 4108695 - DNA, 25 bp, Homo sapien
tctgctattgcctgattcaggtctc

SEQ ID NO: 4108696 - DNA, 25 bp, Homo sapien
aatgccgttctctggagtggccgtc

SEQ ID NO: 4108697 - DNA, 25 bp, Homo sapien
gactttctgatttaacaatgccgtt

SEQ ID NO: 4108698 - DNA, 25 bp, Homo sapien
ttcttgattctgagcctccagccgc

SEQ ID NO: 4108699 - DNA, 25 bp, Homo sapien
tcttgattctgagcctccagccgcc

SEQ ID NO: 4108700 - DNA, 25 bp, Homo sapien
ttctttcttgattctgagcctccag

SEQ ID NO: 4108701 - DNA, 25 bp, Homo sapien
tttcttctttcttgattctgagcct

SEQ ID NO: 4108702 - DNA, 25 bp, Homo sapien
tggctcaaagcatcatacctctgta

SEQ ID NO: 4108703 - DNA, 25 bp, Homo sapien
cagtactgtctacattggctcaaag

SEQ ID NO: 4108704 - DNA, 25 bp, Homo sapien
aaactaagtttgcaggagatttgac

SEQ ID NO: 4108705 - DNA, 25 bp, Homo sapien
gtgcatcacattgggaacataggaa

SEQ ID NO: 4108706 - DNA, 25 bp, Homo sapien
ggctgcgagtcagtttaccttttcc

SEQ ID NO: 4108707 - DNA, 25 bp, Homo sapien
cctggtctggcagaagattcctcac

SEQ ID NO: 4108708 - DNA, 25 bp, Homo sapien
gacagcaaggctgcgagtcagttta

SEQ ID NO: 4108709 - DNA, 25 bp, Homo sapien
ctggtctggcagaagattcctcaca

SEQ ID NO: 4108710 - DNA, 25 bp, Homo sapien
taatgataatggcaaggggatatac

SEQ ID NO: 4108711 - DNA, 25 bp, Homo sapien
tgcacacaaaggtggatcccattca

SEQ ID NO: 4108712 - DNA, 25 bp, Homo sapien
ttaagagtcatgcacacaaaggtgg

SEQ ID NO: 4108713 - DNA, 25 bp, Homo sapien
ggtggatcccattcatgcaattaat

SEQ ID NO: 4108714 - DNA, 25 bp, Homo sapien
aaacaaatttaatactctgtgacaa

SEQ ID NO: 4108715 - DNA, 25 bp, Homo sapien
caaatttaatactctgtgacaaacc

SEQ ID NO: 4108716 - DNA, 25 bp, Homo sapien
actattttagaatgttgcataagca

SEQ ID NO: 4108717 - DNA, 25 bp, Homo sapien
attttagaatgttgcataagcaggg

SEQ ID NO: 4108718 - DNA, 25 bp, Homo sapien
tacttttgtcttgactgcacccagc

SEQ ID NO: 4108719 - DNA, 25 bp, Homo sapien
cctactaatcttgctgtaaggagca

SEQ ID NO: 4108720 - DNA, 25 bp, Homo sapien
gaggaaaattcagcactactgtgcc

SEQ ID NO: 4108721 - DNA, 25 bp, Homo sapien
gagctgagaggtaagacatctccaa

SEQ ID NO: 4108722 - DNA, 25 bp, Homo sapien
aagatagcctgtccatgccttatga

SEQ ID NO: 4108723 - DNA, 25 bp, Homo sapien
tctcagagcccaagtaaaataaagc

SEQ ID NO: 4108724 - DNA, 25 bp, Homo sapien
tcctcctggtaccttgtcaaatggg

SEQ ID NO: 4108725 - DNA, 25 bp, Homo sapien
tacgaaacatagtaatggccactga

SEQ ID NO: 4108726 - DNA, 25 bp, Homo sapien
tattctctaaaaaggtagcacggcc

SEQ ID NO: 4108727 - DNA, 25 bp, Homo sapien
cggtggtacctaatgaaggcattgc

SEQ ID NO: 4108728 - DNA, 25 bp, Homo sapien
cacattttgtaagtgccggtggtac

SEQ ID NO: 4108729 - DNA, 25 bp, Homo sapien
gacagactgaaccatcaggtatggg

SEQ ID NO: 4108730 - DNA, 25 bp, Homo sapien
cctcttgcaggctggaaaaactgga

SEQ ID NO: 4108731 - DNA, 25 bp, Homo sapien
taagtctatgcctgtagaatccgtg

SEQ ID NO: 4108732 - DNA, 25 bp, Homo sapien
gaatccgtgtattcttggctgcaat

SEQ ID NO: 4108733 - DNA, 25 bp, Homo sapien
tgttaatcagaaactcgtgtaagtc

SEQ ID NO: 4108734 - DNA, 25 bp, Homo sapien
gaaactcgtgtaagtctatgcctgt

SEQ ID NO: 4108735 - DNA, 25 bp, Homo sapien
tgctccattttcaaaagtatcatcc

SEQ ID NO: 4108736 - DNA, 25 bp, Homo sapien
aaatcaataatttcctgctccattt

SEQ ID NO: 4108737 - DNA, 25 bp, Homo sapien
cattttcaaaagtatcatcctgtcc

SEQ ID NO: 4108738 - DNA, 25 bp, Homo sapien
ttgttgtcagcaatgaaatcaataa

SEQ ID NO: 4108739 - DNA, 25 bp, Homo sapien
aataagctgccactcgatggacaag

SEQ ID NO: 4108740 - DNA, 25 bp, Homo sapien
cctctgatacgatgacatctgaggg

SEQ ID NO: 4108741 - DNA, 25 bp, Homo sapien
cactcgatggacaagcatcctctga

SEQ ID NO: 4108742 - DNA, 25 bp, Homo sapien
ccacattgtgatccaatccaaaata

SEQ ID NO: 4108743 - DNA, 25 bp, Homo sapien
tttctgcctctaggttcggagcttt

SEQ ID NO: 4108744 - DNA, 25 bp, Homo sapien
gctttttattactccagaaactaca

SEQ ID NO: 4108745 - DNA, 25 bp, Homo sapien
aagtagaattgggttttagaggcag

SEQ ID NO: 4108746 - DNA, 25 bp, Homo sapien
tgcctctaggttcggagctttttat

SEQ ID NO: 4108747 - DNA, 25 bp, Homo sapien
aattggcttgtatggtactccaaag

SEQ ID NO: 4108748 - DNA, 25 bp, Homo sapien
tgactcagtgaaacaatgaaccggt

SEQ ID NO: 4108749 - DNA, 25 bp, Homo sapien
catgttattatgcttttggtgactc

SEQ ID NO: 4108750 - DNA, 25 bp, Homo sapien
tactccaaagatatataggttcaag

SEQ ID NO: 4108751 - DNA, 25 bp, Homo sapien
taaagcatacagacataacactgag

SEQ ID NO: 4108752 - DNA, 25 bp, Homo sapien
tgagaaagctactaagcccagtgct

SEQ ID NO: 4108753 - DNA, 25 bp, Homo sapien
gcttgggaggattacgtacatgcac

SEQ ID NO: 4108754 - DNA, 25 bp, Homo sapien
aacactgagaagcaagcctaaaaac

SEQ ID NO: 4108755 - DNA, 25 bp, Homo sapien
acttccaacactgaactgatgatga

SEQ ID NO: 4108756 - DNA, 25 bp, Homo sapien
tttcttatcagtggtaataaactga

SEQ ID NO: 4108757 - DNA, 25 bp, Homo sapien
gctccagggtactaatttcttgcaa

SEQ ID NO: 4108758 - DNA, 25 bp, Homo sapien
ttgacagaaaggcacaatactttgc

SEQ ID NO: 4108759 - DNA, 25 bp, Homo sapien
aactcattgttcatgtatagtgaag

SEQ ID NO: 4108760 - DNA, 25 bp, Homo sapien
aatgtaatgcttattctaggtgaaa

SEQ ID NO: 4108761 - DNA, 25 bp, Homo sapien
cactatatattttacagccctgcat

SEQ ID NO: 4108762 - DNA, 25 bp, Homo sapien
tactggtattactggtaatgtacca

SEQ ID NO: 4108763 - DNA, 25 bp, Homo sapien
gtaatcataaggcttattctaatta

SEQ ID NO: 4108764 - DNA, 25 bp, Homo sapien
atcatggagaaactatttgaatttt

SEQ ID NO: 4108765 - DNA, 25 bp, Homo sapien
gaatgaaaatcgtggccttcctagt

SEQ ID NO: 4108766 - DNA, 25 bp, Homo sapien
ggaagacatggaagtgtgaatgaaa

SEQ ID NO: 4108767 - DNA, 25 bp, Homo sapien
tgcctggtacctgagaggcatttgg

SEQ ID NO: 4108768 - DNA, 25 bp, Homo sapien
tcagggacagattaaaaaagtcaca

SEQ ID NO: 4108769 - DNA, 25 bp, Homo sapien
gcaaatgaacatttagcgcggctat

SEQ ID NO: 4108770 - DNA, 25 bp, Homo sapien
gcgcggctattcataaatcactata

SEQ ID NO: 4108771 - DNA, 25 bp, Homo sapien
tgattgtatcaatgctattttggtg

SEQ ID NO: 4108772 - DNA, 25 bp, Homo sapien
aaattatctcagaatgtggactttc

SEQ ID NO: 4108773 - DNA, 25 bp, Homo sapien
gtcttctaatatccccaggctctgt

SEQ ID NO: 4108774 - DNA, 25 bp, Homo sapien
ggctctgtaatctgataaactccag

SEQ ID NO: 4108775 - DNA, 25 bp, Homo sapien
tatctcgcttcaagataaaccgctt

SEQ ID NO: 4108776 - DNA, 25 bp, Homo sapien
caagataaaccgcttctgggattct

SEQ ID NO: 4108777 - DNA, 25 bp, Homo sapien
ctttatcaatactagagttatctcg

SEQ ID NO: 4108778 - DNA, 25 bp, Homo sapien
aatactagagttatctcgcttcaag

SEQ ID NO: 4108779 - DNA, 25 bp, Homo sapien
ctgcgccaagcaccacccatgcagc

SEQ ID NO: 4108780 - DNA, 25 bp, Homo sapien
ctgtagggagtggaacgactgccat

SEQ ID NO: 4108781 - DNA, 25 bp, Homo sapien
gctacaccggttgatcatcggtccg

SEQ ID NO: 4108782 - DNA, 25 bp, Homo sapien
catcggtccgtattgataatccagc

SEQ ID NO: 4108783 - DNA, 25 bp, Homo sapien
gatatgcgactgacaaagcttttct

SEQ ID NO: 4108784 - DNA, 25 bp, Homo sapien
aagaaatcattttgaaagcttgggg

SEQ ID NO: 4108785 - DNA, 25 bp, Homo sapien
agaaatcattttgaaagcttgggga

SEQ ID NO: 4108786 - DNA, 25 bp, Homo sapien
aggaggcagaatgccggtgaaaaaa

SEQ ID NO: 4108787 - DNA, 25 bp, Homo sapien
cagaatgccggtgaaaaaagaggaa

SEQ ID NO: 4108788 - DNA, 25 bp, Homo sapien
agaggaagtggctagttcaaggtag

SEQ ID NO: 4108789 - DNA, 25 bp, Homo sapien
gaaggaggcagaatgccggtgaaaa

SEQ ID NO: 4108790 - DNA, 25 bp, Homo sapien
caattgatttacttcgtctgtcatc

SEQ ID NO: 4108791 - DNA, 25 bp, Homo sapien
tcgtctgtcatctctaaatggatgc

SEQ ID NO: 4108792 - DNA, 25 bp, Homo sapien
tcatctctaaatggatgcattctgt

SEQ ID NO: 4108793 - DNA, 25 bp, Homo sapien
ctctctcttcaattgatttacttcg

SEQ ID NO: 4108794 - DNA, 25 bp, Homo sapien
atcgtgtgcaaatattctctccctc

SEQ ID NO: 4108795 - DNA, 25 bp, Homo sapien
tcgtgtgcaaatattctctccctca

SEQ ID NO: 4108796 - DNA, 25 bp, Homo sapien
cgtgtgcaaatattctctccctcac

SEQ ID NO: 4108797 - DNA, 25 bp, Homo sapien
tgctgttggaaggagcgcactaaag

SEQ ID NO: 4108798 - DNA, 25 bp, Homo sapien
ttggaaggagcgcactaaagaggca

SEQ ID NO: 4108799 - DNA, 25 bp, Homo sapien
aggagcgcactaaagaggcaattaa

SEQ ID NO: 4108800 - DNA, 25 bp, Homo sapien
ggaaggagcgcactaaagaggcaat

SEQ ID NO: 4108801 - DNA, 25 bp, Homo sapien
tgtctggggaatgaggaagccttac

SEQ ID NO: 4108802 - DNA, 25 bp, Homo sapien
ccaaaatcacctctagttttcttca

SEQ ID NO: 4108803 - DNA, 25 bp, Homo sapien
gggaaagggttcaaatcaaagcaga

SEQ ID NO: 4108804 - DNA, 25 bp, Homo sapien
gcagagcgtgcagactccatgcgat

SEQ ID NO: 4108805 - DNA, 25 bp, Homo sapien
gagccataaagccacaatcctgaaa

SEQ ID NO: 4108806 - DNA, 25 bp, Homo sapien
tccacgttaagaatgggagagccat

SEQ ID NO: 4108807 - DNA, 25 bp, Homo sapien
tatgctgagggatcccaaatacttg

SEQ ID NO: 4108808 - DNA, 25 bp, Homo sapien
tgaaacagctggagaaacgtgtggc

SEQ ID NO: 4108809 - DNA, 25 bp, Homo sapien
aacgtgtggccgtcggattccgagc

SEQ ID NO: 4108810 - DNA, 25 bp, Homo sapien
tagatttagtctgttcggcatggag

SEQ ID NO: 4108811 - DNA, 25 bp, Homo sapien
tccacaaaaaggctttcctgggagc

SEQ ID NO: 4108812 - DNA, 25 bp, Homo sapien
gacgttgttcctctaaagacatgga

SEQ ID NO: 4108813 - DNA, 25 bp, Homo sapien
caattctgtttggaattaactgaaa

SEQ ID NO: 4108814 - DNA, 25 bp, Homo sapien
ggaccagaaattgagactttaaata

SEQ ID NO: 4108815 - DNA, 25 bp, Homo sapien
ccaaattagatcatttgtagatgtg

SEQ ID NO: 4108816 - DNA, 25 bp, Homo sapien
ctgtcttttcttataggtctcattg

SEQ ID NO: 4108817 - DNA, 25 bp, Homo sapien
tcattgcatatgttactgtcttcca

SEQ ID NO: 4108818 - DNA, 25 bp, Homo sapien
tataggtctcattgcatatgttact

SEQ ID NO: 4108819 - DNA, 25 bp, Homo sapien
gcatatgttactgtcttccaagagc

SEQ ID NO: 4108820 - DNA, 25 bp, Homo sapien
gagctgctctgtcgactcccagatg

SEQ ID NO: 4108821 - DNA, 25 bp, Homo sapien
tcatggcgggctttagattgcggtt

SEQ ID NO: 4108822 - DNA, 25 bp, Homo sapien
aaaactcgccgtcttggtcatggcg

SEQ ID NO: 4108823 - DNA, 25 bp, Homo sapien
tccaggccctttggtggtcagacca

SEQ ID NO: 4108824 - DNA, 25 bp, Homo sapien
gcacctggtaacttggaaactctaa

SEQ ID NO: 4108825 - DNA, 25 bp, Homo sapien
aaactctaaacctctctgacactca

SEQ ID NO: 4108826 - DNA, 25 bp, Homo sapien
ttggaaactctaaacctctctgaca

SEQ ID NO: 4108827 - DNA, 25 bp, Homo sapien
ggaaactctaaacctctctgacact

SEQ ID NO: 4108828 - DNA, 25 bp, Homo sapien
aagtgttctcagttgggcatcttct

SEQ ID NO: 4108829 - DNA, 25 bp, Homo sapien
acaagtgttctcagttgggcatctt

SEQ ID NO: 4108830 - DNA, 25 bp, Homo sapien
cacaagtgttctcagttgggcatct

SEQ ID NO: 4108831 - DNA, 25 bp, Homo sapien
caagtgttctcagttgggcatcttc

SEQ ID NO: 4108832 - DNA, 25 bp, Homo sapien
ggagaggtggatgggtgcgggacag

SEQ ID NO: 4108833 - DNA, 25 bp, Homo sapien
tgcgggacagcgatcctgaggagcc

SEQ ID NO: 4108834 - DNA, 25 bp, Homo sapien
gacagcgatcctgaggagcctgcac

SEQ ID NO: 4108835 - DNA, 25 bp, Homo sapien
atgggtgcgggacagcgatcctgag

SEQ ID NO: 4108836 - DNA, 25 bp, Homo sapien
gcttccaggcgggatgcctgttgca

SEQ ID NO: 4108837 - DNA, 25 bp, Homo sapien
ttccaggcgggatgcctgttgcagc

SEQ ID NO: 4108838 - DNA, 25 bp, Homo sapien
ggattaagaaggatgcttccaggcg

SEQ ID NO: 4108839 - DNA, 25 bp, Homo sapien
tggccccctattccattctctggat

SEQ ID NO: 4108840 - DNA, 25 bp, Homo sapien
cttagtccaggtaagcttctcaatc

SEQ ID NO: 4108841 - DNA, 25 bp, Homo sapien
gacatgaagaaccactctgttagat

SEQ ID NO: 4108842 - DNA, 25 bp, Homo sapien
ctgcaatggaatcagaacttagtcc

SEQ ID NO: 4108843 - DNA, 25 bp, Homo sapien
gaaccactctgttagatactcaaaa

SEQ ID NO: 4108844 - DNA, 25 bp, Homo sapien
gtgggttgtatattgcaggagttcc

SEQ ID NO: 4108845 - DNA, 25 bp, Homo sapien
actggtgggtgggttgtatattgca

SEQ ID NO: 4108846 - DNA, 25 bp, Homo sapien
ttgcaggagttccatcgggattcac

SEQ ID NO: 4108847 - DNA, 25 bp, Homo sapien
tgtatattgcaggagttccatcggg

SEQ ID NO: 4108848 - DNA, 25 bp, Homo sapien
ctgagtgaccagagggcctgccatc

SEQ ID NO: 4108849 - DNA, 25 bp, Homo sapien
gtggctgctgttgggactgccccac

SEQ ID NO: 4108850 - DNA, 25 bp, Homo sapien
tggctgcggtggctggacctgctgt

SEQ ID NO: 4108851 - DNA, 25 bp, Homo sapien
accagagggcctgccatctgtggct

SEQ ID NO: 4108852 - DNA, 25 bp, Homo sapien
aagtgctgcgttggagacacaggta

SEQ ID NO: 4108853 - DNA, 25 bp, Homo sapien
catgggaaagtgctgcgttggagac

SEQ ID NO: 4108854 - DNA, 25 bp, Homo sapien
aaagagactgctggatattgcactg

SEQ ID NO: 4108855 - DNA, 25 bp, Homo sapien
tgctggatattgcactgactgggag

SEQ ID NO: 4108856 - DNA, 25 bp, Homo sapien
gagatctttcccgaaccctcatgca

SEQ ID NO: 4108857 - DNA, 25 bp, Homo sapien
tcccaacaccatccttgagatcttt

SEQ ID NO: 4108858 - DNA, 25 bp, Homo sapien
ggtgataatggttcccatcccaaca

SEQ ID NO: 4108859 - DNA, 25 bp, Homo sapien
actctgaaggcattcagttccttct

SEQ ID NO: 4108860 - DNA, 25 bp, Homo sapien
tcagcttggtaataagagaggcact

SEQ ID NO: 4108861 - DNA, 25 bp, Homo sapien
gatcagcttggtaataagagaggca

SEQ ID NO: 4108862 - DNA, 25 bp, Homo sapien
cacaggatcagcttggtaataagag

SEQ ID NO: 4108863 - DNA, 25 bp, Homo sapien
caggatcagcttggtaataagagag

SEQ ID NO: 4108864 - DNA, 25 bp, Homo sapien
tgctggcctgtagaggcgattacat

SEQ ID NO: 4108865 - DNA, 25 bp, Homo sapien
gaggcgattacatagctgggctgct

SEQ ID NO: 4108866 - DNA, 25 bp, Homo sapien
tggcataagggaggatgggtagaca

SEQ ID NO: 4108867 - DNA, 25 bp, Homo sapien
tcagggtcatctggccaaactgtgt

SEQ ID NO: 4108868 - DNA, 25 bp, Homo sapien
gcggaggctgttgcacaaatccctg

SEQ ID NO: 4108869 - DNA, 25 bp, Homo sapien
gaggctgttgcacaaatccctgtgg

SEQ ID NO: 4108870 - DNA, 25 bp, Homo sapien
ggcggaggctgttgcacaaatccct

SEQ ID NO: 4108871 - DNA, 25 bp, Homo sapien
ggaggctgttgcacaaatccctgtg

SEQ ID NO: 4108872 - DNA, 25 bp, Homo sapien
tacccaagagagtaccagagatgtt

SEQ ID NO: 4108873 - DNA, 25 bp, Homo sapien
aattttcttgggatcggtgtgcctt

SEQ ID NO: 4108874 - DNA, 25 bp, Homo sapien
tgtttggtggtgaacagtaacacat

SEQ ID NO: 4108875 - DNA, 25 bp, Homo sapien
cacttctaatcttctgcaagggata

SEQ ID NO: 4108876 - DNA, 25 bp, Homo sapien
catgggccggtactgttgcgtggtt

SEQ ID NO: 4108877 - DNA, 25 bp, Homo sapien
tagggtactgaccagatgggtaata

SEQ ID NO: 4108878 - DNA, 25 bp, Homo sapien
ggtactgaccagatgggtaataata

SEQ ID NO: 4108879 - DNA, 25 bp, Homo sapien
agcgttgtactgaaccggggccatg

SEQ ID NO: 4108880 - DNA, 25 bp, Homo sapien
taactgggttgagaagcaaatggga

SEQ ID NO: 4108881 - DNA, 25 bp, Homo sapien
actgggttgagaagcaaatgggaaa

SEQ ID NO: 4108882 - DNA, 25 bp, Homo sapien
ctgggttgagaagcaaatgggaaac

SEQ ID NO: 4108883 - DNA, 25 bp, Homo sapien
aactgggttgagaagcaaatgggaa

SEQ ID NO: 4108884 - DNA, 25 bp, Homo sapien
cacagtagggaaagagaccggttca

SEQ ID NO: 4108885 - DNA, 25 bp, Homo sapien
gagacctgctactcactctcgtaca

SEQ ID NO: 4108886 - DNA, 25 bp, Homo sapien
tcactctcgtacagtgtatcggccc

SEQ ID NO: 4108887 - DNA, 25 bp, Homo sapien
tgctactcactctcgtacagtgtat

SEQ ID NO: 4108888 - DNA, 25 bp, Homo sapien
gatagcaccgttaccaccaaaatga

SEQ ID NO: 4108889 - DNA, 25 bp, Homo sapien
taagatagtccagaatgcaagcaac

SEQ ID NO: 4108890 - DNA, 25 bp, Homo sapien
gattggtgctaatccttggcaagaa

SEQ ID NO: 4108891 - DNA, 25 bp, Homo sapien
caatctgacaggatgctagcagtgt

SEQ ID NO: 4108892 - DNA, 25 bp, Homo sapien
tatttaatcaacagtatagtgtcca

SEQ ID NO: 4108893 - DNA, 25 bp, Homo sapien
caggtgtcctatttaatcaacagta

SEQ ID NO: 4108894 - DNA, 25 bp, Homo sapien
cacaggggaactcaggtgtcctatt

SEQ ID NO: 4108895 - DNA, 25 bp, Homo sapien
tcaacagtatagtgtccagttcact

SEQ ID NO: 4108896 - DNA, 25 bp, Homo sapien
taggaccttttaccatgtgctgatc

SEQ ID NO: 4108897 - DNA, 25 bp, Homo sapien
tccacatgtttaggaccttttacca

SEQ ID NO: 4108898 - DNA, 25 bp, Homo sapien
taccaccaacataggcttcctcttc

SEQ ID NO: 4108899 - DNA, 25 bp, Homo sapien
catgtttaggaccttttaccatgtg

SEQ ID NO: 4108900 - DNA, 25 bp, Homo sapien
cacctccacctcccaggttcaagcg

SEQ ID NO: 4108901 - DNA, 25 bp, Homo sapien
caggctggatttggagtgcaatggt

SEQ ID NO: 4108902 - DNA, 25 bp, Homo sapien
acacctggccccaacattagtgttc

SEQ ID NO: 4108903 - DNA, 25 bp, Homo sapien
gcaatctcgactcactgccacctcc

SEQ ID NO: 4108904 - DNA, 25 bp, Homo sapien
ttttggagagccgagaatgaagcta

SEQ ID NO: 4108905 - DNA, 25 bp, Homo sapien
tctgcttttaggtcaacctgtgtac

SEQ ID NO: 4108906 - DNA, 25 bp, Homo sapien
tctctacaaagtgatatggaacccc

SEQ ID NO: 4108907 - DNA, 25 bp, Homo sapien
gcctctataacatgggcatgctggt

SEQ ID NO: 4108908 - DNA, 25 bp, Homo sapien
tgaagtcacaaatcctgagggccaa

SEQ ID NO: 4108909 - DNA, 25 bp, Homo sapien
tacattggctctagggataccacgg

SEQ ID NO: 4108910 - DNA, 25 bp, Homo sapien
tctcataatggagagacatgtgcag

SEQ ID NO: 4108911 - DNA, 25 bp, Homo sapien
caactaattgctacgtgaagtcaca

SEQ ID NO: 4108912 - DNA, 25 bp, Homo sapien
tcatttggacagaagcgctcttggt

SEQ ID NO: 4108913 - DNA, 25 bp, Homo sapien
cagagaggcacttgaggtagactcc

SEQ ID NO: 4108914 - DNA, 25 bp, Homo sapien
caaaagcccttgacagaaggtggaa

SEQ ID NO: 4108915 - DNA, 25 bp, Homo sapien
gagtgtgagctccttgaattgtgtc

SEQ ID NO: 4108916 - DNA, 25 bp, Homo sapien
ggtagactccaactcaaagagtgtg

SEQ ID NO: 4108917 - DNA, 25 bp, Homo sapien
ggcaaactcatagattcctaaagtt

SEQ ID NO: 4108918 - DNA, 25 bp, Homo sapien
aacaggtggctcaattacctgttca

SEQ ID NO: 4108919 - DNA, 25 bp, Homo sapien
tacttatgcggaagacttcttcctg

SEQ ID NO: 4108920 - DNA, 25 bp, Homo sapien
cctaaagttccaagctgaacaggtg

SEQ ID NO: 4108921 - DNA, 25 bp, Homo sapien
gactgtctgtagagttatcagtaga

SEQ ID NO: 4108922 - DNA, 25 bp, Homo sapien
caggtgcattctgacttgtggtttg

SEQ ID NO: 4108923 - DNA, 25 bp, Homo sapien
agtcccagagatcactatggccaaa

SEQ ID NO: 4108924 - DNA, 25 bp, Homo sapien
tctaaaggatttaagtcaggtgcat

SEQ ID NO: 4108925 - DNA, 25 bp, Homo sapien
cagaaaccttcagtcctcagtttag

SEQ ID NO: 4108926 - DNA, 25 bp, Homo sapien
gaagaacagggcactactaagaaaa

SEQ ID NO: 4108927 - DNA, 25 bp, Homo sapien
ttcagtcctcagtttaggaactgct

SEQ ID NO: 4108928 - DNA, 25 bp, Homo sapien
gaaaaattattgatcaaggacactg

SEQ ID NO: 4108929 - DNA, 25 bp, Homo sapien
aagtctgcagacttgtccacacaaa

SEQ ID NO: 4108930 - DNA, 25 bp, Homo sapien
gggttgtattgtctggcttgagaca

SEQ ID NO: 4108931 - DNA, 25 bp, Homo sapien
gacaacaataagaagtctgcagact

SEQ ID NO: 4108932 - DNA, 25 bp, Homo sapien
tggcttgagacaacaataagaagtc

SEQ ID NO: 4108933 - DNA, 25 bp, Homo sapien
tggaggtggctctaataactgtccc

SEQ ID NO: 4108934 - DNA, 25 bp, Homo sapien
catagtgctgtgctgacatccagag

SEQ ID NO: 4108935 - DNA, 25 bp, Homo sapien
tacaggatgtaacctagccttggcc

SEQ ID NO: 4108936 - DNA, 25 bp, Homo sapien
caagggaagccagcattgaattcca

SEQ ID NO: 4108937 - DNA, 25 bp, Homo sapien
tatagtagtcatcctagtaatggcc

SEQ ID NO: 4108938 - DNA, 25 bp, Homo sapien
cttaggaacttggtacaggatgacc

SEQ ID NO: 4108939 - DNA, 25 bp, Homo sapien
taatggcagtacacatcagatgaac

SEQ ID NO: 4108940 - DNA, 25 bp, Homo sapien
ggccctacctaagtggaaccatgct

SEQ ID NO: 4108941 - DNA, 25 bp, Homo sapien
caattcttagctgtgaaattatcac

SEQ ID NO: 4108942 - DNA, 25 bp, Homo sapien
ctggtgagaactgcttatcttgtct

SEQ ID NO: 4108943 - DNA, 25 bp, Homo sapien
tatttattgaggattagcaagatat

SEQ ID NO: 4108944 - DNA, 25 bp, Homo sapien
gcttatcttgtctattcaaatgaga

SEQ ID NO: 4108945 - DNA, 25 bp, Homo sapien
gcaacagcaagtgggacgcatgtga

SEQ ID NO: 4108946 - DNA, 25 bp, Homo sapien
caaacagcccattaactttggataa

SEQ ID NO: 4108947 - DNA, 25 bp, Homo sapien
tgaggaattcacgataaccactgcc

SEQ ID NO: 4108948 - DNA, 25 bp, Homo sapien
gaaccaaatgacttgctaccctgag

SEQ ID NO: 4108949 - DNA, 25 bp, Homo sapien
cagaagactctattgataccaattg

SEQ ID NO: 4108950 - DNA, 25 bp, Homo sapien
ttctattgttatgcagaatggtcta

SEQ ID NO: 4108951 - DNA, 25 bp, Homo sapien
gacaatgataaattattcatggcac

SEQ ID NO: 4108952 - DNA, 25 bp, Homo sapien
ggtctattgaatacatgtgacaatg

SEQ ID NO: 4108953 - DNA, 25 bp, Homo sapien
cacagtgatgtttcatggggtaaaa

SEQ ID NO: 4108954 - DNA, 25 bp, Homo sapien
cacattcagaatgtgttatcagatg

SEQ ID NO: 4108955 - DNA, 25 bp, Homo sapien
tcatggggtaaaactactggttcaa

SEQ ID NO: 4108956 - DNA, 25 bp, Homo sapien
atgtttattccctaagaatgcattt

SEQ ID NO: 4108957 - DNA, 25 bp, Homo sapien
gctgcactcctattaggccttggaa

SEQ ID NO: 4108958 - DNA, 25 bp, Homo sapien
tggaatccctgttgaccagacaaga

SEQ ID NO: 4108959 - DNA, 25 bp, Homo sapien
gaagacattgttgggtaggaaacca

SEQ ID NO: 4108960 - DNA, 25 bp, Homo sapien
taggaaaccatcacgctttgcaccg

SEQ ID NO: 4108961 - DNA, 25 bp, Homo sapien
tatcggctgtttcacattaggaaag

SEQ ID NO: 4108962 - DNA, 25 bp, Homo sapien
tctctaattccctagtccattgcga

SEQ ID NO: 4108963 - DNA, 25 bp, Homo sapien
caagcaagaaccctgtatgaagaga

SEQ ID NO: 4108964 - DNA, 25 bp, Homo sapien
ggtctgtacaataaacaacatggtg

SEQ ID NO: 4108965 - DNA, 25 bp, Homo sapien
cagtttgttctgcagctagctgaca

SEQ ID NO: 4108966 - DNA, 25 bp, Homo sapien
tgtgggccaatcagcctaaggttgt

SEQ ID NO: 4108967 - DNA, 25 bp, Homo sapien
tcagaatttgacctgccaaccagca

SEQ ID NO: 4108968 - DNA, 25 bp, Homo sapien
ctgggagtgacccttgacctgcctg

SEQ ID NO: 4108969 - DNA, 25 bp, Homo sapien
gaataccagcagcaatcatttgagt

SEQ ID NO: 4108970 - DNA, 25 bp, Homo sapien
aaggcatacctagcagacatgacag

SEQ ID NO: 4108971 - DNA, 25 bp, Homo sapien
tatgcaccattaaccagctaacgtg

SEQ ID NO: 4108972 - DNA, 25 bp, Homo sapien
aagaaatgtaccacagccagagctc

SEQ ID NO: 4108973 - DNA, 25 bp, Homo sapien
caaactggtggtaaaaacatgacct

SEQ ID NO: 4108974 - DNA, 25 bp, Homo sapien
agtgacacataagaaaacacacatt

SEQ ID NO: 4108975 - DNA, 25 bp, Homo sapien
aaaacacacattggaagacatagtg

SEQ ID NO: 4108976 - DNA, 25 bp, Homo sapien
gacatagtgaaccaaactggtggta

SEQ ID NO: 4108977 - DNA, 25 bp, Homo sapien
ggttctcctgataataagttttgga

SEQ ID NO: 4108978 - DNA, 25 bp, Homo sapien
tttacattcatatagggttacagag

SEQ ID NO: 4108979 - DNA, 25 bp, Homo sapien
ggaaatgcttcactaataaaaccat

SEQ ID NO: 4108980 - DNA, 25 bp, Homo sapien
aaatgagaaattaagggttctcctg

SEQ ID NO: 4108981 - DNA, 25 bp, Homo sapien
taaatgaatgcgtaatcactctcgt

SEQ ID NO: 4108982 - DNA, 25 bp, Homo sapien
cagaaagtctggcactatggcacga

SEQ ID NO: 4108983 - DNA, 25 bp, Homo sapien
caaaatatgccaccgttggaagtag

SEQ ID NO: 4108984 - DNA, 25 bp, Homo sapien
taagcttcttaagggtaggagctcc

SEQ ID NO: 4108985 - DNA, 25 bp, Homo sapien
gataggtccctaggatctctgacac

SEQ ID NO: 4108986 - DNA, 25 bp, Homo sapien
gggacgccttagcattttgatacca

SEQ ID NO: 4108987 - DNA, 25 bp, Homo sapien
tagaatatccggtgcttgaggctgc

SEQ ID NO: 4108988 - DNA, 25 bp, Homo sapien
gacaccagaatgaaatgcagacaag

SEQ ID NO: 4108989 - DNA, 25 bp, Homo sapien
ctttgtgttccatatccgaagatct

SEQ ID NO: 4108990 - DNA, 25 bp, Homo sapien
ccttgcaactaaagcctccatgaat

SEQ ID NO: 4108991 - DNA, 25 bp, Homo sapien
tttcccttgcaactaaagcctccat

SEQ ID NO: 4108992 - DNA, 25 bp, Homo sapien
gttccatatccgaagatctctttct

SEQ ID NO: 4108993 - DNA, 25 bp, Homo sapien
gatgttgtgtaacttctagggccta

SEQ ID NO: 4108994 - DNA, 25 bp, Homo sapien
tgcctcctgatcatactggattctg

SEQ ID NO: 4108995 - DNA, 25 bp, Homo sapien
taaagaacacatttcagggctatgc

SEQ ID NO: 4108996 - DNA, 25 bp, Homo sapien
ggctatgctgattagtctgtggctc

SEQ ID NO: 4108997 - DNA, 25 bp, Homo sapien
tctggtaccacttaaactgagtggg

SEQ ID NO: 4108998 - DNA, 25 bp, Homo sapien
cttataagagcaaggttactgtccc

SEQ ID NO: 4108999 - DNA, 25 bp, Homo sapien
taactaagtggtgcatctggtacca

SEQ ID NO: 4109000 - DNA, 25 bp, Homo sapien
tgagtgggattcctacccaagactg

SEQ ID NO: 4109001 - DNA, 25 bp, Homo sapien
tccgtctccatggtatctaataaaa

SEQ ID NO: 4109002 - DNA, 25 bp, Homo sapien
tcaccagaagcaaaagtcactaatt

SEQ ID NO: 4109003 - DNA, 25 bp, Homo sapien
gcttaaagcattcacatccgatcca

SEQ ID NO: 4109004 - DNA, 25 bp, Homo sapien
ccatggtatctaataaaagagcaat

SEQ ID NO: 4109005 - DNA, 25 bp, Homo sapien
tcctcatctgcaaataatttttttc

SEQ ID NO: 4109006 - DNA, 25 bp, Homo sapien
tctcttgtttcctctttcttccaca

SEQ ID NO: 4109007 - DNA, 25 bp, Homo sapien
tcttgtttcctctttcttccacaag

SEQ ID NO: 4109008 - DNA, 25 bp, Homo sapien
tttttgtcatgaacttcctcatctg

SEQ ID NO: 4109009 - DNA, 25 bp, Homo sapien
ggatgaaggcaagattgtctccttg

SEQ ID NO: 4109010 - DNA, 25 bp, Homo sapien
actcaggatgaaggcaagattgtct

SEQ ID NO: 4109011 - DNA, 25 bp, Homo sapien
tttcttctctggtaatccctaacag

SEQ ID NO: 4109012 - DNA, 25 bp, Homo sapien
ctggtaatccctaacagcatgtatt

SEQ ID NO: 4109013 - DNA, 25 bp, Homo sapien
gtactgtgttactttgcgaggttgg

SEQ ID NO: 4109014 - DNA, 25 bp, Homo sapien
ttcttgtactgtgttactttgcgag

SEQ ID NO: 4109015 - DNA, 25 bp, Homo sapien
gttactttgcgaggttggtgcttgc

SEQ ID NO: 4109016 - DNA, 25 bp, Homo sapien
ctgtgttactttgcgaggttggtgc

SEQ ID NO: 4109017 - DNA, 25 bp, Homo sapien
tgaaattcatcagccagtgtcaatg

SEQ ID NO: 4109018 - DNA, 25 bp, Homo sapien
aatctctgccctatagtgaaattca

SEQ ID NO: 4109019 - DNA, 25 bp, Homo sapien
agcctcctgtgtactcataatctct

SEQ ID NO: 4109020 - DNA, 25 bp, Homo sapien
gtgtcaatgccttggtcatccacat

SEQ ID NO: 4109021 - DNA, 25 bp, Homo sapien
tcgatgagttctgggcaagttcagg

SEQ ID NO: 4109022 - DNA, 25 bp, Homo sapien
tctttctggatacttctaaggtaac

SEQ ID NO: 4109023 - DNA, 25 bp, Homo sapien
cagacacaccatggagttcctgatg

SEQ ID NO: 4109024 - DNA, 25 bp, Homo sapien
tcagggccaccgcaaacagcctgaa

SEQ ID NO: 4109025 - DNA, 25 bp, Homo sapien
ggcttcttctgttgtcaattcgctg

SEQ ID NO: 4109026 - DNA, 25 bp, Homo sapien
ccagggatgtattggtgaagattgt

SEQ ID NO: 4109027 - DNA, 25 bp, Homo sapien
tatcatctccttttaccagggatgt

SEQ ID NO: 4109028 - DNA, 25 bp, Homo sapien
gatgactttgctgacttttatatca

SEQ ID NO: 4109029 - DNA, 25 bp, Homo sapien
atgtccaccacaggttcaccttgag

SEQ ID NO: 4109030 - DNA, 25 bp, Homo sapien
ccaccacaggttcaccttgagcatt

SEQ ID NO: 4109031 - DNA, 25 bp, Homo sapien
tttcctttattaggctttgcaagtg

SEQ ID NO: 4109032 - DNA, 25 bp, Homo sapien
ttaggtctgcccatccatgatttca

SEQ ID NO: 4109033 - DNA, 25 bp, Homo sapien
cctctatggaagctgaagtggtcgc

SEQ ID NO: 4109034 - DNA, 25 bp, Homo sapien
agaagcaactgtcctctatggaagc

SEQ ID NO: 4109035 - DNA, 25 bp, Homo sapien
ctgtcaggtagaagcaactgtcctc

SEQ ID NO: 4109036 - DNA, 25 bp, Homo sapien
tggaagctgaagtggtcgcatgcat

SEQ ID NO: 4109037 - DNA, 25 bp, Homo sapien
caacatatgtgctcaagaaagattc

SEQ ID NO: 4109038 - DNA, 25 bp, Homo sapien
aatgtattagttcagccagctccca

SEQ ID NO: 4109039 - DNA, 25 bp, Homo sapien
aaactactccggaaacaatctgcat

SEQ ID NO: 4109040 - DNA, 25 bp, Homo sapien
gattcccgtatgttccaaactactc

SEQ ID NO: 4109041 - DNA, 25 bp, Homo sapien
cctgtagcttccaaagtataaataa

SEQ ID NO: 4109042 - DNA, 25 bp, Homo sapien
tgtagcttccaaagtataaataact

SEQ ID NO: 4109043 - DNA, 25 bp, Homo sapien
gtagcttccaaagtataaataacta

SEQ ID NO: 4109044 - DNA, 25 bp, Homo sapien
ctgtagcttccaaagtataaataac

SEQ ID NO: 4109045 - DNA, 25 bp, Homo sapien
gtcagtactagtgatggaagtggaa

SEQ ID NO: 4109046 - DNA, 25 bp, Homo sapien
gcaaacatctgctagagatgaggtt

SEQ ID NO: 4109047 - DNA, 25 bp, Homo sapien
gagacccagagtcagtactagtgat

SEQ ID NO: 4109048 - DNA, 25 bp, Homo sapien
ttgcaaacatctgctagagatgagg

SEQ ID NO: 4109049 - DNA, 25 bp, Homo sapien
ttaagtcctggagccttttgactga

SEQ ID NO: 4109050 - DNA, 25 bp, Homo sapien
ctggatatgaaatgtggaatggaac

SEQ ID NO: 4109051 - DNA, 25 bp, Homo sapien
gactgatacttgaatattgaactca

SEQ ID NO: 4109052 - DNA, 25 bp, Homo sapien
tggaacatgctttcactattaagtc

SEQ ID NO: 4109053 - DNA, 25 bp, Homo sapien
gagaaataattcgaggcagtggaag

SEQ ID NO: 4109054 - DNA, 25 bp, Homo sapien
gagagaaataattcgaggcagtgga

SEQ ID NO: 4109055 - DNA, 25 bp, Homo sapien
agagagaaataattcgaggcagtgg

SEQ ID NO: 4109056 - DNA, 25 bp, Homo sapien
gaaataattcgaggcagtggaagca

SEQ ID NO: 4109057 - DNA, 25 bp, Homo sapien
tagcagggctctccacagtagcttt

SEQ ID NO: 4109058 - DNA, 25 bp, Homo sapien
tctctttctcgagcaggtggcagtg

SEQ ID NO: 4109059 - DNA, 25 bp, Homo sapien
cattgttgctgagattggaccacaa

SEQ ID NO: 4109060 - DNA, 25 bp, Homo sapien
tggaccacaaggcaattagcagggc

SEQ ID NO: 4109061 - DNA, 25 bp, Homo sapien
gctgttagccccatgactatactga

SEQ ID NO: 4109062 - DNA, 25 bp, Homo sapien
taaaagtgtgctgttagccccatga

SEQ ID NO: 4109063 - DNA, 25 bp, Homo sapien
gactatactgattccgcagcacatg

SEQ ID NO: 4109064 - DNA, 25 bp, Homo sapien
tagccccatgactatactgattccg

SEQ ID NO: 4109065 - DNA, 25 bp, Homo sapien
ttctgtattcaacaatagagctcac

SEQ ID NO: 4109066 - DNA, 25 bp, Homo sapien
ctgtattcaacaatagagctcacat

SEQ ID NO: 4109067 - DNA, 25 bp, Homo sapien
gtattcaacaatagagctcacattc

SEQ ID NO: 4109068 - DNA, 25 bp, Homo sapien
ctttctgtattcaacaatagagctc

SEQ ID NO: 4109069 - DNA, 25 bp, Homo sapien
tagatgtcaagttcttgaggatgtg

SEQ ID NO: 4109070 - DNA, 25 bp, Homo sapien
ggccgtttctgtatctatgacacag

SEQ ID NO: 4109071 - DNA, 25 bp, Homo sapien
gatgtgtccaagtaacactgcaatg

SEQ ID NO: 4109072 - DNA, 25 bp, Homo sapien
cacagaacaaaggtttagatgtcaa

SEQ ID NO: 4109073 - DNA, 25 bp, Homo sapien
ggatacccagttgctgagagttttg

SEQ ID NO: 4109074 - DNA, 25 bp, Homo sapien
atggccaattatgttgaagctcctc

SEQ ID NO: 4109075 - DNA, 25 bp, Homo sapien
tctcctatgatagggtgtgatgtgg

SEQ ID NO: 4109076 - DNA, 25 bp, Homo sapien
tctccaaggacattcattttctcta

SEQ ID NO: 4109077 - DNA, 25 bp, Homo sapien
tttctcggcataactgatcatcagc

SEQ ID NO: 4109078 - DNA, 25 bp, Homo sapien
catatgagcccatgaagcttctgaa

SEQ ID NO: 4109079 - DNA, 25 bp, Homo sapien
tgctacccacctaagattaacttcc

SEQ ID NO: 4109080 - DNA, 25 bp, Homo sapien
ttttttcttactgacgtattctcaa

SEQ ID NO: 4109081 - DNA, 25 bp, Homo sapien
tggtttagagtgaagcctgaagttg

SEQ ID NO: 4109082 - DNA, 25 bp, Homo sapien
gaagatgtgcttgtgttaagtgagt

SEQ ID NO: 4109083 - DNA, 25 bp, Homo sapien
gatcttgtcagtatagaagatgtgc

SEQ ID NO: 4109084 - DNA, 25 bp, Homo sapien
aaatcctttcccattgtccatgatg

SEQ ID NO: 4109085 - DNA, 25 bp, Homo sapien
tgttttcagggcatcatagttcctc

SEQ ID NO: 4109086 - DNA, 25 bp, Homo sapien
aatcttggtaccatgattgtgtcac

SEQ ID NO: 4109087 - DNA, 25 bp, Homo sapien
ctcttgcagtttctgtcgcttggga

SEQ ID NO: 4109088 - DNA, 25 bp, Homo sapien
gcttgggatggagtaatttggtttc

SEQ ID NO: 4109089 - DNA, 25 bp, Homo sapien
cacaccttcaacagagagtaattct

SEQ ID NO: 4109090 - DNA, 25 bp, Homo sapien
ctaaccattgggagcatgcacacct

SEQ ID NO: 4109091 - DNA, 25 bp, Homo sapien
gagtaattcttccaaggtgtccaca

SEQ ID NO: 4109092 - DNA, 25 bp, Homo sapien
cattgggagcatgcacaccttcaac

SEQ ID NO: 4109093 - DNA, 25 bp, Homo sapien
gactaatacttcaatggcaaggcat

SEQ ID NO: 4109094 - DNA, 25 bp, Homo sapien
atcaatctcctctgacaacagtggg

SEQ ID NO: 4109095 - DNA, 25 bp, Homo sapien
tcatgctaaacaggaatagctcttc

SEQ ID NO: 4109096 - DNA, 25 bp, Homo sapien
gaggtgaacgtcattagctttttca

SEQ ID NO: 4109097 - DNA, 25 bp, Homo sapien
tcttagctagtaggaattcacagtt

SEQ ID NO: 4109098 - DNA, 25 bp, Homo sapien
gaattcacagttggagtatggggaa

SEQ ID NO: 4109099 - DNA, 25 bp, Homo sapien
cacagttggagtatggggaaagaaa

SEQ ID NO: 4109100 - DNA, 25 bp, Homo sapien
ttcacagttggagtatggggaaaga

SEQ ID NO: 4109101 - DNA, 25 bp, Homo sapien
gaagatcccgctcaaaagtgattca

SEQ ID NO: 4109102 - DNA, 25 bp, Homo sapien
tgccttaactgactgtacatctccc

SEQ ID NO: 4109103 - DNA, 25 bp, Homo sapien
tgttcctcacacctaacttgattcc

SEQ ID NO: 4109104 - DNA, 25 bp, Homo sapien
tgttcagcattactcactctgaaga

SEQ ID NO: 4109105 - DNA, 25 bp, Homo sapien
atttgttagttttcagagaccccag

SEQ ID NO: 4109106 - DNA, 25 bp, Homo sapien
gcttaactctgttgcagcagatttg

SEQ ID NO: 4109107 - DNA, 25 bp, Homo sapien
caacaatggagtgaagataagacat

SEQ ID NO: 4109108 - DNA, 25 bp, Homo sapien
tttccacagctgagcttaactctgt

SEQ ID NO: 4109109 - DNA, 25 bp, Homo sapien
tctgtccttgagcaagctgactagt

SEQ ID NO: 4109110 - DNA, 25 bp, Homo sapien
caagctgactagtggaatcaaagaa

SEQ ID NO: 4109111 - DNA, 25 bp, Homo sapien
aattttagttggtagtggactcagc

SEQ ID NO: 4109112 - DNA, 25 bp, Homo sapien
aagcaattttagttggtagtggact

SEQ ID NO: 4109113 - DNA, 25 bp, Homo sapien
agtgagtgtcacacatctgtcctgc

SEQ ID NO: 4109114 - DNA, 25 bp, Homo sapien
ctgctgagatgagaagccggaacct

SEQ ID NO: 4109115 - DNA, 25 bp, Homo sapien
tggcagtgagtgtcacacatctgtc

SEQ ID NO: 4109116 - DNA, 25 bp, Homo sapien
atgagaagccggaacctgggtctcc

SEQ ID NO: 4109117 - DNA, 25 bp, Homo sapien
taaattccattagtagatccatggc

SEQ ID NO: 4109118 - DNA, 25 bp, Homo sapien
tagatccatggctaatagtcttgta

SEQ ID NO: 4109119 - DNA, 25 bp, Homo sapien
ccattagtagatccatggctaatag

SEQ ID NO: 4109120 - DNA, 25 bp, Homo sapien
tggctaatagtcttgtattctccaa

SEQ ID NO: 4109121 - DNA, 25 bp, Homo sapien
tgaagactcaatgtgggtatctgaa

SEQ ID NO: 4109122 - DNA, 25 bp, Homo sapien
caatgtgggtatctgaaatctaaag

SEQ ID NO: 4109123 - DNA, 25 bp, Homo sapien
ccaaagtcaacttgaatagatgtaa

SEQ ID NO: 4109124 - DNA, 25 bp, Homo sapien
aaggcatcattagaattcaggtaaa

SEQ ID NO: 4109125 - DNA, 25 bp, Homo sapien
cctgatactctgtcgtggagaaact

SEQ ID NO: 4109126 - DNA, 25 bp, Homo sapien
tgagctctgtcgactgtttcaaacc

SEQ ID NO: 4109127 - DNA, 25 bp, Homo sapien
gatgcttctttaagaggagttaaac

SEQ ID NO: 4109128 - DNA, 25 bp, Homo sapien
gtttcaaacctcttaagagctaaga

SEQ ID NO: 4109129 - DNA, 25 bp, Homo sapien
gagagggccaaatagacactgacaa

SEQ ID NO: 4109130 - DNA, 25 bp, Homo sapien
atatttgtttccctacgtgtcctgt

SEQ ID NO: 4109131 - DNA, 25 bp, Homo sapien
tgacaatatttgtttccctacgtgt

SEQ ID NO: 4109132 - DNA, 25 bp, Homo sapien
cttggagagggccaaatagacactg

SEQ ID NO: 4109133 - DNA, 25 bp, Homo sapien
caaccatgtggatagccttgtgaga

SEQ ID NO: 4109134 - DNA, 25 bp, Homo sapien
ggatgagtttatacacctttctcag

SEQ ID NO: 4109135 - DNA, 25 bp, Homo sapien
tgtatagggcaaatagaaagactct

SEQ ID NO: 4109136 - DNA, 25 bp, Homo sapien
ccttgtgagaagtagtgatggagca

SEQ ID NO: 4109137 - DNA, 25 bp, Homo sapien
tgtattccaccctccactgtcaaat

SEQ ID NO: 4109138 - DNA, 25 bp, Homo sapien
gtttcactgtctgtattccaccctc

SEQ ID NO: 4109139 - DNA, 25 bp, Homo sapien
tcttatgcttgcctgtttcactgtc

SEQ ID NO: 4109140 - DNA, 25 bp, Homo sapien
cttatgcttgcctgtttcactgtct

SEQ ID NO: 4109141 - DNA, 25 bp, Homo sapien
atttcatttccggaatagctctctg

SEQ ID NO: 4109142 - DNA, 25 bp, Homo sapien
gccccacatttcatttccggaatag

SEQ ID NO: 4109143 - DNA, 25 bp, Homo sapien
ggagccccacatttcatttccggaa

SEQ ID NO: 4109144 - DNA, 25 bp, Homo sapien
ttccggaatagctctctgggtcccc

SEQ ID NO: 4109145 - DNA, 25 bp, Homo sapien
gaagctgtgtgtgctcttcagagtt

SEQ ID NO: 4109146 - DNA, 25 bp, Homo sapien
tctgattcgttaccaagagaggtgg

SEQ ID NO: 4109147 - DNA, 25 bp, Homo sapien
tcagagttgagttgcactttgtgag

SEQ ID NO: 4109148 - DNA, 25 bp, Homo sapien
tacagttttccacatgaattatatg

SEQ ID NO: 4109149 - DNA, 25 bp, Homo sapien
cctagggaggtaagggcacccactg

SEQ ID NO: 4109150 - DNA, 25 bp, Homo sapien
aacaacaccctcagtcctagggagg

SEQ ID NO: 4109151 - DNA, 25 bp, Homo sapien
tgtctgtcttcaggcctggtaacaa

SEQ ID NO: 4109152 - DNA, 25 bp, Homo sapien
ctgtgaaagccctagggtactgcat

SEQ ID NO: 4109153 - DNA, 25 bp, Homo sapien
tgcatgatctgctcttgctcagcat

SEQ ID NO: 4109154 - DNA, 25 bp, Homo sapien
aatcagagaggttttctgcatgatc

SEQ ID NO: 4109155 - DNA, 25 bp, Homo sapien
tgatgtgtgcccctgttcataccca

SEQ ID NO: 4109156 - DNA, 25 bp, Homo sapien
cagagaagggaatcagagaggtttt

SEQ ID NO: 4109157 - DNA, 25 bp, Homo sapien
tctgtttactgcttaaccttgctct

SEQ ID NO: 4109158 - DNA, 25 bp, Homo sapien
cttctgtttactgcttaaccttgct

SEQ ID NO: 4109159 - DNA, 25 bp, Homo sapien
ctgtttactgcttaaccttgctctg

SEQ ID NO: 4109160 - DNA, 25 bp, Homo sapien
tgtttactgcttaaccttgctctga

SEQ ID NO: 4109161 - DNA, 25 bp, Homo sapien
ttctcagtgcccagttctgagagct

SEQ ID NO: 4109162 - DNA, 25 bp, Homo sapien
ctatcttccacattgacttgttggt

SEQ ID NO: 4109163 - DNA, 25 bp, Homo sapien
tttgatgcccttcccacattgtagg

SEQ ID NO: 4109164 - DNA, 25 bp, Homo sapien
ggtggttgcttggttagttctatct

SEQ ID NO: 4109165 - DNA, 25 bp, Homo sapien
gagttcccgttgctttgtgttcata

SEQ ID NO: 4109166 - DNA, 25 bp, Homo sapien
gaatggccttcctgcagggtagctc

SEQ ID NO: 4109167 - DNA, 25 bp, Homo sapien
gcattttttcctcgcgaattatcag

SEQ ID NO: 4109168 - DNA, 25 bp, Homo sapien
agaaagaacccttcataaatgaggc

SEQ ID NO: 4109169 - DNA, 25 bp, Homo sapien
aataaagtatagtcatactgtcctc

SEQ ID NO: 4109170 - DNA, 25 bp, Homo sapien
ttactcatccttatgttcaggctca

SEQ ID NO: 4109171 - DNA, 25 bp, Homo sapien
tatgttcaggctcatctttagactc

SEQ ID NO: 4109172 - DNA, 25 bp, Homo sapien
tccttatgttcaggctcatctttag

SEQ ID NO: 4109173 - DNA, 25 bp, Homo sapien
ttcaggctcatctttagactctggg

SEQ ID NO: 4109174 - DNA, 25 bp, Homo sapien
accaggtaggatccttcttgatagg

SEQ ID NO: 4109175 - DNA, 25 bp, Homo sapien
gaagatgatggttttttggaccagg

SEQ ID NO: 4109176 - DNA, 25 bp, Homo sapien
taagggcattgctaggcatgtgtag

SEQ ID NO: 4109177 - DNA, 25 bp, Homo sapien
tcttgataggttctagaaggactaa

SEQ ID NO: 4109178 - DNA, 25 bp, Homo sapien
gtccctgcattgctaaaccactcat

SEQ ID NO: 4109179 - DNA, 25 bp, Homo sapien
attgatttgtaagtccctgcattgc

SEQ ID NO: 4109180 - DNA, 25 bp, Homo sapien
gtctgagggatgcattgttgtcttc

SEQ ID NO: 4109181 - DNA, 25 bp, Homo sapien
gcattgttgtcttcgatgagattga

SEQ ID NO: 4109182 - DNA, 25 bp, Homo sapien
tgaacacacatggcattgacctgtg

SEQ ID NO: 4109183 - DNA, 25 bp, Homo sapien
cgggggctggtgattgaacacacat

SEQ ID NO: 4109184 - DNA, 25 bp, Homo sapien
taggtggccgccacctttcctgacc

SEQ ID NO: 4109185 - DNA, 25 bp, Homo sapien
cttgctggcctaggtggccgccacc

SEQ ID NO: 4109186 - DNA, 25 bp, Homo sapien
gctggcctaggtggccgccaccttt

SEQ ID NO: 4109187 - DNA, 25 bp, Homo sapien
gcctaggtggccgccacctttcctg

SEQ ID NO: 4109188 - DNA, 25 bp, Homo sapien
agcaggtgagggaccattgagttct

SEQ ID NO: 4109189 - DNA, 25 bp, Homo sapien
cactcctctctctaccgtctcttct

SEQ ID NO: 4109190 - DNA, 25 bp, Homo sapien
ccattaccactcctctctctaccgt

SEQ ID NO: 4109191 - DNA, 25 bp, Homo sapien
caggtgagggaccattgagttcttt

SEQ ID NO: 4109192 - DNA, 25 bp, Homo sapien
gcatggcagctgccttttctgagcc

SEQ ID NO: 4109193 - DNA, 25 bp, Homo sapien
tctgcatggcagctgccttttctga

SEQ ID NO: 4109194 - DNA, 25 bp, Homo sapien
tgcatggcagctgccttttctgagc

SEQ ID NO: 4109195 - DNA, 25 bp, Homo sapien
ttatctgcatggcagctgccttttc

SEQ ID NO: 4109196 - DNA, 25 bp, Homo sapien
ccaactctagtgactaaaccaaggg

SEQ ID NO: 4109197 - DNA, 25 bp, Homo sapien
tttggcaacatgtcttgggcacagc

SEQ ID NO: 4109198 - DNA, 25 bp, Homo sapien
caatctttgatataggcccaactct

SEQ ID NO: 4109199 - DNA, 25 bp, Homo sapien
tcttggcaggatcagttggtgtcac

SEQ ID NO: 4109200 - DNA, 25 bp, Homo sapien
acactgtttccgcaataggcaccac

SEQ ID NO: 4109201 - DNA, 25 bp, Homo sapien
tatacgtagtgtcttataccctgga

SEQ ID NO: 4109202 - DNA, 25 bp, Homo sapien
tgacctatgcaaaggaaccacttct

SEQ ID NO: 4109203 - DNA, 25 bp, Homo sapien
tattgggcagatattgggcagaaac

SEQ ID NO: 4109204 - DNA, 25 bp, Homo sapien
atgttccaaaagtttgtagagccat

SEQ ID NO: 4109205 - DNA, 25 bp, Homo sapien
aatatgttccaaaagtttgtagagc

SEQ ID NO: 4109206 - DNA, 25 bp, Homo sapien
tatgttccaaaagtttgtagagcca

SEQ ID NO: 4109207 - DNA, 25 bp, Homo sapien
tgaaatatgttccaaaagtttgtag

SEQ ID NO: 4109208 - DNA, 25 bp, Homo sapien
ctctttgacacagaaacccgttgtg

SEQ ID NO: 4109209 - DNA, 25 bp, Homo sapien
tagaatctccattccgggaagccag

SEQ ID NO: 4109210 - DNA, 25 bp, Homo sapien
taaaaaggagccaaaattcagagct

SEQ ID NO: 4109211 - DNA, 25 bp, Homo sapien
cacagaaacccgttgtgtatatggg

SEQ ID NO: 4109212 - DNA, 25 bp, Homo sapien
agctccgggtcctggggactcccat

SEQ ID NO: 4109213 - DNA, 25 bp, Homo sapien
tcacagtcgtgactgccactcggca

SEQ ID NO: 4109214 - DNA, 25 bp, Homo sapien
gcgggcgtggaggagagtgcgccct

SEQ ID NO: 4109215 - DNA, 25 bp, Homo sapien
gttgggctcccggaggaacagcgag

SEQ ID NO: 4109216 - DNA, 25 bp, Homo sapien
agcccgtccacgccgtcctcgcggg

SEQ ID NO: 4109217 - DNA, 25 bp, Homo sapien
caggagagggcggttgctcggcgcc

SEQ ID NO: 4109218 - DNA, 25 bp, Homo sapien
ccacgccgtcctcgcgggggctgct

SEQ ID NO: 4109219 - DNA, 25 bp, Homo sapien
tgctcggcgcccaccgcctccttgg

SEQ ID NO: 4109220 - DNA, 25 bp, Homo sapien
ggtcactttggtccgtggctccact

SEQ ID NO: 4109221 - DNA, 25 bp, Homo sapien
tcagggcacgtcttcatggttagag

SEQ ID NO: 4109222 - DNA, 25 bp, Homo sapien
tggtccaggttcagaaataatcctc

SEQ ID NO: 4109223 - DNA, 25 bp, Homo sapien
tcctccaggaatgagggtcactttg

SEQ ID NO: 4109224 - DNA, 25 bp, Homo sapien
ataatagtcatgcaagagtacagta

SEQ ID NO: 4109225 - DNA, 25 bp, Homo sapien
tgacagataactctaaaagagaatc

SEQ ID NO: 4109226 - DNA, 25 bp, Homo sapien
aaaagtacatattgaggatctagag

SEQ ID NO: 4109227 - DNA, 25 bp, Homo sapien
agtacagtacaataataagtgcaaa

SEQ ID NO: 4109228 - DNA, 25 bp, Homo sapien
gattggttgacaccatggatgatgc

SEQ ID NO: 4109229 - DNA, 25 bp, Homo sapien
gcttctggttttccggattggttga

SEQ ID NO: 4109230 - DNA, 25 bp, Homo sapien
agcttcttccctgcttagcccgccc

SEQ ID NO: 4109231 - DNA, 25 bp, Homo sapien
gttttccggattggttgacaccatg

SEQ ID NO: 4109232 - DNA, 25 bp, Homo sapien
ctgggagctgcaagacatcttgtct

SEQ ID NO: 4109233 - DNA, 25 bp, Homo sapien
gagctgcaagacatcttgtcttctc

SEQ ID NO: 4109234 - DNA, 25 bp, Homo sapien
tctgggagctgcaagacatcttgtc

SEQ ID NO: 4109235 - DNA, 25 bp, Homo sapien
gggagctgcaagacatcttgtcttc

SEQ ID NO: 4109236 - DNA, 25 bp, Homo sapien
ctgacggatttctctagacactgcc

SEQ ID NO: 4109237 - DNA, 25 bp, Homo sapien
agaaatataaggctgacggatttct

SEQ ID NO: 4109238 - DNA, 25 bp, Homo sapien
gaaatataaggctgacggatttctc

SEQ ID NO: 4109239 - DNA, 25 bp, Homo sapien
ctcatcattgtctcttgaagacctc

SEQ ID NO: 4109240 - DNA, 25 bp, Homo sapien
aacctggggacctctcatcattgtc

SEQ ID NO: 4109241 - DNA, 25 bp, Homo sapien
aggtctcctcctacagtggacaagg

SEQ ID NO: 4109242 - DNA, 25 bp, Homo sapien
cccaggtctcctcctacagtggaca

SEQ ID NO: 4109243 - DNA, 25 bp, Homo sapien
ggtctcctcctacagtggacaaggc

SEQ ID NO: 4109244 - DNA, 25 bp, Homo sapien
cactcccaggtctcctcctacagtg

SEQ ID NO: 4109245 - DNA, 25 bp, Homo sapien
gaacaaagagagtgctgggccctag

SEQ ID NO: 4109246 - DNA, 25 bp, Homo sapien
agaacaaagagagtgctgggcccta

SEQ ID NO: 4109247 - DNA, 25 bp, Homo sapien
gggccctaggaaggtcaatgaaaga

SEQ ID NO: 4109248 - DNA, 25 bp, Homo sapien
agaaagtgtacagtcccagggacca

SEQ ID NO: 4109249 - DNA, 25 bp, Homo sapien
caagctgtctgatgccatggccata

SEQ ID NO: 4109250 - DNA, 25 bp, Homo sapien
ggcggcagtggccactccccactct

SEQ ID NO: 4109251 - DNA, 25 bp, Homo sapien
agcccaacacgggcggcagtggcca

SEQ ID NO: 4109252 - DNA, 25 bp, Homo sapien
tcaggtaggagtcatgccaagctgt

SEQ ID NO: 4109253 - DNA, 25 bp, Homo sapien
tggactctgatgacagcttgcacca

SEQ ID NO: 4109254 - DNA, 25 bp, Homo sapien
attctggactctgatgacagcttgc

SEQ ID NO: 4109255 - DNA, 25 bp, Homo sapien
tctggctccaggaactggaagattc

SEQ ID NO: 4109256 - DNA, 25 bp, Homo sapien
caggaactggaagattctggactct

SEQ ID NO: 4109257 - DNA, 25 bp, Homo sapien
agaaagtgatcgttttagtttctgg

SEQ ID NO: 4109258 - DNA, 25 bp, Homo sapien
cttgaaagaaagtgatcgttttagt

SEQ ID NO: 4109259 - DNA, 25 bp, Homo sapien
gaaagtgatcgttttagtttctgga

SEQ ID NO: 4109260 - DNA, 25 bp, Homo sapien
aaagtgatcgttttagtttctggag

SEQ ID NO: 4109261 - DNA, 25 bp, Homo sapien
tgtattcctgaaaggcatgagcctt

SEQ ID NO: 4109262 - DNA, 25 bp, Homo sapien
cgctggaagaagttgtcagcacttt

SEQ ID NO: 4109263 - DNA, 25 bp, Homo sapien
acctggatgcagaccagccctggcg

SEQ ID NO: 4109264 - DNA, 25 bp, Homo sapien
tgtcttcgctgttggttcgctggaa

SEQ ID NO: 4109265 - DNA, 25 bp, Homo sapien
catctgtccgtaggtacctggaccc

SEQ ID NO: 4109266 - DNA, 25 bp, Homo sapien
tagcatctgtccgtaggtacctgga

SEQ ID NO: 4109267 - DNA, 25 bp, Homo sapien
ctcactcagctttccgggggtgctg

SEQ ID NO: 4109268 - DNA, 25 bp, Homo sapien
gtaggtacctggacccgtggcacac

SEQ ID NO: 4109269 - DNA, 25 bp, Homo sapien
aaatacacagtacttggcagcaggc

SEQ ID NO: 4109270 - DNA, 25 bp, Homo sapien
cagtgggaaatatgggaacaagagc

SEQ ID NO: 4109271 - DNA, 25 bp, Homo sapien
gagactctaggatacgtcctccttg

SEQ ID NO: 4109272 - DNA, 25 bp, Homo sapien
gagcacaacagtatcccctaaagag

SEQ ID NO: 4109273 - DNA, 25 bp, Homo sapien
caatttgctcccttatgtatttgct

SEQ ID NO: 4109274 - DNA, 25 bp, Homo sapien
ttagctaaacaagtgggatccatca

SEQ ID NO: 4109275 - DNA, 25 bp, Homo sapien
agtgggatccatcacaatttgctcc

SEQ ID NO: 4109276 - DNA, 25 bp, Homo sapien
cccacctgcaagagactcattagct

SEQ ID NO: 4109277 - DNA, 25 bp, Homo sapien
acccaaagagttagctgtagcaaga

SEQ ID NO: 4109278 - DNA, 25 bp, Homo sapien
gtggacccaaagagttagctgtagc

SEQ ID NO: 4109279 - DNA, 25 bp, Homo sapien
agagttagctgtagcaagatttatt

SEQ ID NO: 4109280 - DNA, 25 bp, Homo sapien
ccaaagagttagctgtagcaagatt

SEQ ID NO: 4109281 - DNA, 25 bp, Homo sapien
tagtatccatgtctttctaagatta

SEQ ID NO: 4109282 - DNA, 25 bp, Homo sapien
catgagatgtttaaggatggagtgg

SEQ ID NO: 4109283 - DNA, 25 bp, Homo sapien
gagatgtttaaggatggagtggaga

SEQ ID NO: 4109284 - DNA, 25 bp, Homo sapien
tgtctttctaagattagcatatatg

SEQ ID NO: 4109285 - DNA, 25 bp, Homo sapien
taaagtaggtcagtggagcattccc

SEQ ID NO: 4109286 - DNA, 25 bp, Homo sapien
ctaaggtatgatctgaaaaggctcc

SEQ ID NO: 4109287 - DNA, 25 bp, Homo sapien
cagacatttacaaaggacggcccta

SEQ ID NO: 4109288 - DNA, 25 bp, Homo sapien
tacaggctgaagtggatatgaaccc

SEQ ID NO: 4109289 - DNA, 25 bp, Homo sapien
aaacttctggcagttgatgtaagag

SEQ ID NO: 4109290 - DNA, 25 bp, Homo sapien
acttctggcagttgatgtaagagac

SEQ ID NO: 4109291 - DNA, 25 bp, Homo sapien
cagcaaacttctggcagttgatgta

SEQ ID NO: 4109292 - DNA, 25 bp, Homo sapien
gcaaacttctggcagttgatgtaag

SEQ ID NO: 4109293 - DNA, 25 bp, Homo sapien
cagcatgatcgtaattcttcgggca

SEQ ID NO: 4109294 - DNA, 25 bp, Homo sapien
tatggaagttggtttgccctcccag

SEQ ID NO: 4109295 - DNA, 25 bp, Homo sapien
ttaagcagacatggctcgaaccagg

SEQ ID NO: 4109296 - DNA, 25 bp, Homo sapien
gatcattttctcacgaccatctggg

SEQ ID NO: 4109297 - DNA, 25 bp, Homo sapien
aggataatctgtatatatgaagcat

SEQ ID NO: 4109298 - DNA, 25 bp, Homo sapien
caggataatctgtatatatgaagca

SEQ ID NO: 4109299 - DNA, 25 bp, Homo sapien
gtggctttccctagtactttgtata

SEQ ID NO: 4109300 - DNA, 25 bp, Homo sapien
tagaactattgtttccacttgtggc

SEQ ID NO: 4109301 - DNA, 25 bp, Homo sapien
tgctaagaactgtagatagtttggt

SEQ ID NO: 4109302 - DNA, 25 bp, Homo sapien
tgtttttatgtgtatccccaattat

SEQ ID NO: 4109303 - DNA, 25 bp, Homo sapien
gcttggtacaaagtacatcactgtc

SEQ ID NO: 4109304 - DNA, 25 bp, Homo sapien
ttggtacaaagtacatcactgtcca

SEQ ID NO: 4109305 - DNA, 25 bp, Homo sapien
gtgcttggtacaaagtacatcactg

SEQ ID NO: 4109306 - DNA, 25 bp, Homo sapien
gaagtgcttggtacaaagtacatca

SEQ ID NO: 4109307 - DNA, 25 bp, Homo sapien
catcgttctcagagcacctattaca

SEQ ID NO: 4109308 - DNA, 25 bp, Homo sapien
ctcctcttctattatgtgggacttg

SEQ ID NO: 4109309 - DNA, 25 bp, Homo sapien
ggacttgacatgaaatggtggtttc

SEQ ID NO: 4109310 - DNA, 25 bp, Homo sapien
ttctctgtcccctcatcgttctcag

SEQ ID NO: 4109311 - DNA, 25 bp, Homo sapien
aggaactgagccgttggataaattc

SEQ ID NO: 4109312 - DNA, 25 bp, Homo sapien
atcacaggaactgagccgttggata

SEQ ID NO: 4109313 - DNA, 25 bp, Homo sapien
gaactgagccgttggataaattctc

SEQ ID NO: 4109314 - DNA, 25 bp, Homo sapien
gagccgttggataaattctcaggaa

SEQ ID NO: 4109315 - DNA, 25 bp, Homo sapien
cagcttgcccatgcaccgctggggt

SEQ ID NO: 4109316 - DNA, 25 bp, Homo sapien
tttgcagcgcagtccatgcttagca

SEQ ID NO: 4109317 - DNA, 25 bp, Homo sapien
gccaggccatctgtgcacttgtggt

SEQ ID NO: 4109318 - DNA, 25 bp, Homo sapien
tgtggtggatgctcatcttacaggc

SEQ ID NO: 4109319 - DNA, 25 bp, Homo sapien
ctttaatgcagccaaactgttcatg

SEQ ID NO: 4109320 - DNA, 25 bp, Homo sapien
caaactgttcatgaatgagcaaggg

SEQ ID NO: 4109321 - DNA, 25 bp, Homo sapien
tgggcataacttctttaatgcagcc

SEQ ID NO: 4109322 - DNA, 25 bp, Homo sapien
caagggggagctgtagtaacgccga

SEQ ID NO: 4109323 - DNA, 25 bp, Homo sapien
gacagggtccaccttattgccacag

SEQ ID NO: 4109324 - DNA, 25 bp, Homo sapien
ggccagggaggtgccgaagcggagg

SEQ ID NO: 4109325 - DNA, 25 bp, Homo sapien
tgccgaagcggagggtctcgtagac

SEQ ID NO: 4109326 - DNA, 25 bp, Homo sapien
cactgccggagctgcccttctttgt

SEQ ID NO: 4109327 - DNA, 25 bp, Homo sapien
acagacaaaccgaggaaggaagagg

SEQ ID NO: 4109328 - DNA, 25 bp, Homo sapien
tgcgtttccttaggtcatacccgcc

SEQ ID NO: 4109329 - DNA, 25 bp, Homo sapien
gttgctgcgtttccttaggtcatac

SEQ ID NO: 4109330 - DNA, 25 bp, Homo sapien
tgctgcgtttccttaggtcataccc

SEQ ID NO: 4109331 - DNA, 25 bp, Homo sapien
gctgcgtttccttaggtcatacccg

SEQ ID NO: 4109332 - DNA, 25 bp, Homo sapien
tgtgacccagcgttcaggtggtctt

SEQ ID NO: 4109333 - DNA, 25 bp, Homo sapien
cctctgtgacccagcgttcaggtgg

SEQ ID NO: 4109334 - DNA, 25 bp, Homo sapien
ctctgtgacccagcgttcaggtggt

SEQ ID NO: 4109335 - DNA, 25 bp, Homo sapien
gacccagcgttcaggtggtcttcca

SEQ ID NO: 4109336 - DNA, 25 bp, Homo sapien
ctggtggtttatgttcttcgctgga

SEQ ID NO: 4109337 - DNA, 25 bp, Homo sapien
gttcttcgctggatctctgaaatca

SEQ ID NO: 4109338 - DNA, 25 bp, Homo sapien
tatgttcttcgctggatctctgaaa

SEQ ID NO: 4109339 - DNA, 25 bp, Homo sapien
tggtttatgttcttcgctggatctc

SEQ ID NO: 4109340 - DNA, 25 bp, Homo sapien
tgtcttctgtgacatccataaatac

SEQ ID NO: 4109341 - DNA, 25 bp, Homo sapien
ttgtcttctgtgacatccataaata

SEQ ID NO: 4109342 - DNA, 25 bp, Homo sapien
ggtgttcatctgtaatgggtctttg

SEQ ID NO: 4109343 - DNA, 25 bp, Homo sapien
gtacaaggcaacataggtgttcatc

SEQ ID NO: 4109344 - DNA, 25 bp, Homo sapien
caaggcaacataggtgttcatctgt

SEQ ID NO: 4109345 - DNA, 25 bp, Homo sapien
gtaatgggtctttggaaagagatcc

SEQ ID NO: 4109346 - DNA, 25 bp, Homo sapien
agagcagatgcttggctatcatgcg

SEQ ID NO: 4109347 - DNA, 25 bp, Homo sapien
agggcctgtgaatggttctcccaga

SEQ ID NO: 4109348 - DNA, 25 bp, Homo sapien
tgagaacagggcctgtgaatggttc

SEQ ID NO: 4109349 - DNA, 25 bp, Homo sapien
tatcatgcgatgagaggtgaataga

SEQ ID NO: 4109350 - DNA, 25 bp, Homo sapien
ttctgatctactcttctgctggtcc

SEQ ID NO: 4109351 - DNA, 25 bp, Homo sapien
ctgatatccacgagactgcctgcac

SEQ ID NO: 4109352 - DNA, 25 bp, Homo sapien
ctgtcatggatcacgctctccagaa

SEQ ID NO: 4109353 - DNA, 25 bp, Homo sapien
tgatatccacgagactgcctgcact

SEQ ID NO: 4109354 - DNA, 25 bp, Homo sapien
tgtcatggatcacgctctccagaac

SEQ ID NO: 4109355 - DNA, 25 bp, Homo sapien
tcctctaaaagagtaattatgtctc

SEQ ID NO: 4109356 - DNA, 25 bp, Homo sapien
taaaagagtaattatgtctcctggc

SEQ ID NO: 4109357 - DNA, 25 bp, Homo sapien
cattggaatcctctaaaagagtaat

SEQ ID NO: 4109358 - DNA, 25 bp, Homo sapien
ggaatcctctaaaagagtaattatg

SEQ ID NO: 4109359 - DNA, 25 bp, Homo sapien
tgcccctgttccttacacccaatga

SEQ ID NO: 4109360 - DNA, 25 bp, Homo sapien
tacacccaatgaaggttctaacaca

SEQ ID NO: 4109361 - DNA, 25 bp, Homo sapien
ttttgttgtagtctctgaacaaagt

SEQ ID NO: 4109362 - DNA, 25 bp, Homo sapien
gaaggttctaacacatctaaaaatc

SEQ ID NO: 4109363 - DNA, 25 bp, Homo sapien
gcctgccactatcacgtttcgttta

SEQ ID NO: 4109364 - DNA, 25 bp, Homo sapien
aatactttgaatgtgaccccactca

SEQ ID NO: 4109365 - DNA, 25 bp, Homo sapien
tatgaacaggtatcaccaagtgaga

SEQ ID NO: 4109366 - DNA, 25 bp, Homo sapien
gacaccctatttggctcatatctgg

SEQ ID NO: 4109367 - DNA, 25 bp, Homo sapien
ttctgggagggaatcgggccatctt

SEQ ID NO: 4109368 - DNA, 25 bp, Homo sapien
gggcatctggtaccattagatcctc

SEQ ID NO: 4109369 - DNA, 25 bp, Homo sapien
cagttttgctacagtcctttctgct

SEQ ID NO: 4109370 - DNA, 25 bp, Homo sapien
aagatctaattgcaccacaggtgcc

SEQ ID NO: 4109371 - DNA, 25 bp, Homo sapien
aagtgttggcatggaatcaagctgg

SEQ ID NO: 4109372 - DNA, 25 bp, Homo sapien
ttgctttgcgagttgtgtatcgcat

SEQ ID NO: 4109373 - DNA, 25 bp, Homo sapien
tgttggcatggaatcaagctgggaa

SEQ ID NO: 4109374 - DNA, 25 bp, Homo sapien
agttgtgtatcgcatcagagatggg

SEQ ID NO: 4109375 - DNA, 25 bp, Homo sapien
gactggagtgacatggtactctttg

SEQ ID NO: 4109376 - DNA, 25 bp, Homo sapien
ctgactggagtgacatggtactctt

SEQ ID NO: 4109377 - DNA, 25 bp, Homo sapien
tctgactggagtgacatggtactct

SEQ ID NO: 4109378 - DNA, 25 bp, Homo sapien
actggagtgacatggtactctttgt

SEQ ID NO: 4109379 - DNA, 25 bp, Homo sapien
gaacgaagttagaacctgcagcttg

SEQ ID NO: 4109380 - DNA, 25 bp, Homo sapien
agttagaacctgcagcttgaatccc

SEQ ID NO: 4109381 - DNA, 25 bp, Homo sapien
cagcaagaacgaagttagaacctgc

SEQ ID NO: 4109382 - DNA, 25 bp, Homo sapien
tgaggttgcaggagcaacaaactgg

SEQ ID NO: 4109383 - DNA, 25 bp, Homo sapien
tcagatgttttctagtacatcaagg

SEQ ID NO: 4109384 - DNA, 25 bp, Homo sapien
ccactgaggactctgataaaaccat

SEQ ID NO: 4109385 - DNA, 25 bp, Homo sapien
tttccactgaggactctgataaaac

SEQ ID NO: 4109386 - DNA, 25 bp, Homo sapien
ctagtacatcaagggggatgaggcc

SEQ ID NO: 4109387 - DNA, 25 bp, Homo sapien
ctgcaaacggaggaggagccagcaa

SEQ ID NO: 4109388 - DNA, 25 bp, Homo sapien
tgcggcagctcctttgggttgacgc

SEQ ID NO: 4109389 - DNA, 25 bp, Homo sapien
gctgggtcagtgcggcagctccttt

SEQ ID NO: 4109390 - DNA, 25 bp, Homo sapien
cctttgggttgacgcagtgtgagat

SEQ ID NO: 4109391 - DNA, 25 bp, Homo sapien
ggcagctcctttgggttgacgcagt

SEQ ID NO: 4109392 - DNA, 25 bp, Homo sapien
catcagtctttaggcaggtcaggtc

SEQ ID NO: 4109393 - DNA, 25 bp, Homo sapien
tctaagatgctgttgttggttcccc

SEQ ID NO: 4109394 - DNA, 25 bp, Homo sapien
cactgggctaccctgcaaactggag

SEQ ID NO: 4109395 - DNA, 25 bp, Homo sapien
cctagatgatgctaattgggcccct

SEQ ID NO: 4109396 - DNA, 25 bp, Homo sapien
caaagaatccatcttgacatcgtac

SEQ ID NO: 4109397 - DNA, 25 bp, Homo sapien
gaggaaattctggatgctggcttta

SEQ ID NO: 4109398 - DNA, 25 bp, Homo sapien
ctggctttaagataagagtaaggca

SEQ ID NO: 4109399 - DNA, 25 bp, Homo sapien
ttttgcatgtggcatcagagaggga

SEQ ID NO: 4109400 - DNA, 25 bp, Homo sapien
cagaaaggcagtcatatgatctacc

SEQ ID NO: 4109401 - DNA, 25 bp, Homo sapien
taaatggaatactgaattagaggca

SEQ ID NO: 4109402 - DNA, 25 bp, Homo sapien
atttgtactaggcatccaattttac

SEQ ID NO: 4109403 - DNA, 25 bp, Homo sapien
tagaggcaaagagcatttgtactag

SEQ ID NO: 4109404 - DNA, 25 bp, Homo sapien
acaagggtgtgattccaacatccac

SEQ ID NO: 4109405 - DNA, 25 bp, Homo sapien
ccactagagtcttgctatcaatgat

SEQ ID NO: 4109406 - DNA, 25 bp, Homo sapien
ctatcccaggtaagtgttcaaggga

SEQ ID NO: 4109407 - DNA, 25 bp, Homo sapien
ccccatgtgataattcagagacaag

SEQ ID NO: 4109408 - DNA, 25 bp, Homo sapien
cattcacatgtccataggctacggg

SEQ ID NO: 4109409 - DNA, 25 bp, Homo sapien
aatatcagaatagttgtgggcccca

SEQ ID NO: 4109410 - DNA, 25 bp, Homo sapien
caggttcctggtatccccaattcaa

SEQ ID NO: 4109411 - DNA, 25 bp, Homo sapien
ttcaatgaaggacagcttgggagct

SEQ ID NO: 4109412 - DNA, 25 bp, Homo sapien
ctctggatccaacagaagaagtttt

SEQ ID NO: 4109413 - DNA, 25 bp, Homo sapien
ctggatccaacagaagaagttttgg

SEQ ID NO: 4109414 - DNA, 25 bp, Homo sapien
tggatccaacagaagaagttttggg

SEQ ID NO: 4109415 - DNA, 25 bp, Homo sapien
tctggatccaacagaagaagttttg

SEQ ID NO: 4109416 - DNA, 25 bp, Homo sapien
catgtttgtccacattccactgtcc

SEQ ID NO: 4109417 - DNA, 25 bp, Homo sapien
tgtgtaagtccaagtaagtccaagg

SEQ ID NO: 4109418 - DNA, 25 bp, Homo sapien
tgtaagtccaagtaagtccaaggtc

SEQ ID NO: 4109419 - DNA, 25 bp, Homo sapien
ccacaaggccattttctgtgccaaa

SEQ ID NO: 4109420 - DNA, 25 bp, Homo sapien
caaatttagccttgtcctgtgtaag

SEQ ID NO: 4109421 - DNA, 25 bp, Homo sapien
aaaacattggaggacttatctgcag

SEQ ID NO: 4109422 - DNA, 25 bp, Homo sapien
cattggaggacttatctgcagtggt

SEQ ID NO: 4109423 - DNA, 25 bp, Homo sapien
ggaggacttatctgcagtggtataa

SEQ ID NO: 4109424 - DNA, 25 bp, Homo sapien
acaaaaacattggaggacttatctg

SEQ ID NO: 4109425 - DNA, 25 bp, Homo sapien
tagaaataaagattcggagggatgt

SEQ ID NO: 4109426 - DNA, 25 bp, Homo sapien
tgcaggtgcaattaggtatagaaat

SEQ ID NO: 4109427 - DNA, 25 bp, Homo sapien
tgctattagagcatacagggcttcc

SEQ ID NO: 4109428 - DNA, 25 bp, Homo sapien
ggtacagcaccctgattgccacaaa

SEQ ID NO: 4109429 - DNA, 25 bp, Homo sapien
tctttgaaggtggatgaatgtgaat

SEQ ID NO: 4109430 - DNA, 25 bp, Homo sapien
gaatatgatctttgccacttgttgg

SEQ ID NO: 4109431 - DNA, 25 bp, Homo sapien
tgttctaagtccatgcaggttctgc

SEQ ID NO: 4109432 - DNA, 25 bp, Homo sapien
ggaactgatgccgttggtcctgttc

SEQ ID NO: 4109433 - DNA, 25 bp, Homo sapien
tcatttaatccataattacggcatg

SEQ ID NO: 4109434 - DNA, 25 bp, Homo sapien
cttgttgaggcaagagtaatgtctt

SEQ ID NO: 4109435 - DNA, 25 bp, Homo sapien
catgtaatgaaagggactggtagct

SEQ ID NO: 4109436 - DNA, 25 bp, Homo sapien
ggttgatatctcattaacagtgatg

SEQ ID NO: 4109437 - DNA, 25 bp, Homo sapien
aagaccagtacttctctatgggtga

SEQ ID NO: 4109438 - DNA, 25 bp, Homo sapien
gactgaagaccagtacttctctatg

SEQ ID NO: 4109439 - DNA, 25 bp, Homo sapien
ctatgggtgatggtcgtccccttcg

SEQ ID NO: 4109440 - DNA, 25 bp, Homo sapien
tcgaccagtgcgcagcttcaagaga

SEQ ID NO: 4109441 - DNA, 25 bp, Homo sapien
ttcagctatgtgataagagtcatgg

SEQ ID NO: 4109442 - DNA, 25 bp, Homo sapien
tctaggtacctaagacccagcttta

SEQ ID NO: 4109443 - DNA, 25 bp, Homo sapien
cagtgtccgtgggtctttgggctcc

SEQ ID NO: 4109444 - DNA, 25 bp, Homo sapien
ctttaatagctagcaacattttgcc

SEQ ID NO: 4109445 - DNA, 25 bp, Homo sapien
tatggacagtgccagccatggagag

SEQ ID NO: 4109446 - DNA, 25 bp, Homo sapien
tggccacacttgagggttgcaaagc

SEQ ID NO: 4109447 - DNA, 25 bp, Homo sapien
ttccgggattaaccaggatgtgagc

SEQ ID NO: 4109448 - DNA, 25 bp, Homo sapien
ccatggagagcatgttttccgggat

SEQ ID NO: 4109449 - DNA, 25 bp, Homo sapien
taggagtgccacctttgagcatttt

SEQ ID NO: 4109450 - DNA, 25 bp, Homo sapien
ggagtgccacctttgagcattttct

SEQ ID NO: 4109451 - DNA, 25 bp, Homo sapien
cataggagtgccacctttgagcatt

SEQ ID NO: 4109452 - DNA, 25 bp, Homo sapien
tgagcattttctcttccatgtccat

SEQ ID NO: 4109453 - DNA, 25 bp, Homo sapien
aaataaacagaagcaccatgggaca

SEQ ID NO: 4109454 - DNA, 25 bp, Homo sapien
tcagccctcataaaaatcgttgaag

SEQ ID NO: 4109455 - DNA, 25 bp, Homo sapien
tccgctttgtctactcccttgaaaa

SEQ ID NO: 4109456 - DNA, 25 bp, Homo sapien
tcgttgaagggctgaacatcactct

SEQ ID NO: 4109457 - DNA, 25 bp, Homo sapien
gcctcaccgtgagagggctcctgta

SEQ ID NO: 4109458 - DNA, 25 bp, Homo sapien
catgggcagcaaaactggccctttt

SEQ ID NO: 4109459 - DNA, 25 bp, Homo sapien
gagactgggcaatttgcagagaaag

SEQ ID NO: 4109460 - DNA, 25 bp, Homo sapien
gtagctggagttgtgtttacagagt

SEQ ID NO: 4109461 - DNA, 25 bp, Homo sapien
gatagattcatttgcaccacagctc

SEQ ID NO: 4109462 - DNA, 25 bp, Homo sapien
tactgaatatatcactgacacttgc

SEQ ID NO: 4109463 - DNA, 25 bp, Homo sapien
caactgtgatattttagccctgaag

SEQ ID NO: 4109464 - DNA, 25 bp, Homo sapien
gccctgaagttaaaagcttagcctc

SEQ ID NO: 4109465 - DNA, 25 bp, Homo sapien
agtctcattagctggtccccggaat

SEQ ID NO: 4109466 - DNA, 25 bp, Homo sapien
ttgggagtctcattagctggtcccc

SEQ ID NO: 4109467 - DNA, 25 bp, Homo sapien
ggagtctcattagctggtccccgga

SEQ ID NO: 4109468 - DNA, 25 bp, Homo sapien
tcattagctggtccccggaatgtcc

SEQ ID NO: 4109469 - DNA, 25 bp, Homo sapien
tatgggagctatgtctgtaacagtc

SEQ ID NO: 4109470 - DNA, 25 bp, Homo sapien
gagaggtccattctgaggagcctgt

SEQ ID NO: 4109471 - DNA, 25 bp, Homo sapien
cagtcatcaactgggagacggtgag

SEQ ID NO: 4109472 - DNA, 25 bp, Homo sapien
ggatattatgggagctatgtctgta

SEQ ID NO: 4109473 - DNA, 25 bp, Homo sapien
aaggcatccgtagcctggggagatg

SEQ ID NO: 4109474 - DNA, 25 bp, Homo sapien
ggcatccgtagcctggggagatgcc

SEQ ID NO: 4109475 - DNA, 25 bp, Homo sapien
ctggggagatgcctcttggtcagca

SEQ ID NO: 4109476 - DNA, 25 bp, Homo sapien
tggggagatgcctcttggtcagcag

SEQ ID NO: 4109477 - DNA, 25 bp, Homo sapien
gacaccggccctgttgcttggctgg

SEQ ID NO: 4109478 - DNA, 25 bp, Homo sapien
ctaggatccctaggccccttatagg

SEQ ID NO: 4109479 - DNA, 25 bp, Homo sapien
gagctatgggtatccctatgggtac

SEQ ID NO: 4109480 - DNA, 25 bp, Homo sapien
tggtgctcagggtctgcctatcact

SEQ ID NO: 4109481 - DNA, 25 bp, Homo sapien
aagctggggccgttcttgctgggta

SEQ ID NO: 4109482 - DNA, 25 bp, Homo sapien
tgaggagctcccacattcgccctcc

SEQ ID NO: 4109483 - DNA, 25 bp, Homo sapien
cctccctcgtggaaccggagccttg

SEQ ID NO: 4109484 - DNA, 25 bp, Homo sapien
caaagagaacagcatttccaggtga

SEQ ID NO: 4109485 - DNA, 25 bp, Homo sapien
ttcactctgcttgagctccatgaca

SEQ ID NO: 4109486 - DNA, 25 bp, Homo sapien
tctgcttgagctccatgacagatcc

SEQ ID NO: 4109487 - DNA, 25 bp, Homo sapien
actctgcttgagctccatgacagat

SEQ ID NO: 4109488 - DNA, 25 bp, Homo sapien
tgcttgagctccatgacagatcccc

SEQ ID NO: 4109489 - DNA, 25 bp, Homo sapien
tgagagcaagatgggtgaggggcca

SEQ ID NO: 4109490 - DNA, 25 bp, Homo sapien
ccacctgagctaagccctgagaggg

SEQ ID NO: 4109491 - DNA, 25 bp, Homo sapien
aggccacctgagctaagccctgaga

SEQ ID NO: 4109492 - DNA, 25 bp, Homo sapien
gggccaggccacctgagctaagccc

SEQ ID NO: 4109493 - DNA, 25 bp, Homo sapien
ttgagtgcggcctcctttgttccct

SEQ ID NO: 4109494 - DNA, 25 bp, Homo sapien
tttgttccctgtctcagcaactcct

SEQ ID NO: 4109495 - DNA, 25 bp, Homo sapien
tgtgcacttgagtgggtgcatctga

SEQ ID NO: 4109496 - DNA, 25 bp, Homo sapien
gtcagcgtttgagtgcggcctcctt

SEQ ID NO: 4109497 - DNA, 25 bp, Homo sapien
ttttgagcccttgaaccagttctgc

SEQ ID NO: 4109498 - DNA, 25 bp, Homo sapien
ttccaaagtgaacttacagctggcc

SEQ ID NO: 4109499 - DNA, 25 bp, Homo sapien
gaaccagaggatcgtcaaagagaat

SEQ ID NO: 4109500 - DNA, 25 bp, Homo sapien
tttccaagggagtaagagaaccaga

SEQ ID NO: 4109501 - DNA, 25 bp, Homo sapien
tcctttggtactggtgcatacaggg

SEQ ID NO: 4109502 - DNA, 25 bp, Homo sapien
tcttgggactgatggcatcctcctg

SEQ ID NO: 4109503 - DNA, 25 bp, Homo sapien
tgagagcatccttgtccttgagtct

SEQ ID NO: 4109504 - DNA, 25 bp, Homo sapien
tttactccatgagagcatccttgtc

SEQ ID NO: 4109505 - DNA, 25 bp, Homo sapien
tccttgagtcttgggactgatggca

SEQ ID NO: 4109506 - DNA, 25 bp, Homo sapien
tgtagtcaagaattcacccagtgtt

SEQ ID NO: 4109507 - DNA, 25 bp, Homo sapien
aaatccgtcactgccacttggctgg

SEQ ID NO: 4109508 - DNA, 25 bp, Homo sapien
ggagccagctaagccaaatccgtca

SEQ ID NO: 4109509 - DNA, 25 bp, Homo sapien
gccttggctatggtgcagacattcc

SEQ ID NO: 4109510 - DNA, 25 bp, Homo sapien
tcacagtgtgtcatgggctagttcc

SEQ ID NO: 4109511 - DNA, 25 bp, Homo sapien
tctctagtacccaagtgccagtgtc

SEQ ID NO: 4109512 - DNA, 25 bp, Homo sapien
taagagagtttatcacaggctcctg

SEQ ID NO: 4109513 - DNA, 25 bp, Homo sapien
tgtatgagctgaacttccctctggg

SEQ ID NO: 4109514 - DNA, 25 bp, Homo sapien
cgggcttgcaattatacatactgta

SEQ ID NO: 4109515 - DNA, 25 bp, Homo sapien
aatgggaactgaaaacgggcttgca

SEQ ID NO: 4109516 - DNA, 25 bp, Homo sapien
ctgcagaggtaatcaaatgggaact

SEQ ID NO: 4109517 - DNA, 25 bp, Homo sapien
tgaatataggttgggaatgagatcc

SEQ ID NO: 4109518 - DNA, 25 bp, Homo sapien
gaatctttcgctcatctataactgc

SEQ ID NO: 4109519 - DNA, 25 bp, Homo sapien
gatcagtgaagtaaacaagtcaccc

SEQ ID NO: 4109520 - DNA, 25 bp, Homo sapien
gccttcttaacaagtctgaaccatg

SEQ ID NO: 4109521 - DNA, 25 bp, Homo sapien
tgccaagggataccatttgtcagta

SEQ ID NO: 4109522 - DNA, 25 bp, Homo sapien
cattttcttaccgtcagctgggagc

SEQ ID NO: 4109523 - DNA, 25 bp, Homo sapien
gcttggctggtttcacatggcgaaa

SEQ ID NO: 4109524 - DNA, 25 bp, Homo sapien
tcctaccgggaaagtctgcaaagac

SEQ ID NO: 4109525 - DNA, 25 bp, Homo sapien
ggtaggtgtaagactcaggtcccca

SEQ ID NO: 4109526 - DNA, 25 bp, Homo sapien
atcagcctgggctcaccgagtctag

SEQ ID NO: 4109527 - DNA, 25 bp, Homo sapien
ctcttcccggcagtaggaggccttc

SEQ ID NO: 4109528 - DNA, 25 bp, Homo sapien
atctaggtgcagacccgagccagtt

SEQ ID NO: 4109529 - DNA, 25 bp, Homo sapien
tgctgggctggctcaaactggactg

SEQ ID NO: 4109530 - DNA, 25 bp, Homo sapien
ccaactatttggtggctagcagtga

SEQ ID NO: 4109531 - DNA, 25 bp, Homo sapien
gaagtagactccttgaagttggcaa

SEQ ID NO: 4109532 - DNA, 25 bp, Homo sapien
ccaacagaaagaggtatgctagaag

SEQ ID NO: 4109533 - DNA, 25 bp, Homo sapien
ctttgatgtaagaacctggctaggc

SEQ ID NO: 4109534 - DNA, 25 bp, Homo sapien
tggaccacccgagtcttggagagga

SEQ ID NO: 4109535 - DNA, 25 bp, Homo sapien
ctgagttccccgcaggcctctggag

SEQ ID NO: 4109536 - DNA, 25 bp, Homo sapien
ctgtgcgctgggtactgtcctggat

SEQ ID NO: 4109537 - DNA, 25 bp, Homo sapien
gcgctgggtactgtcctggatcatc

SEQ ID NO: 4109538 - DNA, 25 bp, Homo sapien
accaggacggttgctgcagctcaaa

SEQ ID NO: 4109539 - DNA, 25 bp, Homo sapien
ggaccaggacggttgctgcagctca

SEQ ID NO: 4109540 - DNA, 25 bp, Homo sapien
aggaccaggacggttgctgcagctc

SEQ ID NO: 4109541 - DNA, 25 bp, Homo sapien
gaccaggacggttgctgcagctcaa

SEQ ID NO: 4109542 - DNA, 25 bp, Homo sapien
ttgtttcaggttctatccagaagcc

SEQ ID NO: 4109543 - DNA, 25 bp, Homo sapien
cagcaccttttgtttcaggttctat

SEQ ID NO: 4109544 - DNA, 25 bp, Homo sapien
accttttgtttcaggttctatccag

SEQ ID NO: 4109545 - DNA, 25 bp, Homo sapien
gggcctgtctcttacctcttctggg

SEQ ID NO: 4109546 - DNA, 25 bp, Homo sapien
tgccaattctgtattcctgagtggg

SEQ ID NO: 4109547 - DNA, 25 bp, Homo sapien
catgtgccaattctgtattcctgag

SEQ ID NO: 4109548 - DNA, 25 bp, Homo sapien
ggacatgtgatccagtcttcggtgg

SEQ ID NO: 4109549 - DNA, 25 bp, Homo sapien
cttcggtggtgtctttcctgaggtc

SEQ ID NO: 4109550 - DNA, 25 bp, Homo sapien
tttagtaaagggtagatgatctgcc

SEQ ID NO: 4109551 - DNA, 25 bp, Homo sapien
caggtatacacgagtacacccagct

SEQ ID NO: 4109552 - DNA, 25 bp, Homo sapien
tggtccatgggcaaaatctgtctag

SEQ ID NO: 4109553 - DNA, 25 bp, Homo sapien
tctgtgtcagcatgggctagcttgc

SEQ ID NO: 4109554 - DNA, 25 bp, Homo sapien
caaagtagaagactgactcagccct

SEQ ID NO: 4109555 - DNA, 25 bp, Homo sapien
tgggaaagccacacccttagtctgt

SEQ ID NO: 4109556 - DNA, 25 bp, Homo sapien
gaaaaagataatgccgcctaagagt

SEQ ID NO: 4109557 - DNA, 25 bp, Homo sapien
cattcagagatcttaacagtaggtg

SEQ ID NO: 4109558 - DNA, 25 bp, Homo sapien
catctttaaggtctcagtatgccac

SEQ ID NO: 4109559 - DNA, 25 bp, Homo sapien
ggaaaccttcattgatgccctctag

SEQ ID NO: 4109560 - DNA, 25 bp, Homo sapien
gctagactgtaagctttgtaagggc

SEQ ID NO: 4109561 - DNA, 25 bp, Homo sapien
tactgcttattgatcactgctagac

SEQ ID NO: 4109562 - DNA, 25 bp, Homo sapien
tgagaaatgtgtaggggcacttttt

SEQ ID NO: 4109563 - DNA, 25 bp, Homo sapien
agaaatgtgtaggggcacttttttg

SEQ ID NO: 4109564 - DNA, 25 bp, Homo sapien
ctgagaaatgtgtaggggcactttt

SEQ ID NO: 4109565 - DNA, 25 bp, Homo sapien
gctgagaaatgtgtaggggcacttt

SEQ ID NO: 4109566 - DNA, 25 bp, Homo sapien
caaggaaccaggctatgactaagaa

SEQ ID NO: 4109567 - DNA, 25 bp, Homo sapien
ggttactaatccagcaaattcaagg

SEQ ID NO: 4109568 - DNA, 25 bp, Homo sapien
actattgaaacaccttaatctgtgg

SEQ ID NO: 4109569 - DNA, 25 bp, Homo sapien
ccaaagtcctgtcttaactattgaa

SEQ ID NO: 4109570 - DNA, 25 bp, Homo sapien
tatggaacaccttcgagaactcagt

SEQ ID NO: 4109571 - DNA, 25 bp, Homo sapien
taacagactttcctgccctcagaga

SEQ ID NO: 4109572 - DNA, 25 bp, Homo sapien
gattaagaccagaggcgttaggcga

SEQ ID NO: 4109573 - DNA, 25 bp, Homo sapien
tacatgagagaaaaggccgtaagcc

SEQ ID NO: 4109574 - DNA, 25 bp, Homo sapien
gcaagatggaagtcgacgaggctct

SEQ ID NO: 4109575 - DNA, 25 bp, Homo sapien
cgaggctgagcacgaatactacgag

SEQ ID NO: 4109576 - DNA, 25 bp, Homo sapien
atactacgagcggtatgtggcggac

SEQ ID NO: 4109577 - DNA, 25 bp, Homo sapien
cgaggctctagttttccggcccgag

SEQ ID NO: 4109578 - DNA, 25 bp, Homo sapien
tgtccgctcttcctattggttcgtt

SEQ ID NO: 4109579 - DNA, 25 bp, Homo sapien
ctctgctgaggtgatctggcgcaga

SEQ ID NO: 4109580 - DNA, 25 bp, Homo sapien
aggtgcttggcgcttctcaggctcc

SEQ ID NO: 4109581 - DNA, 25 bp, Homo sapien
ctttctaacgttggccctgctcttg

SEQ ID NO: 4109582 - DNA, 25 bp, Homo sapien
acccttcagcggcagctattgattg

SEQ ID NO: 4109583 - DNA, 25 bp, Homo sapien
ttcagctgtagcttacgccatccag

SEQ ID NO: 4109584 - DNA, 25 bp, Homo sapien
gattggacagcttgaatgccagtca

SEQ ID NO: 4109585 - DNA, 25 bp, Homo sapien
tcagtgcctcgtgctcacgttcttc

SEQ ID NO: 4109586 - DNA, 25 bp, Homo sapien
tctagatgctcaacggaagtgcctt

SEQ ID NO: 4109587 - DNA, 25 bp, Homo sapien
gaagagccaaggaaacgtctagatg

SEQ ID NO: 4109588 - DNA, 25 bp, Homo sapien
tgctcaacggaagtgccttcagcca

SEQ ID NO: 4109589 - DNA, 25 bp, Homo sapien
gaaacgtctagatgctcaacggaag

SEQ ID NO: 4109590 - DNA, 25 bp, Homo sapien
catctctttgatagcattagctggc

SEQ ID NO: 4109591 - DNA, 25 bp, Homo sapien
actgtctcgtccagccgccgaataa

SEQ ID NO: 4109592 - DNA, 25 bp, Homo sapien
tttgatagcattagctggccgctgg

SEQ ID NO: 4109593 - DNA, 25 bp, Homo sapien
attagctggccgctggataacttcc

SEQ ID NO: 4109594 - DNA, 25 bp, Homo sapien
ctgactggcacgtcagggaacccgg

SEQ ID NO: 4109595 - DNA, 25 bp, Homo sapien
aacacacggtctgcggaaaaggaga

SEQ ID NO: 4109596 - DNA, 25 bp, Homo sapien
aaaggagaaggcctgactggcacgt

SEQ ID NO: 4109597 - DNA, 25 bp, Homo sapien
gagagcggtaaagaaacacacggtc

SEQ ID NO: 4109598 - DNA, 25 bp, Homo sapien
ttgtcacagttataagcttcaaaat

SEQ ID NO: 4109599 - DNA, 25 bp, Homo sapien
ttttttgtcacagttataagcttca

SEQ ID NO: 4109600 - DNA, 25 bp, Homo sapien
aaatctggtatcttcgaagtgcgtc

SEQ ID NO: 4109601 - DNA, 25 bp, Homo sapien
aaggatgacccataaaatctggtat

SEQ ID NO: 4109602 - DNA, 25 bp, Homo sapien
ggttgcagtcagctgagatcgcgcc

SEQ ID NO: 4109603 - DNA, 25 bp, Homo sapien
gagaatctcccttgaacctgtgagg

SEQ ID NO: 4109604 - DNA, 25 bp, Homo sapien
atctcccttgaacctgtgaggagga

SEQ ID NO: 4109605 - DNA, 25 bp, Homo sapien
gaatctcccttgaacctgtgaggag

SEQ ID NO: 4109606 - DNA, 25 bp, Homo sapien
cctgatcccggtgccattgtcttgg

SEQ ID NO: 4109607 - DNA, 25 bp, Homo sapien
gccattgtcttggatctgaatcaac

SEQ ID NO: 4109608 - DNA, 25 bp, Homo sapien
attgtcttggatctgaatcaacttc

SEQ ID NO: 4109609 - DNA, 25 bp, Homo sapien
ccattgtcttggatctgaatcaact

SEQ ID NO: 4109610 - DNA, 25 bp, Homo sapien
ggatttacgtgttttcactcagacc

SEQ ID NO: 4109611 - DNA, 25 bp, Homo sapien
ttttcagcctctagacaaactggcc

SEQ ID NO: 4109612 - DNA, 25 bp, Homo sapien
tagtcctttaacatgtcaggtatgc

SEQ ID NO: 4109613 - DNA, 25 bp, Homo sapien
aaactggcctccttgatagtccttt

SEQ ID NO: 4109614 - DNA, 25 bp, Homo sapien
cactgcaacctcctttgagacagag

SEQ ID NO: 4109615 - DNA, 25 bp, Homo sapien
gcaattttcatgtctcagcctccag

SEQ ID NO: 4109616 - DNA, 25 bp, Homo sapien
aagtgcagtggcgagatctcagctc

SEQ ID NO: 4109617 - DNA, 25 bp, Homo sapien
tcttgctctgtcacccaggctgaag

SEQ ID NO: 4109618 - DNA, 25 bp, Homo sapien
tttactagtagtgaacctttcacat

SEQ ID NO: 4109619 - DNA, 25 bp, Homo sapien
ctcgaaagccataggtagaaatact

SEQ ID NO: 4109620 - DNA, 25 bp, Homo sapien
gctaaatcctcaaaggactgcagtt

SEQ ID NO: 4109621 - DNA, 25 bp, Homo sapien
ggtagaaatactggctaaatcctca

SEQ ID NO: 4109622 - DNA, 25 bp, Homo sapien
gccattttctaactgcgtccgctgg

SEQ ID NO: 4109623 - DNA, 25 bp, Homo sapien
tagaacacaacatcacaccaggaag

SEQ ID NO: 4109624 - DNA, 25 bp, Homo sapien
caccaggaagatagagtaccactac

SEQ ID NO: 4109625 - DNA, 25 bp, Homo sapien
tccgctggccatgtttctatgtaaa

SEQ ID NO: 4109626 - DNA, 25 bp, Homo sapien
catgagccacatggcttatgctggc

SEQ ID NO: 4109627 - DNA, 25 bp, Homo sapien
ccacatggcttatgctggccaaagc

SEQ ID NO: 4109628 - DNA, 25 bp, Homo sapien
ccatcagctgttttcgttgtaatag

SEQ ID NO: 4109629 - DNA, 25 bp, Homo sapien
cgttgtaatagtaacatgagccaca

SEQ ID NO: 4109630 - DNA, 25 bp, Homo sapien
attgccagcacatggtttaggaggg

SEQ ID NO: 4109631 - DNA, 25 bp, Homo sapien
cagttttccatctgagtaacttgct

SEQ ID NO: 4109632 - DNA, 25 bp, Homo sapien
ccttgattgccagcacatggtttag

SEQ ID NO: 4109633 - DNA, 25 bp, Homo sapien
cgtgatctgggtcccttgattgcca

SEQ ID NO: 4109634 - DNA, 25 bp, Homo sapien
ctcctcgtggctatgttgtaaaaaa

SEQ ID NO: 4109635 - DNA, 25 bp, Homo sapien
cctcgtggctatgttgtaaaaaagg

SEQ ID NO: 4109636 - DNA, 25 bp, Homo sapien
tctcctcgtggctatgttgtaaaaa

SEQ ID NO: 4109637 - DNA, 25 bp, Homo sapien
ttctcctcgtggctatgttgtaaaa

SEQ ID NO: 4109638 - DNA, 25 bp, Homo sapien
ttaactgagaaactaatgcctgcat

SEQ ID NO: 4109639 - DNA, 25 bp, Homo sapien
ttttaactgagaaactaatgcctgc

SEQ ID NO: 4109640 - DNA, 25 bp, Homo sapien
gaaactaatgcctgcattgtgtact

SEQ ID NO: 4109641 - DNA, 25 bp, Homo sapien
aatgcctgcattgtgtactgaatac

SEQ ID NO: 4109642 - DNA, 25 bp, Homo sapien
tgaggcattgggtagtgtcctaaca

SEQ ID NO: 4109643 - DNA, 25 bp, Homo sapien
tagtgtcctaacatcagctactgtc

SEQ ID NO: 4109644 - DNA, 25 bp, Homo sapien
tattgtccacggttgaggcattggg

SEQ ID NO: 4109645 - DNA, 25 bp, Homo sapien
tccaaagatggagcgaatattgtcc

SEQ ID NO: 4109646 - DNA, 25 bp, Homo sapien
cactgagtagtttgcattggatatg

SEQ ID NO: 4109647 - DNA, 25 bp, Homo sapien
ggatatgtaaccattcattttgaag

SEQ ID NO: 4109648 - DNA, 25 bp, Homo sapien
gaaggctagggttttatcctcacat

SEQ ID NO: 4109649 - DNA, 25 bp, Homo sapien
gatgaagagtaagaagatgcacttc

SEQ ID NO: 4109650 - DNA, 25 bp, Homo sapien
catggtcccataaaattccctgtgg

SEQ ID NO: 4109651 - DNA, 25 bp, Homo sapien
atggtcccataaaattccctgtggg

SEQ ID NO: 4109652 - DNA, 25 bp, Homo sapien
cccttttccgtatcctgctgtgcaa

SEQ ID NO: 4109653 - DNA, 25 bp, Homo sapien
taatgacaatgcctatacctaaggt

SEQ ID NO: 4109654 - DNA, 25 bp, Homo sapien
tggctagggcttactcgtaaggact

SEQ ID NO: 4109655 - DNA, 25 bp, Homo sapien
tccagcaatgttctggctagggctt

SEQ ID NO: 4109656 - DNA, 25 bp, Homo sapien
ccaaggccatgagtgcacgtgccga

SEQ ID NO: 4109657 - DNA, 25 bp, Homo sapien
catgagtgcacgtgccgaggctatc

SEQ ID NO: 4109658 - DNA, 25 bp, Homo sapien
tgcacgtgccgaggctatcaaggcc

SEQ ID NO: 4109659 - DNA, 25 bp, Homo sapien
gccatgagtgcacgtgccgaggcta

SEQ ID NO: 4109660 - DNA, 25 bp, Homo sapien
caagtggccagcactattatagacg

SEQ ID NO: 4109661 - DNA, 25 bp, Homo sapien
gagccgcggcttaaggtgtagacat

SEQ ID NO: 4109662 - DNA, 25 bp, Homo sapien
tgagccaactcttccggttctaggt

SEQ ID NO: 4109663 - DNA, 25 bp, Homo sapien
caagtgctgggagacaacatgctga

SEQ ID NO: 4109664 - DNA, 25 bp, Homo sapien
aatatgatgtcagccctcagacttt

SEQ ID NO: 4109665 - DNA, 25 bp, Homo sapien
ccattagctcatgtggactaactgt

SEQ ID NO: 4109666 - DNA, 25 bp, Homo sapien
tgcccccattagctcatgtggacta

SEQ ID NO: 4109667 - DNA, 25 bp, Homo sapien
ttctgggcacagtgggaaatatgat

SEQ ID NO: 4109668 - DNA, 25 bp, Homo sapien
tatgcacatcacatccccaggaaga

SEQ ID NO: 4109669 - DNA, 25 bp, Homo sapien
aaaggtgcacctttacctgtcgcca

SEQ ID NO: 4109670 - DNA, 25 bp, Homo sapien
gaggtcacaggtgtacattcacaca

SEQ ID NO: 4109671 - DNA, 25 bp, Homo sapien
cactatcttactatcggcttgggac

SEQ ID NO: 4109672 - DNA, 25 bp, Homo sapien
aggtacaggaatgggtgtgtgtttt

SEQ ID NO: 4109673 - DNA, 25 bp, Homo sapien
caaataggctgcatacactgtttct

SEQ ID NO: 4109674 - DNA, 25 bp, Homo sapien
gtgtttttgggcaaataggctgcat

SEQ ID NO: 4109675 - DNA, 25 bp, Homo sapien
caggaatgggtgtgtgtttttgggc

SEQ ID NO: 4109676 - DNA, 25 bp, Homo sapien
tcttggttgaggagtttggtgctac

SEQ ID NO: 4109677 - DNA, 25 bp, Homo sapien
ccttgtgagtcttggttgaggagtt

SEQ ID NO: 4109678 - DNA, 25 bp, Homo sapien
cttggttgaggagtttggtgctaca

SEQ ID NO: 4109679 - DNA, 25 bp, Homo sapien
ctgttccttgtgagtcttggttgag

SEQ ID NO: 4109680 - DNA, 25 bp, Homo sapien
gggacagaacatccttttgccagtg

SEQ ID NO: 4109681 - DNA, 25 bp, Homo sapien
tttgccagtggtgtatgggattcac

SEQ ID NO: 4109682 - DNA, 25 bp, Homo sapien
tctctttcaaagaggagagcctgat

SEQ ID NO: 4109683 - DNA, 25 bp, Homo sapien
tgattgtactattagcatgctcatc

SEQ ID NO: 4109684 - DNA, 25 bp, Homo sapien
gggtgcactcctatcagacttcaag

SEQ ID NO: 4109685 - DNA, 25 bp, Homo sapien
cagcatcccctcagagtggtactgg

SEQ ID NO: 4109686 - DNA, 25 bp, Homo sapien
caagttctttagcacaagtggccag

SEQ ID NO: 4109687 - DNA, 25 bp, Homo sapien
ccagtataaggtgctagagggactc

SEQ ID NO: 4109688 - DNA, 25 bp, Homo sapien
catatggtgtatgtggtggccagaa

SEQ ID NO: 4109689 - DNA, 25 bp, Homo sapien
gatcgagtctgagtgtgttcaaata

SEQ ID NO: 4109690 - DNA, 25 bp, Homo sapien
gatgacacagtggtcaaaacctcag

SEQ ID NO: 4109691 - DNA, 25 bp, Homo sapien
cccacatatggtgtatgtggtggcc

SEQ ID NO: 4109692 - DNA, 25 bp, Homo sapien
ggaagtgaacttcatgctttgtggg

SEQ ID NO: 4109693 - DNA, 25 bp, Homo sapien
tgggtgaagtacatcctggaggaat

SEQ ID NO: 4109694 - DNA, 25 bp, Homo sapien
cctcgtgcaggaagtgaacttcatg

SEQ ID NO: 4109695 - DNA, 25 bp, Homo sapien
tttgtggggtgcacattaacatcca

SEQ ID NO: 4109696 - DNA, 25 bp, Homo sapien
aagtagctggatgagaagcgccctg

SEQ ID NO: 4109697 - DNA, 25 bp, Homo sapien
gagaagtagctggatgagaagcgcc

SEQ ID NO: 4109698 - DNA, 25 bp, Homo sapien
gaagtagctggatgagaagcgccct

SEQ ID NO: 4109699 - DNA, 25 bp, Homo sapien
gtagctggatgagaagcgccctgac

SEQ ID NO: 4109700 - DNA, 25 bp, Homo sapien
gtcagtgtccttccgagaagcattc

SEQ ID NO: 4109701 - DNA, 25 bp, Homo sapien
catgccacctccatctagattcttt

SEQ ID NO: 4109702 - DNA, 25 bp, Homo sapien
tcaccgcttagtgcccatgccacct

SEQ ID NO: 4109703 - DNA, 25 bp, Homo sapien
tccaggtaggtaactgtcagtgtcc

SEQ ID NO: 4109704 - DNA, 25 bp, Homo sapien
ttcctttcacttgcccaaggcagga

SEQ ID NO: 4109705 - DNA, 25 bp, Homo sapien
ctgctttcctttcacttgcccaagg

SEQ ID NO: 4109706 - DNA, 25 bp, Homo sapien
cattccataggggtcctgccccata

SEQ ID NO: 4109707 - DNA, 25 bp, Homo sapien
aggactctaatttgattgtgggtca

SEQ ID NO: 4109708 - DNA, 25 bp, Homo sapien
ggccagcaagtcctggtagcaaagt

SEQ ID NO: 4109709 - DNA, 25 bp, Homo sapien
agaggggccagcaagtcctggtagc

SEQ ID NO: 4109710 - DNA, 25 bp, Homo sapien
aggggccagcaagtcctggtagcaa

SEQ ID NO: 4109711 - DNA, 25 bp, Homo sapien
cccagaggggccagcaagtcctggt

SEQ ID NO: 4109712 - DNA, 25 bp, Homo sapien
aggtcagacttgttgtggatttaac

SEQ ID NO: 4109713 - DNA, 25 bp, Homo sapien
tctggtgggcatagaccttatcact

SEQ ID NO: 4109714 - DNA, 25 bp, Homo sapien
tagaccttatcactacttccagaag

SEQ ID NO: 4109715 - DNA, 25 bp, Homo sapien
tcagacttgttgtggatttaaccat

SEQ ID NO: 4109716 - DNA, 25 bp, Homo sapien
aatgcatcaagcttctgttcccggg

SEQ ID NO: 4109717 - DNA, 25 bp, Homo sapien
ggttgctggaagtaggtcctctctt

SEQ ID NO: 4109718 - DNA, 25 bp, Homo sapien
gggctgggagttcaagcatctcctc

SEQ ID NO: 4109719 - DNA, 25 bp, Homo sapien
ttatcctctgtgacaatggcctggg

SEQ ID NO: 4109720 - DNA, 25 bp, Homo sapien
cagtcatttcctttcgggaatcatc

SEQ ID NO: 4109721 - DNA, 25 bp, Homo sapien
taatttcttcctggagactcaaaac

SEQ ID NO: 4109722 - DNA, 25 bp, Homo sapien
gagactcaaaacactagtgaggtta

SEQ ID NO: 4109723 - DNA, 25 bp, Homo sapien
taatgatccttctccggggggtaca

SEQ ID NO: 4109724 - DNA, 25 bp, Homo sapien
gagaaggtataacttggtttgatgc

SEQ ID NO: 4109725 - DNA, 25 bp, Homo sapien
tggttatgcaacatctcccggagaa

SEQ ID NO: 4109726 - DNA, 25 bp, Homo sapien
tgtgccaaggcccactgaggattca

SEQ ID NO: 4109727 - DNA, 25 bp, Homo sapien
cagcccacgaaggagtggttatgca

SEQ ID NO: 4109728 - DNA, 25 bp, Homo sapien
attggcaaaatcataaatgagtatc

SEQ ID NO: 4109729 - DNA, 25 bp, Homo sapien
taacctgagaacaccaaaattggca

SEQ ID NO: 4109730 - DNA, 25 bp, Homo sapien
cgataacctgagaacaccaaaattg

SEQ ID NO: 4109731 - DNA, 25 bp, Homo sapien
aatgagtatctggtagaacagttct

SEQ ID NO: 4109732 - DNA, 25 bp, Homo sapien
ttttttggctgggtgaagtaactca

SEQ ID NO: 4109733 - DNA, 25 bp, Homo sapien
ttctcagaagacatgatacatatat

SEQ ID NO: 4109734 - DNA, 25 bp, Homo sapien
tgcaagatacagcatcaaggtacaa

SEQ ID NO: 4109735 - DNA, 25 bp, Homo sapien
ctagcaaataaacaataggaaattg

SEQ ID NO: 4109736 - DNA, 25 bp, Homo sapien
gtttatgtacccaataacagagctt

SEQ ID NO: 4109737 - DNA, 25 bp, Homo sapien
tggaagtttcaatacccctttctca

SEQ ID NO: 4109738 - DNA, 25 bp, Homo sapien
aagatacaggagacttgggcatcac

SEQ ID NO: 4109739 - DNA, 25 bp, Homo sapien
tatatatatgaaggcaaaaactaag

SEQ ID NO: 4109740 - DNA, 25 bp, Homo sapien
gaatccactatcagaatggcaggtg

SEQ ID NO: 4109741 - DNA, 25 bp, Homo sapien
gatacgacagacaaaaagcctgctg

SEQ ID NO: 4109742 - DNA, 25 bp, Homo sapien
tttaacggagcatccaaatgaagcc

SEQ ID NO: 4109743 - DNA, 25 bp, Homo sapien
gtcaatggccatttcaacagagaag

SEQ ID NO: 4109744 - DNA, 25 bp, Homo sapien
gccactctctggactatctaaggca

SEQ ID NO: 4109745 - DNA, 25 bp, Homo sapien
gactatctaaggcaagcatggcaag

SEQ ID NO: 4109746 - DNA, 25 bp, Homo sapien
tcaacaatgtattcagcaagtcctt

SEQ ID NO: 4109747 - DNA, 25 bp, Homo sapien
caaggtcaaagagcggtgctggctc

SEQ ID NO: 4109748 - DNA, 25 bp, Homo sapien
gagaaatagtctgcaagcatctcag

SEQ ID NO: 4109749 - DNA, 25 bp, Homo sapien
agaaatagtctgcaagcatctcagc

SEQ ID NO: 4109750 - DNA, 25 bp, Homo sapien
aagagaaatagtctgcaagcatctc

SEQ ID NO: 4109751 - DNA, 25 bp, Homo sapien
agagaaatagtctgcaagcatctca

SEQ ID NO: 4109752 - DNA, 25 bp, Homo sapien
gaatacaacagaagtataagaatgg

SEQ ID NO: 4109753 - DNA, 25 bp, Homo sapien
aacagaagtataagaatggctgtca

SEQ ID NO: 4109754 - DNA, 25 bp, Homo sapien
tacaacagaagtataagaatggctg

SEQ ID NO: 4109755 - DNA, 25 bp, Homo sapien
agaagtataagaatggctgtcacac

SEQ ID NO: 4109756 - DNA, 25 bp, Homo sapien
tttcatcctgacaaacagcacggca

SEQ ID NO: 4109757 - DNA, 25 bp, Homo sapien
ttcaccctgggaacaagagtaggca

SEQ ID NO: 4109758 - DNA, 25 bp, Homo sapien
cacgttacttgattgggctgggcac

SEQ ID NO: 4109759 - DNA, 25 bp, Homo sapien
tctcatttataatggcctgcaggga

SEQ ID NO: 4109760 - DNA, 25 bp, Homo sapien
ctcagtggctagtcgaagaatgaag

SEQ ID NO: 4109761 - DNA, 25 bp, Homo sapien
gaagataggcagtccctccaaaggg

SEQ ID NO: 4109762 - DNA, 25 bp, Homo sapien
caaagggggcacatagttgtcaatc

SEQ ID NO: 4109763 - DNA, 25 bp, Homo sapien
gttgtcaatcagaaggggtaatcca

SEQ ID NO: 4109764 - DNA, 25 bp, Homo sapien
tctaaacggagatcacagactactt

SEQ ID NO: 4109765 - DNA, 25 bp, Homo sapien
cgaaatgtgatactttaggcgttaa

SEQ ID NO: 4109766 - DNA, 25 bp, Homo sapien
cagcacacatgcatgtaccgaaatg

SEQ ID NO: 4109767 - DNA, 25 bp, Homo sapien
ccagatcaaagggtggtcatttgcc

SEQ ID NO: 4109768 - DNA, 25 bp, Homo sapien
gggtcgactcctcagatatgtactg

SEQ ID NO: 4109769 - DNA, 25 bp, Homo sapien
gatggaatagaacatagcgcattct

SEQ ID NO: 4109770 - DNA, 25 bp, Homo sapien
tgctggcctgagagggtcgactcct

SEQ ID NO: 4109771 - DNA, 25 bp, Homo sapien
agatatgtactgcttccggatggaa

SEQ ID NO: 4109772 - DNA, 25 bp, Homo sapien
atatttcaactctcccttccaacct

SEQ ID NO: 4109773 - DNA, 25 bp, Homo sapien
gattaaagtgggctactctttgatt

SEQ ID NO: 4109774 - DNA, 25 bp, Homo sapien
tgtgagcaatcaggggtcatactct

SEQ ID NO: 4109775 - DNA, 25 bp, Homo sapien
gggtcatactctgattaaagtgggc

SEQ ID NO: 4109776 - DNA, 25 bp, Homo sapien
agacttggaatcctcgagcatgcct

SEQ ID NO: 4109777 - DNA, 25 bp, Homo sapien
tcgagcatgcctgactggccttcag

SEQ ID NO: 4109778 - DNA, 25 bp, Homo sapien
gagcatgcctgactggccttcagcc

SEQ ID NO: 4109779 - DNA, 25 bp, Homo sapien
ggaatcctcgagcatgcctgactgg

SEQ ID NO: 4109780 - DNA, 25 bp, Homo sapien
cagaatgtgtgagcgcaaggcttta

SEQ ID NO: 4109781 - DNA, 25 bp, Homo sapien
caaggctttatagacaatgtgttcc

SEQ ID NO: 4109782 - DNA, 25 bp, Homo sapien
tcttctgtgaaatgtttaggaggca

SEQ ID NO: 4109783 - DNA, 25 bp, Homo sapien
tatagatcaggcaggttagcaagct

SEQ ID NO: 4109784 - DNA, 25 bp, Homo sapien
agagaaagaagaacacatcccacag

SEQ ID NO: 4109785 - DNA, 25 bp, Homo sapien
taaaggaatactatcagaaggcaag

SEQ ID NO: 4109786 - DNA, 25 bp, Homo sapien
taatcaatccactgtgtataaagga

SEQ ID NO: 4109787 - DNA, 25 bp, Homo sapien
caacactttgtatcggaatacagag

SEQ ID NO: 4109788 - DNA, 25 bp, Homo sapien
cacttctgagatgccctggtctact

SEQ ID NO: 4109789 - DNA, 25 bp, Homo sapien
tgtggcacaacaaatacgtctgtaa

SEQ ID NO: 4109790 - DNA, 25 bp, Homo sapien
tattgttcaaaactgaccttgccta

SEQ ID NO: 4109791 - DNA, 25 bp, Homo sapien
tcataagatgagagtagtctgttct

SEQ ID NO: 4109792 - DNA, 25 bp, Homo sapien
caactgtgctgtaccttgtaaagta

SEQ ID NO: 4109793 - DNA, 25 bp, Homo sapien
aagtccaggcctaatactcctaaag

SEQ ID NO: 4109794 - DNA, 25 bp, Homo sapien
tgtggaatgaaacctcaaacaaacc

SEQ ID NO: 4109795 - DNA, 25 bp, Homo sapien
ccacaattggctactgacatgttca

SEQ ID NO: 4109796 - DNA, 25 bp, Homo sapien
ttcaacctgggtgatgctccttggg

SEQ ID NO: 4109797 - DNA, 25 bp, Homo sapien
tctagggtagaaccagtccatgctg

SEQ ID NO: 4109798 - DNA, 25 bp, Homo sapien
tcagtaactgggcactcggaggcct

SEQ ID NO: 4109799 - DNA, 25 bp, Homo sapien
aataggacagcacttctggcccagc

SEQ ID NO: 4109800 - DNA, 25 bp, Homo sapien
tcagtgttgttgtttatgtagagca

SEQ ID NO: 4109801 - DNA, 25 bp, Homo sapien
tcaaattggcctgttcctcagaggt

SEQ ID NO: 4109802 - DNA, 25 bp, Homo sapien
tgttgtgacagtgatcatttaccca

SEQ ID NO: 4109803 - DNA, 25 bp, Homo sapien
tagaattcctagtttcaaattggcc

SEQ ID NO: 4109804 - DNA, 25 bp, Homo sapien
tatatggtcaggtaatacagagggt

SEQ ID NO: 4109805 - DNA, 25 bp, Homo sapien
tacagagggttttagatccagcttg

SEQ ID NO: 4109806 - DNA, 25 bp, Homo sapien
gcacacaaacacaagggtagtggtt

SEQ ID NO: 4109807 - DNA, 25 bp, Homo sapien
tactgtaggagctattgttgcacac

SEQ ID NO: 4109808 - DNA, 25 bp, Homo sapien
ctggatgtatagttaggttcactgc

SEQ ID NO: 4109809 - DNA, 25 bp, Homo sapien
tgagtttggctactctgtgtaccaa

SEQ ID NO: 4109810 - DNA, 25 bp, Homo sapien
tgccactagtctgtgtgtggccaaa

SEQ ID NO: 4109811 - DNA, 25 bp, Homo sapien
ttctttctgcgcttctaactggatg

SEQ ID NO: 4109812 - DNA, 25 bp, Homo sapien
gaatgttccccatcttggtgctgca

SEQ ID NO: 4109813 - DNA, 25 bp, Homo sapien
tgttcacaagcagatccaagggaat

SEQ ID NO: 4109814 - DNA, 25 bp, Homo sapien
ttatgtcagcttgcctcattgcctg

SEQ ID NO: 4109815 - DNA, 25 bp, Homo sapien
tgttcttttgtaagcttgaccatgc

SEQ ID NO: 4109816 - DNA, 25 bp, Homo sapien
tgtatttatggctttttcatttgct

SEQ ID NO: 4109817 - DNA, 25 bp, Homo sapien
catgagaatcagttggatccgtggg

SEQ ID NO: 4109818 - DNA, 25 bp, Homo sapien
gcagggagtcagtcaataaaagctt

SEQ ID NO: 4109819 - DNA, 25 bp, Homo sapien
ttgtaaagaatcatgcagggagtca

SEQ ID NO: 4109820 - DNA, 25 bp, Homo sapien
ttatggatccgtgtgctctctggca

SEQ ID NO: 4109821 - DNA, 25 bp, Homo sapien
tcccggaggtgggacagcattgtct

SEQ ID NO: 4109822 - DNA, 25 bp, Homo sapien
acaactttgtggctggctaaccaga

SEQ ID NO: 4109823 - DNA, 25 bp, Homo sapien
gagacgactctcatgacaactttgt

SEQ ID NO: 4109824 - DNA, 25 bp, Homo sapien
tatatgtgctgccatagcgagcaca

SEQ ID NO: 4109825 - DNA, 25 bp, Homo sapien
ataaataaagatgcttcacaaattt

SEQ ID NO: 4109826 - DNA, 25 bp, Homo sapien
catgctaatctctgtatctttccaa

SEQ ID NO: 4109827 - DNA, 25 bp, Homo sapien
aatttgtatatcatccttgcacaga

SEQ ID NO: 4109828 - DNA, 25 bp, Homo sapien
cggtttaggatcagtggcaagcaca

SEQ ID NO: 4109829 - DNA, 25 bp, Homo sapien
gcaagcacagaagggggagttataa

SEQ ID NO: 4109830 - DNA, 25 bp, Homo sapien
tcaggaaggcctgcggtttaggatc

SEQ ID NO: 4109831 - DNA, 25 bp, Homo sapien
aatctggcctggtcctcttgcaagt

SEQ ID NO: 4109832 - DNA, 25 bp, Homo sapien
tgagaccttgtcaaagcttgcctga

SEQ ID NO: 4109833 - DNA, 25 bp, Homo sapien
gtcggaactcatgagtggcagcttc

SEQ ID NO: 4109834 - DNA, 25 bp, Homo sapien
gaagggctatagtttgatgaagtcg

SEQ ID NO: 4109835 - DNA, 25 bp, Homo sapien
cccagggtctattttgagaccttgt

SEQ ID NO: 4109836 - DNA, 25 bp, Homo sapien
aatattgtggtttgaagactggtac

SEQ ID NO: 4109837 - DNA, 25 bp, Homo sapien
gtatagtttaaattcttgccctgca

SEQ ID NO: 4109838 - DNA, 25 bp, Homo sapien
tgaccagtatcaattaaaagcattg

SEQ ID NO: 4109839 - DNA, 25 bp, Homo sapien
agactggtactgtcatatagaagca

SEQ ID NO: 4109840 - DNA, 25 bp, Homo sapien
atcggcctgaccgactagccggctg

SEQ ID NO: 4109841 - DNA, 25 bp, Homo sapien
agtcgcggccacaactgcttccggg

SEQ ID NO: 4109842 - DNA, 25 bp, Homo sapien
agcgcgcgccctaacacaggtaagg

SEQ ID NO: 4109843 - DNA, 25 bp, Homo sapien
tgacagccccgggtactttgcccag

SEQ ID NO: 4109844 - DNA, 25 bp, Homo sapien
ggtgctcaacatggaattagtgggc

SEQ ID NO: 4109845 - DNA, 25 bp, Homo sapien
ttttcaaatgcacgaccctggtcct

SEQ ID NO: 4109846 - DNA, 25 bp, Homo sapien
tagaaggctttagagacaggtgctc

SEQ ID NO: 4109847 - DNA, 25 bp, Homo sapien
tttagccatcctatccagccagagg

SEQ ID NO: 4109848 - DNA, 25 bp, Homo sapien
ctttgtcttcaacaaatttggcaaa

SEQ ID NO: 4109849 - DNA, 25 bp, Homo sapien
ggaccagacacactttaccaataca

SEQ ID NO: 4109850 - DNA, 25 bp, Homo sapien
atctattgatacaaccccagagaag

SEQ ID NO: 4109851 - DNA, 25 bp, Homo sapien
tgcttggcctcatcaaagaaaactg

SEQ ID NO: 4109852 - DNA, 25 bp, Homo sapien
cagtattaccgtgtttgtgaaagac

SEQ ID NO: 4109853 - DNA, 25 bp, Homo sapien
ttgccaggtttccataggcttgtaa

SEQ ID NO: 4109854 - DNA, 25 bp, Homo sapien
aatctagataggaattcttagaagg

SEQ ID NO: 4109855 - DNA, 25 bp, Homo sapien
atatacacagtaaaagacaattaca

SEQ ID NO: 4109856 - DNA, 25 bp, Homo sapien
tccataggcttgtaaggagttaaat

SEQ ID NO: 4109857 - DNA, 25 bp, Homo sapien
gagaggaagggccaagtcaaatata

SEQ ID NO: 4109858 - DNA, 25 bp, Homo sapien
taggacaagcttattaacatttgct

SEQ ID NO: 4109859 - DNA, 25 bp, Homo sapien
cactaggacaagcttattaacattt

SEQ ID NO: 4109860 - DNA, 25 bp, Homo sapien
catttgctaatttaggagaggaagg

SEQ ID NO: 4109861 - DNA, 25 bp, Homo sapien
tcttttttgaagcaaagtcttactc

SEQ ID NO: 4109862 - DNA, 25 bp, Homo sapien
tttgaagcaaagtcttactctgtgg

SEQ ID NO: 4109863 - DNA, 25 bp, Homo sapien
ccacacctggccaaaaatgaattct

SEQ ID NO: 4109864 - DNA, 25 bp, Homo sapien
acacctggccaaaaatgaattcttt

SEQ ID NO: 4109865 - DNA, 25 bp, Homo sapien
cacggcttagcttactcaaagagga

SEQ ID NO: 4109866 - DNA, 25 bp, Homo sapien
gccttctaggaatatggcattgcgg

SEQ ID NO: 4109867 - DNA, 25 bp, Homo sapien
aggctttagggtacacttctgagca

SEQ ID NO: 4109868 - DNA, 25 bp, Homo sapien
aaccagcctagaacaaaagcatgag

SEQ ID NO: 4109869 - DNA, 25 bp, Homo sapien
tgctaacacataggccatctgaaag

SEQ ID NO: 4109870 - DNA, 25 bp, Homo sapien
gttatacccttgaaaagccatgcct

SEQ ID NO: 4109871 - DNA, 25 bp, Homo sapien
caagttccagctaccaatactgtga

SEQ ID NO: 4109872 - DNA, 25 bp, Homo sapien
tgagagcccggtgtcactgctgatt

SEQ ID NO: 4109873 - DNA, 25 bp, Homo sapien
ccacagctgattgctctggaaggta

SEQ ID NO: 4109874 - DNA, 25 bp, Homo sapien
gctgcatgtgcctagattagtggaa

SEQ ID NO: 4109875 - DNA, 25 bp, Homo sapien
taaagaagatcaacctgcccaagat

SEQ ID NO: 4109876 - DNA, 25 bp, Homo sapien
taagcttaggagtcacagtggtcac

SEQ ID NO: 4109877 - DNA, 25 bp, Homo sapien
gcttcccagtttcctgtccttccaa

SEQ ID NO: 4109878 - DNA, 25 bp, Homo sapien
ctgctggtaaggacctggagcttcc

SEQ ID NO: 4109879 - DNA, 25 bp, Homo sapien
tggagcttcccagtttcctgtcctt

SEQ ID NO: 4109880 - DNA, 25 bp, Homo sapien
cagtttcctgtccttccaaaggtca

SEQ ID NO: 4109881 - DNA, 25 bp, Homo sapien
tggtgaagttgagattatagcccat

SEQ ID NO: 4109882 - DNA, 25 bp, Homo sapien
cgtttggtgaagttgagattatagc

SEQ ID NO: 4109883 - DNA, 25 bp, Homo sapien
ccgtttggtgaagttgagattatag

SEQ ID NO: 4109884 - DNA, 25 bp, Homo sapien
tttggtgaagttgagattatagccc

SEQ ID NO: 4109885 - DNA, 25 bp, Homo sapien
caagcatgggtaccagcgtctctta

SEQ ID NO: 4109886 - DNA, 25 bp, Homo sapien
tggacacgtccatgccagcaaatca

SEQ ID NO: 4109887 - DNA, 25 bp, Homo sapien
gatagcatatatctaggccatgtga

SEQ ID NO: 4109888 - DNA, 25 bp, Homo sapien
caggatctggtcgtactgtatgagg

SEQ ID NO: 4109889 - DNA, 25 bp, Homo sapien
taatatgtcaacatggtaacaaggt

SEQ ID NO: 4109890 - DNA, 25 bp, Homo sapien
tcaggtaatatgtcaacatggtaac

SEQ ID NO: 4109891 - DNA, 25 bp, Homo sapien
aggtaatatgtcaacatggtaacaa

SEQ ID NO: 4109892 - DNA, 25 bp, Homo sapien
cttgggagtactgctccttccgtaa

SEQ ID NO: 4109893 - DNA, 25 bp, Homo sapien
tcaggcatttggaccccagcgttcc

SEQ ID NO: 4109894 - DNA, 25 bp, Homo sapien
gcgttccgggcctgagagtccagaa

SEQ ID NO: 4109895 - DNA, 25 bp, Homo sapien
gggagtactgctccttccgtaactc

SEQ ID NO: 4109896 - DNA, 25 bp, Homo sapien
aaaagagtcatcaaagggcgctggg

SEQ ID NO: 4109897 - DNA, 25 bp, Homo sapien
tttgaagaggcagactaacggcttg

SEQ ID NO: 4109898 - DNA, 25 bp, Homo sapien
ttttgaactaataagcgagctgggc

SEQ ID NO: 4109899 - DNA, 25 bp, Homo sapien
gaactaacctgtgagacttgtccag

SEQ ID NO: 4109900 - DNA, 25 bp, Homo sapien
ccaggcaggacaggtatggtggctt

SEQ ID NO: 4109901 - DNA, 25 bp, Homo sapien
gttccgggctgtctacttatttcag

SEQ ID NO: 4109902 - DNA, 25 bp, Homo sapien
ggttccgggctgtctacttatttca

SEQ ID NO: 4109903 - DNA, 25 bp, Homo sapien
ctaggttccgggctgtctacttatt

SEQ ID NO: 4109904 - DNA, 25 bp, Homo sapien
tccgggctgtctacttatttcagac

SEQ ID NO: 4109905 - DNA, 25 bp, Homo sapien
gtttatatagttggtatgtgtctga

SEQ ID NO: 4109906 - DNA, 25 bp, Homo sapien
ttatatagttggtatgtgtctgaac

SEQ ID NO: 4109907 - DNA, 25 bp, Homo sapien
tatatagttggtatgtgtctgaact

SEQ ID NO: 4109908 - DNA, 25 bp, Homo sapien
atgtttatatagttggtatgtgtct

SEQ ID NO: 4109909 - DNA, 25 bp, Homo sapien
gggatcttgatgcttatgcttccaa

SEQ ID NO: 4109910 - DNA, 25 bp, Homo sapien
aatttagccaacttttcagcctggt

SEQ ID NO: 4109911 - DNA, 25 bp, Homo sapien
ttgctaaatcacctctctgctatgg

SEQ ID NO: 4109912 - DNA, 25 bp, Homo sapien
gaaagttctacacatcagagtctaa

SEQ ID NO: 4109913 - DNA, 25 bp, Homo sapien
cctgatttcgttgcgtgcggagacc

SEQ ID NO: 4109914 - DNA, 25 bp, Homo sapien
tcgctgcactggaggacgcaaggtt

SEQ ID NO: 4109915 - DNA, 25 bp, Homo sapien
taactacggagcaccggatgggaca

SEQ ID NO: 4109916 - DNA, 25 bp, Homo sapien
gacaagcacaatgtcgggtcccgca

SEQ ID NO: 4109917 - DNA, 25 bp, Homo sapien
ccgccgcgtctctttcttccgggtg

SEQ ID NO: 4109918 - DNA, 25 bp, Homo sapien
tgaactgtgcgccaagggcgcttgc

SEQ ID NO: 4109919 - DNA, 25 bp, Homo sapien
gctgtgggcaagtccggacactcgt

SEQ ID NO: 4109920 - DNA, 25 bp, Homo sapien
tccggacactcgtcctgagggtgtc

SEQ ID NO: 4109921 - DNA, 25 bp, Homo sapien
ctgagtgtcaacgaaacctgaaggg

SEQ ID NO: 4109922 - DNA, 25 bp, Homo sapien
tacgtacggtcctgagtgtcaacga

SEQ ID NO: 4109923 - DNA, 25 bp, Homo sapien
ccgcgacggctacggcgacttcttt

SEQ ID NO: 4109924 - DNA, 25 bp, Homo sapien
gcgcagcgtacgtacggtcctgagt

SEQ ID NO: 4109925 - DNA, 25 bp, Homo sapien
gctgctcctcgctgatcttttgctt

SEQ ID NO: 4109926 - DNA, 25 bp, Homo sapien
tgctcctcgctgatcttttgcttca

SEQ ID NO: 4109927 - DNA, 25 bp, Homo sapien
gctcctcgctgatcttttgcttcag

SEQ ID NO: 4109928 - DNA, 25 bp, Homo sapien
tgctgctcctcgctgatcttttgct

SEQ ID NO: 4109929 - DNA, 25 bp, Homo sapien
tcaagaggtattcggaaccagggga

SEQ ID NO: 4109930 - DNA, 25 bp, Homo sapien
caagaggtattcggaaccaggggag

SEQ ID NO: 4109931 - DNA, 25 bp, Homo sapien
gggaggagagcggcggccatcgtac

SEQ ID NO: 4109932 - DNA, 25 bp, Homo sapien
ccagtcccggattaaccaagttatg

SEQ ID NO: 4109933 - DNA, 25 bp, Homo sapien
tcagatatcacaagggacccgggtt

SEQ ID NO: 4109934 - DNA, 25 bp, Homo sapien
agtgactaactcgtgacagcctcgg

SEQ ID NO: 4109935 - DNA, 25 bp, Homo sapien
taggagacttccgtcgagggtcaat

SEQ ID NO: 4109936 - DNA, 25 bp, Homo sapien
tcttcgctgttaagaccctgtgctg

SEQ ID NO: 4109937 - DNA, 25 bp, Homo sapien
aattaagcagaaaccgacgtcttcg

SEQ ID NO: 4109938 - DNA, 25 bp, Homo sapien
gaaaagaagcaacccttcagtgttg

SEQ ID NO: 4109939 - DNA, 25 bp, Homo sapien
tgtgctgccagcatcgaaacatctc

SEQ ID NO: 4109940 - DNA, 25 bp, Homo sapien
ttttctgaagactctaacactagct

SEQ ID NO: 4109941 - DNA, 25 bp, Homo sapien
cactagctgcgtaacattaggcaag

SEQ ID NO: 4109942 - DNA, 25 bp, Homo sapien
tcacctcttcgagcctcactccttc

SEQ ID NO: 4109943 - DNA, 25 bp, Homo sapien
gaagactctaacactagctgcgtaa

SEQ ID NO: 4109944 - DNA, 25 bp, Homo sapien
tcacaacaattcacaagcaaggaga

SEQ ID NO: 4109945 - DNA, 25 bp, Homo sapien
caccagtacgttttcatctttccaa

SEQ ID NO: 4109946 - DNA, 25 bp, Homo sapien
tctaaaagagtgaggtcagctgcca

SEQ ID NO: 4109947 - DNA, 25 bp, Homo sapien
tacctcaattaagtggagtcatgta

SEQ ID NO: 4109948 - DNA, 25 bp, Homo sapien
ggtatccgtgcacaaactgctgtgg

SEQ ID NO: 4109949 - DNA, 25 bp, Homo sapien
taaatgttgggacaactggccatcc

SEQ ID NO: 4109950 - DNA, 25 bp, Homo sapien
tataactggacgtagcaatcagctc

SEQ ID NO: 4109951 - DNA, 25 bp, Homo sapien
aatgctggtgccaagctgaagcagc

SEQ ID NO: 4109952 - DNA, 25 bp, Homo sapien
ggccttgctttgagcctaccttgaa

SEQ ID NO: 4109953 - DNA, 25 bp, Homo sapien
tactaggtccctggcctaactctgc

SEQ ID NO: 4109954 - DNA, 25 bp, Homo sapien
cagcacttgcccacctaattaatgg

SEQ ID NO: 4109955 - DNA, 25 bp, Homo sapien
taccactgctaaatactgagatgct

SEQ ID NO: 4109956 - DNA, 25 bp, Homo sapien
ttggtgttgaagaattggaggacgc

SEQ ID NO: 4109957 - DNA, 25 bp, Homo sapien
tgttggtgttgaagaattggaggac

SEQ ID NO: 4109958 - DNA, 25 bp, Homo sapien
ttgttggtgttgaagaattggagga

SEQ ID NO: 4109959 - DNA, 25 bp, Homo sapien
gttggtgttgaagaattggaggacg

SEQ ID NO: 4109960 - DNA, 25 bp, Homo sapien
tctattgggtgtaccttcatcaagt

SEQ ID NO: 4109961 - DNA, 25 bp, Homo sapien
ctctctattgggtgtaccttcatca

SEQ ID NO: 4109962 - DNA, 25 bp, Homo sapien
taccttcatcaagttgctctgtaaa

SEQ ID NO: 4109963 - DNA, 25 bp, Homo sapien
ccttcatcaagttgctctgtaaatg

SEQ ID NO: 4109964 - DNA, 25 bp, Homo sapien
caattgtgttactaataaaaactct

SEQ ID NO: 4109965 - DNA, 25 bp, Homo sapien
aactctacctaggaattaaatagct

SEQ ID NO: 4109966 - DNA, 25 bp, Homo sapien
ggaattaaatagctgacctgtcaaa

SEQ ID NO: 4109967 - DNA, 25 bp, Homo sapien
gctgacctgtcaaaagtttcccatt

SEQ ID NO: 4109968 - DNA, 25 bp, Homo sapien
gatcacttgaatccagaaggtcaag

SEQ ID NO: 4109969 - DNA, 25 bp, Homo sapien
tcacttgaatccagaaggtcaaggc

SEQ ID NO: 4109970 - DNA, 25 bp, Homo sapien
ggatcacttgaatccagaaggtcaa

SEQ ID NO: 4109971 - DNA, 25 bp, Homo sapien
aggatcacttgaatccagaaggtca

SEQ ID NO: 4109972 - DNA, 25 bp, Homo sapien
tagtagccaaaacctgtagacaacc

SEQ ID NO: 4109973 - DNA, 25 bp, Homo sapien
tccgaggctcaagtaatgcccctgc

SEQ ID NO: 4109974 - DNA, 25 bp, Homo sapien
gggcaagggacttaagcactcacaa

SEQ ID NO: 4109975 - DNA, 25 bp, Homo sapien
gcacgacagtgctaacagtgttcct

SEQ ID NO: 4109976 - DNA, 25 bp, Homo sapien
gtttgtttggccctgtgcggtgact

SEQ ID NO: 4109977 - DNA, 25 bp, Homo sapien
tatggacatatggacccaattaatg

SEQ ID NO: 4109978 - DNA, 25 bp, Homo sapien
gatacacatactggaggggatgaaa

SEQ ID NO: 4109979 - DNA, 25 bp, Homo sapien
tgaaaaagatgagacaaccggatac

SEQ ID NO: 4109980 - DNA, 25 bp, Homo sapien
agagaacagtggaacggaatatata

SEQ ID NO: 4109981 - DNA, 25 bp, Homo sapien
tggacatgaatataaagcatgaatg

SEQ ID NO: 4109982 - DNA, 25 bp, Homo sapien
agtggaacggaatatataaagctca

SEQ ID NO: 4109983 - DNA, 25 bp, Homo sapien
aacggaatatataaagctcagaaac

SEQ ID NO: 4109984 - DNA, 25 bp, Homo sapien
aattcaagaccacaactcaaggctc

SEQ ID NO: 4109985 - DNA, 25 bp, Homo sapien
taatcgccaatgaaaagaccaaggg

SEQ ID NO: 4109986 - DNA, 25 bp, Homo sapien
ttcaaggaggttttgcgaagtccat

SEQ ID NO: 4109987 - DNA, 25 bp, Homo sapien
gatggccctgtttctatcttcccag

SEQ ID NO: 4109988 - DNA, 25 bp, Homo sapien
tcactcataggcaacaaaggcttga

SEQ ID NO: 4109989 - DNA, 25 bp, Homo sapien
aaaggcttgattatcatctctcatg

SEQ ID NO: 4109990 - DNA, 25 bp, Homo sapien
ttagtgtcttagcaagggtgtaaat

SEQ ID NO: 4109991 - DNA, 25 bp, Homo sapien
gcctaaaaagtttagtgccttagca

SEQ ID NO: 4109992 - DNA, 25 bp, Homo sapien
caccttaaagcctaaggagtctttg

SEQ ID NO: 4109993 - DNA, 25 bp, Homo sapien
gcctaaggagtctttgttgaccttg

SEQ ID NO: 4109994 - DNA, 25 bp, Homo sapien
attggcagccaccttaaagcctaag

SEQ ID NO: 4109995 - DNA, 25 bp, Homo sapien
gcagccaccttaaagcctaaggagt

SEQ ID NO: 4109996 - DNA, 25 bp, Homo sapien
gctctgctatcatcccggctagtag

SEQ ID NO: 4109997 - DNA, 25 bp, Homo sapien
gaaaagcaggctctgctatcatccc

SEQ ID NO: 4109998 - DNA, 25 bp, Homo sapien
ctgtgttttaggatgtttggaggaa

SEQ ID NO: 4109999 - DNA, 25 bp, Homo sapien
actctgtgttttaggatgtttggag

SEQ ID NO: 4110000 - DNA, 25 bp, Homo sapien
tacaagattcaaaaccgtatgacgc

SEQ ID NO: 4110001 - DNA, 25 bp, Homo sapien
gctacattagcgaaaacagtgttat

SEQ ID NO: 4110002 - DNA, 25 bp, Homo sapien
taaccgcccatcaatagtagaacag

SEQ ID NO: 4110003 - DNA, 25 bp, Homo sapien
taagcgaaggtagcttcattactga

SEQ ID NO: 4110004 - DNA, 25 bp, Homo sapien
aatgccaaccactatgtttcagtag

SEQ ID NO: 4110005 - DNA, 25 bp, Homo sapien
gcatttccccttggtctagagctga

SEQ ID NO: 4110006 - DNA, 25 bp, Homo sapien
tatgccaaaggctcccagttaagca

SEQ ID NO: 4110007 - DNA, 25 bp, Homo sapien
cttgatagcaagaaacggtaatgtc

SEQ ID NO: 4110008 - DNA, 25 bp, Homo sapien
agaaacattgtaaagcaaaagaaca

SEQ ID NO: 4110009 - DNA, 25 bp, Homo sapien
gaaagaaacattgtaaagcaaaaga

SEQ ID NO: 4110010 - DNA, 25 bp, Homo sapien
agaaagaaacattgtaaagcaaaag

SEQ ID NO: 4110011 - DNA, 25 bp, Homo sapien
gaaacattgtaaagcaaaagaacaa

SEQ ID NO: 4110012 - DNA, 25 bp, Homo sapien
attaacactgtcaggagatttcgag

SEQ ID NO: 4110013 - DNA, 25 bp, Homo sapien
gatttcgaggcatgagtagatgcat

SEQ ID NO: 4110014 - DNA, 25 bp, Homo sapien
cactgtcaggagatttcgaggcatg

SEQ ID NO: 4110015 - DNA, 25 bp, Homo sapien
caggagatttcgaggcatgagtaga

SEQ ID NO: 4110016 - DNA, 25 bp, Homo sapien
ccatttcaatgtaaagtcagatgct

SEQ ID NO: 4110017 - DNA, 25 bp, Homo sapien
cagctcatgacaacgtatgcctcct

SEQ ID NO: 4110018 - DNA, 25 bp, Homo sapien
caagaaaccatgagcaaacctgtgt

SEQ ID NO: 4110019 - DNA, 25 bp, Homo sapien
tgctaataattaacacagactgacc

SEQ ID NO: 4110020 - DNA, 25 bp, Homo sapien
cagcctgctatcataatgatttttt

SEQ ID NO: 4110021 - DNA, 25 bp, Homo sapien
aaaatgacttgagcccctctttata

SEQ ID NO: 4110022 - DNA, 25 bp, Homo sapien
cccagcctgctatcataatgatttt

SEQ ID NO: 4110023 - DNA, 25 bp, Homo sapien
gacttgagcccctctttataaataa

SEQ ID NO: 4110024 - DNA, 25 bp, Homo sapien
tagggactactaagaacaaccagga

SEQ ID NO: 4110025 - DNA, 25 bp, Homo sapien
gtctagactcatgccctgggttcac

SEQ ID NO: 4110026 - DNA, 25 bp, Homo sapien
agtcagcaaatgttcatctccaaca

SEQ ID NO: 4110027 - DNA, 25 bp, Homo sapien
aacatttgttagacaatacttccga

SEQ ID NO: 4110028 - DNA, 25 bp, Homo sapien
aagctggagcggaagacacagcagg

SEQ ID NO: 4110029 - DNA, 25 bp, Homo sapien
cggcaggtcttctccgcgcccaccc

SEQ ID NO: 4110030 - DNA, 25 bp, Homo sapien
ggcgaagctggagcggaagacacag

SEQ ID NO: 4110031 - DNA, 25 bp, Homo sapien
ggcaggtcttctccgcgcccacccc

SEQ ID NO: 4110032 - DNA, 25 bp, Homo sapien
ttggcaaagcggaccacttcgtcct

SEQ ID NO: 4110033 - DNA, 25 bp, Homo sapien
cttggcaaagcggaccacttcgtcc

SEQ ID NO: 4110034 - DNA, 25 bp, Homo sapien
tggcaaagcggaccacttcgtcctc

SEQ ID NO: 4110035 - DNA, 25 bp, Homo sapien
agggtcataggaatattcttaagct

SEQ ID NO: 4110036 - DNA, 25 bp, Homo sapien
cagggtcataggaatattcttaagc

SEQ ID NO: 4110037 - DNA, 25 bp, Homo sapien
ccagggtcataggaatattcttaag

SEQ ID NO: 4110038 - DNA, 25 bp, Homo sapien
cagggctgttctgcgatgtaattgc

SEQ ID NO: 4110039 - DNA, 25 bp, Homo sapien
tctgttgcttacattgccgctggaa

SEQ ID NO: 4110040 - DNA, 25 bp, Homo sapien
gcattaactgacattccgattcttg

SEQ ID NO: 4110041 - DNA, 25 bp, Homo sapien
gaaacataagtatctcgagcatttg

SEQ ID NO: 4110042 - DNA, 25 bp, Homo sapien
tctttaagatttgatatcctacttc

SEQ ID NO: 4110043 - DNA, 25 bp, Homo sapien
tatcctacttcgtactctatttttg

SEQ ID NO: 4110044 - DNA, 25 bp, Homo sapien
aggaatattcccacagaggacattt

SEQ ID NO: 4110045 - DNA, 25 bp, Homo sapien
tcagctccaattgcaatgtagtcat

SEQ ID NO: 4110046 - DNA, 25 bp, Homo sapien
gttcatcagcactacgggtttgtac

SEQ ID NO: 4110047 - DNA, 25 bp, Homo sapien
ggttcatcagcactacgggtttgta

SEQ ID NO: 4110048 - DNA, 25 bp, Homo sapien
tggttcatcagcactacgggtttgt

SEQ ID NO: 4110049 - DNA, 25 bp, Homo sapien
gatcacggttagttacagatgcaaa

SEQ ID NO: 4110050 - DNA, 25 bp, Homo sapien
tccttggtcagtatagatttccgaa

SEQ ID NO: 4110051 - DNA, 25 bp, Homo sapien
tagagcaagtgtaccctagggaacc

SEQ ID NO: 4110052 - DNA, 25 bp, Homo sapien
tactgaggtctttctacgggtgcct

SEQ ID NO: 4110053 - DNA, 25 bp, Homo sapien
tttatattttcggtagagaggagat

SEQ ID NO: 4110054 - DNA, 25 bp, Homo sapien
tgagccaacacgctgggcctctgca

SEQ ID NO: 4110055 - DNA, 25 bp, Homo sapien
ttcggtagagaggagatttcaccac

SEQ ID NO: 4110056 - DNA, 25 bp, Homo sapien
ggcctctgcaggactttttaacatt

SEQ ID NO: 4110057 - DNA, 25 bp, Homo sapien
gagattcctttatcggacttcgaaa

SEQ ID NO: 4110058 - DNA, 25 bp, Homo sapien
tcgaaacaaagactccacggagggc

SEQ ID NO: 4110059 - DNA, 25 bp, Homo sapien
ttcgtaccaaagactctttagaaga

SEQ ID NO: 4110060 - DNA, 25 bp, Homo sapien
gaagaagaccggaatagagattcct

SEQ ID NO: 4110061 - DNA, 25 bp, Homo sapien
tatcagagggtggatcaaaactggc

SEQ ID NO: 4110062 - DNA, 25 bp, Homo sapien
cagtagaactgtccaggtcaagtcg

SEQ ID NO: 4110063 - DNA, 25 bp, Homo sapien
tcaagtcgattcagggattctctgg

SEQ ID NO: 4110064 - DNA, 25 bp, Homo sapien
cagcctcgctatccatatcagaggg

SEQ ID NO: 4110065 - DNA, 25 bp, Homo sapien
ctgttctttgttgagactgtctgaa

SEQ ID NO: 4110066 - DNA, 25 bp, Homo sapien
tcttcgcaaccgctgaatcaactgt

SEQ ID NO: 4110067 - DNA, 25 bp, Homo sapien
ttcgcaaccgctgaatcaactgttc

SEQ ID NO: 4110068 - DNA, 25 bp, Homo sapien
ttctttgttgagactgtctgaattc

SEQ ID NO: 4110069 - DNA, 25 bp, Homo sapien
attttcccctgtagctacttaagct

SEQ ID NO: 4110070 - DNA, 25 bp, Homo sapien
ccctgtagctacttaagcttcgttc

SEQ ID NO: 4110071 - DNA, 25 bp, Homo sapien
ttcccctgtagctacttaagcttcg

SEQ ID NO: 4110072 - DNA, 25 bp, Homo sapien
tgtagctacttaagcttcgttccat

SEQ ID NO: 4110073 - DNA, 25 bp, Homo sapien
cttctctctctgaagcatctgataa

SEQ ID NO: 4110074 - DNA, 25 bp, Homo sapien
gaagcatctgataagctgtaacaag

SEQ ID NO: 4110075 - DNA, 25 bp, Homo sapien
ctctctgaagcatctgataagctgt

SEQ ID NO: 4110076 - DNA, 25 bp, Homo sapien
tgaagcatctgataagctgtaacaa

SEQ ID NO: 4110077 - DNA, 25 bp, Homo sapien
ctcttacaagctgtgcaacaatgaa

SEQ ID NO: 4110078 - DNA, 25 bp, Homo sapien
ttcacaggaaagaggctagaactaa

SEQ ID NO: 4110079 - DNA, 25 bp, Homo sapien
gaaagaggctagaactaaatatacc

SEQ ID NO: 4110080 - DNA, 25 bp, Homo sapien
gaacgagtcactctccctcagtttc

SEQ ID NO: 4110081 - DNA, 25 bp, Homo sapien
ctattctccgaagtgatttatcctg

SEQ ID NO: 4110082 - DNA, 25 bp, Homo sapien
ttctccgaagtgatttatcctgact

SEQ ID NO: 4110083 - DNA, 25 bp, Homo sapien
ctgctattctccgaagtgatttatc

SEQ ID NO: 4110084 - DNA, 25 bp, Homo sapien
tattctccgaagtgatttatcctga

SEQ ID NO: 4110085 - DNA, 25 bp, Homo sapien
tcctctaaagatgcatcaaactcct

SEQ ID NO: 4110086 - DNA, 25 bp, Homo sapien
catttcgtaatcgttgtttcagtag

SEQ ID NO: 4110087 - DNA, 25 bp, Homo sapien
gggccatttcgtaatcgttgtttca

SEQ ID NO: 4110088 - DNA, 25 bp, Homo sapien
tttcgtaatcgttgtttcagtagag

SEQ ID NO: 4110089 - DNA, 25 bp, Homo sapien
gccatttcgtaatcgttgtttcagt

SEQ ID NO: 4110090 - DNA, 25 bp, Homo sapien
tgaggaagtggtttcagtacatcaa

SEQ ID NO: 4110091 - DNA, 25 bp, Homo sapien
ctgaggaagtggtttcagtacatca

SEQ ID NO: 4110092 - DNA, 25 bp, Homo sapien
gaggaagtggtttcagtacatcaac

SEQ ID NO: 4110093 - DNA, 25 bp, Homo sapien
tcttctttagtgaagacttcagcct

SEQ ID NO: 4110094 - DNA, 25 bp, Homo sapien
tggctctccatcactttctggattc

SEQ ID NO: 4110095 - DNA, 25 bp, Homo sapien
gattctcttctttagtgaagacttc

SEQ ID NO: 4110096 - DNA, 25 bp, Homo sapien
tctccatcactttctggattctctt

SEQ ID NO: 4110097 - DNA, 25 bp, Homo sapien
tccagtgtttttacagaagttccat

SEQ ID NO: 4110098 - DNA, 25 bp, Homo sapien
ttcatccagttgttcttgcagagct

SEQ ID NO: 4110099 - DNA, 25 bp, Homo sapien
gtaggttctcttgacgcttcactct

SEQ ID NO: 4110100 - DNA, 25 bp, Homo sapien
cttacaacgcttaagtaggttctct

SEQ ID NO: 4110101 - DNA, 25 bp, Homo sapien
tagtgtacattgttccttatgtgac

SEQ ID NO: 4110102 - DNA, 25 bp, Homo sapien
gttctttgcatcacgcaactgagtg

SEQ ID NO: 4110103 - DNA, 25 bp, Homo sapien
caagctgttcaattaagttctttgc

SEQ ID NO: 4110104 - DNA, 25 bp, Homo sapien
aagtttagtcttctcggccatatga

SEQ ID NO: 4110105 - DNA, 25 bp, Homo sapien
tgcatcacgcaactgagtgataagt

SEQ ID NO: 4110106 - DNA, 25 bp, Homo sapien
tctccctgggtagtcatctgtttga

SEQ ID NO: 4110107 - DNA, 25 bp, Homo sapien
gacgttttgtctctgcgattaccat

SEQ ID NO: 4110108 - DNA, 25 bp, Homo sapien
gactacggagttgagcaatttcttc

SEQ ID NO: 4110109 - DNA, 25 bp, Homo sapien
tttccagggtttcatgcatctgacg

SEQ ID NO: 4110110 - DNA, 25 bp, Homo sapien
tatcttcaatgtagagacagtttgt

SEQ ID NO: 4110111 - DNA, 25 bp, Homo sapien
cagtttgtgtgcaaaactagctttc

SEQ ID NO: 4110112 - DNA, 25 bp, Homo sapien
tacatttgaactaagaatcacttcc

SEQ ID NO: 4110113 - DNA, 25 bp, Homo sapien
cacttcctacttgaacagttctgtt

SEQ ID NO: 4110114 - DNA, 25 bp, Homo sapien
gaacttcggtagcattaacattcta

SEQ ID NO: 4110115 - DNA, 25 bp, Homo sapien
gccaagaactagtgtgaacttcggt

SEQ ID NO: 4110116 - DNA, 25 bp, Homo sapien
tgtacttaagctgaaccaccaaact

SEQ ID NO: 4110117 - DNA, 25 bp, Homo sapien
tgtacatgcactttgacacagccat

SEQ ID NO: 4110118 - DNA, 25 bp, Homo sapien
gttttgtgagacttaagactccaag

SEQ ID NO: 4110119 - DNA, 25 bp, Homo sapien
gcatgtgtggatgcacaaaaataag

SEQ ID NO: 4110120 - DNA, 25 bp, Homo sapien
aaattatcagcaactaacaaagcag

SEQ ID NO: 4110121 - DNA, 25 bp, Homo sapien
gcttgggaaaggcaccatgattcac

SEQ ID NO: 4110122 - DNA, 25 bp, Homo sapien
aattagccaggagccgtggcttgta

SEQ ID NO: 4110123 - DNA, 25 bp, Homo sapien
ggagccgtggcttgtacctgtagtc

SEQ ID NO: 4110124 - DNA, 25 bp, Homo sapien
cgtggcttgtacctgtagtctgagc

SEQ ID NO: 4110125 - DNA, 25 bp, Homo sapien
tagtctgagctactctgagcagctg

SEQ ID NO: 4110126 - DNA, 25 bp, Homo sapien
tttcacttccagtggtataagaaat

SEQ ID NO: 4110127 - DNA, 25 bp, Homo sapien
caagaaacgtatgtcccagggagac

SEQ ID NO: 4110128 - DNA, 25 bp, Homo sapien
tatgtcccagggagacagttgttca

SEQ ID NO: 4110129 - DNA, 25 bp, Homo sapien
aagaaatgtgggaacttcaacctat

SEQ ID NO: 4110130 - DNA, 25 bp, Homo sapien
tcctctgttttttgggctgtactca

SEQ ID NO: 4110131 - DNA, 25 bp, Homo sapien
ctgttttttgggctgtactcaaagc

SEQ ID NO: 4110132 - DNA, 25 bp, Homo sapien
ctctgttttttgggctgtactcaaa

SEQ ID NO: 4110133 - DNA, 25 bp, Homo sapien
ttcctctgttttttgggctgtactc

SEQ ID NO: 4110134 - DNA, 25 bp, Homo sapien
attacatcaacaacctcctgtttca

SEQ ID NO: 4110135 - DNA, 25 bp, Homo sapien
ttacatcaacaacctcctgtttcac

SEQ ID NO: 4110136 - DNA, 25 bp, Homo sapien
cattacatcaacaacctcctgtttc

SEQ ID NO: 4110137 - DNA, 25 bp, Homo sapien
tcattacatcaacaacctcctgttt

SEQ ID NO: 4110138 - DNA, 25 bp, Homo sapien
tattctaatacattgcttgtcaggg

SEQ ID NO: 4110139 - DNA, 25 bp, Homo sapien
caaatgtgaacaagtatggataaga

SEQ ID NO: 4110140 - DNA, 25 bp, Homo sapien
tatggataagaatattcacaggcca

SEQ ID NO: 4110141 - DNA, 25 bp, Homo sapien
ttccacagacctcacagcaactagg

SEQ ID NO: 4110142 - DNA, 25 bp, Homo sapien
ctgtagcttagcaatttgttcttct

SEQ ID NO: 4110143 - DNA, 25 bp, Homo sapien
cttagcaatttgttcttctgaggat

SEQ ID NO: 4110144 - DNA, 25 bp, Homo sapien
agcttagcaatttgttcttctgagg

SEQ ID NO: 4110145 - DNA, 25 bp, Homo sapien
gtagcttagcaatttgttcttctga

SEQ ID NO: 4110146 - DNA, 25 bp, Homo sapien
tgaaattccctttctcgggtctgaa

SEQ ID NO: 4110147 - DNA, 25 bp, Homo sapien
ccctttctcgggtctgaagcttctt

SEQ ID NO: 4110148 - DNA, 25 bp, Homo sapien
cctgaaattccctttctcgggtctg

SEQ ID NO: 4110149 - DNA, 25 bp, Homo sapien
ctttctcgggtctgaagcttcttgg

SEQ ID NO: 4110150 - DNA, 25 bp, Homo sapien
gccatcgtatggactgaaaattagt

SEQ ID NO: 4110151 - DNA, 25 bp, Homo sapien
cacggaaagcatttttgagttacac

SEQ ID NO: 4110152 - DNA, 25 bp, Homo sapien
tttatacccaaacgtcaagactgcc

SEQ ID NO: 4110153 - DNA, 25 bp, Homo sapien
taatcatagcctactgccaggtggg

SEQ ID NO: 4110154 - DNA, 25 bp, Homo sapien
ccagccctgttggataggtaacgtc

SEQ ID NO: 4110155 - DNA, 25 bp, Homo sapien
ttcagcattcgcaaagtacttcccc

SEQ ID NO: 4110156 - DNA, 25 bp, Homo sapien
tacttccccaggaatcattcatttc

SEQ ID NO: 4110157 - DNA, 25 bp, Homo sapien
taattaataccaccttaaacgcaca

SEQ ID NO: 4110158 - DNA, 25 bp, Homo sapien
ttttcactttctgtgaggattgctt

SEQ ID NO: 4110159 - DNA, 25 bp, Homo sapien
cttctagggccaaagattcttgctg

SEQ ID NO: 4110160 - DNA, 25 bp, Homo sapien
tctgcaactctaactcttctagggc

SEQ ID NO: 4110161 - DNA, 25 bp, Homo sapien
aactctaactcttctagggccaaag

SEQ ID NO: 4110162 - DNA, 25 bp, Homo sapien
gatactgtcaacttgctgctggtga

SEQ ID NO: 4110163 - DNA, 25 bp, Homo sapien
aaaaacgtccagcttagcagatgcc

SEQ ID NO: 4110164 - DNA, 25 bp, Homo sapien
tgtctgctcatgtgtggcactctgg

SEQ ID NO: 4110165 - DNA, 25 bp, Homo sapien
gctgcattaagtcctgcacctggat

SEQ ID NO: 4110166 - DNA, 25 bp, Homo sapien
cacacccaaataggaggatcttttg

SEQ ID NO: 4110167 - DNA, 25 bp, Homo sapien
gcaagagaattcacatgggcagact

SEQ ID NO: 4110168 - DNA, 25 bp, Homo sapien
tgctagtcaactcagaaaccttccg

SEQ ID NO: 4110169 - DNA, 25 bp, Homo sapien
tagctgaatcgctagttcctcagac

SEQ ID NO: 4110170 - DNA, 25 bp, Homo sapien
taactcaagctggatctgcaattct

SEQ ID NO: 4110171 - DNA, 25 bp, Homo sapien
aatggctgcttctttttcggatagg

SEQ ID NO: 4110172 - DNA, 25 bp, Homo sapien
taactttagttgtacggtgctgaca

SEQ ID NO: 4110173 - DNA, 25 bp, Homo sapien
tggaccagtcatctacctgctcaag

SEQ ID NO: 4110174 - DNA, 25 bp, Homo sapien
tggagggttttctggacgtcgtcaa

SEQ ID NO: 4110175 - DNA, 25 bp, Homo sapien
ccacatgctgggctactatcaagga

SEQ ID NO: 4110176 - DNA, 25 bp, Homo sapien
tactaagcaatttgggttggaccaa

SEQ ID NO: 4110177 - DNA, 25 bp, Homo sapien
cctggtattggcatcgcatttcaaa

SEQ ID NO: 4110178 - DNA, 25 bp, Homo sapien
tgtttctcccgttctgccccggcta

SEQ ID NO: 4110179 - DNA, 25 bp, Homo sapien
ctcctttctcaacattcgaaggtct

SEQ ID NO: 4110180 - DNA, 25 bp, Homo sapien
tcaacattcgaaggtctttctgcaa

SEQ ID NO: 4110181 - DNA, 25 bp, Homo sapien
ggtctttctgcaatctaacaatctc

SEQ ID NO: 4110182 - DNA, 25 bp, Homo sapien
ggatatgtccctaataaccagaatc

SEQ ID NO: 4110183 - DNA, 25 bp, Homo sapien
tctctcctaaatggacatggaataa

SEQ ID NO: 4110184 - DNA, 25 bp, Homo sapien
gacttaattaagaaggactgccata

SEQ ID NO: 4110185 - DNA, 25 bp, Homo sapien
tgattacctctaagtagtggtcctg

SEQ ID NO: 4110186 - DNA, 25 bp, Homo sapien
aaaatgtaccgttaactgctgccac

SEQ ID NO: 4110187 - DNA, 25 bp, Homo sapien
ctgctgccacacaaagaacaagctg

SEQ ID NO: 4110188 - DNA, 25 bp, Homo sapien
taaaaatgtaccgttaactgctgcc

SEQ ID NO: 4110189 - DNA, 25 bp, Homo sapien
ataaaaatgtaccgttaactgctgc

SEQ ID NO: 4110190 - DNA, 25 bp, Homo sapien
tgttttaatgtggaattgtgcttca

SEQ ID NO: 4110191 - DNA, 25 bp, Homo sapien
ggaattgtgcttcagttcaagatct

SEQ ID NO: 4110192 - DNA, 25 bp, Homo sapien
tgcttcagttcaagatcttcctgct

SEQ ID NO: 4110193 - DNA, 25 bp, Homo sapien
ttaatgtggaattgtgcttcagttc

SEQ ID NO: 4110194 - DNA, 25 bp, Homo sapien
ggctgttcgttttagatcatcatct

SEQ ID NO: 4110195 - DNA, 25 bp, Homo sapien
tcttgatggctttctaaaagttcag

SEQ ID NO: 4110196 - DNA, 25 bp, Homo sapien
tcttttggctgttcgttttagatca

SEQ ID NO: 4110197 - DNA, 25 bp, Homo sapien
ttaagtaactgatttgtctcttctt

SEQ ID NO: 4110198 - DNA, 25 bp, Homo sapien
agtgagagagaagaaataaggtaca

SEQ ID NO: 4110199 - DNA, 25 bp, Homo sapien
aaagtgagagagaagaaataaggta

SEQ ID NO: 4110200 - DNA, 25 bp, Homo sapien
gagagagaagaaataaggtacaaac

SEQ ID NO: 4110201 - DNA, 25 bp, Homo sapien
tgagagagaagaaataaggtacaaa

SEQ ID NO: 4110202 - DNA, 25 bp, Homo sapien
gagctatggcacaatttactccctg

SEQ ID NO: 4110203 - DNA, 25 bp, Homo sapien
ggcttagagcaactacagaatctgt

SEQ ID NO: 4110204 - DNA, 25 bp, Homo sapien
tacctaaaaggtctgtcatgagtct

SEQ ID NO: 4110205 - DNA, 25 bp, Homo sapien
catgtcaaagggtatacggtaacct

SEQ ID NO: 4110206 - DNA, 25 bp, Homo sapien
caccatcaaccgaaaattgttgtaa

SEQ ID NO: 4110207 - DNA, 25 bp, Homo sapien
gaatttggcctccacctctaaaaca

SEQ ID NO: 4110208 - DNA, 25 bp, Homo sapien
cgaggcacacgtgaatttggcctcc

SEQ ID NO: 4110209 - DNA, 25 bp, Homo sapien
ctctaaaacaccatcaaccgaaaat

SEQ ID NO: 4110210 - DNA, 25 bp, Homo sapien
gcagctcctcaagttgagtctgcag

SEQ ID NO: 4110211 - DNA, 25 bp, Homo sapien
gtctgcaggtcccttacttttgcag

SEQ ID NO: 4110212 - DNA, 25 bp, Homo sapien
cagctcctcaagttgagtctgcagg

SEQ ID NO: 4110213 - DNA, 25 bp, Homo sapien
tctgcaggtcccttacttttgcagt

SEQ ID NO: 4110214 - DNA, 25 bp, Homo sapien
tatgttagtaggctagtcaaatcac

SEQ ID NO: 4110215 - DNA, 25 bp, Homo sapien
tatgtatgtatgttagtaggctagt

SEQ ID NO: 4110216 - DNA, 25 bp, Homo sapien
gtaggctagtcaaatcacagaaatg

SEQ ID NO: 4110217 - DNA, 25 bp, Homo sapien
gtatgtatgttagtaggctagtcaa

SEQ ID NO: 4110218 - DNA, 25 bp, Homo sapien
caatttcgaatcactgattaaagtc

SEQ ID NO: 4110219 - DNA, 25 bp, Homo sapien
gaatcactgattaaagtcgtcttct

SEQ ID NO: 4110220 - DNA, 25 bp, Homo sapien
tgctctttcaatttcgaatcactga

SEQ ID NO: 4110221 - DNA, 25 bp, Homo sapien
aactcttgctctttcaatttcgaat

SEQ ID NO: 4110222 - DNA, 25 bp, Homo sapien
cttcaaacggtcttctaaattgtga

SEQ ID NO: 4110223 - DNA, 25 bp, Homo sapien
catatttcttcaaacggtcttctaa

SEQ ID NO: 4110224 - DNA, 25 bp, Homo sapien
tcatatttcttcaaacggtcttcta

SEQ ID NO: 4110225 - DNA, 25 bp, Homo sapien
tcaaacggtcttctaaattgtgaat

SEQ ID NO: 4110226 - DNA, 25 bp, Homo sapien
agatgagattgggagcattcacggt

SEQ ID NO: 4110227 - DNA, 25 bp, Homo sapien
tcagatgagattgggagcattcacg

SEQ ID NO: 4110228 - DNA, 25 bp, Homo sapien
tgggagcattcacggtggtatggct

SEQ ID NO: 4110229 - DNA, 25 bp, Homo sapien
tgagattgggagcattcacggtggt

SEQ ID NO: 4110230 - DNA, 25 bp, Homo sapien
tacatactgcaccacaatgcttggg

SEQ ID NO: 4110231 - DNA, 25 bp, Homo sapien
actattctctatgcactgctgagta

SEQ ID NO: 4110232 - DNA, 25 bp, Homo sapien
aacgtgtttgtaagtgtttagcgct

SEQ ID NO: 4110233 - DNA, 25 bp, Homo sapien
cagcatgacgaagagattaatgtac

SEQ ID NO: 4110234 - DNA, 25 bp, Homo sapien
aatcaaatgcaatgtatgggcactg

SEQ ID NO: 4110235 - DNA, 25 bp, Homo sapien
caatcaaatgcaatgtatgggcact

SEQ ID NO: 4110236 - DNA, 25 bp, Homo sapien
tcaatcaaatgcaatgtatgggcac

SEQ ID NO: 4110237 - DNA, 25 bp, Homo sapien
gctaacgtttttgtctagagacagg

SEQ ID NO: 4110238 - DNA, 25 bp, Homo sapien
gcctagctaacgtttttgtctagag

SEQ ID NO: 4110239 - DNA, 25 bp, Homo sapien
ctaacgtttttgtctagagacaggg

SEQ ID NO: 4110240 - DNA, 25 bp, Homo sapien
tagctaacgtttttgtctagagaca

SEQ ID NO: 4110241 - DNA, 25 bp, Homo sapien
caatcacatctaagaataaacgtaa

SEQ ID NO: 4110242 - DNA, 25 bp, Homo sapien
gtttcctcaaataatgcataatgcc

SEQ ID NO: 4110243 - DNA, 25 bp, Homo sapien
cataagcttgcttggagtttcctca

SEQ ID NO: 4110244 - DNA, 25 bp, Homo sapien
taaaaggggtgcaagattactactg

SEQ ID NO: 4110245 - DNA, 25 bp, Homo sapien
gcaaatactcaaattcggtaggttc

SEQ ID NO: 4110246 - DNA, 25 bp, Homo sapien
acatccgtatggtacaaattgccac

SEQ ID NO: 4110247 - DNA, 25 bp, Homo sapien
ttctccaaagagtgagacatccgta

SEQ ID NO: 4110248 - DNA, 25 bp, Homo sapien
acttttcgcaaatactcaaattcgg

SEQ ID NO: 4110249 - DNA, 25 bp, Homo sapien
tattacctactattagcatgtctga

SEQ ID NO: 4110250 - DNA, 25 bp, Homo sapien
tataagcaagatccaccaattcact

SEQ ID NO: 4110251 - DNA, 25 bp, Homo sapien
gctaatagtaaacatatggcattca

SEQ ID NO: 4110252 - DNA, 25 bp, Homo sapien
taatgtttagcgttcagtgttaccc

SEQ ID NO: 4110253 - DNA, 25 bp, Homo sapien
caactgcagatggtaatcaaatcac

SEQ ID NO: 4110254 - DNA, 25 bp, Homo sapien
cacaggtgagaagacatatgaatcc

SEQ ID NO: 4110255 - DNA, 25 bp, Homo sapien
tctaaaaccgcaacctggtctccat

SEQ ID NO: 4110256 - DNA, 25 bp, Homo sapien
caaaagcagacgaagaaacacaggt

SEQ ID NO: 4110257 - DNA, 25 bp, Homo sapien
tcagggaacttcagtacggtggtta

SEQ ID NO: 4110258 - DNA, 25 bp, Homo sapien
cggtggttataacttttgccatggt

SEQ ID NO: 4110259 - DNA, 25 bp, Homo sapien
tctgagtctgatcatcagggaactt

SEQ ID NO: 4110260 - DNA, 25 bp, Homo sapien
catcagccgagcatcttctctttcc

SEQ ID NO: 4110261 - DNA, 25 bp, Homo sapien
gaggaaaacccctccatctaggcca

SEQ ID NO: 4110262 - DNA, 25 bp, Homo sapien
tctacaggctactatcaagacaagg

SEQ ID NO: 4110263 - DNA, 25 bp, Homo sapien
gaagggtattcacggagggctctac

SEQ ID NO: 4110264 - DNA, 25 bp, Homo sapien
caagaggtattatttagccgggagg

SEQ ID NO: 4110265 - DNA, 25 bp, Homo sapien
cttcagggctgaccttgtgcagaga

SEQ ID NO: 4110266 - DNA, 25 bp, Homo sapien
tggggtcccttcagggctgaccttg

SEQ ID NO: 4110267 - DNA, 25 bp, Homo sapien
gtcccttcagggctgaccttgtgca

SEQ ID NO: 4110268 - DNA, 25 bp, Homo sapien
ccttcagggctgaccttgtgcagag

SEQ ID NO: 4110269 - DNA, 25 bp, Homo sapien
ggctgaagatcatgagggactccct

SEQ ID NO: 4110270 - DNA, 25 bp, Homo sapien
ccaaatcaagggtgtacaggcaagg

SEQ ID NO: 4110271 - DNA, 25 bp, Homo sapien
cacaagactggtccagggcaaggac

SEQ ID NO: 4110272 - DNA, 25 bp, Homo sapien
gatagtgtggccaacctcagaaaca

SEQ ID NO: 4110273 - DNA, 25 bp, Homo sapien
tcagaagataccactgcgaggtgaa

SEQ ID NO: 4110274 - DNA, 25 bp, Homo sapien
aactaagcacagactgatggtttac

SEQ ID NO: 4110275 - DNA, 25 bp, Homo sapien
gttaactaagcacagactgatggtt

SEQ ID NO: 4110276 - DNA, 25 bp, Homo sapien
taactaagcacagactgatggttta

SEQ ID NO: 4110277 - DNA, 25 bp, Homo sapien
ttaactaagcacagactgatggttt

SEQ ID NO: 4110278 - DNA, 25 bp, Homo sapien
tcacattcaattaaagtaggctgcc

SEQ ID NO: 4110279 - DNA, 25 bp, Homo sapien
ggtctcctcaggacaaatgtgttgt

SEQ ID NO: 4110280 - DNA, 25 bp, Homo sapien
cagcaaaatggttagtatcaggcaa

SEQ ID NO: 4110281 - DNA, 25 bp, Homo sapien
gtgaagccctactaattgtgatctg

SEQ ID NO: 4110282 - DNA, 25 bp, Homo sapien
agataaaagcttagagggccaggca

SEQ ID NO: 4110283 - DNA, 25 bp, Homo sapien
cagttctggataatcgctaaggcaa

SEQ ID NO: 4110284 - DNA, 25 bp, Homo sapien
gttctggataatcgctaaggcaaat

SEQ ID NO: 4110285 - DNA, 25 bp, Homo sapien
aaagataaaagcttagagggccagg

SEQ ID NO: 4110286 - DNA, 25 bp, Homo sapien
tccaggcttggcgacagtgacacct

SEQ ID NO: 4110287 - DNA, 25 bp, Homo sapien
taacccaggagtaaacacgctgact

SEQ ID NO: 4110288 - DNA, 25 bp, Homo sapien
gctaccagtttatacagtaacccag

SEQ ID NO: 4110289 - DNA, 25 bp, Homo sapien
tattccatggtctagagactgcagt

SEQ ID NO: 4110290 - DNA, 25 bp, Homo sapien
cattctcaaagagtagcaagtgtgg

SEQ ID NO: 4110291 - DNA, 25 bp, Homo sapien
caagcagcagtcacccaatgtcact

SEQ ID NO: 4110292 - DNA, 25 bp, Homo sapien
tcttttggctacatgaggggccctg

SEQ ID NO: 4110293 - DNA, 25 bp, Homo sapien
aaggcagtctgcaacttatctgtgg

SEQ ID NO: 4110294 - DNA, 25 bp, Homo sapien
ggaaagacaggttggtcctgattgt

SEQ ID NO: 4110295 - DNA, 25 bp, Homo sapien
aaagacaggttggtcctgattgttt

SEQ ID NO: 4110296 - DNA, 25 bp, Homo sapien
gaaagacaggttggtcctgattgtt

SEQ ID NO: 4110297 - DNA, 25 bp, Homo sapien
tctaagcctaagaccaggtgtcact

SEQ ID NO: 4110298 - DNA, 25 bp, Homo sapien
ctcctcttctaagcctaagaccagg

SEQ ID NO: 4110299 - DNA, 25 bp, Homo sapien
gatcagttaggtgctcctcctcttg

SEQ ID NO: 4110300 - DNA, 25 bp, Homo sapien
caggtgtcactctctcaatgatcag

SEQ ID NO: 4110301 - DNA, 25 bp, Homo sapien
tttgccataagaacgtgcccggaca

SEQ ID NO: 4110302 - DNA, 25 bp, Homo sapien
tcagctggacgtggaacagacttcc

SEQ ID NO: 4110303 - DNA, 25 bp, Homo sapien
gcaaaagccccgtttcagagattcg

SEQ ID NO: 4110304 - DNA, 25 bp, Homo sapien
ttctgggagaattgacggactgcct

SEQ ID NO: 4110305 - DNA, 25 bp, Homo sapien
tcaggcaagttctggagatgcccca

SEQ ID NO: 4110306 - DNA, 25 bp, Homo sapien
gaaaaggtgacaataggcaaatgcc

SEQ ID NO: 4110307 - DNA, 25 bp, Homo sapien
gatgactgcttcgaaaatacgtaga

SEQ ID NO: 4110308 - DNA, 25 bp, Homo sapien
tctagagagagtataccatatggcg

SEQ ID NO: 4110309 - DNA, 25 bp, Homo sapien
atgctgagctgcttatccaacatcc

SEQ ID NO: 4110310 - DNA, 25 bp, Homo sapien
tatccaacatcctcatccctttctc

SEQ ID NO: 4110311 - DNA, 25 bp, Homo sapien
tccaacatcctcatccctttctccc

SEQ ID NO: 4110312 - DNA, 25 bp, Homo sapien
gctgagctgcttatccaacatcctc

SEQ ID NO: 4110313 - DNA, 25 bp, Homo sapien
cctgcattctgaggatgtgtaccaa

SEQ ID NO: 4110314 - DNA, 25 bp, Homo sapien
gagtgtagaactcgacctgattccc

SEQ ID NO: 4110315 - DNA, 25 bp, Homo sapien
gactcacagcaagcacaggcacttc

SEQ ID NO: 4110316 - DNA, 25 bp, Homo sapien
ctagattctagccagcatgatcctg

SEQ ID NO: 4110317 - DNA, 25 bp, Homo sapien
atcattgttcatagatggtatgatc

SEQ ID NO: 4110318 - DNA, 25 bp, Homo sapien
gatatttcacgttcatgaactaaaa

SEQ ID NO: 4110319 - DNA, 25 bp, Homo sapien
gaaagatatttcacgttcatgaact

SEQ ID NO: 4110320 - DNA, 25 bp, Homo sapien
cattgttcatagatggtatgatctt

SEQ ID NO: 4110321 - DNA, 25 bp, Homo sapien
acaggcacacaccactatgcttggt

SEQ ID NO: 4110322 - DNA, 25 bp, Homo sapien
cacacaccactatgcttggttaatt

SEQ ID NO: 4110323 - DNA, 25 bp, Homo sapien
ggcacacaccactatgcttggttaa

SEQ ID NO: 4110324 - DNA, 25 bp, Homo sapien
caggcacacaccactatgcttggtt

SEQ ID NO: 4110325 - DNA, 25 bp, Homo sapien
tggctcccaggcgacatctctggac

SEQ ID NO: 4110326 - DNA, 25 bp, Homo sapien
tgtagcttgggtgcaagctcagcca

SEQ ID NO: 4110327 - DNA, 25 bp, Homo sapien
gctcccaggcgacatctctggaccc

SEQ ID NO: 4110328 - DNA, 25 bp, Homo sapien
cagccacagtaacagaactccaggc

SEQ ID NO: 4110329 - DNA, 25 bp, Homo sapien
aggtgagggaagagtaggatgtcat

SEQ ID NO: 4110330 - DNA, 25 bp, Homo sapien
gtggccatgagaagagactcctcta

SEQ ID NO: 4110331 - DNA, 25 bp, Homo sapien
agaagagactcctctacttgtagaa

SEQ ID NO: 4110332 - DNA, 25 bp, Homo sapien
cctctacttgtagaaaggtgaggga

SEQ ID NO: 4110333 - DNA, 25 bp, Homo sapien
ccacaggtagtatagctggcagctc

SEQ ID NO: 4110334 - DNA, 25 bp, Homo sapien
tgtccaagggagtgcttacgccaac

SEQ ID NO: 4110335 - DNA, 25 bp, Homo sapien
ggcaagtcttgccaccatgggctaa

SEQ ID NO: 4110336 - DNA, 25 bp, Homo sapien
gccacatgacgcagtgaaacactag

SEQ ID NO: 4110337 - DNA, 25 bp, Homo sapien
tgcttgtgttcatggctacactgtt

SEQ ID NO: 4110338 - DNA, 25 bp, Homo sapien
tggctacactgttgatcatcctgct

SEQ ID NO: 4110339 - DNA, 25 bp, Homo sapien
cactgttgatcatcctgctgctgat

SEQ ID NO: 4110340 - DNA, 25 bp, Homo sapien
cctgctgctgatggtatgtgatgag

SEQ ID NO: 4110341 - DNA, 25 bp, Homo sapien
tgggtatgggtgcaatcttaaggcc

SEQ ID NO: 4110342 - DNA, 25 bp, Homo sapien
caataacggcttaaatgacagaggt

SEQ ID NO: 4110343 - DNA, 25 bp, Homo sapien
catagctagttatcatggcagacag

SEQ ID NO: 4110344 - DNA, 25 bp, Homo sapien
tgcaggtcagctggaacattgctcc

SEQ ID NO: 4110345 - DNA, 25 bp, Homo sapien
attggtcacagatgggtcatgtgtc

SEQ ID NO: 4110346 - DNA, 25 bp, Homo sapien
ggtcatgtgtccattcctaaacaga

SEQ ID NO: 4110347 - DNA, 25 bp, Homo sapien
aaatcctgaaattcactctcattgg

SEQ ID NO: 4110348 - DNA, 25 bp, Homo sapien
gaggtgagtaagaaaggttgattat

SEQ ID NO: 4110349 - DNA, 25 bp, Homo sapien
ttcagatgtcccaggtttcccatgg

SEQ ID NO: 4110350 - DNA, 25 bp, Homo sapien
tcccaggtttcccatggtggcaaaa

SEQ ID NO: 4110351 - DNA, 25 bp, Homo sapien
tggcaaaatggctgcagctgttcca

SEQ ID NO: 4110352 - DNA, 25 bp, Homo sapien
aggtttcccatggtggcaaaatggc

SEQ ID NO: 4110353 - DNA, 25 bp, Homo sapien
gatacttgatccagcagctccaaaa

SEQ ID NO: 4110354 - DNA, 25 bp, Homo sapien
gccttcttattagctttctcttcag

SEQ ID NO: 4110355 - DNA, 25 bp, Homo sapien
cttcaagtgatacttgatccagcag

SEQ ID NO: 4110356 - DNA, 25 bp, Homo sapien
ttcttattagctttctcttcaggct

SEQ ID NO: 4110357 - DNA, 25 bp, Homo sapien
tattggatatgtaaatttaaagtgc

SEQ ID NO: 4110358 - DNA, 25 bp, Homo sapien
tagccgctctccttcggggaataaa

SEQ ID NO: 4110359 - DNA, 25 bp, Homo sapien
tcgggttggtggttgagagcctgtg

SEQ ID NO: 4110360 - DNA, 25 bp, Homo sapien
cacgtgggccatgtggtacagctgt

SEQ ID NO: 4110361 - DNA, 25 bp, Homo sapien
tgtggctgggcaatactcttagccg

SEQ ID NO: 4110362 - DNA, 25 bp, Homo sapien
gcttgatgagaccaaatattgccaa

SEQ ID NO: 4110363 - DNA, 25 bp, Homo sapien
tttatgtgtaaagcttgatgagacc

SEQ ID NO: 4110364 - DNA, 25 bp, Homo sapien
aattagatgtcagaggaattagcac

SEQ ID NO: 4110365 - DNA, 25 bp, Homo sapien
attagatgtcagaggaattagcacc

SEQ ID NO: 4110366 - DNA, 25 bp, Homo sapien
tcttgtgtgaaaagttcgggcgcac

SEQ ID NO: 4110367 - DNA, 25 bp, Homo sapien
gaaagatgttgaaatgctgagcact

SEQ ID NO: 4110368 - DNA, 25 bp, Homo sapien
gcattagcccgccttcctctgttta

SEQ ID NO: 4110369 - DNA, 25 bp, Homo sapien
ttattccatgtgttaaatctcctcc

SEQ ID NO: 4110370 - DNA, 25 bp, Homo sapien
tatgattgccccaaagacattaact

SEQ ID NO: 4110371 - DNA, 25 bp, Homo sapien
tgaaaactttagaccaccaatcacc

SEQ ID NO: 4110372 - DNA, 25 bp, Homo sapien
tttttagctaaagacaccagcatgc

SEQ ID NO: 4110373 - DNA, 25 bp, Homo sapien
gaaactgaagcagccatatttatga

SEQ ID NO: 4110374 - DNA, 25 bp, Homo sapien
cttcaaaatggagtagtagttggga

SEQ ID NO: 4110375 - DNA, 25 bp, Homo sapien
ttcaaaatggagtagtagttgggat

SEQ ID NO: 4110376 - DNA, 25 bp, Homo sapien
gctccgctgtcatcctggccgtgtg

SEQ ID NO: 4110377 - DNA, 25 bp, Homo sapien
tggccgtgtgcccttcagtaagcga

SEQ ID NO: 4110378 - DNA, 25 bp, Homo sapien
tggctccgctgtcatcctggccgtg

SEQ ID NO: 4110379 - DNA, 25 bp, Homo sapien
taagcgatttacactttcagagcct

SEQ ID NO: 4110380 - DNA, 25 bp, Homo sapien
gagagtattagatatgctcaccatc

SEQ ID NO: 4110381 - DNA, 25 bp, Homo sapien
tgctcacctattgccccagtttgca

SEQ ID NO: 4110382 - DNA, 25 bp, Homo sapien
ggtttcccaggtacagacatatgtc

SEQ ID NO: 4110383 - DNA, 25 bp, Homo sapien
tttatttggccatgactcttctccc

SEQ ID NO: 4110384 - DNA, 25 bp, Homo sapien
caacattgccctttggactaagcag

SEQ ID NO: 4110385 - DNA, 25 bp, Homo sapien
caacagagcaatagaggtgtctgcc

SEQ ID NO: 4110386 - DNA, 25 bp, Homo sapien
ccaacgtagcaactgtgaggtcaac

SEQ ID NO: 4110387 - DNA, 25 bp, Homo sapien
catgtagaagccaggagtatgagcc

SEQ ID NO: 4110388 - DNA, 25 bp, Homo sapien
cacggccacaactggaatcagaggt

SEQ ID NO: 4110389 - DNA, 25 bp, Homo sapien
cctttaatccgagatcagaaggatg

SEQ ID NO: 4110390 - DNA, 25 bp, Homo sapien
gctctgtggatgtgagtcaggaccc

SEQ ID NO: 4110391 - DNA, 25 bp, Homo sapien
aaaggaacctttaatccgagatcag

SEQ ID NO: 4110392 - DNA, 25 bp, Homo sapien
gctgggattgagtcagtcccctccc

SEQ ID NO: 4110393 - DNA, 25 bp, Homo sapien
aatgctgtgattccacgtgagaaga

SEQ ID NO: 4110394 - DNA, 25 bp, Homo sapien
ctgtgattccacgtgagaagagaca

SEQ ID NO: 4110395 - DNA, 25 bp, Homo sapien
tgtgattccacgtgagaagagacac

SEQ ID NO: 4110396 - DNA, 25 bp, Homo sapien
tgctgtgattccacgtgagaagaga

SEQ ID NO: 4110397 - DNA, 25 bp, Homo sapien
agagcaatgctgacccagggctctc

SEQ ID NO: 4110398 - DNA, 25 bp, Homo sapien
cacgcaccaggtgtgctgctccatt

SEQ ID NO: 4110399 - DNA, 25 bp, Homo sapien
ggaaccaagataattctagaatcag

SEQ ID NO: 4110400 - DNA, 25 bp, Homo sapien
caggtgtgctgctccattgcagcct

SEQ ID NO: 4110401 - DNA, 25 bp, Homo sapien
tgcaatataaggatgttggattgaa

SEQ ID NO: 4110402 - DNA, 25 bp, Homo sapien
ttgatgatatataagctgtagccgc

SEQ ID NO: 4110403 - DNA, 25 bp, Homo sapien
gattctgcagaatgaagtgccatca

SEQ ID NO: 4110404 - DNA, 25 bp, Homo sapien
cctagaaatgggcagctgggtcata

SEQ ID NO: 4110405 - DNA, 25 bp, Homo sapien
catacaggccatagggtctgtggtc

SEQ ID NO: 4110406 - DNA, 25 bp, Homo sapien
ttaacagtctttgtcatggcctgtg

SEQ ID NO: 4110407 - DNA, 25 bp, Homo sapien
gatggtagttagagccacataacag

SEQ ID NO: 4110408 - DNA, 25 bp, Homo sapien
gggatggtagttagagccacataac

SEQ ID NO: 4110409 - DNA, 25 bp, Homo sapien
gtagttagagccacataacagatcc

SEQ ID NO: 4110410 - DNA, 25 bp, Homo sapien
ctcttcgcctcagtggtgagctgat

SEQ ID NO: 4110411 - DNA, 25 bp, Homo sapien
gcgggcgctgaaggcgagcacaggg

SEQ ID NO: 4110412 - DNA, 25 bp, Homo sapien
tggacacgggcggaatgcgggcgtc

SEQ ID NO: 4110413 - DNA, 25 bp, Homo sapien
acggcgggctgagcgggcgctgaag

SEQ ID NO: 4110414 - DNA, 25 bp, Homo sapien
tcagtccgcccgagaagtctgcgcg

SEQ ID NO: 4110415 - DNA, 25 bp, Homo sapien
cgggtcgaggttgtaggcgcccgcg

SEQ ID NO: 4110416 - DNA, 25 bp, Homo sapien
taggcgcccgcggggatccccgcga

SEQ ID NO: 4110417 - DNA, 25 bp, Homo sapien
gcgcccgcggggatccccgcgacca

SEQ ID NO: 4110418 - DNA, 25 bp, Homo sapien
ctgcgggtcgaggttgtaggcgccc

SEQ ID NO: 4110419 - DNA, 25 bp, Homo sapien
gaaatgctccagaactgcgtagccg

SEQ ID NO: 4110420 - DNA, 25 bp, Homo sapien
tccagaactgcgtagccgaagaacg

SEQ ID NO: 4110421 - DNA, 25 bp, Homo sapien
tgcgtagccgaagaacgagtcagcg

SEQ ID NO: 4110422 - DNA, 25 bp, Homo sapien
gtgttgtcgtggaaatgctccagaa

SEQ ID NO: 4110423 - DNA, 25 bp, Homo sapien
ttcaaaggacgccagaagactcagg

SEQ ID NO: 4110424 - DNA, 25 bp, Homo sapien
tgttgttcaaaggacgccagaagac

SEQ ID NO: 4110425 - DNA, 25 bp, Homo sapien
ttgttcaaaggacgccagaagactc

SEQ ID NO: 4110426 - DNA, 25 bp, Homo sapien
tgttgttgttcaaaggacgccagaa

SEQ ID NO: 4110427 - DNA, 25 bp, Homo sapien
gtgaggaccaggaacaatgtctgaa

SEQ ID NO: 4110428 - DNA, 25 bp, Homo sapien
tgaggaccaggaacaatgtctgaaa

SEQ ID NO: 4110429 - DNA, 25 bp, Homo sapien
agtgaggaccaggaacaatgtctga

SEQ ID NO: 4110430 - DNA, 25 bp, Homo sapien
gatgctttttggatccccttggaac

SEQ ID NO: 4110431 - DNA, 25 bp, Homo sapien
gaactcaggcctcatatatgtgttg

SEQ ID NO: 4110432 - DNA, 25 bp, Homo sapien
ttcttgagagcttgagaaagcaggc

SEQ ID NO: 4110433 - DNA, 25 bp, Homo sapien
ccagaaaccccgagaagatgctttt

SEQ ID NO: 4110434 - DNA, 25 bp, Homo sapien
cagcattcagcactagctcagaaaa

SEQ ID NO: 4110435 - DNA, 25 bp, Homo sapien
attcagcactagctcagaaaacagc

SEQ ID NO: 4110436 - DNA, 25 bp, Homo sapien
gcattcagcactagctcagaaaaca

SEQ ID NO: 4110437 - DNA, 25 bp, Homo sapien
gccagcattcagcactagctcagaa

SEQ ID NO: 4110438 - DNA, 25 bp, Homo sapien
agaactctgatgtgaaagctccgtc

SEQ ID NO: 4110439 - DNA, 25 bp, Homo sapien
tgaaagctccgtcatgtcaaagggc

SEQ ID NO: 4110440 - DNA, 25 bp, Homo sapien
gcagctctgaagtgagaactctgat

SEQ ID NO: 4110441 - DNA, 25 bp, Homo sapien
ttgagggcagctctgaagtgagaac

SEQ ID NO: 4110442 - DNA, 25 bp, Homo sapien
gttaggctcattgcgggcaggatca

SEQ ID NO: 4110443 - DNA, 25 bp, Homo sapien
aattagggcaaccagcatgtagcag

SEQ ID NO: 4110444 - DNA, 25 bp, Homo sapien
ttttaggtcctctcatcaatgcagg

SEQ ID NO: 4110445 - DNA, 25 bp, Homo sapien
tcaatgcaggactctaaacttctaa

SEQ ID NO: 4110446 - DNA, 25 bp, Homo sapien
ccaggtcagtcttggagggtctgta

SEQ ID NO: 4110447 - DNA, 25 bp, Homo sapien
gagggtctgtatctgattccatgag

SEQ ID NO: 4110448 - DNA, 25 bp, Homo sapien
gagaagcaagactcccaatggtgca

SEQ ID NO: 4110449 - DNA, 25 bp, Homo sapien
tgcggctcctcaataatgccctggg

SEQ ID NO: 4110450 - DNA, 25 bp, Homo sapien
gacatggtgttaaggttcatgggaa

SEQ ID NO: 4110451 - DNA, 25 bp, Homo sapien
gttcatgggaatgtgtgtgggtccc

SEQ ID NO: 4110452 - DNA, 25 bp, Homo sapien
ctggctcagagacatggtgttaagg

SEQ ID NO: 4110453 - DNA, 25 bp, Homo sapien
actgccctgagctcaacacctagaa

SEQ ID NO: 4110454 - DNA, 25 bp, Homo sapien
tgtgaacacggcacttaaacacagc

SEQ ID NO: 4110455 - DNA, 25 bp, Homo sapien
ctccggtcagggttggtgtgaacac

SEQ ID NO: 4110456 - DNA, 25 bp, Homo sapien
ctcgagccatgtccagttcggtgca

SEQ ID NO: 4110457 - DNA, 25 bp, Homo sapien
tggaatctgcctttggtgcgcccac

SEQ ID NO: 4110458 - DNA, 25 bp, Homo sapien
aggagaagagccagacttgggttga

SEQ ID NO: 4110459 - DNA, 25 bp, Homo sapien
tgctttcaaagggtggtccacagcc

SEQ ID NO: 4110460 - DNA, 25 bp, Homo sapien
gctggctgctttcaaagggtggtcc

SEQ ID NO: 4110461 - DNA, 25 bp, Homo sapien
gttgaggagtgatgttctgctggct

SEQ ID NO: 4110462 - DNA, 25 bp, Homo sapien
ttccgcaggacgtgccccgattctt

SEQ ID NO: 4110463 - DNA, 25 bp, Homo sapien
cttcccggcaggtctttccgcagga

SEQ ID NO: 4110464 - DNA, 25 bp, Homo sapien
ccatccactcatcatcgcggtcttc

SEQ ID NO: 4110465 - DNA, 25 bp, Homo sapien
tcatcatcgcggtcttcccggcagg

SEQ ID NO: 4110466 - DNA, 25 bp, Homo sapien
ttcatagcaagggatcagcgtcctg

SEQ ID NO: 4110467 - DNA, 25 bp, Homo sapien
tagatgttcttccagcgatgagcac

SEQ ID NO: 4110468 - DNA, 25 bp, Homo sapien
gtaggatgtggtcggcttcatagta

SEQ ID NO: 4110469 - DNA, 25 bp, Homo sapien
gatcagcgtcctgcctttggcctgg

SEQ ID NO: 4110470 - DNA, 25 bp, Homo sapien
tcagctggtggtgcatagaggtggg

SEQ ID NO: 4110471 - DNA, 25 bp, Homo sapien
aatgttcagctggtggtgcatagag

SEQ ID NO: 4110472 - DNA, 25 bp, Homo sapien
cagctggtggtgcatagaggtggga

SEQ ID NO: 4110473 - DNA, 25 bp, Homo sapien
ggaaatgttcagctggtggtgcata

SEQ ID NO: 4110474 - DNA, 25 bp, Homo sapien
gctgccctatcatgagcatgtggaa

SEQ ID NO: 4110475 - DNA, 25 bp, Homo sapien
aacagtgctgccctatcatgagcat

SEQ ID NO: 4110476 - DNA, 25 bp, Homo sapien
ttggggaccaagagaccatctggga

SEQ ID NO: 4110477 - DNA, 25 bp, Homo sapien
tctgggagcaaacagtgctgcccta

SEQ ID NO: 4110478 - DNA, 25 bp, Homo sapien
ggtgaatttcggtccctgagacttc

SEQ ID NO: 4110479 - DNA, 25 bp, Homo sapien
gaggcttggtgaatttcggtccctg

SEQ ID NO: 4110480 - DNA, 25 bp, Homo sapien
gaatttcggtccctgagacttcata

SEQ ID NO: 4110481 - DNA, 25 bp, Homo sapien
cttggtgaatttcggtccctgagac

SEQ ID NO: 4110482 - DNA, 25 bp, Homo sapien
tgaagagctgccccaccggttgttc

SEQ ID NO: 4110483 - DNA, 25 bp, Homo sapien
gctgccccaccggttgttccagagg

SEQ ID NO: 4110484 - DNA, 25 bp, Homo sapien
tgccccaccggttgttccagaggct

SEQ ID NO: 4110485 - DNA, 25 bp, Homo sapien
agagctgccccaccggttgttccag

SEQ ID NO: 4110486 - DNA, 25 bp, Homo sapien
gatattctggtagcttttcccatcc

SEQ ID NO: 4110487 - DNA, 25 bp, Homo sapien
caacaggatattctggtagcttttc

SEQ ID NO: 4110488 - DNA, 25 bp, Homo sapien
ggttccaacaggatattctggtagc

SEQ ID NO: 4110489 - DNA, 25 bp, Homo sapien
caggatattctggtagcttttccca

SEQ ID NO: 4110490 - DNA, 25 bp, Homo sapien
acttggtctccaaatgcccccaggg

SEQ ID NO: 4110491 - DNA, 25 bp, Homo sapien
ttggtctccaaatgcccccagggac

SEQ ID NO: 4110492 - DNA, 25 bp, Homo sapien
gtctacttggtctccaaatgccccc

SEQ ID NO: 4110493 - DNA, 25 bp, Homo sapien
ggtctccaaatgcccccagggacat

SEQ ID NO: 4110494 - DNA, 25 bp, Homo sapien
cctgcacaaacacaaaggccgtggg

SEQ ID NO: 4110495 - DNA, 25 bp, Homo sapien
ctcctgtgttcccaggaagaacttt

SEQ ID NO: 4110496 - DNA, 25 bp, Homo sapien
acttttcctgcacaaacacaaaggc

SEQ ID NO: 4110497 - DNA, 25 bp, Homo sapien
gggcccagcagttggctgctcctgg

SEQ ID NO: 4110498 - DNA, 25 bp, Homo sapien
gttcctctccgtacttcttcttata

SEQ ID NO: 4110499 - DNA, 25 bp, Homo sapien
gccgtgttcctctccgtacttcttc

SEQ ID NO: 4110500 - DNA, 25 bp, Homo sapien
gaagaagcccgctatcccagcctgg

SEQ ID NO: 4110501 - DNA, 25 bp, Homo sapien
ctcggtgaagaagcccgctatccca

SEQ ID NO: 4110502 - DNA, 25 bp, Homo sapien
cccactttgctgtaccatgagcaca

SEQ ID NO: 4110503 - DNA, 25 bp, Homo sapien
acagccagcacatgctgacacccca

SEQ ID NO: 4110504 - DNA, 25 bp, Homo sapien
catgtccccactttgctgtaccatg

SEQ ID NO: 4110505 - DNA, 25 bp, Homo sapien
catgagcacagccagcacatgctga

SEQ ID NO: 4110506 - DNA, 25 bp, Homo sapien
taggtgttgtccgtaaggttcagca

SEQ ID NO: 4110507 - DNA, 25 bp, Homo sapien
ggtgtaccgcctgttcatgatcact

SEQ ID NO: 4110508 - DNA, 25 bp, Homo sapien
gatcacttcgtcgttcagttttaaa

SEQ ID NO: 4110509 - DNA, 25 bp, Homo sapien
gcactttgatggttccagcccaata

SEQ ID NO: 4110510 - DNA, 25 bp, Homo sapien
tgtggggcacctcctaccacatcaa

SEQ ID NO: 4110511 - DNA, 25 bp, Homo sapien
aagtggccagcggtcactgcgtagc

SEQ ID NO: 4110512 - DNA, 25 bp, Homo sapien
gagagaagtggccagcggtcactgc

SEQ ID NO: 4110513 - DNA, 25 bp, Homo sapien
catcaatggtggacgggtgagagaa

SEQ ID NO: 4110514 - DNA, 25 bp, Homo sapien
gatcttcggtcagctctgaaaatat

SEQ ID NO: 4110515 - DNA, 25 bp, Homo sapien
cctgatgcttgaaagatcttaatta

SEQ ID NO: 4110516 - DNA, 25 bp, Homo sapien
tcttaattaaggtgcctgatcttcg

SEQ ID NO: 4110517 - DNA, 25 bp, Homo sapien
ctttttacctgatgcttgaaagatc

SEQ ID NO: 4110518 - DNA, 25 bp, Homo sapien
cctctgttgatgtagacagtgacct

SEQ ID NO: 4110519 - DNA, 25 bp, Homo sapien
aggccgtccccattcaggtcaactg

SEQ ID NO: 4110520 - DNA, 25 bp, Homo sapien
caccagcaggtcagagaggccgtcc

SEQ ID NO: 4110521 - DNA, 25 bp, Homo sapien
tgtccctcatccctgatctcagaaa

SEQ ID NO: 4110522 - DNA, 25 bp, Homo sapien
atctttctgtccatgtcacgtccct

SEQ ID NO: 4110523 - DNA, 25 bp, Homo sapien
accctccattagctacagagggcca

SEQ ID NO: 4110524 - DNA, 25 bp, Homo sapien
tctgtccatgtcacgtccctttcat

SEQ ID NO: 4110525 - DNA, 25 bp, Homo sapien
tttctgtccatgtcacgtccctttc

SEQ ID NO: 4110526 - DNA, 25 bp, Homo sapien
catcattgtccagatcgtccaggct

SEQ ID NO: 4110527 - DNA, 25 bp, Homo sapien
tgggaacccatcattgtccagatcg

SEQ ID NO: 4110528 - DNA, 25 bp, Homo sapien
tccaaagtgcgcattgtaggcacca

SEQ ID NO: 4110529 - DNA, 25 bp, Homo sapien
ccaggctggcaatgctctctccaaa

SEQ ID NO: 4110530 - DNA, 25 bp, Homo sapien
atgatagatatagaccgcccctgcg

SEQ ID NO: 4110531 - DNA, 25 bp, Homo sapien
tcccaccggcatcaccatgatagat

SEQ ID NO: 4110532 - DNA, 25 bp, Homo sapien
cattgagtactgagggactatccca

SEQ ID NO: 4110533 - DNA, 25 bp, Homo sapien
cctgcgaagtcatcctccttgggtg

SEQ ID NO: 4110534 - DNA, 25 bp, Homo sapien
gcaggcttaagttatcccacagaca

SEQ ID NO: 4110535 - DNA, 25 bp, Homo sapien
tacagatggaggcacgagagatgcc

SEQ ID NO: 4110536 - DNA, 25 bp, Homo sapien
taaaagccacgttttgaagcagacc

SEQ ID NO: 4110537 - DNA, 25 bp, Homo sapien
tggcgcagttcctcacaaagatact

SEQ ID NO: 4110538 - DNA, 25 bp, Homo sapien
catccatatcaatgcctcccgatat

SEQ ID NO: 4110539 - DNA, 25 bp, Homo sapien
atatcaatgcctcccgatatggact

SEQ ID NO: 4110540 - DNA, 25 bp, Homo sapien
tatggactgaccaaacatccggagc

SEQ ID NO: 4110541 - DNA, 25 bp, Homo sapien
tgcctcccgatatggactgaccaaa

SEQ ID NO: 4110542 - DNA, 25 bp, Homo sapien
gaaccacgctgtcggacatgaaggc

SEQ ID NO: 4110543 - DNA, 25 bp, Homo sapien
accacgctgtcggacatgaaggctc

SEQ ID NO: 4110544 - DNA, 25 bp, Homo sapien
gaagaaccacgctgtcggacatgaa

SEQ ID NO: 4110545 - DNA, 25 bp, Homo sapien
cacgctgtcggacatgaaggctcca

SEQ ID NO: 4110546 - DNA, 25 bp, Homo sapien
caggtggtgacgttcaggcagttca

SEQ ID NO: 4110547 - DNA, 25 bp, Homo sapien
gagacatccaccgtaatgacaggcc

SEQ ID NO: 4110548 - DNA, 25 bp, Homo sapien
tccgtcgtgacactgaggcgctgtg

SEQ ID NO: 4110549 - DNA, 25 bp, Homo sapien
gaacgtgtttgccatggaagctgaa

SEQ ID NO: 4110550 - DNA, 25 bp, Homo sapien
gcggaactggcagttttaccagcac

SEQ ID NO: 4110551 - DNA, 25 bp, Homo sapien
actcattccaaagccctgagcggaa

SEQ ID NO: 4110552 - DNA, 25 bp, Homo sapien
gagcggaactggcagttttaccagc

SEQ ID NO: 4110553 - DNA, 25 bp, Homo sapien
cctgagcggaactggcagttttacc

SEQ ID NO: 4110554 - DNA, 25 bp, Homo sapien
tcctttttggccacgtcagccatca

SEQ ID NO: 4110555 - DNA, 25 bp, Homo sapien
gtcagccatcagaacataattcagg

SEQ ID NO: 4110556 - DNA, 25 bp, Homo sapien
tcctccatgtaagtcagctgcagct

SEQ ID NO: 4110557 - DNA, 25 bp, Homo sapien
catgggccacatagtgacgacacgt

SEQ ID NO: 4110558 - DNA, 25 bp, Homo sapien
tacaggattagaggatgagcacagc

SEQ ID NO: 4110559 - DNA, 25 bp, Homo sapien
gatggagtaacaacaggacacctgc

SEQ ID NO: 4110560 - DNA, 25 bp, Homo sapien
tctaacacatgaatggagtgggcgc

SEQ ID NO: 4110561 - DNA, 25 bp, Homo sapien
caaaacctgtggactgagccttgaa

SEQ ID NO: 4110562 - DNA, 25 bp, Homo sapien
gagctcagcaccagaaggcccacag

SEQ ID NO: 4110563 - DNA, 25 bp, Homo sapien
agctcagcaccagaaggcccacagc

SEQ ID NO: 4110564 - DNA, 25 bp, Homo sapien
catagagcagacagttcagttccct

SEQ ID NO: 4110565 - DNA, 25 bp, Homo sapien
tgcagggtcataagctgtcttttgg

SEQ ID NO: 4110566 - DNA, 25 bp, Homo sapien
aaaatgcagggtcataagctgtctt

SEQ ID NO: 4110567 - DNA, 25 bp, Homo sapien
tcatagagcagacagttcagttccc

SEQ ID NO: 4110568 - DNA, 25 bp, Homo sapien
atagcttattggttaaaaccataag

SEQ ID NO: 4110569 - DNA, 25 bp, Homo sapien
tttcagattggatcttaatgtaaca

SEQ ID NO: 4110570 - DNA, 25 bp, Homo sapien
ttatagcttattggttaaaaccata

SEQ ID NO: 4110571 - DNA, 25 bp, Homo sapien
tatagcttattggttaaaaccataa

SEQ ID NO: 4110572 - DNA, 25 bp, Homo sapien
atcatgatgaagttttccctgtagc

SEQ ID NO: 4110573 - DNA, 25 bp, Homo sapien
catgatgaagttttccctgtagccc

SEQ ID NO: 4110574 - DNA, 25 bp, Homo sapien
tcatgatgaagttttccctgtagcc

SEQ ID NO: 4110575 - DNA, 25 bp, Homo sapien
atgatgaagttttccctgtagccct

SEQ ID NO: 4110576 - DNA, 25 bp, Homo sapien
ttccctgggactatgcacactgctg

SEQ ID NO: 4110577 - DNA, 25 bp, Homo sapien
gcaccatgtgaccattaggagagga

SEQ ID NO: 4110578 - DNA, 25 bp, Homo sapien
acttggcttgaaagagtggtggcac

SEQ ID NO: 4110579 - DNA, 25 bp, Homo sapien
tggagctccaacagccacattgggc

SEQ ID NO: 4110580 - DNA, 25 bp, Homo sapien
tgctttcattccgtggtattcttta

SEQ ID NO: 4110581 - DNA, 25 bp, Homo sapien
tttgctttcattccgtggtattctt

SEQ ID NO: 4110582 - DNA, 25 bp, Homo sapien
ctttcattccgtggtattctttatt

SEQ ID NO: 4110583 - DNA, 25 bp, Homo sapien
atttgctttcattccgtggtattct

SEQ ID NO: 4110584 - DNA, 25 bp, Homo sapien
tcacacatgcacactatatcatact

SEQ ID NO: 4110585 - DNA, 25 bp, Homo sapien
gtcacacatgcacactatatcatac

SEQ ID NO: 4110586 - DNA, 25 bp, Homo sapien
cacacatgcacactatatcatactc

SEQ ID NO: 4110587 - DNA, 25 bp, Homo sapien
gcttggctttctcgtgtctggccat

SEQ ID NO: 4110588 - DNA, 25 bp, Homo sapien
aatcctggctgacagtcgtagagca

SEQ ID NO: 4110589 - DNA, 25 bp, Homo sapien
cattaactactaatcctggctgaca

SEQ ID NO: 4110590 - DNA, 25 bp, Homo sapien
tgcattaactactaatcctggctga

SEQ ID NO: 4110591 - DNA, 25 bp, Homo sapien
actactaatcctggctgacagtcgt

SEQ ID NO: 4110592 - DNA, 25 bp, Homo sapien
gattcttttgggcaatcttttgtcc

SEQ ID NO: 4110593 - DNA, 25 bp, Homo sapien
tttccagcggagaactggtgtcaga

SEQ ID NO: 4110594 - DNA, 25 bp, Homo sapien
cacgatcgggctgatgacgtcctgc

SEQ ID NO: 4110595 - DNA, 25 bp, Homo sapien
gctcactgaggctgtaggctgcttc

SEQ ID NO: 4110596 - DNA, 25 bp, Homo sapien
ccttgggtgctgagtatgagcttta

SEQ ID NO: 4110597 - DNA, 25 bp, Homo sapien
ggtgctgagtatgagctttaaggtt

SEQ ID NO: 4110598 - DNA, 25 bp, Homo sapien
caccttgggtgctgagtatgagctt

SEQ ID NO: 4110599 - DNA, 25 bp, Homo sapien
tgagtatgagctttaaggttctgac

SEQ ID NO: 4110600 - DNA, 25 bp, Homo sapien
tgcagatcagaaaagggagacccag

SEQ ID NO: 4110601 - DNA, 25 bp, Homo sapien
aggcccacggctctctcaacttttg

SEQ ID NO: 4110602 - DNA, 25 bp, Homo sapien
tgtgtcctggctgcggtctcctgag

SEQ ID NO: 4110603 - DNA, 25 bp, Homo sapien
gacccagagaggaggtgtgtcctgg

SEQ ID NO: 4110604 - DNA, 25 bp, Homo sapien
ggccgcccacactatcttaaacagt

SEQ ID NO: 4110605 - DNA, 25 bp, Homo sapien
tttagagaaggcgatgcctggctgc

SEQ ID NO: 4110606 - DNA, 25 bp, Homo sapien
gaggccgcccacactatcttaaaca

SEQ ID NO: 4110607 - DNA, 25 bp, Homo sapien
ttaacactttagagaaggcgatgcc

SEQ ID NO: 4110608 - DNA, 25 bp, Homo sapien
tgcctgctaagccatcaacgagtgt

SEQ ID NO: 4110609 - DNA, 25 bp, Homo sapien
gatgaccctgttacactagtagccc

SEQ ID NO: 4110610 - DNA, 25 bp, Homo sapien
caacgagtgttaataccgcagtggc

SEQ ID NO: 4110611 - DNA, 25 bp, Homo sapien
cccagggtagcaatatgtggtacaa

SEQ ID NO: 4110612 - DNA, 25 bp, Homo sapien
aaaccccttcgtctcagccccatat

SEQ ID NO: 4110613 - DNA, 25 bp, Homo sapien
acagtgggccgagttcctgtcactg

SEQ ID NO: 4110614 - DNA, 25 bp, Homo sapien
ttacagtgggccgagttcctgtcac

SEQ ID NO: 4110615 - DNA, 25 bp, Homo sapien
gcctgtgtgacagaggattctttgt

SEQ ID NO: 4110616 - DNA, 25 bp, Homo sapien
gaaaacatgctgatactactactcg

SEQ ID NO: 4110617 - DNA, 25 bp, Homo sapien
gaaagaactgctctcccagaacttc

SEQ ID NO: 4110618 - DNA, 25 bp, Homo sapien
taaattccttccatgatagacagga

SEQ ID NO: 4110619 - DNA, 25 bp, Homo sapien
gacaggaatttatctcacataacga

SEQ ID NO: 4110620 - DNA, 25 bp, Homo sapien
agctctttcttaactggcctcccca

SEQ ID NO: 4110621 - DNA, 25 bp, Homo sapien
acaagctctttcttaactggcctcc

SEQ ID NO: 4110622 - DNA, 25 bp, Homo sapien
gctctttcttaactggcctccccat

SEQ ID NO: 4110623 - DNA, 25 bp, Homo sapien
tctttcaccagctgtatatcctcca

SEQ ID NO: 4110624 - DNA, 25 bp, Homo sapien
tttctttcaccagctgtatatcctc

SEQ ID NO: 4110625 - DNA, 25 bp, Homo sapien
cttttctttcaccagctgtatatcc

SEQ ID NO: 4110626 - DNA, 25 bp, Homo sapien
ctttcaccagctgtatatcctccat

SEQ ID NO: 4110627 - DNA, 25 bp, Homo sapien
agagcagcagtttaccctgaagctg

SEQ ID NO: 4110628 - DNA, 25 bp, Homo sapien
tgaacggcaattcctttcaaaaaca

SEQ ID NO: 4110629 - DNA, 25 bp, Homo sapien
aagctgcaggtctgcggcacagtcc

SEQ ID NO: 4110630 - DNA, 25 bp, Homo sapien
cggcacagtcctctgaacggcaatt

SEQ ID NO: 4110631 - DNA, 25 bp, Homo sapien
ggtcaagaaaaaggagcctgagaac

SEQ ID NO: 4110632 - DNA, 25 bp, Homo sapien
tgctctgaaggaaacaccgacatac

SEQ ID NO: 4110633 - DNA, 25 bp, Homo sapien
ttatcctcttcagtggggaaatctg

SEQ ID NO: 4110634 - DNA, 25 bp, Homo sapien
gcctgagaacaatgctctgaaggaa

SEQ ID NO: 4110635 - DNA, 25 bp, Homo sapien
tattctgcaccagaaatgctctggc

SEQ ID NO: 4110636 - DNA, 25 bp, Homo sapien
gagtcatgggttgtgcttacgcctg

SEQ ID NO: 4110637 - DNA, 25 bp, Homo sapien
ggcttgtctctaccccacatcaatg

SEQ ID NO: 4110638 - DNA, 25 bp, Homo sapien
gctctggctccaagtacacacataa

SEQ ID NO: 4110639 - DNA, 25 bp, Homo sapien
accgggttcctgccacaacatgtgg

SEQ ID NO: 4110640 - DNA, 25 bp, Homo sapien
tcccaccgggttcctgccacaacat

SEQ ID NO: 4110641 - DNA, 25 bp, Homo sapien
ccaccgggttcctgccacaacatgt

SEQ ID NO: 4110642 - DNA, 25 bp, Homo sapien
cgggttcctgccacaacatgtggga

SEQ ID NO: 4110643 - DNA, 25 bp, Homo sapien
cataggcatcatctccgaggttgga

SEQ ID NO: 4110644 - DNA, 25 bp, Homo sapien
agagctcccgggaaacattgaagga

SEQ ID NO: 4110645 - DNA, 25 bp, Homo sapien
acagcccccaaagctagatacaggg

SEQ ID NO: 4110646 - DNA, 25 bp, Homo sapien
gaaggacacgttggcatcataggca

SEQ ID NO: 4110647 - DNA, 25 bp, Homo sapien
tgtggctagcacctcgctcacattc

SEQ ID NO: 4110648 - DNA, 25 bp, Homo sapien
tgcttatttggctgtggcacacttt

SEQ ID NO: 4110649 - DNA, 25 bp, Homo sapien
gtattcttgagtagtttatcagtaa

SEQ ID NO: 4110650 - DNA, 25 bp, Homo sapien
tatgcatttaccatggcaatacttt

SEQ ID NO: 4110651 - DNA, 25 bp, Homo sapien
ctggcgttatacaggaagttcaagg

SEQ ID NO: 4110652 - DNA, 25 bp, Homo sapien
gcgttatacaggaagttcaaggtaa

SEQ ID NO: 4110653 - DNA, 25 bp, Homo sapien
tacaggaagttcaaggtaaagtcac

SEQ ID NO: 4110654 - DNA, 25 bp, Homo sapien
tatacaggaagttcaaggtaaagtc

SEQ ID NO: 4110655 - DNA, 25 bp, Homo sapien
gcagaagaaccccaaggagcttgct

SEQ ID NO: 4110656 - DNA, 25 bp, Homo sapien
ggttgtcgcagaccccactgatgtt

SEQ ID NO: 4110657 - DNA, 25 bp, Homo sapien
caaacaacaggccagaagtgtcaag

SEQ ID NO: 4110658 - DNA, 25 bp, Homo sapien
tgctatagcccgtgaactgctgctc

SEQ ID NO: 4110659 - DNA, 25 bp, Homo sapien
gagccacactctgatggaccatgta

SEQ ID NO: 4110660 - DNA, 25 bp, Homo sapien
cacactctgatggaccatgtacatc

SEQ ID NO: 4110661 - DNA, 25 bp, Homo sapien
gccacactctgatggaccatgtaca

SEQ ID NO: 4110662 - DNA, 25 bp, Homo sapien
tgagccacactctgatggaccatgt

SEQ ID NO: 4110663 - DNA, 25 bp, Homo sapien
cagacattccccttggatgaaggca

SEQ ID NO: 4110664 - DNA, 25 bp, Homo sapien
ttgccaatcggcaggaacccatcag

SEQ ID NO: 4110665 - DNA, 25 bp, Homo sapien
gaacagagctctctattcaaaggcc

SEQ ID NO: 4110666 - DNA, 25 bp, Homo sapien
tagtgtgcaaaacacaggctcagtg

SEQ ID NO: 4110667 - DNA, 25 bp, Homo sapien
gcatccagcaagtcaccggtgttgt

SEQ ID NO: 4110668 - DNA, 25 bp, Homo sapien
agcaagtcaccggtgttgtatttct

SEQ ID NO: 4110669 - DNA, 25 bp, Homo sapien
catgccaatagcacaaagccaccag

SEQ ID NO: 4110670 - DNA, 25 bp, Homo sapien
tccagcaagtcaccggtgttgtatt

SEQ ID NO: 4110671 - DNA, 25 bp, Homo sapien
ttcagagaagcaaatttaatcaagg

SEQ ID NO: 4110672 - DNA, 25 bp, Homo sapien
tgttcagagaagcaaatttaatcaa

SEQ ID NO: 4110673 - DNA, 25 bp, Homo sapien
agtgttcagagaagcaaatttaatc

SEQ ID NO: 4110674 - DNA, 25 bp, Homo sapien
cagagaagcaaatttaatcaaggcc

SEQ ID NO: 4110675 - DNA, 25 bp, Homo sapien
ggccaggagacccttgctggcaggc

SEQ ID NO: 4110676 - DNA, 25 bp, Homo sapien
cagccgtgtggctgtaagcagagca

SEQ ID NO: 4110677 - DNA, 25 bp, Homo sapien
agcagcccgggcctttagggctggc

SEQ ID NO: 4110678 - DNA, 25 bp, Homo sapien
acagccgtgtggctgtaagcagagc

SEQ ID NO: 4110679 - DNA, 25 bp, Homo sapien
tgccctatatcacgccctgttctag

SEQ ID NO: 4110680 - DNA, 25 bp, Homo sapien
tgttctaggggatggggctacaatg

SEQ ID NO: 4110681 - DNA, 25 bp, Homo sapien
attcactgaccgctgccctatatca

SEQ ID NO: 4110682 - DNA, 25 bp, Homo sapien
aaacacagcgctgccgtcgcagcac

SEQ ID NO: 4110683 - DNA, 25 bp, Homo sapien
aatgctgtctcaagaactgcatggc

SEQ ID NO: 4110684 - DNA, 25 bp, Homo sapien
tggctaattggcctgtggacatcag

SEQ ID NO: 4110685 - DNA, 25 bp, Homo sapien
gaggcagcaagccaaagtcttggat

SEQ ID NO: 4110686 - DNA, 25 bp, Homo sapien
gacactaccctaaatcctggctaat

SEQ ID NO: 4110687 - DNA, 25 bp, Homo sapien
tgactttgacctcatgaaaggaaat

SEQ ID NO: 4110688 - DNA, 25 bp, Homo sapien
gaagtccgattccagcagctcacag

SEQ ID NO: 4110689 - DNA, 25 bp, Homo sapien
tgcatttgaggaagtccgattccag

SEQ ID NO: 4110690 - DNA, 25 bp, Homo sapien
aaggaaatcccacgctgcatttgag

SEQ ID NO: 4110691 - DNA, 25 bp, Homo sapien
gcatgtcagggcttcagtggccgcc

SEQ ID NO: 4110692 - DNA, 25 bp, Homo sapien
gaggcggcggaatcagtggctggtg

SEQ ID NO: 4110693 - DNA, 25 bp, Homo sapien
acctcagggaggcggcggaatcagt

SEQ ID NO: 4110694 - DNA, 25 bp, Homo sapien
gtcagggcttcagtggccgccccag

SEQ ID NO: 4110695 - DNA, 25 bp, Homo sapien
tgtctccataccaataccaaagtga

SEQ ID NO: 4110696 - DNA, 25 bp, Homo sapien
tgatggcacatactacaatgttcca

SEQ ID NO: 4110697 - DNA, 25 bp, Homo sapien
ccatgaatgtctgaagatgctgtag

SEQ ID NO: 4110698 - DNA, 25 bp, Homo sapien
ccaaaggcagacttggtcttttaga

SEQ ID NO: 4110699 - DNA, 25 bp, Homo sapien
ggcttgtatcaaagatcacgctgaa

SEQ ID NO: 4110700 - DNA, 25 bp, Homo sapien
agacaggtggcttgtatcaaagatc

SEQ ID NO: 4110701 - DNA, 25 bp, Homo sapien
gtatcaaagatcacgctgaattcat

SEQ ID NO: 4110702 - DNA, 25 bp, Homo sapien
gtaacaatgaagctgagaacttcct

SEQ ID NO: 4110703 - DNA, 25 bp, Homo sapien
tgccagccaagtgctacctagatgc

SEQ ID NO: 4110704 - DNA, 25 bp, Homo sapien
agtgctacctagatgctgcttcaag

SEQ ID NO: 4110705 - DNA, 25 bp, Homo sapien
tgccctggagaaggcatcttgtaac

SEQ ID NO: 4110706 - DNA, 25 bp, Homo sapien
tcaaggcatgctggatctgccctgg

SEQ ID NO: 4110707 - DNA, 25 bp, Homo sapien
tgatggacgtgtccacctcgtgcat

SEQ ID NO: 4110708 - DNA, 25 bp, Homo sapien
cctcgtgcatcagtggcaccatcag

SEQ ID NO: 4110709 - DNA, 25 bp, Homo sapien
tcagcacgagggtgttgtcatgcag

SEQ ID NO: 4110710 - DNA, 25 bp, Homo sapien
tcatgcagggattcagagcgctccg

SEQ ID NO: 4110711 - DNA, 25 bp, Homo sapien
ctgaaagaggaaagcatgaaatctg

SEQ ID NO: 4110712 - DNA, 25 bp, Homo sapien
aagaggaaagcatgaaatctgtcat

SEQ ID NO: 4110713 - DNA, 25 bp, Homo sapien
gaaagaggaaagcatgaaatctgtc

SEQ ID NO: 4110714 - DNA, 25 bp, Homo sapien
tgaaagaggaaagcatgaaatctgt

SEQ ID NO: 4110715 - DNA, 25 bp, Homo sapien
cacggactcgccatatacaaaggag

SEQ ID NO: 4110716 - DNA, 25 bp, Homo sapien
gaagttggctgcgtccacggactcg

SEQ ID NO: 4110717 - DNA, 25 bp, Homo sapien
tccagctgaatgaagttggctgcgt

SEQ ID NO: 4110718 - DNA, 25 bp, Homo sapien
tacaaaggaggttggagacatgatt

SEQ ID NO: 4110719 - DNA, 25 bp, Homo sapien
cattcatgacgtggacctgtccttc

SEQ ID NO: 4110720 - DNA, 25 bp, Homo sapien
tggcattcatgacgtggacctgtcc

SEQ ID NO: 4110721 - DNA, 25 bp, Homo sapien
aaaactggcattcatgacgtggacc

SEQ ID NO: 4110722 - DNA, 25 bp, Homo sapien
gggaaaactggcattcatgacgtgg

SEQ ID NO: 4110723 - DNA, 25 bp, Homo sapien
ttgcccttaacttgtgtgtttataa

SEQ ID NO: 4110724 - DNA, 25 bp, Homo sapien
tgtgctcaatacgtacattaatttt

SEQ ID NO: 4110725 - DNA, 25 bp, Homo sapien
tgctcaatacgtacattaattttct

SEQ ID NO: 4110726 - DNA, 25 bp, Homo sapien
ccttaacttgtgtgtttataacaat

SEQ ID NO: 4110727 - DNA, 25 bp, Homo sapien
tgcttcagttggacccaggtatctt

SEQ ID NO: 4110728 - DNA, 25 bp, Homo sapien
tcagttggacccaggtatctttctg

SEQ ID NO: 4110729 - DNA, 25 bp, Homo sapien
tggtgcttcagttggacccaggtat

SEQ ID NO: 4110730 - DNA, 25 bp, Homo sapien
ttggacccaggtatctttctgtttg

SEQ ID NO: 4110731 - DNA, 25 bp, Homo sapien
gaaacatctctgcaccaccagatga

SEQ ID NO: 4110732 - DNA, 25 bp, Homo sapien
cagatgagagtcgattagggaaaga

SEQ ID NO: 4110733 - DNA, 25 bp, Homo sapien
gggtgcttgggccagtgttgtagac

SEQ ID NO: 4110734 - DNA, 25 bp, Homo sapien
caccaccagatgagagtcgattagg

SEQ ID NO: 4110735 - DNA, 25 bp, Homo sapien
gacctgttctacattcaacattcac

SEQ ID NO: 4110736 - DNA, 25 bp, Homo sapien
gatgttaacatctgagctggcatct

SEQ ID NO: 4110737 - DNA, 25 bp, Homo sapien
catctcgggaggagtgacctgttct

SEQ ID NO: 4110738 - DNA, 25 bp, Homo sapien
acatcatgagggatgttaacatctg

SEQ ID NO: 4110739 - DNA, 25 bp, Homo sapien
ggtgcggaacactggcggctttctt

SEQ ID NO: 4110740 - DNA, 25 bp, Homo sapien
agttccaaccatagtacatcatagg

SEQ ID NO: 4110741 - DNA, 25 bp, Homo sapien
tacatcataggtgcggaacactggc

SEQ ID NO: 4110742 - DNA, 25 bp, Homo sapien
catagtacatcataggtgcggaaca

SEQ ID NO: 4110743 - DNA, 25 bp, Homo sapien
ggaagagaacactcctagatgctgg

SEQ ID NO: 4110744 - DNA, 25 bp, Homo sapien
tgagggtccactcagccagaacgat

SEQ ID NO: 4110745 - DNA, 25 bp, Homo sapien
catcctagggccaagtctgttacag

SEQ ID NO: 4110746 - DNA, 25 bp, Homo sapien
caggcagttgtccaggtcttcagga

SEQ ID NO: 4110747 - DNA, 25 bp, Homo sapien
caaagccttgagctaattggtacat

SEQ ID NO: 4110748 - DNA, 25 bp, Homo sapien
tgaatgccttacattctgggtaact

SEQ ID NO: 4110749 - DNA, 25 bp, Homo sapien
agagtgtctttagggcatttaatcc

SEQ ID NO: 4110750 - DNA, 25 bp, Homo sapien
gtggactaaatctttaacactctga

SEQ ID NO: 4110751 - DNA, 25 bp, Homo sapien
agcttgctgcaggtttgtctatttt

SEQ ID NO: 4110752 - DNA, 25 bp, Homo sapien
tgctaatgtggaatacttttgttgt

SEQ ID NO: 4110753 - DNA, 25 bp, Homo sapien
gtgttgttttttggcatcatcgctc

SEQ ID NO: 4110754 - DNA, 25 bp, Homo sapien
gctttgtctttaataataccttcat

SEQ ID NO: 4110755 - DNA, 25 bp, Homo sapien
gcccggccctcaatttgcaatttat

SEQ ID NO: 4110756 - DNA, 25 bp, Homo sapien
gcgcccggccctcaatttgcaattt

SEQ ID NO: 4110757 - DNA, 25 bp, Homo sapien
atctgttttcaaagtgagtttggct

SEQ ID NO: 4110758 - DNA, 25 bp, Homo sapien
caaagtgagtttggctcactgcttc

SEQ ID NO: 4110759 - DNA, 25 bp, Homo sapien
tctcttcatcttaaccaacaatgga

SEQ ID NO: 4110760 - DNA, 25 bp, Homo sapien
tgattaccagtgaggctaggcatct

SEQ ID NO: 4110761 - DNA, 25 bp, Homo sapien
gtcaaattgcctttcataccagcag

SEQ ID NO: 4110762 - DNA, 25 bp, Homo sapien
ccagcagtatttgaaagtgctcatt

SEQ ID NO: 4110763 - DNA, 25 bp, Homo sapien
cttctctacatgagggaactaggca

SEQ ID NO: 4110764 - DNA, 25 bp, Homo sapien
gcaaagaggacaccctaggatggga

SEQ ID NO: 4110765 - DNA, 25 bp, Homo sapien
gttctcagatagtaaaccaggtcct

SEQ ID NO: 4110766 - DNA, 25 bp, Homo sapien
cataacaagggatttgagggatacc

SEQ ID NO: 4110767 - DNA, 25 bp, Homo sapien
ttttaacaggcagaagcatagatgc

SEQ ID NO: 4110768 - DNA, 25 bp, Homo sapien
gtacgaaccccatcagctggctggg

SEQ ID NO: 4110769 - DNA, 25 bp, Homo sapien
cctctaccagtttgccattttacca

SEQ ID NO: 4110770 - DNA, 25 bp, Homo sapien
attttaccagtacgaaccccatcag

SEQ ID NO: 4110771 - DNA, 25 bp, Homo sapien
aatgactcctgcctagaccatggga

SEQ ID NO: 4110772 - DNA, 25 bp, Homo sapien
tggaaggcagctgcgagatcatgca

SEQ ID NO: 4110773 - DNA, 25 bp, Homo sapien
ccttgtggcctcagctgacagataa

SEQ ID NO: 4110774 - DNA, 25 bp, Homo sapien
gagaagaggcctattctgcacagtc

SEQ ID NO: 4110775 - DNA, 25 bp, Homo sapien
gaagtggagaacaatggctgaaaag

SEQ ID NO: 4110776 - DNA, 25 bp, Homo sapien
tgaagtggagaacaatggctgaaaa

SEQ ID NO: 4110777 - DNA, 25 bp, Homo sapien
tgagggatgatgcagggagttgggt

SEQ ID NO: 4110778 - DNA, 25 bp, Homo sapien
tcttgttcttgagggatgatgcagg

SEQ ID NO: 4110779 - DNA, 25 bp, Homo sapien
aagcaaatattgtgtggaagatatt

SEQ ID NO: 4110780 - DNA, 25 bp, Homo sapien
ttcttgagggatgatgcagggagtt

SEQ ID NO: 4110781 - DNA, 25 bp, Homo sapien
gaaacctcagactgaaaattaggag

SEQ ID NO: 4110782 - DNA, 25 bp, Homo sapien
cttggtgggttgcaaagatttatcc

SEQ ID NO: 4110783 - DNA, 25 bp, Homo sapien
gaaaactggtgtcttccgagtgagg

SEQ ID NO: 4110784 - DNA, 25 bp, Homo sapien
aattaggagttgaccacagtctgtg

SEQ ID NO: 4110785 - DNA, 25 bp, Homo sapien
tctatagtacgactttcttctttag

SEQ ID NO: 4110786 - DNA, 25 bp, Homo sapien
gctgttaggcaagaaattcctggtt

SEQ ID NO: 4110787 - DNA, 25 bp, Homo sapien
tgtaaatgtctatagtacgactttc

SEQ ID NO: 4110788 - DNA, 25 bp, Homo sapien
tagcaagagcactaaagttacagtg

SEQ ID NO: 4110789 - DNA, 25 bp, Homo sapien
tcaccagggctctatggacagtggc

SEQ ID NO: 4110790 - DNA, 25 bp, Homo sapien
tgaagaatacaaacaggacaggtac

SEQ ID NO: 4110791 - DNA, 25 bp, Homo sapien
caggcaataaaactgtctgcagcac

SEQ ID NO: 4110792 - DNA, 25 bp, Homo sapien
agtggcaagtatggcacaggcaata

SEQ ID NO: 4110793 - DNA, 25 bp, Homo sapien
ttcaccttggcgcgggacatgaact

SEQ ID NO: 4110794 - DNA, 25 bp, Homo sapien
accttggcgcgggacatgaactgga

SEQ ID NO: 4110795 - DNA, 25 bp, Homo sapien
caccttcaccttggcgcgggacatg

SEQ ID NO: 4110796 - DNA, 25 bp, Homo sapien
ccttggcgcgggacatgaactggat

SEQ ID NO: 4110797 - DNA, 25 bp, Homo sapien
tgctcaccaaaaacggacaggactg

SEQ ID NO: 4110798 - DNA, 25 bp, Homo sapien
tgagtagggaatgcccaacccctca

SEQ ID NO: 4110799 - DNA, 25 bp, Homo sapien
gactccctgatgttctcatctcttg

SEQ ID NO: 4110800 - DNA, 25 bp, Homo sapien
tcctcactgagtagggaatgcccaa

SEQ ID NO: 4110801 - DNA, 25 bp, Homo sapien
gaccctaagtagtaaatgacccagc

SEQ ID NO: 4110802 - DNA, 25 bp, Homo sapien
cattaaaattagtgcctggcctgag

SEQ ID NO: 4110803 - DNA, 25 bp, Homo sapien
caactccaaatatctgacctgccag

SEQ ID NO: 4110804 - DNA, 25 bp, Homo sapien
cattctaaacctctcatgttgggca

SEQ ID NO: 4110805 - DNA, 25 bp, Homo sapien
cttgcttgccatgttgaaagatgcc

SEQ ID NO: 4110806 - DNA, 25 bp, Homo sapien
tgcctctagaagcagtacaccaaag

SEQ ID NO: 4110807 - DNA, 25 bp, Homo sapien
agggatagctgtgtccagtgtccag

SEQ ID NO: 4110808 - DNA, 25 bp, Homo sapien
gcctgactccagagcacgaggtaga

SEQ ID NO: 4110809 - DNA, 25 bp, Homo sapien
agaaaatgagaccacctctacttca

SEQ ID NO: 4110810 - DNA, 25 bp, Homo sapien
gaaaatgagaccacctctacttcat

SEQ ID NO: 4110811 - DNA, 25 bp, Homo sapien
aagaaaatgagaccacctctacttc

SEQ ID NO: 4110812 - DNA, 25 bp, Homo sapien
tagccacggggctccagattgtgca

SEQ ID NO: 4110813 - DNA, 25 bp, Homo sapien
gatgaggattcccaccaacaaactg

SEQ ID NO: 4110814 - DNA, 25 bp, Homo sapien
agattgtgcagggcctcgaagacca

SEQ ID NO: 4110815 - DNA, 25 bp, Homo sapien
caacaaactgatggcgatgatccac

SEQ ID NO: 4110816 - DNA, 25 bp, Homo sapien
gatgggctttcttgaaggccgccag

SEQ ID NO: 4110817 - DNA, 25 bp, Homo sapien
tcattgtggattttgtgtcagagcc

SEQ ID NO: 4110818 - DNA, 25 bp, Homo sapien
tgccgccaagcatgagaagatgcct

SEQ ID NO: 4110819 - DNA, 25 bp, Homo sapien
gattttgtgtcagagccagggcctg

SEQ ID NO: 4110820 - DNA, 25 bp, Homo sapien
gttgccaaaccttacacattctctg

SEQ ID NO: 4110821 - DNA, 25 bp, Homo sapien
cagtgacctctggaggggttgccaa

SEQ ID NO: 4110822 - DNA, 25 bp, Homo sapien
gctgatagagggtttgaggcagccc

SEQ ID NO: 4110823 - DNA, 25 bp, Homo sapien
ttctgccttaggtcagaagtaatgc

SEQ ID NO: 4110824 - DNA, 25 bp, Homo sapien
tgcacaaaggtaccctatagtctag

SEQ ID NO: 4110825 - DNA, 25 bp, Homo sapien
tagtctagtggtggctctgtcaaac

SEQ ID NO: 4110826 - DNA, 25 bp, Homo sapien
gatcaatgggattctcagacctctt

SEQ ID NO: 4110827 - DNA, 25 bp, Homo sapien
catagtgtcttcgtctctgcctaag

SEQ ID NO: 4110828 - DNA, 25 bp, Homo sapien
taaccctgaggtgtacgttctacca

SEQ ID NO: 4110829 - DNA, 25 bp, Homo sapien
caaatcgtgaagcaaacccagctgt

SEQ ID NO: 4110830 - DNA, 25 bp, Homo sapien
gagcttgcctgcagaggtaaccagc

SEQ ID NO: 4110831 - DNA, 25 bp, Homo sapien
caaggctgactgtatcgggtgtaca

SEQ ID NO: 4110832 - DNA, 25 bp, Homo sapien
gaacgggcgtttcatcctgacccag

SEQ ID NO: 4110833 - DNA, 25 bp, Homo sapien
tgtttaaagcgtctgcaggtctgca

SEQ ID NO: 4110834 - DNA, 25 bp, Homo sapien
tctcacgtgagaggctgtttaaagc

SEQ ID NO: 4110835 - DNA, 25 bp, Homo sapien
cagtgaagcaacgtttgtagcccaa

SEQ ID NO: 4110836 - DNA, 25 bp, Homo sapien
tggaggacccctcggattagagaaa

SEQ ID NO: 4110837 - DNA, 25 bp, Homo sapien
ttggaggacccctcggattagagaa

SEQ ID NO: 4110838 - DNA, 25 bp, Homo sapien
cttggaggacccctcggattagaga

SEQ ID NO: 4110839 - DNA, 25 bp, Homo sapien
gcttggaggacccctcggattagag

SEQ ID NO: 4110840 - DNA, 25 bp, Homo sapien
ttccggttcttctcagcttcgataa

SEQ ID NO: 4110841 - DNA, 25 bp, Homo sapien
tttccggttcttctcagcttcgata

SEQ ID NO: 4110842 - DNA, 25 bp, Homo sapien
tccggttcttctcagcttcgataat

SEQ ID NO: 4110843 - DNA, 25 bp, Homo sapien
ccggttcttctcagcttcgataatt

SEQ ID NO: 4110844 - DNA, 25 bp, Homo sapien
ggcacctgggcttgatagaatgaag

SEQ ID NO: 4110845 - DNA, 25 bp, Homo sapien
gatacaaagaccaaggatgacaggc

SEQ ID NO: 4110846 - DNA, 25 bp, Homo sapien
tgtgacctggccgaagtggctgcct

SEQ ID NO: 4110847 - DNA, 25 bp, Homo sapien
tgagggttgaccatgcgtgttgcat

SEQ ID NO: 4110848 - DNA, 25 bp, Homo sapien
gaatctgcaatcaccactagctggg

SEQ ID NO: 4110849 - DNA, 25 bp, Homo sapien
tgtgacagctctatggcccacttgg

SEQ ID NO: 4110850 - DNA, 25 bp, Homo sapien
aaacgtttacatctcctctgggtgc

SEQ ID NO: 4110851 - DNA, 25 bp, Homo sapien
tagggttcaacaggtagcatacagc

SEQ ID NO: 4110852 - DNA, 25 bp, Homo sapien
ggaggccaaggactgcagacagttc

SEQ ID NO: 4110853 - DNA, 25 bp, Homo sapien
gttcatgtgaattagatggaccttg

SEQ ID NO: 4110854 - DNA, 25 bp, Homo sapien
gccacatcaggtgggttgttcatgt

SEQ ID NO: 4110855 - DNA, 25 bp, Homo sapien
cacatcaggtgggttgttcatgtga

SEQ ID NO: 4110856 - DNA, 25 bp, Homo sapien
caggaggttaggcatcctgtcacag

SEQ ID NO: 4110857 - DNA, 25 bp, Homo sapien
cgtcaggaagttaccgtagtatatg

SEQ ID NO: 4110858 - DNA, 25 bp, Homo sapien
acatggctacaagagtaacttctgg

SEQ ID NO: 4110859 - DNA, 25 bp, Homo sapien
gtcttgacagtttgcagatgccatg

SEQ ID NO: 4110860 - DNA, 25 bp, Homo sapien
catgctcactgtagaaaacgaatat

SEQ ID NO: 4110861 - DNA, 25 bp, Homo sapien
gacaatcattcttaacccattggtg

SEQ ID NO: 4110862 - DNA, 25 bp, Homo sapien
ccatcaggcaatagaagaaatttta

SEQ ID NO: 4110863 - DNA, 25 bp, Homo sapien
caaagcaaaagcctgacaatctcac

SEQ ID NO: 4110864 - DNA, 25 bp, Homo sapien
tactagtactcctggaggaccaagg

SEQ ID NO: 4110865 - DNA, 25 bp, Homo sapien
ttttcatggcctcgaagggttcagg

SEQ ID NO: 4110866 - DNA, 25 bp, Homo sapien
tagtcctgagcatgtggcaagcctt

SEQ ID NO: 4110867 - DNA, 25 bp, Homo sapien
gggctgcaacctcaacataagattc

SEQ ID NO: 4110868 - DNA, 25 bp, Homo sapien
gctggtgagggagtgcatatcatcc

SEQ ID NO: 4110869 - DNA, 25 bp, Homo sapien
gagcgttaccttgggaggccctgat

SEQ ID NO: 4110870 - DNA, 25 bp, Homo sapien
cagtgaccatgaacattagaggtgg

SEQ ID NO: 4110871 - DNA, 25 bp, Homo sapien
cagcgagagctgtgactatcagtag

SEQ ID NO: 4110872 - DNA, 25 bp, Homo sapien
ttccaggacctaagaagagggtgtg

SEQ ID NO: 4110873 - DNA, 25 bp, Homo sapien
tcaaatggaaccacacactgtgggt

SEQ ID NO: 4110874 - DNA, 25 bp, Homo sapien
gagtgacttggtacagcccttatag

SEQ ID NO: 4110875 - DNA, 25 bp, Homo sapien
gatcacgaaagtatgttccaggccc

SEQ ID NO: 4110876 - DNA, 25 bp, Homo sapien
gctaaaacttccaatactctgttga

SEQ ID NO: 4110877 - DNA, 25 bp, Homo sapien
caatactctgttgaataggagtagg

SEQ ID NO: 4110878 - DNA, 25 bp, Homo sapien
ccctggctaaaacttccaatactct

SEQ ID NO: 4110879 - DNA, 25 bp, Homo sapien
actctgttgaataggagtagggaga

SEQ ID NO: 4110880 - DNA, 25 bp, Homo sapien
gactatgcaagaccatatccatgtt

SEQ ID NO: 4110881 - DNA, 25 bp, Homo sapien
caattgcttctctcgtatggtgtga

SEQ ID NO: 4110882 - DNA, 25 bp, Homo sapien
tgagtcatagttggaaagcctttct

SEQ ID NO: 4110883 - DNA, 25 bp, Homo sapien
tcttttacagttagacctctgatcc

SEQ ID NO: 4110884 - DNA, 25 bp, Homo sapien
ggcatggaccctacaactttaggta

SEQ ID NO: 4110885 - DNA, 25 bp, Homo sapien
acactaacacggttctaaaagtcag

SEQ ID NO: 4110886 - DNA, 25 bp, Homo sapien
tcagaactacacagaaaggtatcct

SEQ ID NO: 4110887 - DNA, 25 bp, Homo sapien
tagttcctccacctctaatgagggt

SEQ ID NO: 4110888 - DNA, 25 bp, Homo sapien
gcttgacatgccaacaataacattt

SEQ ID NO: 4110889 - DNA, 25 bp, Homo sapien
ctccttcttacacagaaaagcttga

SEQ ID NO: 4110890 - DNA, 25 bp, Homo sapien
tcttacacagaaaagcttgacatgc

SEQ ID NO: 4110891 - DNA, 25 bp, Homo sapien
cagaaaagcttgacatgccaacaat

SEQ ID NO: 4110892 - DNA, 25 bp, Homo sapien
ggatggcgtaggaaatgattgtact

SEQ ID NO: 4110893 - DNA, 25 bp, Homo sapien
tggcgtaggaaatgattgtactgga

SEQ ID NO: 4110894 - DNA, 25 bp, Homo sapien
cgtaggaaatgattgtactggattt

SEQ ID NO: 4110895 - DNA, 25 bp, Homo sapien
caggatggcgtaggaaatgattgta

SEQ ID NO: 4110896 - DNA, 25 bp, Homo sapien
cctaagggtaatctggagccactga

SEQ ID NO: 4110897 - DNA, 25 bp, Homo sapien
ttaacctaagggtaatctggagcca

SEQ ID NO: 4110898 - DNA, 25 bp, Homo sapien
gggtaatctggagccactgagacct

SEQ ID NO: 4110899 - DNA, 25 bp, Homo sapien
tgaagaccaggttgagtttggaatt

SEQ ID NO: 4110900 - DNA, 25 bp, Homo sapien
agaagtaggacataatgacggagga

SEQ ID NO: 4110901 - DNA, 25 bp, Homo sapien
agtaggacataatgacggaggaaga

SEQ ID NO: 4110902 - DNA, 25 bp, Homo sapien
tgaggagaagtaggacataatgacg

SEQ ID NO: 4110903 - DNA, 25 bp, Homo sapien
aggagaagtaggacataatgacgga

SEQ ID NO: 4110904 - DNA, 25 bp, Homo sapien
cagttcctggatgagcggacttttt

SEQ ID NO: 4110905 - DNA, 25 bp, Homo sapien
tcctggatgagcggactttttcatc

SEQ ID NO: 4110906 - DNA, 25 bp, Homo sapien
gttcctggatgagcggactttttca

SEQ ID NO: 4110907 - DNA, 25 bp, Homo sapien
tcagttcctggatgagcggactttt

SEQ ID NO: 4110908 - DNA, 25 bp, Homo sapien
cggaagagcctttggcctgtggtca

SEQ ID NO: 4110909 - DNA, 25 bp, Homo sapien
tggtcagcccgcagacatcggtggt

SEQ ID NO: 4110910 - DNA, 25 bp, Homo sapien
ggcgagcctctccaaagtattaaag

SEQ ID NO: 4110911 - DNA, 25 bp, Homo sapien
tattaaaggacacttccggaagagc

SEQ ID NO: 4110912 - DNA, 25 bp, Homo sapien
agcaggcgaggccaaacaggatctt

SEQ ID NO: 4110913 - DNA, 25 bp, Homo sapien
tccagcaggcgaggccaaacaggat

SEQ ID NO: 4110914 - DNA, 25 bp, Homo sapien
ttcaggccttgcgggcatgtccagc

SEQ ID NO: 4110915 - DNA, 25 bp, Homo sapien
caggatctttctcacttccccacat

SEQ ID NO: 4110916 - DNA, 25 bp, Homo sapien
cgcgtcctgcgcttccaacttgcag

SEQ ID NO: 4110917 - DNA, 25 bp, Homo sapien
actgtcaggcctaggacgacggcca

SEQ ID NO: 4110918 - DNA, 25 bp, Homo sapien
gggactgtgcttgtgcaaggcagct

SEQ ID NO: 4110919 - DNA, 25 bp, Homo sapien
cgtgggagagacgacaaagtgcctc

SEQ ID NO: 4110920 - DNA, 25 bp, Homo sapien
caggttgttcggatgctggcgggac

SEQ ID NO: 4110921 - DNA, 25 bp, Homo sapien
ggtcctgaaggaccaacctcctgca

SEQ ID NO: 4110922 - DNA, 25 bp, Homo sapien
gcgggactcgcgtcagcattcggcc

SEQ ID NO: 4110923 - DNA, 25 bp, Homo sapien
tcctgcacgtgagggtgtcgtgact

SEQ ID NO: 4110924 - DNA, 25 bp, Homo sapien
ggagaggggagcggggccgacacag

SEQ ID NO: 4110925 - DNA, 25 bp, Homo sapien
tcgcctgctcgcctggtgggggaga

SEQ ID NO: 4110926 - DNA, 25 bp, Homo sapien
cgcctgctcgcctggtgggggagag

SEQ ID NO: 4110927 - DNA, 25 bp, Homo sapien
ccgcgcacggggaggcggagcggga

SEQ ID NO: 4110928 - DNA, 25 bp, Homo sapien
aggagcgagcgagggcgggagggcg

SEQ ID NO: 4110929 - DNA, 25 bp, Homo sapien
gagcgggaggcccggcgccgctgga

SEQ ID NO: 4110930 - DNA, 25 bp, Homo sapien
gcccggcgccgctggaagcgggagc

SEQ ID NO: 4110931 - DNA, 25 bp, Homo sapien
ccccccgcaagccaagcgcgcgggg

SEQ ID NO: 4110932 - DNA, 25 bp, Homo sapien
cgcaagccaagcgcgcgggggcgcg

SEQ ID NO: 4110933 - DNA, 25 bp, Homo sapien
cccgcaagccaagcgcgcgggggcg

SEQ ID NO: 4110934 - DNA, 25 bp, Homo sapien
cggccccccgcaagccaagcgcgcg

SEQ ID NO: 4110935 - DNA, 25 bp, Homo sapien
gggtgatgatggccgggccgtccat

SEQ ID NO: 4110936 - DNA, 25 bp, Homo sapien
ttctcgcccgcgcccggcaaccggc

SEQ ID NO: 4110937 - DNA, 25 bp, Homo sapien
tctcgcccgcgcccggcaaccggcc

SEQ ID NO: 4110938 - DNA, 25 bp, Homo sapien
ctttctcgcccgcgcccggcaaccg

SEQ ID NO: 4110939 - DNA, 25 bp, Homo sapien
gacgggcttgcccagtggcctctgc

SEQ ID NO: 4110940 - DNA, 25 bp, Homo sapien
ctgctggttccttccgtttttctga

SEQ ID NO: 4110941 - DNA, 25 bp, Homo sapien
ttttctgacgggcttgcccagtggc

SEQ ID NO: 4110942 - DNA, 25 bp, Homo sapien
tgctggttccttccgtttttctgac

SEQ ID NO: 4110943 - DNA, 25 bp, Homo sapien
tggagcactctcttgcagaattttt

SEQ ID NO: 4110944 - DNA, 25 bp, Homo sapien
cagccagggctccaagaactaacag

SEQ ID NO: 4110945 - DNA, 25 bp, Homo sapien
gcaaacctccttgatgcctccaacc

SEQ ID NO: 4110946 - DNA, 25 bp, Homo sapien
caaccaaacgctccctgagggcaca

SEQ ID NO: 4110947 - DNA, 25 bp, Homo sapien
ggagcacaggaagcaaacctccttg

SEQ ID NO: 4110948 - DNA, 25 bp, Homo sapien
tctttatcttgacattatcaaccaa

SEQ ID NO: 4110949 - DNA, 25 bp, Homo sapien
acattatcaaccaaatcaaacacaa

SEQ ID NO: 4110950 - DNA, 25 bp, Homo sapien
ctctttatcttgacattatcaacca

SEQ ID NO: 4110951 - DNA, 25 bp, Homo sapien
tcctctacgactttcttgttcctaa

SEQ ID NO: 4110952 - DNA, 25 bp, Homo sapien
tgtctactttgaacattggcagtca

SEQ ID NO: 4110953 - DNA, 25 bp, Homo sapien
aaggtttcacatgaagtagagcaca

SEQ ID NO: 4110954 - DNA, 25 bp, Homo sapien
accaagctgatgcatgaaaaggttt

SEQ ID NO: 4110955 - DNA, 25 bp, Homo sapien
tgtttctttgagcacaaatgaggtt

SEQ ID NO: 4110956 - DNA, 25 bp, Homo sapien
tgctgtttggctgaaccaatacctg

SEQ ID NO: 4110957 - DNA, 25 bp, Homo sapien
tagaacaggagctttcaatgtgtgg

SEQ ID NO: 4110958 - DNA, 25 bp, Homo sapien
cacctactgacacttaggatggttc

SEQ ID NO: 4110959 - DNA, 25 bp, Homo sapien
tacagctgtatgagtttgccaaaac

SEQ ID NO: 4110960 - DNA, 25 bp, Homo sapien
gacaaggatgcacatcaactagaag

SEQ ID NO: 4110961 - DNA, 25 bp, Homo sapien
gagataccactaaatacccactata

SEQ ID NO: 4110962 - DNA, 25 bp, Homo sapien
gcagcagtttgaacacttcaccaag

SEQ ID NO: 4110963 - DNA, 25 bp, Homo sapien
tagaaatttacattcagcagcccct

SEQ ID NO: 4110964 - DNA, 25 bp, Homo sapien
tcaggtacatgagggaaaagccatc

SEQ ID NO: 4110965 - DNA, 25 bp, Homo sapien
gaatcccgcataggaggctcaaaag

SEQ ID NO: 4110966 - DNA, 25 bp, Homo sapien
gaatgagagccctgatgagacaggc

SEQ ID NO: 4110967 - DNA, 25 bp, Homo sapien
aatgtttattaaacgctcatatact

SEQ ID NO: 4110968 - DNA, 25 bp, Homo sapien
taatattcatattaaccctataagg

SEQ ID NO: 4110969 - DNA, 25 bp, Homo sapien
taaccctataaggtattcactacca

SEQ ID NO: 4110970 - DNA, 25 bp, Homo sapien
tcactaccatgaaatcaaggctcag

SEQ ID NO: 4110971 - DNA, 25 bp, Homo sapien
cactagaatagttccatggtgtagc

SEQ ID NO: 4110972 - DNA, 25 bp, Homo sapien
gagggtccataagccactaacgtct

SEQ ID NO: 4110973 - DNA, 25 bp, Homo sapien
tcttaggctacaccagagggtccat

SEQ ID NO: 4110974 - DNA, 25 bp, Homo sapien
ttaagagcctccttagcacagtttc

SEQ ID NO: 4110975 - DNA, 25 bp, Homo sapien
agatgttatgttagtgttttccttt

SEQ ID NO: 4110976 - DNA, 25 bp, Homo sapien
gtagatgttatgttagtgttttcct

SEQ ID NO: 4110977 - DNA, 25 bp, Homo sapien
tagatgttatgttagtgttttcctt

SEQ ID NO: 4110978 - DNA, 25 bp, Homo sapien
agtagatgttatgttagtgttttcc

SEQ ID NO: 4110979 - DNA, 25 bp, Homo sapien
tccaaaagaattcctgtcacctccc

SEQ ID NO: 4110980 - DNA, 25 bp, Homo sapien
aaaagaattcctgtcacctccctgg

SEQ ID NO: 4110981 - DNA, 25 bp, Homo sapien
atcttcttctccaaaagaattcctg

SEQ ID NO: 4110982 - DNA, 25 bp, Homo sapien
tcttctccaaaagaattcctgtcac

SEQ ID NO: 4110983 - DNA, 25 bp, Homo sapien
tggtcattgtgatagggcagacatc

SEQ ID NO: 4110984 - DNA, 25 bp, Homo sapien
taaagtagggtatgggacctcgaca

SEQ ID NO: 4110985 - DNA, 25 bp, Homo sapien
caactggcataatctggatgggact

SEQ ID NO: 4110986 - DNA, 25 bp, Homo sapien
ctggatgggactggtcattgtgata

SEQ ID NO: 4110987 - DNA, 25 bp, Homo sapien
catccactcccaggaactcattcca

SEQ ID NO: 4110988 - DNA, 25 bp, Homo sapien
ctgggcctcatccactcccaggaac

SEQ ID NO: 4110989 - DNA, 25 bp, Homo sapien
tcccaggaactcattccacagcagc

SEQ ID NO: 4110990 - DNA, 25 bp, Homo sapien
cactcccaggaactcattccacagc

SEQ ID NO: 4110991 - DNA, 25 bp, Homo sapien
cttgaataagtcagtaacctggtgg

SEQ ID NO: 4110992 - DNA, 25 bp, Homo sapien
cctgtcctgacagtggtagtcgctt

SEQ ID NO: 4110993 - DNA, 25 bp, Homo sapien
ggtagtcgcttgacccattgtagct

SEQ ID NO: 4110994 - DNA, 25 bp, Homo sapien
taagtcagtaacctggtggcagcgg

SEQ ID NO: 4110995 - DNA, 25 bp, Homo sapien
acttgactggagaactggctggcta

SEQ ID NO: 4110996 - DNA, 25 bp, Homo sapien
caggcttgtatcagggaaactgtga

SEQ ID NO: 4110997 - DNA, 25 bp, Homo sapien
tgcattgacccacgagttgcccagg

SEQ ID NO: 4110998 - DNA, 25 bp, Homo sapien
cccaattctttggataacaggcttg

SEQ ID NO: 4110999 - DNA, 25 bp, Homo sapien
tctgccactcgtcttcttgcccttc

SEQ ID NO: 4111000 - DNA, 25 bp, Homo sapien
tctctttagcgagggttacacctgc

SEQ ID NO: 4111001 - DNA, 25 bp, Homo sapien
cgagggttacacctgccacccaggt

SEQ ID NO: 4111002 - DNA, 25 bp, Homo sapien
tccttctctctttagcgagggttac

SEQ ID NO: 4111003 - DNA, 25 bp, Homo sapien
tggctaatttacgcgtttttgtaga

SEQ ID NO: 4111004 - DNA, 25 bp, Homo sapien
taatcaaactatctaagatctctga

SEQ ID NO: 4111005 - DNA, 25 bp, Homo sapien
actatctaagatctctgagcctcag

SEQ ID NO: 4111006 - DNA, 25 bp, Homo sapien
tatacactcatcaaactacttctaa

SEQ ID NO: 4111007 - DNA, 25 bp, Homo sapien
tattgggataacagacctgagcacc

SEQ ID NO: 4111008 - DNA, 25 bp, Homo sapien
ccatcaatatgagactggtcagaca

SEQ ID NO: 4111009 - DNA, 25 bp, Homo sapien
caaacccagtggtctgtgctctcaa

SEQ ID NO: 4111010 - DNA, 25 bp, Homo sapien
tatattgcctactgagaatggagca

SEQ ID NO: 4111011 - DNA, 25 bp, Homo sapien
tgctctgtaaactgggacaattcac

SEQ ID NO: 4111012 - DNA, 25 bp, Homo sapien
tgtgtagccacaagagatgatcatt

SEQ ID NO: 4111013 - DNA, 25 bp, Homo sapien
cactcacatgttgctggttgctctg

SEQ ID NO: 4111014 - DNA, 25 bp, Homo sapien
gagtaacgtgccaaagactatgaag

SEQ ID NO: 4111015 - DNA, 25 bp, Homo sapien
aattgggccgtaatctctggaatgc

SEQ ID NO: 4111016 - DNA, 25 bp, Homo sapien
tctggaatgcatcccagggccgtgg

SEQ ID NO: 4111017 - DNA, 25 bp, Homo sapien
gcagtagtccctccagcagtgacaa

SEQ ID NO: 4111018 - DNA, 25 bp, Homo sapien
taacaatggtcaggagggattctgc

SEQ ID NO: 4111019 - DNA, 25 bp, Homo sapien
tgccccctttacgtttccactgata

SEQ ID NO: 4111020 - DNA, 25 bp, Homo sapien
ttttcccagtagaacgctcctgctg

SEQ ID NO: 4111021 - DNA, 25 bp, Homo sapien
tccactgataagacacatgagaggt

SEQ ID NO: 4111022 - DNA, 25 bp, Homo sapien
actcaaaaccggaggaggcccatgt

SEQ ID NO: 4111023 - DNA, 25 bp, Homo sapien
tgtcatagagtaccagccatctcat

SEQ ID NO: 4111024 - DNA, 25 bp, Homo sapien
aagatgagcttcagaaccataaatc

SEQ ID NO: 4111025 - DNA, 25 bp, Homo sapien
taaagatgagcttcagaaccataaa

SEQ ID NO: 4111026 - DNA, 25 bp, Homo sapien
cttgggtgcctgtcatagagtacca

SEQ ID NO: 4111027 - DNA, 25 bp, Homo sapien
catgccatgcctgggcggatcagtg

SEQ ID NO: 4111028 - DNA, 25 bp, Homo sapien
ctgggcggatcagtggtgcactgag

SEQ ID NO: 4111029 - DNA, 25 bp, Homo sapien
gcctgggcggatcagtggtgcactg

SEQ ID NO: 4111030 - DNA, 25 bp, Homo sapien
cacatgccatgcctgggcggatcag

SEQ ID NO: 4111031 - DNA, 25 bp, Homo sapien
ccaccagtggcggaagcacactggg

SEQ ID NO: 4111032 - DNA, 25 bp, Homo sapien
gagctaaggatgctgcggctcctct

SEQ ID NO: 4111033 - DNA, 25 bp, Homo sapien
cacattgtaatcacggaagcagcag

SEQ ID NO: 4111034 - DNA, 25 bp, Homo sapien
ctttaagctgacgttgcactgggag

SEQ ID NO: 4111035 - DNA, 25 bp, Homo sapien
ggactcagggacacgtaagcatttt

SEQ ID NO: 4111036 - DNA, 25 bp, Homo sapien
tacattcgagtgtttgtccaaggac

SEQ ID NO: 4111037 - DNA, 25 bp, Homo sapien
tgtgcaggtcagtctatgaggctct

SEQ ID NO: 4111038 - DNA, 25 bp, Homo sapien
gacctcatgggactatacattcgag

SEQ ID NO: 4111039 - DNA, 25 bp, Homo sapien
tgatgacaggtatattcttggaaat

SEQ ID NO: 4111040 - DNA, 25 bp, Homo sapien
tcatacagctgaatttgtcaaacca

SEQ ID NO: 4111041 - DNA, 25 bp, Homo sapien
tcaaaccaatctgatgtagtcttgg

SEQ ID NO: 4111042 - DNA, 25 bp, Homo sapien
aaaatcattcctatttgatgacagg

SEQ ID NO: 4111043 - DNA, 25 bp, Homo sapien
gcatagatacttaaggactcagcag

SEQ ID NO: 4111044 - DNA, 25 bp, Homo sapien
taaatatgcagggtggatggaaccc

SEQ ID NO: 4111045 - DNA, 25 bp, Homo sapien
gatggtggcaatggctgctaaccca

SEQ ID NO: 4111046 - DNA, 25 bp, Homo sapien
tctgcttccacatctaataggcctg

SEQ ID NO: 4111047 - DNA, 25 bp, Homo sapien
cacaggtgcaccttcagaacacact

SEQ ID NO: 4111048 - DNA, 25 bp, Homo sapien
gaacacactttcgatgagatgagca

SEQ ID NO: 4111049 - DNA, 25 bp, Homo sapien
gacgcgcaagatcacaacaatgcag

SEQ ID NO: 4111050 - DNA, 25 bp, Homo sapien
tctctccccgtctagtgacaatcag

SEQ ID NO: 4111051 - DNA, 25 bp, Homo sapien
cattctgggctggataactctgtcg

SEQ ID NO: 4111052 - DNA, 25 bp, Homo sapien
tacctggctgggtcacttcagagta

SEQ ID NO: 4111053 - DNA, 25 bp, Homo sapien
gtaatacgcactgtacccaagagat

SEQ ID NO: 4111054 - DNA, 25 bp, Homo sapien
aactctgtcgtgagggatgtcctat

SEQ ID NO: 4111055 - DNA, 25 bp, Homo sapien
tgggaatgacctgcctctggtcacc

SEQ ID NO: 4111056 - DNA, 25 bp, Homo sapien
accgcacccggccaccatgcccagt

SEQ ID NO: 4111057 - DNA, 25 bp, Homo sapien
gcccacctcggcctcagtgggatta

SEQ ID NO: 4111058 - DNA, 25 bp, Homo sapien
cacctcggcctcagtgggattacag

SEQ ID NO: 4111059 - DNA, 25 bp, Homo sapien
caccgcacccggccaccatgcccag

SEQ ID NO: 4111060 - DNA, 25 bp, Homo sapien
catcaaagatctgccaaaagtggtt

SEQ ID NO: 4111061 - DNA, 25 bp, Homo sapien
cagcccatgggtaagaattctttgg

SEQ ID NO: 4111062 - DNA, 25 bp, Homo sapien
tgtttcctaaatgcacacagcttcc

SEQ ID NO: 4111063 - DNA, 25 bp, Homo sapien
cagtaagtaaaacccctcatggtgc

SEQ ID NO: 4111064 - DNA, 25 bp, Homo sapien
aagaaagagcctttatggcctccca

SEQ ID NO: 4111065 - DNA, 25 bp, Homo sapien
ttggagacaggcacgaaattcgagg

SEQ ID NO: 4111066 - DNA, 25 bp, Homo sapien
caatgatcaccttggcagacagaga

SEQ ID NO: 4111067 - DNA, 25 bp, Homo sapien
tccaacgtcatccagaagaaagagc

SEQ ID NO: 4111068 - DNA, 25 bp, Homo sapien
gcaggtgactcaaatctcgtgataa

SEQ ID NO: 4111069 - DNA, 25 bp, Homo sapien
cataaaatgctaggtatctctggcc

SEQ ID NO: 4111070 - DNA, 25 bp, Homo sapien
tgaagacaaactataggcccaccag

SEQ ID NO: 4111071 - DNA, 25 bp, Homo sapien
cagcataatgcagtccagagttacc

SEQ ID NO: 4111072 - DNA, 25 bp, Homo sapien
tttctttccatagtcaagcaccgtc

SEQ ID NO: 4111073 - DNA, 25 bp, Homo sapien
tctaaatcaatgaccacacatttct

SEQ ID NO: 4111074 - DNA, 25 bp, Homo sapien
gcaccgtcacctctggaagaaggta

SEQ ID NO: 4111075 - DNA, 25 bp, Homo sapien
gaactgtgcaccaatgtttcatcta

SEQ ID NO: 4111076 - DNA, 25 bp, Homo sapien
ccatcgatttcaaccggaacaataa

SEQ ID NO: 4111077 - DNA, 25 bp, Homo sapien
tcaaccggaacaataaaatcagcat

SEQ ID NO: 4111078 - DNA, 25 bp, Homo sapien
tatagttccatcgatttcaaccgga

SEQ ID NO: 4111079 - DNA, 25 bp, Homo sapien
ctgatgtatagttccatcgatttca

SEQ ID NO: 4111080 - DNA, 25 bp, Homo sapien
cattgaaaatggacactttttcccg

SEQ ID NO: 4111081 - DNA, 25 bp, Homo sapien
tcatagcagcctgcggatccgaaaa

SEQ ID NO: 4111082 - DNA, 25 bp, Homo sapien
cgatgcaggaatgataagatcagtc

SEQ ID NO: 4111083 - DNA, 25 bp, Homo sapien
ttttcccgagagtccaccataagtg

SEQ ID NO: 4111084 - DNA, 25 bp, Homo sapien
aggcccattgggacctgcacagcct

SEQ ID NO: 4111085 - DNA, 25 bp, Homo sapien
caagaataggcccattgggacctgc

SEQ ID NO: 4111086 - DNA, 25 bp, Homo sapien
taaccaagaataggcccattgggac

SEQ ID NO: 4111087 - DNA, 25 bp, Homo sapien
gcaagtaaccaagaataggcccatt

SEQ ID NO: 4111088 - DNA, 25 bp, Homo sapien
ggcttccttgtcagcttgggaagct

SEQ ID NO: 4111089 - DNA, 25 bp, Homo sapien
gggcttccttgtcagcttgggaagc

SEQ ID NO: 4111090 - DNA, 25 bp, Homo sapien
gaattgctacaaaggttcctgcctc

SEQ ID NO: 4111091 - DNA, 25 bp, Homo sapien
tattcagggccagcaaatggaaggg

SEQ ID NO: 4111092 - DNA, 25 bp, Homo sapien
cccaggtctatgcatagcaggcaga

SEQ ID NO: 4111093 - DNA, 25 bp, Homo sapien
gcccaaatgcccactgtaggaagaa

SEQ ID NO: 4111094 - DNA, 25 bp, Homo sapien
catgtggccgcttcagcacatacac

SEQ ID NO: 4111095 - DNA, 25 bp, Homo sapien
cctctggaggaactcgtccacatgt

SEQ ID NO: 4111096 - DNA, 25 bp, Homo sapien
gaggaactcgtccacatgtggccgc

SEQ ID NO: 4111097 - DNA, 25 bp, Homo sapien
actcgtccacatgtggccgcttcag

SEQ ID NO: 4111098 - DNA, 25 bp, Homo sapien
tgtggacacccagcttcaggtggct

SEQ ID NO: 4111099 - DNA, 25 bp, Homo sapien
tcagactggcaccatgcacatggcc

SEQ ID NO: 4111100 - DNA, 25 bp, Homo sapien
taagtgctccctgtcaccatggtaa

SEQ ID NO: 4111101 - DNA, 25 bp, Homo sapien
gggaacctgtcaccatagaaatggc

SEQ ID NO: 4111102 - DNA, 25 bp, Homo sapien
tttcaggtcttgacttcctctccca

SEQ ID NO: 4111103 - DNA, 25 bp, Homo sapien
tggagtactatgtgggattgcttga

SEQ ID NO: 4111104 - DNA, 25 bp, Homo sapien
tgtttccctcacagagtggagtact

SEQ ID NO: 4111105 - DNA, 25 bp, Homo sapien
cacactggctttgagtatggtcagg

SEQ ID NO: 4111106 - DNA, 25 bp, Homo sapien
ggaaaagacgtgtcacaatgaaggc

SEQ ID NO: 4111107 - DNA, 25 bp, Homo sapien
ctggaaaagacgtgtcacaatgaag

SEQ ID NO: 4111108 - DNA, 25 bp, Homo sapien
gaaaagacgtgtcacaatgaaggct

SEQ ID NO: 4111109 - DNA, 25 bp, Homo sapien
aaagacgtgtcacaatgaaggctgg

SEQ ID NO: 4111110 - DNA, 25 bp, Homo sapien
ccagcggtctaggaggtcagccaca

SEQ ID NO: 4111111 - DNA, 25 bp, Homo sapien
ctgaagagccgggcccggaacacac

SEQ ID NO: 4111112 - DNA, 25 bp, Homo sapien
tcacgtagttcccacgatgaaaaac

SEQ ID NO: 4111113 - DNA, 25 bp, Homo sapien
cccaaggcgactcaggtccttcacg

SEQ ID NO: 4111114 - DNA, 25 bp, Homo sapien
aaccaggcctccttagtctacaggg

SEQ ID NO: 4111115 - DNA, 25 bp, Homo sapien
catgaagtcctacgcagtagctggc

SEQ ID NO: 4111116 - DNA, 25 bp, Homo sapien
tggtcaatgacacgcaactgctaaa

SEQ ID NO: 4111117 - DNA, 25 bp, Homo sapien
tagctggctccaggaggttactgcc

SEQ ID NO: 4111118 - DNA, 25 bp, Homo sapien
cagatctgaccgtgacttgtgatta

SEQ ID NO: 4111119 - DNA, 25 bp, Homo sapien
ttttggatcccgattgaaatactcc

SEQ ID NO: 4111120 - DNA, 25 bp, Homo sapien
tgcacaacacttcgagatgataggg

SEQ ID NO: 4111121 - DNA, 25 bp, Homo sapien
catagtaaccaaagcaatgcatgga

SEQ ID NO: 4111122 - DNA, 25 bp, Homo sapien
aaaaatcgaatctaatcaagcagta

SEQ ID NO: 4111123 - DNA, 25 bp, Homo sapien
caagcagtagagctctaattacttg

SEQ ID NO: 4111124 - DNA, 25 bp, Homo sapien
tctggcctctatgatatattcttgc

SEQ ID NO: 4111125 - DNA, 25 bp, Homo sapien
aattacttgtttagaggatataagg

SEQ ID NO: 4111126 - DNA, 25 bp, Homo sapien
ttgcaagcagccaggtaagccacca

SEQ ID NO: 4111127 - DNA, 25 bp, Homo sapien
tatgggctagaagtaaagtatatcc

SEQ ID NO: 4111128 - DNA, 25 bp, Homo sapien
gcagcataagagaaagggatacaaa

SEQ ID NO: 4111129 - DNA, 25 bp, Homo sapien
tttagctctgccctgtagtatgggc

SEQ ID NO: 4111130 - DNA, 25 bp, Homo sapien
tataaaattggtgacacaaccacac

SEQ ID NO: 4111131 - DNA, 25 bp, Homo sapien
tgatgtcggaaccatgtaaatgtgt

SEQ ID NO: 4111132 - DNA, 25 bp, Homo sapien
tgtgtgtgtgtgacacagcgtcaca

SEQ ID NO: 4111133 - DNA, 25 bp, Homo sapien
aataaagaaatgactacgcctaggg

SEQ ID NO: 4111134 - DNA, 25 bp, Homo sapien
cagcaggactgcatctagcgctggg

SEQ ID NO: 4111135 - DNA, 25 bp, Homo sapien
taaggacgactggtgtcatcatcgt

SEQ ID NO: 4111136 - DNA, 25 bp, Homo sapien
gcactttctttagtaaggacgactg

SEQ ID NO: 4111137 - DNA, 25 bp, Homo sapien
aggcagcaggactgcatctagcgct

SEQ ID NO: 4111138 - DNA, 25 bp, Homo sapien
gcagcatgctgtacacgtcgtcctc

SEQ ID NO: 4111139 - DNA, 25 bp, Homo sapien
ccgtcatgtcatcgaaccaggactg

SEQ ID NO: 4111140 - DNA, 25 bp, Homo sapien
cgtgtccgtcatgtcatcgaaccag

SEQ ID NO: 4111141 - DNA, 25 bp, Homo sapien
agcagctccgtgtccgtcatgtcat

SEQ ID NO: 4111142 - DNA, 25 bp, Homo sapien
tgcagcatgccacaggttgtcagag

SEQ ID NO: 4111143 - DNA, 25 bp, Homo sapien
aacaaaacaggtaggcatggccaca

SEQ ID NO: 4111144 - DNA, 25 bp, Homo sapien
gcctggagcacggagtatcctcact

SEQ ID NO: 4111145 - DNA, 25 bp, Homo sapien
aggccagaggttccagagtgcacag

SEQ ID NO: 4111146 - DNA, 25 bp, Homo sapien
tattctgagcataggcacagtggca

SEQ ID NO: 4111147 - DNA, 25 bp, Homo sapien
gaccctgtccgagtttgtagcttag

SEQ ID NO: 4111148 - DNA, 25 bp, Homo sapien
tgtacccttcagtggccaatgccag

SEQ ID NO: 4111149 - DNA, 25 bp, Homo sapien
ggctgcaatgggatgggacacctct

SEQ ID NO: 4111150 - DNA, 25 bp, Homo sapien
cagaatgctggctgaagaccaaccc

SEQ ID NO: 4111151 - DNA, 25 bp, Homo sapien
atgctggctgaagaccaacccacag

SEQ ID NO: 4111152 - DNA, 25 bp, Homo sapien
ctttgacccccgatttccagtcttg

SEQ ID NO: 4111153 - DNA, 25 bp, Homo sapien
agaatgctggctgaagaccaaccca

SEQ ID NO: 4111154 - DNA, 25 bp, Homo sapien
cagtccacagaccaaagtgctgttg

SEQ ID NO: 4111155 - DNA, 25 bp, Homo sapien
gcagtccacagaccaaagtgctgtt

SEQ ID NO: 4111156 - DNA, 25 bp, Homo sapien
aagtgctgttgggaggatgtaattg

SEQ ID NO: 4111157 - DNA, 25 bp, Homo sapien
aggatgtaattggcagctggcttca

SEQ ID NO: 4111158 - DNA, 25 bp, Homo sapien
tatttgtggcatgggcagttctacc

SEQ ID NO: 4111159 - DNA, 25 bp, Homo sapien
gaagtgtctggctcaagtctgccaa

SEQ ID NO: 4111160 - DNA, 25 bp, Homo sapien
taacatcatagtgggctgcagtcca

SEQ ID NO: 4111161 - DNA, 25 bp, Homo sapien
gacaagtcagcatcattagggcatc

SEQ ID NO: 4111162 - DNA, 25 bp, Homo sapien
ttcactcttctcgaaccctggcatg

SEQ ID NO: 4111163 - DNA, 25 bp, Homo sapien
acgtaggattgtttgaccatagggc

SEQ ID NO: 4111164 - DNA, 25 bp, Homo sapien
gcaagtacgtcaagccattcactct

SEQ ID NO: 4111165 - DNA, 25 bp, Homo sapien
caggaacagacatgatcaaagttac

SEQ ID NO: 4111166 - DNA, 25 bp, Homo sapien
cctggaaacgtgcacattccgcatg

SEQ ID NO: 4111167 - DNA, 25 bp, Homo sapien
aagtaatgctggattgtttatcaca

SEQ ID NO: 4111168 - DNA, 25 bp, Homo sapien
tttgattgacaatactcgcccctgg

SEQ ID NO: 4111169 - DNA, 25 bp, Homo sapien
cattccgcatgtagcatttcctaag

SEQ ID NO: 4111170 - DNA, 25 bp, Homo sapien
gcttcatcgggcaatcatcttggcc

SEQ ID NO: 4111171 - DNA, 25 bp, Homo sapien
tgcatgtacagagggactgggttca

SEQ ID NO: 4111172 - DNA, 25 bp, Homo sapien
gaatgtctcactgcgagaaactgcc

SEQ ID NO: 4111173 - DNA, 25 bp, Homo sapien
gttcagggcactggcgacagaatgt

SEQ ID NO: 4111174 - DNA, 25 bp, Homo sapien
ttcccctctcactccacctgtctcc

SEQ ID NO: 4111175 - DNA, 25 bp, Homo sapien
agcagagcttgggccttcactcctg

SEQ ID NO: 4111176 - DNA, 25 bp, Homo sapien
cttcaggcctctaaatggcagcagg

SEQ ID NO: 4111177 - DNA, 25 bp, Homo sapien
tgggccttcactcctgtttgttttc

SEQ ID NO: 4111178 - DNA, 25 bp, Homo sapien
ctaagtcaccaatgcccgctgtcaa

SEQ ID NO: 4111179 - DNA, 25 bp, Homo sapien
ggcaatggctctttcctaagtcacc

SEQ ID NO: 4111180 - DNA, 25 bp, Homo sapien
gctgtcaaccaagcggcagtcagtt

SEQ ID NO: 4111181 - DNA, 25 bp, Homo sapien
aagcggcagtcagttcagtcaccat

SEQ ID NO: 4111182 - DNA, 25 bp, Homo sapien
cctggcacggggccagtctctgcct

SEQ ID NO: 4111183 - DNA, 25 bp, Homo sapien
tggaaactgctcccgcgccttcgcc

SEQ ID NO: 4111184 - DNA, 25 bp, Homo sapien
ctcccgcgccttcgccctgcctgtg

SEQ ID NO: 4111185 - DNA, 25 bp, Homo sapien
gtgggcagtgctaggcctggcacgg

SEQ ID NO: 4111186 - DNA, 25 bp, Homo sapien
gctcagtttccatggagcagggagt

SEQ ID NO: 4111187 - DNA, 25 bp, Homo sapien
ggcaacacccaacatgtagccaaag

SEQ ID NO: 4111188 - DNA, 25 bp, Homo sapien
tgtggcaacacccaacatgtagcca

SEQ ID NO: 4111189 - DNA, 25 bp, Homo sapien
caacacccaacatgtagccaaagaa

SEQ ID NO: 4111190 - DNA, 25 bp, Homo sapien
cactgtggcaacacccaacatgtag

SEQ ID NO: 4111191 - DNA, 25 bp, Homo sapien
tttattaggagggctctgtaaacac

SEQ ID NO: 4111192 - DNA, 25 bp, Homo sapien
aaatgtcagcacacagactatgaag

SEQ ID NO: 4111193 - DNA, 25 bp, Homo sapien
tcagattctgcagcaagtgacaggc

SEQ ID NO: 4111194 - DNA, 25 bp, Homo sapien
cagattaggcataaacacttgacaa

SEQ ID NO: 4111195 - DNA, 25 bp, Homo sapien
tgggaggcccttgctgatgtccatc

SEQ ID NO: 4111196 - DNA, 25 bp, Homo sapien
ccaggcaggaatatgggacgacaca

SEQ ID NO: 4111197 - DNA, 25 bp, Homo sapien
ggacgacacaaggaacaacagccag

SEQ ID NO: 4111198 - DNA, 25 bp, Homo sapien
cagagatccatatgtggaggcctcc

SEQ ID NO: 4111199 - DNA, 25 bp, Homo sapien
gtggaggatgacatagcagtgttcc

SEQ ID NO: 4111200 - DNA, 25 bp, Homo sapien
gatgacatagcagtgttcctcaaaa

SEQ ID NO: 4111201 - DNA, 25 bp, Homo sapien
ggatgacatagcagtgttcctcaaa

SEQ ID NO: 4111202 - DNA, 25 bp, Homo sapien
gaggatgacatagcagtgttcctca

SEQ ID NO: 4111203 - DNA, 25 bp, Homo sapien
ctagggtccgggtgtttgtgtatat

SEQ ID NO: 4111204 - DNA, 25 bp, Homo sapien
tgtgtatatgtgttgcggggaagac

SEQ ID NO: 4111205 - DNA, 25 bp, Homo sapien
gggaggatgtaccaagggccatggg

SEQ ID NO: 4111206 - DNA, 25 bp, Homo sapien
gaagacggaggtgcgggtggagaag

SEQ ID NO: 4111207 - DNA, 25 bp, Homo sapien
attcccgggcggaagtagctgcaga

SEQ ID NO: 4111208 - DNA, 25 bp, Homo sapien
gctcgtcctgtaggcgctgctggaa

SEQ ID NO: 4111209 - DNA, 25 bp, Homo sapien
ccagtagtgcaggtcgctggacgcc

SEQ ID NO: 4111210 - DNA, 25 bp, Homo sapien
tagctgcagaagcagtcggactcgt

SEQ ID NO: 4111211 - DNA, 25 bp, Homo sapien
ttgaacaagttggtctccacatgct

SEQ ID NO: 4111212 - DNA, 25 bp, Homo sapien
cacgtgcttcctccctttgatgtgc

SEQ ID NO: 4111213 - DNA, 25 bp, Homo sapien
agacacgtgcttcctccctttgatg

SEQ ID NO: 4111214 - DNA, 25 bp, Homo sapien
tgaggtcagatgctaggcctccctt

SEQ ID NO: 4111215 - DNA, 25 bp, Homo sapien
ctaggtccagcaggaagatgtcacc

SEQ ID NO: 4111216 - DNA, 25 bp, Homo sapien
cccttattaaagctgttccaggaga

SEQ ID NO: 4111217 - DNA, 25 bp, Homo sapien
gcaggaagatgtcacccttattaaa

SEQ ID NO: 4111218 - DNA, 25 bp, Homo sapien
gaagatgtcacccttattaaagctg

SEQ ID NO: 4111219 - DNA, 25 bp, Homo sapien
tggtcttgggcccattccactgaat

SEQ ID NO: 4111220 - DNA, 25 bp, Homo sapien
gctggtcttgggcccattccactga

SEQ ID NO: 4111221 - DNA, 25 bp, Homo sapien
ctggtcttgggcccattccactgaa

SEQ ID NO: 4111222 - DNA, 25 bp, Homo sapien
tcatcatccaccacaccaatctgtg

SEQ ID NO: 4111223 - DNA, 25 bp, Homo sapien
ccctgtcccggaggctgtaggtcaa

SEQ ID NO: 4111224 - DNA, 25 bp, Homo sapien
tggtacaggcgaacattggccttct

SEQ ID NO: 4111225 - DNA, 25 bp, Homo sapien
ctccatgatctgcatgaggtccggg

SEQ ID NO: 4111226 - DNA, 25 bp, Homo sapien
gtcagtgggggggtcgccaactcca

SEQ ID NO: 4111227 - DNA, 25 bp, Homo sapien
cagtgggggggtcgccaactccagg

SEQ ID NO: 4111228 - DNA, 25 bp, Homo sapien
tcagtgggggggtcgccaactccag

SEQ ID NO: 4111229 - DNA, 25 bp, Homo sapien
cacagcccggctgaaggcagccttt

SEQ ID NO: 4111230 - DNA, 25 bp, Homo sapien
cagcccggctgaaggcagcctttct

SEQ ID NO: 4111231 - DNA, 25 bp, Homo sapien
tggaggctagacatgcgtccctgcc

SEQ ID NO: 4111232 - DNA, 25 bp, Homo sapien
ctgccacacatagatcttgaagcca

SEQ ID NO: 4111233 - DNA, 25 bp, Homo sapien
gaagagctgcttgaacgcggccgac

SEQ ID NO: 4111234 - DNA, 25 bp, Homo sapien
ctccacgttggtgtaggtcgggtag

SEQ ID NO: 4111235 - DNA, 25 bp, Homo sapien
gactcggcgccgtcgttcaccacct

SEQ ID NO: 4111236 - DNA, 25 bp, Homo sapien
tgtaggtcgggtagcccttggcctg

SEQ ID NO: 4111237 - DNA, 25 bp, Homo sapien
tcccgccgagcttctggttcctgcg

SEQ ID NO: 4111238 - DNA, 25 bp, Homo sapien
atcctgaggctctgttccgccccgt

SEQ ID NO: 4111239 - DNA, 25 bp, Homo sapien
tcctgaggctctgttccgccccgtg

SEQ ID NO: 4111240 - DNA, 25 bp, Homo sapien
catcctgaggctctgttccgccccg

SEQ ID NO: 4111241 - DNA, 25 bp, Homo sapien
ctgaggctctgttccgccccgtgca

SEQ ID NO: 4111242 - DNA, 25 bp, Homo sapien
cagtaggcgtcagtggcgccctctg

SEQ ID NO: 4111243 - DNA, 25 bp, Homo sapien
gaaggggggacagtaggcgtcagtg

SEQ ID NO: 4111244 - DNA, 25 bp, Homo sapien
tgaaggggggacagtaggcgtcagt

SEQ ID NO: 4111245 - DNA, 25 bp, Homo sapien
gggacagtaggcgtcagtggcgccc

SEQ ID NO: 4111246 - DNA, 25 bp, Homo sapien
gctgggtgtgcagcttgcccacgtc

SEQ ID NO: 4111247 - DNA, 25 bp, Homo sapien
cacgtccagctttacatgaatcgat

SEQ ID NO: 4111248 - DNA, 25 bp, Homo sapien
cagagccgtcgtccaccatcctgag

SEQ ID NO: 4111249 - DNA, 25 bp, Homo sapien
tgagctgggccgctaacttaggctg

SEQ ID NO: 4111250 - DNA, 25 bp, Homo sapien
gccaggcggactctggtcaaatccc

SEQ ID NO: 4111251 - DNA, 25 bp, Homo sapien
agccaggcggactctggtcaaatcc

SEQ ID NO: 4111252 - DNA, 25 bp, Homo sapien
ccaggcggactctggtcaaatccca

SEQ ID NO: 4111253 - DNA, 25 bp, Homo sapien
gcacaaggtagcagttgcctgcaca

SEQ ID NO: 4111254 - DNA, 25 bp, Homo sapien
cagcctctggtatgtgtagagcaca

SEQ ID NO: 4111255 - DNA, 25 bp, Homo sapien
gtacaggatgtactggacacggccc

SEQ ID NO: 4111256 - DNA, 25 bp, Homo sapien
tccatgacgcttggggtccacgggc

SEQ ID NO: 4111257 - DNA, 25 bp, Homo sapien
caatctcatccgcagtggcctggtg

SEQ ID NO: 4111258 - DNA, 25 bp, Homo sapien
tactaggacgccaccatacatgaca

SEQ ID NO: 4111259 - DNA, 25 bp, Homo sapien
catggtcacatgctcctgtactagg

SEQ ID NO: 4111260 - DNA, 25 bp, Homo sapien
tacatgacatctagttcctcagcgt

SEQ ID NO: 4111261 - DNA, 25 bp, Homo sapien
tgctgactgcccctttccatggtgc

SEQ ID NO: 4111262 - DNA, 25 bp, Homo sapien
tggatgctgactgcccctttccatg

SEQ ID NO: 4111263 - DNA, 25 bp, Homo sapien
tgtggtggatgctgactgccccttt

SEQ ID NO: 4111264 - DNA, 25 bp, Homo sapien
tgcccctttccatggtgcccagctc

SEQ ID NO: 4111265 - DNA, 25 bp, Homo sapien
catggtcctggtgttgtggctgtca

SEQ ID NO: 4111266 - DNA, 25 bp, Homo sapien
ccaaaccagaggtagcagacgctgg

SEQ ID NO: 4111267 - DNA, 25 bp, Homo sapien
atgaggcacgggctggcacctccat

SEQ ID NO: 4111268 - DNA, 25 bp, Homo sapien
ggagttgagggatgaggcacgggct

SEQ ID NO: 4111269 - DNA, 25 bp, Homo sapien
tgaccaccacccgtgccatctcacg

SEQ ID NO: 4111270 - DNA, 25 bp, Homo sapien
atctcacgctgatcaccattacagc

SEQ ID NO: 4111271 - DNA, 25 bp, Homo sapien
ctccagcaccgtttcctcattcttc

SEQ ID NO: 4111272 - DNA, 25 bp, Homo sapien
cctccagcaccgtttcctcattctt

SEQ ID NO: 4111273 - DNA, 25 bp, Homo sapien
gcctcccagaagtggggaggctcct

SEQ ID NO: 4111274 - DNA, 25 bp, Homo sapien
tcccagaagtggggaggctcctgac

SEQ ID NO: 4111275 - DNA, 25 bp, Homo sapien
gcctcccagggcctcccagaagtgg

SEQ ID NO: 4111276 - DNA, 25 bp, Homo sapien
ctcccagggcctcccagaagtgggg

SEQ ID NO: 4111277 - DNA, 25 bp, Homo sapien
gaagccacttctcaggagtgggagc

SEQ ID NO: 4111278 - DNA, 25 bp, Homo sapien
cactccgctctgctctgggtacagg

SEQ ID NO: 4111279 - DNA, 25 bp, Homo sapien
tgagccccgtggtttctccccgagc

SEQ ID NO: 4111280 - DNA, 25 bp, Homo sapien
ggcaccccagcccatggcacaagtg

SEQ ID NO: 4111281 - DNA, 25 bp, Homo sapien
gctgaagaaccccacttctgcgagg

SEQ ID NO: 4111282 - DNA, 25 bp, Homo sapien
gtaacatgatgtcatacttgtccag

SEQ ID NO: 4111283 - DNA, 25 bp, Homo sapien
ggagcactcaaacagtcgtggctgg

SEQ ID NO: 4111284 - DNA, 25 bp, Homo sapien
gcactcaaacagtcgtggctggaag

SEQ ID NO: 4111285 - DNA, 25 bp, Homo sapien
aatcacagtcactcatgcagcaccg

SEQ ID NO: 4111286 - DNA, 25 bp, Homo sapien
tggccagttctagcatcacgtgacc

SEQ ID NO: 4111287 - DNA, 25 bp, Homo sapien
gccagttataccactgtgcgcagaa

SEQ ID NO: 4111288 - DNA, 25 bp, Homo sapien
cacacatgaatgatgcgattgggca

SEQ ID NO: 4111289 - DNA, 25 bp, Homo sapien
gctgggtgagtcttcaggtactcct

SEQ ID NO: 4111290 - DNA, 25 bp, Homo sapien
ccatccaatgaaggtgggaggctca

SEQ ID NO: 4111291 - DNA, 25 bp, Homo sapien
ctgctgggtgagtcttcaggtactc

SEQ ID NO: 4111292 - DNA, 25 bp, Homo sapien
gggtcccaagtgaagaaccatccaa

SEQ ID NO: 4111293 - DNA, 25 bp, Homo sapien
agaatcggggcaagtatcagggcca

SEQ ID NO: 4111294 - DNA, 25 bp, Homo sapien
aagggggcaccaatgggacacatga

SEQ ID NO: 4111295 - DNA, 25 bp, Homo sapien
ctggagcaagaatcggggcaagtat

SEQ ID NO: 4111296 - DNA, 25 bp, Homo sapien
caagaatcggggcaagtatcagggc

SEQ ID NO: 4111297 - DNA, 25 bp, Homo sapien
atctcagagatggttgatgctgctg

SEQ ID NO: 4111298 - DNA, 25 bp, Homo sapien
gatggttgatgctgctgccgggctg

SEQ ID NO: 4111299 - DNA, 25 bp, Homo sapien
agatggttgatgctgctgccgggct

SEQ ID NO: 4111300 - DNA, 25 bp, Homo sapien
tcagagatggttgatgctgctgccg

SEQ ID NO: 4111301 - DNA, 25 bp, Homo sapien
ccatcaggaccatgctgtcggagcc

SEQ ID NO: 4111302 - DNA, 25 bp, Homo sapien
atcaggaccatgctgtcggagccca

SEQ ID NO: 4111303 - DNA, 25 bp, Homo sapien
aggaccatgctgtcggagcccaggc

SEQ ID NO: 4111304 - DNA, 25 bp, Homo sapien
cccatcaggaccatgctgtcggagc

SEQ ID NO: 4111305 - DNA, 25 bp, Homo sapien
aagatggggaatcagtagcccacag

SEQ ID NO: 4111306 - DNA, 25 bp, Homo sapien
gaacccacaggcctcttacctccaa

SEQ ID NO: 4111307 - DNA, 25 bp, Homo sapien
aatcagtagcccacagggaggctgc

SEQ ID NO: 4111308 - DNA, 25 bp, Homo sapien
atggggaatcagtagcccacaggga

SEQ ID NO: 4111309 - DNA, 25 bp, Homo sapien
tctggatagccgcaagttgttgact

SEQ ID NO: 4111310 - DNA, 25 bp, Homo sapien
caccagatcattctctgagctgtcc

SEQ ID NO: 4111311 - DNA, 25 bp, Homo sapien
cgacttggggcttcgcaccagatca

SEQ ID NO: 4111312 - DNA, 25 bp, Homo sapien
cattgcccggccatctggatagccg

SEQ ID NO: 4111313 - DNA, 25 bp, Homo sapien
ccccgttgatcgtggcgctggtgct

SEQ ID NO: 4111314 - DNA, 25 bp, Homo sapien
gcatcagttgttcccggcgcaggcc

SEQ ID NO: 4111315 - DNA, 25 bp, Homo sapien
cgcaggcccccgttgatcgtggcgc

SEQ ID NO: 4111316 - DNA, 25 bp, Homo sapien
caggcccccgttgatcgtggcgctg

SEQ ID NO: 4111317 - DNA, 25 bp, Homo sapien
ccactcagtagtgtcagtcatccag

SEQ ID NO: 4111318 - DNA, 25 bp, Homo sapien
cagtgtcagatgcactagtgctggg

SEQ ID NO: 4111319 - DNA, 25 bp, Homo sapien
ttgggactcccgcatctgtttgccc

SEQ ID NO: 4111320 - DNA, 25 bp, Homo sapien
ctagaagacacatctcccggggcag

SEQ ID NO: 4111321 - DNA, 25 bp, Homo sapien
caaagatatcttggaagtcagagtc

SEQ ID NO: 4111322 - DNA, 25 bp, Homo sapien
gctgcctccacgtggccatgctgta

SEQ ID NO: 4111323 - DNA, 25 bp, Homo sapien
gctgtagaattcctccttggatttc

SEQ ID NO: 4111324 - DNA, 25 bp, Homo sapien
ggaagtcagagtctgagagatagaa

SEQ ID NO: 4111325 - DNA, 25 bp, Homo sapien
tccccagcattgtaggtatgttggg

SEQ ID NO: 4111326 - DNA, 25 bp, Homo sapien
tgggctgcctgcttttactgacacg

SEQ ID NO: 4111327 - DNA, 25 bp, Homo sapien
cacgcagaggatgaccaaaagcctc

SEQ ID NO: 4111328 - DNA, 25 bp, Homo sapien
agggcctccccagcattgtaggtat

SEQ ID NO: 4111329 - DNA, 25 bp, Homo sapien
agaaaagtgaaacagtgagagtgga

SEQ ID NO: 4111330 - DNA, 25 bp, Homo sapien
aggctagaaaagtgaaacagtgaga

SEQ ID NO: 4111331 - DNA, 25 bp, Homo sapien
gctagaaaagtgaaacagtgagagt

SEQ ID NO: 4111332 - DNA, 25 bp, Homo sapien
aacacccctgcactcagatcagcct

SEQ ID NO: 4111333 - DNA, 25 bp, Homo sapien
taaagtgttgaacctgattcagtgc

SEQ ID NO: 4111334 - DNA, 25 bp, Homo sapien
ttacagaaacggaatcatggagtct

SEQ ID NO: 4111335 - DNA, 25 bp, Homo sapien
gtatctcttcaccagatgatggaca

SEQ ID NO: 4111336 - DNA, 25 bp, Homo sapien
cactttcctgttctgggcatgttac

SEQ ID NO: 4111337 - DNA, 25 bp, Homo sapien
cgccgggtttctctatgagcagggc

SEQ ID NO: 4111338 - DNA, 25 bp, Homo sapien
tttctctatgagcagggcggggccc

SEQ ID NO: 4111339 - DNA, 25 bp, Homo sapien
ttctctatgagcagggcggggccca

SEQ ID NO: 4111340 - DNA, 25 bp, Homo sapien
agccgccgggtttctctatgagcag

SEQ ID NO: 4111341 - DNA, 25 bp, Homo sapien
ccctagcaggaaccagcagagcacc

SEQ ID NO: 4111342 - DNA, 25 bp, Homo sapien
cctagcaggaaccagcagagcacct

SEQ ID NO: 4111343 - DNA, 25 bp, Homo sapien
aggaaccagcagagcacctcccagc

SEQ ID NO: 4111344 - DNA, 25 bp, Homo sapien
agcaggaaccagcagagcacctccc

SEQ ID NO: 4111345 - DNA, 25 bp, Homo sapien
ccacttctacttctcttggttgggc

SEQ ID NO: 4111346 - DNA, 25 bp, Homo sapien
tgggcctggctctctcttttgtcct

SEQ ID NO: 4111347 - DNA, 25 bp, Homo sapien
cttctacttctcttggttgggcctg

SEQ ID NO: 4111348 - DNA, 25 bp, Homo sapien
tctacttctcttggttgggcctggc

SEQ ID NO: 4111349 - DNA, 25 bp, Homo sapien
gagacgccgctaactccctgcggca

SEQ ID NO: 4111350 - DNA, 25 bp, Homo sapien
gctgtggtcattgtaaacatttgtg

SEQ ID NO: 4111351 - DNA, 25 bp, Homo sapien
cctgcggcacttcggcttccggcct

SEQ ID NO: 4111352 - DNA, 25 bp, Homo sapien
ttgcctttctctcggatcccgtcat

SEQ ID NO: 4111353 - DNA, 25 bp, Homo sapien
gaagttggcgcccacattgtcccct

SEQ ID NO: 4111354 - DNA, 25 bp, Homo sapien
ggcactcgttggtccgggacgctaa

SEQ ID NO: 4111355 - DNA, 25 bp, Homo sapien
gacctccgcgttttggagctcctgg

SEQ ID NO: 4111356 - DNA, 25 bp, Homo sapien
attgtcccctggcactcgttggtcc

SEQ ID NO: 4111357 - DNA, 25 bp, Homo sapien
caagtgcgagatatcttgggtgcgc

SEQ ID NO: 4111358 - DNA, 25 bp, Homo sapien
gctgccgcgggccttgatcaagctt

SEQ ID NO: 4111359 - DNA, 25 bp, Homo sapien
tacaagttgcggaagacgccggtga

SEQ ID NO: 4111360 - DNA, 25 bp, Homo sapien
aagcttgcgctcacttcgtcgccga

SEQ ID NO: 4111361 - DNA, 25 bp, Homo sapien
agccgctgcttatagagctcccgaa

SEQ ID NO: 4111362 - DNA, 25 bp, Homo sapien
gctcattttccgcaatagcccgtgc

SEQ ID NO: 4111363 - DNA, 25 bp, Homo sapien
tagcccgtgcttgggcctgagtgat

SEQ ID NO: 4111364 - DNA, 25 bp, Homo sapien
aaggctctcgaggtcctgtactcca

SEQ ID NO: 4111365 - DNA, 25 bp, Homo sapien
taatttctgcaaaatccacattatc

SEQ ID NO: 4111366 - DNA, 25 bp, Homo sapien
aaatccacattatctgggccaccat

SEQ ID NO: 4111367 - DNA, 25 bp, Homo sapien
tctggacatttgctaccaataattt

SEQ ID NO: 4111368 - DNA, 25 bp, Homo sapien
tgcaaaatccacattatctgggcca

SEQ ID NO: 4111369 - DNA, 25 bp, Homo sapien
accactggaactcattgccctctgg

SEQ ID NO: 4111370 - DNA, 25 bp, Homo sapien
gaagcaccactggaactcattgccc

SEQ ID NO: 4111371 - DNA, 25 bp, Homo sapien
aagcaccactggaactcattgccct

SEQ ID NO: 4111372 - DNA, 25 bp, Homo sapien
ctggaactcattgccctctggcagc

SEQ ID NO: 4111373 - DNA, 25 bp, Homo sapien
gacaagcacattgcactggtatgag

SEQ ID NO: 4111374 - DNA, 25 bp, Homo sapien
tggctgccacaatgacttctgtcag

SEQ ID NO: 4111375 - DNA, 25 bp, Homo sapien
agcaggtttgatgtctaccacgtca

SEQ ID NO: 4111376 - DNA, 25 bp, Homo sapien
ccaggttagcaggtttgatgtctac

SEQ ID NO: 4111377 - DNA, 25 bp, Homo sapien
ttagtcaatggttcctttgctacta

SEQ ID NO: 4111378 - DNA, 25 bp, Homo sapien
tagtcaatggttcctttgctactac

SEQ ID NO: 4111379 - DNA, 25 bp, Homo sapien
gtctgttgcacagggtcgaggagcc

SEQ ID NO: 4111380 - DNA, 25 bp, Homo sapien
tgttgcacagggtcgaggagcccat

SEQ ID NO: 4111381 - DNA, 25 bp, Homo sapien
agggagtctctggtcatcaggtact

SEQ ID NO: 4111382 - DNA, 25 bp, Homo sapien
ggtactgcccactatggctacattt

SEQ ID NO: 4111383 - DNA, 25 bp, Homo sapien
gctatcaaagatgcagtcattctca

SEQ ID NO: 4111384 - DNA, 25 bp, Homo sapien
ctgtgcaggtactcgtggtcccggt

SEQ ID NO: 4111385 - DNA, 25 bp, Homo sapien
tgtatcggtgtagtaatcttctggg

SEQ ID NO: 4111386 - DNA, 25 bp, Homo sapien
tttaggtgcagagtgaaacggcact

SEQ ID NO: 4111387 - DNA, 25 bp, Homo sapien
actcgctgtctatacaccatctgga

SEQ ID NO: 4111388 - DNA, 25 bp, Homo sapien
gatgtttccgtagcaactcgctgtc

SEQ ID NO: 4111389 - DNA, 25 bp, Homo sapien
aattcttggtattgggcagcagatg

SEQ ID NO: 4111390 - DNA, 25 bp, Homo sapien
cttggtattgggcagcagatgtggg

SEQ ID NO: 4111391 - DNA, 25 bp, Homo sapien
ataattcttggtattgggcagcaga

SEQ ID NO: 4111392 - DNA, 25 bp, Homo sapien
ggtattgggcagcagatgtgggcat

SEQ ID NO: 4111393 - DNA, 25 bp, Homo sapien
cagtgtggtctaactcatcttcgaa

SEQ ID NO: 4111394 - DNA, 25 bp, Homo sapien
taaattccatgtcaggctgtccaca

SEQ ID NO: 4111395 - DNA, 25 bp, Homo sapien
gcttcttcctgcatgaatcttcaag

SEQ ID NO: 4111396 - DNA, 25 bp, Homo sapien
gacggaacgcttctcacagctaaat

SEQ ID NO: 4111397 - DNA, 25 bp, Homo sapien
cagtttttattccttggttgacttg

SEQ ID NO: 4111398 - DNA, 25 bp, Homo sapien
tttaggaagtggttccgactctcca

SEQ ID NO: 4111399 - DNA, 25 bp, Homo sapien
aagtggttccgactctccattctgg

SEQ ID NO: 4111400 - DNA, 25 bp, Homo sapien
ggcaagcagaagtctgtctagctct

SEQ ID NO: 4111401 - DNA, 25 bp, Homo sapien
ccatatcgagtgttaggaggaaaaa

SEQ ID NO: 4111402 - DNA, 25 bp, Homo sapien
ggaattctcctatcggtgctggctt

SEQ ID NO: 4111403 - DNA, 25 bp, Homo sapien
tcctatcggtgctggcttctttgga

SEQ ID NO: 4111404 - DNA, 25 bp, Homo sapien
tctcctatcggtgctggcttctttg

SEQ ID NO: 4111405 - DNA, 25 bp, Homo sapien
tgttctggctctgtactctggaatt

SEQ ID NO: 4111406 - DNA, 25 bp, Homo sapien
tagaaacactggagtatcagcacaa

SEQ ID NO: 4111407 - DNA, 25 bp, Homo sapien
caattggtggcttagctagaaacac

SEQ ID NO: 4111408 - DNA, 25 bp, Homo sapien
cataaactggaccaatttcataatc

SEQ ID NO: 4111409 - DNA, 25 bp, Homo sapien
actggaccaatttcataatctgtga

SEQ ID NO: 4111410 - DNA, 25 bp, Homo sapien
cacaggcttccacagcaggcatctg

SEQ ID NO: 4111411 - DNA, 25 bp, Homo sapien
tacagcctcaggatctccaggctct

SEQ ID NO: 4111412 - DNA, 25 bp, Homo sapien
cttccacagcaggcatctgaaagcc

SEQ ID NO: 4111413 - DNA, 25 bp, Homo sapien
gctctgagcacaggcttccacagca

SEQ ID NO: 4111414 - DNA, 25 bp, Homo sapien
tcgtggtggtgttctgcagcgcaat

SEQ ID NO: 4111415 - DNA, 25 bp, Homo sapien
gactcgcaggtagcggctggtcgtg

SEQ ID NO: 4111416 - DNA, 25 bp, Homo sapien
gtggaaggcgggaggactcgcaggt

SEQ ID NO: 4111417 - DNA, 25 bp, Homo sapien
tcccagagcgaagtatggcgtggaa

SEQ ID NO: 4111418 - DNA, 25 bp, Homo sapien
aactggacaatgtactggcaggtca

SEQ ID NO: 4111419 - DNA, 25 bp, Homo sapien
ttccaggagccaccattccaccttt

SEQ ID NO: 4111420 - DNA, 25 bp, Homo sapien
caggagccaccattccaccttttcc

SEQ ID NO: 4111421 - DNA, 25 bp, Homo sapien
gaagtgtgtgggctgactgggtctc

SEQ ID NO: 4111422 - DNA, 25 bp, Homo sapien
aacctgccaacactgaaacccacat

SEQ ID NO: 4111423 - DNA, 25 bp, Homo sapien
ggtcatcttgactcccccaatgagg

SEQ ID NO: 4111424 - DNA, 25 bp, Homo sapien
atttttgcagatgaatctggtcatc

SEQ ID NO: 4111425 - DNA, 25 bp, Homo sapien
tgaggcagtaaccacagtccaacac

SEQ ID NO: 4111426 - DNA, 25 bp, Homo sapien
taatatagcatgtcccggggccagc

SEQ ID NO: 4111427 - DNA, 25 bp, Homo sapien
tccactaatatagcatgtcccgggg

SEQ ID NO: 4111428 - DNA, 25 bp, Homo sapien
gctcaaacaccgaaggcaggattcc

SEQ ID NO: 4111429 - DNA, 25 bp, Homo sapien
gggccagctcaaacaccgaaggcag

SEQ ID NO: 4111430 - DNA, 25 bp, Homo sapien
cagctcctttatctggcagttgtcg

SEQ ID NO: 4111431 - DNA, 25 bp, Homo sapien
tcctttatctggcagttgtcgcaca

SEQ ID NO: 4111432 - DNA, 25 bp, Homo sapien
tctggcagttgtcgcacatgatgat

SEQ ID NO: 4111433 - DNA, 25 bp, Homo sapien
ggcagttgtcgcacatgatgatgaa

SEQ ID NO: 4111434 - DNA, 25 bp, Homo sapien
tcaccagaaatatagatcagatcca

SEQ ID NO: 4111435 - DNA, 25 bp, Homo sapien
ctagccgtggaccgaaggttttcag

SEQ ID NO: 4111436 - DNA, 25 bp, Homo sapien
ttcaggctcaaatcgtatgaagtgc

SEQ ID NO: 4111437 - DNA, 25 bp, Homo sapien
aagtgctgggctgttaagtctgtga

SEQ ID NO: 4111438 - DNA, 25 bp, Homo sapien
gggttgggtattggggcacacacag

SEQ ID NO: 4111439 - DNA, 25 bp, Homo sapien
agggttgggtattggggcacacaca

SEQ ID NO: 4111440 - DNA, 25 bp, Homo sapien
ggttgggtattggggcacacacagg

SEQ ID NO: 4111441 - DNA, 25 bp, Homo sapien
ctgaaggtttctccaggcatgaggg

SEQ ID NO: 4111442 - DNA, 25 bp, Homo sapien
tctgggcatgatggagaaggcagtc

SEQ ID NO: 4111443 - DNA, 25 bp, Homo sapien
gaaaagctcaggatgaactcgtggt

SEQ ID NO: 4111444 - DNA, 25 bp, Homo sapien
tccttgtcggggtagcacttgatgc

SEQ ID NO: 4111445 - DNA, 25 bp, Homo sapien
tagcctagccatcagaaggaccttc

SEQ ID NO: 4111446 - DNA, 25 bp, Homo sapien
catagtagacatgtgggagacaccc

SEQ ID NO: 4111447 - DNA, 25 bp, Homo sapien
ggaccagaggcaggatcactcatct

SEQ ID NO: 4111448 - DNA, 25 bp, Homo sapien
gatagacaacgaggcagctggatgc

SEQ ID NO: 4111449 - DNA, 25 bp, Homo sapien
gggacttcctctagcaccatctgga

SEQ ID NO: 4111450 - DNA, 25 bp, Homo sapien
gctctgggacttcctctagcaccat

SEQ ID NO: 4111451 - DNA, 25 bp, Homo sapien
ttcctctagcaccatctggagcaca

SEQ ID NO: 4111452 - DNA, 25 bp, Homo sapien
aggctctgggacttcctctagcacc

SEQ ID NO: 4111453 - DNA, 25 bp, Homo sapien
acacaaacccaccgttagctaggag

SEQ ID NO: 4111454 - DNA, 25 bp, Homo sapien
caaacccaccgttagctaggagccg

SEQ ID NO: 4111455 - DNA, 25 bp, Homo sapien
acccaccgttagctaggagccggca

SEQ ID NO: 4111456 - DNA, 25 bp, Homo sapien
caccgttagctaggagccggcacac

SEQ ID NO: 4111457 - DNA, 25 bp, Homo sapien
tatcccaatgtagttctcccctggg

SEQ ID NO: 4111458 - DNA, 25 bp, Homo sapien
caggacaatcacatcatccacagag

SEQ ID NO: 4111459 - DNA, 25 bp, Homo sapien
catatggctctaagagaacctggaa

SEQ ID NO: 4111460 - DNA, 25 bp, Homo sapien
atccacagagtaggaggagtgcccc

SEQ ID NO: 4111461 - DNA, 25 bp, Homo sapien
tgatcttcccccacaggtatctgat

SEQ ID NO: 4111462 - DNA, 25 bp, Homo sapien
ccacttcaatgatgtggcagtcgct

SEQ ID NO: 4111463 - DNA, 25 bp, Homo sapien
tgtggcagtcgctgatcttccccca

SEQ ID NO: 4111464 - DNA, 25 bp, Homo sapien
cccacaggtatctgatgggtgactt

SEQ ID NO: 4111465 - DNA, 25 bp, Homo sapien
cagcctcaatgtgtaacaccactgg

SEQ ID NO: 4111466 - DNA, 25 bp, Homo sapien
gagtcttcgatttcacacagcaggt

SEQ ID NO: 4111467 - DNA, 25 bp, Homo sapien
gacacccccagtaaagttcaactca

SEQ ID NO: 4111468 - DNA, 25 bp, Homo sapien
tgtgtaacaccactggcgagggcga

SEQ ID NO: 4111469 - DNA, 25 bp, Homo sapien
tgagacgttgatgatgagggcaggc

SEQ ID NO: 4111470 - DNA, 25 bp, Homo sapien
gagacgttgatgatgagggcaggcc

SEQ ID NO: 4111471 - DNA, 25 bp, Homo sapien
agacgttgatgatgagggcaggccc

SEQ ID NO: 4111472 - DNA, 25 bp, Homo sapien
ctgagacgttgatgatgagggcagg

SEQ ID NO: 4111473 - DNA, 25 bp, Homo sapien
gctctccttcatgcgccatgtggct

SEQ ID NO: 4111474 - DNA, 25 bp, Homo sapien
ggctttctgccccaggcggagcaga

SEQ ID NO: 4111475 - DNA, 25 bp, Homo sapien
agctggctgacgttccggatctgga

SEQ ID NO: 4111476 - DNA, 25 bp, Homo sapien
cgttccggatctggatggagtttgt

SEQ ID NO: 4111477 - DNA, 25 bp, Homo sapien
agtgaagctggccactcgaaggctc

SEQ ID NO: 4111478 - DNA, 25 bp, Homo sapien
cactcgaaggctcaatgtcgaaggg

SEQ ID NO: 4111479 - DNA, 25 bp, Homo sapien
tggccactcgaaggctcaatgtcga

SEQ ID NO: 4111480 - DNA, 25 bp, Homo sapien
aaggctcaatgtcgaagggagacac

SEQ ID NO: 4111481 - DNA, 25 bp, Homo sapien
gcttctgtacctcagcatacacagg

SEQ ID NO: 4111482 - DNA, 25 bp, Homo sapien
cacatggggcttctgtacctcagca

SEQ ID NO: 4111483 - DNA, 25 bp, Homo sapien
ctgtaggtacacatggggcttctgt

SEQ ID NO: 4111484 - DNA, 25 bp, Homo sapien
gtacacatggggcttctgtacctca

SEQ ID NO: 4111485 - DNA, 25 bp, Homo sapien
tgggcacacccaggtagagatttct

SEQ ID NO: 4111486 - DNA, 25 bp, Homo sapien
gataagtgtgatggttgtcttcgtg

SEQ ID NO: 4111487 - DNA, 25 bp, Homo sapien
gcaggagcgtgccattgataagtgt

SEQ ID NO: 4111488 - DNA, 25 bp, Homo sapien
cttgccccagtggaactgggtaggc

SEQ ID NO: 4111489 - DNA, 25 bp, Homo sapien
cagaattctgcttggtgtccgagga

SEQ ID NO: 4111490 - DNA, 25 bp, Homo sapien
gcagaattctgcttggtgtccgagg

SEQ ID NO: 4111491 - DNA, 25 bp, Homo sapien
tgtcaccatgcagaattctgcttgg

SEQ ID NO: 4111492 - DNA, 25 bp, Homo sapien
caccatgcagaattctgcttggtgt

SEQ ID NO: 4111493 - DNA, 25 bp, Homo sapien
agcagtcaactccaacttgagctgg

SEQ ID NO: 4111494 - DNA, 25 bp, Homo sapien
ctgggtatgagcagtcaactccaac

SEQ ID NO: 4111495 - DNA, 25 bp, Homo sapien
tcacttgggcccagcaggccatgtt

SEQ ID NO: 4111496 - DNA, 25 bp, Homo sapien
cttgagctggcactcctcacttggg

SEQ ID NO: 4111497 - DNA, 25 bp, Homo sapien
tcagaaagctgggcccacctgcggc

SEQ ID NO: 4111498 - DNA, 25 bp, Homo sapien
aaatcagaaagctgggcccacctgc

SEQ ID NO: 4111499 - DNA, 25 bp, Homo sapien
atcagaaagctgggcccacctgcgg

SEQ ID NO: 4111500 - DNA, 25 bp, Homo sapien
aatcagaaagctgggcccacctgcg

SEQ ID NO: 4111501 - DNA, 25 bp, Homo sapien
catgcctgacacgtgacaagggagg

SEQ ID NO: 4111502 - DNA, 25 bp, Homo sapien
tcttcatgcctgacacgtgacaagg

SEQ ID NO: 4111503 - DNA, 25 bp, Homo sapien
gcttcttcatgcctgacacgtgaca

SEQ ID NO: 4111504 - DNA, 25 bp, Homo sapien
agtggcttcttcatgcctgacacgt

SEQ ID NO: 4111505 - DNA, 25 bp, Homo sapien
gagctctccttagagatggtaatgg

SEQ ID NO: 4111506 - DNA, 25 bp, Homo sapien
caatcagagctctccttagagatgg

SEQ ID NO: 4111507 - DNA, 25 bp, Homo sapien
tctccttagagatggtaatggccac

SEQ ID NO: 4111508 - DNA, 25 bp, Homo sapien
ctgcaatcagagctctccttagaga

SEQ ID NO: 4111509 - DNA, 25 bp, Homo sapien
acaaaccgtccctggccagcggcat

SEQ ID NO: 4111510 - DNA, 25 bp, Homo sapien
cagggagccatcttgggtgggcatg

SEQ ID NO: 4111511 - DNA, 25 bp, Homo sapien
tgtttcattgagctgccaaccacag

SEQ ID NO: 4111512 - DNA, 25 bp, Homo sapien
ctgggcctcatgtgggcaagcccag

SEQ ID NO: 4111513 - DNA, 25 bp, Homo sapien
ctttgggtggcctggccactgctct

SEQ ID NO: 4111514 - DNA, 25 bp, Homo sapien
ctcctttgggtggcctggccactgc

SEQ ID NO: 4111515 - DNA, 25 bp, Homo sapien
tgggtggcctggccactgctctgtg

SEQ ID NO: 4111516 - DNA, 25 bp, Homo sapien
cctttgggtggcctggccactgctc

SEQ ID NO: 4111517 - DNA, 25 bp, Homo sapien
tggcgagtcacacgggtcctcagtg

SEQ ID NO: 4111518 - DNA, 25 bp, Homo sapien
tcagtggcaccgctgagccaaagtc

SEQ ID NO: 4111519 - DNA, 25 bp, Homo sapien
ctggcgagtcacacgggtcctcagt

SEQ ID NO: 4111520 - DNA, 25 bp, Homo sapien
accgctgagccaaagtccaggcgga

SEQ ID NO: 4111521 - DNA, 25 bp, Homo sapien
tcccgaaatactcaaacttgaggga

SEQ ID NO: 4111522 - DNA, 25 bp, Homo sapien
gggctcccgaaatactcaaacttga

SEQ ID NO: 4111523 - DNA, 25 bp, Homo sapien
gctcccgaaatactcaaacttgagg

SEQ ID NO: 4111524 - DNA, 25 bp, Homo sapien
ccgtattggggagcgattggtgaga

SEQ ID NO: 4111525 - DNA, 25 bp, Homo sapien
ttggccaggtgctcttgcatccgca

SEQ ID NO: 4111526 - DNA, 25 bp, Homo sapien
ggtgctcttgcatccgcactgtctt

SEQ ID NO: 4111527 - DNA, 25 bp, Homo sapien
tctcgcttggccaggtgctcttgca

SEQ ID NO: 4111528 - DNA, 25 bp, Homo sapien
cttgcatccgcactgtctttagcag

SEQ ID NO: 4111529 - DNA, 25 bp, Homo sapien
tcctttcccgtgggatagcatgctc

SEQ ID NO: 4111530 - DNA, 25 bp, Homo sapien
ctgtgatgtcaatgcacagctgctg

SEQ ID NO: 4111531 - DNA, 25 bp, Homo sapien
cagctgctggtagggccccagcatg

SEQ ID NO: 4111532 - DNA, 25 bp, Homo sapien
cacagctgctggtagggccccagca

SEQ ID NO: 4111533 - DNA, 25 bp, Homo sapien
atgcacagctgctggtagggcccca

SEQ ID NO: 4111534 - DNA, 25 bp, Homo sapien
tcccagtactcgccccacatgttgg

SEQ ID NO: 4111535 - DNA, 25 bp, Homo sapien
ccagtactcgccccacatgttggca

SEQ ID NO: 4111536 - DNA, 25 bp, Homo sapien
cccagtactcgccccacatgttggc

SEQ ID NO: 4111537 - DNA, 25 bp, Homo sapien
cagtactcgccccacatgttggcac

SEQ ID NO: 4111538 - DNA, 25 bp, Homo sapien
ccaccgctgccatgtgcactgggat

SEQ ID NO: 4111539 - DNA, 25 bp, Homo sapien
agctgatggggcagcccaccgctgc

SEQ ID NO: 4111540 - DNA, 25 bp, Homo sapien
tcaatagtgtaggaggtggtcctca

SEQ ID NO: 4111541 - DNA, 25 bp, Homo sapien
gcactgggatgacttccggcagcag

SEQ ID NO: 4111542 - DNA, 25 bp, Homo sapien
agcagaggctcaggctgagcatgga

SEQ ID NO: 4111543 - DNA, 25 bp, Homo sapien
cagaggctcaggctgagcatggagc

SEQ ID NO: 4111544 - DNA, 25 bp, Homo sapien
agggagcagaggctcaggctgagca

SEQ ID NO: 4111545 - DNA, 25 bp, Homo sapien
gaggctcaggctgagcatggagcac

SEQ ID NO: 4111546 - DNA, 25 bp, Homo sapien
cagcccggaggccggagggtttcag

SEQ ID NO: 4111547 - DNA, 25 bp, Homo sapien
ttcttgtaggtggcaccaatggccc

SEQ ID NO: 4111548 - DNA, 25 bp, Homo sapien
ataacaagccaacgtgggcagccca

SEQ ID NO: 4111549 - DNA, 25 bp, Homo sapien
agctggagaataacaagccaacgtg

SEQ ID NO: 4111550 - DNA, 25 bp, Homo sapien
acagactggactcagtacagccaca

SEQ ID NO: 4111551 - DNA, 25 bp, Homo sapien
tgtgtctcctccggagacctgggtg

SEQ ID NO: 4111552 - DNA, 25 bp, Homo sapien
tggagttattcaggcgaagggttcg

SEQ ID NO: 4111553 - DNA, 25 bp, Homo sapien
caggcgaagggttcgggtaactgtg

SEQ ID NO: 4111554 - DNA, 25 bp, Homo sapien
taactgtgtctcctccggagacctg

SEQ ID NO: 4111555 - DNA, 25 bp, Homo sapien
tctggaacataggtctcccaatcca

SEQ ID NO: 4111556 - DNA, 25 bp, Homo sapien
tccaccagccggtcttccttgtctt

SEQ ID NO: 4111557 - DNA, 25 bp, Homo sapien
taggtctcccaatccaggcggatgt

SEQ ID NO: 4111558 - DNA, 25 bp, Homo sapien
gtggcccataaaacaccagcagctc

SEQ ID NO: 4111559 - DNA, 25 bp, Homo sapien
tggctgaattccgatgaactggagg

SEQ ID NO: 4111560 - DNA, 25 bp, Homo sapien
gaattccgatgaactggaggggcct

SEQ ID NO: 4111561 - DNA, 25 bp, Homo sapien
tttcatggctgaattccgatgaact

SEQ ID NO: 4111562 - DNA, 25 bp, Homo sapien
catggctgaattccgatgaactgga

SEQ ID NO: 4111563 - DNA, 25 bp, Homo sapien
ctattgctggcactggagctgccct

SEQ ID NO: 4111564 - DNA, 25 bp, Homo sapien
attgctggcactggagctgccctca

SEQ ID NO: 4111565 - DNA, 25 bp, Homo sapien
tattgctggcactggagctgccctc

SEQ ID NO: 4111566 - DNA, 25 bp, Homo sapien
tgctggcactggagctgccctcaac

SEQ ID NO: 4111567 - DNA, 25 bp, Homo sapien
atgactgagatgagcttctgtgcca

SEQ ID NO: 4111568 - DNA, 25 bp, Homo sapien
tgcttggggctgatacagtacaggt

SEQ ID NO: 4111569 - DNA, 25 bp, Homo sapien
gactgagatgagcttctgtgccacc

SEQ ID NO: 4111570 - DNA, 25 bp, Homo sapien
gggcaccccctcatgtgcctgcagg

SEQ ID NO: 4111571 - DNA, 25 bp, Homo sapien
gagatgtagatggtactgctgcccc

SEQ ID NO: 4111572 - DNA, 25 bp, Homo sapien
caccttgtgcaggatctcagggctg

SEQ ID NO: 4111573 - DNA, 25 bp, Homo sapien
gctcatgaaacccagggcgtagcca

SEQ ID NO: 4111574 - DNA, 25 bp, Homo sapien
gtagccagtacactccaccttgtgc

SEQ ID NO: 4111575 - DNA, 25 bp, Homo sapien
atccctgggctgagtaggcagcatg

SEQ ID NO: 4111576 - DNA, 25 bp, Homo sapien
ccaagtctgatcacagctgatccct

SEQ ID NO: 4111577 - DNA, 25 bp, Homo sapien
caagtctgatcacagctgatccctg

SEQ ID NO: 4111578 - DNA, 25 bp, Homo sapien
gcagcatgctacccaggagggagca

SEQ ID NO: 4111579 - DNA, 25 bp, Homo sapien
tagctatgcaggtccagtttcaggg

SEQ ID NO: 4111580 - DNA, 25 bp, Homo sapien
gtagctatgcaggtccagtttcagg

SEQ ID NO: 4111581 - DNA, 25 bp, Homo sapien
gggtcccaccgcaaagtcctgcagg

SEQ ID NO: 4111582 - DNA, 25 bp, Homo sapien
tcaggggtcccaccgcaaagtcctg

SEQ ID NO: 4111583 - DNA, 25 bp, Homo sapien
tgcctggtgagggtgcaccccatgg

SEQ ID NO: 4111584 - DNA, 25 bp, Homo sapien
aaggagatggggcaccccagctgac

SEQ ID NO: 4111585 - DNA, 25 bp, Homo sapien
catgcccgtccttttgctctgagaa

SEQ ID NO: 4111586 - DNA, 25 bp, Homo sapien
ctgcccagcaataggcattgttggg

SEQ ID NO: 4111587 - DNA, 25 bp, Homo sapien
gaattccatactgccgccgtagtcc

SEQ ID NO: 4111588 - DNA, 25 bp, Homo sapien
ggcactggaattccatactgccgcc

SEQ ID NO: 4111589 - DNA, 25 bp, Homo sapien
actggaattccatactgccgccgta

SEQ ID NO: 4111590 - DNA, 25 bp, Homo sapien
tggaattccatactgccgccgtagt

SEQ ID NO: 4111591 - DNA, 25 bp, Homo sapien
cagggctgctcgggaatgaggtcac

SEQ ID NO: 4111592 - DNA, 25 bp, Homo sapien
gctgctcgggaatgaggtcactggc

SEQ ID NO: 4111593 - DNA, 25 bp, Homo sapien
gggctgctcgggaatgaggtcactg

SEQ ID NO: 4111594 - DNA, 25 bp, Homo sapien
ggctgctcgggaatgaggtcactgg

SEQ ID NO: 4111595 - DNA, 25 bp, Homo sapien
gcagggaatgcatcttgtctctctc

SEQ ID NO: 4111596 - DNA, 25 bp, Homo sapien
gaggcagggaatgcatcttgtctct

SEQ ID NO: 4111597 - DNA, 25 bp, Homo sapien
ggcagggaatgcatcttgtctctct

SEQ ID NO: 4111598 - DNA, 25 bp, Homo sapien
cagggaatgcatcttgtctctctct

SEQ ID NO: 4111599 - DNA, 25 bp, Homo sapien
ccggaagtagtgtgggatctctgta

SEQ ID NO: 4111600 - DNA, 25 bp, Homo sapien
gatctctgtagtgttggtcagcttc

SEQ ID NO: 4111601 - DNA, 25 bp, Homo sapien
catcttgagaaacggagaagggcct

SEQ ID NO: 4111602 - DNA, 25 bp, Homo sapien
ctggagaccataagccggaagtagt

SEQ ID NO: 4111603 - DNA, 25 bp, Homo sapien
tttgcgtctgggtacaagcacctga

SEQ ID NO: 4111604 - DNA, 25 bp, Homo sapien
tgcgtctgggtacaagcacctgagg

SEQ ID NO: 4111605 - DNA, 25 bp, Homo sapien
gagggtgtgccatcgaggcaagggc

SEQ ID NO: 4111606 - DNA, 25 bp, Homo sapien
gcaggggtgctgtctgtacacatgt

SEQ ID NO: 4111607 - DNA, 25 bp, Homo sapien
tgtggccatgcccatgtgagccact

SEQ ID NO: 4111608 - DNA, 25 bp, Homo sapien
ctctggtgggagtgcacccccgagt

SEQ ID NO: 4111609 - DNA, 25 bp, Homo sapien
ggtgtctctggtgggagtgcacccc

SEQ ID NO: 4111610 - DNA, 25 bp, Homo sapien
ggccatgcccatgtgagccacttgt

SEQ ID NO: 4111611 - DNA, 25 bp, Homo sapien
ttgcacaggaggacggagtctgtgt

SEQ ID NO: 4111612 - DNA, 25 bp, Homo sapien
tacgttagaacctggagtgtcttac

SEQ ID NO: 4111613 - DNA, 25 bp, Homo sapien
tacaattatggcaaccccatgggct

SEQ ID NO: 4111614 - DNA, 25 bp, Homo sapien
gggaggtgctcacaggaatgcatca

SEQ ID NO: 4111615 - DNA, 25 bp, Homo sapien
aacgcaaagtgggtcaagggtgcca

SEQ ID NO: 4111616 - DNA, 25 bp, Homo sapien
gaagctctggtggaatggaacctct

SEQ ID NO: 4111617 - DNA, 25 bp, Homo sapien
tctgcagatccgtgtgtgtccctga

SEQ ID NO: 4111618 - DNA, 25 bp, Homo sapien
taaatgcctggtggctaaccgccgt

SEQ ID NO: 4111619 - DNA, 25 bp, Homo sapien
gctgggagcttctgataggagagca

SEQ ID NO: 4111620 - DNA, 25 bp, Homo sapien
ctgggagcttctgataggagagcag

SEQ ID NO: 4111621 - DNA, 25 bp, Homo sapien
ctggttggtgtactccaggagcagg

SEQ ID NO: 4111622 - DNA, 25 bp, Homo sapien
tctggttggtgtactccaggagcag

SEQ ID NO: 4111623 - DNA, 25 bp, Homo sapien
gtctggttggtgtactccaggagca

SEQ ID NO: 4111624 - DNA, 25 bp, Homo sapien
cctcctccacatgtaggtgggcctg

SEQ ID NO: 4111625 - DNA, 25 bp, Homo sapien
gttcatcaggtagacctcccggact

SEQ ID NO: 4111626 - DNA, 25 bp, Homo sapien
tcaggtagacctcccggactcgctg

SEQ ID NO: 4111627 - DNA, 25 bp, Homo sapien
tagtccagtagcttcggcacccgct

SEQ ID NO: 4111628 - DNA, 25 bp, Homo sapien
catcagcatagtccagtagcttcgg

SEQ ID NO: 4111629 - DNA, 25 bp, Homo sapien
cagggcaaccctgagatcatgtggg

SEQ ID NO: 4111630 - DNA, 25 bp, Homo sapien
ctggtcttgctcagcactgcagggc

SEQ ID NO: 4111631 - DNA, 25 bp, Homo sapien
ctctggtcttgctcagcactgcagg

SEQ ID NO: 4111632 - DNA, 25 bp, Homo sapien
gggcaaccctgagatcatgtgggat

SEQ ID NO: 4111633 - DNA, 25 bp, Homo sapien
cccatgtactcccacaggaagactt

SEQ ID NO: 4111634 - DNA, 25 bp, Homo sapien
aggcagccccatgtactcccacagg

SEQ ID NO: 4111635 - DNA, 25 bp, Homo sapien
agccccatgtactcccacaggaaga

SEQ ID NO: 4111636 - DNA, 25 bp, Homo sapien
tgtactcccacaggaagactttacc

SEQ ID NO: 4111637 - DNA, 25 bp, Homo sapien
ggatcgtgcttctagcagcccactg

SEQ ID NO: 4111638 - DNA, 25 bp, Homo sapien
tttggggagaccctgaaggccacag

SEQ ID NO: 4111639 - DNA, 25 bp, Homo sapien
cattggcggatcgtgcttctagcag

SEQ ID NO: 4111640 - DNA, 25 bp, Homo sapien
ggtgcattggcggatcgtgcttcta

SEQ ID NO: 4111641 - DNA, 25 bp, Homo sapien
ggtgcaggacttctcaccgagcaca

SEQ ID NO: 4111642 - DNA, 25 bp, Homo sapien
accaccatcgtggactcgtacagct

SEQ ID NO: 4111643 - DNA, 25 bp, Homo sapien
tatctctcatcataggagccttggc

SEQ ID NO: 4111644 - DNA, 25 bp, Homo sapien
tcgtggactcgtacagctcactact

SEQ ID NO: 4111645 - DNA, 25 bp, Homo sapien
ttatgttagctctgaggacatatca

SEQ ID NO: 4111646 - DNA, 25 bp, Homo sapien
tgctcctaatccctgggcaatgttt

SEQ ID NO: 4111647 - DNA, 25 bp, Homo sapien
catgagggcctaggctgagaccatt

SEQ ID NO: 4111648 - DNA, 25 bp, Homo sapien
ctaatccctgggcaatgttttttct

SEQ ID NO: 4111649 - DNA, 25 bp, Homo sapien
ccgtctttgaataccctgggaactg

SEQ ID NO: 4111650 - DNA, 25 bp, Homo sapien
caagataaaagcagcctgggtcacc

SEQ ID NO: 4111651 - DNA, 25 bp, Homo sapien
tcacagggcatacggagtggtgtcc

SEQ ID NO: 4111652 - DNA, 25 bp, Homo sapien
catgggaaaactcagcactggtggt

SEQ ID NO: 4111653 - DNA, 25 bp, Homo sapien
tcacgctgctcaatgagctgaagcg

SEQ ID NO: 4111654 - DNA, 25 bp, Homo sapien
cgctgctcaatgagctgaagcgccg

SEQ ID NO: 4111655 - DNA, 25 bp, Homo sapien
tgctcaatgagctgaagcgccgtgg

SEQ ID NO: 4111656 - DNA, 25 bp, Homo sapien
catcacgctgctcaatgagctgaag

SEQ ID NO: 4111657 - DNA, 25 bp, Homo sapien
tcctctttctcctgcggcacccgcc

SEQ ID NO: 4111658 - DNA, 25 bp, Homo sapien
ccggctttcgctttccgagaagcgc

SEQ ID NO: 4111659 - DNA, 25 bp, Homo sapien
gagcaaaagtgcggaggcgggggtg

SEQ ID NO: 4111660 - DNA, 25 bp, Homo sapien
ccgccggctttcgctttccgagaag

SEQ ID NO: 4111661 - DNA, 25 bp, Homo sapien
gagcctcagcgcggtcgggtcgcat

SEQ ID NO: 4111662 - DNA, 25 bp, Homo sapien
tcctggagcctcagcgcggtcgggt

SEQ ID NO: 4111663 - DNA, 25 bp, Homo sapien
cctggagcctcagcgcggtcgggtc

SEQ ID NO: 4111664 - DNA, 25 bp, Homo sapien
tggagcctcagcgcggtcgggtcgc

SEQ ID NO: 4111665 - DNA, 25 bp, Homo sapien
tggaggagaccggggccgcagaccc

SEQ ID NO: 4111666 - DNA, 25 bp, Homo sapien
gagaccggggccgcagaccccgcgc

SEQ ID NO: 4111667 - DNA, 25 bp, Homo sapien
gtggaggagaccggggccgcagacc

SEQ ID NO: 4111668 - DNA, 25 bp, Homo sapien
tgtgtccgcacgttcaagaacagag

SEQ ID NO: 4111669 - DNA, 25 bp, Homo sapien
gcagctcgagcagtcggcctacaga

SEQ ID NO: 4111670 - DNA, 25 bp, Homo sapien
ggatctccaagtactcaaagtccat

SEQ ID NO: 4111671 - DNA, 25 bp, Homo sapien
gcttgtgtctccagttgccggatct

SEQ ID NO: 4111672 - DNA, 25 bp, Homo sapien
cgaggccaggaaggggacgtcctca

SEQ ID NO: 4111673 - DNA, 25 bp, Homo sapien
caggtacgaggccaggaaggggacg

SEQ ID NO: 4111674 - DNA, 25 bp, Homo sapien
gaggccaggaaggggacgtcctcac

SEQ ID NO: 4111675 - DNA, 25 bp, Homo sapien
cctagggatcctaagaatggtacca

SEQ ID NO: 4111676 - DNA, 25 bp, Homo sapien
tgtgggcggctgtatccaacgccta

SEQ ID NO: 4111677 - DNA, 25 bp, Homo sapien
caggagacccactggttatggtgca

SEQ ID NO: 4111678 - DNA, 25 bp, Homo sapien
cacgcgaagctcaacggctctgaga

SEQ ID NO: 4111679 - DNA, 25 bp, Homo sapien
atcaagtgtggtgatgcccgccagc

SEQ ID NO: 4111680 - DNA, 25 bp, Homo sapien
ctgtctacagcggccacctgtaaag

SEQ ID NO: 4111681 - DNA, 25 bp, Homo sapien
tgtccgtgggacactgctgtctaca

SEQ ID NO: 4111682 - DNA, 25 bp, Homo sapien
caagatatacttttggcaatcctcc

SEQ ID NO: 4111683 - DNA, 25 bp, Homo sapien
tgagcatctcacagcaatccagagg

SEQ ID NO: 4111684 - DNA, 25 bp, Homo sapien
gctaagctctggattaaccacgaga

SEQ ID NO: 4111685 - DNA, 25 bp, Homo sapien
tcccatgggaacagtattggaccct

SEQ ID NO: 4111686 - DNA, 25 bp, Homo sapien
tccagaggtaggactattatctcca

SEQ ID NO: 4111687 - DNA, 25 bp, Homo sapien
tgtctgttccagttgccggatcatc

SEQ ID NO: 4111688 - DNA, 25 bp, Homo sapien
tagcaatagaccagacacaggtgcc

SEQ ID NO: 4111689 - DNA, 25 bp, Homo sapien
cctgcacaaactggatgtcgctggg

SEQ ID NO: 4111690 - DNA, 25 bp, Homo sapien
tgaaggcatcgaaacgctcaggcat

SEQ ID NO: 4111691 - DNA, 25 bp, Homo sapien
agatgcccagtatctggaccccagg

SEQ ID NO: 4111692 - DNA, 25 bp, Homo sapien
acttagttcagcatatcccctggga

SEQ ID NO: 4111693 - DNA, 25 bp, Homo sapien
gaatagcttcaggaagggcccactg

SEQ ID NO: 4111694 - DNA, 25 bp, Homo sapien
tgcacagctaggaggagatgcccag

SEQ ID NO: 4111695 - DNA, 25 bp, Homo sapien
attccttgctctgcaggtaatcatc

SEQ ID NO: 4111696 - DNA, 25 bp, Homo sapien
agagaggctgagtgcaaatttggtc

SEQ ID NO: 4111697 - DNA, 25 bp, Homo sapien
tccttgctctgcaggtaatcatcag

SEQ ID NO: 4111698 - DNA, 25 bp, Homo sapien
ggctgagtgcaaatttggtctggaa

SEQ ID NO: 4111699 - DNA, 25 bp, Homo sapien
agcagttctttggtactgcatccac

SEQ ID NO: 4111700 - DNA, 25 bp, Homo sapien
tctaagtacccctggcacacattca

SEQ ID NO: 4111701 - DNA, 25 bp, Homo sapien
tcaaccccagggttaacaacagcca

SEQ ID NO: 4111702 - DNA, 25 bp, Homo sapien
ttgccccatggtgggacaagcccag

SEQ ID NO: 4111703 - DNA, 25 bp, Homo sapien
gggttggtgtagtcgcagacagtga

SEQ ID NO: 4111704 - DNA, 25 bp, Homo sapien
acaaggccttggcaaggcgagtcca

SEQ ID NO: 4111705 - DNA, 25 bp, Homo sapien
tccagaaccaagatttggtgcaggg

SEQ ID NO: 4111706 - DNA, 25 bp, Homo sapien
cagacagtgatgaacctcaggatgc

SEQ ID NO: 4111707 - DNA, 25 bp, Homo sapien
gaaaaacgtgtgtatgctggtgcct

SEQ ID NO: 4111708 - DNA, 25 bp, Homo sapien
cagggcagaagtacatggacaggca

SEQ ID NO: 4111709 - DNA, 25 bp, Homo sapien
tacttgatgaatatgccagaggcca

SEQ ID NO: 4111710 - DNA, 25 bp, Homo sapien
cagtggccagcatgtagtccagcaa

SEQ ID NO: 4111711 - DNA, 25 bp, Homo sapien
aagaatggcaaatatcggcttttct

SEQ ID NO: 4111712 - DNA, 25 bp, Homo sapien
gcaagatatattccaggatatagga

SEQ ID NO: 4111713 - DNA, 25 bp, Homo sapien
ctcaggatgcaagatatattccagg

SEQ ID NO: 4111714 - DNA, 25 bp, Homo sapien
tccaggatataggaagaatggcaaa

SEQ ID NO: 4111715 - DNA, 25 bp, Homo sapien
agcagcagcgacagaagctttgcct

SEQ ID NO: 4111716 - DNA, 25 bp, Homo sapien
gggctcagagctccggcggacctcg

SEQ ID NO: 4111717 - DNA, 25 bp, Homo sapien
tcaaactcgctgacctcgctcgtct

SEQ ID NO: 4111718 - DNA, 25 bp, Homo sapien
caatcgtctcggaacagccacgggt

SEQ ID NO: 4111719 - DNA, 25 bp, Homo sapien
tggaccagggcagggcgctcgagtc

SEQ ID NO: 4111720 - DNA, 25 bp, Homo sapien
cgtccctgttgatggaccagggcag

SEQ ID NO: 4111721 - DNA, 25 bp, Homo sapien
tcctgcagctcgtaatcgtccctgt

SEQ ID NO: 4111722 - DNA, 25 bp, Homo sapien
gcagggcgctcgagtcctcggacat

SEQ ID NO: 4111723 - DNA, 25 bp, Homo sapien
ctccccgactggaaagtcagttgga

SEQ ID NO: 4111724 - DNA, 25 bp, Homo sapien
gtcgtaagttgggtctcggttgctc

SEQ ID NO: 4111725 - DNA, 25 bp, Homo sapien
gaaagtcagttggaaggagtcgtaa

SEQ ID NO: 4111726 - DNA, 25 bp, Homo sapien
tctcggttgctcagcgcggttcctg

SEQ ID NO: 4111727 - DNA, 25 bp, Homo sapien
ggcacgcatgtgtaatcccacctac

SEQ ID NO: 4111728 - DNA, 25 bp, Homo sapien
cttgaacccaggaagcggaggttgc

SEQ ID NO: 4111729 - DNA, 25 bp, Homo sapien
ttgggaggctgagacaggagaattg

SEQ ID NO: 4111730 - DNA, 25 bp, Homo sapien
ggtggcacgcatgtgtaatcccacc

SEQ ID NO: 4111731 - DNA, 25 bp, Homo sapien
ccttaatctgtgagacaatgacccc

SEQ ID NO: 4111732 - DNA, 25 bp, Homo sapien
caaggatcccgaattaggctacagg

SEQ ID NO: 4111733 - DNA, 25 bp, Homo sapien
tcagaggcttaaatgcaagagctaa

SEQ ID NO: 4111734 - DNA, 25 bp, Homo sapien
caggagacacagatgccagtattgg

SEQ ID NO: 4111735 - DNA, 25 bp, Homo sapien
ggagttcatccatgctagtttgaca

SEQ ID NO: 4111736 - DNA, 25 bp, Homo sapien
tatccgtttgattgccactttctcc

SEQ ID NO: 4111737 - DNA, 25 bp, Homo sapien
tgacatttctcaaggtttatccgtt

SEQ ID NO: 4111738 - DNA, 25 bp, Homo sapien
gggcacaataagctgcttggactac

SEQ ID NO: 4111739 - DNA, 25 bp, Homo sapien
acagctcatcttttaccacaaaaga

SEQ ID NO: 4111740 - DNA, 25 bp, Homo sapien
tattaggatgatggcattgactcat

SEQ ID NO: 4111741 - DNA, 25 bp, Homo sapien
caaaagatgtgtagtaagatacaat

SEQ ID NO: 4111742 - DNA, 25 bp, Homo sapien
ttagcagcttcatgacaagccacag

SEQ ID NO: 4111743 - DNA, 25 bp, Homo sapien
tgaaagaaccatgcttgaccaccat

SEQ ID NO: 4111744 - DNA, 25 bp, Homo sapien
gcttccaaccatcatatgaacaggg

SEQ ID NO: 4111745 - DNA, 25 bp, Homo sapien
tgaacagggcctttaacaaagcaat

SEQ ID NO: 4111746 - DNA, 25 bp, Homo sapien
tctccagtgtgtcactaatgggatt

SEQ ID NO: 4111747 - DNA, 25 bp, Homo sapien
tctcggagtatcgtagcaatggtag

SEQ ID NO: 4111748 - DNA, 25 bp, Homo sapien
gccacaatgtgcttaataatatcca

SEQ ID NO: 4111749 - DNA, 25 bp, Homo sapien
cagcccttccagtacttctcggagt

SEQ ID NO: 4111750 - DNA, 25 bp, Homo sapien
ggtagattcatctaggactccactt

SEQ ID NO: 4111751 - DNA, 25 bp, Homo sapien
tcaacagggactgaatggaagcccc

SEQ ID NO: 4111752 - DNA, 25 bp, Homo sapien
atatgcagtacagccggtaggccca

SEQ ID NO: 4111753 - DNA, 25 bp, Homo sapien
tcaaggattgaatgggagtccccac

SEQ ID NO: 4111754 - DNA, 25 bp, Homo sapien
actaggagagtgctcacagacccgt

SEQ ID NO: 4111755 - DNA, 25 bp, Homo sapien
ggagcccaagtcccaaactgcacat

SEQ ID NO: 4111756 - DNA, 25 bp, Homo sapien
ccctcttgtccctttgttctacaag

SEQ ID NO: 4111757 - DNA, 25 bp, Homo sapien
ttctacaagttgcctgtttggagcc

SEQ ID NO: 4111758 - DNA, 25 bp, Homo sapien
gcccaagtcccaaactgcacatctt

SEQ ID NO: 4111759 - DNA, 25 bp, Homo sapien
agattcctaaggtttccgactccag

SEQ ID NO: 4111760 - DNA, 25 bp, Homo sapien
tagactagaggaccaggtagattcc

SEQ ID NO: 4111761 - DNA, 25 bp, Homo sapien
ttgaacaacacaggcaatagctggg

SEQ ID NO: 4111762 - DNA, 25 bp, Homo sapien
cagagccctaggaccttgaacaaca

SEQ ID NO: 4111763 - DNA, 25 bp, Homo sapien
ccctgcataattggcagtggcagcc

SEQ ID NO: 4111764 - DNA, 25 bp, Homo sapien
tggaccacggttgggtagagcacca

SEQ ID NO: 4111765 - DNA, 25 bp, Homo sapien
taaggagcctttggtccctgcataa

SEQ ID NO: 4111766 - DNA, 25 bp, Homo sapien
tacttgctgtggaccttaggtgaga

SEQ ID NO: 4111767 - DNA, 25 bp, Homo sapien
gaaaaactctagacccattgtataa

SEQ ID NO: 4111768 - DNA, 25 bp, Homo sapien
tttaaaagtggcctaaaatgctgcc

SEQ ID NO: 4111769 - DNA, 25 bp, Homo sapien
tagtaacatattacccatgcatgtg

SEQ ID NO: 4111770 - DNA, 25 bp, Homo sapien
ttcagaattgccctcaaagttagct

SEQ ID NO: 4111771 - DNA, 25 bp, Homo sapien
ctgtactgagccatcttctccaaga

SEQ ID NO: 4111772 - DNA, 25 bp, Homo sapien
ctgcaatctgtactgagccatcttc

SEQ ID NO: 4111773 - DNA, 25 bp, Homo sapien
cttctccaagaagaatgtttccagc

SEQ ID NO: 4111774 - DNA, 25 bp, Homo sapien
caatctgtactgagccatcttctcc

SEQ ID NO: 4111775 - DNA, 25 bp, Homo sapien
caccagttgctaaaaaagcactaac

SEQ ID NO: 4111776 - DNA, 25 bp, Homo sapien
caccaccagttgctaaaaaagcact

SEQ ID NO: 4111777 - DNA, 25 bp, Homo sapien
ccaccagttgctaaaaaagcactaa

SEQ ID NO: 4111778 - DNA, 25 bp, Homo sapien
atcaccaccagttgctaaaaaagca

SEQ ID NO: 4111779 - DNA, 25 bp, Homo sapien
atccaacaaggggtgccaacaaagg

SEQ ID NO: 4111780 - DNA, 25 bp, Homo sapien
catccaacaaggggtgccaacaaag

SEQ ID NO: 4111781 - DNA, 25 bp, Homo sapien
gccaattcaattgctgtaattccaa

SEQ ID NO: 4111782 - DNA, 25 bp, Homo sapien
tccaaaactccaaatatcagctttg

SEQ ID NO: 4111783 - DNA, 25 bp, Homo sapien
ggagccgcccctgtagccaattcaa

SEQ ID NO: 4111784 - DNA, 25 bp, Homo sapien
tggtggatatttatgataaggagcc

SEQ ID NO: 4111785 - DNA, 25 bp, Homo sapien
ctttatcttgaacaccagtttccaa

SEQ ID NO: 4111786 - DNA, 25 bp, Homo sapien
tctcacaatgttttattagagagaa

SEQ ID NO: 4111787 - DNA, 25 bp, Homo sapien
gctgaactatttagggtacactgta

SEQ ID NO: 4111788 - DNA, 25 bp, Homo sapien
tgtgattcttagacttctcacaatg

SEQ ID NO: 4111789 - DNA, 25 bp, Homo sapien
cactgtatactacaaagaaggcaga

SEQ ID NO: 4111790 - DNA, 25 bp, Homo sapien
tacactagagatgtgatcaagaaca

SEQ ID NO: 4111791 - DNA, 25 bp, Homo sapien
ccctattacatacactagagatgtg

SEQ ID NO: 4111792 - DNA, 25 bp, Homo sapien
tacatacactagagatgtgatcaag

SEQ ID NO: 4111793 - DNA, 25 bp, Homo sapien
tgaaaccctattacatacactagag

SEQ ID NO: 4111794 - DNA, 25 bp, Homo sapien
cagccttcaatttaggtaaccacag

SEQ ID NO: 4111795 - DNA, 25 bp, Homo sapien
cacacaaagaggaaatggaccaaat

SEQ ID NO: 4111796 - DNA, 25 bp, Homo sapien
ttcttgccacatggtagcctgccag

SEQ ID NO: 4111797 - DNA, 25 bp, Homo sapien
tggaccaaatcaagacctccacttc

SEQ ID NO: 4111798 - DNA, 25 bp, Homo sapien
tttgctttctggaaaaatttgtgcc

SEQ ID NO: 4111799 - DNA, 25 bp, Homo sapien
aaaatttgtgccttaatagttctgc

SEQ ID NO: 4111800 - DNA, 25 bp, Homo sapien
tctggaaaaatttgtgccttaatag

SEQ ID NO: 4111801 - DNA, 25 bp, Homo sapien
gctttctggaaaaatttgtgcctta

SEQ ID NO: 4111802 - DNA, 25 bp, Homo sapien
ctttcagaaatggttggtgctctct

SEQ ID NO: 4111803 - DNA, 25 bp, Homo sapien
ttcagaaatggttggtgctctctgc

SEQ ID NO: 4111804 - DNA, 25 bp, Homo sapien
ctctttcagaaatggttggtgctct

SEQ ID NO: 4111805 - DNA, 25 bp, Homo sapien
tcagaaatggttggtgctctctgca

SEQ ID NO: 4111806 - DNA, 25 bp, Homo sapien
tatcatcagcagaagcccaaactgc

SEQ ID NO: 4111807 - DNA, 25 bp, Homo sapien
cctcctttccttcacattggataag

SEQ ID NO: 4111808 - DNA, 25 bp, Homo sapien
cttcttcaagtctatcatcagcaga

SEQ ID NO: 4111809 - DNA, 25 bp, Homo sapien
agtctatcatcagcagaagcccaaa

SEQ ID NO: 4111810 - DNA, 25 bp, Homo sapien
taatgcttctaacttcttggacagg

SEQ ID NO: 4111811 - DNA, 25 bp, Homo sapien
tctacggaagagaataagccactgc

SEQ ID NO: 4111812 - DNA, 25 bp, Homo sapien
tatcaaaattcccaagcagtgagat

SEQ ID NO: 4111813 - DNA, 25 bp, Homo sapien
tgtaacgatgcattatagccactga

SEQ ID NO: 4111814 - DNA, 25 bp, Homo sapien
agcgtgagtcaccatatccccggtc

SEQ ID NO: 4111815 - DNA, 25 bp, Homo sapien
ccggtctgaggctcgctcttctttt

SEQ ID NO: 4111816 - DNA, 25 bp, Homo sapien
gccaccgtgcttgatctctttttat

SEQ ID NO: 4111817 - DNA, 25 bp, Homo sapien
atatgcaggtattcacccaggctga

SEQ ID NO: 4111818 - DNA, 25 bp, Homo sapien
cattaagaggtttccctgaggtatc

SEQ ID NO: 4111819 - DNA, 25 bp, Homo sapien
gaactaaagcactgattggaaacac

SEQ ID NO: 4111820 - DNA, 25 bp, Homo sapien
gaggtacctggcactattaattccc

SEQ ID NO: 4111821 - DNA, 25 bp, Homo sapien
tattcccatgtttaactgtgcctgg

SEQ ID NO: 4111822 - DNA, 25 bp, Homo sapien
tgatgagcatgtgggttgtttacac

SEQ ID NO: 4111823 - DNA, 25 bp, Homo sapien
ctggcgtgtgcctaggagtagaact

SEQ ID NO: 4111824 - DNA, 25 bp, Homo sapien
catctttaccaacagttgttactgt

SEQ ID NO: 4111825 - DNA, 25 bp, Homo sapien
tttgtttaggcttctgaggaactgc

SEQ ID NO: 4111826 - DNA, 25 bp, Homo sapien
gtcttatgaagacgcccactggaac

SEQ ID NO: 4111827 - DNA, 25 bp, Homo sapien
tatgaagacgcccactggaacctgg

SEQ ID NO: 4111828 - DNA, 25 bp, Homo sapien
tctgtcttatgaagacgcccactgg

SEQ ID NO: 4111829 - DNA, 25 bp, Homo sapien
tccatcctctgtcttatgaagacgc

SEQ ID NO: 4111830 - DNA, 25 bp, Homo sapien
tagcatcatcatccctttcacagga

SEQ ID NO: 4111831 - DNA, 25 bp, Homo sapien
gagagtatcaattcaaacaggagtc

SEQ ID NO: 4111832 - DNA, 25 bp, Homo sapien
caagagagtcttaagtgctttcacc

SEQ ID NO: 4111833 - DNA, 25 bp, Homo sapien
taaaagcaggaagcaatataccagt

SEQ ID NO: 4111834 - DNA, 25 bp, Homo sapien
cattatctggatacaaggcatgtca

SEQ ID NO: 4111835 - DNA, 25 bp, Homo sapien
tcaggccattcagtggacaaagctg

SEQ ID NO: 4111836 - DNA, 25 bp, Homo sapien
gagagtgaaccctagatagctgcag

SEQ ID NO: 4111837 - DNA, 25 bp, Homo sapien
aaacagagctaagagaccgggagac

SEQ ID NO: 4111838 - DNA, 25 bp, Homo sapien
gatattgattctttcactcggggag

SEQ ID NO: 4111839 - DNA, 25 bp, Homo sapien
atattgattctttcactcggggaga

SEQ ID NO: 4111840 - DNA, 25 bp, Homo sapien
gagcagagatctgttctggaacttg

SEQ ID NO: 4111841 - DNA, 25 bp, Homo sapien
ttggctgtgtagcaatctgcccagc

SEQ ID NO: 4111842 - DNA, 25 bp, Homo sapien
gcaaagtacccacaggatcagttgt

SEQ ID NO: 4111843 - DNA, 25 bp, Homo sapien
ctggaacttggagcaaagtacccac

SEQ ID NO: 4111844 - DNA, 25 bp, Homo sapien
taatcttagtactagactgattggg

SEQ ID NO: 4111845 - DNA, 25 bp, Homo sapien
tcttagtactagactgattgggatc

SEQ ID NO: 4111846 - DNA, 25 bp, Homo sapien
aatcttagtactagactgattggga

SEQ ID NO: 4111847 - DNA, 25 bp, Homo sapien
cttaatcttagtactagactgattg

SEQ ID NO: 4111848 - DNA, 25 bp, Homo sapien
caggagtaaattcaaatcgaatatc

SEQ ID NO: 4111849 - DNA, 25 bp, Homo sapien
aaatcccttccgtcgaccaggccag

SEQ ID NO: 4111850 - DNA, 25 bp, Homo sapien
ccttccgtcgaccaggccagcagaa

SEQ ID NO: 4111851 - DNA, 25 bp, Homo sapien
taaatcccttccgtcgaccaggcca

SEQ ID NO: 4111852 - DNA, 25 bp, Homo sapien
atcccttccgtcgaccaggccagca

SEQ ID NO: 4111853 - DNA, 25 bp, Homo sapien
gacagatcgatttgactgaggttct

SEQ ID NO: 4111854 - DNA, 25 bp, Homo sapien
acaattttctgcaaattagctgcca

SEQ ID NO: 4111855 - DNA, 25 bp, Homo sapien
gactgaggttcttccacaattttct

SEQ ID NO: 4111856 - DNA, 25 bp, Homo sapien
cagtttgaaagtgacagatcgattt

SEQ ID NO: 4111857 - DNA, 25 bp, Homo sapien
atatctgagccttcgacaccagatg

SEQ ID NO: 4111858 - DNA, 25 bp, Homo sapien
aatatctgagccttcgacaccagat

SEQ ID NO: 4111859 - DNA, 25 bp, Homo sapien
tatctgagccttcgacaccagatgc

SEQ ID NO: 4111860 - DNA, 25 bp, Homo sapien
agctgggcaaatcctatcagtttac

SEQ ID NO: 4111861 - DNA, 25 bp, Homo sapien
gagctgggcaaatcctatcagttta

SEQ ID NO: 4111862 - DNA, 25 bp, Homo sapien
aagaacacagtttaggctgcctcca

SEQ ID NO: 4111863 - DNA, 25 bp, Homo sapien
taaattaaattctctgggctccagc

SEQ ID NO: 4111864 - DNA, 25 bp, Homo sapien
tgaggaagcccgatacagctgctac

SEQ ID NO: 4111865 - DNA, 25 bp, Homo sapien
acttctaaagctcctagccgggagg

SEQ ID NO: 4111866 - DNA, 25 bp, Homo sapien
taaggccagattgagtatcccactc

SEQ ID NO: 4111867 - DNA, 25 bp, Homo sapien
ctcgagtgattctgtaaagggcaac

SEQ ID NO: 4111868 - DNA, 25 bp, Homo sapien
taaggtaagcggtaagccactagtc

SEQ ID NO: 4111869 - DNA, 25 bp, Homo sapien
gggagtctaccacacatcatgcaga

SEQ ID NO: 4111870 - DNA, 25 bp, Homo sapien
aggctctctgcaatgcttcaaggcc

SEQ ID NO: 4111871 - DNA, 25 bp, Homo sapien
cacatcctgtaaagactgccaaagg

SEQ ID NO: 4111872 - DNA, 25 bp, Homo sapien
tcctgtaaagactgccaaaggctct

SEQ ID NO: 4111873 - DNA, 25 bp, Homo sapien
aaggcccatgaccaggtatcctctt

SEQ ID NO: 4111874 - DNA, 25 bp, Homo sapien
cctagtctggtattccccttatggg

SEQ ID NO: 4111875 - DNA, 25 bp, Homo sapien
tcagcctgcagtacaggtcaaggca

SEQ ID NO: 4111876 - DNA, 25 bp, Homo sapien
gaaaacaactgctaccagtcaccac

SEQ ID NO: 4111877 - DNA, 25 bp, Homo sapien
aagcctgttaatcagtcagcctgca

SEQ ID NO: 4111878 - DNA, 25 bp, Homo sapien
tacctcctcagcctggggacactag

SEQ ID NO: 4111879 - DNA, 25 bp, Homo sapien
acctcctcagcctggggacactagg

SEQ ID NO: 4111880 - DNA, 25 bp, Homo sapien
gtatgccagtcactacctcctcagc

SEQ ID NO: 4111881 - DNA, 25 bp, Homo sapien
cactacctcctcagcctggggacac

SEQ ID NO: 4111882 - DNA, 25 bp, Homo sapien
ccaggacctggacaaactgagccat

SEQ ID NO: 4111883 - DNA, 25 bp, Homo sapien
tttcagccaggacctggacaaactg

SEQ ID NO: 4111884 - DNA, 25 bp, Homo sapien
tcagccaggacctggacaaactgag

SEQ ID NO: 4111885 - DNA, 25 bp, Homo sapien
ctatttcagccaggacctggacaaa

SEQ ID NO: 4111886 - DNA, 25 bp, Homo sapien
gctgtatctggaagcgaccaaagtc

SEQ ID NO: 4111887 - DNA, 25 bp, Homo sapien
tgggagcctgttctcaggatattcc

SEQ ID NO: 4111888 - DNA, 25 bp, Homo sapien
ttcagcagcactcaggttgaaagtg

SEQ ID NO: 4111889 - DNA, 25 bp, Homo sapien
gctgcgtctcattgaagcggtggct

SEQ ID NO: 4111890 - DNA, 25 bp, Homo sapien
aggcatatcacaacacgttagggct

SEQ ID NO: 4111891 - DNA, 25 bp, Homo sapien
tatcacaacacgttagggctggtga

SEQ ID NO: 4111892 - DNA, 25 bp, Homo sapien
gcatatcacaacacgttagggctgg

SEQ ID NO: 4111893 - DNA, 25 bp, Homo sapien
tcacaacacgttagggctggtgaag

SEQ ID NO: 4111894 - DNA, 25 bp, Homo sapien
ggtgcttccgatcacaaaccaggtt

SEQ ID NO: 4111895 - DNA, 25 bp, Homo sapien
gcttccgatcacaaaccaggttgaa

SEQ ID NO: 4111896 - DNA, 25 bp, Homo sapien
caggtgcttccgatcacaaaccagg

SEQ ID NO: 4111897 - DNA, 25 bp, Homo sapien
cttcaggtgcttccgatcacaaacc

SEQ ID NO: 4111898 - DNA, 25 bp, Homo sapien
caaacatgagggtgccaacaaggag

SEQ ID NO: 4111899 - DNA, 25 bp, Homo sapien
gcccaaacatgagggtgccaacaag

SEQ ID NO: 4111900 - DNA, 25 bp, Homo sapien
gggcccaaacatgagggtgccaaca

SEQ ID NO: 4111901 - DNA, 25 bp, Homo sapien
ccaaacatgagggtgccaacaagga

SEQ ID NO: 4111902 - DNA, 25 bp, Homo sapien
cattgctgaagctaagtccagcgac

SEQ ID NO: 4111903 - DNA, 25 bp, Homo sapien
tagccacagcaaagcgcagggccat

SEQ ID NO: 4111904 - DNA, 25 bp, Homo sapien
gaagctaagtccagcgacggcagta

SEQ ID NO: 4111905 - DNA, 25 bp, Homo sapien
cgccaggattgtggccttgcggcca

SEQ ID NO: 4111906 - DNA, 25 bp, Homo sapien
cagttgcggaaaccgtaggcgagtc

SEQ ID NO: 4111907 - DNA, 25 bp, Homo sapien
gaaggagcctccagttgcggaaacc

SEQ ID NO: 4111908 - DNA, 25 bp, Homo sapien
aggcgagtcccgcaagcaccatctg

SEQ ID NO: 4111909 - DNA, 25 bp, Homo sapien
tctgcccgagggagaagttgcactg

SEQ ID NO: 4111910 - DNA, 25 bp, Homo sapien
ccgaggccgccttctggatcagttg

SEQ ID NO: 4111911 - DNA, 25 bp, Homo sapien
ggatcagttgtatcgcctcgtccat

SEQ ID NO: 4111912 - DNA, 25 bp, Homo sapien
gagagtttccgcctattgaccgagg

SEQ ID NO: 4111913 - DNA, 25 bp, Homo sapien
ctcccacgggtcaggagccaacgtg

SEQ ID NO: 4111914 - DNA, 25 bp, Homo sapien
cagaagataatcagggtcaccttcc

SEQ ID NO: 4111915 - DNA, 25 bp, Homo sapien
acagaagataatcagggtcaccttc

SEQ ID NO: 4111916 - DNA, 25 bp, Homo sapien
cacagaagataatcagggtcacctt

SEQ ID NO: 4111917 - DNA, 25 bp, Homo sapien
agaagataatcagggtcaccttccg

SEQ ID NO: 4111918 - DNA, 25 bp, Homo sapien
gcggccaaacctctgcatcatgaag

SEQ ID NO: 4111919 - DNA, 25 bp, Homo sapien
tggaacagcgggcaggcacctcaac

SEQ ID NO: 4111920 - DNA, 25 bp, Homo sapien
tcagatagacgtccaggccgaagtc

SEQ ID NO: 4111921 - DNA, 25 bp, Homo sapien
cgtagtaccccagactgtccacaaa

SEQ ID NO: 4111922 - DNA, 25 bp, Homo sapien
ggaaaagctcggcagagtacacata

SEQ ID NO: 4111923 - DNA, 25 bp, Homo sapien
cataggagatggtaaaggcagcagc

SEQ ID NO: 4111924 - DNA, 25 bp, Homo sapien
agctcggcagagtacacataggaga

SEQ ID NO: 4111925 - DNA, 25 bp, Homo sapien
tacacataggagatggtaaaggcag

SEQ ID NO: 4111926 - DNA, 25 bp, Homo sapien
tgcccccgatccgtgagaagatgcc

SEQ ID NO: 4111927 - DNA, 25 bp, Homo sapien
gaggatgcccccgatccgtgagaag

SEQ ID NO: 4111928 - DNA, 25 bp, Homo sapien
gtgtgaggatgcccccgatccgtga

SEQ ID NO: 4111929 - DNA, 25 bp, Homo sapien
gatgcccccgatccgtgagaagatg

SEQ ID NO: 4111930 - DNA, 25 bp, Homo sapien
cctggccatgcgtctctggcagcag

SEQ ID NO: 4111931 - DNA, 25 bp, Homo sapien
gggagggcagcgtggtactctccca

SEQ ID NO: 4111932 - DNA, 25 bp, Homo sapien
aggccctggccatgcgtctctggca

SEQ ID NO: 4111933 - DNA, 25 bp, Homo sapien
aggctgccgtagatgagcatgggga

SEQ ID NO: 4111934 - DNA, 25 bp, Homo sapien
aggccactcccgggctggaagttct

SEQ ID NO: 4111935 - DNA, 25 bp, Homo sapien
gagccataccccatgaagattgtta

SEQ ID NO: 4111936 - DNA, 25 bp, Homo sapien
ttgaggagatcaagagagccatacc

SEQ ID NO: 4111937 - DNA, 25 bp, Homo sapien
gaatctggtccatccgctagaagga

SEQ ID NO: 4111938 - DNA, 25 bp, Homo sapien
tgcctgggtagagtccacaacttca

SEQ ID NO: 4111939 - DNA, 25 bp, Homo sapien
tgggccctggaaggtccagaagcag

SEQ ID NO: 4111940 - DNA, 25 bp, Homo sapien
cctgcatgggccctggaaggtccag

SEQ ID NO: 4111941 - DNA, 25 bp, Homo sapien
catgggccctggaaggtccagaagc

SEQ ID NO: 4111942 - DNA, 25 bp, Homo sapien
ctgcatgggccctggaaggtccaga

SEQ ID NO: 4111943 - DNA, 25 bp, Homo sapien
aagcccaagaagatggcccgtggaa

SEQ ID NO: 4111944 - DNA, 25 bp, Homo sapien
caataccaaggcctgagaagatctc

SEQ ID NO: 4111945 - DNA, 25 bp, Homo sapien
gcattagccaatgtgcaccagaaag

SEQ ID NO: 4111946 - DNA, 25 bp, Homo sapien
gcagcagctcggtgaaaagacctct

SEQ ID NO: 4111947 - DNA, 25 bp, Homo sapien
actgcctttagctgggaaatggccc

SEQ ID NO: 4111948 - DNA, 25 bp, Homo sapien
ggtgctgaacacttccatgctgggt

SEQ ID NO: 4111949 - DNA, 25 bp, Homo sapien
ccgtcttaaagggagcaagtgtcca

SEQ ID NO: 4111950 - DNA, 25 bp, Homo sapien
tagtattccccaagaggatgccatg

SEQ ID NO: 4111951 - DNA, 25 bp, Homo sapien
acagtttcgctttcacacacctgga

SEQ ID NO: 4111952 - DNA, 25 bp, Homo sapien
gagtgagtatgaaacacgcagtgga

SEQ ID NO: 4111953 - DNA, 25 bp, Homo sapien
tcatagatcacatgggcaggtacgg

SEQ ID NO: 4111954 - DNA, 25 bp, Homo sapien
gcgcagttctcttcatgacacctca

SEQ ID NO: 4111955 - DNA, 25 bp, Homo sapien
tgcctccctgtaggcaggaccgcaa

SEQ ID NO: 4111956 - DNA, 25 bp, Homo sapien
cccttggaagcagaacctttgagct

SEQ ID NO: 4111957 - DNA, 25 bp, Homo sapien
agctggaaatggcttggccctaccc

SEQ ID NO: 4111958 - DNA, 25 bp, Homo sapien
agggtcagcattctactccagggac

SEQ ID NO: 4111959 - DNA, 25 bp, Homo sapien
ggccccaggcaattggctctcaatg

SEQ ID NO: 4111960 - DNA, 25 bp, Homo sapien
caggcaattggctctcaatgtgcca

SEQ ID NO: 4111961 - DNA, 25 bp, Homo sapien
tcaatgtgccaaagaggtaactgag

SEQ ID NO: 4111962 - DNA, 25 bp, Homo sapien
gtggacaggccccaggcaattggct

SEQ ID NO: 4111963 - DNA, 25 bp, Homo sapien
tgtagtgatgcatgctgttagtccc

SEQ ID NO: 4111964 - DNA, 25 bp, Homo sapien
tcagtgcaatactagaactggtgca

SEQ ID NO: 4111965 - DNA, 25 bp, Homo sapien
gagagcagtcttacagaccactgat

SEQ ID NO: 4111966 - DNA, 25 bp, Homo sapien
gcttctggtgaattgcagagcctga

SEQ ID NO: 4111967 - DNA, 25 bp, Homo sapien
gaaggcaagccactctacaagtcga

SEQ ID NO: 4111968 - DNA, 25 bp, Homo sapien
caaagatctgcatcgtcggctgtag

SEQ ID NO: 4111969 - DNA, 25 bp, Homo sapien
aacatcagagaccagcatgggagcc

SEQ ID NO: 4111970 - DNA, 25 bp, Homo sapien
cttgcaaaaggtaggagaggtctct

SEQ ID NO: 4111971 - DNA, 25 bp, Homo sapien
ctgtccaaagaaagggtgcagctca

SEQ ID NO: 4111972 - DNA, 25 bp, Homo sapien
agctcagtctctgctgacaccactt

SEQ ID NO: 4111973 - DNA, 25 bp, Homo sapien
tccaaagaaagggtgcagctcagtc

SEQ ID NO: 4111974 - DNA, 25 bp, Homo sapien
ccaaagaaagggtgcagctcagtct

SEQ ID NO: 4111975 - DNA, 25 bp, Homo sapien
cctgggatctgagctcttccttgaa

SEQ ID NO: 4111976 - DNA, 25 bp, Homo sapien
tggaagcatcctgggatctgagctc

SEQ ID NO: 4111977 - DNA, 25 bp, Homo sapien
tcttccttgaagttctcctctcctg

SEQ ID NO: 4111978 - DNA, 25 bp, Homo sapien
gcatcctgggatctgagctcttcct

SEQ ID NO: 4111979 - DNA, 25 bp, Homo sapien
tggatgtcctgctacctcatgctgg

SEQ ID NO: 4111980 - DNA, 25 bp, Homo sapien
ggaatgtggatgtcctgctacctca

SEQ ID NO: 4111981 - DNA, 25 bp, Homo sapien
tgctacctcatgctggttcaagttc

SEQ ID NO: 4111982 - DNA, 25 bp, Homo sapien
gaccaggaatgtggatgtcctgcta

SEQ ID NO: 4111983 - DNA, 25 bp, Homo sapien
gcttcttagcgtcaggatagatcca

SEQ ID NO: 4111984 - DNA, 25 bp, Homo sapien
tctgtgtcattgaggccaaactgga

SEQ ID NO: 4111985 - DNA, 25 bp, Homo sapien
tctgggctgtgaacacgaagtggtc

SEQ ID NO: 4111986 - DNA, 25 bp, Homo sapien
cagcaaacatgaagaaggccgacat

SEQ ID NO: 4111987 - DNA, 25 bp, Homo sapien
agactgagactcatcccagcgtggg

SEQ ID NO: 4111988 - DNA, 25 bp, Homo sapien
gggtccagagactgagactcatccc

SEQ ID NO: 4111989 - DNA, 25 bp, Homo sapien
gactgagactcatcccagcgtggga

SEQ ID NO: 4111990 - DNA, 25 bp, Homo sapien
ctttgggtccagagactgagactca

SEQ ID NO: 4111991 - DNA, 25 bp, Homo sapien
acagagattggccacgggtgcccac

SEQ ID NO: 4111992 - DNA, 25 bp, Homo sapien
cacagagattggccacgggtgccca

SEQ ID NO: 4111993 - DNA, 25 bp, Homo sapien
gacacagagattggccacgggtgcc

SEQ ID NO: 4111994 - DNA, 25 bp, Homo sapien
acacagagattggccacgggtgccc

SEQ ID NO: 4111995 - DNA, 25 bp, Homo sapien
agtgtccttcttcgtctccatgcca

SEQ ID NO: 4111996 - DNA, 25 bp, Homo sapien
gagccctgccatgaacatgatctgt

SEQ ID NO: 4111997 - DNA, 25 bp, Homo sapien
atgagagagcctatcgggagccctg

SEQ ID NO: 4111998 - DNA, 25 bp, Homo sapien
gcagtgtccttcttcgtctccatgc

SEQ ID NO: 4111999 - DNA, 25 bp, Homo sapien
ccaaccctgaatgcccatgaggagg

SEQ ID NO: 4112000 - DNA, 25 bp, Homo sapien
tgagccatccatgggtccctggaga

SEQ ID NO: 4112001 - DNA, 25 bp, Homo sapien
atggctcggggaccagcagaaactc

SEQ ID NO: 4112002 - DNA, 25 bp, Homo sapien
accaagtgccgggatctcccgggct

SEQ ID NO: 4112003 - DNA, 25 bp, Homo sapien
caggatggcagggtagcggcccatc

SEQ ID NO: 4112004 - DNA, 25 bp, Homo sapien
tcccaaagccgaagatgatcagccc

SEQ ID NO: 4112005 - DNA, 25 bp, Homo sapien
ttcatgaaggctgtcccaaagccga

SEQ ID NO: 4112006 - DNA, 25 bp, Homo sapien
cactgactgcgagatgccaaagcga

SEQ ID NO: 4112007 - DNA, 25 bp, Homo sapien
agaaatgctgctgatggcgtagccc

SEQ ID NO: 4112008 - DNA, 25 bp, Homo sapien
aaatgctgctgatggcgtagcccac

SEQ ID NO: 4112009 - DNA, 25 bp, Homo sapien
aaagaaatgctgctgatggcgtagc

SEQ ID NO: 4112010 - DNA, 25 bp, Homo sapien
ccaaagaaatgctgctgatggcgta

SEQ ID NO: 4112011 - DNA, 25 bp, Homo sapien
cctggcctttcttaagggctcagta

SEQ ID NO: 4112012 - DNA, 25 bp, Homo sapien
aaggtggaagggcagtcagggcact

SEQ ID NO: 4112013 - DNA, 25 bp, Homo sapien
aggcagccaggaacggagatccctt

SEQ ID NO: 4112014 - DNA, 25 bp, Homo sapien
tctgcctgtccaattaggcccctga

SEQ ID NO: 4112015 - DNA, 25 bp, Homo sapien
tgagatcaggcaaagcttcttctgc

SEQ ID NO: 4112016 - DNA, 25 bp, Homo sapien
aaagcttcttctgctcgtctctgca

SEQ ID NO: 4112017 - DNA, 25 bp, Homo sapien
gacagttgagatcaggcaaagcttc

SEQ ID NO: 4112018 - DNA, 25 bp, Homo sapien
ctgctctggacagttgagatcaggc

SEQ ID NO: 4112019 - DNA, 25 bp, Homo sapien
aagactgtaggcgatccctgtcagc

SEQ ID NO: 4112020 - DNA, 25 bp, Homo sapien
tcccaggataatggcatgggcccgg

SEQ ID NO: 4112021 - DNA, 25 bp, Homo sapien
gcgaaaaagcagtgtcccaggataa

SEQ ID NO: 4112022 - DNA, 25 bp, Homo sapien
gcaacacggccccaacagcgaaaaa

SEQ ID NO: 4112023 - DNA, 25 bp, Homo sapien
ccagcccctctcttatctcaccgtt

SEQ ID NO: 4112024 - DNA, 25 bp, Homo sapien
tgcgtggccagcccctctcttatct

SEQ ID NO: 4112025 - DNA, 25 bp, Homo sapien
gtggccagcccctctcttatctcac

SEQ ID NO: 4112026 - DNA, 25 bp, Homo sapien
gccagcccctctcttatctcaccgt

SEQ ID NO: 4112027 - DNA, 25 bp, Homo sapien
cagccaccgcggggactccgggaga

SEQ ID NO: 4112028 - DNA, 25 bp, Homo sapien
tcttgttcacacttgcggcgtagca

SEQ ID NO: 4112029 - DNA, 25 bp, Homo sapien
agatttgaaggaatggtcttcttgt

SEQ ID NO: 4112030 - DNA, 25 bp, Homo sapien
ttgcggcgtagcacagcacctgctt

SEQ ID NO: 4112031 - DNA, 25 bp, Homo sapien
gaaggaatggtcttcttgttcacac

SEQ ID NO: 4112032 - DNA, 25 bp, Homo sapien
aagtccaggacagaggcccgagtca

SEQ ID NO: 4112033 - DNA, 25 bp, Homo sapien
ttgcagagctgcctattcttacaga

SEQ ID NO: 4112034 - DNA, 25 bp, Homo sapien
gagctgcctattcttacagaagtcc

SEQ ID NO: 4112035 - DNA, 25 bp, Homo sapien
ttacagaagtccaggacagaggccc

SEQ ID NO: 4112036 - DNA, 25 bp, Homo sapien
gccaggaggcaagtgcgcgtgcaca

SEQ ID NO: 4112037 - DNA, 25 bp, Homo sapien
caggaggcaagtgcgcgtgcacacg

SEQ ID NO: 4112038 - DNA, 25 bp, Homo sapien
ccaggaggcaagtgcgcgtgcacac

SEQ ID NO: 4112039 - DNA, 25 bp, Homo sapien
ctcattctcaggctcaacgtaaaat

SEQ ID NO: 4112040 - DNA, 25 bp, Homo sapien
gtgtctgaagtggacgctcacgccc

SEQ ID NO: 4112041 - DNA, 25 bp, Homo sapien
gccgggcaggcacctccatgatgct

SEQ ID NO: 4112042 - DNA, 25 bp, Homo sapien
caacgtaaaataggtgtaactgacg

SEQ ID NO: 4112043 - DNA, 25 bp, Homo sapien
caacgtggccacttgagtctgaggc

SEQ ID NO: 4112044 - DNA, 25 bp, Homo sapien
ggacaacgtggccacttgagtctga

SEQ ID NO: 4112045 - DNA, 25 bp, Homo sapien
ccggacaacgtggccacttgagtct

SEQ ID NO: 4112046 - DNA, 25 bp, Homo sapien
gacaacgtggccacttgagtctgag

SEQ ID NO: 4112047 - DNA, 25 bp, Homo sapien
caggctgaactctctgagcatgagc

SEQ ID NO: 4112048 - DNA, 25 bp, Homo sapien
agctcagcggtgtagaggaagaaca

SEQ ID NO: 4112049 - DNA, 25 bp, Homo sapien
caccaagatcgtcatggatttcagc

SEQ ID NO: 4112050 - DNA, 25 bp, Homo sapien
ctcagcggtgtagaggaagaacaca

SEQ ID NO: 4112051 - DNA, 25 bp, Homo sapien
gaaagtggaggtgagagctcctgtg

SEQ ID NO: 4112052 - DNA, 25 bp, Homo sapien
gtggaggtgagagctcctgtgaggg

SEQ ID NO: 4112053 - DNA, 25 bp, Homo sapien
ctgaaagtggaggtgagagctcctg

SEQ ID NO: 4112054 - DNA, 25 bp, Homo sapien
ggaggtgagagctcctgtgaggggt

SEQ ID NO: 4112055 - DNA, 25 bp, Homo sapien
atctcgcgtttccggcagcagggag

SEQ ID NO: 4112056 - DNA, 25 bp, Homo sapien
gagtggttcaggctctcggagaggg

SEQ ID NO: 4112057 - DNA, 25 bp, Homo sapien
aggccacgatggctaagacgcagca

SEQ ID NO: 4112058 - DNA, 25 bp, Homo sapien
gctaagacgcagcagagaaagatgg

SEQ ID NO: 4112059 - DNA, 25 bp, Homo sapien
tgaaagagccatcagaggatgagtc

SEQ ID NO: 4112060 - DNA, 25 bp, Homo sapien
gaaagagccatcagaggatgagtcc

SEQ ID NO: 4112061 - DNA, 25 bp, Homo sapien
ctgaaagagccatcagaggatgagt

SEQ ID NO: 4112062 - DNA, 25 bp, Homo sapien
tgatgtttccttagtcttcatgtcc

SEQ ID NO: 4112063 - DNA, 25 bp, Homo sapien
tcagacatcatcagatgatgtttcc

SEQ ID NO: 4112064 - DNA, 25 bp, Homo sapien
gatgtttccttagtcttcatgtcct

SEQ ID NO: 4112065 - DNA, 25 bp, Homo sapien
agatgatgtttccttagtcttcatg

SEQ ID NO: 4112066 - DNA, 25 bp, Homo sapien
ctgaactaggcctggaatttgtggc

SEQ ID NO: 4112067 - DNA, 25 bp, Homo sapien
tattgaattgcttcaaggcagggtt

SEQ ID NO: 4112068 - DNA, 25 bp, Homo sapien
ggcctggaatccatgaccccatact

SEQ ID NO: 4112069 - DNA, 25 bp, Homo sapien
tcaattccaacccaagatggtctgg

SEQ ID NO: 4112070 - DNA, 25 bp, Homo sapien
cggcgtgatagtcgccgcgctccag

SEQ ID NO: 4112071 - DNA, 25 bp, Homo sapien
ccgtccgtccgccacgcggcgtgat

SEQ ID NO: 4112072 - DNA, 25 bp, Homo sapien
gctccagcgcccagagacgcagggg

SEQ ID NO: 4112073 - DNA, 25 bp, Homo sapien
cccctagctccgcccggccggactg

SEQ ID NO: 4112074 - DNA, 25 bp, Homo sapien
tgctgcgtgctgaagtcccagccca

SEQ ID NO: 4112075 - DNA, 25 bp, Homo sapien
cagcagcggcgaggggcgtgctccg

SEQ ID NO: 4112076 - DNA, 25 bp, Homo sapien
tgcgtgctgaagtcccagcccaggc

SEQ ID NO: 4112077 - DNA, 25 bp, Homo sapien
ctgctgcgtgctgaagtcccagccc

SEQ ID NO: 4112078 - DNA, 25 bp, Homo sapien
tagctgacttccttcggatccccgt

SEQ ID NO: 4112079 - DNA, 25 bp, Homo sapien
gccgaggagcgcctgcagtttcctg

SEQ ID NO: 4112080 - DNA, 25 bp, Homo sapien
gatccccgtcactgggtgcccagaa

SEQ ID NO: 4112081 - DNA, 25 bp, Homo sapien
agaacagcgcaggaacccgccgagt

SEQ ID NO: 4112082 - DNA, 25 bp, Homo sapien
ccctctttgaaggcaaattttgatt

SEQ ID NO: 4112083 - DNA, 25 bp, Homo sapien
gcctgtctgcagggcgttggcagca

SEQ ID NO: 4112084 - DNA, 25 bp, Homo sapien
tctctgtcaaaatgcacactttcct

SEQ ID NO: 4112085 - DNA, 25 bp, Homo sapien
acattcaactctgcatcaacagcaa

SEQ ID NO: 4112086 - DNA, 25 bp, Homo sapien
cattcaactctgcatcaacagcaac

SEQ ID NO: 4112087 - DNA, 25 bp, Homo sapien
atctctgtcaaaatgcacactttcc

SEQ ID NO: 4112088 - DNA, 25 bp, Homo sapien
aatgagaggtgcacaaagggtcagc

SEQ ID NO: 4112089 - DNA, 25 bp, Homo sapien
tttagactcctaacggccagatgtg

SEQ ID NO: 4112090 - DNA, 25 bp, Homo sapien
tgcaccgagtgaccaccatgtgaag

SEQ ID NO: 4112091 - DNA, 25 bp, Homo sapien
cccgagggccttggattgtgattat

SEQ ID NO: 4112092 - DNA, 25 bp, Homo sapien
tgtgcatctgcgcatgaagtgggat

SEQ ID NO: 4112093 - DNA, 25 bp, Homo sapien
tgaagtactgacacacgctatgaca

SEQ ID NO: 4112094 - DNA, 25 bp, Homo sapien
tcatgatgagggtaggcttccaaca

SEQ ID NO: 4112095 - DNA, 25 bp, Homo sapien
catgtaaagcacaatcagtaggtgg

SEQ ID NO: 4112096 - DNA, 25 bp, Homo sapien
cagcccatccttgtgcacatgaaca

SEQ ID NO: 4112097 - DNA, 25 bp, Homo sapien
tggacccacattagtactggagaag

SEQ ID NO: 4112098 - DNA, 25 bp, Homo sapien
tactggagaagtgaccgtcagccca

SEQ ID NO: 4112099 - DNA, 25 bp, Homo sapien
aagtgaccgtcagcccatccttgtg

SEQ ID NO: 4112100 - DNA, 25 bp, Homo sapien
tggcccgccccggacaaggctagga

SEQ ID NO: 4112101 - DNA, 25 bp, Homo sapien
cggacaaggctaggacttgagagaa

SEQ ID NO: 4112102 - DNA, 25 bp, Homo sapien
gacttgagagaagtcgaagcccgaa

SEQ ID NO: 4112103 - DNA, 25 bp, Homo sapien
gtcgaagcccgaagccttcatcttc

SEQ ID NO: 4112104 - DNA, 25 bp, Homo sapien
gcgtgcacagagctgaatgtattaa

SEQ ID NO: 4112105 - DNA, 25 bp, Homo sapien
gagcagcgtgcacagagctgaatgt

SEQ ID NO: 4112106 - DNA, 25 bp, Homo sapien
ctgcggtagagacctggagaagaat

SEQ ID NO: 4112107 - DNA, 25 bp, Homo sapien
ggctgcggtagagacctggagaaga

SEQ ID NO: 4112108 - DNA, 25 bp, Homo sapien
tagccggaggtctggtgataagctt

SEQ ID NO: 4112109 - DNA, 25 bp, Homo sapien
agctgctggtgtagccggaggtctg

SEQ ID NO: 4112110 - DNA, 25 bp, Homo sapien
cggaggtctggtgataagcttgtca

SEQ ID NO: 4112111 - DNA, 25 bp, Homo sapien
tctggtgataagcttgtcagtgcct

SEQ ID NO: 4112112 - DNA, 25 bp, Homo sapien
cacaccgggcagtcgctgatggaga

SEQ ID NO: 4112113 - DNA, 25 bp, Homo sapien
atccacaccgggcagtcgctgatgg

SEQ ID NO: 4112114 - DNA, 25 bp, Homo sapien
ctcataggcacgggaccccgtgagg

SEQ ID NO: 4112115 - DNA, 25 bp, Homo sapien
tggagtccatccacaccgggcagtc

SEQ ID NO: 4112116 - DNA, 25 bp, Homo sapien
tgtgagtaggcctcggggttctgct

SEQ ID NO: 4112117 - DNA, 25 bp, Homo sapien
cgtatgtgagtaggcctcggggttc

SEQ ID NO: 4112118 - DNA, 25 bp, Homo sapien
atgtgagtaggcctcggggttctgc

SEQ ID NO: 4112119 - DNA, 25 bp, Homo sapien
ctccgtatgtgagtaggcctcgggg

SEQ ID NO: 4112120 - DNA, 25 bp, Homo sapien
ataggggagtaagagccaaggaaca

SEQ ID NO: 4112121 - DNA, 25 bp, Homo sapien
tagtcaataggggagtaagagccaa

SEQ ID NO: 4112122 - DNA, 25 bp, Homo sapien
agcagcaaagctactgaccaaagaa

SEQ ID NO: 4112123 - DNA, 25 bp, Homo sapien
tcactgtagtcaataggggagtaag

SEQ ID NO: 4112124 - DNA, 25 bp, Homo sapien
cacaactgagcatgatggtactggt

SEQ ID NO: 4112125 - DNA, 25 bp, Homo sapien
caaggcaagcctgggaccagacttt

SEQ ID NO: 4112126 - DNA, 25 bp, Homo sapien
aaatgaggtgcacaggcaccaaggc

SEQ ID NO: 4112127 - DNA, 25 bp, Homo sapien
ggctaagcttctcctctaaatgagg

SEQ ID NO: 4112128 - DNA, 25 bp, Homo sapien
tgtgtgcgctacagtgcttccctgg

SEQ ID NO: 4112129 - DNA, 25 bp, Homo sapien
gccacatcaccagaaaggagaccta

SEQ ID NO: 4112130 - DNA, 25 bp, Homo sapien
gtgtgtgcgctacagtgcttccctg

SEQ ID NO: 4112131 - DNA, 25 bp, Homo sapien
cagctcttaaatgagccacatcacc

SEQ ID NO: 4112132 - DNA, 25 bp, Homo sapien
caccactttgcatcctggaggaaat

SEQ ID NO: 4112133 - DNA, 25 bp, Homo sapien
tgggttgtccccagtgaaggccacc

SEQ ID NO: 4112134 - DNA, 25 bp, Homo sapien
gaggaaatccgtagcgctggacgta

SEQ ID NO: 4112135 - DNA, 25 bp, Homo sapien
tagcgctggacgtagtaggaagaaa

SEQ ID NO: 4112136 - DNA, 25 bp, Homo sapien
tccagtctcatgcctgccagcgacg

SEQ ID NO: 4112137 - DNA, 25 bp, Homo sapien
ctccagtctcatgcctgccagcgac

SEQ ID NO: 4112138 - DNA, 25 bp, Homo sapien
gccatgtagtgctgggagtcaaccg

SEQ ID NO: 4112139 - DNA, 25 bp, Homo sapien
gctgggagtcaaccgggttgcagaa

SEQ ID NO: 4112140 - DNA, 25 bp, Homo sapien
gagtcaaccgggttgcagaagatgt

SEQ ID NO: 4112141 - DNA, 25 bp, Homo sapien
tagtgctgggagtcaaccgggttgc

SEQ ID NO: 4112142 - DNA, 25 bp, Homo sapien
ttagagaaatcgctccaggaacggg

SEQ ID NO: 4112143 - DNA, 25 bp, Homo sapien
acgggatacagactcgttgcggatc

SEQ ID NO: 4112144 - DNA, 25 bp, Homo sapien
ctgcagtgccttagagaaatcgctc

SEQ ID NO: 4112145 - DNA, 25 bp, Homo sapien
ggtttccaccgttgcccatctctgt

SEQ ID NO: 4112146 - DNA, 25 bp, Homo sapien
atttcaggggtgatctccattacat

SEQ ID NO: 4112147 - DNA, 25 bp, Homo sapien
cctatgacgtccaataatttcaggg

SEQ ID NO: 4112148 - DNA, 25 bp, Homo sapien
aacctatgacgtccaataatttcag

SEQ ID NO: 4112149 - DNA, 25 bp, Homo sapien
taaacctatgacgtccaataatttc

SEQ ID NO: 4112150 - DNA, 25 bp, Homo sapien
gaattgtccttcaattagtgctcga

SEQ ID NO: 4112151 - DNA, 25 bp, Homo sapien
tcctcttggccatgaattgtccttc

SEQ ID NO: 4112152 - DNA, 25 bp, Homo sapien
caggccttctgcgtgaatcctcttg

SEQ ID NO: 4112153 - DNA, 25 bp, Homo sapien
aattagtgctcgaacctccacatcc

SEQ ID NO: 4112154 - DNA, 25 bp, Homo sapien
gcaagcaggccctcttcagatatgg

SEQ ID NO: 4112155 - DNA, 25 bp, Homo sapien
cattccgaagtcttacaggtcctgg

SEQ ID NO: 4112156 - DNA, 25 bp, Homo sapien
cagagagccctactagcaagcaggc

SEQ ID NO: 4112157 - DNA, 25 bp, Homo sapien
cacagctgagaagcgggaacaacct

SEQ ID NO: 4112158 - DNA, 25 bp, Homo sapien
ttcagctttagcagatgctgtctaa

SEQ ID NO: 4112159 - DNA, 25 bp, Homo sapien
gctttagcagatgctgtctaacagg

SEQ ID NO: 4112160 - DNA, 25 bp, Homo sapien
atttttatagtatccttttactcag

SEQ ID NO: 4112161 - DNA, 25 bp, Homo sapien
tagcagatgctgtctaacaggtttt

SEQ ID NO: 4112162 - DNA, 25 bp, Homo sapien
acttcccgcaacacaccatgttgcc

SEQ ID NO: 4112163 - DNA, 25 bp, Homo sapien
tggttctgttctgcccagctcacca

SEQ ID NO: 4112164 - DNA, 25 bp, Homo sapien
acccgcaggcgcacattctcttttt

SEQ ID NO: 4112165 - DNA, 25 bp, Homo sapien
gaaacatggttctgttctgcccagc

SEQ ID NO: 4112166 - DNA, 25 bp, Homo sapien
taaacacaacgtacagcattcaaac

SEQ ID NO: 4112167 - DNA, 25 bp, Homo sapien
gatgaattagcagataggagcttta

SEQ ID NO: 4112168 - DNA, 25 bp, Homo sapien
ttttctgcaggtaaacattagctat

SEQ ID NO: 4112169 - DNA, 25 bp, Homo sapien
tgttagatggacttaatagcagact

SEQ ID NO: 4112170 - DNA, 25 bp, Homo sapien
attgtgagatgctcctcctgtggcc

SEQ ID NO: 4112171 - DNA, 25 bp, Homo sapien
ctattgtgagatgctcctcctgtgg

SEQ ID NO: 4112172 - DNA, 25 bp, Homo sapien
ttgtgagatgctcctcctgtggcca

SEQ ID NO: 4112173 - DNA, 25 bp, Homo sapien
tattgtgagatgctcctcctgtggc

SEQ ID NO: 4112174 - DNA, 25 bp, Homo sapien
gaaaagctcggtatgcagaacccac

SEQ ID NO: 4112175 - DNA, 25 bp, Homo sapien
atgaaaagctcggtatgcagaaccc

SEQ ID NO: 4112176 - DNA, 25 bp, Homo sapien
ggcagtgtctataacatacaccggg

SEQ ID NO: 4112177 - DNA, 25 bp, Homo sapien
cccacacaggccgagttggcagtgt

SEQ ID NO: 4112178 - DNA, 25 bp, Homo sapien
ggtagcagctagtctgggatttgga

SEQ ID NO: 4112179 - DNA, 25 bp, Homo sapien
ttggagctaacttcacaacctctga

SEQ ID NO: 4112180 - DNA, 25 bp, Homo sapien
tctgaaaagggcacatctgttccac

SEQ ID NO: 4112181 - DNA, 25 bp, Homo sapien
gctaacttcacaacctctgaaaagg

SEQ ID NO: 4112182 - DNA, 25 bp, Homo sapien
tacaaacaaattccgatggtctctc

SEQ ID NO: 4112183 - DNA, 25 bp, Homo sapien
ctacaaacaaattccgatggtctct

SEQ ID NO: 4112184 - DNA, 25 bp, Homo sapien
caaacaaattccgatggtctctcac

SEQ ID NO: 4112185 - DNA, 25 bp, Homo sapien
gctacaaacaaattccgatggtctc

SEQ ID NO: 4112186 - DNA, 25 bp, Homo sapien
tcagtagcttttatagcccagtgac

SEQ ID NO: 4112187 - DNA, 25 bp, Homo sapien
gagcacatcacgttcaatgtaggtg

SEQ ID NO: 4112188 - DNA, 25 bp, Homo sapien
cagtatctgtgacttgcagctgaca

SEQ ID NO: 4112189 - DNA, 25 bp, Homo sapien
ccgtgaggcataagaagcaatacaa

SEQ ID NO: 4112190 - DNA, 25 bp, Homo sapien
cctgggtgactgcacagctatcttg

SEQ ID NO: 4112191 - DNA, 25 bp, Homo sapien
ttctgtaggaatagcttaggctcca

SEQ ID NO: 4112192 - DNA, 25 bp, Homo sapien
gagggacccaacctgcaacaagtga

SEQ ID NO: 4112193 - DNA, 25 bp, Homo sapien
gtggcccacatgtgatgactgattg

SEQ ID NO: 4112194 - DNA, 25 bp, Homo sapien
caaggagtgctgcttaaggtctcat

SEQ ID NO: 4112195 - DNA, 25 bp, Homo sapien
gaaaaattacagatgcttgggcaca

SEQ ID NO: 4112196 - DNA, 25 bp, Homo sapien
gacagatggtgtgcccacttcacag

SEQ ID NO: 4112197 - DNA, 25 bp, Homo sapien
aatctttccagtgtatcgagtggcc

SEQ ID NO: 4112198 - DNA, 25 bp, Homo sapien
agccactgcatccggccccacatta

SEQ ID NO: 4112199 - DNA, 25 bp, Homo sapien
gagacacggtttttgccatgctgcc

SEQ ID NO: 4112200 - DNA, 25 bp, Homo sapien
cactgcatccggccccacattagta

SEQ ID NO: 4112201 - DNA, 25 bp, Homo sapien
agagacacggtttttgccatgctgc

SEQ ID NO: 4112202 - DNA, 25 bp, Homo sapien
aaggctcagggacagttacacaggg

SEQ ID NO: 4112203 - DNA, 25 bp, Homo sapien
tgctcttccaaatgagggtgacaca

SEQ ID NO: 4112204 - DNA, 25 bp, Homo sapien
gaagtacttgggaatagaccccatg

SEQ ID NO: 4112205 - DNA, 25 bp, Homo sapien
cttctgagtccacgataagtctgtg

SEQ ID NO: 4112206 - DNA, 25 bp, Homo sapien
gtacccggccgtgtgggctgtcaat

SEQ ID NO: 4112207 - DNA, 25 bp, Homo sapien
cggccgtgtgggctgtcaatctgcc

SEQ ID NO: 4112208 - DNA, 25 bp, Homo sapien
acccggccgtgtgggctgtcaatct

SEQ ID NO: 4112209 - DNA, 25 bp, Homo sapien
cccggccgtgtgggctgtcaatctg

SEQ ID NO: 4112210 - DNA, 25 bp, Homo sapien
gaggcccccgggtctgagacaagat

SEQ ID NO: 4112211 - DNA, 25 bp, Homo sapien
tctctgctcgagtttggcatactgg

SEQ ID NO: 4112212 - DNA, 25 bp, Homo sapien
gcccccgggtctgagacaagattct

SEQ ID NO: 4112213 - DNA, 25 bp, Homo sapien
acaagattctctgctcgagtttggc

SEQ ID NO: 4112214 - DNA, 25 bp, Homo sapien
tattggacatatcccagtctcagtg

SEQ ID NO: 4112215 - DNA, 25 bp, Homo sapien
cagggacaggagtgcctatctatct

SEQ ID NO: 4112216 - DNA, 25 bp, Homo sapien
gcggctttaagatggtcctggacac

SEQ ID NO: 4112217 - DNA, 25 bp, Homo sapien
tatcttcatgcagatgtgctgaggg

SEQ ID NO: 4112218 - DNA, 25 bp, Homo sapien
ggcggctatgggtcacggtttgtgg

SEQ ID NO: 4112219 - DNA, 25 bp, Homo sapien
ctgctgatttgagtccctagattag

SEQ ID NO: 4112220 - DNA, 25 bp, Homo sapien
aagaggatggatggtagatcaaggt

SEQ ID NO: 4112221 - DNA, 25 bp, Homo sapien
cggtttgtggaggagtgggcagtca

SEQ ID NO: 4112222 - DNA, 25 bp, Homo sapien
tcacagaggactttctatagaggct

SEQ ID NO: 4112223 - DNA, 25 bp, Homo sapien
gaagttctaaactgcaccacttggg

SEQ ID NO: 4112224 - DNA, 25 bp, Homo sapien
tcagtgatctgtgggcatagctaaa

SEQ ID NO: 4112225 - DNA, 25 bp, Homo sapien
tcttcttcggaatcttgggcttgct

SEQ ID NO: 4112226 - DNA, 25 bp, Homo sapien
cttttgtggtcctacttgtctggtc

SEQ ID NO: 4112227 - DNA, 25 bp, Homo sapien
gacattggtttgtaagccaatctga

SEQ ID NO: 4112228 - DNA, 25 bp, Homo sapien
tagtatagtacacctttaatgctct

SEQ ID NO: 4112229 - DNA, 25 bp, Homo sapien
tctacatattgcctaagcaacaagg

SEQ ID NO: 4112230 - DNA, 25 bp, Homo sapien
ctccttaacttcagtcttggatgag

SEQ ID NO: 4112231 - DNA, 25 bp, Homo sapien
gacaacaatcttgattcctagaaga

SEQ ID NO: 4112232 - DNA, 25 bp, Homo sapien
tcacgcttgccctagagtaatattc

SEQ ID NO: 4112233 - DNA, 25 bp, Homo sapien
gctttgacaaggcagaagtaacaca

SEQ ID NO: 4112234 - DNA, 25 bp, Homo sapien
tttgtgcagattcctattggaatgg

SEQ ID NO: 4112235 - DNA, 25 bp, Homo sapien
tgccttttcccaagtacttcgctgt

SEQ ID NO: 4112236 - DNA, 25 bp, Homo sapien
caaaattgcactcctaccagaaatg

SEQ ID NO: 4112237 - DNA, 25 bp, Homo sapien
tttgttgatgttgcccaatttcccc

SEQ ID NO: 4112238 - DNA, 25 bp, Homo sapien
caggcctttcctgctatcgtttgtg

SEQ ID NO: 4112239 - DNA, 25 bp, Homo sapien
acaggcctttcctgctatcgtttgt

SEQ ID NO: 4112240 - DNA, 25 bp, Homo sapien
aggcctttcctgctatcgtttgtgg

SEQ ID NO: 4112241 - DNA, 25 bp, Homo sapien
cacaggcctttcctgctatcgtttg

SEQ ID NO: 4112242 - DNA, 25 bp, Homo sapien
cgttagagctatatgtcctttttct

SEQ ID NO: 4112243 - DNA, 25 bp, Homo sapien
gaaacgttagagctatatgtccttt

SEQ ID NO: 4112244 - DNA, 25 bp, Homo sapien
gggaaacgttagagctatatgtcct

SEQ ID NO: 4112245 - DNA, 25 bp, Homo sapien
caggggggaaacgttagagctatat

SEQ ID NO: 4112246 - DNA, 25 bp, Homo sapien
tttccagtatgacctttcaaatgtt

SEQ ID NO: 4112247 - DNA, 25 bp, Homo sapien
ttccagtatgacctttcaaatgttt

SEQ ID NO: 4112248 - DNA, 25 bp, Homo sapien
ccagtatgacctttcaaatgtttct

SEQ ID NO: 4112249 - DNA, 25 bp, Homo sapien
tccagtatgacctttcaaatgtttc

SEQ ID NO: 4112250 - DNA, 25 bp, Homo sapien
gattgctaccaacgtgtcccacctt

SEQ ID NO: 4112251 - DNA, 25 bp, Homo sapien
ggttagggattgctaccaacgtgtc

SEQ ID NO: 4112252 - DNA, 25 bp, Homo sapien
cagggttagggattgctaccaacgt

SEQ ID NO: 4112253 - DNA, 25 bp, Homo sapien
tagggattgctaccaacgtgtccca

SEQ ID NO: 4112254 - DNA, 25 bp, Homo sapien
acttctagctagtctgattcagaaa

SEQ ID NO: 4112255 - DNA, 25 bp, Homo sapien
aatgaaagggaattctttcactaca

SEQ ID NO: 4112256 - DNA, 25 bp, Homo sapien
ttcactacaagtactacagacatgc

SEQ ID NO: 4112257 - DNA, 25 bp, Homo sapien
gacatgcaaggataataaaggaata

SEQ ID NO: 4112258 - DNA, 25 bp, Homo sapien
ttaaactatatgctgggccaaaaaa

SEQ ID NO: 4112259 - DNA, 25 bp, Homo sapien
cagagcatattcttagaccacacag

SEQ ID NO: 4112260 - DNA, 25 bp, Homo sapien
gcagttaaagcagtgcatacaatga

SEQ ID NO: 4112261 - DNA, 25 bp, Homo sapien
tatgaaaatttacgggatgcagtta

SEQ ID NO: 4112262 - DNA, 25 bp, Homo sapien
gcttttacactaaccggtcagcgat

SEQ ID NO: 4112263 - DNA, 25 bp, Homo sapien
gctacaggaaccagaatcgccagtt

SEQ ID NO: 4112264 - DNA, 25 bp, Homo sapien
tcagcgatagtacgagatgccgccc

SEQ ID NO: 4112265 - DNA, 25 bp, Homo sapien
tgccgcccagcgtttacaggaaaag

SEQ ID NO: 4112266 - DNA, 25 bp, Homo sapien
tgaaaatgatggtccctgcttgcta

SEQ ID NO: 4112267 - DNA, 25 bp, Homo sapien
gtatctggtaataacacaggaggcc

SEQ ID NO: 4112268 - DNA, 25 bp, Homo sapien
tgcttgctataatccctacaggtga

SEQ ID NO: 4112269 - DNA, 25 bp, Homo sapien
tgttgtatgggacaccctagctgtg

SEQ ID NO: 4112270 - DNA, 25 bp, Homo sapien
acagtgaaccgtgggaaagtcggat

SEQ ID NO: 4112271 - DNA, 25 bp, Homo sapien
ccacacactcaaaggcacagctagg

SEQ ID NO: 4112272 - DNA, 25 bp, Homo sapien
cctacaaccccggaatgagtggata

SEQ ID NO: 4112273 - DNA, 25 bp, Homo sapien
aaagtcggatctctactgatgggcg

SEQ ID NO: 4112274 - DNA, 25 bp, Homo sapien
ggccctccggccgcgtggtccgcgc

SEQ ID NO: 4112275 - DNA, 25 bp, Homo sapien
agccagcggggaaacccggatgttg

SEQ ID NO: 4112276 - DNA, 25 bp, Homo sapien
cagcggggaaacccggatgttggat

SEQ ID NO: 4112277 - DNA, 25 bp, Homo sapien
aacccggatgttggatacaaagagg

SEQ ID NO: 4112278 - DNA, 25 bp, Homo sapien
cggggcgcgcccgactcaggcatag

SEQ ID NO: 4112279 - DNA, 25 bp, Homo sapien
gggcgcgcccgactcaggcatagcg

SEQ ID NO: 4112280 - DNA, 25 bp, Homo sapien
cccgactcaggcatagcgcggcggg

SEQ ID NO: 4112281 - DNA, 25 bp, Homo sapien
gcgcccgactcaggcatagcgcggc

SEQ ID NO: 4112282 - DNA, 25 bp, Homo sapien
cgcgggcagggccgcacggcgctcc

SEQ ID NO: 4112283 - DNA, 25 bp, Homo sapien
cgggcagggccgcacggcgctcccg

SEQ ID NO: 4112284 - DNA, 25 bp, Homo sapien
gcgggcagggccgcacggcgctccc

SEQ ID NO: 4112285 - DNA, 25 bp, Homo sapien
ggcgccgccccgcgcacacccggag

SEQ ID NO: 4112286 - DNA, 25 bp, Homo sapien
acagcgatccccagaggagggcgag

SEQ ID NO: 4112287 - DNA, 25 bp, Homo sapien
cagcgatccccagaggagggcgagg

SEQ ID NO: 4112288 - DNA, 25 bp, Homo sapien
gttattccaaacagcaagccaggag

SEQ ID NO: 4112289 - DNA, 25 bp, Homo sapien
gacggtcaggtctgctccaaactgg

SEQ ID NO: 4112290 - DNA, 25 bp, Homo sapien
cactgcccaagctaggtgactgaag

SEQ ID NO: 4112291 - DNA, 25 bp, Homo sapien
cagggactggttgatgtgactacaa

SEQ ID NO: 4112292 - DNA, 25 bp, Homo sapien
ctcatggaaagaatgtgtcccccca

SEQ ID NO: 4112293 - DNA, 25 bp, Homo sapien
tactattgaagttcattccatctca

SEQ ID NO: 4112294 - DNA, 25 bp, Homo sapien
aaaatatactattgaagttcattcc

SEQ ID NO: 4112295 - DNA, 25 bp, Homo sapien
ctgatctcaggctgaaattactttg

SEQ ID NO: 4112296 - DNA, 25 bp, Homo sapien
cccagtgctccgcttggcagacagg

SEQ ID NO: 4112297 - DNA, 25 bp, Homo sapien
gacagggctagccttagctcctgag

SEQ ID NO: 4112298 - DNA, 25 bp, Homo sapien
acggcctgctacaaccccagtgctc

SEQ ID NO: 4112299 - DNA, 25 bp, Homo sapien
cacatggcaggtccactcaggggaa

SEQ ID NO: 4112300 - DNA, 25 bp, Homo sapien
tcactgagcaatgtaatagagtcag

SEQ ID NO: 4112301 - DNA, 25 bp, Homo sapien
gagacatcactgagcaatgtaatag

SEQ ID NO: 4112302 - DNA, 25 bp, Homo sapien
ccacaaggaataggcacctctaggg

SEQ ID NO: 4112303 - DNA, 25 bp, Homo sapien
ccaggaccacaaggaataggcacct

SEQ ID NO: 4112304 - DNA, 25 bp, Homo sapien
gaggaacacatgcaaagagcatgag

SEQ ID NO: 4112305 - DNA, 25 bp, Homo sapien
gaactgaaatagtcggcagaggaac

SEQ ID NO: 4112306 - DNA, 25 bp, Homo sapien
agagcatgagctcgcctcacaaaac

SEQ ID NO: 4112307 - DNA, 25 bp, Homo sapien
tagtcggcagaggaacacatgcaaa

SEQ ID NO: 4112308 - DNA, 25 bp, Homo sapien
ctcaccgaaacttccgcctcccatg

SEQ ID NO: 4112309 - DNA, 25 bp, Homo sapien
atgttcgagtgattctcctgcctca

SEQ ID NO: 4112310 - DNA, 25 bp, Homo sapien
agctcaccgaaacttccgcctccca

SEQ ID NO: 4112311 - DNA, 25 bp, Homo sapien
aattttgtatttttaggagagatgg

SEQ ID NO: 4112312 - DNA, 25 bp, Homo sapien
agggccagtgttctccctctggtgt

SEQ ID NO: 4112313 - DNA, 25 bp, Homo sapien
caggagggccagtgttctccctctg

SEQ ID NO: 4112314 - DNA, 25 bp, Homo sapien
tcaggagggccagtgttctccctct

SEQ ID NO: 4112315 - DNA, 25 bp, Homo sapien
ggagggccagtgttctccctctggt

SEQ ID NO: 4112316 - DNA, 25 bp, Homo sapien
cactacatctatctaggtctgcttc

SEQ ID NO: 4112317 - DNA, 25 bp, Homo sapien
actacatctatctaggtctgcttct

SEQ ID NO: 4112318 - DNA, 25 bp, Homo sapien
ctttaagagtggttagaacactgcc

SEQ ID NO: 4112319 - DNA, 25 bp, Homo sapien
cacagctagggtagttgtaggaact

SEQ ID NO: 4112320 - DNA, 25 bp, Homo sapien
tacaggcaacccagcgaaaaatggc

SEQ ID NO: 4112321 - DNA, 25 bp, Homo sapien
catttcaaaaagatgtcacctgacc

SEQ ID NO: 4112322 - DNA, 25 bp, Homo sapien
tcttcacgagctcgatggtgccaga

SEQ ID NO: 4112323 - DNA, 25 bp, Homo sapien
tatcgtagcagttgaagtcatctag

SEQ ID NO: 4112324 - DNA, 25 bp, Homo sapien
cccagttggcgttgtagtagatgca

SEQ ID NO: 4112325 - DNA, 25 bp, Homo sapien
aggccgctctggttggtgcgctcca

SEQ ID NO: 4112326 - DNA, 25 bp, Homo sapien
acctgggggttctcctcagtggcca

SEQ ID NO: 4112327 - DNA, 25 bp, Homo sapien
gcgttcgttgcagaagttgccttca

SEQ ID NO: 4112328 - DNA, 25 bp, Homo sapien
agcagcagaagtacacctgggggtt

SEQ ID NO: 4112329 - DNA, 25 bp, Homo sapien
tggcaaatgagtgaagcgttcgttg

SEQ ID NO: 4112330 - DNA, 25 bp, Homo sapien
cttgcgatgccggtacatccaaaag

SEQ ID NO: 4112331 - DNA, 25 bp, Homo sapien
agcaggacgatgagggaaaggcccc

SEQ ID NO: 4112332 - DNA, 25 bp, Homo sapien
aaaaggccagcaggacgatgaggga

SEQ ID NO: 4112333 - DNA, 25 bp, Homo sapien
atggatgtccacatgaccgtagggg

SEQ ID NO: 4112334 - DNA, 25 bp, Homo sapien
caaggcttaaaaaggtctggcctgt

SEQ ID NO: 4112335 - DNA, 25 bp, Homo sapien
gagcaaggcttaaaaaggtctggcc

SEQ ID NO: 4112336 - DNA, 25 bp, Homo sapien
ggagagcaaggcttaaaaaggtctg

SEQ ID NO: 4112337 - DNA, 25 bp, Homo sapien
gcttaaaaaggtctggcctgtcctc

SEQ ID NO: 4112338 - DNA, 25 bp, Homo sapien
aaagcgcccccgagccttgatctcc

SEQ ID NO: 4112339 - DNA, 25 bp, Homo sapien
tgagctgggccttccagacacagcc

SEQ ID NO: 4112340 - DNA, 25 bp, Homo sapien
ttgacagctacaaagtcattcatga

SEQ ID NO: 4112341 - DNA, 25 bp, Homo sapien
gatcttgacagctacaaagtcattc

SEQ ID NO: 4112342 - DNA, 25 bp, Homo sapien
cagcaatgaactgtagcaggttctc

SEQ ID NO: 4112343 - DNA, 25 bp, Homo sapien
tctcgtgcttcatgccaggtgtgct

SEQ ID NO: 4112344 - DNA, 25 bp, Homo sapien
aggttggagcctcgcttctcggcag

SEQ ID NO: 4112345 - DNA, 25 bp, Homo sapien
gccacagctctacttcgaggttgga

SEQ ID NO: 4112346 - DNA, 25 bp, Homo sapien
gcaatagacggcttgtggccctcgc

SEQ ID NO: 4112347 - DNA, 25 bp, Homo sapien
ttcgttccatgtgatgatgttcccc

SEQ ID NO: 4112348 - DNA, 25 bp, Homo sapien
gaggcctcgtgacatcgtctctgct

SEQ ID NO: 4112349 - DNA, 25 bp, Homo sapien
ccttgaggtaatccgtgagggagcc

SEQ ID NO: 4112350 - DNA, 25 bp, Homo sapien
tcaagtgcaggaaaggcacctgctg

SEQ ID NO: 4112351 - DNA, 25 bp, Homo sapien
ccacagctccaggtcaagtgcagga

SEQ ID NO: 4112352 - DNA, 25 bp, Homo sapien
caggtcaagtgcaggaaaggcacct

SEQ ID NO: 4112353 - DNA, 25 bp, Homo sapien
ctccaggtcaagtgcaggaaaggca

SEQ ID NO: 4112354 - DNA, 25 bp, Homo sapien
gctcaaatcgaacagccaagccaaa

SEQ ID NO: 4112355 - DNA, 25 bp, Homo sapien
gcacggctgtgaggtcgctcttcag

SEQ ID NO: 4112356 - DNA, 25 bp, Homo sapien
gtttccctggctcaaatcgaacagc

SEQ ID NO: 4112357 - DNA, 25 bp, Homo sapien
ccaaagtcagccagcacggctgtga

SEQ ID NO: 4112358 - DNA, 25 bp, Homo sapien
tcacaacagttacaagaggtcacag

SEQ ID NO: 4112359 - DNA, 25 bp, Homo sapien
ctgtgcaccagatggcgggcaagac

SEQ ID NO: 4112360 - DNA, 25 bp, Homo sapien
caggatttacagtgactggccatac

SEQ ID NO: 4112361 - DNA, 25 bp, Homo sapien
gcaagacagagcaattcagacaggt

SEQ ID NO: 4112362 - DNA, 25 bp, Homo sapien
tcaggagccatgtaccgtctcgtgc

SEQ ID NO: 4112363 - DNA, 25 bp, Homo sapien
ggaagttgatggctccctcgagcac

SEQ ID NO: 4112364 - DNA, 25 bp, Homo sapien
catgtcaatgcgcaggaaggcatct

SEQ ID NO: 4112365 - DNA, 25 bp, Homo sapien
tgcagccttgcagcgagacacaagc

SEQ ID NO: 4112366 - DNA, 25 bp, Homo sapien
cctcaaagggcagcatgtactcatc

SEQ ID NO: 4112367 - DNA, 25 bp, Homo sapien
tgcagctcctccaacgaagggtgct

SEQ ID NO: 4112368 - DNA, 25 bp, Homo sapien
agggcagcatgtactcatccacggg

SEQ ID NO: 4112369 - DNA, 25 bp, Homo sapien
cgggtgtttcaaccagtgatcttta

SEQ ID NO: 4112370 - DNA, 25 bp, Homo sapien
agacacctttgttaggacccttcag

SEQ ID NO: 4112371 - DNA, 25 bp, Homo sapien
cattgaacctcaacatacacaggag

SEQ ID NO: 4112372 - DNA, 25 bp, Homo sapien
gatattcccaaggatcaggcagagc

SEQ ID NO: 4112373 - DNA, 25 bp, Homo sapien
tactaggatagacaccactacttgc

SEQ ID NO: 4112374 - DNA, 25 bp, Homo sapien
caggtccacattggtgacagaggtc

SEQ ID NO: 4112375 - DNA, 25 bp, Homo sapien
gttgaccgacctccgaatcagggac

SEQ ID NO: 4112376 - DNA, 25 bp, Homo sapien
agtccgaggtagtgccgttgaccga

SEQ ID NO: 4112377 - DNA, 25 bp, Homo sapien
tcgatggtcacacaaagctgggcca

SEQ ID NO: 4112378 - DNA, 25 bp, Homo sapien
gtctggacagacactcatgtcctgg

SEQ ID NO: 4112379 - DNA, 25 bp, Homo sapien
ttttcttcagatccactgagtctgg

SEQ ID NO: 4112380 - DNA, 25 bp, Homo sapien
ctggacagacactcatgtcctgggc

SEQ ID NO: 4112381 - DNA, 25 bp, Homo sapien
cttcagatccactgagtctggacag

SEQ ID NO: 4112382 - DNA, 25 bp, Homo sapien
cttggaagccacatagcgaagcatg

SEQ ID NO: 4112383 - DNA, 25 bp, Homo sapien
cactgactagagcaaggttatggca

SEQ ID NO: 4112384 - DNA, 25 bp, Homo sapien
tctgtgcaggacaatcccctgtggg

SEQ ID NO: 4112385 - DNA, 25 bp, Homo sapien
aaacagcagcattaggaacattcac

SEQ ID NO: 4112386 - DNA, 25 bp, Homo sapien
tgcctgaggcgaaagctaaagaaat

SEQ ID NO: 4112387 - DNA, 25 bp, Homo sapien
tgacctaactattcctgcagtaaat

SEQ ID NO: 4112388 - DNA, 25 bp, Homo sapien
tagatatggcacttttcaataaata

SEQ ID NO: 4112389 - DNA, 25 bp, Homo sapien
tgctgtaaggcctgttttgccatta

SEQ ID NO: 4112390 - DNA, 25 bp, Homo sapien
ttaaaaaggtatggtctgatgcccc

SEQ ID NO: 4112391 - DNA, 25 bp, Homo sapien
cattcataggtagactgctggttgc

SEQ ID NO: 4112392 - DNA, 25 bp, Homo sapien
ggtgtgccatcaaaaactcaacagg

SEQ ID NO: 4112393 - DNA, 25 bp, Homo sapien
tcatcaactgaattactgggcctgt

SEQ ID NO: 4112394 - DNA, 25 bp, Homo sapien
tctgtagatgtccagcatagcccag

SEQ ID NO: 4112395 - DNA, 25 bp, Homo sapien
tgaaccaaagtttacagtggaccca

SEQ ID NO: 4112396 - DNA, 25 bp, Homo sapien
tgcatttgcaagaagacccatcctc

SEQ ID NO: 4112397 - DNA, 25 bp, Homo sapien
tcccaggactcaagacagaactcat

SEQ ID NO: 4112398 - DNA, 25 bp, Homo sapien
tgataaaactatcccgtccagtgca

SEQ ID NO: 4112399 - DNA, 25 bp, Homo sapien
tgcacctctgtctagaagcagcagc

SEQ ID NO: 4112400 - DNA, 25 bp, Homo sapien
gattccacagattgaagcagcgagc

SEQ ID NO: 4112401 - DNA, 25 bp, Homo sapien
taaacctatacgctcaaccagaatg

SEQ ID NO: 4112402 - DNA, 25 bp, Homo sapien
aatgccatgacgagcttgccagaag

SEQ ID NO: 4112403 - DNA, 25 bp, Homo sapien
tacatttgagcattagcgactggaa

SEQ ID NO: 4112404 - DNA, 25 bp, Homo sapien
cagggttcctgcatgtgtacgttaa

SEQ ID NO: 4112405 - DNA, 25 bp, Homo sapien
tttaaaacaagtgcccacgctcagc

SEQ ID NO: 4112406 - DNA, 25 bp, Homo sapien
caaaaattcagatgcggtgactgct

SEQ ID NO: 4112407 - DNA, 25 bp, Homo sapien
gaaggtagcccatgctcgtatagct

SEQ ID NO: 4112408 - DNA, 25 bp, Homo sapien
ggctaaagcacttgcagggactgaa

SEQ ID NO: 4112409 - DNA, 25 bp, Homo sapien
taagatgactgacttgggaccctca

SEQ ID NO: 4112410 - DNA, 25 bp, Homo sapien
aagatcatgtccagttcataagcag

SEQ ID NO: 4112411 - DNA, 25 bp, Homo sapien
ggtaacacagctcaataagacttag

SEQ ID NO: 4112412 - DNA, 25 bp, Homo sapien
ccgtatgtgttacatgcagaaagct

SEQ ID NO: 4112413 - DNA, 25 bp, Homo sapien
tgttggttccaaaactgttcctgca

SEQ ID NO: 4112414 - DNA, 25 bp, Homo sapien
caagggtgaaaagtgacctactaca

SEQ ID NO: 4112415 - DNA, 25 bp, Homo sapien
tatatataaatcagcacacttttca

SEQ ID NO: 4112416 - DNA, 25 bp, Homo sapien
gtaacagcaacaagcttaactctgt

SEQ ID NO: 4112417 - DNA, 25 bp, Homo sapien
taattcagtagtacaagctatttct

SEQ ID NO: 4112418 - DNA, 25 bp, Homo sapien
ccagtgcagagttcaagcagcaaaa

SEQ ID NO: 4112419 - DNA, 25 bp, Homo sapien
gcagatctaatttcaaacttgacac

SEQ ID NO: 4112420 - DNA, 25 bp, Homo sapien
tcacatcggtttatttgaggaccca

SEQ ID NO: 4112421 - DNA, 25 bp, Homo sapien
gcagcaaaaccccaacttagcagat

SEQ ID NO: 4112422 - DNA, 25 bp, Homo sapien
gaagccgctcagaaaacgacgggaa

SEQ ID NO: 4112423 - DNA, 25 bp, Homo sapien
gcgggaagcgatactcttgatagcc

SEQ ID NO: 4112424 - DNA, 25 bp, Homo sapien
tgcttccctgtcaacgctccctcag

SEQ ID NO: 4112425 - DNA, 25 bp, Homo sapien
agcgccctgactccggaagaactgc

SEQ ID NO: 4112426 - DNA, 25 bp, Homo sapien
tcctagtgggagaaaccaagcacac

SEQ ID NO: 4112427 - DNA, 25 bp, Homo sapien
gctagatgccaagtatccaaaggag

SEQ ID NO: 4112428 - DNA, 25 bp, Homo sapien
gaaggctgtccgtcaaggactgcca

SEQ ID NO: 4112429 - DNA, 25 bp, Homo sapien
tctgtgcagaaaacgaagatgcccg

SEQ ID NO: 4112430 - DNA, 25 bp, Homo sapien
gggaatccaaattgttccaagacag

SEQ ID NO: 4112431 - DNA, 25 bp, Homo sapien
ttcaagaacccatctaggcacccgc

SEQ ID NO: 4112432 - DNA, 25 bp, Homo sapien
cctgatcataagacaaagcgtgatt

SEQ ID NO: 4112433 - DNA, 25 bp, Homo sapien
ctaggcacccgctttgcctgatcat

SEQ ID NO: 4112434 - DNA, 25 bp, Homo sapien
tgcctgatcataagacaaagcgtga

SEQ ID NO: 4112435 - DNA, 25 bp, Homo sapien
tggtcacacataggtccccaagggt

SEQ ID NO: 4112436 - DNA, 25 bp, Homo sapien
tgccaggcagggttgatttaaccag

SEQ ID NO: 4112437 - DNA, 25 bp, Homo sapien
ccaagggttaccacagtgccagaca

SEQ ID NO: 4112438 - DNA, 25 bp, Homo sapien
gagcctcccaactagtgtgtcaaga

SEQ ID NO: 4112439 - DNA, 25 bp, Homo sapien
gaagaaacaatgatgctaggagtgt

SEQ ID NO: 4112440 - DNA, 25 bp, Homo sapien
agagagaagaaacaatgatgctagg

SEQ ID NO: 4112441 - DNA, 25 bp, Homo sapien
gaaacaatgatgctaggagtgtaaa

SEQ ID NO: 4112442 - DNA, 25 bp, Homo sapien
caatgatgctaggagtgtaaacttg

SEQ ID NO: 4112443 - DNA, 25 bp, Homo sapien
cacttgaacccagaaattcaagacc

SEQ ID NO: 4112444 - DNA, 25 bp, Homo sapien
gggtcacttgaacccagaaattcaa

SEQ ID NO: 4112445 - DNA, 25 bp, Homo sapien
ggcaggagggtcacttgaacccaga

SEQ ID NO: 4112446 - DNA, 25 bp, Homo sapien
aggagggtcacttgaacccagaaat

SEQ ID NO: 4112447 - DNA, 25 bp, Homo sapien
gacctttctccgttcagtgccaaga

SEQ ID NO: 4112448 - DNA, 25 bp, Homo sapien
gccaagacaaccttccatgtagtcc

SEQ ID NO: 4112449 - DNA, 25 bp, Homo sapien
ccttttgacctttctccgttcagtg

SEQ ID NO: 4112450 - DNA, 25 bp, Homo sapien
cgttcagtgccaagacaaccttcca

SEQ ID NO: 4112451 - DNA, 25 bp, Homo sapien
cagtgtagctatctcatataatttt

SEQ ID NO: 4112452 - DNA, 25 bp, Homo sapien
agtactagtctaggaaagaatgctt

SEQ ID NO: 4112453 - DNA, 25 bp, Homo sapien
tctgaatttagaaagtactagtcta

SEQ ID NO: 4112454 - DNA, 25 bp, Homo sapien
acagtgtagctatctcatataattt

SEQ ID NO: 4112455 - DNA, 25 bp, Homo sapien
ttccaacataatcttcattgaaggc

SEQ ID NO: 4112456 - DNA, 25 bp, Homo sapien
tccaacataatcttcattgaaggca

SEQ ID NO: 4112457 - DNA, 25 bp, Homo sapien
atttgttatttcctgctggagccat

SEQ ID NO: 4112458 - DNA, 25 bp, Homo sapien
gaaaatttgttatttcctgctggag

SEQ ID NO: 4112459 - DNA, 25 bp, Homo sapien
cttgaaaatttgttatttcctgctg

SEQ ID NO: 4112460 - DNA, 25 bp, Homo sapien
aaatttgttatttcctgctggagcc

SEQ ID NO: 4112461 - DNA, 25 bp, Homo sapien
tatccagaattattatcaaaatcct

SEQ ID NO: 4112462 - DNA, 25 bp, Homo sapien
gaattattatcaaaatcctgaggca

SEQ ID NO: 4112463 - DNA, 25 bp, Homo sapien
tccaatatccagaattattatcaaa

SEQ ID NO: 4112464 - DNA, 25 bp, Homo sapien
tcaaaatcctgaggcacaatgttag

SEQ ID NO: 4112465 - DNA, 25 bp, Homo sapien
tctagtctgaggtaaggtcaaaggc

SEQ ID NO: 4112466 - DNA, 25 bp, Homo sapien
caaacctttctgtcagctctcgaca

SEQ ID NO: 4112467 - DNA, 25 bp, Homo sapien
cagataccacccaaacatcttcaaa

SEQ ID NO: 4112468 - DNA, 25 bp, Homo sapien
tctttccatcgcctctagtctgagg

SEQ ID NO: 4112469 - DNA, 25 bp, Homo sapien
tagccaacgcaattggaggcagaga

SEQ ID NO: 4112470 - DNA, 25 bp, Homo sapien
tgtactccagatagactggtagcca

SEQ ID NO: 4112471 - DNA, 25 bp, Homo sapien
cagagcttcggtatgtctaagtaaa

SEQ ID NO: 4112472 - DNA, 25 bp, Homo sapien
gtaacaacgtatactttctctgtca

SEQ ID NO: 4112473 - DNA, 25 bp, Homo sapien
ccacttcttcgagttcctcaccgag

SEQ ID NO: 4112474 - DNA, 25 bp, Homo sapien
catggtgctgagtaggtccactgag

SEQ ID NO: 4112475 - DNA, 25 bp, Homo sapien
tccaccagcatgatggacaccactg

SEQ ID NO: 4112476 - DNA, 25 bp, Homo sapien
acaccactgaggagaaccgcagcca

SEQ ID NO: 4112477 - DNA, 25 bp, Homo sapien
taacctgctaaaagcaaagacaaaa

SEQ ID NO: 4112478 - DNA, 25 bp, Homo sapien
caaaaacaaattaacctgctttgca

SEQ ID NO: 4112479 - DNA, 25 bp, Homo sapien
cattaagaaatattaacctgctaaa

SEQ ID NO: 4112480 - DNA, 25 bp, Homo sapien
gctttgcaaaacactaataaatata

SEQ ID NO: 4112481 - DNA, 25 bp, Homo sapien
tcattcaagacaaaaggctgagtca

SEQ ID NO: 4112482 - DNA, 25 bp, Homo sapien
ggaacaagatatctgcaactaactc

SEQ ID NO: 4112483 - DNA, 25 bp, Homo sapien
gacagaatgcttaggaggaaaggaa

SEQ ID NO: 4112484 - DNA, 25 bp, Homo sapien
tgctcaatcctggttggatactgaa

SEQ ID NO: 4112485 - DNA, 25 bp, Homo sapien
tgaggggactgccacgttgtcctcg

SEQ ID NO: 4112486 - DNA, 25 bp, Homo sapien
ggggactgccacgttgtcctcgcca

SEQ ID NO: 4112487 - DNA, 25 bp, Homo sapien
ggactgccacgttgtcctcgccaat

SEQ ID NO: 4112488 - DNA, 25 bp, Homo sapien
gaggggactgccacgttgtcctcgc

SEQ ID NO: 4112489 - DNA, 25 bp, Homo sapien
ggtgtccacagagcagatattccgg

SEQ ID NO: 4112490 - DNA, 25 bp, Homo sapien
tagatactgagcttctgcgggccag

SEQ ID NO: 4112491 - DNA, 25 bp, Homo sapien
tagcgccagtggttcggtagatact

SEQ ID NO: 4112492 - DNA, 25 bp, Homo sapien
aagccgatggcttcattgggtacca

SEQ ID NO: 4112493 - DNA, 25 bp, Homo sapien
cggtatgacacatcttgagataaaa

SEQ ID NO: 4112494 - DNA, 25 bp, Homo sapien
ttacagacggtatgacacatcttga

SEQ ID NO: 4112495 - DNA, 25 bp, Homo sapien
gacggtatgacacatcttgagataa

SEQ ID NO: 4112496 - DNA, 25 bp, Homo sapien
cagacggtatgacacatcttgagat

SEQ ID NO: 4112497 - DNA, 25 bp, Homo sapien
caaatatatagtgcatgtggacagg

SEQ ID NO: 4112498 - DNA, 25 bp, Homo sapien
cagtgtcatctgtgggcagtcttcc

SEQ ID NO: 4112499 - DNA, 25 bp, Homo sapien
tggacaggaactacacagaggattt

SEQ ID NO: 4112500 - DNA, 25 bp, Homo sapien
catccacagggatacaaatgcagtg

SEQ ID NO: 4112501 - DNA, 25 bp, Homo sapien
gcttgcatagcagacgagaaaccag

SEQ ID NO: 4112502 - DNA, 25 bp, Homo sapien
gacattttggctctacatccccgag

SEQ ID NO: 4112503 - DNA, 25 bp, Homo sapien
taataccactcggaaaagacagcag

SEQ ID NO: 4112504 - DNA, 25 bp, Homo sapien
tatgccccaagacgttttactgaca

SEQ ID NO: 4112505 - DNA, 25 bp, Homo sapien
ccaggcagcatctttcaaaagaaat

SEQ ID NO: 4112506 - DNA, 25 bp, Homo sapien
accaggcagcatctttcaaaagaaa

SEQ ID NO: 4112507 - DNA, 25 bp, Homo sapien
caggcagcatctttcaaaagaaata

SEQ ID NO: 4112508 - DNA, 25 bp, Homo sapien
gaccaggcagcatctttcaaaagaa

SEQ ID NO: 4112509 - DNA, 25 bp, Homo sapien
taattaagggctgacatccagtctc

SEQ ID NO: 4112510 - DNA, 25 bp, Homo sapien
ggaagtttgcgattcacagaggtga

SEQ ID NO: 4112511 - DNA, 25 bp, Homo sapien
tggtgcaacagcctcaattcaggga

SEQ ID NO: 4112512 - DNA, 25 bp, Homo sapien
cttatgtactcacaaggatgaggcc

SEQ ID NO: 4112513 - DNA, 25 bp, Homo sapien
taacacaccatatgaatgagcacct

SEQ ID NO: 4112514 - DNA, 25 bp, Homo sapien
tcacacgtgtagctgcagaagtggt

SEQ ID NO: 4112515 - DNA, 25 bp, Homo sapien
cacatagttgtctgcctctggtatc

SEQ ID NO: 4112516 - DNA, 25 bp, Homo sapien
gggagtctctacctaggtcatctgg

SEQ ID NO: 4112517 - DNA, 25 bp, Homo sapien
gacactcatagcgtcctcacaggga

SEQ ID NO: 4112518 - DNA, 25 bp, Homo sapien
caagaatttacatgacacgtccagt

SEQ ID NO: 4112519 - DNA, 25 bp, Homo sapien
cctcaaagtcaactggagcccaggg

SEQ ID NO: 4112520 - DNA, 25 bp, Homo sapien
cacaggtgggttcttgttgtaagcc

SEQ ID NO: 4112521 - DNA, 25 bp, Homo sapien
tccagttgctgtatatccatgccag

SEQ ID NO: 4112522 - DNA, 25 bp, Homo sapien
ctgcttcccagggtagtgtgaggac

SEQ ID NO: 4112523 - DNA, 25 bp, Homo sapien
gatgatgattactaacccctacgtg

SEQ ID NO: 4112524 - DNA, 25 bp, Homo sapien
tacatcatcattggaaggagcaagc

SEQ ID NO: 4112525 - DNA, 25 bp, Homo sapien
gcgctggtctgagccgccatcatct

SEQ ID NO: 4112526 - DNA, 25 bp, Homo sapien
aaccaggccactgcgctggtctgag

SEQ ID NO: 4112527 - DNA, 25 bp, Homo sapien
ccttcgaaatatatcccaagttcaa

SEQ ID NO: 4112528 - DNA, 25 bp, Homo sapien
caatccggccggaaatcctgttggc

SEQ ID NO: 4112529 - DNA, 25 bp, Homo sapien
taatcagtatgtgcagcctattccc

SEQ ID NO: 4112530 - DNA, 25 bp, Homo sapien
ccctcccttcggtctctgtctcagc

SEQ ID NO: 4112531 - DNA, 25 bp, Homo sapien
tatgtgcagcctattccctgagcca

SEQ ID NO: 4112532 - DNA, 25 bp, Homo sapien
gccaaaacccttgacgtcatccttg

SEQ ID NO: 4112533 - DNA, 25 bp, Homo sapien
acctgctgccggagagaaaagcccc

SEQ ID NO: 4112534 - DNA, 25 bp, Homo sapien
ccaggcacctgctgccggagagaaa

SEQ ID NO: 4112535 - DNA, 25 bp, Homo sapien
caggcacctgctgccggagagaaaa

SEQ ID NO: 4112536 - DNA, 25 bp, Homo sapien
ggcacctgctgccggagagaaaagc

SEQ ID NO: 4112537 - DNA, 25 bp, Homo sapien
ttcttgccagataaacacgtgtgga

SEQ ID NO: 4112538 - DNA, 25 bp, Homo sapien
tcaccatgcacttgtgcacatgcaa

SEQ ID NO: 4112539 - DNA, 25 bp, Homo sapien
tgtggattcaccatgcacttgtgca

SEQ ID NO: 4112540 - DNA, 25 bp, Homo sapien
cacaggaccatttgaaattcttgcc

SEQ ID NO: 4112541 - DNA, 25 bp, Homo sapien
actcgctcatccacttgagctttct

SEQ ID NO: 4112542 - DNA, 25 bp, Homo sapien
ttgagctttcttggatcctggaggc

SEQ ID NO: 4112543 - DNA, 25 bp, Homo sapien
acactcgctcatccacttgagcttt

SEQ ID NO: 4112544 - DNA, 25 bp, Homo sapien
cacttgagctttcttggatcctgga

SEQ ID NO: 4112545 - DNA, 25 bp, Homo sapien
agccggaagtctgttctcaaagcag

SEQ ID NO: 4112546 - DNA, 25 bp, Homo sapien
acagtcctcacacacggaggccaga

SEQ ID NO: 4112547 - DNA, 25 bp, Homo sapien
tcttaaccctgaacaagagtgtcta

SEQ ID NO: 4112548 - DNA, 25 bp, Homo sapien
ggacatgggcagcaattcacgctgt

SEQ ID NO: 4112549 - DNA, 25 bp, Homo sapien
catggtgcggtagaggtttagcaaa

SEQ ID NO: 4112550 - DNA, 25 bp, Homo sapien
cttggtgtctaacagccctcgctgc

SEQ ID NO: 4112551 - DNA, 25 bp, Homo sapien
cggtagaggtttagcaaaccatgca

SEQ ID NO: 4112552 - DNA, 25 bp, Homo sapien
agccctcgctgcatggtgcggtaga

SEQ ID NO: 4112553 - DNA, 25 bp, Homo sapien
ccgcctgccgtcacttgtcttccct

SEQ ID NO: 4112554 - DNA, 25 bp, Homo sapien
ccccgcctgccgtcacttgtcttcc

SEQ ID NO: 4112555 - DNA, 25 bp, Homo sapien
tccaccccgcctgccgtcacttgtc

SEQ ID NO: 4112556 - DNA, 25 bp, Homo sapien
accccgcctgccgtcacttgtcttc

SEQ ID NO: 4112557 - DNA, 25 bp, Homo sapien
ctgagagaggttttgtaagcgccaa

SEQ ID NO: 4112558 - DNA, 25 bp, Homo sapien
gagagaggttttgtaagcgccaagc

SEQ ID NO: 4112559 - DNA, 25 bp, Homo sapien
gagaggttttgtaagcgccaagcat

SEQ ID NO: 4112560 - DNA, 25 bp, Homo sapien
gctgagagaggttttgtaagcgcca

SEQ ID NO: 4112561 - DNA, 25 bp, Homo sapien
ctccttctaagcctagttcctgtgg

SEQ ID NO: 4112562 - DNA, 25 bp, Homo sapien
cacctgcagggattgtgctttctct

SEQ ID NO: 4112563 - DNA, 25 bp, Homo sapien
tgctttctcttctagtactgcccat

SEQ ID NO: 4112564 - DNA, 25 bp, Homo sapien
ttgtgctttctcttctagtactgcc

SEQ ID NO: 4112565 - DNA, 25 bp, Homo sapien
acctgcagggattgtgctttctctt

SEQ ID NO: 4112566 - DNA, 25 bp, Homo sapien
cactggggctccgtgccacatccct

SEQ ID NO: 4112567 - DNA, 25 bp, Homo sapien
catctgacttgggatacaactctgc

SEQ ID NO: 4112568 - DNA, 25 bp, Homo sapien
acatcccttgcctcatctgacttgg

SEQ ID NO: 4112569 - DNA, 25 bp, Homo sapien
ctgacttgggatacaactctgcagt

SEQ ID NO: 4112570 - DNA, 25 bp, Homo sapien
tcagaaacacttggaggccgaagat

SEQ ID NO: 4112571 - DNA, 25 bp, Homo sapien
caggccttctgttgtgcatgtcaca

SEQ ID NO: 4112572 - DNA, 25 bp, Homo sapien
gatggtcccaatttgactccaggcc

SEQ ID NO: 4112573 - DNA, 25 bp, Homo sapien
catctgctaagcgatatggctctcc

SEQ ID NO: 4112574 - DNA, 25 bp, Homo sapien
gaggagacccagataaatcatcact

SEQ ID NO: 4112575 - DNA, 25 bp, Homo sapien
ggagacccagataaatcatcactca

SEQ ID NO: 4112576 - DNA, 25 bp, Homo sapien
gagacccagataaatcatcactcac

SEQ ID NO: 4112577 - DNA, 25 bp, Homo sapien
ctgaggagacccagataaatcatca

SEQ ID NO: 4112578 - DNA, 25 bp, Homo sapien
aaacattggcagtgaactctggctc

SEQ ID NO: 4112579 - DNA, 25 bp, Homo sapien
tttcatctggataaatactccctag

SEQ ID NO: 4112580 - DNA, 25 bp, Homo sapien
gggagatggtcaagtacttttcatc

SEQ ID NO: 4112581 - DNA, 25 bp, Homo sapien
tggataaatactccctaggccccaa

SEQ ID NO: 4112582 - DNA, 25 bp, Homo sapien
ccatcatgaatgtcctcctcgtctg

SEQ ID NO: 4112583 - DNA, 25 bp, Homo sapien
gaagcagcctgaatgagtatagaaa

SEQ ID NO: 4112584 - DNA, 25 bp, Homo sapien
gaataagtcaaggttctagaagtct

SEQ ID NO: 4112585 - DNA, 25 bp, Homo sapien
caacccaccctgaatgaggttaagg

SEQ ID NO: 4112586 - DNA, 25 bp, Homo sapien
tgctctgagttccactgttgccagg

SEQ ID NO: 4112587 - DNA, 25 bp, Homo sapien
tcctctgcgtggagtgaagctccct

SEQ ID NO: 4112588 - DNA, 25 bp, Homo sapien
tctccctaaggatggtgactgcact

SEQ ID NO: 4112589 - DNA, 25 bp, Homo sapien
ccagtgtttgcaggagccccttcct

SEQ ID NO: 4112590 - DNA, 25 bp, Homo sapien
tttaatgaaagtgaatccatttgga

SEQ ID NO: 4112591 - DNA, 25 bp, Homo sapien
catccaatcctattagaactaggag

SEQ ID NO: 4112592 - DNA, 25 bp, Homo sapien
aagataatgtgagcaacactgcatc

SEQ ID NO: 4112593 - DNA, 25 bp, Homo sapien
gcacaacccccatccaatcctatta

SEQ ID NO: 4112594 - DNA, 25 bp, Homo sapien
aaaactgggccaagtgtactttctg

SEQ ID NO: 4112595 - DNA, 25 bp, Homo sapien
caaggtctcgtgttcgacatagtca

SEQ ID NO: 4112596 - DNA, 25 bp, Homo sapien
gaggcaatactacttcaccaatggc

SEQ ID NO: 4112597 - DNA, 25 bp, Homo sapien
gttagtaagtaaaatcagcagtcag

SEQ ID NO: 4112598 - DNA, 25 bp, Homo sapien
ccgttatcatcaactgcgtgttcat

SEQ ID NO: 4112599 - DNA, 25 bp, Homo sapien
ttatcggcaccgttatcatcaactg

SEQ ID NO: 4112600 - DNA, 25 bp, Homo sapien
gcatgttcattatcggcaccgttat

SEQ ID NO: 4112601 - DNA, 25 bp, Homo sapien
attgttcagcatgttcattatcggc

SEQ ID NO: 4112602 - DNA, 25 bp, Homo sapien
ccagttggaagcttgtgaggctttc

SEQ ID NO: 4112603 - DNA, 25 bp, Homo sapien
gttggaagcttgtgaggctttctcc

SEQ ID NO: 4112604 - DNA, 25 bp, Homo sapien
tctcctcttgactcctttctcccat

SEQ ID NO: 4112605 - DNA, 25 bp, Homo sapien
cagcccagttggaagcttgtgaggc

SEQ ID NO: 4112606 - DNA, 25 bp, Homo sapien
catccctatggccaccacataagca

SEQ ID NO: 4112607 - DNA, 25 bp, Homo sapien
aagttctcttggcatccctatggcc

SEQ ID NO: 4112608 - DNA, 25 bp, Homo sapien
aaagttctcttggcatccctatggc

SEQ ID NO: 4112609 - DNA, 25 bp, Homo sapien
ttgggttggtgacagtctgctgcag

SEQ ID NO: 4112610 - DNA, 25 bp, Homo sapien
agactgtcgattgtgaaggccttca

SEQ ID NO: 4112611 - DNA, 25 bp, Homo sapien
tgagaagggcttgcactgggcgaag

SEQ ID NO: 4112612 - DNA, 25 bp, Homo sapien
aaggccttcatgatggtcaagatga

SEQ ID NO: 4112613 - DNA, 25 bp, Homo sapien
caggaggaaactggagcagactgtc

SEQ ID NO: 4112614 - DNA, 25 bp, Homo sapien
gaggatggagcaattttcactgttg

SEQ ID NO: 4112615 - DNA, 25 bp, Homo sapien
ttcactgttgcaggagctctcatga

SEQ ID NO: 4112616 - DNA, 25 bp, Homo sapien
gaatactgacatgtgtgagtagccc

SEQ ID NO: 4112617 - DNA, 25 bp, Homo sapien
ctctcatgagttgggcgttgatgcc

SEQ ID NO: 4112618 - DNA, 25 bp, Homo sapien
gagccacggcaacaggatctatagc

SEQ ID NO: 4112619 - DNA, 25 bp, Homo sapien
tttgagccacggcaacaggatctat

SEQ ID NO: 4112620 - DNA, 25 bp, Homo sapien
gatctatagctttgagttgctgagg

SEQ ID NO: 4112621 - DNA, 25 bp, Homo sapien
aggatctatagctttgagttgctga

SEQ ID NO: 4112622 - DNA, 25 bp, Homo sapien
ctgggctgccaatgacccaagcctg

SEQ ID NO: 4112623 - DNA, 25 bp, Homo sapien
gcttgcttcaaacttaaatcacaga

SEQ ID NO: 4112624 - DNA, 25 bp, Homo sapien
tcagctgcagagataactgtttgtt

SEQ ID NO: 4112625 - DNA, 25 bp, Homo sapien
tgccctctggacttcgtgagaaatt

SEQ ID NO: 4112626 - DNA, 25 bp, Homo sapien
gatggctacatctgcttgcttcaaa

SEQ ID NO: 4112627 - DNA, 25 bp, Homo sapien
cccaggaataattatccttaaatag

SEQ ID NO: 4112628 - DNA, 25 bp, Homo sapien
caggaataattatccttaaataggc

SEQ ID NO: 4112629 - DNA, 25 bp, Homo sapien
ccaggaataattatccttaaatagg

SEQ ID NO: 4112630 - DNA, 25 bp, Homo sapien
aggaataattatccttaaataggct

SEQ ID NO: 4112631 - DNA, 25 bp, Homo sapien
tttcaccaagaacctgcaatgctaa

SEQ ID NO: 4112632 - DNA, 25 bp, Homo sapien
cctgcaatgctaattcctgtttttg

SEQ ID NO: 4112633 - DNA, 25 bp, Homo sapien
attagtactttcaccaagaacctgc

SEQ ID NO: 4112634 - DNA, 25 bp, Homo sapien
tactttcaccaagaacctgcaatgc

SEQ ID NO: 4112635 - DNA, 25 bp, Homo sapien
ccttgatgtcagttggagcctccat

SEQ ID NO: 4112636 - DNA, 25 bp, Homo sapien
aattttagtatatgtgctgctgaag

SEQ ID NO: 4112637 - DNA, 25 bp, Homo sapien
tgcgtgttattcttgtgcaggggtc

SEQ ID NO: 4112638 - DNA, 25 bp, Homo sapien
atgttaatcttctctgtatcattct

SEQ ID NO: 4112639 - DNA, 25 bp, Homo sapien
catgaatttgcgtgttattcttgtg

SEQ ID NO: 4112640 - DNA, 25 bp, Homo sapien
gacacctattacattgttttcagct

SEQ ID NO: 4112641 - DNA, 25 bp, Homo sapien
gctaggaggcttgtcctggcagaat

SEQ ID NO: 4112642 - DNA, 25 bp, Homo sapien
tggtttcgttattcaaaatgtaaga

SEQ ID NO: 4112643 - DNA, 25 bp, Homo sapien
aatgtaagaagccttgacacctatt

SEQ ID NO: 4112644 - DNA, 25 bp, Homo sapien
cttgcatgttgacactccgacgtca

SEQ ID NO: 4112645 - DNA, 25 bp, Homo sapien
ctgctgtgttctgccggtgatgggc

SEQ ID NO: 4112646 - DNA, 25 bp, Homo sapien
cctgctgtgttctgccggtgatggg

SEQ ID NO: 4112647 - DNA, 25 bp, Homo sapien
gggcagagcgcttcgaagaaagaca

SEQ ID NO: 4112648 - DNA, 25 bp, Homo sapien
agaagagcggcgacaagcaatcccg

SEQ ID NO: 4112649 - DNA, 25 bp, Homo sapien
caagtgcggaatcctcagcagaaac

SEQ ID NO: 4112650 - DNA, 25 bp, Homo sapien
caagtccactcctacagaagagcgg

SEQ ID NO: 4112651 - DNA, 25 bp, Homo sapien
tctcgaccggctgtgaaaagtctat

SEQ ID NO: 4112652 - DNA, 25 bp, Homo sapien
tatttagtgctggatccagctgcag

SEQ ID NO: 4112653 - DNA, 25 bp, Homo sapien
cacttcatctcgaataacataggaa

SEQ ID NO: 4112654 - DNA, 25 bp, Homo sapien
gagcattgactccatttcggttgta

SEQ ID NO: 4112655 - DNA, 25 bp, Homo sapien
tgtattacctagttaggccgtgtgg

SEQ ID NO: 4112656 - DNA, 25 bp, Homo sapien
catgctcagcctaaccttgtattac

SEQ ID NO: 4112657 - DNA, 25 bp, Homo sapien
gcaaagaactctgtaaggcaaacct

SEQ ID NO: 4112658 - DNA, 25 bp, Homo sapien
gagtccttgtcttagctgaaacact

SEQ ID NO: 4112659 - DNA, 25 bp, Homo sapien
tgggctgggtactaattctctgtca

SEQ ID NO: 4112660 - DNA, 25 bp, Homo sapien
aaagaattcaaagcctgccagactg

SEQ ID NO: 4112661 - DNA, 25 bp, Homo sapien
aaaaatacaaggtctagcactaggg

SEQ ID NO: 4112662 - DNA, 25 bp, Homo sapien
tataggcgcataaagtagtggttct

SEQ ID NO: 4112663 - DNA, 25 bp, Homo sapien
gatgaaaggaaacccaacggctgag

SEQ ID NO: 4112664 - DNA, 25 bp, Homo sapien
gcaacaagctctggactaggcactg

SEQ ID NO: 4112665 - DNA, 25 bp, Homo sapien
gagacactttatgggcaaacagaac

SEQ ID NO: 4112666 - DNA, 25 bp, Homo sapien
tgagtgcactaaggagcctggtctg

SEQ ID NO: 4112667 - DNA, 25 bp, Homo sapien
ttacaacagagtacaatgtcgttta

SEQ ID NO: 4112668 - DNA, 25 bp, Homo sapien
tgtcgtttacccaatcagtatggtg

SEQ ID NO: 4112669 - DNA, 25 bp, Homo sapien
agtacaatgtcgtttacccaatcag

SEQ ID NO: 4112670 - DNA, 25 bp, Homo sapien
cagtatggtgttccatagatgctat

SEQ ID NO: 4112671 - DNA, 25 bp, Homo sapien
ccatacttttactgtcgtgtcagaa

SEQ ID NO: 4112672 - DNA, 25 bp, Homo sapien
gcaaaatcccttgtgtgcattccat

SEQ ID NO: 4112673 - DNA, 25 bp, Homo sapien
tactgtcgtgtcagaagaagcagat

SEQ ID NO: 4112674 - DNA, 25 bp, Homo sapien
tgttgacatgcaaaatcccttgtgt

SEQ ID NO: 4112675 - DNA, 25 bp, Homo sapien
ggcatatgctaaggcctttacgtaa

SEQ ID NO: 4112676 - DNA, 25 bp, Homo sapien
cccagctgatgctactagttcttta

SEQ ID NO: 4112677 - DNA, 25 bp, Homo sapien
tatttgtctgtccaacccagctgat

SEQ ID NO: 4112678 - DNA, 25 bp, Homo sapien
cagtcaatgctgttagagtattcac

SEQ ID NO: 4112679 - DNA, 25 bp, Homo sapien
atttatgttaacttggatcactttc

SEQ ID NO: 4112680 - DNA, 25 bp, Homo sapien
tatttatgttaacttggatcacttt

SEQ ID NO: 4112681 - DNA, 25 bp, Homo sapien
cttggatcactttcaaagaagtttc

SEQ ID NO: 4112682 - DNA, 25 bp, Homo sapien
ctgaaacctggcctagaggactcta

SEQ ID NO: 4112683 - DNA, 25 bp, Homo sapien
ggactctactaggttgggccaagca

SEQ ID NO: 4112684 - DNA, 25 bp, Homo sapien
taatgatgtaccatgacagccccaa

SEQ ID NO: 4112685 - DNA, 25 bp, Homo sapien
caacagggaccagctaatgaatcag

SEQ ID NO: 4112686 - DNA, 25 bp, Homo sapien
ataaatggaatctttgtttccactt

SEQ ID NO: 4112687 - DNA, 25 bp, Homo sapien
ggccaggctataaatggaatctttg

SEQ ID NO: 4112688 - DNA, 25 bp, Homo sapien
gccaggctataaatggaatctttgt

SEQ ID NO: 4112689 - DNA, 25 bp, Homo sapien
tggaatctttgtttccacttaaaga

SEQ ID NO: 4112690 - DNA, 25 bp, Homo sapien
cagtggaccctgatacaatgattgt

SEQ ID NO: 4112691 - DNA, 25 bp, Homo sapien
cttttcagtggaccctgatacaatg

SEQ ID NO: 4112692 - DNA, 25 bp, Homo sapien
acaatgattgttcccagttgattca

SEQ ID NO: 4112693 - DNA, 25 bp, Homo sapien
gatacaatgattgttcccagttgat

SEQ ID NO: 4112694 - DNA, 25 bp, Homo sapien
gttcttggatcccatacccgtaaca

SEQ ID NO: 4112695 - DNA, 25 bp, Homo sapien
tagcaatgccttcacattatccgtg

SEQ ID NO: 4112696 - DNA, 25 bp, Homo sapien
tcacattatccgtgtgccctttaag

SEQ ID NO: 4112697 - DNA, 25 bp, Homo sapien
cctttaagcttcattagttttgcac

SEQ ID NO: 4112698 - DNA, 25 bp, Homo sapien
ttagttattttagcccctatgcacc

SEQ ID NO: 4112699 - DNA, 25 bp, Homo sapien
tgttcactctgagcattatgttaga

SEQ ID NO: 4112700 - DNA, 25 bp, Homo sapien
agtcaactgacaaaatgtgccccta

SEQ ID NO: 4112701 - DNA, 25 bp, Homo sapien
tcacaaattacgtggccaacagagc

SEQ ID NO: 4112702 - DNA, 25 bp, Homo sapien
ccttcatcatggactcggtatgttg

SEQ ID NO: 4112703 - DNA, 25 bp, Homo sapien
catcattgacttgcagcgcccaaac

SEQ ID NO: 4112704 - DNA, 25 bp, Homo sapien
cacaaattagcacccgaatgtcagg

SEQ ID NO: 4112705 - DNA, 25 bp, Homo sapien
ctggccaagggaccaaaggcgaatt

SEQ ID NO: 4112706 - DNA, 25 bp, Homo sapien
gttgcaacccaaattgcaggaggag

SEQ ID NO: 4112707 - DNA, 25 bp, Homo sapien
aacccaaattgcaggaggaggatca

SEQ ID NO: 4112708 - DNA, 25 bp, Homo sapien
tttactgtagacttagttgttgcaa

SEQ ID NO: 4112709 - DNA, 25 bp, Homo sapien
catttatttactgtagacttagttg

SEQ ID NO: 4112710 - DNA, 25 bp, Homo sapien
tgatcatgttatgctctacaagctt

SEQ ID NO: 4112711 - DNA, 25 bp, Homo sapien
gttatgctctacaagctttgccagc

SEQ ID NO: 4112712 - DNA, 25 bp, Homo sapien
agctttgccagcctgtttaaagtgg

SEQ ID NO: 4112713 - DNA, 25 bp, Homo sapien
aatttgttatttgatcatgttatgc

SEQ ID NO: 4112714 - DNA, 25 bp, Homo sapien
cctggtcaggttgtgtacaaagagg

SEQ ID NO: 4112715 - DNA, 25 bp, Homo sapien
tgtgtacaaagaggtgttataggat

SEQ ID NO: 4112716 - DNA, 25 bp, Homo sapien
taggatttgtacagtcattgtcata

SEQ ID NO: 4112717 - DNA, 25 bp, Homo sapien
caaagaggtgttataggatttgtac

SEQ ID NO: 4112718 - DNA, 25 bp, Homo sapien
aatatatgtctcttatcattaagaa

SEQ ID NO: 4112719 - DNA, 25 bp, Homo sapien
ttaatatatgtctcttatcattaag

SEQ ID NO: 4112720 - DNA, 25 bp, Homo sapien
tggcactgaataatactagcacccc

SEQ ID NO: 4112721 - DNA, 25 bp, Homo sapien
tattggtatctttggttaatatatg

SEQ ID NO: 4112722 - DNA, 25 bp, Homo sapien
aggcacccccgacattttaggaatg

SEQ ID NO: 4112723 - DNA, 25 bp, Homo sapien
caataataggcacccccgacatttt

SEQ ID NO: 4112724 - DNA, 25 bp, Homo sapien
acatcaccaataataggcacccccg

SEQ ID NO: 4112725 - DNA, 25 bp, Homo sapien
accaataataggcacccccgacatt

SEQ ID NO: 4112726 - DNA, 25 bp, Homo sapien
taaaataacaatctgctgctataaa

SEQ ID NO: 4112727 - DNA, 25 bp, Homo sapien
gtataatgatcaatattaagtggtg

SEQ ID NO: 4112728 - DNA, 25 bp, Homo sapien
catgtgtctaagtgaaacagtctaa

SEQ ID NO: 4112729 - DNA, 25 bp, Homo sapien
taagtggtgaattcacttgattctg

SEQ ID NO: 4112730 - DNA, 25 bp, Homo sapien
aaccaatttggcacatacaccattt

SEQ ID NO: 4112731 - DNA, 25 bp, Homo sapien
tgcccagatcttcaactttacatgc

SEQ ID NO: 4112732 - DNA, 25 bp, Homo sapien
tgtttttaagtctactgagaaccaa

SEQ ID NO: 4112733 - DNA, 25 bp, Homo sapien
ctgtttttaagtctactgagaacca

SEQ ID NO: 4112734 - DNA, 25 bp, Homo sapien
aatgaaaatcttcaattatcccaaa

SEQ ID NO: 4112735 - DNA, 25 bp, Homo sapien
cacaggactctgtaactaataataa

SEQ ID NO: 4112736 - DNA, 25 bp, Homo sapien
ttatcccaaatcatacaagtatcaa

SEQ ID NO: 4112737 - DNA, 25 bp, Homo sapien
tttcacacctaaaaacacaggactc

SEQ ID NO: 4112738 - DNA, 25 bp, Homo sapien
aaaccagcatcttttgcagaaaccc

SEQ ID NO: 4112739 - DNA, 25 bp, Homo sapien
accagcatcttttgcagaaacccag

SEQ ID NO: 4112740 - DNA, 25 bp, Homo sapien
caggcagcaaaacaatcactttcat

SEQ ID NO: 4112741 - DNA, 25 bp, Homo sapien
cagaaacccaggcagcaaaacaatc

SEQ ID NO: 4112742 - DNA, 25 bp, Homo sapien
gagcaaagacatattctacttggtt

SEQ ID NO: 4112743 - DNA, 25 bp, Homo sapien
gcaaagacatattctacttggttgt

SEQ ID NO: 4112744 - DNA, 25 bp, Homo sapien
tggagcaaagacatattctacttgg

SEQ ID NO: 4112745 - DNA, 25 bp, Homo sapien
aaacaaacatgagaatcagattttt

SEQ ID NO: 4112746 - DNA, 25 bp, Homo sapien
tcttcatccattggattcacatgtg

SEQ ID NO: 4112747 - DNA, 25 bp, Homo sapien
gccaatattccaggagtgcttggag

SEQ ID NO: 4112748 - DNA, 25 bp, Homo sapien
ttcacatgtgttctaggccaatatt

SEQ ID NO: 4112749 - DNA, 25 bp, Homo sapien
tggagtaaaagtcctcctaaattca

SEQ ID NO: 4112750 - DNA, 25 bp, Homo sapien
caccatgggtggggcaacagcaccc

SEQ ID NO: 4112751 - DNA, 25 bp, Homo sapien
ccaccatgggtggggcaacagcacc

SEQ ID NO: 4112752 - DNA, 25 bp, Homo sapien
gtcaggtgatgtaaaagaaaagcca

SEQ ID NO: 4112753 - DNA, 25 bp, Homo sapien
caggtgatgtaaaagaaaagccacc

SEQ ID NO: 4112754 - DNA, 25 bp, Homo sapien
ccaaagggtgcatgactataccact

SEQ ID NO: 4112755 - DNA, 25 bp, Homo sapien
tccaaagggtgcatgactataccac

SEQ ID NO: 4112756 - DNA, 25 bp, Homo sapien
gatccaaagggtgcatgactatacc

SEQ ID NO: 4112757 - DNA, 25 bp, Homo sapien
tagatccaaagggtgcatgactata

SEQ ID NO: 4112758 - DNA, 25 bp, Homo sapien
tgacgtgatttctggtgatgtcttc

SEQ ID NO: 4112759 - DNA, 25 bp, Homo sapien
tctgagctctggatgaggaagtagc

SEQ ID NO: 4112760 - DNA, 25 bp, Homo sapien
catgcagtctgatgttaaggatgac

SEQ ID NO: 4112761 - DNA, 25 bp, Homo sapien
cagagtgtccactgagtatgctgca

SEQ ID NO: 4112762 - DNA, 25 bp, Homo sapien
gcctgtatataaacgaagatctaga

SEQ ID NO: 4112763 - DNA, 25 bp, Homo sapien
caacttgtggtctatttcatggaaa

SEQ ID NO: 4112764 - DNA, 25 bp, Homo sapien
ataaccagctacttcagccacaagg

SEQ ID NO: 4112765 - DNA, 25 bp, Homo sapien
gctatatcgcccagcatggtttcaa

SEQ ID NO: 4112766 - DNA, 25 bp, Homo sapien
tgaacagtgtgcgacctccagcttc

SEQ ID NO: 4112767 - DNA, 25 bp, Homo sapien
caccaaagatcacgggtgtatgtgg

SEQ ID NO: 4112768 - DNA, 25 bp, Homo sapien
gggggcacttgaaaatatccatttc

SEQ ID NO: 4112769 - DNA, 25 bp, Homo sapien
tgcgacctccagcttcaccaaagat

SEQ ID NO: 4112770 - DNA, 25 bp, Homo sapien
gtgtcagcctcaacagttcccagga

SEQ ID NO: 4112771 - DNA, 25 bp, Homo sapien
catttcactatctcatggacatggg

SEQ ID NO: 4112772 - DNA, 25 bp, Homo sapien
gagtcgacacttcttagcaaatggg

SEQ ID NO: 4112773 - DNA, 25 bp, Homo sapien
gaagggccccacacataactgtctg

SEQ ID NO: 4112774 - DNA, 25 bp, Homo sapien
cattaagaagcatagactcagtctc

SEQ ID NO: 4112775 - DNA, 25 bp, Homo sapien
acccccggaatctcggcagagcagc

SEQ ID NO: 4112776 - DNA, 25 bp, Homo sapien
atagactcagtctcacccccggaat

SEQ ID NO: 4112777 - DNA, 25 bp, Homo sapien
agaagcatagactcagtctcacccc

SEQ ID NO: 4112778 - DNA, 25 bp, Homo sapien
ataaaagagcaaagtgggagtggag

SEQ ID NO: 4112779 - DNA, 25 bp, Homo sapien
caaagtgggagtggaggatacttac

SEQ ID NO: 4112780 - DNA, 25 bp, Homo sapien
aaaataaaagagcaaagtgggagtg

SEQ ID NO: 4112781 - DNA, 25 bp, Homo sapien
gcaaagtgggagtggaggatactta

SEQ ID NO: 4112782 - DNA, 25 bp, Homo sapien
tcctctcaagaataagccacagggc

SEQ ID NO: 4112783 - DNA, 25 bp, Homo sapien
taaagtcagcaatgcgtcccaggtg

SEQ ID NO: 4112784 - DNA, 25 bp, Homo sapien
tattggagttgatacctaaaggccc

SEQ ID NO: 4112785 - DNA, 25 bp, Homo sapien
taagtcttagaggtatatccgggac

SEQ ID NO: 4112786 - DNA, 25 bp, Homo sapien
gcatgaggttggaggtagaaaggaa

SEQ ID NO: 4112787 - DNA, 25 bp, Homo sapien
catgaggttggaggtagaaaggaat

SEQ ID NO: 4112788 - DNA, 25 bp, Homo sapien
atgcatgaggttggaggtagaaagg

SEQ ID NO: 4112789 - DNA, 25 bp, Homo sapien
atgaggttggaggtagaaaggaatt

SEQ ID NO: 4112790 - DNA, 25 bp, Homo sapien
ccatttttagagctgcggaaagatt

SEQ ID NO: 4112791 - DNA, 25 bp, Homo sapien
taccagggtccgacactcttagtgc

SEQ ID NO: 4112792 - DNA, 25 bp, Homo sapien
tcttaaaacttgacatatacaggcc

SEQ ID NO: 4112793 - DNA, 25 bp, Homo sapien
ggcagctcccagtgcttaccagggt

SEQ ID NO: 4112794 - DNA, 25 bp, Homo sapien
aacttttcggacttggagcatgtca

SEQ ID NO: 4112795 - DNA, 25 bp, Homo sapien
gagcatgtcactagcagagagtcta

SEQ ID NO: 4112796 - DNA, 25 bp, Homo sapien
gctagtggtttgagactcattatcc

SEQ ID NO: 4112797 - DNA, 25 bp, Homo sapien
tcctctgccaacacagcaatatctt

SEQ ID NO: 4112798 - DNA, 25 bp, Homo sapien
gggctgtagtcctcaagtccactta

SEQ ID NO: 4112799 - DNA, 25 bp, Homo sapien
ggctgtagtcctcaagtccacttac

SEQ ID NO: 4112800 - DNA, 25 bp, Homo sapien
attggggctgtagtcctcaagtcca

SEQ ID NO: 4112801 - DNA, 25 bp, Homo sapien
tggggctgtagtcctcaagtccact

SEQ ID NO: 4112802 - DNA, 25 bp, Homo sapien
tgtcacggcttccatgcatgcggga

SEQ ID NO: 4112803 - DNA, 25 bp, Homo sapien
cattaactcagggactctcatcagg

SEQ ID NO: 4112804 - DNA, 25 bp, Homo sapien
tagagcccctctaaaagtagaagcc

SEQ ID NO: 4112805 - DNA, 25 bp, Homo sapien
tccccagcagtaaagaggagcttta

SEQ ID NO: 4112806 - DNA, 25 bp, Homo sapien
ggtctccaccgctcttccatatgaa

SEQ ID NO: 4112807 - DNA, 25 bp, Homo sapien
gacttctgacggtaatggagggtga

SEQ ID NO: 4112808 - DNA, 25 bp, Homo sapien
aagtgtttcactgttcgaaggtcca

SEQ ID NO: 4112809 - DNA, 25 bp, Homo sapien
gaaggtccatatttggatccaaaac

SEQ ID NO: 4112810 - DNA, 25 bp, Homo sapien
gaaacagagacagttgtggcccgac

SEQ ID NO: 4112811 - DNA, 25 bp, Homo sapien
gggacagcttaatctacacatggag

SEQ ID NO: 4112812 - DNA, 25 bp, Homo sapien
gcccgactgaggtgtctctaacaag

SEQ ID NO: 4112813 - DNA, 25 bp, Homo sapien
gaatatccaggagcattagcccagc

SEQ ID NO: 4112814 - DNA, 25 bp, Homo sapien
aaactccggcccaacagtccaagtg

SEQ ID NO: 4112815 - DNA, 25 bp, Homo sapien
aagtgctatgatccagcacctggaa

SEQ ID NO: 4112816 - DNA, 25 bp, Homo sapien
caacagtccaagtgctatgatccag

SEQ ID NO: 4112817 - DNA, 25 bp, Homo sapien
gaatttcaacagatcttcctacaag

SEQ ID NO: 4112818 - DNA, 25 bp, Homo sapien
tgggaggtgcagcatcgctaggcat

SEQ ID NO: 4112819 - DNA, 25 bp, Homo sapien
aaagccaggacatcatgggaggtgc

SEQ ID NO: 4112820 - DNA, 25 bp, Homo sapien
gcagcatcgctaggcatgggctgca

SEQ ID NO: 4112821 - DNA, 25 bp, Homo sapien
cctggggttgccacaaagccaggac

SEQ ID NO: 4112822 - DNA, 25 bp, Homo sapien
agttgaagtgtttatccccaataag

SEQ ID NO: 4112823 - DNA, 25 bp, Homo sapien
taagttacactctatacaagatcca

SEQ ID NO: 4112824 - DNA, 25 bp, Homo sapien
gatacaggtacaacaaaaacctgca

SEQ ID NO: 4112825 - DNA, 25 bp, Homo sapien
ggtctcagctcgctttgtgtaaata

SEQ ID NO: 4112826 - DNA, 25 bp, Homo sapien
agggaggcaactggactggaatcaa

SEQ ID NO: 4112827 - DNA, 25 bp, Homo sapien
aggccacacacaagctagggaggca

SEQ ID NO: 4112828 - DNA, 25 bp, Homo sapien
cacaagctagggaggcaactggact

SEQ ID NO: 4112829 - DNA, 25 bp, Homo sapien
ctagggaggcaactggactggaatc

SEQ ID NO: 4112830 - DNA, 25 bp, Homo sapien
ccttttggcattgcagactgtcgaa

SEQ ID NO: 4112831 - DNA, 25 bp, Homo sapien
caaggcttagcacacagggcaaaat

SEQ ID NO: 4112832 - DNA, 25 bp, Homo sapien
gcagttgtgcgatcagagtatctta

SEQ ID NO: 4112833 - DNA, 25 bp, Homo sapien
gctgactagcagtgagggaaccctg

SEQ ID NO: 4112834 - DNA, 25 bp, Homo sapien
gaagtagaacagaatcgccacagga

SEQ ID NO: 4112835 - DNA, 25 bp, Homo sapien
aagttgccctcacccaaaggttctg

SEQ ID NO: 4112836 - DNA, 25 bp, Homo sapien
gcctggcagtctgacccaaagttgc

SEQ ID NO: 4112837 - DNA, 25 bp, Homo sapien
gagcagctgatacgtgtgcataaca

SEQ ID NO: 4112838 - DNA, 25 bp, Homo sapien
tcctcccgggtgaagaatgcaccac

SEQ ID NO: 4112839 - DNA, 25 bp, Homo sapien
cgtcctgccagtcgtagggtcgtaa

SEQ ID NO: 4112840 - DNA, 25 bp, Homo sapien
aatcctcgaggagagcgtttgcagc

SEQ ID NO: 4112841 - DNA, 25 bp, Homo sapien
tagatgccgctacatggaggtctgg

SEQ ID NO: 4112842 - DNA, 25 bp, Homo sapien
gtcacaaggcgcaggaatcgagcgc

SEQ ID NO: 4112843 - DNA, 25 bp, Homo sapien
tgctactggcgtcgggtcggtccgg

SEQ ID NO: 4112844 - DNA, 25 bp, Homo sapien
aatcgagcgccgagagagcgagtcg

SEQ ID NO: 4112845 - DNA, 25 bp, Homo sapien
tcggtccgggtaggcgcagcgggac

SEQ ID NO: 4112846 - DNA, 25 bp, Homo sapien
cactctatcgcggcgggcggttgaa

SEQ ID NO: 4112847 - DNA, 25 bp, Homo sapien
gttacagtccttggaaaccgagctg

SEQ ID NO: 4112848 - DNA, 25 bp, Homo sapien
cgggattcccgaggcagggtcgtgg

SEQ ID NO: 4112849 - DNA, 25 bp, Homo sapien
gcggctccgagtccgggtctggtgg

SEQ ID NO: 4112850 - DNA, 25 bp, Homo sapien
taagggaggagtcattgctgctcat

SEQ ID NO: 4112851 - DNA, 25 bp, Homo sapien
ataagggaggagtcattgctgctca

SEQ ID NO: 4112852 - DNA, 25 bp, Homo sapien
cataagggaggagtcattgctgctc

SEQ ID NO: 4112853 - DNA, 25 bp, Homo sapien
tttgaggactccataggctttaaag

SEQ ID NO: 4112854 - DNA, 25 bp, Homo sapien
ttttcctggctatagtaaatgatcc

SEQ ID NO: 4112855 - DNA, 25 bp, Homo sapien
tcctggctatagtaaatgatcccag

SEQ ID NO: 4112856 - DNA, 25 bp, Homo sapien
taaagaacttcaacacagggtcatt

SEQ ID NO: 4112857 - DNA, 25 bp, Homo sapien
tccacatagttatactctcaagctc

SEQ ID NO: 4112858 - DNA, 25 bp, Homo sapien
gacagtccacatagttatactctca

SEQ ID NO: 4112859 - DNA, 25 bp, Homo sapien
ctgcaaagacagtccacatagttat

SEQ ID NO: 4112860 - DNA, 25 bp, Homo sapien
catagttatactctcaagctccagg

SEQ ID NO: 4112861 - DNA, 25 bp, Homo sapien
acatcttttgtgagcataaatgagg

SEQ ID NO: 4112862 - DNA, 25 bp, Homo sapien
cacgtctgggtgatgcctgatgctt

SEQ ID NO: 4112863 - DNA, 25 bp, Homo sapien
taaatgagggccatggtggagcaca

SEQ ID NO: 4112864 - DNA, 25 bp, Homo sapien
gacacgtctgggtgatgcctgatgc

SEQ ID NO: 4112865 - DNA, 25 bp, Homo sapien
tactctttggccttgtcatggcggc

SEQ ID NO: 4112866 - DNA, 25 bp, Homo sapien
gaaatcttcagcatgcggtcaatgt

SEQ ID NO: 4112867 - DNA, 25 bp, Homo sapien
gaaaaggccagcatagtacagtgca

SEQ ID NO: 4112868 - DNA, 25 bp, Homo sapien
tcatggcggcctatgagccagagga

SEQ ID NO: 4112869 - DNA, 25 bp, Homo sapien
ctttggtgtcctgaattccttgttc

SEQ ID NO: 4112870 - DNA, 25 bp, Homo sapien
tcagccccagcacatctttggtgtc

SEQ ID NO: 4112871 - DNA, 25 bp, Homo sapien
aatggctttcttcgcagtgtggggc

SEQ ID NO: 4112872 - DNA, 25 bp, Homo sapien
tgaattccttgttccaggtactcaa

SEQ ID NO: 4112873 - DNA, 25 bp, Homo sapien
agggcctctgagtagttctgctgca

SEQ ID NO: 4112874 - DNA, 25 bp, Homo sapien
acagtgatctggttcaccacctcca

SEQ ID NO: 4112875 - DNA, 25 bp, Homo sapien
tgcatcttcaggacgagggctggca

SEQ ID NO: 4112876 - DNA, 25 bp, Homo sapien
cagtcctgccgagctaagaacagct

SEQ ID NO: 4112877 - DNA, 25 bp, Homo sapien
aatttggcaggcatcaatattgctc

SEQ ID NO: 4112878 - DNA, 25 bp, Homo sapien
cacggttagaatttggcaggcatca

SEQ ID NO: 4112879 - DNA, 25 bp, Homo sapien
gctcatgcacggttagaatttggca

SEQ ID NO: 4112880 - DNA, 25 bp, Homo sapien
tggcaggcatcaatattgctctcat

SEQ ID NO: 4112881 - DNA, 25 bp, Homo sapien
tccttgattctgtttcaaggatcac

SEQ ID NO: 4112882 - DNA, 25 bp, Homo sapien
tacaagggctttgggtcaggtgcac

SEQ ID NO: 4112883 - DNA, 25 bp, Homo sapien
tcctacccagagacgaaaagggctg

SEQ ID NO: 4112884 - DNA, 25 bp, Homo sapien
taaatgctaagtctgcccctgggat

SEQ ID NO: 4112885 - DNA, 25 bp, Homo sapien
gaattcttagttcccagctgcagag

SEQ ID NO: 4112886 - DNA, 25 bp, Homo sapien
gccttaatcagatttctaacgtgat

SEQ ID NO: 4112887 - DNA, 25 bp, Homo sapien
tcagatttctaacgtgattggtagc

SEQ ID NO: 4112888 - DNA, 25 bp, Homo sapien
tagtgccttaatcagatttctaacg

SEQ ID NO: 4112889 - DNA, 25 bp, Homo sapien
gtctctagtgccttaatcagatttc

SEQ ID NO: 4112890 - DNA, 25 bp, Homo sapien
catgtcacagttatcagccagaggc

SEQ ID NO: 4112891 - DNA, 25 bp, Homo sapien
gatatgagccactaccctaaaggac

SEQ ID NO: 4112892 - DNA, 25 bp, Homo sapien
gagatggtgcctatgcaactccaca

SEQ ID NO: 4112893 - DNA, 25 bp, Homo sapien
cacagtaattggtctaaggagtcac

SEQ ID NO: 4112894 - DNA, 25 bp, Homo sapien
aagagatagcccagttctgtggcca

SEQ ID NO: 4112895 - DNA, 25 bp, Homo sapien
tgaaggtgcgctcgatgaaactaca

SEQ ID NO: 4112896 - DNA, 25 bp, Homo sapien
ctagaatcacctggtgactcccaca

SEQ ID NO: 4112897 - DNA, 25 bp, Homo sapien
cgatgaaactacacactagccctag

SEQ ID NO: 4112898 - DNA, 25 bp, Homo sapien
tcagcctgacatgttgaaccagaag

SEQ ID NO: 4112899 - DNA, 25 bp, Homo sapien
gactggtggtgagtagaactgcctc

SEQ ID NO: 4112900 - DNA, 25 bp, Homo sapien
tctacagaggtgaatctagaggctc

SEQ ID NO: 4112901 - DNA, 25 bp, Homo sapien
cagggcccactgagtataaggttca

SEQ ID NO: 4112902 - DNA, 25 bp, Homo sapien
gatagcagggtatccaactaggagt

SEQ ID NO: 4112903 - DNA, 25 bp, Homo sapien
tcggccaacctttcagactgctagc

SEQ ID NO: 4112904 - DNA, 25 bp, Homo sapien
tggagttaggcttagaatccccagg

SEQ ID NO: 4112905 - DNA, 25 bp, Homo sapien
tgctttgcatgttccactcggccaa

SEQ ID NO: 4112906 - DNA, 25 bp, Homo sapien
ccttctaagatatgacacaagatga

SEQ ID NO: 4112907 - DNA, 25 bp, Homo sapien
ggtggccttctaagatatgacacaa

SEQ ID NO: 4112908 - DNA, 25 bp, Homo sapien
tccttcaggaattccagccggtact

SEQ ID NO: 4112909 - DNA, 25 bp, Homo sapien
aattccagccggtactcagcttcct

SEQ ID NO: 4112910 - DNA, 25 bp, Homo sapien
ccttcaggagcgctgtggtctcttc

SEQ ID NO: 4112911 - DNA, 25 bp, Homo sapien
gcaagtactccttagcaatgcagac

SEQ ID NO: 4112912 - DNA, 25 bp, Homo sapien
tcagagccaagagggatgccttgca

SEQ ID NO: 4112913 - DNA, 25 bp, Homo sapien
caggaagtacgggtccagcttttca

SEQ ID NO: 4112914 - DNA, 25 bp, Homo sapien
caaatacagggggtcgatcagagct

SEQ ID NO: 4112915 - DNA, 25 bp, Homo sapien
taagaagtggagacacgatctggcc

SEQ ID NO: 4112916 - DNA, 25 bp, Homo sapien
ggtgctgctttgactacaggattca

SEQ ID NO: 4112917 - DNA, 25 bp, Homo sapien
tcacggcgacttgtttaagaagtgg

SEQ ID NO: 4112918 - DNA, 25 bp, Homo sapien
gatctgacacatgaggagatgggca

SEQ ID NO: 4112919 - DNA, 25 bp, Homo sapien
cctgagccaagtagatctgacacat

SEQ ID NO: 4112920 - DNA, 25 bp, Homo sapien
gccctgagccaagtagatctgacac

SEQ ID NO: 4112921 - DNA, 25 bp, Homo sapien
acatgaggagatgggcatccacgga

SEQ ID NO: 4112922 - DNA, 25 bp, Homo sapien
cagttccaataagatggatgcccgc

SEQ ID NO: 4112923 - DNA, 25 bp, Homo sapien
tccagccttgttgagggccctggcc

SEQ ID NO: 4112924 - DNA, 25 bp, Homo sapien
ctttatggcctctggatagtctcca

SEQ ID NO: 4112925 - DNA, 25 bp, Homo sapien
atgcccgctggctaggctgcacaga

SEQ ID NO: 4112926 - DNA, 25 bp, Homo sapien
cctgagcctccagtgtgccccagtc

SEQ ID NO: 4112927 - DNA, 25 bp, Homo sapien
gtccccagggaagagagcacggcat

SEQ ID NO: 4112928 - DNA, 25 bp, Homo sapien
ccccagggaagagagcacggcattt

SEQ ID NO: 4112929 - DNA, 25 bp, Homo sapien
ccagggaagagagcacggcatttct

SEQ ID NO: 4112930 - DNA, 25 bp, Homo sapien
caagtccacgttggcaatggtgatg

SEQ ID NO: 4112931 - DNA, 25 bp, Homo sapien
tggtgtgccaccgaactcattgatg

SEQ ID NO: 4112932 - DNA, 25 bp, Homo sapien
tctggcttccatatagcaggactgc

SEQ ID NO: 4112933 - DNA, 25 bp, Homo sapien
tagcatctgatgtagaggcgcctgt

SEQ ID NO: 4112934 - DNA, 25 bp, Homo sapien
cattcatcaactacactccaaggac

SEQ ID NO: 4112935 - DNA, 25 bp, Homo sapien
taacccatggacaattccatacatt

SEQ ID NO: 4112936 - DNA, 25 bp, Homo sapien
tgctcaaattgtaacccatggacaa

SEQ ID NO: 4112937 - DNA, 25 bp, Homo sapien
attcatcaactacactccaaggaca

SEQ ID NO: 4112938 - DNA, 25 bp, Homo sapien
ctccagaatgctcattaaggcatcg

SEQ ID NO: 4112939 - DNA, 25 bp, Homo sapien
gaatgctcattaaggcatcgcccag

SEQ ID NO: 4112940 - DNA, 25 bp, Homo sapien
tcattaaggcatcgcccagtagcag

SEQ ID NO: 4112941 - DNA, 25 bp, Homo sapien
taaggcatcgcccagtagcaggctg

SEQ ID NO: 4112942 - DNA, 25 bp, Homo sapien
agaagggagactggggggccacttg

SEQ ID NO: 4112943 - DNA, 25 bp, Homo sapien
gccacttggcaaggctgtgaggcct

SEQ ID NO: 4112944 - DNA, 25 bp, Homo sapien
gggccacttggcaaggctgtgaggc

SEQ ID NO: 4112945 - DNA, 25 bp, Homo sapien
cttggcaaggctgtgaggcctctca

SEQ ID NO: 4112946 - DNA, 25 bp, Homo sapien
ctttgggtcttcctcttctctccca

SEQ ID NO: 4112947 - DNA, 25 bp, Homo sapien
aagtgtctttgggtcttcctcttct

SEQ ID NO: 4112948 - DNA, 25 bp, Homo sapien
agtgtctttgggtcttcctcttctc

SEQ ID NO: 4112949 - DNA, 25 bp, Homo sapien
tgtctttgggtcttcctcttctctc

SEQ ID NO: 4112950 - DNA, 25 bp, Homo sapien
tataggcctcatcatagacctccag

SEQ ID NO: 4112951 - DNA, 25 bp, Homo sapien
taagcgtgcccaattctgctggcca

SEQ ID NO: 4112952 - DNA, 25 bp, Homo sapien
catgtgggttctgtctataggcctc

SEQ ID NO: 4112953 - DNA, 25 bp, Homo sapien
ctcagtatactggtgggccttcaca

SEQ ID NO: 4112954 - DNA, 25 bp, Homo sapien
ctgccccttcacaccctagcccagc

SEQ ID NO: 4112955 - DNA, 25 bp, Homo sapien
tgccccttcacaccctagcccagcc

SEQ ID NO: 4112956 - DNA, 25 bp, Homo sapien
ccttcacaccctagcccagcctgac

SEQ ID NO: 4112957 - DNA, 25 bp, Homo sapien
ccccttcacaccctagcccagcctg

SEQ ID NO: 4112958 - DNA, 25 bp, Homo sapien
gatcgcagcacagaaagtcctgtcc

SEQ ID NO: 4112959 - DNA, 25 bp, Homo sapien
tgcccagatcgcagcacagaaagtc

SEQ ID NO: 4112960 - DNA, 25 bp, Homo sapien
tcaggagcagtttgcccagatcgca

SEQ ID NO: 4112961 - DNA, 25 bp, Homo sapien
gcacagaaagtcctgtccattaatc

SEQ ID NO: 4112962 - DNA, 25 bp, Homo sapien
cttaacatcattcatcatggatggg

SEQ ID NO: 4112963 - DNA, 25 bp, Homo sapien
cattcatcatggatgggatgtcttg

SEQ ID NO: 4112964 - DNA, 25 bp, Homo sapien
ttcatcatggatgggatgtcttgga

SEQ ID NO: 4112965 - DNA, 25 bp, Homo sapien
atcattcatcatggatgggatgtct

SEQ ID NO: 4112966 - DNA, 25 bp, Homo sapien
tttatggctcttgtaaacctttgcc

SEQ ID NO: 4112967 - DNA, 25 bp, Homo sapien
ttttatggctcttgtaaacctttgc

SEQ ID NO: 4112968 - DNA, 25 bp, Homo sapien
caaagtttctatcacagcttctttt

SEQ ID NO: 4112969 - DNA, 25 bp, Homo sapien
cttgttcaaagtttctatcacagct

SEQ ID NO: 4112970 - DNA, 25 bp, Homo sapien
gtttcaagtattctggtatacacca

SEQ ID NO: 4112971 - DNA, 25 bp, Homo sapien
caagtattctggtatacaccaacag

SEQ ID NO: 4112972 - DNA, 25 bp, Homo sapien
agaactgtagaaaatgtatgaatta

SEQ ID NO: 4112973 - DNA, 25 bp, Homo sapien
agtattctggtatacaccaacagaa

SEQ ID NO: 4112974 - DNA, 25 bp, Homo sapien
tcagagcctgacataccagttcaca

SEQ ID NO: 4112975 - DNA, 25 bp, Homo sapien
gaaaccaatcaagccaggatcagaa

SEQ ID NO: 4112976 - DNA, 25 bp, Homo sapien
gccactggctgagtacacatgaggc

SEQ ID NO: 4112977 - DNA, 25 bp, Homo sapien
ttgggtcactctgaataggcaaagc

SEQ ID NO: 4112978 - DNA, 25 bp, Homo sapien
tgctccagtggaactcgcttcagta

SEQ ID NO: 4112979 - DNA, 25 bp, Homo sapien
tccttataagactgtaccgccttgt

SEQ ID NO: 4112980 - DNA, 25 bp, Homo sapien
ctttctctgccaggtagtgctctgc

SEQ ID NO: 4112981 - DNA, 25 bp, Homo sapien
agggaatcatttctggttgctccag

SEQ ID NO: 4112982 - DNA, 25 bp, Homo sapien
cacagaagcggtctcatggttctgc

SEQ ID NO: 4112983 - DNA, 25 bp, Homo sapien
cagaagcggtctcatggttctgctc

SEQ ID NO: 4112984 - DNA, 25 bp, Homo sapien
gaagcggtctcatggttctgctcag

SEQ ID NO: 4112985 - DNA, 25 bp, Homo sapien
agcggtctcatggttctgctcagtc

SEQ ID NO: 4112986 - DNA, 25 bp, Homo sapien
gactggcccaggagattgatgctgc

SEQ ID NO: 4112987 - DNA, 25 bp, Homo sapien
ccactgccagccagcctaccgcttc

SEQ ID NO: 4112988 - DNA, 25 bp, Homo sapien
tggcccaggagattgatgctgccca

SEQ ID NO: 4112989 - DNA, 25 bp, Homo sapien
cttagactggcccaggagattgatg

SEQ ID NO: 4112990 - DNA, 25 bp, Homo sapien
ttggtggtaaagattgatggccgct

SEQ ID NO: 4112991 - DNA, 25 bp, Homo sapien
tgttttctaaacatcaggtcagcca

SEQ ID NO: 4112992 - DNA, 25 bp, Homo sapien
tggcgctttctccaagacttggtgg

SEQ ID NO: 4112993 - DNA, 25 bp, Homo sapien
ttgatggccgcttcatgtttctgtt

SEQ ID NO: 4112994 - DNA, 25 bp, Homo sapien
ggagagcggcccttgctcagtggga

SEQ ID NO: 4112995 - DNA, 25 bp, Homo sapien
gagagcggcccttgctcagtgggaa

SEQ ID NO: 4112996 - DNA, 25 bp, Homo sapien
gctcagtgggaactggtacaggcag

SEQ ID NO: 4112997 - DNA, 25 bp, Homo sapien
gggagagcggcccttgctcagtggg

SEQ ID NO: 4112998 - DNA, 25 bp, Homo sapien
tcaagccccattggctgtgatttgg

SEQ ID NO: 4112999 - DNA, 25 bp, Homo sapien
tgggtccagtgccaagtccttgaga

SEQ ID NO: 4113000 - DNA, 25 bp, Homo sapien
tccttgagaccaggaactggcccct

SEQ ID NO: 4113001 - DNA, 25 bp, Homo sapien
tgtgacctcaaaaggggactgtgtc

SEQ ID NO: 4113002 - DNA, 25 bp, Homo sapien
taagagacagaaatctccaggctga

SEQ ID NO: 4113003 - DNA, 25 bp, Homo sapien
tgcccagtagctgttatcagatgag

SEQ ID NO: 4113004 - DNA, 25 bp, Homo sapien
agcagggacattccaacagctccag

SEQ ID NO: 4113005 - DNA, 25 bp, Homo sapien
tagctgttatcagatgagggtgctg

SEQ ID NO: 4113006 - DNA, 25 bp, Homo sapien
tctgcagtaattgaaccctggttcc

SEQ ID NO: 4113007 - DNA, 25 bp, Homo sapien
cagatcgattaatttatgcaatacc

SEQ ID NO: 4113008 - DNA, 25 bp, Homo sapien
aggcacccggctagacaccttcttg

SEQ ID NO: 4113009 - DNA, 25 bp, Homo sapien
gcaggaatgtcttcaagttttccac

SEQ ID NO: 4113010 - DNA, 25 bp, Homo sapien
agggatatacaaggaccactttgtg

SEQ ID NO: 4113011 - DNA, 25 bp, Homo sapien
ggaccactttgtgagtctgcacaaa

SEQ ID NO: 4113012 - DNA, 25 bp, Homo sapien
tcccctggaggagatgcgggcgtcg

SEQ ID NO: 4113013 - DNA, 25 bp, Homo sapien
tacaaggaccactttgtgagtctgc

SEQ ID NO: 4113014 - DNA, 25 bp, Homo sapien
taaggcttcgttgggctgccctatg

SEQ ID NO: 4113015 - DNA, 25 bp, Homo sapien
tcagacagatctgcaccatgtggta

SEQ ID NO: 4113016 - DNA, 25 bp, Homo sapien
agtgctgtccttgcgtgccttgttc

SEQ ID NO: 4113017 - DNA, 25 bp, Homo sapien
ccatgtggtagatggcgctctggcc

SEQ ID NO: 4113018 - DNA, 25 bp, Homo sapien
gcggtgctcacaccctgctgctcca

SEQ ID NO: 4113019 - DNA, 25 bp, Homo sapien
cggcggtgctcacaccctgctgctc

SEQ ID NO: 4113020 - DNA, 25 bp, Homo sapien
ctcggcggtgctcacaccctgctgc

SEQ ID NO: 4113021 - DNA, 25 bp, Homo sapien
gtgctcacaccctgctgctccaact

SEQ ID NO: 4113022 - DNA, 25 bp, Homo sapien
ctcagcctgcgctatctggatgaag

SEQ ID NO: 4113023 - DNA, 25 bp, Homo sapien
gcctccatgttagccttctccctgg

SEQ ID NO: 4113024 - DNA, 25 bp, Homo sapien
cctgcgctatctggatgaagctgcc

SEQ ID NO: 4113025 - DNA, 25 bp, Homo sapien
gcgctatctggatgaagctgcccag

SEQ ID NO: 4113026 - DNA, 25 bp, Homo sapien
cttggccaggcgcttcaactgcata

SEQ ID NO: 4113027 - DNA, 25 bp, Homo sapien
cgcttcaactgcatacgcgccttgg

SEQ ID NO: 4113028 - DNA, 25 bp, Homo sapien
tgctgccctggcagtaaatgtcagc

SEQ ID NO: 4113029 - DNA, 25 bp, Homo sapien
aacacgtaggcttgtgccaaggcca

SEQ ID NO: 4113030 - DNA, 25 bp, Homo sapien
agcgccgcagcagttctaaggcgag

SEQ ID NO: 4113031 - DNA, 25 bp, Homo sapien
gccgcagcagttctaaggcgaggtc

SEQ ID NO: 4113032 - DNA, 25 bp, Homo sapien
cgcagcagttctaaggcgaggtcga

SEQ ID NO: 4113033 - DNA, 25 bp, Homo sapien
cagcagttctaaggcgaggtcgaac

SEQ ID NO: 4113034 - DNA, 25 bp, Homo sapien
tcccgcagccctagtgtgtgtgtgg

SEQ ID NO: 4113035 - DNA, 25 bp, Homo sapien
tcctggaatgcctagaatcctttcc

SEQ ID NO: 4113036 - DNA, 25 bp, Homo sapien
ttcctggaatgcctagaatcctttc

SEQ ID NO: 4113037 - DNA, 25 bp, Homo sapien
cctggaatgcctagaatcctttccg

SEQ ID NO: 4113038 - DNA, 25 bp, Homo sapien
tgcagagcggaagccccaactggtt

SEQ ID NO: 4113039 - DNA, 25 bp, Homo sapien
cagagcggaagccccaactggttcc

SEQ ID NO: 4113040 - DNA, 25 bp, Homo sapien
gcagagcggaagccccaactggttc

SEQ ID NO: 4113041 - DNA, 25 bp, Homo sapien
ctgcagagcggaagccccaactggt

SEQ ID NO: 4113042 - DNA, 25 bp, Homo sapien
ctgcagggaaagccagttagagcct

SEQ ID NO: 4113043 - DNA, 25 bp, Homo sapien
cagggttggcgtgatgactgtactt

SEQ ID NO: 4113044 - DNA, 25 bp, Homo sapien
cagtttgtagttggtgactgcatcc

SEQ ID NO: 4113045 - DNA, 25 bp, Homo sapien
tgactgcatccttgtaggactgctc

SEQ ID NO: 4113046 - DNA, 25 bp, Homo sapien
tacttccaggccagtttgtagttgg

SEQ ID NO: 4113047 - DNA, 25 bp, Homo sapien
tccattcacgtgcaccctggctggt

SEQ ID NO: 4113048 - DNA, 25 bp, Homo sapien
ccacgtccattcacgtgcaccctgg

SEQ ID NO: 4113049 - DNA, 25 bp, Homo sapien
acgtccattcacgtgcaccctggct

SEQ ID NO: 4113050 - DNA, 25 bp, Homo sapien
tccctcccacgtccattcacgtgca

SEQ ID NO: 4113051 - DNA, 25 bp, Homo sapien
tggttctcataacagccagggtaca

SEQ ID NO: 4113052 - DNA, 25 bp, Homo sapien
cagggtacaggccttgagttctggg

SEQ ID NO: 4113053 - DNA, 25 bp, Homo sapien
atggtggcaccctggtgacctgaga

SEQ ID NO: 4113054 - DNA, 25 bp, Homo sapien
tggtgacctgagaacccctctggtt

SEQ ID NO: 4113055 - DNA, 25 bp, Homo sapien
tcaggtagttgaaagcaagtttgaa

SEQ ID NO: 4113056 - DNA, 25 bp, Homo sapien
ttcaggtagttgaaagcaagtttga

SEQ ID NO: 4113057 - DNA, 25 bp, Homo sapien
ggccctccccaccaaggctgctggc

SEQ ID NO: 4113058 - DNA, 25 bp, Homo sapien
ccctccccaccaaggctgctggctt

SEQ ID NO: 4113059 - DNA, 25 bp, Homo sapien
cactacaccaggccctccccaccaa

SEQ ID NO: 4113060 - DNA, 25 bp, Homo sapien
ctccccaccaaggctgctggcttac

SEQ ID NO: 4113061 - DNA, 25 bp, Homo sapien
gggtgtgcagtatcatgcaggtttc

SEQ ID NO: 4113062 - DNA, 25 bp, Homo sapien
aatgggtgtgcagtatcatgcaggt

SEQ ID NO: 4113063 - DNA, 25 bp, Homo sapien
agagaatgggtgtgcagtatcatgc

SEQ ID NO: 4113064 - DNA, 25 bp, Homo sapien
tgtgcagtatcatgcaggtttcccc

SEQ ID NO: 4113065 - DNA, 25 bp, Homo sapien
ctgatcttggggtagtcggggtgct

SEQ ID NO: 4113066 - DNA, 25 bp, Homo sapien
cctgatcttggggtagtcggggtgc

SEQ ID NO: 4113067 - DNA, 25 bp, Homo sapien
tgatcttggggtagtcggggtgctc

SEQ ID NO: 4113068 - DNA, 25 bp, Homo sapien
ccctgatcttggggtagtcggggtg

SEQ ID NO: 4113069 - DNA, 25 bp, Homo sapien
tgacccactttccatccctccacac

SEQ ID NO: 4113070 - DNA, 25 bp, Homo sapien
taggttgatggcttctactggtcca

SEQ ID NO: 4113071 - DNA, 25 bp, Homo sapien
tcagtaggttgatggcttctactgg

SEQ ID NO: 4113072 - DNA, 25 bp, Homo sapien
tgatggcttctactggtccaggccc

SEQ ID NO: 4113073 - DNA, 25 bp, Homo sapien
aacaatgcatggacagggtgggaca

SEQ ID NO: 4113074 - DNA, 25 bp, Homo sapien
cttaatgacatcaaggaagactggt

SEQ ID NO: 4113075 - DNA, 25 bp, Homo sapien
tgtatttccttgtgccaggcgaggg

SEQ ID NO: 4113076 - DNA, 25 bp, Homo sapien
gaagactggtattgggagcacagca

SEQ ID NO: 4113077 - DNA, 25 bp, Homo sapien
ggctgaaatcaggtggcttctgcca

SEQ ID NO: 4113078 - DNA, 25 bp, Homo sapien
tctttgcgtgatgttccttagccca

SEQ ID NO: 4113079 - DNA, 25 bp, Homo sapien
catgggtggctaaatccactggact

SEQ ID NO: 4113080 - DNA, 25 bp, Homo sapien
tatctccacaacgtgagcctggaag

SEQ ID NO: 4113081 - DNA, 25 bp, Homo sapien
tcctggagtccctcatgggcttctc

SEQ ID NO: 4113082 - DNA, 25 bp, Homo sapien
ttgacagccagtttgaggacactgt

SEQ ID NO: 4113083 - DNA, 25 bp, Homo sapien
gccctagatccctttattgacagcc

SEQ ID NO: 4113084 - DNA, 25 bp, Homo sapien
tggagtccctcatgggcttctccga

SEQ ID NO: 4113085 - DNA, 25 bp, Homo sapien
ccggagtagctcagtggatctcagc

SEQ ID NO: 4113086 - DNA, 25 bp, Homo sapien
tctcagcttgtcttcttgtgactcc

SEQ ID NO: 4113087 - DNA, 25 bp, Homo sapien
ccagctgcttcctaaatggtggcct

SEQ ID NO: 4113088 - DNA, 25 bp, Homo sapien
agcatggacgctggccggagtagct

SEQ ID NO: 4113089 - DNA, 25 bp, Homo sapien
gtcatgtgaccccaagtgttttggg

SEQ ID NO: 4113090 - DNA, 25 bp, Homo sapien
ggaggaggtgccaaggctttcggtc

SEQ ID NO: 4113091 - DNA, 25 bp, Homo sapien
tggaggaagcagtcattgtcaggtg

SEQ ID NO: 4113092 - DNA, 25 bp, Homo sapien
aaggctttcggtctgccctctcagg

SEQ ID NO: 4113093 - DNA, 25 bp, Homo sapien
ggcccattcacaggcacgcactgtg

SEQ ID NO: 4113094 - DNA, 25 bp, Homo sapien
gggcccattcacaggcacgcactgt

SEQ ID NO: 4113095 - DNA, 25 bp, Homo sapien
cattcacaggcacgcactgtggaga

SEQ ID NO: 4113096 - DNA, 25 bp, Homo sapien
tcacaggcacgcactgtggagatgc

SEQ ID NO: 4113097 - DNA, 25 bp, Homo sapien
tccttttgacccagttgcctgagaa

SEQ ID NO: 4113098 - DNA, 25 bp, Homo sapien
ggcattcagcgcgagtggcactgcc

SEQ ID NO: 4113099 - DNA, 25 bp, Homo sapien
gtaaccccgagagaagtcacggctc

SEQ ID NO: 4113100 - DNA, 25 bp, Homo sapien
gagcaggtgacatttgtcgccttcc

SEQ ID NO: 4113101 - DNA, 25 bp, Homo sapien
tgagccccggagttttccactgacg

SEQ ID NO: 4113102 - DNA, 25 bp, Homo sapien
ctccgcgagcgtccggattgcaggt

SEQ ID NO: 4113103 - DNA, 25 bp, Homo sapien
gagcgcacagagtcgcggcgcaggg

SEQ ID NO: 4113104 - DNA, 25 bp, Homo sapien
cgggtcgcgtcgttgtcctccgcga

SEQ ID NO: 4113105 - DNA, 25 bp, Homo sapien
gctgccgggcggcctggctggaggc

SEQ ID NO: 4113106 - DNA, 25 bp, Homo sapien
cggcgcctccggggcggggctgccg

SEQ ID NO: 4113107 - DNA, 25 bp, Homo sapien
ggggctgccgggcggcctggctgga

SEQ ID NO: 4113108 - DNA, 25 bp, Homo sapien
ctgccgggcggcctggctggaggcc

SEQ ID NO: 4113109 - DNA, 25 bp, Homo sapien
cagtcgccgggtcacagtccgcagg

SEQ ID NO: 4113110 - DNA, 25 bp, Homo sapien
gcggaggcgcagtcgccgggtcaca

SEQ ID NO: 4113111 - DNA, 25 bp, Homo sapien
cgcagtcgccgggtcacagtccgca

SEQ ID NO: 4113112 - DNA, 25 bp, Homo sapien
aggcgcagtcgccgggtcacagtcc

SEQ ID NO: 4113113 - DNA, 25 bp, Homo sapien
gagcattccagtcgagaagaccggc

SEQ ID NO: 4113114 - DNA, 25 bp, Homo sapien
cacagtttacttttccggcggatct

SEQ ID NO: 4113115 - DNA, 25 bp, Homo sapien
tgagtagactcgtacctgcggttgg

SEQ ID NO: 4113116 - DNA, 25 bp, Homo sapien
gaagaccggctgcagtaaaagcgtg

SEQ ID NO: 4113117 - DNA, 25 bp, Homo sapien
acagctaggagagcgggtgatttta

SEQ ID NO: 4113118 - DNA, 25 bp, Homo sapien
acacagctaggagagcgggtgattt

SEQ ID NO: 4113119 - DNA, 25 bp, Homo sapien
aggagagcgggtgattttaccagca

SEQ ID NO: 4113120 - DNA, 25 bp, Homo sapien
ctaggagagcgggtgattttaccag

SEQ ID NO: 4113121 - DNA, 25 bp, Homo sapien
caggaatgcattcgattctttaagg

SEQ ID NO: 4113122 - DNA, 25 bp, Homo sapien
gggcaggaatgcattcgattcttta

SEQ ID NO: 4113123 - DNA, 25 bp, Homo sapien
aatgcattcgattctttaaggttca

SEQ ID NO: 4113124 - DNA, 25 bp, Homo sapien
gaatgcattcgattctttaaggttc

SEQ ID NO: 4113125 - DNA, 25 bp, Homo sapien
ccggatatgaagtcactcgcgtgag

SEQ ID NO: 4113126 - DNA, 25 bp, Homo sapien
ttcccagaaagtcccggatatgaag

SEQ ID NO: 4113127 - DNA, 25 bp, Homo sapien
gaagtcactcgcgtgaggtcaccga

SEQ ID NO: 4113128 - DNA, 25 bp, Homo sapien
tgaggtcaccgagcctggttccaag

SEQ ID NO: 4113129 - DNA, 25 bp, Homo sapien
gggcggtactcgggtctcgctggct

SEQ ID NO: 4113130 - DNA, 25 bp, Homo sapien
ggggcggtactcgggtctcgctggc

SEQ ID NO: 4113131 - DNA, 25 bp, Homo sapien
ctgcgtcccggaaggcaggcacggg

SEQ ID NO: 4113132 - DNA, 25 bp, Homo sapien
tcccggaaggcaggcacgggggtgc

SEQ ID NO: 4113133 - DNA, 25 bp, Homo sapien
tgcgtcccggaaggcaggcacgggg

SEQ ID NO: 4113134 - DNA, 25 bp, Homo sapien
ggaaggcaggcacgggggtgccctg

SEQ ID NO: 4113135 - DNA, 25 bp, Homo sapien
tatctttcaaggagtcattcagacc

SEQ ID NO: 4113136 - DNA, 25 bp, Homo sapien
tccctgtaagtgtatttcctgtccc

SEQ ID NO: 4113137 - DNA, 25 bp, Homo sapien
ccccagtgctagaatggtaccagaa

SEQ ID NO: 4113138 - DNA, 25 bp, Homo sapien
aaagcccagtgtttgtattggaggg

SEQ ID NO: 4113139 - DNA, 25 bp, Homo sapien
ccggcaggcgtgcagccagggactg

SEQ ID NO: 4113140 - DNA, 25 bp, Homo sapien
ctgttgctgggagacgcccggcagg

SEQ ID NO: 4113141 - DNA, 25 bp, Homo sapien
gccgccgagttcagaacgttcgggc

SEQ ID NO: 4113142 - DNA, 25 bp, Homo sapien
cgccaaggtgacgatgaggactaag

SEQ ID NO: 4113143 - DNA, 25 bp, Homo sapien
gagcgcgtggcgaccagaccccgcc

SEQ ID NO: 4113144 - DNA, 25 bp, Homo sapien
ccggagcccgcagggcgtgttccca

SEQ ID NO: 4113145 - DNA, 25 bp, Homo sapien
ggaggcggagcgcgtggcgaccaga

SEQ ID NO: 4113146 - DNA, 25 bp, Homo sapien
ggcggagcgcgtggcgaccagaccc

SEQ ID NO: 4113147 - DNA, 25 bp, Homo sapien
gtgactgggccggtggtgcgcgccg

SEQ ID NO: 4113148 - DNA, 25 bp, Homo sapien
gccggcggcggcgtgcacagaggag

SEQ ID NO: 4113149 - DNA, 25 bp, Homo sapien
cggcggcgtgcacagaggagagaag

SEQ ID NO: 4113150 - DNA, 25 bp, Homo sapien
cggcttctcggcgaggcccctcccg

SEQ ID NO: 4113151 - DNA, 25 bp, Homo sapien
tcatgccaggttctgttcagagtgc

SEQ ID NO: 4113152 - DNA, 25 bp, Homo sapien
tgacccgaatgacagaagagccagt

SEQ ID NO: 4113153 - DNA, 25 bp, Homo sapien
ttccttcaacttgggtggtcaggga

SEQ ID NO: 4113154 - DNA, 25 bp, Homo sapien
gcatctcagcggaggtgacccgaat

SEQ ID NO: 4113155 - DNA, 25 bp, Homo sapien
tcattcatcttggtacgtctttacc

SEQ ID NO: 4113156 - DNA, 25 bp, Homo sapien
cttggtacgtctttaccacaagtgc

SEQ ID NO: 4113157 - DNA, 25 bp, Homo sapien
tcatcttggtacgtctttaccacaa

SEQ ID NO: 4113158 - DNA, 25 bp, Homo sapien
tcttggtacgtctttaccacaagtg

SEQ ID NO: 4113159 - DNA, 25 bp, Homo sapien
ggactgaagtgggtacctgcctcct

SEQ ID NO: 4113160 - DNA, 25 bp, Homo sapien
tgtacactggagcaaggaccaagag

SEQ ID NO: 4113161 - DNA, 25 bp, Homo sapien
tatggagccatgagaaccgtgactg

SEQ ID NO: 4113162 - DNA, 25 bp, Homo sapien
catcttcagaggattactgtgggcc

SEQ ID NO: 4113163 - DNA, 25 bp, Homo sapien
gaagctcttccaaacggagcccctg

SEQ ID NO: 4113164 - DNA, 25 bp, Homo sapien
catccatgaggtcaaggccgcatgc

SEQ ID NO: 4113165 - DNA, 25 bp, Homo sapien
catgccgggaggagatccaaagcaa

SEQ ID NO: 4113166 - DNA, 25 bp, Homo sapien
gccccttggaactgcgctcagagat

SEQ ID NO: 4113167 - DNA, 25 bp, Homo sapien
cttccctttgcccagagcctccttc

SEQ ID NO: 4113168 - DNA, 25 bp, Homo sapien
ctttgccactctcttccctttgccc

SEQ ID NO: 4113169 - DNA, 25 bp, Homo sapien
ttccctttgcccagagcctccttcc

SEQ ID NO: 4113170 - DNA, 25 bp, Homo sapien
cactctcttccctttgcccagagcc

SEQ ID NO: 4113171 - DNA, 25 bp, Homo sapien
gtctttgccgccacggtcacaggga

SEQ ID NO: 4113172 - DNA, 25 bp, Homo sapien
ctgagtccgtctttgccgccacggt

SEQ ID NO: 4113173 - DNA, 25 bp, Homo sapien
gatgtggagcatttatgaactttta

SEQ ID NO: 4113174 - DNA, 25 bp, Homo sapien
acttgcactcctgagtccgtctttg

SEQ ID NO: 4113175 - DNA, 25 bp, Homo sapien
caaacaaacaatactcttccggatt

SEQ ID NO: 4113176 - DNA, 25 bp, Homo sapien
tacagcttgtgaagatcattttact

SEQ ID NO: 4113177 - DNA, 25 bp, Homo sapien
tactcttccggatttcttcgtttca

SEQ ID NO: 4113178 - DNA, 25 bp, Homo sapien
tacaccaatatctccagctgagatc

SEQ ID NO: 4113179 - DNA, 25 bp, Homo sapien
tgacgctaatccttaaacgtcaact

SEQ ID NO: 4113180 - DNA, 25 bp, Homo sapien
ttcctagacttccagctaggagtct

SEQ ID NO: 4113181 - DNA, 25 bp, Homo sapien
atctatgacgctaatccttaaacgt

SEQ ID NO: 4113182 - DNA, 25 bp, Homo sapien
aggagtctttgcacccagaagcaag

SEQ ID NO: 4113183 - DNA, 25 bp, Homo sapien
cttatccttaaaagccacatctgat

SEQ ID NO: 4113184 - DNA, 25 bp, Homo sapien
tcacagcatcattcgggtcacacca

SEQ ID NO: 4113185 - DNA, 25 bp, Homo sapien
tctgacagtcggagctctgaggagc

SEQ ID NO: 4113186 - DNA, 25 bp, Homo sapien
cttcagggcacaacggtcaagttct

SEQ ID NO: 4113187 - DNA, 25 bp, Homo sapien
tccctcgatgggaagcaacttcagg

SEQ ID NO: 4113188 - DNA, 25 bp, Homo sapien
gattggaactgccatgctgagtccc

SEQ ID NO: 4113189 - DNA, 25 bp, Homo sapien
cagaacaagagtagggcccacagac

SEQ ID NO: 4113190 - DNA, 25 bp, Homo sapien
agaacaagagtagggcccacagaca

SEQ ID NO: 4113191 - DNA, 25 bp, Homo sapien
ccagaacaagagtagggcccacaga

SEQ ID NO: 4113192 - DNA, 25 bp, Homo sapien
gaacaagagtagggcccacagacat

SEQ ID NO: 4113193 - DNA, 25 bp, Homo sapien
ttcatagtgtcgatggtctttacaa

SEQ ID NO: 4113194 - DNA, 25 bp, Homo sapien
tcatagtgtcgatggtctttacaat

SEQ ID NO: 4113195 - DNA, 25 bp, Homo sapien
ttaggtcttccatctaagtctttaa

SEQ ID NO: 4113196 - DNA, 25 bp, Homo sapien
taggtcttccatctaagtctttaat

SEQ ID NO: 4113197 - DNA, 25 bp, Homo sapien
aggtcttccatctaagtctttaatc

SEQ ID NO: 4113198 - DNA, 25 bp, Homo sapien
tttaggtcttccatctaagtcttta

SEQ ID NO: 4113199 - DNA, 25 bp, Homo sapien
tcggcaaattcccctcaccatcatt

SEQ ID NO: 4113200 - DNA, 25 bp, Homo sapien
cggcaaattcccctcaccatcattc

SEQ ID NO: 4113201 - DNA, 25 bp, Homo sapien
ggcaaattcccctcaccatcattca

SEQ ID NO: 4113202 - DNA, 25 bp, Homo sapien
ctcggcaaattcccctcaccatcat

SEQ ID NO: 4113203 - DNA, 25 bp, Homo sapien
gtgcagctcaatgagcagcagcctc

SEQ ID NO: 4113204 - DNA, 25 bp, Homo sapien
gcagcctctctggaggtatcctccc

SEQ ID NO: 4113205 - DNA, 25 bp, Homo sapien
ccttcttcacaaagtctgtatcctc

SEQ ID NO: 4113206 - DNA, 25 bp, Homo sapien
gtatcctcatgtgagtgcagctcaa

SEQ ID NO: 4113207 - DNA, 25 bp, Homo sapien
ttcttgcagaccacaaggaccagga

SEQ ID NO: 4113208 - DNA, 25 bp, Homo sapien
tatcagggtagtagtagtcggtcac

SEQ ID NO: 4113209 - DNA, 25 bp, Homo sapien
gtctgaataagttccgcatcacagg

SEQ ID NO: 4113210 - DNA, 25 bp, Homo sapien
ctttagggcatacacggcatggaca

SEQ ID NO: 4113211 - DNA, 25 bp, Homo sapien
tggtaaaacactagcaatgggatgg

SEQ ID NO: 4113212 - DNA, 25 bp, Homo sapien
gatggtgaatgggatcaacaagcct

SEQ ID NO: 4113213 - DNA, 25 bp, Homo sapien
aaatgtagtctacgctggaggaacg

SEQ ID NO: 4113214 - DNA, 25 bp, Homo sapien
aagaaccacgttgaatgggacccag

SEQ ID NO: 4113215 - DNA, 25 bp, Homo sapien
gtaactaggcagcagtagcatcagc

SEQ ID NO: 4113216 - DNA, 25 bp, Homo sapien
cacaggcttgatgttgtgccaggca

SEQ ID NO: 4113217 - DNA, 25 bp, Homo sapien
gcctactgacagtctctgaaggtat

SEQ ID NO: 4113218 - DNA, 25 bp, Homo sapien
cattgactgatggtgaaacagctga

SEQ ID NO: 4113219 - DNA, 25 bp, Homo sapien
cagctgttcaggctttttagaagac

SEQ ID NO: 4113220 - DNA, 25 bp, Homo sapien
ctcagctgttcaggctttttagaag

SEQ ID NO: 4113221 - DNA, 25 bp, Homo sapien
tcctcagctgttcaggctttttaga

SEQ ID NO: 4113222 - DNA, 25 bp, Homo sapien
ctgttcaggctttttagaagactct

SEQ ID NO: 4113223 - DNA, 25 bp, Homo sapien
caccttgcatggccttgcattcatg

SEQ ID NO: 4113224 - DNA, 25 bp, Homo sapien
agttcttccatccaccttgcatggc

SEQ ID NO: 4113225 - DNA, 25 bp, Homo sapien
aatcttctcttgagatgtctctctt

SEQ ID NO: 4113226 - DNA, 25 bp, Homo sapien
ccacagttcttccatccaccttgca

SEQ ID NO: 4113227 - DNA, 25 bp, Homo sapien
cagtgtcttctttaacgccaccaac

SEQ ID NO: 4113228 - DNA, 25 bp, Homo sapien
tgttcaaaataatcttttaggtgat

SEQ ID NO: 4113229 - DNA, 25 bp, Homo sapien
cttcagtgtcttctttaacgccacc

SEQ ID NO: 4113230 - DNA, 25 bp, Homo sapien
gttcaaaataatcttttaggtgatg

SEQ ID NO: 4113231 - DNA, 25 bp, Homo sapien
gtggccactcacagtacagtatttc

SEQ ID NO: 4113232 - DNA, 25 bp, Homo sapien
attcccatcaaaaccacctccacga

SEQ ID NO: 4113233 - DNA, 25 bp, Homo sapien
tgtcattcccatcaaaaccacctcc

SEQ ID NO: 4113234 - DNA, 25 bp, Homo sapien
catgggcccaaaatgtgaagactga

SEQ ID NO: 4113235 - DNA, 25 bp, Homo sapien
tctttggctggttgaagcacgagcc

SEQ ID NO: 4113236 - DNA, 25 bp, Homo sapien
aggtgtgatccaactactgagcatg

SEQ ID NO: 4113237 - DNA, 25 bp, Homo sapien
gatccaactactgagcatgaaaatt

SEQ ID NO: 4113238 - DNA, 25 bp, Homo sapien
tgtgatccaactactgagcatgaaa

SEQ ID NO: 4113239 - DNA, 25 bp, Homo sapien
ccaactactgagcatgaaaattttg

SEQ ID NO: 4113240 - DNA, 25 bp, Homo sapien
caaatctacatgtccaatgacaaca

SEQ ID NO: 4113241 - DNA, 25 bp, Homo sapien
gcccaaatctacatgtccaatgaca

SEQ ID NO: 4113242 - DNA, 25 bp, Homo sapien
agtcttttccattcccattgttgct

SEQ ID NO: 4113243 - DNA, 25 bp, Homo sapien
tgaaggagccttttccatctcaaca

SEQ ID NO: 4113244 - DNA, 25 bp, Homo sapien
ttcagcttatccaagacccaggcat

SEQ ID NO: 4113245 - DNA, 25 bp, Homo sapien
ctttcagcttatccaagacccaggc

SEQ ID NO: 4113246 - DNA, 25 bp, Homo sapien
tttcagcttatccaagacccaggca

SEQ ID NO: 4113247 - DNA, 25 bp, Homo sapien
tcagcttatccaagacccaggcata

SEQ ID NO: 4113248 - DNA, 25 bp, Homo sapien
tcacgtagtatttgctggtatcaaa

SEQ ID NO: 4113249 - DNA, 25 bp, Homo sapien
tagtcacgtagtatttgctggtatc

SEQ ID NO: 4113250 - DNA, 25 bp, Homo sapien
acgtagtatttgctggtatcaaatt

SEQ ID NO: 4113251 - DNA, 25 bp, Homo sapien
gatagtcacgtagtatttgctggta

SEQ ID NO: 4113252 - DNA, 25 bp, Homo sapien
cacaatcagcctgagacatccctgt

SEQ ID NO: 4113253 - DNA, 25 bp, Homo sapien
tgtaagacaggagggcatgctcttg

SEQ ID NO: 4113254 - DNA, 25 bp, Homo sapien
gtgtaagacaggagggcatgctctt

SEQ ID NO: 4113255 - DNA, 25 bp, Homo sapien
ggacagcacaatcagcctgagacat

SEQ ID NO: 4113256 - DNA, 25 bp, Homo sapien
ccatccttatgggtgactttccatc

SEQ ID NO: 4113257 - DNA, 25 bp, Homo sapien
gcattgccatccttatgggtgactt

SEQ ID NO: 4113258 - DNA, 25 bp, Homo sapien
catccttatgggtgactttccatct

SEQ ID NO: 4113259 - DNA, 25 bp, Homo sapien
ctggcattgccatccttatgggtga

SEQ ID NO: 4113260 - DNA, 25 bp, Homo sapien
ggagatgcaggcacaaaggcttgtc

SEQ ID NO: 4113261 - DNA, 25 bp, Homo sapien
cagaaacagtacaaatgccaccaat

SEQ ID NO: 4113262 - DNA, 25 bp, Homo sapien
atcctggagatgcaggcacaaaggc

SEQ ID NO: 4113263 - DNA, 25 bp, Homo sapien
cagccaacagaaacagtacaaatgc

SEQ ID NO: 4113264 - DNA, 25 bp, Homo sapien
ccaggtttgagaacaccagtatcca

SEQ ID NO: 4113265 - DNA, 25 bp, Homo sapien
taccaggtttgagaacaccagtatc

SEQ ID NO: 4113266 - DNA, 25 bp, Homo sapien
cataccaggtttgagaacaccagta

SEQ ID NO: 4113267 - DNA, 25 bp, Homo sapien
caggtttgagaacaccagtatccac

SEQ ID NO: 4113268 - DNA, 25 bp, Homo sapien
atattcttgacattgaagcccacat

SEQ ID NO: 4113269 - DNA, 25 bp, Homo sapien
gacatattcttgacattgaagccca

SEQ ID NO: 4113270 - DNA, 25 bp, Homo sapien
agacatattcttgacattgaagccc

SEQ ID NO: 4113271 - DNA, 25 bp, Homo sapien
cttgacagacatattcttgacattg

SEQ ID NO: 4113272 - DNA, 25 bp, Homo sapien
tcacatgagcagtgaagctagctga

SEQ ID NO: 4113273 - DNA, 25 bp, Homo sapien
tgaagctagctgactccattggtgg

SEQ ID NO: 4113274 - DNA, 25 bp, Homo sapien
catgagcagtgaagctagctgactc

SEQ ID NO: 4113275 - DNA, 25 bp, Homo sapien
gagcagtgaagctagctgactccat

SEQ ID NO: 4113276 - DNA, 25 bp, Homo sapien
caatgtggaccatgtggcaatacag

SEQ ID NO: 4113277 - DNA, 25 bp, Homo sapien
gtggaccatgtggcaatacagtaca

SEQ ID NO: 4113278 - DNA, 25 bp, Homo sapien
tgtggaccatgtggcaatacagtac

SEQ ID NO: 4113279 - DNA, 25 bp, Homo sapien
aatgtggaccatgtggcaatacagt

SEQ ID NO: 4113280 - DNA, 25 bp, Homo sapien
tcaagaatttagggcaatcttctgg

SEQ ID NO: 4113281 - DNA, 25 bp, Homo sapien
gaatttagggcaatcttctggcttt

SEQ ID NO: 4113282 - DNA, 25 bp, Homo sapien
aagaatttagggcaatcttctggct

SEQ ID NO: 4113283 - DNA, 25 bp, Homo sapien
aatttagggcaatcttctggctttt

SEQ ID NO: 4113284 - DNA, 25 bp, Homo sapien
ttagtatgagaagctctcaacacac

SEQ ID NO: 4113285 - DNA, 25 bp, Homo sapien
agccttctgacctttctgggcaact

SEQ ID NO: 4113286 - DNA, 25 bp, Homo sapien
gccttctgacctttctgggcaactt

SEQ ID NO: 4113287 - DNA, 25 bp, Homo sapien
tagccttctgacctttctgggcaac

SEQ ID NO: 4113288 - DNA, 25 bp, Homo sapien
taaaactgccagatgcaaaaaagaa

SEQ ID NO: 4113289 - DNA, 25 bp, Homo sapien
ccatctgaaggttttatgatgcatt

SEQ ID NO: 4113290 - DNA, 25 bp, Homo sapien
aacttaaaactgccagatgcaaaaa

SEQ ID NO: 4113291 - DNA, 25 bp, Homo sapien
attctgtaacagatttttggtcaag

SEQ ID NO: 4113292 - DNA, 25 bp, Homo sapien
ttcaagatccagcaatatgttccac

SEQ ID NO: 4113293 - DNA, 25 bp, Homo sapien
tcaaagaggttagttcaggctggct

SEQ ID NO: 4113294 - DNA, 25 bp, Homo sapien
gggtccaggacaggtcttccaatat

SEQ ID NO: 4113295 - DNA, 25 bp, Homo sapien
cccttgcagtgtcccctaaggaaag

SEQ ID NO: 4113296 - DNA, 25 bp, Homo sapien
ggctagcttcactcctattagatga

SEQ ID NO: 4113297 - DNA, 25 bp, Homo sapien
tgaacctcctcacaaaggctagctt

SEQ ID NO: 4113298 - DNA, 25 bp, Homo sapien
tgcagcacgacatccagctgagatc

SEQ ID NO: 4113299 - DNA, 25 bp, Homo sapien
agacatctgagacctctctgcagca

SEQ ID NO: 4113300 - DNA, 25 bp, Homo sapien
agtgatgagctggaccagctgatct

SEQ ID NO: 4113301 - DNA, 25 bp, Homo sapien
gtgatgagctggaccagctgatctg

SEQ ID NO: 4113302 - DNA, 25 bp, Homo sapien
ggtgccaatccgtccttcctgttct

SEQ ID NO: 4113303 - DNA, 25 bp, Homo sapien
actggtgccaatccgtccttcctgt

SEQ ID NO: 4113304 - DNA, 25 bp, Homo sapien
cactggtgccaatccgtccttcctg

SEQ ID NO: 4113305 - DNA, 25 bp, Homo sapien
tggtgccaatccgtccttcctgttc

SEQ ID NO: 4113306 - DNA, 25 bp, Homo sapien
gagtaatcctttgtatcagactgga

SEQ ID NO: 4113307 - DNA, 25 bp, Homo sapien
cagactggaggtggctactgcttga

SEQ ID NO: 4113308 - DNA, 25 bp, Homo sapien
tcctttgtatcagactggaggtggc

SEQ ID NO: 4113309 - DNA, 25 bp, Homo sapien
gggagggagtaatcctttgtatcag

SEQ ID NO: 4113310 - DNA, 25 bp, Homo sapien
tctttaaggaattgcacagagcacc

SEQ ID NO: 4113311 - DNA, 25 bp, Homo sapien
catgaactcattgtagagcctcacc

SEQ ID NO: 4113312 - DNA, 25 bp, Homo sapien
tagcaatcttagtaaggtctgcttc

SEQ ID NO: 4113313 - DNA, 25 bp, Homo sapien
ttgtccatgacccatccacagtctt

SEQ ID NO: 4113314 - DNA, 25 bp, Homo sapien
aggcactggcccttggtcccagacg

SEQ ID NO: 4113315 - DNA, 25 bp, Homo sapien
ttgtcactgagctactggccttggg

SEQ ID NO: 4113316 - DNA, 25 bp, Homo sapien
agacgctgcccctttccaattcctc

SEQ ID NO: 4113317 - DNA, 25 bp, Homo sapien
agctactggccttgggtgtaccagg

SEQ ID NO: 4113318 - DNA, 25 bp, Homo sapien
catctgcgtcacttcatttgtaaga

SEQ ID NO: 4113319 - DNA, 25 bp, Homo sapien
caagtcttgacatctggaggagttt

SEQ ID NO: 4113320 - DNA, 25 bp, Homo sapien
gaaaaggcaaaggtccacatgggaa

SEQ ID NO: 4113321 - DNA, 25 bp, Homo sapien
ttgcagcaccttgcatctgcgtcac

SEQ ID NO: 4113322 - DNA, 25 bp, Homo sapien
ctttgtgaggcctagtctggaggat

SEQ ID NO: 4113323 - DNA, 25 bp, Homo sapien
gtggaattgatatgtactgtatgca

SEQ ID NO: 4113324 - DNA, 25 bp, Homo sapien
taagactggtgaggtaaaatctcaa

SEQ ID NO: 4113325 - DNA, 25 bp, Homo sapien
cacacgctggatgtctaagactggt

SEQ ID NO: 4113326 - DNA, 25 bp, Homo sapien
tgctgcgggaattacgcgccgctct

SEQ ID NO: 4113327 - DNA, 25 bp, Homo sapien
ctgcgggcgcggaacaatcttgctg

SEQ ID NO: 4113328 - DNA, 25 bp, Homo sapien
gcaggcttcagcaccgtaggagatg

SEQ ID NO: 4113329 - DNA, 25 bp, Homo sapien
gaagcgccggaggaactctgtagaa

SEQ ID NO: 4113330 - DNA, 25 bp, Homo sapien
gtctgcgcctataagcacgcagccg

SEQ ID NO: 4113331 - DNA, 25 bp, Homo sapien
ttaagccgcgggctctctgacgtct

SEQ ID NO: 4113332 - DNA, 25 bp, Homo sapien
tgacgtctgcgcctataagcacgca

SEQ ID NO: 4113333 - DNA, 25 bp, Homo sapien
tggcgctagccaggcgacgcgcttt

SEQ ID NO: 4113334 - DNA, 25 bp, Homo sapien
agcgacggacgtgagttctgaatca

SEQ ID NO: 4113335 - DNA, 25 bp, Homo sapien
cagcagcgacggacgtgagttctga

SEQ ID NO: 4113336 - DNA, 25 bp, Homo sapien
gcagcgacggacgtgagttctgaat

SEQ ID NO: 4113337 - DNA, 25 bp, Homo sapien
ttgcagcagcgacggacgtgagttc

SEQ ID NO: 4113338 - DNA, 25 bp, Homo sapien
tcagcgtcagcgctattatcaggcc

SEQ ID NO: 4113339 - DNA, 25 bp, Homo sapien
tattatcaggccttgtgaccgtccc

SEQ ID NO: 4113340 - DNA, 25 bp, Homo sapien
ctgcggcatcaacggcttctcagcg

SEQ ID NO: 4113341 - DNA, 25 bp, Homo sapien
ttgtgaccgtcccaaatctgcccgg

SEQ ID NO: 4113342 - DNA, 25 bp, Homo sapien
caacaggctggaagggtgccgccac

SEQ ID NO: 4113343 - DNA, 25 bp, Homo sapien
acgcgccgtcccaacaggctggaag

SEQ ID NO: 4113344 - DNA, 25 bp, Homo sapien
ggcccgggcacgatgaccaatcgaa

SEQ ID NO: 4113345 - DNA, 25 bp, Homo sapien
atgaccaatcgaacgccggaggagg

SEQ ID NO: 4113346 - DNA, 25 bp, Homo sapien
gaaacttggtcaacagttctccaca

SEQ ID NO: 4113347 - DNA, 25 bp, Homo sapien
cactgggcgaggcatctatagacac

SEQ ID NO: 4113348 - DNA, 25 bp, Homo sapien
tgcctgctgctacatgaccaagtcc

SEQ ID NO: 4113349 - DNA, 25 bp, Homo sapien
tctgctcccagagtagcactgggcg

SEQ ID NO: 4113350 - DNA, 25 bp, Homo sapien
ttggcctctctggtacatgccatat

SEQ ID NO: 4113351 - DNA, 25 bp, Homo sapien
ctctctggtacatgccatatagctg

SEQ ID NO: 4113352 - DNA, 25 bp, Homo sapien
gcctctctggtacatgccatatagc

SEQ ID NO: 4113353 - DNA, 25 bp, Homo sapien
ggcctctctggtacatgccatatag

SEQ ID NO: 4113354 - DNA, 25 bp, Homo sapien
gagaagagagtgtatctcaaattcc

SEQ ID NO: 4113355 - DNA, 25 bp, Homo sapien
tctcaaattccaccaaagaagccag

SEQ ID NO: 4113356 - DNA, 25 bp, Homo sapien
gtatctcaaattccaccaaagaagc

SEQ ID NO: 4113357 - DNA, 25 bp, Homo sapien
tcaaattccaccaaagaagccagtt

SEQ ID NO: 4113358 - DNA, 25 bp, Homo sapien
ggaactgaaatatttgtaatctgca

SEQ ID NO: 4113359 - DNA, 25 bp, Homo sapien
gaaatatttgtaatctgcagtattt

SEQ ID NO: 4113360 - DNA, 25 bp, Homo sapien
aactgaaatatttgtaatctgcagt

SEQ ID NO: 4113361 - DNA, 25 bp, Homo sapien
ctggaactgaaatatttgtaatctg

SEQ ID NO: 4113362 - DNA, 25 bp, Homo sapien
ttgcaggcgtgttttaaggagatcc

SEQ ID NO: 4113363 - DNA, 25 bp, Homo sapien
tttgcaggcgtgttttaaggagatc

SEQ ID NO: 4113364 - DNA, 25 bp, Homo sapien
ttcaagagtacagccaacatcccaa

SEQ ID NO: 4113365 - DNA, 25 bp, Homo sapien
agccaacatcccaacacgtctagac

SEQ ID NO: 4113366 - DNA, 25 bp, Homo sapien
cttcaagagtacagccaacatccca

SEQ ID NO: 4113367 - DNA, 25 bp, Homo sapien
tacagccaacatcccaacacgtcta

SEQ ID NO: 4113368 - DNA, 25 bp, Homo sapien
ggcccaaaagactctccgtgcgaac

SEQ ID NO: 4113369 - DNA, 25 bp, Homo sapien
aaaggcccaaaagactctccgtgcg

SEQ ID NO: 4113370 - DNA, 25 bp, Homo sapien
aaggcccaaaagactctccgtgcga

SEQ ID NO: 4113371 - DNA, 25 bp, Homo sapien
ccaaaggcccaaaagactctccgtg

SEQ ID NO: 4113372 - DNA, 25 bp, Homo sapien
gagtgccaaagtagattccaacgcc

SEQ ID NO: 4113373 - DNA, 25 bp, Homo sapien
tagagagtgccaaagtagattccaa

SEQ ID NO: 4113374 - DNA, 25 bp, Homo sapien
caaagtagattccaacgccagggac

SEQ ID NO: 4113375 - DNA, 25 bp, Homo sapien
gattccaacgccagggacacatctc

SEQ ID NO: 4113376 - DNA, 25 bp, Homo sapien
ctgagaagggcgcatctcgaaggag

SEQ ID NO: 4113377 - DNA, 25 bp, Homo sapien
agaagggcgcatctcgaaggagagt

SEQ ID NO: 4113378 - DNA, 25 bp, Homo sapien
tgagaagggcgcatctcgaaggaga

SEQ ID NO: 4113379 - DNA, 25 bp, Homo sapien
agattcctgagaagggcgcatctcg

SEQ ID NO: 4113380 - DNA, 25 bp, Homo sapien
gataaaggtcagtgcaagttgccca

SEQ ID NO: 4113381 - DNA, 25 bp, Homo sapien
tcaaaacttaaaggtgcaactagta

SEQ ID NO: 4113382 - DNA, 25 bp, Homo sapien
caaatgaggctacgaattcaaaact

SEQ ID NO: 4113383 - DNA, 25 bp, Homo sapien
gaacaaaggtaacatgtggacatag

SEQ ID NO: 4113384 - DNA, 25 bp, Homo sapien
tatcccacagctgaaatttgtaata

SEQ ID NO: 4113385 - DNA, 25 bp, Homo sapien
tcactgcttggccaatccattgaaa

SEQ ID NO: 4113386 - DNA, 25 bp, Homo sapien
tgataacatccgcaggttgagttac

SEQ ID NO: 4113387 - DNA, 25 bp, Homo sapien
gcttggccaatccattgaaacttca

SEQ ID NO: 4113388 - DNA, 25 bp, Homo sapien
gagttttgataacatccgcaggttg

SEQ ID NO: 4113389 - DNA, 25 bp, Homo sapien
accacaagaaccagtacttattttg

SEQ ID NO: 4113390 - DNA, 25 bp, Homo sapien
agatccttaaacaccacaagaacca

SEQ ID NO: 4113391 - DNA, 25 bp, Homo sapien
tccttaaacaccacaagaaccagta

SEQ ID NO: 4113392 - DNA, 25 bp, Homo sapien
taaacaccacaagaaccagtactta

SEQ ID NO: 4113393 - DNA, 25 bp, Homo sapien
ctgactaaatagtactttaccctag

SEQ ID NO: 4113394 - DNA, 25 bp, Homo sapien
gccaaaagactagacacctgtatat

SEQ ID NO: 4113395 - DNA, 25 bp, Homo sapien
ctttttatcttcaataccaccattt

SEQ ID NO: 4113396 - DNA, 25 bp, Homo sapien
tgtatattagagcaaactgctagaa

SEQ ID NO: 4113397 - DNA, 25 bp, Homo sapien
tggtggccctctcttcatattaatt

SEQ ID NO: 4113398 - DNA, 25 bp, Homo sapien
agaaacctgcttgccaaaccctgga

SEQ ID NO: 4113399 - DNA, 25 bp, Homo sapien
agcactaagccccaagtagcagatg

SEQ ID NO: 4113400 - DNA, 25 bp, Homo sapien
gaaagtctttatgcagggttgctgt

SEQ ID NO: 4113401 - DNA, 25 bp, Homo sapien
agggctcgggggatgccaccttgga

SEQ ID NO: 4113402 - DNA, 25 bp, Homo sapien
ccaccttggaagaagccacgtagtc

SEQ ID NO: 4113403 - DNA, 25 bp, Homo sapien
gagggctcgggggatgccaccttgg

SEQ ID NO: 4113404 - DNA, 25 bp, Homo sapien
accttggaagaagccacgtagtcca

SEQ ID NO: 4113405 - DNA, 25 bp, Homo sapien
tcaggcccatcttggccatcatctc

SEQ ID NO: 4113406 - DNA, 25 bp, Homo sapien
catcttggccatcatctcttcatac

SEQ ID NO: 4113407 - DNA, 25 bp, Homo sapien
ttcaggcccatcttggccatcatct

SEQ ID NO: 4113408 - DNA, 25 bp, Homo sapien
gcccatcttggccatcatctcttca

SEQ ID NO: 4113409 - DNA, 25 bp, Homo sapien
tgcctttccaagtagcctctcagag

SEQ ID NO: 4113410 - DNA, 25 bp, Homo sapien
gaacatacccaaggagaccctgtgg

SEQ ID NO: 4113411 - DNA, 25 bp, Homo sapien
ggtaggacttcatcttactgcagaa

SEQ ID NO: 4113412 - DNA, 25 bp, Homo sapien
cagaatagtaagaagcagcagccct

SEQ ID NO: 4113413 - DNA, 25 bp, Homo sapien
atgccagaatttagaggtaaaacag

SEQ ID NO: 4113414 - DNA, 25 bp, Homo sapien
agtacagcactttaattgcagggaa

SEQ ID NO: 4113415 - DNA, 25 bp, Homo sapien
aaagtacagcactttaattgcaggg

SEQ ID NO: 4113416 - DNA, 25 bp, Homo sapien
tgcagggaaaaaaaaatgccagaat

SEQ ID NO: 4113417 - DNA, 25 bp, Homo sapien
catttttataaggcacaggtaaaga

SEQ ID NO: 4113418 - DNA, 25 bp, Homo sapien
ccatttttataaggcacaggtaaag

SEQ ID NO: 4113419 - DNA, 25 bp, Homo sapien
aaaacagaagtgtgacaacatcttt

SEQ ID NO: 4113420 - DNA, 25 bp, Homo sapien
agaaaacagaagtgtgacaacatct

SEQ ID NO: 4113421 - DNA, 25 bp, Homo sapien
tgtactccgttgtcagccaatggca

SEQ ID NO: 4113422 - DNA, 25 bp, Homo sapien
cacggaaaagacaggcggcaggaaa

SEQ ID NO: 4113423 - DNA, 25 bp, Homo sapien
cggtagcggcatcctggtcggatct

SEQ ID NO: 4113424 - DNA, 25 bp, Homo sapien
gaaatgacgtccttatgtactccgt

SEQ ID NO: 4113425 - DNA, 25 bp, Homo sapien
gactccgaagggatagcaacacagg

SEQ ID NO: 4113426 - DNA, 25 bp, Homo sapien
cacaggatgttagcccgctttctgc

SEQ ID NO: 4113427 - DNA, 25 bp, Homo sapien
ggagacagatccagtctgaccggct

SEQ ID NO: 4113428 - DNA, 25 bp, Homo sapien
tcttctcacccttcatttgagcagg

SEQ ID NO: 4113429 - DNA, 25 bp, Homo sapien
tttcaagcagattgtaggcggatgc

SEQ ID NO: 4113430 - DNA, 25 bp, Homo sapien
aaaacccgaccagcccaagtagctg

SEQ ID NO: 4113431 - DNA, 25 bp, Homo sapien
taaatcagcgcctgggcctagactc

SEQ ID NO: 4113432 - DNA, 25 bp, Homo sapien
gaattacttcgctgtgctgtcacca

SEQ ID NO: 4113433 - DNA, 25 bp, Homo sapien
tactgttccatctggaagtcaagat

SEQ ID NO: 4113434 - DNA, 25 bp, Homo sapien
aagattggtgccacctaagtgggtt

SEQ ID NO: 4113435 - DNA, 25 bp, Homo sapien
tcaagattggtgccacctaagtggg

SEQ ID NO: 4113436 - DNA, 25 bp, Homo sapien
ccatctggaagtcaagattggtgcc

SEQ ID NO: 4113437 - DNA, 25 bp, Homo sapien
gctggagtaacaaaaaattaaagca

SEQ ID NO: 4113438 - DNA, 25 bp, Homo sapien
gagtaacaaaaaattaaagcaatga

SEQ ID NO: 4113439 - DNA, 25 bp, Homo sapien
taacaaaaaattaaagcaatgacta

SEQ ID NO: 4113440 - DNA, 25 bp, Homo sapien
agaagttcatgagccaagactggcc

SEQ ID NO: 4113441 - DNA, 25 bp, Homo sapien
gaggcaagctctactggtgttagcg

SEQ ID NO: 4113442 - DNA, 25 bp, Homo sapien
gatatagcacacttccgacactcag

SEQ ID NO: 4113443 - DNA, 25 bp, Homo sapien
tatgtggcagcgagtactaccaaac

SEQ ID NO: 4113444 - DNA, 25 bp, Homo sapien
acttgacctggctgtgcaaacattc

SEQ ID NO: 4113445 - DNA, 25 bp, Homo sapien
cacttgacctggctgtgcaaacatt

SEQ ID NO: 4113446 - DNA, 25 bp, Homo sapien
gtcctcttgagatttatgatataga

SEQ ID NO: 4113447 - DNA, 25 bp, Homo sapien
ctcttgagatttatgatatagatgc

SEQ ID NO: 4113448 - DNA, 25 bp, Homo sapien
caggtcctcttgagatttatgatat

SEQ ID NO: 4113449 - DNA, 25 bp, Homo sapien
ggtcctcttgagatttatgatatag

SEQ ID NO: 4113450 - DNA, 25 bp, Homo sapien
cctcgtaatacgccggactccacct

SEQ ID NO: 4113451 - DNA, 25 bp, Homo sapien
ctcgtaatacgccggactccacctc

SEQ ID NO: 4113452 - DNA, 25 bp, Homo sapien
gtaatacgccggactccacctccca

SEQ ID NO: 4113453 - DNA, 25 bp, Homo sapien
tcgtaatacgccggactccacctcc

SEQ ID NO: 4113454 - DNA, 25 bp, Homo sapien
tactactccatgtaaagcaggcaca

SEQ ID NO: 4113455 - DNA, 25 bp, Homo sapien
tgcaaaaacacacatgggaacccgt

SEQ ID NO: 4113456 - DNA, 25 bp, Homo sapien
gcacttctgggcactggccaactta

SEQ ID NO: 4113457 - DNA, 25 bp, Homo sapien
tatatatcccgagcacctagcaaca

SEQ ID NO: 4113458 - DNA, 25 bp, Homo sapien
gcggccagcaattggagtggctcca

SEQ ID NO: 4113459 - DNA, 25 bp, Homo sapien
gaaggttccaggagtgaagcggcca

SEQ ID NO: 4113460 - DNA, 25 bp, Homo sapien
caggagtgaagcggccagcaattgg

SEQ ID NO: 4113461 - DNA, 25 bp, Homo sapien
agtgaagcggccagcaattggagtg

SEQ ID NO: 4113462 - DNA, 25 bp, Homo sapien
taaccacaagaagccgtggctcccg

SEQ ID NO: 4113463 - DNA, 25 bp, Homo sapien
ccacaagaagccgtggctcccggaa

SEQ ID NO: 4113464 - DNA, 25 bp, Homo sapien
gtaaccacaagaagccgtggctccc

SEQ ID NO: 4113465 - DNA, 25 bp, Homo sapien
caagaagccgtggctcccggaaggc

SEQ ID NO: 4113466 - DNA, 25 bp, Homo sapien
tctgtgttacacagcgcaatggtag

SEQ ID NO: 4113467 - DNA, 25 bp, Homo sapien
ctgtgttacacagcgcaatggtagg

SEQ ID NO: 4113468 - DNA, 25 bp, Homo sapien
agaatctgtgttacacagcgcaatg

SEQ ID NO: 4113469 - DNA, 25 bp, Homo sapien
gttacacagcgcaatggtaggtagg

SEQ ID NO: 4113470 - DNA, 25 bp, Homo sapien
gaatgttttttctagagcacgcatt

SEQ ID NO: 4113471 - DNA, 25 bp, Homo sapien
tgttttttctagagcacgcattcac

SEQ ID NO: 4113472 - DNA, 25 bp, Homo sapien
gcattcacaaactctagatcctaaa

SEQ ID NO: 4113473 - DNA, 25 bp, Homo sapien
tctagagcacgcattcacaaactct

SEQ ID NO: 4113474 - DNA, 25 bp, Homo sapien
cagtcagtagcctcaactccaagct

SEQ ID NO: 4113475 - DNA, 25 bp, Homo sapien
cactacctacacttgcgagttcatc

SEQ ID NO: 4113476 - DNA, 25 bp, Homo sapien
ttgcgagttcatcggccagtcagta

SEQ ID NO: 4113477 - DNA, 25 bp, Homo sapien
catcggccagtcagtagcctcaact

SEQ ID NO: 4113478 - DNA, 25 bp, Homo sapien
ctttttagcatcttatagtagaacc

SEQ ID NO: 4113479 - DNA, 25 bp, Homo sapien
gcatcttatagtagaacccatcaag

SEQ ID NO: 4113480 - DNA, 25 bp, Homo sapien
caaaggccaagtgcctgaggcctga

SEQ ID NO: 4113481 - DNA, 25 bp, Homo sapien
cttatagtagaacccatcaagttgg

SEQ ID NO: 4113482 - DNA, 25 bp, Homo sapien
tgacacttggtcaaacccaaacagc

SEQ ID NO: 4113483 - DNA, 25 bp, Homo sapien
gggcaattcttatgcacaactaggg

SEQ ID NO: 4113484 - DNA, 25 bp, Homo sapien
tgcacactggaatcatagggattga

SEQ ID NO: 4113485 - DNA, 25 bp, Homo sapien
taggtaccaaaagtacagacatctc

SEQ ID NO: 4113486 - DNA, 25 bp, Homo sapien
gacctcccatgggtgttcacgggaa

SEQ ID NO: 4113487 - DNA, 25 bp, Homo sapien
acgggaaatggtgccacgcatgcgc

SEQ ID NO: 4113488 - DNA, 25 bp, Homo sapien
gcatgcgcagaacttcccgagccag

SEQ ID NO: 4113489 - DNA, 25 bp, Homo sapien
cctcccatgggtgttcacgggaaat

SEQ ID NO: 4113490 - DNA, 25 bp, Homo sapien
tccttggtcactgccttctcagcag

SEQ ID NO: 4113491 - DNA, 25 bp, Homo sapien
attcctccttggtcactgccttctc

SEQ ID NO: 4113492 - DNA, 25 bp, Homo sapien
ctccttggtcactgccttctcagca

SEQ ID NO: 4113493 - DNA, 25 bp, Homo sapien
tcctccttggtcactgccttctcag

SEQ ID NO: 4113494 - DNA, 25 bp, Homo sapien
gaattgctgaataggcacagagggc

SEQ ID NO: 4113495 - DNA, 25 bp, Homo sapien
attgctgaataggcacagagggcac

SEQ ID NO: 4113496 - DNA, 25 bp, Homo sapien
gggaattgctgaataggcacagagg

SEQ ID NO: 4113497 - DNA, 25 bp, Homo sapien
cagtagggaattgctgaataggcac

SEQ ID NO: 4113498 - DNA, 25 bp, Homo sapien
gcagtctatcagatgctgtagcaca

SEQ ID NO: 4113499 - DNA, 25 bp, Homo sapien
cagatgctgtagcacactggaatga

SEQ ID NO: 4113500 - DNA, 25 bp, Homo sapien
tctatcagatgctgtagcacactgg

SEQ ID NO: 4113501 - DNA, 25 bp, Homo sapien
gaagttgcaaaatatcagcttgatt

SEQ ID NO: 4113502 - DNA, 25 bp, Homo sapien
tcttccgtggcaggctgagcgctcc

SEQ ID NO: 4113503 - DNA, 25 bp, Homo sapien
ccgtggcaggctgagcgctccagtc

SEQ ID NO: 4113504 - DNA, 25 bp, Homo sapien
agtcttccgtggcaggctgagcgct

SEQ ID NO: 4113505 - DNA, 25 bp, Homo sapien
ttccgtggcaggctgagcgctccag

SEQ ID NO: 4113506 - DNA, 25 bp, Homo sapien
aagaccagtcagtggttgctcctac

SEQ ID NO: 4113507 - DNA, 25 bp, Homo sapien
taagaccagtcagtggttgctccta

SEQ ID NO: 4113508 - DNA, 25 bp, Homo sapien
ttaagaccagtcagtggttgctcct

SEQ ID NO: 4113509 - DNA, 25 bp, Homo sapien
ttattatgctttgatatgcaatccc

SEQ ID NO: 4113510 - DNA, 25 bp, Homo sapien
ttgatatgcaatcccaggtattctg

SEQ ID NO: 4113511 - DNA, 25 bp, Homo sapien
cccaggtattctgatctggagtaaa

SEQ ID NO: 4113512 - DNA, 25 bp, Homo sapien
tattctgatctggagtaaaaagcaa

SEQ ID NO: 4113513 - DNA, 25 bp, Homo sapien
ggatgctcagatttgccctcatact

SEQ ID NO: 4113514 - DNA, 25 bp, Homo sapien
tgcactcagcctccgatttattgat

SEQ ID NO: 4113515 - DNA, 25 bp, Homo sapien
ccagcttttgtgataggctgattcc

SEQ ID NO: 4113516 - DNA, 25 bp, Homo sapien
ggctgattccaatgaggatgctcag

SEQ ID NO: 4113517 - DNA, 25 bp, Homo sapien
tgtctgtgcaatgatagctttttcc

SEQ ID NO: 4113518 - DNA, 25 bp, Homo sapien
agaattggggtagatgtctgtgcaa

SEQ ID NO: 4113519 - DNA, 25 bp, Homo sapien
gggagagtgcttcttggaccattgt

SEQ ID NO: 4113520 - DNA, 25 bp, Homo sapien
gagtgcttcttggaccattgtctct

SEQ ID NO: 4113521 - DNA, 25 bp, Homo sapien
gatgcacacttctggcaatgtcgag

SEQ ID NO: 4113522 - DNA, 25 bp, Homo sapien
tcataaatggaagacaccccttggg

SEQ ID NO: 4113523 - DNA, 25 bp, Homo sapien
ccccttgggttgagataagagtatc

SEQ ID NO: 4113524 - DNA, 25 bp, Homo sapien
caatgtcgagtgctctttgcaccaa

SEQ ID NO: 4113525 - DNA, 25 bp, Homo sapien
ccaggttttagctacccagcttggg

SEQ ID NO: 4113526 - DNA, 25 bp, Homo sapien
tttgagatgattaccaatgggtgcc

SEQ ID NO: 4113527 - DNA, 25 bp, Homo sapien
tatccttgaacaagatcgggttcac

SEQ ID NO: 4113528 - DNA, 25 bp, Homo sapien
catctttgtacacgtgtgaacaggg

SEQ ID NO: 4113529 - DNA, 25 bp, Homo sapien
gccttttgggcagcactgtgagctt

SEQ ID NO: 4113530 - DNA, 25 bp, Homo sapien
aattggaggcccaagacttgcaggg

SEQ ID NO: 4113531 - DNA, 25 bp, Homo sapien
gtttataatcgtgaagatctccctg

SEQ ID NO: 4113532 - DNA, 25 bp, Homo sapien
tcagccttttgcaatggtcggcaag

SEQ ID NO: 4113533 - DNA, 25 bp, Homo sapien
ttccagaacttcctgtgcttcacct

SEQ ID NO: 4113534 - DNA, 25 bp, Homo sapien
ggttcctataaggatattctccctg

SEQ ID NO: 4113535 - DNA, 25 bp, Homo sapien
tttccagaacttcctgtgcttcacc

SEQ ID NO: 4113536 - DNA, 25 bp, Homo sapien
tccagaacttcctgtgcttcacctg

SEQ ID NO: 4113537 - DNA, 25 bp, Homo sapien
tgtgagttgtatcagaacttgtccc

SEQ ID NO: 4113538 - DNA, 25 bp, Homo sapien
gggctgtgagttgtatcagaacttg

SEQ ID NO: 4113539 - DNA, 25 bp, Homo sapien
tgagcactgcaggtcccaatcatgc

SEQ ID NO: 4113540 - DNA, 25 bp, Homo sapien
ctttgtacagatttgagcactgcag

SEQ ID NO: 4113541 - DNA, 25 bp, Homo sapien
gtaaacatttatagtggctatggtt

SEQ ID NO: 4113542 - DNA, 25 bp, Homo sapien
cgccattgtgtttgaattgcctaca

SEQ ID NO: 4113543 - DNA, 25 bp, Homo sapien
catttatagtggctatggtttggat

SEQ ID NO: 4113544 - DNA, 25 bp, Homo sapien
atgtttttatacacaaacgccattg

SEQ ID NO: 4113545 - DNA, 25 bp, Homo sapien
gaaacttgctaacactacagaggat

SEQ ID NO: 4113546 - DNA, 25 bp, Homo sapien
tagtgtttgcccttagtgcggtggc

SEQ ID NO: 4113547 - DNA, 25 bp, Homo sapien
tatctcagaatttggaatgaggccg

SEQ ID NO: 4113548 - DNA, 25 bp, Homo sapien
gaggccacgtctgagtcagtgtcac

SEQ ID NO: 4113549 - DNA, 25 bp, Homo sapien
ttcaatgcatgcagaatatataggg

SEQ ID NO: 4113550 - DNA, 25 bp, Homo sapien
gattctgcgtctataccaggtccct

SEQ ID NO: 4113551 - DNA, 25 bp, Homo sapien
ccaggtccctgagggtttgagccta

SEQ ID NO: 4113552 - DNA, 25 bp, Homo sapien
tatatagggagaggttatagatctg

SEQ ID NO: 4113553 - DNA, 25 bp, Homo sapien
ccatagaactgaaaactccctgttg

SEQ ID NO: 4113554 - DNA, 25 bp, Homo sapien
taagatattctgtatcagacaaagc

SEQ ID NO: 4113555 - DNA, 25 bp, Homo sapien
agcattagcgcctttccatttaagg

SEQ ID NO: 4113556 - DNA, 25 bp, Homo sapien
catttaaggttgttggtctacaggg

SEQ ID NO: 4113557 - DNA, 25 bp, Homo sapien
ctgtattttcatccgtacacatctg

SEQ ID NO: 4113558 - DNA, 25 bp, Homo sapien
gcttgtcttggtatcatttgcttct

SEQ ID NO: 4113559 - DNA, 25 bp, Homo sapien
tgattggatctctgttatgagcttg

SEQ ID NO: 4113560 - DNA, 25 bp, Homo sapien
tcatccgtacacatctgctgattgg

SEQ ID NO: 4113561 - DNA, 25 bp, Homo sapien
caggaggaggcgtggacctgccttc

SEQ ID NO: 4113562 - DNA, 25 bp, Homo sapien
ctcagcgaggagtcagtcaagggaa

SEQ ID NO: 4113563 - DNA, 25 bp, Homo sapien
tgtgaactcagcgaggagtcagtca

SEQ ID NO: 4113564 - DNA, 25 bp, Homo sapien
gaggaggcgtggacctgccttcaag

SEQ ID NO: 4113565 - DNA, 25 bp, Homo sapien
gacaggaggagacataaacgcacat

SEQ ID NO: 4113566 - DNA, 25 bp, Homo sapien
aaatcgccgatgcaaggagacagga

SEQ ID NO: 4113567 - DNA, 25 bp, Homo sapien
aagggagccctctactctggaagcc

SEQ ID NO: 4113568 - DNA, 25 bp, Homo sapien
catcaggaaagggagccctctactc

SEQ ID NO: 4113569 - DNA, 25 bp, Homo sapien
tatgctgaagtgttcggagtacttc

SEQ ID NO: 4113570 - DNA, 25 bp, Homo sapien
cactatctccttcttggaattgagg

SEQ ID NO: 4113571 - DNA, 25 bp, Homo sapien
cctccttggccggtttctgactcat

SEQ ID NO: 4113572 - DNA, 25 bp, Homo sapien
gaagcagccgctcttacagatgctg

SEQ ID NO: 4113573 - DNA, 25 bp, Homo sapien
cttccagtctccctggagtgccttc

SEQ ID NO: 4113574 - DNA, 25 bp, Homo sapien
gagtgccttccggtgtcggagccta

SEQ ID NO: 4113575 - DNA, 25 bp, Homo sapien
gtctccctggagtgccttccggtgt

SEQ ID NO: 4113576 - DNA, 25 bp, Homo sapien
gtgtcggagcctaacccggagccga

SEQ ID NO: 4113577 - DNA, 25 bp, Homo sapien
gaaacaggtaggaaggccctgctcc

SEQ ID NO: 4113578 - DNA, 25 bp, Homo sapien
caggtaggaaggccctgctccccca

SEQ ID NO: 4113579 - DNA, 25 bp, Homo sapien
ctggaaacaggtaggaaggccctgc

SEQ ID NO: 4113580 - DNA, 25 bp, Homo sapien
taggaaggccctgctcccccaccca

SEQ ID NO: 4113581 - DNA, 25 bp, Homo sapien
gctctcctctgctgcttaagcgacg

SEQ ID NO: 4113582 - DNA, 25 bp, Homo sapien
aaagaagctggaggcgggagccagg

SEQ ID NO: 4113583 - DNA, 25 bp, Homo sapien
gggctctcctctgctgcttaagcga

SEQ ID NO: 4113584 - DNA, 25 bp, Homo sapien
ctgagagggccaaaagaagctggag

SEQ ID NO: 4113585 - DNA, 25 bp, Homo sapien
aggggacttggcacggcggctggtt

SEQ ID NO: 4113586 - DNA, 25 bp, Homo sapien
ctgaggggacttggcacggcggctg

SEQ ID NO: 4113587 - DNA, 25 bp, Homo sapien
agctggctgttgcttgggcctctga

SEQ ID NO: 4113588 - DNA, 25 bp, Homo sapien
tctgaggggacttggcacggcggct

SEQ ID NO: 4113589 - DNA, 25 bp, Homo sapien
tgacgctcagacctcggaggggacc

SEQ ID NO: 4113590 - DNA, 25 bp, Homo sapien
gggaccgtggctgacgctcagacct

SEQ ID NO: 4113591 - DNA, 25 bp, Homo sapien
cgtggctgacgctcagacctcggag

SEQ ID NO: 4113592 - DNA, 25 bp, Homo sapien
gacctcggaggggaccgtggctgac

SEQ ID NO: 4113593 - DNA, 25 bp, Homo sapien
tggctgacgctcagacctcggaggg

SEQ ID NO: 4113594 - DNA, 25 bp, Homo sapien
gctgacgctcagacctcggagggga

SEQ ID NO: 4113595 - DNA, 25 bp, Homo sapien
cgtggctgacgctcagacctcggag

SEQ ID NO: 4113596 - DNA, 25 bp, Homo sapien
ctgacgctcagacctcggaggggac

SEQ ID NO: 4113597 - DNA, 25 bp, Homo sapien
catggagacagcccggtgttagtaa

SEQ ID NO: 4113598 - DNA, 25 bp, Homo sapien
cacaggttgggtaataaggctgaag

SEQ ID NO: 4113599 - DNA, 25 bp, Homo sapien
cagcccggtgttagtaaacacagga

SEQ ID NO: 4113600 - DNA, 25 bp, Homo sapien
gggatttaatggagggagctgatta

SEQ ID NO: 4113601 - DNA, 25 bp, Homo sapien
tatgtggcccagacaagcattgcct

SEQ ID NO: 4113602 - DNA, 25 bp, Homo sapien
tagcctgaaaggttggaacacatcc

SEQ ID NO: 4113603 - DNA, 25 bp, Homo sapien
cgaactccccatagatactgctgaa

SEQ ID NO: 4113604 - DNA, 25 bp, Homo sapien
tatgacctccagacatgtggcagcc

SEQ ID NO: 4113605 - DNA, 25 bp, Homo sapien
tctttggggttggcctgatcttcct

SEQ ID NO: 4113606 - DNA, 25 bp, Homo sapien
ctttggggttggcctgatcttcctt

SEQ ID NO: 4113607 - DNA, 25 bp, Homo sapien
ttctttggggttggcctgatcttcc

SEQ ID NO: 4113608 - DNA, 25 bp, Homo sapien
tgtgaagcaatgagtccaggagccg

SEQ ID NO: 4113609 - DNA, 25 bp, Homo sapien
ggagccgaggttgttcattcagttt

SEQ ID NO: 4113610 - DNA, 25 bp, Homo sapien
gccgaggttgttcattcagtttaaa

SEQ ID NO: 4113611 - DNA, 25 bp, Homo sapien
tagatgggttgtgaagcaatgagtc

SEQ ID NO: 4113612 - DNA, 25 bp, Homo sapien
gggaccatgagcatcagcagttgcc

SEQ ID NO: 4113613 - DNA, 25 bp, Homo sapien
tgagcatcagcagttgccacatcag

SEQ ID NO: 4113614 - DNA, 25 bp, Homo sapien
acatcagcaggtgtttgcccctgca

SEQ ID NO: 4113615 - DNA, 25 bp, Homo sapien
gcataatatttgaagccagataact

SEQ ID NO: 4113616 - DNA, 25 bp, Homo sapien
caagggaagcacctctgagacgata

SEQ ID NO: 4113617 - DNA, 25 bp, Homo sapien
gaactgtgcattgagctctagagcc

SEQ ID NO: 4113618 - DNA, 25 bp, Homo sapien
tacagtgcagccctaagtcaaggcc

SEQ ID NO: 4113619 - DNA, 25 bp, Homo sapien
tatggctctgactatgggctggcac

SEQ ID NO: 4113620 - DNA, 25 bp, Homo sapien
atcaaagtcaaagcactgaacttga

SEQ ID NO: 4113621 - DNA, 25 bp, Homo sapien
caaagcactgaacttgatggtagta

SEQ ID NO: 4113622 - DNA, 25 bp, Homo sapien
cactgaacttgatggtagtaaactg

SEQ ID NO: 4113623 - DNA, 25 bp, Homo sapien
taaacccagtcagttgatcaaagtc

SEQ ID NO: 4113624 - DNA, 25 bp, Homo sapien
gacaacatcaaggtgtaaagccatg

SEQ ID NO: 4113625 - DNA, 25 bp, Homo sapien
gaccaggcaccttgatcatgagagt

SEQ ID NO: 4113626 - DNA, 25 bp, Homo sapien
cagagtagaaagtaagccaagtcca

SEQ ID NO: 4113627 - DNA, 25 bp, Homo sapien
gaataactgattgagctggagggca

SEQ ID NO: 4113628 - DNA, 25 bp, Homo sapien
caattatagaggtcagaagacaatg

SEQ ID NO: 4113629 - DNA, 25 bp, Homo sapien
cagcagatctctcagtggcaattat

SEQ ID NO: 4113630 - DNA, 25 bp, Homo sapien
tctcagtggcaattatagaggtcag

SEQ ID NO: 4113631 - DNA, 25 bp, Homo sapien
cgtggaaggataagcagactgacag

SEQ ID NO: 4113632 - DNA, 25 bp, Homo sapien
actttgatggttgtataacatcttt

SEQ ID NO: 4113633 - DNA, 25 bp, Homo sapien
ttccacatgtccctggagaaagaca

SEQ ID NO: 4113634 - DNA, 25 bp, Homo sapien
tccacatgtccctggagaaagacat

SEQ ID NO: 4113635 - DNA, 25 bp, Homo sapien
cacatgtccctggagaaagacatgt

SEQ ID NO: 4113636 - DNA, 25 bp, Homo sapien
tcatcagaagccacaagaacaagcc

SEQ ID NO: 4113637 - DNA, 25 bp, Homo sapien
ggctaggaatggttgtgcccactca

SEQ ID NO: 4113638 - DNA, 25 bp, Homo sapien
tcaagttttctctaggatgggtgcc

SEQ ID NO: 4113639 - DNA, 25 bp, Homo sapien
gatctttgggcatccgactgtgctt

SEQ ID NO: 4113640 - DNA, 25 bp, Homo sapien
aatttccctgcctttatattggaat

SEQ ID NO: 4113641 - DNA, 25 bp, Homo sapien
gactccatgcagtcaaatttccctg

SEQ ID NO: 4113642 - DNA, 25 bp, Homo sapien
cctgcctttatattggaatttctac

SEQ ID NO: 4113643 - DNA, 25 bp, Homo sapien
gaagactccatgcagtcaaatttcc

SEQ ID NO: 4113644 - DNA, 25 bp, Homo sapien
caggaatgtaatggcctcagatatc

SEQ ID NO: 4113645 - DNA, 25 bp, Homo sapien
gttattcccaggaatgtaatggcct

SEQ ID NO: 4113646 - DNA, 25 bp, Homo sapien
gaaacacttcatagtagaggttacc

SEQ ID NO: 4113647 - DNA, 25 bp, Homo sapien
ttagcacctgaatttaggcaagaga

SEQ ID NO: 4113648 - DNA, 25 bp, Homo sapien
agtggtctgtcgtatgtttcaccac

SEQ ID NO: 4113649 - DNA, 25 bp, Homo sapien
gtggtctgtcgtatgtttcaccacc

SEQ ID NO: 4113650 - DNA, 25 bp, Homo sapien
aatatgcactatactctcacctcca

SEQ ID NO: 4113651 - DNA, 25 bp, Homo sapien
acctccacaatcattccatagcaaa

SEQ ID NO: 4113652 - DNA, 25 bp, Homo sapien
acagacaaacagagaattcagtagt

SEQ ID NO: 4113653 - DNA, 25 bp, Homo sapien
ccagcaagcactatgggcctggctt

SEQ ID NO: 4113654 - DNA, 25 bp, Homo sapien
caatatttactggtagtgctcctca

SEQ ID NO: 4113655 - DNA, 25 bp, Homo sapien
cttttagttataatatccaaggcac

SEQ ID NO: 4113656 - DNA, 25 bp, Homo sapien
taactggattatagcaccttttagt

SEQ ID NO: 4113657 - DNA, 25 bp, Homo sapien
cacattacatttagctattcaccca

SEQ ID NO: 4113658 - DNA, 25 bp, Homo sapien
gcttgtgccagctgacgagagtcaa

SEQ ID NO: 4113659 - DNA, 25 bp, Homo sapien
gaaactaacagctcagaacactcag

SEQ ID NO: 4113660 - DNA, 25 bp, Homo sapien
gtaaactctagcttcacagagggcc

SEQ ID NO: 4113661 - DNA, 25 bp, Homo sapien
aaatctgcatcatggtccgggcgtg

SEQ ID NO: 4113662 - DNA, 25 bp, Homo sapien
tacagtgtgcagatcccatcaattc

SEQ ID NO: 4113663 - DNA, 25 bp, Homo sapien
cccatcaattctttggtcagcttca

SEQ ID NO: 4113664 - DNA, 25 bp, Homo sapien
ggtcagcttcatgttagcaccaata

SEQ ID NO: 4113665 - DNA, 25 bp, Homo sapien
cagccatcctgaaaccggctttaca

SEQ ID NO: 4113666 - DNA, 25 bp, Homo sapien
tccgatgccctaatgaaaccctgct

SEQ ID NO: 4113667 - DNA, 25 bp, Homo sapien
tatggacttgtgactctccgatgcc

SEQ ID NO: 4113668 - DNA, 25 bp, Homo sapien
ccctagcttgaggtatggaatcaac

SEQ ID NO: 4113669 - DNA, 25 bp, Homo sapien
tgctttagaagccacaggcactagg

SEQ ID NO: 4113670 - DNA, 25 bp, Homo sapien
gccccgcacagaggaaagcactgtt

SEQ ID NO: 4113671 - DNA, 25 bp, Homo sapien
taacatagaacgaggctgcagagcc

SEQ ID NO: 4113672 - DNA, 25 bp, Homo sapien
gaagccctgattctctccaataggc

SEQ ID NO: 4113673 - DNA, 25 bp, Homo sapien
tacaaacaatgcttaaggtcatccc

SEQ ID NO: 4113674 - DNA, 25 bp, Homo sapien
tatagtgagtcatagtgagccctgc

SEQ ID NO: 4113675 - DNA, 25 bp, Homo sapien
tgagtcatagtgagccctgctgagg

SEQ ID NO: 4113676 - DNA, 25 bp, Homo sapien
cttcccttatagtgagtcatagtga

SEQ ID NO: 4113677 - DNA, 25 bp, Homo sapien
tgctgagggtagagaagctgattct

SEQ ID NO: 4113678 - DNA, 25 bp, Homo sapien
tctttgatactgaccacttgctgtt

SEQ ID NO: 4113679 - DNA, 25 bp, Homo sapien
gtttttccctagatattcatggtca

SEQ ID NO: 4113680 - DNA, 25 bp, Homo sapien
ctttaggagaagaagctcagttaca

SEQ ID NO: 4113681 - DNA, 25 bp, Homo sapien
tcatggtcaaacttacaccttggca

SEQ ID NO: 4113682 - DNA, 25 bp, Homo sapien
gtgaacaagtgtacgctccatccag

SEQ ID NO: 4113683 - DNA, 25 bp, Homo sapien
gacatctgagtaaggaagcaaagcc

SEQ ID NO: 4113684 - DNA, 25 bp, Homo sapien
tgcggtcaagcacctttaggagcct

SEQ ID NO: 4113685 - DNA, 25 bp, Homo sapien
cagaactgttgtgctttagggacta

SEQ ID NO: 4113686 - DNA, 25 bp, Homo sapien
cactggccagacaacacatagaagc

SEQ ID NO: 4113687 - DNA, 25 bp, Homo sapien
actcacacgcgggagagggcagcaa

SEQ ID NO: 4113688 - DNA, 25 bp, Homo sapien
aggaagggcgcctcaagacctgcca

SEQ ID NO: 4113689 - DNA, 25 bp, Homo sapien
agcaggagccactcatccgttagga

SEQ ID NO: 4113690 - DNA, 25 bp, Homo sapien
tccaaaggattaagctcagaacatt

SEQ ID NO: 4113691 - DNA, 25 bp, Homo sapien
tgtttcaacataggagtaggtctca

SEQ ID NO: 4113692 - DNA, 25 bp, Homo sapien
aatagcaatttaggccctgtctggc

SEQ ID NO: 4113693 - DNA, 25 bp, Homo sapien
ccaagtcaggaaatgtctggctgaa

SEQ ID NO: 4113694 - DNA, 25 bp, Homo sapien
cactgcgtgaatgttgcaggaaaca

SEQ ID NO: 4113695 - DNA, 25 bp, Homo sapien
ccactgcgtgaatgttgcaggaaac

SEQ ID NO: 4113696 - DNA, 25 bp, Homo sapien
gccactgcgtgaatgttgcaggaaa

SEQ ID NO: 4113697 - DNA, 25 bp, Homo sapien
catttgaggtggaaagagcgacccc

SEQ ID NO: 4113698 - DNA, 25 bp, Homo sapien
atcatttgaggtggaaagagcgacc

SEQ ID NO: 4113699 - DNA, 25 bp, Homo sapien
tgaggtggaaagagcgaccccattc

SEQ ID NO: 4113700 - DNA, 25 bp, Homo sapien
tttgaggtggaaagagcgaccccat

SEQ ID NO: 4113701 - DNA, 25 bp, Homo sapien
tccagtagcccagctaggaggaatt

SEQ ID NO: 4113702 - DNA, 25 bp, Homo sapien
ttaggtctgttaggccaaagagagc

SEQ ID NO: 4113703 - DNA, 25 bp, Homo sapien
gaaacttatggccatgggtgctgga

SEQ ID NO: 4113704 - DNA, 25 bp, Homo sapien
tttcaagaactcagccaaagggtat

SEQ ID NO: 4113705 - DNA, 25 bp, Homo sapien
gaccagccctctgactgtactctgg

SEQ ID NO: 4113706 - DNA, 25 bp, Homo sapien
caggccccaaataggatgctggggt

SEQ ID NO: 4113707 - DNA, 25 bp, Homo sapien
gggttctgaatctgaccagccctct

SEQ ID NO: 4113708 - DNA, 25 bp, Homo sapien
ccaaataggatgctggggttctgaa

SEQ ID NO: 4113709 - DNA, 25 bp, Homo sapien
ctttgttgagggtgagcagggtgac

SEQ ID NO: 4113710 - DNA, 25 bp, Homo sapien
ctgtgcactgtcaaagatggctttg

SEQ ID NO: 4113711 - DNA, 25 bp, Homo sapien
tcaccactgtgcactgtcaaagatg

SEQ ID NO: 4113712 - DNA, 25 bp, Homo sapien
cactgtgcactgtcaaagatggctt

SEQ ID NO: 4113713 - DNA, 25 bp, Homo sapien
gcacagttctatttctctgggaagc

SEQ ID NO: 4113714 - DNA, 25 bp, Homo sapien
catgcacagttctatttctctggga

SEQ ID NO: 4113715 - DNA, 25 bp, Homo sapien
tcatgcacagttctatttctctggg

SEQ ID NO: 4113716 - DNA, 25 bp, Homo sapien
gcatcatgcacagttctatttctct

SEQ ID NO: 4113717 - DNA, 25 bp, Homo sapien
ctgcgcagccccacggcaacagtca

SEQ ID NO: 4113718 - DNA, 25 bp, Homo sapien
agccccacggcaacagtcacagctc

SEQ ID NO: 4113719 - DNA, 25 bp, Homo sapien
gcagccccacggcaacagtcacagc

SEQ ID NO: 4113720 - DNA, 25 bp, Homo sapien
cacggcaacagtcacagctccccag

SEQ ID NO: 4113721 - DNA, 25 bp, Homo sapien
tagccaaaggggagcaaaatgctgc

SEQ ID NO: 4113722 - DNA, 25 bp, Homo sapien
ctagccaaaggggagcaaaatgctg

SEQ ID NO: 4113723 - DNA, 25 bp, Homo sapien
ccaaaggggagcaaaatgctgcagc

SEQ ID NO: 4113724 - DNA, 25 bp, Homo sapien
aaaggggagcaaaatgctgcagctg

SEQ ID NO: 4113725 - DNA, 25 bp, Homo sapien
gcaaagaagtccgtggttgttgcgt

SEQ ID NO: 4113726 - DNA, 25 bp, Homo sapien
gaagtccgtggttgttgcgtaaata

SEQ ID NO: 4113727 - DNA, 25 bp, Homo sapien
cgtggttgttgcgtaaatatctggt

SEQ ID NO: 4113728 - DNA, 25 bp, Homo sapien
tccgtggttgttgcgtaaatatctg

SEQ ID NO: 4113729 - DNA, 25 bp, Homo sapien
ctgcttctccttgaagatgtttcct

SEQ ID NO: 4113730 - DNA, 25 bp, Homo sapien
cttctccttgaagatgtttcctcag

SEQ ID NO: 4113731 - DNA, 25 bp, Homo sapien
ctccttgaagatgtttcctcagtaa

SEQ ID NO: 4113732 - DNA, 25 bp, Homo sapien
tctccttgaagatgtttcctcagta

SEQ ID NO: 4113733 - DNA, 25 bp, Homo sapien
tcttcttgcacagttggccacattc

SEQ ID NO: 4113734 - DNA, 25 bp, Homo sapien
tcttgcacagttggccacattctag

SEQ ID NO: 4113735 - DNA, 25 bp, Homo sapien
catcttcttgcacagttggccacat

SEQ ID NO: 4113736 - DNA, 25 bp, Homo sapien
tcaaaacctttgtagattacgtctc

SEQ ID NO: 4113737 - DNA, 25 bp, Homo sapien
cagagtaatgattgaactagggcag

SEQ ID NO: 4113738 - DNA, 25 bp, Homo sapien
tcagagtaatgattgaactagggca

SEQ ID NO: 4113739 - DNA, 25 bp, Homo sapien
ttttcagagtaatgattgaactagg

SEQ ID NO: 4113740 - DNA, 25 bp, Homo sapien
ttcagagtaatgattgaactagggc

SEQ ID NO: 4113741 - DNA, 25 bp, Homo sapien
gaaagagggtaacatcaggacagca

SEQ ID NO: 4113742 - DNA, 25 bp, Homo sapien
agtatatggcggtccagaactaagg

SEQ ID NO: 4113743 - DNA, 25 bp, Homo sapien
agcatctctgtgtccgggggaaaga

SEQ ID NO: 4113744 - DNA, 25 bp, Homo sapien
catgcactgcagtcagcccagtata

SEQ ID NO: 4113745 - DNA, 25 bp, Homo sapien
tgagggttgaagcatgggtcgggca

SEQ ID NO: 4113746 - DNA, 25 bp, Homo sapien
tgggtcgggcagagtgaagtcaagc

SEQ ID NO: 4113747 - DNA, 25 bp, Homo sapien
tgaagcatgggtcgggcagagtgaa

SEQ ID NO: 4113748 - DNA, 25 bp, Homo sapien
aggaaggtgagggttgaagcatggg

SEQ ID NO: 4113749 - DNA, 25 bp, Homo sapien
aagacagggatactgtccacattca

SEQ ID NO: 4113750 - DNA, 25 bp, Homo sapien
catagatgaccactgagagctcttg

SEQ ID NO: 4113751 - DNA, 25 bp, Homo sapien
acagggatactgtccacattcagca

SEQ ID NO: 4113752 - DNA, 25 bp, Homo sapien
atagatgcttgcctgcatgcataga

SEQ ID NO: 4113753 - DNA, 25 bp, Homo sapien
cttttctccttatgtctatttcact

SEQ ID NO: 4113754 - DNA, 25 bp, Homo sapien
cgtgggcatggaattccactatacc

SEQ ID NO: 4113755 - DNA, 25 bp, Homo sapien
tttgatcctccctgtgaaagatgtc

SEQ ID NO: 4113756 - DNA, 25 bp, Homo sapien
cttatgtctatttcactcttagcca

SEQ ID NO: 4113757 - DNA, 25 bp, Homo sapien
tttttggatgtgactaccatcacat

SEQ ID NO: 4113758 - DNA, 25 bp, Homo sapien
ttggatgtgactaccatcacatttg

SEQ ID NO: 4113759 - DNA, 25 bp, Homo sapien
ggatgtgactaccatcacatttgct

SEQ ID NO: 4113760 - DNA, 25 bp, Homo sapien
catcacatttgctgggaattccctt

SEQ ID NO: 4113761 - DNA, 25 bp, Homo sapien
tgctcacactgtgcgcagttcagag

SEQ ID NO: 4113762 - DNA, 25 bp, Homo sapien
gtagattagccccactgtgtctgtg

SEQ ID NO: 4113763 - DNA, 25 bp, Homo sapien
gaaatcttggacaacccattgctgc

SEQ ID NO: 4113764 - DNA, 25 bp, Homo sapien
gctagttcacttcgctttggacaga

SEQ ID NO: 4113765 - DNA, 25 bp, Homo sapien
tacgttagatactgtcccaaaagcc

SEQ ID NO: 4113766 - DNA, 25 bp, Homo sapien
cctcataaggcaaagagcttgctgg

SEQ ID NO: 4113767 - DNA, 25 bp, Homo sapien
tgtgtaagcgtaatgaaggctctga

SEQ ID NO: 4113768 - DNA, 25 bp, Homo sapien
tgtaccgtattcactccatagagac

SEQ ID NO: 4113769 - DNA, 25 bp, Homo sapien
aagggcatcgtgctgtattttcaac

SEQ ID NO: 4113770 - DNA, 25 bp, Homo sapien
ggaacaagaagcaggtatgcctata

SEQ ID NO: 4113771 - DNA, 25 bp, Homo sapien
tatgcctataaaagactagaccgag

SEQ ID NO: 4113772 - DNA, 25 bp, Homo sapien
gaagcctatatgctatctcgttcca

SEQ ID NO: 4113773 - DNA, 25 bp, Homo sapien
catgatcttgaccaccgtaagagca

SEQ ID NO: 4113774 - DNA, 25 bp, Homo sapien
ggattcctcctttatcaataagagc

SEQ ID NO: 4113775 - DNA, 25 bp, Homo sapien
ttgtgtgcacaaggaaccgtaccac

SEQ ID NO: 4113776 - DNA, 25 bp, Homo sapien
cgtaagagcattaatggattcctcc

SEQ ID NO: 4113777 - DNA, 25 bp, Homo sapien
tcaccagcgctaatactgactgctt

SEQ ID NO: 4113778 - DNA, 25 bp, Homo sapien
ttaatgttctctgtgaaaggtttgg

SEQ ID NO: 4113779 - DNA, 25 bp, Homo sapien
tgaaaggtttggcatctgaagatga

SEQ ID NO: 4113780 - DNA, 25 bp, Homo sapien
ctttcttcaccagcgctaatactga

SEQ ID NO: 4113781 - DNA, 25 bp, Homo sapien
tataaactcatgatctcacacaagg

SEQ ID NO: 4113782 - DNA, 25 bp, Homo sapien
ggtcaacggtgatgtgcatttgtaa

SEQ ID NO: 4113783 - DNA, 25 bp, Homo sapien
caaggtatgtgagtgcatatttcac

SEQ ID NO: 4113784 - DNA, 25 bp, Homo sapien
ggttctgagcctgttagctctcata

SEQ ID NO: 4113785 - DNA, 25 bp, Homo sapien
cgcccgcgccgcaggcagccagggc

SEQ ID NO: 4113786 - DNA, 25 bp, Homo sapien
agcctggccgcagccaccgccgaca

SEQ ID NO: 4113787 - DNA, 25 bp, Homo sapien
ccagggccagcctggccgcagccac

SEQ ID NO: 4113788 - DNA, 25 bp, Homo sapien
ctgcgagggaggcgcccgcgccgca

SEQ ID NO: 4113789 - DNA, 25 bp, Homo sapien
cgggggctcggctgccagaaccgca

SEQ ID NO: 4113790 - DNA, 25 bp, Homo sapien
cgggaaccgacaggaggcgggagcg

SEQ ID NO: 4113791 - DNA, 25 bp, Homo sapien
tcggctgccagaaccgcagccgcag

SEQ ID NO: 4113792 - DNA, 25 bp, Homo sapien
caggaggcgggagcgcagcggcgtc

SEQ ID NO: 4113793 - DNA, 25 bp, Homo sapien
tgccggcggcgaagaaggggcgcgg

SEQ ID NO: 4113794 - DNA, 25 bp, Homo sapien
gctgccggcggcgaagaaggggcgc

SEQ ID NO: 4113795 - DNA, 25 bp, Homo sapien
cgaagaaggggcgcgggtcggtctg

SEQ ID NO: 4113796 - DNA, 25 bp, Homo sapien
gaaggggcgcgggtcggtctgcgcg

SEQ ID NO: 4113797 - DNA, 25 bp, Homo sapien
cacctgccgcaacgcgccgcgtgga

SEQ ID NO: 4113798 - DNA, 25 bp, Homo sapien
agcctgaagcaagtccgcgaccggg

SEQ ID NO: 4113799 - DNA, 25 bp, Homo sapien
accgcgcctcagtacgcccagggca

SEQ ID NO: 4113800 - DNA, 25 bp, Homo sapien
gcgaccggggtcatcgatggcggcc

SEQ ID NO: 4113801 - DNA, 25 bp, Homo sapien
tcaggtgctcttgactgaacatgca

SEQ ID NO: 4113802 - DNA, 25 bp, Homo sapien
ttctgcctccttccaggtacctccc

SEQ ID NO: 4113803 - DNA, 25 bp, Homo sapien
ttccaggtacctcccatgcatccca

SEQ ID NO: 4113804 - DNA, 25 bp, Homo sapien
ggtgctcttgactgaacatgcagag

SEQ ID NO: 4113805 - DNA, 25 bp, Homo sapien
gccatacttggtgacagaagttcct

SEQ ID NO: 4113806 - DNA, 25 bp, Homo sapien
cattagatggagacccatacccaca

SEQ ID NO: 4113807 - DNA, 25 bp, Homo sapien
ggtggaagaacagcttccatgactt

SEQ ID NO: 4113808 - DNA, 25 bp, Homo sapien
tctaatggcattagatggagaccca

SEQ ID NO: 4113809 - DNA, 25 bp, Homo sapien
gagaagaaatagtggcattcacagc

SEQ ID NO: 4113810 - DNA, 25 bp, Homo sapien
aagagcctacccatgtaaccaagca

SEQ ID NO: 4113811 - DNA, 25 bp, Homo sapien
ctcacttgtgagagctaggctatga

SEQ ID NO: 4113812 - DNA, 25 bp, Homo sapien
tgctcaggtgacagttgcaccaaaa

SEQ ID NO: 4113813 - DNA, 25 bp, Homo sapien
cacaattgggcaaggctacaggctg

SEQ ID NO: 4113814 - DNA, 25 bp, Homo sapien
aaggcagggctaatgtgcagctccc

SEQ ID NO: 4113815 - DNA, 25 bp, Homo sapien
gcaactggactaggactctggctgt

SEQ ID NO: 4113816 - DNA, 25 bp, Homo sapien
cagagcagcatgtagagacgcacac

SEQ ID NO: 4113817 - DNA, 25 bp, Homo sapien
tacaagctggagttatcctcctacc

SEQ ID NO: 4113818 - DNA, 25 bp, Homo sapien
catgatcatgctccactagagatgc

SEQ ID NO: 4113819 - DNA, 25 bp, Homo sapien
ccctgcaagctcaagtgttcatggg

SEQ ID NO: 4113820 - DNA, 25 bp, Homo sapien
gtctgtggcaagagcaggttgctcc

SEQ ID NO: 4113821 - DNA, 25 bp, Homo sapien
cacaattcaacaacccttcatacta

SEQ ID NO: 4113822 - DNA, 25 bp, Homo sapien
tggcccaggcaattaggcaggagaa

SEQ ID NO: 4113823 - DNA, 25 bp, Homo sapien
tctggcccaggcaattaggcaggag

SEQ ID NO: 4113824 - DNA, 25 bp, Homo sapien
aagttctggcccaggcaattaggca

SEQ ID NO: 4113825 - DNA, 25 bp, Homo sapien
gagttcaaaagcagtcatctggcag

SEQ ID NO: 4113826 - DNA, 25 bp, Homo sapien
tttaccctacaaagacaatgcactt

SEQ ID NO: 4113827 - DNA, 25 bp, Homo sapien
tcttgcttgtgtgaggtcagtgttt

SEQ ID NO: 4113828 - DNA, 25 bp, Homo sapien
ttaagtccttcaactaactggatgg

SEQ ID NO: 4113829 - DNA, 25 bp, Homo sapien
gttactcaacacagatgatgaaaca

SEQ ID NO: 4113830 - DNA, 25 bp, Homo sapien
tactcaacacagatgatgaaacaag

SEQ ID NO: 4113831 - DNA, 25 bp, Homo sapien
ctcaacacagatgatgaaacaagac

SEQ ID NO: 4113832 - DNA, 25 bp, Homo sapien
ggttactcaacacagatgatgaaac

SEQ ID NO: 4113833 - DNA, 25 bp, Homo sapien
tcatcatcagtcaaaccagacaggt

SEQ ID NO: 4113834 - DNA, 25 bp, Homo sapien
tcttttttgcgaagattgaagtctc

SEQ ID NO: 4113835 - DNA, 25 bp, Homo sapien
tcaaaccagacaggtccagcttcct

SEQ ID NO: 4113836 - DNA, 25 bp, Homo sapien
tgaagaacatgctctgtttcatcat

SEQ ID NO: 4113837 - DNA, 25 bp, Homo sapien
ggattatgccaaagctctactcatg

SEQ ID NO: 4113838 - DNA, 25 bp, Homo sapien
ctttacctggctacaaaataccctg

SEQ ID NO: 4113839 - DNA, 25 bp, Homo sapien
tctatctcggagtacctcagacttt

SEQ ID NO: 4113840 - DNA, 25 bp, Homo sapien
tatgtcccttgctaggctataagca

SEQ ID NO: 4113841 - DNA, 25 bp, Homo sapien
gaacctggggatagagctgttacag

SEQ ID NO: 4113842 - DNA, 25 bp, Homo sapien
aatgcctgcaatcatagaacctggg

SEQ ID NO: 4113843 - DNA, 25 bp, Homo sapien
gtaggcaagaccaatgcctgcaatc

SEQ ID NO: 4113844 - DNA, 25 bp, Homo sapien
catggggtgcctcacccgtagaggc

SEQ ID NO: 4113845 - DNA, 25 bp, Homo sapien
gaattacctgataagatccctttta

SEQ ID NO: 4113846 - DNA, 25 bp, Homo sapien
cttttactttggttggagagagtct

SEQ ID NO: 4113847 - DNA, 25 bp, Homo sapien
gcagtgcaagggttactagtaagaa

SEQ ID NO: 4113848 - DNA, 25 bp, Homo sapien
gattaccttctggtgaaatcatcta

SEQ ID NO: 4113849 - DNA, 25 bp, Homo sapien
gaataaatagtgtaccaaggaagga

SEQ ID NO: 4113850 - DNA, 25 bp, Homo sapien
tagcatcaatgaaccccttagctct

SEQ ID NO: 4113851 - DNA, 25 bp, Homo sapien
ggtcacaagtcaggtaaggatactc

SEQ ID NO: 4113852 - DNA, 25 bp, Homo sapien
tagtgtgatcaaggatctggcattc

SEQ ID NO: 4113853 - DNA, 25 bp, Homo sapien
caactgcttaggaaaactatttggc

SEQ ID NO: 4113854 - DNA, 25 bp, Homo sapien
tatatacatagcagaaatgcagcca

SEQ ID NO: 4113855 - DNA, 25 bp, Homo sapien
cagcagaagtatctataagagaccc

SEQ ID NO: 4113856 - DNA, 25 bp, Homo sapien
tgcagccatagggtcataagaatat

SEQ ID NO: 4113857 - DNA, 25 bp, Homo sapien
taagatgcatacaccaggttagagg

SEQ ID NO: 4113858 - DNA, 25 bp, Homo sapien
tatcacactacataatcccaggaga

SEQ ID NO: 4113859 - DNA, 25 bp, Homo sapien
tgacctttcgttcctagcagtcaga

SEQ ID NO: 4113860 - DNA, 25 bp, Homo sapien
gttggatagggtagaacctcaggcc

SEQ ID NO: 4113861 - DNA, 25 bp, Homo sapien
tctctttggagactatcaaaaactg

SEQ ID NO: 4113862 - DNA, 25 bp, Homo sapien
ctttggagactatcaaaaactgcca

SEQ ID NO: 4113863 - DNA, 25 bp, Homo sapien
ctcattggctacaacaattgccact

SEQ ID NO: 4113864 - DNA, 25 bp, Homo sapien
caacaattgccactgtgtgaagctc

SEQ ID NO: 4113865 - DNA, 25 bp, Homo sapien
taaagagagtaatgagaaggttgac

SEQ ID NO: 4113866 - DNA, 25 bp, Homo sapien
tcttggctccacctctaaaagttct

SEQ ID NO: 4113867 - DNA, 25 bp, Homo sapien
gaaggttaagaaggaataggtcaca

SEQ ID NO: 4113868 - DNA, 25 bp, Homo sapien
taggtcacagttaaagtcttatccc

SEQ ID NO: 4113869 - DNA, 25 bp, Homo sapien
cagtgagggaaactcgagggcctga

SEQ ID NO: 4113870 - DNA, 25 bp, Homo sapien
tctttccatatggagcatgctgagc

SEQ ID NO: 4113871 - DNA, 25 bp, Homo sapien
tccatatggagcatgctgagctgtc

SEQ ID NO: 4113872 - DNA, 25 bp, Homo sapien
catatggagcatgctgagctgtctc

SEQ ID NO: 4113873 - DNA, 25 bp, Homo sapien
tggcctggatgcctccaagttcatc

SEQ ID NO: 4113874 - DNA, 25 bp, Homo sapien
ggcctggatgcctccaagttcatct

SEQ ID NO: 4113875 - DNA, 25 bp, Homo sapien
taaggccagaagcattcacgtatgt

SEQ ID NO: 4113876 - DNA, 25 bp, Homo sapien
caggagccacattagatactcggca

SEQ ID NO: 4113877 - DNA, 25 bp, Homo sapien
ccctgcataatgtggatgagcctca

SEQ ID NO: 4113878 - DNA, 25 bp, Homo sapien
gaacacctttggactgaagtgcaac

SEQ ID NO: 4113879 - DNA, 25 bp, Homo sapien
ccagttcatgtacccctgtgtctga

SEQ ID NO: 4113880 - DNA, 25 bp, Homo sapien
ccatgtggagactgtgatgtaagga

SEQ ID NO: 4113881 - DNA, 25 bp, Homo sapien
tctccctcggctgtgtcttccagtt

SEQ ID NO: 4113882 - DNA, 25 bp, Homo sapien
gcttcctgaggtcgagtggccatgt

SEQ ID NO: 4113883 - DNA, 25 bp, Homo sapien
gacagagaagctcaaagaatggcta

SEQ ID NO: 4113884 - DNA, 25 bp, Homo sapien
ccatgattaacggtgagcctaggtc

SEQ ID NO: 4113885 - DNA, 25 bp, Homo sapien
gaagaaacgcccaaaccatgattaa

SEQ ID NO: 4113886 - DNA, 25 bp, Homo sapien
caaggcaggtgtctagatcaatgca

SEQ ID NO: 4113887 - DNA, 25 bp, Homo sapien
tactgggcctatgggaaaggtagaa

SEQ ID NO: 4113888 - DNA, 25 bp, Homo sapien
cattgcctatggaagtaacctcttt

SEQ ID NO: 4113889 - DNA, 25 bp, Homo sapien
ttgctataattactgggcctatggg

SEQ ID NO: 4113890 - DNA, 25 bp, Homo sapien
tttgattgtccataatgttagaagc

SEQ ID NO: 4113891 - DNA, 25 bp, Homo sapien
tagctactgctttgtacttaactcg

SEQ ID NO: 4113892 - DNA, 25 bp, Homo sapien
ggaatggccaccttcgtccctagta

SEQ ID NO: 4113893 - DNA, 25 bp, Homo sapien
taccaagtctctagttctgccatgc

SEQ ID NO: 4113894 - DNA, 25 bp, Homo sapien
gcctttgataggacaatgaactcct

SEQ ID NO: 4113895 - DNA, 25 bp, Homo sapien
agaaacccccatccaggtgtcctct

SEQ ID NO: 4113896 - DNA, 25 bp, Homo sapien
cccatccaggtgtcctcttgaccct

SEQ ID NO: 4113897 - DNA, 25 bp, Homo sapien
ccaggtgtcctcttgaccctgccca

SEQ ID NO: 4113898 - DNA, 25 bp, Homo sapien
tcctctgagctgcagaaacccccat

SEQ ID NO: 4113899 - DNA, 25 bp, Homo sapien
ggactagtaccattatatatgggac

SEQ ID NO: 4113900 - DNA, 25 bp, Homo sapien
gccttgcccttccacgatgtgagga

SEQ ID NO: 4113901 - DNA, 25 bp, Homo sapien
tagcggccaaatagactgatatacc

SEQ ID NO: 4113902 - DNA, 25 bp, Homo sapien
taagagtaaaatcctcgtgaatggg

SEQ ID NO: 4113903 - DNA, 25 bp, Homo sapien
tgaatttgcaatctccacactggcg

SEQ ID NO: 4113904 - DNA, 25 bp, Homo sapien
caggccttttcgtgcttctggtagg

SEQ ID NO: 4113905 - DNA, 25 bp, Homo sapien
caaactgctggtgcttcgagaggat

SEQ ID NO: 4113906 - DNA, 25 bp, Homo sapien
cacactggcgcttggtgttgacgag

SEQ ID NO: 4113907 - DNA, 25 bp, Homo sapien
caggctctggtgctacaaatgaaga

SEQ ID NO: 4113908 - DNA, 25 bp, Homo sapien
ccaactgagttccatctaggatgcc

SEQ ID NO: 4113909 - DNA, 25 bp, Homo sapien
taacggctagggtttgacattccag

SEQ ID NO: 4113910 - DNA, 25 bp, Homo sapien
catcgtcctgttctatttgggtcac

SEQ ID NO: 4113911 - DNA, 25 bp, Homo sapien
tgtaaacatatgcactatcattcag

SEQ ID NO: 4113912 - DNA, 25 bp, Homo sapien
gttatgaaagttgtagatggcctct

SEQ ID NO: 4113913 - DNA, 25 bp, Homo sapien
ttatgaaagttgtagatggcctctt

SEQ ID NO: 4113914 - DNA, 25 bp, Homo sapien
accatgctgtaaacatatgcactat

SEQ ID NO: 4113915 - DNA, 25 bp, Homo sapien
tctagatcctggtccaagactggcc

SEQ ID NO: 4113916 - DNA, 25 bp, Homo sapien
tggccagagtagaggagctatgttc

SEQ ID NO: 4113917 - DNA, 25 bp, Homo sapien
ggcctggatgtaactcctcaaccaa

SEQ ID NO: 4113918 - DNA, 25 bp, Homo sapien
tgtaacaaggtttgtttggcctgga

SEQ ID NO: 4113919 - DNA, 25 bp, Homo sapien
tctcatggaagtccagcgcatgcat

SEQ ID NO: 4113920 - DNA, 25 bp, Homo sapien
tgaggccattatcaaggatacagtc

SEQ ID NO: 4113921 - DNA, 25 bp, Homo sapien
ggagcagtcctgtgaaatactatga

SEQ ID NO: 4113922 - DNA, 25 bp, Homo sapien
cagtcctgtgaaatactatgaggcc

SEQ ID NO: 4113923 - DNA, 25 bp, Homo sapien
ttaaggagcagtcctgtgaaatact

SEQ ID NO: 4113924 - DNA, 25 bp, Homo sapien
tacggtagggaacaagtcaggtcag

SEQ ID NO: 4113925 - DNA, 25 bp, Homo sapien
ttctgcatccaggagattacggtag

SEQ ID NO: 4113926 - DNA, 25 bp, Homo sapien
gggagatggctcctactgcagttga

SEQ ID NO: 4113927 - DNA, 25 bp, Homo sapien
gagatggctcctactgcagttgagg

SEQ ID NO: 4113928 - DNA, 25 bp, Homo sapien
ctccaggattaaggagctccaaatg

SEQ ID NO: 4113929 - DNA, 25 bp, Homo sapien
gattaaggagctccaaatgatgtgg

SEQ ID NO: 4113930 - DNA, 25 bp, Homo sapien
ccaggattaaggagctccaaatgat

SEQ ID NO: 4113931 - DNA, 25 bp, Homo sapien
taaggagctccaaatgatgtggaaa

SEQ ID NO: 4113932 - DNA, 25 bp, Homo sapien
ttgccacagtttcccagggacatcc

SEQ ID NO: 4113933 - DNA, 25 bp, Homo sapien
tgccacagtttcccagggacatcct

SEQ ID NO: 4113934 - DNA, 25 bp, Homo sapien
attgttgccacagtttcccagggac

SEQ ID NO: 4113935 - DNA, 25 bp, Homo sapien
cacagtttcccagggacatcctcat

SEQ ID NO: 4113936 - DNA, 25 bp, Homo sapien
gatgaagttcacaggcgttctgcca

SEQ ID NO: 4113937 - DNA, 25 bp, Homo sapien
ccaagattctgagtgtgtacattag

SEQ ID NO: 4113938 - DNA, 25 bp, Homo sapien
cacgcccagttctgtggccggattt

SEQ ID NO: 4113939 - DNA, 25 bp, Homo sapien
tcatgccctttcagaccccaaggtt

SEQ ID NO: 4113940 - DNA, 25 bp, Homo sapien
tactcaaccttgctcgtgctgtgca

SEQ ID NO: 4113941 - DNA, 25 bp, Homo sapien
cactccatgccaatttctatacctg

SEQ ID NO: 4113942 - DNA, 25 bp, Homo sapien
cagttgtcattacctgcagtggcat

SEQ ID NO: 4113943 - DNA, 25 bp, Homo sapien
tctatacctgttctactcaaccttg

SEQ ID NO: 4113944 - DNA, 25 bp, Homo sapien
aaacaagctatagccgggggtgcag

SEQ ID NO: 4113945 - DNA, 25 bp, Homo sapien
caaacaagctatagccgggggtgca

SEQ ID NO: 4113946 - DNA, 25 bp, Homo sapien
caagctatagccgggggtgcagcca

SEQ ID NO: 4113947 - DNA, 25 bp, Homo sapien
ctgcaaacaagctatagccgggggt

SEQ ID NO: 4113948 - DNA, 25 bp, Homo sapien
cggatgctccagtcatattggcagc

SEQ ID NO: 4113949 - DNA, 25 bp, Homo sapien
gatgctccagtcatattggcagcaa

SEQ ID NO: 4113950 - DNA, 25 bp, Homo sapien
ggatgctccagtcatattggcagca

SEQ ID NO: 4113951 - DNA, 25 bp, Homo sapien
atgctccagtcatattggcagcaaa

SEQ ID NO: 4113952 - DNA, 25 bp, Homo sapien
gctcgactcatattcagccaagcag

SEQ ID NO: 4113953 - DNA, 25 bp, Homo sapien
tcatgcttgattcattcctctctgt

SEQ ID NO: 4113954 - DNA, 25 bp, Homo sapien
gcttgattcattcctctctgtatgg

SEQ ID NO: 4113955 - DNA, 25 bp, Homo sapien
gtatggttcagtgagctcgactcat

SEQ ID NO: 4113956 - DNA, 25 bp, Homo sapien
ctagaatgtcgaagcacgcgccact

SEQ ID NO: 4113957 - DNA, 25 bp, Homo sapien
tggcactgccaaagcgcttgaagcg

SEQ ID NO: 4113958 - DNA, 25 bp, Homo sapien
ctgtacaggttcttcagaaccttgg

SEQ ID NO: 4113959 - DNA, 25 bp, Homo sapien
gaagcggctcttcacattattgtag

SEQ ID NO: 4113960 - DNA, 25 bp, Homo sapien
caaagactcccagagcggcaggaag

SEQ ID NO: 4113961 - DNA, 25 bp, Homo sapien
cagcccaccaaagactcccagagcg

SEQ ID NO: 4113962 - DNA, 25 bp, Homo sapien
ccaccaaagactcccagagcggcag

SEQ ID NO: 4113963 - DNA, 25 bp, Homo sapien
accaaagactcccagagcggcagga

SEQ ID NO: 4113964 - DNA, 25 bp, Homo sapien
ggagcattggtgtcatttagtatga

SEQ ID NO: 4113965 - DNA, 25 bp, Homo sapien
gacaagccctggttttgcatgactt

SEQ ID NO: 4113966 - DNA, 25 bp, Homo sapien
tgatgttttttcaagggcagaaagg

SEQ ID NO: 4113967 - DNA, 25 bp, Homo sapien
gactttaaatcttctagtacaacac

SEQ ID NO: 4113968 - DNA, 25 bp, Homo sapien
tctccaggtttgactcaaaaaggct

SEQ ID NO: 4113969 - DNA, 25 bp, Homo sapien
tgcctataaaatgttgaatcactgc

SEQ ID NO: 4113970 - DNA, 25 bp, Homo sapien
cctataaaatgttgaatcactgcca

SEQ ID NO: 4113971 - DNA, 25 bp, Homo sapien
ctccaggtttgactcaaaaaggctt

SEQ ID NO: 4113972 - DNA, 25 bp, Homo sapien
ttcagccacccgtagggccacagcc

SEQ ID NO: 4113973 - DNA, 25 bp, Homo sapien
tctgctttggaaattgcttcctcaa

SEQ ID NO: 4113974 - DNA, 25 bp, Homo sapien
ctttggaaattgcttcctcaatggc

SEQ ID NO: 4113975 - DNA, 25 bp, Homo sapien
gcctctgctttggaaattgcttcct

SEQ ID NO: 4113976 - DNA, 25 bp, Homo sapien
tgggtggatttggggtgacttggca

SEQ ID NO: 4113977 - DNA, 25 bp, Homo sapien
gggtggatttggggtgacttggcag

SEQ ID NO: 4113978 - DNA, 25 bp, Homo sapien
cttggcagtcactttgccaggagag

SEQ ID NO: 4113979 - DNA, 25 bp, Homo sapien
tggcagtcactttgccaggagagtc

SEQ ID NO: 4113980 - DNA, 25 bp, Homo sapien
gaggagggaagagaatggctgtgtg

SEQ ID NO: 4113981 - DNA, 25 bp, Homo sapien
ctgaggagggaagagaatggctgtg

SEQ ID NO: 4113982 - DNA, 25 bp, Homo sapien
tgaggagggaagagaatggctgtgt

SEQ ID NO: 4113983 - DNA, 25 bp, Homo sapien
agctcctccttgtggtcccgcaggt

SEQ ID NO: 4113984 - DNA, 25 bp, Homo sapien
cccgcaggtaactggcctcattttg

SEQ ID NO: 4113985 - DNA, 25 bp, Homo sapien
gcaggattgtcgtggccagttcctc

SEQ ID NO: 4113986 - DNA, 25 bp, Homo sapien
caggattgtcgtggccagttcctca

SEQ ID NO: 4113987 - DNA, 25 bp, Homo sapien
agggcagcgggagcacggtagcctc

SEQ ID NO: 4113988 - DNA, 25 bp, Homo sapien
agcacggtagcctccaggggatgct

SEQ ID NO: 4113989 - DNA, 25 bp, Homo sapien
gccacctttgtgctgcaactctggg

SEQ ID NO: 4113990 - DNA, 25 bp, Homo sapien
tctgccacctttgtgctgcaactct

SEQ ID NO: 4113991 - DNA, 25 bp, Homo sapien
cacgttgacaaggaaaggttctgct

SEQ ID NO: 4113992 - DNA, 25 bp, Homo sapien
tgagcatatgcatgacagcagcagt

SEQ ID NO: 4113993 - DNA, 25 bp, Homo sapien
gattataaagctctggacggtgggc

SEQ ID NO: 4113994 - DNA, 25 bp, Homo sapien
gatactccttgtaaccgttgtgcat

SEQ ID NO: 4113995 - DNA, 25 bp, Homo sapien
ccgtgtcccctcctgccttgctaac

SEQ ID NO: 4113996 - DNA, 25 bp, Homo sapien
gagaagcaagctgatgccatctggc

SEQ ID NO: 4113997 - DNA, 25 bp, Homo sapien
gaagtacagctcataactcacaggg

SEQ ID NO: 4113998 - DNA, 25 bp, Homo sapien
gccttgctgaccaaaacacagtgaa

SEQ ID NO: 4113999 - DNA, 25 bp, Homo sapien
gataagtgatatgccaacagctctg

SEQ ID NO: 4114000 - DNA, 25 bp, Homo sapien
ttcagattcagagtcgtaggaaacc

SEQ ID NO: 4114001 - DNA, 25 bp, Homo sapien
cagagtcgtaggaaacctctacttt

SEQ ID NO: 4114002 - DNA, 25 bp, Homo sapien
ggcgtctggttcactctgttggaga

SEQ ID NO: 4114003 - DNA, 25 bp, Homo sapien
gattcagagtcgtaggaaacctcta

SEQ ID NO: 4114004 - DNA, 25 bp, Homo sapien
tttaagattagaggttggaagagga

SEQ ID NO: 4114005 - DNA, 25 bp, Homo sapien
atggccttgcctcctaaggactctg

SEQ ID NO: 4114006 - DNA, 25 bp, Homo sapien
gacaacactgagctttaagattaga

SEQ ID NO: 4114007 - DNA, 25 bp, Homo sapien
gaagaggaagatgcactcaatggcc

SEQ ID NO: 4114008 - DNA, 25 bp, Homo sapien
ctccagtgattgagaaggcagactg

SEQ ID NO: 4114009 - DNA, 25 bp, Homo sapien
agcagactctgctctcgggtgttgg

SEQ ID NO: 4114010 - DNA, 25 bp, Homo sapien
tcttctccagtgattgagaaggcag

SEQ ID NO: 4114011 - DNA, 25 bp, Homo sapien
ctctcgggtgttggccttggtccct

SEQ ID NO: 4114012 - DNA, 25 bp, Homo sapien
actagatactgcttaaaacagttac

SEQ ID NO: 4114013 - DNA, 25 bp, Homo sapien
aactagatactgcttaaaacagtta

SEQ ID NO: 4114014 - DNA, 25 bp, Homo sapien
caactagatactgcttaaaacagtt

SEQ ID NO: 4114015 - DNA, 25 bp, Homo sapien
gtagagagacacttataatgcagta

SEQ ID NO: 4114016 - DNA, 25 bp, Homo sapien
gtccatcaatgttcttatctgcaaa

SEQ ID NO: 4114017 - DNA, 25 bp, Homo sapien
taaaatagtgcctacatatggactc

SEQ ID NO: 4114018 - DNA, 25 bp, Homo sapien
tgaaaacctgcaaattggagtcatg

SEQ ID NO: 4114019 - DNA, 25 bp, Homo sapien
gaaaccattccccagtttgtgtgtg

SEQ ID NO: 4114020 - DNA, 25 bp, Homo sapien
taaccaggactgttgcagggttgcc

SEQ ID NO: 4114021 - DNA, 25 bp, Homo sapien
cagactggcaggacatcgagttatt

SEQ ID NO: 4114022 - DNA, 25 bp, Homo sapien
ccctgctgcagtaggactctgaagc

SEQ ID NO: 4114023 - DNA, 25 bp, Homo sapien
tcgtaggcagatgccacactggagg

SEQ ID NO: 4114024 - DNA, 25 bp, Homo sapien
tcggagcccatctcatcgtaggcag

SEQ ID NO: 4114025 - DNA, 25 bp, Homo sapien
cccgctcttaggtttggccagtagt

SEQ ID NO: 4114026 - DNA, 25 bp, Homo sapien
aagtcttcctcgctatcggagccca

SEQ ID NO: 4114027 - DNA, 25 bp, Homo sapien
gggccttggtcagagctctgggcct

SEQ ID NO: 4114028 - DNA, 25 bp, Homo sapien
gaggaggtctccgagtcagagcaca

SEQ ID NO: 4114029 - DNA, 25 bp, Homo sapien
cagctatggggccttggtcagagct

SEQ ID NO: 4114030 - DNA, 25 bp, Homo sapien
ctgcggaggaggtctccgagtcaga

SEQ ID NO: 4114031 - DNA, 25 bp, Homo sapien
gatgtgtgtctagatcccggagctg

SEQ ID NO: 4114032 - DNA, 25 bp, Homo sapien
ccatgcaagcgcatcttctcagctg

SEQ ID NO: 4114033 - DNA, 25 bp, Homo sapien
aggacagtctggcctggtgcccaac

SEQ ID NO: 4114034 - DNA, 25 bp, Homo sapien
ctgctgtccgaggtctccctgctgg

SEQ ID NO: 4114035 - DNA, 25 bp, Homo sapien
tctggccaaactaagagtatagggc

SEQ ID NO: 4114036 - DNA, 25 bp, Homo sapien
gaccatatctttggacctacgtgag

SEQ ID NO: 4114037 - DNA, 25 bp, Homo sapien
caagggcaagggcatagcacaatca

SEQ ID NO: 4114038 - DNA, 25 bp, Homo sapien
tacgtgagttgtctgcagccatagg

SEQ ID NO: 4114039 - DNA, 25 bp, Homo sapien
ctcagccccacagctgggtgctgcc

SEQ ID NO: 4114040 - DNA, 25 bp, Homo sapien
gcctcagccccacagctgggtgctg

SEQ ID NO: 4114041 - DNA, 25 bp, Homo sapien
cagccccacagctgggtgctgccat

SEQ ID NO: 4114042 - DNA, 25 bp, Homo sapien
tgggcctcagccccacagctgggtg

SEQ ID NO: 4114043 - DNA, 25 bp, Homo sapien
gacataatcccatcactgattagca

SEQ ID NO: 4114044 - DNA, 25 bp, Homo sapien
cataatcccatcactgattagcatg

SEQ ID NO: 4114045 - DNA, 25 bp, Homo sapien
acataatcccatcactgattagcat

SEQ ID NO: 4114046 - DNA, 25 bp, Homo sapien
agacataatcccatcactgattagc

SEQ ID NO: 4114047 - DNA, 25 bp, Homo sapien
tcccgagcctcattgctgatgtctg

SEQ ID NO: 4114048 - DNA, 25 bp, Homo sapien
tttcattgctaactcgtacagcctg

SEQ ID NO: 4114049 - DNA, 25 bp, Homo sapien
cctgaagaagtctccttttcactca

SEQ ID NO: 4114050 - DNA, 25 bp, Homo sapien
tgtctgtctctgataaatcatccga

SEQ ID NO: 4114051 - DNA, 25 bp, Homo sapien
cagccacgggtaatggtcttcactt

SEQ ID NO: 4114052 - DNA, 25 bp, Homo sapien
agccacgggtaatggtcttcacttc

SEQ ID NO: 4114053 - DNA, 25 bp, Homo sapien
tgtctacgggcatatccacattcct

SEQ ID NO: 4114054 - DNA, 25 bp, Homo sapien
tagatgggatgttatactgaggaca

SEQ ID NO: 4114055 - DNA, 25 bp, Homo sapien
ctgctgctggacaggattctgtagc

SEQ ID NO: 4114056 - DNA, 25 bp, Homo sapien
gattctgtagctccaattagatggg

SEQ ID NO: 4114057 - DNA, 25 bp, Homo sapien
tggataagagctgtagctctaagtg

SEQ ID NO: 4114058 - DNA, 25 bp, Homo sapien
tgtagctctaagtggacagctaaag

SEQ ID NO: 4114059 - DNA, 25 bp, Homo sapien
tctggataagagctgtagctctaag

SEQ ID NO: 4114060 - DNA, 25 bp, Homo sapien
tctaagtggacagctaaagcttctc

SEQ ID NO: 4114061 - DNA, 25 bp, Homo sapien
ctgaagagtgacttgatgcaagagg

SEQ ID NO: 4114062 - DNA, 25 bp, Homo sapien
gcaatgccgctaaaacccgtcaaaa

SEQ ID NO: 4114063 - DNA, 25 bp, Homo sapien
tcatgaaacataaggcactccagca

SEQ ID NO: 4114064 - DNA, 25 bp, Homo sapien
tccatgaacagactcatgtccctga

SEQ ID NO: 4114065 - DNA, 25 bp, Homo sapien
cctagaactgagctgccaatgacca

SEQ ID NO: 4114066 - DNA, 25 bp, Homo sapien
gagatctgtccagcacaagtgccca

SEQ ID NO: 4114067 - DNA, 25 bp, Homo sapien
caatgaccacaagcgagaaaggatg

SEQ ID NO: 4114068 - DNA, 25 bp, Homo sapien
agaggagtctaacgacagggagtcc

SEQ ID NO: 4114069 - DNA, 25 bp, Homo sapien
aacacctgaggtctgcttaaagacc

SEQ ID NO: 4114070 - DNA, 25 bp, Homo sapien
aggcagctggtctgaggagagcgcc

SEQ ID NO: 4114071 - DNA, 25 bp, Homo sapien
ggtctgaggagagcgccacagcttc

SEQ ID NO: 4114072 - DNA, 25 bp, Homo sapien
ccttaagtcagagtgaggaggccca

SEQ ID NO: 4114073 - DNA, 25 bp, Homo sapien
tttggtccgataacagaaggggaca

SEQ ID NO: 4114074 - DNA, 25 bp, Homo sapien
tggtccgataacagaaggggacaga

SEQ ID NO: 4114075 - DNA, 25 bp, Homo sapien
gaacagcacattaacaatgacacag

SEQ ID NO: 4114076 - DNA, 25 bp, Homo sapien
ctgtttggtccgataacagaagggg

SEQ ID NO: 4114077 - DNA, 25 bp, Homo sapien
tgttgcagagagaaacagcagaaaa

SEQ ID NO: 4114078 - DNA, 25 bp, Homo sapien
ctgtggagatgttgcagagagaaac

SEQ ID NO: 4114079 - DNA, 25 bp, Homo sapien
tgcagagagaaacagcagaaaactt

SEQ ID NO: 4114080 - DNA, 25 bp, Homo sapien
tgtggagatgttgcagagagaaaca

SEQ ID NO: 4114081 - DNA, 25 bp, Homo sapien
cacttggtctgtcccacgaggaaac

SEQ ID NO: 4114082 - DNA, 25 bp, Homo sapien
ccttctgtctgtcaggagggacttg

SEQ ID NO: 4114083 - DNA, 25 bp, Homo sapien
gatcctgctatcaactcctctgtgg

SEQ ID NO: 4114084 - DNA, 25 bp, Homo sapien
acgaggaaacatccccttctgtctg

SEQ ID NO: 4114085 - DNA, 25 bp, Homo sapien
caccctagacagggcacctccatac

SEQ ID NO: 4114086 - DNA, 25 bp, Homo sapien
ttcaccctagacagggcacctccat

SEQ ID NO: 4114087 - DNA, 25 bp, Homo sapien
attcaccctagacagggcacctcca

SEQ ID NO: 4114088 - DNA, 25 bp, Homo sapien
tcaccctagacagggcacctccata

SEQ ID NO: 4114089 - DNA, 25 bp, Homo sapien
gagcgggaaccatggcagtctgagg

SEQ ID NO: 4114090 - DNA, 25 bp, Homo sapien
cctcttgattggcagatccactagc

SEQ ID NO: 4114091 - DNA, 25 bp, Homo sapien
atggctggttagcatccttattggg

SEQ ID NO: 4114092 - DNA, 25 bp, Homo sapien
tagttgatgttaggcattttcctct

SEQ ID NO: 4114093 - DNA, 25 bp, Homo sapien
caggcgaagcctagtgtaactgggc

SEQ ID NO: 4114094 - DNA, 25 bp, Homo sapien
agaagccacacaggcgaagcctagt

SEQ ID NO: 4114095 - DNA, 25 bp, Homo sapien
acagtaaagccaatctgaggtcctg

SEQ ID NO: 4114096 - DNA, 25 bp, Homo sapien
agcctagtgtaactgggcagagctg

SEQ ID NO: 4114097 - DNA, 25 bp, Homo sapien
gggctgtgggagctttcagcagtga

SEQ ID NO: 4114098 - DNA, 25 bp, Homo sapien
tgggctgtgggagctttcagcagtg

SEQ ID NO: 4114099 - DNA, 25 bp, Homo sapien
ctgggctgtgggagctttcagcagt

SEQ ID NO: 4114100 - DNA, 25 bp, Homo sapien
gtctgcagacttgggactggttggg

SEQ ID NO: 4114101 - DNA, 25 bp, Homo sapien
ctgcagacttgggactggttggggg

SEQ ID NO: 4114102 - DNA, 25 bp, Homo sapien
tgcagacttgggactggttgggggt

SEQ ID NO: 4114103 - DNA, 25 bp, Homo sapien
gcagacttgggactggttgggggtc

SEQ ID NO: 4114104 - DNA, 25 bp, Homo sapien
ctgtagagacagtgctacatttgag

SEQ ID NO: 4114105 - DNA, 25 bp, Homo sapien
tagagacagtgctacatttgagttc

SEQ ID NO: 4114106 - DNA, 25 bp, Homo sapien
tgtagagacagtgctacatttgagt

SEQ ID NO: 4114107 - DNA, 25 bp, Homo sapien
gagacagtgctacatttgagttcat

SEQ ID NO: 4114108 - DNA, 25 bp, Homo sapien
tcatcagtgccactgtggatgcagc

SEQ ID NO: 4114109 - DNA, 25 bp, Homo sapien
tccagtccatacacagtgcctgctg

SEQ ID NO: 4114110 - DNA, 25 bp, Homo sapien
ggcggcatcttctagctcagtcagc

SEQ ID NO: 4114111 - DNA, 25 bp, Homo sapien
tccagatccgccagatgggtctcat

SEQ ID NO: 4114112 - DNA, 25 bp, Homo sapien
tcagggctgaaatccggctctcaat

SEQ ID NO: 4114113 - DNA, 25 bp, Homo sapien
gtcttcttgtgaagcgcacacatgg

SEQ ID NO: 4114114 - DNA, 25 bp, Homo sapien
gcttctgatcccgtcttcttgtgaa

SEQ ID NO: 4114115 - DNA, 25 bp, Homo sapien
gctatgtttaatcctgcaatggtca

SEQ ID NO: 4114116 - DNA, 25 bp, Homo sapien
tttgctgccttgatgtatctatggt

SEQ ID NO: 4114117 - DNA, 25 bp, Homo sapien
ttgctgccttgatgtatctatggtt

SEQ ID NO: 4114118 - DNA, 25 bp, Homo sapien
ctttcaccggtggagcaggcagttt

SEQ ID NO: 4114119 - DNA, 25 bp, Homo sapien
tgctgccttgatgtatctatggttt

SEQ ID NO: 4114120 - DNA, 25 bp, Homo sapien
ctgtttgttgaggagccttggagaa

SEQ ID NO: 4114121 - DNA, 25 bp, Homo sapien
ttttaatggtagtcactgaagatgt

SEQ ID NO: 4114122 - DNA, 25 bp, Homo sapien
catcaaatccttggtggtgcctttc

SEQ ID NO: 4114123 - DNA, 25 bp, Homo sapien
ttgaggagccttggagaatgaagtt

SEQ ID NO: 4114124 - DNA, 25 bp, Homo sapien
aagcgttgaacattaagacagagat

SEQ ID NO: 4114125 - DNA, 25 bp, Homo sapien
cagtgaaagcgttgaacattaagac

SEQ ID NO: 4114126 - DNA, 25 bp, Homo sapien
catcaacagtgaaagcgttgaacat

SEQ ID NO: 4114127 - DNA, 25 bp, Homo sapien
gaaagcgttgaacattaagacagag

SEQ ID NO: 4114128 - DNA, 25 bp, Homo sapien
aaggaaaggctgcagagtggaggta

SEQ ID NO: 4114129 - DNA, 25 bp, Homo sapien
cagaaggaaaggctgcagagtggag

SEQ ID NO: 4114130 - DNA, 25 bp, Homo sapien
tacagaaggaaaggctgcagagtgg

SEQ ID NO: 4114131 - DNA, 25 bp, Homo sapien
ctacagaaggaaaggctgcagagtg

SEQ ID NO: 4114132 - DNA, 25 bp, Homo sapien
tcctctatacttgcgtagaaagtta

SEQ ID NO: 4114133 - DNA, 25 bp, Homo sapien
tatacttgcgtagaaagttattagt

SEQ ID NO: 4114134 - DNA, 25 bp, Homo sapien
tacttgcgtagaaagttattagtaa

SEQ ID NO: 4114135 - DNA, 25 bp, Homo sapien
tatttcctctatacttgcgtagaaa

SEQ ID NO: 4114136 - DNA, 25 bp, Homo sapien
taccgcggctgttgaacatatgtca

SEQ ID NO: 4114137 - DNA, 25 bp, Homo sapien
acggtcaggataccgcggctgttga

SEQ ID NO: 4114138 - DNA, 25 bp, Homo sapien
aggataccgcggctgttgaacatat

SEQ ID NO: 4114139 - DNA, 25 bp, Homo sapien
tttgcacggtcaggataccgcggct

SEQ ID NO: 4114140 - DNA, 25 bp, Homo sapien
tacatcacagctgactccagagcag

SEQ ID NO: 4114141 - DNA, 25 bp, Homo sapien
tcagtacatcacagctgactccaga

SEQ ID NO: 4114142 - DNA, 25 bp, Homo sapien
catcacagctgactccagagcaggc

SEQ ID NO: 4114143 - DNA, 25 bp, Homo sapien
cagtacatcacagctgactccagag

SEQ ID NO: 4114144 - DNA, 25 bp, Homo sapien
tgtcagtaagcccatggaagaaccc

SEQ ID NO: 4114145 - DNA, 25 bp, Homo sapien
cagtcttgatggttgagcaatcccc

SEQ ID NO: 4114146 - DNA, 25 bp, Homo sapien
caaggcactgtcgtgtacggccgga

SEQ ID NO: 4114147 - DNA, 25 bp, Homo sapien
gtatcttaaacatggagcgctgctg

SEQ ID NO: 4114148 - DNA, 25 bp, Homo sapien
tcattgaggtctgctactaggggaa

SEQ ID NO: 4114149 - DNA, 25 bp, Homo sapien
agggtttgagttttctgtctggatt

SEQ ID NO: 4114150 - DNA, 25 bp, Homo sapien
tcgttggtgcccttcattcaccagc

SEQ ID NO: 4114151 - DNA, 25 bp, Homo sapien
ggattgatatggtacaagacagagg

SEQ ID NO: 4114152 - DNA, 25 bp, Homo sapien
ttgaaaggattggatctcatctaag

SEQ ID NO: 4114153 - DNA, 25 bp, Homo sapien
taagccattgggtctacattttcaa

SEQ ID NO: 4114154 - DNA, 25 bp, Homo sapien
cataatggatttacaatgctggtga

SEQ ID NO: 4114155 - DNA, 25 bp, Homo sapien
caacctcacccaagatttaggctct

SEQ ID NO: 4114156 - DNA, 25 bp, Homo sapien
aacactaaggactgtacatcaaata

SEQ ID NO: 4114157 - DNA, 25 bp, Homo sapien
caaacactaaggactgtacatcaaa

SEQ ID NO: 4114158 - DNA, 25 bp, Homo sapien
aaacactaaggactgtacatcaaat

SEQ ID NO: 4114159 - DNA, 25 bp, Homo sapien
gcatttggtttgtagcctcgtgctg

SEQ ID NO: 4114160 - DNA, 25 bp, Homo sapien
tgctgatggcatttggtttgtagcc

SEQ ID NO: 4114161 - DNA, 25 bp, Homo sapien
cttagagaaggcattatagatgctt

SEQ ID NO: 4114162 - DNA, 25 bp, Homo sapien
tagcctcgtgctgtagacttagaga

SEQ ID NO: 4114163 - DNA, 25 bp, Homo sapien
aggaggaatagctttgccaggccct

SEQ ID NO: 4114164 - DNA, 25 bp, Homo sapien
cacaggaggtattattcttgggccc

SEQ ID NO: 4114165 - DNA, 25 bp, Homo sapien
tccctagcagtttgcccacaatgaa

SEQ ID NO: 4114166 - DNA, 25 bp, Homo sapien
gatgtagtggaagcatccctagcag

SEQ ID NO: 4114167 - DNA, 25 bp, Homo sapien
gattccctagcacggtggatctcag

SEQ ID NO: 4114168 - DNA, 25 bp, Homo sapien
taatctctatgagtcaccctcgagg

SEQ ID NO: 4114169 - DNA, 25 bp, Homo sapien
actaaagcgtgtgtctctggagggc

SEQ ID NO: 4114170 - DNA, 25 bp, Homo sapien
caggagcggtgttagtctcaaccaa

SEQ ID NO: 4114171 - DNA, 25 bp, Homo sapien
gttgggattaggctggagtggcggc

SEQ ID NO: 4114172 - DNA, 25 bp, Homo sapien
aggcgagggcgcgagagaagaggcg

SEQ ID NO: 4114173 - DNA, 25 bp, Homo sapien
ctgtagtggcgagaaaacggaaata

SEQ ID NO: 4114174 - DNA, 25 bp, Homo sapien
ataaataagaaaacgcttcgccctg

SEQ ID NO: 4114175 - DNA, 25 bp, Homo sapien
gcgatactagtgtgaggccggtgag

SEQ ID NO: 4114176 - DNA, 25 bp, Homo sapien
tgaggccggtgaggggataaaattc

SEQ ID NO: 4114177 - DNA, 25 bp, Homo sapien
gatactagtgtgaggccggtgaggg

SEQ ID NO: 4114178 - DNA, 25 bp, Homo sapien
ccggtgaggggataaaattcctgcg

SEQ ID NO: 4114179 - DNA, 25 bp, Homo sapien
attggaggttctggatagtggacat

SEQ ID NO: 4114180 - DNA, 25 bp, Homo sapien
cgaaagattggaggttctggatagt

SEQ ID NO: 4114181 - DNA, 25 bp, Homo sapien
aaagattggaggttctggatagtgg

SEQ ID NO: 4114182 - DNA, 25 bp, Homo sapien
agattggaggttctggatagtggac

SEQ ID NO: 4114183 - DNA, 25 bp, Homo sapien
gccgagatgcgcgccgggcaaggga

SEQ ID NO: 4114184 - DNA, 25 bp, Homo sapien
aggcgggcaaaaggccgagatgcgc

SEQ ID NO: 4114185 - DNA, 25 bp, Homo sapien
ggcggtggccaggcgggcaaaaggc

SEQ ID NO: 4114186 - DNA, 25 bp, Homo sapien
gccaggcgggcaaaaggccgagatg

SEQ ID NO: 4114187 - DNA, 25 bp, Homo sapien
tttctgggcgccgagacaaagcccc

SEQ ID NO: 4114188 - DNA, 25 bp, Homo sapien
agggctcggagtccggcgctgtcct

SEQ ID NO: 4114189 - DNA, 25 bp, Homo sapien
ccgtcgccattttctgggcgccgag

SEQ ID NO: 4114190 - DNA, 25 bp, Homo sapien
caggggccccgtcgccattttctgg

SEQ ID NO: 4114191 - DNA, 25 bp, Homo sapien
taggagtccacgaaataggatcgcc

SEQ ID NO: 4114192 - DNA, 25 bp, Homo sapien
gtagcagggccgatctaggagtcca

SEQ ID NO: 4114193 - DNA, 25 bp, Homo sapien
tggcccggcataccctttgcaagta

SEQ ID NO: 4114194 - DNA, 25 bp, Homo sapien
cactggccagtgacagatcagaggc

SEQ ID NO: 4114195 - DNA, 25 bp, Homo sapien
aatgttatcgttcaatatggtcctc

SEQ ID NO: 4114196 - DNA, 25 bp, Homo sapien
tgtccattgtagaaaaacgctgtta

SEQ ID NO: 4114197 - DNA, 25 bp, Homo sapien
ctttgctgtttttgccggtaggaat

SEQ ID NO: 4114198 - DNA, 25 bp, Homo sapien
gtcatcaatgaaggttctagtgcct

SEQ ID NO: 4114199 - DNA, 25 bp, Homo sapien
gtccctgccgggagtaagtcgtcac

SEQ ID NO: 4114200 - DNA, 25 bp, Homo sapien
tgccctgaacagtagtcagtgtctt

SEQ ID NO: 4114201 - DNA, 25 bp, Homo sapien
gccgttccgttgctggattcttata

SEQ ID NO: 4114202 - DNA, 25 bp, Homo sapien
aagtcgtcacccttagttgcatcag

SEQ ID NO: 4114203 - DNA, 25 bp, Homo sapien
tgagagaccacactgggagaataac

SEQ ID NO: 4114204 - DNA, 25 bp, Homo sapien
gaggtgtgcatcagtaactctaatc

SEQ ID NO: 4114205 - DNA, 25 bp, Homo sapien
tattttcatccacgccgatataaag

SEQ ID NO: 4114206 - DNA, 25 bp, Homo sapien
tataaaggtgtgaatcataatccag

SEQ ID NO: 4114207 - DNA, 25 bp, Homo sapien
aatcacagtaccattacaggcaaat

SEQ ID NO: 4114208 - DNA, 25 bp, Homo sapien
tcacagtaccattacaggcaaattt

SEQ ID NO: 4114209 - DNA, 25 bp, Homo sapien
caccttgaagctgaataacctctcc

SEQ ID NO: 4114210 - DNA, 25 bp, Homo sapien
gctgaataacctctccgtattcagg

SEQ ID NO: 4114211 - DNA, 25 bp, Homo sapien
aataactaccatgtctttatttcac

SEQ ID NO: 4114212 - DNA, 25 bp, Homo sapien
ccaaataactaccatgtctttattt

SEQ ID NO: 4114213 - DNA, 25 bp, Homo sapien
ctaatttccttcattcgtatgattt

SEQ ID NO: 4114214 - DNA, 25 bp, Homo sapien
tccttcattcgtatgattttttact

SEQ ID NO: 4114215 - DNA, 25 bp, Homo sapien
tgtggcatgcactgctgatagccaa

SEQ ID NO: 4114216 - DNA, 25 bp, Homo sapien
gatagccaacaattcaacacgtatt

SEQ ID NO: 4114217 - DNA, 25 bp, Homo sapien
ttaaaaagaatcactatcaacagct

SEQ ID NO: 4114218 - DNA, 25 bp, Homo sapien
tgcaacactgttgtctgtggcatgc

SEQ ID NO: 4114219 - DNA, 25 bp, Homo sapien
tgtaaaataaaatctaatttagcaa

SEQ ID NO: 4114220 - DNA, 25 bp, Homo sapien
ctgtaaaataaaatctaatttagca

SEQ ID NO: 4114221 - DNA, 25 bp, Homo sapien
tgaaccttaagctgttcctccttta

SEQ ID NO: 4114222 - DNA, 25 bp, Homo sapien
aatccatgaaccttaagctgttcct

SEQ ID NO: 4114223 - DNA, 25 bp, Homo sapien
tccatgaaccttaagctgttcctcc

SEQ ID NO: 4114224 - DNA, 25 bp, Homo sapien
tagaatccatgaaccttaagctgtt

SEQ ID NO: 4114225 - DNA, 25 bp, Homo sapien
taaatgaaaagtccgtttactgcag

SEQ ID NO: 4114226 - DNA, 25 bp, Homo sapien
tattgttaagctgcaacgtacatgg

SEQ ID NO: 4114227 - DNA, 25 bp, Homo sapien
cagggaatcatttcacaaggcagcc

SEQ ID NO: 4114228 - DNA, 25 bp, Homo sapien
gtgttactagtctacataccccatg

SEQ ID NO: 4114229 - DNA, 25 bp, Homo sapien
tacttgcttagatttgggagcataa

SEQ ID NO: 4114230 - DNA, 25 bp, Homo sapien
gtattttacttgcttagatttggga

SEQ ID NO: 4114231 - DNA, 25 bp, Homo sapien
tttgggagcataattgctcacaaag

SEQ ID NO: 4114232 - DNA, 25 bp, Homo sapien
ttgggagcataattgctcacaaaga

SEQ ID NO: 4114233 - DNA, 25 bp, Homo sapien
gatggcaacagttttcggggcattg

SEQ ID NO: 4114234 - DNA, 25 bp, Homo sapien
gaagagatagtctcctagatcaagg

SEQ ID NO: 4114235 - DNA, 25 bp, Homo sapien
agaaagaagagatagtctcctagat

SEQ ID NO: 4114236 - DNA, 25 bp, Homo sapien
agatagtctcctagatcaaggaggg

SEQ ID NO: 4114237 - DNA, 25 bp, Homo sapien
tcctcctaggtatgtcctcttgggc

SEQ ID NO: 4114238 - DNA, 25 bp, Homo sapien
tcctgctgggtaattagtgaggcga

SEQ ID NO: 4114239 - DNA, 25 bp, Homo sapien
cgagggtttgaaagggcagcacaaa

SEQ ID NO: 4114240 - DNA, 25 bp, Homo sapien
cagcacaaagatccccgctgatgtc

SEQ ID NO: 4114241 - DNA, 25 bp, Homo sapien
gcagcttccaaagtagacctagtca

SEQ ID NO: 4114242 - DNA, 25 bp, Homo sapien
tttgagagccctgtagtctccaatt

SEQ ID NO: 4114243 - DNA, 25 bp, Homo sapien
ggcactgtgtcaaactcctttgcag

SEQ ID NO: 4114244 - DNA, 25 bp, Homo sapien
gagcatcagcctcctttgagagccc

SEQ ID NO: 4114245 - DNA, 25 bp, Homo sapien
tgtgcggagccgattcggagaaggc

SEQ ID NO: 4114246 - DNA, 25 bp, Homo sapien
ttcggagaaggcgactagcgctgcc

SEQ ID NO: 4114247 - DNA, 25 bp, Homo sapien
agccgattcggagaaggcgactagc

SEQ ID NO: 4114248 - DNA, 25 bp, Homo sapien
agaaggcgactagcgctgccgcaga

SEQ ID NO: 4114249 - DNA, 25 bp, Homo sapien
cagcacatctgcggatccatgcagg

SEQ ID NO: 4114250 - DNA, 25 bp, Homo sapien
gcaggcatctaagcgcccagcacat

SEQ ID NO: 4114251 - DNA, 25 bp, Homo sapien
tgcatagccgcaggcatctaagcgc

SEQ ID NO: 4114252 - DNA, 25 bp, Homo sapien
tctctggactgcgtctctgcatagc

SEQ ID NO: 4114253 - DNA, 25 bp, Homo sapien
tgcttgctcacatggttggcgggtc

SEQ ID NO: 4114254 - DNA, 25 bp, Homo sapien
gctcacatggttggcgggtcagcac

SEQ ID NO: 4114255 - DNA, 25 bp, Homo sapien
tcacatggttggcgggtcagcacag

SEQ ID NO: 4114256 - DNA, 25 bp, Homo sapien
cttgctcacatggttggcgggtcag

SEQ ID NO: 4114257 - DNA, 25 bp, Homo sapien
agggaggacctcttgcttgtggatc

SEQ ID NO: 4114258 - DNA, 25 bp, Homo sapien
tggagttcggtagagggccttgagg

SEQ ID NO: 4114259 - DNA, 25 bp, Homo sapien
atactcacaagcaagaccaccaagg

SEQ ID NO: 4114260 - DNA, 25 bp, Homo sapien
cagtgatactcacaagtaccacaat

SEQ ID NO: 4114261 - DNA, 25 bp, Homo sapien
ctggatgccctctatttccaaactt

SEQ ID NO: 4114262 - DNA, 25 bp, Homo sapien
tttccaaacttctaggcttatcagt

SEQ ID NO: 4114263 - DNA, 25 bp, Homo sapien
ggatgccctctatttccaaacttct

SEQ ID NO: 4114264 - DNA, 25 bp, Homo sapien
atgccctctatttccaaacttctag

SEQ ID NO: 4114265 - DNA, 25 bp, Homo sapien
tagactgtggttcttgaagacccgg

SEQ ID NO: 4114266 - DNA, 25 bp, Homo sapien
tctgctggccattgatacacgtaga

SEQ ID NO: 4114267 - DNA, 25 bp, Homo sapien
tgaccactccggtattattctcttt

SEQ ID NO: 4114268 - DNA, 25 bp, Homo sapien
cacactacatttgaaggtttgactg

SEQ ID NO: 4114269 - DNA, 25 bp, Homo sapien
cagacagcctgtttgcataaggtcc

SEQ ID NO: 4114270 - DNA, 25 bp, Homo sapien
gtttgcataaggtccattaagcctt

SEQ ID NO: 4114271 - DNA, 25 bp, Homo sapien
gcctgtttgcataaggtccattaag

SEQ ID NO: 4114272 - DNA, 25 bp, Homo sapien
cagcctgtttgcataaggtccatta

SEQ ID NO: 4114273 - DNA, 25 bp, Homo sapien
gattatggatgatcttacttccttt

SEQ ID NO: 4114274 - DNA, 25 bp, Homo sapien
aatgttcccctctggtgggaaggat

SEQ ID NO: 4114275 - DNA, 25 bp, Homo sapien
ccctctggtgggaaggattatggat

SEQ ID NO: 4114276 - DNA, 25 bp, Homo sapien
cacccagcctgtatgaataattttt

SEQ ID NO: 4114277 - DNA, 25 bp, Homo sapien
cttgggggttatttccatagctgga

SEQ ID NO: 4114278 - DNA, 25 bp, Homo sapien
tgcatacactcctcaaaggctctgg

SEQ ID NO: 4114279 - DNA, 25 bp, Homo sapien
aggtgggatggaacctgccccttga

SEQ ID NO: 4114280 - DNA, 25 bp, Homo sapien
ggaacctgccccttgactttttgca

SEQ ID NO: 4114281 - DNA, 25 bp, Homo sapien
gaaatgatttgagcacccctaaagt

SEQ ID NO: 4114282 - DNA, 25 bp, Homo sapien
cctaaagtcaaagggctgggacttg

SEQ ID NO: 4114283 - DNA, 25 bp, Homo sapien
aaatttcccattaaatagttggctg

SEQ ID NO: 4114284 - DNA, 25 bp, Homo sapien
ggctgtaatccatccatatacccct

SEQ ID NO: 4114285 - DNA, 25 bp, Homo sapien
tggaggcaccacctaagtccagggc

SEQ ID NO: 4114286 - DNA, 25 bp, Homo sapien
tatacgtagccatacagggacacct

SEQ ID NO: 4114287 - DNA, 25 bp, Homo sapien
tccggccatagcactggaagctgtg

SEQ ID NO: 4114288 - DNA, 25 bp, Homo sapien
tggtttccactccatgcgggtgcac

SEQ ID NO: 4114289 - DNA, 25 bp, Homo sapien
tgcagggcactgtcatgaaaaagtc

SEQ ID NO: 4114290 - DNA, 25 bp, Homo sapien
caccgagcttagtgtttgcagggca

SEQ ID NO: 4114291 - DNA, 25 bp, Homo sapien
gaaaaagtcagtcaatgggctcgag

SEQ ID NO: 4114292 - DNA, 25 bp, Homo sapien
tgggctcgagggagaaaagtccact

SEQ ID NO: 4114293 - DNA, 25 bp, Homo sapien
cacaaatggccctttaatctttggc

SEQ ID NO: 4114294 - DNA, 25 bp, Homo sapien
tctccttacacagagatgggtcccc

SEQ ID NO: 4114295 - DNA, 25 bp, Homo sapien
gctataatcccgagggtaacaggga

SEQ ID NO: 4114296 - DNA, 25 bp, Homo sapien
tccacagtgcacaggctatcaaata

SEQ ID NO: 4114297 - DNA, 25 bp, Homo sapien
aagcactggctgtgtagtagaatcc

SEQ ID NO: 4114298 - DNA, 25 bp, Homo sapien
ctgtgtagtagaatcctgcaaaagc

SEQ ID NO: 4114299 - DNA, 25 bp, Homo sapien
tgaaggtgtccagggaaaagctacc

SEQ ID NO: 4114300 - DNA, 25 bp, Homo sapien
aagctacctgaaagatttaaagcac

SEQ ID NO: 4114301 - DNA, 25 bp, Homo sapien
aacaagtggtagatgtagttggctg

SEQ ID NO: 4114302 - DNA, 25 bp, Homo sapien
ctctgtgaatttgtaaccgttcaca

SEQ ID NO: 4114303 - DNA, 25 bp, Homo sapien
cgggcatatacctcatcaaatttgg

SEQ ID NO: 4114304 - DNA, 25 bp, Homo sapien
ctgagaagcagtaagagcgggcata

SEQ ID NO: 4114305 - DNA, 25 bp, Homo sapien
agctggtattgaacaggctgactcc

SEQ ID NO: 4114306 - DNA, 25 bp, Homo sapien
caaagcttagagagtacatgctacc

SEQ ID NO: 4114307 - DNA, 25 bp, Homo sapien
taccaacagtccttatgtctccaga

SEQ ID NO: 4114308 - DNA, 25 bp, Homo sapien
tagatagtcagaggcctaatgcagg

SEQ ID NO: 4114309 - DNA, 25 bp, Homo sapien
aagacaggtggttctatgggcagac

SEQ ID NO: 4114310 - DNA, 25 bp, Homo sapien
tcagaatccactgcatggtcaaagg

SEQ ID NO: 4114311 - DNA, 25 bp, Homo sapien
tgagcatgtagccaagagaccaggc

SEQ ID NO: 4114312 - DNA, 25 bp, Homo sapien
cagacggatcagagggctttcagct

SEQ ID NO: 4114313 - DNA, 25 bp, Homo sapien
tataaagagcctgaccttcgtggcc

SEQ ID NO: 4114314 - DNA, 25 bp, Homo sapien
tagccaagggatgcctcaagaggtg

SEQ ID NO: 4114315 - DNA, 25 bp, Homo sapien
cagtatttgagaggcacgtgaccta

SEQ ID NO: 4114316 - DNA, 25 bp, Homo sapien
tctagtgaccagagccctaagtggg

SEQ ID NO: 4114317 - DNA, 25 bp, Homo sapien
gcgagaaggaagaagacccgcccaa

SEQ ID NO: 4114318 - DNA, 25 bp, Homo sapien
agaagacccgcccaaccctgcgcat

SEQ ID NO: 4114319 - DNA, 25 bp, Homo sapien
gttggcggcgttaggcgagaaggaa

SEQ ID NO: 4114320 - DNA, 25 bp, Homo sapien
ttaggcgagaaggaagaagacccgc

SEQ ID NO: 4114321 - DNA, 25 bp, Homo sapien
gaccctctgggagccgtttggcgcc

SEQ ID NO: 4114322 - DNA, 25 bp, Homo sapien
cggagcccgcaacagtaagactcac

SEQ ID NO: 4114323 - DNA, 25 bp, Homo sapien
cggaggtggaggtcgagcggcatgg

SEQ ID NO: 4114324 - DNA, 25 bp, Homo sapien
ggtcgagcggcatggtcgacggccc

SEQ ID NO: 4114325 - DNA, 25 bp, Homo sapien
aggacaaggctctcggaccacgagc

SEQ ID NO: 4114326 - DNA, 25 bp, Homo sapien
tcagtagcttaagcccggttcccaa

SEQ ID NO: 4114327 - DNA, 25 bp, Homo sapien
gcaaggcccacacggcaggacaagg

SEQ ID NO: 4114328 - DNA, 25 bp, Homo sapien
tggatggacgaaatcagcaaacgcc

SEQ ID NO: 4114329 - DNA, 25 bp, Homo sapien
cgaccaattttccggcatgaggtcc

SEQ ID NO: 4114330 - DNA, 25 bp, Homo sapien
caataacatctacaatcgcgaccaa

SEQ ID NO: 4114331 - DNA, 25 bp, Homo sapien
aacatctacaatcgcgaccaatttt

SEQ ID NO: 4114332 - DNA, 25 bp, Homo sapien
atctacaatcgcgaccaattttccg

SEQ ID NO: 4114333 - DNA, 25 bp, Homo sapien
gaacacaaacatcaagaacttcagt

SEQ ID NO: 4114334 - DNA, 25 bp, Homo sapien
acacaaacatcaagaacttcagtgc

SEQ ID NO: 4114335 - DNA, 25 bp, Homo sapien
agaacacaaacatcaagaacttcag

SEQ ID NO: 4114336 - DNA, 25 bp, Homo sapien
ctagaacacaaacatcaagaacttc

SEQ ID NO: 4114337 - DNA, 25 bp, Homo sapien
acttgagtgcaaggtccatcgacca

SEQ ID NO: 4114338 - DNA, 25 bp, Homo sapien
cctcacttgagtgcaaggtccatcg

SEQ ID NO: 4114339 - DNA, 25 bp, Homo sapien
cctgtctcctcacttgagtgcaagg

SEQ ID NO: 4114340 - DNA, 25 bp, Homo sapien
tcacttgagtgcaaggtccatcgac

SEQ ID NO: 4114341 - DNA, 25 bp, Homo sapien
gtgagctgcatgcacttgaaaggca

SEQ ID NO: 4114342 - DNA, 25 bp, Homo sapien
gatgaaatcagtgagctgcatgcac

SEQ ID NO: 4114343 - DNA, 25 bp, Homo sapien
tgcggaaacttgaggatgaaatcag

SEQ ID NO: 4114344 - DNA, 25 bp, Homo sapien
ctgtgcggaaacttgaggatgaaat

SEQ ID NO: 4114345 - DNA, 25 bp, Homo sapien
gctatcacgcgcaggcaagacattt

SEQ ID NO: 4114346 - DNA, 25 bp, Homo sapien
ggcaaagccctaaactaccaggata

SEQ ID NO: 4114347 - DNA, 25 bp, Homo sapien
cacacactgagagcttatctaatga

SEQ ID NO: 4114348 - DNA, 25 bp, Homo sapien
gttccactgcaaccatcattgtggg

SEQ ID NO: 4114349 - DNA, 25 bp, Homo sapien
tgtccagggatccaaggcagaatta

SEQ ID NO: 4114350 - DNA, 25 bp, Homo sapien
cacccctaattggtatgtcacagta

SEQ ID NO: 4114351 - DNA, 25 bp, Homo sapien
ggcagaattacaagagtacctagtg

SEQ ID NO: 4114352 - DNA, 25 bp, Homo sapien
ggctatgttcactcgaggttgttca

SEQ ID NO: 4114353 - DNA, 25 bp, Homo sapien
aaaaactacctcttgaccaggcgca

SEQ ID NO: 4114354 - DNA, 25 bp, Homo sapien
aaactacctcttgaccaggcgcagt

SEQ ID NO: 4114355 - DNA, 25 bp, Homo sapien
aaaactacctcttgaccaggcgcag

SEQ ID NO: 4114356 - DNA, 25 bp, Homo sapien
ttgtcggacatacttctggtgggca

SEQ ID NO: 4114357 - DNA, 25 bp, Homo sapien
caggcttgtcggacatacttctggt

SEQ ID NO: 4114358 - DNA, 25 bp, Homo sapien
ggcttgtcggacatacttctggtgg

SEQ ID NO: 4114359 - DNA, 25 bp, Homo sapien
caatcttcttggcccatcgtgtggc

SEQ ID NO: 4114360 - DNA, 25 bp, Homo sapien
ttatccctctcacactatcttgaac

SEQ ID NO: 4114361 - DNA, 25 bp, Homo sapien
tcacactatcttgaaccctccaaaa

SEQ ID NO: 4114362 - DNA, 25 bp, Homo sapien
aaattatccctctcacactatcttg

SEQ ID NO: 4114363 - DNA, 25 bp, Homo sapien
aataaaaattatccctctcacacta

SEQ ID NO: 4114364 - DNA, 25 bp, Homo sapien
gccttcataactttaaaacgatcaa

SEQ ID NO: 4114365 - DNA, 25 bp, Homo sapien
actttaaaacgatcaaaatctgtca

SEQ ID NO: 4114366 - DNA, 25 bp, Homo sapien
ttgccttcataactttaaaacgatc

SEQ ID NO: 4114367 - DNA, 25 bp, Homo sapien
cgatcaaaatctgtcatcttggctt

SEQ ID NO: 4114368 - DNA, 25 bp, Homo sapien
tagtaccaggtgcttttttgggaga

SEQ ID NO: 4114369 - DNA, 25 bp, Homo sapien
ggagaagctttcaggagagctgcct

SEQ ID NO: 4114370 - DNA, 25 bp, Homo sapien
gccttttgaagcttcttaacttcat

SEQ ID NO: 4114371 - DNA, 25 bp, Homo sapien
cttcattcttgattattctgttcct

SEQ ID NO: 4114372 - DNA, 25 bp, Homo sapien
gagcctttttactcgcggcggtgat

SEQ ID NO: 4114373 - DNA, 25 bp, Homo sapien
ctgggctggagcctttttactcgcg

SEQ ID NO: 4114374 - DNA, 25 bp, Homo sapien
ctcgcggcggtgatcttttttgctg

SEQ ID NO: 4114375 - DNA, 25 bp, Homo sapien
tactcgcggcggtgatcttttttgc

SEQ ID NO: 4114376 - DNA, 25 bp, Homo sapien
ctttattactttttatgattgccac

SEQ ID NO: 4114377 - DNA, 25 bp, Homo sapien
cctttattactttttatgattgcca

SEQ ID NO: 4114378 - DNA, 25 bp, Homo sapien
tcaacaggctttaaatccaaaggct

SEQ ID NO: 4114379 - DNA, 25 bp, Homo sapien
caacaggctttaaatccaaaggctt

SEQ ID NO: 4114380 - DNA, 25 bp, Homo sapien
taactccagcctcaacaggctttaa

SEQ ID NO: 4114381 - DNA, 25 bp, Homo sapien
ccagcctcaacaggctttaaatcca

SEQ ID NO: 4114382 - DNA, 25 bp, Homo sapien
ttattataatcctactatcaatctg

SEQ ID NO: 4114383 - DNA, 25 bp, Homo sapien
ttataatcctactatcaatctgcct

SEQ ID NO: 4114384 - DNA, 25 bp, Homo sapien
ataatcctactatcaatctgcctcc

SEQ ID NO: 4114385 - DNA, 25 bp, Homo sapien
tattataatcctactatcaatctgc

SEQ ID NO: 4114386 - DNA, 25 bp, Homo sapien
tgcagtccggcctgagcaacagaac

SEQ ID NO: 4114387 - DNA, 25 bp, Homo sapien
ctgcagtccggcctgagcaacagaa

SEQ ID NO: 4114388 - DNA, 25 bp, Homo sapien
cagtccggcctgagcaacagaacga

SEQ ID NO: 4114389 - DNA, 25 bp, Homo sapien
gtccggcctgagcaacagaacgaga

SEQ ID NO: 4114390 - DNA, 25 bp, Homo sapien
tacacgatctaaccactaacctact

SEQ ID NO: 4114391 - DNA, 25 bp, Homo sapien
acttccttgatgtggtcccgagcca

SEQ ID NO: 4114392 - DNA, 25 bp, Homo sapien
agtcctctacactatcagttcgttt

SEQ ID NO: 4114393 - DNA, 25 bp, Homo sapien
tcccgtgttcccctacacgatctaa

SEQ ID NO: 4114394 - DNA, 25 bp, Homo sapien
tgattgttgtcatcctacccctggg

SEQ ID NO: 4114395 - DNA, 25 bp, Homo sapien
tcacagctcttaccaagggaaccag

SEQ ID NO: 4114396 - DNA, 25 bp, Homo sapien
gaccttgccttgctaactccagaga

SEQ ID NO: 4114397 - DNA, 25 bp, Homo sapien
gaccttcctgaagattacgcccttg

SEQ ID NO: 4114398 - DNA, 25 bp, Homo sapien
cagctagctagaagaatgaggtaac

SEQ ID NO: 4114399 - DNA, 25 bp, Homo sapien
tccaaattttgcctataccgccagg

SEQ ID NO: 4114400 - DNA, 25 bp, Homo sapien
ccttgctttttagatgaggttccca

SEQ ID NO: 4114401 - DNA, 25 bp, Homo sapien
gatagatcctgtcctcactttcaca

SEQ ID NO: 4114402 - DNA, 25 bp, Homo sapien
cagaactcgggcatttagtgcacta

SEQ ID NO: 4114403 - DNA, 25 bp, Homo sapien
ggacattcacggaagcactgtttaa

SEQ ID NO: 4114404 - DNA, 25 bp, Homo sapien
tagaggctgactagataagatctcc

SEQ ID NO: 4114405 - DNA, 25 bp, Homo sapien
ctaaggattgttcagctagctggcg

SEQ ID NO: 4114406 - DNA, 25 bp, Homo sapien
cgcaaggtggccaagacggaagcat

SEQ ID NO: 4114407 - DNA, 25 bp, Homo sapien
ctccagaacaggtagccgagtcagg

SEQ ID NO: 4114408 - DNA, 25 bp, Homo sapien
gaaactcaacccgagcgctcgcaag

SEQ ID NO: 4114409 - DNA, 25 bp, Homo sapien
ccagaacaggtagccgagtcaggga

SEQ ID NO: 4114410 - DNA, 25 bp, Homo sapien
gtcgagggcgtctctgaagactggg

SEQ ID NO: 4114411 - DNA, 25 bp, Homo sapien
ggtcgagggcgtctctgaagactgg

SEQ ID NO: 4114412 - DNA, 25 bp, Homo sapien
aaggtcgagggcgtctctgaagact

SEQ ID NO: 4114413 - DNA, 25 bp, Homo sapien
aggaaggtcgagggcgtctctgaag

SEQ ID NO: 4114414 - DNA, 25 bp, Homo sapien
gggatctgaacgctccaccctggga

SEQ ID NO: 4114415 - DNA, 25 bp, Homo sapien
ggatctgaacgctccaccctgggaa

SEQ ID NO: 4114416 - DNA, 25 bp, Homo sapien
gagaccctatagtcacggctcccat

SEQ ID NO: 4114417 - DNA, 25 bp, Homo sapien
aagcaggagaccctatagtcacggc

SEQ ID NO: 4114418 - DNA, 25 bp, Homo sapien
ggtgacaagggtaagacgcttaatg

SEQ ID NO: 4114419 - DNA, 25 bp, Homo sapien
cttaatgtcccagcgggtgatgctg

SEQ ID NO: 4114420 - DNA, 25 bp, Homo sapien
taagacgcttaatgtcccagcgggt

SEQ ID NO: 4114421 - DNA, 25 bp, Homo sapien
aagggtaagacgcttaatgtcccag

SEQ ID NO: 4114422 - DNA, 25 bp, Homo sapien
ctggaaccacactgtctggagcatg

SEQ ID NO: 4114423 - DNA, 25 bp, Homo sapien
tcatgcactgccctctaggtttgaa

SEQ ID NO: 4114424 - DNA, 25 bp, Homo sapien
gcactgccctctaggtttgaaaaag

SEQ ID NO: 4114425 - DNA, 25 bp, Homo sapien
aaccacactgtctggagcatggctg

SEQ ID NO: 4114426 - DNA, 25 bp, Homo sapien
tactggctcctgaaacaacaggttc

SEQ ID NO: 4114427 - DNA, 25 bp, Homo sapien
atcctcaaaggttactggctcctga

SEQ ID NO: 4114428 - DNA, 25 bp, Homo sapien
tcaaaggttactggctcctgaaaca

SEQ ID NO: 4114429 - DNA, 25 bp, Homo sapien
gaaacaacaggttcctgcccaagcc

SEQ ID NO: 4114430 - DNA, 25 bp, Homo sapien
ctgcgtagggtgcaggctggcccat

SEQ ID NO: 4114431 - DNA, 25 bp, Homo sapien
ccagcatcacctccctgtatagggc

SEQ ID NO: 4114432 - DNA, 25 bp, Homo sapien
acaaggaagtcacatttgcataatt

SEQ ID NO: 4114433 - DNA, 25 bp, Homo sapien
gcatcacctccctgtatagggccct

SEQ ID NO: 4114434 - DNA, 25 bp, Homo sapien
caaggaagtcacatttgcataattc

SEQ ID NO: 4114435 - DNA, 25 bp, Homo sapien
tctgctaaggaggaatctaggagct

SEQ ID NO: 4114436 - DNA, 25 bp, Homo sapien
tcaattctgatggtattaaagagat

SEQ ID NO: 4114437 - DNA, 25 bp, Homo sapien
tcctagttctgctaaggaggaatct

SEQ ID NO: 4114438 - DNA, 25 bp, Homo sapien
aattctgatggtattaaagagatcc

SEQ ID NO: 4114439 - DNA, 25 bp, Homo sapien
gcagttgggtctccattaggaacca

SEQ ID NO: 4114440 - DNA, 25 bp, Homo sapien
ccctgcagttgggtctccattagga

SEQ ID NO: 4114441 - DNA, 25 bp, Homo sapien
tgcagttgggtctccattaggaacc

SEQ ID NO: 4114442 - DNA, 25 bp, Homo sapien
acataggcaatagggccaagatcag

SEQ ID NO: 4114443 - DNA, 25 bp, Homo sapien
tctccttgctccagctggaatatca

SEQ ID NO: 4114444 - DNA, 25 bp, Homo sapien
cagaggttgcggtgagtgaagatca

SEQ ID NO: 4114445 - DNA, 25 bp, Homo sapien
gaggttgcggtgagtgaagatcacg

SEQ ID NO: 4114446 - DNA, 25 bp, Homo sapien
ggttgcggtgagtgaagatcacgcc

SEQ ID NO: 4114447 - DNA, 25 bp, Homo sapien
gttgcggtgagtgaagatcacgcca

SEQ ID NO: 4114448 - DNA, 25 bp, Homo sapien
tgtagctgtgacttctctaacctgt

SEQ ID NO: 4114449 - DNA, 25 bp, Homo sapien
gatcctggactgtcaaatctgtgca

SEQ ID NO: 4114450 - DNA, 25 bp, Homo sapien
gcagtccctccactatcagtctgtg

SEQ ID NO: 4114451 - DNA, 25 bp, Homo sapien
tctcctccctttcagtggtggaaga

SEQ ID NO: 4114452 - DNA, 25 bp, Homo sapien
ctgaatgtgggttgtagtaactgcc

SEQ ID NO: 4114453 - DNA, 25 bp, Homo sapien
tgaatgtgggttgtagtaactgcca

SEQ ID NO: 4114454 - DNA, 25 bp, Homo sapien
gatgcagtcatagctacaactgaag

SEQ ID NO: 4114455 - DNA, 25 bp, Homo sapien
gccgtgacagttttgagttatatct

SEQ ID NO: 4114456 - DNA, 25 bp, Homo sapien
tctctgatgccgaatcagttttgaa

SEQ ID NO: 4114457 - DNA, 25 bp, Homo sapien
tctgatgccgtgacagttttgagtt

SEQ ID NO: 4114458 - DNA, 25 bp, Homo sapien
agaactgaattagaactcaaactct

SEQ ID NO: 4114459 - DNA, 25 bp, Homo sapien
tttgtagagttgttccccagtgtgg

SEQ ID NO: 4114460 - DNA, 25 bp, Homo sapien
gaagcgggagctacagctgaaagtt

SEQ ID NO: 4114461 - DNA, 25 bp, Homo sapien
ctgatgcactatgaagcgggagcta

SEQ ID NO: 4114462 - DNA, 25 bp, Homo sapien
tctgatgcactatgaagcgggagct

SEQ ID NO: 4114463 - DNA, 25 bp, Homo sapien
tggatgaaacttgcattccatctga

SEQ ID NO: 4114464 - DNA, 25 bp, Homo sapien
ctggatgaaacttgcattccatctg

SEQ ID NO: 4114465 - DNA, 25 bp, Homo sapien
gtttcttcctagtatgccacttctg

SEQ ID NO: 4114466 - DNA, 25 bp, Homo sapien
tcttcctagtatgccacttctgatg

SEQ ID NO: 4114467 - DNA, 25 bp, Homo sapien
cttcccaggaaaagcgagatcctga

SEQ ID NO: 4114468 - DNA, 25 bp, Homo sapien
gacaggtgaagggttggccttttca

SEQ ID NO: 4114469 - DNA, 25 bp, Homo sapien
ttacagggagtgagacaaaggattc

SEQ ID NO: 4114470 - DNA, 25 bp, Homo sapien
gaagtaccactgcatgtgaagaaga

SEQ ID NO: 4114471 - DNA, 25 bp, Homo sapien
tacaagacaagaccagaggaatatc

SEQ ID NO: 4114472 - DNA, 25 bp, Homo sapien
caatagacacaatcaggagaccagt

SEQ ID NO: 4114473 - DNA, 25 bp, Homo sapien
acagtaacaacttatacaagacaag

SEQ ID NO: 4114474 - DNA, 25 bp, Homo sapien
gaatccctaacttgaggtgcaaagg

SEQ ID NO: 4114475 - DNA, 25 bp, Homo sapien
tgattatgttctcccataggctttg

SEQ ID NO: 4114476 - DNA, 25 bp, Homo sapien
tacattctttcagtgagccttgccc

SEQ ID NO: 4114477 - DNA, 25 bp, Homo sapien
gccctccttaactcctgaaagcagg

SEQ ID NO: 4114478 - DNA, 25 bp, Homo sapien
tatccccttccaataaagctcaaag

SEQ ID NO: 4114479 - DNA, 25 bp, Homo sapien
tgagaaactacagcaagtcatggtc

SEQ ID NO: 4114480 - DNA, 25 bp, Homo sapien
gttccatccatgtacagctttagag

SEQ ID NO: 4114481 - DNA, 25 bp, Homo sapien
tcagagcagcaaacctacttatggc

SEQ ID NO: 4114482 - DNA, 25 bp, Homo sapien
ccagtgtgatgccaacaagttccat

SEQ ID NO: 4114483 - DNA, 25 bp, Homo sapien
gaagaaagtggacattccttacgca

SEQ ID NO: 4114484 - DNA, 25 bp, Homo sapien
gtggacattccttacgcaaatcttg

SEQ ID NO: 4114485 - DNA, 25 bp, Homo sapien
gaaagtggacattccttacgcaaat

SEQ ID NO: 4114486 - DNA, 25 bp, Homo sapien
ggacattccttacgcaaatcttgaa

SEQ ID NO: 4114487 - DNA, 25 bp, Homo sapien
gaatctaaccatctccagtctgtgc

SEQ ID NO: 4114488 - DNA, 25 bp, Homo sapien
tatgaagcttatacagagggacaga

SEQ ID NO: 4114489 - DNA, 25 bp, Homo sapien
ggacaagacctatagcgcacacatg

SEQ ID NO: 4114490 - DNA, 25 bp, Homo sapien
taattagatggccagatgaagacca

SEQ ID NO: 4114491 - DNA, 25 bp, Homo sapien
aggtcttttgagcaggcatcaggct

SEQ ID NO: 4114492 - DNA, 25 bp, Homo sapien
tgtacaaggtcttttgagcaggcat

SEQ ID NO: 4114493 - DNA, 25 bp, Homo sapien
ggctggcccattgtttgtaggtgaa

SEQ ID NO: 4114494 - DNA, 25 bp, Homo sapien
gcccattgtttgtaggtgaaataga

SEQ ID NO: 4114495 - DNA, 25 bp, Homo sapien
cctagagagggcgtcatctggagaa

SEQ ID NO: 4114496 - DNA, 25 bp, Homo sapien
gagaagcaacagaactgtatctccc

SEQ ID NO: 4114497 - DNA, 25 bp, Homo sapien
tctggagaagcaacagaactgtatc

SEQ ID NO: 4114498 - DNA, 25 bp, Homo sapien
gaagctaagtacaaaggctaagtcc

SEQ ID NO: 4114499 - DNA, 25 bp, Homo sapien
ggtagtatcccacccacatggtagg

SEQ ID NO: 4114500 - DNA, 25 bp, Homo sapien
gacagagggctcaattagggcatca

SEQ ID NO: 4114501 - DNA, 25 bp, Homo sapien
gaaggagcgtaacacatctggccct

SEQ ID NO: 4114502 - DNA, 25 bp, Homo sapien
caaagcagagcctctactagggaac

SEQ ID NO: 4114503 - DNA, 25 bp, Homo sapien
gatatctggaactcttttcagccca

SEQ ID NO: 4114504 - DNA, 25 bp, Homo sapien
tggaacaccccggagaacaagtgag

SEQ ID NO: 4114505 - DNA, 25 bp, Homo sapien
tcttctgcctttagcaagtggagga

SEQ ID NO: 4114506 - DNA, 25 bp, Homo sapien
caagtgaggcgggatctcagggaaa

SEQ ID NO: 4114507 - DNA, 25 bp, Homo sapien
tctacgataaaaaacacctgcacac

SEQ ID NO: 4114508 - DNA, 25 bp, Homo sapien
gctccagcagagatatcagaacttg

SEQ ID NO: 4114509 - DNA, 25 bp, Homo sapien
gaggaacacctctgagtcttaagat

SEQ ID NO: 4114510 - DNA, 25 bp, Homo sapien
agaacagacacctctcagggcctct

SEQ ID NO: 4114511 - DNA, 25 bp, Homo sapien
catggcgtaccgtttctccctatgt

SEQ ID NO: 4114512 - DNA, 25 bp, Homo sapien
taaaagcttgtccattccctacatg

SEQ ID NO: 4114513 - DNA, 25 bp, Homo sapien
aattgtatgatatcttcccagggta

SEQ ID NO: 4114514 - DNA, 25 bp, Homo sapien
aagttctgacctatatttaaaggct

SEQ ID NO: 4114515 - DNA, 25 bp, Homo sapien
ctgagacaacacgggcccgagcggg

SEQ ID NO: 4114516 - DNA, 25 bp, Homo sapien
ccgccgtcagcgccagtgtccctac

SEQ ID NO: 4114517 - DNA, 25 bp, Homo sapien
gccgtcagcgccagtgtccctactg

SEQ ID NO: 4114518 - DNA, 25 bp, Homo sapien
cccgccgtcagcgccagtgtcccta

SEQ ID NO: 4114519 - DNA, 25 bp, Homo sapien
cgccgtcagcgccagtgtccctact

SEQ ID NO: 4114520 - DNA, 25 bp, Homo sapien
agcttgagaccctccgccggaagtg

SEQ ID NO: 4114521 - DNA, 25 bp, Homo sapien
gaagtgcgttttccatgcccctcct

SEQ ID NO: 4114522 - DNA, 25 bp, Homo sapien
gccgacaccggggaaagcttgagac

SEQ ID NO: 4114523 - DNA, 25 bp, Homo sapien
cgccggaagtgcgttttccatgccc

SEQ ID NO: 4114524 - DNA, 25 bp, Homo sapien
agctcggaccgcgaatcccgcgcgg

SEQ ID NO: 4114525 - DNA, 25 bp, Homo sapien
ggcgcagataaagcgtggaaattcc

SEQ ID NO: 4114526 - DNA, 25 bp, Homo sapien
tcttcagctcggaccgcgaatcccg

SEQ ID NO: 4114527 - DNA, 25 bp, Homo sapien
cggcgcaggcgcagataaagcgtgg

SEQ ID NO: 4114528 - DNA, 25 bp, Homo sapien
tgcctcagggttcggagaagtgaaa

SEQ ID NO: 4114529 - DNA, 25 bp, Homo sapien
cagcttcacacactgcctcagggtt

SEQ ID NO: 4114530 - DNA, 25 bp, Homo sapien
catggctggcgtcccagcttcacac

SEQ ID NO: 4114531 - DNA, 25 bp, Homo sapien
cacacactgcctcagggttcggaga

SEQ ID NO: 4114532 - DNA, 25 bp, Homo sapien
aaaaatcatgtaattcaccacatta

SEQ ID NO: 4114533 - DNA, 25 bp, Homo sapien
tgaaagaaaaatcatgtaattcacc

SEQ ID NO: 4114534 - DNA, 25 bp, Homo sapien
tgggggaatcacgaggtcaagggat

SEQ ID NO: 4114535 - DNA, 25 bp, Homo sapien
tcaccacattaacaaagagaggctg

SEQ ID NO: 4114536 - DNA, 25 bp, Homo sapien
ccagggaagccacatttgcataatt

SEQ ID NO: 4114537 - DNA, 25 bp, Homo sapien
tccaggctggcccattcattctggg

SEQ ID NO: 4114538 - DNA, 25 bp, Homo sapien
cccattcattctgggtgaagtacac

SEQ ID NO: 4114539 - DNA, 25 bp, Homo sapien
ccctctgcacagagtccaggctggc

SEQ ID NO: 4114540 - DNA, 25 bp, Homo sapien
taaagaagccaggatgcttaaaggg

SEQ ID NO: 4114541 - DNA, 25 bp, Homo sapien
gaataaagaagccaggatgcttaaa

SEQ ID NO: 4114542 - DNA, 25 bp, Homo sapien
aagccaggatgcttaaagggcagag

SEQ ID NO: 4114543 - DNA, 25 bp, Homo sapien
aagaagccaggatgcttaaagggca

SEQ ID NO: 4114544 - DNA, 25 bp, Homo sapien
accagaacaggcgtggtgaatggga

SEQ ID NO: 4114545 - DNA, 25 bp, Homo sapien
taggttcccagggatcgaggcccca

SEQ ID NO: 4114546 - DNA, 25 bp, Homo sapien
tgggagaccagaacaggcgtggtga

SEQ ID NO: 4114547 - DNA, 25 bp, Homo sapien
ggatcgaggccccatggcagttccc

SEQ ID NO: 4114548 - DNA, 25 bp, Homo sapien
tggacagatacctctgagagcctcc

SEQ ID NO: 4114549 - DNA, 25 bp, Homo sapien
ctggacagatacctctgagagcctc

SEQ ID NO: 4114550 - DNA, 25 bp, Homo sapien
gacacatgatcctttggagttaatc

SEQ ID NO: 4114551 - DNA, 25 bp, Homo sapien
tgatcctttggagttaatccttcct

SEQ ID NO: 4114552 - DNA, 25 bp, Homo sapien
tgaaggactctgtttctttggacac

SEQ ID NO: 4114553 - DNA, 25 bp, Homo sapien
cagtctgaaggactctgtttctttg

SEQ ID NO: 4114554 - DNA, 25 bp, Homo sapien
tatccaatgaccttgtggctgctct

SEQ ID NO: 4114555 - DNA, 25 bp, Homo sapien
ttctcatgtcggtggaagtctgcca

SEQ ID NO: 4114556 - DNA, 25 bp, Homo sapien
gcctggctgaggtatctgtgaaatg

SEQ ID NO: 4114557 - DNA, 25 bp, Homo sapien
tcttgacctcataggcctcatggtg

SEQ ID NO: 4114558 - DNA, 25 bp, Homo sapien
ttctgatgcagaatgaatcttccac

SEQ ID NO: 4114559 - DNA, 25 bp, Homo sapien
aggtgtcttctgagtgtgtagtttc

SEQ ID NO: 4114560 - DNA, 25 bp, Homo sapien
ctatgcttggacaggtgtcttctga

SEQ ID NO: 4114561 - DNA, 25 bp, Homo sapien
agtttctgatgcagaatgaatcttc

SEQ ID NO: 4114562 - DNA, 25 bp, Homo sapien
ccatgagaagtctgaaggcatacac

SEQ ID NO: 4114563 - DNA, 25 bp, Homo sapien
accaggaaggacagcgaggacactg

SEQ ID NO: 4114564 - DNA, 25 bp, Homo sapien
aaagccaagtgtctaaccaggaagg

SEQ ID NO: 4114565 - DNA, 25 bp, Homo sapien
cacagtgggcctaactatggatagc

SEQ ID NO: 4114566 - DNA, 25 bp, Homo sapien
taggagacttctgacgtacggactg

SEQ ID NO: 4114567 - DNA, 25 bp, Homo sapien
ctggaagtttgcaccctactaggaa

SEQ ID NO: 4114568 - DNA, 25 bp, Homo sapien
tttaagacaaatggtgccttgcacc

SEQ ID NO: 4114569 - DNA, 25 bp, Homo sapien
gatgcatttggctccacatggacag

SEQ ID NO: 4114570 - DNA, 25 bp, Homo sapien
tacaaataatgcatttaatccccaa

SEQ ID NO: 4114571 - DNA, 25 bp, Homo sapien
taatccccaacacaaacctatgagg

SEQ ID NO: 4114572 - DNA, 25 bp, Homo sapien
ggtagattaactgtcatcctcattt

SEQ ID NO: 4114573 - DNA, 25 bp, Homo sapien
cagataaggaaactagtgcagtttt

SEQ ID NO: 4114574 - DNA, 25 bp, Homo sapien
caaaccagtggttgcctgtgaaggg

SEQ ID NO: 4114575 - DNA, 25 bp, Homo sapien
tgaactgtgataattgtttcactag

SEQ ID NO: 4114576 - DNA, 25 bp, Homo sapien
aaaggaaaattaatccaagtgacag

SEQ ID NO: 4114577 - DNA, 25 bp, Homo sapien
ggctgattattatcttgaactgtga

SEQ ID NO: 4114578 - DNA, 25 bp, Homo sapien
taatggccaaaacacctcgacaaag

SEQ ID NO: 4114579 - DNA, 25 bp, Homo sapien
aaggcagtgccttaatggcatcaag

SEQ ID NO: 4114580 - DNA, 25 bp, Homo sapien
tcacaacaatggtacaaaggcaatt

SEQ ID NO: 4114581 - DNA, 25 bp, Homo sapien
aatggtgttacaggccaggcaatag

SEQ ID NO: 4114582 - DNA, 25 bp, Homo sapien
ctttatggtctgttctgttagttgg

SEQ ID NO: 4114583 - DNA, 25 bp, Homo sapien
tttatggtctgttctgttagttgga

SEQ ID NO: 4114584 - DNA, 25 bp, Homo sapien
tcggtcgccccgtggccagacccgc

SEQ ID NO: 4114585 - DNA, 25 bp, Homo sapien
ctcggtcgccccgtggccagacccg

SEQ ID NO: 4114586 - DNA, 25 bp, Homo sapien
gccgagccggaagggcgagtgcacg

SEQ ID NO: 4114587 - DNA, 25 bp, Homo sapien
aaggccgagccggaagggcgagtgc

SEQ ID NO: 4114588 - DNA, 25 bp, Homo sapien
aagggcgagtgcacgcccagggtcc

SEQ ID NO: 4114589 - DNA, 25 bp, Homo sapien
agccggaagggcgagtgcacgccca

SEQ ID NO: 4114590 - DNA, 25 bp, Homo sapien
agaacgccgaggagctggtcactaa

SEQ ID NO: 4114591 - DNA, 25 bp, Homo sapien
cagaacgccgaggagctggtcacta

SEQ ID NO: 4114592 - DNA, 25 bp, Homo sapien
gcagaacgccgaggagctggtcact

SEQ ID NO: 4114593 - DNA, 25 bp, Homo sapien
tgcagaacgccgaggagctggtcac

SEQ ID NO: 4114594 - DNA, 25 bp, Homo sapien
cgtagaactcgctgaaacccacgct

SEQ ID NO: 4114595 - DNA, 25 bp, Homo sapien
gcacgtagaactcgctgaaacccac

SEQ ID NO: 4114596 - DNA, 25 bp, Homo sapien
ggcacgtagaactcgctgaaaccca

SEQ ID NO: 4114597 - DNA, 25 bp, Homo sapien
ctggcacgtagaactcgctgaaacc

SEQ ID NO: 4114598 - DNA, 25 bp, Homo sapien
ttgacggcttcggcgaggcccagat

SEQ ID NO: 4114599 - DNA, 25 bp, Homo sapien
cgggccgccattgggaccaagttca

SEQ ID NO: 4114600 - DNA, 25 bp, Homo sapien
gtagtgggggctgacgagccgccag

SEQ ID NO: 4114601 - DNA, 25 bp, Homo sapien
cccagatgcccacggtccgggtgaa

SEQ ID NO: 4114602 - DNA, 25 bp, Homo sapien
gtggcaaagggctggacacgggctc

SEQ ID NO: 4114603 - DNA, 25 bp, Homo sapien
aaagggctggacacgggctctagaa

SEQ ID NO: 4114604 - DNA, 25 bp, Homo sapien
cgggctctagaagcccgagcagcca

SEQ ID NO: 4114605 - DNA, 25 bp, Homo sapien
tggacacgggctctagaagcccgag

SEQ ID NO: 4114606 - DNA, 25 bp, Homo sapien
aggctgtcagggcaagttctttagg

SEQ ID NO: 4114607 - DNA, 25 bp, Homo sapien
agccagaggctgtcagggcaagttc

SEQ ID NO: 4114608 - DNA, 25 bp, Homo sapien
cagggcaagttctttagggcagaaa

SEQ ID NO: 4114609 - DNA, 25 bp, Homo sapien
tgtcagggcaagttctttagggcag

SEQ ID NO: 4114610 - DNA, 25 bp, Homo sapien
gggtttggacaagcaagatcctcaa

SEQ ID NO: 4114611 - DNA, 25 bp, Homo sapien
gaaacaacaggttcctgctcaatct

SEQ ID NO: 4114612 - DNA, 25 bp, Homo sapien
ctgaaacaacaggttcctgctcaat

SEQ ID NO: 4114613 - DNA, 25 bp, Homo sapien
tgaaacaacaggttcctgctcaatc

SEQ ID NO: 4114614 - DNA, 25 bp, Homo sapien
tctgcgcagggtcgaggctggccca

SEQ ID NO: 4114615 - DNA, 25 bp, Homo sapien
cctctgcgcagggtcgaggctggcc

SEQ ID NO: 4114616 - DNA, 25 bp, Homo sapien
ccctctgcgcagggtcgaggctggc

SEQ ID NO: 4114617 - DNA, 25 bp, Homo sapien
tgcgcagggtcgaggctggcccatt

SEQ ID NO: 4114618 - DNA, 25 bp, Homo sapien
ttacaaagggccacagagggaggcc

SEQ ID NO: 4114619 - DNA, 25 bp, Homo sapien
tacaaagggccacagagggaggcct

SEQ ID NO: 4114620 - DNA, 25 bp, Homo sapien
acaaagggccacagagggaggcctt

SEQ ID NO: 4114621 - DNA, 25 bp, Homo sapien
caaagggccacagagggaggcctta

SEQ ID NO: 4114622 - DNA, 25 bp, Homo sapien
catcaaacccaagggctactagaat

SEQ ID NO: 4114623 - DNA, 25 bp, Homo sapien
ctggaggctgctgattgcaaaactc

SEQ ID NO: 4114624 - DNA, 25 bp, Homo sapien
agggctactagaatccccaaaacat

SEQ ID NO: 4114625 - DNA, 25 bp, Homo sapien
tggaggctgctgattgcaaaactct

SEQ ID NO: 4114626 - DNA, 25 bp, Homo sapien
gcaggtttggggaatggaaacgcta

SEQ ID NO: 4114627 - DNA, 25 bp, Homo sapien
ggtgcttcccctctctccaggtggg

SEQ ID NO: 4114628 - DNA, 25 bp, Homo sapien
agcaggtttggggaatggaaacgct

SEQ ID NO: 4114629 - DNA, 25 bp, Homo sapien
tctccaggtgggagatcagagcagg

SEQ ID NO: 4114630 - DNA, 25 bp, Homo sapien
gatgcctctcagaatctcggtgtcc

SEQ ID NO: 4114631 - DNA, 25 bp, Homo sapien
ctctcagaatctcggtgtcccaggg

SEQ ID NO: 4114632 - DNA, 25 bp, Homo sapien
gcctctcagaatctcggtgtcccag

SEQ ID NO: 4114633 - DNA, 25 bp, Homo sapien
actgatgcctctcagaatctcggtg

SEQ ID NO: 4114634 - DNA, 25 bp, Homo sapien
tctgccttggaggatagccacatga

SEQ ID NO: 4114635 - DNA, 25 bp, Homo sapien
taccctgcagcataagaaacacttc

SEQ ID NO: 4114636 - DNA, 25 bp, Homo sapien
gaaaccccacttctttgcaatgaaa

SEQ ID NO: 4114637 - DNA, 25 bp, Homo sapien
tactcccagaggtggtctttcaaag

SEQ ID NO: 4114638 - DNA, 25 bp, Homo sapien
tcctgctttataactagcccttcat

SEQ ID NO: 4114639 - DNA, 25 bp, Homo sapien
cctgctttataactagcccttcatt

SEQ ID NO: 4114640 - DNA, 25 bp, Homo sapien
gaaacgttcctgagaagtcctccta

SEQ ID NO: 4114641 - DNA, 25 bp, Homo sapien
cgttcctgagaagtcctcctactgg

SEQ ID NO: 4114642 - DNA, 25 bp, Homo sapien
tgagaaacgttcctgagaagtcctc

SEQ ID NO: 4114643 - DNA, 25 bp, Homo sapien
tcctgagaagtcctcctactggcat

SEQ ID NO: 4114644 - DNA, 25 bp, Homo sapien
agattgaaagtctgcttcagtgcct

SEQ ID NO: 4114645 - DNA, 25 bp, Homo sapien
tagattgaaagtctgcttcagtgcc

SEQ ID NO: 4114646 - DNA, 25 bp, Homo sapien
taagctttgagttatatcggaagat

SEQ ID NO: 4114647 - DNA, 25 bp, Homo sapien
gactcatctgatgccgaataagctt

SEQ ID NO: 4114648 - DNA, 25 bp, Homo sapien
tctgatgctgcaggtatgccgcact

SEQ ID NO: 4114649 - DNA, 25 bp, Homo sapien
tgacctacaaccgaaagctttccaa

SEQ ID NO: 4114650 - DNA, 25 bp, Homo sapien
caaaacttccataccatttgaaggc

SEQ ID NO: 4114651 - DNA, 25 bp, Homo sapien
ttccataccatttgaaggctttccc

SEQ ID NO: 4114652 - DNA, 25 bp, Homo sapien
acttccataccatttgaaggctttc

SEQ ID NO: 4114653 - DNA, 25 bp, Homo sapien
ctgaacaaaacttccataccatttg

SEQ ID NO: 4114654 - DNA, 25 bp, Homo sapien
agggatggcccaaggaccttgactg

SEQ ID NO: 4114655 - DNA, 25 bp, Homo sapien
gatggcccaaggaccttgactggct

SEQ ID NO: 4114656 - DNA, 25 bp, Homo sapien
ggcccaaggaccttgactggcttct

SEQ ID NO: 4114657 - DNA, 25 bp, Homo sapien
ggatggcccaaggaccttgactggc

SEQ ID NO: 4114658 - DNA, 25 bp, Homo sapien
atccctggagaagaacaggaggtat

SEQ ID NO: 4114659 - DNA, 25 bp, Homo sapien
ggctgaagcagaacaggatccctgg

SEQ ID NO: 4114660 - DNA, 25 bp, Homo sapien
caggatccctggagaagaacaggag

SEQ ID NO: 4114661 - DNA, 25 bp, Homo sapien
caggaggtatggctggagaggagca

SEQ ID NO: 4114662 - DNA, 25 bp, Homo sapien
ggcagatgaagaaggtattccagat

SEQ ID NO: 4114663 - DNA, 25 bp, Homo sapien
gaccctggaagacacgcactatttg

SEQ ID NO: 4114664 - DNA, 25 bp, Homo sapien
gaaggtttcacagtgggagtaagac

SEQ ID NO: 4114665 - DNA, 25 bp, Homo sapien
catgtggaaaggtcagtgaaggcac

SEQ ID NO: 4114666 - DNA, 25 bp, Homo sapien
aactcaaattaggttggaggctggg

SEQ ID NO: 4114667 - DNA, 25 bp, Homo sapien
taacacatgtaaggtgatgaaaaaa

SEQ ID NO: 4114668 - DNA, 25 bp, Homo sapien
gaaactcaaattaggttggaggctg

SEQ ID NO: 4114669 - DNA, 25 bp, Homo sapien
cagctattcgagagtctgaaggagg

SEQ ID NO: 4114670 - DNA, 25 bp, Homo sapien
aagagattatgtaaacacggtcttt

SEQ ID NO: 4114671 - DNA, 25 bp, Homo sapien
gagattatgtaaacacggtctttaa

SEQ ID NO: 4114672 - DNA, 25 bp, Homo sapien
agagattatgtaaacacggtcttta

SEQ ID NO: 4114673 - DNA, 25 bp, Homo sapien
attatgtaaacacggtctttaaatg

SEQ ID NO: 4114674 - DNA, 25 bp, Homo sapien
caccaaagtgttctaccaccagcaa

SEQ ID NO: 4114675 - DNA, 25 bp, Homo sapien
tggcctaatacagggatatcctctt

SEQ ID NO: 4114676 - DNA, 25 bp, Homo sapien
ccaggctgcttatctctaatcataa

SEQ ID NO: 4114677 - DNA, 25 bp, Homo sapien
cagcaaccccacgatgcagatacag

SEQ ID NO: 4114678 - DNA, 25 bp, Homo sapien
tattaataccccacctagccatggg

SEQ ID NO: 4114679 - DNA, 25 bp, Homo sapien
taccagtagccacaggtcttgtatg

SEQ ID NO: 4114680 - DNA, 25 bp, Homo sapien
tagccatgggcccactaaacaatct

SEQ ID NO: 4114681 - DNA, 25 bp, Homo sapien
ttctcaaagatctgtgccaagggca

SEQ ID NO: 4114682 - DNA, 25 bp, Homo sapien
gatcctcatcaaggccacttccaag

SEQ ID NO: 4114683 - DNA, 25 bp, Homo sapien
gaaacatctagatagcaacatcagc

SEQ ID NO: 4114684 - DNA, 25 bp, Homo sapien
cagattcccctcgagttggctttac

SEQ ID NO: 4114685 - DNA, 25 bp, Homo sapien
tatagaagccagtgctcacaaagaa

SEQ ID NO: 4114686 - DNA, 25 bp, Homo sapien
tgcctatgtggcatcccagcttagc

SEQ ID NO: 4114687 - DNA, 25 bp, Homo sapien
tactgctgatcactgacacggaatg

SEQ ID NO: 4114688 - DNA, 25 bp, Homo sapien
gaatgtgaaacgaccttcctggtgg

SEQ ID NO: 4114689 - DNA, 25 bp, Homo sapien
gaagaatcagatacggcaaggtgaa

SEQ ID NO: 4114690 - DNA, 25 bp, Homo sapien
ggagggtgctggacgattggcaggc

SEQ ID NO: 4114691 - DNA, 25 bp, Homo sapien
ttacaacaagaaataggtggcaaag

SEQ ID NO: 4114692 - DNA, 25 bp, Homo sapien
caaaggtggagggtgctggacgatt

SEQ ID NO: 4114693 - DNA, 25 bp, Homo sapien
acaacaagaaataggtggcaaaggt

SEQ ID NO: 4114694 - DNA, 25 bp, Homo sapien
cagctgttgacattagccttcctca

SEQ ID NO: 4114695 - DNA, 25 bp, Homo sapien
tcttagatggatgcagtctgtggca

SEQ ID NO: 4114696 - DNA, 25 bp, Homo sapien
cagaagcagtctagcttttggccta

SEQ ID NO: 4114697 - DNA, 25 bp, Homo sapien
cacaacttgactgtttggcagaagc

SEQ ID NO: 4114698 - DNA, 25 bp, Homo sapien
tctcgaactccctggctaaagggat

SEQ ID NO: 4114699 - DNA, 25 bp, Homo sapien
tcagtaataatgctgtttcactttt

SEQ ID NO: 4114700 - DNA, 25 bp, Homo sapien
cgaactccctggctaaagggatcct

SEQ ID NO: 4114701 - DNA, 25 bp, Homo sapien
ttttttggtttcattctgtcacaca

SEQ ID NO: 4114702 - DNA, 25 bp, Homo sapien
gtcctttgatgcttttaagccaggg

SEQ ID NO: 4114703 - DNA, 25 bp, Homo sapien
aaaagaaggctgtttggaatacact

SEQ ID NO: 4114704 - DNA, 25 bp, Homo sapien
tcctaatatttagtaggtctcaaca

SEQ ID NO: 4114705 - DNA, 25 bp, Homo sapien
tgatgcttttaagccagggattaac

SEQ ID NO: 4114706 - DNA, 25 bp, Homo sapien
gacccatggagtaatggatcctgca

SEQ ID NO: 4114707 - DNA, 25 bp, Homo sapien
tgtacagaacaaccactatggcagc

SEQ ID NO: 4114708 - DNA, 25 bp, Homo sapien
gatcatccatcagggttgaggtcaa

SEQ ID NO: 4114709 - DNA, 25 bp, Homo sapien
gaccagacacattatcaacgagcag

SEQ ID NO: 4114710 - DNA, 25 bp, Homo sapien
gttatgtttaatctatattatagtc

SEQ ID NO: 4114711 - DNA, 25 bp, Homo sapien
tgcaatagcattatatctgacaatg

SEQ ID NO: 4114712 - DNA, 25 bp, Homo sapien
tattatagtctattaagtttgcaat

SEQ ID NO: 4114713 - DNA, 25 bp, Homo sapien
taagtttgcaatagcattatatctg

SEQ ID NO: 4114714 - DNA, 25 bp, Homo sapien
gttatgtaacttctggacaaccatg

SEQ ID NO: 4114715 - DNA, 25 bp, Homo sapien
tactgataaacttcatagcaatgtt

SEQ ID NO: 4114716 - DNA, 25 bp, Homo sapien
caggtttgcttccagacaactgtaa

SEQ ID NO: 4114717 - DNA, 25 bp, Homo sapien
ttagattaagacaagttatgtaact

SEQ ID NO: 4114718 - DNA, 25 bp, Homo sapien
taaggtgtagtgtgatccgggctcc

SEQ ID NO: 4114719 - DNA, 25 bp, Homo sapien
cattgctgtgccctagctggtcagg

SEQ ID NO: 4114720 - DNA, 25 bp, Homo sapien
ggaatgctgaacgaaacccagacag

SEQ ID NO: 4114721 - DNA, 25 bp, Homo sapien
cagacgtgacaataccgaaaggcca

SEQ ID NO: 4114722 - DNA, 25 bp, Homo sapien
gggattcctgaagctaagactatca

SEQ ID NO: 4114723 - DNA, 25 bp, Homo sapien
ccagggacctgtgaatacacgcaaa

SEQ ID NO: 4114724 - DNA, 25 bp, Homo sapien
tgattggttctcagggtcattcacc

SEQ ID NO: 4114725 - DNA, 25 bp, Homo sapien
tagttggctgggctcaagaggcttt

SEQ ID NO: 4114726 - DNA, 25 bp, Homo sapien
gaggtcgtaggtggacatttctcat

SEQ ID NO: 4114727 - DNA, 25 bp, Homo sapien
cctgaggtcgtaggtggacatttct

SEQ ID NO: 4114728 - DNA, 25 bp, Homo sapien
atttctcatggagcaaaaagcagga

SEQ ID NO: 4114729 - DNA, 25 bp, Homo sapien
catttctcatggagcaaaaagcagg

SEQ ID NO: 4114730 - DNA, 25 bp, Homo sapien
gggcagtgtcaatcttcagccgctg

SEQ ID NO: 4114731 - DNA, 25 bp, Homo sapien
cagtgtcaatcttcagccgctgagc

SEQ ID NO: 4114732 - DNA, 25 bp, Homo sapien
tgtcaatcttcagccgctgagccaa

SEQ ID NO: 4114733 - DNA, 25 bp, Homo sapien
ggcagtgtcaatcttcagccgctga

SEQ ID NO: 4114734 - DNA, 25 bp, Homo sapien
tgggctcagcggcctgacattcctg

SEQ ID NO: 4114735 - DNA, 25 bp, Homo sapien
cttgggctcagcggcctgacattcc

SEQ ID NO: 4114736 - DNA, 25 bp, Homo sapien
gctcagcggcctgacattcctgtct

SEQ ID NO: 4114737 - DNA, 25 bp, Homo sapien
ggctcagcggcctgacattcctgtc

SEQ ID NO: 4114738 - DNA, 25 bp, Homo sapien
ccttaaatatgaaactgctcttgca

SEQ ID NO: 4114739 - DNA, 25 bp, Homo sapien
ggtgacattaagttgcagcttgaat

SEQ ID NO: 4114740 - DNA, 25 bp, Homo sapien
gagaaatccgacagtagacttcatc

SEQ ID NO: 4114741 - DNA, 25 bp, Homo sapien
ctctataattatgggagcagtttct

SEQ ID NO: 4114742 - DNA, 25 bp, Homo sapien
aaagtcagaagacctctcagttggt

SEQ ID NO: 4114743 - DNA, 25 bp, Homo sapien
gcaaagtcagaagacctctcagttg

SEQ ID NO: 4114744 - DNA, 25 bp, Homo sapien
cagcaaagtcagaagacctctcagt

SEQ ID NO: 4114745 - DNA, 25 bp, Homo sapien
agtcagaagacctctcagttggttc

SEQ ID NO: 4114746 - DNA, 25 bp, Homo sapien
gagatattacgtaccttaaggcagg

SEQ ID NO: 4114747 - DNA, 25 bp, Homo sapien
ggtaacctgggaatgagaccaatct

SEQ ID NO: 4114748 - DNA, 25 bp, Homo sapien
tgcaggcatattcatggtaacctgg

SEQ ID NO: 4114749 - DNA, 25 bp, Homo sapien
gtttcttaacatgcgtagttcaggg

SEQ ID NO: 4114750 - DNA, 25 bp, Homo sapien
caaaatgttgttgcggacgtggagc

SEQ ID NO: 4114751 - DNA, 25 bp, Homo sapien
tcctcattagtcatcaagtaaatgc

SEQ ID NO: 4114752 - DNA, 25 bp, Homo sapien
tacactgctggaaggagtataaaaa

SEQ ID NO: 4114753 - DNA, 25 bp, Homo sapien
aaatatacacccatgtgaacaagag

SEQ ID NO: 4114754 - DNA, 25 bp, Homo sapien
cttctcagtaagtctggcatggtca

SEQ ID NO: 4114755 - DNA, 25 bp, Homo sapien
ctcacagtacacaataacagattcc

SEQ ID NO: 4114756 - DNA, 25 bp, Homo sapien
cagaaccaccactagtaataaagtt

SEQ ID NO: 4114757 - DNA, 25 bp, Homo sapien
cacagcttaagcatatgaactgcca

SEQ ID NO: 4114758 - DNA, 25 bp, Homo sapien
gaacaactgatcagcaagtcacctg

SEQ ID NO: 4114759 - DNA, 25 bp, Homo sapien
gattgagaagctacaactgggatct

SEQ ID NO: 4114760 - DNA, 25 bp, Homo sapien
gaatgggaaggacaacagaatctct

SEQ ID NO: 4114761 - DNA, 25 bp, Homo sapien
tctctagggccacaagaacctgtgc

SEQ ID NO: 4114762 - DNA, 25 bp, Homo sapien
gattgtccacttgagctctttcaga

SEQ ID NO: 4114763 - DNA, 25 bp, Homo sapien
ccttagattgtccacttgagctctt

SEQ ID NO: 4114764 - DNA, 25 bp, Homo sapien
tagattgtccacttgagctctttca

SEQ ID NO: 4114765 - DNA, 25 bp, Homo sapien
tgaccttagattgtccacttgagct

SEQ ID NO: 4114766 - DNA, 25 bp, Homo sapien
cagtaagttcccaatgttcccactt

SEQ ID NO: 4114767 - DNA, 25 bp, Homo sapien
tcccactttccaagtacaaccatag

SEQ ID NO: 4114768 - DNA, 25 bp, Homo sapien
cgaggagtcctccagtaagttccca

SEQ ID NO: 4114769 - DNA, 25 bp, Homo sapien
ctccaggtttgagtacgaggagtcc

SEQ ID NO: 4114770 - DNA, 25 bp, Homo sapien
tctgttctgctacagtaacgcgaag

SEQ ID NO: 4114771 - DNA, 25 bp, Homo sapien
taacgcgaaggaccaagtggcaact

SEQ ID NO: 4114772 - DNA, 25 bp, Homo sapien
cattcggctcctcaacactgactgg

SEQ ID NO: 4114773 - DNA, 25 bp, Homo sapien
cactctcttctagctgatgtagcag

SEQ ID NO: 4114774 - DNA, 25 bp, Homo sapien
gtacttccactggtagtaggagcct

SEQ ID NO: 4114775 - DNA, 25 bp, Homo sapien
tgttgagtacttccactggtagtag

SEQ ID NO: 4114776 - DNA, 25 bp, Homo sapien
gctctgttgagtacttccactggta

SEQ ID NO: 4114777 - DNA, 25 bp, Homo sapien
ctgagctctgttgagtacttccact

SEQ ID NO: 4114778 - DNA, 25 bp, Homo sapien
ccaagatgggatttgctggtgttcc

SEQ ID NO: 4114779 - DNA, 25 bp, Homo sapien
ggagcacatggtgaaccttccccag

SEQ ID NO: 4114780 - DNA, 25 bp, Homo sapien
gagtgggtttatgaccgggagtgac

SEQ ID NO: 4114781 - DNA, 25 bp, Homo sapien
tgaccgggagtgacaagtgtgagtg

SEQ ID NO: 4114782 - DNA, 25 bp, Homo sapien
gtggagtggacaagagacctcaccc

SEQ ID NO: 4114783 - DNA, 25 bp, Homo sapien
caaatgagaaactgtctggaagtct

SEQ ID NO: 4114784 - DNA, 25 bp, Homo sapien
atgggagcaacagttcccatgacag

SEQ ID NO: 4114785 - DNA, 25 bp, Homo sapien
cagagagtcattgacactggtggag

SEQ ID NO: 4114786 - DNA, 25 bp, Homo sapien
aggactccaaaagttccacctcaga

SEQ ID NO: 4114787 - DNA, 25 bp, Homo sapien
ataaagctggatacagtttggcttg

SEQ ID NO: 4114788 - DNA, 25 bp, Homo sapien
ctggatacagtttggcttggaaaga

SEQ ID NO: 4114789 - DNA, 25 bp, Homo sapien
tgtcctgcctgaaataccatgattg

SEQ ID NO: 4114790 - DNA, 25 bp, Homo sapien
gatacagtttggcttggaaagaaaa

SEQ ID NO: 4114791 - DNA, 25 bp, Homo sapien
gctgcaccctctgagtccatgggaa

SEQ ID NO: 4114792 - DNA, 25 bp, Homo sapien
gaacaggagtataatggttcccttg

SEQ ID NO: 4114793 - DNA, 25 bp, Homo sapien
ctggtgtgaagcagtccatggctgt

SEQ ID NO: 4114794 - DNA, 25 bp, Homo sapien
tataatggttcccttgctgggtcat

SEQ ID NO: 4114795 - DNA, 25 bp, Homo sapien
cattcttcctgaatcaggtaacctc

SEQ ID NO: 4114796 - DNA, 25 bp, Homo sapien
cttcaaactcatgtttaattgccca

SEQ ID NO: 4114797 - DNA, 25 bp, Homo sapien
tcatgtttaattgcccattcttcct

SEQ ID NO: 4114798 - DNA, 25 bp, Homo sapien
ggtaacctccccatggttgtgagga

SEQ ID NO: 4114799 - DNA, 25 bp, Homo sapien
gtttaaatcagtaacaggcaactgg

SEQ ID NO: 4114800 - DNA, 25 bp, Homo sapien
cttgttctagttcttgtgccaagtc

SEQ ID NO: 4114801 - DNA, 25 bp, Homo sapien
cagtaacaggcaactggcagcaaaa

SEQ ID NO: 4114802 - DNA, 25 bp, Homo sapien
tagttcttgtgccaagtccccatac

SEQ ID NO: 4114803 - DNA, 25 bp, Homo sapien
tagggttttctcctaccatctgtgt

SEQ ID NO: 4114804 - DNA, 25 bp, Homo sapien
cagtgggcaatcctccacccaggaa

SEQ ID NO: 4114805 - DNA, 25 bp, Homo sapien
gaccctaccaccttcaatgtcctag

SEQ ID NO: 4114806 - DNA, 25 bp, Homo sapien
tcctgaaatccagacacttcttttt

SEQ ID NO: 4114807 - DNA, 25 bp, Homo sapien
tccactgctctgctatcactctaga

SEQ ID NO: 4114808 - DNA, 25 bp, Homo sapien
cctcttcagggtagagtctgtagag

SEQ ID NO: 4114809 - DNA, 25 bp, Homo sapien
gtagagtctgtagagcacactctgg

SEQ ID NO: 4114810 - DNA, 25 bp, Homo sapien
accctctgctgaagtggatgaccct

SEQ ID NO: 4114811 - DNA, 25 bp, Homo sapien
gagtccctctagctgtcttggtaca

SEQ ID NO: 4114812 - DNA, 25 bp, Homo sapien
gaacagagtccctctagctgtcttg

SEQ ID NO: 4114813 - DNA, 25 bp, Homo sapien
tcaaggaaacaccaacagccttgtc

SEQ ID NO: 4114814 - DNA, 25 bp, Homo sapien
gccttgtcagtgtgcacaggatcct

SEQ ID NO: 4114815 - DNA, 25 bp, Homo sapien
tgggtaggtcgtcactgccggaaaa

SEQ ID NO: 4114816 - DNA, 25 bp, Homo sapien
tgtgggtaggtcgtcactgccggaa

SEQ ID NO: 4114817 - DNA, 25 bp, Homo sapien
ctcgtgtgggtaggtcgtcactgcc

SEQ ID NO: 4114818 - DNA, 25 bp, Homo sapien
cgtgtgggtaggtcgtcactgccgg

SEQ ID NO: 4114819 - DNA, 25 bp, Homo sapien
atggctaaagaccgtggtgatttta

SEQ ID NO: 4114820 - DNA, 25 bp, Homo sapien
gaaggagatcctttgcgagaggcat

SEQ ID NO: 4114821 - DNA, 25 bp, Homo sapien
tttgtgcatggctaaagaccgtggt

SEQ ID NO: 4114822 - DNA, 25 bp, Homo sapien
gatgaaggagatcctttgcgagagg

SEQ ID NO: 4114823 - DNA, 25 bp, Homo sapien
agaggacagtggagcagccaacaca

SEQ ID NO: 4114824 - DNA, 25 bp, Homo sapien
agtgctgcttcctcctgaaggaaca

SEQ ID NO: 4114825 - DNA, 25 bp, Homo sapien
catccttctgtaagccttgcttttc

SEQ ID NO: 4114826 - DNA, 25 bp, Homo sapien
tcctcctgaaggaacatccttctgt

SEQ ID NO: 4114827 - DNA, 25 bp, Homo sapien
ttcccactcatcttgactcagagtg

SEQ ID NO: 4114828 - DNA, 25 bp, Homo sapien
ccactcatcttgactcagagtgctt

SEQ ID NO: 4114829 - DNA, 25 bp, Homo sapien
cccactcatcttgactcagagtgct

SEQ ID NO: 4114830 - DNA, 25 bp, Homo sapien
tcccactcatcttgactcagagtgc

SEQ ID NO: 4114831 - DNA, 25 bp, Homo sapien
caaggttggtagaatcgtctgtact

SEQ ID NO: 4114832 - DNA, 25 bp, Homo sapien
gggcagctgggcgtttgtgtcaagg

SEQ ID NO: 4114833 - DNA, 25 bp, Homo sapien
tagaatcgtctgtactttatagcaa

SEQ ID NO: 4114834 - DNA, 25 bp, Homo sapien
cgtttgtgtcaaggttggtagaatc

SEQ ID NO: 4114835 - DNA, 25 bp, Homo sapien
aactcaacctgttctgcaaggcttt

SEQ ID NO: 4114836 - DNA, 25 bp, Homo sapien
caaactcaacctgttctgcaaggct

SEQ ID NO: 4114837 - DNA, 25 bp, Homo sapien
aagtcattgatagagaagagatgat

SEQ ID NO: 4114838 - DNA, 25 bp, Homo sapien
gttgccagaagtatcacccaagtca

SEQ ID NO: 4114839 - DNA, 25 bp, Homo sapien
aaactcgatgtcaagtgagtgacca

SEQ ID NO: 4114840 - DNA, 25 bp, Homo sapien
ctttgaaactcgatgtcaagtgagt

SEQ ID NO: 4114841 - DNA, 25 bp, Homo sapien
tttgaaactcgatgtcaagtgagtg

SEQ ID NO: 4114842 - DNA, 25 bp, Homo sapien
tgaaactcgatgtcaagtgagtgac

SEQ ID NO: 4114843 - DNA, 25 bp, Homo sapien
caggtggagacccttctttattatc

SEQ ID NO: 4114844 - DNA, 25 bp, Homo sapien
tgcttctgaaagctcaggtggagac

SEQ ID NO: 4114845 - DNA, 25 bp, Homo sapien
tcctcaaccccacatttactgctaa

SEQ ID NO: 4114846 - DNA, 25 bp, Homo sapien
aaccccacatttactgctaagctgc

SEQ ID NO: 4114847 - DNA, 25 bp, Homo sapien
tcttggctttgatagcaatgaccat

SEQ ID NO: 4114848 - DNA, 25 bp, Homo sapien
caatgaccattgacctaacaccagg

SEQ ID NO: 4114849 - DNA, 25 bp, Homo sapien
aggtcaccacatgtacactccaggg

SEQ ID NO: 4114850 - DNA, 25 bp, Homo sapien
gggtgcctgttgcattccttatctg

SEQ ID NO: 4114851 - DNA, 25 bp, Homo sapien
cgacagagactgtggttacctggcc

SEQ ID NO: 4114852 - DNA, 25 bp, Homo sapien
gaccttcagatgcactggccagtaa

SEQ ID NO: 4114853 - DNA, 25 bp, Homo sapien
ccacagggcgatgaaagcacttcag

SEQ ID NO: 4114854 - DNA, 25 bp, Homo sapien
gccagtgaagacagcgactgcccat

SEQ ID NO: 4114855 - DNA, 25 bp, Homo sapien
gaagaggcagccagcataccatgta

SEQ ID NO: 4114856 - DNA, 25 bp, Homo sapien
tcaggctattacagacatggcacca

SEQ ID NO: 4114857 - DNA, 25 bp, Homo sapien
cataccatgtagcaagacagagaga

SEQ ID NO: 4114858 - DNA, 25 bp, Homo sapien
ccttctcaatagtttcccaaagact

SEQ ID NO: 4114859 - DNA, 25 bp, Homo sapien
cctggatccaggtcttctcccaaat

SEQ ID NO: 4114860 - DNA, 25 bp, Homo sapien
tggatccaggtcttctcccaaattc

SEQ ID NO: 4114861 - DNA, 25 bp, Homo sapien
ggggcaggtgggcactgtattccat

SEQ ID NO: 4114862 - DNA, 25 bp, Homo sapien
ccaaattcctctccacaaggggcag

SEQ ID NO: 4114863 - DNA, 25 bp, Homo sapien
cacttgagcaatgagcataagcagc

SEQ ID NO: 4114864 - DNA, 25 bp, Homo sapien
agtgattagtttttgcagcctccag

SEQ ID NO: 4114865 - DNA, 25 bp, Homo sapien
ttccgtctttgactagagaggcacc

SEQ ID NO: 4114866 - DNA, 25 bp, Homo sapien
gaggcacctatgtgggtctgtcaaa

SEQ ID NO: 4114867 - DNA, 25 bp, Homo sapien
tttgaaggtcacagcgtgtcccaga

SEQ ID NO: 4114868 - DNA, 25 bp, Homo sapien
tataaaactttgaaggtcacagcgt

SEQ ID NO: 4114869 - DNA, 25 bp, Homo sapien
cagcgtgtcccagatttagatattc

SEQ ID NO: 4114870 - DNA, 25 bp, Homo sapien
gatttagatattctcagggtgatca

SEQ ID NO: 4114871 - DNA, 25 bp, Homo sapien
tgtggagctgaccacatgagaatgt

SEQ ID NO: 4114872 - DNA, 25 bp, Homo sapien
cttgagctgtccttccagaatgatt

SEQ ID NO: 4114873 - DNA, 25 bp, Homo sapien
ggagctgaccacatgagaatgtgct

SEQ ID NO: 4114874 - DNA, 25 bp, Homo sapien
gagctgtccttccagaatgattcac

SEQ ID NO: 4114875 - DNA, 25 bp, Homo sapien
tgctgcgcggagagctcctcaaagg

SEQ ID NO: 4114876 - DNA, 25 bp, Homo sapien
gcagataggattgttccagcttctc

SEQ ID NO: 4114877 - DNA, 25 bp, Homo sapien
cccgtggctgcccataggattgttg

SEQ ID NO: 4114878 - DNA, 25 bp, Homo sapien
ggttttatcctgcagataggattgt

SEQ ID NO: 4114879 - DNA, 25 bp, Homo sapien
tagttagtgtctgggattcacagtc

SEQ ID NO: 4114880 - DNA, 25 bp, Homo sapien
tcagcaaccatcaatgtttcatgtg

SEQ ID NO: 4114881 - DNA, 25 bp, Homo sapien
caccatcatcagcaaccatcaatgt

SEQ ID NO: 4114882 - DNA, 25 bp, Homo sapien
tggtggttacacctctcggaattgg

SEQ ID NO: 4114883 - DNA, 25 bp, Homo sapien
tcatgagattaatagtgactttcca

SEQ ID NO: 4114884 - DNA, 25 bp, Homo sapien
taatcccaattttgctatatctctg

SEQ ID NO: 4114885 - DNA, 25 bp, Homo sapien
gttacatataatagcgaacattgaa

SEQ ID NO: 4114886 - DNA, 25 bp, Homo sapien
cattgaaaataacctgtatgtccaa

SEQ ID NO: 4114887 - DNA, 25 bp, Homo sapien
tccttgtgagccattgctgtccctc

SEQ ID NO: 4114888 - DNA, 25 bp, Homo sapien
tcaactttatttaactggcctgaat

SEQ ID NO: 4114889 - DNA, 25 bp, Homo sapien
tgtcataaatttggattagccgtag

SEQ ID NO: 4114890 - DNA, 25 bp, Homo sapien
tcagcaaaccagtcacttcaacttt

SEQ ID NO: 4114891 - DNA, 25 bp, Homo sapien
ctgactacagtctggctgtgttttt

SEQ ID NO: 4114892 - DNA, 25 bp, Homo sapien
tggctctctacccttggaagaacca

SEQ ID NO: 4114893 - DNA, 25 bp, Homo sapien
cagcactcgccccacttagtagaga

SEQ ID NO: 4114894 - DNA, 25 bp, Homo sapien
tatgtgatccgtgtcaggccactgt

SEQ ID NO: 4114895 - DNA, 25 bp, Homo sapien
gggaatggacttaccccatgtcagt

SEQ ID NO: 4114896 - DNA, 25 bp, Homo sapien
gcatatgtcgtgtcaaagttcggtc

SEQ ID NO: 4114897 - DNA, 25 bp, Homo sapien
gatgacccttgctctgagcatatgt

SEQ ID NO: 4114898 - DNA, 25 bp, Homo sapien
catagtcaagccagctacaagggat

SEQ ID NO: 4114899 - DNA, 25 bp, Homo sapien
tccatgacttccatagtcaagccag

SEQ ID NO: 4114900 - DNA, 25 bp, Homo sapien
tcgttgggaattaaggtctcttgct

SEQ ID NO: 4114901 - DNA, 25 bp, Homo sapien
ctggttgactcggaacaatcggaac

SEQ ID NO: 4114902 - DNA, 25 bp, Homo sapien
tgtaagccatcctgtcgttgggaat

SEQ ID NO: 4114903 - DNA, 25 bp, Homo sapien
acgttataccctttgaatctagtca

SEQ ID NO: 4114904 - DNA, 25 bp, Homo sapien
ggctaaatttctttgcttatcttca

SEQ ID NO: 4114905 - DNA, 25 bp, Homo sapien
tgcttatcttcagcagagatggttg

SEQ ID NO: 4114906 - DNA, 25 bp, Homo sapien
agatggttggcaaccaagattccca

SEQ ID NO: 4114907 - DNA, 25 bp, Homo sapien
tcagcagagatggttggcaaccaag

SEQ ID NO: 4114908 - DNA, 25 bp, Homo sapien
tagttgctgaggatgttatgagtgt

SEQ ID NO: 4114909 - DNA, 25 bp, Homo sapien
tggccttgagtggaaactgcttggt

SEQ ID NO: 4114910 - DNA, 25 bp, Homo sapien
cagatgatcagccatgcagaggaca

SEQ ID NO: 4114911 - DNA, 25 bp, Homo sapien
ccttgagtggaaactgcttggtagt

SEQ ID NO: 4114912 - DNA, 25 bp, Homo sapien
tctgcagttgaacagtgtctctggg

SEQ ID NO: 4114913 - DNA, 25 bp, Homo sapien
tatattcacaatacagaaccatcag

SEQ ID NO: 4114914 - DNA, 25 bp, Homo sapien
cgtggtggacagttgctgactgtca

SEQ ID NO: 4114915 - DNA, 25 bp, Homo sapien
gaaccatcagtctgtacagagccca

SEQ ID NO: 4114916 - DNA, 25 bp, Homo sapien
cagggtcccggacagagttttctgt

SEQ ID NO: 4114917 - DNA, 25 bp, Homo sapien
ccagggtcccggacagagttttctg

SEQ ID NO: 4114918 - DNA, 25 bp, Homo sapien
agggtcccggacagagttttctgtg

SEQ ID NO: 4114919 - DNA, 25 bp, Homo sapien
cctcccattgacagtaattgaactt

SEQ ID NO: 4114920 - DNA, 25 bp, Homo sapien
cagtaattgaacttccatatgcaga

SEQ ID NO: 4114921 - DNA, 25 bp, Homo sapien
ttccccgggcatgcagagccatgaa

SEQ ID NO: 4114922 - DNA, 25 bp, Homo sapien
ccgggcatgcagagccatgaaaaca

SEQ ID NO: 4114923 - DNA, 25 bp, Homo sapien
catgaaaacagcagtaagcttctcc

SEQ ID NO: 4114924 - DNA, 25 bp, Homo sapien
tgtggccttcctctttccccgggca

SEQ ID NO: 4114925 - DNA, 25 bp, Homo sapien
ctctgagttgtatctcttctgcatg

SEQ ID NO: 4114926 - DNA, 25 bp, Homo sapien
taatggtacaatggtggtgctgccc

SEQ ID NO: 4114927 - DNA, 25 bp, Homo sapien
tacagtggtctggtcattgaggctc

SEQ ID NO: 4114928 - DNA, 25 bp, Homo sapien
tgaggctccctaccagaggacagaa

SEQ ID NO: 4114929 - DNA, 25 bp, Homo sapien
gctgccccaagtaacctggataggt

SEQ ID NO: 4114930 - DNA, 25 bp, Homo sapien
tcccagctgccaggtaatttgatct

SEQ ID NO: 4114931 - DNA, 25 bp, Homo sapien
ggtaatttgatctggatctgtctta

SEQ ID NO: 4114932 - DNA, 25 bp, Homo sapien
tgccaggtaatttgatctggatctg

SEQ ID NO: 4114933 - DNA, 25 bp, Homo sapien
cagctgccaggtaatttgatctgga

SEQ ID NO: 4114934 - DNA, 25 bp, Homo sapien
tgaatgtccctctggttctagcaat

SEQ ID NO: 4114935 - DNA, 25 bp, Homo sapien
catgaagtctaggtcacacatattg

SEQ ID NO: 4114936 - DNA, 25 bp, Homo sapien
cacatattgtcttgttgcctcccag

SEQ ID NO: 4114937 - DNA, 25 bp, Homo sapien
taggtcttccactattgaatgtccc

SEQ ID NO: 4114938 - DNA, 25 bp, Homo sapien
ggtttgcactgttgaactaactctc

SEQ ID NO: 4114939 - DNA, 25 bp, Homo sapien
tcaaagatgcttaagggtttgcact

SEQ ID NO: 4114940 - DNA, 25 bp, Homo sapien
tgcttaagggtttgcactgttgaac

SEQ ID NO: 4114941 - DNA, 25 bp, Homo sapien
gctggtccaagtggtcaaagatgct

SEQ ID NO: 4114942 - DNA, 25 bp, Homo sapien
cagcattcggaagcacctaactgtg

SEQ ID NO: 4114943 - DNA, 25 bp, Homo sapien
taactgtggccaaagttgccagacc

SEQ ID NO: 4114944 - DNA, 25 bp, Homo sapien
ggctgctgacccttgtgtctccctg

SEQ ID NO: 4114945 - DNA, 25 bp, Homo sapien
accctctaagggctgctgacccttg

SEQ ID NO: 4114946 - DNA, 25 bp, Homo sapien
ctgccagtgttagccccttaagaac

SEQ ID NO: 4114947 - DNA, 25 bp, Homo sapien
agccccttaagaacctccacagaga

SEQ ID NO: 4114948 - DNA, 25 bp, Homo sapien
ttcttcttgcactgccagtgttagc

SEQ ID NO: 4114949 - DNA, 25 bp, Homo sapien
tcattcttcttgcactgccagtgtt

SEQ ID NO: 4114950 - DNA, 25 bp, Homo sapien
ggactgggctgatttgctttcatga

SEQ ID NO: 4114951 - DNA, 25 bp, Homo sapien
aggactgggctgatttgctttcatg

SEQ ID NO: 4114952 - DNA, 25 bp, Homo sapien
catctaaggagtctctatgggttcc

SEQ ID NO: 4114953 - DNA, 25 bp, Homo sapien
aaccagcatctaaggagtctctatg

SEQ ID NO: 4114954 - DNA, 25 bp, Homo sapien
cattattcctttgtataagtgccat

SEQ ID NO: 4114955 - DNA, 25 bp, Homo sapien
tataagtgccattcatctggctggc

SEQ ID NO: 4114956 - DNA, 25 bp, Homo sapien
tgccgtcaaaaattgcagtgtgagt

SEQ ID NO: 4114957 - DNA, 25 bp, Homo sapien
gccactgtcaaattggaatctttcc

SEQ ID NO: 4114958 - DNA, 25 bp, Homo sapien
tcctagagtgagaaatgccgtcaaa

SEQ ID NO: 4114959 - DNA, 25 bp, Homo sapien
tagctgcattggcaggaatttctca

SEQ ID NO: 4114960 - DNA, 25 bp, Homo sapien
ggtaccctccagtgtacttatccag

SEQ ID NO: 4114961 - DNA, 25 bp, Homo sapien
taacttgggtacatcacagccctcg

SEQ ID NO: 4114962 - DNA, 25 bp, Homo sapien
taagctatgtatacttggcatgaaa

SEQ ID NO: 4114963 - DNA, 25 bp, Homo sapien
aacagtcagtatccataacttgggt

SEQ ID NO: 4114964 - DNA, 25 bp, Homo sapien
cctgtctatgtggaaggcctgctgt

SEQ ID NO: 4114965 - DNA, 25 bp, Homo sapien
tgtctatgtggaaggcctgctgtgt

SEQ ID NO: 4114966 - DNA, 25 bp, Homo sapien
ctcagctctgtgctaggcataggac

SEQ ID NO: 4114967 - DNA, 25 bp, Homo sapien
gctgtgtgctcagctctgtgctagg

SEQ ID NO: 4114968 - DNA, 25 bp, Homo sapien
ttctgtaagacaagtggggaagcca

SEQ ID NO: 4114969 - DNA, 25 bp, Homo sapien
ttttctgtaagacaagtggggaagc

SEQ ID NO: 4114970 - DNA, 25 bp, Homo sapien
aagtggggaagccatatctatttac

SEQ ID NO: 4114971 - DNA, 25 bp, Homo sapien
tcagttttctgtaagacaagtgggg

SEQ ID NO: 4114972 - DNA, 25 bp, Homo sapien
cagcacttgaaactatcctgtgggc

SEQ ID NO: 4114973 - DNA, 25 bp, Homo sapien
ggtaccctggtagattgagccacag

SEQ ID NO: 4114974 - DNA, 25 bp, Homo sapien
gaagtatgggtagctaatgtcgcca

SEQ ID NO: 4114975 - DNA, 25 bp, Homo sapien
gaattggaggatatataccccagct

SEQ ID NO: 4114976 - DNA, 25 bp, Homo sapien
gttctgtggcccaggactgcggcga

SEQ ID NO: 4114977 - DNA, 25 bp, Homo sapien
acatacaagcccctaattctggagg

SEQ ID NO: 4114978 - DNA, 25 bp, Homo sapien
caggactgcggcgagctggtgcaaa

SEQ ID NO: 4114979 - DNA, 25 bp, Homo sapien
caagcccctaattctggagggcctt

SEQ ID NO: 4114980 - DNA, 25 bp, Homo sapien
cattgtgtgatggttggatagttag

SEQ ID NO: 4114981 - DNA, 25 bp, Homo sapien
gatagttaggtcctgatggagtacc

SEQ ID NO: 4114982 - DNA, 25 bp, Homo sapien
tattgcaatacatggcataatcact

SEQ ID NO: 4114983 - DNA, 25 bp, Homo sapien
cctgatggagtacctaatattgcaa

SEQ ID NO: 4114984 - DNA, 25 bp, Homo sapien
gatgattttccctccatagtctaaa

SEQ ID NO: 4114985 - DNA, 25 bp, Homo sapien
gcatctgtcgtttctgtgcagagcc

SEQ ID NO: 4114986 - DNA, 25 bp, Homo sapien
ccaagtcctgatgcatgaccatggg

SEQ ID NO: 4114987 - DNA, 25 bp, Homo sapien
cccttttcaccctcatgatgatttt

SEQ ID NO: 4114988 - DNA, 25 bp, Homo sapien
gcatttgaaagagccccataagact

SEQ ID NO: 4114989 - DNA, 25 bp, Homo sapien
cccagcatttgaaagagccccataa

SEQ ID NO: 4114990 - DNA, 25 bp, Homo sapien
tccccagcatttgaaagagccccat

SEQ ID NO: 4114991 - DNA, 25 bp, Homo sapien
ggcctccccagcatttgaaagagcc

SEQ ID NO: 4114992 - DNA, 25 bp, Homo sapien
tttctacccatactggctctctctg

SEQ ID NO: 4114993 - DNA, 25 bp, Homo sapien
gcacctgtttctacccatactggct

SEQ ID NO: 4114994 - DNA, 25 bp, Homo sapien
ggaaagcacctgtttctacccatac

SEQ ID NO: 4114995 - DNA, 25 bp, Homo sapien
gaagacaggagagctatcctggaaa

SEQ ID NO: 4114996 - DNA, 25 bp, Homo sapien
ggtcagaatgagggcaggaaataga

SEQ ID NO: 4114997 - DNA, 25 bp, Homo sapien
gtcagaatgagggcaggaaatagac

SEQ ID NO: 4114998 - DNA, 25 bp, Homo sapien
agtgtggagccataggatgactgca

SEQ ID NO: 4114999 - DNA, 25 bp, Homo sapien
gctggaactagtttgattgggtttc

SEQ ID NO: 4115000 - DNA, 25 bp, Homo sapien
gagccctgagggccaaattctgtct

SEQ ID NO: 4115001 - DNA, 25 bp, Homo sapien
ttctgtctccaagtcagggaggagg

SEQ ID NO: 4115002 - DNA, 25 bp, Homo sapien
tggagagggaaagtgctattcataa

SEQ ID NO: 4115003 - DNA, 25 bp, Homo sapien
ctggagagggaaagtgctattcata

SEQ ID NO: 4115004 - DNA, 25 bp, Homo sapien
tcatcgtatgccaccatgatgcttc

SEQ ID NO: 4115005 - DNA, 25 bp, Homo sapien
catcgtatgccaccatgatgcttcc

SEQ ID NO: 4115006 - DNA, 25 bp, Homo sapien
caagatgtcaccacactagaacagt

SEQ ID NO: 4115007 - DNA, 25 bp, Homo sapien
catcaaggcccagaatctttacagc

SEQ ID NO: 4115008 - DNA, 25 bp, Homo sapien
tcttccgatgcaagggccattcttt

SEQ ID NO: 4115009 - DNA, 25 bp, Homo sapien
gacatcaaggcccagaatctttaca

SEQ ID NO: 4115010 - DNA, 25 bp, Homo sapien
ttcacttgtagcctcaaaatgaatt

SEQ ID NO: 4115011 - DNA, 25 bp, Homo sapien
tgtaattgacaccaaagtgttggtg

SEQ ID NO: 4115012 - DNA, 25 bp, Homo sapien
attctgtaattgacaccaaagtgtt

SEQ ID NO: 4115013 - DNA, 25 bp, Homo sapien
cttgtagcctcaaaatgaattctgt

SEQ ID NO: 4115014 - DNA, 25 bp, Homo sapien
gccatgattggcagtaccccttgaa

SEQ ID NO: 4115015 - DNA, 25 bp, Homo sapien
tctttcagtcgaagtaagtgctgac

SEQ ID NO: 4115016 - DNA, 25 bp, Homo sapien
gcatgtgttttctcgtgtgccatga

SEQ ID NO: 4115017 - DNA, 25 bp, Homo sapien
tgctgactggcactatgaattgcat

SEQ ID NO: 4115018 - DNA, 25 bp, Homo sapien
gctgttgatgcgttgtttgaatggc

SEQ ID NO: 4115019 - DNA, 25 bp, Homo sapien
ttagcacttttgctgttgatgcgtt

SEQ ID NO: 4115020 - DNA, 25 bp, Homo sapien
tgaatggcagttgtgctggtgagtt

SEQ ID NO: 4115021 - DNA, 25 bp, Homo sapien
aggagttcaagcaatacaaactgct

SEQ ID NO: 4115022 - DNA, 25 bp, Homo sapien
ccttgcttgttctgtaaagagaccc

SEQ ID NO: 4115023 - DNA, 25 bp, Homo sapien
ccaggaatccgaagtccagactgct

SEQ ID NO: 4115024 - DNA, 25 bp, Homo sapien
gatctcttagtggaaagtatagagg

SEQ ID NO: 4115025 - DNA, 25 bp, Homo sapien
tagtggaaagtatagaggcattttg

SEQ ID NO: 4115026 - DNA, 25 bp, Homo sapien
catttcagacattccccaaggacca

SEQ ID NO: 4115027 - DNA, 25 bp, Homo sapien
tgaaacaaggcgctaacacaaacat

SEQ ID NO: 4115028 - DNA, 25 bp, Homo sapien
gaggaacatgccagcaaagctcatg

SEQ ID NO: 4115029 - DNA, 25 bp, Homo sapien
cattccccaaggaccagaagagagg

SEQ ID NO: 4115030 - DNA, 25 bp, Homo sapien
taggtggaagaatcagaggactcaa

SEQ ID NO: 4115031 - DNA, 25 bp, Homo sapien
tgtaggtggaagaatcagaggactc

SEQ ID NO: 4115032 - DNA, 25 bp, Homo sapien
cttgtaggtggaagaatcagaggac

SEQ ID NO: 4115033 - DNA, 25 bp, Homo sapien
cttgatcttgtaggtggaagaatca

SEQ ID NO: 4115034 - DNA, 25 bp, Homo sapien
gaggactttatctggatcttaggag

SEQ ID NO: 4115035 - DNA, 25 bp, Homo sapien
actttatctggatcttaggagacaa

SEQ ID NO: 4115036 - DNA, 25 bp, Homo sapien
gactttatctggatcttaggagaca

SEQ ID NO: 4115037 - DNA, 25 bp, Homo sapien
ggactttatctggatcttaggagac

SEQ ID NO: 4115038 - DNA, 25 bp, Homo sapien
gggcgttcctcatcacctcatggtc

SEQ ID NO: 4115039 - DNA, 25 bp, Homo sapien
gttgttatcaaaagcgtccctgatg

SEQ ID NO: 4115040 - DNA, 25 bp, Homo sapien
acctcatggtcacaggccttgtaga

SEQ ID NO: 4115041 - DNA, 25 bp, Homo sapien
gccttgtagagccacctcactcttt

SEQ ID NO: 4115042 - DNA, 25 bp, Homo sapien
ctagttagtaaatgcagctctttga

SEQ ID NO: 4115043 - DNA, 25 bp, Homo sapien
gcagctctttgataaactcccacat

SEQ ID NO: 4115044 - DNA, 25 bp, Homo sapien
tgcagctctttgataaactcccaca

SEQ ID NO: 4115045 - DNA, 25 bp, Homo sapien
aaatgcagctctttgataaactccc

SEQ ID NO: 4115046 - DNA, 25 bp, Homo sapien
gcccctgtcttctctaacatgactg

SEQ ID NO: 4115047 - DNA, 25 bp, Homo sapien
taacatgactgtctgtacctccaca

SEQ ID NO: 4115048 - DNA, 25 bp, Homo sapien
gactgtctgtacctccacattggcc

SEQ ID NO: 4115049 - DNA, 25 bp, Homo sapien
tgtcttctctaacatgactgtctgt

SEQ ID NO: 4115050 - DNA, 25 bp, Homo sapien
ccaccccttttcatctttgaattca

SEQ ID NO: 4115051 - DNA, 25 bp, Homo sapien
caccccttttcatctttgaattcac

SEQ ID NO: 4115052 - DNA, 25 bp, Homo sapien
tgcccaccccttttcatctttgaat

SEQ ID NO: 4115053 - DNA, 25 bp, Homo sapien
cggtgcccaccccttttcatctttg

SEQ ID NO: 4115054 - DNA, 25 bp, Homo sapien
agggtatgtggctgggacaccgtcc

SEQ ID NO: 4115055 - DNA, 25 bp, Homo sapien
tcagcaggtgggcatccaccggctg

SEQ ID NO: 4115056 - DNA, 25 bp, Homo sapien
gctgcaggagtcctccagcgtgcag

SEQ ID NO: 4115057 - DNA, 25 bp, Homo sapien
cctccagcgtgcagcgagggtatgt

SEQ ID NO: 4115058 - DNA, 25 bp, Homo sapien
aaaacttgtgcccacgggctgctct

SEQ ID NO: 4115059 - DNA, 25 bp, Homo sapien
ggcaggctatgtgctgttatgcgca

SEQ ID NO: 4115060 - DNA, 25 bp, Homo sapien
tgctgttatgcgcaccttgaagatg

SEQ ID NO: 4115061 - DNA, 25 bp, Homo sapien
gatgcttagggttctccctgtccca

SEQ ID NO: 4115062 - DNA, 25 bp, Homo sapien
tcttcaaaaatggtcccagtgttga

SEQ ID NO: 4115063 - DNA, 25 bp, Homo sapien
ggatgacagggaatatagcaattgt

SEQ ID NO: 4115064 - DNA, 25 bp, Homo sapien
gtaagtctgggatgacagggaatat

SEQ ID NO: 4115065 - DNA, 25 bp, Homo sapien
caggcaggtagcatggtaggttttt

SEQ ID NO: 4115066 - DNA, 25 bp, Homo sapien
gagctgagtccagcagtcaggattg

SEQ ID NO: 4115067 - DNA, 25 bp, Homo sapien
ctagagagaatcagggacggaatgg

SEQ ID NO: 4115068 - DNA, 25 bp, Homo sapien
tgggctgatgctgccaatgaattca

SEQ ID NO: 4115069 - DNA, 25 bp, Homo sapien
gcaggttgggtggctcctttagttc

SEQ ID NO: 4115070 - DNA, 25 bp, Homo sapien
tctctcgcctacttgacaaccggtc

SEQ ID NO: 4115071 - DNA, 25 bp, Homo sapien
tctctctcgcctacttgacaaccgg

SEQ ID NO: 4115072 - DNA, 25 bp, Homo sapien
tctcgcctacttgacaaccggtcca

SEQ ID NO: 4115073 - DNA, 25 bp, Homo sapien
tcgcctacttgacaaccggtccaac

SEQ ID NO: 4115074 - DNA, 25 bp, Homo sapien
tgctctatcttgtagtgtggcacag

SEQ ID NO: 4115075 - DNA, 25 bp, Homo sapien
ttcagtctccgagatgcaacccctg

SEQ ID NO: 4115076 - DNA, 25 bp, Homo sapien
tcagtctccgagatgcaacccctgc

SEQ ID NO: 4115077 - DNA, 25 bp, Homo sapien
tgttttattgacagagggaaatatt

SEQ ID NO: 4115078 - DNA, 25 bp, Homo sapien
tttattgacagagggaaatattagg

SEQ ID NO: 4115079 - DNA, 25 bp, Homo sapien
ttttattgacagagggaaatattag

SEQ ID NO: 4115080 - DNA, 25 bp, Homo sapien
ctgttttattgacagagggaaatat

SEQ ID NO: 4115081 - DNA, 25 bp, Homo sapien
ctgggtgactgggaccaatgtttgt

SEQ ID NO: 4115082 - DNA, 25 bp, Homo sapien
tgtttgtttcctgcaagtcatgttc

SEQ ID NO: 4115083 - DNA, 25 bp, Homo sapien
gctaattcacttcctatcctcgtct

SEQ ID NO: 4115084 - DNA, 25 bp, Homo sapien
tacgttcaacttggtaccacttggc

SEQ ID NO: 4115085 - DNA, 25 bp, Homo sapien
cccaatattgctgatacatttttca

SEQ ID NO: 4115086 - DNA, 25 bp, Homo sapien
gcccaatattgctgatacatttttc

SEQ ID NO: 4115087 - DNA, 25 bp, Homo sapien
ggcccaatattgctgatacattttt

SEQ ID NO: 4115088 - DNA, 25 bp, Homo sapien
aggcccaatattgctgatacatttt

SEQ ID NO: 4115089 - DNA, 25 bp, Homo sapien
ctgtgatgccctggcgctggagtgc

SEQ ID NO: 4115090 - DNA, 25 bp, Homo sapien
gatgccctggcgctggagtgcttgt

SEQ ID NO: 4115091 - DNA, 25 bp, Homo sapien
cctggcgctggagtgcttgtggcca

SEQ ID NO: 4115092 - DNA, 25 bp, Homo sapien
tggcgctggagtgcttgtggccatt

SEQ ID NO: 4115093 - DNA, 25 bp, Homo sapien
ttggtgatccagcaaggtgtaggtt

SEQ ID NO: 4115094 - DNA, 25 bp, Homo sapien
gggtccattaggtcaattggtgatc

SEQ ID NO: 4115095 - DNA, 25 bp, Homo sapien
tacatggggtccattaggtcaattg

SEQ ID NO: 4115096 - DNA, 25 bp, Homo sapien
taggtcaattggtgatccagcaagg

SEQ ID NO: 4115097 - DNA, 25 bp, Homo sapien
acaaggcctgcattgacaccccatg

SEQ ID NO: 4115098 - DNA, 25 bp, Homo sapien
aaaagggtcgcagatgccatggttg

SEQ ID NO: 4115099 - DNA, 25 bp, Homo sapien
taaaaagggtcgcagatgccatggt

SEQ ID NO: 4115100 - DNA, 25 bp, Homo sapien
tgtaccaactggacttttgtaggtg

SEQ ID NO: 4115101 - DNA, 25 bp, Homo sapien
ctatcctgagttgcatcatagcaag

SEQ ID NO: 4115102 - DNA, 25 bp, Homo sapien
tatcctgagttgcatcatagcaaga

SEQ ID NO: 4115103 - DNA, 25 bp, Homo sapien
agcaagatgctactggatgccccat

SEQ ID NO: 4115104 - DNA, 25 bp, Homo sapien
tgctatcctgagttgcatcatagca

SEQ ID NO: 4115105 - DNA, 25 bp, Homo sapien
caactgaaaatgaagcggccacaag

SEQ ID NO: 4115106 - DNA, 25 bp, Homo sapien
cacgggacaggggagcataagcaac

SEQ ID NO: 4115107 - DNA, 25 bp, Homo sapien
tctagctgaggagctaggtccctgg

SEQ ID NO: 4115108 - DNA, 25 bp, Homo sapien
acgggcagctcttctagctgaggag

SEQ ID NO: 4115109 - DNA, 25 bp, Homo sapien
gttgcaacacttgatatggctcctt

SEQ ID NO: 4115110 - DNA, 25 bp, Homo sapien
ctcgtccctaagttgcaacacttga

SEQ ID NO: 4115111 - DNA, 25 bp, Homo sapien
ccctaagttgcaacacttgatatgg

SEQ ID NO: 4115112 - DNA, 25 bp, Homo sapien
aacacttgatatggctccttgagga

SEQ ID NO: 4115113 - DNA, 25 bp, Homo sapien
tggactcctccaagagtgggtcagc

SEQ ID NO: 4115114 - DNA, 25 bp, Homo sapien
ggactcctccaagagtgggtcagca

SEQ ID NO: 4115115 - DNA, 25 bp, Homo sapien
cccctttgtaggtctaggaagcatc

SEQ ID NO: 4115116 - DNA, 25 bp, Homo sapien
tcagtgcacgtgaagtttgtggtat

SEQ ID NO: 4115117 - DNA, 25 bp, Homo sapien
acgtgaagtttgtggtatccgtgca

SEQ ID NO: 4115118 - DNA, 25 bp, Homo sapien
tgtaggtctaggaagcatcccttcg

SEQ ID NO: 4115119 - DNA, 25 bp, Homo sapien
catgtccttcctgtgttgtatcggg

SEQ ID NO: 4115120 - DNA, 25 bp, Homo sapien
caaatgcctttgatggtctcgtggg

SEQ ID NO: 4115121 - DNA, 25 bp, Homo sapien
tgatgactgtatcttgccaggtgcc

SEQ ID NO: 4115122 - DNA, 25 bp, Homo sapien
ggatcaagggctgtcatttaggaac

SEQ ID NO: 4115123 - DNA, 25 bp, Homo sapien
catctttgacatgtccctggtgctg

SEQ ID NO: 4115124 - DNA, 25 bp, Homo sapien
ctgtcatctttgacatgtccctggt

SEQ ID NO: 4115125 - DNA, 25 bp, Homo sapien
gctgtcatctttgacatgtccctgg

SEQ ID NO: 4115126 - DNA, 25 bp, Homo sapien
tttgacatgtccctggtgctgctcc

SEQ ID NO: 4115127 - DNA, 25 bp, Homo sapien
tggattcaagttctccactaggagt

SEQ ID NO: 4115128 - DNA, 25 bp, Homo sapien
gaacctgctcatctaatctcacctt

SEQ ID NO: 4115129 - DNA, 25 bp, Homo sapien
taatctcaccttggattcaagttct

SEQ ID NO: 4115130 - DNA, 25 bp, Homo sapien
ctccactaggagtagtgtattgctc

SEQ ID NO: 4115131 - DNA, 25 bp, Homo sapien
gtttctccaggacaatctgaattga

SEQ ID NO: 4115132 - DNA, 25 bp, Homo sapien
gctggaatgtaattgctgaggataa

SEQ ID NO: 4115133 - DNA, 25 bp, Homo sapien
ctggaatgtaattgctgaggataag

SEQ ID NO: 4115134 - DNA, 25 bp, Homo sapien
ttccttttagctcttgagtcaaatc

SEQ ID NO: 4115135 - DNA, 25 bp, Homo sapien
gctttccttttagctcttgagtcaa

SEQ ID NO: 4115136 - DNA, 25 bp, Homo sapien
ttgctttccttttagctcttgagtc

SEQ ID NO: 4115137 - DNA, 25 bp, Homo sapien
ctttccttttagctcttgagtcaaa

SEQ ID NO: 4115138 - DNA, 25 bp, Homo sapien
caggtagggaaggtgctcctttgtg

SEQ ID NO: 4115139 - DNA, 25 bp, Homo sapien
ttgcaggtagggaaggtgctccttt

SEQ ID NO: 4115140 - DNA, 25 bp, Homo sapien
agggaaggtgctcctttgtgttctg

SEQ ID NO: 4115141 - DNA, 25 bp, Homo sapien
gtagggaaggtgctcctttgtgttc

SEQ ID NO: 4115142 - DNA, 25 bp, Homo sapien
tcatatttaggaaagaacagggatg

SEQ ID NO: 4115143 - DNA, 25 bp, Homo sapien
caatggcgtggcgtattggtgtttc

SEQ ID NO: 4115144 - DNA, 25 bp, Homo sapien
gggtcagggctttatcctgtagtaa

SEQ ID NO: 4115145 - DNA, 25 bp, Homo sapien
ctttcaatcttgagggctgaggctg

SEQ ID NO: 4115146 - DNA, 25 bp, Homo sapien
caggaggatgtacttcacttcaaat

SEQ ID NO: 4115147 - DNA, 25 bp, Homo sapien
ttgtgtcttcgatgagcaggaggat

SEQ ID NO: 4115148 - DNA, 25 bp, Homo sapien
actgagtcgtggaaaggtaattatg

SEQ ID NO: 4115149 - DNA, 25 bp, Homo sapien
caaatctgaactgagtcgtggaaag

SEQ ID NO: 4115150 - DNA, 25 bp, Homo sapien
tcatttgaatttcttctccgggaaa

SEQ ID NO: 4115151 - DNA, 25 bp, Homo sapien
ggtcatttgaatttcttctccggga

SEQ ID NO: 4115152 - DNA, 25 bp, Homo sapien
ctccgggaaataattatggcctttg

SEQ ID NO: 4115153 - DNA, 25 bp, Homo sapien
ttcttctccgggaaataattatggc

SEQ ID NO: 4115154 - DNA, 25 bp, Homo sapien
taaggtgtaggccaaataccaagac

SEQ ID NO: 4115155 - DNA, 25 bp, Homo sapien
tggtcttaggctccgtgatctggtg

SEQ ID NO: 4115156 - DNA, 25 bp, Homo sapien
tcctgttgaccctgagctatgcttt

SEQ ID NO: 4115157 - DNA, 25 bp, Homo sapien
taatgcacgattgtgtggtaaggtg

SEQ ID NO: 4115158 - DNA, 25 bp, Homo sapien
tgcagctggagtaagtcaggcctcg

SEQ ID NO: 4115159 - DNA, 25 bp, Homo sapien
gtatcattgaggtctgaaaggcagc

SEQ ID NO: 4115160 - DNA, 25 bp, Homo sapien
tagcaatcacatttcgtctgtatca

SEQ ID NO: 4115161 - DNA, 25 bp, Homo sapien
tatccacagttggtagcaatcacat

SEQ ID NO: 4115162 - DNA, 25 bp, Homo sapien
aatagaaacatggagtgtggctgcc

SEQ ID NO: 4115163 - DNA, 25 bp, Homo sapien
aactctgatctgtgacgtggatgca

SEQ ID NO: 4115164 - DNA, 25 bp, Homo sapien
gagaattaacaacccaaatcgagtg

SEQ ID NO: 4115165 - DNA, 25 bp, Homo sapien
cagtaacttttgcacgttgacggac

SEQ ID NO: 4115166 - DNA, 25 bp, Homo sapien
gttcttggcactggacgaggctgcc

SEQ ID NO: 4115167 - DNA, 25 bp, Homo sapien
aatgttgatcgtggctaaaaggagg

SEQ ID NO: 4115168 - DNA, 25 bp, Homo sapien
tggttgaatggaaggctgctggtga

SEQ ID NO: 4115169 - DNA, 25 bp, Homo sapien
tgtaggccttgtgcgttcccttttg

SEQ ID NO: 4115170 - DNA, 25 bp, Homo sapien
tgctgtcagtggaggcacagtcagc

SEQ ID NO: 4115171 - DNA, 25 bp, Homo sapien
tgtcagtggaggcacagtcagctat

SEQ ID NO: 4115172 - DNA, 25 bp, Homo sapien
tggtatttgtcaaataccacccttg

SEQ ID NO: 4115173 - DNA, 25 bp, Homo sapien
cctggtatttgtcaaataccaccct

SEQ ID NO: 4115174 - DNA, 25 bp, Homo sapien
ggaacagtctgatatttaatgagta

SEQ ID NO: 4115175 - DNA, 25 bp, Homo sapien
ccttagttcaagtattggaacagtc

SEQ ID NO: 4115176 - DNA, 25 bp, Homo sapien
ttctcagctcagtggccagatgata

SEQ ID NO: 4115177 - DNA, 25 bp, Homo sapien
tgttttcttgcgatctgtgtagctg

SEQ ID NO: 4115178 - DNA, 25 bp, Homo sapien
aggtgctccccaagaaccctctggg

SEQ ID NO: 4115179 - DNA, 25 bp, Homo sapien
ggttttggagatatgctcccaatgg

SEQ ID NO: 4115180 - DNA, 25 bp, Homo sapien
agaaccctctgggtccaggactgcc

SEQ ID NO: 4115181 - DNA, 25 bp, Homo sapien
tttgaaaaaagcgtcagtgtctctc

SEQ ID NO: 4115182 - DNA, 25 bp, Homo sapien
ctggtgtcctgttggaaacctgaat

SEQ ID NO: 4115183 - DNA, 25 bp, Homo sapien
ggtgtcctgttggaaacctgaatac

SEQ ID NO: 4115184 - DNA, 25 bp, Homo sapien
tggtgtcctgttggaaacctgaata

SEQ ID NO: 4115185 - DNA, 25 bp, Homo sapien
cctggtgtcctgttggaaacctgaa

SEQ ID NO: 4115186 - DNA, 25 bp, Homo sapien
tccaagacccaagctttagataaag

SEQ ID NO: 4115187 - DNA, 25 bp, Homo sapien
tccttctgtcttgatttgggttcct

SEQ ID NO: 4115188 - DNA, 25 bp, Homo sapien
tttttggtaatgatgcagcttgcac

SEQ ID NO: 4115189 - DNA, 25 bp, Homo sapien
tgcaccttgtctcccagtggtgcct

SEQ ID NO: 4115190 - DNA, 25 bp, Homo sapien
gcagctggaagagtgagtgcatgca

SEQ ID NO: 4115191 - DNA, 25 bp, Homo sapien
cagctggaagagtgagtgcatgcat

SEQ ID NO: 4115192 - DNA, 25 bp, Homo sapien
caatggtgtggatatgatggtctcc

SEQ ID NO: 4115193 - DNA, 25 bp, Homo sapien
cagggtccagccactatctctgagg

SEQ ID NO: 4115194 - DNA, 25 bp, Homo sapien
tagctgaggcatgctttcaatggtg

SEQ ID NO: 4115195 - DNA, 25 bp, Homo sapien
gccaggcacacttgtggagccagtt

SEQ ID NO: 4115196 - DNA, 25 bp, Homo sapien
gcttccttcacacgcaggagggagg

SEQ ID NO: 4115197 - DNA, 25 bp, Homo sapien
gagggatgagttaaaggtcacgttc

SEQ ID NO: 4115198 - DNA, 25 bp, Homo sapien
agttaaaggtcacgttccttgtgtg

SEQ ID NO: 4115199 - DNA, 25 bp, Homo sapien
agtgcttccttcacacgcaggaggg

SEQ ID NO: 4115200 - DNA, 25 bp, Homo sapien
cattgagtatgggagtgttcattcc

SEQ ID NO: 4115201 - DNA, 25 bp, Homo sapien
gagtatgggagtgttcattcccctt

SEQ ID NO: 4115202 - DNA, 25 bp, Homo sapien
tatgggagtgttcattccccttgct

SEQ ID NO: 4115203 - DNA, 25 bp, Homo sapien
ttgagtatgggagtgttcattcccc

SEQ ID NO: 4115204 - DNA, 25 bp, Homo sapien
agcaccatcatgtaaatgaatacca

SEQ ID NO: 4115205 - DNA, 25 bp, Homo sapien
atgaataccacgtattttcgggcca

SEQ ID NO: 4115206 - DNA, 25 bp, Homo sapien
tgtaaatgaataccacgtattttcg

SEQ ID NO: 4115207 - DNA, 25 bp, Homo sapien
accacgtattttcgggccacatata

SEQ ID NO: 4115208 - DNA, 25 bp, Homo sapien
ttggctctggcctgagctctggggc

SEQ ID NO: 4115209 - DNA, 25 bp, Homo sapien
cctgagctctggggcctgagcttac

SEQ ID NO: 4115210 - DNA, 25 bp, Homo sapien
tggcctgagctctggggcctgagct

SEQ ID NO: 4115211 - DNA, 25 bp, Homo sapien
cttggctctggcctgagctctgggg

SEQ ID NO: 4115212 - DNA, 25 bp, Homo sapien
gaagcttgaggtcttttctgatgtg

SEQ ID NO: 4115213 - DNA, 25 bp, Homo sapien
tgactctcatgtggtactgtggcct

SEQ ID NO: 4115214 - DNA, 25 bp, Homo sapien
ctctctggtttaacctggtgctatc

SEQ ID NO: 4115215 - DNA, 25 bp, Homo sapien
aacctggtgctatctgaagcttgag

SEQ ID NO: 4115216 - DNA, 25 bp, Homo sapien
cctccctcgtctgtctttagtttgt

SEQ ID NO: 4115217 - DNA, 25 bp, Homo sapien
tcctccctcgtctgtctttagtttg

SEQ ID NO: 4115218 - DNA, 25 bp, Homo sapien
agtattctcctgaatgccaggaatg

SEQ ID NO: 4115219 - DNA, 25 bp, Homo sapien
attctcctgaatgccaggaatgcag

SEQ ID NO: 4115220 - DNA, 25 bp, Homo sapien
agaagtattctcctgaatgccagga

SEQ ID NO: 4115221 - DNA, 25 bp, Homo sapien
aggaatgcagttcagtcccccacca

SEQ ID NO: 4115222 - DNA, 25 bp, Homo sapien
ctttgaccagagtaagggtaggaga

SEQ ID NO: 4115223 - DNA, 25 bp, Homo sapien
cagctttgaccagagtaagggtagg

SEQ ID NO: 4115224 - DNA, 25 bp, Homo sapien
tgaccagagtaagggtaggagactc

SEQ ID NO: 4115225 - DNA, 25 bp, Homo sapien
ggcagctttgaccagagtaagggta

SEQ ID NO: 4115226 - DNA, 25 bp, Homo sapien
caccctagcactgcagtattccgtc

SEQ ID NO: 4115227 - DNA, 25 bp, Homo sapien
tagcactgcagtattccgtccctct

SEQ ID NO: 4115228 - DNA, 25 bp, Homo sapien
gcagtattccgtccctctttgcttc

SEQ ID NO: 4115229 - DNA, 25 bp, Homo sapien
cactgcagtattccgtccctctttg

SEQ ID NO: 4115230 - DNA, 25 bp, Homo sapien
tgtatactgcggcaaaatcctaaat

SEQ ID NO: 4115231 - DNA, 25 bp, Homo sapien
aaattcatcgaaaaaatcatttctg

SEQ ID NO: 4115232 - DNA, 25 bp, Homo sapien
aatcctaaattcatcgaaaaaatca

SEQ ID NO: 4115233 - DNA, 25 bp, Homo sapien
tgggactgcagatgtatactgcggc

SEQ ID NO: 4115234 - DNA, 25 bp, Homo sapien
caagttcggcggaaagccactgtgg

SEQ ID NO: 4115235 - DNA, 25 bp, Homo sapien
ggcaagttcggcggaaagccactgt

SEQ ID NO: 4115236 - DNA, 25 bp, Homo sapien
tgggcaagttcggcggaaagccact

SEQ ID NO: 4115237 - DNA, 25 bp, Homo sapien
agttcggcggaaagccactgtggaa

SEQ ID NO: 4115238 - DNA, 25 bp, Homo sapien
tcaggccactggcatataaagcagt

SEQ ID NO: 4115239 - DNA, 25 bp, Homo sapien
gcatcccttcgctaaaacagaggct

SEQ ID NO: 4115240 - DNA, 25 bp, Homo sapien
acgctatcaggccactggcatataa

SEQ ID NO: 4115241 - DNA, 25 bp, Homo sapien
gcagtggtagactgaacctgaatgt

SEQ ID NO: 4115242 - DNA, 25 bp, Homo sapien
gctcttataagtcgcgcagaagccg

SEQ ID NO: 4115243 - DNA, 25 bp, Homo sapien
aaaatggcgccgcacaaggagctct

SEQ ID NO: 4115244 - DNA, 25 bp, Homo sapien
ccgtcctcgacctgcggtggcggct

SEQ ID NO: 4115245 - DNA, 25 bp, Homo sapien
tgctgccacagaccgagaggcttaa

SEQ ID NO: 4115246 - DNA, 25 bp, Homo sapien
taagagaaagtccactggtccgatc

SEQ ID NO: 4115247 - DNA, 25 bp, Homo sapien
cccgaaccccaactcgccgcaagag

SEQ ID NO: 4115248 - DNA, 25 bp, Homo sapien
tggcgtctctgcctcagcgcccgaa

SEQ ID NO: 4115249 - DNA, 25 bp, Homo sapien
cccaggactgatgggacttagggtg

SEQ ID NO: 4115250 - DNA, 25 bp, Homo sapien
gttgcaataatctcagggccttgtc

SEQ ID NO: 4115251 - DNA, 25 bp, Homo sapien
caaattttgtctggtgtgaaaggac

SEQ ID NO: 4115252 - DNA, 25 bp, Homo sapien
gcacagccttagttcaaacgaaaag

SEQ ID NO: 4115253 - DNA, 25 bp, Homo sapien
ggccttcagaacaaaggttaggtca

SEQ ID NO: 4115254 - DNA, 25 bp, Homo sapien
ttttattccagtcattaacaggaac

SEQ ID NO: 4115255 - DNA, 25 bp, Homo sapien
cccctcttccatactctgaaacctg

SEQ ID NO: 4115256 - DNA, 25 bp, Homo sapien
ctgaaacctgaacactgttaaatgc

SEQ ID NO: 4115257 - DNA, 25 bp, Homo sapien
tattccagtcattaacaggaacagt

SEQ ID NO: 4115258 - DNA, 25 bp, Homo sapien
aatcaggacccaggaaaaacgacag

SEQ ID NO: 4115259 - DNA, 25 bp, Homo sapien
tggctcagaaaggaatttaagggtc

SEQ ID NO: 4115260 - DNA, 25 bp, Homo sapien
gaatgaactccacttggaagcctcc

SEQ ID NO: 4115261 - DNA, 25 bp, Homo sapien
taattactctgcctcaacggtgacc

SEQ ID NO: 4115262 - DNA, 25 bp, Homo sapien
caagagatcactgggcatgaagcca

SEQ ID NO: 4115263 - DNA, 25 bp, Homo sapien
tgctgtacaaatgaactgagtggcc

SEQ ID NO: 4115264 - DNA, 25 bp, Homo sapien
tagataaactgtaggtcccaatggg

SEQ ID NO: 4115265 - DNA, 25 bp, Homo sapien
gaaatcaaggaactaagagaccagg

SEQ ID NO: 4115266 - DNA, 25 bp, Homo sapien
tcaaggttattttgcgggaaagaga

SEQ ID NO: 4115267 - DNA, 25 bp, Homo sapien
tgcccatgaacggtagactggatca

SEQ ID NO: 4115268 - DNA, 25 bp, Homo sapien
tgttgtagccatcgttaacgtcgca

SEQ ID NO: 4115269 - DNA, 25 bp, Homo sapien
tataaaagtacagtgggccagacat

SEQ ID NO: 4115270 - DNA, 25 bp, Homo sapien
tactgaatgaaatggtaagccctgt

SEQ ID NO: 4115271 - DNA, 25 bp, Homo sapien
tttaggaggtagaaacaacaggcgc

SEQ ID NO: 4115272 - DNA, 25 bp, Homo sapien
ggttgctaccaactgaacagcacag

SEQ ID NO: 4115273 - DNA, 25 bp, Homo sapien
tatacataggacatctttcaggccg

SEQ ID NO: 4115274 - DNA, 25 bp, Homo sapien
taggtccagtggtgaagtcagcaag

SEQ ID NO: 4115275 - DNA, 25 bp, Homo sapien
tgactggacagagtaaccactagcg

SEQ ID NO: 4115276 - DNA, 25 bp, Homo sapien
gaagctggaccaaatcacacatgaa

SEQ ID NO: 4115277 - DNA, 25 bp, Homo sapien
gaaggtccccttaaactggcaatca

SEQ ID NO: 4115278 - DNA, 25 bp, Homo sapien
taatttacatgtcacaggtcgctga

SEQ ID NO: 4115279 - DNA, 25 bp, Homo sapien
tctgctattgcagtgaaaacagcca

SEQ ID NO: 4115280 - DNA, 25 bp, Homo sapien
cacttacataagcatggatggctgt

SEQ ID NO: 4115281 - DNA, 25 bp, Homo sapien
gcccagccaatttataacctaagag

SEQ ID NO: 4115282 - DNA, 25 bp, Homo sapien
taaatgccttcagaaccacgaaaga

SEQ ID NO: 4115283 - DNA, 25 bp, Homo sapien
tgtcatcctcgaatagtcaataagc

SEQ ID NO: 4115284 - DNA, 25 bp, Homo sapien
taggaaatctctttatggctgggaa

SEQ ID NO: 4115285 - DNA, 25 bp, Homo sapien
aaattagtatgtttccagaatgagc

SEQ ID NO: 4115286 - DNA, 25 bp, Homo sapien
tatgaaatcttctcaggtaggaaac

SEQ ID NO: 4115287 - DNA, 25 bp, Homo sapien
ctttgccatctagaaaatgtatgca

SEQ ID NO: 4115288 - DNA, 25 bp, Homo sapien
tcatgcaacactaacattttaagtt

SEQ ID NO: 4115289 - DNA, 25 bp, Homo sapien
ctgtcaccagtaatactttgccatc

SEQ ID NO: 4115290 - DNA, 25 bp, Homo sapien
cctgttttaacacacttcatgcaac

SEQ ID NO: 4115291 - DNA, 25 bp, Homo sapien
gctttgatacatccggcttccagga

SEQ ID NO: 4115292 - DNA, 25 bp, Homo sapien
gagtggctatgtaactacttcacca

SEQ ID NO: 4115293 - DNA, 25 bp, Homo sapien
catgttctacactgagcttctcctt

SEQ ID NO: 4115294 - DNA, 25 bp, Homo sapien
caactggtcatgtctataggctata

SEQ ID NO: 4115295 - DNA, 25 bp, Homo sapien
aacagttgtatggtatacttcaaat

SEQ ID NO: 4115296 - DNA, 25 bp, Homo sapien
aaacagttgtatggtatacttcaaa

SEQ ID NO: 4115297 - DNA, 25 bp, Homo sapien
tgctggtggcttgtttgctatttca

SEQ ID NO: 4115298 - DNA, 25 bp, Homo sapien
aagaatggtactgcatccaggctcc

SEQ ID NO: 4115299 - DNA, 25 bp, Homo sapien
accaagccattaggaggagtgagca

SEQ ID NO: 4115300 - DNA, 25 bp, Homo sapien
gctccagaagcagtcatccagacta

SEQ ID NO: 4115301 - DNA, 25 bp, Homo sapien
tgccagtgactaacagccgcttttc

SEQ ID NO: 4115302 - DNA, 25 bp, Homo sapien
ggattgcctttaccactcagagaag

SEQ ID NO: 4115303 - DNA, 25 bp, Homo sapien
cactcatacaggacttgggaggtat

SEQ ID NO: 4115304 - DNA, 25 bp, Homo sapien
gtccaggtaagactgttgctgccag

SEQ ID NO: 4115305 - DNA, 25 bp, Homo sapien
tctcagggaacatagcagctcgtac

SEQ ID NO: 4115306 - DNA, 25 bp, Homo sapien
caaacgctggacattagtgggatga

SEQ ID NO: 4115307 - DNA, 25 bp, Homo sapien
tcagttcagggattgcacgtgtggc

SEQ ID NO: 4115308 - DNA, 25 bp, Homo sapien
taccctctgagctcgagtcattgca

SEQ ID NO: 4115309 - DNA, 25 bp, Homo sapien
catgatagcgtgtctggaagcttcc

SEQ ID NO: 4115310 - DNA, 25 bp, Homo sapien
gatggccagtaagccctcacgatga

SEQ ID NO: 4115311 - DNA, 25 bp, Homo sapien
ggttatgcaaggtcccagcggtaca

SEQ ID NO: 4115312 - DNA, 25 bp, Homo sapien
catggtacgtacaatagcagacacc

SEQ ID NO: 4115313 - DNA, 25 bp, Homo sapien
cttcttgatgtaataaaaggttgtg

SEQ ID NO: 4115314 - DNA, 25 bp, Homo sapien
ataaaaggttgtggagagttgtaat

SEQ ID NO: 4115315 - DNA, 25 bp, Homo sapien
taaaaggttgtggagagttgtaatg

SEQ ID NO: 4115316 - DNA, 25 bp, Homo sapien
gctttcttggttgccataagctaaa

SEQ ID NO: 4115317 - DNA, 25 bp, Homo sapien
aaaatttgaaggcagtctgtcgtaa

SEQ ID NO: 4115318 - DNA, 25 bp, Homo sapien
agctaaaatttgaaggcagtctgtc

SEQ ID NO: 4115319 - DNA, 25 bp, Homo sapien
ttgaaggcagtctgtcgtaatagcc

SEQ ID NO: 4115320 - DNA, 25 bp, Homo sapien
tagccggcttattactagagcagac

SEQ ID NO: 4115321 - DNA, 25 bp, Homo sapien
tagagcagacagatagcaccttcag

SEQ ID NO: 4115322 - DNA, 25 bp, Homo sapien
gggtccaccactagccagtatgatg

SEQ ID NO: 4115323 - DNA, 25 bp, Homo sapien
ccacagtagtttttcgtaagtatag

SEQ ID NO: 4115324 - DNA, 25 bp, Homo sapien
tctaagacatagcacatggtgttcc

SEQ ID NO: 4115325 - DNA, 25 bp, Homo sapien
ggaccctatctgttgtgttacccaa

SEQ ID NO: 4115326 - DNA, 25 bp, Homo sapien
tcatatagacaagagacggttccct

SEQ ID NO: 4115327 - DNA, 25 bp, Homo sapien
cacaagactaagaattaagcacggg

SEQ ID NO: 4115328 - DNA, 25 bp, Homo sapien
taaacaaccatcgaaagtgtctcag

SEQ ID NO: 4115329 - DNA, 25 bp, Homo sapien
aaagtcctgcatgttatggctctgc

SEQ ID NO: 4115330 - DNA, 25 bp, Homo sapien
gaatggcctacagagactttaaaac

SEQ ID NO: 4115331 - DNA, 25 bp, Homo sapien
ggattttaaccccagatgtccatca

SEQ ID NO: 4115332 - DNA, 25 bp, Homo sapien
gacagttctgaacaagacgttgact

SEQ ID NO: 4115333 - DNA, 25 bp, Homo sapien
tctgtcaggtgaagtcctaaagctt

SEQ ID NO: 4115334 - DNA, 25 bp, Homo sapien
aagacgttgacttggatctgtcagg

SEQ ID NO: 4115335 - DNA, 25 bp, Homo sapien
gttgcagcatctgaaagattcctga

SEQ ID NO: 4115336 - DNA, 25 bp, Homo sapien
cccatggcaccagtttactcagaat

SEQ ID NO: 4115337 - DNA, 25 bp, Homo sapien
aagcacatactcatcttgactctat

SEQ ID NO: 4115338 - DNA, 25 bp, Homo sapien
ttcccatggcaccagtttactcaga

SEQ ID NO: 4115339 - DNA, 25 bp, Homo sapien
gtcagtacaagcacatactcatctt

SEQ ID NO: 4115340 - DNA, 25 bp, Homo sapien
ggacagtacgcacaagagcctctat

SEQ ID NO: 4115341 - DNA, 25 bp, Homo sapien
tcagatgacgaagagcacagatggc

SEQ ID NO: 4115342 - DNA, 25 bp, Homo sapien
gaaagaattccagctgcacaggtga

SEQ ID NO: 4115343 - DNA, 25 bp, Homo sapien
caactggtagtccatagtgaaggcg

SEQ ID NO: 4115344 - DNA, 25 bp, Homo sapien
tattgatcactatgcttagacagcc

SEQ ID NO: 4115345 - DNA, 25 bp, Homo sapien
ttcagaatcttacccctatcgcagc

SEQ ID NO: 4115346 - DNA, 25 bp, Homo sapien
caactaaaagtagttctgactacac

SEQ ID NO: 4115347 - DNA, 25 bp, Homo sapien
tagacagccatccaacagctagaga

SEQ ID NO: 4115348 - DNA, 25 bp, Homo sapien
tgaactagtcgtggaatggcaccct

SEQ ID NO: 4115349 - DNA, 25 bp, Homo sapien
caaaggtgcatgatttgcgggacaa

SEQ ID NO: 4115350 - DNA, 25 bp, Homo sapien
tacggcgctgggtatcctgatgtgc

SEQ ID NO: 4115351 - DNA, 25 bp, Homo sapien
tgatgtgcacgaacaagcaactgaa

SEQ ID NO: 4115352 - DNA, 25 bp, Homo sapien
tgtaagactgaccatgtgaaggacg

SEQ ID NO: 4115353 - DNA, 25 bp, Homo sapien
taaaactaaccgagttgccagcaga

SEQ ID NO: 4115354 - DNA, 25 bp, Homo sapien
catacagcgctgaatcccaaagaca

SEQ ID NO: 4115355 - DNA, 25 bp, Homo sapien
tattaagtcacctcatggagatggg

SEQ ID NO: 4115356 - DNA, 25 bp, Homo sapien
taacaattcggttgtgaacatcccg

SEQ ID NO: 4115357 - DNA, 25 bp, Homo sapien
tcccgagctaggatgtgaagggctc

SEQ ID NO: 4115358 - DNA, 25 bp, Homo sapien
tatttagtcctctgataacaattcg

SEQ ID NO: 4115359 - DNA, 25 bp, Homo sapien
caaacaatggaatggtatttagtcc

SEQ ID NO: 4115360 - DNA, 25 bp, Homo sapien
cattcccaattcagagtgcaagagg

SEQ ID NO: 4115361 - DNA, 25 bp, Homo sapien
aaagtgaaatgtgaaatctcctccc

SEQ ID NO: 4115362 - DNA, 25 bp, Homo sapien
tcttactgaccaaaaaatgtaggga

SEQ ID NO: 4115363 - DNA, 25 bp, Homo sapien
cagaggcagctctaactgatctaag

SEQ ID NO: 4115364 - DNA, 25 bp, Homo sapien
tgaagtaactctgtcagaggagctg

SEQ ID NO: 4115365 - DNA, 25 bp, Homo sapien
tgttttcaatgggagaataaagcag

SEQ ID NO: 4115366 - DNA, 25 bp, Homo sapien
ccttcattcctagagtgaagtaact

SEQ ID NO: 4115367 - DNA, 25 bp, Homo sapien
tgagcaagttcacagaggacccctg

SEQ ID NO: 4115368 - DNA, 25 bp, Homo sapien
tgtacacatctgctaaaggctttgg

SEQ ID NO: 4115369 - DNA, 25 bp, Homo sapien
cacatctgctaaaggctttggttcc

SEQ ID NO: 4115370 - DNA, 25 bp, Homo sapien
aaactgagacttcaatgtacacatc

SEQ ID NO: 4115371 - DNA, 25 bp, Homo sapien
gacttcaatgtacacatctgctaaa

SEQ ID NO: 4115372 - DNA, 25 bp, Homo sapien
ttgtcctcagacattcggaacaaaa

SEQ ID NO: 4115373 - DNA, 25 bp, Homo sapien
tcagctcaactgaaagccgtttctt

SEQ ID NO: 4115374 - DNA, 25 bp, Homo sapien
ctgaaagccgtttcttgtaatcttg

SEQ ID NO: 4115375 - DNA, 25 bp, Homo sapien
agacattcggaacaaaacagcagct

SEQ ID NO: 4115376 - DNA, 25 bp, Homo sapien
taaactccggtctcaagagctgcat

SEQ ID NO: 4115377 - DNA, 25 bp, Homo sapien
gagctgcatcgttgtaaacctaaca

SEQ ID NO: 4115378 - DNA, 25 bp, Homo sapien
ggaaagaacaagctgccatacctgc

SEQ ID NO: 4115379 - DNA, 25 bp, Homo sapien
tcagagcagttgctagacagcataa

SEQ ID NO: 4115380 - DNA, 25 bp, Homo sapien
cagacaaagctgacattaactaaga

SEQ ID NO: 4115381 - DNA, 25 bp, Homo sapien
caagtaacacactactcactggtaa

SEQ ID NO: 4115382 - DNA, 25 bp, Homo sapien
caggagctgctgataggatgtgtta

SEQ ID NO: 4115383 - DNA, 25 bp, Homo sapien
aaagaaaagttttagcctgagcagc

SEQ ID NO: 4115384 - DNA, 25 bp, Homo sapien
catcctggcgatatccaaggggttc

SEQ ID NO: 4115385 - DNA, 25 bp, Homo sapien
tgggcaccaatatcaagtccaagat

SEQ ID NO: 4115386 - DNA, 25 bp, Homo sapien
tatccaaggggttctccctgggcac

SEQ ID NO: 4115387 - DNA, 25 bp, Homo sapien
ggcaccaatatcaagtccaagatca

SEQ ID NO: 4115388 - DNA, 25 bp, Homo sapien
gaggagagaagcagacatagacgtt

SEQ ID NO: 4115389 - DNA, 25 bp, Homo sapien
tagggcatccaaagttcagcagcaa

SEQ ID NO: 4115390 - DNA, 25 bp, Homo sapien
gagtcagggtgtcaacaaaataggc

SEQ ID NO: 4115391 - DNA, 25 bp, Homo sapien
gacatagacgttaacactgaggtta

SEQ ID NO: 4115392 - DNA, 25 bp, Homo sapien
agctgattgctgtcacctggaggca

SEQ ID NO: 4115393 - DNA, 25 bp, Homo sapien
caccagagtgaaaagaacgatagct

SEQ ID NO: 4115394 - DNA, 25 bp, Homo sapien
catccatgaggtcctgggcatgccc

SEQ ID NO: 4115395 - DNA, 25 bp, Homo sapien
tctggcagcccatcaactggatagt

SEQ ID NO: 4115396 - DNA, 25 bp, Homo sapien
gagagaaaggctgctattaatgttt

SEQ ID NO: 4115397 - DNA, 25 bp, Homo sapien
tttgtggcagatttacaaatagcct

SEQ ID NO: 4115398 - DNA, 25 bp, Homo sapien
cacacatgatcacataacaaccaga

SEQ ID NO: 4115399 - DNA, 25 bp, Homo sapien
taagttgcaaaagctgtggcaaaaa

SEQ ID NO: 4115400 - DNA, 25 bp, Homo sapien
tacttcaattgttcccataggaaac

SEQ ID NO: 4115401 - DNA, 25 bp, Homo sapien
ctcagcttggttagtgtgtcaggca

SEQ ID NO: 4115402 - DNA, 25 bp, Homo sapien
tctcagcaactctacaggccaatca

SEQ ID NO: 4115403 - DNA, 25 bp, Homo sapien
cacaatgcaagttcagacaatacag

SEQ ID NO: 4115404 - DNA, 25 bp, Homo sapien
caaggctagggtttgataaattcca

SEQ ID NO: 4115405 - DNA, 25 bp, Homo sapien
tcacagcaggttacaacaactttgg

SEQ ID NO: 4115406 - DNA, 25 bp, Homo sapien
tcttgaagcatcgtatcacagcagg

SEQ ID NO: 4115407 - DNA, 25 bp, Homo sapien
tcaaagcaagcaaagtcagtaccat

SEQ ID NO: 4115408 - DNA, 25 bp, Homo sapien
ccaagtgggagatgcaaggaacctc

SEQ ID NO: 4115409 - DNA, 25 bp, Homo sapien
gaagtgagttccacagaccggagat

SEQ ID NO: 4115410 - DNA, 25 bp, Homo sapien
gaactgcgtatttgacacccggaag

SEQ ID NO: 4115411 - DNA, 25 bp, Homo sapien
aacctcatgagaaaggcagcccctg

SEQ ID NO: 4115412 - DNA, 25 bp, Homo sapien
tctgctctagatcagcacacactct

SEQ ID NO: 4115413 - DNA, 25 bp, Homo sapien
caggaggatcagcagtctgctctag

SEQ ID NO: 4115414 - DNA, 25 bp, Homo sapien
acacactgggaatccccagttatgg

SEQ ID NO: 4115415 - DNA, 25 bp, Homo sapien
cactgtccactgagatccttcccag

SEQ ID NO: 4115416 - DNA, 25 bp, Homo sapien
gcagatcacctccaatgagaagcac

SEQ ID NO: 4115417 - DNA, 25 bp, Homo sapien
tgcccttgcagatcacctccaatga

SEQ ID NO: 4115418 - DNA, 25 bp, Homo sapien
caatgagaagcacttggagagcctc

SEQ ID NO: 4115419 - DNA, 25 bp, Homo sapien
aatgagaagcacttggagagcctca

SEQ ID NO: 4115420 - DNA, 25 bp, Homo sapien
gattagcatgggcacacttcctggg

SEQ ID NO: 4115421 - DNA, 25 bp, Homo sapien
gacagatttccagttgctagccagg

SEQ ID NO: 4115422 - DNA, 25 bp, Homo sapien
gctgagagccccaaagacagatttc

SEQ ID NO: 4115423 - DNA, 25 bp, Homo sapien
tccaacagggcatgagtcagggacg

SEQ ID NO: 4115424 - DNA, 25 bp, Homo sapien
cagccaggataagttcaccaatagt

SEQ ID NO: 4115425 - DNA, 25 bp, Homo sapien
tattgtgcttacactcttcgctggc

SEQ ID NO: 4115426 - DNA, 25 bp, Homo sapien
gaatactccctcttgacgtctgtaa

SEQ ID NO: 4115427 - DNA, 25 bp, Homo sapien
ttcttagtgtcgctggaatactccc

SEQ ID NO: 4115428 - DNA, 25 bp, Homo sapien
caattgaagggtcattggaaggcag

SEQ ID NO: 4115429 - DNA, 25 bp, Homo sapien
tctggcgctggcatgtgagttcctg

SEQ ID NO: 4115430 - DNA, 25 bp, Homo sapien
ggaggaggcactgtgtcagcgtggt

SEQ ID NO: 4115431 - DNA, 25 bp, Homo sapien
ggttagggatctggcgctggcatgt

SEQ ID NO: 4115432 - DNA, 25 bp, Homo sapien
tctcaaaggcttcgcaaaaaacgtc

SEQ ID NO: 4115433 - DNA, 25 bp, Homo sapien
caaaaaacgtcctcaaagctgtggc

SEQ ID NO: 4115434 - DNA, 25 bp, Homo sapien
aaacccacagatttcacgattccct

SEQ ID NO: 4115435 - DNA, 25 bp, Homo sapien
agccagactctcaaaggcttcgcaa

SEQ ID NO: 4115436 - DNA, 25 bp, Homo sapien
gaatggatgcttttgggtcagctga

SEQ ID NO: 4115437 - DNA, 25 bp, Homo sapien
aatggatgcttttgggtcagctgac

SEQ ID NO: 4115438 - DNA, 25 bp, Homo sapien
gatcccaaccctgtcctgctacctg

SEQ ID NO: 4115439 - DNA, 25 bp, Homo sapien
ctttgagtccaggatcccaaccctg

SEQ ID NO: 4115440 - DNA, 25 bp, Homo sapien
tacatggtggtcacaactcctttga

SEQ ID NO: 4115441 - DNA, 25 bp, Homo sapien
tggtcacaactcctttgagtccagg

SEQ ID NO: 4115442 - DNA, 25 bp, Homo sapien
agaagacgggtcaatagctgcatca

SEQ ID NO: 4115443 - DNA, 25 bp, Homo sapien
cttagaagacgggtcaatagctgca

SEQ ID NO: 4115444 - DNA, 25 bp, Homo sapien
caacttagaagacgggtcaatagct

SEQ ID NO: 4115445 - DNA, 25 bp, Homo sapien
ggaggcaacttagaagacgggtcaa

SEQ ID NO: 4115446 - DNA, 25 bp, Homo sapien
tcatctgaagagctgcgtctttact

SEQ ID NO: 4115447 - DNA, 25 bp, Homo sapien
tgtagcagctgtgtggaaagccttc

SEQ ID NO: 4115448 - DNA, 25 bp, Homo sapien
gggccttcgcgagctgcatctgaag

SEQ ID NO: 4115449 - DNA, 25 bp, Homo sapien
gcgtggccagtgagcgcttggtcca

SEQ ID NO: 4115450 - DNA, 25 bp, Homo sapien
tggaatgcgaaagtgtgatgagctc

SEQ ID NO: 4115451 - DNA, 25 bp, Homo sapien
aacatagcccctcttactgtttcag

SEQ ID NO: 4115452 - DNA, 25 bp, Homo sapien
tttcaggctcaatttgtggaatgcg

SEQ ID NO: 4115453 - DNA, 25 bp, Homo sapien
agaacatagcccctcttactgtttc

SEQ ID NO: 4115454 - DNA, 25 bp, Homo sapien
agtgtgcatccctttgggttggtca

SEQ ID NO: 4115455 - DNA, 25 bp, Homo sapien
gtgtgcatccctttgggttggtcat

SEQ ID NO: 4115456 - DNA, 25 bp, Homo sapien
cagtgtgcatccctttgggttggtc

SEQ ID NO: 4115457 - DNA, 25 bp, Homo sapien
agtgttctcctaactgggatctgtg

SEQ ID NO: 4115458 - DNA, 25 bp, Homo sapien
tcagtgctttaactgctgtgagcca

SEQ ID NO: 4115459 - DNA, 25 bp, Homo sapien
tgtgagccacaaatcacttgtatca

SEQ ID NO: 4115460 - DNA, 25 bp, Homo sapien
tgtatcatggctaggacggtatccc

SEQ ID NO: 4115461 - DNA, 25 bp, Homo sapien
tgttcaaaccccctctgtccttcac

SEQ ID NO: 4115462 - DNA, 25 bp, Homo sapien
ttgttcaaaccccctctgtccttca

SEQ ID NO: 4115463 - DNA, 25 bp, Homo sapien
ttcaaaccccctctgtccttcacag

SEQ ID NO: 4115464 - DNA, 25 bp, Homo sapien
gttcaaaccccctctgtccttcaca

SEQ ID NO: 4115465 - DNA, 25 bp, Homo sapien
tgtttttactctcgtggtgcctatg

SEQ ID NO: 4115466 - DNA, 25 bp, Homo sapien
tatcatgaggcgctggttggaaaac

SEQ ID NO: 4115467 - DNA, 25 bp, Homo sapien
aagaaggaagatgccgttgtattgc

SEQ ID NO: 4115468 - DNA, 25 bp, Homo sapien
ccactcaagagtgaaatgtgcatag

SEQ ID NO: 4115469 - DNA, 25 bp, Homo sapien
ggtgatgtacagcttcttacagcgt

SEQ ID NO: 4115470 - DNA, 25 bp, Homo sapien
cagcgtcattgatggcttttgtaac

SEQ ID NO: 4115471 - DNA, 25 bp, Homo sapien
gtacagcttcttacagcgtcattga

SEQ ID NO: 4115472 - DNA, 25 bp, Homo sapien
cattgatggcttttgtaactgcatt

SEQ ID NO: 4115473 - DNA, 25 bp, Homo sapien
tcacaagcagacttcctgctgcccc

SEQ ID NO: 4115474 - DNA, 25 bp, Homo sapien
aagcagacttcctgctgccccattt

SEQ ID NO: 4115475 - DNA, 25 bp, Homo sapien
gacttcctgctgccccatttggaga

SEQ ID NO: 4115476 - DNA, 25 bp, Homo sapien
ttcctgctgccccatttggagagcc

SEQ ID NO: 4115477 - DNA, 25 bp, Homo sapien
cagatacgtttccttataagcttta

SEQ ID NO: 4115478 - DNA, 25 bp, Homo sapien
tggaccccagtaacattgaagagtg

SEQ ID NO: 4115479 - DNA, 25 bp, Homo sapien
catcattttcagatacgtttcctta

SEQ ID NO: 4115480 - DNA, 25 bp, Homo sapien
gctttaaactgattgtagaggacac

SEQ ID NO: 4115481 - DNA, 25 bp, Homo sapien
taggaccttaaatcataagacctgg

SEQ ID NO: 4115482 - DNA, 25 bp, Homo sapien
tctagaaaatggagctaaggcccaa

SEQ ID NO: 4115483 - DNA, 25 bp, Homo sapien
gatgcggcatgtagtctctctgagc

SEQ ID NO: 4115484 - DNA, 25 bp, Homo sapien
taagacctggatctaagacctgaat

SEQ ID NO: 4115485 - DNA, 25 bp, Homo sapien
tgatgcagaacttcaagggctgcca

SEQ ID NO: 4115486 - DNA, 25 bp, Homo sapien
tagcagggctttctggtttggagcc

SEQ ID NO: 4115487 - DNA, 25 bp, Homo sapien
gagcctgtaggaccaaatgtggctg

SEQ ID NO: 4115488 - DNA, 25 bp, Homo sapien
gggatgaatatcacccttcatagga

SEQ ID NO: 4115489 - DNA, 25 bp, Homo sapien
ctatttgtgttgctcctctgaggga

SEQ ID NO: 4115490 - DNA, 25 bp, Homo sapien
gctctccaggcattccagtctggac

SEQ ID NO: 4115491 - DNA, 25 bp, Homo sapien
ttgctctccaggcattccagtctgg

SEQ ID NO: 4115492 - DNA, 25 bp, Homo sapien
tccaggcattccagtctggacactg

SEQ ID NO: 4115493 - DNA, 25 bp, Homo sapien
tcttgctctccaggcattccagtct

SEQ ID NO: 4115494 - DNA, 25 bp, Homo sapien
ccaggggtggagtgctacaatttgt

SEQ ID NO: 4115495 - DNA, 25 bp, Homo sapien
cagccagtgaggctcttacagcatt

SEQ ID NO: 4115496 - DNA, 25 bp, Homo sapien
cagtgaggctcttacagcattttgg

SEQ ID NO: 4115497 - DNA, 25 bp, Homo sapien
ggctcttacagcattttggagaggc

SEQ ID NO: 4115498 - DNA, 25 bp, Homo sapien
cagaaacttggatttgtcccaagga

SEQ ID NO: 4115499 - DNA, 25 bp, Homo sapien
tctgtgagaagatggctccatttgg

SEQ ID NO: 4115500 - DNA, 25 bp, Homo sapien
ctctgtgagaagatggctccatttg

SEQ ID NO: 4115501 - DNA, 25 bp, Homo sapien
acttggatttgtcccaaggagaaag

SEQ ID NO: 4115502 - DNA, 25 bp, Homo sapien
cataaggcccctctccatgagttca

SEQ ID NO: 4115503 - DNA, 25 bp, Homo sapien
ataaggcccctctccatgagttcat

SEQ ID NO: 4115504 - DNA, 25 bp, Homo sapien
ctccatgagttcatgatatcaacat

SEQ ID NO: 4115505 - DNA, 25 bp, Homo sapien
tcataaggcccctctccatgagttc

SEQ ID NO: 4115506 - DNA, 25 bp, Homo sapien
tggagttttctcaatcagatctaac

SEQ ID NO: 4115507 - DNA, 25 bp, Homo sapien
gcttgctcaaggacatcccatagca

SEQ ID NO: 4115508 - DNA, 25 bp, Homo sapien
caggtctcacttttcctgcttgctc

SEQ ID NO: 4115509 - DNA, 25 bp, Homo sapien
acctgtgccacaaggctgctgttcc

SEQ ID NO: 4115510 - DNA, 25 bp, Homo sapien
tagcttcaatatgtcagtctctatt

SEQ ID NO: 4115511 - DNA, 25 bp, Homo sapien
aatctctgctttatcaatagcttca

SEQ ID NO: 4115512 - DNA, 25 bp, Homo sapien
tgctgattcgaatgttcttaaccaa

SEQ ID NO: 4115513 - DNA, 25 bp, Homo sapien
ttcaatatgtcagtctctatttcag

SEQ ID NO: 4115514 - DNA, 25 bp, Homo sapien
cttgccaagcagtcaggacattttg

SEQ ID NO: 4115515 - DNA, 25 bp, Homo sapien
tactatgaaaggacgtggttgctcg

SEQ ID NO: 4115516 - DNA, 25 bp, Homo sapien
tgtccaataacccagtacagctgat

SEQ ID NO: 4115517 - DNA, 25 bp, Homo sapien
gccttgattgttgtcaccagcagca

SEQ ID NO: 4115518 - DNA, 25 bp, Homo sapien
tattgtacggctggctttgcaggta

SEQ ID NO: 4115519 - DNA, 25 bp, Homo sapien
gcttggatgtggacaataaaaacaa

SEQ ID NO: 4115520 - DNA, 25 bp, Homo sapien
acagcatgctgacctatacctccgg

SEQ ID NO: 4115521 - DNA, 25 bp, Homo sapien
caacaatgagatggcagctccactg

SEQ ID NO: 4115522 - DNA, 25 bp, Homo sapien
ggacttgtcagtcacatctgtaacc

SEQ ID NO: 4115523 - DNA, 25 bp, Homo sapien
acttgtcagtcacatctgtaacctg

SEQ ID NO: 4115524 - DNA, 25 bp, Homo sapien
tcaggacttgtcagtcacatctgta

SEQ ID NO: 4115525 - DNA, 25 bp, Homo sapien
tcagtcacatctgtaacctgctcac

SEQ ID NO: 4115526 - DNA, 25 bp, Homo sapien
gacattttgatctcttggaaagtct

SEQ ID NO: 4115527 - DNA, 25 bp, Homo sapien
gaacacagccttggcaatatccttg

SEQ ID NO: 4115528 - DNA, 25 bp, Homo sapien
gaaagtcttaactctggagaacaca

SEQ ID NO: 4115529 - DNA, 25 bp, Homo sapien
gaggtggaatatcttgtcttgatca

SEQ ID NO: 4115530 - DNA, 25 bp, Homo sapien
tacaagccttcttcgtggaagatga

SEQ ID NO: 4115531 - DNA, 25 bp, Homo sapien
gttacaagccttcttcgtggaagat

SEQ ID NO: 4115532 - DNA, 25 bp, Homo sapien
acaagccttcttcgtggaagatgaa

SEQ ID NO: 4115533 - DNA, 25 bp, Homo sapien
tgttacaagccttcttcgtggaaga

SEQ ID NO: 4115534 - DNA, 25 bp, Homo sapien
gatccagttcatattccaatatatt

SEQ ID NO: 4115535 - DNA, 25 bp, Homo sapien
agcaccaactggtgctttatcctgt

SEQ ID NO: 4115536 - DNA, 25 bp, Homo sapien
tcttctccgaccaacagcaccaact

SEQ ID NO: 4115537 - DNA, 25 bp, Homo sapien
caccaactggtgctttatcctgtga

SEQ ID NO: 4115538 - DNA, 25 bp, Homo sapien
ctttccctgccttcccgttgatcat

SEQ ID NO: 4115539 - DNA, 25 bp, Homo sapien
cacaataactttccctgccttcccg

SEQ ID NO: 4115540 - DNA, 25 bp, Homo sapien
tctctccttccccacaataactttc

SEQ ID NO: 4115541 - DNA, 25 bp, Homo sapien
aagtctctccttccccacaataact

SEQ ID NO: 4115542 - DNA, 25 bp, Homo sapien
ctgtccaaatccagatgatctgcaa

SEQ ID NO: 4115543 - DNA, 25 bp, Homo sapien
gtccaaatccagatgatctgcaaag

SEQ ID NO: 4115544 - DNA, 25 bp, Homo sapien
caaatccagatgatctgcaaagtcc

SEQ ID NO: 4115545 - DNA, 25 bp, Homo sapien
tccaaatccagatgatctgcaaagt

SEQ ID NO: 4115546 - DNA, 25 bp, Homo sapien
aaacttgacacctgaagccccttgc

SEQ ID NO: 4115547 - DNA, 25 bp, Homo sapien
tatcttcatttaggcaagaactatt

SEQ ID NO: 4115548 - DNA, 25 bp, Homo sapien
ttttatatacttgtcgtaacccagc

SEQ ID NO: 4115549 - DNA, 25 bp, Homo sapien
tacttgtcgtaacccagcttctggc

SEQ ID NO: 4115550 - DNA, 25 bp, Homo sapien
tgggccagaagtctgctagggattt

SEQ ID NO: 4115551 - DNA, 25 bp, Homo sapien
cagaagtctgctagggatttgagga

SEQ ID NO: 4115552 - DNA, 25 bp, Homo sapien
tttccaacttggcttcgatccaggg

SEQ ID NO: 4115553 - DNA, 25 bp, Homo sapien
ggaatttccaacttggcttcgatcc

SEQ ID NO: 4115554 - DNA, 25 bp, Homo sapien
ggctgcaccagaagacgagagtcca

SEQ ID NO: 4115555 - DNA, 25 bp, Homo sapien
gtccattgatgccattcatacaggt

SEQ ID NO: 4115556 - DNA, 25 bp, Homo sapien
gacgagagtccattgatgccattca

SEQ ID NO: 4115557 - DNA, 25 bp, Homo sapien
ccagaagacgagagtccattgatgc

SEQ ID NO: 4115558 - DNA, 25 bp, Homo sapien
ctggacattatagatcaccaagatg

SEQ ID NO: 4115559 - DNA, 25 bp, Homo sapien
aagatgagtaacaatcaggaaggaa

SEQ ID NO: 4115560 - DNA, 25 bp, Homo sapien
agatgagtaacaatcaggaaggaac

SEQ ID NO: 4115561 - DNA, 25 bp, Homo sapien
gaaacgagctgtagagcatgtcctg

SEQ ID NO: 4115562 - DNA, 25 bp, Homo sapien
tggcactacgtgcaaagctgtacac

SEQ ID NO: 4115563 - DNA, 25 bp, Homo sapien
gctgctgaaccctcttgaggtgtga

SEQ ID NO: 4115564 - DNA, 25 bp, Homo sapien
gctgtacacatgttaccctcttctg

SEQ ID NO: 4115565 - DNA, 25 bp, Homo sapien
tcttaaagtgtagtgggattgcctt

SEQ ID NO: 4115566 - DNA, 25 bp, Homo sapien
gctattaatagtggccctagtacgt

SEQ ID NO: 4115567 - DNA, 25 bp, Homo sapien
tcagccagtgcgaacacaagtgtct

SEQ ID NO: 4115568 - DNA, 25 bp, Homo sapien
tgtgggctctcaatgatgccatctt

SEQ ID NO: 4115569 - DNA, 25 bp, Homo sapien
gctggtcatttttcacgagtgtttc

SEQ ID NO: 4115570 - DNA, 25 bp, Homo sapien
tatcacagtaaaatagaatgccctg

SEQ ID NO: 4115571 - DNA, 25 bp, Homo sapien
cctgtctacggtgaaactgctttgg

SEQ ID NO: 4115572 - DNA, 25 bp, Homo sapien
ttttcacgagtgtttccttgctgtg

SEQ ID NO: 4115573 - DNA, 25 bp, Homo sapien
tctttttctgtccttaatggatctg

SEQ ID NO: 4115574 - DNA, 25 bp, Homo sapien
tctggtgacagtgatttggatgccg

SEQ ID NO: 4115575 - DNA, 25 bp, Homo sapien
gatgccgtggttcagagtcgttgct

SEQ ID NO: 4115576 - DNA, 25 bp, Homo sapien
ggttcagagtcgttgctgttggcat

SEQ ID NO: 4115577 - DNA, 25 bp, Homo sapien
aggacagggcttgtcactcgtatgg

SEQ ID NO: 4115578 - DNA, 25 bp, Homo sapien
gggcttgtcactcgtatggttttac

SEQ ID NO: 4115579 - DNA, 25 bp, Homo sapien
gacagggcttgtcactcgtatggtt

SEQ ID NO: 4115580 - DNA, 25 bp, Homo sapien
tgtcactcgtatggttttacacaac

SEQ ID NO: 4115581 - DNA, 25 bp, Homo sapien
tctcccggcatccttgtgtgcatct

SEQ ID NO: 4115582 - DNA, 25 bp, Homo sapien
tgtgcacccggatgaggcagctgat

SEQ ID NO: 4115583 - DNA, 25 bp, Homo sapien
cttctgggtcgggctcccagctgtg

SEQ ID NO: 4115584 - DNA, 25 bp, Homo sapien
tcagaagatcacttctctcccggca

SEQ ID NO: 4115585 - DNA, 25 bp, Homo sapien
cagaagccaacagggccgtgtgaaa

SEQ ID NO: 4115586 - DNA, 25 bp, Homo sapien
tgaaagcagaaagcaaggtgatgaa

SEQ ID NO: 4115587 - DNA, 25 bp, Homo sapien
gaccatgaggctgacgtacctctgc

SEQ ID NO: 4115588 - DNA, 25 bp, Homo sapien
tgaggctgacgtacctctgcttctg

SEQ ID NO: 4115589 - DNA, 25 bp, Homo sapien
cggtgtaccgcactaaggcagtctg

SEQ ID NO: 4115590 - DNA, 25 bp, Homo sapien
cacggtgtaccgcactaaggcagtc

SEQ ID NO: 4115591 - DNA, 25 bp, Homo sapien
cttcacggtgtaccgcactaaggca

SEQ ID NO: 4115592 - DNA, 25 bp, Homo sapien
agtcttcacggtgtaccgcactaag

SEQ ID NO: 4115593 - DNA, 25 bp, Homo sapien
gtcatgggcatgtactggaaacttg

SEQ ID NO: 4115594 - DNA, 25 bp, Homo sapien
gctgattggctacaggtttgggact

SEQ ID NO: 4115595 - DNA, 25 bp, Homo sapien
gatgttcgatccgatgtcccaggag

SEQ ID NO: 4115596 - DNA, 25 bp, Homo sapien
tcagcaagagtcaggcttgggtcat

SEQ ID NO: 4115597 - DNA, 25 bp, Homo sapien
tagaccatttagctcctcagagttg

SEQ ID NO: 4115598 - DNA, 25 bp, Homo sapien
gagctcttaattcagatttttccca

SEQ ID NO: 4115599 - DNA, 25 bp, Homo sapien
tattgtatggaagtggctaaatgca

SEQ ID NO: 4115600 - DNA, 25 bp, Homo sapien
tgcatttgattcttgctgagcacga

SEQ ID NO: 4115601 - DNA, 25 bp, Homo sapien
ttcttgggccctctgtcaatccatt

SEQ ID NO: 4115602 - DNA, 25 bp, Homo sapien
tgtcaatccatttaatctgtaccat

SEQ ID NO: 4115603 - DNA, 25 bp, Homo sapien
tttttgtgttcttgggccctctgtc

SEQ ID NO: 4115604 - DNA, 25 bp, Homo sapien
tgtgttcttgggccctctgtcaatc

SEQ ID NO: 4115605 - DNA, 25 bp, Homo sapien
tagcccaggatgacctttgctccat

SEQ ID NO: 4115606 - DNA, 25 bp, Homo sapien
actgcactagcaactggagtcctga

SEQ ID NO: 4115607 - DNA, 25 bp, Homo sapien
gagtcctgaacaaatcacagtgctg

SEQ ID NO: 4115608 - DNA, 25 bp, Homo sapien
aatggaagcctcatatcggtagccc

SEQ ID NO: 4115609 - DNA, 25 bp, Homo sapien
ttgaaacgcaatattaaagggtaca

SEQ ID NO: 4115610 - DNA, 25 bp, Homo sapien
gatagcattggtgctttgaaacgca

SEQ ID NO: 4115611 - DNA, 25 bp, Homo sapien
cctctgctagggatagcattggtgc

SEQ ID NO: 4115612 - DNA, 25 bp, Homo sapien
ttaaaccattcagagcaggtggcaa

SEQ ID NO: 4115613 - DNA, 25 bp, Homo sapien
ttgcttctggccgtgaatgctggac

SEQ ID NO: 4115614 - DNA, 25 bp, Homo sapien
ggacataaccttgttgtgctgtgat

SEQ ID NO: 4115615 - DNA, 25 bp, Homo sapien
tatagaactaaatggcttctgctct

SEQ ID NO: 4115616 - DNA, 25 bp, Homo sapien
gctgtgatttgggttatagaactaa

SEQ ID NO: 4115617 - DNA, 25 bp, Homo sapien
gatctctggggaagtttcagtcgtt

SEQ ID NO: 4115618 - DNA, 25 bp, Homo sapien
cttttgaatttttcgaggatctctg

SEQ ID NO: 4115619 - DNA, 25 bp, Homo sapien
cacttttgaatttttcgaggatctc

SEQ ID NO: 4115620 - DNA, 25 bp, Homo sapien
tttgaatttttcgaggatctctggg

SEQ ID NO: 4115621 - DNA, 25 bp, Homo sapien
tataagtgcttatgccctaacagga

SEQ ID NO: 4115622 - DNA, 25 bp, Homo sapien
cacagatgagacagtgtgttgagta

SEQ ID NO: 4115623 - DNA, 25 bp, Homo sapien
tcgagttcttggagtgtataagtgc

SEQ ID NO: 4115624 - DNA, 25 bp, Homo sapien
tggagccacacattattagcctagg

SEQ ID NO: 4115625 - DNA, 25 bp, Homo sapien
gaggggaaagtagtatgcagcatta

SEQ ID NO: 4115626 - DNA, 25 bp, Homo sapien
aggggaaagtagtatgcagcattat

SEQ ID NO: 4115627 - DNA, 25 bp, Homo sapien
tgaggggaaagtagtatgcagcatt

SEQ ID NO: 4115628 - DNA, 25 bp, Homo sapien
atgaggggaaagtagtatgcagcat

SEQ ID NO: 4115629 - DNA, 25 bp, Homo sapien
gaaaagcaagagcaaacgcattcaa

SEQ ID NO: 4115630 - DNA, 25 bp, Homo sapien
ctagaaaagcaagagcaaacgcatt

SEQ ID NO: 4115631 - DNA, 25 bp, Homo sapien
aactagaaaagcaagagcaaacgca

SEQ ID NO: 4115632 - DNA, 25 bp, Homo sapien
tagaaaagcaagagcaaacgcattc

SEQ ID NO: 4115633 - DNA, 25 bp, Homo sapien
agacaagaggttttgccacgtatcc

SEQ ID NO: 4115634 - DNA, 25 bp, Homo sapien
ggcgtgtaccatgcttggtagagac

SEQ ID NO: 4115635 - DNA, 25 bp, Homo sapien
tataggcgtgtaccatgcttggtag

SEQ ID NO: 4115636 - DNA, 25 bp, Homo sapien
aagaggttttgccacgtatcccagg

SEQ ID NO: 4115637 - DNA, 25 bp, Homo sapien
cctttactcctttaggcaagaggag

SEQ ID NO: 4115638 - DNA, 25 bp, Homo sapien
taaggtactcccaaggttgctgcca

SEQ ID NO: 4115639 - DNA, 25 bp, Homo sapien
gaccattggttctttccatggaaag

SEQ ID NO: 4115640 - DNA, 25 bp, Homo sapien
tggactgaaagtccctaaggtactc

SEQ ID NO: 4115641 - DNA, 25 bp, Homo sapien
ggactctcttggagtcctgtttggg

SEQ ID NO: 4115642 - DNA, 25 bp, Homo sapien
ggaggttttgagttagtcagcatct

SEQ ID NO: 4115643 - DNA, 25 bp, Homo sapien
ccaatcaaaactgttgctttggctt

SEQ ID NO: 4115644 - DNA, 25 bp, Homo sapien
tcagtagtgcctgtcttgaggccag

SEQ ID NO: 4115645 - DNA, 25 bp, Homo sapien
gaaggcactcactacacagcctctg

SEQ ID NO: 4115646 - DNA, 25 bp, Homo sapien
gacacctgatgctcaatttaccgtt

SEQ ID NO: 4115647 - DNA, 25 bp, Homo sapien
ccaggtagcacctgatctaggtaag

SEQ ID NO: 4115648 - DNA, 25 bp, Homo sapien
caagggtttcaaggaacctctctct

SEQ ID NO: 4115649 - DNA, 25 bp, Homo sapien
catcaacttaggagacagacacctg

SEQ ID NO: 4115650 - DNA, 25 bp, Homo sapien
tattatccgttagagaaaagcaaac

SEQ ID NO: 4115651 - DNA, 25 bp, Homo sapien
ggagtatgtctcaaacctcaacagc

SEQ ID NO: 4115652 - DNA, 25 bp, Homo sapien
caagctacatatctgacgaaggact

SEQ ID NO: 4115653 - DNA, 25 bp, Homo sapien
catgagaaacgttttaccaaagagg

SEQ ID NO: 4115654 - DNA, 25 bp, Homo sapien
cactttgggctcttgctccgtatta

SEQ ID NO: 4115655 - DNA, 25 bp, Homo sapien
caaaggctgtgatattatgtgctcc

SEQ ID NO: 4115656 - DNA, 25 bp, Homo sapien
cgtattaagatgcacgattgcacca

SEQ ID NO: 4115657 - DNA, 25 bp, Homo sapien
tctcgcctagcttgagtagtattgc

SEQ ID NO: 4115658 - DNA, 25 bp, Homo sapien
gtctctaacttctggtgacaagcaa

SEQ ID NO: 4115659 - DNA, 25 bp, Homo sapien
tggtgtctcatattatttcccaggc

SEQ ID NO: 4115660 - DNA, 25 bp, Homo sapien
gagatggtgtctcatattatttccc

SEQ ID NO: 4115661 - DNA, 25 bp, Homo sapien
cttttggaatgcaagtggtttttga

SEQ ID NO: 4115662 - DNA, 25 bp, Homo sapien
ggtgctctctataattcactgttgg

SEQ ID NO: 4115663 - DNA, 25 bp, Homo sapien
tctctataattcactgttggagtct

SEQ ID NO: 4115664 - DNA, 25 bp, Homo sapien
gaaacaacttggtgctctctataat

SEQ ID NO: 4115665 - DNA, 25 bp, Homo sapien
catcattataagaaacaacttggtg

SEQ ID NO: 4115666 - DNA, 25 bp, Homo sapien
actcccacttggagagtttggccca

SEQ ID NO: 4115667 - DNA, 25 bp, Homo sapien
ctcccacttggagagtttggcccag

SEQ ID NO: 4115668 - DNA, 25 bp, Homo sapien
aggcttttaggggaaacagcaagag

SEQ ID NO: 4115669 - DNA, 25 bp, Homo sapien
cataggtgaaaagaaccaaggcttt

SEQ ID NO: 4115670 - DNA, 25 bp, Homo sapien
ggcttttaggggaaacagcaagagc

SEQ ID NO: 4115671 - DNA, 25 bp, Homo sapien
tcaagagtcagcataggtgaaaaga

SEQ ID NO: 4115672 - DNA, 25 bp, Homo sapien
tttgactagtttaggcaagttctag

SEQ ID NO: 4115673 - DNA, 25 bp, Homo sapien
ttgactagtttaggcaagttctagg

SEQ ID NO: 4115674 - DNA, 25 bp, Homo sapien
tgagcctggtccacatttatttctt

SEQ ID NO: 4115675 - DNA, 25 bp, Homo sapien
cagtctctatgacagggcaggttag

SEQ ID NO: 4115676 - DNA, 25 bp, Homo sapien
tcgtaaccagcagggcagaatcagc

SEQ ID NO: 4115677 - DNA, 25 bp, Homo sapien
tggtaagatttcatgcccaagaaga

SEQ ID NO: 4115678 - DNA, 25 bp, Homo sapien
ttttggaaaaataggtcagacattc

SEQ ID NO: 4115679 - DNA, 25 bp, Homo sapien
ggcagtgaacggtcctgtctctctg

SEQ ID NO: 4115680 - DNA, 25 bp, Homo sapien
gggacccgctgagcctgaccatgtg

SEQ ID NO: 4115681 - DNA, 25 bp, Homo sapien
tgcacctagcttggtgtctgcccca

SEQ ID NO: 4115682 - DNA, 25 bp, Homo sapien
tgagcctgaccatgtgactccctgg

SEQ ID NO: 4115683 - DNA, 25 bp, Homo sapien
tctcttggtcgctctgctttttgct

SEQ ID NO: 4115684 - DNA, 25 bp, Homo sapien
ttaaattttctcttggtcgctctgc

SEQ ID NO: 4115685 - DNA, 25 bp, Homo sapien
ttctcttggtcgctctgctttttgc

SEQ ID NO: 4115686 - DNA, 25 bp, Homo sapien
aattttctcttggtcgctctgcttt

SEQ ID NO: 4115687 - DNA, 25 bp, Homo sapien
ttgagtgtctgctgtgttagagggc

SEQ ID NO: 4115688 - DNA, 25 bp, Homo sapien
ctgctgtgttagagggcgaaatgat

SEQ ID NO: 4115689 - DNA, 25 bp, Homo sapien
gtgttagagggcgaaatgatcctgt

SEQ ID NO: 4115690 - DNA, 25 bp, Homo sapien
tagagggcgaaatgatcctgtactt

SEQ ID NO: 4115691 - DNA, 25 bp, Homo sapien
gcacgggcagccactgtgtttttaa

SEQ ID NO: 4115692 - DNA, 25 bp, Homo sapien
cggaatgctgggatatctacccacc

SEQ ID NO: 4115693 - DNA, 25 bp, Homo sapien
tggccctcatcgaggcccacggcca

SEQ ID NO: 4115694 - DNA, 25 bp, Homo sapien
caggcttgctcccatttttggtaac

SEQ ID NO: 4115695 - DNA, 25 bp, Homo sapien
gccgaccgcacggaatgctgggata

SEQ ID NO: 4115696 - DNA, 25 bp, Homo sapien
cgcgccagctcgtagggagtaaagc

SEQ ID NO: 4115697 - DNA, 25 bp, Homo sapien
agccatacatctttggaataatgtc

SEQ ID NO: 4115698 - DNA, 25 bp, Homo sapien
tttggaataatgtcccgcatgaact

SEQ ID NO: 4115699 - DNA, 25 bp, Homo sapien
ttggtgcggacgtgtcccccactct

SEQ ID NO: 4115700 - DNA, 25 bp, Homo sapien
ctttcttcatggcgggcagggcgtt

SEQ ID NO: 4115701 - DNA, 25 bp, Homo sapien
actttcttcatggcgggcagggcgt

SEQ ID NO: 4115702 - DNA, 25 bp, Homo sapien
cactttcttcatggcgggcagggcg

SEQ ID NO: 4115703 - DNA, 25 bp, Homo sapien
tgaaggttttatggatagggtatgg

SEQ ID NO: 4115704 - DNA, 25 bp, Homo sapien
tgtgaaggttttatggatagggtat

SEQ ID NO: 4115705 - DNA, 25 bp, Homo sapien
ctgtgaaggttttatggatagggta

SEQ ID NO: 4115706 - DNA, 25 bp, Homo sapien
gtgaaggttttatggatagggtatg

SEQ ID NO: 4115707 - DNA, 25 bp, Homo sapien
tccggtaaatcaagtggtggcctgc

SEQ ID NO: 4115708 - DNA, 25 bp, Homo sapien
tacaaagttgcaaaccaagactacg

SEQ ID NO: 4115709 - DNA, 25 bp, Homo sapien
atcggtctattggttgcagtcagcc

SEQ ID NO: 4115710 - DNA, 25 bp, Homo sapien
gcagggatacagatacccggtccaa

SEQ ID NO: 4115711 - DNA, 25 bp, Homo sapien
gggagatgtgctttatggacgccat

SEQ ID NO: 4115712 - DNA, 25 bp, Homo sapien
cttgtgtgtttcggcttgggagatg

SEQ ID NO: 4115713 - DNA, 25 bp, Homo sapien
ttgtgtgtttcggcttgggagatgt

SEQ ID NO: 4115714 - DNA, 25 bp, Homo sapien
tgtgtgtttcggcttgggagatgtg

SEQ ID NO: 4115715 - DNA, 25 bp, Homo sapien
gggcacacgggacgcctcttctagg

SEQ ID NO: 4115716 - DNA, 25 bp, Homo sapien
tatccgggcgttagttaagggcaca

SEQ ID NO: 4115717 - DNA, 25 bp, Homo sapien
gctcccctgctttgcgctcgtgtta

SEQ ID NO: 4115718 - DNA, 25 bp, Homo sapien
tgcgctcgtgttaaaaaagccgccc

SEQ ID NO: 4115719 - DNA, 25 bp, Homo sapien
tctgcctaagcggtcgcggaagagc

SEQ ID NO: 4115720 - DNA, 25 bp, Homo sapien
tggcagtggcggttttagtagctac

SEQ ID NO: 4115721 - DNA, 25 bp, Homo sapien
tacgagtctgagttcgtgtctgcct

SEQ ID NO: 4115722 - DNA, 25 bp, Homo sapien
gcggttttagtagctacgagtctga

SEQ ID NO: 4115723 - DNA, 25 bp, Homo sapien
cgagatgcgcgcaaccgcgggagca

SEQ ID NO: 4115724 - DNA, 25 bp, Homo sapien
gccgagatgcgcgcaaccgcgggag

SEQ ID NO: 4115725 - DNA, 25 bp, Homo sapien
agatgcgcgcaaccgcgggagcagc

SEQ ID NO: 4115726 - DNA, 25 bp, Homo sapien
gagatgcgcgcaaccgcgggagcag

SEQ ID NO: 4115727 - DNA, 25 bp, Homo sapien
cgtaaggctggtcggcttcttccgc

SEQ ID NO: 4115728 - DNA, 25 bp, Homo sapien
tgctgccgtggaaaccgtatggacg

SEQ ID NO: 4115729 - DNA, 25 bp, Homo sapien
cggaaactgcacagccagtcggctt

SEQ ID NO: 4115730 - DNA, 25 bp, Homo sapien
gtatggacgaatccaaacctggagg

SEQ ID NO: 4115731 - DNA, 25 bp, Homo sapien
tccattgcagactccgctggtatcc

SEQ ID NO: 4115732 - DNA, 25 bp, Homo sapien
aagttgcagagctctaccggcaata

SEQ ID NO: 4115733 - DNA, 25 bp, Homo sapien
cttccatcaagttgcagagctctac

SEQ ID NO: 4115734 - DNA, 25 bp, Homo sapien
cttccattgcagactccgctggtat

SEQ ID NO: 4115735 - DNA, 25 bp, Homo sapien
ctcaggggtactgagggatcaaaac

SEQ ID NO: 4115736 - DNA, 25 bp, Homo sapien
gtcctcaggggtactgagggatcaa

SEQ ID NO: 4115737 - DNA, 25 bp, Homo sapien
tcctcaggggtactgagggatcaaa

SEQ ID NO: 4115738 - DNA, 25 bp, Homo sapien
gggtcctcaggggtactgagggatc

SEQ ID NO: 4115739 - DNA, 25 bp, Homo sapien
ttgagctgcttggatctggacccac

SEQ ID NO: 4115740 - DNA, 25 bp, Homo sapien
catctggacattgagctgcttggat

SEQ ID NO: 4115741 - DNA, 25 bp, Homo sapien
gacattgagctgcttggatctggac

SEQ ID NO: 4115742 - DNA, 25 bp, Homo sapien
cacaacatctggacattgagctgct

SEQ ID NO: 4115743 - DNA, 25 bp, Homo sapien
aattctttgggtcaatttgtgctac

SEQ ID NO: 4115744 - DNA, 25 bp, Homo sapien
caattctttgggtcaatttgtgcta

SEQ ID NO: 4115745 - DNA, 25 bp, Homo sapien
tcaattctttgggtcaatttgtgct

SEQ ID NO: 4115746 - DNA, 25 bp, Homo sapien
atattaacactttgcttccttttca

SEQ ID NO: 4115747 - DNA, 25 bp, Homo sapien
tgaaagaaaaatattaacactttgc

SEQ ID NO: 4115748 - DNA, 25 bp, Homo sapien
tattaacactttgcttccttttcaa

SEQ ID NO: 4115749 - DNA, 25 bp, Homo sapien
ctgaaagaaaaatattaacactttg

SEQ ID NO: 4115750 - DNA, 25 bp, Homo sapien
ttgctgttgccaccgaagtgttggg

SEQ ID NO: 4115751 - DNA, 25 bp, Homo sapien
tgtcgaacagttgaaaacagtgcca

SEQ ID NO: 4115752 - DNA, 25 bp, Homo sapien
aataaccttcagtggctggttggca

SEQ ID NO: 4115753 - DNA, 25 bp, Homo sapien
aacagttgaaaacagtgccacttgt

SEQ ID NO: 4115754 - DNA, 25 bp, Homo sapien
tcttccttgtgcagaatctactccg

SEQ ID NO: 4115755 - DNA, 25 bp, Homo sapien
atcttccttgtgcagaatctactcc

SEQ ID NO: 4115756 - DNA, 25 bp, Homo sapien
aatctactccgggactttcaactgt

SEQ ID NO: 4115757 - DNA, 25 bp, Homo sapien
ctactccgggactttcaactgtggc

SEQ ID NO: 4115758 - DNA, 25 bp, Homo sapien
tcttgcctcgggccactaaatgact

SEQ ID NO: 4115759 - DNA, 25 bp, Homo sapien
ctcttgcctcgggccactaaatgac

SEQ ID NO: 4115760 - DNA, 25 bp, Homo sapien
gccactaaatgactcattgcaggtt

SEQ ID NO: 4115761 - DNA, 25 bp, Homo sapien
tgatgatgccacattgggcgatgag

SEQ ID NO: 4115762 - DNA, 25 bp, Homo sapien
tcttagacactgtgatgatgccaca

SEQ ID NO: 4115763 - DNA, 25 bp, Homo sapien
gcatttggtcagagtttagcacaag

SEQ ID NO: 4115764 - DNA, 25 bp, Homo sapien
ttagcacaaggcctatgtgttggca

SEQ ID NO: 4115765 - DNA, 25 bp, Homo sapien
ggagcagctgctgacctgctgctgc

SEQ ID NO: 4115766 - DNA, 25 bp, Homo sapien
tgctggaagccagtggaacaggaac

SEQ ID NO: 4115767 - DNA, 25 bp, Homo sapien
gctgctggaagccagtggaacagga

SEQ ID NO: 4115768 - DNA, 25 bp, Homo sapien
ctgctgctggaagccagtggaacag

SEQ ID NO: 4115769 - DNA, 25 bp, Homo sapien
tctcctactctcagcttggaggaag

SEQ ID NO: 4115770 - DNA, 25 bp, Homo sapien
ctcccccgcgagcgggcggcttgca

SEQ ID NO: 4115771 - DNA, 25 bp, Homo sapien
ggctcccccgcgagcgggcggcttg

SEQ ID NO: 4115772 - DNA, 25 bp, Homo sapien
cccgcgagcgggcggcttgcacctc

SEQ ID NO: 4115773 - DNA, 25 bp, Homo sapien
ccccgcgagcgggcggcttgcacct

SEQ ID NO: 4115774 - DNA, 25 bp, Homo sapien
cgggcactgttgcgggcgccgccgc

SEQ ID NO: 4115775 - DNA, 25 bp, Homo sapien
gcgggcactgttgcgggcgccgccg

SEQ ID NO: 4115776 - DNA, 25 bp, Homo sapien
cgcgcgggcgtcaagggctcggggc

SEQ ID NO: 4115777 - DNA, 25 bp, Homo sapien
cgcgggcgtcaagggctcggggcgc

SEQ ID NO: 4115778 - DNA, 25 bp, Homo sapien
cgggcgtcaagggctcggggcgcgc

SEQ ID NO: 4115779 - DNA, 25 bp, Homo sapien
gcgcgggcgtcaagggctcggggcg

SEQ ID NO: 4115780 - DNA, 25 bp, Homo sapien
ccgcaagaggtgcacggagcgcaac

SEQ ID NO: 4115781 - DNA, 25 bp, Homo sapien
tcgtcggggcgttcgagactctcgg

SEQ ID NO: 4115782 - DNA, 25 bp, Homo sapien
cttcctccgcgtcgttctcggcccg

SEQ ID NO: 4115783 - DNA, 25 bp, Homo sapien
gcaagaggtgcacggagcgcaaccc

SEQ ID NO: 4115784 - DNA, 25 bp, Homo sapien
tcactgtcacctcggagtgccggag

SEQ ID NO: 4115785 - DNA, 25 bp, Homo sapien
ttcatcaagttttgcgggtgagtgg

SEQ ID NO: 4115786 - DNA, 25 bp, Homo sapien
cggaatccaggccacgcggcgtggc

SEQ ID NO: 4115787 - DNA, 25 bp, Homo sapien
ctctttgaaggtcgcctcactgtca

SEQ ID NO: 4115788 - DNA, 25 bp, Homo sapien
ttcacctgttacatagcaagaacct

SEQ ID NO: 4115789 - DNA, 25 bp, Homo sapien
caaacaggctgcctacaggcacact

SEQ ID NO: 4115790 - DNA, 25 bp, Homo sapien
aggaagggctattcccagcttcacc

SEQ ID NO: 4115791 - DNA, 25 bp, Homo sapien
ggaagtccaaacaggctgcctacag

SEQ ID NO: 4115792 - DNA, 25 bp, Homo sapien
actgtcatacagagcaagtccaggg

SEQ ID NO: 4115793 - DNA, 25 bp, Homo sapien
cccttgaggtgtggcacagaatacc

SEQ ID NO: 4115794 - DNA, 25 bp, Homo sapien
tcaaagtcaaagcagagaagctagt

SEQ ID NO: 4115795 - DNA, 25 bp, Homo sapien
tcacatcaatgctttaggccatggg

SEQ ID NO: 4115796 - DNA, 25 bp, Homo sapien
tgattcccctcacttttcagaagat

SEQ ID NO: 4115797 - DNA, 25 bp, Homo sapien
cctgcgggtgaaggagctgattccc

SEQ ID NO: 4115798 - DNA, 25 bp, Homo sapien
gagaactgcaccttctagagtctct

SEQ ID NO: 4115799 - DNA, 25 bp, Homo sapien
aaggaaacccgctaagcactcctga

SEQ ID NO: 4115800 - DNA, 25 bp, Homo sapien
gcctggctacgaacaacatgggaca

SEQ ID NO: 4115801 - DNA, 25 bp, Homo sapien
cagtacttggcaagacacgcctggc

SEQ ID NO: 4115802 - DNA, 25 bp, Homo sapien
ccactccgggtgtatttgagcaaaa

SEQ ID NO: 4115803 - DNA, 25 bp, Homo sapien
agcagcacattctgcattaaccagg

SEQ ID NO: 4115804 - DNA, 25 bp, Homo sapien
gtcagccgggaagcgtttgtacagg

SEQ ID NO: 4115805 - DNA, 25 bp, Homo sapien
tcacaggcagatccttttctttggg

SEQ ID NO: 4115806 - DNA, 25 bp, Homo sapien
ggcagggaacgggtaatggcagtgg

SEQ ID NO: 4115807 - DNA, 25 bp, Homo sapien
tccatgtcactgctcacaggcagat

SEQ ID NO: 4115808 - DNA, 25 bp, Homo sapien
tcagcaagaactctaaagtcagagt

SEQ ID NO: 4115809 - DNA, 25 bp, Homo sapien
cagcaagaactctaaagtcagagtc

SEQ ID NO: 4115810 - DNA, 25 bp, Homo sapien
atcagcaagaactctaaagtcagag

SEQ ID NO: 4115811 - DNA, 25 bp, Homo sapien
ccatcccaggtaaaagagtcttggc

SEQ ID NO: 4115812 - DNA, 25 bp, Homo sapien
caattatagcaatggccctggaata

SEQ ID NO: 4115813 - DNA, 25 bp, Homo sapien
ctaagggtggtagccagatggcact

SEQ ID NO: 4115814 - DNA, 25 bp, Homo sapien
gagatgtgtaggcacaaggactccc

SEQ ID NO: 4115815 - DNA, 25 bp, Homo sapien
tgaatcctcaacaccccagtggtaa

SEQ ID NO: 4115816 - DNA, 25 bp, Homo sapien
aaatctactgactccacgatgttgg

SEQ ID NO: 4115817 - DNA, 25 bp, Homo sapien
cttgctttataaggacaggtcgctg

SEQ ID NO: 4115818 - DNA, 25 bp, Homo sapien
ggtcgctgtctaccctgaatcctca

SEQ ID NO: 4115819 - DNA, 25 bp, Homo sapien
aaatgggcagccttagccagaagca

SEQ ID NO: 4115820 - DNA, 25 bp, Homo sapien
tgccacacatatgagcaggatctct

SEQ ID NO: 4115821 - DNA, 25 bp, Homo sapien
tgtccattgtcaaaatcttgtctgc

SEQ ID NO: 4115822 - DNA, 25 bp, Homo sapien
gccatgactcctcttgcaatttcaa

SEQ ID NO: 4115823 - DNA, 25 bp, Homo sapien
ggatataatttccacatggccacca

SEQ ID NO: 4115824 - DNA, 25 bp, Homo sapien
tctgaaagggatgactgggcctctc

SEQ ID NO: 4115825 - DNA, 25 bp, Homo sapien
gggcctctctctcacgtggatataa

SEQ ID NO: 4115826 - DNA, 25 bp, Homo sapien
gcatttgtgatctccctcaggtcag

SEQ ID NO: 4115827 - DNA, 25 bp, Homo sapien
aacggcggaaggtcccacttctgca

SEQ ID NO: 4115828 - DNA, 25 bp, Homo sapien
cttccagaagcaccaacggcggaag

SEQ ID NO: 4115829 - DNA, 25 bp, Homo sapien
ccttgctgggcactacttccagaag

SEQ ID NO: 4115830 - DNA, 25 bp, Homo sapien
gtccttgctgggcactacttccaga

SEQ ID NO: 4115831 - DNA, 25 bp, Homo sapien
cagattctgcagctatggaaactga

SEQ ID NO: 4115832 - DNA, 25 bp, Homo sapien
aaaatctcatctaagcactaaaggg

SEQ ID NO: 4115833 - DNA, 25 bp, Homo sapien
gatcacattgccgtcaacttctgaa

SEQ ID NO: 4115834 - DNA, 25 bp, Homo sapien
agaagaaacatctcagcccggacac

SEQ ID NO: 4115835 - DNA, 25 bp, Homo sapien
gtgtatatacacagtcagggtctca

SEQ ID NO: 4115836 - DNA, 25 bp, Homo sapien
ttaaacagcctgacatgagcacatt

SEQ ID NO: 4115837 - DNA, 25 bp, Homo sapien
agtaaagtgacacaagcaagtctca

SEQ ID NO: 4115838 - DNA, 25 bp, Homo sapien
tgacacaagcaagtctcactgcagc

SEQ ID NO: 4115839 - DNA, 25 bp, Homo sapien
ctcatttgacctttctggcacgccc

SEQ ID NO: 4115840 - DNA, 25 bp, Homo sapien
tcatttgacctttctggcacgccca

SEQ ID NO: 4115841 - DNA, 25 bp, Homo sapien
catttgacctttctggcacgcccat

SEQ ID NO: 4115842 - DNA, 25 bp, Homo sapien
tgctgctgaacattaaatgaaggca

SEQ ID NO: 4115843 - DNA, 25 bp, Homo sapien
ggatcataagcattttgctgctgaa

SEQ ID NO: 4115844 - DNA, 25 bp, Homo sapien
cttgggatcataagcattttgctgc

SEQ ID NO: 4115845 - DNA, 25 bp, Homo sapien
gctgctgaacattaaatgaaggcat

SEQ ID NO: 4115846 - DNA, 25 bp, Homo sapien
ggaagctgggcactgccacaaccca

SEQ ID NO: 4115847 - DNA, 25 bp, Homo sapien
cggctgaagccaagggaagctgggc

SEQ ID NO: 4115848 - DNA, 25 bp, Homo sapien
ggctgaagccaagggaagctgggca

SEQ ID NO: 4115849 - DNA, 25 bp, Homo sapien
aagggaagctgggcactgccacaac

SEQ ID NO: 4115850 - DNA, 25 bp, Homo sapien
agttgggcagatggcccccggtagt

SEQ ID NO: 4115851 - DNA, 25 bp, Homo sapien
gggcagttgggcagatggcccccgg

SEQ ID NO: 4115852 - DNA, 25 bp, Homo sapien
cagttgggcagatggcccccggtag

SEQ ID NO: 4115853 - DNA, 25 bp, Homo sapien
gcagttgggcagatggcccccggta

SEQ ID NO: 4115854 - DNA, 25 bp, Homo sapien
tgcatggttgcatgcctccgaaggg

SEQ ID NO: 4115855 - DNA, 25 bp, Homo sapien
cccggtaccctctgtagctgggagc

SEQ ID NO: 4115856 - DNA, 25 bp, Homo sapien
tatgtagtgttcctcagggatgccc

SEQ ID NO: 4115857 - DNA, 25 bp, Homo sapien
gagttggccaaagtgtcgtcgtgca

SEQ ID NO: 4115858 - DNA, 25 bp, Homo sapien
tgcttatcattgtgctaacctcggt

SEQ ID NO: 4115859 - DNA, 25 bp, Homo sapien
gcactacgttagtcactggattcag

SEQ ID NO: 4115860 - DNA, 25 bp, Homo sapien
tccttggtgccctactgtgctgtgc

SEQ ID NO: 4115861 - DNA, 25 bp, Homo sapien
tcttaggcagcaaagaacccttgcc

SEQ ID NO: 4115862 - DNA, 25 bp, Homo sapien
aacagagagagcctccatgagagct

SEQ ID NO: 4115863 - DNA, 25 bp, Homo sapien
tctgagtttgcttgttagggcaaat

SEQ ID NO: 4115864 - DNA, 25 bp, Homo sapien
gcaaatcctaagattgtgagctgtc

SEQ ID NO: 4115865 - DNA, 25 bp, Homo sapien
agagagagcctccatgagagctcag

SEQ ID NO: 4115866 - DNA, 25 bp, Homo sapien
ccctgacgggctgcccgaattgaaa

SEQ ID NO: 4115867 - DNA, 25 bp, Homo sapien
agaggctgagccctgacgggctgcc

SEQ ID NO: 4115868 - DNA, 25 bp, Homo sapien
ggctgcccgaattgaaaaaccaatg

SEQ ID NO: 4115869 - DNA, 25 bp, Homo sapien
gcccgaattgaaaaaccaatgccat

SEQ ID NO: 4115870 - DNA, 25 bp, Homo sapien
aggcgtttgtccgaatgagcttgcc

SEQ ID NO: 4115871 - DNA, 25 bp, Homo sapien
tgtccgaatgagcttgccgtggcag

SEQ ID NO: 4115872 - DNA, 25 bp, Homo sapien
cgtttgtccgaatgagcttgccgtg

SEQ ID NO: 4115873 - DNA, 25 bp, Homo sapien
cacaggcgtttgtccgaatgagctt

SEQ ID NO: 4115874 - DNA, 25 bp, Homo sapien
tgggtcatcaaccactggactctga

SEQ ID NO: 4115875 - DNA, 25 bp, Homo sapien
cagcgtgtagacaggacagaaacca

SEQ ID NO: 4115876 - DNA, 25 bp, Homo sapien
caggaagcagcgtgtagacaggaca

SEQ ID NO: 4115877 - DNA, 25 bp, Homo sapien
tttctggcccagacagctctcagga

SEQ ID NO: 4115878 - DNA, 25 bp, Homo sapien
tgctgagcacacgtactgatagagg

SEQ ID NO: 4115879 - DNA, 25 bp, Homo sapien
ggtgataattgcacaaccccacgaa

SEQ ID NO: 4115880 - DNA, 25 bp, Homo sapien
aatgtgaaagtaagtcctgctgagc

SEQ ID NO: 4115881 - DNA, 25 bp, Homo sapien
gagaactttcgagctgccaaggtca

SEQ ID NO: 4115882 - DNA, 25 bp, Homo sapien
gaaaaacaaatataccctgacagta

SEQ ID NO: 4115883 - DNA, 25 bp, Homo sapien
gattccacattcacttgaaccaatt

SEQ ID NO: 4115884 - DNA, 25 bp, Homo sapien
aatgagatcatctggatattaaaag

SEQ ID NO: 4115885 - DNA, 25 bp, Homo sapien
tgtgcctctaccattcaatgcattc

SEQ ID NO: 4115886 - DNA, 25 bp, Homo sapien
tcttagtatcaaagctctgagcccc

SEQ ID NO: 4115887 - DNA, 25 bp, Homo sapien
tgctgcaaaatgagactacaaggct

SEQ ID NO: 4115888 - DNA, 25 bp, Homo sapien
catggtagacacatggtggccatcc

SEQ ID NO: 4115889 - DNA, 25 bp, Homo sapien
tattgtcatgcctcttggtggttca

SEQ ID NO: 4115890 - DNA, 25 bp, Homo sapien
agcacttcccggtgacgcccccagt

SEQ ID NO: 4115891 - DNA, 25 bp, Homo sapien
gcacttcccggtgacgcccccagtc

SEQ ID NO: 4115892 - DNA, 25 bp, Homo sapien
gggcttcagttagggccaccaggga

SEQ ID NO: 4115893 - DNA, 25 bp, Homo sapien
aaagtgtgctggagcctgcttggca

SEQ ID NO: 4115894 - DNA, 25 bp, Homo sapien
gaaagtgtgctggagcctgcttggc

SEQ ID NO: 4115895 - DNA, 25 bp, Homo sapien
gcttcagttagggccaccagggagt

SEQ ID NO: 4115896 - DNA, 25 bp, Homo sapien
tccggaagatcggtgctgttgcaca

SEQ ID NO: 4115897 - DNA, 25 bp, Homo sapien
gccagtcgtcgtggtcataaccgta

SEQ ID NO: 4115898 - DNA, 25 bp, Homo sapien
tcaatttgctcggttgtgaggtcaa

SEQ ID NO: 4115899 - DNA, 25 bp, Homo sapien
ggctaatgatctcgacttccggaag

SEQ ID NO: 4115900 - DNA, 25 bp, Homo sapien
agctctacccaactgtgacatgaaa

SEQ ID NO: 4115901 - DNA, 25 bp, Homo sapien
cttccactgaagcatgacatgaaaa

SEQ ID NO: 4115902 - DNA, 25 bp, Homo sapien
ctggtgacaatatcacaggtcctgc

SEQ ID NO: 4115903 - DNA, 25 bp, Homo sapien
caggtcctgctaataccactgtgcc

SEQ ID NO: 4115904 - DNA, 25 bp, Homo sapien
gatgacatctcataaggaggttcct

SEQ ID NO: 4115905 - DNA, 25 bp, Homo sapien
tctgacaagcctgcacttgccatgg

SEQ ID NO: 4115906 - DNA, 25 bp, Homo sapien
ttggctagaggtcaacaaggagtac

SEQ ID NO: 4115907 - DNA, 25 bp, Homo sapien
cgtggtattccctccatcaagagag

SEQ ID NO: 4115908 - DNA, 25 bp, Homo sapien
ggtacaaacttagcatcgatggatt

SEQ ID NO: 4115909 - DNA, 25 bp, Homo sapien
tagcatcgatggatttaggagaaca

SEQ ID NO: 4115910 - DNA, 25 bp, Homo sapien
caaacttagcatcgatggatttagg

SEQ ID NO: 4115911 - DNA, 25 bp, Homo sapien
catcgatggatttaggagaacaggg

SEQ ID NO: 4115912 - DNA, 25 bp, Homo sapien
gagtatcaggagttttgctgtcatt

SEQ ID NO: 4115913 - DNA, 25 bp, Homo sapien
tgaattaaacccacagtactgatgc

SEQ ID NO: 4115914 - DNA, 25 bp, Homo sapien
tgctgtcattactagaactacatgt

SEQ ID NO: 4115915 - DNA, 25 bp, Homo sapien
tctattaagattactagatcactgg

SEQ ID NO: 4115916 - DNA, 25 bp, Homo sapien
gagaagaggagaaaacgcccacaga

SEQ ID NO: 4115917 - DNA, 25 bp, Homo sapien
cctagcaatgtcgaggatggccggc

SEQ ID NO: 4115918 - DNA, 25 bp, Homo sapien
agagatgcggccacaaacctagcaa

SEQ ID NO: 4115919 - DNA, 25 bp, Homo sapien
aagtcttgagatgacatcatcctgg

SEQ ID NO: 4115920 - DNA, 25 bp, Homo sapien
gcaacaccaggtttcaagaaagcaa

SEQ ID NO: 4115921 - DNA, 25 bp, Homo sapien
gctgattccaagtcttcgggcaggg

SEQ ID NO: 4115922 - DNA, 25 bp, Homo sapien
aatcaagagggacctgcaacaccag

SEQ ID NO: 4115923 - DNA, 25 bp, Homo sapien
catcttaaaaggactaccatgcacg

SEQ ID NO: 4115924 - DNA, 25 bp, Homo sapien
gaatatcccgaaacacaccagaatt

SEQ ID NO: 4115925 - DNA, 25 bp, Homo sapien
aattaggctgtacattcttaacgac

SEQ ID NO: 4115926 - DNA, 25 bp, Homo sapien
cattcttaacgacagtctggagcca

SEQ ID NO: 4115927 - DNA, 25 bp, Homo sapien
catcaacgtcaagtaaaacgctgcc

SEQ ID NO: 4115928 - DNA, 25 bp, Homo sapien
gcattcttcataataccagtctagt

SEQ ID NO: 4115929 - DNA, 25 bp, Homo sapien
agttcataataatccgcttcgataa

SEQ ID NO: 4115930 - DNA, 25 bp, Homo sapien
cagtctagttcataataatccgctt

SEQ ID NO: 4115931 - DNA, 25 bp, Homo sapien
taatccgcttcgataaatttctgca

SEQ ID NO: 4115932 - DNA, 25 bp, Homo sapien
cagcaagagcgcagtgaacacattt

SEQ ID NO: 4115933 - DNA, 25 bp, Homo sapien
ctttcacggtaaagagccctgccca

SEQ ID NO: 4115934 - DNA, 25 bp, Homo sapien
gagacaatacccctatacatcccgg

SEQ ID NO: 4115935 - DNA, 25 bp, Homo sapien
cagtggtgctagttctggtacctcc

SEQ ID NO: 4115936 - DNA, 25 bp, Homo sapien
cctgaagctaggaaggaactcaact

SEQ ID NO: 4115937 - DNA, 25 bp, Homo sapien
tctgtaaaagcttccctcattgacg

SEQ ID NO: 4115938 - DNA, 25 bp, Homo sapien
taattggcctgcaatctatattccc

SEQ ID NO: 4115939 - DNA, 25 bp, Homo sapien
taagtgtgagtcagtagctctgaca

SEQ ID NO: 4115940 - DNA, 25 bp, Homo sapien
cccaagttttagaggttctgcacca

SEQ ID NO: 4115941 - DNA, 25 bp, Homo sapien
gcctgaggctgctttccatggacat

SEQ ID NO: 4115942 - DNA, 25 bp, Homo sapien
cagtttcccaaacacacgtgatgta

SEQ ID NO: 4115943 - DNA, 25 bp, Homo sapien
tgtatgtgcaaattctgccaaggcc

SEQ ID NO: 4115944 - DNA, 25 bp, Homo sapien
ttcacgggcgcatcacacaataaaa

SEQ ID NO: 4115945 - DNA, 25 bp, Homo sapien
gcgtcaacacgtaggaaaattcgaa

SEQ ID NO: 4115946 - DNA, 25 bp, Homo sapien
aagtcaacctctaccttcacgggcg

SEQ ID NO: 4115947 - DNA, 25 bp, Homo sapien
gaaatcaagtgaggaacagagcgca

SEQ ID NO: 4115948 - DNA, 25 bp, Homo sapien
gggagttcaacattccattttgaaa

SEQ ID NO: 4115949 - DNA, 25 bp, Homo sapien
aaaaaggtgtagaaattcaggcagg

SEQ ID NO: 4115950 - DNA, 25 bp, Homo sapien
tgtagaaattcaggcagggagttca

SEQ ID NO: 4115951 - DNA, 25 bp, Homo sapien
gagctgtattttaccatgttaaaga

SEQ ID NO: 4115952 - DNA, 25 bp, Homo sapien
catgccctggctcagctgaagtgga

SEQ ID NO: 4115953 - DNA, 25 bp, Homo sapien
tggaggggtgtacacaaagctcctg

SEQ ID NO: 4115954 - DNA, 25 bp, Homo sapien
atcaccctaagggaccatccttggg

SEQ ID NO: 4115955 - DNA, 25 bp, Homo sapien
caaagccaaaacatcaccctaaggg

SEQ ID NO: 4115956 - DNA, 25 bp, Homo sapien
catcctggcagtcgtattcaaaaca

SEQ ID NO: 4115957 - DNA, 25 bp, Homo sapien
tctcttcatcctggcagtcgtattc

SEQ ID NO: 4115958 - DNA, 25 bp, Homo sapien
ttccccgcccttgtctcgcagggac

SEQ ID NO: 4115959 - DNA, 25 bp, Homo sapien
tcttcatcctggcagtcgtattcaa

SEQ ID NO: 4115960 - DNA, 25 bp, Homo sapien
ccaaaagcacctcttttaggcaagt

SEQ ID NO: 4115961 - DNA, 25 bp, Homo sapien
tgtagaaacaccttgaaatccaggt

SEQ ID NO: 4115962 - DNA, 25 bp, Homo sapien
ggtaacacggttagatccaaatcca

SEQ ID NO: 4115963 - DNA, 25 bp, Homo sapien
gcaagttgacaatgtagaaacacct

SEQ ID NO: 4115964 - DNA, 25 bp, Homo sapien
gctttctcattgtgcaagttttcag

SEQ ID NO: 4115965 - DNA, 25 bp, Homo sapien
caattttgctttctcattgtgcaag

SEQ ID NO: 4115966 - DNA, 25 bp, Homo sapien
tgtgcaagttttcaggagccagaag

SEQ ID NO: 4115967 - DNA, 25 bp, Homo sapien
gacccagggcctggatatttcctct

SEQ ID NO: 4115968 - DNA, 25 bp, Homo sapien
acctccaagacacggcactcctgga

SEQ ID NO: 4115969 - DNA, 25 bp, Homo sapien
acaaaagcctgacgcatcacaacca

SEQ ID NO: 4115970 - DNA, 25 bp, Homo sapien
acaaccacctccaagacacggcact

SEQ ID NO: 4115971 - DNA, 25 bp, Homo sapien
acagcccacaaaagcctgacgcatc

SEQ ID NO: 4115972 - DNA, 25 bp, Homo sapien
gatactgaggaccaaatcccaagcg

SEQ ID NO: 4115973 - DNA, 25 bp, Homo sapien
cggtaggtactgatgcgccaggtca

SEQ ID NO: 4115974 - DNA, 25 bp, Homo sapien
tcgacactgacccatcgggaaagtt

SEQ ID NO: 4115975 - DNA, 25 bp, Homo sapien
gggaaagttgtgcacggcaccctcg

SEQ ID NO: 4115976 - DNA, 25 bp, Homo sapien
atttctaatcgacaccccagagagg

SEQ ID NO: 4115977 - DNA, 25 bp, Homo sapien
tggtgagtctatcccggccacaagt

SEQ ID NO: 4115978 - DNA, 25 bp, Homo sapien
tgcacagtgcatgccctcaagatga

SEQ ID NO: 4115979 - DNA, 25 bp, Homo sapien
tttaggtcacatgaaggcagctgag

SEQ ID NO: 4115980 - DNA, 25 bp, Homo sapien
tcaaaaaactgagtcctctgccttc

SEQ ID NO: 4115981 - DNA, 25 bp, Homo sapien
gcgcccactctcctcaaaaaactga

SEQ ID NO: 4115982 - DNA, 25 bp, Homo sapien
cctcaaaaaactgagtcctctgcct

SEQ ID NO: 4115983 - DNA, 25 bp, Homo sapien
cggcgcccactctcctcaaaaaact

SEQ ID NO: 4115984 - DNA, 25 bp, Homo sapien
aacccctgtgaaaccttgacattgt

SEQ ID NO: 4115985 - DNA, 25 bp, Homo sapien
ccctgtgaaaccttgacattgtgtg

SEQ ID NO: 4115986 - DNA, 25 bp, Homo sapien
ctgtgaaaccttgacattgtgtgtc

SEQ ID NO: 4115987 - DNA, 25 bp, Homo sapien
tcccagttccaacgactggaggatg

SEQ ID NO: 4115988 - DNA, 25 bp, Homo sapien
tggccaactctttcagcacataaaa

SEQ ID NO: 4115989 - DNA, 25 bp, Homo sapien
ctggccaactctttcagcacataaa

SEQ ID NO: 4115990 - DNA, 25 bp, Homo sapien
tcctcaagaagccgagtgacagcat

SEQ ID NO: 4115991 - DNA, 25 bp, Homo sapien
ctcctcaagaagccgagtgacagca

SEQ ID NO: 4115992 - DNA, 25 bp, Homo sapien
attttactgaggcaacaagctggtt

SEQ ID NO: 4115993 - DNA, 25 bp, Homo sapien
actgactgacacacccactagagat

SEQ ID NO: 4115994 - DNA, 25 bp, Homo sapien
cactagagattccaaacagcctgcc

SEQ ID NO: 4115995 - DNA, 25 bp, Homo sapien
cccaagaaatgaggcaaggtagagc

SEQ ID NO: 4115996 - DNA, 25 bp, Homo sapien
tcctccctgatgtgttccacctgct

SEQ ID NO: 4115997 - DNA, 25 bp, Homo sapien
cggccaattctaaatcccgctcttt

SEQ ID NO: 4115998 - DNA, 25 bp, Homo sapien
gttcttcttcaacaacgactggccg

SEQ ID NO: 4115999 - DNA, 25 bp, Homo sapien
tggccgatgcgagcggccaattcta

SEQ ID NO: 4116000 - DNA, 25 bp, Homo sapien
acagctcatgccggagctgagacac

SEQ ID NO: 4116001 - DNA, 25 bp, Homo sapien
gacagctcatgccggagctgagaca

SEQ ID NO: 4116002 - DNA, 25 bp, Homo sapien
catggacagctcatgccggagctga

SEQ ID NO: 4116003 - DNA, 25 bp, Homo sapien
aaatgaaagtaattctggactgagg

SEQ ID NO: 4116004 - DNA, 25 bp, Homo sapien
gaggaggacgactcattcctcttca

SEQ ID NO: 4116005 - DNA, 25 bp, Homo sapien
ctcggatcgaagtacaacattctcc

SEQ ID NO: 4116006 - DNA, 25 bp, Homo sapien
gatcgaagtacaacattctcctctt

SEQ ID NO: 4116007 - DNA, 25 bp, Homo sapien
cacctatcggtgtttctagagaggg

SEQ ID NO: 4116008 - DNA, 25 bp, Homo sapien
ggttatcaaaacacctagcagcctg

SEQ ID NO: 4116009 - DNA, 25 bp, Homo sapien
atttactcactcaaatgacctcggg

SEQ ID NO: 4116010 - DNA, 25 bp, Homo sapien
gggcccaccgttccaatgagaatca

SEQ ID NO: 4116011 - DNA, 25 bp, Homo sapien
cctcataggtgatggtctctgtctt

SEQ ID NO: 4116012 - DNA, 25 bp, Homo sapien
ctcctcataggtgatggtctctgtc

SEQ ID NO: 4116013 - DNA, 25 bp, Homo sapien
agctccttcacgcagtcattgacca

SEQ ID NO: 4116014 - DNA, 25 bp, Homo sapien
ctccttcacgcagtcattgaccagc

SEQ ID NO: 4116015 - DNA, 25 bp, Homo sapien
tggcgggcagcatcttccgtcttct

SEQ ID NO: 4116016 - DNA, 25 bp, Homo sapien
agatactagcaatctggacattggc

SEQ ID NO: 4116017 - DNA, 25 bp, Homo sapien
tgcgatagcaggtgtgtgatctcct

SEQ ID NO: 4116018 - DNA, 25 bp, Homo sapien
caaatcaactatttgcgatagcagg

SEQ ID NO: 4116019 - DNA, 25 bp, Homo sapien
gtgagctgccgctgggcatccttag

SEQ ID NO: 4116020 - DNA, 25 bp, Homo sapien
tgtgagctgccgctgggcatcctta

SEQ ID NO: 4116021 - DNA, 25 bp, Homo sapien
ccgagacgtggtattgggcatggtt

SEQ ID NO: 4116022 - DNA, 25 bp, Homo sapien
gcgccgagacgtggtattgggcatg

SEQ ID NO: 4116023 - DNA, 25 bp, Homo sapien
gggaaacaggcccagtgagtggtag

SEQ ID NO: 4116024 - DNA, 25 bp, Homo sapien
cagtgagtggtagcgccgagacgtg

SEQ ID NO: 4116025 - DNA, 25 bp, Homo sapien
tgtacaacgagaagcgaactgtgaa

SEQ ID NO: 4116026 - DNA, 25 bp, Homo sapien
cagtcagattcaagtgtccttgatt

SEQ ID NO: 4116027 - DNA, 25 bp, Homo sapien
gattcagactcagatctgaactgta

SEQ ID NO: 4116028 - DNA, 25 bp, Homo sapien
tcttatgtagttaagaaaccaccag

SEQ ID NO: 4116029 - DNA, 25 bp, Homo sapien
ttagcgctagatcagggaacttggg

SEQ ID NO: 4116030 - DNA, 25 bp, Homo sapien
catctgtgccctagaaagctgacta

SEQ ID NO: 4116031 - DNA, 25 bp, Homo sapien
tgcaaagctacacaggccagcgtgt

SEQ ID NO: 4116032 - DNA, 25 bp, Homo sapien
gaatctcacgagcatttacgcagcc

SEQ ID NO: 4116033 - DNA, 25 bp, Homo sapien
tgagtctgacatcttttaagccagc

SEQ ID NO: 4116034 - DNA, 25 bp, Homo sapien
ccagtaaggacttccctaggtgagt

SEQ ID NO: 4116035 - DNA, 25 bp, Homo sapien
gattgccattaaacgttatgtccag

SEQ ID NO: 4116036 - DNA, 25 bp, Homo sapien
actaatcttagatagaaaatttggg

SEQ ID NO: 4116037 - DNA, 25 bp, Homo sapien
tggtccatgcggatgctccggtctg

SEQ ID NO: 4116038 - DNA, 25 bp, Homo sapien
tccatgcggatgctccggtctggag

SEQ ID NO: 4116039 - DNA, 25 bp, Homo sapien
catggtccatgcggatgctccggtc

SEQ ID NO: 4116040 - DNA, 25 bp, Homo sapien
gtccatgcggatgctccggtctgga

SEQ ID NO: 4116041 - DNA, 25 bp, Homo sapien
tgagagggtctctacagacgtgacg

SEQ ID NO: 4116042 - DNA, 25 bp, Homo sapien
taaaggctgccagatggatgtcccc

SEQ ID NO: 4116043 - DNA, 25 bp, Homo sapien
gatacccacaggaccaagtgtgtgc

SEQ ID NO: 4116044 - DNA, 25 bp, Homo sapien
gatggcttctcacttcaccaatggg

SEQ ID NO: 4116045 - DNA, 25 bp, Homo sapien
caaggcatcagaagctcacggtctt

SEQ ID NO: 4116046 - DNA, 25 bp, Homo sapien
tgggccatggagagtaaaccaaggc

SEQ ID NO: 4116047 - DNA, 25 bp, Homo sapien
taaaagaggtatgcacccaggtggg

SEQ ID NO: 4116048 - DNA, 25 bp, Homo sapien
tcaagtgagcgccaattcaaatgct

SEQ ID NO: 4116049 - DNA, 25 bp, Homo sapien
ttgcgcatcgttccctcaatctctg

SEQ ID NO: 4116050 - DNA, 25 bp, Homo sapien
actgcagctccttgcgcatcgttcc

SEQ ID NO: 4116051 - DNA, 25 bp, Homo sapien
gagactcggcctcttccaactgcag

SEQ ID NO: 4116052 - DNA, 25 bp, Homo sapien
gtgatgtctggagactcggcctctt

SEQ ID NO: 4116053 - DNA, 25 bp, Homo sapien
tacccagagcctcaacattgctagg

SEQ ID NO: 4116054 - DNA, 25 bp, Homo sapien
tagtcaatcactgtcggtacccaga

SEQ ID NO: 4116055 - DNA, 25 bp, Homo sapien
taggttttgaacactgcactggtcc

SEQ ID NO: 4116056 - DNA, 25 bp, Homo sapien
tctggcgtgcccaataaagtgagac

SEQ ID NO: 4116057 - DNA, 25 bp, Homo sapien
tgctgttggtcttgttgtcgaggac

SEQ ID NO: 4116058 - DNA, 25 bp, Homo sapien
gatctctgcttgacaacctggttga

SEQ ID NO: 4116059 - DNA, 25 bp, Homo sapien
tcttactgtctcaaagacacgcttc

SEQ ID NO: 4116060 - DNA, 25 bp, Homo sapien
gacgacgttgcctatgtcgctgccg

SEQ ID NO: 4116061 - DNA, 25 bp, Homo sapien
ccggcttcttactccgctcatcgtt

SEQ ID NO: 4116062 - DNA, 25 bp, Homo sapien
cccggcttcttactccgctcatcgt

SEQ ID NO: 4116063 - DNA, 25 bp, Homo sapien
tccccggcttcttactccgctcatc

SEQ ID NO: 4116064 - DNA, 25 bp, Homo sapien
cggcttcttactccgctcatcgttt

SEQ ID NO: 4116065 - DNA, 25 bp, Homo sapien
ccagagaagccggtgaactcggaga

SEQ ID NO: 4116066 - DNA, 25 bp, Homo sapien
tccgagaggtagttctcccggcgca

SEQ ID NO: 4116067 - DNA, 25 bp, Homo sapien
cggcttcacgatctggagcttctca

SEQ ID NO: 4116068 - DNA, 25 bp, Homo sapien
tcaaagaacctcctctccgagaggt

SEQ ID NO: 4116069 - DNA, 25 bp, Homo sapien
ttccgcaggtggatcagggaccaaa

SEQ ID NO: 4116070 - DNA, 25 bp, Homo sapien
gctgtcgcggaagaaaaaggagtag

SEQ ID NO: 4116071 - DNA, 25 bp, Homo sapien
actcaaaccagcagcgcgggtggct

SEQ ID NO: 4116072 - DNA, 25 bp, Homo sapien
aaaggagtaggcgtgacagaggtgc

SEQ ID NO: 4116073 - DNA, 25 bp, Homo sapien
gctcttggcagagtagcagcaggta

SEQ ID NO: 4116074 - DNA, 25 bp, Homo sapien
aaattgtagactctaggagccgcgc

SEQ ID NO: 4116075 - DNA, 25 bp, Homo sapien
gatactaacacatgaactgaccctg

SEQ ID NO: 4116076 - DNA, 25 bp, Homo sapien
gagtttgcttggaacctctccccga

SEQ ID NO: 4116077 - DNA, 25 bp, Homo sapien
tgaactggctaaaacatgtgctttg

SEQ ID NO: 4116078 - DNA, 25 bp, Homo sapien
ctgggtagcagagcactatagatga

SEQ ID NO: 4116079 - DNA, 25 bp, Homo sapien
tatcatgaggttgtgttataggcca

SEQ ID NO: 4116080 - DNA, 25 bp, Homo sapien
taattgtattgttttagcctcctgg

SEQ ID NO: 4116081 - DNA, 25 bp, Homo sapien
tctttctttccatttctccagctca

SEQ ID NO: 4116082 - DNA, 25 bp, Homo sapien
ctttctttccatttctccagctcat

SEQ ID NO: 4116083 - DNA, 25 bp, Homo sapien
ctctttctttccatttctccagctc

SEQ ID NO: 4116084 - DNA, 25 bp, Homo sapien
caaaatagcaccacgagaagtctta

SEQ ID NO: 4116085 - DNA, 25 bp, Homo sapien
agtacaaatgctcactggctgtgca

SEQ ID NO: 4116086 - DNA, 25 bp, Homo sapien
taaagtagccactgtactgccatgt

SEQ ID NO: 4116087 - DNA, 25 bp, Homo sapien
cagaatttccagatgggtgtccagg

SEQ ID NO: 4116088 - DNA, 25 bp, Homo sapien
caggagtcggcagctcaggaagtca

SEQ ID NO: 4116089 - DNA, 25 bp, Homo sapien
taacgaaagagggtatcacatatcc

SEQ ID NO: 4116090 - DNA, 25 bp, Homo sapien
gggttcacgggtacaatagcaacat

SEQ ID NO: 4116091 - DNA, 25 bp, Homo sapien
ttctcatgtgtcgatctcagccagg

SEQ ID NO: 4116092 - DNA, 25 bp, Homo sapien
tgggtaggcaagaagccctccagga

SEQ ID NO: 4116093 - DNA, 25 bp, Homo sapien
aggcaagaagccctccaggatacca

SEQ ID NO: 4116094 - DNA, 25 bp, Homo sapien
tttctgggtaggcaagaagccctcc

SEQ ID NO: 4116095 - DNA, 25 bp, Homo sapien
aagccctccaggataccaggttgcc

SEQ ID NO: 4116096 - DNA, 25 bp, Homo sapien
caaatggatgctcgggcagtcacca

SEQ ID NO: 4116097 - DNA, 25 bp, Homo sapien
gcagtcaccactggtttaccaaggg

SEQ ID NO: 4116098 - DNA, 25 bp, Homo sapien
tctacagattaagaaggcacccaaa

SEQ ID NO: 4116099 - DNA, 25 bp, Homo sapien
tccatgctcaaaggagagacttctg

SEQ ID NO: 4116100 - DNA, 25 bp, Homo sapien
ttattaacacctcacatgacaccat

SEQ ID NO: 4116101 - DNA, 25 bp, Homo sapien
ttgacagagcaacccattttaccct

SEQ ID NO: 4116102 - DNA, 25 bp, Homo sapien
cacttattaacacctcacatgacac

SEQ ID NO: 4116103 - DNA, 25 bp, Homo sapien
cagagcaacccattttacccttgga

SEQ ID NO: 4116104 - DNA, 25 bp, Homo sapien
gagaagtgttcctaggccaagcatg

SEQ ID NO: 4116105 - DNA, 25 bp, Homo sapien
acatagtaagtccacacagaggtct

SEQ ID NO: 4116106 - DNA, 25 bp, Homo sapien
catgcaaggtctgtaataacactgg

SEQ ID NO: 4116107 - DNA, 25 bp, Homo sapien
tagtatgctacggtgttcttgccaa

SEQ ID NO: 4116108 - DNA, 25 bp, Homo sapien
ctgccagtggtgaagtgtggcggaa

SEQ ID NO: 4116109 - DNA, 25 bp, Homo sapien
tgccagtggtgaagtgtggcggaac

SEQ ID NO: 4116110 - DNA, 25 bp, Homo sapien
aacatccagcgtccggaagcccttg

SEQ ID NO: 4116111 - DNA, 25 bp, Homo sapien
taaggcagtacacttcgtccaggtc

SEQ ID NO: 4116112 - DNA, 25 bp, Homo sapien
gtacacttcgtccaggtcaacatcc

SEQ ID NO: 4116113 - DNA, 25 bp, Homo sapien
atcttcttcaaagtcgttaaggcag

SEQ ID NO: 4116114 - DNA, 25 bp, Homo sapien
taggcgtgggagagaaatgtggtca

SEQ ID NO: 4116115 - DNA, 25 bp, Homo sapien
aggcgtgggagagaaatgtggtcac

SEQ ID NO: 4116116 - DNA, 25 bp, Homo sapien
ctaggcgtgggagagaaatgtggtc

SEQ ID NO: 4116117 - DNA, 25 bp, Homo sapien
ctgaggtctctgggtgctgaactgg

SEQ ID NO: 4116118 - DNA, 25 bp, Homo sapien
tgggtgctgaactggagtggaggta

SEQ ID NO: 4116119 - DNA, 25 bp, Homo sapien
gaggtctctgggtgctgaactggag

SEQ ID NO: 4116120 - DNA, 25 bp, Homo sapien
ggtctctgggtgctgaactggagtg

SEQ ID NO: 4116121 - DNA, 25 bp, Homo sapien
tacaggacttatcgtggtgccctca

SEQ ID NO: 4116122 - DNA, 25 bp, Homo sapien
tgagacagtcacacgtgcttgggac

SEQ ID NO: 4116123 - DNA, 25 bp, Homo sapien
tctgcctccgggaaaggtgccaagt

SEQ ID NO: 4116124 - DNA, 25 bp, Homo sapien
tacagacagagaaccactacggatg

SEQ ID NO: 4116125 - DNA, 25 bp, Homo sapien
aactgtgcaatgagaatgctttaat

SEQ ID NO: 4116126 - DNA, 25 bp, Homo sapien
gaactgtgcaatgagaatgctttaa

SEQ ID NO: 4116127 - DNA, 25 bp, Homo sapien
acacccattgttacaaataggaggc

SEQ ID NO: 4116128 - DNA, 25 bp, Homo sapien
cccattgttacaaataggaggcatc

SEQ ID NO: 4116129 - DNA, 25 bp, Homo sapien
tgggcaggggagctacacccattgt

SEQ ID NO: 4116130 - DNA, 25 bp, Homo sapien
cattgttacaaataggaggcatcag

SEQ ID NO: 4116131 - DNA, 25 bp, Homo sapien
gaaaagcttagtgacgttctccgaa

SEQ ID NO: 4116132 - DNA, 25 bp, Homo sapien
ggtaattctgtaaactcatggccac

SEQ ID NO: 4116133 - DNA, 25 bp, Homo sapien
gagaatcttccccttagactcaggg

SEQ ID NO: 4116134 - DNA, 25 bp, Homo sapien
tgggaggtccagtctagacagagca

SEQ ID NO: 4116135 - DNA, 25 bp, Homo sapien
tacccctttagccacgaaaatcagc

SEQ ID NO: 4116136 - DNA, 25 bp, Homo sapien
tattctacctgtaaggctgtagggg

SEQ ID NO: 4116137 - DNA, 25 bp, Homo sapien
gcatcccaatcaacataaggcctac

SEQ ID NO: 4116138 - DNA, 25 bp, Homo sapien
aatcagccaggcatcatgtttctgc

SEQ ID NO: 4116139 - DNA, 25 bp, Homo sapien
taacgttgctaggatgaatttgcca

SEQ ID NO: 4116140 - DNA, 25 bp, Homo sapien
gcccaagcgtagaggacggattaaa

SEQ ID NO: 4116141 - DNA, 25 bp, Homo sapien
ccacaggtttgagtacagagagaac

SEQ ID NO: 4116142 - DNA, 25 bp, Homo sapien
catagagctacttgggacctccagg

SEQ ID NO: 4116143 - DNA, 25 bp, Homo sapien
tagagacgtagttgcatcagcagaa

SEQ ID NO: 4116144 - DNA, 25 bp, Homo sapien
tgcaaacagggcaaggctcacagct

SEQ ID NO: 4116145 - DNA, 25 bp, Homo sapien
gacagtgagtcacccaagactggga

SEQ ID NO: 4116146 - DNA, 25 bp, Homo sapien
caatgaatagccgtagaagaccaag

SEQ ID NO: 4116147 - DNA, 25 bp, Homo sapien
gcttccgacccaatccagactaggt

SEQ ID NO: 4116148 - DNA, 25 bp, Homo sapien
tgttctggattgaaggcgagtcctc

SEQ ID NO: 4116149 - DNA, 25 bp, Homo sapien
cacaattttgagcactggtctgcag

SEQ ID NO: 4116150 - DNA, 25 bp, Homo sapien
gaaggtgaaacgcaaatgttctgga

SEQ ID NO: 4116151 - DNA, 25 bp, Homo sapien
tccttgcatccaagtacaaccacaa

SEQ ID NO: 4116152 - DNA, 25 bp, Homo sapien
ccttgcatccaagtacaaccacaat

SEQ ID NO: 4116153 - DNA, 25 bp, Homo sapien
aacaaaacatattccttgcatccaa

SEQ ID NO: 4116154 - DNA, 25 bp, Homo sapien
aacatattccttgcatccaagtaca

SEQ ID NO: 4116155 - DNA, 25 bp, Homo sapien
tgagctcatctgaaggatgcaggat

SEQ ID NO: 4116156 - DNA, 25 bp, Homo sapien
cttggtgtgacccgagtgagctcat

SEQ ID NO: 4116157 - DNA, 25 bp, Homo sapien
gagctcatctgaaggatgcaggatg

SEQ ID NO: 4116158 - DNA, 25 bp, Homo sapien
tggtgtgacccgagtgagctcatct

SEQ ID NO: 4116159 - DNA, 25 bp, Homo sapien
caggtcagctgcatggtccctagga

SEQ ID NO: 4116160 - DNA, 25 bp, Homo sapien
tccccagtctggcagaaggaagtcc

SEQ ID NO: 4116161 - DNA, 25 bp, Homo sapien
acagccctcctaacagtctcgtggg

SEQ ID NO: 4116162 - DNA, 25 bp, Homo sapien
ggaagtccatgtactctgagaaagg

SEQ ID NO: 4116163 - DNA, 25 bp, Homo sapien
gcctctatctcaagtcgtcacggcg

SEQ ID NO: 4116164 - DNA, 25 bp, Homo sapien
aaattgccaatgctgcctctatctc

SEQ ID NO: 4116165 - DNA, 25 bp, Homo sapien
ttcaactagtaataaacctcattgg

SEQ ID NO: 4116166 - DNA, 25 bp, Homo sapien
attttcaactagtaataaacctcat

SEQ ID NO: 4116167 - DNA, 25 bp, Homo sapien
ggtcgtacacggcagcagaaatgcc

SEQ ID NO: 4116168 - DNA, 25 bp, Homo sapien
tgtgctcatggtggtcgtggactca

SEQ ID NO: 4116169 - DNA, 25 bp, Homo sapien
caccggcgtggatttcaagtggctg

SEQ ID NO: 4116170 - DNA, 25 bp, Homo sapien
cacgggtgttagtgaaggactcagc

SEQ ID NO: 4116171 - DNA, 25 bp, Homo sapien
tagggagggctcgtgcacttgaact

SEQ ID NO: 4116172 - DNA, 25 bp, Homo sapien
ggctcgccctgagttcaccactttg

SEQ ID NO: 4116173 - DNA, 25 bp, Homo sapien
gattccgccggatgccactattgag

SEQ ID NO: 4116174 - DNA, 25 bp, Homo sapien
ggagagcttagcacccatcaagatg

SEQ ID NO: 4116175 - DNA, 25 bp, Homo sapien
cacacttcctccattaggcacgagg

SEQ ID NO: 4116176 - DNA, 25 bp, Homo sapien
aagagcagggcggacacaaggtctc

SEQ ID NO: 4116177 - DNA, 25 bp, Homo sapien
cgaggttgatttgtctagcttagga

SEQ ID NO: 4116178 - DNA, 25 bp, Homo sapien
ggtctccaagtcctatgtacacatt

SEQ ID NO: 4116179 - DNA, 25 bp, Homo sapien
cctcgtgagagtgatgacagtgcag

SEQ ID NO: 4116180 - DNA, 25 bp, Homo sapien
cacaggtgacgtcctcgtgagagtg

SEQ ID NO: 4116181 - DNA, 25 bp, Homo sapien
ccccaggttagcacaggtgacgtcc

SEQ ID NO: 4116182 - DNA, 25 bp, Homo sapien
gacgtcctcgtgagagtgatgacag

SEQ ID NO: 4116183 - DNA, 25 bp, Homo sapien
gaaacgactgtccactgaggcagag

SEQ ID NO: 4116184 - DNA, 25 bp, Homo sapien
cattagcggcttggtgtgttcgaaa

SEQ ID NO: 4116185 - DNA, 25 bp, Homo sapien
agatgtgttatgacccgtgccgcgt

SEQ ID NO: 4116186 - DNA, 25 bp, Homo sapien
tcaaagaccgcatggtgacagcacc

SEQ ID NO: 4116187 - DNA, 25 bp, Homo sapien
aatcggcgacagcaacaggaccagc

SEQ ID NO: 4116188 - DNA, 25 bp, Homo sapien
ttaatcggcgacagcaacaggacca

SEQ ID NO: 4116189 - DNA, 25 bp, Homo sapien
gcgacagcaacaggaccagcctccc

SEQ ID NO: 4116190 - DNA, 25 bp, Homo sapien
tcggcgacagcaacaggaccagcct

SEQ ID NO: 4116191 - DNA, 25 bp, Homo sapien
gaatgtttatttaaaatacggcaga

SEQ ID NO: 4116192 - DNA, 25 bp, Homo sapien
agaatgtttatttaaaatacggcag

SEQ ID NO: 4116193 - DNA, 25 bp, Homo sapien
gagaatgtttatttaaaatacggca

SEQ ID NO: 4116194 - DNA, 25 bp, Homo sapien
gaataaatagtctgaaaccgtggga

SEQ ID NO: 4116195 - DNA, 25 bp, Homo sapien
gggaggacacagcatgacagtttca

SEQ ID NO: 4116196 - DNA, 25 bp, Homo sapien
ggaatgccacagacacactatgact

SEQ ID NO: 4116197 - DNA, 25 bp, Homo sapien
tcacatggttggactggaatgccac

SEQ ID NO: 4116198 - DNA, 25 bp, Homo sapien
caagtcttacataaagagatcgtct

SEQ ID NO: 4116199 - DNA, 25 bp, Homo sapien
taattttgcaaagagctaaacactt

SEQ ID NO: 4116200 - DNA, 25 bp, Homo sapien
tacataaagagatcgtctccttgat

SEQ ID NO: 4116201 - DNA, 25 bp, Homo sapien
aaagagatcgtctccttgatgaaaa

SEQ ID NO: 4116202 - DNA, 25 bp, Homo sapien
tgaatcttgtcacatcgatgtacag

SEQ ID NO: 4116203 - DNA, 25 bp, Homo sapien
gaatcttgtcacatcgatgtacagg

SEQ ID NO: 4116204 - DNA, 25 bp, Homo sapien
aatcttgtcacatcgatgtacaggc

SEQ ID NO: 4116205 - DNA, 25 bp, Homo sapien
tcttgtcacatcgatgtacaggcat

SEQ ID NO: 4116206 - DNA, 25 bp, Homo sapien
tctgcagaactctggaacagctaaa

SEQ ID NO: 4116207 - DNA, 25 bp, Homo sapien
caagggtggcaaaggccaccattgg

SEQ ID NO: 4116208 - DNA, 25 bp, Homo sapien
cagtcataggctagtggcccaaggg

SEQ ID NO: 4116209 - DNA, 25 bp, Homo sapien
tggaacagctaaacacacagtacaa

SEQ ID NO: 4116210 - DNA, 25 bp, Homo sapien
tcctctgcgccgtgagggtgatttg

SEQ ID NO: 4116211 - DNA, 25 bp, Homo sapien
ggtaccaggtaacaggaaacagctg

SEQ ID NO: 4116212 - DNA, 25 bp, Homo sapien
gacaggagccgaaggggcccattcc

SEQ ID NO: 4116213 - DNA, 25 bp, Homo sapien
aaacagctgagacggcatggttctg

SEQ ID NO: 4116214 - DNA, 25 bp, Homo sapien
gacagggtctcaacagcatcctgca

SEQ ID NO: 4116215 - DNA, 25 bp, Homo sapien
ttattgccaaagagaccagttgccc

SEQ ID NO: 4116216 - DNA, 25 bp, Homo sapien
gatgccatgggaacctctctgataa

SEQ ID NO: 4116217 - DNA, 25 bp, Homo sapien
aacaccattggcctatgaaggtcac

SEQ ID NO: 4116218 - DNA, 25 bp, Homo sapien
tgaggtcccaaggttcaaggcctgg

SEQ ID NO: 4116219 - DNA, 25 bp, Homo sapien
tctccttgcatctaagacgggtggg

SEQ ID NO: 4116220 - DNA, 25 bp, Homo sapien
tttacagctgcgtcaagagaggccc

SEQ ID NO: 4116221 - DNA, 25 bp, Homo sapien
gcaagcggactcgaactcaaagggt

SEQ ID NO: 4116222 - DNA, 25 bp, Homo sapien
catttacccaggcttggtccaggtc

SEQ ID NO: 4116223 - DNA, 25 bp, Homo sapien
ctgccttgtgatgatattagagact

SEQ ID NO: 4116224 - DNA, 25 bp, Homo sapien
gatattagagactctgcatatccat

SEQ ID NO: 4116225 - DNA, 25 bp, Homo sapien
tatccatttacccaggcttggtcca

SEQ ID NO: 4116226 - DNA, 25 bp, Homo sapien
atcaggacccttcatgggagcccag

SEQ ID NO: 4116227 - DNA, 25 bp, Homo sapien
ccagtgactccatagtgtcagggcg

SEQ ID NO: 4116228 - DNA, 25 bp, Homo sapien
cacaataatctggtgatgtagacac

SEQ ID NO: 4116229 - DNA, 25 bp, Homo sapien
tgtcagggcgtattcaaccagttct

SEQ ID NO: 4116230 - DNA, 25 bp, Homo sapien
gaagggatgttggcttgaagtagtt

SEQ ID NO: 4116231 - DNA, 25 bp, Homo sapien
agaagggatgttggcttgaagtagt

SEQ ID NO: 4116232 - DNA, 25 bp, Homo sapien
cttgaagtagtttggcttgtttcaa

SEQ ID NO: 4116233 - DNA, 25 bp, Homo sapien
ggcttgaagtagtttggcttgtttc

SEQ ID NO: 4116234 - DNA, 25 bp, Homo sapien
catctttgggtttgaggtcgactgt

SEQ ID NO: 4116235 - DNA, 25 bp, Homo sapien
caaatcacttgcgagaggagacatg

SEQ ID NO: 4116236 - DNA, 25 bp, Homo sapien
agggagactgctctgacacttgtgc

SEQ ID NO: 4116237 - DNA, 25 bp, Homo sapien
tggatggttctagcgcgacaatgga

SEQ ID NO: 4116238 - DNA, 25 bp, Homo sapien
ggtccacccgtgaatgcgaagagca

SEQ ID NO: 4116239 - DNA, 25 bp, Homo sapien
tccagtgtgggtccacccgtgaatg

SEQ ID NO: 4116240 - DNA, 25 bp, Homo sapien
tgcgaagagcaccagtggacgagaa

SEQ ID NO: 4116241 - DNA, 25 bp, Homo sapien
agcaccagtggacgagaagttcttc

SEQ ID NO: 4116242 - DNA, 25 bp, Homo sapien
catggccagactgccgctcggcatg

SEQ ID NO: 4116243 - DNA, 25 bp, Homo sapien
ccatcttgaagacggtggtgttatt

SEQ ID NO: 4116244 - DNA, 25 bp, Homo sapien
cttgaagacggtggtgttattcaca

SEQ ID NO: 4116245 - DNA, 25 bp, Homo sapien
gccatccatcttgaagacggtggtg

SEQ ID NO: 4116246 - DNA, 25 bp, Homo sapien
ccagggtactgaacagggcatccag

SEQ ID NO: 4116247 - DNA, 25 bp, Homo sapien
agacccagggtactgaacagggcat

SEQ ID NO: 4116248 - DNA, 25 bp, Homo sapien
gacccagggtactgaacagggcatc

SEQ ID NO: 4116249 - DNA, 25 bp, Homo sapien
cccagggtactgaacagggcatcca

SEQ ID NO: 4116250 - DNA, 25 bp, Homo sapien
tgacccatatcctggtgtgagccat

SEQ ID NO: 4116251 - DNA, 25 bp, Homo sapien
tgacacccatcatgatactggtctg

SEQ ID NO: 4116252 - DNA, 25 bp, Homo sapien
gtagtcatcatctctgaggtaccca

SEQ ID NO: 4116253 - DNA, 25 bp, Homo sapien
gctatcaacacctcttctaggcagg

SEQ ID NO: 4116254 - DNA, 25 bp, Homo sapien
tcactacctgtagggggttgctgct

SEQ ID NO: 4116255 - DNA, 25 bp, Homo sapien
tccctccagcagtctttgttccctc

SEQ ID NO: 4116256 - DNA, 25 bp, Homo sapien
cctctgagggttgaactggaggtac

SEQ ID NO: 4116257 - DNA, 25 bp, Homo sapien
gacttttggacattcatcccgtcta

SEQ ID NO: 4116258 - DNA, 25 bp, Homo sapien
ctatttggtgtaatctgctccttcc

SEQ ID NO: 4116259 - DNA, 25 bp, Homo sapien
tgcctttgggttgagacatagctat

SEQ ID NO: 4116260 - DNA, 25 bp, Homo sapien
gtctggatgtaggtttgctttgctc

SEQ ID NO: 4116261 - DNA, 25 bp, Homo sapien
gaaagcacaggaggtctatttggtg

SEQ ID NO: 4116262 - DNA, 25 bp, Homo sapien
cagtacccttcatggttgatgatcc

SEQ ID NO: 4116263 - DNA, 25 bp, Homo sapien
caaaaagagaccagtagcccgtact

SEQ ID NO: 4116264 - DNA, 25 bp, Homo sapien
agaaatccagacactcctcgcgcag

SEQ ID NO: 4116265 - DNA, 25 bp, Homo sapien
agtagcccgtacttccagaaatcca

SEQ ID NO: 4116266 - DNA, 25 bp, Homo sapien
tgctctaaagctggcacaccatgtt

SEQ ID NO: 4116267 - DNA, 25 bp, Homo sapien
gggcattctagatctcttcttagag

SEQ ID NO: 4116268 - DNA, 25 bp, Homo sapien
aactctagggctgttgatacttgca

SEQ ID NO: 4116269 - DNA, 25 bp, Homo sapien
gcacaccatgttgggtctgagatct

SEQ ID NO: 4116270 - DNA, 25 bp, Homo sapien
gagcaagtttcatgctgatggccat

SEQ ID NO: 4116271 - DNA, 25 bp, Homo sapien
cagagcaagtttcatgctgatggcc

SEQ ID NO: 4116272 - DNA, 25 bp, Homo sapien
tacagagcaagtttcatgctgatgg

SEQ ID NO: 4116273 - DNA, 25 bp, Homo sapien
gggtacagagcaagtttcatgctga

SEQ ID NO: 4116274 - DNA, 25 bp, Homo sapien
cactggtgtccactaagctttggtg

SEQ ID NO: 4116275 - DNA, 25 bp, Homo sapien
tccactaagctttggtggctcctac

SEQ ID NO: 4116276 - DNA, 25 bp, Homo sapien
tccctgcactggtgtccactaagct

SEQ ID NO: 4116277 - DNA, 25 bp, Homo sapien
gtttccctgcactggtgtccactaa

SEQ ID NO: 4116278 - DNA, 25 bp, Homo sapien
gccaacctcctctgggtggctcccc

SEQ ID NO: 4116279 - DNA, 25 bp, Homo sapien
cctgccaacctcctctgggtggctc

SEQ ID NO: 4116280 - DNA, 25 bp, Homo sapien
gccctgccaacctcctctgggtggc

SEQ ID NO: 4116281 - DNA, 25 bp, Homo sapien
tcctctgggtggctccccactccca

SEQ ID NO: 4116282 - DNA, 25 bp, Homo sapien
ctgtaagtcctggatatggaaaatg

SEQ ID NO: 4116283 - DNA, 25 bp, Homo sapien
atatggaaaatgtccaagatgtatt

SEQ ID NO: 4116284 - DNA, 25 bp, Homo sapien
tgtaagtcctggatatggaaaatgt

SEQ ID NO: 4116285 - DNA, 25 bp, Homo sapien
tggatatggaaaatgtccaagatgt

SEQ ID NO: 4116286 - DNA, 25 bp, Homo sapien
agagctcttgagtgtctaggtgtat

SEQ ID NO: 4116287 - DNA, 25 bp, Homo sapien
tcagagctcttgagtgtctaggtgt

SEQ ID NO: 4116288 - DNA, 25 bp, Homo sapien
gagctcttgagtgtctaggtgtatt

SEQ ID NO: 4116289 - DNA, 25 bp, Homo sapien
cagagctcttgagtgtctaggtgta

SEQ ID NO: 4116290 - DNA, 25 bp, Homo sapien
cttggggacaaggttgcccttggca

SEQ ID NO: 4116291 - DNA, 25 bp, Homo sapien
gttgttgttatagtccttggggaca

SEQ ID NO: 4116292 - DNA, 25 bp, Homo sapien
tcaattttgtcagaagggtagggat

SEQ ID NO: 4116293 - DNA, 25 bp, Homo sapien
cagaagggtagggatcctggtaggg

SEQ ID NO: 4116294 - DNA, 25 bp, Homo sapien
ctgaagggggtaggagtatgaatga

SEQ ID NO: 4116295 - DNA, 25 bp, Homo sapien
ggcagttgcctgtgtggctggacat

SEQ ID NO: 4116296 - DNA, 25 bp, Homo sapien
gggtaggagtatgaatgaaggcagt

SEQ ID NO: 4116297 - DNA, 25 bp, Homo sapien
agtatgaatgaaggcagttgcctgt

SEQ ID NO: 4116298 - DNA, 25 bp, Homo sapien
cttcttccttgtccttggcattcat

SEQ ID NO: 4116299 - DNA, 25 bp, Homo sapien
actgcacccctgggcgctcttcttc

SEQ ID NO: 4116300 - DNA, 25 bp, Homo sapien
tgggcgctcttcttccttgtccttg

SEQ ID NO: 4116301 - DNA, 25 bp, Homo sapien
cacccctgggcgctcttcttccttg

SEQ ID NO: 4116302 - DNA, 25 bp, Homo sapien
tgaatcagcatggaggtctgagagc

SEQ ID NO: 4116303 - DNA, 25 bp, Homo sapien
tttcccactactgttggatcctgag

SEQ ID NO: 4116304 - DNA, 25 bp, Homo sapien
ctgaatcagcatggaggtctgagag

SEQ ID NO: 4116305 - DNA, 25 bp, Homo sapien
gagaatctttcccactactgttgga

SEQ ID NO: 4116306 - DNA, 25 bp, Homo sapien
caggatagtaggtgcagacctgcat

SEQ ID NO: 4116307 - DNA, 25 bp, Homo sapien
tctcccccacttgcaagctgttgct

SEQ ID NO: 4116308 - DNA, 25 bp, Homo sapien
ggatgaaggcaggatagtaggtgca

SEQ ID NO: 4116309 - DNA, 25 bp, Homo sapien
taggtggatgaaggcaggatagtag

SEQ ID NO: 4116310 - DNA, 25 bp, Homo sapien
gaagaactgggatgcatgaggaaat

SEQ ID NO: 4116311 - DNA, 25 bp, Homo sapien
ctgtatcaacccttccctgctggaa

SEQ ID NO: 4116312 - DNA, 25 bp, Homo sapien
tttccatggccactagggtgttttc

SEQ ID NO: 4116313 - DNA, 25 bp, Homo sapien
cacacagagggacttgttgaaatct

SEQ ID NO: 4116314 - DNA, 25 bp, Homo sapien
gctggggtgaggaggctctttaggt

SEQ ID NO: 4116315 - DNA, 25 bp, Homo sapien
tgctggggtgaggaggctctttagg

SEQ ID NO: 4116316 - DNA, 25 bp, Homo sapien
ctggggtgaggaggctctttaggtt

SEQ ID NO: 4116317 - DNA, 25 bp, Homo sapien
ctgctggggtgaggaggctctttag

SEQ ID NO: 4116318 - DNA, 25 bp, Homo sapien
tctccccagcatcgcttctttgtct

SEQ ID NO: 4116319 - DNA, 25 bp, Homo sapien
gagtctcatgcttcctcggaggcag

SEQ ID NO: 4116320 - DNA, 25 bp, Homo sapien
gtctcatgcttcctcggaggcagag

SEQ ID NO: 4116321 - DNA, 25 bp, Homo sapien
tggagtctcatgcttcctcggaggc

SEQ ID NO: 4116322 - DNA, 25 bp, Homo sapien
gcactgccctcacatcacaaggctg

SEQ ID NO: 4116323 - DNA, 25 bp, Homo sapien
aatgtctttgccttgcactgccctc

SEQ ID NO: 4116324 - DNA, 25 bp, Homo sapien
ttgccctgcaggagacgctgccaca

SEQ ID NO: 4116325 - DNA, 25 bp, Homo sapien
ctggcaatgtctttgccttgcactg

SEQ ID NO: 4116326 - DNA, 25 bp, Homo sapien
atctatgtatggtctggaggccagg

SEQ ID NO: 4116327 - DNA, 25 bp, Homo sapien
tgccaagttgtacaaggcccagagg

SEQ ID NO: 4116328 - DNA, 25 bp, Homo sapien
gagagcactctgatcagcccacttg

SEQ ID NO: 4116329 - DNA, 25 bp, Homo sapien
tagtggtagtagtagacatcttgcc

SEQ ID NO: 4116330 - DNA, 25 bp, Homo sapien
cttaatattatcagcccatgggtca

SEQ ID NO: 4116331 - DNA, 25 bp, Homo sapien
ccaaagtaaagtgtgagtgccagcc

SEQ ID NO: 4116332 - DNA, 25 bp, Homo sapien
ccaaggatgaggttcaaggagcaga

SEQ ID NO: 4116333 - DNA, 25 bp, Homo sapien
caggctaacaacactatgacaggaa

SEQ ID NO: 4116334 - DNA, 25 bp, Homo sapien
ttacctgggttctaggaatagcctc

SEQ ID NO: 4116335 - DNA, 25 bp, Homo sapien
ctgaagggtccgtaggaattacctg

SEQ ID NO: 4116336 - DNA, 25 bp, Homo sapien
tacctgggttctaggaatagcctct

SEQ ID NO: 4116337 - DNA, 25 bp, Homo sapien
ctgggttctaggaatagcctcttcc

SEQ ID NO: 4116338 - DNA, 25 bp, Homo sapien
aggcctgagatccaggtttaaggtc

SEQ ID NO: 4116339 - DNA, 25 bp, Homo sapien
aggtccaatgatctggccaaatccc

SEQ ID NO: 4116340 - DNA, 25 bp, Homo sapien
gtcaggtccaatgatctggccaaat

SEQ ID NO: 4116341 - DNA, 25 bp, Homo sapien
tgagatccaggtttaaggtccagtt

SEQ ID NO: 4116342 - DNA, 25 bp, Homo sapien
ttgaatgcggcctaatacagattca

SEQ ID NO: 4116343 - DNA, 25 bp, Homo sapien
caaaaaattagacacccctggatat

SEQ ID NO: 4116344 - DNA, 25 bp, Homo sapien
gcggcctaatacagattcataaact

SEQ ID NO: 4116345 - DNA, 25 bp, Homo sapien
gaatgcggcctaatacagattcata

SEQ ID NO: 4116346 - DNA, 25 bp, Homo sapien
cctagttcccaagggctgggtgctc

SEQ ID NO: 4116347 - DNA, 25 bp, Homo sapien
ctttgtcttccagagtgggagaggg

SEQ ID NO: 4116348 - DNA, 25 bp, Homo sapien
ttgccaaggagggatgagctgcctt

SEQ ID NO: 4116349 - DNA, 25 bp, Homo sapien
gagctgcctttcagacgcctctaac

SEQ ID NO: 4116350 - DNA, 25 bp, Homo sapien
aagtcatggccaccgtggcttccag

SEQ ID NO: 4116351 - DNA, 25 bp, Homo sapien
caagtcatggccaccgtggcttcca

SEQ ID NO: 4116352 - DNA, 25 bp, Homo sapien
tcaagtcatggccaccgtggcttcc

SEQ ID NO: 4116353 - DNA, 25 bp, Homo sapien
ctggaactgtgggaaagaagctgct

SEQ ID NO: 4116354 - DNA, 25 bp, Homo sapien
tcctggtgtcagtgtgaagacgcac

SEQ ID NO: 4116355 - DNA, 25 bp, Homo sapien
caatgggagtcttgccaatggtcac

SEQ ID NO: 4116356 - DNA, 25 bp, Homo sapien
gatgttctgccatagccaagctgct

SEQ ID NO: 4116357 - DNA, 25 bp, Homo sapien
acctcaggctgtggtggtgcttcct

SEQ ID NO: 4116358 - DNA, 25 bp, Homo sapien
gacaacctcaggctgtggtggtgct

SEQ ID NO: 4116359 - DNA, 25 bp, Homo sapien
gaaacttggtgaaggcagcactcag

SEQ ID NO: 4116360 - DNA, 25 bp, Homo sapien
aaacttggtgaaggcagcactcagc

SEQ ID NO: 4116361 - DNA, 25 bp, Homo sapien
gagaggcagacctcactttgccatg

SEQ ID NO: 4116362 - DNA, 25 bp, Homo sapien
gattcttcggaataaacatcacttc

SEQ ID NO: 4116363 - DNA, 25 bp, Homo sapien
catgtgacccaccagtgaatggctg

SEQ ID NO: 4116364 - DNA, 25 bp, Homo sapien
tccccggaagggagtaggtgaatca

SEQ ID NO: 4116365 - DNA, 25 bp, Homo sapien
tgtggccccagagctaagaggcgca

SEQ ID NO: 4116366 - DNA, 25 bp, Homo sapien
ccagagctaagaggcgcagctcagg

SEQ ID NO: 4116367 - DNA, 25 bp, Homo sapien
gcagagtggcgctggcgctgtggcc

SEQ ID NO: 4116368 - DNA, 25 bp, Homo sapien
cccgcgcgggcaaagagctggcggg

SEQ ID NO: 4116369 - DNA, 25 bp, Homo sapien
cctgccagcacgcatagccagcggg

SEQ ID NO: 4116370 - DNA, 25 bp, Homo sapien
cgcctgccagcacgcatagccagcg

SEQ ID NO: 4116371 - DNA, 25 bp, Homo sapien
ctgccagcacgcatagccagcgggc

SEQ ID NO: 4116372 - DNA, 25 bp, Homo sapien
gcctgccagcacgcatagccagcgg

SEQ ID NO: 4116373 - DNA, 25 bp, Homo sapien
ggagggactgggcacgaccaatatc

SEQ ID NO: 4116374 - DNA, 25 bp, Homo sapien
cacaaccacgacaaggaaggcaagt

SEQ ID NO: 4116375 - DNA, 25 bp, Homo sapien
ccacgacaaggaaggcaagtctggg

SEQ ID NO: 4116376 - DNA, 25 bp, Homo sapien
atatcccagccctcgcgtctaggtt

SEQ ID NO: 4116377 - DNA, 25 bp, Homo sapien
aagaaacatggggatgtaagagacc

SEQ ID NO: 4116378 - DNA, 25 bp, Homo sapien
gaaacatggggatgtaagagacccc

SEQ ID NO: 4116379 - DNA, 25 bp, Homo sapien
catggggatgtaagagaccccagcc

SEQ ID NO: 4116380 - DNA, 25 bp, Homo sapien
tggggatgtaagagaccccagcccc

SEQ ID NO: 4116381 - DNA, 25 bp, Homo sapien
tcctctctctgtggacccagcccct

SEQ ID NO: 4116382 - DNA, 25 bp, Homo sapien
aagtcagggcaccataaacaggagt

SEQ ID NO: 4116383 - DNA, 25 bp, Homo sapien
gtttgccccattccatgagggagcg

SEQ ID NO: 4116384 - DNA, 25 bp, Homo sapien
caccgagtccggctagagcaggttt

SEQ ID NO: 4116385 - DNA, 25 bp, Homo sapien
aggccttgggccttcaacttgaact

SEQ ID NO: 4116386 - DNA, 25 bp, Homo sapien
aatgttttggccacctaatgaggaa

SEQ ID NO: 4116387 - DNA, 25 bp, Homo sapien
tgttttggccacctaatgaggaaac

SEQ ID NO: 4116388 - DNA, 25 bp, Homo sapien
tttggccacctaatgaggaaacgtc

SEQ ID NO: 4116389 - DNA, 25 bp, Homo sapien
tggccacctaatgaggaaacgtccc

SEQ ID NO: 4116390 - DNA, 25 bp, Homo sapien
tgcctgtgggtgacgttggtgttgg

SEQ ID NO: 4116391 - DNA, 25 bp, Homo sapien
tcctggccacacctagggaactgga

SEQ ID NO: 4116392 - DNA, 25 bp, Homo sapien
tgctgcttgttcacgatcctggcca

SEQ ID NO: 4116393 - DNA, 25 bp, Homo sapien
ttgcaggactcagcttataaacaca

SEQ ID NO: 4116394 - DNA, 25 bp, Homo sapien
ggagacataaggatacaggattgtg

SEQ ID NO: 4116395 - DNA, 25 bp, Homo sapien
ccatctaagggttcttcttggaagg

SEQ ID NO: 4116396 - DNA, 25 bp, Homo sapien
ggacaagggctctcataattagcag

SEQ ID NO: 4116397 - DNA, 25 bp, Homo sapien
cagacacttagcttgttcccatcta

SEQ ID NO: 4116398 - DNA, 25 bp, Homo sapien
ccatgggcgcctaggatttctggca

SEQ ID NO: 4116399 - DNA, 25 bp, Homo sapien
actgtggccatatagtttgccaaga

SEQ ID NO: 4116400 - DNA, 25 bp, Homo sapien
tgggccttcttaagccaggactgtg

SEQ ID NO: 4116401 - DNA, 25 bp, Homo sapien
tatttgtttcccaatcaccatgggc

SEQ ID NO: 4116402 - DNA, 25 bp, Homo sapien
tggaagccacagtgagcacgagctc

SEQ ID NO: 4116403 - DNA, 25 bp, Homo sapien
aagccacagtgagcacgagctccat

SEQ ID NO: 4116404 - DNA, 25 bp, Homo sapien
ctgcctaagtgctgttgccctggaa

SEQ ID NO: 4116405 - DNA, 25 bp, Homo sapien
ctggaagccacagtgagcacgagct

SEQ ID NO: 4116406 - DNA, 25 bp, Homo sapien
ctccatggaggaagcgttggactgg

SEQ ID NO: 4116407 - DNA, 25 bp, Homo sapien
accttctgcgtctttggctttagaa

SEQ ID NO: 4116408 - DNA, 25 bp, Homo sapien
tcttgggaactcttagatgggtgtg

SEQ ID NO: 4116409 - DNA, 25 bp, Homo sapien
catggaggaagcgttggactggcag

SEQ ID NO: 4116410 - DNA, 25 bp, Homo sapien
ctgcacatagtcacactcctcctgc

SEQ ID NO: 4116411 - DNA, 25 bp, Homo sapien
ctattgtctcattctccagctgggc

SEQ ID NO: 4116412 - DNA, 25 bp, Homo sapien
cacctcgatcatctgcacatagtca

SEQ ID NO: 4116413 - DNA, 25 bp, Homo sapien
cactgcttgtgctgcacctcgatca

SEQ ID NO: 4116414 - DNA, 25 bp, Homo sapien
tgggctggccgccatggagatcttc

SEQ ID NO: 4116415 - DNA, 25 bp, Homo sapien
gtgggctggccgccatggagatctt

SEQ ID NO: 4116416 - DNA, 25 bp, Homo sapien
ggtgggctggccgccatggagatct

SEQ ID NO: 4116417 - DNA, 25 bp, Homo sapien
gggtgggctggccgccatggagatc

SEQ ID NO: 4116418 - DNA, 25 bp, Homo sapien
cagacacagagctatagaccccaga

SEQ ID NO: 4116419 - DNA, 25 bp, Homo sapien
gtcagacacagagctatagacccca

SEQ ID NO: 4116420 - DNA, 25 bp, Homo sapien
tcagacacagagctatagaccccag

SEQ ID NO: 4116421 - DNA, 25 bp, Homo sapien
tgagggctcttgtggcctcatgttg

SEQ ID NO: 4116422 - DNA, 25 bp, Homo sapien
tggcctcatgttggctgtcagtccc

SEQ ID NO: 4116423 - DNA, 25 bp, Homo sapien
tcttgagggctcttgtggcctcatg

SEQ ID NO: 4116424 - DNA, 25 bp, Homo sapien
ctgtcttgagggctcttgtggcctc

SEQ ID NO: 4116425 - DNA, 25 bp, Homo sapien
tccttagtgagggatggagcgcccc

SEQ ID NO: 4116426 - DNA, 25 bp, Homo sapien
ggaaggaggcctgactacagttcct

SEQ ID NO: 4116427 - DNA, 25 bp, Homo sapien
ttcataatgaccagagcctagactc

SEQ ID NO: 4116428 - DNA, 25 bp, Homo sapien
gggatgccagacagacaactcctgc

SEQ ID NO: 4116429 - DNA, 25 bp, Homo sapien
ggccaagacaactacctggccccga

SEQ ID NO: 4116430 - DNA, 25 bp, Homo sapien
gccaagacaactacctggccccgag

SEQ ID NO: 4116431 - DNA, 25 bp, Homo sapien
caagacaactacctggccccgaggg

SEQ ID NO: 4116432 - DNA, 25 bp, Homo sapien
aggccaagacaactacctggccccg

SEQ ID NO: 4116433 - DNA, 25 bp, Homo sapien
ccttgtcacaaggccacggctgggg

SEQ ID NO: 4116434 - DNA, 25 bp, Homo sapien
ggtttcttctcacacctggaagggc

SEQ ID NO: 4116435 - DNA, 25 bp, Homo sapien
ggcctgcccggtcctcctcagtcag

SEQ ID NO: 4116436 - DNA, 25 bp, Homo sapien
cacctggaagggcttagatgtgctg

SEQ ID NO: 4116437 - DNA, 25 bp, Homo sapien
tccaaactcgctgccttgtcatcca

SEQ ID NO: 4116438 - DNA, 25 bp, Homo sapien
caggtgcgtccagccttcgtcggtg

SEQ ID NO: 4116439 - DNA, 25 bp, Homo sapien
gtgcagctgcggcttacattgcggc

SEQ ID NO: 4116440 - DNA, 25 bp, Homo sapien
accacaggcaatggggtacgggcca

SEQ ID NO: 4116441 - DNA, 25 bp, Homo sapien
cgtagccaatggtgtagccggtctt

SEQ ID NO: 4116442 - DNA, 25 bp, Homo sapien
tcacagaaccgtagaacatggtctg

SEQ ID NO: 4116443 - DNA, 25 bp, Homo sapien
tggcgagggacaggccgtagccaat

SEQ ID NO: 4116444 - DNA, 25 bp, Homo sapien
tcaggatagctgtggcgaccagaag

SEQ ID NO: 4116445 - DNA, 25 bp, Homo sapien
caagggcctcaacctcgtgtgtggc

SEQ ID NO: 4116446 - DNA, 25 bp, Homo sapien
gggagactaggctgcaacacatgga

SEQ ID NO: 4116447 - DNA, 25 bp, Homo sapien
gggatcccatcctgaaatacgagcc

SEQ ID NO: 4116448 - DNA, 25 bp, Homo sapien
acctgtgcaactgggctcccaaggg

SEQ ID NO: 4116449 - DNA, 25 bp, Homo sapien
gagccctcggagcactggtccgact

SEQ ID NO: 4116450 - DNA, 25 bp, Homo sapien
tggtccgactccccgctgtcgaaga

SEQ ID NO: 4116451 - DNA, 25 bp, Homo sapien
gtagttccgcgtgcagtggagcttc

SEQ ID NO: 4116452 - DNA, 25 bp, Homo sapien
tccgactccccgctgtcgaagaggg

SEQ ID NO: 4116453 - DNA, 25 bp, Homo sapien
catgactggaaggtattctgggcct

SEQ ID NO: 4116454 - DNA, 25 bp, Homo sapien
gacccatgagtagagcaatcacagg

SEQ ID NO: 4116455 - DNA, 25 bp, Homo sapien
tttcttaggcagacgaggaccatga

SEQ ID NO: 4116456 - DNA, 25 bp, Homo sapien
catttatcctgctgcctacttagcc

SEQ ID NO: 4116457 - DNA, 25 bp, Homo sapien
cagggtgtacaggtagaggccctcc

SEQ ID NO: 4116458 - DNA, 25 bp, Homo sapien
gttagccatgacacaatattggaaa

SEQ ID NO: 4116459 - DNA, 25 bp, Homo sapien
agaagaaggagacggcaagcagggt

SEQ ID NO: 4116460 - DNA, 25 bp, Homo sapien
gaagaagttagccatgacacaatat

SEQ ID NO: 4116461 - DNA, 25 bp, Homo sapien
cctggcgatggtccacaccatggtg

SEQ ID NO: 4116462 - DNA, 25 bp, Homo sapien
aaaatggatcctggcgatggtccac

SEQ ID NO: 4116463 - DNA, 25 bp, Homo sapien
cctcaaaatggatcctggcgatggt

SEQ ID NO: 4116464 - DNA, 25 bp, Homo sapien
tggatcctggcgatggtccacacca

SEQ ID NO: 4116465 - DNA, 25 bp, Homo sapien
ggggccctttatgatccaccacagt

SEQ ID NO: 4116466 - DNA, 25 bp, Homo sapien
gggccctttatgatccaccacagtg

SEQ ID NO: 4116467 - DNA, 25 bp, Homo sapien
tctgggggccgcagtttctgaagca

SEQ ID NO: 4116468 - DNA, 25 bp, Homo sapien
tgaagcaggattcggatgatgcaaa

SEQ ID NO: 4116469 - DNA, 25 bp, Homo sapien
tcggatgatgcaaataaacaggatg

SEQ ID NO: 4116470 - DNA, 25 bp, Homo sapien
gtttctgaagcaggattcggatgat

SEQ ID NO: 4116471 - DNA, 25 bp, Homo sapien
tcagtccaaggaagtctagcccaag

SEQ ID NO: 4116472 - DNA, 25 bp, Homo sapien
gacctggttctcagccatgccaaga

SEQ ID NO: 4116473 - DNA, 25 bp, Homo sapien
gaaataaggtcccatcggcaaagga

SEQ ID NO: 4116474 - DNA, 25 bp, Homo sapien
caccggaggctaacagatggaggct

SEQ ID NO: 4116475 - DNA, 25 bp, Homo sapien
aattgtccggaaagaaggcgaacat

SEQ ID NO: 4116476 - DNA, 25 bp, Homo sapien
aaagaccccacgacgagctcaaaga

SEQ ID NO: 4116477 - DNA, 25 bp, Homo sapien
tcaggcttaaaattgtccggaaaga

SEQ ID NO: 4116478 - DNA, 25 bp, Homo sapien
gaacatgatgtagtgtactccaaac

SEQ ID NO: 4116479 - DNA, 25 bp, Homo sapien
agtagaggatagccaccacaaaacc

SEQ ID NO: 4116480 - DNA, 25 bp, Homo sapien
caccattgaggaagcagtagaggat

SEQ ID NO: 4116481 - DNA, 25 bp, Homo sapien
gaagcagtagaggatagccaccaca

SEQ ID NO: 4116482 - DNA, 25 bp, Homo sapien
gcagtagaggatagccaccacaaaa

SEQ ID NO: 4116483 - DNA, 25 bp, Homo sapien
gcgccgccacttccgcctcagctcc

SEQ ID NO: 4116484 - DNA, 25 bp, Homo sapien
ccagcgccgccacttccgcctcagc

SEQ ID NO: 4116485 - DNA, 25 bp, Homo sapien
agcgccgccacttccgcctcagctc

SEQ ID NO: 4116486 - DNA, 25 bp, Homo sapien
gccgccacttccgcctcagctccgc

SEQ ID NO: 4116487 - DNA, 25 bp, Homo sapien
ctgacgcgggtcagcatggaaacct

SEQ ID NO: 4116488 - DNA, 25 bp, Homo sapien
ttgctgcctcccgacgggtgccggt

SEQ ID NO: 4116489 - DNA, 25 bp, Homo sapien
gggttccagcccaggacgccctgca

SEQ ID NO: 4116490 - DNA, 25 bp, Homo sapien
gggctgacgcgggtcagcatggaaa

SEQ ID NO: 4116491 - DNA, 25 bp, Homo sapien
ccagggagacttcggcttggaagct

SEQ ID NO: 4116492 - DNA, 25 bp, Homo sapien
accagggagacttcggcttggaagc

SEQ ID NO: 4116493 - DNA, 25 bp, Homo sapien
agaccagggagacttcggcttggaa

SEQ ID NO: 4116494 - DNA, 25 bp, Homo sapien
tcagaccagggagacttcggcttgg

SEQ ID NO: 4116495 - DNA, 25 bp, Homo sapien
gctgcgttctctaggagtgtccgga

SEQ ID NO: 4116496 - DNA, 25 bp, Homo sapien
tagtccgagacctagcattcgctgg

SEQ ID NO: 4116497 - DNA, 25 bp, Homo sapien
gaccagcaggctcctatccagatga

SEQ ID NO: 4116498 - DNA, 25 bp, Homo sapien
tgttgtttgaggatccaccggttgc

SEQ ID NO: 4116499 - DNA, 25 bp, Homo sapien
tctgactatgtgatgggatgcctgc

SEQ ID NO: 4116500 - DNA, 25 bp, Homo sapien
gttcctctgactatgtgatgggatg

SEQ ID NO: 4116501 - DNA, 25 bp, Homo sapien
ccctttctgccccggagttcctctg

SEQ ID NO: 4116502 - DNA, 25 bp, Homo sapien
cctctgactatgtgatgggatgcct

SEQ ID NO: 4116503 - DNA, 25 bp, Homo sapien
caagggcttattttaggatgccagg

SEQ ID NO: 4116504 - DNA, 25 bp, Homo sapien
gaagcggaagaaagacagtctcagg

SEQ ID NO: 4116505 - DNA, 25 bp, Homo sapien
caagcaagtgcagaattcaggtaag

SEQ ID NO: 4116506 - DNA, 25 bp, Homo sapien
caggaataggtcgaactgaagagac

SEQ ID NO: 4116507 - DNA, 25 bp, Homo sapien
cgagccctcccggtcggctaagatt

SEQ ID NO: 4116508 - DNA, 25 bp, Homo sapien
aggaggcggcgggtagctggcaggc

SEQ ID NO: 4116509 - DNA, 25 bp, Homo sapien
cccggtcggctaagattgctgagga

SEQ ID NO: 4116510 - DNA, 25 bp, Homo sapien
gggtagctggcaggcgccgacttcc

SEQ ID NO: 4116511 - DNA, 25 bp, Homo sapien
ttggatctcaaaccgccgcggtgag

SEQ ID NO: 4116512 - DNA, 25 bp, Homo sapien
tacaggcttggatctcaaaccgccg

SEQ ID NO: 4116513 - DNA, 25 bp, Homo sapien
ctccggacgtgagaattacaggctt

SEQ ID NO: 4116514 - DNA, 25 bp, Homo sapien
gacgtgagaattacaggcttggatc

SEQ ID NO: 4116515 - DNA, 25 bp, Homo sapien
caagttttgagagcccaattcccca

SEQ ID NO: 4116516 - DNA, 25 bp, Homo sapien
gttgtccaatctaccatggtgcctg

SEQ ID NO: 4116517 - DNA, 25 bp, Homo sapien
taccctaggagtggaggactgaaga

SEQ ID NO: 4116518 - DNA, 25 bp, Homo sapien
caccagtcagagagtgtaaggtcct

SEQ ID NO: 4116519 - DNA, 25 bp, Homo sapien
tgtagtcttctagaccagtggtccc

SEQ ID NO: 4116520 - DNA, 25 bp, Homo sapien
tagagctttattcccctgagtggtg

SEQ ID NO: 4116521 - DNA, 25 bp, Homo sapien
acaagattcgttttccctggagtga

SEQ ID NO: 4116522 - DNA, 25 bp, Homo sapien
aatgctcggcggtaatgcttatccg

SEQ ID NO: 4116523 - DNA, 25 bp, Homo sapien
ttggcaaccctaaaaagcactggta

SEQ ID NO: 4116524 - DNA, 25 bp, Homo sapien
cataccgcaaaggtgttgtgccgca

SEQ ID NO: 4116525 - DNA, 25 bp, Homo sapien
gtttgctcggcttcacccagcgtgt

SEQ ID NO: 4116526 - DNA, 25 bp, Homo sapien
caaagccagtctctgaatacgggca

SEQ ID NO: 4116527 - DNA, 25 bp, Homo sapien
gataggtggggcctacgctctcgaa

SEQ ID NO: 4116528 - DNA, 25 bp, Homo sapien
ctcgaagttgattggatgctcccgc

SEQ ID NO: 4116529 - DNA, 25 bp, Homo sapien
gccaagcaactcgacccacgatagg

SEQ ID NO: 4116530 - DNA, 25 bp, Homo sapien
caagcaactcgacccacgataggtg

SEQ ID NO: 4116531 - DNA, 25 bp, Homo sapien
agtccggtacgaaggccaccgacat

SEQ ID NO: 4116532 - DNA, 25 bp, Homo sapien
cagtccggtacgaaggccaccgaca

SEQ ID NO: 4116533 - DNA, 25 bp, Homo sapien
cagccagtccggtacgaaggccacc

SEQ ID NO: 4116534 - DNA, 25 bp, Homo sapien
gccagtccggtacgaaggccaccga

SEQ ID NO: 4116535 - DNA, 25 bp, Homo sapien
ggagtggcgtcgcgctcctgtaatc

SEQ ID NO: 4116536 - DNA, 25 bp, Homo sapien
cgggagtggcgtcgcgctcctgtaa

SEQ ID NO: 4116537 - DNA, 25 bp, Homo sapien
tagccgggagtggcgtcgcgctcct

SEQ ID NO: 4116538 - DNA, 25 bp, Homo sapien
gccgggagtggcgtcgcgctcctgt

SEQ ID NO: 4116539 - DNA, 25 bp, Homo sapien
gcactcgttcccgcggcccttgttc

SEQ ID NO: 4116540 - DNA, 25 bp, Homo sapien
cgcactcgttcccgcggcccttgtt

SEQ ID NO: 4116541 - DNA, 25 bp, Homo sapien
cacgcactcgttcccgcggcccttg

SEQ ID NO: 4116542 - DNA, 25 bp, Homo sapien
tgcacgcactcgttcccgcggccct

SEQ ID NO: 4116543 - DNA, 25 bp, Homo sapien
ggtgagctgttcttgtgtcctaata

SEQ ID NO: 4116544 - DNA, 25 bp, Homo sapien
agtggcctccttctgtgacttgaag

SEQ ID NO: 4116545 - DNA, 25 bp, Homo sapien
tatgccttactactgcatagctggc

SEQ ID NO: 4116546 - DNA, 25 bp, Homo sapien
gacttgaagatatccggcacactcc

SEQ ID NO: 4116547 - DNA, 25 bp, Homo sapien
gctggttggactggcatctgcaatg

SEQ ID NO: 4116548 - DNA, 25 bp, Homo sapien
gtgctggttggactggcatctgcaa

SEQ ID NO: 4116549 - DNA, 25 bp, Homo sapien
tgctggttggactggcatctgcaat

SEQ ID NO: 4116550 - DNA, 25 bp, Homo sapien
caaggtatcaagtcaggaatctcac

SEQ ID NO: 4116551 - DNA, 25 bp, Homo sapien
tcacgtttcgaaagagccacagagg

SEQ ID NO: 4116552 - DNA, 25 bp, Homo sapien
aaaagtagacttgaacatcccagtg

SEQ ID NO: 4116553 - DNA, 25 bp, Homo sapien
tttacaaactgataggaaggagcac

SEQ ID NO: 4116554 - DNA, 25 bp, Homo sapien
aaataagctttatttcaaagcaatc

SEQ ID NO: 4116555 - DNA, 25 bp, Homo sapien
gctttatttcaaagcaatctgaaaa

SEQ ID NO: 4116556 - DNA, 25 bp, Homo sapien
taagctttatttcaaagcaatctga

SEQ ID NO: 4116557 - DNA, 25 bp, Homo sapien
tttatttcaaagcaatctgaaaaca

SEQ ID NO: 4116558 - DNA, 25 bp, Homo sapien
tatggttaagtcctcacagttattc

SEQ ID NO: 4116559 - DNA, 25 bp, Homo sapien
aaaccaaatggaatacttattacat

SEQ ID NO: 4116560 - DNA, 25 bp, Homo sapien
tatatactttatggttaagtcctca

SEQ ID NO: 4116561 - DNA, 25 bp, Homo sapien
ttacatgaaaacttctatacctcca

SEQ ID NO: 4116562 - DNA, 25 bp, Homo sapien
gctgtcctttgttagagcttgccca

SEQ ID NO: 4116563 - DNA, 25 bp, Homo sapien
cagtctgtaggctgaattgagaagc

SEQ ID NO: 4116564 - DNA, 25 bp, Homo sapien
ggatggagaccattacccagctttg

SEQ ID NO: 4116565 - DNA, 25 bp, Homo sapien
gaagctagcggtcttgggtctgatt

SEQ ID NO: 4116566 - DNA, 25 bp, Homo sapien
acacattacatgggcgggcgtggtg

SEQ ID NO: 4116567 - DNA, 25 bp, Homo sapien
tacacattacatgggcgggcgtggt

SEQ ID NO: 4116568 - DNA, 25 bp, Homo sapien
aaatacacattacatgggcgggcgt

SEQ ID NO: 4116569 - DNA, 25 bp, Homo sapien
aatacacattacatgggcgggcgtg

SEQ ID NO: 4116570 - DNA, 25 bp, Homo sapien
ttccgataccgcgagacttctctgt

SEQ ID NO: 4116571 - DNA, 25 bp, Homo sapien
catctcgtcaggtgtggctgtgagc

SEQ ID NO: 4116572 - DNA, 25 bp, Homo sapien
aatctgaaagccgtggatgcgcctg

SEQ ID NO: 4116573 - DNA, 25 bp, Homo sapien
cctttgaagtcagtcgcccaatctg

SEQ ID NO: 4116574 - DNA, 25 bp, Homo sapien
gagagtcgggacaaataccgcgaga

SEQ ID NO: 4116575 - DNA, 25 bp, Homo sapien
gacaaataccgcgagagtacagtct

SEQ ID NO: 4116576 - DNA, 25 bp, Homo sapien
cgggtccccgtgagcagaagagaaa

SEQ ID NO: 4116577 - DNA, 25 bp, Homo sapien
atgccacgctaaaccccgcgagagt

SEQ ID NO: 4116578 - DNA, 25 bp, Homo sapien
ggcctcgcggctcccacgcagcgcg

SEQ ID NO: 4116579 - DNA, 25 bp, Homo sapien
gcctcgcggctcccacgcagcgcgc

SEQ ID NO: 4116580 - DNA, 25 bp, Homo sapien
agggggagaaaagcggtcagggcag

SEQ ID NO: 4116581 - DNA, 25 bp, Homo sapien
gagggggagaaaagcggtcagggca

SEQ ID NO: 4116582 - DNA, 25 bp, Homo sapien
tgatctcgatgtcgaagtggcactg

SEQ ID NO: 4116583 - DNA, 25 bp, Homo sapien
ccggttgatctcgatgtcgaagtgg

SEQ ID NO: 4116584 - DNA, 25 bp, Homo sapien
tcgatgtcgaagtggcactgcggcc

SEQ ID NO: 4116585 - DNA, 25 bp, Homo sapien
tcgaagtggcactgcggccggtcct

SEQ ID NO: 4116586 - DNA, 25 bp, Homo sapien
tcatagcaccaagcaagataaccgg

SEQ ID NO: 4116587 - DNA, 25 bp, Homo sapien
taaacacacctagatggtacggcct

SEQ ID NO: 4116588 - DNA, 25 bp, Homo sapien
catttggcgcctgactgtatactac

SEQ ID NO: 4116589 - DNA, 25 bp, Homo sapien
gaaaacggaaagttgcctgcgcctc

SEQ ID NO: 4116590 - DNA, 25 bp, Homo sapien
ccctgatctgctgattctgagtgct

SEQ ID NO: 4116591 - DNA, 25 bp, Homo sapien
agtatcgacacaaaaagagcctgga

SEQ ID NO: 4116592 - DNA, 25 bp, Homo sapien
tatggtttggccactgatgactact

SEQ ID NO: 4116593 - DNA, 25 bp, Homo sapien
gaatctttctgttaagagccgcacg

SEQ ID NO: 4116594 - DNA, 25 bp, Homo sapien
atgaggtcagatgttagagctgcca

SEQ ID NO: 4116595 - DNA, 25 bp, Homo sapien
aatgaggtcagatgttagagctgcc

SEQ ID NO: 4116596 - DNA, 25 bp, Homo sapien
aggtcagatgttagagctgccaggt

SEQ ID NO: 4116597 - DNA, 25 bp, Homo sapien
tgaggtcagatgttagagctgccag

SEQ ID NO: 4116598 - DNA, 25 bp, Homo sapien
tgaatgagaactagtaggaagagtg

SEQ ID NO: 4116599 - DNA, 25 bp, Homo sapien
catttttaaggaataggctgtgaaa

SEQ ID NO: 4116600 - DNA, 25 bp, Homo sapien
gaattctatacctagcaaaggaaat

SEQ ID NO: 4116601 - DNA, 25 bp, Homo sapien
tagtatccaggcagtagaatcatat

SEQ ID NO: 4116602 - DNA, 25 bp, Homo sapien
cagggctaacaaattagaaagtcta

SEQ ID NO: 4116603 - DNA, 25 bp, Homo sapien
atgggaaagcatttaactgggtgat

SEQ ID NO: 4116604 - DNA, 25 bp, Homo sapien
aaatagtaagcaagttaaatatatc

SEQ ID NO: 4116605 - DNA, 25 bp, Homo sapien
tatcacatttaaatgggagaaagaa

SEQ ID NO: 4116606 - DNA, 25 bp, Homo sapien
tgtttttggacatatgtctgagaag

SEQ ID NO: 4116607 - DNA, 25 bp, Homo sapien
gaagagctgaaacataatgcgacca

SEQ ID NO: 4116608 - DNA, 25 bp, Homo sapien
ggacatatgtctgagaagagctgaa

SEQ ID NO: 4116609 - DNA, 25 bp, Homo sapien
tgagaagagctgaaacataatgcga

SEQ ID NO: 4116610 - DNA, 25 bp, Homo sapien
aaaactgtaagccacagcttctcat

SEQ ID NO: 4116611 - DNA, 25 bp, Homo sapien
aagccacagcttctcattggaaata

SEQ ID NO: 4116612 - DNA, 25 bp, Homo sapien
actgtaagccacagcttctcattgg

SEQ ID NO: 4116613 - DNA, 25 bp, Homo sapien
tgtaagccacagcttctcattggaa

SEQ ID NO: 4116614 - DNA, 25 bp, Homo sapien
ctgaatcataaagtttttaaccaca

SEQ ID NO: 4116615 - DNA, 25 bp, Homo sapien
ttttaaccacacgatggaacgtaga

SEQ ID NO: 4116616 - DNA, 25 bp, Homo sapien
cacacgatggaacgtagaaccttta

SEQ ID NO: 4116617 - DNA, 25 bp, Homo sapien
gatggaacgtagaacctttataaca

SEQ ID NO: 4116618 - DNA, 25 bp, Homo sapien
taaaatgtcttacgtggtactttgc

SEQ ID NO: 4116619 - DNA, 25 bp, Homo sapien
aaggaattcactaagtaactataat

SEQ ID NO: 4116620 - DNA, 25 bp, Homo sapien
tcacaacctacttatttcaaacagt

SEQ ID NO: 4116621 - DNA, 25 bp, Homo sapien
tacattctggacctataatattcac

SEQ ID NO: 4116622 - DNA, 25 bp, Homo sapien
aatatccaccataaattgattctcc

SEQ ID NO: 4116623 - DNA, 25 bp, Homo sapien
ttaaaatatccaccataaattgatt

SEQ ID NO: 4116624 - DNA, 25 bp, Homo sapien
taaaatatccaccataaattgattc

SEQ ID NO: 4116625 - DNA, 25 bp, Homo sapien
aaatatccaccataaattgattctc

SEQ ID NO: 4116626 - DNA, 25 bp, Homo sapien
gtcatgtttaaccataaagttagcc

SEQ ID NO: 4116627 - DNA, 25 bp, Homo sapien
cattagtttcatgcaaaaagtgaac

SEQ ID NO: 4116628 - DNA, 25 bp, Homo sapien
gaactataagtaaacctcttctcat

SEQ ID NO: 4116629 - DNA, 25 bp, Homo sapien
tatagttgcctaacctccatgctga

SEQ ID NO: 4116630 - DNA, 25 bp, Homo sapien
ttcattttgcaaaagaccacattct

SEQ ID NO: 4116631 - DNA, 25 bp, Homo sapien
cttttcattttgcaaaagaccacat

SEQ ID NO: 4116632 - DNA, 25 bp, Homo sapien
ttttcattttgcaaaagaccacatt

SEQ ID NO: 4116633 - DNA, 25 bp, Homo sapien
tttcattttgcaaaagaccacattc

SEQ ID NO: 4116634 - DNA, 25 bp, Homo sapien
tgtgaaattaataacccattgggaa

SEQ ID NO: 4116635 - DNA, 25 bp, Homo sapien
ttattaggaagggtgcaagggaaca

SEQ ID NO: 4116636 - DNA, 25 bp, Homo sapien
cccagactgtccataaatttattag

SEQ ID NO: 4116637 - DNA, 25 bp, Homo sapien
gaattggagtttgtgttactgagct

SEQ ID NO: 4116638 - DNA, 25 bp, Homo sapien
taattgaagctagactgtaagacaa

SEQ ID NO: 4116639 - DNA, 25 bp, Homo sapien
taatacttcacacaaacagccttag

SEQ ID NO: 4116640 - DNA, 25 bp, Homo sapien
tctgccacaaggaacaaccacaaag

SEQ ID NO: 4116641 - DNA, 25 bp, Homo sapien
taaattgctacataacagaaccagc

SEQ ID NO: 4116642 - DNA, 25 bp, Homo sapien
cagtctccaattataagtcacttta

SEQ ID NO: 4116643 - DNA, 25 bp, Homo sapien
aaatttgtcagtctccaattataag

SEQ ID NO: 4116644 - DNA, 25 bp, Homo sapien
tttgtcagtctccaattataagtca

SEQ ID NO: 4116645 - DNA, 25 bp, Homo sapien
tgtcagtctccaattataagtcact

SEQ ID NO: 4116646 - DNA, 25 bp, Homo sapien
tgataaaaggaacgctctgtcatgt

SEQ ID NO: 4116647 - DNA, 25 bp, Homo sapien
aggaacgctctgtcatgtttgagaa

SEQ ID NO: 4116648 - DNA, 25 bp, Homo sapien
tggtatgtttccctcgatttgccat

SEQ ID NO: 4116649 - DNA, 25 bp, Homo sapien
gatttgccattgataaaaggaacgc

SEQ ID NO: 4116650 - DNA, 25 bp, Homo sapien
gacaggaactgttcttgcagggtct

SEQ ID NO: 4116651 - DNA, 25 bp, Homo sapien
ttattaatgaccactgacagtggcc

SEQ ID NO: 4116652 - DNA, 25 bp, Homo sapien
agatccctactctatggctgcgcag

SEQ ID NO: 4116653 - DNA, 25 bp, Homo sapien
ggctgcgcagactcatgttctaaca

SEQ ID NO: 4116654 - DNA, 25 bp, Homo sapien
taagcctgaatgttagggatgacac

SEQ ID NO: 4116655 - DNA, 25 bp, Homo sapien
tgctctacccatgtgttccaaaagt

SEQ ID NO: 4116656 - DNA, 25 bp, Homo sapien
tgaaactatcacactgtcagggaag

SEQ ID NO: 4116657 - DNA, 25 bp, Homo sapien
aatgagcaaatgttcggaccctagt

SEQ ID NO: 4116658 - DNA, 25 bp, Homo sapien
tgtaacatagagtgccaataatagc

SEQ ID NO: 4116659 - DNA, 25 bp, Homo sapien
tacgtagagatgaattatgcttaag

SEQ ID NO: 4116660 - DNA, 25 bp, Homo sapien
aaagcatcgtggctaagtgggaatc

SEQ ID NO: 4116661 - DNA, 25 bp, Homo sapien
tcccagaaattagctaagacaacat

SEQ ID NO: 4116662 - DNA, 25 bp, Homo sapien
ctttggagcgcacggtgtaacactc

SEQ ID NO: 4116663 - DNA, 25 bp, Homo sapien
tggagcgcacggtgtaacactcttt

SEQ ID NO: 4116664 - DNA, 25 bp, Homo sapien
tttggagcgcacggtgtaacactct

SEQ ID NO: 4116665 - DNA, 25 bp, Homo sapien
ttggagcgcacggtgtaacactctt

SEQ ID NO: 4116666 - DNA, 25 bp, Homo sapien
taaagcagggttactggcacttggc

SEQ ID NO: 4116667 - DNA, 25 bp, Homo sapien
gggttctcaacctacattccaggag

SEQ ID NO: 4116668 - DNA, 25 bp, Homo sapien
tcacccaaggtgaagctctgacacg

SEQ ID NO: 4116669 - DNA, 25 bp, Homo sapien
ttctacagtgtaagggatcagcccc

SEQ ID NO: 4116670 - DNA, 25 bp, Homo sapien
gtttaaacacagcatgtagagaaca

SEQ ID NO: 4116671 - DNA, 25 bp, Homo sapien
acatcaacacaaagatgatgtcaaa

SEQ ID NO: 4116672 - DNA, 25 bp, Homo sapien
ccatccaggtgtggagcaggctttg

SEQ ID NO: 4116673 - DNA, 25 bp, Homo sapien
tccaggtgtggagcaggctttgtgg

SEQ ID NO: 4116674 - DNA, 25 bp, Homo sapien
caggtgtggagcaggctttgtggta

SEQ ID NO: 4116675 - DNA, 25 bp, Homo sapien
catccaggtgtggagcaggctttgt

SEQ ID NO: 4116676 - DNA, 25 bp, Homo sapien
cagatttcgcttggtacttgggaac

SEQ ID NO: 4116677 - DNA, 25 bp, Homo sapien
gaaacgattatgcaaactgggcctc

SEQ ID NO: 4116678 - DNA, 25 bp, Homo sapien
tgagaagcccatccatgagcacaga

SEQ ID NO: 4116679 - DNA, 25 bp, Homo sapien
ggaaccttccttacagggacacatg

SEQ ID NO: 4116680 - DNA, 25 bp, Homo sapien
aactcgcacatctgcatatggtctg

SEQ ID NO: 4116681 - DNA, 25 bp, Homo sapien
tgattttgtggcaagtactccacag

SEQ ID NO: 4116682 - DNA, 25 bp, Homo sapien
ggtctgcttgcagcatcggtcttca

SEQ ID NO: 4116683 - DNA, 25 bp, Homo sapien
taaccagtccaaagactacatgcac

SEQ ID NO: 4116684 - DNA, 25 bp, Homo sapien
aggaatccgagccttctgaatgagt

SEQ ID NO: 4116685 - DNA, 25 bp, Homo sapien
ccgagccttctgaatgagttggttt

SEQ ID NO: 4116686 - DNA, 25 bp, Homo sapien
agaggaatccgagccttctgaatga

SEQ ID NO: 4116687 - DNA, 25 bp, Homo sapien
aatccgagccttctgaatgagttgg

SEQ ID NO: 4116688 - DNA, 25 bp, Homo sapien
cttgcttcctttcgcctctttttag

SEQ ID NO: 4116689 - DNA, 25 bp, Homo sapien
tgcttgcttcctttcgcctcttttt

SEQ ID NO: 4116690 - DNA, 25 bp, Homo sapien
tgcttcctttcgcctctttttagaa

SEQ ID NO: 4116691 - DNA, 25 bp, Homo sapien
cttttggcctcctcttatgtttcct

SEQ ID NO: 4116692 - DNA, 25 bp, Homo sapien
aatgcctatgctacctactcctaga

SEQ ID NO: 4116693 - DNA, 25 bp, Homo sapien
atgaaatgcctatgctacctactcc

SEQ ID NO: 4116694 - DNA, 25 bp, Homo sapien
taggtaagagtacattggtgtttta

SEQ ID NO: 4116695 - DNA, 25 bp, Homo sapien
taagagtacattggtgttttacacg

SEQ ID NO: 4116696 - DNA, 25 bp, Homo sapien
caaagagaacaatatcaacccagtg

SEQ ID NO: 4116697 - DNA, 25 bp, Homo sapien
taacgatagcttacaagtctcactc

SEQ ID NO: 4116698 - DNA, 25 bp, Homo sapien
caaaagagttatatgattttcacaa

SEQ ID NO: 4116699 - DNA, 25 bp, Homo sapien
aaacaacagcataattaacgatagc

SEQ ID NO: 4116700 - DNA, 25 bp, Homo sapien
tggaggaatctcttctgggcggacc

SEQ ID NO: 4116701 - DNA, 25 bp, Homo sapien
gcagtaacaacaggcatatctcttc

SEQ ID NO: 4116702 - DNA, 25 bp, Homo sapien
taaaaatcggttctcaggcactgga

SEQ ID NO: 4116703 - DNA, 25 bp, Homo sapien
ttttagcactggaatcaactgacct

SEQ ID NO: 4116704 - DNA, 25 bp, Homo sapien
gaaaggtagggtacatatcactcaa

SEQ ID NO: 4116705 - DNA, 25 bp, Homo sapien
ttccagatccccaataagggcttcc

SEQ ID NO: 4116706 - DNA, 25 bp, Homo sapien
tgagctgacggaacagtgttatcgg

SEQ ID NO: 4116707 - DNA, 25 bp, Homo sapien
tgagtgtggaatgcaatgagctgac

SEQ ID NO: 4116708 - DNA, 25 bp, Homo sapien
aatgggtgcaacatcaggaatcttc

SEQ ID NO: 4116709 - DNA, 25 bp, Homo sapien
ctttaatcttccgtccagactttga

SEQ ID NO: 4116710 - DNA, 25 bp, Homo sapien
ttgatacagatggtttctgatcact

SEQ ID NO: 4116711 - DNA, 25 bp, Homo sapien
tccagactttgatacagatggtttc

SEQ ID NO: 4116712 - DNA, 25 bp, Homo sapien
tcttccgtccagactttgatacaga

SEQ ID NO: 4116713 - DNA, 25 bp, Homo sapien
tccactaggtggtctatatgctctt

SEQ ID NO: 4116714 - DNA, 25 bp, Homo sapien
ttgatcttggaggtgtgtgatagcg

SEQ ID NO: 4116715 - DNA, 25 bp, Homo sapien
ggtggtctatatgctcttaatctct

SEQ ID NO: 4116716 - DNA, 25 bp, Homo sapien
ttctccactaggtggtctatatgct

SEQ ID NO: 4116717 - DNA, 25 bp, Homo sapien
aggattgtgcttatactcaaagttc

SEQ ID NO: 4116718 - DNA, 25 bp, Homo sapien
gacacaggattgtgcttatactcaa

SEQ ID NO: 4116719 - DNA, 25 bp, Homo sapien
gaattgtatccaatccctttaacat

SEQ ID NO: 4116720 - DNA, 25 bp, Homo sapien
gtccagaattgtatccaatcccttt

SEQ ID NO: 4116721 - DNA, 25 bp, Homo sapien
cagagtgtcttgctgtactaaggtc

SEQ ID NO: 4116722 - DNA, 25 bp, Homo sapien
gaggatttcattcttcgagtggaag

SEQ ID NO: 4116723 - DNA, 25 bp, Homo sapien
cgttttttatggtggccagagtgtc

SEQ ID NO: 4116724 - DNA, 25 bp, Homo sapien
tgggttaaagagctctggacatcct

SEQ ID NO: 4116725 - DNA, 25 bp, Homo sapien
gacttggaactagatctggactttg

SEQ ID NO: 4116726 - DNA, 25 bp, Homo sapien
attttgatgctctctttcggtgccc

SEQ ID NO: 4116727 - DNA, 25 bp, Homo sapien
gaatgtgatgaggactttgacgcag

SEQ ID NO: 4116728 - DNA, 25 bp, Homo sapien
tttgacgcagtccttgatcttgagc

SEQ ID NO: 4116729 - DNA, 25 bp, Homo sapien
cttgaccttggtgagctttctgaac

SEQ ID NO: 4116730 - DNA, 25 bp, Homo sapien
gaatgtgaactagctagactacgtg

SEQ ID NO: 4116731 - DNA, 25 bp, Homo sapien
ggagacctagaccttgaatgtgaac

SEQ ID NO: 4116732 - DNA, 25 bp, Homo sapien
tcctgaattcgctcataagagggct

SEQ ID NO: 4116733 - DNA, 25 bp, Homo sapien
gattcagaatcggatgtggcctcac

SEQ ID NO: 4116734 - DNA, 25 bp, Homo sapien
ggaggctgccagtgaaatgcttgct

SEQ ID NO: 4116735 - DNA, 25 bp, Homo sapien
ttcaccaaattctagtggaggctgc

SEQ ID NO: 4116736 - DNA, 25 bp, Homo sapien
gagggcattcccgttcagacttgga

SEQ ID NO: 4116737 - DNA, 25 bp, Homo sapien
ctgtgggagaaatactgagtttact

SEQ ID NO: 4116738 - DNA, 25 bp, Homo sapien
gggagaaatactgagtttactatca

SEQ ID NO: 4116739 - DNA, 25 bp, Homo sapien
ctttagtaaactgatcaagatctga

SEQ ID NO: 4116740 - DNA, 25 bp, Homo sapien
tactatcatctttagtaaactgatc

SEQ ID NO: 4116741 - DNA, 25 bp, Homo sapien
tatcaagccgtgcatttcctagagg

SEQ ID NO: 4116742 - DNA, 25 bp, Homo sapien
gactggctatcatcatcccgactag

SEQ ID NO: 4116743 - DNA, 25 bp, Homo sapien
ggtactttctccagcactagccaag

SEQ ID NO: 4116744 - DNA, 25 bp, Homo sapien
gactaggcgtctgctcatcacttga

SEQ ID NO: 4116745 - DNA, 25 bp, Homo sapien
taggagacagaccttgttctgtgtc

SEQ ID NO: 4116746 - DNA, 25 bp, Homo sapien
atgtggaacttctcgatcgacttct

SEQ ID NO: 4116747 - DNA, 25 bp, Homo sapien
cttgagtgactataggagacagacc

SEQ ID NO: 4116748 - DNA, 25 bp, Homo sapien
gatcgacttcttgagtgactatagg

SEQ ID NO: 4116749 - DNA, 25 bp, Homo sapien
tctactacctgttagctgcatagcc

SEQ ID NO: 4116750 - DNA, 25 bp, Homo sapien
tgactgaacgatgagtaacacacag

SEQ ID NO: 4116751 - DNA, 25 bp, Homo sapien
tgcatagcctagaacaagtccctta

SEQ ID NO: 4116752 - DNA, 25 bp, Homo sapien
gaacaatacctctgtgtacaggtga

SEQ ID NO: 4116753 - DNA, 25 bp, Homo sapien
taactccggtaggaactgctccggc

SEQ ID NO: 4116754 - DNA, 25 bp, Homo sapien
gctccgacttctagagtagcttctt

SEQ ID NO: 4116755 - DNA, 25 bp, Homo sapien
tctggttcggcctctgctgtaccat

SEQ ID NO: 4116756 - DNA, 25 bp, Homo sapien
gctgtaccatcctctgctccgactt

SEQ ID NO: 4116757 - DNA, 25 bp, Homo sapien
tcagggcaggacaggctataccaaa

SEQ ID NO: 4116758 - DNA, 25 bp, Homo sapien
ttaatcacatgaaggaccatcatct

SEQ ID NO: 4116759 - DNA, 25 bp, Homo sapien
gaccatcatcttatagatcagggca

SEQ ID NO: 4116760 - DNA, 25 bp, Homo sapien
tatctagacatttatttgcccatca

SEQ ID NO: 4116761 - DNA, 25 bp, Homo sapien
ctgtggggatcatatgagctgctcc

SEQ ID NO: 4116762 - DNA, 25 bp, Homo sapien
tgtggggatcatatgagctgctcct

SEQ ID NO: 4116763 - DNA, 25 bp, Homo sapien
gtggggatcatatgagctgctcctg

SEQ ID NO: 4116764 - DNA, 25 bp, Homo sapien
ggtttcaggagacaaatatatgcat

SEQ ID NO: 4116765 - DNA, 25 bp, Homo sapien
tacaatgggccaacagataaaactt

SEQ ID NO: 4116766 - DNA, 25 bp, Homo sapien
cgagttagtttgaacctggtggatc

SEQ ID NO: 4116767 - DNA, 25 bp, Homo sapien
gataaaacttgtcgaacagacctca

SEQ ID NO: 4116768 - DNA, 25 bp, Homo sapien
cataattaaagagaaaaatgttaat

SEQ ID NO: 4116769 - DNA, 25 bp, Homo sapien
tcgactccgactcctgctatagtag

SEQ ID NO: 4116770 - DNA, 25 bp, Homo sapien
ctggaccgccgattataacttctgc

SEQ ID NO: 4116771 - DNA, 25 bp, Homo sapien
acttctgcctcggtggtaactgtca

SEQ ID NO: 4116772 - DNA, 25 bp, Homo sapien
tctctggcttctacttcgactccga

SEQ ID NO: 4116773 - DNA, 25 bp, Homo sapien
caagaggacctggtcatgggtccca

SEQ ID NO: 4116774 - DNA, 25 bp, Homo sapien
gacagaatagaatagtcagcaagac

SEQ ID NO: 4116775 - DNA, 25 bp, Homo sapien
tgtgagccaggcattttgcaagatg

SEQ ID NO: 4116776 - DNA, 25 bp, Homo sapien
actgggatattgagtcaagaggacc

SEQ ID NO: 4116777 - DNA, 25 bp, Homo sapien
gtcagagccataagatctacaactc

SEQ ID NO: 4116778 - DNA, 25 bp, Homo sapien
gagtaacttcggtcactttcactgt

SEQ ID NO: 4116779 - DNA, 25 bp, Homo sapien
tcactgtcagagccataagatctac

SEQ ID NO: 4116780 - DNA, 25 bp, Homo sapien
gatgagagtaacttcggtcactttc

SEQ ID NO: 4116781 - DNA, 25 bp, Homo sapien
aagatataatttgtatccggacgtt

SEQ ID NO: 4116782 - DNA, 25 bp, Homo sapien
taagatataatttgtatccggacgt

SEQ ID NO: 4116783 - DNA, 25 bp, Homo sapien
agatataatttgtatccggacgttt

SEQ ID NO: 4116784 - DNA, 25 bp, Homo sapien
cacacaagttgaacgctgcagcaga

SEQ ID NO: 4116785 - DNA, 25 bp, Homo sapien
tgggtcaggtcacgcaaggctttga

SEQ ID NO: 4116786 - DNA, 25 bp, Homo sapien
aattccacctacagctgagatgggc

SEQ ID NO: 4116787 - DNA, 25 bp, Homo sapien
tcatatgcccctaaaacaggaggac

SEQ ID NO: 4116788 - DNA, 25 bp, Homo sapien
tagccgtgtgacctgaccactgctg

SEQ ID NO: 4116789 - DNA, 25 bp, Homo sapien
aaatcatctaaggtgactggcccag

SEQ ID NO: 4116790 - DNA, 25 bp, Homo sapien
ttaaatcccaggactacaaccgcag

SEQ ID NO: 4116791 - DNA, 25 bp, Homo sapien
ggcaggagatttaaatcccaggact

SEQ ID NO: 4116792 - DNA, 25 bp, Homo sapien
agggccccgcgggatcgcgctgccc

SEQ ID NO: 4116793 - DNA, 25 bp, Homo sapien
cagggccgctccatgaagcgccgcg

SEQ ID NO: 4116794 - DNA, 25 bp, Homo sapien
ggctcacagggccccgcgggatcgc

SEQ ID NO: 4116795 - DNA, 25 bp, Homo sapien
ccagggccgctccatgaagcgccgc

SEQ ID NO: 4116796 - DNA, 25 bp, Homo sapien
gagagcagcgccacagcgccgcatt

SEQ ID NO: 4116797 - DNA, 25 bp, Homo sapien
ccgggcccgcgggccgtgtgcctgg

SEQ ID NO: 4116798 - DNA, 25 bp, Homo sapien
ctggcaggtgggcggataagcgggg

SEQ ID NO: 4116799 - DNA, 25 bp, Homo sapien
gggcggataagcggggggacaggca

SEQ ID NO: 4116800 - DNA, 25 bp, Homo sapien
taactgggacgtggcaccaagcccc

SEQ ID NO: 4116801 - DNA, 25 bp, Homo sapien
ctaactgggacgtggcaccaagccc

SEQ ID NO: 4116802 - DNA, 25 bp, Homo sapien
tgggacgtggcaccaagcccctccc

SEQ ID NO: 4116803 - DNA, 25 bp, Homo sapien
actgggacgtggcaccaagcccctc

SEQ ID NO: 4116804 - DNA, 25 bp, Homo sapien
aggggccacctgtctccaggcctgc

SEQ ID NO: 4116805 - DNA, 25 bp, Homo sapien
gaccctgccccctacacccagcagc

SEQ ID NO: 4116806 - DNA, 25 bp, Homo sapien
gagcctccctgagccaccaggggcc

SEQ ID NO: 4116807 - DNA, 25 bp, Homo sapien
cgtgggcctcagcaggagcctccct

SEQ ID NO: 4116808 - DNA, 25 bp, Homo sapien
tctggtcctgctgcactgcctggtg

SEQ ID NO: 4116809 - DNA, 25 bp, Homo sapien
taggcggctagcacacccttgtgtg

SEQ ID NO: 4116810 - DNA, 25 bp, Homo sapien
atcaagcaggcaaagtgcagcgcca

SEQ ID NO: 4116811 - DNA, 25 bp, Homo sapien
accaagtccacgtcgcagaggtcag

SEQ ID NO: 4116812 - DNA, 25 bp, Homo sapien
ttgtgtgccggaaagacgctgcgct

SEQ ID NO: 4116813 - DNA, 25 bp, Homo sapien
aggacgcagcgatgtcagccatctg

SEQ ID NO: 4116814 - DNA, 25 bp, Homo sapien
agcagctcttggcaggacgcagcga

SEQ ID NO: 4116815 - DNA, 25 bp, Homo sapien
ctgcagcaatgaggcggcgctgagc

SEQ ID NO: 4116816 - DNA, 25 bp, Homo sapien
tagagagcgggcgtccagcagctct

SEQ ID NO: 4116817 - DNA, 25 bp, Homo sapien
aacacgcaccgagtaagggtcaggg

SEQ ID NO: 4116818 - DNA, 25 bp, Homo sapien
cttgatgtcacagtagtagggcggc

SEQ ID NO: 4116819 - DNA, 25 bp, Homo sapien
cctcgcgggcatagatcttgggcag

SEQ ID NO: 4116820 - DNA, 25 bp, Homo sapien
tgggctggcccaatggtggcaggca

SEQ ID NO: 4116821 - DNA, 25 bp, Homo sapien
caactcttctccaccctccagcttg

SEQ ID NO: 4116822 - DNA, 25 bp, Homo sapien
ttcctccaactcttctccaccctcc

SEQ ID NO: 4116823 - DNA, 25 bp, Homo sapien
cttcctccaactcttctccaccctc

SEQ ID NO: 4116824 - DNA, 25 bp, Homo sapien
ctcttctccaccctccagcttgcac

SEQ ID NO: 4116825 - DNA, 25 bp, Homo sapien
tctgggattgctccctgcggctgta

SEQ ID NO: 4116826 - DNA, 25 bp, Homo sapien
acgatgatctgggattgctccctgc

SEQ ID NO: 4116827 - DNA, 25 bp, Homo sapien
ctccacgatgatctgggattgctcc

SEQ ID NO: 4116828 - DNA, 25 bp, Homo sapien
tgatctgggattgctccctgcggct

SEQ ID NO: 4116829 - DNA, 25 bp, Homo sapien
gccccgtggacacgtgcagtgtctg

SEQ ID NO: 4116830 - DNA, 25 bp, Homo sapien
ggccccgtggacacgtgcagtgtct

SEQ ID NO: 4116831 - DNA, 25 bp, Homo sapien
ccccgtggacacgtgcagtgtctgg

SEQ ID NO: 4116832 - DNA, 25 bp, Homo sapien
acggtggctgggcttggcccggcac

SEQ ID NO: 4116833 - DNA, 25 bp, Homo sapien
cacggtggctgggcttggcccggca

SEQ ID NO: 4116834 - DNA, 25 bp, Homo sapien
cctcctcgtccgagtgtctctgcag

SEQ ID NO: 4116835 - DNA, 25 bp, Homo sapien
tcctcgtccgagtgtctctgcagcc

SEQ ID NO: 4116836 - DNA, 25 bp, Homo sapien
ctgctcactgtgcccgtcctcctcc

SEQ ID NO: 4116837 - DNA, 25 bp, Homo sapien
tgctcactgtgcccgtcctcctcct

SEQ ID NO: 4116838 - DNA, 25 bp, Homo sapien
cctgcttgcccccagcctccccctc

SEQ ID NO: 4116839 - DNA, 25 bp, Homo sapien
cggcttccccgtggcccctgcttgc

SEQ ID NO: 4116840 - DNA, 25 bp, Homo sapien
ccctgcttgcccccagcctccccct

SEQ ID NO: 4116841 - DNA, 25 bp, Homo sapien
gcttcggcttccccgtggcccctgc

SEQ ID NO: 4116842 - DNA, 25 bp, Homo sapien
gcgttctcccgggaccgtgtggcca

SEQ ID NO: 4116843 - DNA, 25 bp, Homo sapien
cgttctcccgggaccgtgtggccat

SEQ ID NO: 4116844 - DNA, 25 bp, Homo sapien
gccactccagggggtggctttggcc

SEQ ID NO: 4116845 - DNA, 25 bp, Homo sapien
cactccagggggtggctttggcctc

SEQ ID NO: 4116846 - DNA, 25 bp, Homo sapien
cgggccgatgcagaggccactccag

SEQ ID NO: 4116847 - DNA, 25 bp, Homo sapien
ctcgggccgatgcagaggccactcc

SEQ ID NO: 4116848 - DNA, 25 bp, Homo sapien
tggcccccagcccatcagtggctgg

SEQ ID NO: 4116849 - DNA, 25 bp, Homo sapien
cccagcccatcagtggctggcggcc

SEQ ID NO: 4116850 - DNA, 25 bp, Homo sapien
gcccccagcccatcagtggctggcg

SEQ ID NO: 4116851 - DNA, 25 bp, Homo sapien
cttggcccccagcccatcagtggct

SEQ ID NO: 4116852 - DNA, 25 bp, Homo sapien
tgcatgcggctgtgggtcacattca

SEQ ID NO: 4116853 - DNA, 25 bp, Homo sapien
aactcgtgggcacttctggcatgga

SEQ ID NO: 4116854 - DNA, 25 bp, Homo sapien
taccagcggttgttgaaaactcgtg

SEQ ID NO: 4116855 - DNA, 25 bp, Homo sapien
cactggtcgcagatctgcatgcggc

SEQ ID NO: 4116856 - DNA, 25 bp, Homo sapien
ctgccctgcccccagccacgtgagg

SEQ ID NO: 4116857 - DNA, 25 bp, Homo sapien
ctgcccccagccacgtgaggcccac

SEQ ID NO: 4116858 - DNA, 25 bp, Homo sapien
gccctgcccccagccacgtgaggcc

SEQ ID NO: 4116859 - DNA, 25 bp, Homo sapien
ctggacagcctctgccctgccccca

SEQ ID NO: 4116860 - DNA, 25 bp, Homo sapien
ctgcagaataagaggacttgaggcc

SEQ ID NO: 4116861 - DNA, 25 bp, Homo sapien
catggagggaccaaagcttcttgaa

SEQ ID NO: 4116862 - DNA, 25 bp, Homo sapien
cacgtgggccatggtgtagaacttc

SEQ ID NO: 4116863 - DNA, 25 bp, Homo sapien
aacttcttctctgcgtagccgtgca

SEQ ID NO: 4116864 - DNA, 25 bp, Homo sapien
aaccatgtgcttacgcacgtgggcc

SEQ ID NO: 4116865 - DNA, 25 bp, Homo sapien
ggctccatcccccagtggcccagac

SEQ ID NO: 4116866 - DNA, 25 bp, Homo sapien
atcctctggctccatcccccagtgg

SEQ ID NO: 4116867 - DNA, 25 bp, Homo sapien
tccatcccccagtggcccagactta

SEQ ID NO: 4116868 - DNA, 25 bp, Homo sapien
ctatcctctggctccatcccccagt

SEQ ID NO: 4116869 - DNA, 25 bp, Homo sapien
tcacagacaccagtcctggtttacc

SEQ ID NO: 4116870 - DNA, 25 bp, Homo sapien
cagacaccagtcctggtttacccag

SEQ ID NO: 4116871 - DNA, 25 bp, Homo sapien
acaccagtcctggtttacccagcat

SEQ ID NO: 4116872 - DNA, 25 bp, Homo sapien
ttcaagctcacagacaccagtcctg

SEQ ID NO: 4116873 - DNA, 25 bp, Homo sapien
tgttttacgggcctgcccaagcacc

SEQ ID NO: 4116874 - DNA, 25 bp, Homo sapien
ctacgaggtgggcaccagggccatc

SEQ ID NO: 4116875 - DNA, 25 bp, Homo sapien
catcatgttttacgggcctgcccaa

SEQ ID NO: 4116876 - DNA, 25 bp, Homo sapien
accagggccatcatgttttacgggc

SEQ ID NO: 4116877 - DNA, 25 bp, Homo sapien
ccttgagggacatgctgcgcttgaa

SEQ ID NO: 4116878 - DNA, 25 bp, Homo sapien
tgcaccttgagggacatgctgcgct

SEQ ID NO: 4116879 - DNA, 25 bp, Homo sapien
tgctgcgcttgaaggactttccgca

SEQ ID NO: 4116880 - DNA, 25 bp, Homo sapien
gcagtgagtgcaccttgagggacat

SEQ ID NO: 4116881 - DNA, 25 bp, Homo sapien
catgtgtgaccgcagctggtacttg

SEQ ID NO: 4116882 - DNA, 25 bp, Homo sapien
aagtccttgccgcaccattggcaca

SEQ ID NO: 4116883 - DNA, 25 bp, Homo sapien
cattggcacatgaactgcttgtggc

SEQ ID NO: 4116884 - DNA, 25 bp, Homo sapien
tgcttgtggccaatgtggatgctca

SEQ ID NO: 4116885 - DNA, 25 bp, Homo sapien
tgcgtgcgccggtgccgcttcatgt

SEQ ID NO: 4116886 - DNA, 25 bp, Homo sapien
tgccgcttcatgttgggccggctgg

SEQ ID NO: 4116887 - DNA, 25 bp, Homo sapien
cgccggtgccgcttcatgttgggcc

SEQ ID NO: 4116888 - DNA, 25 bp, Homo sapien
gcgtgcgccggtgccgcttcatgtt

SEQ ID NO: 4116889 - DNA, 25 bp, Homo sapien
tgttggcgttcatcctcccgccggg

SEQ ID NO: 4116890 - DNA, 25 bp, Homo sapien
gttgttggcgttcatcctcccgccg

SEQ ID NO: 4116891 - DNA, 25 bp, Homo sapien
gccgtcgccggccagggtgtggctg

SEQ ID NO: 4116892 - DNA, 25 bp, Homo sapien
ctagttgttggcgttcatcctcccg

SEQ ID NO: 4116893 - DNA, 25 bp, Homo sapien
cacctggtgcaggtcagggatccct

SEQ ID NO: 4116894 - DNA, 25 bp, Homo sapien
tccttctggtgtgggatatatggcc

SEQ ID NO: 4116895 - DNA, 25 bp, Homo sapien
agtgcttgcggctctcagactgggt

SEQ ID NO: 4116896 - DNA, 25 bp, Homo sapien
gaagcactggtctgcagtctccgca

SEQ ID NO: 4116897 - DNA, 25 bp, Homo sapien
caggagggacgaggacgctggagcc

SEQ ID NO: 4116898 - DNA, 25 bp, Homo sapien
ggacgaggacgctggagccagccag

SEQ ID NO: 4116899 - DNA, 25 bp, Homo sapien
cagccagggacaggttgtggcagga

SEQ ID NO: 4116900 - DNA, 25 bp, Homo sapien
gagggacgaggacgctggagccagc

SEQ ID NO: 4116901 - DNA, 25 bp, Homo sapien
tttaccggcagtgctatgggcgccc

SEQ ID NO: 4116902 - DNA, 25 bp, Homo sapien
tgaacatgcaggctcctttaccggc

SEQ ID NO: 4116903 - DNA, 25 bp, Homo sapien
gtgccatgggcctcataaggtcaga

SEQ ID NO: 4116904 - DNA, 25 bp, Homo sapien
catgtagcttatggaaccttcctcc

SEQ ID NO: 4116905 - DNA, 25 bp, Homo sapien
gaataaagtgcttcgtttattgatg

SEQ ID NO: 4116906 - DNA, 25 bp, Homo sapien
taaagtgcttcgtttattgatgatt

SEQ ID NO: 4116907 - DNA, 25 bp, Homo sapien
agtgcttcgtttattgatgattaaa

SEQ ID NO: 4116908 - DNA, 25 bp, Homo sapien
acagaataaagtgcttcgtttattg

SEQ ID NO: 4116909 - DNA, 25 bp, Homo sapien
actcgggcaccttgggcctgcccaa

SEQ ID NO: 4116910 - DNA, 25 bp, Homo sapien
atcactcgggcaccttgggcctgcc

SEQ ID NO: 4116911 - DNA, 25 bp, Homo sapien
tcactcgggcaccttgggcctgccc

SEQ ID NO: 4116912 - DNA, 25 bp, Homo sapien
tcgggcaccttgggcctgcccaaat

SEQ ID NO: 4116913 - DNA, 25 bp, Homo sapien
aagtgagtatggtgccctagtcgcc

SEQ ID NO: 4116914 - DNA, 25 bp, Homo sapien
caatggcccaagtgaagagagtgct

SEQ ID NO: 4116915 - DNA, 25 bp, Homo sapien
gagctacagtaaagcaggagcctgg

SEQ ID NO: 4116916 - DNA, 25 bp, Homo sapien
gccaggcactgggactagagattaa

SEQ ID NO: 4116917 - DNA, 25 bp, Homo sapien
tgctggggtttgcttagactgagca

SEQ ID NO: 4116918 - DNA, 25 bp, Homo sapien
gctggggtttgcttagactgagcag

SEQ ID NO: 4116919 - DNA, 25 bp, Homo sapien
ctggggtttgcttagactgagcagc

SEQ ID NO: 4116920 - DNA, 25 bp, Homo sapien
tggggtttgcttagactgagcagct

SEQ ID NO: 4116921 - DNA, 25 bp, Homo sapien
gaacatgccgaagcgcagggtgtca

SEQ ID NO: 4116922 - DNA, 25 bp, Homo sapien
cagtcgaggaacttgccatggtcca

SEQ ID NO: 4116923 - DNA, 25 bp, Homo sapien
tcccaggaaggatacgttcggcctc

SEQ ID NO: 4116924 - DNA, 25 bp, Homo sapien
tctttgagcccgtcttgcaggagcg

SEQ ID NO: 4116925 - DNA, 25 bp, Homo sapien
ctagagcccagcattagctggcggc

SEQ ID NO: 4116926 - DNA, 25 bp, Homo sapien
cccagcattagctggcggctcccaa

SEQ ID NO: 4116927 - DNA, 25 bp, Homo sapien
gagcccagcattagctggcggctcc

SEQ ID NO: 4116928 - DNA, 25 bp, Homo sapien
tagagcccagcattagctggcggct

SEQ ID NO: 4116929 - DNA, 25 bp, Homo sapien
gccactctgagtccagatggtcaaa

SEQ ID NO: 4116930 - DNA, 25 bp, Homo sapien
agccactctgagtccagatggtcaa

SEQ ID NO: 4116931 - DNA, 25 bp, Homo sapien
gcgctcgccgtccttgatctctctg

SEQ ID NO: 4116932 - DNA, 25 bp, Homo sapien
tctgccaccgaccacgtagatggag

SEQ ID NO: 4116933 - DNA, 25 bp, Homo sapien
gagcttctcccaggccaaagaggca

SEQ ID NO: 4116934 - DNA, 25 bp, Homo sapien
tcgtagcacatgaccgagtccaggc

SEQ ID NO: 4116935 - DNA, 25 bp, Homo sapien
accacgtaaggcagcgggtccgatt

SEQ ID NO: 4116936 - DNA, 25 bp, Homo sapien
tgtgtggccatacaccacgtaaggc

SEQ ID NO: 4116937 - DNA, 25 bp, Homo sapien
gtcactgcctttgccgccaattacg

SEQ ID NO: 4116938 - DNA, 25 bp, Homo sapien
gacaaggtccatgtgggagagcact

SEQ ID NO: 4116939 - DNA, 25 bp, Homo sapien
agtgagcgggcggtctgcatgggtg

SEQ ID NO: 4116940 - DNA, 25 bp, Homo sapien
gggtcatagacgcacatcttgttca

SEQ ID NO: 4116941 - DNA, 25 bp, Homo sapien
tgccacgataatgcggccatcatgg

SEQ ID NO: 4116942 - DNA, 25 bp, Homo sapien
cgggcggtctgcatgggtgccagct

SEQ ID NO: 4116943 - DNA, 25 bp, Homo sapien
aactggtcagccctgtgtcggtgac

SEQ ID NO: 4116944 - DNA, 25 bp, Homo sapien
tgatgctgtacacttcggcagaact

SEQ ID NO: 4116945 - DNA, 25 bp, Homo sapien
tacacttcggcagaactggtcagcc

SEQ ID NO: 4116946 - DNA, 25 bp, Homo sapien
tgctgtacacttcggcagaactggt

SEQ ID NO: 4116947 - DNA, 25 bp, Homo sapien
tgtgggaaggcctcgaagggtgccc

SEQ ID NO: 4116948 - DNA, 25 bp, Homo sapien
ctacgctcctgtgggaaggcctcga

SEQ ID NO: 4116949 - DNA, 25 bp, Homo sapien
tgggaaggcctcgaagggtgcccac

SEQ ID NO: 4116950 - DNA, 25 bp, Homo sapien
acgctcctgtgggaaggcctcgaag

SEQ ID NO: 4116951 - DNA, 25 bp, Homo sapien
aagccaccaatggcatagagggtac

SEQ ID NO: 4116952 - DNA, 25 bp, Homo sapien
tctgtgggaaccagctctccagact

SEQ ID NO: 4116953 - DNA, 25 bp, Homo sapien
agctctgtgggaaccagctctccag

SEQ ID NO: 4116954 - DNA, 25 bp, Homo sapien
gctctgtgggaaccagctctccaga

SEQ ID NO: 4116955 - DNA, 25 bp, Homo sapien
ggcacctgctgcataggcgatctcc

SEQ ID NO: 4116956 - DNA, 25 bp, Homo sapien
gtggcacctgctgcataggcgatct

SEQ ID NO: 4116957 - DNA, 25 bp, Homo sapien
acagcacattgagccgcactggtag

SEQ ID NO: 4116958 - DNA, 25 bp, Homo sapien
tcacatcttagtcaggcacagcaca

SEQ ID NO: 4116959 - DNA, 25 bp, Homo sapien
gttcatggatcaagacaacctaggg

SEQ ID NO: 4116960 - DNA, 25 bp, Homo sapien
taactggatccaggtagactctggc

SEQ ID NO: 4116961 - DNA, 25 bp, Homo sapien
cctaaagaaggagacatatctgcac

SEQ ID NO: 4116962 - DNA, 25 bp, Homo sapien
ggatgctcccatcggaaagacgaga

SEQ ID NO: 4116963 - DNA, 25 bp, Homo sapien
acctgtattttgtgccaacctccca

SEQ ID NO: 4116964 - DNA, 25 bp, Homo sapien
tgtattttgtgccaacctcccatct

SEQ ID NO: 4116965 - DNA, 25 bp, Homo sapien
cgaccagaggtcagtctcattgcca

SEQ ID NO: 4116966 - DNA, 25 bp, Homo sapien
gtattttgtgccaacctcccatctc

SEQ ID NO: 4116967 - DNA, 25 bp, Homo sapien
tcctgggcctggcttctagcacctt

SEQ ID NO: 4116968 - DNA, 25 bp, Homo sapien
cttctagcaccttccctcatcttct

SEQ ID NO: 4116969 - DNA, 25 bp, Homo sapien
aacctgaggaaccttcctgggcctg

SEQ ID NO: 4116970 - DNA, 25 bp, Homo sapien
agaattaacctgaggaaccttcctg

SEQ ID NO: 4116971 - DNA, 25 bp, Homo sapien
tcctcaggttcaagagcttgagaag

SEQ ID NO: 4116972 - DNA, 25 bp, Homo sapien
tctgcgggaacagccagtgatgagt

SEQ ID NO: 4116973 - DNA, 25 bp, Homo sapien
tccagacccaaggaagctgtcggca

SEQ ID NO: 4116974 - DNA, 25 bp, Homo sapien
gctgtcggcacaggagaaaaacctg

SEQ ID NO: 4116975 - DNA, 25 bp, Homo sapien
gcacttcaacaaccgcaaagctggg

SEQ ID NO: 4116976 - DNA, 25 bp, Homo sapien
gagacctgagtttacgtttggccac

SEQ ID NO: 4116977 - DNA, 25 bp, Homo sapien
taggtctcacagtgcactcgtgcgg

SEQ ID NO: 4116978 - DNA, 25 bp, Homo sapien
tcccagggacttcgagggtcacagt

SEQ ID NO: 4116979 - DNA, 25 bp, Homo sapien
ataaagttattgagtccagaattgt

SEQ ID NO: 4116980 - DNA, 25 bp, Homo sapien
aaagttattgagtccagaattgtgg

SEQ ID NO: 4116981 - DNA, 25 bp, Homo sapien
taaagttattgagtccagaattgtg

SEQ ID NO: 4116982 - DNA, 25 bp, Homo sapien
aagatgcgacccgacggcgtgcact

SEQ ID NO: 4116983 - DNA, 25 bp, Homo sapien
gcccggagtccagccctgagaacca

SEQ ID NO: 4116984 - DNA, 25 bp, Homo sapien
gacggcgtgcacttccgcatctccc

SEQ ID NO: 4116985 - DNA, 25 bp, Homo sapien
ggactcgcaagagggagttcccctc

SEQ ID NO: 4116986 - DNA, 25 bp, Homo sapien
ggcagcgcgtgtcggcgtccggagg

SEQ ID NO: 4116987 - DNA, 25 bp, Homo sapien
cgtccggaggaggtgacctagccgc

SEQ ID NO: 4116988 - DNA, 25 bp, Homo sapien
aggaggtgacctagccgccgcggtc

SEQ ID NO: 4116989 - DNA, 25 bp, Homo sapien
tccctggtgacggttgccagggcag

SEQ ID NO: 4116990 - DNA, 25 bp, Homo sapien
tgtcactttcagaactcttggcgcc

SEQ ID NO: 4116991 - DNA, 25 bp, Homo sapien
tcggcccccgtagagtagcgttgaa

SEQ ID NO: 4116992 - DNA, 25 bp, Homo sapien
tcgagatcgtgctcgcttggatcca

SEQ ID NO: 4116993 - DNA, 25 bp, Homo sapien
gtagcgttgaaaacgcgcaagtgac

SEQ ID NO: 4116994 - DNA, 25 bp, Homo sapien
ccccaacaggagagcggaatgggca

SEQ ID NO: 4116995 - DNA, 25 bp, Homo sapien
gtgcagaacgtttggtccacaaaac

SEQ ID NO: 4116996 - DNA, 25 bp, Homo sapien
taaatttcatggtgagatcgttcgc

SEQ ID NO: 4116997 - DNA, 25 bp, Homo sapien
agcggaatgggcatctctgtgcaga

SEQ ID NO: 4116998 - DNA, 25 bp, Homo sapien
attgctatattgcgtcctgcttcct

SEQ ID NO: 4116999 - DNA, 25 bp, Homo sapien
tgtttgttctgaatccatgctcaca

SEQ ID NO: 4117000 - DNA, 25 bp, Homo sapien
ccaaaaataccctctaggcagtttg

SEQ ID NO: 4117001 - DNA, 25 bp, Homo sapien
ctatgtagggctcctgattgtgaag

SEQ ID NO: 4117002 - DNA, 25 bp, Homo sapien
ggagagtctctggacatgggtcaca

SEQ ID NO: 4117003 - DNA, 25 bp, Homo sapien
gcttcgtgcgattctgatgcttcaa

SEQ ID NO: 4117004 - DNA, 25 bp, Homo sapien
gctgatacactctggtgcccaacta

SEQ ID NO: 4117005 - DNA, 25 bp, Homo sapien
gcccaactattattgtatcagtgaa

SEQ ID NO: 4117006 - DNA, 25 bp, Homo sapien
gttgtatcattcctaccttgtgagg

SEQ ID NO: 4117007 - DNA, 25 bp, Homo sapien
tgcaacttccatcccccaggttcaa

SEQ ID NO: 4117008 - DNA, 25 bp, Homo sapien
caacttccatcccccaggttcaagt

SEQ ID NO: 4117009 - DNA, 25 bp, Homo sapien
acttccatcccccaggttcaagtga

SEQ ID NO: 4117010 - DNA, 25 bp, Homo sapien
atcttggctggcgtgcagtggcacg

SEQ ID NO: 4117011 - DNA, 25 bp, Homo sapien
ggaggactgggtgcgcctgcaggga

SEQ ID NO: 4117012 - DNA, 25 bp, Homo sapien
gcctgcagggatcggaagccggttg

SEQ ID NO: 4117013 - DNA, 25 bp, Homo sapien
ggagaagccgggaggactgggtgcg

SEQ ID NO: 4117014 - DNA, 25 bp, Homo sapien
actgggtgcgcctgcagggatcgga

SEQ ID NO: 4117015 - DNA, 25 bp, Homo sapien
acgcacgcgtccttttgcggccgct

SEQ ID NO: 4117016 - DNA, 25 bp, Homo sapien
ccgccgcgcacacgcacgcgtcctt

SEQ ID NO: 4117017 - DNA, 25 bp, Homo sapien
gtccttttgcggccgctggcctctg

SEQ ID NO: 4117018 - DNA, 25 bp, Homo sapien
ccacccgccgcgcacacgcacgcgt

SEQ ID NO: 4117019 - DNA, 25 bp, Homo sapien
cccgtgaggcgtccgcaggcggcgg

SEQ ID NO: 4117020 - DNA, 25 bp, Homo sapien
gcgctcgggacacggcgttcgcggt

SEQ ID NO: 4117021 - DNA, 25 bp, Homo sapien
acggcgttcgcggtgctcgcctccg

SEQ ID NO: 4117022 - DNA, 25 bp, Homo sapien
gcatcccttcccggcccgtgaggcg

SEQ ID NO: 4117023 - DNA, 25 bp, Homo sapien
ggctttcgacttgtaaatgcactga

SEQ ID NO: 4117024 - DNA, 25 bp, Homo sapien
aataatggagttgttcttgcacacc

SEQ ID NO: 4117025 - DNA, 25 bp, Homo sapien
tgaacggcgagaacaagcagtcgga

SEQ ID NO: 4117026 - DNA, 25 bp, Homo sapien
gcctgagctttttcaacccctagag

SEQ ID NO: 4117027 - DNA, 25 bp, Homo sapien
gtcccggcgcactgggcaagctctg

SEQ ID NO: 4117028 - DNA, 25 bp, Homo sapien
cagatctccattagcaaccagagca

SEQ ID NO: 4117029 - DNA, 25 bp, Homo sapien
aacgcctcactgtcattctgatgca

SEQ ID NO: 4117030 - DNA, 25 bp, Homo sapien
ctgggagcggaatggatggagcccg

SEQ ID NO: 4117031 - DNA, 25 bp, Homo sapien
tcttgagagaaaggtcgcctggcct

SEQ ID NO: 4117032 - DNA, 25 bp, Homo sapien
gtactggctgcctcctactatagtg

SEQ ID NO: 4117033 - DNA, 25 bp, Homo sapien
ttgacaaacacattaggagccctgt

SEQ ID NO: 4117034 - DNA, 25 bp, Homo sapien
gcgaccccgtgcttgcaagtactgg

SEQ ID NO: 4117035 - DNA, 25 bp, Homo sapien
gctcctgcatcatgtaaaactttga

SEQ ID NO: 4117036 - DNA, 25 bp, Homo sapien
ctttgatcaataggaggctgaggaa

SEQ ID NO: 4117037 - DNA, 25 bp, Homo sapien
ggctcctgcatcatgtaaaactttg

SEQ ID NO: 4117038 - DNA, 25 bp, Homo sapien
aggctcctgcatcatgtaaaacttt

SEQ ID NO: 4117039 - DNA, 25 bp, Homo sapien
ctgccgtgttcaatagcagctcata

SEQ ID NO: 4117040 - DNA, 25 bp, Homo sapien
ccattccagaaaggatcccgtactg

SEQ ID NO: 4117041 - DNA, 25 bp, Homo sapien
tccagaaaggatcccgtactgtatc

SEQ ID NO: 4117042 - DNA, 25 bp, Homo sapien
caatagcagctcataagacctccat

SEQ ID NO: 4117043 - DNA, 25 bp, Homo sapien
ttgtctaagaattggccataaagaa

SEQ ID NO: 4117044 - DNA, 25 bp, Homo sapien
tttgtctaagaattggccataaaga

SEQ ID NO: 4117045 - DNA, 25 bp, Homo sapien
ttttgtctaagaattggccataaag

SEQ ID NO: 4117046 - DNA, 25 bp, Homo sapien
aacgtggtattgtggcgtgcctggg

SEQ ID NO: 4117047 - DNA, 25 bp, Homo sapien
agttggtattgataaaacgtggtat

SEQ ID NO: 4117048 - DNA, 25 bp, Homo sapien
taaaacgtggtattgtggcgtgcct

SEQ ID NO: 4117049 - DNA, 25 bp, Homo sapien
aaaacgtggtattgtggcgtgcctg

SEQ ID NO: 4117050 - DNA, 25 bp, Homo sapien
gacacaatagaggttctgccgccag

SEQ ID NO: 4117051 - DNA, 25 bp, Homo sapien
ggagcccagctcttttctactggaa

SEQ ID NO: 4117052 - DNA, 25 bp, Homo sapien
tatcataccgtgtgccaggaaacag

SEQ ID NO: 4117053 - DNA, 25 bp, Homo sapien
ctgtgggcaatacaaagaaggacac

SEQ ID NO: 4117054 - DNA, 25 bp, Homo sapien
gagaggcagccttgagtaattcaat

SEQ ID NO: 4117055 - DNA, 25 bp, Homo sapien
gaggcagccttgagtaattcaatca

SEQ ID NO: 4117056 - DNA, 25 bp, Homo sapien
agaggcagccttgagtaattcaatc

SEQ ID NO: 4117057 - DNA, 25 bp, Homo sapien
ggcagccttgagtaattcaatcagt

SEQ ID NO: 4117058 - DNA, 25 bp, Homo sapien
ggacattggtggctaacatttgact

SEQ ID NO: 4117059 - DNA, 25 bp, Homo sapien
catttgactgttgggttgggcagat

SEQ ID NO: 4117060 - DNA, 25 bp, Homo sapien
gtgctcataatctttgaaaatctct

SEQ ID NO: 4117061 - DNA, 25 bp, Homo sapien
cctcagaaagcagggtaacacaagg

SEQ ID NO: 4117062 - DNA, 25 bp, Homo sapien
cactatagcctgtggatcacaagca

SEQ ID NO: 4117063 - DNA, 25 bp, Homo sapien
aaagggatgccagggacaactcact

SEQ ID NO: 4117064 - DNA, 25 bp, Homo sapien
cagcagtgcacgtaggaaatggaag

SEQ ID NO: 4117065 - DNA, 25 bp, Homo sapien
tggaagtgagctaaacaggactcct

SEQ ID NO: 4117066 - DNA, 25 bp, Homo sapien
taccaaaactctctcaagaggaaaa

SEQ ID NO: 4117067 - DNA, 25 bp, Homo sapien
tgaatagacctataacaaagaaagg

SEQ ID NO: 4117068 - DNA, 25 bp, Homo sapien
gaattaccactaatcctctcaaact

SEQ ID NO: 4117069 - DNA, 25 bp, Homo sapien
cattagtaatcaaaaaatgtcccac

SEQ ID NO: 4117070 - DNA, 25 bp, Homo sapien
caacaagtcctaaatgggagtgtgg

SEQ ID NO: 4117071 - DNA, 25 bp, Homo sapien
tgtgtggtagctaaagggcaattca

SEQ ID NO: 4117072 - DNA, 25 bp, Homo sapien
tctgcccaaagttagcaaacaacca

SEQ ID NO: 4117073 - DNA, 25 bp, Homo sapien
gactttacacatgattttgcaggct

SEQ ID NO: 4117074 - DNA, 25 bp, Homo sapien
tcagaggctaacgaccagcatcctc

SEQ ID NO: 4117075 - DNA, 25 bp, Homo sapien
gattgccacatggtcattggaggag

SEQ ID NO: 4117076 - DNA, 25 bp, Homo sapien
taagaagtgcttatcaatcagaggc

SEQ ID NO: 4117077 - DNA, 25 bp, Homo sapien
gatacaggaatactatctaagaccc

SEQ ID NO: 4117078 - DNA, 25 bp, Homo sapien
gcttgcctgaagcaacaaagacttt

SEQ ID NO: 4117079 - DNA, 25 bp, Homo sapien
cacacagtccaaccaacaccccagc

SEQ ID NO: 4117080 - DNA, 25 bp, Homo sapien
gagaggccacacagtccaaccaaca

SEQ ID NO: 4117081 - DNA, 25 bp, Homo sapien
gaagagagggataaagagaggccac

SEQ ID NO: 4117082 - DNA, 25 bp, Homo sapien
ttcctcatgcagaccggagcatcca

SEQ ID NO: 4117083 - DNA, 25 bp, Homo sapien
catagaatgtctatctagcctaagg

SEQ ID NO: 4117084 - DNA, 25 bp, Homo sapien
gtacaccaatcccaaattatacaga

SEQ ID NO: 4117085 - DNA, 25 bp, Homo sapien
tctggtacaccaatcccaaattata

SEQ ID NO: 4117086 - DNA, 25 bp, Homo sapien
tcaagaatctgctcacggtaaaggg

SEQ ID NO: 4117087 - DNA, 25 bp, Homo sapien
gaaattcaggccgatcgtgctggct

SEQ ID NO: 4117088 - DNA, 25 bp, Homo sapien
tatcacaacacgaaactcaggagag

SEQ ID NO: 4117089 - DNA, 25 bp, Homo sapien
gagagtagacttcgtagtggccaca

SEQ ID NO: 4117090 - DNA, 25 bp, Homo sapien
cgtggctctggtttttatagtggct

SEQ ID NO: 4117091 - DNA, 25 bp, Homo sapien
ttgtgtggtttgaactgcccgtctg

SEQ ID NO: 4117092 - DNA, 25 bp, Homo sapien
gggcacgtggctctggtttttatag

SEQ ID NO: 4117093 - DNA, 25 bp, Homo sapien
aactgcccgtctgcaccaaggaagg

SEQ ID NO: 4117094 - DNA, 25 bp, Homo sapien
ccaacatcaccttcagcttcttcat

SEQ ID NO: 4117095 - DNA, 25 bp, Homo sapien
ctgaagggccttcccaacatcacct

SEQ ID NO: 4117096 - DNA, 25 bp, Homo sapien
aagggccttcccaacatcaccttca

SEQ ID NO: 4117097 - DNA, 25 bp, Homo sapien
cccaacatcaccttcagcttcttca

SEQ ID NO: 4117098 - DNA, 25 bp, Homo sapien
ctgggaggagagcggcagcgccagg

SEQ ID NO: 4117099 - DNA, 25 bp, Homo sapien
gacttgcttgagaatgtccaccaca

SEQ ID NO: 4117100 - DNA, 25 bp, Homo sapien
tgacttgcttgagaatgtccaccac

SEQ ID NO: 4117101 - DNA, 25 bp, Homo sapien
acttgcttgagaatgtccaccacaa

SEQ ID NO: 4117102 - DNA, 25 bp, Homo sapien
ccaaattcaagacggcaggtgcctg

SEQ ID NO: 4117103 - DNA, 25 bp, Homo sapien
tgtccacggttaagtgtcctctaag

SEQ ID NO: 4117104 - DNA, 25 bp, Homo sapien
ccatggagatgggacaagtcactgt

SEQ ID NO: 4117105 - DNA, 25 bp, Homo sapien
tctaaggcagtgacatcccaggatt

SEQ ID NO: 4117106 - DNA, 25 bp, Homo sapien
catgtagttgtatagttttgagcaa

SEQ ID NO: 4117107 - DNA, 25 bp, Homo sapien
gttgtatagttttgagcaagtttct

SEQ ID NO: 4117108 - DNA, 25 bp, Homo sapien
taagtgtgatgttgtggtatcagga

SEQ ID NO: 4117109 - DNA, 25 bp, Homo sapien
tcttaatcttgaactctaacttgat

SEQ ID NO: 4117110 - DNA, 25 bp, Homo sapien
tgattcgtgtctcctttcttgttta

SEQ ID NO: 4117111 - DNA, 25 bp, Homo sapien
gattcgtgtctcctttcttgtttat

SEQ ID NO: 4117112 - DNA, 25 bp, Homo sapien
tttgattcgtgtctcctttcttgtt

SEQ ID NO: 4117113 - DNA, 25 bp, Homo sapien
atttgattcgtgtctcctttcttgt

SEQ ID NO: 4117114 - DNA, 25 bp, Homo sapien
atgcccagtcccgacgtcctgtagt

SEQ ID NO: 4117115 - DNA, 25 bp, Homo sapien
tgcccagtcccgacgtcctgtagtg

SEQ ID NO: 4117116 - DNA, 25 bp, Homo sapien
aatgcccagtcccgacgtcctgtag

SEQ ID NO: 4117117 - DNA, 25 bp, Homo sapien
gaaatgcccagtcccgacgtcctgt

SEQ ID NO: 4117118 - DNA, 25 bp, Homo sapien
gaaggccacttcatccaggtagtca

SEQ ID NO: 4117119 - DNA, 25 bp, Homo sapien
gaagactgggaggaagactttgcca

SEQ ID NO: 4117120 - DNA, 25 bp, Homo sapien
cacgtaacggagcaagaccatgaga

SEQ ID NO: 4117121 - DNA, 25 bp, Homo sapien
tggagatggccagattcagcagata

SEQ ID NO: 4117122 - DNA, 25 bp, Homo sapien
tagggctgagcatgaacgatctcca

SEQ ID NO: 4117123 - DNA, 25 bp, Homo sapien
tatgggaaccatagcacgaagaagg

SEQ ID NO: 4117124 - DNA, 25 bp, Homo sapien
cagttcccgaatacttgcaggtcca

SEQ ID NO: 4117125 - DNA, 25 bp, Homo sapien
tacctggagtgcgtagtctagatgc

SEQ ID NO: 4117126 - DNA, 25 bp, Homo sapien
ttgttagggtagttctcagactgcc

SEQ ID NO: 4117127 - DNA, 25 bp, Homo sapien
ttcctcttgggcagtaagtatgctg

SEQ ID NO: 4117128 - DNA, 25 bp, Homo sapien
gtgccatccaagcacggcagccagg

SEQ ID NO: 4117129 - DNA, 25 bp, Homo sapien
caaggtcattcatgccagtcatttc

SEQ ID NO: 4117130 - DNA, 25 bp, Homo sapien
gaactgaccactgggtttagcaaca

SEQ ID NO: 4117131 - DNA, 25 bp, Homo sapien
tccggccgcatatagaaagtaactt

SEQ ID NO: 4117132 - DNA, 25 bp, Homo sapien
gagagcactttgagtggacacccaa

SEQ ID NO: 4117133 - DNA, 25 bp, Homo sapien
taaaggccgagagtatcaggatcac

SEQ ID NO: 4117134 - DNA, 25 bp, Homo sapien
taccttgtggaattcacctgggaca

SEQ ID NO: 4117135 - DNA, 25 bp, Homo sapien
tggactacagagaatgtggaaccct

SEQ ID NO: 4117136 - DNA, 25 bp, Homo sapien
cctcagaaggtgagagagtgagcca

SEQ ID NO: 4117137 - DNA, 25 bp, Homo sapien
tgctgggtccaccatcaaggctacg

SEQ ID NO: 4117138 - DNA, 25 bp, Homo sapien
ggctcaaacagtgccctcgggatct

SEQ ID NO: 4117139 - DNA, 25 bp, Homo sapien
tcctaattacatgagggagcccaca

SEQ ID NO: 4117140 - DNA, 25 bp, Homo sapien
taactgtcgaatccaagattgggac

SEQ ID NO: 4117141 - DNA, 25 bp, Homo sapien
gcacagggcagagtgaccaagcagt

SEQ ID NO: 4117142 - DNA, 25 bp, Homo sapien
aaaggcttctcagtggatgtgtcag

SEQ ID NO: 4117143 - DNA, 25 bp, Homo sapien
tggagcttacattcacccagccgtc

SEQ ID NO: 4117144 - DNA, 25 bp, Homo sapien
gggcaggttgcaccaggtagttcta

SEQ ID NO: 4117145 - DNA, 25 bp, Homo sapien
tatcagtcaggaatctttaggttgc

SEQ ID NO: 4117146 - DNA, 25 bp, Homo sapien
cctgtcttcaaagtctggtatgtac

SEQ ID NO: 4117147 - DNA, 25 bp, Homo sapien
tttcaacgtgatcactattaaaaat

SEQ ID NO: 4117148 - DNA, 25 bp, Homo sapien
gtctggtatgtactgtacttttgca

SEQ ID NO: 4117149 - DNA, 25 bp, Homo sapien
caagtgcttaattgccgtgtgtggc

SEQ ID NO: 4117150 - DNA, 25 bp, Homo sapien
ggctggagaccaagcagtcctttgc

SEQ ID NO: 4117151 - DNA, 25 bp, Homo sapien
caactggctgggcaacatgcttcag

SEQ ID NO: 4117152 - DNA, 25 bp, Homo sapien
tccagtgggcaggagtatctgttcc

SEQ ID NO: 4117153 - DNA, 25 bp, Homo sapien
tataccctgaagatgtccagtgggc

SEQ ID NO: 4117154 - DNA, 25 bp, Homo sapien
tggccaactctaccaatcaagactt

SEQ ID NO: 4117155 - DNA, 25 bp, Homo sapien
tatcaggactccatgctgacgatgc

SEQ ID NO: 4117156 - DNA, 25 bp, Homo sapien
tatatgggtgcctgaaattggccag

SEQ ID NO: 4117157 - DNA, 25 bp, Homo sapien
gacaggacaagtcattgtgcccaca

SEQ ID NO: 4117158 - DNA, 25 bp, Homo sapien
aatagtcactttagacagttctgcc

SEQ ID NO: 4117159 - DNA, 25 bp, Homo sapien
tctgccagtacaatgctctctaggt

SEQ ID NO: 4117160 - DNA, 25 bp, Homo sapien
tagtcactttagacagttctgccag

SEQ ID NO: 4117161 - DNA, 25 bp, Homo sapien
agtacaatgctctctaggtgatgag

SEQ ID NO: 4117162 - DNA, 25 bp, Homo sapien
catgggacttatgggtgggtatcca

SEQ ID NO: 4117163 - DNA, 25 bp, Homo sapien
caatggaggtgaaccaatggcagcc

SEQ ID NO: 4117164 - DNA, 25 bp, Homo sapien
aacacagagccccaatatctggagg

SEQ ID NO: 4117165 - DNA, 25 bp, Homo sapien
tagagactgcttcagccaatggagg

SEQ ID NO: 4117166 - DNA, 25 bp, Homo sapien
agttcttccaaccaccttgcatggc

SEQ ID NO: 4117167 - DNA, 25 bp, Homo sapien
cagttcttccaaccaccttgcatgg

SEQ ID NO: 4117168 - DNA, 25 bp, Homo sapien
tccacagttcttccaaccaccttgc

SEQ ID NO: 4117169 - DNA, 25 bp, Homo sapien
cacagttcttccaaccaccttgcat

SEQ ID NO: 4117170 - DNA, 25 bp, Homo sapien
atatttttttcacagtcaagtgggc

SEQ ID NO: 4117171 - DNA, 25 bp, Homo sapien
atttttttcacagtcaagtgggcac

SEQ ID NO: 4117172 - DNA, 25 bp, Homo sapien
taaggacacaaatatttttttcaca

SEQ ID NO: 4117173 - DNA, 25 bp, Homo sapien
aaatatttttttcacagtcaagtgg

SEQ ID NO: 4117174 - DNA, 25 bp, Homo sapien
cagtcttatccatggagtcatggtt

SEQ ID NO: 4117175 - DNA, 25 bp, Homo sapien
ggctggatgaagcacgagccatctc

SEQ ID NO: 4117176 - DNA, 25 bp, Homo sapien
cttcaattttcccatactgttcaaa

SEQ ID NO: 4117177 - DNA, 25 bp, Homo sapien
atcacttcaattttcccatactgtt

SEQ ID NO: 4117178 - DNA, 25 bp, Homo sapien
gaagtggttaagtcataagagcctc

SEQ ID NO: 4117179 - DNA, 25 bp, Homo sapien
ccatctatgaaggatgggccctcac

SEQ ID NO: 4117180 - DNA, 25 bp, Homo sapien
tattgttatggtattaagaggcagg

SEQ ID NO: 4117181 - DNA, 25 bp, Homo sapien
tccagaactacaagcaattgatttc

SEQ ID NO: 4117182 - DNA, 25 bp, Homo sapien
aggtcagggttgtctcttacggcca

SEQ ID NO: 4117183 - DNA, 25 bp, Homo sapien
gactctagttgacccaatagggctg

SEQ ID NO: 4117184 - DNA, 25 bp, Homo sapien
tcacaaggtagccaccagggtcagt

SEQ ID NO: 4117185 - DNA, 25 bp, Homo sapien
tagggctgctaacctcctgaagtgg

SEQ ID NO: 4117186 - DNA, 25 bp, Homo sapien
gaacttatgttctcgagggatcagg

SEQ ID NO: 4117187 - DNA, 25 bp, Homo sapien
tgcagaagcacagtccaggtgagct

SEQ ID NO: 4117188 - DNA, 25 bp, Homo sapien
tcctgggtcaagtgaatggcctcta

SEQ ID NO: 4117189 - DNA, 25 bp, Homo sapien
cctgtgatccctagaaaggcctgat

SEQ ID NO: 4117190 - DNA, 25 bp, Homo sapien
ggaggaatccttcccctgcgctcta

SEQ ID NO: 4117191 - DNA, 25 bp, Homo sapien
ctgcgctctaggccaccccttcctc

SEQ ID NO: 4117192 - DNA, 25 bp, Homo sapien
ctggggaggaatccttcccctgcgc

SEQ ID NO: 4117193 - DNA, 25 bp, Homo sapien
tggagacacggacgatcccagggac

SEQ ID NO: 4117194 - DNA, 25 bp, Homo sapien
ggctcgggccgctccggttgctcta

SEQ ID NO: 4117195 - DNA, 25 bp, Homo sapien
ggttgctctaggacggcggagggcg

SEQ ID NO: 4117196 - DNA, 25 bp, Homo sapien
ggcggagggcgccgcatctctgtgg

SEQ ID NO: 4117197 - DNA, 25 bp, Homo sapien
ccgctccggttgctctaggacggcg

SEQ ID NO: 4117198 - DNA, 25 bp, Homo sapien
tgcagccaccggagtaagaccccga

SEQ ID NO: 4117199 - DNA, 25 bp, Homo sapien
accagaggctgttggggtcgcggaa

SEQ ID NO: 4117200 - DNA, 25 bp, Homo sapien
tgggcaggcctgacacggctaccct

SEQ ID NO: 4117201 - DNA, 25 bp, Homo sapien
agggcgcgccagaccggaccagagg

SEQ ID NO: 4117202 - DNA, 25 bp, Homo sapien
gccgaggcgtgtcccgctcgccagc

SEQ ID NO: 4117203 - DNA, 25 bp, Homo sapien
acaaggccgaggcgtgtcccgctcg

SEQ ID NO: 4117204 - DNA, 25 bp, Homo sapien
aggacaaggccgaggcgtgtcccgc

SEQ ID NO: 4117205 - DNA, 25 bp, Homo sapien
aggcgtgtcccgctcgccagcgcca

SEQ ID NO: 4117206 - DNA, 25 bp, Homo sapien
ctgaaacaacatgtgtttaaatgcc

SEQ ID NO: 4117207 - DNA, 25 bp, Homo sapien
ccaggccgatccattcgttctcaga

SEQ ID NO: 4117208 - DNA, 25 bp, Homo sapien
ggccgatccattcgttctcagagaa

SEQ ID NO: 4117209 - DNA, 25 bp, Homo sapien
agggcccaggccgatccattcgttc

SEQ ID NO: 4117210 - DNA, 25 bp, Homo sapien
gggcccaggccgatccattcgttct

SEQ ID NO: 4117211 - DNA, 25 bp, Homo sapien
gggaagccacagccccataattctc

SEQ ID NO: 4117212 - DNA, 25 bp, Homo sapien
gaagccacagccccataattctcca

SEQ ID NO: 4117213 - DNA, 25 bp, Homo sapien
agccacagccccataattctccagc

SEQ ID NO: 4117214 - DNA, 25 bp, Homo sapien
ccagggaagccacagccccataatt

SEQ ID NO: 4117215 - DNA, 25 bp, Homo sapien
gcaaggaagtcctgtataaggccca

SEQ ID NO: 4117216 - DNA, 25 bp, Homo sapien
tcaggaagttgacagacgactcagt

SEQ ID NO: 4117217 - DNA, 25 bp, Homo sapien
tgagctgagggttatcaacaactcc

SEQ ID NO: 4117218 - DNA, 25 bp, Homo sapien
gaattaggctggatcttgcaaaccg

SEQ ID NO: 4117219 - DNA, 25 bp, Homo sapien
aatcagagccggtttgggaaatgga

SEQ ID NO: 4117220 - DNA, 25 bp, Homo sapien
tctccatccagagctccccgaggaa

SEQ ID NO: 4117221 - DNA, 25 bp, Homo sapien
ctccccgaggaaccgagcaccaggg

SEQ ID NO: 4117222 - DNA, 25 bp, Homo sapien
tccagctgggaaatcagagccggtt

SEQ ID NO: 4117223 - DNA, 25 bp, Homo sapien
tgtatgtgccaaggaagtcagctgc

SEQ ID NO: 4117224 - DNA, 25 bp, Homo sapien
tttaaagcctaaggaaggcctgcca

SEQ ID NO: 4117225 - DNA, 25 bp, Homo sapien
tcagaccaagtcaatcagtgcacag

SEQ ID NO: 4117226 - DNA, 25 bp, Homo sapien
taagctaagcaggttaatcccatcc

SEQ ID NO: 4117227 - DNA, 25 bp, Homo sapien
gaaatagaaaagatgaaggcctctt

SEQ ID NO: 4117228 - DNA, 25 bp, Homo sapien
atagaaaagatgaaggcctcttctt

SEQ ID NO: 4117229 - DNA, 25 bp, Homo sapien
gatgaaggcctcttcttcacctatc

SEQ ID NO: 4117230 - DNA, 25 bp, Homo sapien
agatgaaggcctcttcttcacctat

SEQ ID NO: 4117231 - DNA, 25 bp, Homo sapien
ctcaggatgggaaatcccagcaggc

SEQ ID NO: 4117232 - DNA, 25 bp, Homo sapien
gctcaggatgggaaatcccagcagg

SEQ ID NO: 4117233 - DNA, 25 bp, Homo sapien
tcaggatgggaaatcccagcaggct

SEQ ID NO: 4117234 - DNA, 25 bp, Homo sapien
ccacttgataggaccatgaggtcct

SEQ ID NO: 4117235 - DNA, 25 bp, Homo sapien
cacttgataggaccatgaggtcctg

SEQ ID NO: 4117236 - DNA, 25 bp, Homo sapien
ttgataggaccatgaggtcctgtgc

SEQ ID NO: 4117237 - DNA, 25 bp, Homo sapien
cttgataggaccatgaggtcctgtg

SEQ ID NO: 4117238 - DNA, 25 bp, Homo sapien
gaaagatctgagttccacatgaagc

SEQ ID NO: 4117239 - DNA, 25 bp, Homo sapien
cattgaggtaaccaggccatctccc

SEQ ID NO: 4117240 - DNA, 25 bp, Homo sapien
tttgtctctagcatggcgcctctgg

SEQ ID NO: 4117241 - DNA, 25 bp, Homo sapien
caatgtgatcgaaaactgaaagcct

SEQ ID NO: 4117242 - DNA, 25 bp, Homo sapien
tactaactgagcaaccctgaatgag

SEQ ID NO: 4117243 - DNA, 25 bp, Homo sapien
tgattgacacaagccaaacagggtc

SEQ ID NO: 4117244 - DNA, 25 bp, Homo sapien
aactctgcagtcagataggcctggc

SEQ ID NO: 4117245 - DNA, 25 bp, Homo sapien
catgaagatggtggtggtgccaaac

SEQ ID NO: 4117246 - DNA, 25 bp, Homo sapien
tggctcaaaagatgtcaccaaggac

SEQ ID NO: 4117247 - DNA, 25 bp, Homo sapien
caggtaaagcttggtctagtggctc

SEQ ID NO: 4117248 - DNA, 25 bp, Homo sapien
ggctcacatagctgaaaagttctga

SEQ ID NO: 4117249 - DNA, 25 bp, Homo sapien
ttaggctccatatggtagcacctgg

SEQ ID NO: 4117250 - DNA, 25 bp, Homo sapien
gactaaataaggtgcccataacctg

SEQ ID NO: 4117251 - DNA, 25 bp, Homo sapien
gggtgtgtcagcagccttaggattt

SEQ ID NO: 4117252 - DNA, 25 bp, Homo sapien
tagtgagatggaaaacctgcatgca

SEQ ID NO: 4117253 - DNA, 25 bp, Homo sapien
gaatgatagaatcaggagacagcca

SEQ ID NO: 4117254 - DNA, 25 bp, Homo sapien
actttatgcaaataatcagaccaaa

SEQ ID NO: 4117255 - DNA, 25 bp, Homo sapien
cactttatgcaaataatcagaccaa

SEQ ID NO: 4117256 - DNA, 25 bp, Homo sapien
gcactttatgcaaataatcagacca

SEQ ID NO: 4117257 - DNA, 25 bp, Homo sapien
caaatttcagcttcaaggttgtctt

SEQ ID NO: 4117258 - DNA, 25 bp, Homo sapien
aaatttcagcttcaaggttgtcttt

SEQ ID NO: 4117259 - DNA, 25 bp, Homo sapien
ctaatatatgtaacaggcttcccaa

SEQ ID NO: 4117260 - DNA, 25 bp, Homo sapien
tgtgtgaacattaaattcaagaggg

SEQ ID NO: 4117261 - DNA, 25 bp, Homo sapien
aagatttgatagaatggcctgtaag

SEQ ID NO: 4117262 - DNA, 25 bp, Homo sapien
tgaacattaaattcaagagggtatt

SEQ ID NO: 4117263 - DNA, 25 bp, Homo sapien
cattaaattcaagagggtatttatg

SEQ ID NO: 4117264 - DNA, 25 bp, Homo sapien
catatgggaaagtaccaagccagga

SEQ ID NO: 4117265 - DNA, 25 bp, Homo sapien
catgtatttccatgtcctaagggca

SEQ ID NO: 4117266 - DNA, 25 bp, Homo sapien
gaagctgttaggtggcaatgtcctc

SEQ ID NO: 4117267 - DNA, 25 bp, Homo sapien
cctctattgtgcaggaagtgagaca

SEQ ID NO: 4117268 - DNA, 25 bp, Homo sapien
caagcagagatggtgggcgccactc

SEQ ID NO: 4117269 - DNA, 25 bp, Homo sapien
cacaaaccaaaacctcgcgcgacaa

SEQ ID NO: 4117270 - DNA, 25 bp, Homo sapien
tcgcgcgacaaaaacgaaggcggcc

SEQ ID NO: 4117271 - DNA, 25 bp, Homo sapien
actcgccgatcctcacaaaccaaaa

SEQ ID NO: 4117272 - DNA, 25 bp, Homo sapien
ttatgagccaatccagatcgcaggg

SEQ ID NO: 4117273 - DNA, 25 bp, Homo sapien
taagtcttagggtactgcaacagca

SEQ ID NO: 4117274 - DNA, 25 bp, Homo sapien
cacaaaggcgagatagcaggcatac

SEQ ID NO: 4117275 - DNA, 25 bp, Homo sapien
cacattaggtgcatgacggatacga

SEQ ID NO: 4117276 - DNA, 25 bp, Homo sapien
gcctggttgttaaggacacagctgt

SEQ ID NO: 4117277 - DNA, 25 bp, Homo sapien
ggttgttaaggacacagctgtcatc

SEQ ID NO: 4117278 - DNA, 25 bp, Homo sapien
tcatcatctgacctcttttattcct

SEQ ID NO: 4117279 - DNA, 25 bp, Homo sapien
ctggttgttaaggacacagctgtca

SEQ ID NO: 4117280 - DNA, 25 bp, Homo sapien
cacttgtggaaggagaactgacccc

SEQ ID NO: 4117281 - DNA, 25 bp, Homo sapien
gcttgggcccgatcacagaagtgca

SEQ ID NO: 4117282 - DNA, 25 bp, Homo sapien
tgaagctgctgcatagaagctgggc

SEQ ID NO: 4117283 - DNA, 25 bp, Homo sapien
tgggcccgatcacagaagtgcactt

SEQ ID NO: 4117284 - DNA, 25 bp, Homo sapien
ccgctatgagcttctaaacatgtga

SEQ ID NO: 4117285 - DNA, 25 bp, Homo sapien
tccgctatgagcttctaaacatgtg

SEQ ID NO: 4117286 - DNA, 25 bp, Homo sapien
cgctatgagcttctaaacatgtgac

SEQ ID NO: 4117287 - DNA, 25 bp, Homo sapien
ctccgctatgagcttctaaacatgt

SEQ ID NO: 4117288 - DNA, 25 bp, Homo sapien
caaatgatacgtattcagtattggg

SEQ ID NO: 4117289 - DNA, 25 bp, Homo sapien
tattcagtattgggtccttcacgtg

SEQ ID NO: 4117290 - DNA, 25 bp, Homo sapien
ctacaaatgatacgtattcagtatt

SEQ ID NO: 4117291 - DNA, 25 bp, Homo sapien
attcagtattgggtccttcacgtgc

SEQ ID NO: 4117292 - DNA, 25 bp, Homo sapien
gacctcagtactttggtgatggtca

SEQ ID NO: 4117293 - DNA, 25 bp, Homo sapien
agacctcagtactttggtgatggtc

SEQ ID NO: 4117294 - DNA, 25 bp, Homo sapien
gatggcccattccttcgtagtgaag

SEQ ID NO: 4117295 - DNA, 25 bp, Homo sapien
tggcccattccttcgtagtgaagta

SEQ ID NO: 4117296 - DNA, 25 bp, Homo sapien
gcccattccttcgtagtgaagtaca

SEQ ID NO: 4117297 - DNA, 25 bp, Homo sapien
attccttcgtagtgaagtacacagc

SEQ ID NO: 4117298 - DNA, 25 bp, Homo sapien
aaaggccacagcctcatagttctcc

SEQ ID NO: 4117299 - DNA, 25 bp, Homo sapien
ataaaagagcccttcaacctgaggg

SEQ ID NO: 4117300 - DNA, 25 bp, Homo sapien
agagcccttcaacctgagggcccaa

SEQ ID NO: 4117301 - DNA, 25 bp, Homo sapien
gagcccttcaacctgagggcccaag

SEQ ID NO: 4117302 - DNA, 25 bp, Homo sapien
aattataaaagagcccttcaacctg

SEQ ID NO: 4117303 - DNA, 25 bp, Homo sapien
ccttgctccagatgagagaccaaag

SEQ ID NO: 4117304 - DNA, 25 bp, Homo sapien
cattcctgcttaggactccctgtgg

SEQ ID NO: 4117305 - DNA, 25 bp, Homo sapien
ttcccttgctccagatgagagacca

SEQ ID NO: 4117306 - DNA, 25 bp, Homo sapien
tgctctccagtcattcctgcttagg

SEQ ID NO: 4117307 - DNA, 25 bp, Homo sapien
tatttgacatcgtttaaggtggctc

SEQ ID NO: 4117308 - DNA, 25 bp, Homo sapien
ggtggctcttacatcaactccttac

SEQ ID NO: 4117309 - DNA, 25 bp, Homo sapien
tgatactattctacgtaacactgct

SEQ ID NO: 4117310 - DNA, 25 bp, Homo sapien
tcccagcattgacgatttcgaaaaa

SEQ ID NO: 4117311 - DNA, 25 bp, Homo sapien
taccatgccacaagatttgtgttta

SEQ ID NO: 4117312 - DNA, 25 bp, Homo sapien
tgctcattctcagccgaggcttttc

SEQ ID NO: 4117313 - DNA, 25 bp, Homo sapien
gatgctcattctcagccgaggcttt

SEQ ID NO: 4117314 - DNA, 25 bp, Homo sapien
cagatgctcattctcagccgaggct

SEQ ID NO: 4117315 - DNA, 25 bp, Homo sapien
tggctacagcccgtatatgtgtggg

SEQ ID NO: 4117316 - DNA, 25 bp, Homo sapien
ccacttccaatcctgagcatgggaa

SEQ ID NO: 4117317 - DNA, 25 bp, Homo sapien
taaacaaagactgtagctggctaca

SEQ ID NO: 4117318 - DNA, 25 bp, Homo sapien
gcaggatcttaggatatctttcagc

SEQ ID NO: 4117319 - DNA, 25 bp, Homo sapien
gaggacctgacaggattaggtctcc

SEQ ID NO: 4117320 - DNA, 25 bp, Homo sapien
taggtctcccatctcacttcttccc

SEQ ID NO: 4117321 - DNA, 25 bp, Homo sapien
cctgacaggattaggtctcccatct

SEQ ID NO: 4117322 - DNA, 25 bp, Homo sapien
gacctgacaggattaggtctcccat

SEQ ID NO: 4117323 - DNA, 25 bp, Homo sapien
tactcctatttactgccagctgaac

SEQ ID NO: 4117324 - DNA, 25 bp, Homo sapien
tatatggctgcctatctacttaggg

SEQ ID NO: 4117325 - DNA, 25 bp, Homo sapien
gatgtaatcttagcaccaaacatga

SEQ ID NO: 4117326 - DNA, 25 bp, Homo sapien
ggttttcctgaacaatatgaggaca

SEQ ID NO: 4117327 - DNA, 25 bp, Homo sapien
tgaagggcagtatcagctcaacagt

SEQ ID NO: 4117328 - DNA, 25 bp, Homo sapien
tcctgagaactcatagtaatgggtt

SEQ ID NO: 4117329 - DNA, 25 bp, Homo sapien
cacctagtaggttctcatcaactga

SEQ ID NO: 4117330 - DNA, 25 bp, Homo sapien
tgattcctctcaccggtcatggcca

SEQ ID NO: 4117331 - DNA, 25 bp, Homo sapien
ggcagattgctgagtaaagtccagt

SEQ ID NO: 4117332 - DNA, 25 bp, Homo sapien
tcagtggtaagatctgacagaatca

SEQ ID NO: 4117333 - DNA, 25 bp, Homo sapien
acagaatcagctctacacgccaggg

SEQ ID NO: 4117334 - DNA, 25 bp, Homo sapien
gacacatcacttaatgtacggtaga

SEQ ID NO: 4117335 - DNA, 25 bp, Homo sapien
tgcacaccgggatactccgcgggtg

SEQ ID NO: 4117336 - DNA, 25 bp, Homo sapien
acgttctctgcagccaagtggccct

SEQ ID NO: 4117337 - DNA, 25 bp, Homo sapien
ccaactctcgggagatcgctgcaca

SEQ ID NO: 4117338 - DNA, 25 bp, Homo sapien
gaatacacgccggatctactgagat

SEQ ID NO: 4117339 - DNA, 25 bp, Homo sapien
ttgctcattgcaagcaaacaccctc

SEQ ID NO: 4117340 - DNA, 25 bp, Homo sapien
gctcattgcaagcaaacaccctcaa

SEQ ID NO: 4117341 - DNA, 25 bp, Homo sapien
agcatgtgatacagccccttcccgc

SEQ ID NO: 4117342 - DNA, 25 bp, Homo sapien
gcatgtgatacagccccttcccgcg

SEQ ID NO: 4117343 - DNA, 25 bp, Homo sapien
actctgtcaggtggtccagtcccga

SEQ ID NO: 4117344 - DNA, 25 bp, Homo sapien
aggtggtccagtcccgagtgcgtct

SEQ ID NO: 4117345 - DNA, 25 bp, Homo sapien
atgaactctgtcaggtggtccagtc

SEQ ID NO: 4117346 - DNA, 25 bp, Homo sapien
tgtcaggtggtccagtcccgagtgc

SEQ ID NO: 4117347 - DNA, 25 bp, Homo sapien
cactgaagccccagtagacaagctc

SEQ ID NO: 4117348 - DNA, 25 bp, Homo sapien
agggtgggctgcgagagagccagcc

SEQ ID NO: 4117349 - DNA, 25 bp, Homo sapien
ctgaagccccagtagacaagctcct

SEQ ID NO: 4117350 - DNA, 25 bp, Homo sapien
gaagccccagtagacaagctcctct

SEQ ID NO: 4117351 - DNA, 25 bp, Homo sapien
gcactgggtgttcccaacactgagg

SEQ ID NO: 4117352 - DNA, 25 bp, Homo sapien
tatgacccggggtcggctttctgga

SEQ ID NO: 4117353 - DNA, 25 bp, Homo sapien
ggactaggcccacaatgtctgcgcc

SEQ ID NO: 4117354 - DNA, 25 bp, Homo sapien
tgggtgttcccaacactgaggcatc

SEQ ID NO: 4117355 - DNA, 25 bp, Homo sapien
caaataggcaagctctgcattcttg

SEQ ID NO: 4117356 - DNA, 25 bp, Homo sapien
caaacaaataggcaagctctgcatt

SEQ ID NO: 4117357 - DNA, 25 bp, Homo sapien
gttcacaaacaaataggcaagctct

SEQ ID NO: 4117358 - DNA, 25 bp, Homo sapien
tgcagcttcatgttcacaaacaaat

SEQ ID NO: 4117359 - DNA, 25 bp, Homo sapien
tactcagcctctgcgactgtcggtt

SEQ ID NO: 4117360 - DNA, 25 bp, Homo sapien
taaacagcagtagatcacttggacc

SEQ ID NO: 4117361 - DNA, 25 bp, Homo sapien
gaatgtttgaatgcggacctacctg

SEQ ID NO: 4117362 - DNA, 25 bp, Homo sapien
gaaaattatgtcacgtactcagcct

SEQ ID NO: 4117363 - DNA, 25 bp, Homo sapien
tcatgtgacttcacactgtgccttc

SEQ ID NO: 4117364 - DNA, 25 bp, Homo sapien
ttcatgtgacttcacactgtgcctt

SEQ ID NO: 4117365 - DNA, 25 bp, Homo sapien
tttcatgtgacttcacactgtgcct

SEQ ID NO: 4117366 - DNA, 25 bp, Homo sapien
ccctgtgacttcacatagccccttc

SEQ ID NO: 4117367 - DNA, 25 bp, Homo sapien
tatttacatgagtggtgggatccgg

SEQ ID NO: 4117368 - DNA, 25 bp, Homo sapien
tctgagctgcgttacaataggcaag

SEQ ID NO: 4117369 - DNA, 25 bp, Homo sapien
ttgtaaaaccacaagcgtcagccag

SEQ ID NO: 4117370 - DNA, 25 bp, Homo sapien
gggttttggctcatcgtaaagtcag

SEQ ID NO: 4117371 - DNA, 25 bp, Homo sapien
agaacaatggttcttaaacttgctc

SEQ ID NO: 4117372 - DNA, 25 bp, Homo sapien
ttaaacttgctctggggattccttc

SEQ ID NO: 4117373 - DNA, 25 bp, Homo sapien
caatggttcttaaacttgctctggg

SEQ ID NO: 4117374 - DNA, 25 bp, Homo sapien
cagagatgggacagaacaatggttc

SEQ ID NO: 4117375 - DNA, 25 bp, Homo sapien
caggtgagcctatatgtcccagggc

SEQ ID NO: 4117376 - DNA, 25 bp, Homo sapien
gccagcaggtgagcctatatgtccc

SEQ ID NO: 4117377 - DNA, 25 bp, Homo sapien
cagcaggtgagcctatatgtcccag

SEQ ID NO: 4117378 - DNA, 25 bp, Homo sapien
gggccacaaagccctgcttggacac

SEQ ID NO: 4117379 - DNA, 25 bp, Homo sapien
tctgggccggcggatggacgctgtg

SEQ ID NO: 4117380 - DNA, 25 bp, Homo sapien
tcgcagataggatcatcaagaggca

SEQ ID NO: 4117381 - DNA, 25 bp, Homo sapien
gaacgctatcactggccgcctcttg

SEQ ID NO: 4117382 - DNA, 25 bp, Homo sapien
ggtgacagccatcgcagataggatc

SEQ ID NO: 4117383 - DNA, 25 bp, Homo sapien
ctgggcaaagcacggcttctccaga

SEQ ID NO: 4117384 - DNA, 25 bp, Homo sapien
ggagttcctgggcaaagcacggctt

SEQ ID NO: 4117385 - DNA, 25 bp, Homo sapien
aagcccatgtttcttgcccgctgcc

SEQ ID NO: 4117386 - DNA, 25 bp, Homo sapien
aaagcctgccggatatgggttgcag

SEQ ID NO: 4117387 - DNA, 25 bp, Homo sapien
tgacaaagtaatgtccctcctcacc

SEQ ID NO: 4117388 - DNA, 25 bp, Homo sapien
ctgacaaagtaatgtccctcctcac

SEQ ID NO: 4117389 - DNA, 25 bp, Homo sapien
tctatggccttgctcctcagcacag

SEQ ID NO: 4117390 - DNA, 25 bp, Homo sapien
tatggccttgctcctcagcacagac

SEQ ID NO: 4117391 - DNA, 25 bp, Homo sapien
tccaagccggtaaagctgccatgtc

SEQ ID NO: 4117392 - DNA, 25 bp, Homo sapien
gcacaacatgctgagtactgagtct

SEQ ID NO: 4117393 - DNA, 25 bp, Homo sapien
gttgcccaccagtcaaggctctgtt

SEQ ID NO: 4117394 - DNA, 25 bp, Homo sapien
gccagagtgtcagcccagaagtagc

SEQ ID NO: 4117395 - DNA, 25 bp, Homo sapien
cacatcgtggtctgtcagccatggg

SEQ ID NO: 4117396 - DNA, 25 bp, Homo sapien
gagcatctgcacatcgtggtctgtc

SEQ ID NO: 4117397 - DNA, 25 bp, Homo sapien
gccaacagacggagcatctgcacat

SEQ ID NO: 4117398 - DNA, 25 bp, Homo sapien
ccctgtgccaacagacggagcatct

SEQ ID NO: 4117399 - DNA, 25 bp, Homo sapien
gaagggcagcctcagtggagaagcc

SEQ ID NO: 4117400 - DNA, 25 bp, Homo sapien
aggacaggtcctgaagggcagcctc

SEQ ID NO: 4117401 - DNA, 25 bp, Homo sapien
tgggagaggacaggtcctgaagggc

SEQ ID NO: 4117402 - DNA, 25 bp, Homo sapien
cagtggagaagccaacctgtagcac

SEQ ID NO: 4117403 - DNA, 25 bp, Homo sapien
tacgtggaaggacaggacctcaggc

SEQ ID NO: 4117404 - DNA, 25 bp, Homo sapien
acgtggaaggacaggacctcaggca

SEQ ID NO: 4117405 - DNA, 25 bp, Homo sapien
ctacgtggaaggacaggacctcagg

SEQ ID NO: 4117406 - DNA, 25 bp, Homo sapien
cgtggaaggacaggacctcaggcag

SEQ ID NO: 4117407 - DNA, 25 bp, Homo sapien
tcaggtgctgcacatcgggtgccca

SEQ ID NO: 4117408 - DNA, 25 bp, Homo sapien
cccactcggtatggtggatgcccgg

SEQ ID NO: 4117409 - DNA, 25 bp, Homo sapien
caccgtctgtgtatcggtagggcag

SEQ ID NO: 4117410 - DNA, 25 bp, Homo sapien
agggcctgatactgcagccagccca

SEQ ID NO: 4117411 - DNA, 25 bp, Homo sapien
aaaattatagccatcagctcttgtg

SEQ ID NO: 4117412 - DNA, 25 bp, Homo sapien
ggaaaattacaaaagcaggtgcttg

SEQ ID NO: 4117413 - DNA, 25 bp, Homo sapien
tctaacctcaggtgggcaattcagg

SEQ ID NO: 4117414 - DNA, 25 bp, Homo sapien
taatgcctgtgtttcacaactaggt

SEQ ID NO: 4117415 - DNA, 25 bp, Homo sapien
tacagagacttgtccccacagcagg

SEQ ID NO: 4117416 - DNA, 25 bp, Homo sapien
tgtatgctttggctacagagacttg

SEQ ID NO: 4117417 - DNA, 25 bp, Homo sapien
ctacagagacttgtccccacagcag

SEQ ID NO: 4117418 - DNA, 25 bp, Homo sapien
ctttggctacagagacttgtcccca

SEQ ID NO: 4117419 - DNA, 25 bp, Homo sapien
ctgacttttagtgttgtgcaatcgc

SEQ ID NO: 4117420 - DNA, 25 bp, Homo sapien
tggtttgaggtactgacttttagtg

SEQ ID NO: 4117421 - DNA, 25 bp, Homo sapien
acttttagtgttgtgcaatcgcagg

SEQ ID NO: 4117422 - DNA, 25 bp, Homo sapien
gaggtactgacttttagtgttgtgc

SEQ ID NO: 4117423 - DNA, 25 bp, Homo sapien
ctgaagcagcataaggaggtctgcc

SEQ ID NO: 4117424 - DNA, 25 bp, Homo sapien
cgatcccccagattttgacttaggt

SEQ ID NO: 4117425 - DNA, 25 bp, Homo sapien
tgacttaggttctttggccacttct

SEQ ID NO: 4117426 - DNA, 25 bp, Homo sapien
aagacatagcagaggacttcgatcc

SEQ ID NO: 4117427 - DNA, 25 bp, Homo sapien
gacatagcagaggacttcgatcccc

SEQ ID NO: 4117428 - DNA, 25 bp, Homo sapien
cgttcatctggggagttggcttctc

SEQ ID NO: 4117429 - DNA, 25 bp, Homo sapien
ggccatcgctccattttcagccagg

SEQ ID NO: 4117430 - DNA, 25 bp, Homo sapien
agttggcttctcctcggccatcgct

SEQ ID NO: 4117431 - DNA, 25 bp, Homo sapien
catcgctccattttcagccagggac

SEQ ID NO: 4117432 - DNA, 25 bp, Homo sapien
ttcaaggcactttcagagtggctgg

SEQ ID NO: 4117433 - DNA, 25 bp, Homo sapien
tattcaaggcactttcagagtggct

SEQ ID NO: 4117434 - DNA, 25 bp, Homo sapien
attcaaggcactttcagagtggctg

SEQ ID NO: 4117435 - DNA, 25 bp, Homo sapien
tcttctttatttaagacagctgcct

SEQ ID NO: 4117436 - DNA, 25 bp, Homo sapien
ccagagcagcttctgtgtggcaagg

SEQ ID NO: 4117437 - DNA, 25 bp, Homo sapien
tccagatattcctaaataccttacc

SEQ ID NO: 4117438 - DNA, 25 bp, Homo sapien
gacaaaatgtacataactgcaggtt

SEQ ID NO: 4117439 - DNA, 25 bp, Homo sapien
ctgatatcaaagagggatctgaatt

SEQ ID NO: 4117440 - DNA, 25 bp, Homo sapien
atatcaaagagggatctgaatttcc

SEQ ID NO: 4117441 - DNA, 25 bp, Homo sapien
tgatatcaaagagggatctgaattt

SEQ ID NO: 4117442 - DNA, 25 bp, Homo sapien
ggatctgaatttccaaagtcctcat

SEQ ID NO: 4117443 - DNA, 25 bp, Homo sapien
acctgctcgtaaagtacgtatgatg

SEQ ID NO: 4117444 - DNA, 25 bp, Homo sapien
ctgctcgtaaagtacgtatgatgta

SEQ ID NO: 4117445 - DNA, 25 bp, Homo sapien
ttaacctgctcgtaaagtacgtatg

SEQ ID NO: 4117446 - DNA, 25 bp, Homo sapien
taacctgctcgtaaagtacgtatga

SEQ ID NO: 4117447 - DNA, 25 bp, Homo sapien
atccgattcaaaaccacatagttca

SEQ ID NO: 4117448 - DNA, 25 bp, Homo sapien
catccgattcaaaaccacatagttc

SEQ ID NO: 4117449 - DNA, 25 bp, Homo sapien
ctacatccgattcaaaaccacatag

SEQ ID NO: 4117450 - DNA, 25 bp, Homo sapien
tacatccgattcaaaaccacatagt

SEQ ID NO: 4117451 - DNA, 25 bp, Homo sapien
tgtgtcagggccgaactcccttcaa

SEQ ID NO: 4117452 - DNA, 25 bp, Homo sapien
caatccatgtgtcagggccgaactc

SEQ ID NO: 4117453 - DNA, 25 bp, Homo sapien
tgtcagggccgaactcccttcaact

SEQ ID NO: 4117454 - DNA, 25 bp, Homo sapien
cttgcacaatccatgtgtcagggcc

SEQ ID NO: 4117455 - DNA, 25 bp, Homo sapien
ggcgaatagaccagctgatgggctt

SEQ ID NO: 4117456 - DNA, 25 bp, Homo sapien
agccggcgaatagaccagctgatgg

SEQ ID NO: 4117457 - DNA, 25 bp, Homo sapien
gaatagaccagctgatgggctttga

SEQ ID NO: 4117458 - DNA, 25 bp, Homo sapien
tcggaagccggcgaatagaccagct

SEQ ID NO: 4117459 - DNA, 25 bp, Homo sapien
gctccagggagggaacacctagact

SEQ ID NO: 4117460 - DNA, 25 bp, Homo sapien
tccagggagggaacacctagactgc

SEQ ID NO: 4117461 - DNA, 25 bp, Homo sapien
ctccagggagggaacacctagactg

SEQ ID NO: 4117462 - DNA, 25 bp, Homo sapien
tgttctacacagtctgtcaagggcc

SEQ ID NO: 4117463 - DNA, 25 bp, Homo sapien
tagtacctagcactggacacaacag

SEQ ID NO: 4117464 - DNA, 25 bp, Homo sapien
tacggagtagcacagaaacatcgcc

SEQ ID NO: 4117465 - DNA, 25 bp, Homo sapien
gaatgataccccacagcagtgttct

SEQ ID NO: 4117466 - DNA, 25 bp, Homo sapien
aggatggagaggcatacaagcaaga

SEQ ID NO: 4117467 - DNA, 25 bp, Homo sapien
tacaagcaagaagtggtagagtcct

SEQ ID NO: 4117468 - DNA, 25 bp, Homo sapien
ggatggagaggcatacaagcaagaa

SEQ ID NO: 4117469 - DNA, 25 bp, Homo sapien
aagaagtggtagagtcctctgagga

SEQ ID NO: 4117470 - DNA, 25 bp, Homo sapien
tgaaagtcagcaataggaagaatcg

SEQ ID NO: 4117471 - DNA, 25 bp, Homo sapien
gaaagtcagcaataggaagaatcgt

SEQ ID NO: 4117472 - DNA, 25 bp, Homo sapien
gaagaatcgtgggtctaccccagcc

SEQ ID NO: 4117473 - DNA, 25 bp, Homo sapien
agtcagcaataggaagaatcgtggg

SEQ ID NO: 4117474 - DNA, 25 bp, Homo sapien
cagtagcgatccaagcggtcgtgga

SEQ ID NO: 4117475 - DNA, 25 bp, Homo sapien
caggatgtggaccagccgcagctcg

SEQ ID NO: 4117476 - DNA, 25 bp, Homo sapien
tgggttctggcatttctctcggagc

SEQ ID NO: 4117477 - DNA, 25 bp, Homo sapien
gctcaggctcgaagccacagcagta

SEQ ID NO: 4117478 - DNA, 25 bp, Homo sapien
ccagtaaccttaggaagcaggcact

SEQ ID NO: 4117479 - DNA, 25 bp, Homo sapien
gttgccaaggtagcctgctcctcgg

SEQ ID NO: 4117480 - DNA, 25 bp, Homo sapien
tagctgggctgtttcaaacccggac

SEQ ID NO: 4117481 - DNA, 25 bp, Homo sapien
gctaaatcgcaaggccaaaggactg

SEQ ID NO: 4117482 - DNA, 25 bp, Homo sapien
tgtagaccaggtgagatggatcgct

SEQ ID NO: 4117483 - DNA, 25 bp, Homo sapien
ggtgctgaaggttgccagcgttatc

SEQ ID NO: 4117484 - DNA, 25 bp, Homo sapien
ctatgccctccagcagccgaaagtt

SEQ ID NO: 4117485 - DNA, 25 bp, Homo sapien
cagcagccgaaagttcagcttgtcc

SEQ ID NO: 4117486 - DNA, 25 bp, Homo sapien
gaatttcagtaacaggtgatgccag

SEQ ID NO: 4117487 - DNA, 25 bp, Homo sapien
gcaacagtaatctcagagaatttca

SEQ ID NO: 4117488 - DNA, 25 bp, Homo sapien
agaaaaagcaacagtaatctcagag

SEQ ID NO: 4117489 - DNA, 25 bp, Homo sapien
gccccagagccccgtaacagaaaga

SEQ ID NO: 4117490 - DNA, 25 bp, Homo sapien
tcctcgtccctgaagagtgtgaggt

SEQ ID NO: 4117491 - DNA, 25 bp, Homo sapien
tgcagcgacttcagcagcatgttct

SEQ ID NO: 4117492 - DNA, 25 bp, Homo sapien
gcttttggatgtgtcccagcagcac

SEQ ID NO: 4117493 - DNA, 25 bp, Homo sapien
tagacaccctgatgcgagaaccttc

SEQ ID NO: 4117494 - DNA, 25 bp, Homo sapien
ggtgaaatatcccgtgacatccttg

SEQ ID NO: 4117495 - DNA, 25 bp, Homo sapien
caggcaggtgaaatatcccgtgaca

SEQ ID NO: 4117496 - DNA, 25 bp, Homo sapien
caggtgaaatatcccgtgacatcct

SEQ ID NO: 4117497 - DNA, 25 bp, Homo sapien
ggcaggtgaaatatcccgtgacatc

SEQ ID NO: 4117498 - DNA, 25 bp, Homo sapien
gctttgagattgaaaaccccatact

SEQ ID NO: 4117499 - DNA, 25 bp, Homo sapien
gaataaatagccagagccgagaagg

SEQ ID NO: 4117500 - DNA, 25 bp, Homo sapien
caggtattgcatgcaggcgggcaca

SEQ ID NO: 4117501 - DNA, 25 bp, Homo sapien
gcatatgcacgtgcatcacacattt

SEQ ID NO: 4117502 - DNA, 25 bp, Homo sapien
catgcaatcatgttcatggcggcaa

SEQ ID NO: 4117503 - DNA, 25 bp, Homo sapien
cacacatacacaccgctagggagtt

SEQ ID NO: 4117504 - DNA, 25 bp, Homo sapien
taatcagtctcctaccctcttggga

SEQ ID NO: 4117505 - DNA, 25 bp, Homo sapien
tcgcagaaatacttgcacgccatgc

SEQ ID NO: 4117506 - DNA, 25 bp, Homo sapien
ctcggtggtgagacaggattagatc

SEQ ID NO: 4117507 - DNA, 25 bp, Homo sapien
tcaaagcggctggttaagtcacaaa

SEQ ID NO: 4117508 - DNA, 25 bp, Homo sapien
tcacaaagtagaatgagcctcatcc

SEQ ID NO: 4117509 - DNA, 25 bp, Homo sapien
cctctggctgagtgtaggtctacca

SEQ ID NO: 4117510 - DNA, 25 bp, Homo sapien
tgtgttactatcttcagctcctcta

SEQ ID NO: 4117511 - DNA, 25 bp, Homo sapien
ctcctctagcttggaaaccatcatt

SEQ ID NO: 4117512 - DNA, 25 bp, Homo sapien
ctgtgttactatcttcagctcctct

SEQ ID NO: 4117513 - DNA, 25 bp, Homo sapien
tcagctcctctagcttggaaaccat

SEQ ID NO: 4117514 - DNA, 25 bp, Homo sapien
tcatgggggatgaacgggccaagga

SEQ ID NO: 4117515 - DNA, 25 bp, Homo sapien
acattccactcagggtgggggccgt

SEQ ID NO: 4117516 - DNA, 25 bp, Homo sapien
gggaggaggagcatcgcattcaccc

SEQ ID NO: 4117517 - DNA, 25 bp, Homo sapien
tcagggaacccacatctgacattcc

SEQ ID NO: 4117518 - DNA, 25 bp, Homo sapien
ctggtgcctttgaaacacagagtgc

SEQ ID NO: 4117519 - DNA, 25 bp, Homo sapien
tgcccattcttccaaccgcgactct

SEQ ID NO: 4117520 - DNA, 25 bp, Homo sapien
tctcgtccatcggagcactcactct

SEQ ID NO: 4117521 - DNA, 25 bp, Homo sapien
tctggtgcctttgaaacacagagtg

SEQ ID NO: 4117522 - DNA, 25 bp, Homo sapien
ctgaaatgagcacccctgagcaatg

SEQ ID NO: 4117523 - DNA, 25 bp, Homo sapien
taaagctcttggcatagcgtgagac

SEQ ID NO: 4117524 - DNA, 25 bp, Homo sapien
aacccaagataggtcaggagaggcc

SEQ ID NO: 4117525 - DNA, 25 bp, Homo sapien
tgagcaatgctaaccagaacccaag

SEQ ID NO: 4117526 - DNA, 25 bp, Homo sapien
cagcctcttccaagtccactggacc

SEQ ID NO: 4117527 - DNA, 25 bp, Homo sapien
gcctcttccaagtccactggaccca

SEQ ID NO: 4117528 - DNA, 25 bp, Homo sapien
ccagcctcttccaagtccactggac

SEQ ID NO: 4117529 - DNA, 25 bp, Homo sapien
cctcttccaagtccactggacccat

SEQ ID NO: 4117530 - DNA, 25 bp, Homo sapien
gaggagctaggtcctacagtggaat

SEQ ID NO: 4117531 - DNA, 25 bp, Homo sapien
cctaggaatccttacgaggagctag

SEQ ID NO: 4117532 - DNA, 25 bp, Homo sapien
ggaatttcggacactagcagcaggt

SEQ ID NO: 4117533 - DNA, 25 bp, Homo sapien
aaaggccagatgttccctaggaatc

SEQ ID NO: 4117534 - DNA, 25 bp, Homo sapien
cttagcctgctctgggtcaggggac

SEQ ID NO: 4117535 - DNA, 25 bp, Homo sapien
tagcctgctctgggtcaggggacat

SEQ ID NO: 4117536 - DNA, 25 bp, Homo sapien
ttagcctgctctgggtcaggggaca

SEQ ID NO: 4117537 - DNA, 25 bp, Homo sapien
gactttacctatacctacaccttga

SEQ ID NO: 4117538 - DNA, 25 bp, Homo sapien
tagggaccttctagagctcacccac

SEQ ID NO: 4117539 - DNA, 25 bp, Homo sapien
gctgggaagacacgcacaggagact

SEQ ID NO: 4117540 - DNA, 25 bp, Homo sapien
tggacctccattccctggtgcacta

SEQ ID NO: 4117541 - DNA, 25 bp, Homo sapien
ctcgtacccaaggtgatgcccagtg

SEQ ID NO: 4117542 - DNA, 25 bp, Homo sapien
atggcttcccgggtcatgctcctcg

SEQ ID NO: 4117543 - DNA, 25 bp, Homo sapien
gtgcaccactcgcctgacacatgga

SEQ ID NO: 4117544 - DNA, 25 bp, Homo sapien
acatggagggcaaagccctgtttcc

SEQ ID NO: 4117545 - DNA, 25 bp, Homo sapien
tgcagaacttccatgtgggcagggc

SEQ ID NO: 4117546 - DNA, 25 bp, Homo sapien
tgtcaagtggatactgaagcctgct

SEQ ID NO: 4117547 - DNA, 25 bp, Homo sapien
gaatctaatttgcatccagagccca

SEQ ID NO: 4117548 - DNA, 25 bp, Homo sapien
gatcaggatgctgtcaccagtgcca

SEQ ID NO: 4117549 - DNA, 25 bp, Homo sapien
cttaaagggatgtggtctgaagcct

SEQ ID NO: 4117550 - DNA, 25 bp, Homo sapien
aagggatgtggtctgaagcctcctg

SEQ ID NO: 4117551 - DNA, 25 bp, Homo sapien
taaagggatgtggtctgaagcctcc

SEQ ID NO: 4117552 - DNA, 25 bp, Homo sapien
gatgtggtctgaagcctcctgtgtc

SEQ ID NO: 4117553 - DNA, 25 bp, Homo sapien
aagccagcctcgcagtcagctctgg

SEQ ID NO: 4117554 - DNA, 25 bp, Homo sapien
gcataaagccagcctcgcagtcagc

SEQ ID NO: 4117555 - DNA, 25 bp, Homo sapien
tcaggagggtacaggttatggggcc

SEQ ID NO: 4117556 - DNA, 25 bp, Homo sapien
ataaagccagcctcgcagtcagctc

SEQ ID NO: 4117557 - DNA, 25 bp, Homo sapien
catgtggcccacaactgatggaaga

SEQ ID NO: 4117558 - DNA, 25 bp, Homo sapien
ccgatataatcaggctgtccaggtg

SEQ ID NO: 4117559 - DNA, 25 bp, Homo sapien
cagccacagcccgatataatcaggc

SEQ ID NO: 4117560 - DNA, 25 bp, Homo sapien
tgtccaggtgcaccaacctctgcac

SEQ ID NO: 4117561 - DNA, 25 bp, Homo sapien
gaatcacaaggaacctctggctagg

SEQ ID NO: 4117562 - DNA, 25 bp, Homo sapien
aagcccgtatcctgcaaagccgtga

SEQ ID NO: 4117563 - DNA, 25 bp, Homo sapien
tcattcaaaccatacggcgcgtggt

SEQ ID NO: 4117564 - DNA, 25 bp, Homo sapien
ctgaacatttgtacccctggagaag

SEQ ID NO: 4117565 - DNA, 25 bp, Homo sapien
gagtaaatgcttacccctagccagg

SEQ ID NO: 4117566 - DNA, 25 bp, Homo sapien
aagtggctctgctactccaacgagg

SEQ ID NO: 4117567 - DNA, 25 bp, Homo sapien
tgaggatcgactacccgaaggcact

SEQ ID NO: 4117568 - DNA, 25 bp, Homo sapien
gattccagtaatcagccaggcttga

SEQ ID NO: 4117569 - DNA, 25 bp, Homo sapien
ccttgaagacctgaatgaaggacat

SEQ ID NO: 4117570 - DNA, 25 bp, Homo sapien
agccttgaagacctgaatgaaggac

SEQ ID NO: 4117571 - DNA, 25 bp, Homo sapien
tggcccagaagttctcagcccgtgt

SEQ ID NO: 4117572 - DNA, 25 bp, Homo sapien
gcccgtgttccacaagagccttgaa

SEQ ID NO: 4117573 - DNA, 25 bp, Homo sapien
gtggacgtgcttggtgttgaatcct

SEQ ID NO: 4117574 - DNA, 25 bp, Homo sapien
tgacacatggttcagcctctgagcc

SEQ ID NO: 4117575 - DNA, 25 bp, Homo sapien
gaatcctggactgttgacacatggt

SEQ ID NO: 4117576 - DNA, 25 bp, Homo sapien
tggtgttgaatcctggactgttgac

SEQ ID NO: 4117577 - DNA, 25 bp, Homo sapien
acagcatttttgacattatcctctg

SEQ ID NO: 4117578 - DNA, 25 bp, Homo sapien
agcatttttgacattatcctctgat

SEQ ID NO: 4117579 - DNA, 25 bp, Homo sapien
ctgcccagctgttactggggtctgc

SEQ ID NO: 4117580 - DNA, 25 bp, Homo sapien
gcccagctgttactggggtctgcag

SEQ ID NO: 4117581 - DNA, 25 bp, Homo sapien
tgatggtggattaatgtctccagct

SEQ ID NO: 4117582 - DNA, 25 bp, Homo sapien
ctattgataaggcaatatagtcaca

SEQ ID NO: 4117583 - DNA, 25 bp, Homo sapien
gataaggcaatatagtcacagtcat

SEQ ID NO: 4117584 - DNA, 25 bp, Homo sapien
caaagtagtacagacttgaattctg

SEQ ID NO: 4117585 - DNA, 25 bp, Homo sapien
tatttggaggctgaaaaccggtgag

SEQ ID NO: 4117586 - DNA, 25 bp, Homo sapien
cagtgatgccagagaggaccaatac

SEQ ID NO: 4117587 - DNA, 25 bp, Homo sapien
catttgtgctaagcaaaagccagat

SEQ ID NO: 4117588 - DNA, 25 bp, Homo sapien
tcatccccgtttatgaccacactgg

SEQ ID NO: 4117589 - DNA, 25 bp, Homo sapien
ctgtaagaattgttttcatttgatt

SEQ ID NO: 4117590 - DNA, 25 bp, Homo sapien
ttttcatttgattttgtagttccac

SEQ ID NO: 4117591 - DNA, 25 bp, Homo sapien
gaattgttttcatttgattttgtag

SEQ ID NO: 4117592 - DNA, 25 bp, Homo sapien
ttgttttcatttgattttgtagttc

SEQ ID NO: 4117593 - DNA, 25 bp, Homo sapien
ctggatttgtgtacacactggggtc

SEQ ID NO: 4117594 - DNA, 25 bp, Homo sapien
gatttgtgtacacactggggtctga

SEQ ID NO: 4117595 - DNA, 25 bp, Homo sapien
ttgtgtacacactggggtctgagca

SEQ ID NO: 4117596 - DNA, 25 bp, Homo sapien
gtacacactggggtctgagcattcc

SEQ ID NO: 4117597 - DNA, 25 bp, Homo sapien
tcagttcaaccctctcaaattgggc

SEQ ID NO: 4117598 - DNA, 25 bp, Homo sapien
ctgggtgtttttggctctcttgatc

SEQ ID NO: 4117599 - DNA, 25 bp, Homo sapien
tgttttatgcttcctatactgggtg

SEQ ID NO: 4117600 - DNA, 25 bp, Homo sapien
agcttccctggatgatctcttgttg

SEQ ID NO: 4117601 - DNA, 25 bp, Homo sapien
tttgctggacatttgtgagaactag

SEQ ID NO: 4117602 - DNA, 25 bp, Homo sapien
tggacatttgtgagaactagacagt

SEQ ID NO: 4117603 - DNA, 25 bp, Homo sapien
gaggcctcatggtttgctggacatt

SEQ ID NO: 4117604 - DNA, 25 bp, Homo sapien
cttggaggcctcatggtttgctgga

SEQ ID NO: 4117605 - DNA, 25 bp, Homo sapien
gaagtggaggtgtcgaaccctcggc

SEQ ID NO: 4117606 - DNA, 25 bp, Homo sapien
tggaggtggcggtcgctgcgaaccc

SEQ ID NO: 4117607 - DNA, 25 bp, Homo sapien
cccgcggagtccaggcttcaggtaa

SEQ ID NO: 4117608 - DNA, 25 bp, Homo sapien
cttcaggtaagacgcgcgcgcgctt

SEQ ID NO: 4117609 - DNA, 25 bp, Homo sapien
gcgcgggctgtcctcgtacgcaaaa

SEQ ID NO: 4117610 - DNA, 25 bp, Homo sapien
ccaggattccgcgagccaaggttgt

SEQ ID NO: 4117611 - DNA, 25 bp, Homo sapien
actcccaacattccgcaggctggtg

SEQ ID NO: 4117612 - DNA, 25 bp, Homo sapien
tgtcctcgtacgcaaaactacacct

SEQ ID NO: 4117613 - DNA, 25 bp, Homo sapien
tgtatcccttagttgaaaagagccc

SEQ ID NO: 4117614 - DNA, 25 bp, Homo sapien
ggaatgtatcccttagttgaaaaga

SEQ ID NO: 4117615 - DNA, 25 bp, Homo sapien
tatcccttagttgaaaagagcccca

SEQ ID NO: 4117616 - DNA, 25 bp, Homo sapien
tacatggaatgtatcccttagttga

SEQ ID NO: 4117617 - DNA, 25 bp, Homo sapien
tccttccagacccattcagatgtca

SEQ ID NO: 4117618 - DNA, 25 bp, Homo sapien
ctgaaaccttttccgatccttgcat

SEQ ID NO: 4117619 - DNA, 25 bp, Homo sapien
ttcagatgtcactttctctgaaacc

SEQ ID NO: 4117620 - DNA, 25 bp, Homo sapien
tgtcactttctctgaaaccttttcc

SEQ ID NO: 4117621 - DNA, 25 bp, Homo sapien
agatacatccatttgtcttctgatc

SEQ ID NO: 4117622 - DNA, 25 bp, Homo sapien
aaagatacatccatttgtcttctga

SEQ ID NO: 4117623 - DNA, 25 bp, Homo sapien
ttaaagatacatccatttgtcttct

SEQ ID NO: 4117624 - DNA, 25 bp, Homo sapien
taaagatacatccatttgtcttctg

SEQ ID NO: 4117625 - DNA, 25 bp, Homo sapien
tgactggtgcttcgatgtcactggg

SEQ ID NO: 4117626 - DNA, 25 bp, Homo sapien
aatgtggtgactggtgcttcgatgt

SEQ ID NO: 4117627 - DNA, 25 bp, Homo sapien
tggtgcttcgatgtcactgggatac

SEQ ID NO: 4117628 - DNA, 25 bp, Homo sapien
tcacagtgcctcataatgtggtgac

SEQ ID NO: 4117629 - DNA, 25 bp, Homo sapien
tgctgcttgttagcatcatctactg

SEQ ID NO: 4117630 - DNA, 25 bp, Homo sapien
gctgcttgttagcatcatctactgt

SEQ ID NO: 4117631 - DNA, 25 bp, Homo sapien
atgctgcttgttagcatcatctact

SEQ ID NO: 4117632 - DNA, 25 bp, Homo sapien
agtttcctaagattccaggcgaggg

SEQ ID NO: 4117633 - DNA, 25 bp, Homo sapien
gcaggcagtaaacggacgctgctgc

SEQ ID NO: 4117634 - DNA, 25 bp, Homo sapien
taaacggacgctgctgcgggaattc

SEQ ID NO: 4117635 - DNA, 25 bp, Homo sapien
tctttgaagaacacgcctgtggttg

SEQ ID NO: 4117636 - DNA, 25 bp, Homo sapien
tttgagctagagtcatttgcaagcc

SEQ ID NO: 4117637 - DNA, 25 bp, Homo sapien
ggaaacgctgacacagcctttcatt

SEQ ID NO: 4117638 - DNA, 25 bp, Homo sapien
cccttcacagtgattaaaatcctta

SEQ ID NO: 4117639 - DNA, 25 bp, Homo sapien
tttgcaagcccaggaatacatctct

SEQ ID NO: 4117640 - DNA, 25 bp, Homo sapien
tgatgaagtcataaccaaaatgtct

SEQ ID NO: 4117641 - DNA, 25 bp, Homo sapien
taacagatgttacagcttcagcatc

SEQ ID NO: 4117642 - DNA, 25 bp, Homo sapien
caaaatgtcttggtgtaacagatgt

SEQ ID NO: 4117643 - DNA, 25 bp, Homo sapien
caattgcttgtgtgatcccattttc

SEQ ID NO: 4117644 - DNA, 25 bp, Homo sapien
gaggagatggcagcttccctggaga

SEQ ID NO: 4117645 - DNA, 25 bp, Homo sapien
agatggcagcttccctggagatggc

SEQ ID NO: 4117646 - DNA, 25 bp, Homo sapien
ccctgctgatggccttggaggagat

SEQ ID NO: 4117647 - DNA, 25 bp, Homo sapien
gcagtcacctccttcagaaacagca

SEQ ID NO: 4117648 - DNA, 25 bp, Homo sapien
aaggaggaatgatagcgaagaccca

SEQ ID NO: 4117649 - DNA, 25 bp, Homo sapien
tcaggcctgaaaggaaatttcagcc

SEQ ID NO: 4117650 - DNA, 25 bp, Homo sapien
agttcagtgtttgccggatgtcagg

SEQ ID NO: 4117651 - DNA, 25 bp, Homo sapien
cacattttgcgaggggtcactgcca

SEQ ID NO: 4117652 - DNA, 25 bp, Homo sapien
ttctgacagtactaaaagggtgatg

SEQ ID NO: 4117653 - DNA, 25 bp, Homo sapien
aagacttccgatttgtagagaccga

SEQ ID NO: 4117654 - DNA, 25 bp, Homo sapien
ggtatttcaatgcaggtacacacca

SEQ ID NO: 4117655 - DNA, 25 bp, Homo sapien
tttgcggcagagcacaagaccttct

SEQ ID NO: 4117656 - DNA, 25 bp, Homo sapien
ccagttccagcggcccagaagggag

SEQ ID NO: 4117657 - DNA, 25 bp, Homo sapien
cagaagggaggtgagatgtagcaaa

SEQ ID NO: 4117658 - DNA, 25 bp, Homo sapien
tttccagttccagcggcccagaagg

SEQ ID NO: 4117659 - DNA, 25 bp, Homo sapien
tcatttccagttccagcggcccaga

SEQ ID NO: 4117660 - DNA, 25 bp, Homo sapien
cagtgttggcatctgggacactttt

SEQ ID NO: 4117661 - DNA, 25 bp, Homo sapien
agcccttcaaatgatgaaggtcctt

SEQ ID NO: 4117662 - DNA, 25 bp, Homo sapien
tgtgaactgcaaacacttggggaaa

SEQ ID NO: 4117663 - DNA, 25 bp, Homo sapien
cttcaaatgatgaaggtccttctga

SEQ ID NO: 4117664 - DNA, 25 bp, Homo sapien
aaaatacctgtgctgctgaggatca

SEQ ID NO: 4117665 - DNA, 25 bp, Homo sapien
cattttcccaagaatcaggtgtaga

SEQ ID NO: 4117666 - DNA, 25 bp, Homo sapien
tacagtgggaagacaccttgatttg

SEQ ID NO: 4117667 - DNA, 25 bp, Homo sapien
cattgcatgtttgggatatcctcca

SEQ ID NO: 4117668 - DNA, 25 bp, Homo sapien
cttatgccccaatgattcttcttcc

SEQ ID NO: 4117669 - DNA, 25 bp, Homo sapien
gggcttgggcaccactttccttatg

SEQ ID NO: 4117670 - DNA, 25 bp, Homo sapien
ccttatgccccaatgattcttcttc

SEQ ID NO: 4117671 - DNA, 25 bp, Homo sapien
tccttatgccccaatgattcttctt

SEQ ID NO: 4117672 - DNA, 25 bp, Homo sapien
taccatcagcgcccaaagctaagat

SEQ ID NO: 4117673 - DNA, 25 bp, Homo sapien
aaagtacttgactttaccatcagcg

SEQ ID NO: 4117674 - DNA, 25 bp, Homo sapien
gactttaccatcagcgcccaaagct

SEQ ID NO: 4117675 - DNA, 25 bp, Homo sapien
tacttgactttaccatcagcgccca

SEQ ID NO: 4117676 - DNA, 25 bp, Homo sapien
tgggcccaaaggacacgccacagat

SEQ ID NO: 4117677 - DNA, 25 bp, Homo sapien
cttctcctcaatgggcccaaaggac

SEQ ID NO: 4117678 - DNA, 25 bp, Homo sapien
caaaggacacgccacagatgagtgg

SEQ ID NO: 4117679 - DNA, 25 bp, Homo sapien
ctcaatgggcccaaaggacacgcca

SEQ ID NO: 4117680 - DNA, 25 bp, Homo sapien
ccataatccgttgaaccaggaaatc

SEQ ID NO: 4117681 - DNA, 25 bp, Homo sapien
aagtgaccctgacacccttgccata

SEQ ID NO: 4117682 - DNA, 25 bp, Homo sapien
tcttgcacagagttgtcatgctttg

SEQ ID NO: 4117683 - DNA, 25 bp, Homo sapien
ggatataggcagacacagatcttcc

SEQ ID NO: 4117684 - DNA, 25 bp, Homo sapien
gaggttgcaccatcaactgaatcac

SEQ ID NO: 4117685 - DNA, 25 bp, Homo sapien
tgaggttgcaccatcaactgaatca

SEQ ID NO: 4117686 - DNA, 25 bp, Homo sapien
ctgaggttgcaccatcaactgaatc

SEQ ID NO: 4117687 - DNA, 25 bp, Homo sapien
ggttgcaccatcaactgaatcactc

SEQ ID NO: 4117688 - DNA, 25 bp, Homo sapien
gctgactatctcagggaatctttgg

SEQ ID NO: 4117689 - DNA, 25 bp, Homo sapien
ggtagccaactaccaggaggtagct

SEQ ID NO: 4117690 - DNA, 25 bp, Homo sapien
tgcaggaccccgttgacctggaatc

SEQ ID NO: 4117691 - DNA, 25 bp, Homo sapien
tgctgatgaaggtcacttggtagcc

SEQ ID NO: 4117692 - DNA, 25 bp, Homo sapien
tcataataccgagcgggctgccggc

SEQ ID NO: 4117693 - DNA, 25 bp, Homo sapien
ataataccgagcgggctgccggccg

SEQ ID NO: 4117694 - DNA, 25 bp, Homo sapien
ctaatcataataccgagcgggctgc

SEQ ID NO: 4117695 - DNA, 25 bp, Homo sapien
aatcataataccgagcgggctgccg

SEQ ID NO: 4117696 - DNA, 25 bp, Homo sapien
gccgcggcgccgacaactccctccc

SEQ ID NO: 4117697 - DNA, 25 bp, Homo sapien
ccgcggcgccgacaactccctcccg

SEQ ID NO: 4117698 - DNA, 25 bp, Homo sapien
cggccgcggcgccgacaactccctc

SEQ ID NO: 4117699 - DNA, 25 bp, Homo sapien
gcggcgccgacaactccctcccggc

SEQ ID NO: 4117700 - DNA, 25 bp, Homo sapien
ttgccctttctctacagacaacatc

SEQ ID NO: 4117701 - DNA, 25 bp, Homo sapien
gacaacatccccactctattgtaaa

SEQ ID NO: 4117702 - DNA, 25 bp, Homo sapien
tgtaaagcagtttgaccacggaacc

SEQ ID NO: 4117703 - DNA, 25 bp, Homo sapien
ccttttgctgaggccggatttctac

SEQ ID NO: 4117704 - DNA, 25 bp, Homo sapien
ttggtggagattcaacaggatgtcc

SEQ ID NO: 4117705 - DNA, 25 bp, Homo sapien
ggaacttggtggagattcaacagga

SEQ ID NO: 4117706 - DNA, 25 bp, Homo sapien
tgtttgataggaacttggtggagat

SEQ ID NO: 4117707 - DNA, 25 bp, Homo sapien
ggagattcaacaggatgtccaacac

SEQ ID NO: 4117708 - DNA, 25 bp, Homo sapien
ttaagcagacgttgaggacagattt

SEQ ID NO: 4117709 - DNA, 25 bp, Homo sapien
tcacttgtacagtacattcctcttc

SEQ ID NO: 4117710 - DNA, 25 bp, Homo sapien
gagaaatatttaagcagacgttgag

SEQ ID NO: 4117711 - DNA, 25 bp, Homo sapien
ttgtacagtacattcctcttcaaga

SEQ ID NO: 4117712 - DNA, 25 bp, Homo sapien
tatcccagggtctgccaagtatagc

SEQ ID NO: 4117713 - DNA, 25 bp, Homo sapien
ggtttaacaaattactctggcagca

SEQ ID NO: 4117714 - DNA, 25 bp, Homo sapien
gacttaaaaatgagggcagctggta

SEQ ID NO: 4117715 - DNA, 25 bp, Homo sapien
tccaagaactcaatgcacaggaggc

SEQ ID NO: 4117716 - DNA, 25 bp, Homo sapien
caagagggatatagtagctccttcc

SEQ ID NO: 4117717 - DNA, 25 bp, Homo sapien
gagggatatagtagctccttccact

SEQ ID NO: 4117718 - DNA, 25 bp, Homo sapien
tatagtagctccttccactatcctt

SEQ ID NO: 4117719 - DNA, 25 bp, Homo sapien
agctccaagagggatatagtagctc

SEQ ID NO: 4117720 - DNA, 25 bp, Homo sapien
tacaacacactgtcctctagaaggc

SEQ ID NO: 4117721 - DNA, 25 bp, Homo sapien
cagcattagggatcacacaaagcac

SEQ ID NO: 4117722 - DNA, 25 bp, Homo sapien
caaggacggcaagctttacaacaca

SEQ ID NO: 4117723 - DNA, 25 bp, Homo sapien
cgaggactgtcacttgatagtaaca

SEQ ID NO: 4117724 - DNA, 25 bp, Homo sapien
tgaataatccttattatcacagtgt

SEQ ID NO: 4117725 - DNA, 25 bp, Homo sapien
cctgcaaactgcatactgaataatc

SEQ ID NO: 4117726 - DNA, 25 bp, Homo sapien
caaactgcatactgaataatcctta

SEQ ID NO: 4117727 - DNA, 25 bp, Homo sapien
tgcaaactgcatactgaataatcct

SEQ ID NO: 4117728 - DNA, 25 bp, Homo sapien
ataagcttgcaaatgccactttagc

SEQ ID NO: 4117729 - DNA, 25 bp, Homo sapien
tctgttgctattgcataagcttgca

SEQ ID NO: 4117730 - DNA, 25 bp, Homo sapien
caggctgcccccaagttatataact

SEQ ID NO: 4117731 - DNA, 25 bp, Homo sapien
ccacccaagtctgttgctattgcat

SEQ ID NO: 4117732 - DNA, 25 bp, Homo sapien
tcattttcaatgtcgtcatggatat

SEQ ID NO: 4117733 - DNA, 25 bp, Homo sapien
cttctcatataagaatatctggtga

SEQ ID NO: 4117734 - DNA, 25 bp, Homo sapien
atctggtgaatacaaaaaattcatt

SEQ ID NO: 4117735 - DNA, 25 bp, Homo sapien
tatttagactgtttaaaatagatct

SEQ ID NO: 4117736 - DNA, 25 bp, Homo sapien
ttttcacccgtaaagacatgcctgg

SEQ ID NO: 4117737 - DNA, 25 bp, Homo sapien
gatgaccagtagctagagtgtccag

SEQ ID NO: 4117738 - DNA, 25 bp, Homo sapien
caataacttcataaaggcggacgat

SEQ ID NO: 4117739 - DNA, 25 bp, Homo sapien
tttaaccacggcaaaatggcctcga

SEQ ID NO: 4117740 - DNA, 25 bp, Homo sapien
gaaatgccagctttaggcatatatg

SEQ ID NO: 4117741 - DNA, 25 bp, Homo sapien
ttttagataaacaaccgatctgacc

SEQ ID NO: 4117742 - DNA, 25 bp, Homo sapien
tgaaacccaatttgctagttaaggc

SEQ ID NO: 4117743 - DNA, 25 bp, Homo sapien
tctagctggcagaattcaaatggcc

SEQ ID NO: 4117744 - DNA, 25 bp, Homo sapien
acaaatatactttagacatttgcca

SEQ ID NO: 4117745 - DNA, 25 bp, Homo sapien
caaatatactttagacatttgccat

SEQ ID NO: 4117746 - DNA, 25 bp, Homo sapien
tcggaggaattactaccaatggcag

SEQ ID NO: 4117747 - DNA, 25 bp, Homo sapien
actgtgaacccctcgaagtcatcca

SEQ ID NO: 4117748 - DNA, 25 bp, Homo sapien
ttactttgcccagatggatcggagg

SEQ ID NO: 4117749 - DNA, 25 bp, Homo sapien
cacaaactgtgaacccctcgaagtc

SEQ ID NO: 4117750 - DNA, 25 bp, Homo sapien
tccacgcagacatgtgttccaggtt

SEQ ID NO: 4117751 - DNA, 25 bp, Homo sapien
catgtccacgcagacatgtgttcca

SEQ ID NO: 4117752 - DNA, 25 bp, Homo sapien
caaccatgtccacgcagacatgtgt

SEQ ID NO: 4117753 - DNA, 25 bp, Homo sapien
ccaaccatgtccacgcagacatgtg

SEQ ID NO: 4117754 - DNA, 25 bp, Homo sapien
acttagtgcaggcaaccgaccggca

SEQ ID NO: 4117755 - DNA, 25 bp, Homo sapien
gtgcaggcaaccgaccggcataata

SEQ ID NO: 4117756 - DNA, 25 bp, Homo sapien
caaccgaccggcataatacactaca

SEQ ID NO: 4117757 - DNA, 25 bp, Homo sapien
tccttaggcagcctagtggtaaccc

SEQ ID NO: 4117758 - DNA, 25 bp, Homo sapien
agttaaacaaattctgcctctggga

SEQ ID NO: 4117759 - DNA, 25 bp, Homo sapien
gagtagtccctgtgacaaaagccta

SEQ ID NO: 4117760 - DNA, 25 bp, Homo sapien
taatctagaactcatcagggcctgt

SEQ ID NO: 4117761 - DNA, 25 bp, Homo sapien
gataatcccaaactcgatagtcagg

SEQ ID NO: 4117762 - DNA, 25 bp, Homo sapien
tctgctgacccaaggaattctctcc

SEQ ID NO: 4117763 - DNA, 25 bp, Homo sapien
gattcagactgaaatggaaggtctc

SEQ ID NO: 4117764 - DNA, 25 bp, Homo sapien
gggttacctgaaactgctacctcag

SEQ ID NO: 4117765 - DNA, 25 bp, Homo sapien
gaccgggcttggagtgtgcctaaca

SEQ ID NO: 4117766 - DNA, 25 bp, Homo sapien
gagcttgttacgtttgccaggtgac

SEQ ID NO: 4117767 - DNA, 25 bp, Homo sapien
tcagcaaagagattgggaagagcca

SEQ ID NO: 4117768 - DNA, 25 bp, Homo sapien
tgttcatccaaatagttgcgggtcc

SEQ ID NO: 4117769 - DNA, 25 bp, Homo sapien
acaagtgagccatctggagtgaggc

SEQ ID NO: 4117770 - DNA, 25 bp, Homo sapien
caaggagaggcgcacaccgtgtttt

SEQ ID NO: 4117771 - DNA, 25 bp, Homo sapien
actcggacttcaggtggcaaggaga

SEQ ID NO: 4117772 - DNA, 25 bp, Homo sapien
gagaggcgcacaccgtgttttttaa

SEQ ID NO: 4117773 - DNA, 25 bp, Homo sapien
ccataagcactgttaaacactcgga

SEQ ID NO: 4117774 - DNA, 25 bp, Homo sapien
caaatattgccccaacttgtttgca

SEQ ID NO: 4117775 - DNA, 25 bp, Homo sapien
tgtaagaactctttctaccttaaga

SEQ ID NO: 4117776 - DNA, 25 bp, Homo sapien
catccacgaactgtaatcaaagcta

SEQ ID NO: 4117777 - DNA, 25 bp, Homo sapien
cccggcctaccaatacagtctttat

SEQ ID NO: 4117778 - DNA, 25 bp, Homo sapien
tggcgaaaacatcatacttgggcga

SEQ ID NO: 4117779 - DNA, 25 bp, Homo sapien
ccttctgttgagcaggccctagtct

SEQ ID NO: 4117780 - DNA, 25 bp, Homo sapien
tattgtgggactgcacacattcaca

SEQ ID NO: 4117781 - DNA, 25 bp, Homo sapien
ctagtctacactcagccagggcctg

SEQ ID NO: 4117782 - DNA, 25 bp, Homo sapien
cctctgacttccagatcaagaaggc

SEQ ID NO: 4117783 - DNA, 25 bp, Homo sapien
gaaaaggatcactcccagactccaa

SEQ ID NO: 4117784 - DNA, 25 bp, Homo sapien
aaaaggatcactcccagactccaaa

SEQ ID NO: 4117785 - DNA, 25 bp, Homo sapien
aaaggatcactcccagactccaaat

SEQ ID NO: 4117786 - DNA, 25 bp, Homo sapien
ttgaaagggcggctgcccacacacc

SEQ ID NO: 4117787 - DNA, 25 bp, Homo sapien
catgggatggtactgtatatttgca

SEQ ID NO: 4117788 - DNA, 25 bp, Homo sapien
ctgtatatttgcaatccatgatcat

SEQ ID NO: 4117789 - DNA, 25 bp, Homo sapien
tacactctttagacacatgggatgg

SEQ ID NO: 4117790 - DNA, 25 bp, Homo sapien
tgcctcggccttgaatacctaagtt

SEQ ID NO: 4117791 - DNA, 25 bp, Homo sapien
cagcaaagtcctgtaagtagtggct

SEQ ID NO: 4117792 - DNA, 25 bp, Homo sapien
gctcatgcagagaaaggtagttccc

SEQ ID NO: 4117793 - DNA, 25 bp, Homo sapien
gaaaatgccctaactcttctctgga

SEQ ID NO: 4117794 - DNA, 25 bp, Homo sapien
tgtccccaagcaccatgcgctgaat

SEQ ID NO: 4117795 - DNA, 25 bp, Homo sapien
aatgatgctgttgtgctcctcttcc

SEQ ID NO: 4117796 - DNA, 25 bp, Homo sapien
tctctgtagcatccgtgtgattagg

SEQ ID NO: 4117797 - DNA, 25 bp, Homo sapien
tacaatggcgtctcgatccgctatg

SEQ ID NO: 4117798 - DNA, 25 bp, Homo sapien
gacagaggaatgagaatagtgccac

SEQ ID NO: 4117799 - DNA, 25 bp, Homo sapien
caagaatcctaaacctgtggccctc

SEQ ID NO: 4117800 - DNA, 25 bp, Homo sapien
ttaagtagagagagcccattccaag

SEQ ID NO: 4117801 - DNA, 25 bp, Homo sapien
ttgtataacttgcaggctccaggtg

SEQ ID NO: 4117802 - DNA, 25 bp, Homo sapien
aagtatgtggctgtgatatggttat

SEQ ID NO: 4117803 - DNA, 25 bp, Homo sapien
tgtggctgtgatatggttatacctg

SEQ ID NO: 4117804 - DNA, 25 bp, Homo sapien
gctgtgatatggttatacctgttgg

SEQ ID NO: 4117805 - DNA, 25 bp, Homo sapien
tgatatggttatacctgttggtttc

SEQ ID NO: 4117806 - DNA, 25 bp, Homo sapien
tattgctcgggcttgcagatctggt

SEQ ID NO: 4117807 - DNA, 25 bp, Homo sapien
ccttgatattgctcgggcttgcaga

SEQ ID NO: 4117808 - DNA, 25 bp, Homo sapien
aaactgggccttgatattgctcggg

SEQ ID NO: 4117809 - DNA, 25 bp, Homo sapien
ctaaactgggccttgatattgctcg

SEQ ID NO: 4117810 - DNA, 25 bp, Homo sapien
tggtggtagctccagtctcggtgca

SEQ ID NO: 4117811 - DNA, 25 bp, Homo sapien
tctaagcagacactagacagtgtgc

SEQ ID NO: 4117812 - DNA, 25 bp, Homo sapien
tgcacctggcgagtagtgatgatct

SEQ ID NO: 4117813 - DNA, 25 bp, Homo sapien
tcaggactaggttgaccgtaacctc

SEQ ID NO: 4117814 - DNA, 25 bp, Homo sapien
ttaaatgcccatacaagagtagtga

SEQ ID NO: 4117815 - DNA, 25 bp, Homo sapien
aacattttttagaagcccatggagg

SEQ ID NO: 4117816 - DNA, 25 bp, Homo sapien
gcaaagcaaaacctgaacaccacgt

SEQ ID NO: 4117817 - DNA, 25 bp, Homo sapien
ccgtgccagccttaaataagtatat

SEQ ID NO: 4117818 - DNA, 25 bp, Homo sapien
cctcaaggtcctggggtacatcaat

SEQ ID NO: 4117819 - DNA, 25 bp, Homo sapien
actgagggacagtcgcgtgggacaa

SEQ ID NO: 4117820 - DNA, 25 bp, Homo sapien
ttgaggacactgtcagcagcccgag

SEQ ID NO: 4117821 - DNA, 25 bp, Homo sapien
gagtggccgtgaggtcatcctcaag

SEQ ID NO: 4117822 - DNA, 25 bp, Homo sapien
caccgtagagagtgctggtccagcc

SEQ ID NO: 4117823 - DNA, 25 bp, Homo sapien
ggtcatctttcttagctgagtcaca

SEQ ID NO: 4117824 - DNA, 25 bp, Homo sapien
gtcatctttcttagctgagtcacac

SEQ ID NO: 4117825 - DNA, 25 bp, Homo sapien
ttgcgggtggcaccgtagagagtgc

SEQ ID NO: 4117826 - DNA, 25 bp, Homo sapien
tgaacagacacttccgcccactggc

SEQ ID NO: 4117827 - DNA, 25 bp, Homo sapien
aacagacacttccgcccactggctg

SEQ ID NO: 4117828 - DNA, 25 bp, Homo sapien
gaacagacacttccgcccactggct

SEQ ID NO: 4117829 - DNA, 25 bp, Homo sapien
ctgaacagacacttccgcccactgg

SEQ ID NO: 4117830 - DNA, 25 bp, Homo sapien
tggtctccgaactactgcagctgga

SEQ ID NO: 4117831 - DNA, 25 bp, Homo sapien
ttggttacagatggcttccggcgca

SEQ ID NO: 4117832 - DNA, 25 bp, Homo sapien
tctttaacctgctcaacttgggagg

SEQ ID NO: 4117833 - DNA, 25 bp, Homo sapien
caaaaccacttgtgttgagagggac

SEQ ID NO: 4117834 - DNA, 25 bp, Homo sapien
ccccagcactgcgagaggccagctg

SEQ ID NO: 4117835 - DNA, 25 bp, Homo sapien
gctccccagcactgcgagaggccag

SEQ ID NO: 4117836 - DNA, 25 bp, Homo sapien
agcactgcgagaggccagctgcatg

SEQ ID NO: 4117837 - DNA, 25 bp, Homo sapien
ccagcactgcgagaggccagctgca

SEQ ID NO: 4117838 - DNA, 25 bp, Homo sapien
tccgctggatgttcacagagatggt

SEQ ID NO: 4117839 - DNA, 25 bp, Homo sapien
ccaattcagtggtggtatctgccat

SEQ ID NO: 4117840 - DNA, 25 bp, Homo sapien
cattccctgtggagctaatgcacat

SEQ ID NO: 4117841 - DNA, 25 bp, Homo sapien
gagatggtcttttcgcacagaggta

SEQ ID NO: 4117842 - DNA, 25 bp, Homo sapien
cataataggcttttcggctgggaaa

SEQ ID NO: 4117843 - DNA, 25 bp, Homo sapien
tgcttttaagactcccagggcactg

SEQ ID NO: 4117844 - DNA, 25 bp, Homo sapien
tgaattacaggaccagatgcgtctc

SEQ ID NO: 4117845 - DNA, 25 bp, Homo sapien
gactgacatttgtataccccaaggg

SEQ ID NO: 4117846 - DNA, 25 bp, Homo sapien
tgttttcaccggagagtcccacggc

SEQ ID NO: 4117847 - DNA, 25 bp, Homo sapien
gggtggatagatgcagtcactgcaa

SEQ ID NO: 4117848 - DNA, 25 bp, Homo sapien
gcttcaataaatccaggccagctga

SEQ ID NO: 4117849 - DNA, 25 bp, Homo sapien
agtcactgcaagaagtggaggcaga

SEQ ID NO: 4117850 - DNA, 25 bp, Homo sapien
gcaagcacccttctcagtttcgcag

SEQ ID NO: 4117851 - DNA, 25 bp, Homo sapien
aaagcttgtagctgaaggctgggcc

SEQ ID NO: 4117852 - DNA, 25 bp, Homo sapien
cctacataggtaccgcaatgggctt

SEQ ID NO: 4117853 - DNA, 25 bp, Homo sapien
cctacagggacactagggctgcttt

SEQ ID NO: 4117854 - DNA, 25 bp, Homo sapien
cctggtgtggtttgacaaggctgta

SEQ ID NO: 4117855 - DNA, 25 bp, Homo sapien
tctgatcacaccagggtctttcatt

SEQ ID NO: 4117856 - DNA, 25 bp, Homo sapien
catccaggccctgtgttctgatcac

SEQ ID NO: 4117857 - DNA, 25 bp, Homo sapien
tgttagtcacaaatgccccaatttc

SEQ ID NO: 4117858 - DNA, 25 bp, Homo sapien
tcatagccagctggggtgtgtgcat

SEQ ID NO: 4117859 - DNA, 25 bp, Homo sapien
ggtgtgtgcataatgctggctgcca

SEQ ID NO: 4117860 - DNA, 25 bp, Homo sapien
ctgggagcgccgctcttcatagcca

SEQ ID NO: 4117861 - DNA, 25 bp, Homo sapien
gtgtgcataatgctggctgccaaca

SEQ ID NO: 4117862 - DNA, 25 bp, Homo sapien
ctcagatatggggagaccaacaaac

SEQ ID NO: 4117863 - DNA, 25 bp, Homo sapien
catctcagatatggggagaccaaca

SEQ ID NO: 4117864 - DNA, 25 bp, Homo sapien
tgccacatctcagatatggggagac

SEQ ID NO: 4117865 - DNA, 25 bp, Homo sapien
cacatctcagatatggggagaccaa

SEQ ID NO: 4117866 - DNA, 25 bp, Homo sapien
aaaagccaagcagcaaaagagtcca

SEQ ID NO: 4117867 - DNA, 25 bp, Homo sapien
gggaccaaagatgcatgccatgccc

SEQ ID NO: 4117868 - DNA, 25 bp, Homo sapien
aagcgatcctagcacctcaccccac

SEQ ID NO: 4117869 - DNA, 25 bp, Homo sapien
gaccaaagatgcatgccatgcccga

SEQ ID NO: 4117870 - DNA, 25 bp, Homo sapien
tcctagcacctcaccccacaagtag

SEQ ID NO: 4117871 - DNA, 25 bp, Homo sapien
ccgactaattggatcagaggtgaaa

SEQ ID NO: 4117872 - DNA, 25 bp, Homo sapien
gggagtaccgactaattggatcaga

SEQ ID NO: 4117873 - DNA, 25 bp, Homo sapien
cagggaatggggagtaccgactaat

SEQ ID NO: 4117874 - DNA, 25 bp, Homo sapien
gagtaccgactaattggatcagagg

SEQ ID NO: 4117875 - DNA, 25 bp, Homo sapien
caaattagacatacttgaaggtggg

SEQ ID NO: 4117876 - DNA, 25 bp, Homo sapien
catttgataactccgtggcctggag

SEQ ID NO: 4117877 - DNA, 25 bp, Homo sapien
gctgcctagagcctttgagaaagaa

SEQ ID NO: 4117878 - DNA, 25 bp, Homo sapien
gaaaggattctaatgcaggaaccat

SEQ ID NO: 4117879 - DNA, 25 bp, Homo sapien
gtgtttcactcataagaacactgct

SEQ ID NO: 4117880 - DNA, 25 bp, Homo sapien
agaacactgctatccacttttccca

SEQ ID NO: 4117881 - DNA, 25 bp, Homo sapien
cactcataagaacactgctatccac

SEQ ID NO: 4117882 - DNA, 25 bp, Homo sapien
tttcactcataagaacactgctatc

SEQ ID NO: 4117883 - DNA, 25 bp, Homo sapien
ccatttactagggaagtgcatcagg

SEQ ID NO: 4117884 - DNA, 25 bp, Homo sapien
tgatgctcaatttggttatcctcca

SEQ ID NO: 4117885 - DNA, 25 bp, Homo sapien
tttccttcaacaacaccgaatcctg

SEQ ID NO: 4117886 - DNA, 25 bp, Homo sapien
gtgcatcaggtagaaatggaatctg

SEQ ID NO: 4117887 - DNA, 25 bp, Homo sapien
attatgagggcattgtccaggtaca

SEQ ID NO: 4117888 - DNA, 25 bp, Homo sapien
ttccatagccaaagcctgcctccat

SEQ ID NO: 4117889 - DNA, 25 bp, Homo sapien
ttatgagggcattgtccaggtacaa

SEQ ID NO: 4117890 - DNA, 25 bp, Homo sapien
cattatgagggcattgtccaggtac

SEQ ID NO: 4117891 - DNA, 25 bp, Homo sapien
tgtcactctttgactccttcacagg

SEQ ID NO: 4117892 - DNA, 25 bp, Homo sapien
caggcatatggtgacagttcttcca

SEQ ID NO: 4117893 - DNA, 25 bp, Homo sapien
tcactctttgactccttcacaggaa

SEQ ID NO: 4117894 - DNA, 25 bp, Homo sapien
actctttgactccttcacaggaagc

SEQ ID NO: 4117895 - DNA, 25 bp, Homo sapien
ttcactcctaacagtgcaattaatg

SEQ ID NO: 4117896 - DNA, 25 bp, Homo sapien
cactcctaacagtgcaattaatgaa

SEQ ID NO: 4117897 - DNA, 25 bp, Homo sapien
tcactcctaacagtgcaattaatga

SEQ ID NO: 4117898 - DNA, 25 bp, Homo sapien
gcctttagaattttcactcctaaca

SEQ ID NO: 4117899 - DNA, 25 bp, Homo sapien
catgtggaatttaacacccttgatg

SEQ ID NO: 4117900 - DNA, 25 bp, Homo sapien
tgtggaatttaacacccttgatgtt

SEQ ID NO: 4117901 - DNA, 25 bp, Homo sapien
cacccagacgccctgaacactcctc

SEQ ID NO: 4117902 - DNA, 25 bp, Homo sapien
acatgtggaatttaacacccttgat

SEQ ID NO: 4117903 - DNA, 25 bp, Homo sapien
ctgagataactcactgtgataactt

SEQ ID NO: 4117904 - DNA, 25 bp, Homo sapien
tgagataactcactgtgataacttc

SEQ ID NO: 4117905 - DNA, 25 bp, Homo sapien
ttagttttgataatcaatcctgata

SEQ ID NO: 4117906 - DNA, 25 bp, Homo sapien
tagttttgataatcaatcctgataa

SEQ ID NO: 4117907 - DNA, 25 bp, Homo sapien
gcagttccacgactccaagatcaag

SEQ ID NO: 4117908 - DNA, 25 bp, Homo sapien
atccagatcactccaccagatgaag

SEQ ID NO: 4117909 - DNA, 25 bp, Homo sapien
cactccaccagatgaaggtggaggt

SEQ ID NO: 4117910 - DNA, 25 bp, Homo sapien
cacccagtgctaccgcgccagggcc

SEQ ID NO: 4117911 - DNA, 25 bp, Homo sapien
ggacgccatgaaggtcttgggcaca

SEQ ID NO: 4117912 - DNA, 25 bp, Homo sapien
aggacgccatgaaggtcttgggcac

SEQ ID NO: 4117913 - DNA, 25 bp, Homo sapien
gacagatttagttccattcagcaga

SEQ ID NO: 4117914 - DNA, 25 bp, Homo sapien
tagttccattcagcagaatatcagt

SEQ ID NO: 4117915 - DNA, 25 bp, Homo sapien
ccaatccctggacagatttagttcc

SEQ ID NO: 4117916 - DNA, 25 bp, Homo sapien
gttccattcagcagaatatcagtca

SEQ ID NO: 4117917 - DNA, 25 bp, Homo sapien
aagagcacgtgaagaaaatgtgtta

SEQ ID NO: 4117918 - DNA, 25 bp, Homo sapien
gaaagagcacgtgaagaaaatgtgt

SEQ ID NO: 4117919 - DNA, 25 bp, Homo sapien
tggaaagagcacgtgaagaaaatgt

SEQ ID NO: 4117920 - DNA, 25 bp, Homo sapien
gagcacgtgaagaaaatgtgttata

SEQ ID NO: 4117921 - DNA, 25 bp, Homo sapien
gcctggacctgtggtaggtccctga

SEQ ID NO: 4117922 - DNA, 25 bp, Homo sapien
gggtgaggattgtgccccagcttcc

SEQ ID NO: 4117923 - DNA, 25 bp, Homo sapien
tgagcctcgctgaacacttcttatt

SEQ ID NO: 4117924 - DNA, 25 bp, Homo sapien
gggagggatgccttgcacacttgac

SEQ ID NO: 4117925 - DNA, 25 bp, Homo sapien
gaatttggcccttgtaccatggacc

SEQ ID NO: 4117926 - DNA, 25 bp, Homo sapien
gggtttagatgacaagactctgctg

SEQ ID NO: 4117927 - DNA, 25 bp, Homo sapien
tgggtttagatgacaagactctgct

SEQ ID NO: 4117928 - DNA, 25 bp, Homo sapien
gctgctttagaatttggcccttgta

SEQ ID NO: 4117929 - DNA, 25 bp, Homo sapien
ctctggtctgccctcatatgagtga

SEQ ID NO: 4117930 - DNA, 25 bp, Homo sapien
cctcatatgagtgaagggataagca

SEQ ID NO: 4117931 - DNA, 25 bp, Homo sapien
gaggctagttggatgaagcttttga

SEQ ID NO: 4117932 - DNA, 25 bp, Homo sapien
ggttctcatacttgatgtagaggct

SEQ ID NO: 4117933 - DNA, 25 bp, Homo sapien
cagcatgatcctggcccgagaccat

SEQ ID NO: 4117934 - DNA, 25 bp, Homo sapien
gagaccatatggtcactgggaagct

SEQ ID NO: 4117935 - DNA, 25 bp, Homo sapien
tattcctgtggacctctacattctg

SEQ ID NO: 4117936 - DNA, 25 bp, Homo sapien
gaagtcagccatgtgggtatcagga

SEQ ID NO: 4117937 - DNA, 25 bp, Homo sapien
catctctgctacaaggaggttgcca

SEQ ID NO: 4117938 - DNA, 25 bp, Homo sapien
aacatgaccttgtccggagtctgaa

SEQ ID NO: 4117939 - DNA, 25 bp, Homo sapien
gaacacaaagcaccagatagtcatg

SEQ ID NO: 4117940 - DNA, 25 bp, Homo sapien
ggcactggagctttatctagcatga

SEQ ID NO: 4117941 - DNA, 25 bp, Homo sapien
taaggagaagtatccagtaaaatgg

SEQ ID NO: 4117942 - DNA, 25 bp, Homo sapien
agcctcttcgttgggttgaggaagc

SEQ ID NO: 4117943 - DNA, 25 bp, Homo sapien
ggttgaggaagctgaaacagttctt

SEQ ID NO: 4117944 - DNA, 25 bp, Homo sapien
agcagcctcttcgttgggttgagga

SEQ ID NO: 4117945 - DNA, 25 bp, Homo sapien
agacagcaggccgttctccatcctg

SEQ ID NO: 4117946 - DNA, 25 bp, Homo sapien
tggctccattaccagatcgagcttc

SEQ ID NO: 4117947 - DNA, 25 bp, Homo sapien
tgctgaactctcctgttatttccaa

SEQ ID NO: 4117948 - DNA, 25 bp, Homo sapien
aattatctgtgggtcaatacttttg

SEQ ID NO: 4117949 - DNA, 25 bp, Homo sapien
taattgtttgttgctggcatatggg

SEQ ID NO: 4117950 - DNA, 25 bp, Homo sapien
catagacagtaatttgagctataaa

SEQ ID NO: 4117951 - DNA, 25 bp, Homo sapien
gctgggaccacatgtttacttttta

SEQ ID NO: 4117952 - DNA, 25 bp, Homo sapien
gctcaaataatctcctgccttagcc

SEQ ID NO: 4117953 - DNA, 25 bp, Homo sapien
ggctcaaataatctcctgccttagc

SEQ ID NO: 4117954 - DNA, 25 bp, Homo sapien
gtagctgggaccacatgtttacttt

SEQ ID NO: 4117955 - DNA, 25 bp, Homo sapien
gaaacacattaaattctctgtttac

SEQ ID NO: 4117956 - DNA, 25 bp, Homo sapien
cattaaattctctgtttactcgcat

SEQ ID NO: 4117957 - DNA, 25 bp, Homo sapien
catggaagtccccttgaaacacatt

SEQ ID NO: 4117958 - DNA, 25 bp, Homo sapien
acacattaaattctctgtttactcg

SEQ ID NO: 4117959 - DNA, 25 bp, Homo sapien
cattctgactgatcactgcctgctc

SEQ ID NO: 4117960 - DNA, 25 bp, Homo sapien
ctgctctgaccagcctagcagtggg

SEQ ID NO: 4117961 - DNA, 25 bp, Homo sapien
gcctgctctgaccagcctagcagtg

SEQ ID NO: 4117962 - DNA, 25 bp, Homo sapien
actggttgtttatggcagtcatcca

SEQ ID NO: 4117963 - DNA, 25 bp, Homo sapien
cttccctttagctaggcagagaact

SEQ ID NO: 4117964 - DNA, 25 bp, Homo sapien
tagctaggcagagaacttcagtgac

SEQ ID NO: 4117965 - DNA, 25 bp, Homo sapien
gatgcaatccaacgatttaaaggta

SEQ ID NO: 4117966 - DNA, 25 bp, Homo sapien
gtgactgtcccataagatgcaatcc

SEQ ID NO: 4117967 - DNA, 25 bp, Homo sapien
tctgtttagtctgcacttgtggcag

SEQ ID NO: 4117968 - DNA, 25 bp, Homo sapien
tagtctgcacttgtggcagaaaaca

SEQ ID NO: 4117969 - DNA, 25 bp, Homo sapien
tatccattctgtttagtctgcactt

SEQ ID NO: 4117970 - DNA, 25 bp, Homo sapien
cattctgtttagtctgcacttgtgg

SEQ ID NO: 4117971 - DNA, 25 bp, Homo sapien
agaaatccaagctagaattggccat

SEQ ID NO: 4117972 - DNA, 25 bp, Homo sapien
ttcaacaatggcaagaaatccaagc

SEQ ID NO: 4117973 - DNA, 25 bp, Homo sapien
caagaaatccaagctagaattggcc

SEQ ID NO: 4117974 - DNA, 25 bp, Homo sapien
aatggcaagaaatccaagctagaat

SEQ ID NO: 4117975 - DNA, 25 bp, Homo sapien
cgccagcgcatgcgtcttccgcgca

SEQ ID NO: 4117976 - DNA, 25 bp, Homo sapien
cgcaagcgccgggacttatctcgaa

SEQ ID NO: 4117977 - DNA, 25 bp, Homo sapien
tcgaagccggctgacaggccgactg

SEQ ID NO: 4117978 - DNA, 25 bp, Homo sapien
cgggacttatctcgaagccggctga

SEQ ID NO: 4117979 - DNA, 25 bp, Homo sapien
acttatctcgaagccggctgacagg

SEQ ID NO: 4117980 - DNA, 25 bp, Homo sapien
ccacctcctcctcctccgccgccat

SEQ ID NO: 4117981 - DNA, 25 bp, Homo sapien
agtccacctcctcctcctccgccgc

SEQ ID NO: 4117982 - DNA, 25 bp, Homo sapien
ctctctccggtgtcggcagagtcca

SEQ ID NO: 4117983 - DNA, 25 bp, Homo sapien
tctctccggtgtcggcagagtccac

SEQ ID NO: 4117984 - DNA, 25 bp, Homo sapien
gaggctgacagacccggtcatttcc

SEQ ID NO: 4117985 - DNA, 25 bp, Homo sapien
ccgcggggtggcttatacaacaacg

SEQ ID NO: 4117986 - DNA, 25 bp, Homo sapien
atttcccgcgcctcgcagtcaggtg

SEQ ID NO: 4117987 - DNA, 25 bp, Homo sapien
tcccttggcagagcccgagccggtg

SEQ ID NO: 4117988 - DNA, 25 bp, Homo sapien
tcatttgacagttagcaagggctcg

SEQ ID NO: 4117989 - DNA, 25 bp, Homo sapien
tggcctggcagtcacaaaccaaaag

SEQ ID NO: 4117990 - DNA, 25 bp, Homo sapien
tgaacagaacgaccaaagcatccat

SEQ ID NO: 4117991 - DNA, 25 bp, Homo sapien
acacaaatgtgggaggctggtctgc

SEQ ID NO: 4117992 - DNA, 25 bp, Homo sapien
gggagccaaccagttagccatcctg

SEQ ID NO: 4117993 - DNA, 25 bp, Homo sapien
tcagcttctttaaggtgtgatatag

SEQ ID NO: 4117994 - DNA, 25 bp, Homo sapien
gagccaaccagttagccatcctgac

SEQ ID NO: 4117995 - DNA, 25 bp, Homo sapien
gatatagacgtagggcaccatgtgg

SEQ ID NO: 4117996 - DNA, 25 bp, Homo sapien
tgccagcccccgacattcatttctg

SEQ ID NO: 4117997 - DNA, 25 bp, Homo sapien
cagcccccgacattcatttctgtac

SEQ ID NO: 4117998 - DNA, 25 bp, Homo sapien
ctgccagcccccgacattcatttct

SEQ ID NO: 4117999 - DNA, 25 bp, Homo sapien
agcccccgacattcatttctgtact

SEQ ID NO: 4118000 - DNA, 25 bp, Homo sapien
caggtgttctacaatttcaaggtgg

SEQ ID NO: 4118001 - DNA, 25 bp, Homo sapien
caaagtattgtaggaactcctcagc

SEQ ID NO: 4118002 - DNA, 25 bp, Homo sapien
ggaagacctacctcagacaaacctc

SEQ ID NO: 4118003 - DNA, 25 bp, Homo sapien
gcatgacacaccaggtaacttgggt

SEQ ID NO: 4118004 - DNA, 25 bp, Homo sapien
tatttccattagatatacgaacagg

SEQ ID NO: 4118005 - DNA, 25 bp, Homo sapien
tttatttccattagatatacgaaca

SEQ ID NO: 4118006 - DNA, 25 bp, Homo sapien
aggacaagtggagtcttatttgaaa

SEQ ID NO: 4118007 - DNA, 25 bp, Homo sapien
cctccaaaaccatggagaaggacaa

SEQ ID NO: 4118008 - DNA, 25 bp, Homo sapien
tacttcagcgagtaagcagcagcca

SEQ ID NO: 4118009 - DNA, 25 bp, Homo sapien
tgtccaatcctagggcacatctcca

SEQ ID NO: 4118010 - DNA, 25 bp, Homo sapien
tgcatcactgtcaaacctgggtcta

SEQ ID NO: 4118011 - DNA, 25 bp, Homo sapien
agaatccacctaggttgtgcccaag

SEQ ID NO: 4118012 - DNA, 25 bp, Homo sapien
agtcaatgctgctcccaaggctctg

SEQ ID NO: 4118013 - DNA, 25 bp, Homo sapien
caaggctctgatccaaactggaatt

SEQ ID NO: 4118014 - DNA, 25 bp, Homo sapien
ggtcctgcaatccttaggccagcta

SEQ ID NO: 4118015 - DNA, 25 bp, Homo sapien
cagcaaggtctggtcgttcagggaa

SEQ ID NO: 4118016 - DNA, 25 bp, Homo sapien
tcaatcagggactaaacactggtgc

SEQ ID NO: 4118017 - DNA, 25 bp, Homo sapien
tcaggagtccccaaaatgttgtgga

SEQ ID NO: 4118018 - DNA, 25 bp, Homo sapien
tatccccagggtcaatcaaatcagg

SEQ ID NO: 4118019 - DNA, 25 bp, Homo sapien
caacactctgacatggataagggaa

SEQ ID NO: 4118020 - DNA, 25 bp, Homo sapien
cagagaggactttcttccctgacaa

SEQ ID NO: 4118021 - DNA, 25 bp, Homo sapien
tatggcaggcatcaaaccaccgtga

SEQ ID NO: 4118022 - DNA, 25 bp, Homo sapien
tcaattaggcagcaacatgcccagg

SEQ ID NO: 4118023 - DNA, 25 bp, Homo sapien
caaagcattatggagagaaggacca

SEQ ID NO: 4118024 - DNA, 25 bp, Homo sapien
ggccttaaacgctgcactagactta

SEQ ID NO: 4118025 - DNA, 25 bp, Homo sapien
gaatactttcgtttgaaatcaggcc

SEQ ID NO: 4118026 - DNA, 25 bp, Homo sapien
cagtatcgtcttcgaacattgaaga

SEQ ID NO: 4118027 - DNA, 25 bp, Homo sapien
cacattacagtggtagatgtattct

SEQ ID NO: 4118028 - DNA, 25 bp, Homo sapien
gaatcaccagagtatttgttagaga

SEQ ID NO: 4118029 - DNA, 25 bp, Homo sapien
tcttagaaacaaacctcaggagtca

SEQ ID NO: 4118030 - DNA, 25 bp, Homo sapien
taattccagtacacaacatagcatg

SEQ ID NO: 4118031 - DNA, 25 bp, Homo sapien
tctgtcttaaagtgtgctccatagt

SEQ ID NO: 4118032 - DNA, 25 bp, Homo sapien
ctttaacggcaaggagaaaatcacg

SEQ ID NO: 4118033 - DNA, 25 bp, Homo sapien
gggaatgagtatgcattgcactgtc

SEQ ID NO: 4118034 - DNA, 25 bp, Homo sapien
ggaatgagtatgcattgcactgtca

SEQ ID NO: 4118035 - DNA, 25 bp, Homo sapien
caaggagaaaatcacgatgtatgat

SEQ ID NO: 4118036 - DNA, 25 bp, Homo sapien
catattcttgaaagctgtctcacca

SEQ ID NO: 4118037 - DNA, 25 bp, Homo sapien
gagcattggcctttttgcccatcca

SEQ ID NO: 4118038 - DNA, 25 bp, Homo sapien
ggaatgtcagggtgcattttaccaa

SEQ ID NO: 4118039 - DNA, 25 bp, Homo sapien
tgcccatccataaggaatagtcata

SEQ ID NO: 4118040 - DNA, 25 bp, Homo sapien
tgccatctatgcaggatcgggcgcc

SEQ ID NO: 4118041 - DNA, 25 bp, Homo sapien
ttgtcttcacatatgaatgtggtcg

SEQ ID NO: 4118042 - DNA, 25 bp, Homo sapien
aatgtggtcgtaaggactggatgct

SEQ ID NO: 4118043 - DNA, 25 bp, Homo sapien
tgctggtgccagaattgccatctat

SEQ ID NO: 4118044 - DNA, 25 bp, Homo sapien
gcagatctcctttactttctggttg

SEQ ID NO: 4118045 - DNA, 25 bp, Homo sapien
attcttctggttgatctgcatatac

SEQ ID NO: 4118046 - DNA, 25 bp, Homo sapien
tcagtccacagtgtcgcagatctcc

SEQ ID NO: 4118047 - DNA, 25 bp, Homo sapien
cttctggttgatctgcatatacata

SEQ ID NO: 4118048 - DNA, 25 bp, Homo sapien
ggttttcccatcagagcttcagtgt

SEQ ID NO: 4118049 - DNA, 25 bp, Homo sapien
caggttttcccatcagagcttcagt

SEQ ID NO: 4118050 - DNA, 25 bp, Homo sapien
ttttcccatcagagcttcagtgtgt

SEQ ID NO: 4118051 - DNA, 25 bp, Homo sapien
aggttttcccatcagagcttcagtg

SEQ ID NO: 4118052 - DNA, 25 bp, Homo sapien
tcttctagaaggcactaactggttt

SEQ ID NO: 4118053 - DNA, 25 bp, Homo sapien
gaaaacatgtgcaaagtatagtcaa

SEQ ID NO: 4118054 - DNA, 25 bp, Homo sapien
catcacagactatgaattattgctg

SEQ ID NO: 4118055 - DNA, 25 bp, Homo sapien
tgtattcactactcttcatcacaga

SEQ ID NO: 4118056 - DNA, 25 bp, Homo sapien
tacactgtatgtcaggatagaccac

SEQ ID NO: 4118057 - DNA, 25 bp, Homo sapien
ggtgaagggttttctcagcagccag

SEQ ID NO: 4118058 - DNA, 25 bp, Homo sapien
taatgatagtgatcaactcccgtcc

SEQ ID NO: 4118059 - DNA, 25 bp, Homo sapien
taccacacataggaggttccaagga

SEQ ID NO: 4118060 - DNA, 25 bp, Homo sapien
tcaatcacttggcacatctgcggcc

SEQ ID NO: 4118061 - DNA, 25 bp, Homo sapien
gaaatcagacaacacatcttggcgc

SEQ ID NO: 4118062 - DNA, 25 bp, Homo sapien
tctgcggccagaaactccattcact

SEQ ID NO: 4118063 - DNA, 25 bp, Homo sapien
caagcaacgttagcgaaagatgcct

SEQ ID NO: 4118064 - DNA, 25 bp, Homo sapien
catcttaagggaatgcatggaccca

SEQ ID NO: 4118065 - DNA, 25 bp, Homo sapien
taaagccatgtatggcggccacaac

SEQ ID NO: 4118066 - DNA, 25 bp, Homo sapien
gaaatcgcgtatggccctttaagta

SEQ ID NO: 4118067 - DNA, 25 bp, Homo sapien
tagttaacaaataccatccacaggg

SEQ ID NO: 4118068 - DNA, 25 bp, Homo sapien
tacccaaatgacactaccaatatca

SEQ ID NO: 4118069 - DNA, 25 bp, Homo sapien
aatcttggctcttgattccaatgac

SEQ ID NO: 4118070 - DNA, 25 bp, Homo sapien
tgattccaatgacacaagtaaatat

SEQ ID NO: 4118071 - DNA, 25 bp, Homo sapien
ccaaatgacactaccaatatcattg

SEQ ID NO: 4118072 - DNA, 25 bp, Homo sapien
tacagcccaccgacagtatatgaga

SEQ ID NO: 4118073 - DNA, 25 bp, Homo sapien
tgctgatacatcaccccaactgtgc

SEQ ID NO: 4118074 - DNA, 25 bp, Homo sapien
tagaccgtacataagcccctgtgtg

SEQ ID NO: 4118075 - DNA, 25 bp, Homo sapien
tgagagttcctatttgcccttagcc

SEQ ID NO: 4118076 - DNA, 25 bp, Homo sapien
tattctaaattttcaaacaatgggc

SEQ ID NO: 4118077 - DNA, 25 bp, Homo sapien
tgggcaccttatggaaaccttctaa

SEQ ID NO: 4118078 - DNA, 25 bp, Homo sapien
taagtgaacatacagaacatttttt

SEQ ID NO: 4118079 - DNA, 25 bp, Homo sapien
atacatggtagaataacattccttg

SEQ ID NO: 4118080 - DNA, 25 bp, Homo sapien
ctgaaactttgataaggaagacgcc

SEQ ID NO: 4118081 - DNA, 25 bp, Homo sapien
taaggaagacgccatacagacagga

SEQ ID NO: 4118082 - DNA, 25 bp, Homo sapien
tggtgttgtcctcaatgcctggctt

SEQ ID NO: 4118083 - DNA, 25 bp, Homo sapien
ggccagcacgagagtccagtccttt

SEQ ID NO: 4118084 - DNA, 25 bp, Homo sapien
tgcttttccacaaggagggatctcc

SEQ ID NO: 4118085 - DNA, 25 bp, Homo sapien
tcattagctgtatgatcctgggcaa

SEQ ID NO: 4118086 - DNA, 25 bp, Homo sapien
ttataaggcacaaggaacagatggt

SEQ ID NO: 4118087 - DNA, 25 bp, Homo sapien
tactgttgtgcatcctttgacccca

SEQ ID NO: 4118088 - DNA, 25 bp, Homo sapien
tggtgtgaactagttggcagccaac

SEQ ID NO: 4118089 - DNA, 25 bp, Homo sapien
gatggaagacagatccaggaagtcc

SEQ ID NO: 4118090 - DNA, 25 bp, Homo sapien
tgtctacttagtcagcaaggtttcc

SEQ ID NO: 4118091 - DNA, 25 bp, Homo sapien
agccaagagcattcctcaggagaag

SEQ ID NO: 4118092 - DNA, 25 bp, Homo sapien
agtttcactcttcttacccagactg

SEQ ID NO: 4118093 - DNA, 25 bp, Homo sapien
gtttcactcttcttacccagactgg

SEQ ID NO: 4118094 - DNA, 25 bp, Homo sapien
actggagtgcaatggcacgatctca

SEQ ID NO: 4118095 - DNA, 25 bp, Homo sapien
ggagtttcactcttcttacccagac

SEQ ID NO: 4118096 - DNA, 25 bp, Homo sapien
tgattatatgagagcacctgacacc

SEQ ID NO: 4118097 - DNA, 25 bp, Homo sapien
caccaggtactgacgcttatgagca

SEQ ID NO: 4118098 - DNA, 25 bp, Homo sapien
ggctctcagacatggttttgcggaa

SEQ ID NO: 4118099 - DNA, 25 bp, Homo sapien
gaaggtggccttcagcagatggaca

SEQ ID NO: 4118100 - DNA, 25 bp, Homo sapien
gaggagacagctataagccactagg

SEQ ID NO: 4118101 - DNA, 25 bp, Homo sapien
tgtcagtcaatcatcggctgcaggg

SEQ ID NO: 4118102 - DNA, 25 bp, Homo sapien
gggtagttgcaccagcaccgtaaag

SEQ ID NO: 4118103 - DNA, 25 bp, Homo sapien
gaagtttaacttcagccagtcccac

SEQ ID NO: 4118104 - DNA, 25 bp, Homo sapien
cagctggtgcccaaaggtgaactca

SEQ ID NO: 4118105 - DNA, 25 bp, Homo sapien
ccagagggctgtcactacttaatgc

SEQ ID NO: 4118106 - DNA, 25 bp, Homo sapien
cattcttagatgtgtggttctgccc

SEQ ID NO: 4118107 - DNA, 25 bp, Homo sapien
acgaagcagggaggccaaattccac

SEQ ID NO: 4118108 - DNA, 25 bp, Homo sapien
ccatattcacttcatatttcagcat

SEQ ID NO: 4118109 - DNA, 25 bp, Homo sapien
gcaccatattcacttcatatttcag

SEQ ID NO: 4118110 - DNA, 25 bp, Homo sapien
agcaccatattcacttcatatttca

SEQ ID NO: 4118111 - DNA, 25 bp, Homo sapien
ttaagcaccatattcacttcatatt

SEQ ID NO: 4118112 - DNA, 25 bp, Homo sapien
tggaaatgaatcaggcagccacgtg

SEQ ID NO: 4118113 - DNA, 25 bp, Homo sapien
gaaaggctcctgtaaacaatggctc

SEQ ID NO: 4118114 - DNA, 25 bp, Homo sapien
gataatgtcggtttccctcttggaa

SEQ ID NO: 4118115 - DNA, 25 bp, Homo sapien
gctttcagtatgacatgcaggcagt

SEQ ID NO: 4118116 - DNA, 25 bp, Homo sapien
tctccctggaaatgctgaagtccat

SEQ ID NO: 4118117 - DNA, 25 bp, Homo sapien
gtctccctggaaatgctgaagtcca

SEQ ID NO: 4118118 - DNA, 25 bp, Homo sapien
cttgtctccctggaaatgctgaagt

SEQ ID NO: 4118119 - DNA, 25 bp, Homo sapien
tgtctccctggaaatgctgaagtcc

SEQ ID NO: 4118120 - DNA, 25 bp, Homo sapien
gccatgattggtgttaccaggacaa

SEQ ID NO: 4118121 - DNA, 25 bp, Homo sapien
ggtgttaccaggacaatcatttgtt

SEQ ID NO: 4118122 - DNA, 25 bp, Homo sapien
ttgggcaaagagccatgattggtgt

SEQ ID NO: 4118123 - DNA, 25 bp, Homo sapien
ttaccaggacaatcatttgttgctg

SEQ ID NO: 4118124 - DNA, 25 bp, Homo sapien
gtcttctcttgaacatgagctgtaa

SEQ ID NO: 4118125 - DNA, 25 bp, Homo sapien
caatgactttggcactctgggccgc

SEQ ID NO: 4118126 - DNA, 25 bp, Homo sapien
catgagctgtaagatgcaatgactt

SEQ ID NO: 4118127 - DNA, 25 bp, Homo sapien
gatgcaatgactttggcactctggg

SEQ ID NO: 4118128 - DNA, 25 bp, Homo sapien
ctttgtgaagcataccacctctgtg

SEQ ID NO: 4118129 - DNA, 25 bp, Homo sapien
catgtgacccctgtgggtcatgtca

SEQ ID NO: 4118130 - DNA, 25 bp, Homo sapien
tggagcatgtgacccctgtgggtca

SEQ ID NO: 4118131 - DNA, 25 bp, Homo sapien
gtgaagcataccacctctgtggagc

SEQ ID NO: 4118132 - DNA, 25 bp, Homo sapien
cctgccagtcacgaagcatgacttg

SEQ ID NO: 4118133 - DNA, 25 bp, Homo sapien
tctcctgccagtcacgaagcatgac

SEQ ID NO: 4118134 - DNA, 25 bp, Homo sapien
ccaggaagtctccttcgatcacctc

SEQ ID NO: 4118135 - DNA, 25 bp, Homo sapien
tccaggaagtctccttcgatcacct

SEQ ID NO: 4118136 - DNA, 25 bp, Homo sapien
catcctaattccccatcaggggtcc

SEQ ID NO: 4118137 - DNA, 25 bp, Homo sapien
tcatcctaattccccatcaggggtc

SEQ ID NO: 4118138 - DNA, 25 bp, Homo sapien
cactgctttgcctccaagagcagaa

SEQ ID NO: 4118139 - DNA, 25 bp, Homo sapien
gagccagccttccagggaatgaggc

SEQ ID NO: 4118140 - DNA, 25 bp, Homo sapien
gaatgaggccactgtccaggtgtcc

SEQ ID NO: 4118141 - DNA, 25 bp, Homo sapien
caaccccagactgttccatcataaa

SEQ ID NO: 4118142 - DNA, 25 bp, Homo sapien
tgggtgtgaacctggccggagtaaa

SEQ ID NO: 4118143 - DNA, 25 bp, Homo sapien
gccagacttgaatactctcaagcct

SEQ ID NO: 4118144 - DNA, 25 bp, Homo sapien
ctggccggagtaaagaccgtgggtg

SEQ ID NO: 4118145 - DNA, 25 bp, Homo sapien
gtggagccagacttgaatactctca

SEQ ID NO: 4118146 - DNA, 25 bp, Homo sapien
gtatgtaacaatggcctgcagttcc

SEQ ID NO: 4118147 - DNA, 25 bp, Homo sapien
gataatagaaccacaaaacagtgtg

SEQ ID NO: 4118148 - DNA, 25 bp, Homo sapien
caaggcaccatcactgggtatgata

SEQ ID NO: 4118149 - DNA, 25 bp, Homo sapien
gcaagcccagtctcattagcatgct

SEQ ID NO: 4118150 - DNA, 25 bp, Homo sapien
ctctggtttaacacaaagcccttgg

SEQ ID NO: 4118151 - DNA, 25 bp, Homo sapien
cagtgtttaacaaggctcttcccag

SEQ ID NO: 4118152 - DNA, 25 bp, Homo sapien
tatcttctcggaagggaagcctctg

SEQ ID NO: 4118153 - DNA, 25 bp, Homo sapien
tctgttataagcaaccgccttgtgc

SEQ ID NO: 4118154 - DNA, 25 bp, Homo sapien
catctgtgactaatgcagctttggg

SEQ ID NO: 4118155 - DNA, 25 bp, Homo sapien
tctgtgactaatgcagctttgggct

SEQ ID NO: 4118156 - DNA, 25 bp, Homo sapien
gtgactaatgcagctttgggctgct

SEQ ID NO: 4118157 - DNA, 25 bp, Homo sapien
acatctgtgactaatgcagctttgg

SEQ ID NO: 4118158 - DNA, 25 bp, Homo sapien
gccccatttattccatcttggtgtg

SEQ ID NO: 4118159 - DNA, 25 bp, Homo sapien
ttgaaaggggttgccctgctaatgc

SEQ ID NO: 4118160 - DNA, 25 bp, Homo sapien
tgtgtggactgagtgacattgaaag

SEQ ID NO: 4118161 - DNA, 25 bp, Homo sapien
tgtagactgtctaccagctcccatg

SEQ ID NO: 4118162 - DNA, 25 bp, Homo sapien
gggacaagtgccctggacaagagaa

SEQ ID NO: 4118163 - DNA, 25 bp, Homo sapien
ggttcctacttgaaagtgaggccaa

SEQ ID NO: 4118164 - DNA, 25 bp, Homo sapien
gatacttcagactcaataccagccc

SEQ ID NO: 4118165 - DNA, 25 bp, Homo sapien
acccagcaaggcagcatcttacaca

SEQ ID NO: 4118166 - DNA, 25 bp, Homo sapien
ctgcccacttgcacctggcgcacga

SEQ ID NO: 4118167 - DNA, 25 bp, Homo sapien
tggatgacacctctccagcaggatt

SEQ ID NO: 4118168 - DNA, 25 bp, Homo sapien
ttctggatgacacctctccagcagg

SEQ ID NO: 4118169 - DNA, 25 bp, Homo sapien
cccaccacttgaaaacatgggtgga

SEQ ID NO: 4118170 - DNA, 25 bp, Homo sapien
tttccggatagattatcttcccgga

SEQ ID NO: 4118171 - DNA, 25 bp, Homo sapien
ttcccggagactctgacagcagcag

SEQ ID NO: 4118172 - DNA, 25 bp, Homo sapien
cagcagccagccgataatgcaatgc

SEQ ID NO: 4118173 - DNA, 25 bp, Homo sapien
cagccagccgataatgcaatgcggg

SEQ ID NO: 4118174 - DNA, 25 bp, Homo sapien
tgctttctaatcgtgggcgcctagg

SEQ ID NO: 4118175 - DNA, 25 bp, Homo sapien
ctattaaagcgaaatgctgcagggc

SEQ ID NO: 4118176 - DNA, 25 bp, Homo sapien
tgcagagaagcagtgaatcaagagg

SEQ ID NO: 4118177 - DNA, 25 bp, Homo sapien
tattgatttagtaattcgcacgcac

SEQ ID NO: 4118178 - DNA, 25 bp, Homo sapien
cccagaggttactgaagggtgagcc

SEQ ID NO: 4118179 - DNA, 25 bp, Homo sapien
caatggagactgagcctggttggcc

SEQ ID NO: 4118180 - DNA, 25 bp, Homo sapien
gctgccatcacttctttgtcacagg

SEQ ID NO: 4118181 - DNA, 25 bp, Homo sapien
gccagccattgggtcaaggtgcaga

SEQ ID NO: 4118182 - DNA, 25 bp, Homo sapien
ccctctgtaggcctgcagtcctcct

SEQ ID NO: 4118183 - DNA, 25 bp, Homo sapien
aggtctgcccatcagtttgtcccca

SEQ ID NO: 4118184 - DNA, 25 bp, Homo sapien
cactaggtcatatctcctgcctgct

SEQ ID NO: 4118185 - DNA, 25 bp, Homo sapien
ttggcacctggacctgtctccttcg

SEQ ID NO: 4118186 - DNA, 25 bp, Homo sapien
aagactggaggtcggagagaccacc

SEQ ID NO: 4118187 - DNA, 25 bp, Homo sapien
tagttaaacagggattggggcattc

SEQ ID NO: 4118188 - DNA, 25 bp, Homo sapien
acactgagggacctccccagagcca

SEQ ID NO: 4118189 - DNA, 25 bp, Homo sapien
gaactgaagttaaatgtcaagtggg

SEQ ID NO: 4118190 - DNA, 25 bp, Homo sapien
ccctgtatgggttccaaggatggca

SEQ ID NO: 4118191 - DNA, 25 bp, Homo sapien
gtggcaggccctgtatgggttccaa

SEQ ID NO: 4118192 - DNA, 25 bp, Homo sapien
tatgggttccaaggatggcacttag

SEQ ID NO: 4118193 - DNA, 25 bp, Homo sapien
caggccctgtatgggttccaaggat

SEQ ID NO: 4118194 - DNA, 25 bp, Homo sapien
agtgtgggctgctcgtttatctcca

SEQ ID NO: 4118195 - DNA, 25 bp, Homo sapien
gcaaatatttgctatgctggcacct

SEQ ID NO: 4118196 - DNA, 25 bp, Homo sapien
tggcaccttcgatgctggccgatgc

SEQ ID NO: 4118197 - DNA, 25 bp, Homo sapien
catcttgccagtggagcgatggccg

SEQ ID NO: 4118198 - DNA, 25 bp, Homo sapien
tggcgtggcaaagtgggatctcaca

SEQ ID NO: 4118199 - DNA, 25 bp, Homo sapien
agtcattgactttggcgtggcaaag

SEQ ID NO: 4118200 - DNA, 25 bp, Homo sapien
cgtgtgactcagcggcacggaaaac

SEQ ID NO: 4118201 - DNA, 25 bp, Homo sapien
tgactcagcggcacggaaaacatca

SEQ ID NO: 4118202 - DNA, 25 bp, Homo sapien
aatcatccgagtgagacgtggacca

SEQ ID NO: 4118203 - DNA, 25 bp, Homo sapien
tgcccaagccgggtaacgagaaagc

SEQ ID NO: 4118204 - DNA, 25 bp, Homo sapien
caaagagccttgttgaatcatccga

SEQ ID NO: 4118205 - DNA, 25 bp, Homo sapien
taggcaggaaatagagtcccgggct

SEQ ID NO: 4118206 - DNA, 25 bp, Homo sapien
cagtgttgggaacatagtgagtgct

SEQ ID NO: 4118207 - DNA, 25 bp, Homo sapien
caggtgtcctattaaagcccagggc

SEQ ID NO: 4118208 - DNA, 25 bp, Homo sapien
tgtttggcacagtgttgggaacata

SEQ ID NO: 4118209 - DNA, 25 bp, Homo sapien
tccaggatgatgcaccatgtactac

SEQ ID NO: 4118210 - DNA, 25 bp, Homo sapien
catgttgtgggtccatccacactga

SEQ ID NO: 4118211 - DNA, 25 bp, Homo sapien
actgctgcagagcatgttgtgggtc

SEQ ID NO: 4118212 - DNA, 25 bp, Homo sapien
tcactgtgcccccagtgtagcgctg

SEQ ID NO: 4118213 - DNA, 25 bp, Homo sapien
ccccagtgtagcgctgactgctgca

SEQ ID NO: 4118214 - DNA, 25 bp, Homo sapien
ccaaccgctctatttcttgaatcaa

SEQ ID NO: 4118215 - DNA, 25 bp, Homo sapien
tgccaagctcggactgatcatcaga

SEQ ID NO: 4118216 - DNA, 25 bp, Homo sapien
aaatgaaaatgccaagctcggactg

SEQ ID NO: 4118217 - DNA, 25 bp, Homo sapien
tcatcagagattattaccaaccgct

SEQ ID NO: 4118218 - DNA, 25 bp, Homo sapien
tagatctagatttgtttagtggttt

SEQ ID NO: 4118219 - DNA, 25 bp, Homo sapien
tatttagcttcaatagggttagatc

SEQ ID NO: 4118220 - DNA, 25 bp, Homo sapien
gctctgattcaagctgtatcatttg

SEQ ID NO: 4118221 - DNA, 25 bp, Homo sapien
ctcttggctactgccctacaccctc

SEQ ID NO: 4118222 - DNA, 25 bp, Homo sapien
agtgggagtggaatgctgatgcttt

SEQ ID NO: 4118223 - DNA, 25 bp, Homo sapien
aagtgggagtggaatgctgatgctt

SEQ ID NO: 4118224 - DNA, 25 bp, Homo sapien
aaagtgggagtggaatgctgatgct

SEQ ID NO: 4118225 - DNA, 25 bp, Homo sapien
gaaagtgggagtggaatgctgatgc

SEQ ID NO: 4118226 - DNA, 25 bp, Homo sapien
cccaaggcctactttaccagaagct

SEQ ID NO: 4118227 - DNA, 25 bp, Homo sapien
aattctgagtctaacttttgccacg

SEQ ID NO: 4118228 - DNA, 25 bp, Homo sapien
tgagtctaacttttgccacgttagg

SEQ ID NO: 4118229 - DNA, 25 bp, Homo sapien
ccaaggcctactttaccagaagctt

SEQ ID NO: 4118230 - DNA, 25 bp, Homo sapien
gaatctggaatcctactgccaccat

SEQ ID NO: 4118231 - DNA, 25 bp, Homo sapien
gaagattattcttagaccaagcctg

SEQ ID NO: 4118232 - DNA, 25 bp, Homo sapien
gacgcagaagattattcttagacca

SEQ ID NO: 4118233 - DNA, 25 bp, Homo sapien
cttagaccaagcctggaactgtgga

SEQ ID NO: 4118234 - DNA, 25 bp, Homo sapien
cagtgatggcagtgtgcccacagga

SEQ ID NO: 4118235 - DNA, 25 bp, Homo sapien
ggaagggagagaggcccgcaggagg

SEQ ID NO: 4118236 - DNA, 25 bp, Homo sapien
gtgatggcagtgtgcccacaggact

SEQ ID NO: 4118237 - DNA, 25 bp, Homo sapien
gccttggctgctttgtacagccgag

SEQ ID NO: 4118238 - DNA, 25 bp, Homo sapien
tctcctctgtaaacagccgctggaa

SEQ ID NO: 4118239 - DNA, 25 bp, Homo sapien
tgctcttcagatgtgctttgagttt

SEQ ID NO: 4118240 - DNA, 25 bp, Homo sapien
tcacatttgctgagtcctcgtgccc

SEQ ID NO: 4118241 - DNA, 25 bp, Homo sapien
taaacagccgctggaatagttgctc

SEQ ID NO: 4118242 - DNA, 25 bp, Homo sapien
gcccatggagctttatgttagaatc

SEQ ID NO: 4118243 - DNA, 25 bp, Homo sapien
taggtggagcaacccttaggagtga

SEQ ID NO: 4118244 - DNA, 25 bp, Homo sapien
ccttgaaaggccaattgggctctgc

SEQ ID NO: 4118245 - DNA, 25 bp, Homo sapien
taatggaacttgcagacgcaaagtg

SEQ ID NO: 4118246 - DNA, 25 bp, Homo sapien
tttattctgtccatgatctgccttc

SEQ ID NO: 4118247 - DNA, 25 bp, Homo sapien
cctttattctgtccatgatctgcct

SEQ ID NO: 4118248 - DNA, 25 bp, Homo sapien
ctagtcctttattctgtccatgatc

SEQ ID NO: 4118249 - DNA, 25 bp, Homo sapien
agtcctttattctgtccatgatctg

SEQ ID NO: 4118250 - DNA, 25 bp, Homo sapien
aggaggcttcatcttgcaccacagg

SEQ ID NO: 4118251 - DNA, 25 bp, Homo sapien
ttcatcttgcaccacaggagtttgc

SEQ ID NO: 4118252 - DNA, 25 bp, Homo sapien
ccacaggagtttgctcagcctgcgt

SEQ ID NO: 4118253 - DNA, 25 bp, Homo sapien
gcctgcgtgtttgcacctccaggga

SEQ ID NO: 4118254 - DNA, 25 bp, Homo sapien
tgggtggagcagatgctgcggttcc

SEQ ID NO: 4118255 - DNA, 25 bp, Homo sapien
gtgggtggagcagatgctgcggttc

SEQ ID NO: 4118256 - DNA, 25 bp, Homo sapien
tggagcagatgctgcggttccccag

SEQ ID NO: 4118257 - DNA, 25 bp, Homo sapien
ggtggagcagatgctgcggttcccc

SEQ ID NO: 4118258 - DNA, 25 bp, Homo sapien
tgctgagacaatcttgtcccagtgc

SEQ ID NO: 4118259 - DNA, 25 bp, Homo sapien
gaggagtcattatttttgtgcccca

SEQ ID NO: 4118260 - DNA, 25 bp, Homo sapien
agcccccaagcacctttgctgtttg

SEQ ID NO: 4118261 - DNA, 25 bp, Homo sapien
ggctgcagctccactgtcacaaaag

SEQ ID NO: 4118262 - DNA, 25 bp, Homo sapien
catgcacggatgagcttccatgcag

SEQ ID NO: 4118263 - DNA, 25 bp, Homo sapien
gcacggatgagcttccatgcagtcc

SEQ ID NO: 4118264 - DNA, 25 bp, Homo sapien
tgcacggatgagcttccatgcagtc

SEQ ID NO: 4118265 - DNA, 25 bp, Homo sapien
cacggatgagcttccatgcagtccc

SEQ ID NO: 4118266 - DNA, 25 bp, Homo sapien
tgttttgcccaatgtccttttggag

SEQ ID NO: 4118267 - DNA, 25 bp, Homo sapien
cagctggaaccacccagtgtagaag

SEQ ID NO: 4118268 - DNA, 25 bp, Homo sapien
taatgcagggttaaagtattgctca

SEQ ID NO: 4118269 - DNA, 25 bp, Homo sapien
tgcttgcttgaagggtcttgggccc

SEQ ID NO: 4118270 - DNA, 25 bp, Homo sapien
tggtctacatgttggaggactgtct

SEQ ID NO: 4118271 - DNA, 25 bp, Homo sapien
ccagaaatcctcaggcattggtcta

SEQ ID NO: 4118272 - DNA, 25 bp, Homo sapien
tgcaggtggccttccgatgggctgc

SEQ ID NO: 4118273 - DNA, 25 bp, Homo sapien
tggccttccgatgggctgcagggac

SEQ ID NO: 4118274 - DNA, 25 bp, Homo sapien
ttgtcaaggcttgacttcccacttc

SEQ ID NO: 4118275 - DNA, 25 bp, Homo sapien
tcgccttgtcaaggcttgacttccc

SEQ ID NO: 4118276 - DNA, 25 bp, Homo sapien
ccctgtggtcgccttgtcaaggctt

SEQ ID NO: 4118277 - DNA, 25 bp, Homo sapien
cccacttcctctgatgattgattta

SEQ ID NO: 4118278 - DNA, 25 bp, Homo sapien
agagaggggagggacggtacactgg

SEQ ID NO: 4118279 - DNA, 25 bp, Homo sapien
gggagggacggtacactggtgctga

SEQ ID NO: 4118280 - DNA, 25 bp, Homo sapien
cggtacactggtgctgagggaccca

SEQ ID NO: 4118281 - DNA, 25 bp, Homo sapien
gggacggtacactggtgctgaggga

SEQ ID NO: 4118282 - DNA, 25 bp, Homo sapien
tgcaggtggaagtagcggtagtaaa

SEQ ID NO: 4118283 - DNA, 25 bp, Homo sapien
tagcggtagtaaaggtgggaggatg

SEQ ID NO: 4118284 - DNA, 25 bp, Homo sapien
atgggagcccatttagactgaaaaa

SEQ ID NO: 4118285 - DNA, 25 bp, Homo sapien
aaaacttggccttaagcatgtagag

SEQ ID NO: 4118286 - DNA, 25 bp, Homo sapien
ggaggtggcacctgtgaactaggtg

SEQ ID NO: 4118287 - DNA, 25 bp, Homo sapien
aggaggtggcacctgtgaactaggt

SEQ ID NO: 4118288 - DNA, 25 bp, Homo sapien
gccaggaccggtatctctctcttga

SEQ ID NO: 4118289 - DNA, 25 bp, Homo sapien
ctgaacaccgagaggccaggaccgg

SEQ ID NO: 4118290 - DNA, 25 bp, Homo sapien
aggccaggaccggtatctctctctt

SEQ ID NO: 4118291 - DNA, 25 bp, Homo sapien
caggaccggtatctctctcttgaac

SEQ ID NO: 4118292 - DNA, 25 bp, Homo sapien
ctacgcctcgctccctgcattcagt

SEQ ID NO: 4118293 - DNA, 25 bp, Homo sapien
cccggcctgcagatgctacaaggct

SEQ ID NO: 4118294 - DNA, 25 bp, Homo sapien
gcattcagtctccttggcgtctccg

SEQ ID NO: 4118295 - DNA, 25 bp, Homo sapien
atgctacaaggctggcgccgcctgg

SEQ ID NO: 4118296 - DNA, 25 bp, Homo sapien
gggtcaatgaccacctcagtctttc

SEQ ID NO: 4118297 - DNA, 25 bp, Homo sapien
aaagatgcgcgtggagagcgcctcc

SEQ ID NO: 4118298 - DNA, 25 bp, Homo sapien
atctccggacaaagccactcggctt

SEQ ID NO: 4118299 - DNA, 25 bp, Homo sapien
actcgccgttcctccagcacgggca

SEQ ID NO: 4118300 - DNA, 25 bp, Homo sapien
tcctccggtggcatcgtccgagatt

SEQ ID NO: 4118301 - DNA, 25 bp, Homo sapien
cgaggacacgagcaactcgctgtgg

SEQ ID NO: 4118302 - DNA, 25 bp, Homo sapien
tttgccttcagcgtcctccggtggc

SEQ ID NO: 4118303 - DNA, 25 bp, Homo sapien
ccgagatttgcggagcagaagccga

SEQ ID NO: 4118304 - DNA, 25 bp, Homo sapien
ggtcccggagcgcacacggcgcagt

SEQ ID NO: 4118305 - DNA, 25 bp, Homo sapien
caaaggtgcaggggcggtcccggag

SEQ ID NO: 4118306 - DNA, 25 bp, Homo sapien
gggcggtcccggagcgcacacggcg

SEQ ID NO: 4118307 - DNA, 25 bp, Homo sapien
ccggagcgcacacggcgcagtccgc

SEQ ID NO: 4118308 - DNA, 25 bp, Homo sapien
accgcctcggtgtggctgctgacgt

SEQ ID NO: 4118309 - DNA, 25 bp, Homo sapien
gctgctgacgtgagacaggtaactc

SEQ ID NO: 4118310 - DNA, 25 bp, Homo sapien
tcggaaaggtcttcctccggctgcc

SEQ ID NO: 4118311 - DNA, 25 bp, Homo sapien
acaggagcctcggactttcaggggc

SEQ ID NO: 4118312 - DNA, 25 bp, Homo sapien
ctgtgcgattaaacgcgtgacacac

SEQ ID NO: 4118313 - DNA, 25 bp, Homo sapien
tgtgcgattaaacgcgtgacacaca

SEQ ID NO: 4118314 - DNA, 25 bp, Homo sapien
gaggcagacggcgagaacagattca

SEQ ID NO: 4118315 - DNA, 25 bp, Homo sapien
tgcaccgccagaagagctaattccg

SEQ ID NO: 4118316 - DNA, 25 bp, Homo sapien
taattccgagcggatctggcaggga

SEQ ID NO: 4118317 - DNA, 25 bp, Homo sapien
gatgtagtccctccgagtgcacaag

SEQ ID NO: 4118318 - DNA, 25 bp, Homo sapien
aaattgaagttgattgagacaagag

SEQ ID NO: 4118319 - DNA, 25 bp, Homo sapien
cggccacgttaaaattgaagttgat

SEQ ID NO: 4118320 - DNA, 25 bp, Homo sapien
gcacgcagacagacaatttcacaat

SEQ ID NO: 4118321 - DNA, 25 bp, Homo sapien
gagcacagcacgcagacagacaatt

SEQ ID NO: 4118322 - DNA, 25 bp, Homo sapien
cgctgggcataggacaagggttggg

SEQ ID NO: 4118323 - DNA, 25 bp, Homo sapien
tgggcttcgctgggcataggacaag

SEQ ID NO: 4118324 - DNA, 25 bp, Homo sapien
cttcgctgggcataggacaagggtt

SEQ ID NO: 4118325 - DNA, 25 bp, Homo sapien
ggcttcgctgggcataggacaaggg

SEQ ID NO: 4118326 - DNA, 25 bp, Homo sapien
gcccaagatggcctttccaactgga

SEQ ID NO: 4118327 - DNA, 25 bp, Homo sapien
tatttagaccagtcgggcaacacgt

SEQ ID NO: 4118328 - DNA, 25 bp, Homo sapien
ccaagggagttttgcgctcgatttg

SEQ ID NO: 4118329 - DNA, 25 bp, Homo sapien
gactcagacaatgtggaagccaggg

SEQ ID NO: 4118330 - DNA, 25 bp, Homo sapien
gaccgtgaatctgggcgtctgctct

SEQ ID NO: 4118331 - DNA, 25 bp, Homo sapien
tgcggtgtcacgtccgccgctatgc

SEQ ID NO: 4118332 - DNA, 25 bp, Homo sapien
tccagcaacacgtggggaccgtgaa

SEQ ID NO: 4118333 - DNA, 25 bp, Homo sapien
caggaattcggagaaaatgcggtgt

SEQ ID NO: 4118334 - DNA, 25 bp, Homo sapien
cccctttagccgcagtgctggtgat

SEQ ID NO: 4118335 - DNA, 25 bp, Homo sapien
caggcaagggcacgctcagtgtaga

SEQ ID NO: 4118336 - DNA, 25 bp, Homo sapien
agtgctggtgattccggccgctgaa

SEQ ID NO: 4118337 - DNA, 25 bp, Homo sapien
tgaacccggagaggaaaggctccca

SEQ ID NO: 4118338 - DNA, 25 bp, Homo sapien
agacttccgtgtcgacctccgtggg

SEQ ID NO: 4118339 - DNA, 25 bp, Homo sapien
ctgccggtagacgagccacacgcct

SEQ ID NO: 4118340 - DNA, 25 bp, Homo sapien
gcctcggcggtccagacttccgtgt

SEQ ID NO: 4118341 - DNA, 25 bp, Homo sapien
tgggcgagcctacgcgctgggtgcc

SEQ ID NO: 4118342 - DNA, 25 bp, Homo sapien
cagctccttcactgagtgcaatcgg

SEQ ID NO: 4118343 - DNA, 25 bp, Homo sapien
cagtctgcatgttatcagcttgaca

SEQ ID NO: 4118344 - DNA, 25 bp, Homo sapien
atcggataagggcttatgtcttcct

SEQ ID NO: 4118345 - DNA, 25 bp, Homo sapien
ttctctccagtctgcatgttatcag

SEQ ID NO: 4118346 - DNA, 25 bp, Homo sapien
tcctgatggaagttgagttgcaccc

SEQ ID NO: 4118347 - DNA, 25 bp, Homo sapien
aaacaatcagccacaacgaagtcgg

SEQ ID NO: 4118348 - DNA, 25 bp, Homo sapien
tcaagtcagctgtataaagtaaccc

SEQ ID NO: 4118349 - DNA, 25 bp, Homo sapien
cagactgggaaaaacgtgatgtacc

SEQ ID NO: 4118350 - DNA, 25 bp, Homo sapien
ccaatttctggagtatgtgctgcca

SEQ ID NO: 4118351 - DNA, 25 bp, Homo sapien
tctccaatttctggagtatgtgctg

SEQ ID NO: 4118352 - DNA, 25 bp, Homo sapien
cagtctccaatttctggagtatgtg

SEQ ID NO: 4118353 - DNA, 25 bp, Homo sapien
caatttctggagtatgtgctgccat

SEQ ID NO: 4118354 - DNA, 25 bp, Homo sapien
tcttgtattcctcaacgggctctga

SEQ ID NO: 4118355 - DNA, 25 bp, Homo sapien
tcccctagttcagtgtctgtctctc

SEQ ID NO: 4118356 - DNA, 25 bp, Homo sapien
aggtctcaggctcctgtgtgtgtca

SEQ ID NO: 4118357 - DNA, 25 bp, Homo sapien
tgtgtgtcaagcagcatggggtcac

SEQ ID NO: 4118358 - DNA, 25 bp, Homo sapien
tcagtcccctagttcagtgtctgtc

SEQ ID NO: 4118359 - DNA, 25 bp, Homo sapien
gaggaaggctccacccactcacact

SEQ ID NO: 4118360 - DNA, 25 bp, Homo sapien
cgtgtgtgggtattgggcagggcca

SEQ ID NO: 4118361 - DNA, 25 bp, Homo sapien
tttgcacgtgtgtgggtattgggca

SEQ ID NO: 4118362 - DNA, 25 bp, Homo sapien
ctgggggcaccagaggaaggctcca

SEQ ID NO: 4118363 - DNA, 25 bp, Homo sapien
tgcgcttcatgaggtgtccaggcag

SEQ ID NO: 4118364 - DNA, 25 bp, Homo sapien
gctagactagctggattgcgcttca

SEQ ID NO: 4118365 - DNA, 25 bp, Homo sapien
tgaaactggagacgctagactagct

SEQ ID NO: 4118366 - DNA, 25 bp, Homo sapien
tacagccaggatggctgaaactgga

SEQ ID NO: 4118367 - DNA, 25 bp, Homo sapien
tggccctcagcactctgggtcaact

SEQ ID NO: 4118368 - DNA, 25 bp, Homo sapien
tctgggtcaacttcctcaaaggctc

SEQ ID NO: 4118369 - DNA, 25 bp, Homo sapien
tcaccaagatcgagctttggaagct

SEQ ID NO: 4118370 - DNA, 25 bp, Homo sapien
tctccccatacttgtctacagcagg

SEQ ID NO: 4118371 - DNA, 25 bp, Homo sapien
ttctactaggttactattcattggg

SEQ ID NO: 4118372 - DNA, 25 bp, Homo sapien
ttgggagaacacaaacaatttcctc

SEQ ID NO: 4118373 - DNA, 25 bp, Homo sapien
atgaatttcccattcctaagagaaa

SEQ ID NO: 4118374 - DNA, 25 bp, Homo sapien
caccattctcatagccattacatag

SEQ ID NO: 4118375 - DNA, 25 bp, Homo sapien
tttcttgattgaccataaactcctc

SEQ ID NO: 4118376 - DNA, 25 bp, Homo sapien
tcttcttggtccagatttaaaccac

SEQ ID NO: 4118377 - DNA, 25 bp, Homo sapien
cactgggagctccatatgacactct

SEQ ID NO: 4118378 - DNA, 25 bp, Homo sapien
tgggagctccatatgacactctcct

SEQ ID NO: 4118379 - DNA, 25 bp, Homo sapien
ccaatgaaggtcttgtatttccacc

SEQ ID NO: 4118380 - DNA, 25 bp, Homo sapien
ggaggcctttgggtagcctgaatta

SEQ ID NO: 4118381 - DNA, 25 bp, Homo sapien
tctactgtcattcgtaagttttaac

SEQ ID NO: 4118382 - DNA, 25 bp, Homo sapien
tgattttcttactgaatcctgggag

SEQ ID NO: 4118383 - DNA, 25 bp, Homo sapien
tagacagacgcccttccaccgttag

SEQ ID NO: 4118384 - DNA, 25 bp, Homo sapien
cattttcacatgtgaatctcagtgg

SEQ ID NO: 4118385 - DNA, 25 bp, Homo sapien
gaatctcagtggttgaatgacacgt

SEQ ID NO: 4118386 - DNA, 25 bp, Homo sapien
gacacgttgatttctgagtggacta

SEQ ID NO: 4118387 - DNA, 25 bp, Homo sapien
taatctccacttagcgtggtccaca

SEQ ID NO: 4118388 - DNA, 25 bp, Homo sapien
ttagcgtggtccacagagcgcacat

SEQ ID NO: 4118389 - DNA, 25 bp, Homo sapien
tgcggcagtgcggatgtcacagaaa

SEQ ID NO: 4118390 - DNA, 25 bp, Homo sapien
tgactgcccctctgtgacatgcggc

SEQ ID NO: 4118391 - DNA, 25 bp, Homo sapien
cagtgaaactcagagctaagtcccg

SEQ ID NO: 4118392 - DNA, 25 bp, Homo sapien
cccggcttcttcttcgatctgtgct

SEQ ID NO: 4118393 - DNA, 25 bp, Homo sapien
agacctgacacgcagcttctctgac

SEQ ID NO: 4118394 - DNA, 25 bp, Homo sapien
gcttcttcttcgatctgtgctgaga

SEQ ID NO: 4118395 - DNA, 25 bp, Homo sapien
tgcgtttcatccttgtgacggggcc

SEQ ID NO: 4118396 - DNA, 25 bp, Homo sapien
atttgcgtttcatccttgtgacggg

SEQ ID NO: 4118397 - DNA, 25 bp, Homo sapien
gcgtttcatccttgtgacggggcca

SEQ ID NO: 4118398 - DNA, 25 bp, Homo sapien
cgaatttgcgtttcatccttgtgac

SEQ ID NO: 4118399 - DNA, 25 bp, Homo sapien
gggacacaagatacggactctctgg

SEQ ID NO: 4118400 - DNA, 25 bp, Homo sapien
ctggtttgagaatctcgttgttcac

SEQ ID NO: 4118401 - DNA, 25 bp, Homo sapien
caagatacggactctctggtttgag

SEQ ID NO: 4118402 - DNA, 25 bp, Homo sapien
cacccgaagtggtaacaattccctg

SEQ ID NO: 4118403 - DNA, 25 bp, Homo sapien
ttacaatgtggggcacatctgcccc

SEQ ID NO: 4118404 - DNA, 25 bp, Homo sapien
cccctccatgtcctccccatccaca

SEQ ID NO: 4118405 - DNA, 25 bp, Homo sapien
ctcttgattctcttgtgatattctc

SEQ ID NO: 4118406 - DNA, 25 bp, Homo sapien
gattctcttgtgatattctcttaac

SEQ ID NO: 4118407 - DNA, 25 bp, Homo sapien
aacgcgctgtactcttcaaatccag

SEQ ID NO: 4118408 - DNA, 25 bp, Homo sapien
gaaatccctatcctcaaacgcgctg

SEQ ID NO: 4118409 - DNA, 25 bp, Homo sapien
catcggcttctacttagggagggcc

SEQ ID NO: 4118410 - DNA, 25 bp, Homo sapien
ggagttgagaaaccagatgcttgcc

SEQ ID NO: 4118411 - DNA, 25 bp, Homo sapien
agaccctcctgagacaagcgactgc

SEQ ID NO: 4118412 - DNA, 25 bp, Homo sapien
gacagaaacgaatgcaccagatcca

SEQ ID NO: 4118413 - DNA, 25 bp, Homo sapien
gctgccgagactcccgggaacagtg

SEQ ID NO: 4118414 - DNA, 25 bp, Homo sapien
agctgagcgcctaaacacagattcc

SEQ ID NO: 4118415 - DNA, 25 bp, Homo sapien
tgcctcctgggttcacaccattctc

SEQ ID NO: 4118416 - DNA, 25 bp, Homo sapien
aatctccgcttactgcaagccctgc

SEQ ID NO: 4118417 - DNA, 25 bp, Homo sapien
gcaatctccgcttactgcaagccct

SEQ ID NO: 4118418 - DNA, 25 bp, Homo sapien
gcgcaatctccgcttactgcaagcc

SEQ ID NO: 4118419 - DNA, 25 bp, Homo sapien
taaaaaggctgggtttgacactaca

SEQ ID NO: 4118420 - DNA, 25 bp, Homo sapien
catgggctacataggagaacagagg

SEQ ID NO: 4118421 - DNA, 25 bp, Homo sapien
tagccatgcaggttcttgagcaagc

SEQ ID NO: 4118422 - DNA, 25 bp, Homo sapien
tttgggtgagctagggacagcaacc

SEQ ID NO: 4118423 - DNA, 25 bp, Homo sapien
ctctccatccttgttctggacagaa

SEQ ID NO: 4118424 - DNA, 25 bp, Homo sapien
acagaaactgagaagtccaacctca

SEQ ID NO: 4118425 - DNA, 25 bp, Homo sapien
tgtttgagaagtctgctctgtgccc

SEQ ID NO: 4118426 - DNA, 25 bp, Homo sapien
cctgtgctgcaagcagcttttttta

SEQ ID NO: 4118427 - DNA, 25 bp, Homo sapien
ggaagcagaataataagcaccagtg

SEQ ID NO: 4118428 - DNA, 25 bp, Homo sapien
ttaatggttgattcactgccagaaa

SEQ ID NO: 4118429 - DNA, 25 bp, Homo sapien
ggcccctgcttgtaattaatcttgg

SEQ ID NO: 4118430 - DNA, 25 bp, Homo sapien
tgctgtatttgagcgcggctttcag

SEQ ID NO: 4118431 - DNA, 25 bp, Homo sapien
ttggaaaggcgtagctcttctgtgg

SEQ ID NO: 4118432 - DNA, 25 bp, Homo sapien
ctcttctgtggatggattgctgtat

SEQ ID NO: 4118433 - DNA, 25 bp, Homo sapien
attgccccaggatagagtgagtccc

SEQ ID NO: 4118434 - DNA, 25 bp, Homo sapien
ttgccccaggatagagtgagtccca

SEQ ID NO: 4118435 - DNA, 25 bp, Homo sapien
cattgccccaggatagagtgagtcc

SEQ ID NO: 4118436 - DNA, 25 bp, Homo sapien
tccagaaagtgggattaactccttg

SEQ ID NO: 4118437 - DNA, 25 bp, Homo sapien
tcctggcgctatcccatctctgtgt

SEQ ID NO: 4118438 - DNA, 25 bp, Homo sapien
ttgctgaccaagagggtacatggga

SEQ ID NO: 4118439 - DNA, 25 bp, Homo sapien
tacatgggaaggtcacgctggtacc

SEQ ID NO: 4118440 - DNA, 25 bp, Homo sapien
caatcatagcttatcaccaggccac

SEQ ID NO: 4118441 - DNA, 25 bp, Homo sapien
tctgctgggacattaggctataatc

SEQ ID NO: 4118442 - DNA, 25 bp, Homo sapien
gctttccaagcatcaggtagagacc

SEQ ID NO: 4118443 - DNA, 25 bp, Homo sapien
tgttgactaagttaacatggctggc

SEQ ID NO: 4118444 - DNA, 25 bp, Homo sapien
gaaaagaaatcaggtagccaacatg

SEQ ID NO: 4118445 - DNA, 25 bp, Homo sapien
caaaccaaccaaagctgagactggc

SEQ ID NO: 4118446 - DNA, 25 bp, Homo sapien
tggacacacttaaccatcacggcgc

SEQ ID NO: 4118447 - DNA, 25 bp, Homo sapien
gtgaccaccgaggatttgaggcagt

SEQ ID NO: 4118448 - DNA, 25 bp, Homo sapien
aatggaacccttcaaggatgcacag

SEQ ID NO: 4118449 - DNA, 25 bp, Homo sapien
gtcaaaatggaacccttcaaggatg

SEQ ID NO: 4118450 - DNA, 25 bp, Homo sapien
tccaaggccacgcttggagtagctt

SEQ ID NO: 4118451 - DNA, 25 bp, Homo sapien
caaggccacgcttggagtagcttcc

SEQ ID NO: 4118452 - DNA, 25 bp, Homo sapien
tcccattactgtgttgccaaacaca

SEQ ID NO: 4118453 - DNA, 25 bp, Homo sapien
aaccagaaaccagacatggttctta

SEQ ID NO: 4118454 - DNA, 25 bp, Homo sapien
atcccattactgtgttgccaaacac

SEQ ID NO: 4118455 - DNA, 25 bp, Homo sapien
cagacatggttcttactgcatattc

SEQ ID NO: 4118456 - DNA, 25 bp, Homo sapien
gggcaggccgatgggcgtagagatg

SEQ ID NO: 4118457 - DNA, 25 bp, Homo sapien
aggccgatgggcgtagagatgcctt

SEQ ID NO: 4118458 - DNA, 25 bp, Homo sapien
ccgatgggcgtagagatgcctttgt

SEQ ID NO: 4118459 - DNA, 25 bp, Homo sapien
atgggcgtagagatgcctttgtgct

SEQ ID NO: 4118460 - DNA, 25 bp, Homo sapien
tctgattggcaacggcctgattcac

SEQ ID NO: 4118461 - DNA, 25 bp, Homo sapien
gaagtagccgttctctgattggcaa

SEQ ID NO: 4118462 - DNA, 25 bp, Homo sapien
cctgtagtgtggtgtggccctggtg

SEQ ID NO: 4118463 - DNA, 25 bp, Homo sapien
ctggtgttgtgaagtagccgttctc

SEQ ID NO: 4118464 - DNA, 25 bp, Homo sapien
cagaactggaaagccgcgtgcctgg

SEQ ID NO: 4118465 - DNA, 25 bp, Homo sapien
gagggcgcccttgcgggttctggag

SEQ ID NO: 4118466 - DNA, 25 bp, Homo sapien
tgacgggtgtagctgcctcgccaga

SEQ ID NO: 4118467 - DNA, 25 bp, Homo sapien
gccgagggtcctctgtgacgggtgt

SEQ ID NO: 4118468 - DNA, 25 bp, Homo sapien
tgttccccgagttggccactggaga

SEQ ID NO: 4118469 - DNA, 25 bp, Homo sapien
aaaacattctttatagagattaggt

SEQ ID NO: 4118470 - DNA, 25 bp, Homo sapien
caccatgagtggctctagcttggac

SEQ ID NO: 4118471 - DNA, 25 bp, Homo sapien
ccactggagattctgatggagcagg

SEQ ID NO: 4118472 - DNA, 25 bp, Homo sapien
ggtggttacatgacctgcctgctta

SEQ ID NO: 4118473 - DNA, 25 bp, Homo sapien
cctgcctgcttatgaggaggaaatg

SEQ ID NO: 4118474 - DNA, 25 bp, Homo sapien
tacatgacctgcctgcttatgagga

SEQ ID NO: 4118475 - DNA, 25 bp, Homo sapien
gatagggtggttacatgacctgcct

SEQ ID NO: 4118476 - DNA, 25 bp, Homo sapien
agtccctgggagcggccctggactt

SEQ ID NO: 4118477 - DNA, 25 bp, Homo sapien
aggaagtgaggattcccgaagctga

SEQ ID NO: 4118478 - DNA, 25 bp, Homo sapien
aaactctctcattggtctgtgaggt

SEQ ID NO: 4118479 - DNA, 25 bp, Homo sapien
gcctcaggtctcgtttttggctcct

SEQ ID NO: 4118480 - DNA, 25 bp, Homo sapien
aatgttagggatgaggttttactgc

SEQ ID NO: 4118481 - DNA, 25 bp, Homo sapien
atgccactcatctgagactgtgact

SEQ ID NO: 4118482 - DNA, 25 bp, Homo sapien
atctgagactgtgactgatggactg

SEQ ID NO: 4118483 - DNA, 25 bp, Homo sapien
gcaggtgtctagccctgggctctgt

SEQ ID NO: 4118484 - DNA, 25 bp, Homo sapien
cactcatctgagactgtgactgatg

SEQ ID NO: 4118485 - DNA, 25 bp, Homo sapien
ggacaaggcggggggcagacatttc

SEQ ID NO: 4118486 - DNA, 25 bp, Homo sapien
catggtccaggacaggttgctttgc

SEQ ID NO: 4118487 - DNA, 25 bp, Homo sapien
ccaggacaggttgctttgcttctgc

SEQ ID NO: 4118488 - DNA, 25 bp, Homo sapien
ctgcatggtccaggacaggttgctt

SEQ ID NO: 4118489 - DNA, 25 bp, Homo sapien
tggtccaggacaggttgctttgctt

SEQ ID NO: 4118490 - DNA, 25 bp, Homo sapien
tcactgtctttgtttcagagcacaa

SEQ ID NO: 4118491 - DNA, 25 bp, Homo sapien
cactgtctttgtttcagagcacaaa

SEQ ID NO: 4118492 - DNA, 25 bp, Homo sapien
tgtctttgtttcagagcacaaagac

SEQ ID NO: 4118493 - DNA, 25 bp, Homo sapien
actgtctttgtttcagagcacaaag

SEQ ID NO: 4118494 - DNA, 25 bp, Homo sapien
agacaacacaggctgagtgcctggc

SEQ ID NO: 4118495 - DNA, 25 bp, Homo sapien
acagtaagtgccagtgggttaatgg

SEQ ID NO: 4118496 - DNA, 25 bp, Homo sapien
acacagtaagtgccagtgggttaat

SEQ ID NO: 4118497 - DNA, 25 bp, Homo sapien
tgagacaacacaggctgagtgcctg

SEQ ID NO: 4118498 - DNA, 25 bp, Homo sapien
tgcttcttccagtcgagtcaggccc

SEQ ID NO: 4118499 - DNA, 25 bp, Homo sapien
cacctacgttgcctgttggtgggtg

SEQ ID NO: 4118500 - DNA, 25 bp, Homo sapien
tctccagtgcttcaagcttgaaggc

SEQ ID NO: 4118501 - DNA, 25 bp, Homo sapien
gaaaactttgaaggcaatcacacct

SEQ ID NO: 4118502 - DNA, 25 bp, Homo sapien
tctaggctcagcaagatgtatccca

SEQ ID NO: 4118503 - DNA, 25 bp, Homo sapien
agatgggtcccacatttgttcagag

SEQ ID NO: 4118504 - DNA, 25 bp, Homo sapien
ttcaaaaggatttcaggtcagccct

SEQ ID NO: 4118505 - DNA, 25 bp, Homo sapien
tcaaatcccacgtgaaagcagctgg

SEQ ID NO: 4118506 - DNA, 25 bp, Homo sapien
tatagctgaatgctcacccttccag

SEQ ID NO: 4118507 - DNA, 25 bp, Homo sapien
ttacctagttttggcagatgctgct

SEQ ID NO: 4118508 - DNA, 25 bp, Homo sapien
gaacagcagtagtcctcttgtgaca

SEQ ID NO: 4118509 - DNA, 25 bp, Homo sapien
tggccaagtgataggagttctgcct

SEQ ID NO: 4118510 - DNA, 25 bp, Homo sapien
aaccaagaataacagtcatcactcc

SEQ ID NO: 4118511 - DNA, 25 bp, Homo sapien
caatgccaagtgtaaaggctaattt

SEQ ID NO: 4118512 - DNA, 25 bp, Homo sapien
aatttcagagcaacccatattgtgg

SEQ ID NO: 4118513 - DNA, 25 bp, Homo sapien
catattgtggttctacccacgttaa

SEQ ID NO: 4118514 - DNA, 25 bp, Homo sapien
gggaaccatcctttacaagtgtaga

SEQ ID NO: 4118515 - DNA, 25 bp, Homo sapien
agtcagtctctccttgtcagtcagc

SEQ ID NO: 4118516 - DNA, 25 bp, Homo sapien
aagtgtgaaccatggctagggctgc

SEQ ID NO: 4118517 - DNA, 25 bp, Homo sapien
agaagcaaggaaagtggccaacgcc

SEQ ID NO: 4118518 - DNA, 25 bp, Homo sapien
tcttctacccactacatcagggaac

SEQ ID NO: 4118519 - DNA, 25 bp, Homo sapien
cttctacccactacatcagggaaca

SEQ ID NO: 4118520 - DNA, 25 bp, Homo sapien
tctcttctacccactacatcaggga

SEQ ID NO: 4118521 - DNA, 25 bp, Homo sapien
tgggtcgctgtgtgcactgtttggt

SEQ ID NO: 4118522 - DNA, 25 bp, Homo sapien
tctgggtcgctgtgtgcactgtttg

SEQ ID NO: 4118523 - DNA, 25 bp, Homo sapien
tttctgggtcgctgtgtgcactgtt

SEQ ID NO: 4118524 - DNA, 25 bp, Homo sapien
gtttctgggtcgctgtgtgcactgt

SEQ ID NO: 4118525 - DNA, 25 bp, Homo sapien
gctggccttcacatctaacctggtc

SEQ ID NO: 4118526 - DNA, 25 bp, Homo sapien
cttcacatctaacctggtcccctcc

SEQ ID NO: 4118527 - DNA, 25 bp, Homo sapien
ttcacatctaacctggtcccctcca

SEQ ID NO: 4118528 - DNA, 25 bp, Homo sapien
ctagctggccttcacatctaacctg

SEQ ID NO: 4118529 - DNA, 25 bp, Homo sapien
aagacctgagtgacctgggttgaaa

SEQ ID NO: 4118530 - DNA, 25 bp, Homo sapien
acctgagtgacctgggttgaaagga

SEQ ID NO: 4118531 - DNA, 25 bp, Homo sapien
aaagacctgagtgacctgggttgaa

SEQ ID NO: 4118532 - DNA, 25 bp, Homo sapien
agacctgagtgacctgggttgaaag

SEQ ID NO: 4118533 - DNA, 25 bp, Homo sapien
tgcagaacctgtgatctgaagactc

SEQ ID NO: 4118534 - DNA, 25 bp, Homo sapien
taagctgagcagcatgcctgaagtc

SEQ ID NO: 4118535 - DNA, 25 bp, Homo sapien
gagcagcatgcctgaagtcatagtc

SEQ ID NO: 4118536 - DNA, 25 bp, Homo sapien
tgaagactcagtaagctgagcagca

SEQ ID NO: 4118537 - DNA, 25 bp, Homo sapien
tccctttcttacagttaggaggcaa

SEQ ID NO: 4118538 - DNA, 25 bp, Homo sapien
tttcttacagttaggaggcaaaagc

SEQ ID NO: 4118539 - DNA, 25 bp, Homo sapien
tcttacagttaggaggcaaaagccc

SEQ ID NO: 4118540 - DNA, 25 bp, Homo sapien
catcttccctttcttacagttagga

SEQ ID NO: 4118541 - DNA, 25 bp, Homo sapien
tgtaactttgtctttagaataaatg

SEQ ID NO: 4118542 - DNA, 25 bp, Homo sapien
gttttatacatatagtgttcttgta

SEQ ID NO: 4118543 - DNA, 25 bp, Homo sapien
aactttgtctttagaataaatgtag

SEQ ID NO: 4118544 - DNA, 25 bp, Homo sapien
ggaaatgagcatcttcaagtgttga

SEQ ID NO: 4118545 - DNA, 25 bp, Homo sapien
ccactagtgatggtcattgtgtcaa

SEQ ID NO: 4118546 - DNA, 25 bp, Homo sapien
agtttactaataggagtatcagtca

SEQ ID NO: 4118547 - DNA, 25 bp, Homo sapien
tagctaatggatcaaacacgatgag

SEQ ID NO: 4118548 - DNA, 25 bp, Homo sapien
cccttatctgatccactagtgatgg

SEQ ID NO: 4118549 - DNA, 25 bp, Homo sapien
gcattctcagcatgtcgtaacagtt

SEQ ID NO: 4118550 - DNA, 25 bp, Homo sapien
tgcctctgtcccctggagtaattct

SEQ ID NO: 4118551 - DNA, 25 bp, Homo sapien
catctgcagagcgtctgcaactggc

SEQ ID NO: 4118552 - DNA, 25 bp, Homo sapien
tctgcagagcgtctgcaactggcat

SEQ ID NO: 4118553 - DNA, 25 bp, Homo sapien
atctgcagagcgtctgcaactggca

SEQ ID NO: 4118554 - DNA, 25 bp, Homo sapien
agccagttggcacacttaaagttag

SEQ ID NO: 4118555 - DNA, 25 bp, Homo sapien
tgttattggtattggtctccaagag

SEQ ID NO: 4118556 - DNA, 25 bp, Homo sapien
ttggtattggtctccaagagccagt

SEQ ID NO: 4118557 - DNA, 25 bp, Homo sapien
ccaagagccagttggcacacttaaa

SEQ ID NO: 4118558 - DNA, 25 bp, Homo sapien
tcagttgcttcgtgcacagatggag

SEQ ID NO: 4118559 - DNA, 25 bp, Homo sapien
tccattttcggaagtagtcatttcc

SEQ ID NO: 4118560 - DNA, 25 bp, Homo sapien
ttcgtgcacagatggagctagcagg

SEQ ID NO: 4118561 - DNA, 25 bp, Homo sapien
gctgtggctccatctatctctcttg

SEQ ID NO: 4118562 - DNA, 25 bp, Homo sapien
catgtgttcttgtgacttgcactga

SEQ ID NO: 4118563 - DNA, 25 bp, Homo sapien
tcttctatcagatggccagacactg

SEQ ID NO: 4118564 - DNA, 25 bp, Homo sapien
gaaggtcttcaccagccgggtggct

SEQ ID NO: 4118565 - DNA, 25 bp, Homo sapien
tcaatgccttgtgggaagtaggtac

SEQ ID NO: 4118566 - DNA, 25 bp, Homo sapien
tttgctctgaagagccatggctttc

SEQ ID NO: 4118567 - DNA, 25 bp, Homo sapien
gctactgcttcatctatccaacctt

SEQ ID NO: 4118568 - DNA, 25 bp, Homo sapien
ggaaggtaaggtctccaagctactg

SEQ ID NO: 4118569 - DNA, 25 bp, Homo sapien
tctgtgcagctaggagcagtgagaa

SEQ ID NO: 4118570 - DNA, 25 bp, Homo sapien
cataaaagctctaggccagcaacct

SEQ ID NO: 4118571 - DNA, 25 bp, Homo sapien
tggaatcacagttttcacctgagca

SEQ ID NO: 4118572 - DNA, 25 bp, Homo sapien
cagagtgggagtcagtctgtgtcta

SEQ ID NO: 4118573 - DNA, 25 bp, Homo sapien
tttgagccccttatgagcaaacggg

SEQ ID NO: 4118574 - DNA, 25 bp, Homo sapien
ttccaacgatctgatgaggatctaa

SEQ ID NO: 4118575 - DNA, 25 bp, Homo sapien
aacgatctgatgaggatctaaaatc

SEQ ID NO: 4118576 - DNA, 25 bp, Homo sapien
tccaacgatctgatgaggatctaaa

SEQ ID NO: 4118577 - DNA, 25 bp, Homo sapien
ccaacgatctgatgaggatctaaaa

SEQ ID NO: 4118578 - DNA, 25 bp, Homo sapien
cagcataacatgtccaagcctctag

SEQ ID NO: 4118579 - DNA, 25 bp, Homo sapien
aagcctctagcttcaagtagtgaga

SEQ ID NO: 4118580 - DNA, 25 bp, Homo sapien
ctcagtgactgtctgccacctgata

SEQ ID NO: 4118581 - DNA, 25 bp, Homo sapien
gagacccctgctaaactgtgtaacc

SEQ ID NO: 4118582 - DNA, 25 bp, Homo sapien
cagcttgaagtcagctgagtcatga

SEQ ID NO: 4118583 - DNA, 25 bp, Homo sapien
attcagcttgaagtcagctgagtca

SEQ ID NO: 4118584 - DNA, 25 bp, Homo sapien
caccgccctatgattcagcttgaag

SEQ ID NO: 4118585 - DNA, 25 bp, Homo sapien
cacccaccgccctatgattcagctt

SEQ ID NO: 4118586 - DNA, 25 bp, Homo sapien
tttttaactactgcattgggataag

SEQ ID NO: 4118587 - DNA, 25 bp, Homo sapien
gataagataattcacactttgtggg

SEQ ID NO: 4118588 - DNA, 25 bp, Homo sapien
taattcacactttgtgggtctgtgg

SEQ ID NO: 4118589 - DNA, 25 bp, Homo sapien
tgcattgggataagataattcacac

SEQ ID NO: 4118590 - DNA, 25 bp, Homo sapien
caggatattactggtgtattgtaag

SEQ ID NO: 4118591 - DNA, 25 bp, Homo sapien
gtacaattgtggtcattaactgcaa

SEQ ID NO: 4118592 - DNA, 25 bp, Homo sapien
tgtggtcattaactgcaaactcaac

SEQ ID NO: 4118593 - DNA, 25 bp, Homo sapien
tgtaagttgtacaattgtggtcatt

SEQ ID NO: 4118594 - DNA, 25 bp, Homo sapien
taatctgcacgagcataggtgtttg

SEQ ID NO: 4118595 - DNA, 25 bp, Homo sapien
attcatctggtaattctactatctg

SEQ ID NO: 4118596 - DNA, 25 bp, Homo sapien
ttctttcatctgtgctgggtcttgg

SEQ ID NO: 4118597 - DNA, 25 bp, Homo sapien
tctgtagcagttgtgggtctgtctc

SEQ ID NO: 4118598 - DNA, 25 bp, Homo sapien
cgattgcattgcgagggactgtagt

SEQ ID NO: 4118599 - DNA, 25 bp, Homo sapien
catcacataacaggcctccgttggc

SEQ ID NO: 4118600 - DNA, 25 bp, Homo sapien
gagttccgtgccagcgtctttttgg

SEQ ID NO: 4118601 - DNA, 25 bp, Homo sapien
cgttggcccttccactaggctgagc

SEQ ID NO: 4118602 - DNA, 25 bp, Homo sapien
ctctgacccaccccacaccgccagt

SEQ ID NO: 4118603 - DNA, 25 bp, Homo sapien
tgccctctgacccaccccacaccgc

SEQ ID NO: 4118604 - DNA, 25 bp, Homo sapien
ctactgccctctgacccaccccaca

SEQ ID NO: 4118605 - DNA, 25 bp, Homo sapien
tgacccaccccacaccgccagtcac

SEQ ID NO: 4118606 - DNA, 25 bp, Homo sapien
cggtgcaaacgctgctcccgcctgg

SEQ ID NO: 4118607 - DNA, 25 bp, Homo sapien
gtgcaaacgctgctcccgcctggag

SEQ ID NO: 4118608 - DNA, 25 bp, Homo sapien
gcaaacgctgctcccgcctggaggt

SEQ ID NO: 4118609 - DNA, 25 bp, Homo sapien
cgcggtgcaaacgctgctcccgcct

SEQ ID NO: 4118610 - DNA, 25 bp, Homo sapien
tctgcaccagctcgcaggaacccac

SEQ ID NO: 4118611 - DNA, 25 bp, Homo sapien
gaggtcgtcgcatgtgccccggggc

SEQ ID NO: 4118612 - DNA, 25 bp, Homo sapien
gggtggaggtcgtcgcatgtgcccc

SEQ ID NO: 4118613 - DNA, 25 bp, Homo sapien
tggaggtcgtcgcatgtgccccggg

SEQ ID NO: 4118614 - DNA, 25 bp, Homo sapien
ggtctgacgagtctgacgggctcac

SEQ ID NO: 4118615 - DNA, 25 bp, Homo sapien
caggtttcgcacattgccttcaggc

SEQ ID NO: 4118616 - DNA, 25 bp, Homo sapien
gcccctgatgctgcaaccgacttat

SEQ ID NO: 4118617 - DNA, 25 bp, Homo sapien
ctgcttctaggcctcgcgggtctga

SEQ ID NO: 4118618 - DNA, 25 bp, Homo sapien
tgagtcagaactagcttgcactgga

SEQ ID NO: 4118619 - DNA, 25 bp, Homo sapien
tcctgagacccacgaagaaagtaac

SEQ ID NO: 4118620 - DNA, 25 bp, Homo sapien
cctggcttatctttgggacctcaga

SEQ ID NO: 4118621 - DNA, 25 bp, Homo sapien
gaatatctggaaaccctacctctga

SEQ ID NO: 4118622 - DNA, 25 bp, Homo sapien
ataaaaatttccaaggcgtctctgt

SEQ ID NO: 4118623 - DNA, 25 bp, Homo sapien
aataaaaatttccaaggcgtctctg

SEQ ID NO: 4118624 - DNA, 25 bp, Homo sapien
taaaaatttccaaggcgtctctgtc

SEQ ID NO: 4118625 - DNA, 25 bp, Homo sapien
tttattccagcaaagacaaagacta

SEQ ID NO: 4118626 - DNA, 25 bp, Homo sapien
cagcaaagacaaagactagtttacg

SEQ ID NO: 4118627 - DNA, 25 bp, Homo sapien
caaagacaaagactagtttacgtgg

SEQ ID NO: 4118628 - DNA, 25 bp, Homo sapien
atactgtttattccagcaaagacaa

SEQ ID NO: 4118629 - DNA, 25 bp, Homo sapien
tccacagtccagtacaggaagttct

SEQ ID NO: 4118630 - DNA, 25 bp, Homo sapien
atccacagtccagtacaggaagttc

SEQ ID NO: 4118631 - DNA, 25 bp, Homo sapien
ccatccacagtccagtacaggaagt

SEQ ID NO: 4118632 - DNA, 25 bp, Homo sapien
catccacagtccagtacaggaagtt

SEQ ID NO: 4118633 - DNA, 25 bp, Homo sapien
actgaagtctcccagtgtttcattt

SEQ ID NO: 4118634 - DNA, 25 bp, Homo sapien
ctaaggaagtgtttacatctttggg

SEQ ID NO: 4118635 - DNA, 25 bp, Homo sapien
ttagcaacttctcctaaggaagtgt

SEQ ID NO: 4118636 - DNA, 25 bp, Homo sapien
catctttgggatcacgttttatttc

SEQ ID NO: 4118637 - DNA, 25 bp, Homo sapien
ctttggtaatcactttgtctgtaaa

SEQ ID NO: 4118638 - DNA, 25 bp, Homo sapien
tttcttctttggtaatcactttgtc

SEQ ID NO: 4118639 - DNA, 25 bp, Homo sapien
tggtaatcactttgtctgtaaatct

SEQ ID NO: 4118640 - DNA, 25 bp, Homo sapien
taatcactttgtctgtaaatctatg

SEQ ID NO: 4118641 - DNA, 25 bp, Homo sapien
attctaataagtttttcagcttgtg

SEQ ID NO: 4118642 - DNA, 25 bp, Homo sapien
ctaataagtttttcagcttgtgttt

SEQ ID NO: 4118643 - DNA, 25 bp, Homo sapien
agtattgtgtcttcttgacgaccac

SEQ ID NO: 4118644 - DNA, 25 bp, Homo sapien
tgcaaattgacattcgccgaccata

SEQ ID NO: 4118645 - DNA, 25 bp, Homo sapien
gaggtttcgggactggtactgcaaa

SEQ ID NO: 4118646 - DNA, 25 bp, Homo sapien
cgccgaccataaagtctgcatttct

SEQ ID NO: 4118647 - DNA, 25 bp, Homo sapien
ccttctagaaccttagccctgaact

SEQ ID NO: 4118648 - DNA, 25 bp, Homo sapien
gaaaagttatgtgaggacttagcaa

SEQ ID NO: 4118649 - DNA, 25 bp, Homo sapien
tgaggacttagcaagaaggtagcca

SEQ ID NO: 4118650 - DNA, 25 bp, Homo sapien
gagcttacactctttccttgcacac

SEQ ID NO: 4118651 - DNA, 25 bp, Homo sapien
tctgcagctttaggacagaatgttt

SEQ ID NO: 4118652 - DNA, 25 bp, Homo sapien
atttcacaagtttcaggattctgca

SEQ ID NO: 4118653 - DNA, 25 bp, Homo sapien
caagtttcaggattctgcagcttta

SEQ ID NO: 4118654 - DNA, 25 bp, Homo sapien
taggacagaatgttttcccagaaat

SEQ ID NO: 4118655 - DNA, 25 bp, Homo sapien
tcaaccctagggacttctggaacac

SEQ ID NO: 4118656 - DNA, 25 bp, Homo sapien
gcaatatttatagggtatcatcaac

SEQ ID NO: 4118657 - DNA, 25 bp, Homo sapien
tcatccccttgttcaggcacatgag

SEQ ID NO: 4118658 - DNA, 25 bp, Homo sapien
tgagcaaacttgcacagtggtcgct

SEQ ID NO: 4118659 - DNA, 25 bp, Homo sapien
aacacagttcattgatatttatata

SEQ ID NO: 4118660 - DNA, 25 bp, Homo sapien
caaacacagttcattgatatttata

SEQ ID NO: 4118661 - DNA, 25 bp, Homo sapien
cacagttcattgatatttatatatt

SEQ ID NO: 4118662 - DNA, 25 bp, Homo sapien
acacagttcattgatatttatatat

SEQ ID NO: 4118663 - DNA, 25 bp, Homo sapien
caaagaataggtccaaactgccatt

SEQ ID NO: 4118664 - DNA, 25 bp, Homo sapien
gcgtcaatatgagctcctacagagt

SEQ ID NO: 4118665 - DNA, 25 bp, Homo sapien
gaagtcaaccaagcatgctcagcat

SEQ ID NO: 4118666 - DNA, 25 bp, Homo sapien
ctacagagtcaagctcccaggcagt

SEQ ID NO: 4118667 - DNA, 25 bp, Homo sapien
tttaaccattatgctgaggttcact

SEQ ID NO: 4118668 - DNA, 25 bp, Homo sapien
catttagcacttgtaaatcaaagta

SEQ ID NO: 4118669 - DNA, 25 bp, Homo sapien
accattatgctgaggttcactatct

SEQ ID NO: 4118670 - DNA, 25 bp, Homo sapien
taaatcaaagtatacacctggggga

SEQ ID NO: 4118671 - DNA, 25 bp, Homo sapien
taaagcaggtacagcattccttaat

SEQ ID NO: 4118672 - DNA, 25 bp, Homo sapien
gccacatactcaaatatgtttagta

SEQ ID NO: 4118673 - DNA, 25 bp, Homo sapien
gcaaaagatatcaattaaagcaggt

SEQ ID NO: 4118674 - DNA, 25 bp, Homo sapien
taatttcatagttgccacatactca

SEQ ID NO: 4118675 - DNA, 25 bp, Homo sapien
tgaagtagacgattgagtagtatca

SEQ ID NO: 4118676 - DNA, 25 bp, Homo sapien
ctgaagtagacgattgagtagtatc

SEQ ID NO: 4118677 - DNA, 25 bp, Homo sapien
aagtagacgattgagtagtatcaaa

SEQ ID NO: 4118678 - DNA, 25 bp, Homo sapien
gtagacgattgagtagtatcaaata

SEQ ID NO: 4118679 - DNA, 25 bp, Homo sapien
tgttcttctgcttgagttcttccaa

SEQ ID NO: 4118680 - DNA, 25 bp, Homo sapien
tctgcttgagttcttccaatgttgc

SEQ ID NO: 4118681 - DNA, 25 bp, Homo sapien
ctggcagttttcctatcaggcctat

SEQ ID NO: 4118682 - DNA, 25 bp, Homo sapien
tcttccaatgttgcttctgaaagaa

SEQ ID NO: 4118683 - DNA, 25 bp, Homo sapien
tcttgtttggaagcttgtacttggt

SEQ ID NO: 4118684 - DNA, 25 bp, Homo sapien
gggtcaagcaccatcccggcttcaa

SEQ ID NO: 4118685 - DNA, 25 bp, Homo sapien
tatagttaaagtgctctgggtcaag

SEQ ID NO: 4118686 - DNA, 25 bp, Homo sapien
tcatttccagaactgcagttatttc

SEQ ID NO: 4118687 - DNA, 25 bp, Homo sapien
ttattcaaggctgaatctaaatcac

SEQ ID NO: 4118688 - DNA, 25 bp, Homo sapien
agttctttttaaatcgtctcatctg

SEQ ID NO: 4118689 - DNA, 25 bp, Homo sapien
attcaaggctgaatctaaatcacac

SEQ ID NO: 4118690 - DNA, 25 bp, Homo sapien
tattcaaggctgaatctaaatcaca

SEQ ID NO: 4118691 - DNA, 25 bp, Homo sapien
taattttcccaatttggtccagtca

SEQ ID NO: 4118692 - DNA, 25 bp, Homo sapien
aaatctgcaaatttttcacagccca

SEQ ID NO: 4118693 - DNA, 25 bp, Homo sapien
gaaatctgcaaatttttcacagccc

SEQ ID NO: 4118694 - DNA, 25 bp, Homo sapien
ggaaatctgcaaatttttcacagcc

SEQ ID NO: 4118695 - DNA, 25 bp, Homo sapien
aatctgcaaatttttcacagcccat

SEQ ID NO: 4118696 - DNA, 25 bp, Homo sapien
gcactgattccaattcttcccagta

SEQ ID NO: 4118697 - DNA, 25 bp, Homo sapien
gatagaagtacatagcactgattcc

SEQ ID NO: 4118698 - DNA, 25 bp, Homo sapien
cttggaccactgcaacagcttgtga

SEQ ID NO: 4118699 - DNA, 25 bp, Homo sapien
tcccagtacacctttatctacttta

SEQ ID NO: 4118700 - DNA, 25 bp, Homo sapien
gcaacattcacaatttgacatcttg

SEQ ID NO: 4118701 - DNA, 25 bp, Homo sapien
tttctgctgcaacattcacaatttg

SEQ ID NO: 4118702 - DNA, 25 bp, Homo sapien
tctcaggccctataagtccttttaa

SEQ ID NO: 4118703 - DNA, 25 bp, Homo sapien
acttctcaggccctataagtccttt

SEQ ID NO: 4118704 - DNA, 25 bp, Homo sapien
aggcagcagggttcttccccgcctt

SEQ ID NO: 4118705 - DNA, 25 bp, Homo sapien
ccgccttgccttggttcctttgcag

SEQ ID NO: 4118706 - DNA, 25 bp, Homo sapien
tggttcctttgcaggattgagccac

SEQ ID NO: 4118707 - DNA, 25 bp, Homo sapien
ggcagcagggttcttccccgccttg

SEQ ID NO: 4118708 - DNA, 25 bp, Homo sapien
tttctgtgttgccatcttttttaaa

SEQ ID NO: 4118709 - DNA, 25 bp, Homo sapien
taaaaacctgttcagtgttgccaat

SEQ ID NO: 4118710 - DNA, 25 bp, Homo sapien
acatcatctccctgtctgggttttt

SEQ ID NO: 4118711 - DNA, 25 bp, Homo sapien
tcagtgttgccaatcaaccaacggt

SEQ ID NO: 4118712 - DNA, 25 bp, Homo sapien
gaaaacctggtagattctgcaaaac

SEQ ID NO: 4118713 - DNA, 25 bp, Homo sapien
tgtctgtctataaaggctcttggct

SEQ ID NO: 4118714 - DNA, 25 bp, Homo sapien
taagcacatccagtctatcacaagg

SEQ ID NO: 4118715 - DNA, 25 bp, Homo sapien
tcacaaggccacagaggcgtattga

SEQ ID NO: 4118716 - DNA, 25 bp, Homo sapien
agaaggctatattgtgagacttcca

SEQ ID NO: 4118717 - DNA, 25 bp, Homo sapien
taaaaagaaggctatattgtgagac

SEQ ID NO: 4118718 - DNA, 25 bp, Homo sapien
ggctatattgtgagacttccacagt

SEQ ID NO: 4118719 - DNA, 25 bp, Homo sapien
aaggctatattgtgagacttccaca

SEQ ID NO: 4118720 - DNA, 25 bp, Homo sapien
aaatcaatagggatgctctttgaaa

SEQ ID NO: 4118721 - DNA, 25 bp, Homo sapien
tagggatgctctttgaaatcatgaa

SEQ ID NO: 4118722 - DNA, 25 bp, Homo sapien
gatgacataccaagactactgcttt

SEQ ID NO: 4118723 - DNA, 25 bp, Homo sapien
tctttgaaatcatgaattctgccac

SEQ ID NO: 4118724 - DNA, 25 bp, Homo sapien
tgggctctggctttgagccataaac

SEQ ID NO: 4118725 - DNA, 25 bp, Homo sapien
ctctggctttgagccataaacgact

SEQ ID NO: 4118726 - DNA, 25 bp, Homo sapien
gctttgagccataaacgactccttc

SEQ ID NO: 4118727 - DNA, 25 bp, Homo sapien
tggctttgagccataaacgactcct

SEQ ID NO: 4118728 - DNA, 25 bp, Homo sapien
tccaggactctgaatactactagca

SEQ ID NO: 4118729 - DNA, 25 bp, Homo sapien
tactactagcattagataccatgaa

SEQ ID NO: 4118730 - DNA, 25 bp, Homo sapien
tgaagatttcaatagctaagagcat

SEQ ID NO: 4118731 - DNA, 25 bp, Homo sapien
tccttccaatggtgggtagcaaccc

SEQ ID NO: 4118732 - DNA, 25 bp, Homo sapien
tgaacacctcataaagtcagaaact

SEQ ID NO: 4118733 - DNA, 25 bp, Homo sapien
tagtcatttacatttactggtacta

SEQ ID NO: 4118734 - DNA, 25 bp, Homo sapien
tactggtactaagctatgatagtct

SEQ ID NO: 4118735 - DNA, 25 bp, Homo sapien
cacctcataaagtcagaaactctta

SEQ ID NO: 4118736 - DNA, 25 bp, Homo sapien
catttcagggcagaacaatgttcca

SEQ ID NO: 4118737 - DNA, 25 bp, Homo sapien
ctttggatctgatatacgagcagcc

SEQ ID NO: 4118738 - DNA, 25 bp, Homo sapien
catgtgtttaacgaaaagctttgga

SEQ ID NO: 4118739 - DNA, 25 bp, Homo sapien
ataatcatcattgctccgagactgg

SEQ ID NO: 4118740 - DNA, 25 bp, Homo sapien
tattgccttttattttcaacaatga

SEQ ID NO: 4118741 - DNA, 25 bp, Homo sapien
actgtctatttttattgccttttat

SEQ ID NO: 4118742 - DNA, 25 bp, Homo sapien
ttattgccttttattttcaacaatg

SEQ ID NO: 4118743 - DNA, 25 bp, Homo sapien
agtgaaaactgtctatttttattgc

SEQ ID NO: 4118744 - DNA, 25 bp, Homo sapien
tcaagggaactcaggaacagtctct

SEQ ID NO: 4118745 - DNA, 25 bp, Homo sapien
tgtggtaactaaacaacagcttcag

SEQ ID NO: 4118746 - DNA, 25 bp, Homo sapien
caaaagggaatagctttgggagtct

SEQ ID NO: 4118747 - DNA, 25 bp, Homo sapien
cagatcttaaacgtgacaattgtgg

SEQ ID NO: 4118748 - DNA, 25 bp, Homo sapien
gactcggaaaatgatggtccggcag

SEQ ID NO: 4118749 - DNA, 25 bp, Homo sapien
tttaggaggcgcgagcgagcactcc

SEQ ID NO: 4118750 - DNA, 25 bp, Homo sapien
tgacccaagggcctgcaaggaacgg

SEQ ID NO: 4118751 - DNA, 25 bp, Homo sapien
gcactccgactaggccggagggact

SEQ ID NO: 4118752 - DNA, 25 bp, Homo sapien
tttgacgggctcctagccgcagtgc

SEQ ID NO: 4118753 - DNA, 25 bp, Homo sapien
cccgcagggctgttcggacgcgcat

SEQ ID NO: 4118754 - DNA, 25 bp, Homo sapien
cgacgcgagggctttgtccgactag

SEQ ID NO: 4118755 - DNA, 25 bp, Homo sapien
cacccagtacaccagaagggaggac

SEQ ID NO: 4118756 - DNA, 25 bp, Homo sapien
gcgttctcatttcacagcgagttaa

SEQ ID NO: 4118757 - DNA, 25 bp, Homo sapien
cactttgcgctaaggtggctctgag

SEQ ID NO: 4118758 - DNA, 25 bp, Homo sapien
tgagatttagtacgtaacaatttcc

SEQ ID NO: 4118759 - DNA, 25 bp, Homo sapien
tgtagatgcgatgcggatactgcgt

SEQ ID NO: 4118760 - DNA, 25 bp, Homo sapien
acagaatatgagaaactcccagacg

SEQ ID NO: 4118761 - DNA, 25 bp, Homo sapien
cttctctaaggaaatggtgcctttc

SEQ ID NO: 4118762 - DNA, 25 bp, Homo sapien
ctcccagacgcaacacttggaatgg

SEQ ID NO: 4118763 - DNA, 25 bp, Homo sapien
gaaggtcttctctaaggaaatggtg

SEQ ID NO: 4118764 - DNA, 25 bp, Homo sapien
acttcaagacagaaatacgtgggcc

SEQ ID NO: 4118765 - DNA, 25 bp, Homo sapien
cgcaggcttctcgtcttcagataaa

SEQ ID NO: 4118766 - DNA, 25 bp, Homo sapien
gctccaaaagtctgggacatccaca

SEQ ID NO: 4118767 - DNA, 25 bp, Homo sapien
tatcacacttgggaggcataccgag

SEQ ID NO: 4118768 - DNA, 25 bp, Homo sapien
cacaataaggagtcaatgtctgaag

SEQ ID NO: 4118769 - DNA, 25 bp, Homo sapien
catttgaagacaaaggtggcacttg

SEQ ID NO: 4118770 - DNA, 25 bp, Homo sapien
ggcaattttgccaaggctacataca

SEQ ID NO: 4118771 - DNA, 25 bp, Homo sapien
ggtcttaaacacaaggtagtaggca

SEQ ID NO: 4118772 - DNA, 25 bp, Homo sapien
cagacactttgggtaactcttacag

SEQ ID NO: 4118773 - DNA, 25 bp, Homo sapien
tcaaaacacctaagccacagtggcc

SEQ ID NO: 4118774 - DNA, 25 bp, Homo sapien
tctgctcccgacattagaaaaagct

SEQ ID NO: 4118775 - DNA, 25 bp, Homo sapien
caacttgcccgggagctgttcccag

SEQ ID NO: 4118776 - DNA, 25 bp, Homo sapien
tatgtacgtcaacttcgaggcatcc

SEQ ID NO: 4118777 - DNA, 25 bp, Homo sapien
tcaacttcgaggcatccattaattg

SEQ ID NO: 4118778 - DNA, 25 bp, Homo sapien
tacgtcaacttcgaggcatccatta

SEQ ID NO: 4118779 - DNA, 25 bp, Homo sapien
aatatatatgtacgtcaacttcgag

SEQ ID NO: 4118780 - DNA, 25 bp, Homo sapien
ctcctcataggtctcaggtggcaaa

SEQ ID NO: 4118781 - DNA, 25 bp, Homo sapien
tcctcataggtctcaggtggcaaaa

SEQ ID NO: 4118782 - DNA, 25 bp, Homo sapien
tgcagaataaatccactccttagtc

SEQ ID NO: 4118783 - DNA, 25 bp, Homo sapien
tccactccttagtctggtatttgaa

SEQ ID NO: 4118784 - DNA, 25 bp, Homo sapien
gaataaatccactccttagtctggt

SEQ ID NO: 4118785 - DNA, 25 bp, Homo sapien
cttagtctggtatttgaaaccctct

SEQ ID NO: 4118786 - DNA, 25 bp, Homo sapien
ttggctcaacctctgtaccctgggt

SEQ ID NO: 4118787 - DNA, 25 bp, Homo sapien
cttggctcaacctctgtaccctggg

SEQ ID NO: 4118788 - DNA, 25 bp, Homo sapien
tcttggctcaacctctgtaccctgg

SEQ ID NO: 4118789 - DNA, 25 bp, Homo sapien
agcacttccacgacacctattttta

SEQ ID NO: 4118790 - DNA, 25 bp, Homo sapien
gaaagcacttccacgacacctattt

SEQ ID NO: 4118791 - DNA, 25 bp, Homo sapien
gcacttccacgacacctatttttaa

SEQ ID NO: 4118792 - DNA, 25 bp, Homo sapien
tttgaaagcacttccacgacaccta

SEQ ID NO: 4118793 - DNA, 25 bp, Homo sapien
aaccagtgtggaaatatcttctcta

SEQ ID NO: 4118794 - DNA, 25 bp, Homo sapien
aagggaaaccagtgtggaaatatct

SEQ ID NO: 4118795 - DNA, 25 bp, Homo sapien
gaaaccagtgtggaaatatcttctc

SEQ ID NO: 4118796 - DNA, 25 bp, Homo sapien
gggaaaccagtgtggaaatatcttc

SEQ ID NO: 4118797 - DNA, 25 bp, Homo sapien
gaaaggcctcaaggcattgactgct

SEQ ID NO: 4118798 - DNA, 25 bp, Homo sapien
ttgactgcttcagctcccgataaag

SEQ ID NO: 4118799 - DNA, 25 bp, Homo sapien
ccaaagaaatctggatgtactgcaa

SEQ ID NO: 4118800 - DNA, 25 bp, Homo sapien
tctacggggtgctgtccaaagaaat

SEQ ID NO: 4118801 - DNA, 25 bp, Homo sapien
tagagcagaatcaggagagaccacg

SEQ ID NO: 4118802 - DNA, 25 bp, Homo sapien
ttcctggagcacacattaactgatg

SEQ ID NO: 4118803 - DNA, 25 bp, Homo sapien
tttgtaatacatagcagtcccttgg

SEQ ID NO: 4118804 - DNA, 25 bp, Homo sapien
caggacctcccgtggataccgaaat

SEQ ID NO: 4118805 - DNA, 25 bp, Homo sapien
agcctggtttctggaggttttctag

SEQ ID NO: 4118806 - DNA, 25 bp, Homo sapien
aaaatgtaagctgagttggtttcaa

SEQ ID NO: 4118807 - DNA, 25 bp, Homo sapien
tggaggttttctaggtagacactta

SEQ ID NO: 4118808 - DNA, 25 bp, Homo sapien
ttggtttcaaagacttgaagcctgg

SEQ ID NO: 4118809 - DNA, 25 bp, Homo sapien
ctggccatcggaggaactctggtct

SEQ ID NO: 4118810 - DNA, 25 bp, Homo sapien
cctggccatcggaggaactctggtc

SEQ ID NO: 4118811 - DNA, 25 bp, Homo sapien
tggccatcggaggaactctggtctg

SEQ ID NO: 4118812 - DNA, 25 bp, Homo sapien
tcctggccatcggaggaactctggt

SEQ ID NO: 4118813 - DNA, 25 bp, Homo sapien
agctcttcctccttccatttgaagt

SEQ ID NO: 4118814 - DNA, 25 bp, Homo sapien
gctcttcctccttccatttgaagtc

SEQ ID NO: 4118815 - DNA, 25 bp, Homo sapien
tcaacatacttcagcattcttcaga

SEQ ID NO: 4118816 - DNA, 25 bp, Homo sapien
aattcctagcctaatcttgaccctg

SEQ ID NO: 4118817 - DNA, 25 bp, Homo sapien
gactctcatgcctaggaacagcaca

SEQ ID NO: 4118818 - DNA, 25 bp, Homo sapien
gaatttgtgactcctgatctcccat

SEQ ID NO: 4118819 - DNA, 25 bp, Homo sapien
tgactaacaggagcatacatctatt

SEQ ID NO: 4118820 - DNA, 25 bp, Homo sapien
tggtgtgcaaagtaaatttgactgc

SEQ ID NO: 4118821 - DNA, 25 bp, Homo sapien
gcttagcagatctctggtgtgcaaa

SEQ ID NO: 4118822 - DNA, 25 bp, Homo sapien
aaagtaaatttgactgctcgaaatc

SEQ ID NO: 4118823 - DNA, 25 bp, Homo sapien
actgtgcttagcagatctctggtgt

SEQ ID NO: 4118824 - DNA, 25 bp, Homo sapien
ttcaagctttggatatgttcaacag

SEQ ID NO: 4118825 - DNA, 25 bp, Homo sapien
tcaagctttggatatgttcaacaga

SEQ ID NO: 4118826 - DNA, 25 bp, Homo sapien
tagtattcaagctttggatatgttc

SEQ ID NO: 4118827 - DNA, 25 bp, Homo sapien
tattcaagctttggatatgttcaac

SEQ ID NO: 4118828 - DNA, 25 bp, Homo sapien
gagtaataagacttgtcccatttga

SEQ ID NO: 4118829 - DNA, 25 bp, Homo sapien
ttccactctcgagacttgttcaagg

SEQ ID NO: 4118830 - DNA, 25 bp, Homo sapien
gtgagagttgtttccactctcgaga

SEQ ID NO: 4118831 - DNA, 25 bp, Homo sapien
tcagggtccttgaatccagtaaagg

SEQ ID NO: 4118832 - DNA, 25 bp, Homo sapien
ccaataaatcagtgtcataaacaca

SEQ ID NO: 4118833 - DNA, 25 bp, Homo sapien
catcccaataaatcagtgtcataaa

SEQ ID NO: 4118834 - DNA, 25 bp, Homo sapien
tgccatcccaataaatcagtgtcat

SEQ ID NO: 4118835 - DNA, 25 bp, Homo sapien
taaatcagtgtcataaacacaaact

SEQ ID NO: 4118836 - DNA, 25 bp, Homo sapien
ctcttttcatgatggctgcacatcc

SEQ ID NO: 4118837 - DNA, 25 bp, Homo sapien
tactcaactgaaccacagaccaact

SEQ ID NO: 4118838 - DNA, 25 bp, Homo sapien
aactgtgttctacgaaatactcaac

SEQ ID NO: 4118839 - DNA, 25 bp, Homo sapien
ctaagtccagttctaggtccttggg

SEQ ID NO: 4118840 - DNA, 25 bp, Homo sapien
tagcacctgatagttagaaacaccc

SEQ ID NO: 4118841 - DNA, 25 bp, Homo sapien
cagtgaagccatccagttcagggct

SEQ ID NO: 4118842 - DNA, 25 bp, Homo sapien
tacatgggtgtaacgtaacgtgctg

SEQ ID NO: 4118843 - DNA, 25 bp, Homo sapien
gctcatgtgcaggttaacaaaggca

SEQ ID NO: 4118844 - DNA, 25 bp, Homo sapien
cattgcagaggtgatagcaggcatt

SEQ ID NO: 4118845 - DNA, 25 bp, Homo sapien
ggctctccaggacaaatacattgca

SEQ ID NO: 4118846 - DNA, 25 bp, Homo sapien
taagtaatccaagtgtatctctgcc

SEQ ID NO: 4118847 - DNA, 25 bp, Homo sapien
ttataatacattggctgggctctcc

SEQ ID NO: 4118848 - DNA, 25 bp, Homo sapien
atgaggaaatcaacacgtggcaacc

SEQ ID NO: 4118849 - DNA, 25 bp, Homo sapien
gaaaacaacacaacgtcacttctgg

SEQ ID NO: 4118850 - DNA, 25 bp, Homo sapien
gggtaggcctgcaaaaaactctgac

SEQ ID NO: 4118851 - DNA, 25 bp, Homo sapien
tcctaataaagggtagcgatcagaa

SEQ ID NO: 4118852 - DNA, 25 bp, Homo sapien
tttacctcaatagtcttacaagaag

SEQ ID NO: 4118853 - DNA, 25 bp, Homo sapien
tagaatgtttacctcaatagtctta

SEQ ID NO: 4118854 - DNA, 25 bp, Homo sapien
cctcaatagtcttacaagaagaact

SEQ ID NO: 4118855 - DNA, 25 bp, Homo sapien
tgttctctaaacctgtatttcttag

SEQ ID NO: 4118856 - DNA, 25 bp, Homo sapien
agagttgcaattgatgagacagttc

SEQ ID NO: 4118857 - DNA, 25 bp, Homo sapien
gttcatcttttaaacgatctagttc

SEQ ID NO: 4118858 - DNA, 25 bp, Homo sapien
tgagagttgcaattgatgagacagt

SEQ ID NO: 4118859 - DNA, 25 bp, Homo sapien
catcttttaaacgatctagttcttt

SEQ ID NO: 4118860 - DNA, 25 bp, Homo sapien
ttctgctgtgctaagcggcttaaac

SEQ ID NO: 4118861 - DNA, 25 bp, Homo sapien
tgctaagcggcttaaactatgcagc

SEQ ID NO: 4118862 - DNA, 25 bp, Homo sapien
ggcttaaactatgcagctggctaca

SEQ ID NO: 4118863 - DNA, 25 bp, Homo sapien
aactatgcagctggctacagcggtg

SEQ ID NO: 4118864 - DNA, 25 bp, Homo sapien
cactgcactcatgccagaacggtct

SEQ ID NO: 4118865 - DNA, 25 bp, Homo sapien
gttcctagcatcacatggcccactg

SEQ ID NO: 4118866 - DNA, 25 bp, Homo sapien
gtccagtggtgatggacatccattg

SEQ ID NO: 4118867 - DNA, 25 bp, Homo sapien
cagaacggtctgtaaatatgattgt

SEQ ID NO: 4118868 - DNA, 25 bp, Homo sapien
aataacttggcaatctttcaaaaag

SEQ ID NO: 4118869 - DNA, 25 bp, Homo sapien
ctcctctgaaggtcaaaataacttg

SEQ ID NO: 4118870 - DNA, 25 bp, Homo sapien
cctcctctgaaggtcaaaataactt

SEQ ID NO: 4118871 - DNA, 25 bp, Homo sapien
aatattcttcaagtgtcaatactgg

SEQ ID NO: 4118872 - DNA, 25 bp, Homo sapien
gagagtaatattcttcaagtgtcaa

SEQ ID NO: 4118873 - DNA, 25 bp, Homo sapien
tcttcaagtgtcaatactggctgta

SEQ ID NO: 4118874 - DNA, 25 bp, Homo sapien
caagtgtcaatactggctgtaattc

SEQ ID NO: 4118875 - DNA, 25 bp, Homo sapien
cttcgagggtgaaatagtattctac

SEQ ID NO: 4118876 - DNA, 25 bp, Homo sapien
gaaatagtattctacttttcaacag

SEQ ID NO: 4118877 - DNA, 25 bp, Homo sapien
tcatttgtaaaccacgcaaacttcg

SEQ ID NO: 4118878 - DNA, 25 bp, Homo sapien
cacgcaaacttcgagggtgaaatag

SEQ ID NO: 4118879 - DNA, 25 bp, Homo sapien
gagctttggtgagaataaaccactg

SEQ ID NO: 4118880 - DNA, 25 bp, Homo sapien
gagtgttggaatattaaaatgcccg

SEQ ID NO: 4118881 - DNA, 25 bp, Homo sapien
cactggagatttgctggatcacaga

SEQ ID NO: 4118882 - DNA, 25 bp, Homo sapien
cccgagttcatgcaagcttggagca

SEQ ID NO: 4118883 - DNA, 25 bp, Homo sapien
ccaggtcccatatttatgagttcca

SEQ ID NO: 4118884 - DNA, 25 bp, Homo sapien
ctcaaactgaggtccgtggtggtaa

SEQ ID NO: 4118885 - DNA, 25 bp, Homo sapien
gtcaatttcctaagcttcatactgt

SEQ ID NO: 4118886 - DNA, 25 bp, Homo sapien
tgaatgatctgactttacagaagac

SEQ ID NO: 4118887 - DNA, 25 bp, Homo sapien
aagattcctgttaatcaagaaataa

SEQ ID NO: 4118888 - DNA, 25 bp, Homo sapien
gggactagaggtgaccgccataaca

SEQ ID NO: 4118889 - DNA, 25 bp, Homo sapien
cgccataacacctggataacttttg

SEQ ID NO: 4118890 - DNA, 25 bp, Homo sapien
cgtgccgggcctaagatgagttttg

SEQ ID NO: 4118891 - DNA, 25 bp, Homo sapien
ggagtatcactgtcgtgaccatggt

SEQ ID NO: 4118892 - DNA, 25 bp, Homo sapien
aggctggagtatcactgtcgtgacc

SEQ ID NO: 4118893 - DNA, 25 bp, Homo sapien
gctggagtatcactgtcgtgaccat

SEQ ID NO: 4118894 - DNA, 25 bp, Homo sapien
tatcactgtcgtgaccatggttcac

SEQ ID NO: 4118895 - DNA, 25 bp, Homo sapien
aacaatccaccatttgtatactaga

SEQ ID NO: 4118896 - DNA, 25 bp, Homo sapien
acaatccaccatttgtatactagaa

SEQ ID NO: 4118897 - DNA, 25 bp, Homo sapien
ggtgcatcccatgtaggtaaggcag

SEQ ID NO: 4118898 - DNA, 25 bp, Homo sapien
ggtctccatcttgcataacagagta

SEQ ID NO: 4118899 - DNA, 25 bp, Homo sapien
ttccaaggaatacaaaggtctccat

SEQ ID NO: 4118900 - DNA, 25 bp, Homo sapien
aaggcagtgattgttctagaagtct

SEQ ID NO: 4118901 - DNA, 25 bp, Homo sapien
taaataatactgttatatcaaattg

SEQ ID NO: 4118902 - DNA, 25 bp, Homo sapien
cttatgtaaataatactgttatatc

SEQ ID NO: 4118903 - DNA, 25 bp, Homo sapien
tttgttcttatgtaaataatactgt

SEQ ID NO: 4118904 - DNA, 25 bp, Homo sapien
atactgttatatcaaattgtggatt

SEQ ID NO: 4118905 - DNA, 25 bp, Homo sapien
aaagtctacttttaaagcagcagtt

SEQ ID NO: 4118906 - DNA, 25 bp, Homo sapien
caccacgcctggcatataaaacctc

SEQ ID NO: 4118907 - DNA, 25 bp, Homo sapien
aacctctcctagcagaaattaattt

SEQ ID NO: 4118908 - DNA, 25 bp, Homo sapien
tggcatataaaacctctcctagcag

SEQ ID NO: 4118909 - DNA, 25 bp, Homo sapien
aatattgcccgaaggtatcttaggg

SEQ ID NO: 4118910 - DNA, 25 bp, Homo sapien
cctggatagtgtttgcccatgaaac

SEQ ID NO: 4118911 - DNA, 25 bp, Homo sapien
ccaaaaatggtgttccaagccaaga

SEQ ID NO: 4118912 - DNA, 25 bp, Homo sapien
taggcacggttaaaagggatgatac

SEQ ID NO: 4118913 - DNA, 25 bp, Homo sapien
ctgcttggtttgctccagggaagcc

SEQ ID NO: 4118914 - DNA, 25 bp, Homo sapien
tgcttggtttgctccagggaagcct

SEQ ID NO: 4118915 - DNA, 25 bp, Homo sapien
aggaccatggtcccctacagaggag

SEQ ID NO: 4118916 - DNA, 25 bp, Homo sapien
catggtcccctacagaggagcctgc

SEQ ID NO: 4118917 - DNA, 25 bp, Homo sapien
tgtggagccagacattaccgtgggc

SEQ ID NO: 4118918 - DNA, 25 bp, Homo sapien
cctgaggttgcacaatgggagatga

SEQ ID NO: 4118919 - DNA, 25 bp, Homo sapien
gataagctgtgcctcgaatcatgtg

SEQ ID NO: 4118920 - DNA, 25 bp, Homo sapien
aacgtgactgtgcattgcttctgac

SEQ ID NO: 4118921 - DNA, 25 bp, Homo sapien
tgtcccactgctgagctcgcctttc

SEQ ID NO: 4118922 - DNA, 25 bp, Homo sapien
ctgagctcgcctttccccaaggaag

SEQ ID NO: 4118923 - DNA, 25 bp, Homo sapien
cactgctgagctcgcctttccccaa

SEQ ID NO: 4118924 - DNA, 25 bp, Homo sapien
tgctgagctcgcctttccccaagga

SEQ ID NO: 4118925 - DNA, 25 bp, Homo sapien
agtgatggcctgatgctgagccatg

SEQ ID NO: 4118926 - DNA, 25 bp, Homo sapien
ggacctgcatgtccccatcggtgac

SEQ ID NO: 4118927 - DNA, 25 bp, Homo sapien
gatggcctgatgctgagccatgctc

SEQ ID NO: 4118928 - DNA, 25 bp, Homo sapien
ctggacctgcatgtccccatcggtg

SEQ ID NO: 4118929 - DNA, 25 bp, Homo sapien
caagggctgagatggtgtagatatc

SEQ ID NO: 4118930 - DNA, 25 bp, Homo sapien
tgtttgagcagggggtgcagttctg

SEQ ID NO: 4118931 - DNA, 25 bp, Homo sapien
ttgagcagggggtgcagttctgaaa

SEQ ID NO: 4118932 - DNA, 25 bp, Homo sapien
caggggagcgctcaagggctgagat

SEQ ID NO: 4118933 - DNA, 25 bp, Homo sapien
ggtcagagctccgtgcaatgcagtt

SEQ ID NO: 4118934 - DNA, 25 bp, Homo sapien
caggtccagccgcagatatgggcag

SEQ ID NO: 4118935 - DNA, 25 bp, Homo sapien
cccatgtgaaatgctccctcttgct

SEQ ID NO: 4118936 - DNA, 25 bp, Homo sapien
gcagcttttaagagacccattgagg

SEQ ID NO: 4118937 - DNA, 25 bp, Homo sapien
catgcagagcaacggcaggtaggtg

SEQ ID NO: 4118938 - DNA, 25 bp, Homo sapien
gccagaatcggacgtgcagcctggc

SEQ ID NO: 4118939 - DNA, 25 bp, Homo sapien
ggtaggtgtggccagaatcggacgt

SEQ ID NO: 4118940 - DNA, 25 bp, Homo sapien
tgtggccagaatcggacgtgcagcc

SEQ ID NO: 4118941 - DNA, 25 bp, Homo sapien
gagaagccccactagtgtccctgaa

SEQ ID NO: 4118942 - DNA, 25 bp, Homo sapien
tgaacaggtgctaggtggctccaag

SEQ ID NO: 4118943 - DNA, 25 bp, Homo sapien
tggctccaagttgtaccggagcagc

SEQ ID NO: 4118944 - DNA, 25 bp, Homo sapien
gagcagctccaggtgaaatgcgtca

SEQ ID NO: 4118945 - DNA, 25 bp, Homo sapien
ctggccctccttgatcaggctggtt

SEQ ID NO: 4118946 - DNA, 25 bp, Homo sapien
gttgagggctggaggaagcctcggg

SEQ ID NO: 4118947 - DNA, 25 bp, Homo sapien
aagcctcgggggtacaggagtgcat

SEQ ID NO: 4118948 - DNA, 25 bp, Homo sapien
ccctccttgatcaggctggttgagg

SEQ ID NO: 4118949 - DNA, 25 bp, Homo sapien
tggctacactctttaagcaccttcc

SEQ ID NO: 4118950 - DNA, 25 bp, Homo sapien
actctttaagcaccttcctgagcca

SEQ ID NO: 4118951 - DNA, 25 bp, Homo sapien
gctacactctttaagcaccttcctg

SEQ ID NO: 4118952 - DNA, 25 bp, Homo sapien
tacactctttaagcaccttcctgag

SEQ ID NO: 4118953 - DNA, 25 bp, Homo sapien
cttgaagtttctcaggattgacagt

SEQ ID NO: 4118954 - DNA, 25 bp, Homo sapien
gaagtttctcaggattgacagtcat

SEQ ID NO: 4118955 - DNA, 25 bp, Homo sapien
tgaagtttctcaggattgacagtca

SEQ ID NO: 4118956 - DNA, 25 bp, Homo sapien
ttgaagtttctcaggattgacagtc

SEQ ID NO: 4118957 - DNA, 25 bp, Homo sapien
aggatcagcttctggttgagctggt

SEQ ID NO: 4118958 - DNA, 25 bp, Homo sapien
gatcagcttctggttgagctggttg

SEQ ID NO: 4118959 - DNA, 25 bp, Homo sapien
cagcttctggttgagctggttgata

SEQ ID NO: 4118960 - DNA, 25 bp, Homo sapien
gcttctggttgagctggttgatatt

SEQ ID NO: 4118961 - DNA, 25 bp, Homo sapien
gttgtgctgactcccccatggcctt

SEQ ID NO: 4118962 - DNA, 25 bp, Homo sapien
aggttgtgctgactcccccatggcc

SEQ ID NO: 4118963 - DNA, 25 bp, Homo sapien
tgcaggttgtgctgactcccccatg

SEQ ID NO: 4118964 - DNA, 25 bp, Homo sapien
tctgcaggttgtgctgactccccca

SEQ ID NO: 4118965 - DNA, 25 bp, Homo sapien
cagcctctaactgttcagcccccga

SEQ ID NO: 4118966 - DNA, 25 bp, Homo sapien
tcctggccagcctctaactgttcag

SEQ ID NO: 4118967 - DNA, 25 bp, Homo sapien
gctcctggccagcctctaactgttc

SEQ ID NO: 4118968 - DNA, 25 bp, Homo sapien
gcctctaactgttcagcccccgaac

SEQ ID NO: 4118969 - DNA, 25 bp, Homo sapien
gaaggtaatggaatgagttagagtt

SEQ ID NO: 4118970 - DNA, 25 bp, Homo sapien
gggaaggtaatggaatgagttagag

SEQ ID NO: 4118971 - DNA, 25 bp, Homo sapien
ggtaatggaatgagttagagtttcc

SEQ ID NO: 4118972 - DNA, 25 bp, Homo sapien
aggtaatggaatgagttagagtttc

SEQ ID NO: 4118973 - DNA, 25 bp, Homo sapien
cactgatcaagagctggacgccatg

SEQ ID NO: 4118974 - DNA, 25 bp, Homo sapien
gctcttaagcttgccaatattcaca

SEQ ID NO: 4118975 - DNA, 25 bp, Homo sapien
cattcagggttgtccaaggcttgga

SEQ ID NO: 4118976 - DNA, 25 bp, Homo sapien
gaagacaaagccctcaaagcacact

SEQ ID NO: 4118977 - DNA, 25 bp, Homo sapien
cagtgaagggaaggaccacgaaaag

SEQ ID NO: 4118978 - DNA, 25 bp, Homo sapien
cagaagactggcagtcccttcaccc

SEQ ID NO: 4118979 - DNA, 25 bp, Homo sapien
cacgaaaaggagtggcagaagactg

SEQ ID NO: 4118980 - DNA, 25 bp, Homo sapien
ctgcttcattctctggcagctgtcc

SEQ ID NO: 4118981 - DNA, 25 bp, Homo sapien
ggcagcctttggattggaactggat

SEQ ID NO: 4118982 - DNA, 25 bp, Homo sapien
gcctttggattggaactggatgccc

SEQ ID NO: 4118983 - DNA, 25 bp, Homo sapien
tctgggcagccgattggctgtctga

SEQ ID NO: 4118984 - DNA, 25 bp, Homo sapien
tctaggttactgaggtttcgaggtc

SEQ ID NO: 4118985 - DNA, 25 bp, Homo sapien
caccttcaaagaaactgtgtggtct

SEQ ID NO: 4118986 - DNA, 25 bp, Homo sapien
tggtctgtggacttcaacaaactaa

SEQ ID NO: 4118987 - DNA, 25 bp, Homo sapien
taggagagggctcataagctgtccc

SEQ ID NO: 4118988 - DNA, 25 bp, Homo sapien
aagctgtcccaagtgaatttctagg

SEQ ID NO: 4118989 - DNA, 25 bp, Homo sapien
catttgcccacatgcatgtgagtag

SEQ ID NO: 4118990 - DNA, 25 bp, Homo sapien
tgcccacatgcatgtgagtagaggc

SEQ ID NO: 4118991 - DNA, 25 bp, Homo sapien
ttgaccccaattgacttttagacat

SEQ ID NO: 4118992 - DNA, 25 bp, Homo sapien
ggatgcagggtaggttatttgttct

SEQ ID NO: 4118993 - DNA, 25 bp, Homo sapien
acaggggtccacattgcaggatccg

SEQ ID NO: 4118994 - DNA, 25 bp, Homo sapien
tccacattgcaggatccgcagagaa

SEQ ID NO: 4118995 - DNA, 25 bp, Homo sapien
gggtccacattgcaggatccgcaga

SEQ ID NO: 4118996 - DNA, 25 bp, Homo sapien
acattgcaggatccgcagagaagca

SEQ ID NO: 4118997 - DNA, 25 bp, Homo sapien
gtgggaacacgagatgggcctctgg

SEQ ID NO: 4118998 - DNA, 25 bp, Homo sapien
tgtgggaacacgagatgggcctctg

SEQ ID NO: 4118999 - DNA, 25 bp, Homo sapien
tgtgtgggaacacgagatgggcctc

SEQ ID NO: 4119000 - DNA, 25 bp, Homo sapien
ctgtgtgggaacacgagatgggcct

SEQ ID NO: 4119001 - DNA, 25 bp, Homo sapien
cagcagggggtgtccctggactccg

SEQ ID NO: 4119002 - DNA, 25 bp, Homo sapien
agcagcagggggtgtccctggactc

SEQ ID NO: 4119003 - DNA, 25 bp, Homo sapien
cagggggtgtccctggactccgtgc

SEQ ID NO: 4119004 - DNA, 25 bp, Homo sapien
agcagggggtgtccctggactccgt

SEQ ID NO: 4119005 - DNA, 25 bp, Homo sapien
aagcgcaggatgcttgtgtcaggca

SEQ ID NO: 4119006 - DNA, 25 bp, Homo sapien
tgtcaggcagtagcagagggctcct

SEQ ID NO: 4119007 - DNA, 25 bp, Homo sapien
caggcaccgggccagtgcttcttgg

SEQ ID NO: 4119008 - DNA, 25 bp, Homo sapien
gagggctcctggcatcagcaggcac

SEQ ID NO: 4119009 - DNA, 25 bp, Homo sapien
gggctcagtggcatagggagtggta

SEQ ID NO: 4119010 - DNA, 25 bp, Homo sapien
ggctcagtggcatagggagtggtac

SEQ ID NO: 4119011 - DNA, 25 bp, Homo sapien
gaaatgtggggctcagtggcatagg

SEQ ID NO: 4119012 - DNA, 25 bp, Homo sapien
ggatgggaaatgtggggctcagtgg

SEQ ID NO: 4119013 - DNA, 25 bp, Homo sapien
tcaaaccaggccacgatttgtgctg

SEQ ID NO: 4119014 - DNA, 25 bp, Homo sapien
gaaagaattatatctatggaaaata

SEQ ID NO: 4119015 - DNA, 25 bp, Homo sapien
acatttttggacaaatcataaatgt

SEQ ID NO: 4119016 - DNA, 25 bp, Homo sapien
tgtgtgacgatcacagcctggagga

SEQ ID NO: 4119017 - DNA, 25 bp, Homo sapien
gagaatctctagatcccgggagttg

SEQ ID NO: 4119018 - DNA, 25 bp, Homo sapien
gacagtttctgattgccctgagcac

SEQ ID NO: 4119019 - DNA, 25 bp, Homo sapien
ccctgctgaccaagactgactgaaa

SEQ ID NO: 4119020 - DNA, 25 bp, Homo sapien
cacctgttcagtgtggtctgcccca

SEQ ID NO: 4119021 - DNA, 25 bp, Homo sapien
tcctagagaagtgccatgtgaacag

SEQ ID NO: 4119022 - DNA, 25 bp, Homo sapien
tgtcccaaaactggcactagaagtg

SEQ ID NO: 4119023 - DNA, 25 bp, Homo sapien
gattcaacccgaaggaacaagtgca

SEQ ID NO: 4119024 - DNA, 25 bp, Homo sapien
cataggaagggtcttggagtcatca

SEQ ID NO: 4119025 - DNA, 25 bp, Homo sapien
tttaccaaggctctccatcaggtgg

SEQ ID NO: 4119026 - DNA, 25 bp, Homo sapien
gtggaccgattgtcgctcggcggcg

SEQ ID NO: 4119027 - DNA, 25 bp, Homo sapien
ggtggcggcgggtggaccgattgtc

SEQ ID NO: 4119028 - DNA, 25 bp, Homo sapien
ggcggcgggagtcggtgagaggcct

SEQ ID NO: 4119029 - DNA, 25 bp, Homo sapien
gcgccgacgcgcgtgcgcgactgga

SEQ ID NO: 4119030 - DNA, 25 bp, Homo sapien
gagagctttgctccctcatgggctc

SEQ ID NO: 4119031 - DNA, 25 bp, Homo sapien
cagactttctataagagagctttgc

SEQ ID NO: 4119032 - DNA, 25 bp, Homo sapien
ctttctataagagagctttgctccc

SEQ ID NO: 4119033 - DNA, 25 bp, Homo sapien
cctggcctcagactttctataagag

SEQ ID NO: 4119034 - DNA, 25 bp, Homo sapien
cctttgaatggcagctactagcctg

SEQ ID NO: 4119035 - DNA, 25 bp, Homo sapien
caagagactgctatcaggatgcacc

SEQ ID NO: 4119036 - DNA, 25 bp, Homo sapien
catacagattggatactgcggcaac

SEQ ID NO: 4119037 - DNA, 25 bp, Homo sapien
tatgtgaccttaagacctgagctgc

SEQ ID NO: 4119038 - DNA, 25 bp, Homo sapien
tcagagagcaagagcactggtgcct

SEQ ID NO: 4119039 - DNA, 25 bp, Homo sapien
ttcaacatcaagatgccagaatggt

SEQ ID NO: 4119040 - DNA, 25 bp, Homo sapien
gagtgacagccccattctcatgacc

SEQ ID NO: 4119041 - DNA, 25 bp, Homo sapien
caagtcttttaagggcgttagtgag

SEQ ID NO: 4119042 - DNA, 25 bp, Homo sapien
tccaagaatggctagaggtctcacc

SEQ ID NO: 4119043 - DNA, 25 bp, Homo sapien
gaaatggaaaggtctcgcactcagt

SEQ ID NO: 4119044 - DNA, 25 bp, Homo sapien
gagagccctgcactggaacatgatg

SEQ ID NO: 4119045 - DNA, 25 bp, Homo sapien
tactgtggcgtatgaggacctgtct

SEQ ID NO: 4119046 - DNA, 25 bp, Homo sapien
cgccgccagcggccctgggcccagg

SEQ ID NO: 4119047 - DNA, 25 bp, Homo sapien
ccgccgcccgccgccagcggccctg

SEQ ID NO: 4119048 - DNA, 25 bp, Homo sapien
ccgccgccagcggccctgggcccag

SEQ ID NO: 4119049 - DNA, 25 bp, Homo sapien
ccgcccgccgccagcggccctgggc

SEQ ID NO: 4119050 - DNA, 25 bp, Homo sapien
tacgccaaagccgatagagttctgg

SEQ ID NO: 4119051 - DNA, 25 bp, Homo sapien
tattttcaccgctagctttggatcc

SEQ ID NO: 4119052 - DNA, 25 bp, Homo sapien
tcagagcgtggaagacaagtgtccg

SEQ ID NO: 4119053 - DNA, 25 bp, Homo sapien
ggagggatgtaggataatacgccaa

SEQ ID NO: 4119054 - DNA, 25 bp, Homo sapien
tgagtacactctgggccttgatgcg

SEQ ID NO: 4119055 - DNA, 25 bp, Homo sapien
ttctttgagtacactctgggccttg

SEQ ID NO: 4119056 - DNA, 25 bp, Homo sapien
ctgttgttctttgagtacactctgg

SEQ ID NO: 4119057 - DNA, 25 bp, Homo sapien
tctgggccttgatgcgttgggtcat

SEQ ID NO: 4119058 - DNA, 25 bp, Homo sapien
gtgatccctattgatacatagacca

SEQ ID NO: 4119059 - DNA, 25 bp, Homo sapien
tcccatttacataggcaagcacctt

SEQ ID NO: 4119060 - DNA, 25 bp, Homo sapien
tgctggtgtctgtgggtgatcccta

SEQ ID NO: 4119061 - DNA, 25 bp, Homo sapien
gcaggaagctcccatttacataggc

SEQ ID NO: 4119062 - DNA, 25 bp, Homo sapien
cccttgggtgaatgaaatttgtaat

SEQ ID NO: 4119063 - DNA, 25 bp, Homo sapien
cacccttgggtgaatgaaatttgta

SEQ ID NO: 4119064 - DNA, 25 bp, Homo sapien
accacccttgggtgaatgaaatttg

SEQ ID NO: 4119065 - DNA, 25 bp, Homo sapien
ttctaccacccttgggtgaatgaaa

SEQ ID NO: 4119066 - DNA, 25 bp, Homo sapien
tgtggatttttaacaccactgagag

SEQ ID NO: 4119067 - DNA, 25 bp, Homo sapien
tgccaggaaaggcacgattcatcct

SEQ ID NO: 4119068 - DNA, 25 bp, Homo sapien
agaatcttcctgacaccagcgtgtg

SEQ ID NO: 4119069 - DNA, 25 bp, Homo sapien
cgtaaggtagaatcttcctgacacc

SEQ ID NO: 4119070 - DNA, 25 bp, Homo sapien
gctagacactccaatccatcaaaag

SEQ ID NO: 4119071 - DNA, 25 bp, Homo sapien
gctgacagtgtcaaaacctttctcc

SEQ ID NO: 4119072 - DNA, 25 bp, Homo sapien
gatagtttgggtactgacgacatgg

SEQ ID NO: 4119073 - DNA, 25 bp, Homo sapien
tctcctctgcgtagttgatagtttg

SEQ ID NO: 4119074 - DNA, 25 bp, Homo sapien
gttcccgttggaaccaccaatctgc

SEQ ID NO: 4119075 - DNA, 25 bp, Homo sapien
tcagggcaaacctatccacaggaga

SEQ ID NO: 4119076 - DNA, 25 bp, Homo sapien
gttctcagggcaaacctatccacag

SEQ ID NO: 4119077 - DNA, 25 bp, Homo sapien
atctcaccagaagttcccgttggaa

SEQ ID NO: 4119078 - DNA, 25 bp, Homo sapien
gatttctgacatttcctaaggcctg

SEQ ID NO: 4119079 - DNA, 25 bp, Homo sapien
tataaccagaacaggtatagccttc

SEQ ID NO: 4119080 - DNA, 25 bp, Homo sapien
tggagtttctgatgctgacccaggc

SEQ ID NO: 4119081 - DNA, 25 bp, Homo sapien
taaggcctgaaatccgctctaaaga

SEQ ID NO: 4119082 - DNA, 25 bp, Homo sapien
gaaaccatttgaggggcattgagta

SEQ ID NO: 4119083 - DNA, 25 bp, Homo sapien
tcagggagtgctcaatagggccagg

SEQ ID NO: 4119084 - DNA, 25 bp, Homo sapien
gagtgctcaatagggccaggggcct

SEQ ID NO: 4119085 - DNA, 25 bp, Homo sapien
cagggagtgctcaatagggccaggg

SEQ ID NO: 4119086 - DNA, 25 bp, Homo sapien
gggagtgctcaatagggccaggggc

SEQ ID NO: 4119087 - DNA, 25 bp, Homo sapien
ctctgcccccaaaccgctcagatgt

SEQ ID NO: 4119088 - DNA, 25 bp, Homo sapien
aggagcacaggtctggagagtctct

SEQ ID NO: 4119089 - DNA, 25 bp, Homo sapien
gagcacaggtctggagagtctctgc

SEQ ID NO: 4119090 - DNA, 25 bp, Homo sapien
cgctcagatgttctgacatcatctg

SEQ ID NO: 4119091 - DNA, 25 bp, Homo sapien
tcagaggcacttctgtgaccaacac

SEQ ID NO: 4119092 - DNA, 25 bp, Homo sapien
tgaccacgtgttgtcctgcagtcct

SEQ ID NO: 4119093 - DNA, 25 bp, Homo sapien
gaccaggcccatctgagcagtgtgt

SEQ ID NO: 4119094 - DNA, 25 bp, Homo sapien
gctgtttcatgcacaagtggttggc

SEQ ID NO: 4119095 - DNA, 25 bp, Homo sapien
ccataaatgtggttaatatttcgta

SEQ ID NO: 4119096 - DNA, 25 bp, Homo sapien
gcccataaatgtggttaatatttcg

SEQ ID NO: 4119097 - DNA, 25 bp, Homo sapien
ttttggcccataaatgtggttaata

SEQ ID NO: 4119098 - DNA, 25 bp, Homo sapien
ttggcccataaatgtggttaatatt

SEQ ID NO: 4119099 - DNA, 25 bp, Homo sapien
gcactcggcaccgaagccggacact

SEQ ID NO: 4119100 - DNA, 25 bp, Homo sapien
gcgtctcggcccactcgcggtggca

SEQ ID NO: 4119101 - DNA, 25 bp, Homo sapien
tcctggccagcgtcggcgacccgag

SEQ ID NO: 4119102 - DNA, 25 bp, Homo sapien
cgccgggaagaagcgcggtcctggc

SEQ ID NO: 4119103 - DNA, 25 bp, Homo sapien
gaagcggctctacatcgggcggctt

SEQ ID NO: 4119104 - DNA, 25 bp, Homo sapien
gggtatgagacaaagaagcggctct

SEQ ID NO: 4119105 - DNA, 25 bp, Homo sapien
tccgtgccacgcacgaatggtcagg

SEQ ID NO: 4119106 - DNA, 25 bp, Homo sapien
cctgttcatcgctgtacccgcagat

SEQ ID NO: 4119107 - DNA, 25 bp, Homo sapien
ttcgtgttaaaccaggcttcagcag

SEQ ID NO: 4119108 - DNA, 25 bp, Homo sapien
gttaaaccaggcttcagcagcgccg

SEQ ID NO: 4119109 - DNA, 25 bp, Homo sapien
ctttcgtgttaaaccaggcttcagc

SEQ ID NO: 4119110 - DNA, 25 bp, Homo sapien
cgtgttaaaccaggcttcagcagcg

SEQ ID NO: 4119111 - DNA, 25 bp, Homo sapien
tgcagttggtccgattaaaatgatg

SEQ ID NO: 4119112 - DNA, 25 bp, Homo sapien
gattaaaatgatggtcaatagttca

SEQ ID NO: 4119113 - DNA, 25 bp, Homo sapien
tggtccgattaaaatgatggtcaat

SEQ ID NO: 4119114 - DNA, 25 bp, Homo sapien
cagttggtccgattaaaatgatggt

SEQ ID NO: 4119115 - DNA, 25 bp, Homo sapien
gaccccaaagagaagcttgttacag

SEQ ID NO: 4119116 - DNA, 25 bp, Homo sapien
tgtgaccccaaagagaagcttgtta

SEQ ID NO: 4119117 - DNA, 25 bp, Homo sapien
gtgaccccaaagagaagcttgttac

SEQ ID NO: 4119118 - DNA, 25 bp, Homo sapien
tgaccccaaagagaagcttgttaca

SEQ ID NO: 4119119 - DNA, 25 bp, Homo sapien
tcgtggtaacacaattgcctgaagt

SEQ ID NO: 4119120 - DNA, 25 bp, Homo sapien
tgcggcccagacatctcgtggtaac

SEQ ID NO: 4119121 - DNA, 25 bp, Homo sapien
ttcgcagacaggaggatagttcttc

SEQ ID NO: 4119122 - DNA, 25 bp, Homo sapien
gaagtgtagccggaagatttcgcag

SEQ ID NO: 4119123 - DNA, 25 bp, Homo sapien
tgtccctgggtcataaggaggctcc

SEQ ID NO: 4119124 - DNA, 25 bp, Homo sapien
ctgggtcataaggaggctccaggtg

SEQ ID NO: 4119125 - DNA, 25 bp, Homo sapien
cctgggtcataaggaggctccaggt

SEQ ID NO: 4119126 - DNA, 25 bp, Homo sapien
tgtgtccctgggtcataaggaggct

SEQ ID NO: 4119127 - DNA, 25 bp, Homo sapien
atgattagagaataagcaaaaggaa

SEQ ID NO: 4119128 - DNA, 25 bp, Homo sapien
tgattagagaataagcaaaaggaac

SEQ ID NO: 4119129 - DNA, 25 bp, Homo sapien
taactacacgaatgattagagaata

SEQ ID NO: 4119130 - DNA, 25 bp, Homo sapien
tcagtgacaatagatgtactacatc

SEQ ID NO: 4119131 - DNA, 25 bp, Homo sapien
agtgcctttcctacgacatgccctt

SEQ ID NO: 4119132 - DNA, 25 bp, Homo sapien
catctagataacaagctctttgaaa

SEQ ID NO: 4119133 - DNA, 25 bp, Homo sapien
cgacatgcccttgatgaaaacttac

SEQ ID NO: 4119134 - DNA, 25 bp, Homo sapien
tccctggagggtacagtacaaggtc

SEQ ID NO: 4119135 - DNA, 25 bp, Homo sapien
caaggtcccggatcaagctgagaac

SEQ ID NO: 4119136 - DNA, 25 bp, Homo sapien
aactgggtgttcctccaagccctca

SEQ ID NO: 4119137 - DNA, 25 bp, Homo sapien
gggtacagtacaaggtcccggatca

SEQ ID NO: 4119138 - DNA, 25 bp, Homo sapien
ttggtctcctgagttccccacttga

SEQ ID NO: 4119139 - DNA, 25 bp, Homo sapien
gggcctgaccatccgaagtacagtt

SEQ ID NO: 4119140 - DNA, 25 bp, Homo sapien
catccgaagtacagttgcccctgct

SEQ ID NO: 4119141 - DNA, 25 bp, Homo sapien
ggtctcctgagttccccacttgagg

SEQ ID NO: 4119142 - DNA, 25 bp, Homo sapien
gggtatgggctcttcatgggcaaaa

SEQ ID NO: 4119143 - DNA, 25 bp, Homo sapien
gacacctcgaaaaggacaagtccag

SEQ ID NO: 4119144 - DNA, 25 bp, Homo sapien
caagtccagggcaagatagagtcca

SEQ ID NO: 4119145 - DNA, 25 bp, Homo sapien
gaatgacaagctccaatcgctcagg

SEQ ID NO: 4119146 - DNA, 25 bp, Homo sapien
ttctgagtgtagtctacagataggt

SEQ ID NO: 4119147 - DNA, 25 bp, Homo sapien
catttcttctgagtgtagtctacag

SEQ ID NO: 4119148 - DNA, 25 bp, Homo sapien
caaggaggccatgctatggtgattt

SEQ ID NO: 4119149 - DNA, 25 bp, Homo sapien
catgctatggtgattttctggcatc

SEQ ID NO: 4119150 - DNA, 25 bp, Homo sapien
ctgcccaaagaaagaagacaacaac

SEQ ID NO: 4119151 - DNA, 25 bp, Homo sapien
tgcccaaagaaagaagacaacaact

SEQ ID NO: 4119152 - DNA, 25 bp, Homo sapien
atcgataggatttctgtccctttaa

SEQ ID NO: 4119153 - DNA, 25 bp, Homo sapien
atcacatcgataggatttctgtccc

SEQ ID NO: 4119154 - DNA, 25 bp, Homo sapien
catcgataggatttctgtcccttta

SEQ ID NO: 4119155 - DNA, 25 bp, Homo sapien
cacatcgataggatttctgtccctt

SEQ ID NO: 4119156 - DNA, 25 bp, Homo sapien
cttcgaatgaatgcctctccacact

SEQ ID NO: 4119157 - DNA, 25 bp, Homo sapien
ctggtggtcagtgagtcgggaactc

SEQ ID NO: 4119158 - DNA, 25 bp, Homo sapien
cagtgagtcgggaactctgagtaaa

SEQ ID NO: 4119159 - DNA, 25 bp, Homo sapien
ttgcttcgaatgaatgcctctccac

SEQ ID NO: 4119160 - DNA, 25 bp, Homo sapien
tcgctcatgctcaatgagttgagag

SEQ ID NO: 4119161 - DNA, 25 bp, Homo sapien
caatgagttgagagttctgattgaa

SEQ ID NO: 4119162 - DNA, 25 bp, Homo sapien
catgctcaatgagttgagagttctg

SEQ ID NO: 4119163 - DNA, 25 bp, Homo sapien
attcgctcatgctcaatgagttgag

SEQ ID NO: 4119164 - DNA, 25 bp, Homo sapien
gctggagctataactgaataccttc

SEQ ID NO: 4119165 - DNA, 25 bp, Homo sapien
taaggctggagctataactgaatac

SEQ ID NO: 4119166 - DNA, 25 bp, Homo sapien
taccataaggctggagctataactg

SEQ ID NO: 4119167 - DNA, 25 bp, Homo sapien
ctgatgtaccataaggctggagcta

SEQ ID NO: 4119168 - DNA, 25 bp, Homo sapien
taaagacagcttaactcaaaggtcg

SEQ ID NO: 4119169 - DNA, 25 bp, Homo sapien
tactggctccgggaaaccactatga

SEQ ID NO: 4119170 - DNA, 25 bp, Homo sapien
tgagcatcctgcttataaagacagc

SEQ ID NO: 4119171 - DNA, 25 bp, Homo sapien
aaagcaagtagggaatggtccaccg

SEQ ID NO: 4119172 - DNA, 25 bp, Homo sapien
gactgcccaacccaatacctagata

SEQ ID NO: 4119173 - DNA, 25 bp, Homo sapien
tcagaactagaatcagcatgtaggg

SEQ ID NO: 4119174 - DNA, 25 bp, Homo sapien
gtaacagtagtaagacttccaggag

SEQ ID NO: 4119175 - DNA, 25 bp, Homo sapien
gaaagtccgtaccagtgggatatga

SEQ ID NO: 4119176 - DNA, 25 bp, Homo sapien
gatggaatccccactggtcagagaa

SEQ ID NO: 4119177 - DNA, 25 bp, Homo sapien
cacccgctagtctggctgttaagag

SEQ ID NO: 4119178 - DNA, 25 bp, Homo sapien
tgtcagtattaaggcccagcagcct

SEQ ID NO: 4119179 - DNA, 25 bp, Homo sapien
gcagcctgttgataagctaccctgt

SEQ ID NO: 4119180 - DNA, 25 bp, Homo sapien
cgcatggaggtggaccggagcccag

SEQ ID NO: 4119181 - DNA, 25 bp, Homo sapien
catggaggtggaccggagcccaggg

SEQ ID NO: 4119182 - DNA, 25 bp, Homo sapien
tgcgcatggaggtggaccggagccc

SEQ ID NO: 4119183 - DNA, 25 bp, Homo sapien
ctgcgcatggaggtggaccggagcc

SEQ ID NO: 4119184 - DNA, 25 bp, Homo sapien
cctgcgccctgaggcggagcctggg

SEQ ID NO: 4119185 - DNA, 25 bp, Homo sapien
gctggagcgggagcgtgcacggagg

SEQ ID NO: 4119186 - DNA, 25 bp, Homo sapien
cgggagcgtgcacggaggcgggagg

SEQ ID NO: 4119187 - DNA, 25 bp, Homo sapien
tggagcgggagcgtgcacggaggcg

SEQ ID NO: 4119188 - DNA, 25 bp, Homo sapien
gggcctctccaagacctttgactgg

SEQ ID NO: 4119189 - DNA, 25 bp, Homo sapien
tttgactgggctgagttccgtccca

SEQ ID NO: 4119190 - DNA, 25 bp, Homo sapien
aagaggagccgcacgtgggagcgga

SEQ ID NO: 4119191 - DNA, 25 bp, Homo sapien
gctgagttccgtcccatccagcagg

SEQ ID NO: 4119192 - DNA, 25 bp, Homo sapien
gagaacccgtgcaggaaattccagg

SEQ ID NO: 4119193 - DNA, 25 bp, Homo sapien
aaggagcatttcatccgggcggaga

SEQ ID NO: 4119194 - DNA, 25 bp, Homo sapien
gatgggaccgactttgacaactcag

SEQ ID NO: 4119195 - DNA, 25 bp, Homo sapien
tcagtgcaccggtctccgaaatggc

SEQ ID NO: 4119196 - DNA, 25 bp, Homo sapien
cattggctcatgtaggtggcacaac

SEQ ID NO: 4119197 - DNA, 25 bp, Homo sapien
tcacaccctcagttgatgtgggacg

SEQ ID NO: 4119198 - DNA, 25 bp, Homo sapien
gacaaaagtcctccacaagttcaca

SEQ ID NO: 4119199 - DNA, 25 bp, Homo sapien
tgggacgtagaactcgggacactct

SEQ ID NO: 4119200 - DNA, 25 bp, Homo sapien
ccaggcgctgcggatacagtagtga

SEQ ID NO: 4119201 - DNA, 25 bp, Homo sapien
tagtgggccattaggagcaaaattc

SEQ ID NO: 4119202 - DNA, 25 bp, Homo sapien
tgctctgcataacagctggagggct

SEQ ID NO: 4119203 - DNA, 25 bp, Homo sapien
caggatcagctatggtttattggca

SEQ ID NO: 4119204 - DNA, 25 bp, Homo sapien
cgaaagcgccagacccacatcttga

SEQ ID NO: 4119205 - DNA, 25 bp, Homo sapien
catcttgaacaaagcgcagaaggaa

SEQ ID NO: 4119206 - DNA, 25 bp, Homo sapien
cacatcttgaacaaagcgcagaagg

SEQ ID NO: 4119207 - DNA, 25 bp, Homo sapien
atcttgaacaaagcgcagaaggaac

SEQ ID NO: 4119208 - DNA, 25 bp, Homo sapien
acagcagcctcaatccaaaggatct

SEQ ID NO: 4119209 - DNA, 25 bp, Homo sapien
acagcacagatcttgcctgatctcc

SEQ ID NO: 4119210 - DNA, 25 bp, Homo sapien
gcagcctcaatccaaaggatctgca

SEQ ID NO: 4119211 - DNA, 25 bp, Homo sapien
tgaagaagttcctaagagggtcttg

SEQ ID NO: 4119212 - DNA, 25 bp, Homo sapien
acttcctgggcaatgtctctgtgga

SEQ ID NO: 4119213 - DNA, 25 bp, Homo sapien
gatgctttggaattaactcctcctc

SEQ ID NO: 4119214 - DNA, 25 bp, Homo sapien
cagaggagccttctaaattttgact

SEQ ID NO: 4119215 - DNA, 25 bp, Homo sapien
tgcttggaacataccagtgtcctct

SEQ ID NO: 4119216 - DNA, 25 bp, Homo sapien
gtctttaactgtcttatgtttgaaa

SEQ ID NO: 4119217 - DNA, 25 bp, Homo sapien
tctcatttgttgcagggtcacagca

SEQ ID NO: 4119218 - DNA, 25 bp, Homo sapien
agcactgactattgtctttttcaga

SEQ ID NO: 4119219 - DNA, 25 bp, Homo sapien
ttttcagcctgaactctctcatttg

SEQ ID NO: 4119220 - DNA, 25 bp, Homo sapien
tggtgccgaataagatgtgactttc

SEQ ID NO: 4119221 - DNA, 25 bp, Homo sapien
gatgtgatataaggcccgaactccg

SEQ ID NO: 4119222 - DNA, 25 bp, Homo sapien
gcatgtatagggcttcagtccagtg

SEQ ID NO: 4119223 - DNA, 25 bp, Homo sapien
caatacaagaatagggcttctctcc

SEQ ID NO: 4119224 - DNA, 25 bp, Homo sapien
gtgaactataccgataggctttccc

SEQ ID NO: 4119225 - DNA, 25 bp, Homo sapien
ataagctgtgaactataccgatagg

SEQ ID NO: 4119226 - DNA, 25 bp, Homo sapien
gctgtgaactataccgataggcttt

SEQ ID NO: 4119227 - DNA, 25 bp, Homo sapien
gaactataccgataggctttcccac

SEQ ID NO: 4119228 - DNA, 25 bp, Homo sapien
aaagatttctaagtccagggcgaca

SEQ ID NO: 4119229 - DNA, 25 bp, Homo sapien
gaacagcccggtttccattggaaca

SEQ ID NO: 4119230 - DNA, 25 bp, Homo sapien
gtttattcctacagctcaaggcagg

SEQ ID NO: 4119231 - DNA, 25 bp, Homo sapien
tagaggcagctacctgggaaaacgc

SEQ ID NO: 4119232 - DNA, 25 bp, Homo sapien
tggcaaagctttcagagtgcatacc

SEQ ID NO: 4119233 - DNA, 25 bp, Homo sapien
gaatcctcctatgtcctccagtctg

SEQ ID NO: 4119234 - DNA, 25 bp, Homo sapien
agtgcatacctcaatggccatcaga

SEQ ID NO: 4119235 - DNA, 25 bp, Homo sapien
gaacagaaatcctaccaatgtgatg

SEQ ID NO: 4119236 - DNA, 25 bp, Homo sapien
cggcagccgaggcacagaataatgg

SEQ ID NO: 4119237 - DNA, 25 bp, Homo sapien
tgcggctccagccttgcgtaccgcc

SEQ ID NO: 4119238 - DNA, 25 bp, Homo sapien
cttccggcagccgaggcacagaata

SEQ ID NO: 4119239 - DNA, 25 bp, Homo sapien
cagccttgcgtaccgccgcctcggc

SEQ ID NO: 4119240 - DNA, 25 bp, Homo sapien
aaagcgccagcagagtccgttagac

SEQ ID NO: 4119241 - DNA, 25 bp, Homo sapien
taacaatcgtcgctgacaggttggc

SEQ ID NO: 4119242 - DNA, 25 bp, Homo sapien
tgtggattagcctcagacaagactg

SEQ ID NO: 4119243 - DNA, 25 bp, Homo sapien
aaaatccgtcctcaagagtctgggc

SEQ ID NO: 4119244 - DNA, 25 bp, Homo sapien
tcattgttaaagttagcccagagaa

SEQ ID NO: 4119245 - DNA, 25 bp, Homo sapien
gaaatcattgttaaagttagcccag

SEQ ID NO: 4119246 - DNA, 25 bp, Homo sapien
aatcattgttaaagttagcccagag

SEQ ID NO: 4119247 - DNA, 25 bp, Homo sapien
aaatcattgttaaagttagcccaga

SEQ ID NO: 4119248 - DNA, 25 bp, Homo sapien
ggtctccttaatccttgacttcttc

SEQ ID NO: 4119249 - DNA, 25 bp, Homo sapien
gatctgtgccttggtgcgtgcttct

SEQ ID NO: 4119250 - DNA, 25 bp, Homo sapien
tgctggtccatcaaggtctttctgc

SEQ ID NO: 4119251 - DNA, 25 bp, Homo sapien
tgatggagctgtacccaggtccgaa

SEQ ID NO: 4119252 - DNA, 25 bp, Homo sapien
ggtccagatgtctcatggtaacgta

SEQ ID NO: 4119253 - DNA, 25 bp, Homo sapien
agcctagcctcaattctttccttcc

SEQ ID NO: 4119254 - DNA, 25 bp, Homo sapien
tagcctagcctcaattctttccttc

SEQ ID NO: 4119255 - DNA, 25 bp, Homo sapien
ctagcctagcctcaattctttcctt

SEQ ID NO: 4119256 - DNA, 25 bp, Homo sapien
tgagaacaatggagctgccctcgag

SEQ ID NO: 4119257 - DNA, 25 bp, Homo sapien
caagtatggagcatcaaaacagcag

SEQ ID NO: 4119258 - DNA, 25 bp, Homo sapien
actggtgacctctcccagaggagac

SEQ ID NO: 4119259 - DNA, 25 bp, Homo sapien
gtacacaacggtgggaacagaagcc

SEQ ID NO: 4119260 - DNA, 25 bp, Homo sapien
aacaagtaaaataagctagctcttc

SEQ ID NO: 4119261 - DNA, 25 bp, Homo sapien
taaaataagctagctcttcttgttt

SEQ ID NO: 4119262 - DNA, 25 bp, Homo sapien
ctggaaacaagtaaaataagctagc

SEQ ID NO: 4119263 - DNA, 25 bp, Homo sapien
caagtaaaataagctagctcttctt

SEQ ID NO: 4119264 - DNA, 25 bp, Homo sapien
cttctggagagtgtcctgatccttg

SEQ ID NO: 4119265 - DNA, 25 bp, Homo sapien
gaagtacaggaggaagtgttgttcc

SEQ ID NO: 4119266 - DNA, 25 bp, Homo sapien
ggatcctggaggttgaatgccacta

SEQ ID NO: 4119267 - DNA, 25 bp, Homo sapien
cctgatccttgacaaggactggaac

SEQ ID NO: 4119268 - DNA, 25 bp, Homo sapien
aagggcagaagcttcaggggcagga

SEQ ID NO: 4119269 - DNA, 25 bp, Homo sapien
ctgggaaagggcagaagcttcaggg

SEQ ID NO: 4119270 - DNA, 25 bp, Homo sapien
gggcagaagcttcaggggcaggaga

SEQ ID NO: 4119271 - DNA, 25 bp, Homo sapien
gcagaagcttcaggggcaggagaat

SEQ ID NO: 4119272 - DNA, 25 bp, Homo sapien
gagcataagtgccattaattgattt

SEQ ID NO: 4119273 - DNA, 25 bp, Homo sapien
gctgggctgttaggagcataagtgc

SEQ ID NO: 4119274 - DNA, 25 bp, Homo sapien
gggctgggctgttaggagcataagt

SEQ ID NO: 4119275 - DNA, 25 bp, Homo sapien
gccattaattgatttcttgggttct

SEQ ID NO: 4119276 - DNA, 25 bp, Homo sapien
aggccatgagtgcataacagacatc

SEQ ID NO: 4119277 - DNA, 25 bp, Homo sapien
taacagacatcagggagacataagg

SEQ ID NO: 4119278 - DNA, 25 bp, Homo sapien
gagtgcataacagacatcagggaga

SEQ ID NO: 4119279 - DNA, 25 bp, Homo sapien
catcagggagacataaggagatcac

SEQ ID NO: 4119280 - DNA, 25 bp, Homo sapien
cttgcctgtcgaaaggttcccttca

SEQ ID NO: 4119281 - DNA, 25 bp, Homo sapien
tgcctgtcgaaaggttcccttcact

SEQ ID NO: 4119282 - DNA, 25 bp, Homo sapien
tgtgagattaccaatgcccaggaac

SEQ ID NO: 4119283 - DNA, 25 bp, Homo sapien
ctgaaataacaagtgtgtgtgagat

SEQ ID NO: 4119284 - DNA, 25 bp, Homo sapien
tacaaggccctctggattgggccca

SEQ ID NO: 4119285 - DNA, 25 bp, Homo sapien
agcatactgacacctcctcgaacat

SEQ ID NO: 4119286 - DNA, 25 bp, Homo sapien
gaagtgaagcatactgacacctcct

SEQ ID NO: 4119287 - DNA, 25 bp, Homo sapien
cctctgaagtgaagcatactgacac

SEQ ID NO: 4119288 - DNA, 25 bp, Homo sapien
tcttgtctcgttcacaaagggaaac

SEQ ID NO: 4119289 - DNA, 25 bp, Homo sapien
gatgttcctttatgagagtctgctc

SEQ ID NO: 4119290 - DNA, 25 bp, Homo sapien
gctgaaccgaaagtcaagctgtctc

SEQ ID NO: 4119291 - DNA, 25 bp, Homo sapien
gctctttgagaactacttggctttg

SEQ ID NO: 4119292 - DNA, 25 bp, Homo sapien
gtctctcccctgaatggcgccttag

SEQ ID NO: 4119293 - DNA, 25 bp, Homo sapien
gcctgagtgcctatagaagcccttt

SEQ ID NO: 4119294 - DNA, 25 bp, Homo sapien
taaatgcattagaaggctcgaacgc

SEQ ID NO: 4119295 - DNA, 25 bp, Homo sapien
ggattctccgatgtacaagcaggct

SEQ ID NO: 4119296 - DNA, 25 bp, Homo sapien
tctggtggccaactaaattcctctt

SEQ ID NO: 4119297 - DNA, 25 bp, Homo sapien
tctactagaggtaaggactttccta

SEQ ID NO: 4119298 - DNA, 25 bp, Homo sapien
tctgtttgaactgaaagctcttcca

SEQ ID NO: 4119299 - DNA, 25 bp, Homo sapien
caagagaattcctcaatggtatgga

SEQ ID NO: 4119300 - DNA, 25 bp, Homo sapien
cggcctattaactttcttctatatg

SEQ ID NO: 4119301 - DNA, 25 bp, Homo sapien
ttttgtagacttgaaagttgggatg

SEQ ID NO: 4119302 - DNA, 25 bp, Homo sapien
tatatcatttgtccaacagttactt

SEQ ID NO: 4119303 - DNA, 25 bp, Homo sapien
gctactcatttgtctagtaaagagt

SEQ ID NO: 4119304 - DNA, 25 bp, Homo sapien
actaaagctttagaggctgacttaa

SEQ ID NO: 4119305 - DNA, 25 bp, Homo sapien
catggccattaagggaaagccagga

SEQ ID NO: 4119306 - DNA, 25 bp, Homo sapien
ccagtgctcttttaggttgtcctca

SEQ ID NO: 4119307 - DNA, 25 bp, Homo sapien
gccaggaatcaaaggtaggtcttct

SEQ ID NO: 4119308 - DNA, 25 bp, Homo sapien
tggcttaatcagtgaagagcttggc

SEQ ID NO: 4119309 - DNA, 25 bp, Homo sapien
ggcttaatcagtgaagagcttggct

SEQ ID NO: 4119310 - DNA, 25 bp, Homo sapien
actggcttaatcagtgaagagcttg

SEQ ID NO: 4119311 - DNA, 25 bp, Homo sapien
ctggcttaatcagtgaagagcttgg

SEQ ID NO: 4119312 - DNA, 25 bp, Homo sapien
ggcagatggcaaaacctgaaccaca

SEQ ID NO: 4119313 - DNA, 25 bp, Homo sapien
ctggcaatgaggtccaagaagcttg

SEQ ID NO: 4119314 - DNA, 25 bp, Homo sapien
tatgtgggctgtctcaatctaagca

SEQ ID NO: 4119315 - DNA, 25 bp, Homo sapien
gctgggatgattcaacaacctggat

SEQ ID NO: 4119316 - DNA, 25 bp, Homo sapien
ttgttcctctgcctcctgtatttcc

SEQ ID NO: 4119317 - DNA, 25 bp, Homo sapien
tgttcctctgcctcctgtatttcct

SEQ ID NO: 4119318 - DNA, 25 bp, Homo sapien
ttatttgttcctctgcctcctgtat

SEQ ID NO: 4119319 - DNA, 25 bp, Homo sapien
atttgttcctctgcctcctgtattt

SEQ ID NO: 4119320 - DNA, 25 bp, Homo sapien
atggtataataaactcacagcagac

SEQ ID NO: 4119321 - DNA, 25 bp, Homo sapien
gtataataaactcacagcagactca

SEQ ID NO: 4119322 - DNA, 25 bp, Homo sapien
cagggcagctttcttatgcaatatt

SEQ ID NO: 4119323 - DNA, 25 bp, Homo sapien
cagactcaagacagcttgaacaatt

SEQ ID NO: 4119324 - DNA, 25 bp, Homo sapien
tatttgctgaaaaggcgatccctcc

SEQ ID NO: 4119325 - DNA, 25 bp, Homo sapien
tccttgccagcagttaccaccatta

SEQ ID NO: 4119326 - DNA, 25 bp, Homo sapien
tctggttcttagtacctaacggctc

SEQ ID NO: 4119327 - DNA, 25 bp, Homo sapien
tatgggttgcctacaggtttcgacc

SEQ ID NO: 4119328 - DNA, 25 bp, Homo sapien
ccttgaaatttatttgagttgttat

SEQ ID NO: 4119329 - DNA, 25 bp, Homo sapien
attcccttgaaatttatttgagttg

SEQ ID NO: 4119330 - DNA, 25 bp, Homo sapien
cttgaaatttatttgagttgttatg

SEQ ID NO: 4119331 - DNA, 25 bp, Homo sapien
tgaatacccgtattttccatgtgga

SEQ ID NO: 4119332 - DNA, 25 bp, Homo sapien
cacacactttagttggttacagctc

SEQ ID NO: 4119333 - DNA, 25 bp, Homo sapien
tgaaagttgtaaacatcagaacact

SEQ ID NO: 4119334 - DNA, 25 bp, Homo sapien
gaaagtatggcacattgaatacccg

SEQ ID NO: 4119335 - DNA, 25 bp, Homo sapien
tctcgatgggtgtccaatgtcgccc

SEQ ID NO: 4119336 - DNA, 25 bp, Homo sapien
gagaagcccgacctgagttcactgg

SEQ ID NO: 4119337 - DNA, 25 bp, Homo sapien
tctaccggcacgagaacaatgaccg

SEQ ID NO: 4119338 - DNA, 25 bp, Homo sapien
caatgaccggacaggaagtgcctcg

SEQ ID NO: 4119339 - DNA, 25 bp, Homo sapien
ggacgcaggggccgctcctagggcc

SEQ ID NO: 4119340 - DNA, 25 bp, Homo sapien
gggccgctcctagggccatggcccc

SEQ ID NO: 4119341 - DNA, 25 bp, Homo sapien
ttttctccctcgacgttcgtgccca

SEQ ID NO: 4119342 - DNA, 25 bp, Homo sapien
cccccgcaccccgacagacaaggct

SEQ ID NO: 4119343 - DNA, 25 bp, Homo sapien
ccccttggccggtccgtgtgcatcc

SEQ ID NO: 4119344 - DNA, 25 bp, Homo sapien
ttggccggtccgtgtgcatcctctc

SEQ ID NO: 4119345 - DNA, 25 bp, Homo sapien
cttggccggtccgtgtgcatcctct

SEQ ID NO: 4119346 - DNA, 25 bp, Homo sapien
tggccccttggccggtccgtgtgca

SEQ ID NO: 4119347 - DNA, 25 bp, Homo sapien
cccagggccaagatgagtactgcct

SEQ ID NO: 4119348 - DNA, 25 bp, Homo sapien
actcctatagctgggcgctgccctg

SEQ ID NO: 4119349 - DNA, 25 bp, Homo sapien
ccagggccaagatgagtactgccta

SEQ ID NO: 4119350 - DNA, 25 bp, Homo sapien
agcaggggaactcctatagctgggc

SEQ ID NO: 4119351 - DNA, 25 bp, Homo sapien
ggcttctctcaattctgcagtcatc

SEQ ID NO: 4119352 - DNA, 25 bp, Homo sapien
tctctcaattctgcagtcatcttct

SEQ ID NO: 4119353 - DNA, 25 bp, Homo sapien
gcttctctcaattctgcagtcatct

SEQ ID NO: 4119354 - DNA, 25 bp, Homo sapien
ttctctcaattctgcagtcatcttc

SEQ ID NO: 4119355 - DNA, 25 bp, Homo sapien
cacttgttggctggatgcctgacct

SEQ ID NO: 4119356 - DNA, 25 bp, Homo sapien
catcaaggcctgtctgaagaccctg

SEQ ID NO: 4119357 - DNA, 25 bp, Homo sapien
tcaaggcctgtctgaagaccctgca

SEQ ID NO: 4119358 - DNA, 25 bp, Homo sapien
agactttgatgttctcggagtgcac

SEQ ID NO: 4119359 - DNA, 25 bp, Homo sapien
tgagttgctttcaggactaccgcca

SEQ ID NO: 4119360 - DNA, 25 bp, Homo sapien
gccagagtccctggtaatgagtagc

SEQ ID NO: 4119361 - DNA, 25 bp, Homo sapien
gagtctccagtatctcactcttggc

SEQ ID NO: 4119362 - DNA, 25 bp, Homo sapien
tgagtagctgccaagggttgaagca

SEQ ID NO: 4119363 - DNA, 25 bp, Homo sapien
tctcctaactcaggtccttgaggat

SEQ ID NO: 4119364 - DNA, 25 bp, Homo sapien
tctgcctctttaacatgtttccctt

SEQ ID NO: 4119365 - DNA, 25 bp, Homo sapien
gtcattcactatcacttgtctgaaa

SEQ ID NO: 4119366 - DNA, 25 bp, Homo sapien
taacagcgccagaattaaggctata

SEQ ID NO: 4119367 - DNA, 25 bp, Homo sapien
ttcccacacacgctacacgtaaaag

SEQ ID NO: 4119368 - DNA, 25 bp, Homo sapien
tttctaaggagtggattttttgatg

SEQ ID NO: 4119369 - DNA, 25 bp, Homo sapien
ccacagtcgttacaggcaaagggct

SEQ ID NO: 4119370 - DNA, 25 bp, Homo sapien
cacgctacacgtaaaaggcttttgt

SEQ ID NO: 4119371 - DNA, 25 bp, Homo sapien
cgctgcagtcgtaaggtttctctgc

SEQ ID NO: 4119372 - DNA, 25 bp, Homo sapien
taaggcaagagagctgactgaaggc

SEQ ID NO: 4119373 - DNA, 25 bp, Homo sapien
tggtggacaataaggcaagagagct

SEQ ID NO: 4119374 - DNA, 25 bp, Homo sapien
cattcgctgcagtcgtaaggtttct

SEQ ID NO: 4119375 - DNA, 25 bp, Homo sapien
taagtaggtatgagctacatgtgaa

SEQ ID NO: 4119376 - DNA, 25 bp, Homo sapien
gatgaataagtaggtatgagctaca

SEQ ID NO: 4119377 - DNA, 25 bp, Homo sapien
gtaggtatgagctacatgtgaaggc

SEQ ID NO: 4119378 - DNA, 25 bp, Homo sapien
tgaataagtaggtatgagctacatg

SEQ ID NO: 4119379 - DNA, 25 bp, Homo sapien
tggaaatgaaagctgcaccacactt

SEQ ID NO: 4119380 - DNA, 25 bp, Homo sapien
tatggtgtcgcatgaggtgtgagtt

SEQ ID NO: 4119381 - DNA, 25 bp, Homo sapien
caagatgggttctatggtgtcgcat

SEQ ID NO: 4119382 - DNA, 25 bp, Homo sapien
tattcaacaagatgggttctatggt

SEQ ID NO: 4119383 - DNA, 25 bp, Homo sapien
agctttgtacgacccattcctagga

SEQ ID NO: 4119384 - DNA, 25 bp, Homo sapien
tgttgaactgctaccccaagtggtt

SEQ ID NO: 4119385 - DNA, 25 bp, Homo sapien
caaagaggtgtctcattagggaggc

SEQ ID NO: 4119386 - DNA, 25 bp, Homo sapien
caatccttgagtgcttggccatgga

SEQ ID NO: 4119387 - DNA, 25 bp, Homo sapien
tggaattaaccgtcagtatggctgt

SEQ ID NO: 4119388 - DNA, 25 bp, Homo sapien
caatgtaagagccaacgacgtggaa

SEQ ID NO: 4119389 - DNA, 25 bp, Homo sapien
ttcttgctccttatagaaatataga

SEQ ID NO: 4119390 - DNA, 25 bp, Homo sapien
gagtatatgggtttgaatgtaagcc

SEQ ID NO: 4119391 - DNA, 25 bp, Homo sapien
ccaaactaccatcaagtgagaggtc

SEQ ID NO: 4119392 - DNA, 25 bp, Homo sapien
gtggaaagcaaccagtacaaggtaa

SEQ ID NO: 4119393 - DNA, 25 bp, Homo sapien
tcagtgaagcagtggctacaaactt

SEQ ID NO: 4119394 - DNA, 25 bp, Homo sapien
gaatcaggcatctcattagcagcag

SEQ ID NO: 4119395 - DNA, 25 bp, Homo sapien
cacgtatatgggtgtaagaatcaca

SEQ ID NO: 4119396 - DNA, 25 bp, Homo sapien
tgagagtaaacaaggtaaacagagg

SEQ ID NO: 4119397 - DNA, 25 bp, Homo sapien
ggctctcagaaattaaactagttat

SEQ ID NO: 4119398 - DNA, 25 bp, Homo sapien
catttgaggaaagtctaatgagagt

SEQ ID NO: 4119399 - DNA, 25 bp, Homo sapien
tctgtaataacacttggcttccttc

SEQ ID NO: 4119400 - DNA, 25 bp, Homo sapien
cagaagtggatctaaaaataagggc

SEQ ID NO: 4119401 - DNA, 25 bp, Homo sapien
tgctgagggctatccaatggaagga

SEQ ID NO: 4119402 - DNA, 25 bp, Homo sapien
gaggtagctgatctaccctgcccaa

SEQ ID NO: 4119403 - DNA, 25 bp, Homo sapien
caaggtagcctacgatagccaggta

SEQ ID NO: 4119404 - DNA, 25 bp, Homo sapien
tcctgactgggactactggctttgc

SEQ ID NO: 4119405 - DNA, 25 bp, Homo sapien
tgaagacagggtagctccagagagc

SEQ ID NO: 4119406 - DNA, 25 bp, Homo sapien
gcactgagaagttcacctgggagaa

SEQ ID NO: 4119407 - DNA, 25 bp, Homo sapien
gcacatcgctgctcttctccttgca

SEQ ID NO: 4119408 - DNA, 25 bp, Homo sapien
ctgcacatcgctgctcttctccttg

SEQ ID NO: 4119409 - DNA, 25 bp, Homo sapien
tcttctccttgcacattcccgattc

SEQ ID NO: 4119410 - DNA, 25 bp, Homo sapien
ttctccttgcacattcccgattctt

SEQ ID NO: 4119411 - DNA, 25 bp, Homo sapien
tcgaacctgtgatggaagagagaaa

SEQ ID NO: 4119412 - DNA, 25 bp, Homo sapien
cactctcattcgaacctgtgatgga

SEQ ID NO: 4119413 - DNA, 25 bp, Homo sapien
catcctcatctgtgtgcacctcact

SEQ ID NO: 4119414 - DNA, 25 bp, Homo sapien
acctcactctcattcgaacctgtga

SEQ ID NO: 4119415 - DNA, 25 bp, Homo sapien
cgtgttgctctaccagtgaaccagg

SEQ ID NO: 4119416 - DNA, 25 bp, Homo sapien
tctgatgcacgatgaaagtggagct

SEQ ID NO: 4119417 - DNA, 25 bp, Homo sapien
gaaggtcttgccaccctatgggcac

SEQ ID NO: 4119418 - DNA, 25 bp, Homo sapien
gaaggcctttccatactgggtgcag

SEQ ID NO: 4119419 - DNA, 25 bp, Homo sapien
gactgtcatccataaagaggccaag

SEQ ID NO: 4119420 - DNA, 25 bp, Homo sapien
tcaaggctccctattctggaaaaag

SEQ ID NO: 4119421 - DNA, 25 bp, Homo sapien
aaaaagatgccggaagggactgtca

SEQ ID NO: 4119422 - DNA, 25 bp, Homo sapien
ccagggccttcaagcatatcagtaa

SEQ ID NO: 4119423 - DNA, 25 bp, Homo sapien
ccgagattcctagagcggtcggcga

SEQ ID NO: 4119424 - DNA, 25 bp, Homo sapien
cacccctaaacacattgcagatttt

SEQ ID NO: 4119425 - DNA, 25 bp, Homo sapien
tagatagtagattgtcctcccaccc

SEQ ID NO: 4119426 - DNA, 25 bp, Homo sapien
taaggaggcgtcgaggtcaaaagac

SEQ ID NO: 4119427 - DNA, 25 bp, Homo sapien
gatccacggactctccgcggagcgg

SEQ ID NO: 4119428 - DNA, 25 bp, Homo sapien
cagccttaacttctgaaaccggaag

SEQ ID NO: 4119429 - DNA, 25 bp, Homo sapien
gactctccgcggagcggcgcaggcg

SEQ ID NO: 4119430 - DNA, 25 bp, Homo sapien
caccagccttaacttctgaaaccgg

SEQ ID NO: 4119431 - DNA, 25 bp, Homo sapien
catccttccaatcatggatcatctg

SEQ ID NO: 4119432 - DNA, 25 bp, Homo sapien
cttccaatcatggatcatctgagct

SEQ ID NO: 4119433 - DNA, 25 bp, Homo sapien
ccacatccttccaatcatggatcat

SEQ ID NO: 4119434 - DNA, 25 bp, Homo sapien
ccttccaatcatggatcatctgagc

SEQ ID NO: 4119435 - DNA, 25 bp, Homo sapien
tctcttcgctttgattggaaaacac

SEQ ID NO: 4119436 - DNA, 25 bp, Homo sapien
cagatcgtctcttcgctttgattgg

SEQ ID NO: 4119437 - DNA, 25 bp, Homo sapien
atcgtctcttcgctttgattggaaa

SEQ ID NO: 4119438 - DNA, 25 bp, Homo sapien
ccacagatcgtctcttcgctttgat

SEQ ID NO: 4119439 - DNA, 25 bp, Homo sapien
ctggacaagtctctcttctaatgtc

SEQ ID NO: 4119440 - DNA, 25 bp, Homo sapien
ggacaagtctctcttctaatgtctc

SEQ ID NO: 4119441 - DNA, 25 bp, Homo sapien
ctcttcagctccttgcatattcaac

SEQ ID NO: 4119442 - DNA, 25 bp, Homo sapien
cttcagctccttgcatattcaacat

SEQ ID NO: 4119443 - DNA, 25 bp, Homo sapien
catgattcagcaatctccctaggag

SEQ ID NO: 4119444 - DNA, 25 bp, Homo sapien
ggaacctctttactactatccctga

SEQ ID NO: 4119445 - DNA, 25 bp, Homo sapien
ccctaggagagttttccttcatgcc

SEQ ID NO: 4119446 - DNA, 25 bp, Homo sapien
ggtattcatcctcttggaacctctt

SEQ ID NO: 4119447 - DNA, 25 bp, Homo sapien
ggcttgaggtcaaaagcaagctttt

SEQ ID NO: 4119448 - DNA, 25 bp, Homo sapien
aacaaggcttgaggtcaaaagcaag

SEQ ID NO: 4119449 - DNA, 25 bp, Homo sapien
caaggcttgaggtcaaaagcaagct

SEQ ID NO: 4119450 - DNA, 25 bp, Homo sapien
taacaaggcttgaggtcaaaagcaa

SEQ ID NO: 4119451 - DNA, 25 bp, Homo sapien
caaggaatgaactacgactaaaggc

SEQ ID NO: 4119452 - DNA, 25 bp, Homo sapien
agagagttggacatttactttggtc

SEQ ID NO: 4119453 - DNA, 25 bp, Homo sapien
ttttctgtgtgcagagagttggaca

SEQ ID NO: 4119454 - DNA, 25 bp, Homo sapien
tattacttgtttcccactgatgcag

SEQ ID NO: 4119455 - DNA, 25 bp, Homo sapien
gagtgttttcgaaaagaagagccac

SEQ ID NO: 4119456 - DNA, 25 bp, Homo sapien
gcatacttgcggaaggttttctcac

SEQ ID NO: 4119457 - DNA, 25 bp, Homo sapien
tgctgagtaagaaatgatcgacatc

SEQ ID NO: 4119458 - DNA, 25 bp, Homo sapien
gggtgctctgagtaaacgctttgcc

SEQ ID NO: 4119459 - DNA, 25 bp, Homo sapien
catggtagcatggtcagggctgcct

SEQ ID NO: 4119460 - DNA, 25 bp, Homo sapien
gcagatctatagaggtcagcccagt

SEQ ID NO: 4119461 - DNA, 25 bp, Homo sapien
gagccccaatgtccaaccaagtgaa

SEQ ID NO: 4119462 - DNA, 25 bp, Homo sapien
tctgaacaggtatgactgcctcccc

SEQ ID NO: 4119463 - DNA, 25 bp, Homo sapien
cctctcgcaccttgcaacactcagg

SEQ ID NO: 4119464 - DNA, 25 bp, Homo sapien
tgccctgcggaaaggagtaagtccc

SEQ ID NO: 4119465 - DNA, 25 bp, Homo sapien
tcgcaccttgcaacactcaggtccc

SEQ ID NO: 4119466 - DNA, 25 bp, Homo sapien
tgctgccctgcggaaaggagtaagt

SEQ ID NO: 4119467 - DNA, 25 bp, Homo sapien
cacaactttgggaaacggcaaggca

SEQ ID NO: 4119468 - DNA, 25 bp, Homo sapien
tcagaaaactaaagtgcccagaagt

SEQ ID NO: 4119469 - DNA, 25 bp, Homo sapien
gcaagtttgccctaggcctcgggcc

SEQ ID NO: 4119470 - DNA, 25 bp, Homo sapien
tatgtataaatcgaacccaggtcct

SEQ ID NO: 4119471 - DNA, 25 bp, Homo sapien
gagacaggttgttaggagcacaagc

SEQ ID NO: 4119472 - DNA, 25 bp, Homo sapien
caagagacaggttgttaggagcaca

SEQ ID NO: 4119473 - DNA, 25 bp, Homo sapien
aagagacaggttgttaggagcacaa

SEQ ID NO: 4119474 - DNA, 25 bp, Homo sapien
gacaggttgttaggagcacaagcaa

SEQ ID NO: 4119475 - DNA, 25 bp, Homo sapien
gccatcacttctgatggtagtctca

SEQ ID NO: 4119476 - DNA, 25 bp, Homo sapien
tctgatggtagtctcacaaccacca

SEQ ID NO: 4119477 - DNA, 25 bp, Homo sapien
ggtctgccatcacttctgatggtag

SEQ ID NO: 4119478 - DNA, 25 bp, Homo sapien
tcacttctgatggtagtctcacaac

SEQ ID NO: 4119479 - DNA, 25 bp, Homo sapien
taatggaccttcttctaggtatctc

SEQ ID NO: 4119480 - DNA, 25 bp, Homo sapien
tcttctaggtatctcttgatgcata

SEQ ID NO: 4119481 - DNA, 25 bp, Homo sapien
attaaactaatccaaattcttcagg

SEQ ID NO: 4119482 - DNA, 25 bp, Homo sapien
cataaatacgtacataagtgtacat

SEQ ID NO: 4119483 - DNA, 25 bp, Homo sapien
tctcctaggaaaggttactgtgtgt

SEQ ID NO: 4119484 - DNA, 25 bp, Homo sapien
tatcattagagtaatacagttctcc

SEQ ID NO: 4119485 - DNA, 25 bp, Homo sapien
taacaccaaattcatacttacaagt

SEQ ID NO: 4119486 - DNA, 25 bp, Homo sapien
tgttcagcctgcattctcaacttct

SEQ ID NO: 4119487 - DNA, 25 bp, Homo sapien
tgagtgatatttggctggaattcat

SEQ ID NO: 4119488 - DNA, 25 bp, Homo sapien
tctgagtgatatttggctggaattc

SEQ ID NO: 4119489 - DNA, 25 bp, Homo sapien
ctgagtgatatttggctggaattca

SEQ ID NO: 4119490 - DNA, 25 bp, Homo sapien
taagatttgactgtttacggaaaca

SEQ ID NO: 4119491 - DNA, 25 bp, Homo sapien
tctcagatgctgaacaagaattgct

SEQ ID NO: 4119492 - DNA, 25 bp, Homo sapien
cattcactacactttgaaggtttct

SEQ ID NO: 4119493 - DNA, 25 bp, Homo sapien
tcttctgcatgttaactctcccatg

SEQ ID NO: 4119494 - DNA, 25 bp, Homo sapien
tgacgagtaaggcatatgctctgac

SEQ ID NO: 4119495 - DNA, 25 bp, Homo sapien
tgagacatgcactctgattaaaggc

SEQ ID NO: 4119496 - DNA, 25 bp, Homo sapien
tgctgcatgagacatgcactctgat

SEQ ID NO: 4119497 - DNA, 25 bp, Homo sapien
gcatgagacatgcactctgattaaa

SEQ ID NO: 4119498 - DNA, 25 bp, Homo sapien
tcaacaagggaagagttctgagtga

SEQ ID NO: 4119499 - DNA, 25 bp, Homo sapien
aggtgtgcttgtttgcggaaagttt

SEQ ID NO: 4119500 - DNA, 25 bp, Homo sapien
ctaaggtgtgcttgtttgcggaaag

SEQ ID NO: 4119501 - DNA, 25 bp, Homo sapien
aaggtgtgcttgtttgcggaaagtt

SEQ ID NO: 4119502 - DNA, 25 bp, Homo sapien
taaggtgtgcttgtttgcggaaagt

SEQ ID NO: 4119503 - DNA, 25 bp, Homo sapien
ccacatccaacacactcataaggtt

SEQ ID NO: 4119504 - DNA, 25 bp, Homo sapien
ttactctccagcatgaagcctctga

SEQ ID NO: 4119505 - DNA, 25 bp, Homo sapien
tgaactgtgcctaaaggatttccca

SEQ ID NO: 4119506 - DNA, 25 bp, Homo sapien
ctctgatgtcgaagaagtgctgaac

SEQ ID NO: 4119507 - DNA, 25 bp, Homo sapien
taaggttacacccactgagcagcag

SEQ ID NO: 4119508 - DNA, 25 bp, Homo sapien
tagttaaaatccgaccagatgtggt

SEQ ID NO: 4119509 - DNA, 25 bp, Homo sapien
tcagttaatgtcagggaggctttcc

SEQ ID NO: 4119510 - DNA, 25 bp, Homo sapien
cacagaagtcccacaacatgaggtt

SEQ ID NO: 4119511 - DNA, 25 bp, Homo sapien
tccatattatagagggtaatctgct

SEQ ID NO: 4119512 - DNA, 25 bp, Homo sapien
ttttaaggaattggttacatgcttg

SEQ ID NO: 4119513 - DNA, 25 bp, Homo sapien
tgcagctcaagtcccaaggcagtct

SEQ ID NO: 4119514 - DNA, 25 bp, Homo sapien
ctttaactgattggctaaggcccat

SEQ ID NO: 4119515 - DNA, 25 bp, Homo sapien
tgttattgtaccaaactacactgtt

SEQ ID NO: 4119516 - DNA, 25 bp, Homo sapien
aacactgaaaggtgatgtgtgtgga

SEQ ID NO: 4119517 - DNA, 25 bp, Homo sapien
tatgtcttagtatctgggtgtggga

SEQ ID NO: 4119518 - DNA, 25 bp, Homo sapien
aaataggctctctctaaattaatca

SEQ ID NO: 4119519 - DNA, 25 bp, Homo sapien
attttagaactctcatacaatcctg

SEQ ID NO: 4119520 - DNA, 25 bp, Homo sapien
taacataatcattacaacatatatt

SEQ ID NO: 4119521 - DNA, 25 bp, Homo sapien
cataatcattacaacatatattaag

SEQ ID NO: 4119522 - DNA, 25 bp, Homo sapien
gacacagttgacaaatgtggctatt

SEQ ID NO: 4119523 - DNA, 25 bp, Homo sapien
tcctgctctacttcatattcatctt

SEQ ID NO: 4119524 - DNA, 25 bp, Homo sapien
cttaaagtgtatttcaaggctataa

SEQ ID NO: 4119525 - DNA, 25 bp, Homo sapien
ctcctagattggctttgctagaaca

SEQ ID NO: 4119526 - DNA, 25 bp, Homo sapien
tattaactttatacagacaaatgcc

SEQ ID NO: 4119527 - DNA, 25 bp, Homo sapien
ctgagaaagtaaccggtttcaattg

SEQ ID NO: 4119528 - DNA, 25 bp, Homo sapien
tacttggagtgcagagataaaacct

SEQ ID NO: 4119529 - DNA, 25 bp, Homo sapien
gagactcagctctggcaagttaaga

SEQ ID NO: 4119530 - DNA, 25 bp, Homo sapien
acttttaggcataaggaaggcagcc

SEQ ID NO: 4119531 - DNA, 25 bp, Homo sapien
cctgctaagggtggccatgagactc

SEQ ID NO: 4119532 - DNA, 25 bp, Homo sapien
caatacccctctgacttaaaatgcc

SEQ ID NO: 4119533 - DNA, 25 bp, Homo sapien
atcaatacccctctgacttaaaatg

SEQ ID NO: 4119534 - DNA, 25 bp, Homo sapien
attcatcaatacccctctgacttaa

SEQ ID NO: 4119535 - DNA, 25 bp, Homo sapien
tcatcaatacccctctgacttaaaa

SEQ ID NO: 4119536 - DNA, 25 bp, Homo sapien
ttgcttgaggtcctggtgatgaccc

SEQ ID NO: 4119537 - DNA, 25 bp, Homo sapien
cagttgacagcttgaaggttacagc

SEQ ID NO: 4119538 - DNA, 25 bp, Homo sapien
tatcttaagagaacttcgggaatcc

SEQ ID NO: 4119539 - DNA, 25 bp, Homo sapien
gatgaccctgtatgcacagttgaca

SEQ ID NO: 4119540 - DNA, 25 bp, Homo sapien
caggctaactctctcattaggagct

SEQ ID NO: 4119541 - DNA, 25 bp, Homo sapien
agcctctcaaaaaccactatgcctg

SEQ ID NO: 4119542 - DNA, 25 bp, Homo sapien
gcctgggccatttaggactttcata

SEQ ID NO: 4119543 - DNA, 25 bp, Homo sapien
tttagcctctcaaagcctctcaaaa

SEQ ID NO: 4119544 - DNA, 25 bp, Homo sapien
gcgtcgtcccgtattccagataagg

SEQ ID NO: 4119545 - DNA, 25 bp, Homo sapien
tgagttagagttacagcgtcgtccc

SEQ ID NO: 4119546 - DNA, 25 bp, Homo sapien
ggacacaggccactcgatcaaatga

SEQ ID NO: 4119547 - DNA, 25 bp, Homo sapien
caaaagctgtgagttcgcagggtga

SEQ ID NO: 4119548 - DNA, 25 bp, Homo sapien
tgagcaagcggaaccaggtatcgta

SEQ ID NO: 4119549 - DNA, 25 bp, Homo sapien
ccagagctaccatgagcaagcggaa

SEQ ID NO: 4119550 - DNA, 25 bp, Homo sapien
aggtatcgtacgtgcggccagccga

SEQ ID NO: 4119551 - DNA, 25 bp, Homo sapien
tctggcccgcttcaaggaacgggtc

SEQ ID NO: 4119552 - DNA, 25 bp, Homo sapien
actgaattccgcccgctcaagatgg

SEQ ID NO: 4119553 - DNA, 25 bp, Homo sapien
gaaaacaatgcagccggtgcctcca

SEQ ID NO: 4119554 - DNA, 25 bp, Homo sapien
tcacccctcgatcccgaaaacaatg

SEQ ID NO: 4119555 - DNA, 25 bp, Homo sapien
cgactgcaccgcgcgcgactgaatt

SEQ ID NO: 4119556 - DNA, 25 bp, Homo sapien
aagttgcaaagaccactgcacgggc

SEQ ID NO: 4119557 - DNA, 25 bp, Homo sapien
ctagagatagccttcatggggccgg

SEQ ID NO: 4119558 - DNA, 25 bp, Homo sapien
caactcatggtgtcaatgatgtcac

SEQ ID NO: 4119559 - DNA, 25 bp, Homo sapien
tttcacagtcagcaactcatggtgt

SEQ ID NO: 4119560 - DNA, 25 bp, Homo sapien
tgcagtctagataaatactcatcag

SEQ ID NO: 4119561 - DNA, 25 bp, Homo sapien
ttggatgctttactctgcagtctag

SEQ ID NO: 4119562 - DNA, 25 bp, Homo sapien
ctgcagtctagataaatactcatca

SEQ ID NO: 4119563 - DNA, 25 bp, Homo sapien
cattggatgctttactctgcagtct

SEQ ID NO: 4119564 - DNA, 25 bp, Homo sapien
tagactgaccatttgtcacgctgcg

SEQ ID NO: 4119565 - DNA, 25 bp, Homo sapien
tgaccatttgtcacgctgcgtaact

SEQ ID NO: 4119566 - DNA, 25 bp, Homo sapien
cttggttggttagactgaccatttg

SEQ ID NO: 4119567 - DNA, 25 bp, Homo sapien
tggttagactgaccatttgtcacgc

SEQ ID NO: 4119568 - DNA, 25 bp, Homo sapien
gacagcacagataagcataagttct

SEQ ID NO: 4119569 - DNA, 25 bp, Homo sapien
ggacgaattcgcacaaaaactttga

SEQ ID NO: 4119570 - DNA, 25 bp, Homo sapien
cagatctttctgcaggaggacgaat

SEQ ID NO: 4119571 - DNA, 25 bp, Homo sapien
catgatcaaacgtgaaggtcttggg

SEQ ID NO: 4119572 - DNA, 25 bp, Homo sapien
attataaccgctcatgcaagactcc

SEQ ID NO: 4119573 - DNA, 25 bp, Homo sapien
acaatgcttttagccacagttgcga

SEQ ID NO: 4119574 - DNA, 25 bp, Homo sapien
ttagccacagttgcgaatacagatt

SEQ ID NO: 4119575 - DNA, 25 bp, Homo sapien
catgcaagactccacaatgctttta

SEQ ID NO: 4119576 - DNA, 25 bp, Homo sapien
ccatcatagtaaatgtcttccctga

SEQ ID NO: 4119577 - DNA, 25 bp, Homo sapien
tcatagtaaatgtcttccctgagcc

SEQ ID NO: 4119578 - DNA, 25 bp, Homo sapien
tagtaaatgtcttccctgagccagt

SEQ ID NO: 4119579 - DNA, 25 bp, Homo sapien
catagtaaatgtcttccctgagcca

SEQ ID NO: 4119580 - DNA, 25 bp, Homo sapien
ccttgtattcaagtaaaccaacagt

SEQ ID NO: 4119581 - DNA, 25 bp, Homo sapien
tctgcctgagaatcagaaggtccac

SEQ ID NO: 4119582 - DNA, 25 bp, Homo sapien
cataatttctagaggtgtatttgct

SEQ ID NO: 4119583 - DNA, 25 bp, Homo sapien
gagccaggacactgccttgtattca

SEQ ID NO: 4119584 - DNA, 25 bp, Homo sapien
tcaaaacttcgtgggattactcctc

SEQ ID NO: 4119585 - DNA, 25 bp, Homo sapien
tttctttttcacgatcaattaagga

SEQ ID NO: 4119586 - DNA, 25 bp, Homo sapien
tttcacgatcaattaaggaaaacaa

SEQ ID NO: 4119587 - DNA, 25 bp, Homo sapien
acttcgtgggattactcctctcagg

SEQ ID NO: 4119588 - DNA, 25 bp, Homo sapien
ccttaagtacagtccagccgatgca

SEQ ID NO: 4119589 - DNA, 25 bp, Homo sapien
cagtagatcatatatctgctcgttg

SEQ ID NO: 4119590 - DNA, 25 bp, Homo sapien
cttcagcagctgaggttaccacctg

SEQ ID NO: 4119591 - DNA, 25 bp, Homo sapien
cttcttgatatgctcccttaagtac

SEQ ID NO: 4119592 - DNA, 25 bp, Homo sapien
ctaaatccaccaggttgagtaggga

SEQ ID NO: 4119593 - DNA, 25 bp, Homo sapien
cattgatgttgatgccacacgtcta

SEQ ID NO: 4119594 - DNA, 25 bp, Homo sapien
taattgtaaagacggcatgagacct

SEQ ID NO: 4119595 - DNA, 25 bp, Homo sapien
tagggaggtccgtatattcacaatc

SEQ ID NO: 4119596 - DNA, 25 bp, Homo sapien
tggttactctttggtattttgaatg

SEQ ID NO: 4119597 - DNA, 25 bp, Homo sapien
ggttactctttggtattttgaatga

SEQ ID NO: 4119598 - DNA, 25 bp, Homo sapien
ttgaatgaaaatatatctagcagag

SEQ ID NO: 4119599 - DNA, 25 bp, Homo sapien
tgaaaatatatctagcagaggaaaa

SEQ ID NO: 4119600 - DNA, 25 bp, Homo sapien
cccacgtcgacaagtgctgtaatca

SEQ ID NO: 4119601 - DNA, 25 bp, Homo sapien
ctgtaatcacttggcccaggcagct

SEQ ID NO: 4119602 - DNA, 25 bp, Homo sapien
caatgatcgatttatgttacctgct

SEQ ID NO: 4119603 - DNA, 25 bp, Homo sapien
agtctctgtagcaaacatgtctctg

SEQ ID NO: 4119604 - DNA, 25 bp, Homo sapien
catttgcaattatggctgttttggc

SEQ ID NO: 4119605 - DNA, 25 bp, Homo sapien
taatcagcttggctctttgagcaaa

SEQ ID NO: 4119606 - DNA, 25 bp, Homo sapien
gcttggctctttgagcaaagttaag

SEQ ID NO: 4119607 - DNA, 25 bp, Homo sapien
cctggatccaggatgaacatttgca

SEQ ID NO: 4119608 - DNA, 25 bp, Homo sapien
ttttgtgtgttaagcagccatttcc

SEQ ID NO: 4119609 - DNA, 25 bp, Homo sapien
gttttgttcttttgtgtgttaagca

SEQ ID NO: 4119610 - DNA, 25 bp, Homo sapien
cattgagagtgactagtagaaggct

SEQ ID NO: 4119611 - DNA, 25 bp, Homo sapien
actagtagaaggctcttggttttgt

SEQ ID NO: 4119612 - DNA, 25 bp, Homo sapien
cccaatggagaagagccaatacctc

SEQ ID NO: 4119613 - DNA, 25 bp, Homo sapien
gatccgggtgtgttcacctaatact

SEQ ID NO: 4119614 - DNA, 25 bp, Homo sapien
tacctcagtgagtatcatttccctt

SEQ ID NO: 4119615 - DNA, 25 bp, Homo sapien
tctttccctgagaacgacagccttc

SEQ ID NO: 4119616 - DNA, 25 bp, Homo sapien
gtcctgaagcaagctccgccagttg

SEQ ID NO: 4119617 - DNA, 25 bp, Homo sapien
tcacatttccttgggtgtcttcatt

SEQ ID NO: 4119618 - DNA, 25 bp, Homo sapien
cctgaagcaagctccgccagttgtt

SEQ ID NO: 4119619 - DNA, 25 bp, Homo sapien
agcaagctccgccagttgttctttg

SEQ ID NO: 4119620 - DNA, 25 bp, Homo sapien
gagatacctgcagaaaaatttgggt

SEQ ID NO: 4119621 - DNA, 25 bp, Homo sapien
tctcactgcctatggtatctgtatc

SEQ ID NO: 4119622 - DNA, 25 bp, Homo sapien
tacatatgctacgtagaagtagatc

SEQ ID NO: 4119623 - DNA, 25 bp, Homo sapien
tgttgtgtctatcaccaagggctct

SEQ ID NO: 4119624 - DNA, 25 bp, Homo sapien
tactccatatagttagtcttctttt

SEQ ID NO: 4119625 - DNA, 25 bp, Homo sapien
taaagaataacattgcttcctggaa

SEQ ID NO: 4119626 - DNA, 25 bp, Homo sapien
tcttaaagaataacattgcttcctg

SEQ ID NO: 4119627 - DNA, 25 bp, Homo sapien
tcctgttcagatttcttaaagaata

SEQ ID NO: 4119628 - DNA, 25 bp, Homo sapien
cgggattccttgtggagcttttcca

SEQ ID NO: 4119629 - DNA, 25 bp, Homo sapien
ttaattctgagagcaaacgatcctg

SEQ ID NO: 4119630 - DNA, 25 bp, Homo sapien
tcctttttgagggtgaggtcttcta

SEQ ID NO: 4119631 - DNA, 25 bp, Homo sapien
caagcgtattatttgatcctctcgg

SEQ ID NO: 4119632 - DNA, 25 bp, Homo sapien
ttctcctccctgagggaatgatttt

SEQ ID NO: 4119633 - DNA, 25 bp, Homo sapien
ccatagcatactttgcaactctggg

SEQ ID NO: 4119634 - DNA, 25 bp, Homo sapien
ttcacaggctctaataatctcagtc

SEQ ID NO: 4119635 - DNA, 25 bp, Homo sapien
aatggtctgggcatccatttcttga

SEQ ID NO: 4119636 - DNA, 25 bp, Homo sapien
ttctgagctttaggtgaaaatcctt

SEQ ID NO: 4119637 - DNA, 25 bp, Homo sapien
tgtctgaatttgcaggagttgtgct

SEQ ID NO: 4119638 - DNA, 25 bp, Homo sapien
gctttaggtgaaaatccttgctgat

SEQ ID NO: 4119639 - DNA, 25 bp, Homo sapien
tctgaatttgcaggagttgtgcttt

SEQ ID NO: 4119640 - DNA, 25 bp, Homo sapien
acttcttgccgcttgcaggcttttg

SEQ ID NO: 4119641 - DNA, 25 bp, Homo sapien
attttattcagctgagaaacttctt

SEQ ID NO: 4119642 - DNA, 25 bp, Homo sapien
gattaaggttcgctttttgcaaaga

SEQ ID NO: 4119643 - DNA, 25 bp, Homo sapien
gaagctctgattccaattctagctg

SEQ ID NO: 4119644 - DNA, 25 bp, Homo sapien
gagaatgcacgcactggaaaccatc

SEQ ID NO: 4119645 - DNA, 25 bp, Homo sapien
tatgcatctatgctgcgggaacagg

SEQ ID NO: 4119646 - DNA, 25 bp, Homo sapien
cactaggagggagcttcagcttgac

SEQ ID NO: 4119647 - DNA, 25 bp, Homo sapien
gggatatccctcatggtgcttcaag

SEQ ID NO: 4119648 - DNA, 25 bp, Homo sapien
aaacagtggatacacaaacacctca

SEQ ID NO: 4119649 - DNA, 25 bp, Homo sapien
ggaatatattggcagtacacctaac

SEQ ID NO: 4119650 - DNA, 25 bp, Homo sapien
ccactatgcctagctgtattacttt

SEQ ID NO: 4119651 - DNA, 25 bp, Homo sapien
cagggaataggatatacaaatggac

SEQ ID NO: 4119652 - DNA, 25 bp, Homo sapien
aaagcttcccatttcagggcttaat

SEQ ID NO: 4119653 - DNA, 25 bp, Homo sapien
agtgtatagagagccaaagcttccc

SEQ ID NO: 4119654 - DNA, 25 bp, Homo sapien
catctcaggaggaactggctcattt

SEQ ID NO: 4119655 - DNA, 25 bp, Homo sapien
taattttggtactggtcgggaatga

SEQ ID NO: 4119656 - DNA, 25 bp, Homo sapien
tttgggtagaatgatgttccagttt

SEQ ID NO: 4119657 - DNA, 25 bp, Homo sapien
catttgggtagaatgatgttccagt

SEQ ID NO: 4119658 - DNA, 25 bp, Homo sapien
tgcatttgggtagaatgatgttcca

SEQ ID NO: 4119659 - DNA, 25 bp, Homo sapien
ctgcatttgggtagaatgatgttcc

SEQ ID NO: 4119660 - DNA, 25 bp, Homo sapien
cttttcaaggacattcaactgtgag

SEQ ID NO: 4119661 - DNA, 25 bp, Homo sapien
gtttggtccaatcaattctttctga

SEQ ID NO: 4119662 - DNA, 25 bp, Homo sapien
atttttagtttgagtctcttgaagc

SEQ ID NO: 4119663 - DNA, 25 bp, Homo sapien
gaagctgcttttcaaggacattcaa

SEQ ID NO: 4119664 - DNA, 25 bp, Homo sapien
caaagctcctgatagaataacttac

SEQ ID NO: 4119665 - DNA, 25 bp, Homo sapien
aaaagatattgagttacagtattcc

SEQ ID NO: 4119666 - DNA, 25 bp, Homo sapien
tattgagttacagtattccttcaag

SEQ ID NO: 4119667 - DNA, 25 bp, Homo sapien
tacagtattccttcaagtcacaaag

SEQ ID NO: 4119668 - DNA, 25 bp, Homo sapien
cctgattcgttttgaatgaactata

SEQ ID NO: 4119669 - DNA, 25 bp, Homo sapien
cagaatgaaggactactcgcaggtc

SEQ ID NO: 4119670 - DNA, 25 bp, Homo sapien
catgcatgtgtctttcggaaagttt

SEQ ID NO: 4119671 - DNA, 25 bp, Homo sapien
tactcgcaggtcatgtacctcactt

SEQ ID NO: 4119672 - DNA, 25 bp, Homo sapien
gtttcttgaaagttggtcaatctca

SEQ ID NO: 4119673 - DNA, 25 bp, Homo sapien
ttatttcttgtaagttgtcatagga

SEQ ID NO: 4119674 - DNA, 25 bp, Homo sapien
tgtaagttgtcataggaatcctgta

SEQ ID NO: 4119675 - DNA, 25 bp, Homo sapien
ttcagatcagatttcagagtttcat

SEQ ID NO: 4119676 - DNA, 25 bp, Homo sapien
ttgttattgcgttctttttctgcct

SEQ ID NO: 4119677 - DNA, 25 bp, Homo sapien
ctttttctgcctcaagaagctccat

SEQ ID NO: 4119678 - DNA, 25 bp, Homo sapien
ctgcctcaagaagctccatcaaatt

SEQ ID NO: 4119679 - DNA, 25 bp, Homo sapien
tttctgcctcaagaagctccatcaa

SEQ ID NO: 4119680 - DNA, 25 bp, Homo sapien
tgtaagctctacgttcaccactgta

SEQ ID NO: 4119681 - DNA, 25 bp, Homo sapien
agaagttaaaatccacgaggacagg

SEQ ID NO: 4119682 - DNA, 25 bp, Homo sapien
tggaattcaccagatcagtgcctgg

SEQ ID NO: 4119683 - DNA, 25 bp, Homo sapien
tgtctctcaactggatgtaagctct

SEQ ID NO: 4119684 - DNA, 25 bp, Homo sapien
tcctgacgtacagcctcaagaactt

SEQ ID NO: 4119685 - DNA, 25 bp, Homo sapien
tgctcacacttggccgtctctttct

SEQ ID NO: 4119686 - DNA, 25 bp, Homo sapien
cacacttggccgtctctttctgttt

SEQ ID NO: 4119687 - DNA, 25 bp, Homo sapien
tctgtttctcctgacgtacagcctc

SEQ ID NO: 4119688 - DNA, 25 bp, Homo sapien
cagtagcaagcaagctctcttctag

SEQ ID NO: 4119689 - DNA, 25 bp, Homo sapien
tccagggaactgatcactttttcag

SEQ ID NO: 4119690 - DNA, 25 bp, Homo sapien
ggaactgatcactttttcagtagca

SEQ ID NO: 4119691 - DNA, 25 bp, Homo sapien
ctttttcagtagcaagcaagctctc

SEQ ID NO: 4119692 - DNA, 25 bp, Homo sapien
cgatgttcttagctcctggatctgg

SEQ ID NO: 4119693 - DNA, 25 bp, Homo sapien
ttctcacagaccgatgttcttagct

SEQ ID NO: 4119694 - DNA, 25 bp, Homo sapien
cagaccgatgttcttagctcctgga

SEQ ID NO: 4119695 - DNA, 25 bp, Homo sapien
tctgttttctcacagaccgatgttc

SEQ ID NO: 4119696 - DNA, 25 bp, Homo sapien
agaaagtattctcagcctaagggtt

SEQ ID NO: 4119697 - DNA, 25 bp, Homo sapien
cctaagggtttctttcagatccaga

SEQ ID NO: 4119698 - DNA, 25 bp, Homo sapien
tgcttcttgatcaacactctgctct

SEQ ID NO: 4119699 - DNA, 25 bp, Homo sapien
ctctgtcaaccaaagcagagttgta

SEQ ID NO: 4119700 - DNA, 25 bp, Homo sapien
tccaggctagaaagcttggtgccca

SEQ ID NO: 4119701 - DNA, 25 bp, Homo sapien
aagacacttcactacacaggctcag

SEQ ID NO: 4119702 - DNA, 25 bp, Homo sapien
cagcaccttgtattggccaccctga

SEQ ID NO: 4119703 - DNA, 25 bp, Homo sapien
caaatcctttctgcgatgtagcaag

SEQ ID NO: 4119704 - DNA, 25 bp, Homo sapien
agcagccccgagtgtttttttgagg

SEQ ID NO: 4119705 - DNA, 25 bp, Homo sapien
tgcagcagccccgagtgtttttttg

SEQ ID NO: 4119706 - DNA, 25 bp, Homo sapien
gcagccccgagtgtttttttgaggc

SEQ ID NO: 4119707 - DNA, 25 bp, Homo sapien
gcagcagccccgagtgtttttttga

SEQ ID NO: 4119708 - DNA, 25 bp, Homo sapien
cattttgaagttatattcattcttc

SEQ ID NO: 4119709 - DNA, 25 bp, Homo sapien
acatgttctagttgcctcattttga

SEQ ID NO: 4119710 - DNA, 25 bp, Homo sapien
cattcttcttctgttctacttcctc

SEQ ID NO: 4119711 - DNA, 25 bp, Homo sapien
cagcagaatccatcacatgttctag

SEQ ID NO: 4119712 - DNA, 25 bp, Homo sapien
aggtgttccaaagaagtcttagagg

SEQ ID NO: 4119713 - DNA, 25 bp, Homo sapien
tagctttgttacaaggtgttccaaa

SEQ ID NO: 4119714 - DNA, 25 bp, Homo sapien
aagaagtcttagaggctcttccatc

SEQ ID NO: 4119715 - DNA, 25 bp, Homo sapien
catttagctttgttacaaggtgttc

SEQ ID NO: 4119716 - DNA, 25 bp, Homo sapien
ttctctattaactgctgactttcca

SEQ ID NO: 4119717 - DNA, 25 bp, Homo sapien
tgactttccaggcgtaggttttcca

SEQ ID NO: 4119718 - DNA, 25 bp, Homo sapien
tctctattaactgctgactttccag

SEQ ID NO: 4119719 - DNA, 25 bp, Homo sapien
gagaatcttttcttgacatccctct

SEQ ID NO: 4119720 - DNA, 25 bp, Homo sapien
gaatcttttcttgacatccctcttt

SEQ ID NO: 4119721 - DNA, 25 bp, Homo sapien
cgccttgatttacggctgcatccat

SEQ ID NO: 4119722 - DNA, 25 bp, Homo sapien
ccttgtgtcgccttgatttacggct

SEQ ID NO: 4119723 - DNA, 25 bp, Homo sapien
caatcttattcgcagagtcatggct

SEQ ID NO: 4119724 - DNA, 25 bp, Homo sapien
gtcatggctgtcctcaaaggttaaa

SEQ ID NO: 4119725 - DNA, 25 bp, Homo sapien
tctggctggctgaagtactaaccat

SEQ ID NO: 4119726 - DNA, 25 bp, Homo sapien
caaaatcgttgtagttcccaccatc

SEQ ID NO: 4119727 - DNA, 25 bp, Homo sapien
tgagaacttttttagggcctcctga

SEQ ID NO: 4119728 - DNA, 25 bp, Homo sapien
ggtatgcaagctatgacgggccatt

SEQ ID NO: 4119729 - DNA, 25 bp, Homo sapien
tgttgctgagtaactgtcctggtgc

SEQ ID NO: 4119730 - DNA, 25 bp, Homo sapien
gaaataaagctcacgggtcacagaa

SEQ ID NO: 4119731 - DNA, 25 bp, Homo sapien
agccacgacacccagtgaaaaacat

SEQ ID NO: 4119732 - DNA, 25 bp, Homo sapien
ccacgacacccagtgaaaaacatct

SEQ ID NO: 4119733 - DNA, 25 bp, Homo sapien
acgacacccagtgaaaaacatcttt

SEQ ID NO: 4119734 - DNA, 25 bp, Homo sapien
tttttacccatacacctgagtattg

SEQ ID NO: 4119735 - DNA, 25 bp, Homo sapien
cttgttcattcttcagctgttgatt

SEQ ID NO: 4119736 - DNA, 25 bp, Homo sapien
ttgcaagtctttctttgatactttc

SEQ ID NO: 4119737 - DNA, 25 bp, Homo sapien
attcttcagctgttgattatctgga

SEQ ID NO: 4119738 - DNA, 25 bp, Homo sapien
ctgttgattatctggatgattctga

SEQ ID NO: 4119739 - DNA, 25 bp, Homo sapien
tcagcatttcttcaactattttact

SEQ ID NO: 4119740 - DNA, 25 bp, Homo sapien
attttcagcatttcttcaactattt

SEQ ID NO: 4119741 - DNA, 25 bp, Homo sapien
tttcagcatttcttcaactatttta

SEQ ID NO: 4119742 - DNA, 25 bp, Homo sapien
tcattttcagcatttcttcaactat

SEQ ID NO: 4119743 - DNA, 25 bp, Homo sapien
tatgcaagagggtatatgatgtttc

SEQ ID NO: 4119744 - DNA, 25 bp, Homo sapien
gagggtatatgatgtttcaaaatcc

SEQ ID NO: 4119745 - DNA, 25 bp, Homo sapien
tctctatccctaataaggagtatct

SEQ ID NO: 4119746 - DNA, 25 bp, Homo sapien
gtttgaagatctctatccctaataa

SEQ ID NO: 4119747 - DNA, 25 bp, Homo sapien
gtcattctaaggcattccatctctt

SEQ ID NO: 4119748 - DNA, 25 bp, Homo sapien
ggttcgttcgacttcatcagtcatt

SEQ ID NO: 4119749 - DNA, 25 bp, Homo sapien
agtttgggttcgttcgacttcatca

SEQ ID NO: 4119750 - DNA, 25 bp, Homo sapien
tctttgttgtaaagggcactttgga

SEQ ID NO: 4119751 - DNA, 25 bp, Homo sapien
tgggatgttctctctctttcttcat

SEQ ID NO: 4119752 - DNA, 25 bp, Homo sapien
ctgggatgttctctctctttcttca

SEQ ID NO: 4119753 - DNA, 25 bp, Homo sapien
gggatgttctctctctttcttcata

SEQ ID NO: 4119754 - DNA, 25 bp, Homo sapien
ggatgttctctctctttcttcatac

SEQ ID NO: 4119755 - DNA, 25 bp, Homo sapien
ctgaatcttctgatgcaaattttgg

SEQ ID NO: 4119756 - DNA, 25 bp, Homo sapien
tcagcaagacactccacctgcttcc

SEQ ID NO: 4119757 - DNA, 25 bp, Homo sapien
acattttccttctttagtcgcacta

SEQ ID NO: 4119758 - DNA, 25 bp, Homo sapien
gtcgcactacgtactgaatcttctg

SEQ ID NO: 4119759 - DNA, 25 bp, Homo sapien
acattttcggcacgcaacttttctg

SEQ ID NO: 4119760 - DNA, 25 bp, Homo sapien
aaaatacattttcggcacgcaactt

SEQ ID NO: 4119761 - DNA, 25 bp, Homo sapien
atacattttcggcacgcaacttttc

SEQ ID NO: 4119762 - DNA, 25 bp, Homo sapien
taaaaatacattttcggcacgcaac

SEQ ID NO: 4119763 - DNA, 25 bp, Homo sapien
tgatgcctaggtagctgaccggaat

SEQ ID NO: 4119764 - DNA, 25 bp, Homo sapien
tagcagactgctgactgtcacaggg

SEQ ID NO: 4119765 - DNA, 25 bp, Homo sapien
tcagaaacttgaggtggttaccacc

SEQ ID NO: 4119766 - DNA, 25 bp, Homo sapien
gaagtaggccacttaatagcagact

SEQ ID NO: 4119767 - DNA, 25 bp, Homo sapien
tgcttttcagataacccagtaattc

SEQ ID NO: 4119768 - DNA, 25 bp, Homo sapien
aattcaagtatccatcagctgttgg

SEQ ID NO: 4119769 - DNA, 25 bp, Homo sapien
aaaaagttcccgtgtgcccagtcat

SEQ ID NO: 4119770 - DNA, 25 bp, Homo sapien
tactcctaggcatgtgctcaagaga

SEQ ID NO: 4119771 - DNA, 25 bp, Homo sapien
gccccatatggggacaagcgcatca

SEQ ID NO: 4119772 - DNA, 25 bp, Homo sapien
cacagaaaaccgaaaaaatgaggat

SEQ ID NO: 4119773 - DNA, 25 bp, Homo sapien
cggaccaagagatgcctcggcagag

SEQ ID NO: 4119774 - DNA, 25 bp, Homo sapien
gagtccatccacgtcgaccaggctt

SEQ ID NO: 4119775 - DNA, 25 bp, Homo sapien
tccggcaggccccttgggaatcgct

SEQ ID NO: 4119776 - DNA, 25 bp, Homo sapien
gggaatcgctctccggcgcctcgga

SEQ ID NO: 4119777 - DNA, 25 bp, Homo sapien
gtgacgcgacgctcctgtgacgcca

SEQ ID NO: 4119778 - DNA, 25 bp, Homo sapien
tcctgtgacgccacgctccggcagg

SEQ ID NO: 4119779 - DNA, 25 bp, Homo sapien
accgtgcctggcacccgctgcccgc

SEQ ID NO: 4119780 - DNA, 25 bp, Homo sapien
agggcagagcgcgcgccgcgattgg

SEQ ID NO: 4119781 - DNA, 25 bp, Homo sapien
agcgcgcgccgcgattggatggcag

SEQ ID NO: 4119782 - DNA, 25 bp, Homo sapien
cgcgccgcgattggatggcagcctc

SEQ ID NO: 4119783 - DNA, 25 bp, Homo sapien
agggtacgcggtcgcggacacggcg

SEQ ID NO: 4119784 - DNA, 25 bp, Homo sapien
tcagggtacgcggtcgcggacacgg

SEQ ID NO: 4119785 - DNA, 25 bp, Homo sapien
gcggtcgcggacacggcgccgcccg

SEQ ID NO: 4119786 - DNA, 25 bp, Homo sapien
tacgcggtcgcggacacggcgccgc

SEQ ID NO: 4119787 - DNA, 25 bp, Homo sapien
tggaggtgcggagggaattccgcgg

SEQ ID NO: 4119788 - DNA, 25 bp, Homo sapien
ctggaggtgcggagggaattccgcg

SEQ ID NO: 4119789 - DNA, 25 bp, Homo sapien
gacagttgaatacgccccaaaagcg

SEQ ID NO: 4119790 - DNA, 25 bp, Homo sapien
ttgaatacgccccaaaagcggcgcc

SEQ ID NO: 4119791 - DNA, 25 bp, Homo sapien
acagacagttgaatacgccccaaaa

SEQ ID NO: 4119792 - DNA, 25 bp, Homo sapien
gttgaatacgccccaaaagcggcgc

SEQ ID NO: 4119793 - DNA, 25 bp, Homo sapien
gcggaggcggcggccagggccccga

SEQ ID NO: 4119794 - DNA, 25 bp, Homo sapien
cttggcggaggcggcggccagggcc

SEQ ID NO: 4119795 - DNA, 25 bp, Homo sapien
cagcttggcggaggcggcggccagg

SEQ ID NO: 4119796 - DNA, 25 bp, Homo sapien
ctcgctgccgaaggccagcttggcg

SEQ ID NO: 4119797 - DNA, 25 bp, Homo sapien
tttggcgtgattagaggcgaaacac

SEQ ID NO: 4119798 - DNA, 25 bp, Homo sapien
tagaggcgaaacactctctgccacc

SEQ ID NO: 4119799 - DNA, 25 bp, Homo sapien
ggacagaccggcgagggtgcggcgg

SEQ ID NO: 4119800 - DNA, 25 bp, Homo sapien
tggacgagggtttggcgtgattaga

SEQ ID NO: 4119801 - DNA, 25 bp, Homo sapien
gagagcgaactagcccaaccggaga

SEQ ID NO: 4119802 - DNA, 25 bp, Homo sapien
gtggagagaaatgctcaggcacaag

SEQ ID NO: 4119803 - DNA, 25 bp, Homo sapien
cacaagggacttaaaatgagaggta

SEQ ID NO: 4119804 - DNA, 25 bp, Homo sapien
gaggtgtagttcttccccgagagcg

SEQ ID NO: 4119805 - DNA, 25 bp, Homo sapien
tagtgatcccagacatcccttggag

SEQ ID NO: 4119806 - DNA, 25 bp, Homo sapien
gctaaccttgggctgcagacgcaat

SEQ ID NO: 4119807 - DNA, 25 bp, Homo sapien
gagatacaccttagcagacgccagg

SEQ ID NO: 4119808 - DNA, 25 bp, Homo sapien
aatgaaacccctatagcaagcagag

SEQ ID NO: 4119809 - DNA, 25 bp, Homo sapien
ggtgctcgccatcacaataatgcct

SEQ ID NO: 4119810 - DNA, 25 bp, Homo sapien
tgcctaagacgcataaacccatgct

SEQ ID NO: 4119811 - DNA, 25 bp, Homo sapien
tgaggccccggctaaagaaggtcca

SEQ ID NO: 4119812 - DNA, 25 bp, Homo sapien
tgacagatgcaatggctgaagacat

SEQ ID NO: 4119813 - DNA, 25 bp, Homo sapien
agctgtgagggactcaacttcagca

SEQ ID NO: 4119814 - DNA, 25 bp, Homo sapien
ctgcgagacaaagatagctgtgagg

SEQ ID NO: 4119815 - DNA, 25 bp, Homo sapien
caaagatagctgtgagggactcaac

SEQ ID NO: 4119816 - DNA, 25 bp, Homo sapien
agacaaagatagctgtgagggactc

SEQ ID NO: 4119817 - DNA, 25 bp, Homo sapien
ccatacagcacatagcccaggaagg

SEQ ID NO: 4119818 - DNA, 25 bp, Homo sapien
agacctcctggcactctccatacag

SEQ ID NO: 4119819 - DNA, 25 bp, Homo sapien
cagagaataaggaacactcctcccc

SEQ ID NO: 4119820 - DNA, 25 bp, Homo sapien
gattagggtgagtccgcagagaata

SEQ ID NO: 4119821 - DNA, 25 bp, Homo sapien
tgcacaactggatcgccctaggata

SEQ ID NO: 4119822 - DNA, 25 bp, Homo sapien
ttccggtagaacactgctgcagctg

SEQ ID NO: 4119823 - DNA, 25 bp, Homo sapien
cagctggtccgtctagccaagtggt

SEQ ID NO: 4119824 - DNA, 25 bp, Homo sapien
tacagtcccacatgacatcccaagg

SEQ ID NO: 4119825 - DNA, 25 bp, Homo sapien
tggacaagacccttcgctctcctag

SEQ ID NO: 4119826 - DNA, 25 bp, Homo sapien
agcaatgaaggtgctacatgggcga

SEQ ID NO: 4119827 - DNA, 25 bp, Homo sapien
tgtcaattgtgctgaccacagtaag

SEQ ID NO: 4119828 - DNA, 25 bp, Homo sapien
ccgtggaatggttttagtaagctca

SEQ ID NO: 4119829 - DNA, 25 bp, Homo sapien
tgagctgagcccagtcagatcgggc

SEQ ID NO: 4119830 - DNA, 25 bp, Homo sapien
gagatcaacactagagcccctaaga

SEQ ID NO: 4119831 - DNA, 25 bp, Homo sapien
tcacagtatggaacaggccccttac

SEQ ID NO: 4119832 - DNA, 25 bp, Homo sapien
tgatagggttccacgtcaacaccaa

SEQ ID NO: 4119833 - DNA, 25 bp, Homo sapien
ctggaaccaacatggtctgtctcac

SEQ ID NO: 4119834 - DNA, 25 bp, Homo sapien
tatctgattcaccacacctccagac

SEQ ID NO: 4119835 - DNA, 25 bp, Homo sapien
tttggagtaataattatctgcccag

SEQ ID NO: 4119836 - DNA, 25 bp, Homo sapien
gagccaattccactggaaccaacat

SEQ ID NO: 4119837 - DNA, 25 bp, Homo sapien
agcaagggaacacggaagcagtaca

SEQ ID NO: 4119838 - DNA, 25 bp, Homo sapien
gggaccctattgaagaccagcaagg

SEQ ID NO: 4119839 - DNA, 25 bp, Homo sapien
tcaatctatgacaagttgagtggat

SEQ ID NO: 4119840 - DNA, 25 bp, Homo sapien
gaagcagtacagacaagacaggctc

SEQ ID NO: 4119841 - DNA, 25 bp, Homo sapien
tgaggggctaccctgtgagggacca

SEQ ID NO: 4119842 - DNA, 25 bp, Homo sapien
gaggggctaccctgtgagggaccat

SEQ ID NO: 4119843 - DNA, 25 bp, Homo sapien
taaactctggtgaggggctaccctg

SEQ ID NO: 4119844 - DNA, 25 bp, Homo sapien
tctggtgaggggctaccctgtgagg

SEQ ID NO: 4119845 - DNA, 25 bp, Homo sapien
ttaggtctaactgcataggggactg

SEQ ID NO: 4119846 - DNA, 25 bp, Homo sapien
gaaaagttggcatggtctacacttc

SEQ ID NO: 4119847 - DNA, 25 bp, Homo sapien
ttcacattaatccacagatgatgga

SEQ ID NO: 4119848 - DNA, 25 bp, Homo sapien
agaaaagttggcatggtctacactt

SEQ ID NO: 4119849 - DNA, 25 bp, Homo sapien
tacacttcacattaatccacagatg

SEQ ID NO: 4119850 - DNA, 25 bp, Homo sapien
atcagaggcagcccactcaagaccc

SEQ ID NO: 4119851 - DNA, 25 bp, Homo sapien
ggatcagaggcagcccactcaagac

SEQ ID NO: 4119852 - DNA, 25 bp, Homo sapien
ggtggccaactccaggcatattggg

SEQ ID NO: 4119853 - DNA, 25 bp, Homo sapien
ccactcaagaccctctgctctctgc

SEQ ID NO: 4119854 - DNA, 25 bp, Homo sapien
tgcagccactgtattgcactagcac

SEQ ID NO: 4119855 - DNA, 25 bp, Homo sapien
tgaactgcagccactgtattgcact

SEQ ID NO: 4119856 - DNA, 25 bp, Homo sapien
actgcagccactgtattgcactagc

SEQ ID NO: 4119857 - DNA, 25 bp, Homo sapien
ctgctgaactgcagccactgtattg

SEQ ID NO: 4119858 - DNA, 25 bp, Homo sapien
tatgattacaggctcaggagtggga

SEQ ID NO: 4119859 - DNA, 25 bp, Homo sapien
gagcaatgaccctggttactctgaa

SEQ ID NO: 4119860 - DNA, 25 bp, Homo sapien
catggcatttacgaaaagtcttggc

SEQ ID NO: 4119861 - DNA, 25 bp, Homo sapien
gtctcttccagaccaaaagcccagg

SEQ ID NO: 4119862 - DNA, 25 bp, Homo sapien
gtctaaaggcttgccgtcaacggtg

SEQ ID NO: 4119863 - DNA, 25 bp, Homo sapien
ttgaaggagacgcaggtctaaaggc

SEQ ID NO: 4119864 - DNA, 25 bp, Homo sapien
gagacgcaggtctaaaggcttgccg

SEQ ID NO: 4119865 - DNA, 25 bp, Homo sapien
ggcttgccgtcaacggtgatgttga

SEQ ID NO: 4119866 - DNA, 25 bp, Homo sapien
gagcacaaaagttttctgctggctt

SEQ ID NO: 4119867 - DNA, 25 bp, Homo sapien
gctcagagcacaaaagttttctgct

SEQ ID NO: 4119868 - DNA, 25 bp, Homo sapien
tcagagcacaaaagttttctgctgg

SEQ ID NO: 4119869 - DNA, 25 bp, Homo sapien
cagagcacaaaagttttctgctggc

SEQ ID NO: 4119870 - DNA, 25 bp, Homo sapien
agtcaaacttataagagctgtccac

SEQ ID NO: 4119871 - DNA, 25 bp, Homo sapien
acaagtcaaacttataagagctgtc

SEQ ID NO: 4119872 - DNA, 25 bp, Homo sapien
caaacttataagagctgtccacagt

SEQ ID NO: 4119873 - DNA, 25 bp, Homo sapien
gggtggagggtgctcccctgagcta

SEQ ID NO: 4119874 - DNA, 25 bp, Homo sapien
gggaagactctatctctgatgcctg

SEQ ID NO: 4119875 - DNA, 25 bp, Homo sapien
cagggaagactctatctctgatgcc

SEQ ID NO: 4119876 - DNA, 25 bp, Homo sapien
gaagactctatctctgatgcctggt

SEQ ID NO: 4119877 - DNA, 25 bp, Homo sapien
gccagggaagactctatctctgatg

SEQ ID NO: 4119878 - DNA, 25 bp, Homo sapien
taaatctgaaattatgcctaaatga

SEQ ID NO: 4119879 - DNA, 25 bp, Homo sapien
gagagcagtttagggccagctggct

SEQ ID NO: 4119880 - DNA, 25 bp, Homo sapien
aaattatgcctaaatgaaaagtttg

SEQ ID NO: 4119881 - DNA, 25 bp, Homo sapien
tgtggggctccatggagatttcacc

SEQ ID NO: 4119882 - DNA, 25 bp, Homo sapien
tttatcccacacatatcaccatctt

SEQ ID NO: 4119883 - DNA, 25 bp, Homo sapien
cttccaggtccctatttggatgtcc

SEQ ID NO: 4119884 - DNA, 25 bp, Homo sapien
caccatcttccaggtccctatttgg

SEQ ID NO: 4119885 - DNA, 25 bp, Homo sapien
gtccctatttggatgtcctgacctc

SEQ ID NO: 4119886 - DNA, 25 bp, Homo sapien
gccagagagccttctagcgactgca

SEQ ID NO: 4119887 - DNA, 25 bp, Homo sapien
tctagcgactgcaccagtgatactc

SEQ ID NO: 4119888 - DNA, 25 bp, Homo sapien
agccttctagcgactgcaccagtga

SEQ ID NO: 4119889 - DNA, 25 bp, Homo sapien
gagagccttctagcgactgcaccag

SEQ ID NO: 4119890 - DNA, 25 bp, Homo sapien
agctgtgaatagccacaacacgcca

SEQ ID NO: 4119891 - DNA, 25 bp, Homo sapien
gctgtgaatagccacaacacgccag

SEQ ID NO: 4119892 - DNA, 25 bp, Homo sapien
cagctgtgaatagccacaacacgcc

SEQ ID NO: 4119893 - DNA, 25 bp, Homo sapien
ggggatgcggccagtgatgtgtttg

SEQ ID NO: 4119894 - DNA, 25 bp, Homo sapien
cagcttcaagtcagacaccatcctg

SEQ ID NO: 4119895 - DNA, 25 bp, Homo sapien
gagccctgggattgctccccttcct

SEQ ID NO: 4119896 - DNA, 25 bp, Homo sapien
gagcgggcaaactgaggagggaaca

SEQ ID NO: 4119897 - DNA, 25 bp, Homo sapien
ccgtcaatcaacacaaaagctgaag

SEQ ID NO: 4119898 - DNA, 25 bp, Homo sapien
gattcaagaagtcaatgtggagaac

SEQ ID NO: 4119899 - DNA, 25 bp, Homo sapien
ctgattcaagaagtcaatgtggaga

SEQ ID NO: 4119900 - DNA, 25 bp, Homo sapien
agaagtcaatgtggagaacttgcag

SEQ ID NO: 4119901 - DNA, 25 bp, Homo sapien
aagtcaatgtggagaacttgcagct

SEQ ID NO: 4119902 - DNA, 25 bp, Homo sapien
tcgccggaacacaggactgctcgtt

SEQ ID NO: 4119903 - DNA, 25 bp, Homo sapien
aggtgaaacacctgtcctcgccgga

SEQ ID NO: 4119904 - DNA, 25 bp, Homo sapien
gctcgtttggaactcccatgtgtgg

SEQ ID NO: 4119905 - DNA, 25 bp, Homo sapien
ccagtttcagttggtggtaggattg

SEQ ID NO: 4119906 - DNA, 25 bp, Homo sapien
agcaccaccagggtgtgtttggcga

SEQ ID NO: 4119907 - DNA, 25 bp, Homo sapien
ggttgcctgccagttgtagtggtct

SEQ ID NO: 4119908 - DNA, 25 bp, Homo sapien
caccagggtgtgtttggcgatgcta

SEQ ID NO: 4119909 - DNA, 25 bp, Homo sapien
gtcctcgggtcgagcaccaccaggg

SEQ ID NO: 4119910 - DNA, 25 bp, Homo sapien
catgtaggaggtttggccacagcga

SEQ ID NO: 4119911 - DNA, 25 bp, Homo sapien
cacattaggagcattccgccagaag

SEQ ID NO: 4119912 - DNA, 25 bp, Homo sapien
gctgggatcaaactcactgtgctac

SEQ ID NO: 4119913 - DNA, 25 bp, Homo sapien
gaggttcacagaggtagcccaagag

SEQ ID NO: 4119914 - DNA, 25 bp, Homo sapien
ttcacgtttagttggtacttgccca

SEQ ID NO: 4119915 - DNA, 25 bp, Homo sapien
atgttttcttcagacttaaggatgt

SEQ ID NO: 4119916 - DNA, 25 bp, Homo sapien
tagttggtacttgcccaggatggca

SEQ ID NO: 4119917 - DNA, 25 bp, Homo sapien
caccatgggttgaagagaaggtata

SEQ ID NO: 4119918 - DNA, 25 bp, Homo sapien
gaaaatctggagcaatttaagcatg

SEQ ID NO: 4119919 - DNA, 25 bp, Homo sapien
gaagggaggactctgcctacaggaa

SEQ ID NO: 4119920 - DNA, 25 bp, Homo sapien
gagagagtccatgagtccatacaga

SEQ ID NO: 4119921 - DNA, 25 bp, Homo sapien
gtgaagaatggttgaagcaagaacc

SEQ ID NO: 4119922 - DNA, 25 bp, Homo sapien
tgcatttgatacttctggcagcccc

SEQ ID NO: 4119923 - DNA, 25 bp, Homo sapien
taatggcagcccgtgtcattgagga

SEQ ID NO: 4119924 - DNA, 25 bp, Homo sapien
gaggatgtactctttgcgctcgtcc

SEQ ID NO: 4119925 - DNA, 25 bp, Homo sapien
ctgaccaaagttccagggtttgcat

SEQ ID NO: 4119926 - DNA, 25 bp, Homo sapien
tggtgcagccacaagacgacaaatc

SEQ ID NO: 4119927 - DNA, 25 bp, Homo sapien
tgactactacccagctaaaagggtg

SEQ ID NO: 4119928 - DNA, 25 bp, Homo sapien
tagagctctttgtcaaggccaacat

SEQ ID NO: 4119929 - DNA, 25 bp, Homo sapien
gctggcgtttgacccgaggttcaca

SEQ ID NO: 4119930 - DNA, 25 bp, Homo sapien
tgggcttgagggagctctcagtcag

SEQ ID NO: 4119931 - DNA, 25 bp, Homo sapien
acggggtccctcctatctgtgggct

SEQ ID NO: 4119932 - DNA, 25 bp, Homo sapien
agcacggggtccctcctatctgtgg

SEQ ID NO: 4119933 - DNA, 25 bp, Homo sapien
atctgtgggcttgagggagctctca

SEQ ID NO: 4119934 - DNA, 25 bp, Homo sapien
gagggcccccggtaatcccatcagc

SEQ ID NO: 4119935 - DNA, 25 bp, Homo sapien
gtgagggcccccggtaatcccatca

SEQ ID NO: 4119936 - DNA, 25 bp, Homo sapien
cccagagagtcagcgtgagggcccc

SEQ ID NO: 4119937 - DNA, 25 bp, Homo sapien
ccccagagagtcagcgtgagggccc

SEQ ID NO: 4119938 - DNA, 25 bp, Homo sapien
tgtagtcaggatcccagcaaacacc

SEQ ID NO: 4119939 - DNA, 25 bp, Homo sapien
gggcactgcctgtccacttgtatgg

SEQ ID NO: 4119940 - DNA, 25 bp, Homo sapien
cctgcttcgtgttgtagtactgctg

SEQ ID NO: 4119941 - DNA, 25 bp, Homo sapien
gtagtccccagtccaattcccaatg

SEQ ID NO: 4119942 - DNA, 25 bp, Homo sapien
cagacagagtcgtgggtcatactgg

SEQ ID NO: 4119943 - DNA, 25 bp, Homo sapien
aagcctgtcacactgcgtgctggga

SEQ ID NO: 4119944 - DNA, 25 bp, Homo sapien
tgaggttcctttctgtgtcgtgagc

SEQ ID NO: 4119945 - DNA, 25 bp, Homo sapien
tcgtgagctgaatcgaagcctgtca

SEQ ID NO: 4119946 - DNA, 25 bp, Homo sapien
tgcagtcacagcctagtaaaagatt

SEQ ID NO: 4119947 - DNA, 25 bp, Homo sapien
gatcagcaactttgtaactggccag

SEQ ID NO: 4119948 - DNA, 25 bp, Homo sapien
tgaatgggtgaaatgcactaggctg

SEQ ID NO: 4119949 - DNA, 25 bp, Homo sapien
cactgggattctgatttggttgatc

SEQ ID NO: 4119950 - DNA, 25 bp, Homo sapien
agacatcttcatcaccggggaccca

SEQ ID NO: 4119951 - DNA, 25 bp, Homo sapien
tcatcaccggggacccactgaggtt

SEQ ID NO: 4119952 - DNA, 25 bp, Homo sapien
ctagttagagataaatacgccaaaa

SEQ ID NO: 4119953 - DNA, 25 bp, Homo sapien
agataaatacgccaaaattgccaga

SEQ ID NO: 4119954 - DNA, 25 bp, Homo sapien
tgccgcaaattgggaacgggcccca

SEQ ID NO: 4119955 - DNA, 25 bp, Homo sapien
agatccggtcgcttcatccaggcat

SEQ ID NO: 4119956 - DNA, 25 bp, Homo sapien
tgccagccgtcgtagcccttgggca

SEQ ID NO: 4119957 - DNA, 25 bp, Homo sapien
ggcatccgtccacacatggaaattc

SEQ ID NO: 4119958 - DNA, 25 bp, Homo sapien
tcctgcggcgttgcgtccacagcct

SEQ ID NO: 4119959 - DNA, 25 bp, Homo sapien
agtggcagcaatgattcccaaactc

SEQ ID NO: 4119960 - DNA, 25 bp, Homo sapien
gtcactctcagtggggttccccagc

SEQ ID NO: 4119961 - DNA, 25 bp, Homo sapien
gggaagccaggggtggtcactctca

SEQ ID NO: 4119962 - DNA, 25 bp, Homo sapien
caatgattcccaaactcaaacagga

SEQ ID NO: 4119963 - DNA, 25 bp, Homo sapien
tttgcggatggcggtcagtggtgat

SEQ ID NO: 4119964 - DNA, 25 bp, Homo sapien
ctttgcggatggcggtcagtggtga

SEQ ID NO: 4119965 - DNA, 25 bp, Homo sapien
ttgcggatggcggtcagtggtgatg

SEQ ID NO: 4119966 - DNA, 25 bp, Homo sapien
gtcagtggtgatggcccacagcaga

SEQ ID NO: 4119967 - DNA, 25 bp, Homo sapien
ctgagaagacgaatctggtgtcata

SEQ ID NO: 4119968 - DNA, 25 bp, Homo sapien
tcaccatcttcaccaaccagatgag

SEQ ID NO: 4119969 - DNA, 25 bp, Homo sapien
caccatcttcaccaaccagatgagc

SEQ ID NO: 4119970 - DNA, 25 bp, Homo sapien
ggtgatatctctccgcctgtcttgg

SEQ ID NO: 4119971 - DNA, 25 bp, Homo sapien
cttggtgctgatgtttttcccgatg

SEQ ID NO: 4119972 - DNA, 25 bp, Homo sapien
tactcataggtgatatctctccgcc

SEQ ID NO: 4119973 - DNA, 25 bp, Homo sapien
tacttgtactcataggtgatatctc

SEQ ID NO: 4119974 - DNA, 25 bp, Homo sapien
ttttcatgttctgggtgactcaggg

SEQ ID NO: 4119975 - DNA, 25 bp, Homo sapien
attttcatgttctgggtgactcagg

SEQ ID NO: 4119976 - DNA, 25 bp, Homo sapien
gccaatgggccacaggggaaataca

SEQ ID NO: 4119977 - DNA, 25 bp, Homo sapien
ggtacaggaaccacagccaatgggc

SEQ ID NO: 4119978 - DNA, 25 bp, Homo sapien
tctgtcagattgaggaacatcaaga

SEQ ID NO: 4119979 - DNA, 25 bp, Homo sapien
aacatcaagaacagaggcagcgtat

SEQ ID NO: 4119980 - DNA, 25 bp, Homo sapien
acacaagctcacaatcaacccaggg

SEQ ID NO: 4119981 - DNA, 25 bp, Homo sapien
cccaggggtccaaactgacctgctt

SEQ ID NO: 4119982 - DNA, 25 bp, Homo sapien
ggttttacacaagctcacaatcaac

SEQ ID NO: 4119983 - DNA, 25 bp, Homo sapien
ttgtacaaggttttacacaagctca

SEQ ID NO: 4119984 - DNA, 25 bp, Homo sapien
tcccaaccacccgtgtggcagaagg

SEQ ID NO: 4119985 - DNA, 25 bp, Homo sapien
tcaaggaccaaatgtcccaaccacc

SEQ ID NO: 4119986 - DNA, 25 bp, Homo sapien
aaccacccgtgtggcagaaggagac

SEQ ID NO: 4119987 - DNA, 25 bp, Homo sapien
aaatgtcccaaccacccgtgtggca

SEQ ID NO: 4119988 - DNA, 25 bp, Homo sapien
tacaggtcgtctgtgctccctctca

SEQ ID NO: 4119989 - DNA, 25 bp, Homo sapien
ggtgaaattaacagagtttcccagc

SEQ ID NO: 4119990 - DNA, 25 bp, Homo sapien
ttaagaatcacggtgaaattaacag

SEQ ID NO: 4119991 - DNA, 25 bp, Homo sapien
cacatcatctgattgtaccgacatg

SEQ ID NO: 4119992 - DNA, 25 bp, Homo sapien
tcttgccagtgtacaactgtagttc

SEQ ID NO: 4119993 - DNA, 25 bp, Homo sapien
aactgtagttcaaaggagcccaaga

SEQ ID NO: 4119994 - DNA, 25 bp, Homo sapien
cttcttgccagtgtacaactgtagt

SEQ ID NO: 4119995 - DNA, 25 bp, Homo sapien
tagttcaaaggagcccaagatgttg

SEQ ID NO: 4119996 - DNA, 25 bp, Homo sapien
tataactctacgatagacccaggct

SEQ ID NO: 4119997 - DNA, 25 bp, Homo sapien
caagacgttgggctcaagatggaat

SEQ ID NO: 4119998 - DNA, 25 bp, Homo sapien
tgagtccatgacagacattacccgt

SEQ ID NO: 4119999 - DNA, 25 bp, Homo sapien
cattgatctgactgggcatctgaga

SEQ ID NO: 4120000 - DNA, 25 bp, Homo sapien
tccgcaatgatgaaacctctgataa

SEQ ID NO: 4120001 - DNA, 25 bp, Homo sapien
ttagactccacaatttccgcaatga

SEQ ID NO: 4120002 - DNA, 25 bp, Homo sapien
tctatagagaactcagggtactgga

SEQ ID NO: 4120003 - DNA, 25 bp, Homo sapien
tatagccaggctgttgatgtaggtc

SEQ ID NO: 4120004 - DNA, 25 bp, Homo sapien
aaggagccctttatggcctgcagga

SEQ ID NO: 4120005 - DNA, 25 bp, Homo sapien
ggagccctttatggcctgcaggaag

SEQ ID NO: 4120006 - DNA, 25 bp, Homo sapien
aggagccctttatggcctgcaggaa

SEQ ID NO: 4120007 - DNA, 25 bp, Homo sapien
gaagatacaattgcagacaagtagc

SEQ ID NO: 4120008 - DNA, 25 bp, Homo sapien
ggccaattctgcctgtgttaggcaa

SEQ ID NO: 4120009 - DNA, 25 bp, Homo sapien
aagtagctggccaattctgcctgtg

SEQ ID NO: 4120010 - DNA, 25 bp, Homo sapien
gcagacaagtagctggccaattctg

SEQ ID NO: 4120011 - DNA, 25 bp, Homo sapien
cagaggtctgtagtgaggagatgcc

SEQ ID NO: 4120012 - DNA, 25 bp, Homo sapien
aagagaacttgacgtcagtcaaagg

SEQ ID NO: 4120013 - DNA, 25 bp, Homo sapien
cagtcaaagggatggccagggtatt

SEQ ID NO: 4120014 - DNA, 25 bp, Homo sapien
ccatggtcagaggtctgtagtgagg

SEQ ID NO: 4120015 - DNA, 25 bp, Homo sapien
tgggattggatggtctcaccaggct

SEQ ID NO: 4120016 - DNA, 25 bp, Homo sapien
cttgtttggaacttaacttgacgat

SEQ ID NO: 4120017 - DNA, 25 bp, Homo sapien
cttaacttgacgataaatttcttgg

SEQ ID NO: 4120018 - DNA, 25 bp, Homo sapien
cttctgagcattaatctctttcact

SEQ ID NO: 4120019 - DNA, 25 bp, Homo sapien
ggaaatgctgaaatctcaactaagg

SEQ ID NO: 4120020 - DNA, 25 bp, Homo sapien
aatgctgaaatctcaactaaggctc

SEQ ID NO: 4120021 - DNA, 25 bp, Homo sapien
gctgaaatctcaactaaggctccac

SEQ ID NO: 4120022 - DNA, 25 bp, Homo sapien
gaaatctcaactaaggctccacagc

SEQ ID NO: 4120023 - DNA, 25 bp, Homo sapien
ttctcaagggtcgtcagcaggtggc

SEQ ID NO: 4120024 - DNA, 25 bp, Homo sapien
tggtgaacccatggcctgaagatat

SEQ ID NO: 4120025 - DNA, 25 bp, Homo sapien
tggcccttgagaaatgtccttgcag

SEQ ID NO: 4120026 - DNA, 25 bp, Homo sapien
gagagagcactccagttgacaggtg

SEQ ID NO: 4120027 - DNA, 25 bp, Homo sapien
gaggatgacaggtatcccacccatg

SEQ ID NO: 4120028 - DNA, 25 bp, Homo sapien
taaaccgccagcacatttaagaagc

SEQ ID NO: 4120029 - DNA, 25 bp, Homo sapien
caagctacgtgcctttgccagggtg

SEQ ID NO: 4120030 - DNA, 25 bp, Homo sapien
ggattccatggctccccaagtgact

SEQ ID NO: 4120031 - DNA, 25 bp, Homo sapien
ttttacttgcacagaggctgaccct

SEQ ID NO: 4120032 - DNA, 25 bp, Homo sapien
ccagatgagatcttacagggagaga

SEQ ID NO: 4120033 - DNA, 25 bp, Homo sapien
gccacagccagggttatgtaggtaa

SEQ ID NO: 4120034 - DNA, 25 bp, Homo sapien
aaggtagacctcagccatgtcagtc

SEQ ID NO: 4120035 - DNA, 25 bp, Homo sapien
gaactgaccataaaccctgcctgtg

SEQ ID NO: 4120036 - DNA, 25 bp, Homo sapien
tcttcactgagcgagacagctggga

SEQ ID NO: 4120037 - DNA, 25 bp, Homo sapien
gacctgggttgggacactgacatca

SEQ ID NO: 4120038 - DNA, 25 bp, Homo sapien
cagatgtggatatgggaaggacctc

SEQ ID NO: 4120039 - DNA, 25 bp, Homo sapien
acgctgtgcgtggatggaatagtct

SEQ ID NO: 4120040 - DNA, 25 bp, Homo sapien
tgtctcgcgctgtgcccattctact

SEQ ID NO: 4120041 - DNA, 25 bp, Homo sapien
ctgagtgagacatgacgctgtgcgt

SEQ ID NO: 4120042 - DNA, 25 bp, Homo sapien
tgcccattctactaactgagtgaga

SEQ ID NO: 4120043 - DNA, 25 bp, Homo sapien
tgaaggaccccgaccggcatggcca

SEQ ID NO: 4120044 - DNA, 25 bp, Homo sapien
aaggcagacccgtaccagtatgtgg

SEQ ID NO: 4120045 - DNA, 25 bp, Homo sapien
cctttgccacgccagaccaagggaa

SEQ ID NO: 4120046 - DNA, 25 bp, Homo sapien
ggcatggccactcagacacaagtcc

SEQ ID NO: 4120047 - DNA, 25 bp, Homo sapien
caggcttgaaatagagtggttgaca

SEQ ID NO: 4120048 - DNA, 25 bp, Homo sapien
caggcttttacctggcctctgggtc

SEQ ID NO: 4120049 - DNA, 25 bp, Homo sapien
aggagacaggtctgccttgagcccc

SEQ ID NO: 4120050 - DNA, 25 bp, Homo sapien
tggttgacagggtgccctaacccag

SEQ ID NO: 4120051 - DNA, 25 bp, Homo sapien
aagcctcagacccttccagtcacca

SEQ ID NO: 4120052 - DNA, 25 bp, Homo sapien
acccttccagtcaccaattgctttg

SEQ ID NO: 4120053 - DNA, 25 bp, Homo sapien
agacccttccagtcaccaattgctt

SEQ ID NO: 4120054 - DNA, 25 bp, Homo sapien
gcctcagacccttccagtcaccaat

SEQ ID NO: 4120055 - DNA, 25 bp, Homo sapien
gtctggttaaaggtcggtgctgtat

SEQ ID NO: 4120056 - DNA, 25 bp, Homo sapien
gagttgtctggttaaaggtcggtgc

SEQ ID NO: 4120057 - DNA, 25 bp, Homo sapien
ttccagagagttgtctggttaaagg

SEQ ID NO: 4120058 - DNA, 25 bp, Homo sapien
ttgtctggttaaaggtcggtgctgt

SEQ ID NO: 4120059 - DNA, 25 bp, Homo sapien
ctaagtagctgggcactccaccgca

SEQ ID NO: 4120060 - DNA, 25 bp, Homo sapien
taagtagctgggcactccaccgcac

SEQ ID NO: 4120061 - DNA, 25 bp, Homo sapien
taatgggcctgagctagttcttgtc

SEQ ID NO: 4120062 - DNA, 25 bp, Homo sapien
gctattgaatgtttgtgcaccctgg

SEQ ID NO: 4120063 - DNA, 25 bp, Homo sapien
taaatatgccaagctgcgcacgtgg

SEQ ID NO: 4120064 - DNA, 25 bp, Homo sapien
tcaaagggctccatttcctgccggt

SEQ ID NO: 4120065 - DNA, 25 bp, Homo sapien
catgctgacggaccccgtgagtatg

SEQ ID NO: 4120066 - DNA, 25 bp, Homo sapien
tatacattcattgggcctgctctgg

SEQ ID NO: 4120067 - DNA, 25 bp, Homo sapien
gggtcaacacctgtaccacagccta

SEQ ID NO: 4120068 - DNA, 25 bp, Homo sapien
cagcctatctgtcttggttaaatga

SEQ ID NO: 4120069 - DNA, 25 bp, Homo sapien
gatgccagtatggacagaatagctt

SEQ ID NO: 4120070 - DNA, 25 bp, Homo sapien
cattgagcggaaaccagaatacctc

SEQ ID NO: 4120071 - DNA, 25 bp, Homo sapien
tagcttatgatgcttatccccaccc

SEQ ID NO: 4120072 - DNA, 25 bp, Homo sapien
cctaccctggtcctgtgggaaccat

SEQ ID NO: 4120073 - DNA, 25 bp, Homo sapien
tctctttcctacaaagcctgcatct

SEQ ID NO: 4120074 - DNA, 25 bp, Homo sapien
ctctttcctacaaagcctgcatctg

SEQ ID NO: 4120075 - DNA, 25 bp, Homo sapien
tcctctctttcctacaaagcctgca

SEQ ID NO: 4120076 - DNA, 25 bp, Homo sapien
aagcctgcatctgtccacagacacg

SEQ ID NO: 4120077 - DNA, 25 bp, Homo sapien
cagtcaacacttggccaggccagtt

SEQ ID NO: 4120078 - DNA, 25 bp, Homo sapien
tggccaacccgatgaagtgccacag

SEQ ID NO: 4120079 - DNA, 25 bp, Homo sapien
gatgtagctggattctgcccatcac

SEQ ID NO: 4120080 - DNA, 25 bp, Homo sapien
gcctgagagcttggcattagcacca

SEQ ID NO: 4120081 - DNA, 25 bp, Homo sapien
aaccccttgcgatggccgagtggga

SEQ ID NO: 4120082 - DNA, 25 bp, Homo sapien
gagcagttgcccgaaaaaaagccaa

SEQ ID NO: 4120083 - DNA, 25 bp, Homo sapien
caacgcttcctagcgggaactggaa

SEQ ID NO: 4120084 - DNA, 25 bp, Homo sapien
tggaaaccccggcttgatggaagtg

SEQ ID NO: 4120085 - DNA, 25 bp, Homo sapien
tgtctggccgagtccagagagccgc

SEQ ID NO: 4120086 - DNA, 25 bp, Homo sapien
gttccgaggagccatcgccgaagcc

SEQ ID NO: 4120087 - DNA, 25 bp, Homo sapien
cgcccggtgtctggccgagtccaga

SEQ ID NO: 4120088 - DNA, 25 bp, Homo sapien
agagagccgcggcgcctcgttccga

SEQ ID NO: 4120089 - DNA, 25 bp, Homo sapien
ctgccgagctgccccacgagccgca

SEQ ID NO: 4120090 - DNA, 25 bp, Homo sapien
gccgagctgccccacgagccgcacg

SEQ ID NO: 4120091 - DNA, 25 bp, Homo sapien
gctgccgagctgccccacgagccgc

SEQ ID NO: 4120092 - DNA, 25 bp, Homo sapien
tgccgagctgccccacgagccgcac

SEQ ID NO: 4120093 - DNA, 25 bp, Homo sapien
cctcgctcagcgtcacggacgccat

SEQ ID NO: 4120094 - DNA, 25 bp, Homo sapien
gacgccatgcacgatgtacaccttc

SEQ ID NO: 4120095 - DNA, 25 bp, Homo sapien
ctggacgccatgcacgatgtacacc

SEQ ID NO: 4120096 - DNA, 25 bp, Homo sapien
tccgcctcgctcagcgtcacggacg

SEQ ID NO: 4120097 - DNA, 25 bp, Homo sapien
ggatttaatatagaacacagaggac

SEQ ID NO: 4120098 - DNA, 25 bp, Homo sapien
aaccagggatttaatatagaacaca

SEQ ID NO: 4120099 - DNA, 25 bp, Homo sapien
gatttaatatagaacacagaggaca

SEQ ID NO: 4120100 - DNA, 25 bp, Homo sapien
cagggatttaatatagaacacagag

SEQ ID NO: 4120101 - DNA, 25 bp, Homo sapien
ggacttcaatgatagctggccgctt

SEQ ID NO: 4120102 - DNA, 25 bp, Homo sapien
tacagggtagctcgttaccaggtcc

SEQ ID NO: 4120103 - DNA, 25 bp, Homo sapien
gaactctgataggaggaccacaccg

SEQ ID NO: 4120104 - DNA, 25 bp, Homo sapien
gatggctacatcacgggaccactga

SEQ ID NO: 4120105 - DNA, 25 bp, Homo sapien
tggcatccctgctgtttcccacata

SEQ ID NO: 4120106 - DNA, 25 bp, Homo sapien
catgccaggagctagatatatgttg

SEQ ID NO: 4120107 - DNA, 25 bp, Homo sapien
aatgaccatggtgggactctgctgc

SEQ ID NO: 4120108 - DNA, 25 bp, Homo sapien
gatagctaatgaactgccgtgggaa

SEQ ID NO: 4120109 - DNA, 25 bp, Homo sapien
aatcccgattccttcaaatcaaaag

SEQ ID NO: 4120110 - DNA, 25 bp, Homo sapien
cgattccttcaaatcaaaagaggtt

SEQ ID NO: 4120111 - DNA, 25 bp, Homo sapien
taatgaggtcactatgaaggctggg

SEQ ID NO: 4120112 - DNA, 25 bp, Homo sapien
tggcctatcccttttcttgagataa

SEQ ID NO: 4120113 - DNA, 25 bp, Homo sapien
attctctcattgcaatctggtctct

SEQ ID NO: 4120114 - DNA, 25 bp, Homo sapien
gattctctcattgcaatctggtctc

SEQ ID NO: 4120115 - DNA, 25 bp, Homo sapien
cagtaggctgaacctgggaaagctt

SEQ ID NO: 4120116 - DNA, 25 bp, Homo sapien
atagcactcagtaggctgaacctgg

SEQ ID NO: 4120117 - DNA, 25 bp, Homo sapien
taggctgaacctgggaaagctttat

SEQ ID NO: 4120118 - DNA, 25 bp, Homo sapien
cactcagtaggctgaacctgggaaa

SEQ ID NO: 4120119 - DNA, 25 bp, Homo sapien
gggttcgtcaattgccatggccagg

SEQ ID NO: 4120120 - DNA, 25 bp, Homo sapien
ggtagggttcgtcaattgccatggc

SEQ ID NO: 4120121 - DNA, 25 bp, Homo sapien
cctgtggtagggttcgtcaattgcc

SEQ ID NO: 4120122 - DNA, 25 bp, Homo sapien
agccctgtggtagggttcgtcaatt

SEQ ID NO: 4120123 - DNA, 25 bp, Homo sapien
gcatgcgccaccacatctggtccaa

SEQ ID NO: 4120124 - DNA, 25 bp, Homo sapien
atgcgccaccacatctggtccaact

SEQ ID NO: 4120125 - DNA, 25 bp, Homo sapien
catgcgccaccacatctggtccaac

SEQ ID NO: 4120126 - DNA, 25 bp, Homo sapien
ctcaatctctaacactccagccctc

SEQ ID NO: 4120127 - DNA, 25 bp, Homo sapien
gaacctgaaggctttctagctcaat

SEQ ID NO: 4120128 - DNA, 25 bp, Homo sapien
aacctgaaggctttctagctcaatc

SEQ ID NO: 4120129 - DNA, 25 bp, Homo sapien
tttctagctcaatctctaacactcc

SEQ ID NO: 4120130 - DNA, 25 bp, Homo sapien
ttccagacacaatatccctatcttg

SEQ ID NO: 4120131 - DNA, 25 bp, Homo sapien
caatatccctatcttgagtctggag

SEQ ID NO: 4120132 - DNA, 25 bp, Homo sapien
aaggtgatccctcttcactggaaga

SEQ ID NO: 4120133 - DNA, 25 bp, Homo sapien
ttcaagtctaagagagtaagccttt

SEQ ID NO: 4120134 - DNA, 25 bp, Homo sapien
gaccctggcggacccactagtgttg

SEQ ID NO: 4120135 - DNA, 25 bp, Homo sapien
tagtgttggacaccacatcagtttc

SEQ ID NO: 4120136 - DNA, 25 bp, Homo sapien
tcagtttccacttcgacacatcggt

SEQ ID NO: 4120137 - DNA, 25 bp, Homo sapien
tcgacacatcggtagtcctcacagc

SEQ ID NO: 4120138 - DNA, 25 bp, Homo sapien
gggcttgaaccatggtcacagtact

SEQ ID NO: 4120139 - DNA, 25 bp, Homo sapien
gcttgaaccatggtcacagtactca

SEQ ID NO: 4120140 - DNA, 25 bp, Homo sapien
ctgggcttgaaccatggtcacagta

SEQ ID NO: 4120141 - DNA, 25 bp, Homo sapien
cttgaaccatggtcacagtactcac

SEQ ID NO: 4120142 - DNA, 25 bp, Homo sapien
gtcaacaaagaactccaagtagcct

SEQ ID NO: 4120143 - DNA, 25 bp, Homo sapien
caaagaactccaagtagccttcatt

SEQ ID NO: 4120144 - DNA, 25 bp, Homo sapien
cactcccaccaagatgtctgtgtga

SEQ ID NO: 4120145 - DNA, 25 bp, Homo sapien
cagcttcggcgtccccatttctgct

SEQ ID NO: 4120146 - DNA, 25 bp, Homo sapien
agaaatatctgcatagacagtactg

SEQ ID NO: 4120147 - DNA, 25 bp, Homo sapien
cagagggtctttaagtcgacactgc

SEQ ID NO: 4120148 - DNA, 25 bp, Homo sapien
tcccgaggactaatgcagagggtct

SEQ ID NO: 4120149 - DNA, 25 bp, Homo sapien
agggtgttagcgatctcggtgccaa

SEQ ID NO: 4120150 - DNA, 25 bp, Homo sapien
tattgttaaatatccgatagagggt

SEQ ID NO: 4120151 - DNA, 25 bp, Homo sapien
agtacaagggaagaaatgacgggct

SEQ ID NO: 4120152 - DNA, 25 bp, Homo sapien
gaagttactgtcgagtgccaaaacc

SEQ ID NO: 4120153 - DNA, 25 bp, Homo sapien
gtgccaaaacctgggtagaggagta

SEQ ID NO: 4120154 - DNA, 25 bp, Homo sapien
tgtcgagtgccaaaacctgggtaga

SEQ ID NO: 4120155 - DNA, 25 bp, Homo sapien
gggctgtggtaccaacactcagagg

SEQ ID NO: 4120156 - DNA, 25 bp, Homo sapien
agggctgtggtaccaacactcagag

SEQ ID NO: 4120157 - DNA, 25 bp, Homo sapien
accaagcatcacttattactttagg

SEQ ID NO: 4120158 - DNA, 25 bp, Homo sapien
attaccccagttaaaggacactgct

SEQ ID NO: 4120159 - DNA, 25 bp, Homo sapien
aaaaaccaagcatcacttattactt

SEQ ID NO: 4120160 - DNA, 25 bp, Homo sapien
tattaccccagttaaaggacactgc

SEQ ID NO: 4120161 - DNA, 25 bp, Homo sapien
ggcatcaaacaaatttccaccacat

SEQ ID NO: 4120162 - DNA, 25 bp, Homo sapien
gcatcaaacaaatttccaccacatt

SEQ ID NO: 4120163 - DNA, 25 bp, Homo sapien
catcaaacaaatttccaccacattc

SEQ ID NO: 4120164 - DNA, 25 bp, Homo sapien
tcaggtactgttcatggtgctagga

SEQ ID NO: 4120165 - DNA, 25 bp, Homo sapien
gaaagctgaaccatgtggaatagcc

SEQ ID NO: 4120166 - DNA, 25 bp, Homo sapien
tctccacaggttcgcagagctgttt

SEQ ID NO: 4120167 - DNA, 25 bp, Homo sapien
ggaagcctgttaccctgcttttaga

SEQ ID NO: 4120168 - DNA, 25 bp, Homo sapien
ccttctaaaggaccctgaatatgcc

SEQ ID NO: 4120169 - DNA, 25 bp, Homo sapien
gggacttgatgccttagagtcccca

SEQ ID NO: 4120170 - DNA, 25 bp, Homo sapien
ccaatagtctctccacataccaggg

SEQ ID NO: 4120171 - DNA, 25 bp, Homo sapien
gatgccttagagtccccattccttg

SEQ ID NO: 4120172 - DNA, 25 bp, Homo sapien
tgatgctgggtcaatcagatatccc

SEQ ID NO: 4120173 - DNA, 25 bp, Homo sapien
tgaaactggcagcatctaccgtaac

SEQ ID NO: 4120174 - DNA, 25 bp, Homo sapien
tcagccagagaatgttgacaagggc

SEQ ID NO: 4120175 - DNA, 25 bp, Homo sapien
tgtaagggtcttccccatttggagc

SEQ ID NO: 4120176 - DNA, 25 bp, Homo sapien
ctggaagcagaagcactagtaaaat

SEQ ID NO: 4120177 - DNA, 25 bp, Homo sapien
agcagaagcactagtaaaattccca

SEQ ID NO: 4120178 - DNA, 25 bp, Homo sapien
gacaattcaatgtccttcgacccct

SEQ ID NO: 4120179 - DNA, 25 bp, Homo sapien
catcctccaaaactcgaacccttgg

SEQ ID NO: 4120180 - DNA, 25 bp, Homo sapien
tgcacagagtgacaatgcaggggac

SEQ ID NO: 4120181 - DNA, 25 bp, Homo sapien
gggacattctccacacttagtcgta

SEQ ID NO: 4120182 - DNA, 25 bp, Homo sapien
catcatctcgaagatgctctctggg

SEQ ID NO: 4120183 - DNA, 25 bp, Homo sapien
ctccatcatctcgaagatgctctct

SEQ ID NO: 4120184 - DNA, 25 bp, Homo sapien
atgcacgtcacaactcccttgctgg

SEQ ID NO: 4120185 - DNA, 25 bp, Homo sapien
cactttcctcatgcacgtcacaact

SEQ ID NO: 4120186 - DNA, 25 bp, Homo sapien
ggaggacaaagctcagctcactgaa

SEQ ID NO: 4120187 - DNA, 25 bp, Homo sapien
gaggacaaagctcagctcactgaac

SEQ ID NO: 4120188 - DNA, 25 bp, Homo sapien
gggaggacaaagctcagctcactga

SEQ ID NO: 4120189 - DNA, 25 bp, Homo sapien
cctctgaatccagatgcaggaaagc

SEQ ID NO: 4120190 - DNA, 25 bp, Homo sapien
agagggccttgacgcctctgaatcc

SEQ ID NO: 4120191 - DNA, 25 bp, Homo sapien
aaggctctcagctccaccaagtcat

SEQ ID NO: 4120192 - DNA, 25 bp, Homo sapien
ggatgccaggacttgagagggcctt

SEQ ID NO: 4120193 - DNA, 25 bp, Homo sapien
aaggaggcatgcagtaccttgccca

SEQ ID NO: 4120194 - DNA, 25 bp, Homo sapien
tttcttccttgtgcacaacactctg

SEQ ID NO: 4120195 - DNA, 25 bp, Homo sapien
atgcagtaccttgcccacacgcttg

SEQ ID NO: 4120196 - DNA, 25 bp, Homo sapien
tcttccttgtgcacaacactctgca

SEQ ID NO: 4120197 - DNA, 25 bp, Homo sapien
ccacagttgagcagttgatgtgcaa

SEQ ID NO: 4120198 - DNA, 25 bp, Homo sapien
aaacaatccacagttgagcagttga

SEQ ID NO: 4120199 - DNA, 25 bp, Homo sapien
aagtaaaaaacaatccacagttgag

SEQ ID NO: 4120200 - DNA, 25 bp, Homo sapien
taaaaaacaatccacagttgagcag

SEQ ID NO: 4120201 - DNA, 25 bp, Homo sapien
tcgtaacagcgaagaaaaatatata

SEQ ID NO: 4120202 - DNA, 25 bp, Homo sapien
tgtaaattcgtaacagcgaagaaaa

SEQ ID NO: 4120203 - DNA, 25 bp, Homo sapien
ttcgtaacagcgaagaaaaatatat

SEQ ID NO: 4120204 - DNA, 25 bp, Homo sapien
ctgctgtaaattcgtaacagcgaag

SEQ ID NO: 4120205 - DNA, 25 bp, Homo sapien
tttgctaactggaatgcagagagca

SEQ ID NO: 4120206 - DNA, 25 bp, Homo sapien
gaaacgctctccttcgtgaatcagc

SEQ ID NO: 4120207 - DNA, 25 bp, Homo sapien
gcagagagcaaatgccacggttgaa

SEQ ID NO: 4120208 - DNA, 25 bp, Homo sapien
cccatttgctaactggaatgcagag

SEQ ID NO: 4120209 - DNA, 25 bp, Homo sapien
ccattaagcccaagtctaggcagct

SEQ ID NO: 4120210 - DNA, 25 bp, Homo sapien
ttgctgggaggaacgcccacaccag

SEQ ID NO: 4120211 - DNA, 25 bp, Homo sapien
aaaacccaggctatgctctcaacag

SEQ ID NO: 4120212 - DNA, 25 bp, Homo sapien
tggtgataaattcctaacgccttac

SEQ ID NO: 4120213 - DNA, 25 bp, Homo sapien
atgtcacgggcagtcaaccaggagc

SEQ ID NO: 4120214 - DNA, 25 bp, Homo sapien
tttctgccttgttgggaacactgtc

SEQ ID NO: 4120215 - DNA, 25 bp, Homo sapien
ctgtcatggtgcctgtagatagtca

SEQ ID NO: 4120216 - DNA, 25 bp, Homo sapien
actgccaatgttttgtcatgtcacg

SEQ ID NO: 4120217 - DNA, 25 bp, Homo sapien
ttcacactcgagttgcatctctgcg

SEQ ID NO: 4120218 - DNA, 25 bp, Homo sapien
tgcttctaaactttattcacactcg

SEQ ID NO: 4120219 - DNA, 25 bp, Homo sapien
actttattcacactcgagttgcatc

SEQ ID NO: 4120220 - DNA, 25 bp, Homo sapien
taaactttattcacactcgagttgc

SEQ ID NO: 4120221 - DNA, 25 bp, Homo sapien
cagccaaaggacctctgtccaggaa

SEQ ID NO: 4120222 - DNA, 25 bp, Homo sapien
caacttggctgcaggcgtgccaaaa

SEQ ID NO: 4120223 - DNA, 25 bp, Homo sapien
gtctgggtccgaacgcagtgacagc

SEQ ID NO: 4120224 - DNA, 25 bp, Homo sapien
ggtccgaacgcagtgacagccacgg

SEQ ID NO: 4120225 - DNA, 25 bp, Homo sapien
gaggaggaggtaggccccccagagc

SEQ ID NO: 4120226 - DNA, 25 bp, Homo sapien
tcttggcatttacaatcttcttggg

SEQ ID NO: 4120227 - DNA, 25 bp, Homo sapien
ggcatttacaatcttcttgggcttc

SEQ ID NO: 4120228 - DNA, 25 bp, Homo sapien
gggttggtggctcggtggtgacctg

SEQ ID NO: 4120229 - DNA, 25 bp, Homo sapien
catcacagctactaataagatgagg

SEQ ID NO: 4120230 - DNA, 25 bp, Homo sapien
ccatcacagctactaataagatgag

SEQ ID NO: 4120231 - DNA, 25 bp, Homo sapien
ccaggttttccactcttacagagga

SEQ ID NO: 4120232 - DNA, 25 bp, Homo sapien
gacggctcttgagctcctcaaacat

SEQ ID NO: 4120233 - DNA, 25 bp, Homo sapien
cagggtgtccagacggctcttgagc

SEQ ID NO: 4120234 - DNA, 25 bp, Homo sapien
tgtccagacggctcttgagctcctc

SEQ ID NO: 4120235 - DNA, 25 bp, Homo sapien
tgggccagggtgtccagacggctct

SEQ ID NO: 4120236 - DNA, 25 bp, Homo sapien
gagtctgtgttctccatagaatgga

SEQ ID NO: 4120237 - DNA, 25 bp, Homo sapien
gggagtgagaaacaataggctgcca

SEQ ID NO: 4120238 - DNA, 25 bp, Homo sapien
ggcatgaccttaccatgcgcctggg

SEQ ID NO: 4120239 - DNA, 25 bp, Homo sapien
tgcagactatatgacaggaacatgg

SEQ ID NO: 4120240 - DNA, 25 bp, Homo sapien
gaggatgtagtaacaggaccactgc

SEQ ID NO: 4120241 - DNA, 25 bp, Homo sapien
gccttggtcacaaaagcaacaggta

SEQ ID NO: 4120242 - DNA, 25 bp, Homo sapien
tgcatcaagcatcaagaacagtgcc

SEQ ID NO: 4120243 - DNA, 25 bp, Homo sapien
tgatttcccagctgataactcgagg

SEQ ID NO: 4120244 - DNA, 25 bp, Homo sapien
cctcgctggcctcgtggaaggtctt

SEQ ID NO: 4120245 - DNA, 25 bp, Homo sapien
caggtactcatacagggcgtcgttc

SEQ ID NO: 4120246 - DNA, 25 bp, Homo sapien
aaggtcttcgtctgggtgaaggcca

SEQ ID NO: 4120247 - DNA, 25 bp, Homo sapien
gcgtcgttctccgagccagtctgag

SEQ ID NO: 4120248 - DNA, 25 bp, Homo sapien
tctcccagttcttgtaggcgatgcg

SEQ ID NO: 4120249 - DNA, 25 bp, Homo sapien
cgggttgcgcggtgatctcagtctc

SEQ ID NO: 4120250 - DNA, 25 bp, Homo sapien
gcgcctgacaggaccgcgcagttct

SEQ ID NO: 4120251 - DNA, 25 bp, Homo sapien
gcgcagttctcggtcttgccgccat

SEQ ID NO: 4120252 - DNA, 25 bp, Homo sapien
agctgatcgcggcagcgcttgtcga

SEQ ID NO: 4120253 - DNA, 25 bp, Homo sapien
gcagatgtagggcagctgatcgcgg

SEQ ID NO: 4120254 - DNA, 25 bp, Homo sapien
ctgatcgcggcagcgcttgtcgaac

SEQ ID NO: 4120255 - DNA, 25 bp, Homo sapien
tgtagggcagctgatcgcggcagcg

SEQ ID NO: 4120256 - DNA, 25 bp, Homo sapien
cccgcggcccctgccctcctccagg

SEQ ID NO: 4120257 - DNA, 25 bp, Homo sapien
tgccctcctccaggccccccacggc

SEQ ID NO: 4120258 - DNA, 25 bp, Homo sapien
cctgccctcctccaggccccccacg

SEQ ID NO: 4120259 - DNA, 25 bp, Homo sapien
gcggcccctgccctcctccaggccc

SEQ ID NO: 4120260 - DNA, 25 bp, Homo sapien
gctccaagcgcacggagaggatggg

SEQ ID NO: 4120261 - DNA, 25 bp, Homo sapien
aaaagaggctccaagcgcacggaga

SEQ ID NO: 4120262 - DNA, 25 bp, Homo sapien
aggctccaagcgcacggagaggatg

SEQ ID NO: 4120263 - DNA, 25 bp, Homo sapien
ctttatttgcaaaaagaggctccaa

SEQ ID NO: 4120264 - DNA, 25 bp, Homo sapien
atgaagcgcgtgtgctcagctcgcc

SEQ ID NO: 4120265 - DNA, 25 bp, Homo sapien
tggcatgaagcgcgtgtgctcagct

SEQ ID NO: 4120266 - DNA, 25 bp, Homo sapien
cttctcgcctacttcatcacggagg

SEQ ID NO: 4120267 - DNA, 25 bp, Homo sapien
cacggagggagctttcgaaccggct

SEQ ID NO: 4120268 - DNA, 25 bp, Homo sapien
ccgaccccatagcaagagtcagcat

SEQ ID NO: 4120269 - DNA, 25 bp, Homo sapien
agtcagcatgtcagtgcctcccaga

SEQ ID NO: 4120270 - DNA, 25 bp, Homo sapien
cccgccgaccccatagcaagagtca

SEQ ID NO: 4120271 - DNA, 25 bp, Homo sapien
gaggaagaaggggaatgcccagctc

SEQ ID NO: 4120272 - DNA, 25 bp, Homo sapien
gggtcgggcagtgctggccgtcgta

SEQ ID NO: 4120273 - DNA, 25 bp, Homo sapien
gcagtgctggccgtcgtatttggct

SEQ ID NO: 4120274 - DNA, 25 bp, Homo sapien
tcgggcagtgctggccgtcgtattt

SEQ ID NO: 4120275 - DNA, 25 bp, Homo sapien
ctggccgtcgtatttggctcccggg

SEQ ID NO: 4120276 - DNA, 25 bp, Homo sapien
ctgagcagctttctgtgaagagtgg

SEQ ID NO: 4120277 - DNA, 25 bp, Homo sapien
agcagctttctgtgaagagtgggaa

SEQ ID NO: 4120278 - DNA, 25 bp, Homo sapien
cagctttctgtgaagagtgggaagg

SEQ ID NO: 4120279 - DNA, 25 bp, Homo sapien
ctttctgtgaagagtgggaaggaaa

SEQ ID NO: 4120280 - DNA, 25 bp, Homo sapien
cagccacccagttcaggaactttaa

SEQ ID NO: 4120281 - DNA, 25 bp, Homo sapien
ttgtgggcagccacccagttcagga

SEQ ID NO: 4120282 - DNA, 25 bp, Homo sapien
gggcagccacccagttcaggaactt

SEQ ID NO: 4120283 - DNA, 25 bp, Homo sapien
cttgtgggcagccacccagttcagg

SEQ ID NO: 4120284 - DNA, 25 bp, Homo sapien
ctcacacgcagaggcatgagtgccc

SEQ ID NO: 4120285 - DNA, 25 bp, Homo sapien
aagatgggtgatgatactcttgccc

SEQ ID NO: 4120286 - DNA, 25 bp, Homo sapien
gctggaagtggaaaatgccgactgt

SEQ ID NO: 4120287 - DNA, 25 bp, Homo sapien
gaaaatgccgactgtcttcccaaag

SEQ ID NO: 4120288 - DNA, 25 bp, Homo sapien
cagcgtgagggagggaataagccca

SEQ ID NO: 4120289 - DNA, 25 bp, Homo sapien
tagtccacaacagcagcgtgaggga

SEQ ID NO: 4120290 - DNA, 25 bp, Homo sapien
tcttcataattgtgtgccaagcagc

SEQ ID NO: 4120291 - DNA, 25 bp, Homo sapien
cagggcagagcctttacacaggtgt

SEQ ID NO: 4120292 - DNA, 25 bp, Homo sapien
gagaggaagcaataagcaagggttt

SEQ ID NO: 4120293 - DNA, 25 bp, Homo sapien
cacagaggcccattaaaggcctgct

SEQ ID NO: 4120294 - DNA, 25 bp, Homo sapien
ccagcaagttcccatgcaagtgttc

SEQ ID NO: 4120295 - DNA, 25 bp, Homo sapien
gtttgagttggtcaaatccttccag

SEQ ID NO: 4120296 - DNA, 25 bp, Homo sapien
tgtgcttgacccccatctggacagc

SEQ ID NO: 4120297 - DNA, 25 bp, Homo sapien
cactgtgcttgacccccatctggac

SEQ ID NO: 4120298 - DNA, 25 bp, Homo sapien
gggccactgtgcttgacccccatct

SEQ ID NO: 4120299 - DNA, 25 bp, Homo sapien
acgggccactgtgcttgacccccat

SEQ ID NO: 4120300 - DNA, 25 bp, Homo sapien
caagagtcaagaagagggttttgaa

SEQ ID NO: 4120301 - DNA, 25 bp, Homo sapien
ccaagagtcaagaagagggttttga

SEQ ID NO: 4120302 - DNA, 25 bp, Homo sapien
ggttttgaaggtaacggctgtgcta

SEQ ID NO: 4120303 - DNA, 25 bp, Homo sapien
aaggtaacggctgtgctagggatgg

SEQ ID NO: 4120304 - DNA, 25 bp, Homo sapien
ttaagtatccaaagtgacattttcc

SEQ ID NO: 4120305 - DNA, 25 bp, Homo sapien
caggtcctccctcccaagttctttg

SEQ ID NO: 4120306 - DNA, 25 bp, Homo sapien
caaagtgacattttccaggtcctcc

SEQ ID NO: 4120307 - DNA, 25 bp, Homo sapien
tcctccctcccaagttctttgagga

SEQ ID NO: 4120308 - DNA, 25 bp, Homo sapien
tctgcatagagaactaccagacctt

SEQ ID NO: 4120309 - DNA, 25 bp, Homo sapien
tagagaactaccagacctttagcaa

SEQ ID NO: 4120310 - DNA, 25 bp, Homo sapien
gcaacagcaacgtaatatcttctca

SEQ ID NO: 4120311 - DNA, 25 bp, Homo sapien
ctttagcaacagcaacgtaatatct

SEQ ID NO: 4120312 - DNA, 25 bp, Homo sapien
cttgcacaaatacatcaagatgttt

SEQ ID NO: 4120313 - DNA, 25 bp, Homo sapien
ggctgaacatggcatcacatctgct

SEQ ID NO: 4120314 - DNA, 25 bp, Homo sapien
tcagatccttgccaagagttgagca

SEQ ID NO: 4120315 - DNA, 25 bp, Homo sapien
tgctgctggcatagacttcttgcac

SEQ ID NO: 4120316 - DNA, 25 bp, Homo sapien
accaggctggacgaacagcaccact

SEQ ID NO: 4120317 - DNA, 25 bp, Homo sapien
ggacaccttcctcaatgacaccagg

SEQ ID NO: 4120318 - DNA, 25 bp, Homo sapien
ggctggacgaacagcaccactcctt

SEQ ID NO: 4120319 - DNA, 25 bp, Homo sapien
acggacaccttcctcaatgacacca

SEQ ID NO: 4120320 - DNA, 25 bp, Homo sapien
ggtgcccatccaggatctcgtttct

SEQ ID NO: 4120321 - DNA, 25 bp, Homo sapien
ctgaaactatccgaggcactcctcg

SEQ ID NO: 4120322 - DNA, 25 bp, Homo sapien
tctcatctgaaactatccgaggcac

SEQ ID NO: 4120323 - DNA, 25 bp, Homo sapien
tgcagagactcagtgtcacccacca

SEQ ID NO: 4120324 - DNA, 25 bp, Homo sapien
aaaaggctcttcttaacatggtggt

SEQ ID NO: 4120325 - DNA, 25 bp, Homo sapien
caagccctgggacttgcaccctttg

SEQ ID NO: 4120326 - DNA, 25 bp, Homo sapien
ccaagccctgggacttgcacccttt

SEQ ID NO: 4120327 - DNA, 25 bp, Homo sapien
gccaagccctgggacttgcaccctt

SEQ ID NO: 4120328 - DNA, 25 bp, Homo sapien
agaggtatagttggacttgcagttc

SEQ ID NO: 4120329 - DNA, 25 bp, Homo sapien
aagaggtatagttggacttgcagtt

SEQ ID NO: 4120330 - DNA, 25 bp, Homo sapien
agtgcttcggctacttgtcccctgg

SEQ ID NO: 4120331 - DNA, 25 bp, Homo sapien
tgtcccctggttcagtagaggcccc

SEQ ID NO: 4120332 - DNA, 25 bp, Homo sapien
gatgccgtgcactgtgtgaagcaga

SEQ ID NO: 4120333 - DNA, 25 bp, Homo sapien
aaaataatagtcttggagtctcgcc

SEQ ID NO: 4120334 - DNA, 25 bp, Homo sapien
gtggtctgccatgcctacgaggaag

SEQ ID NO: 4120335 - DNA, 25 bp, Homo sapien
tcctgagaccagtatttcctggagc

SEQ ID NO: 4120336 - DNA, 25 bp, Homo sapien
caaaactcctggacaagttgctggc

SEQ ID NO: 4120337 - DNA, 25 bp, Homo sapien
cagcgcatgcaggactggtctctaa

SEQ ID NO: 4120338 - DNA, 25 bp, Homo sapien
tgtcagcacagtcccaagttcaata

SEQ ID NO: 4120339 - DNA, 25 bp, Homo sapien
taaatggcgtgtactgcaagacctc

SEQ ID NO: 4120340 - DNA, 25 bp, Homo sapien
ggatatttaagtcatgcccttggcg

SEQ ID NO: 4120341 - DNA, 25 bp, Homo sapien
cttggaaatgcaccgcctcaacttg

SEQ ID NO: 4120342 - DNA, 25 bp, Homo sapien
gagaactggtgggagccaaatgcca

SEQ ID NO: 4120343 - DNA, 25 bp, Homo sapien
cacacaactggttagcctcaagaga

SEQ ID NO: 4120344 - DNA, 25 bp, Homo sapien
tgaaggcaccgagcatcacagtgtc

SEQ ID NO: 4120345 - DNA, 25 bp, Homo sapien
taaagggtatcaagcaagggaatgc

SEQ ID NO: 4120346 - DNA, 25 bp, Homo sapien
gttaaacgtgggcactcatggccat

SEQ ID NO: 4120347 - DNA, 25 bp, Homo sapien
tctgaggagtgggatacagtaacac

SEQ ID NO: 4120348 - DNA, 25 bp, Homo sapien
tggttcccagaagagacaagagttc

SEQ ID NO: 4120349 - DNA, 25 bp, Homo sapien
cagtataaggtggtctctagtttcc

SEQ ID NO: 4120350 - DNA, 25 bp, Homo sapien
tagcctcagattggactcagcttca

SEQ ID NO: 4120351 - DNA, 25 bp, Homo sapien
tctagccttaggcaatgcagctctg

SEQ ID NO: 4120352 - DNA, 25 bp, Homo sapien
taacatagctagatgggctgtagcc

SEQ ID NO: 4120353 - DNA, 25 bp, Homo sapien
tgctggtgaattagcccaacttgga

SEQ ID NO: 4120354 - DNA, 25 bp, Homo sapien
agtcccgtgttgataaactgttcca

SEQ ID NO: 4120355 - DNA, 25 bp, Homo sapien
gaccctgatgtctcttgagccctga

SEQ ID NO: 4120356 - DNA, 25 bp, Homo sapien
gattgactaagcgtgcacatggttc

SEQ ID NO: 4120357 - DNA, 25 bp, Homo sapien
aatgaatgtataaaacagtcccgtg

SEQ ID NO: 4120358 - DNA, 25 bp, Homo sapien
cgcttgcaagggcttcattcagaaa

SEQ ID NO: 4120359 - DNA, 25 bp, Homo sapien
ccacacaatgtgctttggagccaag

SEQ ID NO: 4120360 - DNA, 25 bp, Homo sapien
ttgacataatacctcctggaagctg

SEQ ID NO: 4120361 - DNA, 25 bp, Homo sapien
gatataacgccttccgtaatgactg

SEQ ID NO: 4120362 - DNA, 25 bp, Homo sapien
aaaatgacatgaaaggatgaaccat

SEQ ID NO: 4120363 - DNA, 25 bp, Homo sapien
tcctcatgttgccaaggttataaaa

SEQ ID NO: 4120364 - DNA, 25 bp, Homo sapien
gaaaggatgaaccattatcctcatg

SEQ ID NO: 4120365 - DNA, 25 bp, Homo sapien
ggttataaaatggtatcaactggat

SEQ ID NO: 4120366 - DNA, 25 bp, Homo sapien
tgcatgagcgttctctgtagtacct

SEQ ID NO: 4120367 - DNA, 25 bp, Homo sapien
aaacccatattgagggaaactctgc

SEQ ID NO: 4120368 - DNA, 25 bp, Homo sapien
ttagaactagctagcgaacgagtgc

SEQ ID NO: 4120369 - DNA, 25 bp, Homo sapien
gacctgtcaccgatgggaggagtct

SEQ ID NO: 4120370 - DNA, 25 bp, Homo sapien
accgactacttagaggaaacaaatg

SEQ ID NO: 4120371 - DNA, 25 bp, Homo sapien
gcagggccaagaagagtgctttcaa

SEQ ID NO: 4120372 - DNA, 25 bp, Homo sapien
tgttctcactagaggcagtgcccct

SEQ ID NO: 4120373 - DNA, 25 bp, Homo sapien
gtgctttcaaatgacgccacaagct

SEQ ID NO: 4120374 - DNA, 25 bp, Homo sapien
gacttctccacgcttcgtcttgtaa

SEQ ID NO: 4120375 - DNA, 25 bp, Homo sapien
acagaagaggcagccctccatgcca

SEQ ID NO: 4120376 - DNA, 25 bp, Homo sapien
cactgtgaccacagacattccacag

SEQ ID NO: 4120377 - DNA, 25 bp, Homo sapien
aagaggcagccctccatgccaggac

SEQ ID NO: 4120378 - DNA, 25 bp, Homo sapien
attccacagaagaggcagccctcca

SEQ ID NO: 4120379 - DNA, 25 bp, Homo sapien
ctgagacaccaagtcccacaggtct

SEQ ID NO: 4120380 - DNA, 25 bp, Homo sapien
cttctgagacaccaagtcccacagg

SEQ ID NO: 4120381 - DNA, 25 bp, Homo sapien
acaccaagtcccacaggtctcagag

SEQ ID NO: 4120382 - DNA, 25 bp, Homo sapien
attgaacctcttttccacaaatgtg

SEQ ID NO: 4120383 - DNA, 25 bp, Homo sapien
tccttattgcccctgcagaatatag

SEQ ID NO: 4120384 - DNA, 25 bp, Homo sapien
tgcccctgcagaatatagtcccaag

SEQ ID NO: 4120385 - DNA, 25 bp, Homo sapien
aaatggctccttattgcccctgcag

SEQ ID NO: 4120386 - DNA, 25 bp, Homo sapien
gaatatagtcccaagatcctcatcc

SEQ ID NO: 4120387 - DNA, 25 bp, Homo sapien
aggccaagtatcacatctaccaagc

SEQ ID NO: 4120388 - DNA, 25 bp, Homo sapien
cctgcatcaggccaagtatcacatc

SEQ ID NO: 4120389 - DNA, 25 bp, Homo sapien
tggaacagtccatgggcttgtctcc

SEQ ID NO: 4120390 - DNA, 25 bp, Homo sapien
tccactgatcccgtctggaacagtc

SEQ ID NO: 4120391 - DNA, 25 bp, Homo sapien
tcacagccacgctggaaccagctcc

SEQ ID NO: 4120392 - DNA, 25 bp, Homo sapien
ccagagatgcccatcacagcaggtc

SEQ ID NO: 4120393 - DNA, 25 bp, Homo sapien
ttgggccatggacactaccagactc

SEQ ID NO: 4120394 - DNA, 25 bp, Homo sapien
tgcacagggagccaccccatgctgt

SEQ ID NO: 4120395 - DNA, 25 bp, Homo sapien
ctctgacactcagtgacccaaccca

SEQ ID NO: 4120396 - DNA, 25 bp, Homo sapien
actggtaaactgccgcccaatccat

SEQ ID NO: 4120397 - DNA, 25 bp, Homo sapien
cccactggtaaactgccgcccaatc

SEQ ID NO: 4120398 - DNA, 25 bp, Homo sapien
tgacactcagtgacccaacccactg

SEQ ID NO: 4120399 - DNA, 25 bp, Homo sapien
ggtacccgaatctgaagcttccaac

SEQ ID NO: 4120400 - DNA, 25 bp, Homo sapien
caaccttaggtggagaaagtagact

SEQ ID NO: 4120401 - DNA, 25 bp, Homo sapien
tggagaaagtagactagaaagaggc

SEQ ID NO: 4120402 - DNA, 25 bp, Homo sapien
ccccatgaatctcaggtacccgaat

SEQ ID NO: 4120403 - DNA, 25 bp, Homo sapien
cttggaaagtattccctgagagcct

SEQ ID NO: 4120404 - DNA, 25 bp, Homo sapien
catcttccttgcgttccccaacctt

SEQ ID NO: 4120405 - DNA, 25 bp, Homo sapien
tccttacattcctgcgggcttggaa

SEQ ID NO: 4120406 - DNA, 25 bp, Homo sapien
cagcgatgtgggagtgtccttacat

SEQ ID NO: 4120407 - DNA, 25 bp, Homo sapien
tattttaaatgcctggcttctagtg

SEQ ID NO: 4120408 - DNA, 25 bp, Homo sapien
aaatgcctggcttctagtgacaatg

SEQ ID NO: 4120409 - DNA, 25 bp, Homo sapien
cctggcttctagtgacaatgtacac

SEQ ID NO: 4120410 - DNA, 25 bp, Homo sapien
ttttaaatgcctggcttctagtgac

SEQ ID NO: 4120411 - DNA, 25 bp, Homo sapien
ggccccattagggagtgtgcgatcc

SEQ ID NO: 4120412 - DNA, 25 bp, Homo sapien
cattagggagtgtgcgatccaaatc

SEQ ID NO: 4120413 - DNA, 25 bp, Homo sapien
cccattagggagtgtgcgatccaaa

SEQ ID NO: 4120414 - DNA, 25 bp, Homo sapien
aagggccccattagggagtgtgcga

SEQ ID NO: 4120415 - DNA, 25 bp, Homo sapien
cttgccttggtgtgaggattgggct

SEQ ID NO: 4120416 - DNA, 25 bp, Homo sapien
gattgggcttgggacttgggacgga

SEQ ID NO: 4120417 - DNA, 25 bp, Homo sapien
ttgggacttgggacggaaggatcag

SEQ ID NO: 4120418 - DNA, 25 bp, Homo sapien
aacaggacagctccttcggtggagc

SEQ ID NO: 4120419 - DNA, 25 bp, Homo sapien
ggccctgcagagaatctacccgcag

SEQ ID NO: 4120420 - DNA, 25 bp, Homo sapien
cgagcagtcggccttcagaagtgtc

SEQ ID NO: 4120421 - DNA, 25 bp, Homo sapien
gaatctacccgcaggccagtggtgt

SEQ ID NO: 4120422 - DNA, 25 bp, Homo sapien
tgtcgtcaggtctggctgagctact

SEQ ID NO: 4120423 - DNA, 25 bp, Homo sapien
agtcccagcaccgcgtagggctggg

SEQ ID NO: 4120424 - DNA, 25 bp, Homo sapien
ggtttgcatcccctcaaagagtctc

SEQ ID NO: 4120425 - DNA, 25 bp, Homo sapien
agtctggttcactctggggccctgg

SEQ ID NO: 4120426 - DNA, 25 bp, Homo sapien
ctgcactggggcaaggaccctccat

SEQ ID NO: 4120427 - DNA, 25 bp, Homo sapien
cagcatcaacatgcaggcagacaca

SEQ ID NO: 4120428 - DNA, 25 bp, Homo sapien
acagccactcccagatgcacctccc

SEQ ID NO: 4120429 - DNA, 25 bp, Homo sapien
gcatcaacatgcaggcagacacagc

SEQ ID NO: 4120430 - DNA, 25 bp, Homo sapien
accagcatcaacatgcaggcagaca

SEQ ID NO: 4120431 - DNA, 25 bp, Homo sapien
tctggcggctttgtgaaccttcacc

SEQ ID NO: 4120432 - DNA, 25 bp, Homo sapien
gaaccttcacctcggtttagagcac

SEQ ID NO: 4120433 - DNA, 25 bp, Homo sapien
gtgaaccttcacctcggtttagagc

SEQ ID NO: 4120434 - DNA, 25 bp, Homo sapien
gaaaaagcagctgttctggcggctt

SEQ ID NO: 4120435 - DNA, 25 bp, Homo sapien
tgtctctggtgtcctgcactggggc

SEQ ID NO: 4120436 - DNA, 25 bp, Homo sapien
tcaaagtttcaactccctctccggc

SEQ ID NO: 4120437 - DNA, 25 bp, Homo sapien
cctctccggccaacaatgctgacca

SEQ ID NO: 4120438 - DNA, 25 bp, Homo sapien
caggccttgccagtctcgaggagat

SEQ ID NO: 4120439 - DNA, 25 bp, Homo sapien
cagaggtcggggaatcaccaaggac

SEQ ID NO: 4120440 - DNA, 25 bp, Homo sapien
ggtcggggaatcaccaaggacagga

SEQ ID NO: 4120441 - DNA, 25 bp, Homo sapien
agaggtcggggaatcaccaaggaca

SEQ ID NO: 4120442 - DNA, 25 bp, Homo sapien
gaggtcggggaatcaccaaggacag

SEQ ID NO: 4120443 - DNA, 25 bp, Homo sapien
gccagaacccctctgaagtcagaac

SEQ ID NO: 4120444 - DNA, 25 bp, Homo sapien
agttaaagctgcagccagaacccct

SEQ ID NO: 4120445 - DNA, 25 bp, Homo sapien
ctgtcacaacatatggctgagttaa

SEQ ID NO: 4120446 - DNA, 25 bp, Homo sapien
aacatatggctgagttaaagctgca

SEQ ID NO: 4120447 - DNA, 25 bp, Homo sapien
tctttggtccgaaaatgaattctga

SEQ ID NO: 4120448 - DNA, 25 bp, Homo sapien
caagtcataactgcaaacggcttcg

SEQ ID NO: 4120449 - DNA, 25 bp, Homo sapien
attctgagatccaattagcaggaag

SEQ ID NO: 4120450 - DNA, 25 bp, Homo sapien
attgctcccgtgtaatgctgctcca

SEQ ID NO: 4120451 - DNA, 25 bp, Homo sapien
gaggattggatctgctatatttccc

SEQ ID NO: 4120452 - DNA, 25 bp, Homo sapien
tagaggatgaacaactcaattcgtc

SEQ ID NO: 4120453 - DNA, 25 bp, Homo sapien
tatttcccttcccaagtttatcatc

SEQ ID NO: 4120454 - DNA, 25 bp, Homo sapien
cagacacatatcaaaaccagaccga

SEQ ID NO: 4120455 - DNA, 25 bp, Homo sapien
tgcactcagcagctcttaggcagtt

SEQ ID NO: 4120456 - DNA, 25 bp, Homo sapien
tcagctgcacaggatattgaaatct

SEQ ID NO: 4120457 - DNA, 25 bp, Homo sapien
tctgcagaaggtcatagagggcttc

SEQ ID NO: 4120458 - DNA, 25 bp, Homo sapien
ccaaactgggtacctgcttcttagc

SEQ ID NO: 4120459 - DNA, 25 bp, Homo sapien
tttgcactctggatccccacggtct

SEQ ID NO: 4120460 - DNA, 25 bp, Homo sapien
ttgacagacaatggcggtatcagct

SEQ ID NO: 4120461 - DNA, 25 bp, Homo sapien
acaatggcggtatcagcttggtagc

SEQ ID NO: 4120462 - DNA, 25 bp, Homo sapien
aatagaggaggggatatccctaaag

SEQ ID NO: 4120463 - DNA, 25 bp, Homo sapien
gctggcggctgaaccgtaagcccat

SEQ ID NO: 4120464 - DNA, 25 bp, Homo sapien
tggtgtggagcgtggccgccctcat

SEQ ID NO: 4120465 - DNA, 25 bp, Homo sapien
taagcccattgagtccacgctggtg

SEQ ID NO: 4120466 - DNA, 25 bp, Homo sapien
tggtggcctgcttcatgaccctggt

SEQ ID NO: 4120467 - DNA, 25 bp, Homo sapien
cgcgctgccagcctaccccgcggcc

SEQ ID NO: 4120468 - DNA, 25 bp, Homo sapien
gctgccagcctaccccgcggccgag

SEQ ID NO: 4120469 - DNA, 25 bp, Homo sapien
cggccgagccgcccgggccgctgtg

SEQ ID NO: 4120470 - DNA, 25 bp, Homo sapien
cgcccgggccgctgtggctgcaggg

SEQ ID NO: 4120471 - DNA, 25 bp, Homo sapien
gcagcaggacctgcgcctctgcgtg

SEQ ID NO: 4120472 - DNA, 25 bp, Homo sapien
gcgggcggcgcgcagcaggacctgc

SEQ ID NO: 4120473 - DNA, 25 bp, Homo sapien
caggacctgcgcctctgcgtgggct

SEQ ID NO: 4120474 - DNA, 25 bp, Homo sapien
gcgcgcagcaggacctgcgcctctg

SEQ ID NO: 4120475 - DNA, 25 bp, Homo sapien
gcacggccgcgctttcttcgccgcc

SEQ ID NO: 4120476 - DNA, 25 bp, Homo sapien
cttccaccgcgtcgggccgccgctg

SEQ ID NO: 4120477 - DNA, 25 bp, Homo sapien
cgccgctgctcatcgagcacctggg

SEQ ID NO: 4120478 - DNA, 25 bp, Homo sapien
tcttctccaccaacgcgcacggccg

SEQ ID NO: 4120479 - DNA, 25 bp, Homo sapien
gtcactctccactcgaaactccaca

SEQ ID NO: 4120480 - DNA, 25 bp, Homo sapien
gaattttcctcgcttgctgcgagga

SEQ ID NO: 4120481 - DNA, 25 bp, Homo sapien
cgcttgctgcgaggagaatcccaag

SEQ ID NO: 4120482 - DNA, 25 bp, Homo sapien
cttggaattttcctcgcttgctgcg

SEQ ID NO: 4120483 - DNA, 25 bp, Homo sapien
agaatgcaggttgctaggatgcaga

SEQ ID NO: 4120484 - DNA, 25 bp, Homo sapien
ctgcttggctccccaaatagatctc

SEQ ID NO: 4120485 - DNA, 25 bp, Homo sapien
gaatgcaggttgctaggatgcagag

SEQ ID NO: 4120486 - DNA, 25 bp, Homo sapien
gcttggctccccaaatagatctctt

SEQ ID NO: 4120487 - DNA, 25 bp, Homo sapien
tgtgttactatttgaagggtaatta

SEQ ID NO: 4120488 - DNA, 25 bp, Homo sapien
aaagtaggatctgtgttactatttg

SEQ ID NO: 4120489 - DNA, 25 bp, Homo sapien
ggtgacggagtcctcaggacggcac

SEQ ID NO: 4120490 - DNA, 25 bp, Homo sapien
ttacattctgaatgagggcgaggtg

SEQ ID NO: 4120491 - DNA, 25 bp, Homo sapien
aacacgagcatggaccaccctttgc

SEQ ID NO: 4120492 - DNA, 25 bp, Homo sapien
gtcagccaacacgagcatggaccac

SEQ ID NO: 4120493 - DNA, 25 bp, Homo sapien
caacacgagcatggaccaccctttg

SEQ ID NO: 4120494 - DNA, 25 bp, Homo sapien
tcagtcagccaacacgagcatggac

SEQ ID NO: 4120495 - DNA, 25 bp, Homo sapien
gaacatctgcctgaatgagcacatc

SEQ ID NO: 4120496 - DNA, 25 bp, Homo sapien
taggagcccatagatccagcaagaa

SEQ ID NO: 4120497 - DNA, 25 bp, Homo sapien
caagaggcaatctcaacgtgaagag

SEQ ID NO: 4120498 - DNA, 25 bp, Homo sapien
tgtcccacaagcatgtaggagccca

SEQ ID NO: 4120499 - DNA, 25 bp, Homo sapien
ttggtgcatgcaatcaatcctccac

SEQ ID NO: 4120500 - DNA, 25 bp, Homo sapien
gaatacaccggcactcttggtgcat

SEQ ID NO: 4120501 - DNA, 25 bp, Homo sapien
gaaggagcaagccttaattgcatca

SEQ ID NO: 4120502 - DNA, 25 bp, Homo sapien
gaacggaagcttgctgaatacaccg

SEQ ID NO: 4120503 - DNA, 25 bp, Homo sapien
ggcctaaatctgctcccaacactgg

SEQ ID NO: 4120504 - DNA, 25 bp, Homo sapien
gcaggcctaaatctgctcccaacac

SEQ ID NO: 4120505 - DNA, 25 bp, Homo sapien
taaatctgctcccaacactggtatc

SEQ ID NO: 4120506 - DNA, 25 bp, Homo sapien
cctaaatctgctcccaacactggta

SEQ ID NO: 4120507 - DNA, 25 bp, Homo sapien
gcacatgctggcttgaccagtgtcc

SEQ ID NO: 4120508 - DNA, 25 bp, Homo sapien
tgtcctcaacagacagcaaggcctt

SEQ ID NO: 4120509 - DNA, 25 bp, Homo sapien
ggacagctaggccagctgtgccctt

SEQ ID NO: 4120510 - DNA, 25 bp, Homo sapien
ttttccaccgtgagttcaaggtgcc

SEQ ID NO: 4120511 - DNA, 25 bp, Homo sapien
tgtcccaagttctcgcaacatttga

SEQ ID NO: 4120512 - DNA, 25 bp, Homo sapien
tttgagcaggtccatccagccctgc

SEQ ID NO: 4120513 - DNA, 25 bp, Homo sapien
caacatttgagcaggtccatccagc

SEQ ID NO: 4120514 - DNA, 25 bp, Homo sapien
caaggtgttataactgtcccaagtt

SEQ ID NO: 4120515 - DNA, 25 bp, Homo sapien
gcccaccctccaggggtcaggcaga

SEQ ID NO: 4120516 - DNA, 25 bp, Homo sapien
ccaccctccaggggtcaggcagaca

SEQ ID NO: 4120517 - DNA, 25 bp, Homo sapien
accctccaggggtcaggcagacaat

SEQ ID NO: 4120518 - DNA, 25 bp, Homo sapien
ggcccaccctccaggggtcaggcag

SEQ ID NO: 4120519 - DNA, 25 bp, Homo sapien
tcccaccatggatgtagggaaaggc

SEQ ID NO: 4120520 - DNA, 25 bp, Homo sapien
ctttcccaccatggatgtagggaaa

SEQ ID NO: 4120521 - DNA, 25 bp, Homo sapien
agggaaaggcatcctccggctgcat

SEQ ID NO: 4120522 - DNA, 25 bp, Homo sapien
ccaccatggatgtagggaaaggcat

SEQ ID NO: 4120523 - DNA, 25 bp, Homo sapien
gtagcatttcaaactcctatgaaca

SEQ ID NO: 4120524 - DNA, 25 bp, Homo sapien
ttcactgatgtcagttcctcctgca

SEQ ID NO: 4120525 - DNA, 25 bp, Homo sapien
taggtccaggcccaccatgggctct

SEQ ID NO: 4120526 - DNA, 25 bp, Homo sapien
tgaaatgtcttttgatgcgcccatc

SEQ ID NO: 4120527 - DNA, 25 bp, Homo sapien
cctaaagctcctaaatctgtttcac

SEQ ID NO: 4120528 - DNA, 25 bp, Homo sapien
taaatctgtttcacccttctgctcc

SEQ ID NO: 4120529 - DNA, 25 bp, Homo sapien
tctgctccaacaccactctctcatc

SEQ ID NO: 4120530 - DNA, 25 bp, Homo sapien
cacccttctgctccaacaccactct

SEQ ID NO: 4120531 - DNA, 25 bp, Homo sapien
tcactcccaacacaaacatggctgc

SEQ ID NO: 4120532 - DNA, 25 bp, Homo sapien
actcccaacacaaacatggctgcca

SEQ ID NO: 4120533 - DNA, 25 bp, Homo sapien
ctcactcccaacacaaacatggctg

SEQ ID NO: 4120534 - DNA, 25 bp, Homo sapien
cccaacacaaacatggctgccaccc

SEQ ID NO: 4120535 - DNA, 25 bp, Homo sapien
tagcagctgctaaagtaacatggtg

SEQ ID NO: 4120536 - DNA, 25 bp, Homo sapien
tgattcggccccctttaatagcagc

SEQ ID NO: 4120537 - DNA, 25 bp, Homo sapien
gtaacatggtgatcagtagtctggt

SEQ ID NO: 4120538 - DNA, 25 bp, Homo sapien
ggaagtctgtgggttcaaaggcatt

SEQ ID NO: 4120539 - DNA, 25 bp, Homo sapien
tctcgcctctggtaactgggtgcct

SEQ ID NO: 4120540 - DNA, 25 bp, Homo sapien
ctttgccttgagaggccactgtctt

SEQ ID NO: 4120541 - DNA, 25 bp, Homo sapien
tgcctggatctctcgcctctggtaa

SEQ ID NO: 4120542 - DNA, 25 bp, Homo sapien
agactcccatgtctgactgcctgga

SEQ ID NO: 4120543 - DNA, 25 bp, Homo sapien
gcttcactgtaagtgtctggtggac

SEQ ID NO: 4120544 - DNA, 25 bp, Homo sapien
aagtgtctggtggacagatgtcctc

SEQ ID NO: 4120545 - DNA, 25 bp, Homo sapien
atcctgtcggtgcagaggtggcttc

SEQ ID NO: 4120546 - DNA, 25 bp, Homo sapien
gaacggtgagcagatacccctgaaa

SEQ ID NO: 4120547 - DNA, 25 bp, Homo sapien
tcagatgctctttttggatatcaca

SEQ ID NO: 4120548 - DNA, 25 bp, Homo sapien
aactgatgccggcactcagctgctg

SEQ ID NO: 4120549 - DNA, 25 bp, Homo sapien
agatgtcttactcaggtctcctgta

SEQ ID NO: 4120550 - DNA, 25 bp, Homo sapien
gcagttgggatctgctagtgtccac

SEQ ID NO: 4120551 - DNA, 25 bp, Homo sapien
tgctgggcccactaaagtagctgtc

SEQ ID NO: 4120552 - DNA, 25 bp, Homo sapien
gctgtttctcggagagtctgccagc

SEQ ID NO: 4120553 - DNA, 25 bp, Homo sapien
gagagtctgccagcagacggccctc

SEQ ID NO: 4120554 - DNA, 25 bp, Homo sapien
acagctgtttctcggagagtctgcc

SEQ ID NO: 4120555 - DNA, 25 bp, Homo sapien
tgacagctgtttctcggagagtctg

SEQ ID NO: 4120556 - DNA, 25 bp, Homo sapien
tctggccctgtcctcatgtctgcag

SEQ ID NO: 4120557 - DNA, 25 bp, Homo sapien
ccttcaaccagtcttctcagagttc

SEQ ID NO: 4120558 - DNA, 25 bp, Homo sapien
tatcttcttcctgcggcatttggtt

SEQ ID NO: 4120559 - DNA, 25 bp, Homo sapien
cccaagacctagactgaaagccact

SEQ ID NO: 4120560 - DNA, 25 bp, Homo sapien
gtttcccctgagcgggagcccacag

SEQ ID NO: 4120561 - DNA, 25 bp, Homo sapien
agcaccctgggtaggatgggcagcc

SEQ ID NO: 4120562 - DNA, 25 bp, Homo sapien
tgtttcccctgagcgggagcccaca

SEQ ID NO: 4120563 - DNA, 25 bp, Homo sapien
cagcaccctgggtaggatgggcagc

SEQ ID NO: 4120564 - DNA, 25 bp, Homo sapien
gcctgagatcagtaatgtttgggtt

SEQ ID NO: 4120565 - DNA, 25 bp, Homo sapien
aaaatgaaaatcctggaacagttga

SEQ ID NO: 4120566 - DNA, 25 bp, Homo sapien
tcaaatccgatttcctgttcctggt

SEQ ID NO: 4120567 - DNA, 25 bp, Homo sapien
tgagctgaatgtgacttaggatgtg

SEQ ID NO: 4120568 - DNA, 25 bp, Homo sapien
tgaaatcaaggtttccacagggaca

SEQ ID NO: 4120569 - DNA, 25 bp, Homo sapien
acgctctgcctctgcgtcacatgga

SEQ ID NO: 4120570 - DNA, 25 bp, Homo sapien
agggacatgctctgtctgagactct

SEQ ID NO: 4120571 - DNA, 25 bp, Homo sapien
gcctctgcgtcacatggagttcttc

SEQ ID NO: 4120572 - DNA, 25 bp, Homo sapien
atgcctcctcatcctgaatatcgtt

SEQ ID NO: 4120573 - DNA, 25 bp, Homo sapien
cctgaatatcgttttgggttctaag

SEQ ID NO: 4120574 - DNA, 25 bp, Homo sapien
tgagacctctaatgcctcctcatcc

SEQ ID NO: 4120575 - DNA, 25 bp, Homo sapien
tcctcatcctgaatatcgttttggg

SEQ ID NO: 4120576 - DNA, 25 bp, Homo sapien
cggagtggcaccacagcccatccca

SEQ ID NO: 4120577 - DNA, 25 bp, Homo sapien
accggagtggcaccacagcccatcc

SEQ ID NO: 4120578 - DNA, 25 bp, Homo sapien
gaggcaccggagtggcaccacagcc

SEQ ID NO: 4120579 - DNA, 25 bp, Homo sapien
gcaccggagtggcaccacagcccat

SEQ ID NO: 4120580 - DNA, 25 bp, Homo sapien
agctctccagtgcggtaagtaggat

SEQ ID NO: 4120581 - DNA, 25 bp, Homo sapien
cagtgcggtaagtaggattcatggt

SEQ ID NO: 4120582 - DNA, 25 bp, Homo sapien
tccagtgcggtaagtaggattcatg

SEQ ID NO: 4120583 - DNA, 25 bp, Homo sapien
tctccagtgcggtaagtaggattca

SEQ ID NO: 4120584 - DNA, 25 bp, Homo sapien
gtgggcaaaagcacagctattgaca

SEQ ID NO: 4120585 - DNA, 25 bp, Homo sapien
tgtgggcaaaagcacagctattgac

SEQ ID NO: 4120586 - DNA, 25 bp, Homo sapien
tgggcaaaagcacagctattgacac

SEQ ID NO: 4120587 - DNA, 25 bp, Homo sapien
ttgtgggcaaaagcacagctattga

SEQ ID NO: 4120588 - DNA, 25 bp, Homo sapien
tctgtggtcatgactcttctgagca

SEQ ID NO: 4120589 - DNA, 25 bp, Homo sapien
ggcacagcccagtcaacaacctgga

SEQ ID NO: 4120590 - DNA, 25 bp, Homo sapien
gcctgttcctaaaactctgggcaca

SEQ ID NO: 4120591 - DNA, 25 bp, Homo sapien
tgatgtatggactcagtgagcctgt

SEQ ID NO: 4120592 - DNA, 25 bp, Homo sapien
actggagcgggatgtaaatgacttc

SEQ ID NO: 4120593 - DNA, 25 bp, Homo sapien
gagcgggatgtaaatgacttcatta

SEQ ID NO: 4120594 - DNA, 25 bp, Homo sapien
aaggatgtcataagcaaaggtgagg

SEQ ID NO: 4120595 - DNA, 25 bp, Homo sapien
aggatgtcataagcaaaggtgagga

SEQ ID NO: 4120596 - DNA, 25 bp, Homo sapien
tgccagagggacgtggacacagggt

SEQ ID NO: 4120597 - DNA, 25 bp, Homo sapien
ctgtgccagagggacgtggacacag

SEQ ID NO: 4120598 - DNA, 25 bp, Homo sapien
acacagggtggatagtgctgatgtc

SEQ ID NO: 4120599 - DNA, 25 bp, Homo sapien
cgtggacacagggtggatagtgctg

SEQ ID NO: 4120600 - DNA, 25 bp, Homo sapien
aaaataggacacaggtctggtccta

SEQ ID NO: 4120601 - DNA, 25 bp, Homo sapien
gacacaggtctggtcctatttcccc

SEQ ID NO: 4120602 - DNA, 25 bp, Homo sapien
taggacacaggtctggtcctatttc

SEQ ID NO: 4120603 - DNA, 25 bp, Homo sapien
gaaaataggacacaggtctggtcct

SEQ ID NO: 4120604 - DNA, 25 bp, Homo sapien
acctctgctcggatgttaattatct

SEQ ID NO: 4120605 - DNA, 25 bp, Homo sapien
gagacctctgctcggatgttaatta

SEQ ID NO: 4120606 - DNA, 25 bp, Homo sapien
cagagacctctgctcggatgttaat

SEQ ID NO: 4120607 - DNA, 25 bp, Homo sapien
tcagagacctctgctcggatgttaa

SEQ ID NO: 4120608 - DNA, 25 bp, Homo sapien
atgtttagcactgagattaatgtcc

SEQ ID NO: 4120609 - DNA, 25 bp, Homo sapien
tttagcactgagattaatgtcctcc

SEQ ID NO: 4120610 - DNA, 25 bp, Homo sapien
ttgaggaaaggcaattccttacatg

SEQ ID NO: 4120611 - DNA, 25 bp, Homo sapien
ttccaaagatagctgaaatagaagc

SEQ ID NO: 4120612 - DNA, 25 bp, Homo sapien
taggtaaggcaaactcactagaaat

SEQ ID NO: 4120613 - DNA, 25 bp, Homo sapien
ccctctaggtaaggcaaactcacta

SEQ ID NO: 4120614 - DNA, 25 bp, Homo sapien
tctaggtaaggcaaactcactagaa

SEQ ID NO: 4120615 - DNA, 25 bp, Homo sapien
gtaaggcaaactcactagaaatgac

SEQ ID NO: 4120616 - DNA, 25 bp, Homo sapien
tactcctcgttctccacctttaggc

SEQ ID NO: 4120617 - DNA, 25 bp, Homo sapien
ctcgttctccacctttaggcgagca

SEQ ID NO: 4120618 - DNA, 25 bp, Homo sapien
cctctactcctcgttctccaccttt

SEQ ID NO: 4120619 - DNA, 25 bp, Homo sapien
tcctcgttctccacctttaggcgag

SEQ ID NO: 4120620 - DNA, 25 bp, Homo sapien
gacctcaggcggatttctcgtctgg

SEQ ID NO: 4120621 - DNA, 25 bp, Homo sapien
ctcaggcggatttctcgtctggaac

SEQ ID NO: 4120622 - DNA, 25 bp, Homo sapien
tgacctcaggcggatttctcgtctg

SEQ ID NO: 4120623 - DNA, 25 bp, Homo sapien
tgtgacctcaggcggatttctcgtc

SEQ ID NO: 4120624 - DNA, 25 bp, Homo sapien
tcataagccggagtaaatcccagat

SEQ ID NO: 4120625 - DNA, 25 bp, Homo sapien
ctcaaatcataagccggagtaaatc

SEQ ID NO: 4120626 - DNA, 25 bp, Homo sapien
aaatcataagccggagtaaatccca

SEQ ID NO: 4120627 - DNA, 25 bp, Homo sapien
cccagatagattaaataatgttttt

SEQ ID NO: 4120628 - DNA, 25 bp, Homo sapien
tcagaagagaggcataaaaacccaa

SEQ ID NO: 4120629 - DNA, 25 bp, Homo sapien
cagaagagaggcataaaaacccaat

SEQ ID NO: 4120630 - DNA, 25 bp, Homo sapien
cttttcagaagagaggcataaaaac

SEQ ID NO: 4120631 - DNA, 25 bp, Homo sapien
tttcagaagagaggcataaaaaccc

SEQ ID NO: 4120632 - DNA, 25 bp, Homo sapien
ctggtacatccgggaattactctcc

SEQ ID NO: 4120633 - DNA, 25 bp, Homo sapien
tacatccgggaattactctcctttc

SEQ ID NO: 4120634 - DNA, 25 bp, Homo sapien
tggtacatccgggaattactctcct

SEQ ID NO: 4120635 - DNA, 25 bp, Homo sapien
ccactttcccgtggcactgtagatg

SEQ ID NO: 4120636 - DNA, 25 bp, Homo sapien
cctttcttgtctgcaatgtatactc

SEQ ID NO: 4120637 - DNA, 25 bp, Homo sapien
ttcttgtctgcaatgtatactcttt

SEQ ID NO: 4120638 - DNA, 25 bp, Homo sapien
tccactttcccgtggcactgtagat

SEQ ID NO: 4120639 - DNA, 25 bp, Homo sapien
ctgttcttttattcgttgatgccac

SEQ ID NO: 4120640 - DNA, 25 bp, Homo sapien
cctgttcttttattcgttgatgcca

SEQ ID NO: 4120641 - DNA, 25 bp, Homo sapien
agcttctgaaattttggaggcctgt

SEQ ID NO: 4120642 - DNA, 25 bp, Homo sapien
acatggaaagcacgtaaaattttgg

SEQ ID NO: 4120643 - DNA, 25 bp, Homo sapien
ggataagggaacatggaaagcacgt

SEQ ID NO: 4120644 - DNA, 25 bp, Homo sapien
agaaggataagggaacatggaaagc

SEQ ID NO: 4120645 - DNA, 25 bp, Homo sapien
taagggaacatggaaagcacgtaaa

SEQ ID NO: 4120646 - DNA, 25 bp, Homo sapien
tcatcttctggaaccgtgctatggt

SEQ ID NO: 4120647 - DNA, 25 bp, Homo sapien
tggaaccgtgctatggtgtcgctga

SEQ ID NO: 4120648 - DNA, 25 bp, Homo sapien
atggtgtcgctgatggtgtagacac

SEQ ID NO: 4120649 - DNA, 25 bp, Homo sapien
tcttctggaaccgtgctatggtgtc

SEQ ID NO: 4120650 - DNA, 25 bp, Homo sapien
tttatcacccggcttctggaccaga

SEQ ID NO: 4120651 - DNA, 25 bp, Homo sapien
gatgcttttatcacccggcttctgg

SEQ ID NO: 4120652 - DNA, 25 bp, Homo sapien
cttgatgcttttatcacccggcttc

SEQ ID NO: 4120653 - DNA, 25 bp, Homo sapien
tatcacccggcttctggaccagaag

SEQ ID NO: 4120654 - DNA, 25 bp, Homo sapien
tctttggccacatttaacatagttg

SEQ ID NO: 4120655 - DNA, 25 bp, Homo sapien
tggccacatttaacatagttgcttt

SEQ ID NO: 4120656 - DNA, 25 bp, Homo sapien
tttggccacatttaacatagttgct

SEQ ID NO: 4120657 - DNA, 25 bp, Homo sapien
ctttggccacatttaacatagttgc

SEQ ID NO: 4120658 - DNA, 25 bp, Homo sapien
gattcctctcgactgcggcattttc

SEQ ID NO: 4120659 - DNA, 25 bp, Homo sapien
ttcagcaggcaatccaaaagcatcc

SEQ ID NO: 4120660 - DNA, 25 bp, Homo sapien
aactttgtggatgtagattcctctc

SEQ ID NO: 4120661 - DNA, 25 bp, Homo sapien
gcggcattttcagcaggcaatccaa

SEQ ID NO: 4120662 - DNA, 25 bp, Homo sapien
ggcccagacgatcaagctgtttcct

SEQ ID NO: 4120663 - DNA, 25 bp, Homo sapien
caggcccagacgatcaagctgtttc

SEQ ID NO: 4120664 - DNA, 25 bp, Homo sapien
gcccagacgatcaagctgtttcctc

SEQ ID NO: 4120665 - DNA, 25 bp, Homo sapien
acaggcccagacgatcaagctgttt

SEQ ID NO: 4120666 - DNA, 25 bp, Homo sapien
taaacaaccgatactctgcaagaga

SEQ ID NO: 4120667 - DNA, 25 bp, Homo sapien
gacaaacacctcctatctatatggg

SEQ ID NO: 4120668 - DNA, 25 bp, Homo sapien
ggttcccaacttatgacggcttgcc

SEQ ID NO: 4120669 - DNA, 25 bp, Homo sapien
cacacagtcatgagggtaaacaacc

SEQ ID NO: 4120670 - DNA, 25 bp, Homo sapien
gcagtgcccaaaatgagccgttttg

SEQ ID NO: 4120671 - DNA, 25 bp, Homo sapien
aaatgagccgttttgctgcctgcaa

SEQ ID NO: 4120672 - DNA, 25 bp, Homo sapien
ccacggatgcaaacagtgacagcag

SEQ ID NO: 4120673 - DNA, 25 bp, Homo sapien
tcaatcatcaattccacggatgcaa

SEQ ID NO: 4120674 - DNA, 25 bp, Homo sapien
ttcttcaaccatctgtcaaattcca

SEQ ID NO: 4120675 - DNA, 25 bp, Homo sapien
cagcctcttctcctaattccttttt

SEQ ID NO: 4120676 - DNA, 25 bp, Homo sapien
tcttcaaccatctgtcaaattccat

SEQ ID NO: 4120677 - DNA, 25 bp, Homo sapien
ctccttttgataggccagcccagcc

SEQ ID NO: 4120678 - DNA, 25 bp, Homo sapien
taataaagagatactgagtccactt

SEQ ID NO: 4120679 - DNA, 25 bp, Homo sapien
aatctggcaaacacgtagttatttc

SEQ ID NO: 4120680 - DNA, 25 bp, Homo sapien
ctgagtccacttgtagtaatctggc

SEQ ID NO: 4120681 - DNA, 25 bp, Homo sapien
cacctgctcattggcaagcactgtt

SEQ ID NO: 4120682 - DNA, 25 bp, Homo sapien
aagcactgtttgatccactgggtcc

SEQ ID NO: 4120683 - DNA, 25 bp, Homo sapien
cacctttgctccagaacgccatgaa

SEQ ID NO: 4120684 - DNA, 25 bp, Homo sapien
taaaccattgtctgaggtacttctg

SEQ ID NO: 4120685 - DNA, 25 bp, Homo sapien
ctcctctttcctccagccccatgtg

SEQ ID NO: 4120686 - DNA, 25 bp, Homo sapien
tttcctccagccccatgtgtgcatg

SEQ ID NO: 4120687 - DNA, 25 bp, Homo sapien
ctctttcctccagccccatgtgtgc

SEQ ID NO: 4120688 - DNA, 25 bp, Homo sapien
tcctccagccccatgtgtgcatgct

SEQ ID NO: 4120689 - DNA, 25 bp, Homo sapien
ggtcatgtgatttccctaaactcca

SEQ ID NO: 4120690 - DNA, 25 bp, Homo sapien
aatacttccctatcgactcccaagg

SEQ ID NO: 4120691 - DNA, 25 bp, Homo sapien
caaatcgaatctgagggaacccaat

SEQ ID NO: 4120692 - DNA, 25 bp, Homo sapien
tctggcagacaggactggtacgtgt

SEQ ID NO: 4120693 - DNA, 25 bp, Homo sapien
tggaaggtctgccaacgcgtcctgc

SEQ ID NO: 4120694 - DNA, 25 bp, Homo sapien
aaggtctgccaacgcgtcctgcatg

SEQ ID NO: 4120695 - DNA, 25 bp, Homo sapien
tctggaaggtctgccaacgcgtcct

SEQ ID NO: 4120696 - DNA, 25 bp, Homo sapien
cagcccacacagtccccaatccagt

SEQ ID NO: 4120697 - DNA, 25 bp, Homo sapien
tcagagagctgtgcccatgtaggag

SEQ ID NO: 4120698 - DNA, 25 bp, Homo sapien
cttttcgcccgtggcttgcccatga

SEQ ID NO: 4120699 - DNA, 25 bp, Homo sapien
ggtggccgtataggcagtcagcttt

SEQ ID NO: 4120700 - DNA, 25 bp, Homo sapien
gccacgtgggaggtgccataaatgg

SEQ ID NO: 4120701 - DNA, 25 bp, Homo sapien
gcatctgccctttcagcaaaaaatg

SEQ ID NO: 4120702 - DNA, 25 bp, Homo sapien
tctctaatgtgcctgtaatgtgtca

SEQ ID NO: 4120703 - DNA, 25 bp, Homo sapien
ggagacaaggacaaaacagtagtga

SEQ ID NO: 4120704 - DNA, 25 bp, Homo sapien
tgtcctttggagagaccgcatctgc

SEQ ID NO: 4120705 - DNA, 25 bp, Homo sapien
cctttgtcctcaccccatatggata

SEQ ID NO: 4120706 - DNA, 25 bp, Homo sapien
accctttgtcctcaccccatatgga

SEQ ID NO: 4120707 - DNA, 25 bp, Homo sapien
ccctttgtcctcaccccatatggat

SEQ ID NO: 4120708 - DNA, 25 bp, Homo sapien
tcaccctttgtcctcaccccatatg

SEQ ID NO: 4120709 - DNA, 25 bp, Homo sapien
ttaccccagaattacagatctgctc

SEQ ID NO: 4120710 - DNA, 25 bp, Homo sapien
ccaaaccattaccccagaattacag

SEQ ID NO: 4120711 - DNA, 25 bp, Homo sapien
attaccccagaattacagatctgct

SEQ ID NO: 4120712 - DNA, 25 bp, Homo sapien
gagatggtagacaattagtgagttc

SEQ ID NO: 4120713 - DNA, 25 bp, Homo sapien
catatatgtgactatatggagagct

SEQ ID NO: 4120714 - DNA, 25 bp, Homo sapien
taatgacctaagtaaagtcccagtg

SEQ ID NO: 4120715 - DNA, 25 bp, Homo sapien
ggagacaagccatacgtgcatatat

SEQ ID NO: 4120716 - DNA, 25 bp, Homo sapien
aatccagagagccttccaagtcagc

SEQ ID NO: 4120717 - DNA, 25 bp, Homo sapien
aaaataacgacagggacctcctgct

SEQ ID NO: 4120718 - DNA, 25 bp, Homo sapien
agctttggccaaaataacgacaggg

SEQ ID NO: 4120719 - DNA, 25 bp, Homo sapien
tccaagtcagctttggccaaaataa

SEQ ID NO: 4120720 - DNA, 25 bp, Homo sapien
ggtgtcctctgagctagtactggga

SEQ ID NO: 4120721 - DNA, 25 bp, Homo sapien
gagctgctcagtctctctgtgccat

SEQ ID NO: 4120722 - DNA, 25 bp, Homo sapien
tgtgccatctggcaaagtttcaatg

SEQ ID NO: 4120723 - DNA, 25 bp, Homo sapien
agtttcaatgacttcagagtaggcc

SEQ ID NO: 4120724 - DNA, 25 bp, Homo sapien
ttgccagtgaaagacgcgatgttgg

SEQ ID NO: 4120725 - DNA, 25 bp, Homo sapien
tgagtcagggctagaaaagcatcct

SEQ ID NO: 4120726 - DNA, 25 bp, Homo sapien
caggagcagttcacccactctgaag

SEQ ID NO: 4120727 - DNA, 25 bp, Homo sapien
catcctgccgggtcatacctgtgaa

SEQ ID NO: 4120728 - DNA, 25 bp, Homo sapien
tagtaccaagcagaatcaacaaagg

SEQ ID NO: 4120729 - DNA, 25 bp, Homo sapien
cagtgtatctgaagtagtaccaagc

SEQ ID NO: 4120730 - DNA, 25 bp, Homo sapien
agaatcaacaaaggtatccatcgtg

SEQ ID NO: 4120731 - DNA, 25 bp, Homo sapien
tgtggattatgagggtcagtgtatc

SEQ ID NO: 4120732 - DNA, 25 bp, Homo sapien
cacaggcatccagtaatcggccact

SEQ ID NO: 4120733 - DNA, 25 bp, Homo sapien
acaagtgcatgacggcatgttcttt

SEQ ID NO: 4120734 - DNA, 25 bp, Homo sapien
tttccctccaatgtacaaatccaca

SEQ ID NO: 4120735 - DNA, 25 bp, Homo sapien
ttgatcatggcaaaaatgactaaag

SEQ ID NO: 4120736 - DNA, 25 bp, Homo sapien
agacaagagagcctgaattattgtc

SEQ ID NO: 4120737 - DNA, 25 bp, Homo sapien
gcagacaagagagcctgaattattg

SEQ ID NO: 4120738 - DNA, 25 bp, Homo sapien
agcagacaagagagcctgaattatt

SEQ ID NO: 4120739 - DNA, 25 bp, Homo sapien
cagacaagagagcctgaattattgt

SEQ ID NO: 4120740 - DNA, 25 bp, Homo sapien
ttccttgttctgtgcccagggccat

SEQ ID NO: 4120741 - DNA, 25 bp, Homo sapien
tcttcttccttgttctgtgcccagg

SEQ ID NO: 4120742 - DNA, 25 bp, Homo sapien
tcttccttgttctgtgcccagggcc

SEQ ID NO: 4120743 - DNA, 25 bp, Homo sapien
ttcttccttgttctgtgcccagggc

SEQ ID NO: 4120744 - DNA, 25 bp, Homo sapien
tatgggcccctatagcctgactgct

SEQ ID NO: 4120745 - DNA, 25 bp, Homo sapien
tattgaaaagtgtaagtcctagcgg

SEQ ID NO: 4120746 - DNA, 25 bp, Homo sapien
ggcattcagcccaattagcagaacg

SEQ ID NO: 4120747 - DNA, 25 bp, Homo sapien
taggcactgtctcctcactatgggc

SEQ ID NO: 4120748 - DNA, 25 bp, Homo sapien
tgtctgccccttgataaggccttgg

SEQ ID NO: 4120749 - DNA, 25 bp, Homo sapien
agatggtaggcggaatgtctgcccc

SEQ ID NO: 4120750 - DNA, 25 bp, Homo sapien
gatactgtccagatggtaggcggaa

SEQ ID NO: 4120751 - DNA, 25 bp, Homo sapien
ggccagcagcttatgaaaaggctcc

SEQ ID NO: 4120752 - DNA, 25 bp, Homo sapien
ctggatgggaccagatgggccattc

SEQ ID NO: 4120753 - DNA, 25 bp, Homo sapien
tggatgggaccagatgggccattct

SEQ ID NO: 4120754 - DNA, 25 bp, Homo sapien
gatgggaccagatgggccattctta

SEQ ID NO: 4120755 - DNA, 25 bp, Homo sapien
atgggaccagatgggccattcttac

SEQ ID NO: 4120756 - DNA, 25 bp, Homo sapien
tagaaatagcatcaataagtaaaaa

SEQ ID NO: 4120757 - DNA, 25 bp, Homo sapien
atagaaatagcatcaataagtaaaa

SEQ ID NO: 4120758 - DNA, 25 bp, Homo sapien
tatagaaatagcatcaataagtaaa

SEQ ID NO: 4120759 - DNA, 25 bp, Homo sapien
ctatagaaatagcatcaataagtaa

SEQ ID NO: 4120760 - DNA, 25 bp, Homo sapien
taggtatggtatgtgtcattgtgaa

SEQ ID NO: 4120761 - DNA, 25 bp, Homo sapien
aaaataatccataggtatggtatgt

SEQ ID NO: 4120762 - DNA, 25 bp, Homo sapien
taatccataggtatggtatgtgtca

SEQ ID NO: 4120763 - DNA, 25 bp, Homo sapien
tccataggtatggtatgtgtcattg

SEQ ID NO: 4120764 - DNA, 25 bp, Homo sapien
gtgtcgatcccatactgctccacaa

SEQ ID NO: 4120765 - DNA, 25 bp, Homo sapien
tggacttactcatcttctcccacgt

SEQ ID NO: 4120766 - DNA, 25 bp, Homo sapien
ccacaagatatccttctcaggaggg

SEQ ID NO: 4120767 - DNA, 25 bp, Homo sapien
gcagcaaaaaggatgtagagccgaa

SEQ ID NO: 4120768 - DNA, 25 bp, Homo sapien
gcgtgcaacataagggtgattgact

SEQ ID NO: 4120769 - DNA, 25 bp, Homo sapien
cataagggtgattgacttggtataa

SEQ ID NO: 4120770 - DNA, 25 bp, Homo sapien
caacataagggtgattgacttggta

SEQ ID NO: 4120771 - DNA, 25 bp, Homo sapien
agagagcgtgcaacataagggtgat

SEQ ID NO: 4120772 - DNA, 25 bp, Homo sapien
gaagccctggcctcaataaaccgag

SEQ ID NO: 4120773 - DNA, 25 bp, Homo sapien
taaaccgagttgtcaaggtccacag

SEQ ID NO: 4120774 - DNA, 25 bp, Homo sapien
gacggagttcttgtactcccagagc

SEQ ID NO: 4120775 - DNA, 25 bp, Homo sapien
tctccttgttactcagcagctgagg

SEQ ID NO: 4120776 - DNA, 25 bp, Homo sapien
agtcccatcagctgagaaattgcag

SEQ ID NO: 4120777 - DNA, 25 bp, Homo sapien
ctgagtcccatcagctgagaaattg

SEQ ID NO: 4120778 - DNA, 25 bp, Homo sapien
cgagagggcattgctgagtcccatc

SEQ ID NO: 4120779 - DNA, 25 bp, Homo sapien
aattgcagaattcagtgagaagtcc

SEQ ID NO: 4120780 - DNA, 25 bp, Homo sapien
agagaaatgcactgagacctgctca

SEQ ID NO: 4120781 - DNA, 25 bp, Homo sapien
gagaaatgcactgagacctgctcaa

SEQ ID NO: 4120782 - DNA, 25 bp, Homo sapien
gaaatgcactgagacctgctcaaag

SEQ ID NO: 4120783 - DNA, 25 bp, Homo sapien
atgcactgagacctgctcaaaggtg

SEQ ID NO: 4120784 - DNA, 25 bp, Homo sapien
cagtggagcagccattaccatcagg

SEQ ID NO: 4120785 - DNA, 25 bp, Homo sapien
tggagaatgacgctctgagaggctt

SEQ ID NO: 4120786 - DNA, 25 bp, Homo sapien
ggagcagccattaccatcagggcac

SEQ ID NO: 4120787 - DNA, 25 bp, Homo sapien
gggctgtggagaatgacgctctgag

SEQ ID NO: 4120788 - DNA, 25 bp, Homo sapien
tgtccttgagctagccctaagggtg

SEQ ID NO: 4120789 - DNA, 25 bp, Homo sapien
agtcagttacttcttggagacacgc

SEQ ID NO: 4120790 - DNA, 25 bp, Homo sapien
tctagtaactaacatctgctggcct

SEQ ID NO: 4120791 - DNA, 25 bp, Homo sapien
taggtcccataaatttgtccttgag

SEQ ID NO: 4120792 - DNA, 25 bp, Homo sapien
gcgcccggcaagataagatttctta

SEQ ID NO: 4120793 - DNA, 25 bp, Homo sapien
tattctaccaaagcccaaattcatt

SEQ ID NO: 4120794 - DNA, 25 bp, Homo sapien
aaactgtccccacttactgacagca

SEQ ID NO: 4120795 - DNA, 25 bp, Homo sapien
gatttcttaagatacccaatcacaa

SEQ ID NO: 4120796 - DNA, 25 bp, Homo sapien
ctaagacatatctcctcgctctggg

SEQ ID NO: 4120797 - DNA, 25 bp, Homo sapien
cactagggctctgatgctgacacca

SEQ ID NO: 4120798 - DNA, 25 bp, Homo sapien
ctctgtgttctgactgactctctga

SEQ ID NO: 4120799 - DNA, 25 bp, Homo sapien
tctgtccagacaggatgcactaggg

SEQ ID NO: 4120800 - DNA, 25 bp, Homo sapien
ctggagatctactgtgcatcctggt

SEQ ID NO: 4120801 - DNA, 25 bp, Homo sapien
cacatctaaccagggaagcgtttgt

SEQ ID NO: 4120802 - DNA, 25 bp, Homo sapien
gacaccatggcataactattagaag

SEQ ID NO: 4120803 - DNA, 25 bp, Homo sapien
aaataagacctgactgcctgtagcc

SEQ ID NO: 4120804 - DNA, 25 bp, Homo sapien
tcttttactgttgaccagcaaagga

SEQ ID NO: 4120805 - DNA, 25 bp, Homo sapien
tgtctagaaacagtgtcagtggctc

SEQ ID NO: 4120806 - DNA, 25 bp, Homo sapien
gagtcttttgtctagaaacagtgtc

SEQ ID NO: 4120807 - DNA, 25 bp, Homo sapien
tgctcttttactgttgaccagcaaa

SEQ ID NO: 4120808 - DNA, 25 bp, Homo sapien
ggacacaaatgttctgggcagaagc

SEQ ID NO: 4120809 - DNA, 25 bp, Homo sapien
tggacacaaatgttctgggcagaag

SEQ ID NO: 4120810 - DNA, 25 bp, Homo sapien
ccagctgcagcgggaagatttccaa

SEQ ID NO: 4120811 - DNA, 25 bp, Homo sapien
tccgtatggcagttgtacaggatgc

SEQ ID NO: 4120812 - DNA, 25 bp, Homo sapien
cagctgcagcgggaagatttccaaa

SEQ ID NO: 4120813 - DNA, 25 bp, Homo sapien
acctccgtatggcagttgtacagga

SEQ ID NO: 4120814 - DNA, 25 bp, Homo sapien
tggtcctgtgtggcttgtcctgtga

SEQ ID NO: 4120815 - DNA, 25 bp, Homo sapien
ctggtcctgtgtggcttgtcctgtg

SEQ ID NO: 4120816 - DNA, 25 bp, Homo sapien
cgaggcacagaagcgtggggtcact

SEQ ID NO: 4120817 - DNA, 25 bp, Homo sapien
caatgccgaggcacagaagcgtggg

SEQ ID NO: 4120818 - DNA, 25 bp, Homo sapien
tgccgaggcacagaagcgtggggtc

SEQ ID NO: 4120819 - DNA, 25 bp, Homo sapien
gcaatgccgaggcacagaagcgtgg

SEQ ID NO: 4120820 - DNA, 25 bp, Homo sapien
aactccgggtccacagcaggccatg

SEQ ID NO: 4120821 - DNA, 25 bp, Homo sapien
gcacagagcttcctcggcaccagcg

SEQ ID NO: 4120822 - DNA, 25 bp, Homo sapien
gagcttcctcggcaccagcgccagg

SEQ ID NO: 4120823 - DNA, 25 bp, Homo sapien
aggaactccgggtccacagcaggcc

SEQ ID NO: 4120824 - DNA, 25 bp, Homo sapien
tcaatagccggataaggcaggcact

SEQ ID NO: 4120825 - DNA, 25 bp, Homo sapien
gggtcggcgctcactctgtattaag

SEQ ID NO: 4120826 - DNA, 25 bp, Homo sapien
tagtaaataagctcacacctgggaa

SEQ ID NO: 4120827 - DNA, 25 bp, Homo sapien
ttccaaggtgacaaggcggtagctc

SEQ ID NO: 4120828 - DNA, 25 bp, Homo sapien
cataaagcgccaatgagatgggcag

SEQ ID NO: 4120829 - DNA, 25 bp, Homo sapien
cgggcaggctggtcctaagtcatca

SEQ ID NO: 4120830 - DNA, 25 bp, Homo sapien
tctttgacgcatggcctcagcacaa

SEQ ID NO: 4120831 - DNA, 25 bp, Homo sapien
tgtaaagggaccagctcactaagct

SEQ ID NO: 4120832 - DNA, 25 bp, Homo sapien
gaacaaattcgtggactttgtcctg

SEQ ID NO: 4120833 - DNA, 25 bp, Homo sapien
ctttgtcctggtcccgggcaacttg

SEQ ID NO: 4120834 - DNA, 25 bp, Homo sapien
aaggacttcttgatgcttcgtcctt

SEQ ID NO: 4120835 - DNA, 25 bp, Homo sapien
tgacacccagctcgctttgaagaac

SEQ ID NO: 4120836 - DNA, 25 bp, Homo sapien
ggaccacatgtgaggctacttcaga

SEQ ID NO: 4120837 - DNA, 25 bp, Homo sapien
tgtgtgtcagaaccacagcaggcct

SEQ ID NO: 4120838 - DNA, 25 bp, Homo sapien
aattcccgagaagtgcctaaggcag

SEQ ID NO: 4120839 - DNA, 25 bp, Homo sapien
caggaccgaggtcaacagtcaagac

SEQ ID NO: 4120840 - DNA, 25 bp, Homo sapien
tatccccgctaacctgaagattagg

SEQ ID NO: 4120841 - DNA, 25 bp, Homo sapien
cactgccatgtgcaatgagactgag

SEQ ID NO: 4120842 - DNA, 25 bp, Homo sapien
ggctcaagtgcatcaatgtgtccag

SEQ ID NO: 4120843 - DNA, 25 bp, Homo sapien
tgttcaagccacaccatggaccaat

SEQ ID NO: 4120844 - DNA, 25 bp, Homo sapien
tgagcaactccgtgagcaggaactt

SEQ ID NO: 4120845 - DNA, 25 bp, Homo sapien
ctgcccagactgagcaactccgtga

SEQ ID NO: 4120846 - DNA, 25 bp, Homo sapien
gcaactccgtgagcaggaacttcat

SEQ ID NO: 4120847 - DNA, 25 bp, Homo sapien
cagactgagcaactccgtgagcagg

SEQ ID NO: 4120848 - DNA, 25 bp, Homo sapien
aggtgtgtgcccacagcgagccaac

SEQ ID NO: 4120849 - DNA, 25 bp, Homo sapien
tgtgtgcccacagcgagccaacgtt

SEQ ID NO: 4120850 - DNA, 25 bp, Homo sapien
cacagcgagccaacgttcacagata

SEQ ID NO: 4120851 - DNA, 25 bp, Homo sapien
gagccaacgttcacagatacacatg

SEQ ID NO: 4120852 - DNA, 25 bp, Homo sapien
gtgtaaaggacacattattcctttc

SEQ ID NO: 4120853 - DNA, 25 bp, Homo sapien
tcccctaagatctagttctcctctg

SEQ ID NO: 4120854 - DNA, 25 bp, Homo sapien
ccccgcgacagtgcctgaggaaggg

SEQ ID NO: 4120855 - DNA, 25 bp, Homo sapien
tattcctttctacacccccgcgaca

SEQ ID NO: 4120856 - DNA, 25 bp, Homo sapien
gaaataaagtttgctgggtcagacc

SEQ ID NO: 4120857 - DNA, 25 bp, Homo sapien
tggaactgaacggaacagaacctcc

SEQ ID NO: 4120858 - DNA, 25 bp, Homo sapien
gaggtctactacattcactcagagg

SEQ ID NO: 4120859 - DNA, 25 bp, Homo sapien
gatatctggcgacacttgctttagg

SEQ ID NO: 4120860 - DNA, 25 bp, Homo sapien
tgagcagccatgaccttttaggagc

SEQ ID NO: 4120861 - DNA, 25 bp, Homo sapien
taatcatacagaagactcccaccag

SEQ ID NO: 4120862 - DNA, 25 bp, Homo sapien
tgtgaggcacgttcttctgtcaggc

SEQ ID NO: 4120863 - DNA, 25 bp, Homo sapien
ggtgcacctgtagttggaggcctca

SEQ ID NO: 4120864 - DNA, 25 bp, Homo sapien
ggctgcagtgtcatgacactgtact

SEQ ID NO: 4120865 - DNA, 25 bp, Homo sapien
gaggctgcagtgtcatgacactgta

SEQ ID NO: 4120866 - DNA, 25 bp, Homo sapien
ttgaggctgcagtgtcatgacactg

SEQ ID NO: 4120867 - DNA, 25 bp, Homo sapien
gttgaggctgcagtgtcatgacact

SEQ ID NO: 4120868 - DNA, 25 bp, Homo sapien
cttttcctggcaggccagggagact

SEQ ID NO: 4120869 - DNA, 25 bp, Homo sapien
aggccagggagactggcaactcctc

SEQ ID NO: 4120870 - DNA, 25 bp, Homo sapien
gccagggagactggcaactcctctt

SEQ ID NO: 4120871 - DNA, 25 bp, Homo sapien
agggagactggcaactcctcttcct

SEQ ID NO: 4120872 - DNA, 25 bp, Homo sapien
gtagaaaaagtatatgcccatacct

SEQ ID NO: 4120873 - DNA, 25 bp, Homo sapien
aaagacttgactgtctgaagcaaaa

SEQ ID NO: 4120874 - DNA, 25 bp, Homo sapien
tatatgcccataccttcaaaggaca

SEQ ID NO: 4120875 - DNA, 25 bp, Homo sapien
aactgttgcaagaatgggtcaattt

SEQ ID NO: 4120876 - DNA, 25 bp, Homo sapien
tctggccttgaataaggcctcacta

SEQ ID NO: 4120877 - DNA, 25 bp, Homo sapien
ctcagcacctctggccttgaataag

SEQ ID NO: 4120878 - DNA, 25 bp, Homo sapien
tcccctacagctagaaacatctgaa

SEQ ID NO: 4120879 - DNA, 25 bp, Homo sapien
gtaaatggaattacttgggtctcca

SEQ ID NO: 4120880 - DNA, 25 bp, Homo sapien
caacctagaaactctgtgaatccca

SEQ ID NO: 4120881 - DNA, 25 bp, Homo sapien
caagcaagaggcgtttccctttata

SEQ ID NO: 4120882 - DNA, 25 bp, Homo sapien
cctagaaactctgtgaatcccagtc

SEQ ID NO: 4120883 - DNA, 25 bp, Homo sapien
cagcatatggacatggtcaccaacc

SEQ ID NO: 4120884 - DNA, 25 bp, Homo sapien
gatttaagagtccagccgaagttga

SEQ ID NO: 4120885 - DNA, 25 bp, Homo sapien
agtaaagacttccacctgcctagcg

SEQ ID NO: 4120886 - DNA, 25 bp, Homo sapien
caagtccggcccagtacaagtaaag

SEQ ID NO: 4120887 - DNA, 25 bp, Homo sapien
gttgagacctcaacgccagctggac

SEQ ID NO: 4120888 - DNA, 25 bp, Homo sapien
ccgggcctagcccaggtgccgtgtg

SEQ ID NO: 4120889 - DNA, 25 bp, Homo sapien
tgcagacaggtgtccgggcctagcc

SEQ ID NO: 4120890 - DNA, 25 bp, Homo sapien
gggcctagcccaggtgccgtgtgtg

SEQ ID NO: 4120891 - DNA, 25 bp, Homo sapien
aggtgtccgggcctagcccaggtgc

SEQ ID NO: 4120892 - DNA, 25 bp, Homo sapien
tcggaagagcccatccttagaggcc

SEQ ID NO: 4120893 - DNA, 25 bp, Homo sapien
catcttggtggcgaacaccctgcga

SEQ ID NO: 4120894 - DNA, 25 bp, Homo sapien
tcgatgaatttactggcctccaggc

SEQ ID NO: 4120895 - DNA, 25 bp, Homo sapien
gatctctgctcctgcggtgggtacg

SEQ ID NO: 4120896 - DNA, 25 bp, Homo sapien
ttacaagataactcaggcagggtgg

SEQ ID NO: 4120897 - DNA, 25 bp, Homo sapien
cagccccgagtttgatcttggaaga

SEQ ID NO: 4120898 - DNA, 25 bp, Homo sapien
tggtgctccgttctccaagtttggg

SEQ ID NO: 4120899 - DNA, 25 bp, Homo sapien
cagatcccaggctaccatcagaaga

SEQ ID NO: 4120900 - DNA, 25 bp, Homo sapien
ttgggtgagggcttctaatttcaac

SEQ ID NO: 4120901 - DNA, 25 bp, Homo sapien
aaagtaatcagccttcgggtgagca

SEQ ID NO: 4120902 - DNA, 25 bp, Homo sapien
tctctcgctccagacgttgggtgag

SEQ ID NO: 4120903 - DNA, 25 bp, Homo sapien
cagagggtctcagctcaggacctgg

SEQ ID NO: 4120904 - DNA, 25 bp, Homo sapien
tcaagtttctgaatcagaaaaagca

SEQ ID NO: 4120905 - DNA, 25 bp, Homo sapien
caagtttctgaatcagaaaaagcag

SEQ ID NO: 4120906 - DNA, 25 bp, Homo sapien
gactgtttggcaatgctggttagac

SEQ ID NO: 4120907 - DNA, 25 bp, Homo sapien
tggacggaggtgttcattgtacaac

SEQ ID NO: 4120908 - DNA, 25 bp, Homo sapien
ggtaaatgccatagggacagaatgc

SEQ ID NO: 4120909 - DNA, 25 bp, Homo sapien
aatgcacattggttgttgccaggag

SEQ ID NO: 4120910 - DNA, 25 bp, Homo sapien
cattctgtatcaccagtgggctcag

SEQ ID NO: 4120911 - DNA, 25 bp, Homo sapien
tgggtcatgccggtacaaacaagga

SEQ ID NO: 4120912 - DNA, 25 bp, Homo sapien
tgacaaatgatcaggcctgagaccc

SEQ ID NO: 4120913 - DNA, 25 bp, Homo sapien
tggaatgagcgcctcaaaaggcctg

SEQ ID NO: 4120914 - DNA, 25 bp, Homo sapien
aacaaatcgattgggcttggctttc

SEQ ID NO: 4120915 - DNA, 25 bp, Homo sapien
aaatcagcctcccttgaacaaatga

SEQ ID NO: 4120916 - DNA, 25 bp, Homo sapien
gcctcccttgaacaaatgatgatct

SEQ ID NO: 4120917 - DNA, 25 bp, Homo sapien
tgtggttctgaacaaatcgattggg

SEQ ID NO: 4120918 - DNA, 25 bp, Homo sapien
tctgctttagttttcgcatcttcaa

SEQ ID NO: 4120919 - DNA, 25 bp, Homo sapien
ttagttttcgcatcttcaaaacagg

SEQ ID NO: 4120920 - DNA, 25 bp, Homo sapien
caggagagaaaattggcgggcactt

SEQ ID NO: 4120921 - DNA, 25 bp, Homo sapien
agaaaattggcgggcactttgcagg

SEQ ID NO: 4120922 - DNA, 25 bp, Homo sapien
ccttccttgtgaaaaggctcaaaat

SEQ ID NO: 4120923 - DNA, 25 bp, Homo sapien
gctcaaaatcatgcatgtttcccag

SEQ ID NO: 4120924 - DNA, 25 bp, Homo sapien
gaaagtgtcttgaccccatcatgca

SEQ ID NO: 4120925 - DNA, 25 bp, Homo sapien
gagtagtgcaacattcatatcgctt

SEQ ID NO: 4120926 - DNA, 25 bp, Homo sapien
gcagctctcacgtcaatgggtaaag

SEQ ID NO: 4120927 - DNA, 25 bp, Homo sapien
ctggcatcctggacatcccctgcct

SEQ ID NO: 4120928 - DNA, 25 bp, Homo sapien
ctgcagctctcacgtcaatgggtaa

SEQ ID NO: 4120929 - DNA, 25 bp, Homo sapien
ctctcacgtcaatgggtaaagccat

SEQ ID NO: 4120930 - DNA, 25 bp, Homo sapien
gagtggtacacttgtcacaaatgag

SEQ ID NO: 4120931 - DNA, 25 bp, Homo sapien
tcacccgaagtccacagttcatgtg

SEQ ID NO: 4120932 - DNA, 25 bp, Homo sapien
tgagcaaaagctacagagaatttcc

SEQ ID NO: 4120933 - DNA, 25 bp, Homo sapien
tagcaaacagactaatttcactgcc

SEQ ID NO: 4120934 - DNA, 25 bp, Homo sapien
tgaggaagaccccataagaagccaa

SEQ ID NO: 4120935 - DNA, 25 bp, Homo sapien
tggctaaatggatctaaaagtactt

SEQ ID NO: 4120936 - DNA, 25 bp, Homo sapien
atttcatccttgtggctaaatggat

SEQ ID NO: 4120937 - DNA, 25 bp, Homo sapien
ccttgtggctaaatggatctaaaag

SEQ ID NO: 4120938 - DNA, 25 bp, Homo sapien
gggctgctgacatcctttctctcca

SEQ ID NO: 4120939 - DNA, 25 bp, Homo sapien
gtagaggttccccatggcctgacag

SEQ ID NO: 4120940 - DNA, 25 bp, Homo sapien
agaggttccccatggcctgacaggc

SEQ ID NO: 4120941 - DNA, 25 bp, Homo sapien
tggtagaggttccccatggcctgac

SEQ ID NO: 4120942 - DNA, 25 bp, Homo sapien
atggtagaggttccccatggcctga

SEQ ID NO: 4120943 - DNA, 25 bp, Homo sapien
cttagtcattttaggctgttagaac

SEQ ID NO: 4120944 - DNA, 25 bp, Homo sapien
gcggtataaacgttcagtccttcca

SEQ ID NO: 4120945 - DNA, 25 bp, Homo sapien
aaaggaatatctctcagactaaggg

SEQ ID NO: 4120946 - DNA, 25 bp, Homo sapien
caacatcagggtgctagtagggtca

SEQ ID NO: 4120947 - DNA, 25 bp, Homo sapien
ggtaggaaacagcaagcaacctggt

SEQ ID NO: 4120948 - DNA, 25 bp, Homo sapien
tgaacagctccgtaaaaactccttg

SEQ ID NO: 4120949 - DNA, 25 bp, Homo sapien
tgagttaccatatctggccggaaaa

SEQ ID NO: 4120950 - DNA, 25 bp, Homo sapien
cctggaggcctgcttgagtcatttc

SEQ ID NO: 4120951 - DNA, 25 bp, Homo sapien
tcttccttctcggaattcccgcagg

SEQ ID NO: 4120952 - DNA, 25 bp, Homo sapien
ctcttccttctcggaattcccgcag

SEQ ID NO: 4120953 - DNA, 25 bp, Homo sapien
cttccttctcggaattcccgcaggg

SEQ ID NO: 4120954 - DNA, 25 bp, Homo sapien
agcaaaactattcacacactgtctg

SEQ ID NO: 4120955 - DNA, 25 bp, Homo sapien
gtaagcaaaactattcacacactgt

SEQ ID NO: 4120956 - DNA, 25 bp, Homo sapien
gcttgctcaaccagtaagcaaaact

SEQ ID NO: 4120957 - DNA, 25 bp, Homo sapien
agagaagcttgctcaaccagtaagc

SEQ ID NO: 4120958 - DNA, 25 bp, Homo sapien
caaagcatttggtggcaggacagca

SEQ ID NO: 4120959 - DNA, 25 bp, Homo sapien
tcctatctgcttggaaagatgccag

SEQ ID NO: 4120960 - DNA, 25 bp, Homo sapien
cccacaggcatttatgacagtcacc

SEQ ID NO: 4120961 - DNA, 25 bp, Homo sapien
gacagtcaccttggacatatgctcc

SEQ ID NO: 4120962 - DNA, 25 bp, Homo sapien
tcacaaaacactttgccgttgacaa

SEQ ID NO: 4120963 - DNA, 25 bp, Homo sapien
caaagaaaacacctgtcagccgact

SEQ ID NO: 4120964 - DNA, 25 bp, Homo sapien
catgtccatgatcagatgtccacaa

SEQ ID NO: 4120965 - DNA, 25 bp, Homo sapien
aaacacctgtcagccgactgctgga

SEQ ID NO: 4120966 - DNA, 25 bp, Homo sapien
gaaaacacctgtcagccgactgctg

SEQ ID NO: 4120967 - DNA, 25 bp, Homo sapien
tctcttctttggctgacctactcac

SEQ ID NO: 4120968 - DNA, 25 bp, Homo sapien
ctgtaaccacaaatcaagataagaa

SEQ ID NO: 4120969 - DNA, 25 bp, Homo sapien
aacactgtcctcaattattaatttc

SEQ ID NO: 4120970 - DNA, 25 bp, Homo sapien
tcctcctccacctgagatgctgttc

SEQ ID NO: 4120971 - DNA, 25 bp, Homo sapien
gaggacatggctctaatagggctaa

SEQ ID NO: 4120972 - DNA, 25 bp, Homo sapien
tgaggacatggctctaatagggcta

SEQ ID NO: 4120973 - DNA, 25 bp, Homo sapien
tctaatagggctaagacctctgctg

SEQ ID NO: 4120974 - DNA, 25 bp, Homo sapien
ctcccactgcgagcatgggggaagg

SEQ ID NO: 4120975 - DNA, 25 bp, Homo sapien
tgtacagaacggtcatcagcatcca

SEQ ID NO: 4120976 - DNA, 25 bp, Homo sapien
aacatgcatctgcaaagaatgtaca

SEQ ID NO: 4120977 - DNA, 25 bp, Homo sapien
gcatccagcagtgggagcccacaca

SEQ ID NO: 4120978 - DNA, 25 bp, Homo sapien
tctgcaaagaatgtacagaacggtc

SEQ ID NO: 4120979 - DNA, 25 bp, Homo sapien
gcctaaggattacatgagcagtcac

SEQ ID NO: 4120980 - DNA, 25 bp, Homo sapien
aatggcagagctcaaaaggaacccc

SEQ ID NO: 4120981 - DNA, 25 bp, Homo sapien
cccgagtttcacctaggagaagagc

SEQ ID NO: 4120982 - DNA, 25 bp, Homo sapien
gagaggaacacatcaggcctaagga

SEQ ID NO: 4120983 - DNA, 25 bp, Homo sapien
atgacacagcggaaacagccggggt

SEQ ID NO: 4120984 - DNA, 25 bp, Homo sapien
gttctctgagtccacggtgaagggc

SEQ ID NO: 4120985 - DNA, 25 bp, Homo sapien
gggcaccccatccaaacactcatta

SEQ ID NO: 4120986 - DNA, 25 bp, Homo sapien
ttgtggtaatctcggacacagtaga

SEQ ID NO: 4120987 - DNA, 25 bp, Homo sapien
cagttttgtcggtttccaccactca

SEQ ID NO: 4120988 - DNA, 25 bp, Homo sapien
tgtcaacactggcatcgaccaacct

SEQ ID NO: 4120989 - DNA, 25 bp, Homo sapien
taagcctttgctggactgtgatcta

SEQ ID NO: 4120990 - DNA, 25 bp, Homo sapien
ggcggctggcaaacacagttttgtc

SEQ ID NO: 4120991 - DNA, 25 bp, Homo sapien
cctcatagaatgactggtacctggc

SEQ ID NO: 4120992 - DNA, 25 bp, Homo sapien
agctgcaatgaggacactggctgcc

SEQ ID NO: 4120993 - DNA, 25 bp, Homo sapien
gagtcagacttgcacttggaatcca

SEQ ID NO: 4120994 - DNA, 25 bp, Homo sapien
gttaggtaacgctgaagccacaggg

SEQ ID NO: 4120995 - DNA, 25 bp, Homo sapien
ggctgcacacttgggggccagcacc

SEQ ID NO: 4120996 - DNA, 25 bp, Homo sapien
gagcccagggagatattcatgtctt

SEQ ID NO: 4120997 - DNA, 25 bp, Homo sapien
ggatcttgtaaatgagcccagggag

SEQ ID NO: 4120998 - DNA, 25 bp, Homo sapien
tggatcttgtaaatgagcccaggga

SEQ ID NO: 4120999 - DNA, 25 bp, Homo sapien
atattcatgtcttagaagcccctgg

SEQ ID NO: 4121000 - DNA, 25 bp, Homo sapien
tcagcacaagaagggtactgggttg

SEQ ID NO: 4121001 - DNA, 25 bp, Homo sapien
tctaagaattagtatcaagtaaggg

SEQ ID NO: 4121002 - DNA, 25 bp, Homo sapien
tatcaagtaagggagtttgacctgg

SEQ ID NO: 4121003 - DNA, 25 bp, Homo sapien
tgacctggttatggggacaaatcag

SEQ ID NO: 4121004 - DNA, 25 bp, Homo sapien
cacgacacggatggtctcatctgag

SEQ ID NO: 4121005 - DNA, 25 bp, Homo sapien
tggacacgacacggatggtctcatc

SEQ ID NO: 4121006 - DNA, 25 bp, Homo sapien
cgacacggatggtctcatctgagcc

SEQ ID NO: 4121007 - DNA, 25 bp, Homo sapien
gacacgacacggatggtctcatctg

SEQ ID NO: 4121008 - DNA, 25 bp, Homo sapien
caatgggctttgggggctgggtggg

SEQ ID NO: 4121009 - DNA, 25 bp, Homo sapien
tacaatgggctttgggggctgggtg

SEQ ID NO: 4121010 - DNA, 25 bp, Homo sapien
acaatgggctttgggggctgggtgg

SEQ ID NO: 4121011 - DNA, 25 bp, Homo sapien
ctacaatgggctttgggggctgggt

SEQ ID NO: 4121012 - DNA, 25 bp, Homo sapien
gggagagcagctccaacagttgcag

SEQ ID NO: 4121013 - DNA, 25 bp, Homo sapien
gctccaacagttgcaggacttgata

SEQ ID NO: 4121014 - DNA, 25 bp, Homo sapien
ccaacagttgcaggacttgatagtt

SEQ ID NO: 4121015 - DNA, 25 bp, Homo sapien
agcagctccaacagttgcaggactt

SEQ ID NO: 4121016 - DNA, 25 bp, Homo sapien
gattacatgttcaaaagataacatt

SEQ ID NO: 4121017 - DNA, 25 bp, Homo sapien
gctgggattatgcacgcgccaacac

SEQ ID NO: 4121018 - DNA, 25 bp, Homo sapien
tctcatgggtaacttttttatattg

SEQ ID NO: 4121019 - DNA, 25 bp, Homo sapien
ttatgcacgcgccaacacatctggc

SEQ ID NO: 4121020 - DNA, 25 bp, Homo sapien
taaatgcagattccgaagacttagg

SEQ ID NO: 4121021 - DNA, 25 bp, Homo sapien
tgtataggcaggaaatgccagtgca

SEQ ID NO: 4121022 - DNA, 25 bp, Homo sapien
ccgtggaggcctgtccaacacagga

SEQ ID NO: 4121023 - DNA, 25 bp, Homo sapien
gaaccacttaaaatgtgctgtcagt

SEQ ID NO: 4121024 - DNA, 25 bp, Homo sapien
ggtcctccagcggataacagcggtg

SEQ ID NO: 4121025 - DNA, 25 bp, Homo sapien
gcaggagtgacagaacaggtggtcc

SEQ ID NO: 4121026 - DNA, 25 bp, Homo sapien
tctccagcctcttcacgtggcagga

SEQ ID NO: 4121027 - DNA, 25 bp, Homo sapien
ggataacagcggtggccatcttcat

SEQ ID NO: 4121028 - DNA, 25 bp, Homo sapien
tcaaaacatggcctagaagtggagc

SEQ ID NO: 4121029 - DNA, 25 bp, Homo sapien
taataacttatcctgaggcgctccc

SEQ ID NO: 4121030 - DNA, 25 bp, Homo sapien
caaaggtgtgtcagtaaggccaaca

SEQ ID NO: 4121031 - DNA, 25 bp, Homo sapien
gaaaaacagcgcaaacacgtgggca

SEQ ID NO: 4121032 - DNA, 25 bp, Homo sapien
tcttggcataaaggagggtacaaaa

SEQ ID NO: 4121033 - DNA, 25 bp, Homo sapien
aattaggactgattcttggcataaa

SEQ ID NO: 4121034 - DNA, 25 bp, Homo sapien
tagccagtcatacacgcctgtggtc

SEQ ID NO: 4121035 - DNA, 25 bp, Homo sapien
ttagccaggcgtagccagtcataca

SEQ ID NO: 4121036 - DNA, 25 bp, Homo sapien
gatagctaatatatttcactctttt

SEQ ID NO: 4121037 - DNA, 25 bp, Homo sapien
tgttcaaggagcactttaatagtca

SEQ ID NO: 4121038 - DNA, 25 bp, Homo sapien
atgaagatttcccacatctgtcaag

SEQ ID NO: 4121039 - DNA, 25 bp, Homo sapien
ggaaaataatttccctgtacaatga

SEQ ID NO: 4121040 - DNA, 25 bp, Homo sapien
catctgactggttgtgtaaaacgcc

SEQ ID NO: 4121041 - DNA, 25 bp, Homo sapien
tctctggagcaaaagtcaggcaggc

SEQ ID NO: 4121042 - DNA, 25 bp, Homo sapien
tgtggactcactgtaccccagaaga

SEQ ID NO: 4121043 - DNA, 25 bp, Homo sapien
tatagcacctctggaagcaattcgc

SEQ ID NO: 4121044 - DNA, 25 bp, Homo sapien
gctacaactctaccggtcaccctgg

SEQ ID NO: 4121045 - DNA, 25 bp, Homo sapien
ccgccacctcggctacaactctacc

SEQ ID NO: 4121046 - DNA, 25 bp, Homo sapien
tcggctacaactctaccggtcaccc

SEQ ID NO: 4121047 - DNA, 25 bp, Homo sapien
acctcggctacaactctaccggtca

SEQ ID NO: 4121048 - DNA, 25 bp, Homo sapien
gctgctcgtaggccgccgtcgccat

SEQ ID NO: 4121049 - DNA, 25 bp, Homo sapien
ttcagctgctcgtaggccgccgtcg

SEQ ID NO: 4121050 - DNA, 25 bp, Homo sapien
agcttcagctgctcgtaggccgccg

SEQ ID NO: 4121051 - DNA, 25 bp, Homo sapien
agctgctcgtaggccgccgtcgcca

SEQ ID NO: 4121052 - DNA, 25 bp, Homo sapien
ctcagccttctctccattaaaaaga

SEQ ID NO: 4121053 - DNA, 25 bp, Homo sapien
tctccattaaaaagagatagaggct

SEQ ID NO: 4121054 - DNA, 25 bp, Homo sapien
gccttctctccattaaaaagagata

SEQ ID NO: 4121055 - DNA, 25 bp, Homo sapien
tctctccattaaaaagagatagagg

SEQ ID NO: 4121056 - DNA, 25 bp, Homo sapien
cacggtcaatggtaagtacgtcatc

SEQ ID NO: 4121057 - DNA, 25 bp, Homo sapien
tctgtggacacacggtcaatggtaa

SEQ ID NO: 4121058 - DNA, 25 bp, Homo sapien
ggtaacctctgtggacacacggtca

SEQ ID NO: 4121059 - DNA, 25 bp, Homo sapien
ggtaagtacgtcatctgctccatca

SEQ ID NO: 4121060 - DNA, 25 bp, Homo sapien
tgcccagtataccaaatattggtct

SEQ ID NO: 4121061 - DNA, 25 bp, Homo sapien
ctgccaccagatggattgtgcccag

SEQ ID NO: 4121062 - DNA, 25 bp, Homo sapien
caccagatggattgtgcccagtata

SEQ ID NO: 4121063 - DNA, 25 bp, Homo sapien
cccagtataccaaatattggtcttg

SEQ ID NO: 4121064 - DNA, 25 bp, Homo sapien
gacatcaaaatctgttgctttccag

SEQ ID NO: 4121065 - DNA, 25 bp, Homo sapien
ttggtaatgactataagataattac

SEQ ID NO: 4121066 - DNA, 25 bp, Homo sapien
gctttccagactacatgactgaaaa

SEQ ID NO: 4121067 - DNA, 25 bp, Homo sapien
tatcagttaagtgcaacattgtctt

SEQ ID NO: 4121068 - DNA, 25 bp, Homo sapien
gatcttactctataggttgttaaaa

SEQ ID NO: 4121069 - DNA, 25 bp, Homo sapien
tatgcctaggtagaaaagtaggtag

SEQ ID NO: 4121070 - DNA, 25 bp, Homo sapien
tgaagttaaatctggtgttgagtac

SEQ ID NO: 4121071 - DNA, 25 bp, Homo sapien
gagtacccgtgcatttctgttttcc

SEQ ID NO: 4121072 - DNA, 25 bp, Homo sapien
tgcatacctactgtcccttgaatgg

SEQ ID NO: 4121073 - DNA, 25 bp, Homo sapien
taatgggaagtctgttgcaggcatc

SEQ ID NO: 4121074 - DNA, 25 bp, Homo sapien
taatgtcggtcagttcgcctgcacc

SEQ ID NO: 4121075 - DNA, 25 bp, Homo sapien
tctatccctggtgaactgtcataca

SEQ ID NO: 4121076 - DNA, 25 bp, Homo sapien
gctttcccaatgaatactaagattg

SEQ ID NO: 4121077 - DNA, 25 bp, Homo sapien
gcctagtagagaatgaagatattga

SEQ ID NO: 4121078 - DNA, 25 bp, Homo sapien
gaataacaatcgagaagaaattgtc

SEQ ID NO: 4121079 - DNA, 25 bp, Homo sapien
aagtataaaaagcatatcctgtagt

SEQ ID NO: 4121080 - DNA, 25 bp, Homo sapien
ttcttggaattcaggactagtgttg

SEQ ID NO: 4121081 - DNA, 25 bp, Homo sapien
caagacatggtttagcatcgctagg

SEQ ID NO: 4121082 - DNA, 25 bp, Homo sapien
tagccgctgcaaagtatgggtcaaa

SEQ ID NO: 4121083 - DNA, 25 bp, Homo sapien
catcgctaggaaggttttattatct

SEQ ID NO: 4121084 - DNA, 25 bp, Homo sapien
gatgaccattccatacaaaccgctg

SEQ ID NO: 4121085 - DNA, 25 bp, Homo sapien
agatgaccattccatacaaaccgct

SEQ ID NO: 4121086 - DNA, 25 bp, Homo sapien
tgaccattccatacaaaccgctgat

SEQ ID NO: 4121087 - DNA, 25 bp, Homo sapien
ccattccatacaaaccgctgatctg

SEQ ID NO: 4121088 - DNA, 25 bp, Homo sapien
cctagaatgatgtgacagggtagac

SEQ ID NO: 4121089 - DNA, 25 bp, Homo sapien
gcatgcattgaattaaagcttggac

SEQ ID NO: 4121090 - DNA, 25 bp, Homo sapien
cagggtagacctgatccaagtttgt

SEQ ID NO: 4121091 - DNA, 25 bp, Homo sapien
taggaagtcactttatagcatgcat

SEQ ID NO: 4121092 - DNA, 25 bp, Homo sapien
taatatatcatgtttccctagctgg

SEQ ID NO: 4121093 - DNA, 25 bp, Homo sapien
gatatcccatgctaattgtttgcag

SEQ ID NO: 4121094 - DNA, 25 bp, Homo sapien
cacatagggaggtaatatacaaaca

SEQ ID NO: 4121095 - DNA, 25 bp, Homo sapien
gctgggcctccctgtttatacctca

SEQ ID NO: 4121096 - DNA, 25 bp, Homo sapien
gtaacactggaagggcaaaccgatg

SEQ ID NO: 4121097 - DNA, 25 bp, Homo sapien
catgtaacactggaagggcaaaccg

SEQ ID NO: 4121098 - DNA, 25 bp, Homo sapien
acactggaagggcaaaccgatgaac

SEQ ID NO: 4121099 - DNA, 25 bp, Homo sapien
agccatgtaacactggaagggcaaa

SEQ ID NO: 4121100 - DNA, 25 bp, Homo sapien
cctcgagatgagaatccaatcaaag

SEQ ID NO: 4121101 - DNA, 25 bp, Homo sapien
tcttacataatagcgcacaccagct

SEQ ID NO: 4121102 - DNA, 25 bp, Homo sapien
ctcttacataatagcgcacaccagc

SEQ ID NO: 4121103 - DNA, 25 bp, Homo sapien
aacagctcctcctcgagatgagaat

SEQ ID NO: 4121104 - DNA, 25 bp, Homo sapien
ctgtacaaacgaagctttgctccca

SEQ ID NO: 4121105 - DNA, 25 bp, Homo sapien
tagctgcatggccttccgaatcaat

SEQ ID NO: 4121106 - DNA, 25 bp, Homo sapien
gctgcatggccttccgaatcaattc

SEQ ID NO: 4121107 - DNA, 25 bp, Homo sapien
ccattgtagtgcacaatttgttctg

SEQ ID NO: 4121108 - DNA, 25 bp, Homo sapien
gtgatttgctactttgctgatctgt

SEQ ID NO: 4121109 - DNA, 25 bp, Homo sapien
tgaggtttggtctttgggaccagaa

SEQ ID NO: 4121110 - DNA, 25 bp, Homo sapien
tgtacttgaggtttggtctttggga

SEQ ID NO: 4121111 - DNA, 25 bp, Homo sapien
tggcagtggtttgtacttgaggttt

SEQ ID NO: 4121112 - DNA, 25 bp, Homo sapien
aataattacttgggaatcaaaatgc

SEQ ID NO: 4121113 - DNA, 25 bp, Homo sapien
tggtgcaaaccagggaggcatgcca

SEQ ID NO: 4121114 - DNA, 25 bp, Homo sapien
catgaccgcctgaaaatataatgaa

SEQ ID NO: 4121115 - DNA, 25 bp, Homo sapien
catatatgcaacaaaccatgaccgc

SEQ ID NO: 4121116 - DNA, 25 bp, Homo sapien
taaatggtcaattttccaagaagat

SEQ ID NO: 4121117 - DNA, 25 bp, Homo sapien
gaaaagagtcctgagaagaccttaa

SEQ ID NO: 4121118 - DNA, 25 bp, Homo sapien
ataaccaggcaagatgcatgctgaa

SEQ ID NO: 4121119 - DNA, 25 bp, Homo sapien
catgctgaaaagagtcctgagaaga

SEQ ID NO: 4121120 - DNA, 25 bp, Homo sapien
gatgcatgctgaaaagagtcctgag

SEQ ID NO: 4121121 - DNA, 25 bp, Homo sapien
ttccacttcccaaggaagacaccat

SEQ ID NO: 4121122 - DNA, 25 bp, Homo sapien
gcttctccgagcccttctggttaat

SEQ ID NO: 4121123 - DNA, 25 bp, Homo sapien
gacaccattgttgcaaatgtctgct

SEQ ID NO: 4121124 - DNA, 25 bp, Homo sapien
ccacttcccaaggaagacaccattg

SEQ ID NO: 4121125 - DNA, 25 bp, Homo sapien
tctgctacctgatccaataaaatac

SEQ ID NO: 4121126 - DNA, 25 bp, Homo sapien
acattccttatggaagtcaaaggca

SEQ ID NO: 4121127 - DNA, 25 bp, Homo sapien
taaaatacttagtcgatcccatctc

SEQ ID NO: 4121128 - DNA, 25 bp, Homo sapien
cattccttatggaagtcaaaggcaa

SEQ ID NO: 4121129 - DNA, 25 bp, Homo sapien
catttggattgccaggtttagaacc

SEQ ID NO: 4121130 - DNA, 25 bp, Homo sapien
tgagcaaatgtctatccaagaggtt

SEQ ID NO: 4121131 - DNA, 25 bp, Homo sapien
ggtagtacgatttacagattccttc

SEQ ID NO: 4121132 - DNA, 25 bp, Homo sapien
ttaaaatcggtaaagactggcacgc

SEQ ID NO: 4121133 - DNA, 25 bp, Homo sapien
ttacactcttgtacggcagcagtta

SEQ ID NO: 4121134 - DNA, 25 bp, Homo sapien
actcttgtacggcagcagttaatgg

SEQ ID NO: 4121135 - DNA, 25 bp, Homo sapien
tacactcttgtacggcagcagttaa

SEQ ID NO: 4121136 - DNA, 25 bp, Homo sapien
tcttacactcttgtacggcagcagt

SEQ ID NO: 4121137 - DNA, 25 bp, Homo sapien
atggaatctccctccgtcacccaga

SEQ ID NO: 4121138 - DNA, 25 bp, Homo sapien
acccagactgaagcacagtggcatg

SEQ ID NO: 4121139 - DNA, 25 bp, Homo sapien
cacccagactgaagcacagtggcat

SEQ ID NO: 4121140 - DNA, 25 bp, Homo sapien
ttagtacagatagggttttgacatg

SEQ ID NO: 4121141 - DNA, 25 bp, Homo sapien
gtgaaaaaagattcctggccttgag

SEQ ID NO: 4121142 - DNA, 25 bp, Homo sapien
gagatcatctcaccccaaagatgtg

SEQ ID NO: 4121143 - DNA, 25 bp, Homo sapien
caactatatccctagatgtcagggc

SEQ ID NO: 4121144 - DNA, 25 bp, Homo sapien
taacatgggtctcatttcagtgaca

SEQ ID NO: 4121145 - DNA, 25 bp, Homo sapien
ttcggaacacgccttcctggtttgc

SEQ ID NO: 4121146 - DNA, 25 bp, Homo sapien
ggatcacattggttctatctagaca

SEQ ID NO: 4121147 - DNA, 25 bp, Homo sapien
tagacaatccatgcaattgcttcgg

SEQ ID NO: 4121148 - DNA, 25 bp, Homo sapien
tgaacgacgagctaacaaactctgg

SEQ ID NO: 4121149 - DNA, 25 bp, Homo sapien
aatgtgacatccatgggcaagacac

SEQ ID NO: 4121150 - DNA, 25 bp, Homo sapien
tgtaaactggtatgacgctcttgga

SEQ ID NO: 4121151 - DNA, 25 bp, Homo sapien
tacacagactgaccctagttatgga

SEQ ID NO: 4121152 - DNA, 25 bp, Homo sapien
tctgaatggcttagtaaattacggc

SEQ ID NO: 4121153 - DNA, 25 bp, Homo sapien
tggagaccaccaaccacagatgaca

SEQ ID NO: 4121154 - DNA, 25 bp, Homo sapien
tatggattgcagagcctagtcaagt

SEQ ID NO: 4121155 - DNA, 25 bp, Homo sapien
agtagacagcccctacactagtagg

SEQ ID NO: 4121156 - DNA, 25 bp, Homo sapien
cctttagctgggtaagaactctgcc

SEQ ID NO: 4121157 - DNA, 25 bp, Homo sapien
tgtcccacatgcaaaactcctagtc

SEQ ID NO: 4121158 - DNA, 25 bp, Homo sapien
gtcccacatgcaaaactcctagtct

SEQ ID NO: 4121159 - DNA, 25 bp, Homo sapien
ttgtcccacatgcaaaactcctagt

SEQ ID NO: 4121160 - DNA, 25 bp, Homo sapien
aaggcaccagttcccgcatattgct

SEQ ID NO: 4121161 - DNA, 25 bp, Homo sapien
ccagttcccgcatattgcttggcac

SEQ ID NO: 4121162 - DNA, 25 bp, Homo sapien
tggcacaagcatttgcgttgtcagc

SEQ ID NO: 4121163 - DNA, 25 bp, Homo sapien
caagcatttgcgttgtcagcccagg

SEQ ID NO: 4121164 - DNA, 25 bp, Homo sapien
ccatccattataagtcccaaatgag

SEQ ID NO: 4121165 - DNA, 25 bp, Homo sapien
gttcttataatatcgtatcattgag

SEQ ID NO: 4121166 - DNA, 25 bp, Homo sapien
tgagttccagccatccattataagt

SEQ ID NO: 4121167 - DNA, 25 bp, Homo sapien
tgtctaaatccatcggaaaagttgt

SEQ ID NO: 4121168 - DNA, 25 bp, Homo sapien
aattcatccactgaatagtttccaa

SEQ ID NO: 4121169 - DNA, 25 bp, Homo sapien
ttaaaggactatgagattctaattc

SEQ ID NO: 4121170 - DNA, 25 bp, Homo sapien
gattctaattcatccactgaatagt

SEQ ID NO: 4121171 - DNA, 25 bp, Homo sapien
cccttggaacacttaaaggactatg

SEQ ID NO: 4121172 - DNA, 25 bp, Homo sapien
ttgaaaaggcaacaaccatgataat

SEQ ID NO: 4121173 - DNA, 25 bp, Homo sapien
tgcacattgaaaaggcaacaaccat

SEQ ID NO: 4121174 - DNA, 25 bp, Homo sapien
aggcaacaaccatgataataggcaa

SEQ ID NO: 4121175 - DNA, 25 bp, Homo sapien
cattgaaaaggcaacaaccatgata

SEQ ID NO: 4121176 - DNA, 25 bp, Homo sapien
tctgcctacgtgtgctttctataat

SEQ ID NO: 4121177 - DNA, 25 bp, Homo sapien
caggactccaaatttactatgccaa

SEQ ID NO: 4121178 - DNA, 25 bp, Homo sapien
tagcaattaagaacatgggaaaaca

SEQ ID NO: 4121179 - DNA, 25 bp, Homo sapien
taagagtggttagcttctctctcaa

SEQ ID NO: 4121180 - DNA, 25 bp, Homo sapien
cctgtactagttcaccattccttag

SEQ ID NO: 4121181 - DNA, 25 bp, Homo sapien
ttccaacctgtactagttcaccatt

SEQ ID NO: 4121182 - DNA, 25 bp, Homo sapien
gcggacatccgatcagcataacaca

SEQ ID NO: 4121183 - DNA, 25 bp, Homo sapien
gtgcggacatccgatcagcataaca

SEQ ID NO: 4121184 - DNA, 25 bp, Homo sapien
taaagcatcaactgttgggccccag

SEQ ID NO: 4121185 - DNA, 25 bp, Homo sapien
ctcaaaccctggctagtaccagaat

SEQ ID NO: 4121186 - DNA, 25 bp, Homo sapien
gcatcaactgttgggccccaggaat

SEQ ID NO: 4121187 - DNA, 25 bp, Homo sapien
agtttactagcacattcacaggaaa

SEQ ID NO: 4121188 - DNA, 25 bp, Homo sapien
aatgcttgcaactccccagaagagc

SEQ ID NO: 4121189 - DNA, 25 bp, Homo sapien
gaccagtctgggagcatcgacaaaa

SEQ ID NO: 4121190 - DNA, 25 bp, Homo sapien
tctttgccattgtaaagaatgataa

SEQ ID NO: 4121191 - DNA, 25 bp, Homo sapien
agaagagcacataggccagtgtttc

SEQ ID NO: 4121192 - DNA, 25 bp, Homo sapien
tgattaaagtcatgaggcagcccac

SEQ ID NO: 4121193 - DNA, 25 bp, Homo sapien
ttaaaacagaggcagctttggacct

SEQ ID NO: 4121194 - DNA, 25 bp, Homo sapien
tacaaagcagccacattagcagttc

SEQ ID NO: 4121195 - DNA, 25 bp, Homo sapien
aagtatgcctgctaatagtgaccgc

SEQ ID NO: 4121196 - DNA, 25 bp, Homo sapien
gtcaccgtcttacaactcagggcca

SEQ ID NO: 4121197 - DNA, 25 bp, Homo sapien
aactccctaggtgatccgatgtgca

SEQ ID NO: 4121198 - DNA, 25 bp, Homo sapien
gaagagccggcacactcaatggcaa

SEQ ID NO: 4121199 - DNA, 25 bp, Homo sapien
cagtcatcagtcagggtgcgtaagc

SEQ ID NO: 4121200 - DNA, 25 bp, Homo sapien
tgcaaccccaaaccacattagaagt

SEQ ID NO: 4121201 - DNA, 25 bp, Homo sapien
gtcttggtgcattggaaaaggagtc

SEQ ID NO: 4121202 - DNA, 25 bp, Homo sapien
ctgtgcagacatccctccgtggtgt

SEQ ID NO: 4121203 - DNA, 25 bp, Homo sapien
tctaaggtctctgacggtgggtcca

SEQ ID NO: 4121204 - DNA, 25 bp, Homo sapien
gatgagtaaggcatgatgcgagcca

SEQ ID NO: 4121205 - DNA, 25 bp, Homo sapien
gggacacatacgatgcactcttcat

SEQ ID NO: 4121206 - DNA, 25 bp, Homo sapien
aaggcatgatgcgagccatagtcca

SEQ ID NO: 4121207 - DNA, 25 bp, Homo sapien
catgatgcgagccatagtccagagg

SEQ ID NO: 4121208 - DNA, 25 bp, Homo sapien
gctgccaacccagtgccagttctgt

SEQ ID NO: 4121209 - DNA, 25 bp, Homo sapien
tctgcgtcttgttatatttgccaaa

SEQ ID NO: 4121210 - DNA, 25 bp, Homo sapien
tggaggctctctgcgtcttgttata

SEQ ID NO: 4121211 - DNA, 25 bp, Homo sapien
ggccagcagttcctccgatcctgga

SEQ ID NO: 4121212 - DNA, 25 bp, Homo sapien
cagccaagcacgatctactcagggt

SEQ ID NO: 4121213 - DNA, 25 bp, Homo sapien
agtgaaatgctcctctgtaggtggc

SEQ ID NO: 4121214 - DNA, 25 bp, Homo sapien
taggtggcttgaatcctgccctaca

SEQ ID NO: 4121215 - DNA, 25 bp, Homo sapien
gctaagataaacgttggacaactgc

SEQ ID NO: 4121216 - DNA, 25 bp, Homo sapien
ggttccctgtccaagacaactctca

SEQ ID NO: 4121217 - DNA, 25 bp, Homo sapien
gctccatccttgtataagctgtcag

SEQ ID NO: 4121218 - DNA, 25 bp, Homo sapien
tgtacatctctggacacttctactg

SEQ ID NO: 4121219 - DNA, 25 bp, Homo sapien
ggtgaacacccttacattgccagaa

SEQ ID NO: 4121220 - DNA, 25 bp, Homo sapien
caccttcagtgtgaaaggcctcggt

SEQ ID NO: 4121221 - DNA, 25 bp, Homo sapien
ttcagtgtgaaaggcctcggtctct

SEQ ID NO: 4121222 - DNA, 25 bp, Homo sapien
ccttcagtgtgaaaggcctcggtct

SEQ ID NO: 4121223 - DNA, 25 bp, Homo sapien
ccaccttcagtgtgaaaggcctcgg

SEQ ID NO: 4121224 - DNA, 25 bp, Homo sapien
gctataatgcatcatcgcaaggtct

SEQ ID NO: 4121225 - DNA, 25 bp, Homo sapien
gctagcagccagttagaaaaacctt

SEQ ID NO: 4121226 - DNA, 25 bp, Homo sapien
cgcaaggtctacttactcataggac

SEQ ID NO: 4121227 - DNA, 25 bp, Homo sapien
gcacttctgagcttcccgggctttt

SEQ ID NO: 4121228 - DNA, 25 bp, Homo sapien
gaacccattccaatggggctgacat

SEQ ID NO: 4121229 - DNA, 25 bp, Homo sapien
tctggtgatgagaaggattcaaggg

SEQ ID NO: 4121230 - DNA, 25 bp, Homo sapien
ggtgatgagaaggattcaagggcag

SEQ ID NO: 4121231 - DNA, 25 bp, Homo sapien
ctggtgatgagaaggattcaagggc

SEQ ID NO: 4121232 - DNA, 25 bp, Homo sapien
tggtgatgagaaggattcaagggca

SEQ ID NO: 4121233 - DNA, 25 bp, Homo sapien
gtgggcaactgataaacaccagcca

SEQ ID NO: 4121234 - DNA, 25 bp, Homo sapien
cagatgctggttgcaagtcgctttt

SEQ ID NO: 4121235 - DNA, 25 bp, Homo sapien
gttataaagcgcctggtagaactgc

SEQ ID NO: 4121236 - DNA, 25 bp, Homo sapien
caagctcccactatagaaaggattt

SEQ ID NO: 4121237 - DNA, 25 bp, Homo sapien
cacgagcatgttgggctttgaggct

SEQ ID NO: 4121238 - DNA, 25 bp, Homo sapien
cactggatggtctgggaaaggccca

SEQ ID NO: 4121239 - DNA, 25 bp, Homo sapien
gattggagcagccattatcagcaga

SEQ ID NO: 4121240 - DNA, 25 bp, Homo sapien
taggtgataacacgatccgatttcc

SEQ ID NO: 4121241 - DNA, 25 bp, Homo sapien
agcagcaggaatgggagggacagga

SEQ ID NO: 4121242 - DNA, 25 bp, Homo sapien
gcagcagcaggaatgggagggacag

SEQ ID NO: 4121243 - DNA, 25 bp, Homo sapien
agcagcagcaggaatgggagggaca

SEQ ID NO: 4121244 - DNA, 25 bp, Homo sapien
cagcaggaatgggagggacaggaca

SEQ ID NO: 4121245 - DNA, 25 bp, Homo sapien
atgccctctcctgggatgcagagag

SEQ ID NO: 4121246 - DNA, 25 bp, Homo sapien
ctgggatgcagagaggatcatgagg

SEQ ID NO: 4121247 - DNA, 25 bp, Homo sapien
tctcctgggatgcagagaggatcat

SEQ ID NO: 4121248 - DNA, 25 bp, Homo sapien
tcctgggatgcagagaggatcatga

SEQ ID NO: 4121249 - DNA, 25 bp, Homo sapien
tgcttgcccctagacgttggagtga

SEQ ID NO: 4121250 - DNA, 25 bp, Homo sapien
cgaggtgagacacgcactattgcaa

SEQ ID NO: 4121251 - DNA, 25 bp, Homo sapien
ccttggaaagcttgcagcgaggtga

SEQ ID NO: 4121252 - DNA, 25 bp, Homo sapien
cccgtgtttgattgcgtccttggaa

SEQ ID NO: 4121253 - DNA, 25 bp, Homo sapien
tcagttcccgtagagcaaagggatg

SEQ ID NO: 4121254 - DNA, 25 bp, Homo sapien
atgcagaaggtgcacttgggtttat

SEQ ID NO: 4121255 - DNA, 25 bp, Homo sapien
cagttcccgtagagcaaagggatgc

SEQ ID NO: 4121256 - DNA, 25 bp, Homo sapien
ggatgcagaaggtgcacttgggttt

SEQ ID NO: 4121257 - DNA, 25 bp, Homo sapien
gtggagggcgatgcaactctccctg

SEQ ID NO: 4121258 - DNA, 25 bp, Homo sapien
ggtgggtcagtcagatgcaagcctg

SEQ ID NO: 4121259 - DNA, 25 bp, Homo sapien
cccccacagtggatccttcccacac

SEQ ID NO: 4121260 - DNA, 25 bp, Homo sapien
ttcccccacagtggatccttcccac

SEQ ID NO: 4121261 - DNA, 25 bp, Homo sapien
tcccccacagtggatccttcccaca

SEQ ID NO: 4121262 - DNA, 25 bp, Homo sapien
cagttgtgaacacccagagcaggaa

SEQ ID NO: 4121263 - DNA, 25 bp, Homo sapien
tgttgctcccacacaggcacgtcct

SEQ ID NO: 4121264 - DNA, 25 bp, Homo sapien
aggaagaaggtcccagagctttcca

SEQ ID NO: 4121265 - DNA, 25 bp, Homo sapien
agcagcccaggcgtcccagttgtga

SEQ ID NO: 4121266 - DNA, 25 bp, Homo sapien
cgatgaacacgagccagtacaaggg

SEQ ID NO: 4121267 - DNA, 25 bp, Homo sapien
ggaaatggctcgcaaactgcctgac

SEQ ID NO: 4121268 - DNA, 25 bp, Homo sapien
aatgatgatggtatagcagcaagcc

SEQ ID NO: 4121269 - DNA, 25 bp, Homo sapien
gctctcatcgctagggtaaaccatg

SEQ ID NO: 4121270 - DNA, 25 bp, Homo sapien
tcttcagggttttcacgagatcccg

SEQ ID NO: 4121271 - DNA, 25 bp, Homo sapien
gcaacatagacgacagcttcaagct

SEQ ID NO: 4121272 - DNA, 25 bp, Homo sapien
tgatgcaacccaagttcttcagggt

SEQ ID NO: 4121273 - DNA, 25 bp, Homo sapien
tctccttgtaaatgaaacccactgg

SEQ ID NO: 4121274 - DNA, 25 bp, Homo sapien
tcacagtcaagagccaatcaacagc

SEQ ID NO: 4121275 - DNA, 25 bp, Homo sapien
cctgcactagtcagttgattttgaa

SEQ ID NO: 4121276 - DNA, 25 bp, Homo sapien
tgctttggcaaattctgactacaag

SEQ ID NO: 4121277 - DNA, 25 bp, Homo sapien
tccaaaagaaccatgcacctcagag

SEQ ID NO: 4121278 - DNA, 25 bp, Homo sapien
cagaggcagcggcattgatgctccg

SEQ ID NO: 4121279 - DNA, 25 bp, Homo sapien
gcttttgcggtctgtagcagcagcc

SEQ ID NO: 4121280 - DNA, 25 bp, Homo sapien
gtgctccacagtgccggtccttagt

SEQ ID NO: 4121281 - DNA, 25 bp, Homo sapien
atgctccggcgagtggcaaagccag

SEQ ID NO: 4121282 - DNA, 25 bp, Homo sapien
tattcctcagaataaagtgggcctc

SEQ ID NO: 4121283 - DNA, 25 bp, Homo sapien
gaacaagcctacaacagggccaagg

SEQ ID NO: 4121284 - DNA, 25 bp, Homo sapien
catgggttatcaggctcaagagcag

SEQ ID NO: 4121285 - DNA, 25 bp, Homo sapien
gagacactgtcaccataccaaggaa

SEQ ID NO: 4121286 - DNA, 25 bp, Homo sapien
acaatccgattgagatagctcacta

SEQ ID NO: 4121287 - DNA, 25 bp, Homo sapien
caatccgattgagatagctcactac

SEQ ID NO: 4121288 - DNA, 25 bp, Homo sapien
aatccgattgagatagctcactacc

SEQ ID NO: 4121289 - DNA, 25 bp, Homo sapien
tccgattgagatagctcactacctt

SEQ ID NO: 4121290 - DNA, 25 bp, Homo sapien
gggcagcatgttgatggggtagcaa

SEQ ID NO: 4121291 - DNA, 25 bp, Homo sapien
ttgatggggtagcaaggcctgcgct

SEQ ID NO: 4121292 - DNA, 25 bp, Homo sapien
aaggcctgcgcttcaccccttcgcc

SEQ ID NO: 4121293 - DNA, 25 bp, Homo sapien
gcaaggcctgcgcttcaccccttcg

SEQ ID NO: 4121294 - DNA, 25 bp, Homo sapien
ggcgtccagtcctggtctagtcagt

SEQ ID NO: 4121295 - DNA, 25 bp, Homo sapien
tgggaaaagcattggcgtccagtcc

SEQ ID NO: 4121296 - DNA, 25 bp, Homo sapien
agtcctggtctagtcagttccttcc

SEQ ID NO: 4121297 - DNA, 25 bp, Homo sapien
aaagcattggcgtccagtcctggtc

SEQ ID NO: 4121298 - DNA, 25 bp, Homo sapien
gtctgcatgccccttgagatcatct

SEQ ID NO: 4121299 - DNA, 25 bp, Homo sapien
cagtgagtaatgcctggatcccgca

SEQ ID NO: 4121300 - DNA, 25 bp, Homo sapien
gggaatctgacctaaagccacatct

SEQ ID NO: 4121301 - DNA, 25 bp, Homo sapien
ccttgagatcatctgactggctgca

SEQ ID NO: 4121302 - DNA, 25 bp, Homo sapien
tgactcccagaaggagatgccagtc

SEQ ID NO: 4121303 - DNA, 25 bp, Homo sapien
caggcacagtgttcgtccaggtggt

SEQ ID NO: 4121304 - DNA, 25 bp, Homo sapien
catcatcaggccagggaatccaggc

SEQ ID NO: 4121305 - DNA, 25 bp, Homo sapien
cacagcttttcaggaaagcctggag

SEQ ID NO: 4121306 - DNA, 25 bp, Homo sapien
tgaacggcataaagccatgagcggg

SEQ ID NO: 4121307 - DNA, 25 bp, Homo sapien
gctgaacggcataaagccatgagcg

SEQ ID NO: 4121308 - DNA, 25 bp, Homo sapien
cagcaaagctgaacggcataaagcc

SEQ ID NO: 4121309 - DNA, 25 bp, Homo sapien
aaagctgaacggcataaagccatga

SEQ ID NO: 4121310 - DNA, 25 bp, Homo sapien
tctcctccagatacactcatacaag

SEQ ID NO: 4121311 - DNA, 25 bp, Homo sapien
cacgcaacaatcttcatggccacaa

SEQ ID NO: 4121312 - DNA, 25 bp, Homo sapien
gatacactcatacaagtacgcaaaa

SEQ ID NO: 4121313 - DNA, 25 bp, Homo sapien
tacgcaaaaacacacgcaacaatct

SEQ ID NO: 4121314 - DNA, 25 bp, Homo sapien
tcctatgtggaacccaaggtcttgg

SEQ ID NO: 4121315 - DNA, 25 bp, Homo sapien
gcttgtgaatgagcgacagggttcc

SEQ ID NO: 4121316 - DNA, 25 bp, Homo sapien
tgatgtggaaagacaagccggtttg

SEQ ID NO: 4121317 - DNA, 25 bp, Homo sapien
cactttaatgtaaggaagcctggac

SEQ ID NO: 4121318 - DNA, 25 bp, Homo sapien
gattcacttacccacaaacaaggag

SEQ ID NO: 4121319 - DNA, 25 bp, Homo sapien
tgtacacaaagaccatcgagacggc

SEQ ID NO: 4121320 - DNA, 25 bp, Homo sapien
ggtggctgcagagcaatacccaagc

SEQ ID NO: 4121321 - DNA, 25 bp, Homo sapien
tagccctggctagactgaattacac

SEQ ID NO: 4121322 - DNA, 25 bp, Homo sapien
tcaggtgctcaatcatcttctcctg

SEQ ID NO: 4121323 - DNA, 25 bp, Homo sapien
tcaatcatcttctcctggccaaggc

SEQ ID NO: 4121324 - DNA, 25 bp, Homo sapien
gccatcaggtgctcaatcatcttct

SEQ ID NO: 4121325 - DNA, 25 bp, Homo sapien
catcaggtgctcaatcatcttctcc

SEQ ID NO: 4121326 - DNA, 25 bp, Homo sapien
tcatttctggaatggactcagacct

SEQ ID NO: 4121327 - DNA, 25 bp, Homo sapien
gacctttaaacaggagagttgagca

SEQ ID NO: 4121328 - DNA, 25 bp, Homo sapien
cagtcagtttttaagcaaggcatgg

SEQ ID NO: 4121329 - DNA, 25 bp, Homo sapien
ttgtcataaccctggtctggctggt

SEQ ID NO: 4121330 - DNA, 25 bp, Homo sapien
cgtgcctggccggaatattctatta

SEQ ID NO: 4121331 - DNA, 25 bp, Homo sapien
ttctattatagatgccaattaggtc

SEQ ID NO: 4121332 - DNA, 25 bp, Homo sapien
gccggaatattctattatagatgcc

SEQ ID NO: 4121333 - DNA, 25 bp, Homo sapien
ttatagatgccaattaggtcaagtt

SEQ ID NO: 4121334 - DNA, 25 bp, Homo sapien
gaaaagtagcctaaccagccaggcg

SEQ ID NO: 4121335 - DNA, 25 bp, Homo sapien
gagctgttatcagttccaggattca

SEQ ID NO: 4121336 - DNA, 25 bp, Homo sapien
gacatttacagttgttggcaaggca

SEQ ID NO: 4121337 - DNA, 25 bp, Homo sapien
ccactatggctgagaggaattgttc

SEQ ID NO: 4121338 - DNA, 25 bp, Homo sapien
gatgagcttgctcatgaagcaaggt

SEQ ID NO: 4121339 - DNA, 25 bp, Homo sapien
cagagatgctttgccagtttgttcc

SEQ ID NO: 4121340 - DNA, 25 bp, Homo sapien
gagcttgctcatgaagcaaggtctg

SEQ ID NO: 4121341 - DNA, 25 bp, Homo sapien
cagcagagatgctttgccagtttgt

SEQ ID NO: 4121342 - DNA, 25 bp, Homo sapien
cccactgggatgtgtagaaacagca

SEQ ID NO: 4121343 - DNA, 25 bp, Homo sapien
tgagctcatcaatggaacatgcctg

SEQ ID NO: 4121344 - DNA, 25 bp, Homo sapien
cactgatgatggatggttgagccca

SEQ ID NO: 4121345 - DNA, 25 bp, Homo sapien
tgaaagctaaagcaagtgcccctac

SEQ ID NO: 4121346 - DNA, 25 bp, Homo sapien
cattgaaactgctgaacccatagtc

SEQ ID NO: 4121347 - DNA, 25 bp, Homo sapien
cccatagtcttcatggtaatcatgc

SEQ ID NO: 4121348 - DNA, 25 bp, Homo sapien
tgctgaacccatagtcttcatggta

SEQ ID NO: 4121349 - DNA, 25 bp, Homo sapien
tcttcatggtaatcatgctctgcca

SEQ ID NO: 4121350 - DNA, 25 bp, Homo sapien
gaaattgcctcgtcatggtaaccac

SEQ ID NO: 4121351 - DNA, 25 bp, Homo sapien
gggatatcacccagatgagcaagct

SEQ ID NO: 4121352 - DNA, 25 bp, Homo sapien
tttccattgatgtgagaccccaagg

SEQ ID NO: 4121353 - DNA, 25 bp, Homo sapien
gatatgaccagcaccagagagttcc

SEQ ID NO: 4121354 - DNA, 25 bp, Homo sapien
tacaaaagtcaagccccaaggtgag

SEQ ID NO: 4121355 - DNA, 25 bp, Homo sapien
aacagctttgttggccgtgctcacc

SEQ ID NO: 4121356 - DNA, 25 bp, Homo sapien
ttcagccccagtcccaatcaaggag

SEQ ID NO: 4121357 - DNA, 25 bp, Homo sapien
tctccatgagaatgcgcaagctata

SEQ ID NO: 4121358 - DNA, 25 bp, Homo sapien
tggtccctgtgaactccagtctgca

SEQ ID NO: 4121359 - DNA, 25 bp, Homo sapien
gcaggaggcacagttagacgatacc

SEQ ID NO: 4121360 - DNA, 25 bp, Homo sapien
aagagctccggcaggccaacaggga

SEQ ID NO: 4121361 - DNA, 25 bp, Homo sapien
ctacagaatgtggtcgggcgtaacc

SEQ ID NO: 4121362 - DNA, 25 bp, Homo sapien
tgatttgtggccctccggggttgca

SEQ ID NO: 4121363 - DNA, 25 bp, Homo sapien
gccctgcggagtcgccgggagttgt

SEQ ID NO: 4121364 - DNA, 25 bp, Homo sapien
caagaacagcgttgttgtcaagatg

SEQ ID NO: 4121365 - DNA, 25 bp, Homo sapien
caggcgttaacctggggccagcatg

SEQ ID NO: 4121366 - DNA, 25 bp, Homo sapien
gagagtaaaggatagccagccacag

SEQ ID NO: 4121367 - DNA, 25 bp, Homo sapien
cagccacagctaaggaatgcagtca

SEQ ID NO: 4121368 - DNA, 25 bp, Homo sapien
gataccacgagctaggtcctacaag

SEQ ID NO: 4121369 - DNA, 25 bp, Homo sapien
tagaagccaaagtccccgtgtagtg

SEQ ID NO: 4121370 - DNA, 25 bp, Homo sapien
ctggtacccttaagcttgctcccat

SEQ ID NO: 4121371 - DNA, 25 bp, Homo sapien
tggtacccttaagcttgctcccatc

SEQ ID NO: 4121372 - DNA, 25 bp, Homo sapien
gcttgctcccatctcatcatgttta

SEQ ID NO: 4121373 - DNA, 25 bp, Homo sapien
gctcccatctcatcatgtttatcca

SEQ ID NO: 4121374 - DNA, 25 bp, Homo sapien
attcaacccaagctgtgttacagaa

SEQ ID NO: 4121375 - DNA, 25 bp, Homo sapien
ggcatgtcccatggtatgaatatgt

SEQ ID NO: 4121376 - DNA, 25 bp, Homo sapien
atgcatccgaggggcatgtcccatg

SEQ ID NO: 4121377 - DNA, 25 bp, Homo sapien
gggcatgtcccatggtatgaatatg

SEQ ID NO: 4121378 - DNA, 25 bp, Homo sapien
cagtgaaagacgagcctgctcagat

SEQ ID NO: 4121379 - DNA, 25 bp, Homo sapien
ggcttcagaaagatatgccgcagcc

SEQ ID NO: 4121380 - DNA, 25 bp, Homo sapien
taaacggtcggctcgtctgctctgc

SEQ ID NO: 4121381 - DNA, 25 bp, Homo sapien
cgagcctgctcagattgtgtcagct

SEQ ID NO: 4121382 - DNA, 25 bp, Homo sapien
tccacacgtctcttcaaatctgcaa

SEQ ID NO: 4121383 - DNA, 25 bp, Homo sapien
acaaggaattccacacgtctcttca

SEQ ID NO: 4121384 - DNA, 25 bp, Homo sapien
ttggttgcctattcctctataattg

SEQ ID NO: 4121385 - DNA, 25 bp, Homo sapien
aaatctgcaattttggttgcctatt

SEQ ID NO: 4121386 - DNA, 25 bp, Homo sapien
tcctttcagaatattctcagggaga

SEQ ID NO: 4121387 - DNA, 25 bp, Homo sapien
cggcaagctccgtaattctgacgtt

SEQ ID NO: 4121388 - DNA, 25 bp, Homo sapien
atattctcagggagatccataaggg

SEQ ID NO: 4121389 - DNA, 25 bp, Homo sapien
gcggcaagctccgtaattctgacgt

SEQ ID NO: 4121390 - DNA, 25 bp, Homo sapien
tcttctcccctcttctgtggccttc

SEQ ID NO: 4121391 - DNA, 25 bp, Homo sapien
ctcccctcttctgtggccttccatt

SEQ ID NO: 4121392 - DNA, 25 bp, Homo sapien
ttctcccctcttctgtggccttcca

SEQ ID NO: 4121393 - DNA, 25 bp, Homo sapien
tgtattatttcctcttctcccctct

SEQ ID NO: 4121394 - DNA, 25 bp, Homo sapien
ccttacacgagaaggatgagcctct

SEQ ID NO: 4121395 - DNA, 25 bp, Homo sapien
caatgggaagttttacctcaaggca

SEQ ID NO: 4121396 - DNA, 25 bp, Homo sapien
gaacgtgtctcactatcaatgggaa

SEQ ID NO: 4121397 - DNA, 25 bp, Homo sapien
ttccccagtggccatttcaagagac

SEQ ID NO: 4121398 - DNA, 25 bp, Homo sapien
ctggcatcagccgcctaacccccat

SEQ ID NO: 4121399 - DNA, 25 bp, Homo sapien
ccttctggcatcagccgcctaaccc

SEQ ID NO: 4121400 - DNA, 25 bp, Homo sapien
ttctggcatcagccgcctaaccccc

SEQ ID NO: 4121401 - DNA, 25 bp, Homo sapien
cttctggcatcagccgcctaacccc

SEQ ID NO: 4121402 - DNA, 25 bp, Homo sapien
caggagaccagggaaagaagcccag

SEQ ID NO: 4121403 - DNA, 25 bp, Homo sapien
gggctttctcagtcaccatgcccag

SEQ ID NO: 4121404 - DNA, 25 bp, Homo sapien
ctggggctttctcagtcaccatgcc

SEQ ID NO: 4121405 - DNA, 25 bp, Homo sapien
ccaggagaccagggaaagaagccca

SEQ ID NO: 4121406 - DNA, 25 bp, Homo sapien
catcggagacgacaggccctctgga

SEQ ID NO: 4121407 - DNA, 25 bp, Homo sapien
cagcccagagataggctaggagttc

SEQ ID NO: 4121408 - DNA, 25 bp, Homo sapien
ggagttccatcggagacgacaggcc

SEQ ID NO: 4121409 - DNA, 25 bp, Homo sapien
ggctaggagttccatcggagacgac

SEQ ID NO: 4121410 - DNA, 25 bp, Homo sapien
gaaggagagtgaacgtggcctattc

SEQ ID NO: 4121411 - DNA, 25 bp, Homo sapien
gaacgtggcctattctttcaagaaa

SEQ ID NO: 4121412 - DNA, 25 bp, Homo sapien
agtgaacgtggcctattctttcaag

SEQ ID NO: 4121413 - DNA, 25 bp, Homo sapien
gagagtgaacgtggcctattctttc

SEQ ID NO: 4121414 - DNA, 25 bp, Homo sapien
gagacaggaacaacttgtgttgctt

SEQ ID NO: 4121415 - DNA, 25 bp, Homo sapien
aacacttattggagacaggaacaac

SEQ ID NO: 4121416 - DNA, 25 bp, Homo sapien
attcaaacacttattggagacagga

SEQ ID NO: 4121417 - DNA, 25 bp, Homo sapien
gacaggaacaacttgtgttgctttc

SEQ ID NO: 4121418 - DNA, 25 bp, Homo sapien
tacttaggaatgtcacccacgacat

SEQ ID NO: 4121419 - DNA, 25 bp, Homo sapien
tcagtctgactagatggttcaccaa

SEQ ID NO: 4121420 - DNA, 25 bp, Homo sapien
tcatgcaagatctcgttggaacctc

SEQ ID NO: 4121421 - DNA, 25 bp, Homo sapien
tctggttcaggagaatgcgggccaa

SEQ ID NO: 4121422 - DNA, 25 bp, Homo sapien
tcagggagtgtacagagacgggctt

SEQ ID NO: 4121423 - DNA, 25 bp, Homo sapien
gtagaaccacatcagggagtgtaca

SEQ ID NO: 4121424 - DNA, 25 bp, Homo sapien
cagagacgggctttgagagctcctc

SEQ ID NO: 4121425 - DNA, 25 bp, Homo sapien
ctgagtagaaccacatcagggagtg

SEQ ID NO: 4121426 - DNA, 25 bp, Homo sapien
ccagaaagtctggccacctagaaag

SEQ ID NO: 4121427 - DNA, 25 bp, Homo sapien
gaaagtctggccacctagaaaggag

SEQ ID NO: 4121428 - DNA, 25 bp, Homo sapien
gtctggccacctagaaaggagaaac

SEQ ID NO: 4121429 - DNA, 25 bp, Homo sapien
agtctggccacctagaaaggagaaa

SEQ ID NO: 4121430 - DNA, 25 bp, Homo sapien
gaagttgggacctatggttggtcca

SEQ ID NO: 4121431 - DNA, 25 bp, Homo sapien
caggaagttgggacctatggttggt

SEQ ID NO: 4121432 - DNA, 25 bp, Homo sapien
ttgggacctatggttggtccaggaa

SEQ ID NO: 4121433 - DNA, 25 bp, Homo sapien
accaggaagttgggacctatggttg

SEQ ID NO: 4121434 - DNA, 25 bp, Homo sapien
gactttgaagggccatcaaaggtga

SEQ ID NO: 4121435 - DNA, 25 bp, Homo sapien
tagtgagtcaccactgactttgaag

SEQ ID NO: 4121436 - DNA, 25 bp, Homo sapien
ggaggtgatgtggtctttctacaca

SEQ ID NO: 4121437 - DNA, 25 bp, Homo sapien
gagaacactggggtagtgagtcacc

SEQ ID NO: 4121438 - DNA, 25 bp, Homo sapien
gcatccagcacgggaaaaaatgtag

SEQ ID NO: 4121439 - DNA, 25 bp, Homo sapien
catccagcacgggaaaaaatgtagg

SEQ ID NO: 4121440 - DNA, 25 bp, Homo sapien
ttttgcctcaggctacccgagagct

SEQ ID NO: 4121441 - DNA, 25 bp, Homo sapien
catcacctagagaggttttgcctca

SEQ ID NO: 4121442 - DNA, 25 bp, Homo sapien
gaccagtttgcccaataggactttg

SEQ ID NO: 4121443 - DNA, 25 bp, Homo sapien
catctgtgagactggaaacctataa

SEQ ID NO: 4121444 - DNA, 25 bp, Homo sapien
gttcccagggcgtggccccatgcca

SEQ ID NO: 4121445 - DNA, 25 bp, Homo sapien
cgttcccagggcgtggccccatgcc

SEQ ID NO: 4121446 - DNA, 25 bp, Homo sapien
ttcccagggcgtggccccatgccat

SEQ ID NO: 4121447 - DNA, 25 bp, Homo sapien
ctccacctggaggtccttcagctca

SEQ ID NO: 4121448 - DNA, 25 bp, Homo sapien
gctcacacatgctccaagcctggag

SEQ ID NO: 4121449 - DNA, 25 bp, Homo sapien
agctcacacatgctccaagcctgga

SEQ ID NO: 4121450 - DNA, 25 bp, Homo sapien
gaggtccttcagctcacacatgctc

SEQ ID NO: 4121451 - DNA, 25 bp, Homo sapien
atgactcagccgttccagcctgtgg

SEQ ID NO: 4121452 - DNA, 25 bp, Homo sapien
cagggtagcacctacttgagacagg

SEQ ID NO: 4121453 - DNA, 25 bp, Homo sapien
tccaagggacctcacaggataagat

SEQ ID NO: 4121454 - DNA, 25 bp, Homo sapien
tccaaatgaaccagacaagaaaggg

SEQ ID NO: 4121455 - DNA, 25 bp, Homo sapien
aattctaacgaccatcaatgctaga

SEQ ID NO: 4121456 - DNA, 25 bp, Homo sapien
gcaaacacatgccaaattctaacga

SEQ ID NO: 4121457 - DNA, 25 bp, Homo sapien
ctaacgaccatcaatgctagaaaga

SEQ ID NO: 4121458 - DNA, 25 bp, Homo sapien
cacatgccaaattctaacgaccatc

SEQ ID NO: 4121459 - DNA, 25 bp, Homo sapien
tactcgattgaggaagttcacagtt

SEQ ID NO: 4121460 - DNA, 25 bp, Homo sapien
gaggatatacattgatagctgaccc

SEQ ID NO: 4121461 - DNA, 25 bp, Homo sapien
cagtcatggaataaatgcaataccc

SEQ ID NO: 4121462 - DNA, 25 bp, Homo sapien
gaaatacccagtgcagttaagaatg

SEQ ID NO: 4121463 - DNA, 25 bp, Homo sapien
aatgttctggatgcatcatctccaa

SEQ ID NO: 4121464 - DNA, 25 bp, Homo sapien
tgggtcagagttccgactgccatct

SEQ ID NO: 4121465 - DNA, 25 bp, Homo sapien
agcaagttgtgatcactttcccagg

SEQ ID NO: 4121466 - DNA, 25 bp, Homo sapien
gagaaggcccttaactcaaagtagc

SEQ ID NO: 4121467 - DNA, 25 bp, Homo sapien
gcatctgttctgctctactaacaaa

SEQ ID NO: 4121468 - DNA, 25 bp, Homo sapien
ttggggggcatctgttctgctctac

SEQ ID NO: 4121469 - DNA, 25 bp, Homo sapien
tctactaacaaagacacaggtcagg

SEQ ID NO: 4121470 - DNA, 25 bp, Homo sapien
gctctactaacaaagacacaggtca

SEQ ID NO: 4121471 - DNA, 25 bp, Homo sapien
tgatgacggccagggtccatgagct

SEQ ID NO: 4121472 - DNA, 25 bp, Homo sapien
gaagacaaggcccagcagttgaata

SEQ ID NO: 4121473 - DNA, 25 bp, Homo sapien
ctttagatgtgataacctggagatt

SEQ ID NO: 4121474 - DNA, 25 bp, Homo sapien
cagttccccaccatcgctgatttgg

SEQ ID NO: 4121475 - DNA, 25 bp, Homo sapien
gatccacctcttcccagcctcaaat

SEQ ID NO: 4121476 - DNA, 25 bp, Homo sapien
ttcttccaattctgggatccacctc

SEQ ID NO: 4121477 - DNA, 25 bp, Homo sapien
cttcttccaattctgggatccacct

SEQ ID NO: 4121478 - DNA, 25 bp, Homo sapien
cacctcttcccagcctcaaatcttg

SEQ ID NO: 4121479 - DNA, 25 bp, Homo sapien
gctcttggcaccagcctcttcaggt

SEQ ID NO: 4121480 - DNA, 25 bp, Homo sapien
cagactagcttctcagttttgcaag

SEQ ID NO: 4121481 - DNA, 25 bp, Homo sapien
cctgagaaatccttgcaattagtgc

SEQ ID NO: 4121482 - DNA, 25 bp, Homo sapien
tgattgacaccacatactaaccagt

SEQ ID NO: 4121483 - DNA, 25 bp, Homo sapien
gaaacagagataccatcagatcaca

SEQ ID NO: 4121484 - DNA, 25 bp, Homo sapien
agtgatagcttaggcgtcaccactc

SEQ ID NO: 4121485 - DNA, 25 bp, Homo sapien
tgatatgtccagtgatagcttaggc

SEQ ID NO: 4121486 - DNA, 25 bp, Homo sapien
gtgaagtccttgatatgtccagtga

SEQ ID NO: 4121487 - DNA, 25 bp, Homo sapien
ctgctaatttagtgaagtccttgat

SEQ ID NO: 4121488 - DNA, 25 bp, Homo sapien
tcgataagttcttgcccggataagc

SEQ ID NO: 4121489 - DNA, 25 bp, Homo sapien
ggataagcacaagaagaccagtggt

SEQ ID NO: 4121490 - DNA, 25 bp, Homo sapien
tattgtatttcgataagttcttgcc

SEQ ID NO: 4121491 - DNA, 25 bp, Homo sapien
ttgcccggataagcacaagaagacc

SEQ ID NO: 4121492 - DNA, 25 bp, Homo sapien
cctttatatcccttatagtcctctg

SEQ ID NO: 4121493 - DNA, 25 bp, Homo sapien
gacctgtcctcggaatgctataagg

SEQ ID NO: 4121494 - DNA, 25 bp, Homo sapien
ttctcagaagtcagacctgtcctcg

SEQ ID NO: 4121495 - DNA, 25 bp, Homo sapien
tcccttatagtcctctgtcttcaag

SEQ ID NO: 4121496 - DNA, 25 bp, Homo sapien
caactcagcagtgaaatgtgcaatg

SEQ ID NO: 4121497 - DNA, 25 bp, Homo sapien
tacaactcagcagtgaaatgtgcaa

SEQ ID NO: 4121498 - DNA, 25 bp, Homo sapien
aatacaactcagcagtgaaatgtgc

SEQ ID NO: 4121499 - DNA, 25 bp, Homo sapien
aactcagcagtgaaatgtgcaatga

SEQ ID NO: 4121500 - DNA, 25 bp, Homo sapien
taagccatgcactagttcctcagag

SEQ ID NO: 4121501 - DNA, 25 bp, Homo sapien
gatgtgaatatacaggccgatgggc

SEQ ID NO: 4121502 - DNA, 25 bp, Homo sapien
tatcgaaagtgaggaccattgggtc

SEQ ID NO: 4121503 - DNA, 25 bp, Homo sapien
ataattgatcgaatactgaggcccc

SEQ ID NO: 4121504 - DNA, 25 bp, Homo sapien
ccaaatggcataatccaatccacag

SEQ ID NO: 4121505 - DNA, 25 bp, Homo sapien
ttccaaatggcataatccaatccac

SEQ ID NO: 4121506 - DNA, 25 bp, Homo sapien
aatggcataatccaatccacagcag

SEQ ID NO: 4121507 - DNA, 25 bp, Homo sapien
tattccaaatggcataatccaatcc

SEQ ID NO: 4121508 - DNA, 25 bp, Homo sapien
tcctgtcactagattcaaatgtagt

SEQ ID NO: 4121509 - DNA, 25 bp, Homo sapien
tccagggccccataatgatgagcca

SEQ ID NO: 4121510 - DNA, 25 bp, Homo sapien
aaatttgggctagatctttagtctc

SEQ ID NO: 4121511 - DNA, 25 bp, Homo sapien
gtaatttgttcaaaatcctctaaca

SEQ ID NO: 4121512 - DNA, 25 bp, Homo sapien
agagcaggcccacgtcatcatagta

SEQ ID NO: 4121513 - DNA, 25 bp, Homo sapien
tgtggtaccaaaggtctcaactgta

SEQ ID NO: 4121514 - DNA, 25 bp, Homo sapien
caaaggtctcaactgtatctagtga

SEQ ID NO: 4121515 - DNA, 25 bp, Homo sapien
tcatagtaggatgtggtaccaaagg

SEQ ID NO: 4121516 - DNA, 25 bp, Homo sapien
caaaagtgacagtccgggctcgaag

SEQ ID NO: 4121517 - DNA, 25 bp, Homo sapien
tccaacaaaggcgtagatcaccggg

SEQ ID NO: 4121518 - DNA, 25 bp, Homo sapien
gatcaccgggttcatgcagcagtgg

SEQ ID NO: 4121519 - DNA, 25 bp, Homo sapien
cagatggccataacgagcagaggga

SEQ ID NO: 4121520 - DNA, 25 bp, Homo sapien
tcttcaagagcttcagtgttgcact

SEQ ID NO: 4121521 - DNA, 25 bp, Homo sapien
gttgatgatgagtacgctgcccagc

SEQ ID NO: 4121522 - DNA, 25 bp, Homo sapien
gaccttagggtacatgcatctactg

SEQ ID NO: 4121523 - DNA, 25 bp, Homo sapien
tagtaactatctaacattcaggtgc

SEQ ID NO: 4121524 - DNA, 25 bp, Homo sapien
aaaaacaagcttttcattaagcagg

SEQ ID NO: 4121525 - DNA, 25 bp, Homo sapien
aaaacaagcttttcattaagcaggg

SEQ ID NO: 4121526 - DNA, 25 bp, Homo sapien
aaacaagcttttcattaagcaggga

SEQ ID NO: 4121527 - DNA, 25 bp, Homo sapien
tgtgaacaaaacattgcacgctcat

SEQ ID NO: 4121528 - DNA, 25 bp, Homo sapien
gcattatgcagtgttgtagttactt

SEQ ID NO: 4121529 - DNA, 25 bp, Homo sapien
attatgcagtgttgtagttactttc

SEQ ID NO: 4121530 - DNA, 25 bp, Homo sapien
tatgcagtgttgtagttactttctg

SEQ ID NO: 4121531 - DNA, 25 bp, Homo sapien
cactggtgtatcaaaggctctgcaa

SEQ ID NO: 4121532 - DNA, 25 bp, Homo sapien
gcttagagtcccacactggtgtatc

SEQ ID NO: 4121533 - DNA, 25 bp, Homo sapien
aaataagcttagagtcccacactgg

SEQ ID NO: 4121534 - DNA, 25 bp, Homo sapien
gagtcccacactggtgtatcaaagg

SEQ ID NO: 4121535 - DNA, 25 bp, Homo sapien
ttctggaatctcctgaccctggcat

SEQ ID NO: 4121536 - DNA, 25 bp, Homo sapien
cttggcatgcagaagtaggaaataa

SEQ ID NO: 4121537 - DNA, 25 bp, Homo sapien
cttctcagcaactgaaccaaacaga

SEQ ID NO: 4121538 - DNA, 25 bp, Homo sapien
caggcagtcctggtatgtcaggctt

SEQ ID NO: 4121539 - DNA, 25 bp, Homo sapien
tgaaccaaacagatctagaggtaga

SEQ ID NO: 4121540 - DNA, 25 bp, Homo sapien
gtccttgttcaatccactttctctg

SEQ ID NO: 4121541 - DNA, 25 bp, Homo sapien
gaaatgcgtccttgttcaatccact

SEQ ID NO: 4121542 - DNA, 25 bp, Homo sapien
ctggggaaatgcgtccttgttcaat

SEQ ID NO: 4121543 - DNA, 25 bp, Homo sapien
tgcgtccttgttcaatccactttct

SEQ ID NO: 4121544 - DNA, 25 bp, Homo sapien
gattccgccaaaataaccgatgtga

SEQ ID NO: 4121545 - DNA, 25 bp, Homo sapien
gtttattaagatgaggacgaccagc

SEQ ID NO: 4121546 - DNA, 25 bp, Homo sapien
aaaccgagaacgagatgtggacagc

SEQ ID NO: 4121547 - DNA, 25 bp, Homo sapien
ccatcctcgtggaaaataagggcca

SEQ ID NO: 4121548 - DNA, 25 bp, Homo sapien
cattgtttgcagaagcgcttggtga

SEQ ID NO: 4121549 - DNA, 25 bp, Homo sapien
gcgtgtttgttgaagtcactccatc

SEQ ID NO: 4121550 - DNA, 25 bp, Homo sapien
tataaaccagccgagacttcctgct

SEQ ID NO: 4121551 - DNA, 25 bp, Homo sapien
ctttcggaagaacaccgagagatac

SEQ ID NO: 4121552 - DNA, 25 bp, Homo sapien
tagtctgtattagtacacacagccc

SEQ ID NO: 4121553 - DNA, 25 bp, Homo sapien
gagtcaaagtctctacccacagttt

SEQ ID NO: 4121554 - DNA, 25 bp, Homo sapien
tcaagacattgacagaatcagagat

SEQ ID NO: 4121555 - DNA, 25 bp, Homo sapien
tagaaaaagaggattagcacaaggt

SEQ ID NO: 4121556 - DNA, 25 bp, Homo sapien
tttgtccaggctcagccatgctcat

SEQ ID NO: 4121557 - DNA, 25 bp, Homo sapien
ctttgtctttgtccaggctcagcca

SEQ ID NO: 4121558 - DNA, 25 bp, Homo sapien
tctttgtccaggctcagccatgctc

SEQ ID NO: 4121559 - DNA, 25 bp, Homo sapien
tgtctttgtccaggctcagccatgc

SEQ ID NO: 4121560 - DNA, 25 bp, Homo sapien
tcctggctgaatgcgtgagcccttt

SEQ ID NO: 4121561 - DNA, 25 bp, Homo sapien
gcaaaagagaatcatcggactccac

SEQ ID NO: 4121562 - DNA, 25 bp, Homo sapien
tccctgacctggtgaacccttcaag

SEQ ID NO: 4121563 - DNA, 25 bp, Homo sapien
tgtggcctaagaagcatctgaacaa

SEQ ID NO: 4121564 - DNA, 25 bp, Homo sapien
ctttccttttccacgaccatcgagg

SEQ ID NO: 4121565 - DNA, 25 bp, Homo sapien
gggcaatcctacagccaagagctat

SEQ ID NO: 4121566 - DNA, 25 bp, Homo sapien
gtgtagtcactttcacattctttcc

SEQ ID NO: 4121567 - DNA, 25 bp, Homo sapien
catcgaggagtccttgtgtagtcac

SEQ ID NO: 4121568 - DNA, 25 bp, Homo sapien
gaaaccttctttagccatgtggcct

SEQ ID NO: 4121569 - DNA, 25 bp, Homo sapien
taggagttcccactggcaaaatagg

SEQ ID NO: 4121570 - DNA, 25 bp, Homo sapien
cccaagttgcctggttctagaagcc

SEQ ID NO: 4121571 - DNA, 25 bp, Homo sapien
aagccagacgtgtgatttccaaagc

SEQ ID NO: 4121572 - DNA, 25 bp, Homo sapien
gtgtcacactgattgtcaccatcag

SEQ ID NO: 4121573 - DNA, 25 bp, Homo sapien
tcttctcggttgttcagtcatgtga

SEQ ID NO: 4121574 - DNA, 25 bp, Homo sapien
gttcagtagacagtcgggctcttct

SEQ ID NO: 4121575 - DNA, 25 bp, Homo sapien
tcccgttgttcagtagacagtcggg

SEQ ID NO: 4121576 - DNA, 25 bp, Homo sapien
cagatacataggtggcaggattctt

SEQ ID NO: 4121577 - DNA, 25 bp, Homo sapien
gccagatacataggtggcaggattc

SEQ ID NO: 4121578 - DNA, 25 bp, Homo sapien
gcaggattcttcactccagatataa

SEQ ID NO: 4121579 - DNA, 25 bp, Homo sapien
gtggcaggattcttcactccagata

SEQ ID NO: 4121580 - DNA, 25 bp, Homo sapien
cattaagtgtattgaaggcgaaaag

SEQ ID NO: 4121581 - DNA, 25 bp, Homo sapien
gagggtggagttaaatcattaagtg

SEQ ID NO: 4121582 - DNA, 25 bp, Homo sapien
gctagagaatagatctctggtctga

SEQ ID NO: 4121583 - DNA, 25 bp, Homo sapien
tatttacgggcttttctcactggat

SEQ ID NO: 4121584 - DNA, 25 bp, Homo sapien
aggacaatgttgtagggagcccaga

SEQ ID NO: 4121585 - DNA, 25 bp, Homo sapien
cattgattttttggcagggctccga

SEQ ID NO: 4121586 - DNA, 25 bp, Homo sapien
taaactgagcttgctcgctcgggag

SEQ ID NO: 4121587 - DNA, 25 bp, Homo sapien
gaggcgggctgcgatttgcttcaca

SEQ ID NO: 4121588 - DNA, 25 bp, Homo sapien
cagcccaggctgtgtatgaaaacta

SEQ ID NO: 4121589 - DNA, 25 bp, Homo sapien
tcatgacttagacggagcaatgccg

SEQ ID NO: 4121590 - DNA, 25 bp, Homo sapien
catgtgcacaactctgactgggtca

SEQ ID NO: 4121591 - DNA, 25 bp, Homo sapien
tctggaataagtacctaaggcgccc

SEQ ID NO: 4121592 - DNA, 25 bp, Homo sapien
tagacaactaacttatggcaccaat

SEQ ID NO: 4121593 - DNA, 25 bp, Homo sapien
gcaaccagcaaccttactcttagag

SEQ ID NO: 4121594 - DNA, 25 bp, Homo sapien
tgtgcctacaactcagggctgcggg

SEQ ID NO: 4121595 - DNA, 25 bp, Homo sapien
tgcgggtaagtgaccaggccatgac

SEQ ID NO: 4121596 - DNA, 25 bp, Homo sapien
tctggaagttgaacacccttgctgg

SEQ ID NO: 4121597 - DNA, 25 bp, Homo sapien
ggcatcaacctgtaccccgaatgga

SEQ ID NO: 4121598 - DNA, 25 bp, Homo sapien
ggagactcctctcggttttcagaaa

SEQ ID NO: 4121599 - DNA, 25 bp, Homo sapien
tttcacaactgggatggtgccggca

SEQ ID NO: 4121600 - DNA, 25 bp, Homo sapien
tcacacaccgtttccacagaaattc

SEQ ID NO: 4121601 - DNA, 25 bp, Homo sapien
tctcacacaccgtttccacagaaat

SEQ ID NO: 4121602 - DNA, 25 bp, Homo sapien
ctcacacaccgtttccacagaaatt

SEQ ID NO: 4121603 - DNA, 25 bp, Homo sapien
ggaacattactttgtattcctttgc

SEQ ID NO: 4121604 - DNA, 25 bp, Homo sapien
attcctttgccatgagtgggcagag

SEQ ID NO: 4121605 - DNA, 25 bp, Homo sapien
tgcattccgattgcatcacagggtt

SEQ ID NO: 4121606 - DNA, 25 bp, Homo sapien
ctaggcggaaggagggaacattact

SEQ ID NO: 4121607 - DNA, 25 bp, Homo sapien
caacttcagaggctggtcctgtcct

SEQ ID NO: 4121608 - DNA, 25 bp, Homo sapien
ttcaacttcagaggctggtcctgtc

SEQ ID NO: 4121609 - DNA, 25 bp, Homo sapien
tcctgtcctctcaggagagcccagg

SEQ ID NO: 4121610 - DNA, 25 bp, Homo sapien
aggaccttcaacttcagaggctggt

SEQ ID NO: 4121611 - DNA, 25 bp, Homo sapien
cttttggaacacataaagccactta

SEQ ID NO: 4121612 - DNA, 25 bp, Homo sapien
gcgtggaccaatccttttggaacac

SEQ ID NO: 4121613 - DNA, 25 bp, Homo sapien
ttcctgtggcctgcgtggaccaatc

SEQ ID NO: 4121614 - DNA, 25 bp, Homo sapien
tccttttggaacacataaagccact

SEQ ID NO: 4121615 - DNA, 25 bp, Homo sapien
cactttgcagcatttcgatcccttt

SEQ ID NO: 4121616 - DNA, 25 bp, Homo sapien
catgaagtaatacactttgcagcat

SEQ ID NO: 4121617 - DNA, 25 bp, Homo sapien
taatacactttgcagcatttcgatc

SEQ ID NO: 4121618 - DNA, 25 bp, Homo sapien
gcagcatttcgatccctttcttctt

SEQ ID NO: 4121619 - DNA, 25 bp, Homo sapien
gaaacccacccgctgattcaatacg

SEQ ID NO: 4121620 - DNA, 25 bp, Homo sapien
gctgattcaatacggggaccaggaa

SEQ ID NO: 4121621 - DNA, 25 bp, Homo sapien
agtgttcgcagaaacccacccgctg

SEQ ID NO: 4121622 - DNA, 25 bp, Homo sapien
aacccacccgctgattcaatacggg

SEQ ID NO: 4121623 - DNA, 25 bp, Homo sapien
ccgagctcagggaccaactgaaata

SEQ ID NO: 4121624 - DNA, 25 bp, Homo sapien
gaagcgtctgaaagcaaccgggaag

SEQ ID NO: 4121625 - DNA, 25 bp, Homo sapien
aaaccactgttgattcccctggtgg

SEQ ID NO: 4121626 - DNA, 25 bp, Homo sapien
cctccagaggatctctgaagcgtct

SEQ ID NO: 4121627 - DNA, 25 bp, Homo sapien
tccttttgatcagactgctcctgac

SEQ ID NO: 4121628 - DNA, 25 bp, Homo sapien
cctccttttgatcagactgctcctg

SEQ ID NO: 4121629 - DNA, 25 bp, Homo sapien
tggatgccctccttttgatcagact

SEQ ID NO: 4121630 - DNA, 25 bp, Homo sapien
tgccctccttttgatcagactgctc

SEQ ID NO: 4121631 - DNA, 25 bp, Homo sapien
aagtgaaaccatgctcagcatcaac

SEQ ID NO: 4121632 - DNA, 25 bp, Homo sapien
ctcagcatcaacatggccataaggg

SEQ ID NO: 4121633 - DNA, 25 bp, Homo sapien
catagatgacacacagatgacttac

SEQ ID NO: 4121634 - DNA, 25 bp, Homo sapien
tgagacgtttttctctcgaagggta

SEQ ID NO: 4121635 - DNA, 25 bp, Homo sapien
tttctgcattttaaaaagtttgctc

SEQ ID NO: 4121636 - DNA, 25 bp, Homo sapien
atttctgcattttaaaaagtttgct

SEQ ID NO: 4121637 - DNA, 25 bp, Homo sapien
ttctgcattttaaaaagtttgctca

SEQ ID NO: 4121638 - DNA, 25 bp, Homo sapien
tctgcattttaaaaagtttgctcac

SEQ ID NO: 4121639 - DNA, 25 bp, Homo sapien
ttcttttagcagaaacaggacttgc

SEQ ID NO: 4121640 - DNA, 25 bp, Homo sapien
cttcttttagcagaaacaggacttg

SEQ ID NO: 4121641 - DNA, 25 bp, Homo sapien
gaaaaatgtctcactgtacaggccc

SEQ ID NO: 4121642 - DNA, 25 bp, Homo sapien
aatgcaatattgtagggcgcccaca

SEQ ID NO: 4121643 - DNA, 25 bp, Homo sapien
tcaagaaacgcatacaggagagggt

SEQ ID NO: 4121644 - DNA, 25 bp, Homo sapien
gagaattttacacatgggatcgccc

SEQ ID NO: 4121645 - DNA, 25 bp, Homo sapien
tgttctggaccaagcgtaggctctg

SEQ ID NO: 4121646 - DNA, 25 bp, Homo sapien
tgtaaagagccttgcacggtgcctg

SEQ ID NO: 4121647 - DNA, 25 bp, Homo sapien
tctgagcaaatgctaccagggctgg

SEQ ID NO: 4121648 - DNA, 25 bp, Homo sapien
tgatcttagacaaatttccgcgcct

SEQ ID NO: 4121649 - DNA, 25 bp, Homo sapien
tataaatgggctgtctataatttgg

SEQ ID NO: 4121650 - DNA, 25 bp, Homo sapien
tagctagttcttctcatcaccggcg

SEQ ID NO: 4121651 - DNA, 25 bp, Homo sapien
tgagcctgaaaagttactcccatat

SEQ ID NO: 4121652 - DNA, 25 bp, Homo sapien
tcaccggcgaggcaatgagcctgaa

SEQ ID NO: 4121653 - DNA, 25 bp, Homo sapien
ttgccatggcaggtcattcccgatg

SEQ ID NO: 4121654 - DNA, 25 bp, Homo sapien
cacaccaacgtaatggagtgcctgg

SEQ ID NO: 4121655 - DNA, 25 bp, Homo sapien
gagtccggacctacttctgcaaatg

SEQ ID NO: 4121656 - DNA, 25 bp, Homo sapien
gagattcctgtcctacctatcggag

SEQ ID NO: 4121657 - DNA, 25 bp, Homo sapien
gtctgaccaaaaatttactacagca

SEQ ID NO: 4121658 - DNA, 25 bp, Homo sapien
ccaaaaatttactacagcagagttt

SEQ ID NO: 4121659 - DNA, 25 bp, Homo sapien
caatatttcacgtaggttcgttcta

SEQ ID NO: 4121660 - DNA, 25 bp, Homo sapien
ccaatatttcacgtaggttcgttct

SEQ ID NO: 4121661 - DNA, 25 bp, Homo sapien
gaaacagaagattgactagatgcag

SEQ ID NO: 4121662 - DNA, 25 bp, Homo sapien
gatctcagtccctgtgtgccactca

SEQ ID NO: 4121663 - DNA, 25 bp, Homo sapien
ttcccagagcatggcctggtaggtg

SEQ ID NO: 4121664 - DNA, 25 bp, Homo sapien
cactcaccaggatggttgggcctct

SEQ ID NO: 4121665 - DNA, 25 bp, Homo sapien
tctgagaaatatggctacagggctc

SEQ ID NO: 4121666 - DNA, 25 bp, Homo sapien
tacagggctcttcttgtgagcagcc

SEQ ID NO: 4121667 - DNA, 25 bp, Homo sapien
gcaataaagggttattatcaggccc

SEQ ID NO: 4121668 - DNA, 25 bp, Homo sapien
agctcaggactgcatagaccacatg

SEQ ID NO: 4121669 - DNA, 25 bp, Homo sapien
tggagctcttaatgtgcacacacag

SEQ ID NO: 4121670 - DNA, 25 bp, Homo sapien
tgtgagggcagatctcaaaacccct

SEQ ID NO: 4121671 - DNA, 25 bp, Homo sapien
gccttgtcacccataagaagttgta

SEQ ID NO: 4121672 - DNA, 25 bp, Homo sapien
tagcagcctgcctctctagaagagc

SEQ ID NO: 4121673 - DNA, 25 bp, Homo sapien
ggacacagcactaatatttggtata

SEQ ID NO: 4121674 - DNA, 25 bp, Homo sapien
gaggtcagtggaatggccacaccca

SEQ ID NO: 4121675 - DNA, 25 bp, Homo sapien
tgcatattgcaggatgtaccagaac

SEQ ID NO: 4121676 - DNA, 25 bp, Homo sapien
tagcatcgttttcgaggttcatgca

SEQ ID NO: 4121677 - DNA, 25 bp, Homo sapien
taaccctgtggtgagcattcttgag

SEQ ID NO: 4121678 - DNA, 25 bp, Homo sapien
aatatggctcagtttagtcatgccc

SEQ ID NO: 4121679 - DNA, 25 bp, Homo sapien
tactactgatgagtccatgatcctg

SEQ ID NO: 4121680 - DNA, 25 bp, Homo sapien
tggtgggccaatatgacgacttcag

SEQ ID NO: 4121681 - DNA, 25 bp, Homo sapien
gcagaaattcaaggaggctgcccag

SEQ ID NO: 4121682 - DNA, 25 bp, Homo sapien
cagaaattcaaggaggctgcccagg

SEQ ID NO: 4121683 - DNA, 25 bp, Homo sapien
taggaaaagtctcagggcagtgggg

SEQ ID NO: 4121684 - DNA, 25 bp, Homo sapien
tgagaggggccattaggaaaagtct

SEQ ID NO: 4121685 - DNA, 25 bp, Homo sapien
tgactgagtggccacatgggttctg

SEQ ID NO: 4121686 - DNA, 25 bp, Homo sapien
gggaagtgactgagtggccacatgg

SEQ ID NO: 4121687 - DNA, 25 bp, Homo sapien
aagtgactgagtggccacatgggtt

SEQ ID NO: 4121688 - DNA, 25 bp, Homo sapien
tgtcaccaacatagcgaccttcagc

SEQ ID NO: 4121689 - DNA, 25 bp, Homo sapien
agtggacggtgacgtggccttcaca

SEQ ID NO: 4121690 - DNA, 25 bp, Homo sapien
tgcattcccgcccattctggctctc

SEQ ID NO: 4121691 - DNA, 25 bp, Homo sapien
tcccagtggacggtgacgtggcctt

SEQ ID NO: 4121692 - DNA, 25 bp, Homo sapien
ggacggtgacgtggccttcacagct

SEQ ID NO: 4121693 - DNA, 25 bp, Homo sapien
ctccctctgggagtgccagcagtac

SEQ ID NO: 4121694 - DNA, 25 bp, Homo sapien
ccctccctctgggagtgccagcagt

SEQ ID NO: 4121695 - DNA, 25 bp, Homo sapien
ttccctccctctgggagtgccagca

SEQ ID NO: 4121696 - DNA, 25 bp, Homo sapien
cttccctccctctgggagtgccagc

SEQ ID NO: 4121697 - DNA, 25 bp, Homo sapien
taggttgtgataagaagggtgctcc

SEQ ID NO: 4121698 - DNA, 25 bp, Homo sapien
tcaccagtgtggatgtaatgcaccc

SEQ ID NO: 4121699 - DNA, 25 bp, Homo sapien
tctttctgggtaggctagacacttc

SEQ ID NO: 4121700 - DNA, 25 bp, Homo sapien
gatgaggcttagttcagctgctacc

SEQ ID NO: 4121701 - DNA, 25 bp, Homo sapien
acaggctgctcggagactccgaggt

SEQ ID NO: 4121702 - DNA, 25 bp, Homo sapien
aagtctgggcgccagcacggacagc

SEQ ID NO: 4121703 - DNA, 25 bp, Homo sapien
tctgtaagccgacaaaggagcaggg

SEQ ID NO: 4121704 - DNA, 25 bp, Homo sapien
tcgggaaccagtgacatgggcatac

SEQ ID NO: 4121705 - DNA, 25 bp, Homo sapien
gacaggaggccttttgagcgcctga

SEQ ID NO: 4121706 - DNA, 25 bp, Homo sapien
ttcagaggatggcactaggctccac

SEQ ID NO: 4121707 - DNA, 25 bp, Homo sapien
cctgggacctcagcgggattcggat

SEQ ID NO: 4121708 - DNA, 25 bp, Homo sapien
tgaggacctggattgggcccatgaa

SEQ ID NO: 4121709 - DNA, 25 bp, Homo sapien
taaacggtggagacaggctacaggt

SEQ ID NO: 4121710 - DNA, 25 bp, Homo sapien
ctctggggctatggtgtgcctgggt

SEQ ID NO: 4121711 - DNA, 25 bp, Homo sapien
tctggggctatggtgtgcctgggtg

SEQ ID NO: 4121712 - DNA, 25 bp, Homo sapien
tgtgcctgggtgggtcgagctctcc

SEQ ID NO: 4121713 - DNA, 25 bp, Homo sapien
gcctgggtgggtcgagctctcctgg

SEQ ID NO: 4121714 - DNA, 25 bp, Homo sapien
ctgaaacatttgcttccacacttct

SEQ ID NO: 4121715 - DNA, 25 bp, Homo sapien
tgaaacatttgcttccacacttctg

SEQ ID NO: 4121716 - DNA, 25 bp, Homo sapien
ctggcgaaggtccactgctggtatt

SEQ ID NO: 4121717 - DNA, 25 bp, Homo sapien
gaaggtccactgctggtattgcatc

SEQ ID NO: 4121718 - DNA, 25 bp, Homo sapien
cactgctggtattgcatccagcctg

SEQ ID NO: 4121719 - DNA, 25 bp, Homo sapien
ggtccactgctggtattgcatccag

SEQ ID NO: 4121720 - DNA, 25 bp, Homo sapien
tgtgtggcccttcaagagagatgtc

SEQ ID NO: 4121721 - DNA, 25 bp, Homo sapien
aaggaccagaacttgggcagaggcc

SEQ ID NO: 4121722 - DNA, 25 bp, Homo sapien
cactccagttcatgtggaaaaggac

SEQ ID NO: 4121723 - DNA, 25 bp, Homo sapien
tgaactcagggtcctcaaacagagg

SEQ ID NO: 4121724 - DNA, 25 bp, Homo sapien
gcacagaagccctgcagacatgcct

SEQ ID NO: 4121725 - DNA, 25 bp, Homo sapien
tctgagatggggggaggcttgtaac

SEQ ID NO: 4121726 - DNA, 25 bp, Homo sapien
aatggagtgtactcttggggtctga

SEQ ID NO: 4121727 - DNA, 25 bp, Homo sapien
ttgtaaatggagtgtactcttgggg

SEQ ID NO: 4121728 - DNA, 25 bp, Homo sapien
taaatggagtgtactcttggggtct

SEQ ID NO: 4121729 - DNA, 25 bp, Homo sapien
gcagtttttacaacaatcaccacga

SEQ ID NO: 4121730 - DNA, 25 bp, Homo sapien
aggaatagacattctctcctgaggc

SEQ ID NO: 4121731 - DNA, 25 bp, Homo sapien
aatgcttaagttcctacagatgtgg

SEQ ID NO: 4121732 - DNA, 25 bp, Homo sapien
acagatgtggttttggcatgcgtag

SEQ ID NO: 4121733 - DNA, 25 bp, Homo sapien
tctgacttagcttcatgtttccaag

SEQ ID NO: 4121734 - DNA, 25 bp, Homo sapien
ctgacttagcttcatgtttccaagg

SEQ ID NO: 4121735 - DNA, 25 bp, Homo sapien
tttctgacttagcttcatgtttcca

SEQ ID NO: 4121736 - DNA, 25 bp, Homo sapien
tttttctgacttagcttcatgtttc

SEQ ID NO: 4121737 - DNA, 25 bp, Homo sapien
cttctttcagctcacacagctgtgc

SEQ ID NO: 4121738 - DNA, 25 bp, Homo sapien
attcaccatgcagcccttctttcag

SEQ ID NO: 4121739 - DNA, 25 bp, Homo sapien
tcattcaccatgcagcccttctttc

SEQ ID NO: 4121740 - DNA, 25 bp, Homo sapien
gcagcccttctttcagctcacacag

SEQ ID NO: 4121741 - DNA, 25 bp, Homo sapien
tttgccaaagagtgagctaggatca

SEQ ID NO: 4121742 - DNA, 25 bp, Homo sapien
ttctaagctgttcatggccaaatgg

SEQ ID NO: 4121743 - DNA, 25 bp, Homo sapien
acatgaggagagaaacggcaaatgg

SEQ ID NO: 4121744 - DNA, 25 bp, Homo sapien
cccagcagtgctcagtccagatgtg

SEQ ID NO: 4121745 - DNA, 25 bp, Homo sapien
tgagaagtaggctaagagaagacaa

SEQ ID NO: 4121746 - DNA, 25 bp, Homo sapien
gctaagagaagacaagagggccggg

SEQ ID NO: 4121747 - DNA, 25 bp, Homo sapien
gaagtaggctaagagaagacaagag

SEQ ID NO: 4121748 - DNA, 25 bp, Homo sapien
taagagaagacaagagggccgggcg

SEQ ID NO: 4121749 - DNA, 25 bp, Homo sapien
caggtgtaaaacaggcagagcattc

SEQ ID NO: 4121750 - DNA, 25 bp, Homo sapien
ggctaccatactcctgaacaggtct

SEQ ID NO: 4121751 - DNA, 25 bp, Homo sapien
tcttggtgggcttactcataagtcc

SEQ ID NO: 4121752 - DNA, 25 bp, Homo sapien
attgacatcccaatattttgtcttg

SEQ ID NO: 4121753 - DNA, 25 bp, Homo sapien
gacttcctgttagaatttatttgta

SEQ ID NO: 4121754 - DNA, 25 bp, Homo sapien
ttagctatgatgctaagtccagtgc

SEQ ID NO: 4121755 - DNA, 25 bp, Homo sapien
taagttggttctcataaaggtcaca

SEQ ID NO: 4121756 - DNA, 25 bp, Homo sapien
acctcttcttaggctagaggagctg

SEQ ID NO: 4121757 - DNA, 25 bp, Homo sapien
taaaatactggataggctcacaaac

SEQ ID NO: 4121758 - DNA, 25 bp, Homo sapien
aggaaacttgaagtagattactggg

SEQ ID NO: 4121759 - DNA, 25 bp, Homo sapien
tactgggtttcatgcgcatctgtgt

SEQ ID NO: 4121760 - DNA, 25 bp, Homo sapien
cacaaacgtaatggagatggcatag

SEQ ID NO: 4121761 - DNA, 25 bp, Homo sapien
ttccaagttggcccttccttggatg

SEQ ID NO: 4121762 - DNA, 25 bp, Homo sapien
tgggctgaaccccttccaagttggc

SEQ ID NO: 4121763 - DNA, 25 bp, Homo sapien
ctgctatctgatgggctgaacccct

SEQ ID NO: 4121764 - DNA, 25 bp, Homo sapien
ccttccttggatgtgctccctcagc

SEQ ID NO: 4121765 - DNA, 25 bp, Homo sapien
ctagcctgcccaaaccagaggactt

SEQ ID NO: 4121766 - DNA, 25 bp, Homo sapien
tgcacttgaggggttctcctattag

SEQ ID NO: 4121767 - DNA, 25 bp, Homo sapien
cagcaactccagactagcctgccca

SEQ ID NO: 4121768 - DNA, 25 bp, Homo sapien
tcctattagttacccagcaactcca

SEQ ID NO: 4121769 - DNA, 25 bp, Homo sapien
atgcccatgccaccagttgctgatt

SEQ ID NO: 4121770 - DNA, 25 bp, Homo sapien
catgccaccagttgctgattggcca

SEQ ID NO: 4121771 - DNA, 25 bp, Homo sapien
tctggacttccatcacatgcccatg

SEQ ID NO: 4121772 - DNA, 25 bp, Homo sapien
gcctgtgtggtccacacactctgaa

SEQ ID NO: 4121773 - DNA, 25 bp, Homo sapien
ctgtgcccctgagggtcacatgcca

SEQ ID NO: 4121774 - DNA, 25 bp, Homo sapien
tgtgcccctgagggtcacatgccaa

SEQ ID NO: 4121775 - DNA, 25 bp, Homo sapien
gcctgtgcccctgagggtcacatgc

SEQ ID NO: 4121776 - DNA, 25 bp, Homo sapien
ctgcctgtgcccctgagggtcacat

SEQ ID NO: 4121777 - DNA, 25 bp, Homo sapien
taaatcttcgctgcttggccgcgac

SEQ ID NO: 4121778 - DNA, 25 bp, Homo sapien
gctgaatagcaccacgaagactgaa

SEQ ID NO: 4121779 - DNA, 25 bp, Homo sapien
tttctgattggaggagctatagccc

SEQ ID NO: 4121780 - DNA, 25 bp, Homo sapien
gccctttaaagtgagcgcagtgctg

SEQ ID NO: 4121781 - DNA, 25 bp, Homo sapien
gaagagaccattcctctaagatggg

SEQ ID NO: 4121782 - DNA, 25 bp, Homo sapien
ttttcaggatgatgcgtagcgttcc

SEQ ID NO: 4121783 - DNA, 25 bp, Homo sapien
tgatctagagaacacgagccctgtg

SEQ ID NO: 4121784 - DNA, 25 bp, Homo sapien
taatgtacagctctggctactagcc

SEQ ID NO: 4121785 - DNA, 25 bp, Homo sapien
taccctggactgacacatggactct

SEQ ID NO: 4121786 - DNA, 25 bp, Homo sapien
gacctggcacttaggatcttgtatg

SEQ ID NO: 4121787 - DNA, 25 bp, Homo sapien
tgtcctacatgggatgccaagggct

SEQ ID NO: 4121788 - DNA, 25 bp, Homo sapien
cttgtatgtcatagcttcccagcac

SEQ ID NO: 4121789 - DNA, 25 bp, Homo sapien
caggagctggaacactaagtgtctg

SEQ ID NO: 4121790 - DNA, 25 bp, Homo sapien
taagtgtctgggagtccttggactg

SEQ ID NO: 4121791 - DNA, 25 bp, Homo sapien
ctttgagagtgtgctgatggttaac

SEQ ID NO: 4121792 - DNA, 25 bp, Homo sapien
ttaacattttcactcaggagctgga

SEQ ID NO: 4121793 - DNA, 25 bp, Homo sapien
gaggctcgccagagggttctccttt

SEQ ID NO: 4121794 - DNA, 25 bp, Homo sapien
gcttattggcctgggaaacctctat

SEQ ID NO: 4121795 - DNA, 25 bp, Homo sapien
gaaacatgctaactactccggatgg

SEQ ID NO: 4121796 - DNA, 25 bp, Homo sapien
ttaccatcaagttttctcagccctg

SEQ ID NO: 4121797 - DNA, 25 bp, Homo sapien
aatccagggcagtttagctgagtgt

SEQ ID NO: 4121798 - DNA, 25 bp, Homo sapien
tcatgaagttgtggtcaagatgtcc

SEQ ID NO: 4121799 - DNA, 25 bp, Homo sapien
gaggatctgcttttaagacagcccc

SEQ ID NO: 4121800 - DNA, 25 bp, Homo sapien
ccacaaggctgcttgagcatcatca

SEQ ID NO: 4121801 - DNA, 25 bp, Homo sapien
tgcataacagtttattctagactgt

SEQ ID NO: 4121802 - DNA, 25 bp, Homo sapien
taacagtttattctagactgttagt

SEQ ID NO: 4121803 - DNA, 25 bp, Homo sapien
ctgcataacagtttattctagactg

SEQ ID NO: 4121804 - DNA, 25 bp, Homo sapien
cataacagtttattctagactgtta

SEQ ID NO: 4121805 - DNA, 25 bp, Homo sapien
caggtaagcgctgggcgtccgaggt

SEQ ID NO: 4121806 - DNA, 25 bp, Homo sapien
gcggtgtaaacagccgcggcgggca

SEQ ID NO: 4121807 - DNA, 25 bp, Homo sapien
gtgccccgggcgctcagttgtttaa

SEQ ID NO: 4121808 - DNA, 25 bp, Homo sapien
aggacgcgggcggatggccggtgcc

SEQ ID NO: 4121809 - DNA, 25 bp, Homo sapien
gacagagagggattgatataaagtt

SEQ ID NO: 4121810 - DNA, 25 bp, Homo sapien
taatgtagtgctgaattcggcttgc

SEQ ID NO: 4121811 - DNA, 25 bp, Homo sapien
gaactatccttgtatcccaggcata

SEQ ID NO: 4121812 - DNA, 25 bp, Homo sapien
tgtacctagaagtttgttcatttct

SEQ ID NO: 4121813 - DNA, 25 bp, Homo sapien
gcagcaagcatcttaaattttgtta

SEQ ID NO: 4121814 - DNA, 25 bp, Homo sapien
tgcagcaagcatcttaaattttgtt

SEQ ID NO: 4121815 - DNA, 25 bp, Homo sapien
cagtatgtgaaaagtagtatttcat

SEQ ID NO: 4121816 - DNA, 25 bp, Homo sapien
aaattttgttaatacagtatgtgaa

SEQ ID NO: 4121817 - DNA, 25 bp, Homo sapien
gaaacagttgtgagaagtaacccca

SEQ ID NO: 4121818 - DNA, 25 bp, Homo sapien
gagatgtaagggctatttaacaggt

SEQ ID NO: 4121819 - DNA, 25 bp, Homo sapien
tagatatttgccgttgggctggaga

SEQ ID NO: 4121820 - DNA, 25 bp, Homo sapien
tttgatgtctactactgggcggcct

SEQ ID NO: 4121821 - DNA, 25 bp, Homo sapien
tctaaggaccagaaccccctgaaga

SEQ ID NO: 4121822 - DNA, 25 bp, Homo sapien
tcattgacgggaccagaaccccagg

SEQ ID NO: 4121823 - DNA, 25 bp, Homo sapien
gaaccccctgaagagattcccattc

SEQ ID NO: 4121824 - DNA, 25 bp, Homo sapien
ggtctccagtctggcgatgttgtca

SEQ ID NO: 4121825 - DNA, 25 bp, Homo sapien
cccagaaggtcgtagcagaagcagg

SEQ ID NO: 4121826 - DNA, 25 bp, Homo sapien
tctcctaaagcgaaaatggcaattt

SEQ ID NO: 4121827 - DNA, 25 bp, Homo sapien
cttggacgttttgaccttgagctgg

SEQ ID NO: 4121828 - DNA, 25 bp, Homo sapien
gggaaaagaggcgttagcatcgctt

SEQ ID NO: 4121829 - DNA, 25 bp, Homo sapien
catgtgaaattccaggtctttcagg

SEQ ID NO: 4121830 - DNA, 25 bp, Homo sapien
aaaaacagcagtgcggttggcagct

SEQ ID NO: 4121831 - DNA, 25 bp, Homo sapien
tagttttgccaagtattgaatctgc

SEQ ID NO: 4121832 - DNA, 25 bp, Homo sapien
cagctcttttaaggcttgagcaaga

SEQ ID NO: 4121833 - DNA, 25 bp, Homo sapien
aaagactttagaaatggccatgatc

SEQ ID NO: 4121834 - DNA, 25 bp, Homo sapien
cggcaactaatcccagttcaaagac

SEQ ID NO: 4121835 - DNA, 25 bp, Homo sapien
gcaactaatcccagttcaaagactt

SEQ ID NO: 4121836 - DNA, 25 bp, Homo sapien
tcaaagactttagaaatggccatga

SEQ ID NO: 4121837 - DNA, 25 bp, Homo sapien
taggccacataaaaattgagagtga

SEQ ID NO: 4121838 - DNA, 25 bp, Homo sapien
aattcatggagtctgtattttaggc

SEQ ID NO: 4121839 - DNA, 25 bp, Homo sapien
gacaaaatcaattcatggagtctgt

SEQ ID NO: 4121840 - DNA, 25 bp, Homo sapien
tggagtctgtattttaggccacata

SEQ ID NO: 4121841 - DNA, 25 bp, Homo sapien
tccccgagatggacgagcaaattcc

SEQ ID NO: 4121842 - DNA, 25 bp, Homo sapien
ggacgagcaaattcctgatggccca

SEQ ID NO: 4121843 - DNA, 25 bp, Homo sapien
gatggacgagcaaattcctgatggc

SEQ ID NO: 4121844 - DNA, 25 bp, Homo sapien
cgagatggacgagcaaattcctgat

SEQ ID NO: 4121845 - DNA, 25 bp, Homo sapien
gctgtatccccatgggcggcacacg

SEQ ID NO: 4121846 - DNA, 25 bp, Homo sapien
tgtgctgtatccccatgggcggcac

SEQ ID NO: 4121847 - DNA, 25 bp, Homo sapien
gaccgaggccgaattgcaggctcct

SEQ ID NO: 4121848 - DNA, 25 bp, Homo sapien
acgctgggaagaccgaggccgaatt

SEQ ID NO: 4121849 - DNA, 25 bp, Homo sapien
cagttccgtccgtagaaggagggag

SEQ ID NO: 4121850 - DNA, 25 bp, Homo sapien
cagcggagctgaccgtgccagcatt

SEQ ID NO: 4121851 - DNA, 25 bp, Homo sapien
atttacacagggaacacttcttggg

SEQ ID NO: 4121852 - DNA, 25 bp, Homo sapien
cacagccgggtagaaatgcctgagg

SEQ ID NO: 4121853 - DNA, 25 bp, Homo sapien
acttcttgggcagccaggtgtcatg

SEQ ID NO: 4121854 - DNA, 25 bp, Homo sapien
aaaagtggtagtacgtgcagacggt

SEQ ID NO: 4121855 - DNA, 25 bp, Homo sapien
tggtagtacgtgcagacggtggtag

SEQ ID NO: 4121856 - DNA, 25 bp, Homo sapien
agcataaaagtggtagtacgtgcag

SEQ ID NO: 4121857 - DNA, 25 bp, Homo sapien
cataaaagtggtagtacgtgcagac

SEQ ID NO: 4121858 - DNA, 25 bp, Homo sapien
tagtctccaataatctgaacatata

SEQ ID NO: 4121859 - DNA, 25 bp, Homo sapien
gtctccaataatctgaacatataat

SEQ ID NO: 4121860 - DNA, 25 bp, Homo sapien
cacgggccaggcagtatacatgtga

SEQ ID NO: 4121861 - DNA, 25 bp, Homo sapien
tgtgttgctcaggagttagctgtga

SEQ ID NO: 4121862 - DNA, 25 bp, Homo sapien
aatgttcagttattgaagcagcacg

SEQ ID NO: 4121863 - DNA, 25 bp, Homo sapien
gactgtcaattaggcttctggtcaa

SEQ ID NO: 4121864 - DNA, 25 bp, Homo sapien
agtggagtactgaagtcccctgcta

SEQ ID NO: 4121865 - DNA, 25 bp, Homo sapien
gagtactgaagtcccctgctattat

SEQ ID NO: 4121866 - DNA, 25 bp, Homo sapien
tcagtggagtactgaagtcccctgc

SEQ ID NO: 4121867 - DNA, 25 bp, Homo sapien
actgaagtcccctgctattattgtg

SEQ ID NO: 4121868 - DNA, 25 bp, Homo sapien
cagtgaccacggaatggaacccgct

SEQ ID NO: 4121869 - DNA, 25 bp, Homo sapien
cagcctgtgatttgtgagtgaccat

SEQ ID NO: 4121870 - DNA, 25 bp, Homo sapien
ttgagggctttgaggacttccacca

SEQ ID NO: 4121871 - DNA, 25 bp, Homo sapien
tgccagcagttggacttgagggctt

SEQ ID NO: 4121872 - DNA, 25 bp, Homo sapien
catcattactagactcagcctgtgg

SEQ ID NO: 4121873 - DNA, 25 bp, Homo sapien
caaggtggaatctaccagttttctc

SEQ ID NO: 4121874 - DNA, 25 bp, Homo sapien
ccactgaagtgatgatgtttcccat

SEQ ID NO: 4121875 - DNA, 25 bp, Homo sapien
ctcacaggaggcgtaagatagccat

SEQ ID NO: 4121876 - DNA, 25 bp, Homo sapien
gaattacgtacagagccatgggact

SEQ ID NO: 4121877 - DNA, 25 bp, Homo sapien
ggaggcaacttgtcccctggtgtga

SEQ ID NO: 4121878 - DNA, 25 bp, Homo sapien
aaaggaggcaacttgtcccctggtg

SEQ ID NO: 4121879 - DNA, 25 bp, Homo sapien
ccgaattacgtacagagccatggga

SEQ ID NO: 4121880 - DNA, 25 bp, Homo sapien
cccctccctcttctggacacaaaga

SEQ ID NO: 4121881 - DNA, 25 bp, Homo sapien
ctggacacaaagaggattgctttac

SEQ ID NO: 4121882 - DNA, 25 bp, Homo sapien
gacatttctggctcccctccctctt

SEQ ID NO: 4121883 - DNA, 25 bp, Homo sapien
tcttctggacacaaagaggattgct

SEQ ID NO: 4121884 - DNA, 25 bp, Homo sapien
tctcagaggccacgacctggtcctg

SEQ ID NO: 4121885 - DNA, 25 bp, Homo sapien
gaaggcaagtattgtaactcctgtt

SEQ ID NO: 4121886 - DNA, 25 bp, Homo sapien
gaggccacgacctggtcctgaaacc

SEQ ID NO: 4121887 - DNA, 25 bp, Homo sapien
tgctgccttgatgtgttgtaacgga

SEQ ID NO: 4121888 - DNA, 25 bp, Homo sapien
caaatgtgtcgcacttgaccgcctg

SEQ ID NO: 4121889 - DNA, 25 bp, Homo sapien
aaaggaacatttgtccctcgcaagc

SEQ ID NO: 4121890 - DNA, 25 bp, Homo sapien
caaccgcatgaagggatgtgaagac

SEQ ID NO: 4121891 - DNA, 25 bp, Homo sapien
tcgattcagtcgaaccaaatgtgtc

SEQ ID NO: 4121892 - DNA, 25 bp, Homo sapien
gtgtttcggtttcctggtgtctaca

SEQ ID NO: 4121893 - DNA, 25 bp, Homo sapien
tgtttccgtgagtatttgtgtttcg

SEQ ID NO: 4121894 - DNA, 25 bp, Homo sapien
tttcctggtgtctacaatgaggaca

SEQ ID NO: 4121895 - DNA, 25 bp, Homo sapien
ccttcacaggtaacgtgtttccgtg

SEQ ID NO: 4121896 - DNA, 25 bp, Homo sapien
gaagacctcccgacgggtgtattga

SEQ ID NO: 4121897 - DNA, 25 bp, Homo sapien
tgtttgccaatttccctttcccaga

SEQ ID NO: 4121898 - DNA, 25 bp, Homo sapien
gatcatggcaggtgttccggcagaa

SEQ ID NO: 4121899 - DNA, 25 bp, Homo sapien
gacgttcctctgattctcggtagta

SEQ ID NO: 4121900 - DNA, 25 bp, Homo sapien
aaaagtagacaaacaagccacatac

SEQ ID NO: 4121901 - DNA, 25 bp, Homo sapien
ggtacaggactctgagtggcatagc

SEQ ID NO: 4121902 - DNA, 25 bp, Homo sapien
cccacacatggtacaggactctgag

SEQ ID NO: 4121903 - DNA, 25 bp, Homo sapien
catggtacaggactctgagtggcat

SEQ ID NO: 4121904 - DNA, 25 bp, Homo sapien
tggtacaggactctgagtggcatag

SEQ ID NO: 4121905 - DNA, 25 bp, Homo sapien
aggaatgtcttcctttggcgtattg

SEQ ID NO: 4121906 - DNA, 25 bp, Homo sapien
gaatgtcttcctttggcgtattgct

SEQ ID NO: 4121907 - DNA, 25 bp, Homo sapien
ggaatgtcttcctttggcgtattgc

SEQ ID NO: 4121908 - DNA, 25 bp, Homo sapien
caaccagcatgccaagacatctgca

SEQ ID NO: 4121909 - DNA, 25 bp, Homo sapien
ctggacctcagagtgcgggctgcca

SEQ ID NO: 4121910 - DNA, 25 bp, Homo sapien
catgccaagacatctgcacagcagc

SEQ ID NO: 4121911 - DNA, 25 bp, Homo sapien
gctggtgcccaagggccaagtgaac

SEQ ID NO: 4121912 - DNA, 25 bp, Homo sapien
tcctctggattgttccgcagcctca

SEQ ID NO: 4121913 - DNA, 25 bp, Homo sapien
gtcctctggattgttccgcagcctc

SEQ ID NO: 4121914 - DNA, 25 bp, Homo sapien
gcctcaggcccagttacagtttgca

SEQ ID NO: 4121915 - DNA, 25 bp, Homo sapien
acatttgggataataacctggcgcc

SEQ ID NO: 4121916 - DNA, 25 bp, Homo sapien
cacaattaaggtatgaaactcccgg

SEQ ID NO: 4121917 - DNA, 25 bp, Homo sapien
ttacagccagcaagtacccaggact

SEQ ID NO: 4121918 - DNA, 25 bp, Homo sapien
gacaccacaggcgataacaatagtg

SEQ ID NO: 4121919 - DNA, 25 bp, Homo sapien
gtgagatcattgttacttccttaca

SEQ ID NO: 4121920 - DNA, 25 bp, Homo sapien
tagaggtcatgatatcagattcaga

SEQ ID NO: 4121921 - DNA, 25 bp, Homo sapien
gaaagctatcgtatatcaaatgcaa

SEQ ID NO: 4121922 - DNA, 25 bp, Homo sapien
cctgagaggcctccctggggaccat

SEQ ID NO: 4121923 - DNA, 25 bp, Homo sapien
gcctacagcctgagaggcctccctg

SEQ ID NO: 4121924 - DNA, 25 bp, Homo sapien
agcctgagaggcctccctggggacc

SEQ ID NO: 4121925 - DNA, 25 bp, Homo sapien
acagcctgagaggcctccctgggga

SEQ ID NO: 4121926 - DNA, 25 bp, Homo sapien
caggtccagccaaaatgcagcagta

SEQ ID NO: 4121927 - DNA, 25 bp, Homo sapien
caaaatgcagcagtaacaacaccat

SEQ ID NO: 4121928 - DNA, 25 bp, Homo sapien
gactcacccaggtccagccaaaatg

SEQ ID NO: 4121929 - DNA, 25 bp, Homo sapien
gaccaacagactcacccaggtccag

SEQ ID NO: 4121930 - DNA, 25 bp, Homo sapien
tatgcagatatctctccaggtcatt

SEQ ID NO: 4121931 - DNA, 25 bp, Homo sapien
tatatctcattaataggcatcttct

SEQ ID NO: 4121932 - DNA, 25 bp, Homo sapien
catcttcttcatgaaggctatgcag

SEQ ID NO: 4121933 - DNA, 25 bp, Homo sapien
tacagttgctagtaggtctatgagg

SEQ ID NO: 4121934 - DNA, 25 bp, Homo sapien
cttcctcgtggttgaaactacattt

SEQ ID NO: 4121935 - DNA, 25 bp, Homo sapien
tcctcgtggttgaaactacatttcc

SEQ ID NO: 4121936 - DNA, 25 bp, Homo sapien
cgtggttgaaactacatttccagta

SEQ ID NO: 4121937 - DNA, 25 bp, Homo sapien
cctcgtggttgaaactacatttcca

SEQ ID NO: 4121938 - DNA, 25 bp, Homo sapien
cattgatggtgaaatcccaatgtga

SEQ ID NO: 4121939 - DNA, 25 bp, Homo sapien
ggtgaaatcccaatgtgaggttatg

SEQ ID NO: 4121940 - DNA, 25 bp, Homo sapien
cccaatgtgaggttatgctgcacac

SEQ ID NO: 4121941 - DNA, 25 bp, Homo sapien
aatcccaatgtgaggttatgctgca

SEQ ID NO: 4121942 - DNA, 25 bp, Homo sapien
ttctgccgtagccatagattccatt

SEQ ID NO: 4121943 - DNA, 25 bp, Homo sapien
tctgccgtagccatagattccattt

SEQ ID NO: 4121944 - DNA, 25 bp, Homo sapien
ctttagaatcaagcacgagaattgc

SEQ ID NO: 4121945 - DNA, 25 bp, Homo sapien
taaatgggacagaatcgggagctta

SEQ ID NO: 4121946 - DNA, 25 bp, Homo sapien
gcaaaggcagtacttactcaagttc

SEQ ID NO: 4121947 - DNA, 25 bp, Homo sapien
gacccacatagatatagctaactga

SEQ ID NO: 4121948 - DNA, 25 bp, Homo sapien
tacaagtgtcactggcgagaaggca

SEQ ID NO: 4121949 - DNA, 25 bp, Homo sapien
cagagctcgttgttgatggccctcc

SEQ ID NO: 4121950 - DNA, 25 bp, Homo sapien
catgtgtggctacggcatctgtgag

SEQ ID NO: 4121951 - DNA, 25 bp, Homo sapien
tacaagggctacttccaggagggcc

SEQ ID NO: 4121952 - DNA, 25 bp, Homo sapien
gtcagcgagcatcatttattcatcc

SEQ ID NO: 4121953 - DNA, 25 bp, Homo sapien
ctttggccacgggtagtcagcgagc

SEQ ID NO: 4121954 - DNA, 25 bp, Homo sapien
catttattcatcctcggtgtcaggt

SEQ ID NO: 4121955 - DNA, 25 bp, Homo sapien
tcatcctcggtgtcaggttcccgcg

SEQ ID NO: 4121956 - DNA, 25 bp, Homo sapien
gctgcccggcaacccccgcgaggca

SEQ ID NO: 4121957 - DNA, 25 bp, Homo sapien
cagctgcccggcaacccccgcgagg

SEQ ID NO: 4121958 - DNA, 25 bp, Homo sapien
aggcacaccccgagtgcggcgccgc

SEQ ID NO: 4121959 - DNA, 25 bp, Homo sapien
ccccgcgaggcacaccccgagtgcg

SEQ ID NO: 4121960 - DNA, 25 bp, Homo sapien
aagagcgaaaagatgcccaccacgt

SEQ ID NO: 4121961 - DNA, 25 bp, Homo sapien
gtgccacaggcgcatgtcccagaac

SEQ ID NO: 4121962 - DNA, 25 bp, Homo sapien
gatggacaacacgaagagcgaaaag

SEQ ID NO: 4121963 - DNA, 25 bp, Homo sapien
tctccttggtcagcggaggcggctt

SEQ ID NO: 4121964 - DNA, 25 bp, Homo sapien
tgcctttcgctgcaggtaccgggct

SEQ ID NO: 4121965 - DNA, 25 bp, Homo sapien
gggtggcacagtctccagcttgtct

SEQ ID NO: 4121966 - DNA, 25 bp, Homo sapien
tgtctgtgtacatcttggctgcctt

SEQ ID NO: 4121967 - DNA, 25 bp, Homo sapien
cacgacagttgaagacacagcacag

SEQ ID NO: 4121968 - DNA, 25 bp, Homo sapien
gtgtccacactgtccttcttcttct

SEQ ID NO: 4121969 - DNA, 25 bp, Homo sapien
ctgtgtccacactgtccttcttctt

SEQ ID NO: 4121970 - DNA, 25 bp, Homo sapien
tgtgtccacactgtccttcttcttc

SEQ ID NO: 4121971 - DNA, 25 bp, Homo sapien
tcatcctcctctactttgatggcca

SEQ ID NO: 4121972 - DNA, 25 bp, Homo sapien
tcttcttggcctcattcttctcatc

SEQ ID NO: 4121973 - DNA, 25 bp, Homo sapien
ttcttggcctcattcttctcatcct

SEQ ID NO: 4121974 - DNA, 25 bp, Homo sapien
ttctcatcctcctctactttgatgg

SEQ ID NO: 4121975 - DNA, 25 bp, Homo sapien
gggcaggacacctacgagattgtct

SEQ ID NO: 4121976 - DNA, 25 bp, Homo sapien
tgtggtccccaaatgagctcagagt

SEQ ID NO: 4121977 - DNA, 25 bp, Homo sapien
tgccgagacagtacccatgtggatg

SEQ ID NO: 4121978 - DNA, 25 bp, Homo sapien
tatctgcagagggacggtggcacca

SEQ ID NO: 4121979 - DNA, 25 bp, Homo sapien
gaaatgagggtagcccattgccttg

SEQ ID NO: 4121980 - DNA, 25 bp, Homo sapien
tggccttagctctgtgtacccctga

SEQ ID NO: 4121981 - DNA, 25 bp, Homo sapien
gcctcagcttcatcacaacgtgtga

SEQ ID NO: 4121982 - DNA, 25 bp, Homo sapien
tcctcatggctactctgggtgtggc

SEQ ID NO: 4121983 - DNA, 25 bp, Homo sapien
atgcttcttttaggtgcccgtagtg

SEQ ID NO: 4121984 - DNA, 25 bp, Homo sapien
taggtgcccgtagtgggaaatggta

SEQ ID NO: 4121985 - DNA, 25 bp, Homo sapien
aggtgcccgtagtgggaaatggtag

SEQ ID NO: 4121986 - DNA, 25 bp, Homo sapien
tgcttcttttaggtgcccgtagtgg

SEQ ID NO: 4121987 - DNA, 25 bp, Homo sapien
ggtttcagagccttagtctgttcga

SEQ ID NO: 4121988 - DNA, 25 bp, Homo sapien
cgagaccttagtgttcaggcctagg

SEQ ID NO: 4121989 - DNA, 25 bp, Homo sapien
aacctctggtgtctcgagaccttag

SEQ ID NO: 4121990 - DNA, 25 bp, Homo sapien
tagtctgttcgatgccatctggaag

SEQ ID NO: 4121991 - DNA, 25 bp, Homo sapien
tatcaattatatggaatatgctgag

SEQ ID NO: 4121992 - DNA, 25 bp, Homo sapien
gtaatacgtaagtgcaaaattagaa

SEQ ID NO: 4121993 - DNA, 25 bp, Homo sapien
ttagttctaaagtggtatcaattat

SEQ ID NO: 4121994 - DNA, 25 bp, Homo sapien
tatgctgagaaggtttactctttct

SEQ ID NO: 4121995 - DNA, 25 bp, Homo sapien
cactttgacatacttgtaataccag

SEQ ID NO: 4121996 - DNA, 25 bp, Homo sapien
aaatgccccaacagtgcctttaggg

SEQ ID NO: 4121997 - DNA, 25 bp, Homo sapien
gttgtggctgtattgaaatgcccca

SEQ ID NO: 4121998 - DNA, 25 bp, Homo sapien
taagaaaggcagtagttgaaaaaca

SEQ ID NO: 4121999 - DNA, 25 bp, Homo sapien
acagtagcattaaacgtcaggtgac

SEQ ID NO: 4122000 - DNA, 25 bp, Homo sapien
caacatggaccaaagggacagtagc

SEQ ID NO: 4122001 - DNA, 25 bp, Homo sapien
aagggacagtagcattaaacgtcag

SEQ ID NO: 4122002 - DNA, 25 bp, Homo sapien
cacacacactatcatcaacatggac

SEQ ID NO: 4122003 - DNA, 25 bp, Homo sapien
agtagtggtcgcatttttgtgtgaa

SEQ ID NO: 4122004 - DNA, 25 bp, Homo sapien
ctcccgatgaggtggagggccctga

SEQ ID NO: 4122005 - DNA, 25 bp, Homo sapien
aaggagactctaaagccctggctgg

SEQ ID NO: 4122006 - DNA, 25 bp, Homo sapien
caaagggctagacagctgccactct

SEQ ID NO: 4122007 - DNA, 25 bp, Homo sapien
tcatggggatgacggctggccctgg

SEQ ID NO: 4122008 - DNA, 25 bp, Homo sapien
caggagccggctcccgtgtgagccc

SEQ ID NO: 4122009 - DNA, 25 bp, Homo sapien
agacagacgcgcagggaggaggcgc

SEQ ID NO: 4122010 - DNA, 25 bp, Homo sapien
ggctcccgtgtgagcccctggcctg

SEQ ID NO: 4122011 - DNA, 25 bp, Homo sapien
ggtactgcagctcaagcctcccgcc

SEQ ID NO: 4122012 - DNA, 25 bp, Homo sapien
gccctgcccactcttgttccttttg

SEQ ID NO: 4122013 - DNA, 25 bp, Homo sapien
gcctcccgcctcagggccctggcca

SEQ ID NO: 4122014 - DNA, 25 bp, Homo sapien
gaccaggtactgcagctcaagcctc

SEQ ID NO: 4122015 - DNA, 25 bp, Homo sapien
acaacccctccctggtcggcgcagc

SEQ ID NO: 4122016 - DNA, 25 bp, Homo sapien
cagcctcgaggtgttgtgggaccat

SEQ ID NO: 4122017 - DNA, 25 bp, Homo sapien
tcgaggtgttgtgggaccatcccct

SEQ ID NO: 4122018 - DNA, 25 bp, Homo sapien
ctggtcggcgcagcctcgaggtgtt

SEQ ID NO: 4122019 - DNA, 25 bp, Homo sapien
aggccttgcccactgcctgagattt

SEQ ID NO: 4122020 - DNA, 25 bp, Homo sapien
tgctttttctcaggccttgcccact

SEQ ID NO: 4122021 - DNA, 25 bp, Homo sapien
cttgcccactgcctgagatttgtcc

SEQ ID NO: 4122022 - DNA, 25 bp, Homo sapien
gctttttctcaggccttgcccactg

SEQ ID NO: 4122023 - DNA, 25 bp, Homo sapien
cctccgcagatctcctggaggcggg

SEQ ID NO: 4122024 - DNA, 25 bp, Homo sapien
tgcaggggaggcctccgcagatctc

SEQ ID NO: 4122025 - DNA, 25 bp, Homo sapien
ctctgggcacaggggcgcgggtggc

SEQ ID NO: 4122026 - DNA, 25 bp, Homo sapien
gaggcctccgcagatctcctggagg

SEQ ID NO: 4122027 - DNA, 25 bp, Homo sapien
ggagccaagccccagtttgtgcact

SEQ ID NO: 4122028 - DNA, 25 bp, Homo sapien
gtgcaacttatcacacgcacagtgt

SEQ ID NO: 4122029 - DNA, 25 bp, Homo sapien
ggcgacgcgccagtgatacacactc

SEQ ID NO: 4122030 - DNA, 25 bp, Homo sapien
acggtgacaccagcgacgcatgctg

SEQ ID NO: 4122031 - DNA, 25 bp, Homo sapien
gagcctgtgtccaggtatgtgttcc

SEQ ID NO: 4122032 - DNA, 25 bp, Homo sapien
ggctctcccaactaggattccaaga

SEQ ID NO: 4122033 - DNA, 25 bp, Homo sapien
ctcagggcccatcacaaggtgctgg

SEQ ID NO: 4122034 - DNA, 25 bp, Homo sapien
gattccaagagcaggagtgctttcc

SEQ ID NO: 4122035 - DNA, 25 bp, Homo sapien
tccctgaggcgagtgcccaaggtga

SEQ ID NO: 4122036 - DNA, 25 bp, Homo sapien
ggaaccttggatgctccgaagcacc

SEQ ID NO: 4122037 - DNA, 25 bp, Homo sapien
caaggtgaggactggcctgatgggt

SEQ ID NO: 4122038 - DNA, 25 bp, Homo sapien
cccgaagctgggatagtaggtccct

SEQ ID NO: 4122039 - DNA, 25 bp, Homo sapien
gcactttacagtttaggcaccctgt

SEQ ID NO: 4122040 - DNA, 25 bp, Homo sapien
acccccgtgggtactgcagatgcac

SEQ ID NO: 4122041 - DNA, 25 bp, Homo sapien
tacagtttaggcaccctgtggtgga

SEQ ID NO: 4122042 - DNA, 25 bp, Homo sapien
gatagggtgtcctctctatctcaca

SEQ ID NO: 4122043 - DNA, 25 bp, Homo sapien
agctacccccgctgttgccaagagt

SEQ ID NO: 4122044 - DNA, 25 bp, Homo sapien
ccacgtggcaaccatagtctgagct

SEQ ID NO: 4122045 - DNA, 25 bp, Homo sapien
ggaaatccgtcagcccttgtcctgg

SEQ ID NO: 4122046 - DNA, 25 bp, Homo sapien
cttctgaacgctaccagggaggtct

SEQ ID NO: 4122047 - DNA, 25 bp, Homo sapien
gtgggcctgcgtcccagcccagagg

SEQ ID NO: 4122048 - DNA, 25 bp, Homo sapien
tgtttggcctgctcgaggacagagt

SEQ ID NO: 4122049 - DNA, 25 bp, Homo sapien
cacaaggttggagcatctggtcccc

SEQ ID NO: 4122050 - DNA, 25 bp, Homo sapien
gctcccaaatatagcggccgtggcc

SEQ ID NO: 4122051 - DNA, 25 bp, Homo sapien
gagctgattataggtccctgggcca

SEQ ID NO: 4122052 - DNA, 25 bp, Homo sapien
gttgtccctgtcctcggcactgcct

SEQ ID NO: 4122053 - DNA, 25 bp, Homo sapien
ccctgtcctcggcactgccttcttc

SEQ ID NO: 4122054 - DNA, 25 bp, Homo sapien
agctactctgcttgggcctctgttt

SEQ ID NO: 4122055 - DNA, 25 bp, Homo sapien
actctgcttgggcctctgtttcccc

SEQ ID NO: 4122056 - DNA, 25 bp, Homo sapien
tcagctactctgcttgggcctctgt

SEQ ID NO: 4122057 - DNA, 25 bp, Homo sapien
tctgcttgggcctctgtttcccctt

SEQ ID NO: 4122058 - DNA, 25 bp, Homo sapien
ccagtgtctcctaacattccactgt

SEQ ID NO: 4122059 - DNA, 25 bp, Homo sapien
gtttctcatccaaccgagctccaga

SEQ ID NO: 4122060 - DNA, 25 bp, Homo sapien
agtgtctcctaacattccactgtcc

SEQ ID NO: 4122061 - DNA, 25 bp, Homo sapien
ctttggatgggaggatgatgctcca

SEQ ID NO: 4122062 - DNA, 25 bp, Homo sapien
tgctttctttgggtgagttagagca

SEQ ID NO: 4122063 - DNA, 25 bp, Homo sapien
tttctttgggtgagttagagcaccg

SEQ ID NO: 4122064 - DNA, 25 bp, Homo sapien
tttgggtgagttagagcaccgtccc

SEQ ID NO: 4122065 - DNA, 25 bp, Homo sapien
tgggtgagttagagcaccgtcccgt

SEQ ID NO: 4122066 - DNA, 25 bp, Homo sapien
atgccgcccccagacctgctgggag

SEQ ID NO: 4122067 - DNA, 25 bp, Homo sapien
ggatgccaaggctggatgccgcccc

SEQ ID NO: 4122068 - DNA, 25 bp, Homo sapien
cctggatgccaaggctggatgccgc

SEQ ID NO: 4122069 - DNA, 25 bp, Homo sapien
tcagaacgcctggatgccaaggctg

SEQ ID NO: 4122070 - DNA, 25 bp, Homo sapien
agctccggggacaggaagttgtatt

SEQ ID NO: 4122071 - DNA, 25 bp, Homo sapien
gagccttgggcctgccagtttgcgt

SEQ ID NO: 4122072 - DNA, 25 bp, Homo sapien
ttctctcctcgagccttgggcctgc

SEQ ID NO: 4122073 - DNA, 25 bp, Homo sapien
gccagtttgcgttcctcctgtgggc

SEQ ID NO: 4122074 - DNA, 25 bp, Homo sapien
gtggttcttgcctgtgtcacaggca

SEQ ID NO: 4122075 - DNA, 25 bp, Homo sapien
tcttgcctgtgtcacaggcaggaaa

SEQ ID NO: 4122076 - DNA, 25 bp, Homo sapien
cttgcctgtgtcacaggcaggaaaa

SEQ ID NO: 4122077 - DNA, 25 bp, Homo sapien
ggttcttgcctgtgtcacaggcagg

SEQ ID NO: 4122078 - DNA, 25 bp, Homo sapien
tccaagtcgggcctaaagctgcaga

SEQ ID NO: 4122079 - DNA, 25 bp, Homo sapien
gaggccatggatagtccctgagcag

SEQ ID NO: 4122080 - DNA, 25 bp, Homo sapien
tgcagagcagactcaagttggccac

SEQ ID NO: 4122081 - DNA, 25 bp, Homo sapien
tgtggctcaggcctaagcaaggata

SEQ ID NO: 4122082 - DNA, 25 bp, Homo sapien
cagttgtgtgtcctggacactacca

SEQ ID NO: 4122083 - DNA, 25 bp, Homo sapien
ctggacactaccactcttcggctgt

SEQ ID NO: 4122084 - DNA, 25 bp, Homo sapien
actaccactcttcggctgtctggac

SEQ ID NO: 4122085 - DNA, 25 bp, Homo sapien
gacactaccactcttcggctgtctg

SEQ ID NO: 4122086 - DNA, 25 bp, Homo sapien
cttcatggagctctcgggatacccc

SEQ ID NO: 4122087 - DNA, 25 bp, Homo sapien
gcatccctcgcctcggcgtctgccg

SEQ ID NO: 4122088 - DNA, 25 bp, Homo sapien
gcggcccccgccttgccatggatgt

SEQ ID NO: 4122089 - DNA, 25 bp, Homo sapien
gccttgccatggatgtcggggcccc

SEQ ID NO: 4122090 - DNA, 25 bp, Homo sapien
agctccgcgactttcggcgtaggga

SEQ ID NO: 4122091 - DNA, 25 bp, Homo sapien
tgagcccttaggtgttccggccgcc

SEQ ID NO: 4122092 - DNA, 25 bp, Homo sapien
tgggagctgtggcttcgccccacgc

SEQ ID NO: 4122093 - DNA, 25 bp, Homo sapien
tgcagttagggggtgcgatctcaac

SEQ ID NO: 4122094 - DNA, 25 bp, Homo sapien
gcgcggggcccatgcgctgagggcg

SEQ ID NO: 4122095 - DNA, 25 bp, Homo sapien
ggcgcggggcccatgcgctgagggc

SEQ ID NO: 4122096 - DNA, 25 bp, Homo sapien
cggggcccatgcgctgagggcgagc

SEQ ID NO: 4122097 - DNA, 25 bp, Homo sapien
cgcggggcccatgcgctgagggcga

SEQ ID NO: 4122098 - DNA, 25 bp, Homo sapien
cgccaccgcctagggccgcgtccct

SEQ ID NO: 4122099 - DNA, 25 bp, Homo sapien
gccaccgcctagggccgcgtccctc

SEQ ID NO: 4122100 - DNA, 25 bp, Homo sapien
caccgcctagggccgcgtccctcgg

SEQ ID NO: 4122101 - DNA, 25 bp, Homo sapien
gcctagggccgcgtccctcggggca

SEQ ID NO: 4122102 - DNA, 25 bp, Homo sapien
agcgcgtacgcggagctgagcacgg

SEQ ID NO: 4122103 - DNA, 25 bp, Homo sapien
agcagagcaggagcgccaggccggg

SEQ ID NO: 4122104 - DNA, 25 bp, Homo sapien
gcgcgtacgcggagctgagcacggg

SEQ ID NO: 4122105 - DNA, 25 bp, Homo sapien
cgccaggccgggtgcgatccgggcg

SEQ ID NO: 4122106 - DNA, 25 bp, Homo sapien
ttacagacttgtttgactcttttat

SEQ ID NO: 4122107 - DNA, 25 bp, Homo sapien
tacagacttgtttgactcttttata

SEQ ID NO: 4122108 - DNA, 25 bp, Homo sapien
tgacgcctcattaaaacattccgaa

SEQ ID NO: 4122109 - DNA, 25 bp, Homo sapien
atctgagggaggctacttgacgcct

SEQ ID NO: 4122110 - DNA, 25 bp, Homo sapien
gggaggctacttgacgcctcattaa

SEQ ID NO: 4122111 - DNA, 25 bp, Homo sapien
agttcctcggagggctcggcaccct

SEQ ID NO: 4122112 - DNA, 25 bp, Homo sapien
tagcggagttggctgctacgacctg

SEQ ID NO: 4122113 - DNA, 25 bp, Homo sapien
gaagaggcactgtgacgcctctcat

SEQ ID NO: 4122114 - DNA, 25 bp, Homo sapien
cccttcgccaggctttcctgaacag

SEQ ID NO: 4122115 - DNA, 25 bp, Homo sapien
cgctgacaagtgctgacttttcctc

SEQ ID NO: 4122116 - DNA, 25 bp, Homo sapien
ctctctctgtccggctggcctgagc

SEQ ID NO: 4122117 - DNA, 25 bp, Homo sapien
ctctctgtccggctggcctgagcag

SEQ ID NO: 4122118 - DNA, 25 bp, Homo sapien
gccctctctctgtccggctggcctg

SEQ ID NO: 4122119 - DNA, 25 bp, Homo sapien
tctctgtccggctggcctgagcagg

SEQ ID NO: 4122120 - DNA, 25 bp, Homo sapien
tgcacgtgcacatgtatttctgggc

SEQ ID NO: 4122121 - DNA, 25 bp, Homo sapien
cagcctgtcagtatgggacgcgagc

SEQ ID NO: 4122122 - DNA, 25 bp, Homo sapien
aaggagtctccaattggctcggccg

SEQ ID NO: 4122123 - DNA, 25 bp, Homo sapien
tctgctggttccacttagcggagcc

SEQ ID NO: 4122124 - DNA, 25 bp, Homo sapien
gcatccttcagacgcgccaaggcgg

SEQ ID NO: 4122125 - DNA, 25 bp, Homo sapien
cagaaggctacgtctcctcagctcc

SEQ ID NO: 4122126 - DNA, 25 bp, Homo sapien
cccagaaggctacgtctcctcagct

SEQ ID NO: 4122127 - DNA, 25 bp, Homo sapien
gctgcatccttcagacgcgccaagg

SEQ ID NO: 4122128 - DNA, 25 bp, Homo sapien
cattcccgtgaatgtgacccgcaga

SEQ ID NO: 4122129 - DNA, 25 bp, Homo sapien
caatgctgtccccagtgaacggtga

SEQ ID NO: 4122130 - DNA, 25 bp, Homo sapien
tagggcctgcctgatcgaagggaaa

SEQ ID NO: 4122131 - DNA, 25 bp, Homo sapien
tatggagctcacaccttacagatgg

SEQ ID NO: 4122132 - DNA, 25 bp, Homo sapien
gtttttcgcactgggcctgagcacg

SEQ ID NO: 4122133 - DNA, 25 bp, Homo sapien
tctgttcctctttagtcatgacgtc

SEQ ID NO: 4122134 - DNA, 25 bp, Homo sapien
cacggtgcagcaggaagatctgttc

SEQ ID NO: 4122135 - DNA, 25 bp, Homo sapien
tagtcatgacgtcatctgcatccac

SEQ ID NO: 4122136 - DNA, 25 bp, Homo sapien
gattaacccgacagctatcagtctg

SEQ ID NO: 4122137 - DNA, 25 bp, Homo sapien
acagggacctgagctcgagacttag

SEQ ID NO: 4122138 - DNA, 25 bp, Homo sapien
tgtgttctgggcgatcaccagcctc

SEQ ID NO: 4122139 - DNA, 25 bp, Homo sapien
cgagacttaggacaagccatggatg

SEQ ID NO: 4122140 - DNA, 25 bp, Homo sapien
ttacatgtcgggtctgtggcaatga

SEQ ID NO: 4122141 - DNA, 25 bp, Homo sapien
gtacagtaggaagcgagaggctcca

SEQ ID NO: 4122142 - DNA, 25 bp, Homo sapien
tgacttgtattccttcagccaccgc

SEQ ID NO: 4122143 - DNA, 25 bp, Homo sapien
cagatctcgatgtgactgggagcca

SEQ ID NO: 4122144 - DNA, 25 bp, Homo sapien
ggtctttcttcctagccacaaagtc

SEQ ID NO: 4122145 - DNA, 25 bp, Homo sapien
tctttcttcctagccacaaagtctt

SEQ ID NO: 4122146 - DNA, 25 bp, Homo sapien
aggtctttcttcctagccacaaagt

SEQ ID NO: 4122147 - DNA, 25 bp, Homo sapien
gaggtctttcttcctagccacaaag

SEQ ID NO: 4122148 - DNA, 25 bp, Homo sapien
agaaaccagggtggtaatgatggct

SEQ ID NO: 4122149 - DNA, 25 bp, Homo sapien
ggagaaaccagggtggtaatgatgg

SEQ ID NO: 4122150 - DNA, 25 bp, Homo sapien
gagaaaccagggtggtaatgatggc

SEQ ID NO: 4122151 - DNA, 25 bp, Homo sapien
gagcttcccagatgccttatctttc

SEQ ID NO: 4122152 - DNA, 25 bp, Homo sapien
ggtagagcttcccagatgccttatc

SEQ ID NO: 4122153 - DNA, 25 bp, Homo sapien
ctgatgtggacgcagatgtccatcc

SEQ ID NO: 4122154 - DNA, 25 bp, Homo sapien
gatgtccatcccttgtctgattcca

SEQ ID NO: 4122155 - DNA, 25 bp, Homo sapien
atgtggtcccattccggcagacagg

SEQ ID NO: 4122156 - DNA, 25 bp, Homo sapien
tgtggtcccattccggcagacaggg

SEQ ID NO: 4122157 - DNA, 25 bp, Homo sapien
aaatgtagtccggacagggcacagc

SEQ ID NO: 4122158 - DNA, 25 bp, Homo sapien
gaagtcataaatgtagtccggacag

SEQ ID NO: 4122159 - DNA, 25 bp, Homo sapien
attgcggtcacagcgtcggtaggca

SEQ ID NO: 4122160 - DNA, 25 bp, Homo sapien
ctgccattgcggtcacagcgtcggt

SEQ ID NO: 4122161 - DNA, 25 bp, Homo sapien
ccattgcggtcacagcgtcggtagg

SEQ ID NO: 4122162 - DNA, 25 bp, Homo sapien
tgccattgcggtcacagcgtcggta

SEQ ID NO: 4122163 - DNA, 25 bp, Homo sapien
ccgttcacgagtctcattggtgaga

SEQ ID NO: 4122164 - DNA, 25 bp, Homo sapien
tcacgagtctcattggtgagaaatt

SEQ ID NO: 4122165 - DNA, 25 bp, Homo sapien
tggcccacgtcctgttgtgcccagg

SEQ ID NO: 4122166 - DNA, 25 bp, Homo sapien
gacacactcgctgtagttggcccac

SEQ ID NO: 4122167 - DNA, 25 bp, Homo sapien
gagtgaatttatcctggtcaggttg

SEQ ID NO: 4122168 - DNA, 25 bp, Homo sapien
ggagtgaatttatcctggtcaggtt

SEQ ID NO: 4122169 - DNA, 25 bp, Homo sapien
tgggagtgaatttatcctggtcagg

SEQ ID NO: 4122170 - DNA, 25 bp, Homo sapien
ggtgggagtgaatttatcctggtca

SEQ ID NO: 4122171 - DNA, 25 bp, Homo sapien
ggcggggggagacacagtcagagcc

SEQ ID NO: 4122172 - DNA, 25 bp, Homo sapien
gggcggggggagacacagtcagagc

SEQ ID NO: 4122173 - DNA, 25 bp, Homo sapien
tgcggggcggggggagacacagtca

SEQ ID NO: 4122174 - DNA, 25 bp, Homo sapien
cggggcggggggagacacagtcaga

SEQ ID NO: 4122175 - DNA, 25 bp, Homo sapien
ggacacggagtagcccacggtgtaa

SEQ ID NO: 4122176 - DNA, 25 bp, Homo sapien
gccaggatgagcacagctacggtga

SEQ ID NO: 4122177 - DNA, 25 bp, Homo sapien
taaatcatgcccaggcggtcaaaca

SEQ ID NO: 4122178 - DNA, 25 bp, Homo sapien
agcacagctacggtgagggacgcca

SEQ ID NO: 4122179 - DNA, 25 bp, Homo sapien
ggcgcgcgacatgaccgtgggtggg

SEQ ID NO: 4122180 - DNA, 25 bp, Homo sapien
agggggtcgcatcagacctcggcca

SEQ ID NO: 4122181 - DNA, 25 bp, Homo sapien
acaggaagctgggttgtgcgccgta

SEQ ID NO: 4122182 - DNA, 25 bp, Homo sapien
gttgtgcgccgtaggtagggacacc

SEQ ID NO: 4122183 - DNA, 25 bp, Homo sapien
tgctcacggcgcgcagcatgaagga

SEQ ID NO: 4122184 - DNA, 25 bp, Homo sapien
acgaagatgctcacggcgcgcagca

SEQ ID NO: 4122185 - DNA, 25 bp, Homo sapien
tcacggcgcgcagcatgaaggacag

SEQ ID NO: 4122186 - DNA, 25 bp, Homo sapien
cgaagatgctcacggcgcgcagcat

SEQ ID NO: 4122187 - DNA, 25 bp, Homo sapien
caagcgtggcgccagagtagagcac

SEQ ID NO: 4122188 - DNA, 25 bp, Homo sapien
gcgctcagcctcatcaagcgtggcg

SEQ ID NO: 4122189 - DNA, 25 bp, Homo sapien
ctcatcaagcgtggcgccagagtag

SEQ ID NO: 4122190 - DNA, 25 bp, Homo sapien
tcagcctcatcaagcgtggcgccag

SEQ ID NO: 4122191 - DNA, 25 bp, Homo sapien
tataagacgggtttgagtggctgaa

SEQ ID NO: 4122192 - DNA, 25 bp, Homo sapien
gtaggagccttgatggcagcgcggg

SEQ ID NO: 4122193 - DNA, 25 bp, Homo sapien
cacgaggccagtggcggcaccggga

SEQ ID NO: 4122194 - DNA, 25 bp, Homo sapien
ctgagggttgcgagggaccctataa

SEQ ID NO: 4122195 - DNA, 25 bp, Homo sapien
ctccaccagaatccagtagtagttg

SEQ ID NO: 4122196 - DNA, 25 bp, Homo sapien
cagccgaagactgtgaagccccaca

SEQ ID NO: 4122197 - DNA, 25 bp, Homo sapien
accagaatccagtagtagttggtgg

SEQ ID NO: 4122198 - DNA, 25 bp, Homo sapien
tagttggtggccaggaagtaaagga

SEQ ID NO: 4122199 - DNA, 25 bp, Homo sapien
acagccacgaagacagcgggcagac

SEQ ID NO: 4122200 - DNA, 25 bp, Homo sapien
cacagccacgaagacagcgggcaga

SEQ ID NO: 4122201 - DNA, 25 bp, Homo sapien
acacagccacgaagacagcgggcag

SEQ ID NO: 4122202 - DNA, 25 bp, Homo sapien
ccacacagccacgaagacagcgggc

SEQ ID NO: 4122203 - DNA, 25 bp, Homo sapien
tggccagggtagctctgacactgac

SEQ ID NO: 4122204 - DNA, 25 bp, Homo sapien
tgttggccagggtagctctgacact

SEQ ID NO: 4122205 - DNA, 25 bp, Homo sapien
gtgttggccagggtagctctgacac

SEQ ID NO: 4122206 - DNA, 25 bp, Homo sapien
ccggtgttggccagggtagctctga

SEQ ID NO: 4122207 - DNA, 25 bp, Homo sapien
gaggccctctcacatgcttcctgga

SEQ ID NO: 4122208 - DNA, 25 bp, Homo sapien
ctgggccgtttgaggccagggtaca

SEQ ID NO: 4122209 - DNA, 25 bp, Homo sapien
aggaggccctctcacatgcttcctg

SEQ ID NO: 4122210 - DNA, 25 bp, Homo sapien
ccctctcacatgcttcctggaagaa

SEQ ID NO: 4122211 - DNA, 25 bp, Homo sapien
gatgatccactttttgttcccggag

SEQ ID NO: 4122212 - DNA, 25 bp, Homo sapien
atgatccactttttgttcccggagc

SEQ ID NO: 4122213 - DNA, 25 bp, Homo sapien
tgtggccagcagcccacccctgctc

SEQ ID NO: 4122214 - DNA, 25 bp, Homo sapien
tggccagcagcccacccctgctcac

SEQ ID NO: 4122215 - DNA, 25 bp, Homo sapien
ccctgtggccagcagcccacccctg

SEQ ID NO: 4122216 - DNA, 25 bp, Homo sapien
ctgtggccagcagcccacccctgct

SEQ ID NO: 4122217 - DNA, 25 bp, Homo sapien
tccggcctctgtagctctgacactg

SEQ ID NO: 4122218 - DNA, 25 bp, Homo sapien
cggcctctgtagctctgacactggg

SEQ ID NO: 4122219 - DNA, 25 bp, Homo sapien
ggtcctccggcctctgtagctctga

SEQ ID NO: 4122220 - DNA, 25 bp, Homo sapien
agctggtcctccggcctctgtagct

SEQ ID NO: 4122221 - DNA, 25 bp, Homo sapien
gccgtgtgtcacaccggccggcgtt

SEQ ID NO: 4122222 - DNA, 25 bp, Homo sapien
cttggtggcgagcacccggacgata

SEQ ID NO: 4122223 - DNA, 25 bp, Homo sapien
ccggacgatattgatgaagaggatg

SEQ ID NO: 4122224 - DNA, 25 bp, Homo sapien
gagcacccggacgatattgatgaag

SEQ ID NO: 4122225 - DNA, 25 bp, Homo sapien
aaccaactctttgaggagaggttca

SEQ ID NO: 4122226 - DNA, 25 bp, Homo sapien
tcaagttcgttgcacactcacagac

SEQ ID NO: 4122227 - DNA, 25 bp, Homo sapien
cctggtacaagtgggcaggctggct

SEQ ID NO: 4122228 - DNA, 25 bp, Homo sapien
tcccggagcggacttcaaatgacag

SEQ ID NO: 4122229 - DNA, 25 bp, Homo sapien
aggtaggtcagggccaagccacttc

SEQ ID NO: 4122230 - DNA, 25 bp, Homo sapien
caggtaggtcagggccaagccactt

SEQ ID NO: 4122231 - DNA, 25 bp, Homo sapien
tggacttgccagagcgtccctgaga

SEQ ID NO: 4122232 - DNA, 25 bp, Homo sapien
gaagagcatctcatagtgcatctgg

SEQ ID NO: 4122233 - DNA, 25 bp, Homo sapien
ggcatgagcaccagcgtggatttga

SEQ ID NO: 4122234 - DNA, 25 bp, Homo sapien
tgaagacaatgtagtggacgccaaa

SEQ ID NO: 4122235 - DNA, 25 bp, Homo sapien
gaggggtgtctcgaatcaggcctgc

SEQ ID NO: 4122236 - DNA, 25 bp, Homo sapien
aagaggggtgtctcgaatcaggcct

SEQ ID NO: 4122237 - DNA, 25 bp, Homo sapien
aggggtgtctcgaatcaggcctgcc

SEQ ID NO: 4122238 - DNA, 25 bp, Homo sapien
gggtgtctcgaatcaggcctgcccc

SEQ ID NO: 4122239 - DNA, 25 bp, Homo sapien
cattgcagaaacagtatatgattgc

SEQ ID NO: 4122240 - DNA, 25 bp, Homo sapien
gaaacagtatatgattgcgacaaaa

SEQ ID NO: 4122241 - DNA, 25 bp, Homo sapien
cagtatatgattgcgacaaaaaatc

SEQ ID NO: 4122242 - DNA, 25 bp, Homo sapien
ctcgccattgcagaaacagtatatg

SEQ ID NO: 4122243 - DNA, 25 bp, Homo sapien
tctggaaagacttctctgctttcag

SEQ ID NO: 4122244 - DNA, 25 bp, Homo sapien
ctggacacccagcacggaatgaaaa

SEQ ID NO: 4122245 - DNA, 25 bp, Homo sapien
ggactcctgggaaactccaaggcca

SEQ ID NO: 4122246 - DNA, 25 bp, Homo sapien
cacccagcacggaatgaaaatggga

SEQ ID NO: 4122247 - DNA, 25 bp, Homo sapien
ttggggcagtaagggtgcggcagtc

SEQ ID NO: 4122248 - DNA, 25 bp, Homo sapien
tgagcaggagccgttgaggaaccca

SEQ ID NO: 4122249 - DNA, 25 bp, Homo sapien
gggccgacattggtcacacttgtgt

SEQ ID NO: 4122250 - DNA, 25 bp, Homo sapien
gaggaacccatcgtccttgggagca

SEQ ID NO: 4122251 - DNA, 25 bp, Homo sapien
aagtccagtgccagtgtccagcggc

SEQ ID NO: 4122252 - DNA, 25 bp, Homo sapien
catccactatgtcagcaggtccagc

SEQ ID NO: 4122253 - DNA, 25 bp, Homo sapien
ccatcttttggtccatctgtccatc

SEQ ID NO: 4122254 - DNA, 25 bp, Homo sapien
cctgagtgggaaatcattcaaccac

SEQ ID NO: 4122255 - DNA, 25 bp, Homo sapien
ttcaaccacccatcttttggtccat

SEQ ID NO: 4122256 - DNA, 25 bp, Homo sapien
tccttgaactgtgggtgcgtctgca

SEQ ID NO: 4122257 - DNA, 25 bp, Homo sapien
caagatgcccagtgttgacccaggg

SEQ ID NO: 4122258 - DNA, 25 bp, Homo sapien
ctgacagggcgcgttggtccaaaca

SEQ ID NO: 4122259 - DNA, 25 bp, Homo sapien
tgaacatctgctgctcggagccaag

SEQ ID NO: 4122260 - DNA, 25 bp, Homo sapien
gagtgggccattagtgtagcatgct

SEQ ID NO: 4122261 - DNA, 25 bp, Homo sapien
tgtgactgacgatggttctgccttc

SEQ ID NO: 4122262 - DNA, 25 bp, Homo sapien
ggcccagggcttgctacagcgctgc

SEQ ID NO: 4122263 - DNA, 25 bp, Homo sapien
gcttcccgaggacccatgtcatgct

SEQ ID NO: 4122264 - DNA, 25 bp, Homo sapien
gtcacaagggaaaactactgtccag

SEQ ID NO: 4122265 - DNA, 25 bp, Homo sapien
caagggaaaactactgtccagcctc

SEQ ID NO: 4122266 - DNA, 25 bp, Homo sapien
gaaaactactgtccagcctcaagcc

SEQ ID NO: 4122267 - DNA, 25 bp, Homo sapien
gggaaaactactgtccagcctcaag

SEQ ID NO: 4122268 - DNA, 25 bp, Homo sapien
ggccttgtaaccacagtgaggaact

SEQ ID NO: 4122269 - DNA, 25 bp, Homo sapien
tgggcttgcagagtcagggaccagg

SEQ ID NO: 4122270 - DNA, 25 bp, Homo sapien
gtgaggaactatgggcttgggatca

SEQ ID NO: 4122271 - DNA, 25 bp, Homo sapien
aggacagggccttgtaaccacagtg

SEQ ID NO: 4122272 - DNA, 25 bp, Homo sapien
tagaagaggacaggagaccagagac

SEQ ID NO: 4122273 - DNA, 25 bp, Homo sapien
cgcagggcctctcggttctgactct

SEQ ID NO: 4122274 - DNA, 25 bp, Homo sapien
caggcgcagggcctctcggttctga

SEQ ID NO: 4122275 - DNA, 25 bp, Homo sapien
gcctctcggttctgactcttgctgg

SEQ ID NO: 4122276 - DNA, 25 bp, Homo sapien
tggggttctctaggacacccagcct

SEQ ID NO: 4122277 - DNA, 25 bp, Homo sapien
gggttctctaggacacccagcctct

SEQ ID NO: 4122278 - DNA, 25 bp, Homo sapien
ttctctaggacacccagcctcttca

SEQ ID NO: 4122279 - DNA, 25 bp, Homo sapien
tcttggggttctctaggacacccag

SEQ ID NO: 4122280 - DNA, 25 bp, Homo sapien
cttcaggcttaagatgggccagcga

SEQ ID NO: 4122281 - DNA, 25 bp, Homo sapien
ggttacctgtatctatgcacccgat

SEQ ID NO: 4122282 - DNA, 25 bp, Homo sapien
gacaggttaagctcgggttcatccg

SEQ ID NO: 4122283 - DNA, 25 bp, Homo sapien
ttaaacttcctatcggctgggtgca

SEQ ID NO: 4122284 - DNA, 25 bp, Homo sapien
ggtgttttaagctgggcactttgcc

SEQ ID NO: 4122285 - DNA, 25 bp, Homo sapien
gaaggcaccggatatgggtgtttta

SEQ ID NO: 4122286 - DNA, 25 bp, Homo sapien
ccatgactgtgtcagcagccgtgaa

SEQ ID NO: 4122287 - DNA, 25 bp, Homo sapien
caatgaattgagactgtctgaggaa

SEQ ID NO: 4122288 - DNA, 25 bp, Homo sapien
cagattcgaggtaccgttaggagga

SEQ ID NO: 4122289 - DNA, 25 bp, Homo sapien
gccccatcacagattcgaggtaccg

SEQ ID NO: 4122290 - DNA, 25 bp, Homo sapien
tcatctcctcatgggagcttctgcc

SEQ ID NO: 4122291 - DNA, 25 bp, Homo sapien
gagcttctgccccatcacagattcg

SEQ ID NO: 4122292 - DNA, 25 bp, Homo sapien
gcgtgagcccgcgccattttttaaa

SEQ ID NO: 4122293 - DNA, 25 bp, Homo sapien
gtgagcccgcgccattttttaaata

SEQ ID NO: 4122294 - DNA, 25 bp, Homo sapien
cgtgagcccgcgccattttttaaat

SEQ ID NO: 4122295 - DNA, 25 bp, Homo sapien
tgggagatcatgtgagcctgggagt

SEQ ID NO: 4122296 - DNA, 25 bp, Homo sapien
cctgggagttctgagcgacagagtg

SEQ ID NO: 4122297 - DNA, 25 bp, Homo sapien
agcctgggagttctgagcgacagag

SEQ ID NO: 4122298 - DNA, 25 bp, Homo sapien
gagatcatgtgagcctgggagttct

SEQ ID NO: 4122299 - DNA, 25 bp, Homo sapien
cacagctgaatcctttctgtgtgca

SEQ ID NO: 4122300 - DNA, 25 bp, Homo sapien
ggagcacagctgaatcctttctgtg

SEQ ID NO: 4122301 - DNA, 25 bp, Homo sapien
ggtaggagcacagctgaatcctttc

SEQ ID NO: 4122302 - DNA, 25 bp, Homo sapien
tggggtaggagcacagctgaatcct

SEQ ID NO: 4122303 - DNA, 25 bp, Homo sapien
gaggatgtctacatctggtgatgtc

SEQ ID NO: 4122304 - DNA, 25 bp, Homo sapien
cctgagttctttcagtcccactgta

SEQ ID NO: 4122305 - DNA, 25 bp, Homo sapien
ctgaccctgtttcttgggaataggc

SEQ ID NO: 4122306 - DNA, 25 bp, Homo sapien
cagggacccacgactgcctcgtttt

SEQ ID NO: 4122307 - DNA, 25 bp, Homo sapien
gacttctagcatcctgtacctggca

SEQ ID NO: 4122308 - DNA, 25 bp, Homo sapien
tactcggtcactcccttggttgcca

SEQ ID NO: 4122309 - DNA, 25 bp, Homo sapien
ccaggaagcctagccttagcaagga

SEQ ID NO: 4122310 - DNA, 25 bp, Homo sapien
tggaacaggtttgcctcccagtcgt

SEQ ID NO: 4122311 - DNA, 25 bp, Homo sapien
ccacagtgcccgttcagggtgtcgg

SEQ ID NO: 4122312 - DNA, 25 bp, Homo sapien
ctcccatgacacatcttgtaggcta

SEQ ID NO: 4122313 - DNA, 25 bp, Homo sapien
tcttgtaggctaccacagtgcccgt

SEQ ID NO: 4122314 - DNA, 25 bp, Homo sapien
ctggtcttccccgttcctcccatga

SEQ ID NO: 4122315 - DNA, 25 bp, Homo sapien
ttcctggtgagtctctagcttcttc

SEQ ID NO: 4122316 - DNA, 25 bp, Homo sapien
ttggaaagtgtttctgtacccatga

SEQ ID NO: 4122317 - DNA, 25 bp, Homo sapien
attggaaagtgtttctgtacccatg

SEQ ID NO: 4122318 - DNA, 25 bp, Homo sapien
taacttttgaacagagggcagtttc

SEQ ID NO: 4122319 - DNA, 25 bp, Homo sapien
tggacattatagcaggcgtactcag

SEQ ID NO: 4122320 - DNA, 25 bp, Homo sapien
tagcaggcgtactcagagctaatgg

SEQ ID NO: 4122321 - DNA, 25 bp, Homo sapien
ggcagtttcccatggacattatagc

SEQ ID NO: 4122322 - DNA, 25 bp, Homo sapien
ctggacacacccgctccttctagtg

SEQ ID NO: 4122323 - DNA, 25 bp, Homo sapien
ccgctccttctagtgaccctgacat

SEQ ID NO: 4122324 - DNA, 25 bp, Homo sapien
acattcccctctctgaccgctcagt

SEQ ID NO: 4122325 - DNA, 25 bp, Homo sapien
gacattcccctctctgaccgctcag

SEQ ID NO: 4122326 - DNA, 25 bp, Homo sapien
ttgtgagataaagtctgtagcccat

SEQ ID NO: 4122327 - DNA, 25 bp, Homo sapien
taagaatagatgtgatcacacttct

SEQ ID NO: 4122328 - DNA, 25 bp, Homo sapien
aatagatgtgatcacacttctctgg

SEQ ID NO: 4122329 - DNA, 25 bp, Homo sapien
tttggtgtaagaatagatgtgatca

SEQ ID NO: 4122330 - DNA, 25 bp, Homo sapien
ggtgtaagaatagatgtgatcacac

SEQ ID NO: 4122331 - DNA, 25 bp, Homo sapien
tgtggtagctcgagggcaagggctg

SEQ ID NO: 4122332 - DNA, 25 bp, Homo sapien
actgtggtagctcgagggcaagggc

SEQ ID NO: 4122333 - DNA, 25 bp, Homo sapien
aactgtggtagctcgagggcaaggg

SEQ ID NO: 4122334 - DNA, 25 bp, Homo sapien
tcaactgtggtagctcgagggcaag

SEQ ID NO: 4122335 - DNA, 25 bp, Homo sapien
gactagaaatatgtgttacctccga

SEQ ID NO: 4122336 - DNA, 25 bp, Homo sapien
gggtgttctgactagaaatatgtgt

SEQ ID NO: 4122337 - DNA, 25 bp, Homo sapien
gttgtttcaaactggggctgtatgt

SEQ ID NO: 4122338 - DNA, 25 bp, Homo sapien
cctccgatagttgcttcagggtcag

SEQ ID NO: 4122339 - DNA, 25 bp, Homo sapien
ttaaattcgggtgatgtcaggtgag

SEQ ID NO: 4122340 - DNA, 25 bp, Homo sapien
agtgttttcagtagtggctgcacca

SEQ ID NO: 4122341 - DNA, 25 bp, Homo sapien
tttttaaaggagtcaggagtctcac

SEQ ID NO: 4122342 - DNA, 25 bp, Homo sapien
caaatctgtcttttcgacgaactaa

SEQ ID NO: 4122343 - DNA, 25 bp, Homo sapien
tacagccgctccgaggcggccatgg

SEQ ID NO: 4122344 - DNA, 25 bp, Homo sapien
acaactcgtacagccgctccgaggc

SEQ ID NO: 4122345 - DNA, 25 bp, Homo sapien
tagagcagccacaactcgtacagcc

SEQ ID NO: 4122346 - DNA, 25 bp, Homo sapien
ctgcgcgtagtagagcagccacaac

SEQ ID NO: 4122347 - DNA, 25 bp, Homo sapien
gtgggaatgtggaaggccggtgtcc

SEQ ID NO: 4122348 - DNA, 25 bp, Homo sapien
ctgcagcaggggagaaggttgtggg

SEQ ID NO: 4122349 - DNA, 25 bp, Homo sapien
gggagaaggttgtgggaatgtggaa

SEQ ID NO: 4122350 - DNA, 25 bp, Homo sapien
aaggttgtgggaatgtggaaggccg

SEQ ID NO: 4122351 - DNA, 25 bp, Homo sapien
agggtccataggtaagtgatgccca

SEQ ID NO: 4122352 - DNA, 25 bp, Homo sapien
tccagggtccataggtaagtgatgc

SEQ ID NO: 4122353 - DNA, 25 bp, Homo sapien
tccataggtaagtgatgcccaggtc

SEQ ID NO: 4122354 - DNA, 25 bp, Homo sapien
ccctctccagggtccataggtaagt

SEQ ID NO: 4122355 - DNA, 25 bp, Homo sapien
ccagagctggttccatgggcaagag

SEQ ID NO: 4122356 - DNA, 25 bp, Homo sapien
cccagagctggttccatgggcaaga

SEQ ID NO: 4122357 - DNA, 25 bp, Homo sapien
tggctaagcccaggtctaggcgctg

SEQ ID NO: 4122358 - DNA, 25 bp, Homo sapien
ctaagcccaggtctaggcgctgcca

SEQ ID NO: 4122359 - DNA, 25 bp, Homo sapien
ggcacctacaaaggccttcagccac

SEQ ID NO: 4122360 - DNA, 25 bp, Homo sapien
cagtgagatgctcttcttgaaggca

SEQ ID NO: 4122361 - DNA, 25 bp, Homo sapien
cttcgtggctccagagaggacagtg

SEQ ID NO: 4122362 - DNA, 25 bp, Homo sapien
gaggacagtgagatgctcttcttga

SEQ ID NO: 4122363 - DNA, 25 bp, Homo sapien
tgcagctgttcggccagcacatgca

SEQ ID NO: 4122364 - DNA, 25 bp, Homo sapien
cagctcatccagtggtagcagcggg

SEQ ID NO: 4122365 - DNA, 25 bp, Homo sapien
gtagcagcgggacctctgcacctgc

SEQ ID NO: 4122366 - DNA, 25 bp, Homo sapien
gaatgatgaagagcttgagcagcag

SEQ ID NO: 4122367 - DNA, 25 bp, Homo sapien
ctccctctggcccacagttctaggc

SEQ ID NO: 4122368 - DNA, 25 bp, Homo sapien
agttctaggcccctgcttgtagagt

SEQ ID NO: 4122369 - DNA, 25 bp, Homo sapien
gatgagagaggtcacaataatacac

SEQ ID NO: 4122370 - DNA, 25 bp, Homo sapien
cttgtagagtggacaacagagacac

SEQ ID NO: 4122371 - DNA, 25 bp, Homo sapien
agtgccagcactcggggcactagca

SEQ ID NO: 4122372 - DNA, 25 bp, Homo sapien
caccaacttggtcaacagtgccagc

SEQ ID NO: 4122373 - DNA, 25 bp, Homo sapien
ttggccccggcctgcctctatgttc

SEQ ID NO: 4122374 - DNA, 25 bp, Homo sapien
gcactcggggcactagcacttggcc

SEQ ID NO: 4122375 - DNA, 25 bp, Homo sapien
ctggcgccgccaggtttggtaaggg

SEQ ID NO: 4122376 - DNA, 25 bp, Homo sapien
aaagaggccctcgcagagaagcaga

SEQ ID NO: 4122377 - DNA, 25 bp, Homo sapien
gcatgtagggccacattctccaact

SEQ ID NO: 4122378 - DNA, 25 bp, Homo sapien
ttctccaactgcgtgcctcggccct

SEQ ID NO: 4122379 - DNA, 25 bp, Homo sapien
gaaggcgctgaattcctggggcaaa

SEQ ID NO: 4122380 - DNA, 25 bp, Homo sapien
ggcgctgaattcctggggcaaagca

SEQ ID NO: 4122381 - DNA, 25 bp, Homo sapien
cgctgaattcctggggcaaagcagc

SEQ ID NO: 4122382 - DNA, 25 bp, Homo sapien
ggaagaaggcgctgaattcctgggg

SEQ ID NO: 4122383 - DNA, 25 bp, Homo sapien
ctcgctccagcccaagatgtcttct

SEQ ID NO: 4122384 - DNA, 25 bp, Homo sapien
tccctaaactcttgcttggtctttg

SEQ ID NO: 4122385 - DNA, 25 bp, Homo sapien
tctgtccctaaactcttgcttggtc

SEQ ID NO: 4122386 - DNA, 25 bp, Homo sapien
gtctttggttctcccagtcctgcat

SEQ ID NO: 4122387 - DNA, 25 bp, Homo sapien
ggaacaggaggtggagatacctcct

SEQ ID NO: 4122388 - DNA, 25 bp, Homo sapien
gaggtggagatacctcctgtgtctc

SEQ ID NO: 4122389 - DNA, 25 bp, Homo sapien
gagatacctcctgtgtctccgggat

SEQ ID NO: 4122390 - DNA, 25 bp, Homo sapien
tacctcctgtgtctccgggatgggt

SEQ ID NO: 4122391 - DNA, 25 bp, Homo sapien
agaccagccctgagagtctagccag

SEQ ID NO: 4122392 - DNA, 25 bp, Homo sapien
tatggctgtatagtagagggcctga

SEQ ID NO: 4122393 - DNA, 25 bp, Homo sapien
gagctgggccaagtaaaagatccag

SEQ ID NO: 4122394 - DNA, 25 bp, Homo sapien
ggacttaagggtgacaaagaccagc

SEQ ID NO: 4122395 - DNA, 25 bp, Homo sapien
gggtgtgggcagggtaatgtcacca

SEQ ID NO: 4122396 - DNA, 25 bp, Homo sapien
tgtgggcagggtaatgtcaccaagg

SEQ ID NO: 4122397 - DNA, 25 bp, Homo sapien
ggtgtgggcagggtaatgtcaccaa

SEQ ID NO: 4122398 - DNA, 25 bp, Homo sapien
gtgtgggcagggtaatgtcaccaag

SEQ ID NO: 4122399 - DNA, 25 bp, Homo sapien
cgaggacggcgcagaagaggtggat

SEQ ID NO: 4122400 - DNA, 25 bp, Homo sapien
aggtggatgagacgtaacagcagta

SEQ ID NO: 4122401 - DNA, 25 bp, Homo sapien
agcagtatgggaggcaagtggtctg

SEQ ID NO: 4122402 - DNA, 25 bp, Homo sapien
tcctccagcgaggacggcgcagaag

SEQ ID NO: 4122403 - DNA, 25 bp, Homo sapien
agctggccagtcagcattaaggaca

SEQ ID NO: 4122404 - DNA, 25 bp, Homo sapien
agtgcctctagagccagtggcacta

SEQ ID NO: 4122405 - DNA, 25 bp, Homo sapien
gaagtagctctcaagcagggcacga

SEQ ID NO: 4122406 - DNA, 25 bp, Homo sapien
gcaagacatggactgcacctaccag

SEQ ID NO: 4122407 - DNA, 25 bp, Homo sapien
agcactggccggtcttcacatgcca

SEQ ID NO: 4122408 - DNA, 25 bp, Homo sapien
ctgaatgagccgagtgaggtgttca

SEQ ID NO: 4122409 - DNA, 25 bp, Homo sapien
ttgcagcactggccggtcttcacat

SEQ ID NO: 4122410 - DNA, 25 bp, Homo sapien
ggtgttcaaagcaattgttgctgag

SEQ ID NO: 4122411 - DNA, 25 bp, Homo sapien
tcagtaaccgggtagccaggtcact

SEQ ID NO: 4122412 - DNA, 25 bp, Homo sapien
tcgggctcagtcagtaaccgggtag

SEQ ID NO: 4122413 - DNA, 25 bp, Homo sapien
ttggacatcgggctcagtcagtaac

SEQ ID NO: 4122414 - DNA, 25 bp, Homo sapien
taaccgggtagccaggtcactgtcc

SEQ ID NO: 4122415 - DNA, 25 bp, Homo sapien
caatggcgtctgtgtcttggtccag

SEQ ID NO: 4122416 - DNA, 25 bp, Homo sapien
tctgactacatggactgcaatggcg

SEQ ID NO: 4122417 - DNA, 25 bp, Homo sapien
ggggagtcactcatgatgcaggtca

SEQ ID NO: 4122418 - DNA, 25 bp, Homo sapien
tgcaggtcagcactctgactacatg

SEQ ID NO: 4122419 - DNA, 25 bp, Homo sapien
agctcttgcaacagccgatgggtgg

SEQ ID NO: 4122420 - DNA, 25 bp, Homo sapien
tgcaggtgagggtagccgatgcgct

SEQ ID NO: 4122421 - DNA, 25 bp, Homo sapien
gtagccgatgcgctccttaaacacc

SEQ ID NO: 4122422 - DNA, 25 bp, Homo sapien
cagctcttgcaacagccgatgggtg

SEQ ID NO: 4122423 - DNA, 25 bp, Homo sapien
cgtgaggtcaaagtagcgcagagca

SEQ ID NO: 4122424 - DNA, 25 bp, Homo sapien
gccttattgatacacggcccagtgc

SEQ ID NO: 4122425 - DNA, 25 bp, Homo sapien
taatgtgcggatgacagcacctgcg

SEQ ID NO: 4122426 - DNA, 25 bp, Homo sapien
taggtgctgtatccatagggtgcag

SEQ ID NO: 4122427 - DNA, 25 bp, Homo sapien
gctgctttcgctggagtggtcgggt

SEQ ID NO: 4122428 - DNA, 25 bp, Homo sapien
tgctttcgctggagtggtcgggtgg

SEQ ID NO: 4122429 - DNA, 25 bp, Homo sapien
cagctgctttcgctggagtggtcgg

SEQ ID NO: 4122430 - DNA, 25 bp, Homo sapien
gctttcgctggagtggtcgggtggg

SEQ ID NO: 4122431 - DNA, 25 bp, Homo sapien
cacttcgggcaaactcatggtcaaa

SEQ ID NO: 4122432 - DNA, 25 bp, Homo sapien
ggcagagtcggcaaaggacacttcg

SEQ ID NO: 4122433 - DNA, 25 bp, Homo sapien
gtcaaatactccttccgtgtgcaca

SEQ ID NO: 4122434 - DNA, 25 bp, Homo sapien
cggccgccgtgaagaaggcctcaaa

SEQ ID NO: 4122435 - DNA, 25 bp, Homo sapien
ggcacatggacgatagccacgcagt

SEQ ID NO: 4122436 - DNA, 25 bp, Homo sapien
gctgtcttgaccagatggccgtctt

SEQ ID NO: 4122437 - DNA, 25 bp, Homo sapien
ccggcgcccaggcacatggacgata

SEQ ID NO: 4122438 - DNA, 25 bp, Homo sapien
gtctttgtagacatggaccaggttc

SEQ ID NO: 4122439 - DNA, 25 bp, Homo sapien
ggctgccccaccgagtgtcctgggt

SEQ ID NO: 4122440 - DNA, 25 bp, Homo sapien
agccctgtggtggtggtcgttgtgc

SEQ ID NO: 4122441 - DNA, 25 bp, Homo sapien
tcgttgtgcggtatccagcggagcc

SEQ ID NO: 4122442 - DNA, 25 bp, Homo sapien
cgagggtagagtcgatgctgccctc

SEQ ID NO: 4122443 - DNA, 25 bp, Homo sapien
agggtcctcagagccgtcgcctgca

SEQ ID NO: 4122444 - DNA, 25 bp, Homo sapien
ccgtcgcctgcagggcttcgtgaaa

SEQ ID NO: 4122445 - DNA, 25 bp, Homo sapien
cctgcagggcttcgtgaaagatggc

SEQ ID NO: 4122446 - DNA, 25 bp, Homo sapien
cttcgtgaaagatggccacagcccc

SEQ ID NO: 4122447 - DNA, 25 bp, Homo sapien
ccccctcaggcttgaagggtgccgt

SEQ ID NO: 4122448 - DNA, 25 bp, Homo sapien
caggcttgaagggtgccgtctcatt

SEQ ID NO: 4122449 - DNA, 25 bp, Homo sapien
ttgaagggtgccgtctcattgggcc

SEQ ID NO: 4122450 - DNA, 25 bp, Homo sapien
cccctcaggcttgaagggtgccgtc

SEQ ID NO: 4122451 - DNA, 25 bp, Homo sapien
agtagcacagtcgagccaaccactc

SEQ ID NO: 4122452 - DNA, 25 bp, Homo sapien
gggaagtagcacagtcgagccaacc

SEQ ID NO: 4122453 - DNA, 25 bp, Homo sapien
ccggggaagtagcacagtcgagcca

SEQ ID NO: 4122454 - DNA, 25 bp, Homo sapien
ggaagtagcacagtcgagccaacca

SEQ ID NO: 4122455 - DNA, 25 bp, Homo sapien
tgtggcccgtcaggcgcccatcaag

SEQ ID NO: 4122456 - DNA, 25 bp, Homo sapien
ggcgcccatcaagcccatgactggg

SEQ ID NO: 4122457 - DNA, 25 bp, Homo sapien
gacaggtccaggcagatgttgttct

SEQ ID NO: 4122458 - DNA, 25 bp, Homo sapien
cacatcccaggtctccactctgtgg

SEQ ID NO: 4122459 - DNA, 25 bp, Homo sapien
tcatgcgtttcagctggacctgctt

SEQ ID NO: 4122460 - DNA, 25 bp, Homo sapien
tttgggctgtgcagctactcgctcc

SEQ ID NO: 4122461 - DNA, 25 bp, Homo sapien
cagttcaggacccacgaggtcatgc

SEQ ID NO: 4122462 - DNA, 25 bp, Homo sapien
agatttacccaatgggagaaccagg

SEQ ID NO: 4122463 - DNA, 25 bp, Homo sapien
actgcaccaggctctcttggttcac

SEQ ID NO: 4122464 - DNA, 25 bp, Homo sapien
ccaggctctcttggttcaccatgtg

SEQ ID NO: 4122465 - DNA, 25 bp, Homo sapien
cccgatgatggcaggcccctggcac

SEQ ID NO: 4122466 - DNA, 25 bp, Homo sapien
tcttggttcaccatgtgaccctgaa

SEQ ID NO: 4122467 - DNA, 25 bp, Homo sapien
gtccagaggtgaaagttgaagagca

SEQ ID NO: 4122468 - DNA, 25 bp, Homo sapien
agctgggcggacatgagcacgttca

SEQ ID NO: 4122469 - DNA, 25 bp, Homo sapien
aatgctggtagagtaggtacaggag

SEQ ID NO: 4122470 - DNA, 25 bp, Homo sapien
gaggcgcacggcgaagtcactgagg

SEQ ID NO: 4122471 - DNA, 25 bp, Homo sapien
ggtgcgcagagcatccaagataaac

SEQ ID NO: 4122472 - DNA, 25 bp, Homo sapien
tggacgccgtacttcttccgcagct

SEQ ID NO: 4122473 - DNA, 25 bp, Homo sapien
tctgtgctcccgaactatgctggac

SEQ ID NO: 4122474 - DNA, 25 bp, Homo sapien
tatgctggacatgtactggatgtga

SEQ ID NO: 4122475 - DNA, 25 bp, Homo sapien
ctcagcatggtctgcgtgacctgca

SEQ ID NO: 4122476 - DNA, 25 bp, Homo sapien
cctgcacgtcatctgctgagagact

SEQ ID NO: 4122477 - DNA, 25 bp, Homo sapien
tctgcacggtgcgtaggtcgtcagc

SEQ ID NO: 4122478 - DNA, 25 bp, Homo sapien
tgctgagagactccgcaccaggaac

SEQ ID NO: 4122479 - DNA, 25 bp, Homo sapien
cctggccgcactagcagggccagta

SEQ ID NO: 4122480 - DNA, 25 bp, Homo sapien
ggccagtagcacttcgaggttccct

SEQ ID NO: 4122481 - DNA, 25 bp, Homo sapien
cttgcagactcgatcgggcagcagg

SEQ ID NO: 4122482 - DNA, 25 bp, Homo sapien
tccctggctccaacagaaagacagc

SEQ ID NO: 4122483 - DNA, 25 bp, Homo sapien
cattctgctgcagtctgcgcaggat

SEQ ID NO: 4122484 - DNA, 25 bp, Homo sapien
tggcggctccgctcaggtagccgct

SEQ ID NO: 4122485 - DNA, 25 bp, Homo sapien
aagcaggcaaccagaccctggagac

SEQ ID NO: 4122486 - DNA, 25 bp, Homo sapien
caggaacagcttgtagaggccctgg

SEQ ID NO: 4122487 - DNA, 25 bp, Homo sapien
ctaggcgaacgctgaggtcagcctg

SEQ ID NO: 4122488 - DNA, 25 bp, Homo sapien
agatgtctaggcgaacgctgaggtc

SEQ ID NO: 4122489 - DNA, 25 bp, Homo sapien
tctaggcgaacgctgaggtcagcct

SEQ ID NO: 4122490 - DNA, 25 bp, Homo sapien
gacagatgtctaggcgaacgctgag

SEQ ID NO: 4122491 - DNA, 25 bp, Homo sapien
tccaggacatatagccgggtcagca

SEQ ID NO: 4122492 - DNA, 25 bp, Homo sapien
gcccaggtcaaagggcgtgcagaat

SEQ ID NO: 4122493 - DNA, 25 bp, Homo sapien
tctgaaggctcagcaggtgactcag

SEQ ID NO: 4122494 - DNA, 25 bp, Homo sapien
cagaagccgcactacatctggctgt

SEQ ID NO: 4122495 - DNA, 25 bp, Homo sapien
tggtgttcgaggtatcatccccgct

SEQ ID NO: 4122496 - DNA, 25 bp, Homo sapien
catccccgctaatggtgggctccgg

SEQ ID NO: 4122497 - DNA, 25 bp, Homo sapien
ccaccaccagcagtgttgcctgatc

SEQ ID NO: 4122498 - DNA, 25 bp, Homo sapien
ccgcggcccatccagtggcgaagga

SEQ ID NO: 4122499 - DNA, 25 bp, Homo sapien
ggagccctctgggaacacaactgca

SEQ ID NO: 4122500 - DNA, 25 bp, Homo sapien
ccaggagccctctgggaacacaact

SEQ ID NO: 4122501 - DNA, 25 bp, Homo sapien
ctgggaacacaactgcagatgagag

SEQ ID NO: 4122502 - DNA, 25 bp, Homo sapien
ccctctgggaacacaactgcagatg

SEQ ID NO: 4122503 - DNA, 25 bp, Homo sapien
tggtgtgggcgtgggttgtgggcgg

SEQ ID NO: 4122504 - DNA, 25 bp, Homo sapien
gggtgagcactgagaaaacctggcc

SEQ ID NO: 4122505 - DNA, 25 bp, Homo sapien
tctggtgggcgcacaagtgtggctg

SEQ ID NO: 4122506 - DNA, 25 bp, Homo sapien
gccacgtcaccgagaacagcacgtt

SEQ ID NO: 4122507 - DNA, 25 bp, Homo sapien
gcacgttggtgagcagattgcacaa

SEQ ID NO: 4122508 - DNA, 25 bp, Homo sapien
agccaaagcgcttgctgggtgaggc

SEQ ID NO: 4122509 - DNA, 25 bp, Homo sapien
cgcagcagccaaagcgcttgctggg

SEQ ID NO: 4122510 - DNA, 25 bp, Homo sapien
acgggggcctctttgatgtcggtca

SEQ ID NO: 4122511 - DNA, 25 bp, Homo sapien
gggcctctttgatgtcggtcagggc

SEQ ID NO: 4122512 - DNA, 25 bp, Homo sapien
cgccatctcacggagatcagctgtg

SEQ ID NO: 4122513 - DNA, 25 bp, Homo sapien
ctcccaggcgatcaagtaggctgca

SEQ ID NO: 4122514 - DNA, 25 bp, Homo sapien
aagccgtaggccaatctgcgccatc

SEQ ID NO: 4122515 - DNA, 25 bp, Homo sapien
aagtaggctgcatacaccttcaaag

SEQ ID NO: 4122516 - DNA, 25 bp, Homo sapien
ggtcttccagcaggatgtagccaag

SEQ ID NO: 4122517 - DNA, 25 bp, Homo sapien
tgtgggtcttccagcaggatgtagc

SEQ ID NO: 4122518 - DNA, 25 bp, Homo sapien
tgggtcttccagcaggatgtagcca

SEQ ID NO: 4122519 - DNA, 25 bp, Homo sapien
ctgtgggtcttccagcaggatgtag

SEQ ID NO: 4122520 - DNA, 25 bp, Homo sapien
ggagagcacatagcaggcctcctcg

SEQ ID NO: 4122521 - DNA, 25 bp, Homo sapien
gctggcactgcagtctgtagcagca

SEQ ID NO: 4122522 - DNA, 25 bp, Homo sapien
gcaatctcacgtaggcctgggcatg

SEQ ID NO: 4122523 - DNA, 25 bp, Homo sapien
tctgtagcagcatgtgcaatctcac

SEQ ID NO: 4122524 - DNA, 25 bp, Homo sapien
gctgcaagtggggaccctgcctcat

SEQ ID NO: 4122525 - DNA, 25 bp, Homo sapien
tgcctcatcagtggctgactccaag

SEQ ID NO: 4122526 - DNA, 25 bp, Homo sapien
ggaccctgcctcatcagtggctgac

SEQ ID NO: 4122527 - DNA, 25 bp, Homo sapien
gctgactccaaggaagaggtgttca

SEQ ID NO: 4122528 - DNA, 25 bp, Homo sapien
ctgtttgtcgatgaagtggcgccat

SEQ ID NO: 4122529 - DNA, 25 bp, Homo sapien
agccccagcggctcataggcacggt

SEQ ID NO: 4122530 - DNA, 25 bp, Homo sapien
tcgggtgtggcacaaaaagcctgga

SEQ ID NO: 4122531 - DNA, 25 bp, Homo sapien
gtctagcagcgtgcgcaccagtggc

SEQ ID NO: 4122532 - DNA, 25 bp, Homo sapien
gaaacctgacataaggtcgtggctc

SEQ ID NO: 4122533 - DNA, 25 bp, Homo sapien
catacgtgtccatttcgaactggga

SEQ ID NO: 4122534 - DNA, 25 bp, Homo sapien
tagcaggcattccagaaacctgaca

SEQ ID NO: 4122535 - DNA, 25 bp, Homo sapien
tgcccactgctcataagcatgtcat

SEQ ID NO: 4122536 - DNA, 25 bp, Homo sapien
gagtgctgcgttgcctgctgcttca

SEQ ID NO: 4122537 - DNA, 25 bp, Homo sapien
cagggccatggagtgctgcgttgcc

SEQ ID NO: 4122538 - DNA, 25 bp, Homo sapien
gccatggagtgctgcgttgcctgct

SEQ ID NO: 4122539 - DNA, 25 bp, Homo sapien
tgccgtgtagcgtagcccctccagg

SEQ ID NO: 4122540 - DNA, 25 bp, Homo sapien
ttgtctcggagagcgctggcttcca

SEQ ID NO: 4122541 - DNA, 25 bp, Homo sapien
tatgtctcggcgctggacagtttcc

SEQ ID NO: 4122542 - DNA, 25 bp, Homo sapien
tcgaagtgatggttgggcaccagct

SEQ ID NO: 4122543 - DNA, 25 bp, Homo sapien
gcaccagcttcagacgcatgcgtga

SEQ ID NO: 4122544 - DNA, 25 bp, Homo sapien
gtcctcgccgagctggtcctcctgc

SEQ ID NO: 4122545 - DNA, 25 bp, Homo sapien
agcaactcgggtggggtgctcactt

SEQ ID NO: 4122546 - DNA, 25 bp, Homo sapien
tcgccgagctggtcctcctgcagca

SEQ ID NO: 4122547 - DNA, 25 bp, Homo sapien
ctcgtcctcgccgagctggtcctcc

SEQ ID NO: 4122548 - DNA, 25 bp, Homo sapien
acgcgctcagtgctgccatcgtaga

SEQ ID NO: 4122549 - DNA, 25 bp, Homo sapien
tggcactcggccgacagcaccagct

SEQ ID NO: 4122550 - DNA, 25 bp, Homo sapien
cgtagaagtatacattctgtgtggt

SEQ ID NO: 4122551 - DNA, 25 bp, Homo sapien
ctcctcggtttccacgcgctcagtg

SEQ ID NO: 4122552 - DNA, 25 bp, Homo sapien
aagagctcaagtgctgaacggcgca

SEQ ID NO: 4122553 - DNA, 25 bp, Homo sapien
gcctgatcgataaagaagagctcaa

SEQ ID NO: 4122554 - DNA, 25 bp, Homo sapien
cagtgggcgccggaaatcatagccg

SEQ ID NO: 4122555 - DNA, 25 bp, Homo sapien
gaacggcgcaggttgaaacgccgca

SEQ ID NO: 4122556 - DNA, 25 bp, Homo sapien
gtctgggagtctggctaggagatga

SEQ ID NO: 4122557 - DNA, 25 bp, Homo sapien
gagtctggctaggagatgagactgg

SEQ ID NO: 4122558 - DNA, 25 bp, Homo sapien
ctggggtctgggagtctggctagga

SEQ ID NO: 4122559 - DNA, 25 bp, Homo sapien
gggagtctggctaggagatgagact

SEQ ID NO: 4122560 - DNA, 25 bp, Homo sapien
taaggcctgaggcacgcagcatctc

SEQ ID NO: 4122561 - DNA, 25 bp, Homo sapien
ggccgtaggcgcaggagccacgagt

SEQ ID NO: 4122562 - DNA, 25 bp, Homo sapien
gagccacgagtacacctggttccgt

SEQ ID NO: 4122563 - DNA, 25 bp, Homo sapien
agcggctgcttaggtagccttgaga

SEQ ID NO: 4122564 - DNA, 25 bp, Homo sapien
ggacaggggcagacaagatgtgagc

SEQ ID NO: 4122565 - DNA, 25 bp, Homo sapien
gcagacaagatgtgagccaggtggg

SEQ ID NO: 4122566 - DNA, 25 bp, Homo sapien
gtgattcagggtcccgacttcacat

SEQ ID NO: 4122567 - DNA, 25 bp, Homo sapien
tgccccgtgattcagggtcccgact

SEQ ID NO: 4122568 - DNA, 25 bp, Homo sapien
aagttggatatctcacgctgtaccc

SEQ ID NO: 4122569 - DNA, 25 bp, Homo sapien
gagacaggtcattgtaggtccgccc

SEQ ID NO: 4122570 - DNA, 25 bp, Homo sapien
aggtccgccccgcaatggtgttgag

SEQ ID NO: 4122571 - DNA, 25 bp, Homo sapien
agttgcatcaagtactcgaagttgg

SEQ ID NO: 4122572 - DNA, 25 bp, Homo sapien
ccttttgaggaatagaggctaggca

SEQ ID NO: 4122573 - DNA, 25 bp, Homo sapien
ggccaggtcttcattggcacatcta

SEQ ID NO: 4122574 - DNA, 25 bp, Homo sapien
acaccctcaagaaggcgggcacaga

SEQ ID NO: 4122575 - DNA, 25 bp, Homo sapien
aaggacagagtgtcctggaacagga

SEQ ID NO: 4122576 - DNA, 25 bp, Homo sapien
gcatgcttggggttcaccacaccga

SEQ ID NO: 4122577 - DNA, 25 bp, Homo sapien
cccggaagacggctgggttgctgag

SEQ ID NO: 4122578 - DNA, 25 bp, Homo sapien
gcttagacaggtcccggaagacggc

SEQ ID NO: 4122579 - DNA, 25 bp, Homo sapien
gggttcaccacaccgatgggcttag

SEQ ID NO: 4122580 - DNA, 25 bp, Homo sapien
catagtggaacttgtcaatggtccc

SEQ ID NO: 4122581 - DNA, 25 bp, Homo sapien
tcacgcctgctgcattggagtagtg

SEQ ID NO: 4122582 - DNA, 25 bp, Homo sapien
ggccactttgcagctggacgtgcag

SEQ ID NO: 4122583 - DNA, 25 bp, Homo sapien
ccacgcggatgaggtagtgcatcac

SEQ ID NO: 4122584 - DNA, 25 bp, Homo sapien
tgccgccaccgagtggaactgccgg

SEQ ID NO: 4122585 - DNA, 25 bp, Homo sapien
ccaccgagtggaactgccggtcgga

SEQ ID NO: 4122586 - DNA, 25 bp, Homo sapien
agtcaggaaagtagaagaattccgg

SEQ ID NO: 4122587 - DNA, 25 bp, Homo sapien
ggatgagctccttcacatcggcagg

SEQ ID NO: 4122588 - DNA, 25 bp, Homo sapien
tccagtgtgagcacctcacacctac

SEQ ID NO: 4122589 - DNA, 25 bp, Homo sapien
tgcccgctccagtgtgagcacctca

SEQ ID NO: 4122590 - DNA, 25 bp, Homo sapien
ctgcccgctccagtgtgagcacctc

SEQ ID NO: 4122591 - DNA, 25 bp, Homo sapien
ccgctccagtgtgagcacctcacac

SEQ ID NO: 4122592 - DNA, 25 bp, Homo sapien
ggtagcaccacatcgcctaccttct

SEQ ID NO: 4122593 - DNA, 25 bp, Homo sapien
cgcctaccttctcgttggtcagctg

SEQ ID NO: 4122594 - DNA, 25 bp, Homo sapien
tggcccacgggggtagcaccacatc

SEQ ID NO: 4122595 - DNA, 25 bp, Homo sapien
accttctcgttggtcagctggagac

SEQ ID NO: 4122596 - DNA, 25 bp, Homo sapien
gatgaggtcgatccactcgtgtagg

SEQ ID NO: 4122597 - DNA, 25 bp, Homo sapien
gatccactcgtgtaggtgtgcagac

SEQ ID NO: 4122598 - DNA, 25 bp, Homo sapien
ccccgctgcttgtagccaaagatga

SEQ ID NO: 4122599 - DNA, 25 bp, Homo sapien
taatagaagacattgagggcctcct

SEQ ID NO: 4122600 - DNA, 25 bp, Homo sapien
gttgctgataatgccctccagagcc

SEQ ID NO: 4122601 - DNA, 25 bp, Homo sapien
agctgacagggagtctgcccaaagt

SEQ ID NO: 4122602 - DNA, 25 bp, Homo sapien
tgtcacatggtccaggtctacagcc

SEQ ID NO: 4122603 - DNA, 25 bp, Homo sapien
ataatgccctccagagccttccgtt

SEQ ID NO: 4122604 - DNA, 25 bp, Homo sapien
gtgctggaagatgctaggtgagtta

SEQ ID NO: 4122605 - DNA, 25 bp, Homo sapien
atgctaggtgagttagtgtccaggc

SEQ ID NO: 4122606 - DNA, 25 bp, Homo sapien
tccaggcgtgcaaggcgatgggctg

SEQ ID NO: 4122607 - DNA, 25 bp, Homo sapien
cgaagaatgccttgagttcgtccag

SEQ ID NO: 4122608 - DNA, 25 bp, Homo sapien
ccaggggtacaccatcactgacaac

SEQ ID NO: 4122609 - DNA, 25 bp, Homo sapien
tgccggtgggggaccagggctagca

SEQ ID NO: 4122610 - DNA, 25 bp, Homo sapien
gggaaccctgggtgatgaaggagtg

SEQ ID NO: 4122611 - DNA, 25 bp, Homo sapien
cagggctagcaccaggggtacacca

SEQ ID NO: 4122612 - DNA, 25 bp, Homo sapien
gctgaagtagttgcttatgttgcgg

SEQ ID NO: 4122613 - DNA, 25 bp, Homo sapien
tgaagtagttgcttatgttgcggtc

SEQ ID NO: 4122614 - DNA, 25 bp, Homo sapien
ctgaagtagttgcttatgttgcggt

SEQ ID NO: 4122615 - DNA, 25 bp, Homo sapien
aagctgaagtagttgcttatgttgc

SEQ ID NO: 4122616 - DNA, 25 bp, Homo sapien
tctgattagggaggggaataattcc

SEQ ID NO: 4122617 - DNA, 25 bp, Homo sapien
gaataattccgggtgcagggcattt

SEQ ID NO: 4122618 - DNA, 25 bp, Homo sapien
tgcagggcatttgtagcccacccca

SEQ ID NO: 4122619 - DNA, 25 bp, Homo sapien
cctgcagctggcctacattctgatt

SEQ ID NO: 4122620 - DNA, 25 bp, Homo sapien
ggtagtgcagtcacccgcaggctgc

SEQ ID NO: 4122621 - DNA, 25 bp, Homo sapien
atcccagtggccaccgctgaatagc

SEQ ID NO: 4122622 - DNA, 25 bp, Homo sapien
gctgaatagcagctttccatccggg

SEQ ID NO: 4122623 - DNA, 25 bp, Homo sapien
agctggctcaacagcttgccacggg

SEQ ID NO: 4122624 - DNA, 25 bp, Homo sapien
caggcagaacggaggagtcacatcc

SEQ ID NO: 4122625 - DNA, 25 bp, Homo sapien
aacggaggagtcacatccgccctgg

SEQ ID NO: 4122626 - DNA, 25 bp, Homo sapien
ggcagaacggaggagtcacatccgc

SEQ ID NO: 4122627 - DNA, 25 bp, Homo sapien
tcagaacccggccccatacctgtgt

SEQ ID NO: 4122628 - DNA, 25 bp, Homo sapien
gagccgccacaccatgcacgtggtg

SEQ ID NO: 4122629 - DNA, 25 bp, Homo sapien
tgcaggagccgccacaccatgcacg

SEQ ID NO: 4122630 - DNA, 25 bp, Homo sapien
caggtgtccagtgcaaggcaggtta

SEQ ID NO: 4122631 - DNA, 25 bp, Homo sapien
acaggtgtccagtgcaaggcaggtt

SEQ ID NO: 4122632 - DNA, 25 bp, Homo sapien
actggaaggccactgagggacggat

SEQ ID NO: 4122633 - DNA, 25 bp, Homo sapien
ggccttgtccaagactagaggagga

SEQ ID NO: 4122634 - DNA, 25 bp, Homo sapien
tggaggaccagggttggcttaggac

SEQ ID NO: 4122635 - DNA, 25 bp, Homo sapien
ttgtccaagactagaggaggacagg

SEQ ID NO: 4122636 - DNA, 25 bp, Homo sapien
gacacagccatgtcaagttcagtgc

SEQ ID NO: 4122637 - DNA, 25 bp, Homo sapien
catgcccatacaggacctgcacagg

SEQ ID NO: 4122638 - DNA, 25 bp, Homo sapien
cccatgcccatacaggacctgcaca

SEQ ID NO: 4122639 - DNA, 25 bp, Homo sapien
cagccccatgcccatacaggacctg

SEQ ID NO: 4122640 - DNA, 25 bp, Homo sapien
ctccagggggattgcccaggaaact

SEQ ID NO: 4122641 - DNA, 25 bp, Homo sapien
tgtccgcggcgtacagtgtgtatga

SEQ ID NO: 4122642 - DNA, 25 bp, Homo sapien
tcggaccccaatgccaggtggaaaa

SEQ ID NO: 4122643 - DNA, 25 bp, Homo sapien
aaaataggtccagggaatgtggcac

SEQ ID NO: 4122644 - DNA, 25 bp, Homo sapien
gtagtgccgctacaaactgtccgcg

SEQ ID NO: 4122645 - DNA, 25 bp, Homo sapien
gtgtcagcaaggacaggatcccaac

SEQ ID NO: 4122646 - DNA, 25 bp, Homo sapien
ctccatctttgctgggcaccccttc

SEQ ID NO: 4122647 - DNA, 25 bp, Homo sapien
tcagcaaggacaggatcccaactgc

SEQ ID NO: 4122648 - DNA, 25 bp, Homo sapien
agcaaggacaggatcccaactgccc

SEQ ID NO: 4122649 - DNA, 25 bp, Homo sapien
gactgaatacaggtgcaaggagtag

SEQ ID NO: 4122650 - DNA, 25 bp, Homo sapien
cagtgaagcccgcaacttcccattg

SEQ ID NO: 4122651 - DNA, 25 bp, Homo sapien
gcaacttcccattgactgaatacag

SEQ ID NO: 4122652 - DNA, 25 bp, Homo sapien
ccaggggcagtgaagcccgcaactt

SEQ ID NO: 4122653 - DNA, 25 bp, Homo sapien
cacgctgcggatggccaccttcatg

SEQ ID NO: 4122654 - DNA, 25 bp, Homo sapien
tggctgcgctccttggtcacggcca

SEQ ID NO: 4122655 - DNA, 25 bp, Homo sapien
cacgtggctgcgctccttggtcacg

SEQ ID NO: 4122656 - DNA, 25 bp, Homo sapien
ggccacgctgcggatggccaccttc

SEQ ID NO: 4122657 - DNA, 25 bp, Homo sapien
agatgcgccgcgaggaccgccacag

SEQ ID NO: 4122658 - DNA, 25 bp, Homo sapien
accgccacagcttccgcgcgaactg

SEQ ID NO: 4122659 - DNA, 25 bp, Homo sapien
tgggagatgcgccgcgaggaccgcc

SEQ ID NO: 4122660 - DNA, 25 bp, Homo sapien
acagcttccgcgcgaactggctgct

SEQ ID NO: 4122661 - DNA, 25 bp, Homo sapien
ggttgtattccgtctctcccgagga

SEQ ID NO: 4122662 - DNA, 25 bp, Homo sapien
tagggttgtattccgtctctcccga

SEQ ID NO: 4122663 - DNA, 25 bp, Homo sapien
tgtattccgtctctcccgaggacac

SEQ ID NO: 4122664 - DNA, 25 bp, Homo sapien
cctcagtagggttgtattccgtctc

SEQ ID NO: 4122665 - DNA, 25 bp, Homo sapien
ggcccgagcagccggactggccagg

SEQ ID NO: 4122666 - DNA, 25 bp, Homo sapien
gttaggaattaaggccacaggcggc

SEQ ID NO: 4122667 - DNA, 25 bp, Homo sapien
tgacgaaacagcgacttggaagccg

SEQ ID NO: 4122668 - DNA, 25 bp, Homo sapien
caggcggccctcgtgctttgacgaa

SEQ ID NO: 4122669 - DNA, 25 bp, Homo sapien
aaactaggcctggtttattgccgag

SEQ ID NO: 4122670 - DNA, 25 bp, Homo sapien
cgggaagacaacgtggactctctgg

SEQ ID NO: 4122671 - DNA, 25 bp, Homo sapien
caggaccgagccctccgggaagaca

SEQ ID NO: 4122672 - DNA, 25 bp, Homo sapien
cctccgggaagacaacgtggactct

SEQ ID NO: 4122673 - DNA, 25 bp, Homo sapien
cgagccctccgggaagacaacgtgg

SEQ ID NO: 4122674 - DNA, 25 bp, Homo sapien
tgcaggatcctggatagtggatggg

SEQ ID NO: 4122675 - DNA, 25 bp, Homo sapien
gcaggatcctggatagtggatgggc

SEQ ID NO: 4122676 - DNA, 25 bp, Homo sapien
ctcgtctagactaaggagagcttgc

SEQ ID NO: 4122677 - DNA, 25 bp, Homo sapien
gaagctcctcgtctagactaaggag

SEQ ID NO: 4122678 - DNA, 25 bp, Homo sapien
tcctcgtctagactaaggagagctt

SEQ ID NO: 4122679 - DNA, 25 bp, Homo sapien
ggaagagaagctcctcgtctagact

SEQ ID NO: 4122680 - DNA, 25 bp, Homo sapien
ggatcctatagggctgaatctgctg

SEQ ID NO: 4122681 - DNA, 25 bp, Homo sapien
tcctatagggctgaatctgctggga

SEQ ID NO: 4122682 - DNA, 25 bp, Homo sapien
gatcctatagggctgaatctgctgg

SEQ ID NO: 4122683 - DNA, 25 bp, Homo sapien
ctggatcctatagggctgaatctgc

SEQ ID NO: 4122684 - DNA, 25 bp, Homo sapien
ggctctgttagtggttaatactcct

SEQ ID NO: 4122685 - DNA, 25 bp, Homo sapien
tctgttagtggttaatactcctggg

SEQ ID NO: 4122686 - DNA, 25 bp, Homo sapien
tgtttcttggagaagacgttagaga

SEQ ID NO: 4122687 - DNA, 25 bp, Homo sapien
agagttttaggcagcgcccaggcag

SEQ ID NO: 4122688 - DNA, 25 bp, Homo sapien
tgcccagtgcccatgatctggatca

SEQ ID NO: 4122689 - DNA, 25 bp, Homo sapien
actttgctgtggctagagttgtgaa

SEQ ID NO: 4122690 - DNA, 25 bp, Homo sapien
tgatctggatcaacggatgcttacc

SEQ ID NO: 4122691 - DNA, 25 bp, Homo sapien
cttacccacataggccaggactttg

SEQ ID NO: 4122692 - DNA, 25 bp, Homo sapien
tgcctcctcaggatcttacctgtgg

SEQ ID NO: 4122693 - DNA, 25 bp, Homo sapien
ctcctcaggatcttacctgtggaag

SEQ ID NO: 4122694 - DNA, 25 bp, Homo sapien
tgcccctacccatactccttccctg

SEQ ID NO: 4122695 - DNA, 25 bp, Homo sapien
cctcctgcccctacccatactcctt

SEQ ID NO: 4122696 - DNA, 25 bp, Homo sapien
atgtaggcaagcagaccgaggacca

SEQ ID NO: 4122697 - DNA, 25 bp, Homo sapien
agactgggatgatgctgcctgagac

SEQ ID NO: 4122698 - DNA, 25 bp, Homo sapien
cacttgaaggccatgtaggcaagca

SEQ ID NO: 4122699 - DNA, 25 bp, Homo sapien
agaccgaggaccacagtggccagaa

SEQ ID NO: 4122700 - DNA, 25 bp, Homo sapien
ctgcagttcgagctttggccagctg

SEQ ID NO: 4122701 - DNA, 25 bp, Homo sapien
tctggtccttgttgagacctcccag

SEQ ID NO: 4122702 - DNA, 25 bp, Homo sapien
tccagactgctaggagagtccagga

SEQ ID NO: 4122703 - DNA, 25 bp, Homo sapien
gaagacactgctatccccatgcatc

SEQ ID NO: 4122704 - DNA, 25 bp, Homo sapien
cccttgtcaggttcacgtgacacct

SEQ ID NO: 4122705 - DNA, 25 bp, Homo sapien
tcggcacccaagctcaggatgtggt

SEQ ID NO: 4122706 - DNA, 25 bp, Homo sapien
cgccagcccttgtcaggttcacgtg

SEQ ID NO: 4122707 - DNA, 25 bp, Homo sapien
gtgctgccgagggagatcaaggtga

SEQ ID NO: 4122708 - DNA, 25 bp, Homo sapien
cttggatagcccagtccctcagcag

SEQ ID NO: 4122709 - DNA, 25 bp, Homo sapien
atagcccagtccctcagcagtgtgt

SEQ ID NO: 4122710 - DNA, 25 bp, Homo sapien
cagtccctcagcagtgtgtaggctc

SEQ ID NO: 4122711 - DNA, 25 bp, Homo sapien
agtccctcagcagtgtgtaggctca

SEQ ID NO: 4122712 - DNA, 25 bp, Homo sapien
gaacagccctcagcttgggggccca

SEQ ID NO: 4122713 - DNA, 25 bp, Homo sapien
ggcccaggacctggaccacatcttc

SEQ ID NO: 4122714 - DNA, 25 bp, Homo sapien
cacagaacagccctcagcttggggg

SEQ ID NO: 4122715 - DNA, 25 bp, Homo sapien
tctctagcaccttgtgggtggcacc

SEQ ID NO: 4122716 - DNA, 25 bp, Homo sapien
aagtccgaatcacctttaatatggg

SEQ ID NO: 4122717 - DNA, 25 bp, Homo sapien
cagtctccgagagtgcaggctatgg

SEQ ID NO: 4122718 - DNA, 25 bp, Homo sapien
ttaatatgggttacaaaagtagcaa

SEQ ID NO: 4122719 - DNA, 25 bp, Homo sapien
aaccagctgaggcttaataagagga

SEQ ID NO: 4122720 - DNA, 25 bp, Homo sapien
gaattcaaccctgcagatgtcaact

SEQ ID NO: 4122721 - DNA, 25 bp, Homo sapien
cacaggaagactttgtaaggacagt

SEQ ID NO: 4122722 - DNA, 25 bp, Homo sapien
tctccttggcggtgctgtcagcgca

SEQ ID NO: 4122723 - DNA, 25 bp, Homo sapien
tgcaagggcttagaaaagaccctgg

SEQ ID NO: 4122724 - DNA, 25 bp, Homo sapien
ctctcaagccattgtagacaggcag

SEQ ID NO: 4122725 - DNA, 25 bp, Homo sapien
ttaacgtggcttgcatgcctggcca

SEQ ID NO: 4122726 - DNA, 25 bp, Homo sapien
gacaggcagtagacctctgctgcta

SEQ ID NO: 4122727 - DNA, 25 bp, Homo sapien
tgtcttggtcacttgggtcttccca

SEQ ID NO: 4122728 - DNA, 25 bp, Homo sapien
aagtaagttacagcagaggtgggca

SEQ ID NO: 4122729 - DNA, 25 bp, Homo sapien
tctagtgacgagtctagagaaaatt

SEQ ID NO: 4122730 - DNA, 25 bp, Homo sapien
aaaagtaagttacagcagaggtggg

SEQ ID NO: 4122731 - DNA, 25 bp, Homo sapien
tacatgttacacacattctagtgac

SEQ ID NO: 4122732 - DNA, 25 bp, Homo sapien
tcccagttgactggctgtattttgt

SEQ ID NO: 4122733 - DNA, 25 bp, Homo sapien
gagattgtagttgtaagccacagtg

SEQ ID NO: 4122734 - DNA, 25 bp, Homo sapien
tgttgtagagttctatttaggctaa

SEQ ID NO: 4122735 - DNA, 25 bp, Homo sapien
tgtgtatcagagaagattataatct

SEQ ID NO: 4122736 - DNA, 25 bp, Homo sapien
tatagcaagtaaagcctgtcctcaa

SEQ ID NO: 4122737 - DNA, 25 bp, Homo sapien
acagagaagaatccggaaatttctt

SEQ ID NO: 4122738 - DNA, 25 bp, Homo sapien
tgagagattggagtcaaggagacat

SEQ ID NO: 4122739 - DNA, 25 bp, Homo sapien
caaggagacatttgtatgaggaaaa

SEQ ID NO: 4122740 - DNA, 25 bp, Homo sapien
tattaatgcgcttgatagggccaaa

SEQ ID NO: 4122741 - DNA, 25 bp, Homo sapien
taatgtcctagcctgagagattggt

SEQ ID NO: 4122742 - DNA, 25 bp, Homo sapien
catgatctcatcctgtggagttaaa

SEQ ID NO: 4122743 - DNA, 25 bp, Homo sapien
tttggttccttgagcttgccatgac

SEQ ID NO: 4122744 - DNA, 25 bp, Homo sapien
gaggcctatactacactcaagtgta

SEQ ID NO: 4122745 - DNA, 25 bp, Homo sapien
gtcctgtacagtgacacatctagtt

SEQ ID NO: 4122746 - DNA, 25 bp, Homo sapien
tgagacctaggacctcacttttggc

SEQ ID NO: 4122747 - DNA, 25 bp, Homo sapien
tacgaaattcagtagaaggtctgga

SEQ ID NO: 4122748 - DNA, 25 bp, Homo sapien
taatcagacacagctgcaagatgtc

SEQ ID NO: 4122749 - DNA, 25 bp, Homo sapien
ttttattcagcagcatagaggacat

SEQ ID NO: 4122750 - DNA, 25 bp, Homo sapien
ccatgcttttaatcagacacagctg

SEQ ID NO: 4122751 - DNA, 25 bp, Homo sapien
gacacagctgcaagatgtctttttt

SEQ ID NO: 4122752 - DNA, 25 bp, Homo sapien
tggctcgtttttgaatcccttgcca

SEQ ID NO: 4122753 - DNA, 25 bp, Homo sapien
cttaggtttgctctggctcgttttt

SEQ ID NO: 4122754 - DNA, 25 bp, Homo sapien
ggctcgtttttgaatcccttgccac

SEQ ID NO: 4122755 - DNA, 25 bp, Homo sapien
tctggctcgtttttgaatcccttgc

SEQ ID NO: 4122756 - DNA, 25 bp, Homo sapien
cgggctcgggtggaagctcgacccg

SEQ ID NO: 4122757 - DNA, 25 bp, Homo sapien
ggtggaagctcgacccgtcgcccga

SEQ ID NO: 4122758 - DNA, 25 bp, Homo sapien
gccggtgagggtaggccgcgaatcc

SEQ ID NO: 4122759 - DNA, 25 bp, Homo sapien
gggcccggcaagagggcgccggtga

SEQ ID NO: 4122760 - DNA, 25 bp, Homo sapien
ccgccacttcgagccgcttggccgg

SEQ ID NO: 4122761 - DNA, 25 bp, Homo sapien
ctcgcgcggtcggtgtcgggagcag

SEQ ID NO: 4122762 - DNA, 25 bp, Homo sapien
gttgggcccggcgttggcgccgctg

SEQ ID NO: 4122763 - DNA, 25 bp, Homo sapien
ccggcgcgaggagtaacaggcccac

SEQ ID NO: 4122764 - DNA, 25 bp, Homo sapien
cccgctgctgtcggccgccttatcc

SEQ ID NO: 4122765 - DNA, 25 bp, Homo sapien
gctgtcggccgccttatccccagcc

SEQ ID NO: 4122766 - DNA, 25 bp, Homo sapien
gccttatccccagccgagggcggcg

SEQ ID NO: 4122767 - DNA, 25 bp, Homo sapien
tcggccgccttatccccagccgagg

SEQ ID NO: 4122768 - DNA, 25 bp, Homo sapien
gggtttattgttccggagagccaca

SEQ ID NO: 4122769 - DNA, 25 bp, Homo sapien
gagccacaggcacggtcggcctgga

SEQ ID NO: 4122770 - DNA, 25 bp, Homo sapien
tcagtcgccagctgtgacacggtag

SEQ ID NO: 4122771 - DNA, 25 bp, Homo sapien
tccaggtccggtctggcccacatca

SEQ ID NO: 4122772 - DNA, 25 bp, Homo sapien
ttctcccgacgtcgcctgctgtttg

SEQ ID NO: 4122773 - DNA, 25 bp, Homo sapien
tgcagggccgcggagcgagaaggct

SEQ ID NO: 4122774 - DNA, 25 bp, Homo sapien
aaggctgatgtctcgggtgtctcgg

SEQ ID NO: 4122775 - DNA, 25 bp, Homo sapien
gggagttctcccgacgtcgcctgct

SEQ ID NO: 4122776 - DNA, 25 bp, Homo sapien
tttacagaagagagtgcctgactgg

SEQ ID NO: 4122777 - DNA, 25 bp, Homo sapien
gcctgactggaagtaatcaacttgt

SEQ ID NO: 4122778 - DNA, 25 bp, Homo sapien
aagaattggtattccatggatgagc

SEQ ID NO: 4122779 - DNA, 25 bp, Homo sapien
ccagtgaaatagctgcttgtaggag

SEQ ID NO: 4122780 - DNA, 25 bp, Homo sapien
aaactggtaatcttgagtacattca

SEQ ID NO: 4122781 - DNA, 25 bp, Homo sapien
tagaagaacgccaagatccaaagca

SEQ ID NO: 4122782 - DNA, 25 bp, Homo sapien
tctgctgggtaagacaagtttggga

SEQ ID NO: 4122783 - DNA, 25 bp, Homo sapien
gaataaaagatacaccataatcacc

SEQ ID NO: 4122784 - DNA, 25 bp, Homo sapien
tttcttagtcatgtgactctagata

SEQ ID NO: 4122785 - DNA, 25 bp, Homo sapien
tcttagtcatgtgactctagatatg

SEQ ID NO: 4122786 - DNA, 25 bp, Homo sapien
tgaaacagataacctggctgaaatc

SEQ ID NO: 4122787 - DNA, 25 bp, Homo sapien
tcttgaaacagataacctggctgaa

SEQ ID NO: 4122788 - DNA, 25 bp, Homo sapien
gcacacacatagttgttacggaata

SEQ ID NO: 4122789 - DNA, 25 bp, Homo sapien
cctgggtgtcccctatataatccct

SEQ ID NO: 4122790 - DNA, 25 bp, Homo sapien
cattacatctagtgtagacaaaata

SEQ ID NO: 4122791 - DNA, 25 bp, Homo sapien
ctatgtacgagtgcttttatttccg

SEQ ID NO: 4122792 - DNA, 25 bp, Homo sapien
aatgacagtataatactcctctgta

SEQ ID NO: 4122793 - DNA, 25 bp, Homo sapien
gtataatactcctctgtatggatgt

SEQ ID NO: 4122794 - DNA, 25 bp, Homo sapien
tcccaccacaaattataccattaat

SEQ ID NO: 4122795 - DNA, 25 bp, Homo sapien
atgttccaaaatatattcacccatt

SEQ ID NO: 4122796 - DNA, 25 bp, Homo sapien
gattaccagcgcgtgccatgcccgg

SEQ ID NO: 4122797 - DNA, 25 bp, Homo sapien
ggattaccagcgcgtgccatgcccg

SEQ ID NO: 4122798 - DNA, 25 bp, Homo sapien
aataaggtacgttttctgagcaata

SEQ ID NO: 4122799 - DNA, 25 bp, Homo sapien
cagagaagtaacatcctataaacac

SEQ ID NO: 4122800 - DNA, 25 bp, Homo sapien
aagagtgggatatcagattcttggc

SEQ ID NO: 4122801 - DNA, 25 bp, Homo sapien
tgtgtgaaacatgtctaaccagaga

SEQ ID NO: 4122802 - DNA, 25 bp, Homo sapien
caagttgttggaaaaataggtgcac

SEQ ID NO: 4122803 - DNA, 25 bp, Homo sapien
tgttggaaaaataggtgcacaccac

SEQ ID NO: 4122804 - DNA, 25 bp, Homo sapien
gttgttggaaaaataggtgcacacc

SEQ ID NO: 4122805 - DNA, 25 bp, Homo sapien
agttgttggaaaaataggtgcacac

SEQ ID NO: 4122806 - DNA, 25 bp, Homo sapien
agagccgtggcgccatcagctcact

SEQ ID NO: 4122807 - DNA, 25 bp, Homo sapien
ggagagccgtggcgccatcagctca

SEQ ID NO: 4122808 - DNA, 25 bp, Homo sapien
ctggagagccgtggcgccatcagct

SEQ ID NO: 4122809 - DNA, 25 bp, Homo sapien
gctggagagccgtggcgccatcagc

SEQ ID NO: 4122810 - DNA, 25 bp, Homo sapien
taacactggggattcgacatgagat

SEQ ID NO: 4122811 - DNA, 25 bp, Homo sapien
catggtactaagcaattcatgagaa

SEQ ID NO: 4122812 - DNA, 25 bp, Homo sapien
tgagaactcacaagggggcatggta

SEQ ID NO: 4122813 - DNA, 25 bp, Homo sapien
cacaagggggcatggtactaagcaa

SEQ ID NO: 4122814 - DNA, 25 bp, Homo sapien
aggcaaagcaggagccggcatttta

SEQ ID NO: 4122815 - DNA, 25 bp, Homo sapien
ggagccggcattttatatggcagga

SEQ ID NO: 4122816 - DNA, 25 bp, Homo sapien
ggcaaagcaggagccggcattttat

SEQ ID NO: 4122817 - DNA, 25 bp, Homo sapien
agcaggagccggcattttatatggc

SEQ ID NO: 4122818 - DNA, 25 bp, Homo sapien
tacacagttcaaagacatatgcatg

SEQ ID NO: 4122819 - DNA, 25 bp, Homo sapien
catgttaccgagctggtctcctgga

SEQ ID NO: 4122820 - DNA, 25 bp, Homo sapien
taaaagattaaattgatatctcagc

SEQ ID NO: 4122821 - DNA, 25 bp, Homo sapien
acacttttcagatacggatttcaga

SEQ ID NO: 4122822 - DNA, 25 bp, Homo sapien
taaagtaatataagctattgattgg

SEQ ID NO: 4122823 - DNA, 25 bp, Homo sapien
agtaatataagctattgattggctg

SEQ ID NO: 4122824 - DNA, 25 bp, Homo sapien
aatacaattactggggcatggtagc

SEQ ID NO: 4122825 - DNA, 25 bp, Homo sapien
aggaagataatggctgaggctgggc

SEQ ID NO: 4122826 - DNA, 25 bp, Homo sapien
aatacctccttgtagcgtacatgag

SEQ ID NO: 4122827 - DNA, 25 bp, Homo sapien
tccttgtagcgtacatgagtcttct

SEQ ID NO: 4122828 - DNA, 25 bp, Homo sapien
tgtagcgtacatgagtcttctttct

SEQ ID NO: 4122829 - DNA, 25 bp, Homo sapien
ctgagagagatatagttgtgagtgc

SEQ ID NO: 4122830 - DNA, 25 bp, Homo sapien
tacatgctactaaatggacgaaact

SEQ ID NO: 4122831 - DNA, 25 bp, Homo sapien
gattgagcatctctatcttgtacta

SEQ ID NO: 4122832 - DNA, 25 bp, Homo sapien
caatggagtacttgttcagccttaa

SEQ ID NO: 4122833 - DNA, 25 bp, Homo sapien
ttttcgccacaagctacagattgag

SEQ ID NO: 4122834 - DNA, 25 bp, Homo sapien
gactagaggcccatgccactaaact

SEQ ID NO: 4122835 - DNA, 25 bp, Homo sapien
gcccatgccactaaactcagctttt

SEQ ID NO: 4122836 - DNA, 25 bp, Homo sapien
agaggcccatgccactaaactcagc

SEQ ID NO: 4122837 - DNA, 25 bp, Homo sapien
gaggcccatgccactaaactcagct

SEQ ID NO: 4122838 - DNA, 25 bp, Homo sapien
tatttggttctataaccagcttttc

SEQ ID NO: 4122839 - DNA, 25 bp, Homo sapien
gtagaaggacccataaacattattc

SEQ ID NO: 4122840 - DNA, 25 bp, Homo sapien
ccaatctgggttaggtaagtagaag

SEQ ID NO: 4122841 - DNA, 25 bp, Homo sapien
ttattcataaaacctagctggcgca

SEQ ID NO: 4122842 - DNA, 25 bp, Homo sapien
acaggtgcactccacgacacttggt

SEQ ID NO: 4122843 - DNA, 25 bp, Homo sapien
gaaaaacctcttgtagtgcaattgt

SEQ ID NO: 4122844 - DNA, 25 bp, Homo sapien
gcactccacgacacttggtaatttt

SEQ ID NO: 4122845 - DNA, 25 bp, Homo sapien
tatttggttttgaggccagttacca

SEQ ID NO: 4122846 - DNA, 25 bp, Homo sapien
cctcttattagagaatcactcgaga

SEQ ID NO: 4122847 - DNA, 25 bp, Homo sapien
tcagataaataagagcagggtggtg

SEQ ID NO: 4122848 - DNA, 25 bp, Homo sapien
tgagcagagacagtatgggtaagaa

SEQ ID NO: 4122849 - DNA, 25 bp, Homo sapien
ccttgacttgccctagaatgcttac

SEQ ID NO: 4122850 - DNA, 25 bp, Homo sapien
gctggttttctcactatgagaagga

SEQ ID NO: 4122851 - DNA, 25 bp, Homo sapien
aaacatttaagcttatcaacaggat

SEQ ID NO: 4122852 - DNA, 25 bp, Homo sapien
taagcttatcaacaggatcaggtcc

SEQ ID NO: 4122853 - DNA, 25 bp, Homo sapien
tttcccattgcaccagcattggctg

SEQ ID NO: 4122854 - DNA, 25 bp, Homo sapien
acttgtcacccctgccaacgtggtg

SEQ ID NO: 4122855 - DNA, 25 bp, Homo sapien
taatatggtgctatatccaacaggg

SEQ ID NO: 4122856 - DNA, 25 bp, Homo sapien
gggttcccaccacagttgtactcta

SEQ ID NO: 4122857 - DNA, 25 bp, Homo sapien
caacgtggtgctctagccaacatgg

SEQ ID NO: 4122858 - DNA, 25 bp, Homo sapien
gaacttcagaggatggtgtatgcaa

SEQ ID NO: 4122859 - DNA, 25 bp, Homo sapien
ggcagctcgtcctagattccctgga

SEQ ID NO: 4122860 - DNA, 25 bp, Homo sapien
caataaaggtccacagttttggcgg

SEQ ID NO: 4122861 - DNA, 25 bp, Homo sapien
tcagaagtgccagagtgggcagctc

SEQ ID NO: 4122862 - DNA, 25 bp, Homo sapien
caggagctgaacataaaggaggaac

SEQ ID NO: 4122863 - DNA, 25 bp, Homo sapien
gaggtgagctagaaaaccgaatgtc

SEQ ID NO: 4122864 - DNA, 25 bp, Homo sapien
gacgtcagttcatgccatataggaa

SEQ ID NO: 4122865 - DNA, 25 bp, Homo sapien
cagcgtgtgaactggctatgtcttc

SEQ ID NO: 4122866 - DNA, 25 bp, Homo sapien
cccatccagagaggcttaagcatag

SEQ ID NO: 4122867 - DNA, 25 bp, Homo sapien
gtctcttacatggattctgaaggtc

SEQ ID NO: 4122868 - DNA, 25 bp, Homo sapien
catccagagaggcttaagcataggg

SEQ ID NO: 4122869 - DNA, 25 bp, Homo sapien
taagcataggggtctcttacatgga

SEQ ID NO: 4122870 - DNA, 25 bp, Homo sapien
atctggtacaatgagtcctttgtca

SEQ ID NO: 4122871 - DNA, 25 bp, Homo sapien
acaatgagtcctttgtcatccctga

SEQ ID NO: 4122872 - DNA, 25 bp, Homo sapien
atggcactgaagccaggcggcagca

SEQ ID NO: 4122873 - DNA, 25 bp, Homo sapien
caggcggcagcatccggccaggcat

SEQ ID NO: 4122874 - DNA, 25 bp, Homo sapien
tatctcctaggccaggcgaagtggc

SEQ ID NO: 4122875 - DNA, 25 bp, Homo sapien
tacttgaacagatcaagtaaactca

SEQ ID NO: 4122876 - DNA, 25 bp, Homo sapien
aagtaaactcatatctcctaggcca

SEQ ID NO: 4122877 - DNA, 25 bp, Homo sapien
attgaatttacttgaacagatcaag

SEQ ID NO: 4122878 - DNA, 25 bp, Homo sapien
ttccaactctgggacaggtggttca

SEQ ID NO: 4122879 - DNA, 25 bp, Homo sapien
tgggctttccctcgctaaatcacaa

SEQ ID NO: 4122880 - DNA, 25 bp, Homo sapien
caggacctgcattttagtgagtgac

SEQ ID NO: 4122881 - DNA, 25 bp, Homo sapien
accaagcttgcgtgttcagatgact

SEQ ID NO: 4122882 - DNA, 25 bp, Homo sapien
cattatctcagacctaggtgctggg

SEQ ID NO: 4122883 - DNA, 25 bp, Homo sapien
caagcgggagattgatgtgaccaag

SEQ ID NO: 4122884 - DNA, 25 bp, Homo sapien
gatcacttagctctggtcagcccct

SEQ ID NO: 4122885 - DNA, 25 bp, Homo sapien
ccagaagtcactacgggagaagcaa

SEQ ID NO: 4122886 - DNA, 25 bp, Homo sapien
tgtgagacatgagaaccgctctgtg

SEQ ID NO: 4122887 - DNA, 25 bp, Homo sapien
caaagacatgctttcgcgggaccgg

SEQ ID NO: 4122888 - DNA, 25 bp, Homo sapien
tcactgtccatgactgaaccctggg

SEQ ID NO: 4122889 - DNA, 25 bp, Homo sapien
caccgagggctctttgttctgataa

SEQ ID NO: 4122890 - DNA, 25 bp, Homo sapien
cacctagtgggtgagcctgaaggac

SEQ ID NO: 4122891 - DNA, 25 bp, Homo sapien
gagccttgggccatatacatgtggg

SEQ ID NO: 4122892 - DNA, 25 bp, Homo sapien
ctcagctactgggttggcacaatgg

SEQ ID NO: 4122893 - DNA, 25 bp, Homo sapien
gctgccaatactagcaagtctgtgg

SEQ ID NO: 4122894 - DNA, 25 bp, Homo sapien
tgtgattccaagtggcctcttagag

SEQ ID NO: 4122895 - DNA, 25 bp, Homo sapien
cagtgagttcattaattggacagga

SEQ ID NO: 4122896 - DNA, 25 bp, Homo sapien
cagagcagggcattgtgaatattca

SEQ ID NO: 4122897 - DNA, 25 bp, Homo sapien
gcagcttatgctaggtggtgtcact

SEQ ID NO: 4122898 - DNA, 25 bp, Homo sapien
ccgggagcgtcgctgcctggtgaac

SEQ ID NO: 4122899 - DNA, 25 bp, Homo sapien
tttcggttgcggcagtcgcgtcccg

SEQ ID NO: 4122900 - DNA, 25 bp, Homo sapien
gcgactatgtacacagccaggcagc

SEQ ID NO: 4122901 - DNA, 25 bp, Homo sapien
ggaaaagggtgtgcgcccggactgc

SEQ ID NO: 4122902 - DNA, 25 bp, Homo sapien
gacgtaggacctcggacttcatttc

SEQ ID NO: 4122903 - DNA, 25 bp, Homo sapien
cttcatttccgccaccccgacactt

SEQ ID NO: 4122904 - DNA, 25 bp, Homo sapien
atccccggaagcgacccgttgccat

SEQ ID NO: 4122905 - DNA, 25 bp, Homo sapien
ccgtatcctcgacgtaggacctcgg

SEQ ID NO: 4122906 - DNA, 25 bp, Homo sapien
atcaatcggccccatctctcgtctt

SEQ ID NO: 4122907 - DNA, 25 bp, Homo sapien
tctcgtcttcccgattcggccatga

SEQ ID NO: 4122908 - DNA, 25 bp, Homo sapien
tagatcaatcggccccatctctcgt

SEQ ID NO: 4122909 - DNA, 25 bp, Homo sapien
ccatctctcgtcttcccgattcggc

SEQ ID NO: 4122910 - DNA, 25 bp, Homo sapien
ttcatgtgcggccttcgttccctcg

SEQ ID NO: 4122911 - DNA, 25 bp, Homo sapien
tgtgcggccttcgttccctcgctat

SEQ ID NO: 4122912 - DNA, 25 bp, Homo sapien
tcgctatctcgaccttgacttcgca

SEQ ID NO: 4122913 - DNA, 25 bp, Homo sapien
tcgcatgtgcatccgccgaagtctt

SEQ ID NO: 4122914 - DNA, 25 bp, Homo sapien
tccgcggccgccgtagttgaatctc

SEQ ID NO: 4122915 - DNA, 25 bp, Homo sapien
cggagcagcaatcggacgggcctcc

SEQ ID NO: 4122916 - DNA, 25 bp, Homo sapien
ccggctagacactaaccagggcggg

SEQ ID NO: 4122917 - DNA, 25 bp, Homo sapien
cgtagttgaatctcctcggcgccgg

SEQ ID NO: 4122918 - DNA, 25 bp, Homo sapien
cgtagccgcgactaggcaactcaga

SEQ ID NO: 4122919 - DNA, 25 bp, Homo sapien
catgacgccgtagccgcgactaggc

SEQ ID NO: 4122920 - DNA, 25 bp, Homo sapien
cttgagggtcacgtcgcacagcttg

SEQ ID NO: 4122921 - DNA, 25 bp, Homo sapien
gacacggagaagtgcaccagatcct

SEQ ID NO: 4122922 - DNA, 25 bp, Homo sapien
taagcggcgcacctctcaacctttc

SEQ ID NO: 4122923 - DNA, 25 bp, Homo sapien
cactccaagggcctaagcggcgcac

SEQ ID NO: 4122924 - DNA, 25 bp, Homo sapien
ggccccgatccccttttgctcggca

SEQ ID NO: 4122925 - DNA, 25 bp, Homo sapien
caagggctgaaaggttgtcctcttc

SEQ ID NO: 4122926 - DNA, 25 bp, Homo sapien
aaagaaatatctgtagtgacaagag

SEQ ID NO: 4122927 - DNA, 25 bp, Homo sapien
cagccaagttcgacaggcacaaaga

SEQ ID NO: 4122928 - DNA, 25 bp, Homo sapien
acaagagaaggttcttcagtggtgc

SEQ ID NO: 4122929 - DNA, 25 bp, Homo sapien
tcagtggtgcccatcagcatgtgga

SEQ ID NO: 4122930 - DNA, 25 bp, Homo sapien
ctcttcctcatgaaaagacccaggc

SEQ ID NO: 4122931 - DNA, 25 bp, Homo sapien
tcttaatatcagtcagcatccctct

SEQ ID NO: 4122932 - DNA, 25 bp, Homo sapien
ggcagggtggcttcccacctcaaaa

SEQ ID NO: 4122933 - DNA, 25 bp, Homo sapien
tggctctagcgaccagaatgctggt

SEQ ID NO: 4122934 - DNA, 25 bp, Homo sapien
tgagtattgcggatggcaagccact

SEQ ID NO: 4122935 - DNA, 25 bp, Homo sapien
caaaatggaaccactggaggtacca

SEQ ID NO: 4122936 - DNA, 25 bp, Homo sapien
gggccgaaatcaggaagtactggtc

SEQ ID NO: 4122937 - DNA, 25 bp, Homo sapien
tagtaactgacttagaggatactga

SEQ ID NO: 4122938 - DNA, 25 bp, Homo sapien
cagacgagacagagaatcaccagtg

SEQ ID NO: 4122939 - DNA, 25 bp, Homo sapien
agtctgtgtgataccgcctttcgga

SEQ ID NO: 4122940 - DNA, 25 bp, Homo sapien
cagaactcaaacgtaggcagtgtgg

SEQ ID NO: 4122941 - DNA, 25 bp, Homo sapien
tcaacactcaagtaggtggtgatgt

SEQ ID NO: 4122942 - DNA, 25 bp, Homo sapien
catggatacggctctgcttggcaga

SEQ ID NO: 4122943 - DNA, 25 bp, Homo sapien
caaaggaacactagagcaaaggccc

SEQ ID NO: 4122944 - DNA, 25 bp, Homo sapien
gagcagatactccaagccaaaggaa

SEQ ID NO: 4122945 - DNA, 25 bp, Homo sapien
ttagagaagtcaaccagaatggctg

SEQ ID NO: 4122946 - DNA, 25 bp, Homo sapien
ttaaccttaagagagaagacttcaa

SEQ ID NO: 4122947 - DNA, 25 bp, Homo sapien
taaccttaagagagaagacttcaat

SEQ ID NO: 4122948 - DNA, 25 bp, Homo sapien
cattaaccttaagagagaagacttc

SEQ ID NO: 4122949 - DNA, 25 bp, Homo sapien
aaccttaagagagaagacttcaata

SEQ ID NO: 4122950 - DNA, 25 bp, Homo sapien
gaatcggccatttgattgaggaccc

SEQ ID NO: 4122951 - DNA, 25 bp, Homo sapien
tcttgcagggaaatatctgtcggcc

SEQ ID NO: 4122952 - DNA, 25 bp, Homo sapien
cacgatcttccagtctcttgcaggg

SEQ ID NO: 4122953 - DNA, 25 bp, Homo sapien
ttgaggacccctagaagtattcagt

SEQ ID NO: 4122954 - DNA, 25 bp, Homo sapien
gtggattgcttgagggtggatcagg

SEQ ID NO: 4122955 - DNA, 25 bp, Homo sapien
attttgggccggacgcagggtggct

SEQ ID NO: 4122956 - DNA, 25 bp, Homo sapien
gagtgagcttggaagagcatcctcc

SEQ ID NO: 4122957 - DNA, 25 bp, Homo sapien
gtcactaaattttgggccggacgca

SEQ ID NO: 4122958 - DNA, 25 bp, Homo sapien
gcccactgcaaaggcggtgaaggca

SEQ ID NO: 4122959 - DNA, 25 bp, Homo sapien
cactgcaaaggcggtgaaggcatcc

SEQ ID NO: 4122960 - DNA, 25 bp, Homo sapien
tgcaaaggcggtgaaggcatcccag

SEQ ID NO: 4122961 - DNA, 25 bp, Homo sapien
tgcccactgcaaaggcggtgaaggc

SEQ ID NO: 4122962 - DNA, 25 bp, Homo sapien
tgcccctccgcccggctccacagca

SEQ ID NO: 4122963 - DNA, 25 bp, Homo sapien
ccctccgcccggctccacagcatac

SEQ ID NO: 4122964 - DNA, 25 bp, Homo sapien
cctgcccctccgcccggctccacag

SEQ ID NO: 4122965 - DNA, 25 bp, Homo sapien
cccctccgcccggctccacagcata

SEQ ID NO: 4122966 - DNA, 25 bp, Homo sapien
tgctaagacaatccggtgggcactg

SEQ ID NO: 4122967 - DNA, 25 bp, Homo sapien
gatcgaggctgctaagacaatccgg

SEQ ID NO: 4122968 - DNA, 25 bp, Homo sapien
aatacgggatcgaggctgctaagac

SEQ ID NO: 4122969 - DNA, 25 bp, Homo sapien
agcatggaaatacgggatcgaggct

SEQ ID NO: 4122970 - DNA, 25 bp, Homo sapien
tccttgcattacaatctcatcctgc

SEQ ID NO: 4122971 - DNA, 25 bp, Homo sapien
caggcgtctttgatgctctgcagct

SEQ ID NO: 4122972 - DNA, 25 bp, Homo sapien
actggacattttgctggtcaatggc

SEQ ID NO: 4122973 - DNA, 25 bp, Homo sapien
tctcgaaggaatgtgcagcaggcgt

SEQ ID NO: 4122974 - DNA, 25 bp, Homo sapien
gcaaggttgccgttgtaggcaaagt

SEQ ID NO: 4122975 - DNA, 25 bp, Homo sapien
agaagtgggcactgctacaaactga

SEQ ID NO: 4122976 - DNA, 25 bp, Homo sapien
tgtacatgtcaagccaagggaaagg

SEQ ID NO: 4122977 - DNA, 25 bp, Homo sapien
ctatggaacagtagaggagcactgc

SEQ ID NO: 4122978 - DNA, 25 bp, Homo sapien
agggcaggctggactatgtaaatca

SEQ ID NO: 4122979 - DNA, 25 bp, Homo sapien
cacgggcctaattgttcagacaagc

SEQ ID NO: 4122980 - DNA, 25 bp, Homo sapien
tgtgcacattcccacggtagcctgg

SEQ ID NO: 4122981 - DNA, 25 bp, Homo sapien
taacgcactcacagatggaaaacag

SEQ ID NO: 4122982 - DNA, 25 bp, Homo sapien
tggcagacttacactcatcagggct

SEQ ID NO: 4122983 - DNA, 25 bp, Homo sapien
tctcagcaaactggcgcacacccag

SEQ ID NO: 4122984 - DNA, 25 bp, Homo sapien
tgtctcagcaaactggcgcacaccc

SEQ ID NO: 4122985 - DNA, 25 bp, Homo sapien
cgcacacccaggcagttttttgggt

SEQ ID NO: 4122986 - DNA, 25 bp, Homo sapien
cacacccaggcagttttttgggtga

SEQ ID NO: 4122987 - DNA, 25 bp, Homo sapien
tcctcagatttgacattcagctcat

SEQ ID NO: 4122988 - DNA, 25 bp, Homo sapien
gctcaagcacgtcttccaagggcag

SEQ ID NO: 4122989 - DNA, 25 bp, Homo sapien
ggaactcttctgacatggacacctc

SEQ ID NO: 4122990 - DNA, 25 bp, Homo sapien
gatgaagctgttggcagcgtcgtac

SEQ ID NO: 4122991 - DNA, 25 bp, Homo sapien
caggcggatattggacagcagctca

SEQ ID NO: 4122992 - DNA, 25 bp, Homo sapien
tgctcccggtcgtatctgacccagg

SEQ ID NO: 4122993 - DNA, 25 bp, Homo sapien
tcgtatctgacccaggccaatgcag

SEQ ID NO: 4122994 - DNA, 25 bp, Homo sapien
ttgtggcagcaacgcaccaggtcat

SEQ ID NO: 4122995 - DNA, 25 bp, Homo sapien
gacctgggagtttcgacaagcagca

SEQ ID NO: 4122996 - DNA, 25 bp, Homo sapien
gagttctgggaaaatcatacatggc

SEQ ID NO: 4122997 - DNA, 25 bp, Homo sapien
agatgctagaacaggaggtatcccc

SEQ ID NO: 4122998 - DNA, 25 bp, Homo sapien
cacctcagctagtgtagattaggca

SEQ ID NO: 4122999 - DNA, 25 bp, Homo sapien
ccctacagcgtagataagtccagcg

SEQ ID NO: 4123000 - DNA, 25 bp, Homo sapien
tctggcatgaggtggtagtcctttg

SEQ ID NO: 4123001 - DNA, 25 bp, Homo sapien
cgtggccgggttctgaaagctggca

SEQ ID NO: 4123002 - DNA, 25 bp, Homo sapien
tccagcgatggatgtgcagcagcgt

SEQ ID NO: 4123003 - DNA, 25 bp, Homo sapien
gagcacagctattgggcattgatta

SEQ ID NO: 4123004 - DNA, 25 bp, Homo sapien
cagaattactcaaggcacaagggcc

SEQ ID NO: 4123005 - DNA, 25 bp, Homo sapien
tgagaccacttgtttagagcacagc

SEQ ID NO: 4123006 - DNA, 25 bp, Homo sapien
caagggcccactaagaaatttcagc

SEQ ID NO: 4123007 - DNA, 25 bp, Homo sapien
tgctcagccgtagctggccgtcata

SEQ ID NO: 4123008 - DNA, 25 bp, Homo sapien
tggcatagagaagcccgttcaccac

SEQ ID NO: 4123009 - DNA, 25 bp, Homo sapien
catctctcccagcaattggcaatgg

SEQ ID NO: 4123010 - DNA, 25 bp, Homo sapien
ggccgtcatatcctccgatggcata

SEQ ID NO: 4123011 - DNA, 25 bp, Homo sapien
ttctcttgctattcatgctccccac

SEQ ID NO: 4123012 - DNA, 25 bp, Homo sapien
cttctcttgctattcatgctcccca

SEQ ID NO: 4123013 - DNA, 25 bp, Homo sapien
tgtgtatgttcgggctgcacgtggc

SEQ ID NO: 4123014 - DNA, 25 bp, Homo sapien
gtgtatgttcgggctgcacgtggct

SEQ ID NO: 4123015 - DNA, 25 bp, Homo sapien
gtatgttcgggctgcacgtggcttc

SEQ ID NO: 4123016 - DNA, 25 bp, Homo sapien
tgtatgttcgggctgcacgtggctt

SEQ ID NO: 4123017 - DNA, 25 bp, Homo sapien
gggatgtaatggaaccgggcccaca

SEQ ID NO: 4123018 - DNA, 25 bp, Homo sapien
tactgagtgacatatcaacttggcc

SEQ ID NO: 4123019 - DNA, 25 bp, Homo sapien
taagaggtgccccaaaactgcatga

SEQ ID NO: 4123020 - DNA, 25 bp, Homo sapien
taagaagggctaaacaaaggcactg

SEQ ID NO: 4123021 - DNA, 25 bp, Homo sapien
taaggaattcagcacaaatgccaag

SEQ ID NO: 4123022 - DNA, 25 bp, Homo sapien
cagatttaaatgagacaagcccaac

SEQ ID NO: 4123023 - DNA, 25 bp, Homo sapien
tcctggaagacaggaaagggccttc

SEQ ID NO: 4123024 - DNA, 25 bp, Homo sapien
gtagcacaatgatggttcacagcag

SEQ ID NO: 4123025 - DNA, 25 bp, Homo sapien
cccacagacgtagatctgcccatcc

SEQ ID NO: 4123026 - DNA, 25 bp, Homo sapien
tgagggaagagttgccatcgtagcc

SEQ ID NO: 4123027 - DNA, 25 bp, Homo sapien
cagacgtagatctgcccatccagca

SEQ ID NO: 4123028 - DNA, 25 bp, Homo sapien
agatctgcccatccagcacgactgt

SEQ ID NO: 4123029 - DNA, 25 bp, Homo sapien
tgtccgtctcaggtgagtaggtctc

SEQ ID NO: 4123030 - DNA, 25 bp, Homo sapien
ttgtccgtctcaggtgagtaggtct

SEQ ID NO: 4123031 - DNA, 25 bp, Homo sapien
ccgtctcaggtgagtaggtctccac

SEQ ID NO: 4123032 - DNA, 25 bp, Homo sapien
tccgtctcaggtgagtaggtctcca

SEQ ID NO: 4123033 - DNA, 25 bp, Homo sapien
aaataagtatttccaagcaactatg

SEQ ID NO: 4123034 - DNA, 25 bp, Homo sapien
cattaaaatgggctgatttagctaa

SEQ ID NO: 4123035 - DNA, 25 bp, Homo sapien
gatttagctaagaggtacagaccat

SEQ ID NO: 4123036 - DNA, 25 bp, Homo sapien
tggaacatgctgttcatctacttct

SEQ ID NO: 4123037 - DNA, 25 bp, Homo sapien
cgattcgagctcatcgaggtcacca

SEQ ID NO: 4123038 - DNA, 25 bp, Homo sapien
actgctgaagatctgcaaaccatca

SEQ ID NO: 4123039 - DNA, 25 bp, Homo sapien
catcatggccgcctgacacatatat

SEQ ID NO: 4123040 - DNA, 25 bp, Homo sapien
tgacacatatatcctgccctcaaag

SEQ ID NO: 4123041 - DNA, 25 bp, Homo sapien
taggtttgactgtccgtcgtagccc

SEQ ID NO: 4123042 - DNA, 25 bp, Homo sapien
tgccggcagcgcttgttgagcatgc

SEQ ID NO: 4123043 - DNA, 25 bp, Homo sapien
gggccatgaatgtccagcagtctgt

SEQ ID NO: 4123044 - DNA, 25 bp, Homo sapien
catctcggcaatgctgaggaagcca

SEQ ID NO: 4123045 - DNA, 25 bp, Homo sapien
gtgaggagagggatgcagcccacac

SEQ ID NO: 4123046 - DNA, 25 bp, Homo sapien
ggagagggatgcagcccacaccgac

SEQ ID NO: 4123047 - DNA, 25 bp, Homo sapien
agatggtgaggagagggatgcagcc

SEQ ID NO: 4123048 - DNA, 25 bp, Homo sapien
ttagatggtgaggagagggatgcag

SEQ ID NO: 4123049 - DNA, 25 bp, Homo sapien
gagctcacgtttcgccatctcttct

SEQ ID NO: 4123050 - DNA, 25 bp, Homo sapien
aaggaagcgcctatgtctgtaccag

SEQ ID NO: 4123051 - DNA, 25 bp, Homo sapien
tggaaaaactgtacctccggcgagc

SEQ ID NO: 4123052 - DNA, 25 bp, Homo sapien
tgcctctcctgagggactgttcctg

SEQ ID NO: 4123053 - DNA, 25 bp, Homo sapien
ttgtgttccatgctgtgcatcttga

SEQ ID NO: 4123054 - DNA, 25 bp, Homo sapien
tccagaggagcttgtgttccatgct

SEQ ID NO: 4123055 - DNA, 25 bp, Homo sapien
aggatccagaggagcttgtgttcca

SEQ ID NO: 4123056 - DNA, 25 bp, Homo sapien
gatggagcctgtgttcatgtggacc

SEQ ID NO: 4123057 - DNA, 25 bp, Homo sapien
cagggagaacgcttgggtctgtcct

SEQ ID NO: 4123058 - DNA, 25 bp, Homo sapien
gggtctgtcctttcgtccccagcta

SEQ ID NO: 4123059 - DNA, 25 bp, Homo sapien
ccagctacatcccagtttccagcag

SEQ ID NO: 4123060 - DNA, 25 bp, Homo sapien
aattggccagactcggctggagagc

SEQ ID NO: 4123061 - DNA, 25 bp, Homo sapien
tatggtcaacgtgccccagaagcat

SEQ ID NO: 4123062 - DNA, 25 bp, Homo sapien
aatctgggccagtatcctaaggacc

SEQ ID NO: 4123063 - DNA, 25 bp, Homo sapien
tcaggaagtccactacaagagcagc

SEQ ID NO: 4123064 - DNA, 25 bp, Homo sapien
gaaggcccgtgtgttatccaagaag

SEQ ID NO: 4123065 - DNA, 25 bp, Homo sapien
aaaaaattaagttgccatccaggag

SEQ ID NO: 4123066 - DNA, 25 bp, Homo sapien
caaagttaaagcacctctcgcctag

SEQ ID NO: 4123067 - DNA, 25 bp, Homo sapien
gaaacttgctcacgccagaatgctg

SEQ ID NO: 4123068 - DNA, 25 bp, Homo sapien
gacaggcaccaatatgcagtcccaa

SEQ ID NO: 4123069 - DNA, 25 bp, Homo sapien
tagcagtccactcttcacctatggg

SEQ ID NO: 4123070 - DNA, 25 bp, Homo sapien
gagtgccacgctgaccagagatgtt

SEQ ID NO: 4123071 - DNA, 25 bp, Homo sapien
tgaactgcagaactaagctgggcgt

SEQ ID NO: 4123072 - DNA, 25 bp, Homo sapien
gaatccagtttgacttagcagtcca

SEQ ID NO: 4123073 - DNA, 25 bp, Homo sapien
caccacgtagcaggtaaaacaggta

SEQ ID NO: 4123074 - DNA, 25 bp, Homo sapien
acagagctcaccacgtagcaggtaa

SEQ ID NO: 4123075 - DNA, 25 bp, Homo sapien
gctcaccacgtagcaggtaaaacag

SEQ ID NO: 4123076 - DNA, 25 bp, Homo sapien
tgttgtgtctacagtaatggagagt

SEQ ID NO: 4123077 - DNA, 25 bp, Homo sapien
tcttcaagaagctattgttcagcct

SEQ ID NO: 4123078 - DNA, 25 bp, Homo sapien
cttcaagaagctattgttcagcctc

SEQ ID NO: 4123079 - DNA, 25 bp, Homo sapien
ttcaagaagctattgttcagcctct

SEQ ID NO: 4123080 - DNA, 25 bp, Homo sapien
tcaagaagctattgttcagcctctt

SEQ ID NO: 4123081 - DNA, 25 bp, Homo sapien
gacatgggaatgcaaagtatctaga

SEQ ID NO: 4123082 - DNA, 25 bp, Homo sapien
cttaagatacgacaccaaaggcatg

SEQ ID NO: 4123083 - DNA, 25 bp, Homo sapien
tcaataacacacaatcatggacagg

SEQ ID NO: 4123084 - DNA, 25 bp, Homo sapien
tgcttggacaaatggaaatcggtcc

SEQ ID NO: 4123085 - DNA, 25 bp, Homo sapien
tctatatactagcaccaaaaagtct

SEQ ID NO: 4123086 - DNA, 25 bp, Homo sapien
aaatattgctaagagaaatcaagga

SEQ ID NO: 4123087 - DNA, 25 bp, Homo sapien
cagattgaatttagacaggtcacag

SEQ ID NO: 4123088 - DNA, 25 bp, Homo sapien
caaaaggagtgtaagatgtatatac

SEQ ID NO: 4123089 - DNA, 25 bp, Homo sapien
gctgtaggtggctgtggaacaaggt

SEQ ID NO: 4123090 - DNA, 25 bp, Homo sapien
caaggttctctataaggtgctcctg

SEQ ID NO: 4123091 - DNA, 25 bp, Homo sapien
tggctgtggaacaaggttctctata

SEQ ID NO: 4123092 - DNA, 25 bp, Homo sapien
ggttctctataaggtgctcctggca

SEQ ID NO: 4123093 - DNA, 25 bp, Homo sapien
ccgcaaatggcccagcgtgaagcat

SEQ ID NO: 4123094 - DNA, 25 bp, Homo sapien
cgcgccggggtctttgttgcaaccg

SEQ ID NO: 4123095 - DNA, 25 bp, Homo sapien
ccgagggtcaggaaccgcaaatggc

SEQ ID NO: 4123096 - DNA, 25 bp, Homo sapien
tgttgcaaccgagggtcaggaaccg

SEQ ID NO: 4123097 - DNA, 25 bp, Homo sapien
agcagccaaaccaacatcagactgc

SEQ ID NO: 4123098 - DNA, 25 bp, Homo sapien
aaaccaacatcagactgccgctcct

SEQ ID NO: 4123099 - DNA, 25 bp, Homo sapien
ggccccagcagccaaaccaacatca

SEQ ID NO: 4123100 - DNA, 25 bp, Homo sapien
gccaaaccaacatcagactgccgct

SEQ ID NO: 4123101 - DNA, 25 bp, Homo sapien
ctttctgatggtgaggcagtggtca

SEQ ID NO: 4123102 - DNA, 25 bp, Homo sapien
ttggggctttctgatggtgaggcag

SEQ ID NO: 4123103 - DNA, 25 bp, Homo sapien
gggctttctgatggtgaggcagtgg

SEQ ID NO: 4123104 - DNA, 25 bp, Homo sapien
cttggggctttctgatggtgaggca

SEQ ID NO: 4123105 - DNA, 25 bp, Homo sapien
cgcaggcgctgtccctgttgcgcat

SEQ ID NO: 4123106 - DNA, 25 bp, Homo sapien
gcgtagtcttttgcgcaggcgctgt

SEQ ID NO: 4123107 - DNA, 25 bp, Homo sapien
gctcgcgtagtcttttgcgcaggcg

SEQ ID NO: 4123108 - DNA, 25 bp, Homo sapien
agccacccgctcgcgtagtcttttg

SEQ ID NO: 4123109 - DNA, 25 bp, Homo sapien
tcacgggagggaatgaaaaatgcca

SEQ ID NO: 4123110 - DNA, 25 bp, Homo sapien
cgggagggaatgaaaaatgccagcg

SEQ ID NO: 4123111 - DNA, 25 bp, Homo sapien
ggagggaatgaaaaatgccagcggc

SEQ ID NO: 4123112 - DNA, 25 bp, Homo sapien
ctggtcacgggagggaatgaaaaat

SEQ ID NO: 4123113 - DNA, 25 bp, Homo sapien
ccggccactcccgtagctgctgcag

SEQ ID NO: 4123114 - DNA, 25 bp, Homo sapien
ggcggctggcacccgccggccaccc

SEQ ID NO: 4123115 - DNA, 25 bp, Homo sapien
ggctggcacccgccggccacccggc

SEQ ID NO: 4123116 - DNA, 25 bp, Homo sapien
ccacccggccactcccgtagctgct

SEQ ID NO: 4123117 - DNA, 25 bp, Homo sapien
aagtgaaagtcaccggcctccttca

SEQ ID NO: 4123118 - DNA, 25 bp, Homo sapien
ggctggaagtgaaagtcaccggcct

SEQ ID NO: 4123119 - DNA, 25 bp, Homo sapien
tggaagtgaaagtcaccggcctcct

SEQ ID NO: 4123120 - DNA, 25 bp, Homo sapien
ttcttcacagctggctggaagtgaa

SEQ ID NO: 4123121 - DNA, 25 bp, Homo sapien
cagtgggaacagcggatgactcggg

SEQ ID NO: 4123122 - DNA, 25 bp, Homo sapien
tgactcggggcagaagtcgggaacc

SEQ ID NO: 4123123 - DNA, 25 bp, Homo sapien
agcacggggctatcggggaggagaa

SEQ ID NO: 4123124 - DNA, 25 bp, Homo sapien
aagatgcaggtgctagcacggggct

SEQ ID NO: 4123125 - DNA, 25 bp, Homo sapien
gagtctaaccctggttcttctgttg

SEQ ID NO: 4123126 - DNA, 25 bp, Homo sapien
ctctgagtctaaccctggttcttct

SEQ ID NO: 4123127 - DNA, 25 bp, Homo sapien
ctgagtctaaccctggttcttctgt

SEQ ID NO: 4123128 - DNA, 25 bp, Homo sapien
aagtccctgtgtccataagctcttt

SEQ ID NO: 4123129 - DNA, 25 bp, Homo sapien
ttctgggttctctccataattcttc

SEQ ID NO: 4123130 - DNA, 25 bp, Homo sapien
tcttcagttcttcattgtaggcttc

SEQ ID NO: 4123131 - DNA, 25 bp, Homo sapien
ctgggttctctccataattcttcag

SEQ ID NO: 4123132 - DNA, 25 bp, Homo sapien
ctgtctgagcaactccagcttcttc

SEQ ID NO: 4123133 - DNA, 25 bp, Homo sapien
ttgcggaggacactacagccctcaa

SEQ ID NO: 4123134 - DNA, 25 bp, Homo sapien
aaagtctcgtgggacacggacagca

SEQ ID NO: 4123135 - DNA, 25 bp, Homo sapien
caggtaatgaagctggccgaggtac

SEQ ID NO: 4123136 - DNA, 25 bp, Homo sapien
gccgaggtacttgcggaggacacta

SEQ ID NO: 4123137 - DNA, 25 bp, Homo sapien
gcctgctcgtacttgatgtcctcat

SEQ ID NO: 4123138 - DNA, 25 bp, Homo sapien
tacaggcctgctcgtacttgatgtc

SEQ ID NO: 4123139 - DNA, 25 bp, Homo sapien
caaggttgtagagaatacaggcctg

SEQ ID NO: 4123140 - DNA, 25 bp, Homo sapien
tgtagagaatacaggcctgctcgta

SEQ ID NO: 4123141 - DNA, 25 bp, Homo sapien
ggcccccagcatggagtgcagcgct

SEQ ID NO: 4123142 - DNA, 25 bp, Homo sapien
acccgcttgtccatggcccccagca

SEQ ID NO: 4123143 - DNA, 25 bp, Homo sapien
ctcctcagacacccgcttgtccatg

SEQ ID NO: 4123144 - DNA, 25 bp, Homo sapien
tcagacacccgcttgtccatggccc

SEQ ID NO: 4123145 - DNA, 25 bp, Homo sapien
aaatgggtacaggagaccttcatgc

SEQ ID NO: 4123146 - DNA, 25 bp, Homo sapien
gaaatgggtacaggagaccttcatg

SEQ ID NO: 4123147 - DNA, 25 bp, Homo sapien
aatgggtacaggagaccttcatgcc

SEQ ID NO: 4123148 - DNA, 25 bp, Homo sapien
ggaaatgggtacaggagaccttcat

SEQ ID NO: 4123149 - DNA, 25 bp, Homo sapien
ttgagcgtaaggatctggcggctca

SEQ ID NO: 4123150 - DNA, 25 bp, Homo sapien
tgctcccgtaggtaggcgaaggcgc

SEQ ID NO: 4123151 - DNA, 25 bp, Homo sapien
taggcttgagggaagtgctcccgta

SEQ ID NO: 4123152 - DNA, 25 bp, Homo sapien
tcatgtcgacgctgtaggcttgagg

SEQ ID NO: 4123153 - DNA, 25 bp, Homo sapien
caacatcgacttctccaggaggcac

SEQ ID NO: 4123154 - DNA, 25 bp, Homo sapien
tcttcctgttgtccaacatcgactt

SEQ ID NO: 4123155 - DNA, 25 bp, Homo sapien
tccaggaggcactcctgagcctggc

SEQ ID NO: 4123156 - DNA, 25 bp, Homo sapien
ctgtgcactgatgcgggccaccaga

SEQ ID NO: 4123157 - DNA, 25 bp, Homo sapien
gcatgcctccttgtagtaatctacc

SEQ ID NO: 4123158 - DNA, 25 bp, Homo sapien
caaggcccggcatgcctccttgtag

SEQ ID NO: 4123159 - DNA, 25 bp, Homo sapien
tgagccacggctgcgaagtagtaga

SEQ ID NO: 4123160 - DNA, 25 bp, Homo sapien
atctgcacaagtttcttccagtcct

SEQ ID NO: 4123161 - DNA, 25 bp, Homo sapien
gctccccgaacttctgctgctcctc

SEQ ID NO: 4123162 - DNA, 25 bp, Homo sapien
cttctgctgctcctcggcctgcttt

SEQ ID NO: 4123163 - DNA, 25 bp, Homo sapien
ccgctccccgaacttctgctgctcc

SEQ ID NO: 4123164 - DNA, 25 bp, Homo sapien
gctgctcctcggcctgctttcccat

SEQ ID NO: 4123165 - DNA, 25 bp, Homo sapien
ctgccattggtccccagtcccctcc

SEQ ID NO: 4123166 - DNA, 25 bp, Homo sapien
tgccattggtccccagtcccctcct

SEQ ID NO: 4123167 - DNA, 25 bp, Homo sapien
acttgatggcttcattgagcttgtc

SEQ ID NO: 4123168 - DNA, 25 bp, Homo sapien
ccagggcgctctggaagtatgcaac

SEQ ID NO: 4123169 - DNA, 25 bp, Homo sapien
gtccagggcgctctggaagtatgca

SEQ ID NO: 4123170 - DNA, 25 bp, Homo sapien
tgatggcttcattgagcttgtccag

SEQ ID NO: 4123171 - DNA, 25 bp, Homo sapien
catccatagtgaagcgaagcgcgtc

SEQ ID NO: 4123172 - DNA, 25 bp, Homo sapien
tagtgaagcgaagcgcgtcttgcac

SEQ ID NO: 4123173 - DNA, 25 bp, Homo sapien
ccccaatgacatccatagtgaagcg

SEQ ID NO: 4123174 - DNA, 25 bp, Homo sapien
agcgaagcgcgtcttgcacagtgtc

SEQ ID NO: 4123175 - DNA, 25 bp, Homo sapien
gctgaagagtgtccaatgctgggac

SEQ ID NO: 4123176 - DNA, 25 bp, Homo sapien
taaatgaagtcgttgtccttcttgg

SEQ ID NO: 4123177 - DNA, 25 bp, Homo sapien
gtgtccaatgctgggacagcctcat

SEQ ID NO: 4123178 - DNA, 25 bp, Homo sapien
tgggacagcctcatggtaaatgaag

SEQ ID NO: 4123179 - DNA, 25 bp, Homo sapien
tgtacagtgacgaggcctcgtgggc

SEQ ID NO: 4123180 - DNA, 25 bp, Homo sapien
gcaaagatgtcagggcctgtaacag

SEQ ID NO: 4123181 - DNA, 25 bp, Homo sapien
tgggtaccagtttggcaaagatgtc

SEQ ID NO: 4123182 - DNA, 25 bp, Homo sapien
ccagtttggcaaagatgtcagggcc

SEQ ID NO: 4123183 - DNA, 25 bp, Homo sapien
ttggccatcatctcccggagcagct

SEQ ID NO: 4123184 - DNA, 25 bp, Homo sapien
aggacctcattcttgtcctcaatct

SEQ ID NO: 4123185 - DNA, 25 bp, Homo sapien
atctcccggagcagcttggccttct

SEQ ID NO: 4123186 - DNA, 25 bp, Homo sapien
tccaggacctcattcttgtcctcaa

SEQ ID NO: 4123187 - DNA, 25 bp, Homo sapien
ggcaagcctcaccactcaatctgag

SEQ ID NO: 4123188 - DNA, 25 bp, Homo sapien
tgaccatgtcaaaggagccgctagg

SEQ ID NO: 4123189 - DNA, 25 bp, Homo sapien
tctggcctggtctcacagaacatgc

SEQ ID NO: 4123190 - DNA, 25 bp, Homo sapien
agcaaattgtgacctcggaccccta

SEQ ID NO: 4123191 - DNA, 25 bp, Homo sapien
ttcctgacagtgtcgggccggacgc

SEQ ID NO: 4123192 - DNA, 25 bp, Homo sapien
ggcatcaaggttgtccaccgtctcg

SEQ ID NO: 4123193 - DNA, 25 bp, Homo sapien
ccgtctcgggatccaactgcattga

SEQ ID NO: 4123194 - DNA, 25 bp, Homo sapien
tgcatggactgtacaaggttcctga

SEQ ID NO: 4123195 - DNA, 25 bp, Homo sapien
cgcaggttgccgacgtgcaggttca

SEQ ID NO: 4123196 - DNA, 25 bp, Homo sapien
atgtacttggcccattctcgcctca

SEQ ID NO: 4123197 - DNA, 25 bp, Homo sapien
ggtgaaggaggccttctcatggact

SEQ ID NO: 4123198 - DNA, 25 bp, Homo sapien
tggcacggtgcagctcactgttggt

SEQ ID NO: 4123199 - DNA, 25 bp, Homo sapien
gccggtgtgggcagggcagcccgga

SEQ ID NO: 4123200 - DNA, 25 bp, Homo sapien
ctggggagagggccggtgtgggcag

SEQ ID NO: 4123201 - DNA, 25 bp, Homo sapien
ggagagggccggtgtgggcagggca

SEQ ID NO: 4123202 - DNA, 25 bp, Homo sapien
ccggtgtgggcagggcagcccggac

SEQ ID NO: 4123203 - DNA, 25 bp, Homo sapien
ttaggttttgcagcacggccttgtc

SEQ ID NO: 4123204 - DNA, 25 bp, Homo sapien
agggacacgcgctggtcccgcatct

SEQ ID NO: 4123205 - DNA, 25 bp, Homo sapien
ttctggataagctcacgcagctgct

SEQ ID NO: 4123206 - DNA, 25 bp, Homo sapien
tcatctctgagtggtctgtggtgac

SEQ ID NO: 4123207 - DNA, 25 bp, Homo sapien
actcagggcctcgactcctaagggt

SEQ ID NO: 4123208 - DNA, 25 bp, Homo sapien
acactcagggcctcgactcctaagg

SEQ ID NO: 4123209 - DNA, 25 bp, Homo sapien
cagggcctcgactcctaagggtggg

SEQ ID NO: 4123210 - DNA, 25 bp, Homo sapien
tcagggcctcgactcctaagggtgg

SEQ ID NO: 4123211 - DNA, 25 bp, Homo sapien
ctggtcatactttttcagctgctcc

SEQ ID NO: 4123212 - DNA, 25 bp, Homo sapien
tttggtccaagtcgctgagtacccg

SEQ ID NO: 4123213 - DNA, 25 bp, Homo sapien
gcgtactgcacgttggcctctgtca

SEQ ID NO: 4123214 - DNA, 25 bp, Homo sapien
caggtacaccttcagctggtcatac

SEQ ID NO: 4123215 - DNA, 25 bp, Homo sapien
ctccaggtgaaccatggggctgggc

SEQ ID NO: 4123216 - DNA, 25 bp, Homo sapien
ggctccgggaaagagcagaggactg

SEQ ID NO: 4123217 - DNA, 25 bp, Homo sapien
gccagctccaggtgaaccatggggc

SEQ ID NO: 4123218 - DNA, 25 bp, Homo sapien
agaagggccagctccaggtgaacca

SEQ ID NO: 4123219 - DNA, 25 bp, Homo sapien
tgcgtgcgctccagcagagcagcca

SEQ ID NO: 4123220 - DNA, 25 bp, Homo sapien
agatctgcgtagaagtccctgccct

SEQ ID NO: 4123221 - DNA, 25 bp, Homo sapien
ggcttcatacgaggccaccagggtc

SEQ ID NO: 4123222 - DNA, 25 bp, Homo sapien
tcaggtcctcataggcttcatacga

SEQ ID NO: 4123223 - DNA, 25 bp, Homo sapien
tggacccgagccgcaccacagcccc

SEQ ID NO: 4123224 - DNA, 25 bp, Homo sapien
ggacccgagccgcaccacagcccca

SEQ ID NO: 4123225 - DNA, 25 bp, Homo sapien
gcaggcccaggtgctacgggcattg

SEQ ID NO: 4123226 - DNA, 25 bp, Homo sapien
ggcccagctccggtgtgtaggcagg

SEQ ID NO: 4123227 - DNA, 25 bp, Homo sapien
gagcggggtggcacttcccaggaag

SEQ ID NO: 4123228 - DNA, 25 bp, Homo sapien
ccctgggctgtatcagctgggtggg

SEQ ID NO: 4123229 - DNA, 25 bp, Homo sapien
gccaactcggggcctgagaattgag

SEQ ID NO: 4123230 - DNA, 25 bp, Homo sapien
tggccgaaccgccatggccaactcg

SEQ ID NO: 4123231 - DNA, 25 bp, Homo sapien
gagacctgcaactggtggggccggc

SEQ ID NO: 4123232 - DNA, 25 bp, Homo sapien
cctacccccacatagggactgctca

SEQ ID NO: 4123233 - DNA, 25 bp, Homo sapien
ggatgggcgcctggatgctatctac

SEQ ID NO: 4123234 - DNA, 25 bp, Homo sapien
gggatgggcgcctggatgctatcta

SEQ ID NO: 4123235 - DNA, 25 bp, Homo sapien
tggggtttggccgtggggctgtgtg

SEQ ID NO: 4123236 - DNA, 25 bp, Homo sapien
cagggtaggtgtaaggcgtgggcag

SEQ ID NO: 4123237 - DNA, 25 bp, Homo sapien
cgggatgggttgcttagcccctgca

SEQ ID NO: 4123238 - DNA, 25 bp, Homo sapien
gggctgaggcccaaacgcttgtgaa

SEQ ID NO: 4123239 - DNA, 25 bp, Homo sapien
aatccttggggctggaaaacctgcg

SEQ ID NO: 4123240 - DNA, 25 bp, Homo sapien
ggctggcagagggtcttgagcggga

SEQ ID NO: 4123241 - DNA, 25 bp, Homo sapien
tggcagagggtcttgagcgggacct

SEQ ID NO: 4123242 - DNA, 25 bp, Homo sapien
tgggctggcagagggtcttgagcgg

SEQ ID NO: 4123243 - DNA, 25 bp, Homo sapien
gcagagggtcttgagcgggacctgg

SEQ ID NO: 4123244 - DNA, 25 bp, Homo sapien
gcccagggctggggaaaggcagagc

SEQ ID NO: 4123245 - DNA, 25 bp, Homo sapien
cccagggctggggaaaggcagagcc

SEQ ID NO: 4123246 - DNA, 25 bp, Homo sapien
gggcccagggctggggaaaggcaga

SEQ ID NO: 4123247 - DNA, 25 bp, Homo sapien
ccagggctggggaaaggcagagccc

SEQ ID NO: 4123248 - DNA, 25 bp, Homo sapien
tggtagaaggggcaggaccatatgc

SEQ ID NO: 4123249 - DNA, 25 bp, Homo sapien
gtagaaggggcaggaccatatgcca

SEQ ID NO: 4123250 - DNA, 25 bp, Homo sapien
agaaggggcaggaccatatgccagt

SEQ ID NO: 4123251 - DNA, 25 bp, Homo sapien
gcaggaccatatgccagtgggggat

SEQ ID NO: 4123252 - DNA, 25 bp, Homo sapien
cagcagacgagggccctcgaatggt

SEQ ID NO: 4123253 - DNA, 25 bp, Homo sapien
gcagacgagggccctcgaatggtaa

SEQ ID NO: 4123254 - DNA, 25 bp, Homo sapien
agacgagggccctcgaatggtaaga

SEQ ID NO: 4123255 - DNA, 25 bp, Homo sapien
ccagcagacgagggccctcgaatgg

SEQ ID NO: 4123256 - DNA, 25 bp, Homo sapien
agtgccgccatgctggctctccggg

SEQ ID NO: 4123257 - DNA, 25 bp, Homo sapien
caggagactgagtgccgccatgctg

SEQ ID NO: 4123258 - DNA, 25 bp, Homo sapien
ccccaggagactgagtgccgccatg

SEQ ID NO: 4123259 - DNA, 25 bp, Homo sapien
actgagtgccgccatgctggctctc

SEQ ID NO: 4123260 - DNA, 25 bp, Homo sapien
gttcttcagtgagtagcagcgggca

SEQ ID NO: 4123261 - DNA, 25 bp, Homo sapien
accacacggttactgtcatagggca

SEQ ID NO: 4123262 - DNA, 25 bp, Homo sapien
gatggaacggcctcgggcatcatgt

SEQ ID NO: 4123263 - DNA, 25 bp, Homo sapien
tagggcatgacatcctggtgccggt

SEQ ID NO: 4123264 - DNA, 25 bp, Homo sapien
agtgcaggtgcacaagagagcgctt

SEQ ID NO: 4123265 - DNA, 25 bp, Homo sapien
tgaggctctggtctcggaactgcag

SEQ ID NO: 4123266 - DNA, 25 bp, Homo sapien
gtgctgcggacgctgctcaatgcca

SEQ ID NO: 4123267 - DNA, 25 bp, Homo sapien
ctcagcacgcgctccacatgggttt

SEQ ID NO: 4123268 - DNA, 25 bp, Homo sapien
agcaccaaggactggacagcactta

SEQ ID NO: 4123269 - DNA, 25 bp, Homo sapien
caccaaggactggacagcacttaga

SEQ ID NO: 4123270 - DNA, 25 bp, Homo sapien
ccaaggactggacagcacttagacc

SEQ ID NO: 4123271 - DNA, 25 bp, Homo sapien
aaggactggacagcacttagacccc

SEQ ID NO: 4123272 - DNA, 25 bp, Homo sapien
caggtaatgtgcgtgcacctcctgg

SEQ ID NO: 4123273 - DNA, 25 bp, Homo sapien
gatgcaggtaatgtgcgtgcacctc

SEQ ID NO: 4123274 - DNA, 25 bp, Homo sapien
atgatgggcgtgtgcagcggccgct

SEQ ID NO: 4123275 - DNA, 25 bp, Homo sapien
tgggcgtgtgcagcggccgctgatg

SEQ ID NO: 4123276 - DNA, 25 bp, Homo sapien
cagctgcatagagcagtgcaaaggc

SEQ ID NO: 4123277 - DNA, 25 bp, Homo sapien
gctttctctgctgccgcatgcgccg

SEQ ID NO: 4123278 - DNA, 25 bp, Homo sapien
aaaggctcccgtgcggcccacacca

SEQ ID NO: 4123279 - DNA, 25 bp, Homo sapien
tcagggattccgttcccagcctcca

SEQ ID NO: 4123280 - DNA, 25 bp, Homo sapien
ctggctgatgcttgcactggccaag

SEQ ID NO: 4123281 - DNA, 25 bp, Homo sapien
tggaggaggcacaccatggcgctgc

SEQ ID NO: 4123282 - DNA, 25 bp, Homo sapien
tgcactggccaagggtttgcatgga

SEQ ID NO: 4123283 - DNA, 25 bp, Homo sapien
tgcctcatagcagaacctgaggtgc

SEQ ID NO: 4123284 - DNA, 25 bp, Homo sapien
aggagagggagtcccaaggctgtgg

SEQ ID NO: 4123285 - DNA, 25 bp, Homo sapien
ggagtcccaaggctgtggctctccc

SEQ ID NO: 4123286 - DNA, 25 bp, Homo sapien
agggagtcccaaggctgtggctctc

SEQ ID NO: 4123287 - DNA, 25 bp, Homo sapien
gagagggagtcccaaggctgtggct

SEQ ID NO: 4123288 - DNA, 25 bp, Homo sapien
atgggcacatccccaccgaggacca

SEQ ID NO: 4123289 - DNA, 25 bp, Homo sapien
cccaccgaggaccaggtcctgggag

SEQ ID NO: 4123290 - DNA, 25 bp, Homo sapien
tgatgggcacatccccaccgaggac

SEQ ID NO: 4123291 - DNA, 25 bp, Homo sapien
cagggcctggcaagctggcaaccgg

SEQ ID NO: 4123292 - DNA, 25 bp, Homo sapien
agggcctggcaagctggcaaccggg

SEQ ID NO: 4123293 - DNA, 25 bp, Homo sapien
gcaagctggcaaccggggactccaa

SEQ ID NO: 4123294 - DNA, 25 bp, Homo sapien
ctggcaagctggcaaccggggactc

SEQ ID NO: 4123295 - DNA, 25 bp, Homo sapien
ggtcaaggaggccagcaattccagg

SEQ ID NO: 4123296 - DNA, 25 bp, Homo sapien
actggcggctcctccttaggctggg

SEQ ID NO: 4123297 - DNA, 25 bp, Homo sapien
ctggggagcctcaggtagtggggag

SEQ ID NO: 4123298 - DNA, 25 bp, Homo sapien
ctgggggcttcaggcactggcggct

SEQ ID NO: 4123299 - DNA, 25 bp, Homo sapien
ttatgggcctgcagaaagttatgct

SEQ ID NO: 4123300 - DNA, 25 bp, Homo sapien
agcccttgcccgttatgggcctgca

SEQ ID NO: 4123301 - DNA, 25 bp, Homo sapien
tgagtgtccagagtggatccagaag

SEQ ID NO: 4123302 - DNA, 25 bp, Homo sapien
tatgcttgctcatccgctgtttgcc

SEQ ID NO: 4123303 - DNA, 25 bp, Homo sapien
tagtgtaaggaccaggtaggcaaaa

SEQ ID NO: 4123304 - DNA, 25 bp, Homo sapien
atgtagtgtaaggaccaggtaggca

SEQ ID NO: 4123305 - DNA, 25 bp, Homo sapien
gtagtgtaaggaccaggtaggcaaa

SEQ ID NO: 4123306 - DNA, 25 bp, Homo sapien
tgtagtgtaaggaccaggtaggcaa

SEQ ID NO: 4123307 - DNA, 25 bp, Homo sapien
ctgcagtacatttccaccccacagg

SEQ ID NO: 4123308 - DNA, 25 bp, Homo sapien
gtcccataaaggagcagaacctgac

SEQ ID NO: 4123309 - DNA, 25 bp, Homo sapien
ctgaaaaatgtcgggtcccataaag

SEQ ID NO: 4123310 - DNA, 25 bp, Homo sapien
aatgtcgggtcccataaaggagcag

SEQ ID NO: 4123311 - DNA, 25 bp, Homo sapien
agatcctggtgctggacaacgctgc

SEQ ID NO: 4123312 - DNA, 25 bp, Homo sapien
gaaagagccgagtatcttccagccg

SEQ ID NO: 4123313 - DNA, 25 bp, Homo sapien
ggccaatgcactgaacctggacttg

SEQ ID NO: 4123314 - DNA, 25 bp, Homo sapien
gctcagcctggtgtatgtgccctct

SEQ ID NO: 4123315 - DNA, 25 bp, Homo sapien
ggccgtctacccattgctttctcag

SEQ ID NO: 4123316 - DNA, 25 bp, Homo sapien
atcacgaccgtgtacattgaccagg

SEQ ID NO: 4123317 - DNA, 25 bp, Homo sapien
ttccgtctggaggactcgtgctgcc

SEQ ID NO: 4123318 - DNA, 25 bp, Homo sapien
gcagcagcgacacagtggcctgtca

SEQ ID NO: 4123319 - DNA, 25 bp, Homo sapien
ggtacgtgcctataggcaggctaaa

SEQ ID NO: 4123320 - DNA, 25 bp, Homo sapien
ctacagtaagacatgatagtgccac

SEQ ID NO: 4123321 - DNA, 25 bp, Homo sapien
tgcctataggcaggctaaagtggga

SEQ ID NO: 4123322 - DNA, 25 bp, Homo sapien
tgtaaagatactgagatttgagttt

SEQ ID NO: 4123323 - DNA, 25 bp, Homo sapien
tctggctaaaacttttcagtactgg

SEQ ID NO: 4123324 - DNA, 25 bp, Homo sapien
gattaaatagaagtggcatccttgt

SEQ ID NO: 4123325 - DNA, 25 bp, Homo sapien
gatcatgtcatctaggaacggaaat

SEQ ID NO: 4123326 - DNA, 25 bp, Homo sapien
aaaacacaaatcagtcccagcctgg

SEQ ID NO: 4123327 - DNA, 25 bp, Homo sapien
ctccgcgggcccctggtgtgacggg

SEQ ID NO: 4123328 - DNA, 25 bp, Homo sapien
acggggggagatgcgcggcgtcgca

SEQ ID NO: 4123329 - DNA, 25 bp, Homo sapien
cagacctccgcgggcccctggtgtg

SEQ ID NO: 4123330 - DNA, 25 bp, Homo sapien
gtgtgacggggggagatgcgcggcg

SEQ ID NO: 4123331 - DNA, 25 bp, Homo sapien
tccctgcaccggccggcccctggag

SEQ ID NO: 4123332 - DNA, 25 bp, Homo sapien
ctggagaccgcaggccggcaaggag

SEQ ID NO: 4123333 - DNA, 25 bp, Homo sapien
cgtgtccctgcaccggccggcccct

SEQ ID NO: 4123334 - DNA, 25 bp, Homo sapien
caacccggccgtgtccctgcaccgg

SEQ ID NO: 4123335 - DNA, 25 bp, Homo sapien
ctaggttcgggggtgcgtgggcatg

SEQ ID NO: 4123336 - DNA, 25 bp, Homo sapien
gttcgggggtgcgtgggcatggcgc

SEQ ID NO: 4123337 - DNA, 25 bp, Homo sapien
gtgcgtgggcatggcgctgtccagc

SEQ ID NO: 4123338 - DNA, 25 bp, Homo sapien
tgtccagcagccgtgcgggccggcc

SEQ ID NO: 4123339 - DNA, 25 bp, Homo sapien
gcgtggagctgggagttccggaatg

SEQ ID NO: 4123340 - DNA, 25 bp, Homo sapien
agctcgaccccagccgcgtggagct

SEQ ID NO: 4123341 - DNA, 25 bp, Homo sapien
cgtggagctgggagttccggaatgg

SEQ ID NO: 4123342 - DNA, 25 bp, Homo sapien
gcgggccccagctcgaccccagccg

SEQ ID NO: 4123343 - DNA, 25 bp, Homo sapien
gagggcgaacgggagacgcgaatgt

SEQ ID NO: 4123344 - DNA, 25 bp, Homo sapien
ctgggcgcacgtgcggagggcggcg

SEQ ID NO: 4123345 - DNA, 25 bp, Homo sapien
acgcaccggactgcgggccgagagc

SEQ ID NO: 4123346 - DNA, 25 bp, Homo sapien
tgtggttcgactacgcatgcgcacg

SEQ ID NO: 4123347 - DNA, 25 bp, Homo sapien
agagaagtttgctggtgcctttgag

SEQ ID NO: 4123348 - DNA, 25 bp, Homo sapien
ccagagaagtttgctggtgcctttg

SEQ ID NO: 4123349 - DNA, 25 bp, Homo sapien
gcctttgagggcaggtacagggcct

SEQ ID NO: 4123350 - DNA, 25 bp, Homo sapien
tggaactcccagagaagtttgctgg

SEQ ID NO: 4123351 - DNA, 25 bp, Homo sapien
agttcccagaaattcgctcaggtga

SEQ ID NO: 4123352 - DNA, 25 bp, Homo sapien
tgtgtcctgtagatagcacccagag

SEQ ID NO: 4123353 - DNA, 25 bp, Homo sapien
gagattgcttcaactcgatttccct

SEQ ID NO: 4123354 - DNA, 25 bp, Homo sapien
gctcaggtgatagtatcctaagccc

SEQ ID NO: 4123355 - DNA, 25 bp, Homo sapien
ggaatattggaatagacatcaaagc

SEQ ID NO: 4123356 - DNA, 25 bp, Homo sapien
aaaaggcggaatattggaatagaca

SEQ ID NO: 4123357 - DNA, 25 bp, Homo sapien
catgcgtatataagtgctcaacatt

SEQ ID NO: 4123358 - DNA, 25 bp, Homo sapien
cagacatcggaatggctaacatgcg

SEQ ID NO: 4123359 - DNA, 25 bp, Homo sapien
gtggtgcgacctcagtgaccttggc

SEQ ID NO: 4123360 - DNA, 25 bp, Homo sapien
cacgacggttgagggtcacgtcctc

SEQ ID NO: 4123361 - DNA, 25 bp, Homo sapien
tatttacccgccagtgtgtctgaag

SEQ ID NO: 4123362 - DNA, 25 bp, Homo sapien
tgcccaaaaataacacatggatctg

SEQ ID NO: 4123363 - DNA, 25 bp, Homo sapien
ctcggaagctgcaggcacgacggtt

SEQ ID NO: 4123364 - DNA, 25 bp, Homo sapien
atacagcagtgggaacagagaagga

SEQ ID NO: 4123365 - DNA, 25 bp, Homo sapien
ggttagtcaaatacagcagtgggaa

SEQ ID NO: 4123366 - DNA, 25 bp, Homo sapien
tcaaatacagcagtgggaacagaga

SEQ ID NO: 4123367 - DNA, 25 bp, Homo sapien
atcatttagatgtaaatactactgc

SEQ ID NO: 4123368 - DNA, 25 bp, Homo sapien
ttagccaggtggttggcatgctcct

SEQ ID NO: 4123369 - DNA, 25 bp, Homo sapien
attagccaggtggttggcatgctcc

SEQ ID NO: 4123370 - DNA, 25 bp, Homo sapien
tagccaggtggttggcatgctccta

SEQ ID NO: 4123371 - DNA, 25 bp, Homo sapien
cgtcctcggctgtaccgctgtcctc

SEQ ID NO: 4123372 - DNA, 25 bp, Homo sapien
gaacaccgtcctcggctgtaccgct

SEQ ID NO: 4123373 - DNA, 25 bp, Homo sapien
ctcagaacaccgtcctcggctgtac

SEQ ID NO: 4123374 - DNA, 25 bp, Homo sapien
cccatcctcagaacaccgtcctcgg

SEQ ID NO: 4123375 - DNA, 25 bp, Homo sapien
cactgtggacctagtctactctctg

SEQ ID NO: 4123376 - DNA, 25 bp, Homo sapien
ccctgagtcacactgtggacctagt

SEQ ID NO: 4123377 - DNA, 25 bp, Homo sapien
tcattttttcagtgagccctcctgc

SEQ ID NO: 4123378 - DNA, 25 bp, Homo sapien
tcccaccgtgcttcactccctgttt

SEQ ID NO: 4123379 - DNA, 25 bp, Homo sapien
gacaaggttgccaggagtaaccacc

SEQ ID NO: 4123380 - DNA, 25 bp, Homo sapien
aaggccacgacaaggttgccaggag

SEQ ID NO: 4123381 - DNA, 25 bp, Homo sapien
atgtccaaggccacgacaaggttgc

SEQ ID NO: 4123382 - DNA, 25 bp, Homo sapien
cacgacaaggttgccaggagtaacc

SEQ ID NO: 4123383 - DNA, 25 bp, Homo sapien
gaggacagcacgcttcctggtccgg

SEQ ID NO: 4123384 - DNA, 25 bp, Homo sapien
gcttggccctctcaaggaggacagc

SEQ ID NO: 4123385 - DNA, 25 bp, Homo sapien
gccagggcagaagttcacccttgtt

SEQ ID NO: 4123386 - DNA, 25 bp, Homo sapien
gtctttactctggtgactgcttggc

SEQ ID NO: 4123387 - DNA, 25 bp, Homo sapien
ggaagaagttgttatttggatagca

SEQ ID NO: 4123388 - DNA, 25 bp, Homo sapien
tacttacccactagaattgctcaaa

SEQ ID NO: 4123389 - DNA, 25 bp, Homo sapien
aaaaggctaaatagcccgggcacag

SEQ ID NO: 4123390 - DNA, 25 bp, Homo sapien
tacagtaagataccactacttaccc

SEQ ID NO: 4123391 - DNA, 25 bp, Homo sapien
caaaatacctgaattcttaacactg

SEQ ID NO: 4123392 - DNA, 25 bp, Homo sapien
caggtctttaatgtgatcactttca

SEQ ID NO: 4123393 - DNA, 25 bp, Homo sapien
ttattcctgtaattcagccacctga

SEQ ID NO: 4123394 - DNA, 25 bp, Homo sapien
aatgaagaaggcctaatctctctct

SEQ ID NO: 4123395 - DNA, 25 bp, Homo sapien
ctcccttctgtccttccatgtgtgg

SEQ ID NO: 4123396 - DNA, 25 bp, Homo sapien
tgtccttccatgtgtggggaaaggg

SEQ ID NO: 4123397 - DNA, 25 bp, Homo sapien
tcccttctgtccttccatgtgtggg

SEQ ID NO: 4123398 - DNA, 25 bp, Homo sapien
catgtgtggggaaagggtgtttttg

SEQ ID NO: 4123399 - DNA, 25 bp, Homo sapien
tgctgagggtaacaaggaactcact

SEQ ID NO: 4123400 - DNA, 25 bp, Homo sapien
tcacttggcagtcagagcatcatgc

SEQ ID NO: 4123401 - DNA, 25 bp, Homo sapien
gccagggagtggaatttcgtcaacc

SEQ ID NO: 4123402 - DNA, 25 bp, Homo sapien
caactagcctggaaagttaggagtc

SEQ ID NO: 4123403 - DNA, 25 bp, Homo sapien
tttattccctagtgaggcctctgag

SEQ ID NO: 4123404 - DNA, 25 bp, Homo sapien
tggcagaacataccactgaactagt

SEQ ID NO: 4123405 - DNA, 25 bp, Homo sapien
tgcttttctgagctaagaatggtgc

SEQ ID NO: 4123406 - DNA, 25 bp, Homo sapien
aactagtatgtgctagaggagggca

SEQ ID NO: 4123407 - DNA, 25 bp, Homo sapien
ctggccttctgtaatccactcgcct

SEQ ID NO: 4123408 - DNA, 25 bp, Homo sapien
attataggcgtaggcatgagcttct

SEQ ID NO: 4123409 - DNA, 25 bp, Homo sapien
ttctgtaatccactcgccttcccaa

SEQ ID NO: 4123410 - DNA, 25 bp, Homo sapien
ccttctgtaatccactcgccttccc

SEQ ID NO: 4123411 - DNA, 25 bp, Homo sapien
tgactgggggcttcgatggttcaaa

SEQ ID NO: 4123412 - DNA, 25 bp, Homo sapien
aatgactgggggcttcgatggttca

SEQ ID NO: 4123413 - DNA, 25 bp, Homo sapien
ccctcaatgactgggggcttcgatg

SEQ ID NO: 4123414 - DNA, 25 bp, Homo sapien
aacagtggggctaagcccctcaatg

SEQ ID NO: 4123415 - DNA, 25 bp, Homo sapien
agctgagagcgctggctgttgcccc

SEQ ID NO: 4123416 - DNA, 25 bp, Homo sapien
aaatgctgaaggttaatatctggtt

SEQ ID NO: 4123417 - DNA, 25 bp, Homo sapien
ttgagcacacccctttgatttttaa

SEQ ID NO: 4123418 - DNA, 25 bp, Homo sapien
gctcaggctggcatactattttatt

SEQ ID NO: 4123419 - DNA, 25 bp, Homo sapien
tatttatcgtattcttgagcacacc

SEQ ID NO: 4123420 - DNA, 25 bp, Homo sapien
tgttgacactaaagacatccaagaa

SEQ ID NO: 4123421 - DNA, 25 bp, Homo sapien
ctattttggaatctttgggctctgg

SEQ ID NO: 4123422 - DNA, 25 bp, Homo sapien
caatgactggagcaacagttgttct

SEQ ID NO: 4123423 - DNA, 25 bp, Homo sapien
gaatgactgagctactgttgacact

SEQ ID NO: 4123424 - DNA, 25 bp, Homo sapien
cgttttaatgccaaagataagagga

SEQ ID NO: 4123425 - DNA, 25 bp, Homo sapien
tacccttgtcatcgttagtatcaca

SEQ ID NO: 4123426 - DNA, 25 bp, Homo sapien
taagtaataactagagtccttggtg

SEQ ID NO: 4123427 - DNA, 25 bp, Homo sapien
cattaattgcaatgccagcctcttc

SEQ ID NO: 4123428 - DNA, 25 bp, Homo sapien
tgtcttgtcttgttacccacactgg

SEQ ID NO: 4123429 - DNA, 25 bp, Homo sapien
tgatctctaggaggcatgaggctca

SEQ ID NO: 4123430 - DNA, 25 bp, Homo sapien
caggacaccagtggttattgaacca

SEQ ID NO: 4123431 - DNA, 25 bp, Homo sapien
gggagcgcactgtcaactataatga

SEQ ID NO: 4123432 - DNA, 25 bp, Homo sapien
aagaaagattattactgttgaagaa

SEQ ID NO: 4123433 - DNA, 25 bp, Homo sapien
gaaagattattactgttgaagaagg

SEQ ID NO: 4123434 - DNA, 25 bp, Homo sapien
gggaactatcattcaacgttttctc

SEQ ID NO: 4123435 - DNA, 25 bp, Homo sapien
tacacctattttaagggaactatca

SEQ ID NO: 4123436 - DNA, 25 bp, Homo sapien
cagaatgcagcctacggaggatggc

SEQ ID NO: 4123437 - DNA, 25 bp, Homo sapien
taatgattcgacgtcggtagcgagg

SEQ ID NO: 4123438 - DNA, 25 bp, Homo sapien
tgaggccgcaggacgtgctattcca

SEQ ID NO: 4123439 - DNA, 25 bp, Homo sapien
agcaaggctcaaaaaccggcgctca

SEQ ID NO: 4123440 - DNA, 25 bp, Homo sapien
ggcttgcaacacaacgctggctgat

SEQ ID NO: 4123441 - DNA, 25 bp, Homo sapien
gcagtgaatctgaacgcgtctcgta

SEQ ID NO: 4123442 - DNA, 25 bp, Homo sapien
tctgtgaagccgaaaagcctaggcg

SEQ ID NO: 4123443 - DNA, 25 bp, Homo sapien
atgagaaactagaaacgccgggtcg

SEQ ID NO: 4123444 - DNA, 25 bp, Homo sapien
cctgggactcgtcgtagccgctcgg

SEQ ID NO: 4123445 - DNA, 25 bp, Homo sapien
cacccggcgtcacggagcccgcctg

SEQ ID NO: 4123446 - DNA, 25 bp, Homo sapien
aagcctctgtgcaccgcgcatgagc

SEQ ID NO: 4123447 - DNA, 25 bp, Homo sapien
gagtcccgtggcggaagtcccgcca

SEQ ID NO: 4123448 - DNA, 25 bp, Homo sapien
tgggacaagttaccaccagcaaaca

SEQ ID NO: 4123449 - DNA, 25 bp, Homo sapien
ccccagtgacaaggtcggtgcaaaa

SEQ ID NO: 4123450 - DNA, 25 bp, Homo sapien
gatatgccatatccctggcttaggg

SEQ ID NO: 4123451 - DNA, 25 bp, Homo sapien
tcgttgcgccaatgaagcggcctct

SEQ ID NO: 4123452 - DNA, 25 bp, Homo sapien
cagtctcagattttgtaggcttttg

SEQ ID NO: 4123453 - DNA, 25 bp, Homo sapien
taaaagcaatgacagtctcagattt

SEQ ID NO: 4123454 - DNA, 25 bp, Homo sapien
ccttgctattcctcatcacgaggct

SEQ ID NO: 4123455 - DNA, 25 bp, Homo sapien
attcctcatcacgaggctgggcctc

SEQ ID NO: 4123456 - DNA, 25 bp, Homo sapien
ttacagtacagctgagcatcagatc

SEQ ID NO: 4123457 - DNA, 25 bp, Homo sapien
gctgagcatcagatccaccactgct

SEQ ID NO: 4123458 - DNA, 25 bp, Homo sapien
tctgtgcacggctaaatcaacttac

SEQ ID NO: 4123459 - DNA, 25 bp, Homo sapien
caccactgctctgtgcacggctaaa

SEQ ID NO: 4123460 - DNA, 25 bp, Homo sapien
gacagagactccacaatgactaaaa

SEQ ID NO: 4123461 - DNA, 25 bp, Homo sapien
gtagagtcacttggggatggttcca

SEQ ID NO: 4123462 - DNA, 25 bp, Homo sapien
atttaactccaggtagagtcacttg

SEQ ID NO: 4123463 - DNA, 25 bp, Homo sapien
aatttaactccaggtagagtcactt

SEQ ID NO: 4123464 - DNA, 25 bp, Homo sapien
atgcagtaatgtttaaaaatctttg

SEQ ID NO: 4123465 - DNA, 25 bp, Homo sapien
ataatgcagtaatgtttaaaaatct

SEQ ID NO: 4123466 - DNA, 25 bp, Homo sapien
taatgcagtaatgtttaaaaatctt

SEQ ID NO: 4123467 - DNA, 25 bp, Homo sapien
aatgcagtaatgtttaaaaatcttt

SEQ ID NO: 4123468 - DNA, 25 bp, Homo sapien
gtccctaaacctctagcccaatatg

SEQ ID NO: 4123469 - DNA, 25 bp, Homo sapien
taggctcatgtaccattctttttcc

SEQ ID NO: 4123470 - DNA, 25 bp, Homo sapien
cccaatatgtcaatttaggctcatg

SEQ ID NO: 4123471 - DNA, 25 bp, Homo sapien
gagatccaaaagaaagcggtcttcc

SEQ ID NO: 4123472 - DNA, 25 bp, Homo sapien
tagtgcagtaaccttaaatggactt

SEQ ID NO: 4123473 - DNA, 25 bp, Homo sapien
tctacacagtgtttagccaatcaga

SEQ ID NO: 4123474 - DNA, 25 bp, Homo sapien
ccagtactccttgattagtgcagta

SEQ ID NO: 4123475 - DNA, 25 bp, Homo sapien
ccaacattgattggagtctactggg

SEQ ID NO: 4123476 - DNA, 25 bp, Homo sapien
gaacaaggagggccaagaggcaatg

SEQ ID NO: 4123477 - DNA, 25 bp, Homo sapien
caatggttaatattcctggtccagc

SEQ ID NO: 4123478 - DNA, 25 bp, Homo sapien
gcaatggttaatattcctggtccag

SEQ ID NO: 4123479 - DNA, 25 bp, Homo sapien
aatggttaatattcctggtccagca

SEQ ID NO: 4123480 - DNA, 25 bp, Homo sapien
tctggccaggagggaaagctggaat

SEQ ID NO: 4123481 - DNA, 25 bp, Homo sapien
ctggccaggagggaaagctggaatc

SEQ ID NO: 4123482 - DNA, 25 bp, Homo sapien
ttctggccaggagggaaagctggaa

SEQ ID NO: 4123483 - DNA, 25 bp, Homo sapien
cttttctgaatgagtccaggctgaa

SEQ ID NO: 4123484 - DNA, 25 bp, Homo sapien
tttctgaatgagtccaggctgaaca

SEQ ID NO: 4123485 - DNA, 25 bp, Homo sapien
ttttctgaatgagtccaggctgaac

SEQ ID NO: 4123486 - DNA, 25 bp, Homo sapien
ttctgaatgagtccaggctgaacat

SEQ ID NO: 4123487 - DNA, 25 bp, Homo sapien
catacatagagttacagcagacgtg

SEQ ID NO: 4123488 - DNA, 25 bp, Homo sapien
tgcctaggatcaaggtttattttga

SEQ ID NO: 4123489 - DNA, 25 bp, Homo sapien
cattcctgtttaaggagggtcctca

SEQ ID NO: 4123490 - DNA, 25 bp, Homo sapien
gaagctaaggttggaaatgaccagc

SEQ ID NO: 4123491 - DNA, 25 bp, Homo sapien
aaggctctttgtagcccggcgcggt

SEQ ID NO: 4123492 - DNA, 25 bp, Homo sapien
cctgtctaggtagtccaaagcatct

SEQ ID NO: 4123493 - DNA, 25 bp, Homo sapien
gcttcctcggtaactgccagctctg

SEQ ID NO: 4123494 - DNA, 25 bp, Homo sapien
aaaaagttgcagttgcattggccca

SEQ ID NO: 4123495 - DNA, 25 bp, Homo sapien
atcttcagcaggaaagaaaaagccc

SEQ ID NO: 4123496 - DNA, 25 bp, Homo sapien
ggttgacacacatgggtggaaggcg

SEQ ID NO: 4123497 - DNA, 25 bp, Homo sapien
gaagtttgcactgacgctgcctgtg

SEQ ID NO: 4123498 - DNA, 25 bp, Homo sapien
ggtagggttgacacacatgggtgga

SEQ ID NO: 4123499 - DNA, 25 bp, Homo sapien
tcgagagatggtccctcctggggta

SEQ ID NO: 4123500 - DNA, 25 bp, Homo sapien
ttctccgtattcttggaggagagaa

SEQ ID NO: 4123501 - DNA, 25 bp, Homo sapien
aagccttctccgtattcttggagga

SEQ ID NO: 4123502 - DNA, 25 bp, Homo sapien
gaggagagaaagttgattcctttcc

SEQ ID NO: 4123503 - DNA, 25 bp, Homo sapien
ttaagccttctccgtattcttggag

SEQ ID NO: 4123504 - DNA, 25 bp, Homo sapien
aatgactcttgtaagataagggcaa

SEQ ID NO: 4123505 - DNA, 25 bp, Homo sapien
taagataagggcaactctttacagc

SEQ ID NO: 4123506 - DNA, 25 bp, Homo sapien
ctcactggtctagagcaggagttgg

SEQ ID NO: 4123507 - DNA, 25 bp, Homo sapien
ttctcctcactggtctagagcagga

SEQ ID NO: 4123508 - DNA, 25 bp, Homo sapien
accattatcctggctcagcccccca

SEQ ID NO: 4123509 - DNA, 25 bp, Homo sapien
tcacaccattatcctggctcagccc

SEQ ID NO: 4123510 - DNA, 25 bp, Homo sapien
tcatgattcgccttccttggcctct

SEQ ID NO: 4123511 - DNA, 25 bp, Homo sapien
cgcctggcctttcttattttttatg

SEQ ID NO: 4123512 - DNA, 25 bp, Homo sapien
gacaacagtctagacagaaaggccc

SEQ ID NO: 4123513 - DNA, 25 bp, Homo sapien
tggaaactgccaagaattgagctgg

SEQ ID NO: 4123514 - DNA, 25 bp, Homo sapien
ggaagccctcaggatagcactcttt

SEQ ID NO: 4123515 - DNA, 25 bp, Homo sapien
tggtccagcgtaaagtccagcagtg

SEQ ID NO: 4123516 - DNA, 25 bp, Homo sapien
gaagcccaagcctaggcgagggcat

SEQ ID NO: 4123517 - DNA, 25 bp, Homo sapien
gcccagggctaggaccctgcagagc

SEQ ID NO: 4123518 - DNA, 25 bp, Homo sapien
ccctgggccttcagtaggcgggctc

SEQ ID NO: 4123519 - DNA, 25 bp, Homo sapien
taaaccagcagtcgtgtggatggaa

SEQ ID NO: 4123520 - DNA, 25 bp, Homo sapien
cctcggcggcttccttggtgtggtc

SEQ ID NO: 4123521 - DNA, 25 bp, Homo sapien
ctgcaggcgcggagagatgccggcg

SEQ ID NO: 4123522 - DNA, 25 bp, Homo sapien
cgttcaccaagcttccgtcgccttc

SEQ ID NO: 4123523 - DNA, 25 bp, Homo sapien
cagcttgaagagaagccgcgcgagc

SEQ ID NO: 4123524 - DNA, 25 bp, Homo sapien
tttgcatgtgagatgccgagggctc

SEQ ID NO: 4123525 - DNA, 25 bp, Homo sapien
gctgtgggaactcttttaataggtc

SEQ ID NO: 4123526 - DNA, 25 bp, Homo sapien
gagggctcttccaatcacactgttg

SEQ ID NO: 4123527 - DNA, 25 bp, Homo sapien
tcttcggtccatttgtgtgcacgta

SEQ ID NO: 4123528 - DNA, 25 bp, Homo sapien
gccttctacctccacgctcttgggc

SEQ ID NO: 4123529 - DNA, 25 bp, Homo sapien
gcctgccgctcagcatcgatcttct

SEQ ID NO: 4123530 - DNA, 25 bp, Homo sapien
acgctcttgggccattttatgtgca

SEQ ID NO: 4123531 - DNA, 25 bp, Homo sapien
tgcagcctgccgctcagcatcgatc

SEQ ID NO: 4123532 - DNA, 25 bp, Homo sapien
aacagggcctcttcaagtgcaggaa

SEQ ID NO: 4123533 - DNA, 25 bp, Homo sapien
aagacttagcaacctggccgggtgc

SEQ ID NO: 4123534 - DNA, 25 bp, Homo sapien
gagaagctgagggaatacgcatcct

SEQ ID NO: 4123535 - DNA, 25 bp, Homo sapien
gagcagagatgaagacttagcaacc

SEQ ID NO: 4123536 - DNA, 25 bp, Homo sapien
gaatactctctggattcagctgccg

SEQ ID NO: 4123537 - DNA, 25 bp, Homo sapien
caaagcgatcagctagcactcggta

SEQ ID NO: 4123538 - DNA, 25 bp, Homo sapien
tcatggacaagaagtcggtaacatc

SEQ ID NO: 4123539 - DNA, 25 bp, Homo sapien
gctgcgtcaaacaactcattccggg

SEQ ID NO: 4123540 - DNA, 25 bp, Homo sapien
tggcactgtcgtcatctgtcatctc

SEQ ID NO: 4123541 - DNA, 25 bp, Homo sapien
gaaactgggtcagagccctaatggc

SEQ ID NO: 4123542 - DNA, 25 bp, Homo sapien
gctgtggaggatgacgttgcaatct

SEQ ID NO: 4123543 - DNA, 25 bp, Homo sapien
aatctgaatcaccttggccagaagg

SEQ ID NO: 4123544 - DNA, 25 bp, Homo sapien
tctacgccagacacgaactcaaggt

SEQ ID NO: 4123545 - DNA, 25 bp, Homo sapien
cagacatgaccaagtaaacggcccc

SEQ ID NO: 4123546 - DNA, 25 bp, Homo sapien
ttaggcatttcatgaccaaagcccc

SEQ ID NO: 4123547 - DNA, 25 bp, Homo sapien
aatccaccgcccagaagaggtatgg

SEQ ID NO: 4123548 - DNA, 25 bp, Homo sapien
agcagggtgagtgtagacagcttgg

SEQ ID NO: 4123549 - DNA, 25 bp, Homo sapien
gctttgcggcgccctttggcaacaa

SEQ ID NO: 4123550 - DNA, 25 bp, Homo sapien
cttggtgcccacagtatggaactgc

SEQ ID NO: 4123551 - DNA, 25 bp, Homo sapien
attctcagcctctgctttgcggcgc

SEQ ID NO: 4123552 - DNA, 25 bp, Homo sapien
ctttcaagagaacggccatggccag

SEQ ID NO: 4123553 - DNA, 25 bp, Homo sapien
cagagccaactgtacccatgaaatg

SEQ ID NO: 4123554 - DNA, 25 bp, Homo sapien
gagattactaactcctcaggcagtc

SEQ ID NO: 4123555 - DNA, 25 bp, Homo sapien
tgaccattcagagtaaagcaggccc

SEQ ID NO: 4123556 - DNA, 25 bp, Homo sapien
tgcaagactcagtctatgctctggg

SEQ ID NO: 4123557 - DNA, 25 bp, Homo sapien
ccagacaagctcaggagctccaacg

SEQ ID NO: 4123558 - DNA, 25 bp, Homo sapien
acgcataagttgtgccaagtaatct

SEQ ID NO: 4123559 - DNA, 25 bp, Homo sapien
gattttggattttggctgacatggt

SEQ ID NO: 4123560 - DNA, 25 bp, Homo sapien
gtgtaagcggttcgttgttcctgtc

SEQ ID NO: 4123561 - DNA, 25 bp, Homo sapien
gtgtgtaagcggttcgttgttcctg

SEQ ID NO: 4123562 - DNA, 25 bp, Homo sapien
taagcggttcgttgttcctgtccac

SEQ ID NO: 4123563 - DNA, 25 bp, Homo sapien
agcggttcgttgttcctgtccacca

SEQ ID NO: 4123564 - DNA, 25 bp, Homo sapien
ctctatcttgcggaggatgggctcg

SEQ ID NO: 4123565 - DNA, 25 bp, Homo sapien
ggtctcacccagctcacgcaaagag

SEQ ID NO: 4123566 - DNA, 25 bp, Homo sapien
cacctggatggtgcatggtcggcgc

SEQ ID NO: 4123567 - DNA, 25 bp, Homo sapien
gcaaagaggccaggttatacatggc

SEQ ID NO: 4123568 - DNA, 25 bp, Homo sapien
tactactgcctgtcgcaggtggagg

SEQ ID NO: 4123569 - DNA, 25 bp, Homo sapien
ttaatttagtccatgactgccccgg

SEQ ID NO: 4123570 - DNA, 25 bp, Homo sapien
gatgttgtggcccaacccgctgggc

SEQ ID NO: 4123571 - DNA, 25 bp, Homo sapien
cactctgcaggattcgcctgggtca

SEQ ID NO: 4123572 - DNA, 25 bp, Homo sapien
ggagaagcgctcattgtcccctgtg

SEQ ID NO: 4123573 - DNA, 25 bp, Homo sapien
tgcaggcccttgagcaggatcagca

SEQ ID NO: 4123574 - DNA, 25 bp, Homo sapien
tgataacattgcagcgggcacctcg

SEQ ID NO: 4123575 - DNA, 25 bp, Homo sapien
caccgggtgctgctcaatggcgttg

SEQ ID NO: 4123576 - DNA, 25 bp, Homo sapien
aatcgagtgcgcattcatcctcaga

SEQ ID NO: 4123577 - DNA, 25 bp, Homo sapien
ccccgcgagcatcgatgtgcagaac

SEQ ID NO: 4123578 - DNA, 25 bp, Homo sapien
cacaaggtccaaatcgagtgcgcat

SEQ ID NO: 4123579 - DNA, 25 bp, Homo sapien
gaaccagatcagtcacaaggtccaa

SEQ ID NO: 4123580 - DNA, 25 bp, Homo sapien
gcgctgctgcactcctttgatctcc

SEQ ID NO: 4123581 - DNA, 25 bp, Homo sapien
gctgcactcctttgatctcctgcca

SEQ ID NO: 4123582 - DNA, 25 bp, Homo sapien
tgatctcctgccacccaggcaggaa

SEQ ID NO: 4123583 - DNA, 25 bp, Homo sapien
gctgctgcactcctttgatctcctg

SEQ ID NO: 4123584 - DNA, 25 bp, Homo sapien
tggcaggatgaggtacttgctctcg

SEQ ID NO: 4123585 - DNA, 25 bp, Homo sapien
ctggcaggatgaggtacttgctctc

SEQ ID NO: 4123586 - DNA, 25 bp, Homo sapien
ggatgaggtacttgctctcgtgcat

SEQ ID NO: 4123587 - DNA, 25 bp, Homo sapien
caggatgaggtacttgctctcgtgc

SEQ ID NO: 4123588 - DNA, 25 bp, Homo sapien
actatgcccagtgaaaagtgccaca

SEQ ID NO: 4123589 - DNA, 25 bp, Homo sapien
gcgcagataaacactatgcccagtg

SEQ ID NO: 4123590 - DNA, 25 bp, Homo sapien
attttgatgaaacaggcgcagataa

SEQ ID NO: 4123591 - DNA, 25 bp, Homo sapien
tgaaacaggcgcagataaacactat

SEQ ID NO: 4123592 - DNA, 25 bp, Homo sapien
actggaggctgctggaatatggcct

SEQ ID NO: 4123593 - DNA, 25 bp, Homo sapien
ggtcttcaggtcatagcgttcttcc

SEQ ID NO: 4123594 - DNA, 25 bp, Homo sapien
ttggtggccaagacaatcttgcgca

SEQ ID NO: 4123595 - DNA, 25 bp, Homo sapien
tgtgatggaagtctcagcaatgttg

SEQ ID NO: 4123596 - DNA, 25 bp, Homo sapien
cacaaagcaggtctaaggtagatct

SEQ ID NO: 4123597 - DNA, 25 bp, Homo sapien
actccctgagtaaccctcaccagcc

SEQ ID NO: 4123598 - DNA, 25 bp, Homo sapien
cacaagcgcggccttctgaagacac

SEQ ID NO: 4123599 - DNA, 25 bp, Homo sapien
ggtggcaagtaagcagcacacaaat

SEQ ID NO: 4123600 - DNA, 25 bp, Homo sapien
tggctcttgatacccacactgtctc

SEQ ID NO: 4123601 - DNA, 25 bp, Homo sapien
ccggccccggcgctggatcacattg

SEQ ID NO: 4123602 - DNA, 25 bp, Homo sapien
ctggatcacattggctcttgatacc

SEQ ID NO: 4123603 - DNA, 25 bp, Homo sapien
ggctcttgatacccacactgtctcc

SEQ ID NO: 4123604 - DNA, 25 bp, Homo sapien
ttctccagccggcttcgagggaaca

SEQ ID NO: 4123605 - DNA, 25 bp, Homo sapien
caccaggttctcaagaggtgtgcgc

SEQ ID NO: 4123606 - DNA, 25 bp, Homo sapien
ttcgagggaacaagtggtaggcaaa

SEQ ID NO: 4123607 - DNA, 25 bp, Homo sapien
ggtgtgcgcaggatctctggcactt

SEQ ID NO: 4123608 - DNA, 25 bp, Homo sapien
cctggagcaagatcacagcctcgtc

SEQ ID NO: 4123609 - DNA, 25 bp, Homo sapien
tttggactgtccacagccttggaca

SEQ ID NO: 4123610 - DNA, 25 bp, Homo sapien
agcaagatcacagcctcgtccactg

SEQ ID NO: 4123611 - DNA, 25 bp, Homo sapien
gatgtttggactgtccacagccttg

SEQ ID NO: 4123612 - DNA, 25 bp, Homo sapien
ggcaggaaacgaccaccagtagtgg

SEQ ID NO: 4123613 - DNA, 25 bp, Homo sapien
cccggttctgtaggctgctgctgaa

SEQ ID NO: 4123614 - DNA, 25 bp, Homo sapien
gatggcagccaacacaatggccttg

SEQ ID NO: 4123615 - DNA, 25 bp, Homo sapien
gtagtcaggtactcccgctggtcca

SEQ ID NO: 4123616 - DNA, 25 bp, Homo sapien
ctgggtgcgtacagcaggttttcct

SEQ ID NO: 4123617 - DNA, 25 bp, Homo sapien
tgtcatggctcaacagtgctttcac

SEQ ID NO: 4123618 - DNA, 25 bp, Homo sapien
gagctgcggtcctgccaacgcagca

SEQ ID NO: 4123619 - DNA, 25 bp, Homo sapien
tggatgaagcgcaggctgggtgcgt

SEQ ID NO: 4123620 - DNA, 25 bp, Homo sapien
tcataaatgttctctgagaactgct

SEQ ID NO: 4123621 - DNA, 25 bp, Homo sapien
ggccggccatcagcacgcccttcac

SEQ ID NO: 4123622 - DNA, 25 bp, Homo sapien
aggccagggtgcagtccgagggctt

SEQ ID NO: 4123623 - DNA, 25 bp, Homo sapien
ctcctcactgtactcgttgcactgg

SEQ ID NO: 4123624 - DNA, 25 bp, Homo sapien
cagggatggaggaaaagacgggtgg

SEQ ID NO: 4123625 - DNA, 25 bp, Homo sapien
gcagggatggaggaaaagacgggtg

SEQ ID NO: 4123626 - DNA, 25 bp, Homo sapien
tgcagggatggaggaaaagacgggt

SEQ ID NO: 4123627 - DNA, 25 bp, Homo sapien
ctgcagggatggaggaaaagacggg

SEQ ID NO: 4123628 - DNA, 25 bp, Homo sapien
tatgtgacgctgttgggcttgaact

SEQ ID NO: 4123629 - DNA, 25 bp, Homo sapien
gatgttgcctgatttggtcctatat

SEQ ID NO: 4123630 - DNA, 25 bp, Homo sapien
ggcttgaacttcccctgccgggtga

SEQ ID NO: 4123631 - DNA, 25 bp, Homo sapien
tgtgcagcaggatgttgcctgattt

SEQ ID NO: 4123632 - DNA, 25 bp, Homo sapien
agcagcacagctagcgggtgcacct

SEQ ID NO: 4123633 - DNA, 25 bp, Homo sapien
tgcacctgagaggagtcccggacga

SEQ ID NO: 4123634 - DNA, 25 bp, Homo sapien
ggatgtgcacgtccccgtcggtcag

SEQ ID NO: 4123635 - DNA, 25 bp, Homo sapien
cgaagacgctgccattggacttgac

SEQ ID NO: 4123636 - DNA, 25 bp, Homo sapien
gggaactgtggtgaggccaggcccc

SEQ ID NO: 4123637 - DNA, 25 bp, Homo sapien
ggggaactgtggtgaggccaggccc

SEQ ID NO: 4123638 - DNA, 25 bp, Homo sapien
gctctgccagtagcgcaagcagctg

SEQ ID NO: 4123639 - DNA, 25 bp, Homo sapien
ttcagcagccgcacggtacgcgagt

SEQ ID NO: 4123640 - DNA, 25 bp, Homo sapien
ctgtcttgcgcacatcaaagctgcc

SEQ ID NO: 4123641 - DNA, 25 bp, Homo sapien
cactgtcgctcagtgagatggtggc

SEQ ID NO: 4123642 - DNA, 25 bp, Homo sapien
aacatttgcactctgtacacagccc

SEQ ID NO: 4123643 - DNA, 25 bp, Homo sapien
ggccctgtgtgatgtgtactccgca

SEQ ID NO: 4123644 - DNA, 25 bp, Homo sapien
ggttgcgtagtcaggagacacctca

SEQ ID NO: 4123645 - DNA, 25 bp, Homo sapien
caagtggcgtgctctctaggtagac

SEQ ID NO: 4123646 - DNA, 25 bp, Homo sapien
gggaccagctttcctccgtagagac

SEQ ID NO: 4123647 - DNA, 25 bp, Homo sapien
catgtaagccctcatgtccaaggga

SEQ ID NO: 4123648 - DNA, 25 bp, Homo sapien
gaaatcccgggaactgtattgacac

SEQ ID NO: 4123649 - DNA, 25 bp, Homo sapien
gacgctgaccgtggagcttaagcca

SEQ ID NO: 4123650 - DNA, 25 bp, Homo sapien
gagatggaattccttcaggccggca

SEQ ID NO: 4123651 - DNA, 25 bp, Homo sapien
attgaagcgagagctatgtgaggcc

SEQ ID NO: 4123652 - DNA, 25 bp, Homo sapien
tctatctagggaaaattgcagactt

SEQ ID NO: 4123653 - DNA, 25 bp, Homo sapien
ggaaagatgagacaaagtagaggct

SEQ ID NO: 4123654 - DNA, 25 bp, Homo sapien
tcaaacacgtgaagccattatggta

SEQ ID NO: 4123655 - DNA, 25 bp, Homo sapien
gctgtgcaggcctgcttacgcaccg

SEQ ID NO: 4123656 - DNA, 25 bp, Homo sapien
ccttagtggactacctggaacagtg

SEQ ID NO: 4123657 - DNA, 25 bp, Homo sapien
aaatgggatcttggctttgccccag

SEQ ID NO: 4123658 - DNA, 25 bp, Homo sapien
tagctagtatcacaaacagctgtgc

SEQ ID NO: 4123659 - DNA, 25 bp, Homo sapien
tgcaaagacttcaacatcgaaagcc

SEQ ID NO: 4123660 - DNA, 25 bp, Homo sapien
tgagccttgcttcaggcttagtgcc

SEQ ID NO: 4123661 - DNA, 25 bp, Homo sapien
caacaatcaacctaaagcctttggc

SEQ ID NO: 4123662 - DNA, 25 bp, Homo sapien
tcgaaagccaaaacacagcccactt

SEQ ID NO: 4123663 - DNA, 25 bp, Homo sapien
gtatgtatattgtaatacctagagc

SEQ ID NO: 4123664 - DNA, 25 bp, Homo sapien
ctaagaaaactatacagagcaatat

SEQ ID NO: 4123665 - DNA, 25 bp, Homo sapien
cagagcaatatactcaaaagctttt

SEQ ID NO: 4123666 - DNA, 25 bp, Homo sapien
cagtagtagaacattgataccagtt

SEQ ID NO: 4123667 - DNA, 25 bp, Homo sapien
gatgtagtgcttaatctatgaagag

SEQ ID NO: 4123668 - DNA, 25 bp, Homo sapien
agcacaaattgtaatgccatctgat

SEQ ID NO: 4123669 - DNA, 25 bp, Homo sapien
attgtaatgccatctgatgtagtgc

SEQ ID NO: 4123670 - DNA, 25 bp, Homo sapien
gccatctgatgtagtgcttaatcta

SEQ ID NO: 4123671 - DNA, 25 bp, Homo sapien
tcctaggggtattgtgtgcctctaa

SEQ ID NO: 4123672 - DNA, 25 bp, Homo sapien
ggctatgggagggtccatactagac

SEQ ID NO: 4123673 - DNA, 25 bp, Homo sapien
ctttctacctagtttagttggatga

SEQ ID NO: 4123674 - DNA, 25 bp, Homo sapien
caagttgtagtttttagagttgttg

SEQ ID NO: 4123675 - DNA, 25 bp, Homo sapien
caccactatgcctggctaatttttt

SEQ ID NO: 4123676 - DNA, 25 bp, Homo sapien
ctcgctctttcgccaaggcgagagt

SEQ ID NO: 4123677 - DNA, 25 bp, Homo sapien
gctctttcgccaaggcgagagtgca

SEQ ID NO: 4123678 - DNA, 25 bp, Homo sapien
accactatgcctggctaattttttg

SEQ ID NO: 4123679 - DNA, 25 bp, Homo sapien
taaggatgtcagatggcccacagaa

SEQ ID NO: 4123680 - DNA, 25 bp, Homo sapien
gaaaccaacgtgatcttgaccaagg

SEQ ID NO: 4123681 - DNA, 25 bp, Homo sapien
aatagccccggccaaggatgtggct

SEQ ID NO: 4123682 - DNA, 25 bp, Homo sapien
gatatggccctagtcaaggacatgg

SEQ ID NO: 4123683 - DNA, 25 bp, Homo sapien
gggcataactctgcccgggcatggt

SEQ ID NO: 4123684 - DNA, 25 bp, Homo sapien
agttaaacaggttaaagatggctgc

SEQ ID NO: 4123685 - DNA, 25 bp, Homo sapien
aatgggcataactctgcccgggcat

SEQ ID NO: 4123686 - DNA, 25 bp, Homo sapien
ctataatcattaagttaaacaggtt

SEQ ID NO: 4123687 - DNA, 25 bp, Homo sapien
tgcggcatcaccagcaagcctgttt

SEQ ID NO: 4123688 - DNA, 25 bp, Homo sapien
tgagaatgcccactaaagcttgttg

SEQ ID NO: 4123689 - DNA, 25 bp, Homo sapien
tgcccgctctctaggaagaaatgtt

SEQ ID NO: 4123690 - DNA, 25 bp, Homo sapien
gatgcaaaagcacactagaaccagg

SEQ ID NO: 4123691 - DNA, 25 bp, Homo sapien
aagacctaaacaaagcaccaaggct

SEQ ID NO: 4123692 - DNA, 25 bp, Homo sapien
agttgggaccattatcttatattca

SEQ ID NO: 4123693 - DNA, 25 bp, Homo sapien
gatatacaccaaaaacacagacgac

SEQ ID NO: 4123694 - DNA, 25 bp, Homo sapien
tggtaaagtacaccgctgcattcac

SEQ ID NO: 4123695 - DNA, 25 bp, Homo sapien
gctggagcgcagtgcaatggcacaa

SEQ ID NO: 4123696 - DNA, 25 bp, Homo sapien
tctcagctcaccacaacctccacct

SEQ ID NO: 4123697 - DNA, 25 bp, Homo sapien
acctcctgggttcaagcaattctcc

SEQ ID NO: 4123698 - DNA, 25 bp, Homo sapien
tcttccagcgtgtagtcaataaatg

SEQ ID NO: 4123699 - DNA, 25 bp, Homo sapien
tagacttgaagtagtcaaccagggc

SEQ ID NO: 4123700 - DNA, 25 bp, Homo sapien
tgacttctgattgacccaactctag

SEQ ID NO: 4123701 - DNA, 25 bp, Homo sapien
caaccagggcaactaaatagctgtc

SEQ ID NO: 4123702 - DNA, 25 bp, Homo sapien
ttggactcttggcatacttgccgcc

SEQ ID NO: 4123703 - DNA, 25 bp, Homo sapien
gactcttggcatacttgccgcctct

SEQ ID NO: 4123704 - DNA, 25 bp, Homo sapien
tcttggcatacttgccgcctctaat

SEQ ID NO: 4123705 - DNA, 25 bp, Homo sapien
tggactcttggcatacttgccgcct

SEQ ID NO: 4123706 - DNA, 25 bp, Homo sapien
tactggaactagatcttaaaatatc

SEQ ID NO: 4123707 - DNA, 25 bp, Homo sapien
attttattactactggaactagatc

SEQ ID NO: 4123708 - DNA, 25 bp, Homo sapien
tattactactggaactagatcttaa

SEQ ID NO: 4123709 - DNA, 25 bp, Homo sapien
tactactggaactagatcttaaaat

SEQ ID NO: 4123710 - DNA, 25 bp, Homo sapien
ccacattatgtttagttatcatact

SEQ ID NO: 4123711 - DNA, 25 bp, Homo sapien
cacattatgtttagttatcatactt

SEQ ID NO: 4123712 - DNA, 25 bp, Homo sapien
tcctgggcatttcacgttcaggaag

SEQ ID NO: 4123713 - DNA, 25 bp, Homo sapien
ttcacgttcaggaagtaagaattgg

SEQ ID NO: 4123714 - DNA, 25 bp, Homo sapien
ctattgtgcatgactgacgaccatg

SEQ ID NO: 4123715 - DNA, 25 bp, Homo sapien
catgactgacgaccatggtgatttt

SEQ ID NO: 4123716 - DNA, 25 bp, Homo sapien
ctctggaagagagttagactaaaca

SEQ ID NO: 4123717 - DNA, 25 bp, Homo sapien
tcttgtccaaaatttcagtagtgaa

SEQ ID NO: 4123718 - DNA, 25 bp, Homo sapien
cttccagtttagaggacaacctctc

SEQ ID NO: 4123719 - DNA, 25 bp, Homo sapien
cagtagtgaaggtgttaagaaactc

SEQ ID NO: 4123720 - DNA, 25 bp, Homo sapien
acttctcagacggggtggttgccag

SEQ ID NO: 4123721 - DNA, 25 bp, Homo sapien
tcagacggggtggttgccaggcaga

SEQ ID NO: 4123722 - DNA, 25 bp, Homo sapien
ttctcagacggggtggttgccaggc

SEQ ID NO: 4123723 - DNA, 25 bp, Homo sapien
tctcagacggggtggttgccaggca

SEQ ID NO: 4123724 - DNA, 25 bp, Homo sapien
ggggtggctgccgggcggagacgct

SEQ ID NO: 4123725 - DNA, 25 bp, Homo sapien
gggtggctgccgggcggagacgctc

SEQ ID NO: 4123726 - DNA, 25 bp, Homo sapien
gtggctgccgggcggagacgctcct

SEQ ID NO: 4123727 - DNA, 25 bp, Homo sapien
ggtggctgccgggcggagacgctcc

SEQ ID NO: 4123728 - DNA, 25 bp, Homo sapien
ctcccggacggcacggctggccagg

SEQ ID NO: 4123729 - DNA, 25 bp, Homo sapien
cggacggcacggctggccaggcggg

SEQ ID NO: 4123730 - DNA, 25 bp, Homo sapien
gggtggctggccgggctgaggggct

SEQ ID NO: 4123731 - DNA, 25 bp, Homo sapien
tggctggccgggctgaggggctcct

SEQ ID NO: 4123732 - DNA, 25 bp, Homo sapien
aagccgccattgtcatcctggcccg

SEQ ID NO: 4123733 - DNA, 25 bp, Homo sapien
agccgccattgtcatcctggcccgt

SEQ ID NO: 4123734 - DNA, 25 bp, Homo sapien
ggcccgttctcaatgagctagtggg

SEQ ID NO: 4123735 - DNA, 25 bp, Homo sapien
ccgttctcaatgagctagtgggcac

SEQ ID NO: 4123736 - DNA, 25 bp, Homo sapien
tttttatacatgatgtgtgaggtag

SEQ ID NO: 4123737 - DNA, 25 bp, Homo sapien
tatacatgatgtgtgaggtaggaat

SEQ ID NO: 4123738 - DNA, 25 bp, Homo sapien
ggattataggtgtaatttatgtttc

SEQ ID NO: 4123739 - DNA, 25 bp, Homo sapien
tttatacatgatgtgtgaggtagga

SEQ ID NO: 4123740 - DNA, 25 bp, Homo sapien
tctgttctggacattccatattaat

SEQ ID NO: 4123741 - DNA, 25 bp, Homo sapien
ataatgcttttaggttcatccatgt

SEQ ID NO: 4123742 - DNA, 25 bp, Homo sapien
catacaataaatggcctttctgtgt

SEQ ID NO: 4123743 - DNA, 25 bp, Homo sapien
tggcaaccactaatcatcttcctgt

SEQ ID NO: 4123744 - DNA, 25 bp, Homo sapien
taccaccattatctaagtccagaac

SEQ ID NO: 4123745 - DNA, 25 bp, Homo sapien
caactaccaccattatctaagtcca

SEQ ID NO: 4123746 - DNA, 25 bp, Homo sapien
actaccaccattatctaagtccaga

SEQ ID NO: 4123747 - DNA, 25 bp, Homo sapien
aactaccaccattatctaagtccag

SEQ ID NO: 4123748 - DNA, 25 bp, Homo sapien
cagcacttttagaaccaggttattg

SEQ ID NO: 4123749 - DNA, 25 bp, Homo sapien
ggcagttcatgtatatagtcaattt

SEQ ID NO: 4123750 - DNA, 25 bp, Homo sapien
gattaagcgtgagtagttgctatgt

SEQ ID NO: 4123751 - DNA, 25 bp, Homo sapien
tttccttaagatgtgagaaaatctg

SEQ ID NO: 4123752 - DNA, 25 bp, Homo sapien
tgctttaggacccaagctcggatga

SEQ ID NO: 4123753 - DNA, 25 bp, Homo sapien
ctgttacagtattgctccccagggc

SEQ ID NO: 4123754 - DNA, 25 bp, Homo sapien
gatgaaatacgtgttcctcgcgaag

SEQ ID NO: 4123755 - DNA, 25 bp, Homo sapien
tagtgttacccagctttctactgga

SEQ ID NO: 4123756 - DNA, 25 bp, Homo sapien
gccgcaggcggggtccgattggagg

SEQ ID NO: 4123757 - DNA, 25 bp, Homo sapien
cctgcggcagctgggtaccccacgg

SEQ ID NO: 4123758 - DNA, 25 bp, Homo sapien
tcctcacggctcttcccggcgctct

SEQ ID NO: 4123759 - DNA, 25 bp, Homo sapien
gcggcgggtaggtgcagccgcaggc

SEQ ID NO: 4123760 - DNA, 25 bp, Homo sapien
agtcgatcggcctgcggtccgcttc

SEQ ID NO: 4123761 - DNA, 25 bp, Homo sapien
cttcggcattcgcaggccgcaggcg

SEQ ID NO: 4123762 - DNA, 25 bp, Homo sapien
tagaacagcgaaggcagtcgatcgg

SEQ ID NO: 4123763 - DNA, 25 bp, Homo sapien
gagcgacggccatcatagaacagcg

SEQ ID NO: 4123764 - DNA, 25 bp, Homo sapien
tgtaataggcatacaagggatgcag

SEQ ID NO: 4123765 - DNA, 25 bp, Homo sapien
tgcccagaataggtggttctatgct

SEQ ID NO: 4123766 - DNA, 25 bp, Homo sapien
ttgtgatatttggactgaagcagga

SEQ ID NO: 4123767 - DNA, 25 bp, Homo sapien
gaatgaacctgtactttgagatgca

SEQ ID NO: 4123768 - DNA, 25 bp, Homo sapien
tatgattatagccaggaagcagatc

SEQ ID NO: 4123769 - DNA, 25 bp, Homo sapien
cagagagagcaattatgattatagc

SEQ ID NO: 4123770 - DNA, 25 bp, Homo sapien
gagagcaattatgattatagccagg

SEQ ID NO: 4123771 - DNA, 25 bp, Homo sapien
gcaattatgattatagccaggaagc

SEQ ID NO: 4123772 - DNA, 25 bp, Homo sapien
ctcgaaagatgtcaaaactgtaccc

SEQ ID NO: 4123773 - DNA, 25 bp, Homo sapien
gctgctatggtcagtggggggtctc

SEQ ID NO: 4123774 - DNA, 25 bp, Homo sapien
tctcctgcgtggcttctgatgcctg

SEQ ID NO: 4123775 - DNA, 25 bp, Homo sapien
cagctctcctgcgtggcttctgatg

SEQ ID NO: 4123776 - DNA, 25 bp, Homo sapien
tgcgtggcttctgatgcctgctgag

SEQ ID NO: 4123777 - DNA, 25 bp, Homo sapien
ggtgtttacaccgtagacattagtg

SEQ ID NO: 4123778 - DNA, 25 bp, Homo sapien
tacactctgtaggtgtttacaccgt

SEQ ID NO: 4123779 - DNA, 25 bp, Homo sapien
gacattagtgccaattgcctgggat

SEQ ID NO: 4123780 - DNA, 25 bp, Homo sapien
caccgtagacattagtgccaattgc

SEQ ID NO: 4123781 - DNA, 25 bp, Homo sapien
aaaaatagcacttaaagaggctggg

SEQ ID NO: 4123782 - DNA, 25 bp, Homo sapien
ctggccaggatttactcttaaaaat

SEQ ID NO: 4123783 - DNA, 25 bp, Homo sapien
aatagcacttaaagaggctgggcac

SEQ ID NO: 4123784 - DNA, 25 bp, Homo sapien
tcttaaaaatagcacttaaagaggc

SEQ ID NO: 4123785 - DNA, 25 bp, Homo sapien
caccataatcagctaaggctaagcc

SEQ ID NO: 4123786 - DNA, 25 bp, Homo sapien
cccatactctggctgaggcgaaggt

SEQ ID NO: 4123787 - DNA, 25 bp, Homo sapien
gacaggcatggtgaggccaccataa

SEQ ID NO: 4123788 - DNA, 25 bp, Homo sapien
tgaggcgaaggtcgttcctccaccc

SEQ ID NO: 4123789 - DNA, 25 bp, Homo sapien
ttgggcatcatgtctctccctcgat

SEQ ID NO: 4123790 - DNA, 25 bp, Homo sapien
gaaattgttcccacatctgggcaga

SEQ ID NO: 4123791 - DNA, 25 bp, Homo sapien
tcatgatgggtcctgaaccaatagt

SEQ ID NO: 4123792 - DNA, 25 bp, Homo sapien
ggcacctcctgggtactcaggttct

SEQ ID NO: 4123793 - DNA, 25 bp, Homo sapien
gaagccctgggcattaggagaaggg

SEQ ID NO: 4123794 - DNA, 25 bp, Homo sapien
aaaatggtcatattatgagtcaaag

SEQ ID NO: 4123795 - DNA, 25 bp, Homo sapien
tgttggatggaccacccaagggtga

SEQ ID NO: 4123796 - DNA, 25 bp, Homo sapien
ctggcatggacatgactggatagaa

SEQ ID NO: 4123797 - DNA, 25 bp, Homo sapien
gctgctatttaagccaagaactgag

SEQ ID NO: 4123798 - DNA, 25 bp, Homo sapien
ttatcggacagaaagctaggtgctc

SEQ ID NO: 4123799 - DNA, 25 bp, Homo sapien
gaaatactgccattctaggtagggt

SEQ ID NO: 4123800 - DNA, 25 bp, Homo sapien
tattatcccagggactacctcggct

SEQ ID NO: 4123801 - DNA, 25 bp, Homo sapien
tgcagcctcagtgccgaccgcgacc

SEQ ID NO: 4123802 - DNA, 25 bp, Homo sapien
agtgccgaccgcgaccccgagacca

SEQ ID NO: 4123803 - DNA, 25 bp, Homo sapien
agcctcagtgccgaccgcgaccccg

SEQ ID NO: 4123804 - DNA, 25 bp, Homo sapien
cctcagtgccgaccgcgaccccgag

SEQ ID NO: 4123805 - DNA, 25 bp, Homo sapien
cttctttattgggtcgcaataccct

SEQ ID NO: 4123806 - DNA, 25 bp, Homo sapien
taacttctttattgggtcgcaatac

SEQ ID NO: 4123807 - DNA, 25 bp, Homo sapien
gtaacttctttattgggtcgcaata

SEQ ID NO: 4123808 - DNA, 25 bp, Homo sapien
atgtgaacattctataattcagcca

SEQ ID NO: 4123809 - DNA, 25 bp, Homo sapien
aaaatgtgaacattctataattcag

SEQ ID NO: 4123810 - DNA, 25 bp, Homo sapien
gaacattctataattcagccagtct

SEQ ID NO: 4123811 - DNA, 25 bp, Homo sapien
tttgattcttcatggttttatttct

SEQ ID NO: 4123812 - DNA, 25 bp, Homo sapien
cagcctgagcctgatgcaaaagccc

SEQ ID NO: 4123813 - DNA, 25 bp, Homo sapien
tctgcctccctctagcccacaggag

SEQ ID NO: 4123814 - DNA, 25 bp, Homo sapien
cccagcctgagcctgatgcaaaagc

SEQ ID NO: 4123815 - DNA, 25 bp, Homo sapien
atgcaaaagcccaaccaggagcctt

SEQ ID NO: 4123816 - DNA, 25 bp, Homo sapien
agggagtggccatccctttgggtct

SEQ ID NO: 4123817 - DNA, 25 bp, Homo sapien
caccagtgaccaccgccccagggag

SEQ ID NO: 4123818 - DNA, 25 bp, Homo sapien
cagcaggagcaccagtgaccaccgc

SEQ ID NO: 4123819 - DNA, 25 bp, Homo sapien
aggagcaccagtgaccaccgcccca

SEQ ID NO: 4123820 - DNA, 25 bp, Homo sapien
tccgaggaccgctggttgatgccat

SEQ ID NO: 4123821 - DNA, 25 bp, Homo sapien
ccatctatagcacgaagcacagctt

SEQ ID NO: 4123822 - DNA, 25 bp, Homo sapien
cggtagaggttagcatccgaggacc

SEQ ID NO: 4123823 - DNA, 25 bp, Homo sapien
tccaggaggcggtagaggttagcat

SEQ ID NO: 4123824 - DNA, 25 bp, Homo sapien
tgtgaagctcacaggctttggcgtg

SEQ ID NO: 4123825 - DNA, 25 bp, Homo sapien
aggctttggcgtgtctgggtcccca

SEQ ID NO: 4123826 - DNA, 25 bp, Homo sapien
gtccttcttgaagtcacaatcctct

SEQ ID NO: 4123827 - DNA, 25 bp, Homo sapien
caatcctctggtgactgctgtgtcg

SEQ ID NO: 4123828 - DNA, 25 bp, Homo sapien
cttatcacaactgatgtcaaaggag

SEQ ID NO: 4123829 - DNA, 25 bp, Homo sapien
tcacaactgatgtcaaaggagcccc

SEQ ID NO: 4123830 - DNA, 25 bp, Homo sapien
aactgatgtcaaaggagcccctggc

SEQ ID NO: 4123831 - DNA, 25 bp, Homo sapien
gatgtcaaaggagcccctggcctgg

SEQ ID NO: 4123832 - DNA, 25 bp, Homo sapien
ccagcagggcaaatctcttgttatc

SEQ ID NO: 4123833 - DNA, 25 bp, Homo sapien
gattccgcaaaaaatccttgattct

SEQ ID NO: 4123834 - DNA, 25 bp, Homo sapien
tttccggaagaaatcacccagcagg

SEQ ID NO: 4123835 - DNA, 25 bp, Homo sapien
tctgtcctgggtacaagattccgca

SEQ ID NO: 4123836 - DNA, 25 bp, Homo sapien
tttctcagagcccagaagcctgagc

SEQ ID NO: 4123837 - DNA, 25 bp, Homo sapien
ttatttctcagagcccagaagcctg

SEQ ID NO: 4123838 - DNA, 25 bp, Homo sapien
ctcagagcccagaagcctgagccag

SEQ ID NO: 4123839 - DNA, 25 bp, Homo sapien
tgctctcatagtttatttctcagag

SEQ ID NO: 4123840 - DNA, 25 bp, Homo sapien
ccagcatgggtctgtttaacttgtc

SEQ ID NO: 4123841 - DNA, 25 bp, Homo sapien
gaatggtcgtttttcatgggcagcc

SEQ ID NO: 4123842 - DNA, 25 bp, Homo sapien
gagtccagtgtagtctgctgccaca

SEQ ID NO: 4123843 - DNA, 25 bp, Homo sapien
taacttgtcgattccatcgatgttc

SEQ ID NO: 4123844 - DNA, 25 bp, Homo sapien
gatggattaccatgccttgtgtgat

SEQ ID NO: 4123845 - DNA, 25 bp, Homo sapien
tgccttgtgtgatagtatgtccaca

SEQ ID NO: 4123846 - DNA, 25 bp, Homo sapien
gatagtatgtccacatggccgtggt

SEQ ID NO: 4123847 - DNA, 25 bp, Homo sapien
cagatggattaccatgccttgtgtg

SEQ ID NO: 4123848 - DNA, 25 bp, Homo sapien
gcctcccgtgctggaatcactatgc

SEQ ID NO: 4123849 - DNA, 25 bp, Homo sapien
cactatgccaaatttggcgatgcag

SEQ ID NO: 4123850 - DNA, 25 bp, Homo sapien
tggaatcactatgccaaatttggcg

SEQ ID NO: 4123851 - DNA, 25 bp, Homo sapien
ggcacacttgccagacttccttagc

SEQ ID NO: 4123852 - DNA, 25 bp, Homo sapien
tagcagcaccgtgtgtgaaacggat

SEQ ID NO: 4123853 - DNA, 25 bp, Homo sapien
cgcacgaagcaaacgaggtagcagc

SEQ ID NO: 4123854 - DNA, 25 bp, Homo sapien
caccgtgtgtgaaacggattagaat

SEQ ID NO: 4123855 - DNA, 25 bp, Homo sapien
gcacgcacgcacgaagcaaacgagg

SEQ ID NO: 4123856 - DNA, 25 bp, Homo sapien
cgcagtccagcccagtagctgctcc

SEQ ID NO: 4123857 - DNA, 25 bp, Homo sapien
cttccgcagtccagcccagtagctg

SEQ ID NO: 4123858 - DNA, 25 bp, Homo sapien
ccagcccagtagctgctcccgcggg

SEQ ID NO: 4123859 - DNA, 25 bp, Homo sapien
gtccagcccagtagctgctcccgcg

SEQ ID NO: 4123860 - DNA, 25 bp, Homo sapien
ccacgcgcatccctggtggatacgg

SEQ ID NO: 4123861 - DNA, 25 bp, Homo sapien
gggaggcgatctcgcggccccgact

SEQ ID NO: 4123862 - DNA, 25 bp, Homo sapien
ccccaggggagtaagagccgctgta

SEQ ID NO: 4123863 - DNA, 25 bp, Homo sapien
tgtaggggtagtcagcgcctcacac

SEQ ID NO: 4123864 - DNA, 25 bp, Homo sapien
cagggccaggcagaatccttggcag

SEQ ID NO: 4123865 - DNA, 25 bp, Homo sapien
gatatctaggcttctcttcccaggg

SEQ ID NO: 4123866 - DNA, 25 bp, Homo sapien
cagatatctaggcttctcttcccag

SEQ ID NO: 4123867 - DNA, 25 bp, Homo sapien
gccaggcagaatccttggcaggcag

SEQ ID NO: 4123868 - DNA, 25 bp, Homo sapien
tgctgcttagccagttcatccagcc

SEQ ID NO: 4123869 - DNA, 25 bp, Homo sapien
tgttttgctgcttagccagttcatc

SEQ ID NO: 4123870 - DNA, 25 bp, Homo sapien
catgctgccccgaaagatcacaggc

SEQ ID NO: 4123871 - DNA, 25 bp, Homo sapien
gaggcatgctgccccgaaagatcac

SEQ ID NO: 4123872 - DNA, 25 bp, Homo sapien
tctggccagtgccccatctgccact

SEQ ID NO: 4123873 - DNA, 25 bp, Homo sapien
cctctggccagtgccccatctgcca

SEQ ID NO: 4123874 - DNA, 25 bp, Homo sapien
tggccagtgccccatctgccactgg

SEQ ID NO: 4123875 - DNA, 25 bp, Homo sapien
ccctctggccagtgccccatctgcc

SEQ ID NO: 4123876 - DNA, 25 bp, Homo sapien
tcagcttccagctcgtggtttcagg

SEQ ID NO: 4123877 - DNA, 25 bp, Homo sapien
caactataattgaaggccgtatcac

SEQ ID NO: 4123878 - DNA, 25 bp, Homo sapien
gactcccaaggagagtccaaatcct

SEQ ID NO: 4123879 - DNA, 25 bp, Homo sapien
ttgaaggccgtatcacagcgactcc

SEQ ID NO: 4123880 - DNA, 25 bp, Homo sapien
cagcttccgtgtgggctcctagcag

SEQ ID NO: 4123881 - DNA, 25 bp, Homo sapien
tgggcagcttccgtgtgggctccta

SEQ ID NO: 4123882 - DNA, 25 bp, Homo sapien
tccgtgtgggctcctagcaggccca

SEQ ID NO: 4123883 - DNA, 25 bp, Homo sapien
caagatggcggcctttgaggctctg

SEQ ID NO: 4123884 - DNA, 25 bp, Homo sapien
acttgggtttattatagttctgcaa

SEQ ID NO: 4123885 - DNA, 25 bp, Homo sapien
cacacttgggtttattatagttctg

SEQ ID NO: 4123886 - DNA, 25 bp, Homo sapien
ttattatagttctgcaaagctggtt

SEQ ID NO: 4123887 - DNA, 25 bp, Homo sapien
ggtttattatagttctgcaaagctg

SEQ ID NO: 4123888 - DNA, 25 bp, Homo sapien
tgatcaccacaatacttgagacagg

SEQ ID NO: 4123889 - DNA, 25 bp, Homo sapien
ttgatcaccacaatacttgagacag

SEQ ID NO: 4123890 - DNA, 25 bp, Homo sapien
tatttgatcaccacaatacttgaga

SEQ ID NO: 4123891 - DNA, 25 bp, Homo sapien
tttgatcaccacaatacttgagaca

SEQ ID NO: 4123892 - DNA, 25 bp, Homo sapien
tccactctgcctcagtgaaaagcac

SEQ ID NO: 4123893 - DNA, 25 bp, Homo sapien
ccactctgcctcagtgaaaagcaca

SEQ ID NO: 4123894 - DNA, 25 bp, Homo sapien
ttccactctgcctcagtgaaaagca

SEQ ID NO: 4123895 - DNA, 25 bp, Homo sapien
cagattcctgagattttccagcatc

SEQ ID NO: 4123896 - DNA, 25 bp, Homo sapien
ccaatgagaccagattcctgagatt

SEQ ID NO: 4123897 - DNA, 25 bp, Homo sapien
aatgagaccagattcctgagatttt

SEQ ID NO: 4123898 - DNA, 25 bp, Homo sapien
agaccagattcctgagattttccag

SEQ ID NO: 4123899 - DNA, 25 bp, Homo sapien
aagggcaggtatggacttctggctt

SEQ ID NO: 4123900 - DNA, 25 bp, Homo sapien
ggcaggtatggacttctggctttga

SEQ ID NO: 4123901 - DNA, 25 bp, Homo sapien
gcaagaagggcaggtatggacttct

SEQ ID NO: 4123902 - DNA, 25 bp, Homo sapien
caggtatggacttctggctttgatt

SEQ ID NO: 4123903 - DNA, 25 bp, Homo sapien
tatcagaaggatgttgtgactgtgg

SEQ ID NO: 4123904 - DNA, 25 bp, Homo sapien
tcctgcatggaaacctggaatagga

SEQ ID NO: 4123905 - DNA, 25 bp, Homo sapien
ccttccactcgttgatcttctgctt

SEQ ID NO: 4123906 - DNA, 25 bp, Homo sapien
ctgggtggagttgatttcctgcatg

SEQ ID NO: 4123907 - DNA, 25 bp, Homo sapien
ttgtactccaaaacaagggtctgac

SEQ ID NO: 4123908 - DNA, 25 bp, Homo sapien
tttgtactccaaaacaagggtctga

SEQ ID NO: 4123909 - DNA, 25 bp, Homo sapien
tcatttgtactccaaaacaagggtc

SEQ ID NO: 4123910 - DNA, 25 bp, Homo sapien
ctttcatttgtactccaaaacaagg

SEQ ID NO: 4123911 - DNA, 25 bp, Homo sapien
tttctccccggagtgtgtactcagg

SEQ ID NO: 4123912 - DNA, 25 bp, Homo sapien
gacttctggttaaaagctagtgcac

SEQ ID NO: 4123913 - DNA, 25 bp, Homo sapien
ggactgactcaactataaagcctcg

SEQ ID NO: 4123914 - DNA, 25 bp, Homo sapien
taatattctgttgcctccccaagag

SEQ ID NO: 4123915 - DNA, 25 bp, Homo sapien
ggcttatcccccgtgtgaattctct

SEQ ID NO: 4123916 - DNA, 25 bp, Homo sapien
aaggcttatcccccgtgtgaattct

SEQ ID NO: 4123917 - DNA, 25 bp, Homo sapien
ataaggcttatcccccgtgtgaatt

SEQ ID NO: 4123918 - DNA, 25 bp, Homo sapien
gcttatcccccgtgtgaattctctg

SEQ ID NO: 4123919 - DNA, 25 bp, Homo sapien
atgatctccttacaaagcctcggcc

SEQ ID NO: 4123920 - DNA, 25 bp, Homo sapien
agacatgatctccttacaaagcctc

SEQ ID NO: 4123921 - DNA, 25 bp, Homo sapien
ctcatctgaatgtatcctctggtgt

SEQ ID NO: 4123922 - DNA, 25 bp, Homo sapien
cttctcatctgaatgtatcctctgg

SEQ ID NO: 4123923 - DNA, 25 bp, Homo sapien
ggaggagagttgatttagcacgaaa

SEQ ID NO: 4123924 - DNA, 25 bp, Homo sapien
tgatttcgtgataaagccttgccca

SEQ ID NO: 4123925 - DNA, 25 bp, Homo sapien
gatgtacactaagagcggacttgag

SEQ ID NO: 4123926 - DNA, 25 bp, Homo sapien
tctccgatgtgatttgagcgacgac

SEQ ID NO: 4123927 - DNA, 25 bp, Homo sapien
tctgttgaggagtatcttccggcca

SEQ ID NO: 4123928 - DNA, 25 bp, Homo sapien
gcgtacagtggatagatttgactcc

SEQ ID NO: 4123929 - DNA, 25 bp, Homo sapien
caagtaatgatgtccacgtacagct

SEQ ID NO: 4123930 - DNA, 25 bp, Homo sapien
tcctctgacacgtgacaagtaatga

SEQ ID NO: 4123931 - DNA, 25 bp, Homo sapien
tcactccatgaaggtttctcccgag

SEQ ID NO: 4123932 - DNA, 25 bp, Homo sapien
cacagttgcagaaggaagtagtcag

SEQ ID NO: 4123933 - DNA, 25 bp, Homo sapien
gtccctcagattgtagggctggaga

SEQ ID NO: 4123934 - DNA, 25 bp, Homo sapien
gatgcaaagaccattcctccaaggg

SEQ ID NO: 4123935 - DNA, 25 bp, Homo sapien
ggacctggtaaaggtgtccctcaga

SEQ ID NO: 4123936 - DNA, 25 bp, Homo sapien
cccaagggagtaaggcaaactgtca

SEQ ID NO: 4123937 - DNA, 25 bp, Homo sapien
cacagggtatcaggtagggctagcc

SEQ ID NO: 4123938 - DNA, 25 bp, Homo sapien
tgtaatttagccacccgagcatggc

SEQ ID NO: 4123939 - DNA, 25 bp, Homo sapien
cgagcatggctaaaacactgggtac

SEQ ID NO: 4123940 - DNA, 25 bp, Homo sapien
aaggtttgtaaacgcgtgtctagct

SEQ ID NO: 4123941 - DNA, 25 bp, Homo sapien
ggaaaatttttgtctagctagaggc

SEQ ID NO: 4123942 - DNA, 25 bp, Homo sapien
acgccgcacttgaattctcaccggg

SEQ ID NO: 4123943 - DNA, 25 bp, Homo sapien
tgggctcgcatgcagcccgagactc

SEQ ID NO: 4123944 - DNA, 25 bp, Homo sapien
ctgggttggtcgaggccggagccag

SEQ ID NO: 4123945 - DNA, 25 bp, Homo sapien
ggaatgatggtgtcccacccttccc

SEQ ID NO: 4123946 - DNA, 25 bp, Homo sapien
cactttctatggcttttagctcagg

SEQ ID NO: 4123947 - DNA, 25 bp, Homo sapien
gggctcgcaggccagcatgagttcc

SEQ ID NO: 4123948 - DNA, 25 bp, Homo sapien
tctgtgtggtatctcgacagtgcct

SEQ ID NO: 4123949 - DNA, 25 bp, Homo sapien
ctgacagtcctcttgccggaccaga

SEQ ID NO: 4123950 - DNA, 25 bp, Homo sapien
taatttacttctgcggaacggtgcc

SEQ ID NO: 4123951 - DNA, 25 bp, Homo sapien
taaaccctttgaagagagactcaga

SEQ ID NO: 4123952 - DNA, 25 bp, Homo sapien
tatagtatatccttagtcgacccaa

SEQ ID NO: 4123953 - DNA, 25 bp, Homo sapien
tattatttaccatactgggtcctgg

SEQ ID NO: 4123954 - DNA, 25 bp, Homo sapien
tatctttccaaccttttagcctgag

SEQ ID NO: 4123955 - DNA, 25 bp, Homo sapien
tatcaggtggtatatctttgagacc

SEQ ID NO: 4123956 - DNA, 25 bp, Homo sapien
cacttgtgtcaatcaagatcacaag

SEQ ID NO: 4123957 - DNA, 25 bp, Homo sapien
ccacttgtgtcaatcaagatcacaa

SEQ ID NO: 4123958 - DNA, 25 bp, Homo sapien
tattcaaggttgagttacaaggccc

SEQ ID NO: 4123959 - DNA, 25 bp, Homo sapien
gatccagatccaaagacgaggtcca

SEQ ID NO: 4123960 - DNA, 25 bp, Homo sapien
gatgcagttccaaagacgcgggtgt

SEQ ID NO: 4123961 - DNA, 25 bp, Homo sapien
ggaggtccaagtcccatgtccaaga

SEQ ID NO: 4123962 - DNA, 25 bp, Homo sapien
gactacgggcatgctccattatgct

SEQ ID NO: 4123963 - DNA, 25 bp, Homo sapien
actacgggcatgctccattatgctg

SEQ ID NO: 4123964 - DNA, 25 bp, Homo sapien
aggcattcaacctgtaactaactgt

SEQ ID NO: 4123965 - DNA, 25 bp, Homo sapien
aaggcattcaacctgtaactaactg

SEQ ID NO: 4123966 - DNA, 25 bp, Homo sapien
tgtactttccataggaaggccttcc

SEQ ID NO: 4123967 - DNA, 25 bp, Homo sapien
gcttgatggacgttctctacctgct

SEQ ID NO: 4123968 - DNA, 25 bp, Homo sapien
tacatcctgcagtccaactaggttc

SEQ ID NO: 4123969 - DNA, 25 bp, Homo sapien
tacctgctagggtctttacccatga

SEQ ID NO: 4123970 - DNA, 25 bp, Homo sapien
tgtgtgggcataccataatctgttc

SEQ ID NO: 4123971 - DNA, 25 bp, Homo sapien
agctgtgcacactagttacctattg

SEQ ID NO: 4123972 - DNA, 25 bp, Homo sapien
gaaacaccgagtcttgcacccatgt

SEQ ID NO: 4123973 - DNA, 25 bp, Homo sapien
tgtctgaaatcattctccggtgtgt

SEQ ID NO: 4123974 - DNA, 25 bp, Homo sapien
agcctgggtgacagcgagatcccgt

SEQ ID NO: 4123975 - DNA, 25 bp, Homo sapien
agagacagcgcatcctatccccttt

SEQ ID NO: 4123976 - DNA, 25 bp, Homo sapien
gaactacttaacaccttctgaccag

SEQ ID NO: 4123977 - DNA, 25 bp, Homo sapien
tgagcactgggctaaagtggttgta

SEQ ID NO: 4123978 - DNA, 25 bp, Homo sapien
tgtgacgtgtcaattatagagtttc

SEQ ID NO: 4123979 - DNA, 25 bp, Homo sapien
ttatgatggtaggactgaggctgcc

SEQ ID NO: 4123980 - DNA, 25 bp, Homo sapien
tcagtagtttagaggtccagtaggc

SEQ ID NO: 4123981 - DNA, 25 bp, Homo sapien
aaagtcaaggtattggctgaccagg

SEQ ID NO: 4123982 - DNA, 25 bp, Homo sapien
tgtttgcttaaggtctcacaaggcc

SEQ ID NO: 4123983 - DNA, 25 bp, Homo sapien
tagcacctcagttgctgtccatcaa

SEQ ID NO: 4123984 - DNA, 25 bp, Homo sapien
ggtgtttatccagcagactttttgg

SEQ ID NO: 4123985 - DNA, 25 bp, Homo sapien
ccaattctagatttgataggagagc

SEQ ID NO: 4123986 - DNA, 25 bp, Homo sapien
tattaacaggtttgatttgggcaca

SEQ ID NO: 4123987 - DNA, 25 bp, Homo sapien
ctcgtcccgtccgcggcaaatgcat

SEQ ID NO: 4123988 - DNA, 25 bp, Homo sapien
cctctcgtcccgtccgcggcaaatg

SEQ ID NO: 4123989 - DNA, 25 bp, Homo sapien
tctcgtcccgtccgcggcaaatgca

SEQ ID NO: 4123990 - DNA, 25 bp, Homo sapien
ctctcgtcccgtccgcggcaaatgc

SEQ ID NO: 4123991 - DNA, 25 bp, Homo sapien
gcggttcccacaagcgagttccggc

SEQ ID NO: 4123992 - DNA, 25 bp, Homo sapien
gttccggcgcccagaacggcttcat

SEQ ID NO: 4123993 - DNA, 25 bp, Homo sapien
ctgcgtagcgctgcgccagcacccg

SEQ ID NO: 4123994 - DNA, 25 bp, Homo sapien
ccagcactccctcccgccgagggcg

SEQ ID NO: 4123995 - DNA, 25 bp, Homo sapien
tccatcggtgtctctgctggcgggc

SEQ ID NO: 4123996 - DNA, 25 bp, Homo sapien
tatcgagcgcttaagttctttgccc

SEQ ID NO: 4123997 - DNA, 25 bp, Homo sapien
gccctccgcgtacttttgacaaata

SEQ ID NO: 4123998 - DNA, 25 bp, Homo sapien
ttcctaatgacacgtgaaaggccgt

SEQ ID NO: 4123999 - DNA, 25 bp, Homo sapien
ctcaggggtggcgatgctggctgtg

SEQ ID NO: 4124000 - DNA, 25 bp, Homo sapien
cagactcaggggtggcgatgctggc

SEQ ID NO: 4124001 - DNA, 25 bp, Homo sapien
caggggtggcgatgctggctgtggc

SEQ ID NO: 4124002 - DNA, 25 bp, Homo sapien
aggcagactcaggggtggcgatgct

SEQ ID NO: 4124003 - DNA, 25 bp, Homo sapien
tctgtttaactggtttgctgggact

SEQ ID NO: 4124004 - DNA, 25 bp, Homo sapien
ttaactggtttgctgggacttctga

SEQ ID NO: 4124005 - DNA, 25 bp, Homo sapien
ctggaatgccatctgtatcagttgt

SEQ ID NO: 4124006 - DNA, 25 bp, Homo sapien
tcacttattgcagtttgttgcatgc

SEQ ID NO: 4124007 - DNA, 25 bp, Homo sapien
tacatacagaatacctcggcaaagg

SEQ ID NO: 4124008 - DNA, 25 bp, Homo sapien
tagaaggccctatgtgctcaccttg

SEQ ID NO: 4124009 - DNA, 25 bp, Homo sapien
gatttgcctggcagttccctagaga

SEQ ID NO: 4124010 - DNA, 25 bp, Homo sapien
tggaaaccagcctgcgaaaagacat

SEQ ID NO: 4124011 - DNA, 25 bp, Homo sapien
tttcactgtccaagcaaaagggctc

SEQ ID NO: 4124012 - DNA, 25 bp, Homo sapien
tcttataactataaatgggtgcaaa

SEQ ID NO: 4124013 - DNA, 25 bp, Homo sapien
taaaacctcatgtccattaagcagt

SEQ ID NO: 4124014 - DNA, 25 bp, Homo sapien
gttcctggcaactagcaatagactt

SEQ ID NO: 4124015 - DNA, 25 bp, Homo sapien
cttttgccatctgcgcactcaaatc

SEQ ID NO: 4124016 - DNA, 25 bp, Homo sapien
ttgccatctgcgcactcaaatccat

SEQ ID NO: 4124017 - DNA, 25 bp, Homo sapien
tccttttgccatctgcgcactcaaa

SEQ ID NO: 4124018 - DNA, 25 bp, Homo sapien
catgccagttcacttccttttgcca

SEQ ID NO: 4124019 - DNA, 25 bp, Homo sapien
caggtgcactcagaaggtatatggc

SEQ ID NO: 4124020 - DNA, 25 bp, Homo sapien
gagatgactcgcatggcatctgcca

SEQ ID NO: 4124021 - DNA, 25 bp, Homo sapien
gattcagagccattgtcttgggtga

SEQ ID NO: 4124022 - DNA, 25 bp, Homo sapien
ggtgataggcacatgggaaggagat

SEQ ID NO: 4124023 - DNA, 25 bp, Homo sapien
tagcagtggtccatctagagtggct

SEQ ID NO: 4124024 - DNA, 25 bp, Homo sapien
tcagctgtctaagtcatggctgctg

SEQ ID NO: 4124025 - DNA, 25 bp, Homo sapien
tagagtggctactgccaagacactg

SEQ ID NO: 4124026 - DNA, 25 bp, Homo sapien
ccaagtcgtggctgctgatcaagcc

SEQ ID NO: 4124027 - DNA, 25 bp, Homo sapien
ctgccacttatgcaggtttgctcag

SEQ ID NO: 4124028 - DNA, 25 bp, Homo sapien
ccacttatgcaggtttgctcagtga

SEQ ID NO: 4124029 - DNA, 25 bp, Homo sapien
cttatgcaggtttgctcagtgatgg

SEQ ID NO: 4124030 - DNA, 25 bp, Homo sapien
tatgcaggtttgctcagtgatggtg

SEQ ID NO: 4124031 - DNA, 25 bp, Homo sapien
tgggtttctaccttctcgcatttaa

SEQ ID NO: 4124032 - DNA, 25 bp, Homo sapien
cttgggatcttgaatctggtgagtg

SEQ ID NO: 4124033 - DNA, 25 bp, Homo sapien
ggcctctgggtttctaccttctcgc

SEQ ID NO: 4124034 - DNA, 25 bp, Homo sapien
tctgggtttctaccttctcgcattt

SEQ ID NO: 4124035 - DNA, 25 bp, Homo sapien
ataggctttgccaaagtctgcagca

SEQ ID NO: 4124036 - DNA, 25 bp, Homo sapien
tcctctccgggctgctctgaattta

SEQ ID NO: 4124037 - DNA, 25 bp, Homo sapien
ttcatgcggcctgaacccacatcca

SEQ ID NO: 4124038 - DNA, 25 bp, Homo sapien
tgctctgaatttataggctttgcca

SEQ ID NO: 4124039 - DNA, 25 bp, Homo sapien
gctaagtcaggcaatcggatctcca

SEQ ID NO: 4124040 - DNA, 25 bp, Homo sapien
gcttcaaagctaagtcaggcaatcg

SEQ ID NO: 4124041 - DNA, 25 bp, Homo sapien
gattcgcttcaaagctaagtcaggc

SEQ ID NO: 4124042 - DNA, 25 bp, Homo sapien
ggaaagagaagattcgcttcaaagc

SEQ ID NO: 4124043 - DNA, 25 bp, Homo sapien
aggtaatcactgtctgcaatcctat

SEQ ID NO: 4124044 - DNA, 25 bp, Homo sapien
cactgtctgcaatcctattccaatg

SEQ ID NO: 4124045 - DNA, 25 bp, Homo sapien
ggtaatcactgtctgcaatcctatt

SEQ ID NO: 4124046 - DNA, 25 bp, Homo sapien
aatcactgtctgcaatcctattcca

SEQ ID NO: 4124047 - DNA, 25 bp, Homo sapien
tgtgcccaggtgttgattggtgaag

SEQ ID NO: 4124048 - DNA, 25 bp, Homo sapien
tttgtagataaagttatgcggctgt

SEQ ID NO: 4124049 - DNA, 25 bp, Homo sapien
gtgccaatgccaaccgaagctcctt

SEQ ID NO: 4124050 - DNA, 25 bp, Homo sapien
tggtgaagttgctgcagtcccatct

SEQ ID NO: 4124051 - DNA, 25 bp, Homo sapien
tgagagataagccaactccgtctca

SEQ ID NO: 4124052 - DNA, 25 bp, Homo sapien
ctgagagataagccaactccgtctc

SEQ ID NO: 4124053 - DNA, 25 bp, Homo sapien
aggcacaaagctcttgctttggaga

SEQ ID NO: 4124054 - DNA, 25 bp, Homo sapien
ccaggcacaaagctcttgctttgga

SEQ ID NO: 4124055 - DNA, 25 bp, Homo sapien
tcccaggcacaaagctcttgctttg

SEQ ID NO: 4124056 - DNA, 25 bp, Homo sapien
tggagatacactacaaatgattgat

SEQ ID NO: 4124057 - DNA, 25 bp, Homo sapien
ggttaccagatttgagaaatggaac

SEQ ID NO: 4124058 - DNA, 25 bp, Homo sapien
tggactgggcttgaccagatcatgg

SEQ ID NO: 4124059 - DNA, 25 bp, Homo sapien
ctgagggagggttaccagatttgag

SEQ ID NO: 4124060 - DNA, 25 bp, Homo sapien
gagaaatggaactcctggactgggc

SEQ ID NO: 4124061 - DNA, 25 bp, Homo sapien
tccatgcaataacagggctgtggca

SEQ ID NO: 4124062 - DNA, 25 bp, Homo sapien
ccatcctttgtaagataggcttcca

SEQ ID NO: 4124063 - DNA, 25 bp, Homo sapien
acagttccacactttgatagttttt

SEQ ID NO: 4124064 - DNA, 25 bp, Homo sapien
gatccatagtgatggcgagatgcat

SEQ ID NO: 4124065 - DNA, 25 bp, Homo sapien
ccatatcaataggaagatatgtgaa

SEQ ID NO: 4124066 - DNA, 25 bp, Homo sapien
aaagcatccccaccatatcaatagg

SEQ ID NO: 4124067 - DNA, 25 bp, Homo sapien
aaccaaagcatccccaccatatcaa

SEQ ID NO: 4124068 - DNA, 25 bp, Homo sapien
gcatccccaccatatcaataggaag

SEQ ID NO: 4124069 - DNA, 25 bp, Homo sapien
tgtaaatgtgtagatgtcacctgca

SEQ ID NO: 4124070 - DNA, 25 bp, Homo sapien
catttcttgtcaggagagcagtgta

SEQ ID NO: 4124071 - DNA, 25 bp, Homo sapien
ggcaaggtacgactgtatgtcccac

SEQ ID NO: 4124072 - DNA, 25 bp, Homo sapien
gaaacatctcttaacccaggcagtg

SEQ ID NO: 4124073 - DNA, 25 bp, Homo sapien
caaattcgggcttcatgaacgagtt

SEQ ID NO: 4124074 - DNA, 25 bp, Homo sapien
tcgggcttcatgaacgagtttttgt

SEQ ID NO: 4124075 - DNA, 25 bp, Homo sapien
ctctttggcaaattcgggcttcatg

SEQ ID NO: 4124076 - DNA, 25 bp, Homo sapien
ggcaaattcgggcttcatgaacgag

SEQ ID NO: 4124077 - DNA, 25 bp, Homo sapien
gaggtgaacgtattgatgccagact

SEQ ID NO: 4124078 - DNA, 25 bp, Homo sapien
aggaggtgaacgtattgatgccaga

SEQ ID NO: 4124079 - DNA, 25 bp, Homo sapien
ggaggtgaacgtattgatgccagac

SEQ ID NO: 4124080 - DNA, 25 bp, Homo sapien
ccagtcttcttggttgttagatcaa

SEQ ID NO: 4124081 - DNA, 25 bp, Homo sapien
gaaaggtagacagaggaacactgcc

SEQ ID NO: 4124082 - DNA, 25 bp, Homo sapien
gcaggcgctggcacataatttatgt

SEQ ID NO: 4124083 - DNA, 25 bp, Homo sapien
gatggtctcagtaaggactctgtga

SEQ ID NO: 4124084 - DNA, 25 bp, Homo sapien
cacataaggaagtaaagatcaggtc

SEQ ID NO: 4124085 - DNA, 25 bp, Homo sapien
catatcactgactgtggtaacaggt

SEQ ID NO: 4124086 - DNA, 25 bp, Homo sapien
cactgaataaaaaagcatagtcccc

SEQ ID NO: 4124087 - DNA, 25 bp, Homo sapien
tccagtggcctgacaaatacatatc

SEQ ID NO: 4124088 - DNA, 25 bp, Homo sapien
gctgccacctggaaacttgcgatct

SEQ ID NO: 4124089 - DNA, 25 bp, Homo sapien
tgatggctgcctgatggtcctcaaa

SEQ ID NO: 4124090 - DNA, 25 bp, Homo sapien
ccagatagggcacttcagatgagct

SEQ ID NO: 4124091 - DNA, 25 bp, Homo sapien
ctcaaatcgttgcagcaggaagcca

SEQ ID NO: 4124092 - DNA, 25 bp, Homo sapien
tgagtggccaaggagtcaaagtcag

SEQ ID NO: 4124093 - DNA, 25 bp, Homo sapien
gagtcaaagtcagatcaaaaagcag

SEQ ID NO: 4124094 - DNA, 25 bp, Homo sapien
gccaaggagtcaaagtcagatcaaa

SEQ ID NO: 4124095 - DNA, 25 bp, Homo sapien
tcaaagtcagatcaaaaagcagtgg

SEQ ID NO: 4124096 - DNA, 25 bp, Homo sapien
catgccacgtgttttccaggtgaca

SEQ ID NO: 4124097 - DNA, 25 bp, Homo sapien
acagagttctcggatgtggtgagca

SEQ ID NO: 4124098 - DNA, 25 bp, Homo sapien
ctcctgaggtatggatggcggcctc

SEQ ID NO: 4124099 - DNA, 25 bp, Homo sapien
tgtacacgtgcacagagttctcgga

SEQ ID NO: 4124100 - DNA, 25 bp, Homo sapien
caccctaagtactatgcttgcatta

SEQ ID NO: 4124101 - DNA, 25 bp, Homo sapien
tcaccctaagtactatgcttgcatt

SEQ ID NO: 4124102 - DNA, 25 bp, Homo sapien
ccctaagtactatgcttgcattatc

SEQ ID NO: 4124103 - DNA, 25 bp, Homo sapien
ctaagtactatgcttgcattatcac

SEQ ID NO: 4124104 - DNA, 25 bp, Homo sapien
atacatcaccagaatgctggagtca

SEQ ID NO: 4124105 - DNA, 25 bp, Homo sapien
aatacatcaccagaatgctggagtc

SEQ ID NO: 4124106 - DNA, 25 bp, Homo sapien
tacatcaccagaatgctggagtcac

SEQ ID NO: 4124107 - DNA, 25 bp, Homo sapien
gatgatgcaaggtcaattttgttag

SEQ ID NO: 4124108 - DNA, 25 bp, Homo sapien
agaagatgatgcaaggtcaattttg

SEQ ID NO: 4124109 - DNA, 25 bp, Homo sapien
agatgatgcaaggtcaattttgtta

SEQ ID NO: 4124110 - DNA, 25 bp, Homo sapien
cagttttgaacaatgctgaggtgct

SEQ ID NO: 4124111 - DNA, 25 bp, Homo sapien
gctgagggaggtagctgttcatcct

SEQ ID NO: 4124112 - DNA, 25 bp, Homo sapien
tgactgatataaaccccaaatgtga

SEQ ID NO: 4124113 - DNA, 25 bp, Homo sapien
caccaatttggtggaggcctgtatt

SEQ ID NO: 4124114 - DNA, 25 bp, Homo sapien
caaagggcaatagccgtcagatgag

SEQ ID NO: 4124115 - DNA, 25 bp, Homo sapien
aaagggcaatagccgtcagatgagg

SEQ ID NO: 4124116 - DNA, 25 bp, Homo sapien
aagggcaatagccgtcagatgaggt

SEQ ID NO: 4124117 - DNA, 25 bp, Homo sapien
aaagaaattattgagggcagggtgg

SEQ ID NO: 4124118 - DNA, 25 bp, Homo sapien
aagaaattattgagggcagggtggt

SEQ ID NO: 4124119 - DNA, 25 bp, Homo sapien
aaaagaaattattgagggcagggtg

SEQ ID NO: 4124120 - DNA, 25 bp, Homo sapien
cagcagggtgcacaccttgccctgg

SEQ ID NO: 4124121 - DNA, 25 bp, Homo sapien
gcagcagggtgcacaccttgccctg

SEQ ID NO: 4124122 - DNA, 25 bp, Homo sapien
agcagggtgcacaccttgccctggc

SEQ ID NO: 4124123 - DNA, 25 bp, Homo sapien
gcagggtgcacaccttgccctggcc

SEQ ID NO: 4124124 - DNA, 25 bp, Homo sapien
tgaagagtgacccaactgggcgact

SEQ ID NO: 4124125 - DNA, 25 bp, Homo sapien
acccaactgggcgactgcctgaggc

SEQ ID NO: 4124126 - DNA, 25 bp, Homo sapien
cctggtgaagagtgacccaactggg

SEQ ID NO: 4124127 - DNA, 25 bp, Homo sapien
agtgacccaactgggcgactgcctg

SEQ ID NO: 4124128 - DNA, 25 bp, Homo sapien
cctcttcaccttatctccaggttgg

SEQ ID NO: 4124129 - DNA, 25 bp, Homo sapien
ctagtgctccttgggcggtgctgca

SEQ ID NO: 4124130 - DNA, 25 bp, Homo sapien
ggcggtgctgcactgtccacctgaa

SEQ ID NO: 4124131 - DNA, 25 bp, Homo sapien
gctccttgggcggtgctgcactgtc

SEQ ID NO: 4124132 - DNA, 25 bp, Homo sapien
gggcggtgctgcactgtccacctga

SEQ ID NO: 4124133 - DNA, 25 bp, Homo sapien
tgaagcacagctgttaccagtcctg

SEQ ID NO: 4124134 - DNA, 25 bp, Homo sapien
gaagcacagctgttaccagtcctgg

SEQ ID NO: 4124135 - DNA, 25 bp, Homo sapien
aagcacagctgttaccagtcctggg

SEQ ID NO: 4124136 - DNA, 25 bp, Homo sapien
gtgaagcacagctgttaccagtcct

SEQ ID NO: 4124137 - DNA, 25 bp, Homo sapien
ggcaggagacctggattctagttcc

SEQ ID NO: 4124138 - DNA, 25 bp, Homo sapien
agtggagtgacaggagccttgctct

SEQ ID NO: 4124139 - DNA, 25 bp, Homo sapien
tggcaggagccactctgtgtcatgg

SEQ ID NO: 4124140 - DNA, 25 bp, Homo sapien
ctcaagatctcaggcccaagaagcc

SEQ ID NO: 4124141 - DNA, 25 bp, Homo sapien
tctggagctctataaattgcaagcc

SEQ ID NO: 4124142 - DNA, 25 bp, Homo sapien
ccatgaagagaacctctggaggtct

SEQ ID NO: 4124143 - DNA, 25 bp, Homo sapien
tcagaagcagctaccaatgagggtg

SEQ ID NO: 4124144 - DNA, 25 bp, Homo sapien
gaatggtttgccagttgtccaggtg

SEQ ID NO: 4124145 - DNA, 25 bp, Homo sapien
agaatttgtgatcgcttaacttggg

SEQ ID NO: 4124146 - DNA, 25 bp, Homo sapien
aacttgggtcatgaccacaatttca

SEQ ID NO: 4124147 - DNA, 25 bp, Homo sapien
atggagattccaacaccagcaagaa

SEQ ID NO: 4124148 - DNA, 25 bp, Homo sapien
aatggagattccaacaccagcaaga

SEQ ID NO: 4124149 - DNA, 25 bp, Homo sapien
tgctgccacatcctaggtctaagag

SEQ ID NO: 4124150 - DNA, 25 bp, Homo sapien
cagagttagtggaaggtgactccca

SEQ ID NO: 4124151 - DNA, 25 bp, Homo sapien
ccatggtgagggctatctgctgcag

SEQ ID NO: 4124152 - DNA, 25 bp, Homo sapien
gagagtggtgactccattgacccag

SEQ ID NO: 4124153 - DNA, 25 bp, Homo sapien
cccggagcggccgacgcccgcctcg

SEQ ID NO: 4124154 - DNA, 25 bp, Homo sapien
agcccgagcccggagcggccgacgc

SEQ ID NO: 4124155 - DNA, 25 bp, Homo sapien
gggagaggccgctgcgcgcggagcc

SEQ ID NO: 4124156 - DNA, 25 bp, Homo sapien
ccgacgcccgcctcggcgcgcacat

SEQ ID NO: 4124157 - DNA, 25 bp, Homo sapien
ccctccgggcgacccgcgttgccat

SEQ ID NO: 4124158 - DNA, 25 bp, Homo sapien
agacttgcccaacgcttctcagctt

SEQ ID NO: 4124159 - DNA, 25 bp, Homo sapien
gccaggttctggtcctgagttagcc

SEQ ID NO: 4124160 - DNA, 25 bp, Homo sapien
ggagagaacctttctgccagcgttt

SEQ ID NO: 4124161 - DNA, 25 bp, Homo sapien
tgccagcgtttcctcccgcagaagg

SEQ ID NO: 4124162 - DNA, 25 bp, Homo sapien
tggatcactttctctaccatgtggg

SEQ ID NO: 4124163 - DNA, 25 bp, Homo sapien
catttcgtgaccatggttgcttccc

SEQ ID NO: 4124164 - DNA, 25 bp, Homo sapien
tctgaactgttatggatgcactcct

SEQ ID NO: 4124165 - DNA, 25 bp, Homo sapien
tgactgtccggtgtcagatggcctg

SEQ ID NO: 4124166 - DNA, 25 bp, Homo sapien
ctgaaggctttactcctggaggcgc

SEQ ID NO: 4124167 - DNA, 25 bp, Homo sapien
tcatgagaaggagcgcacaagggct

SEQ ID NO: 4124168 - DNA, 25 bp, Homo sapien
tggctccacctatgtgaaccgtgtg

SEQ ID NO: 4124169 - DNA, 25 bp, Homo sapien
gaaccgtgtgcgactacaggagctg

SEQ ID NO: 4124170 - DNA, 25 bp, Homo sapien
cgccgcttccccagaccctgccacc

SEQ ID NO: 4124171 - DNA, 25 bp, Homo sapien
ctgccgccgcttccccagaccctgc

SEQ ID NO: 4124172 - DNA, 25 bp, Homo sapien
ccgcttccccagaccctgccaccgg

SEQ ID NO: 4124173 - DNA, 25 bp, Homo sapien
gcttccccagaccctgccaccggaa

SEQ ID NO: 4124174 - DNA, 25 bp, Homo sapien
caccccgccgtccccgcagtcctca

SEQ ID NO: 4124175 - DNA, 25 bp, Homo sapien
tgtgggcgacacgagcacgttcggc

SEQ ID NO: 4124176 - DNA, 25 bp, Homo sapien
ctgtgggcgacacgagcacgttcgg

SEQ ID NO: 4124177 - DNA, 25 bp, Homo sapien
tcgtccatctccttggcctgcttct

SEQ ID NO: 4124178 - DNA, 25 bp, Homo sapien
ctgcttcttgggctgtttcagtggc

SEQ ID NO: 4124179 - DNA, 25 bp, Homo sapien
atctccttggcctgcttcttgggct

SEQ ID NO: 4124180 - DNA, 25 bp, Homo sapien
tgtttcagtggcttcttcttgccac

SEQ ID NO: 4124181 - DNA, 25 bp, Homo sapien
gcagagcgtgttcaactcaggcctg

SEQ ID NO: 4124182 - DNA, 25 bp, Homo sapien
gcgtgttcaactcaggcctgtctcc

SEQ ID NO: 4124183 - DNA, 25 bp, Homo sapien
agaggcagagcgtgttcaactcagg

SEQ ID NO: 4124184 - DNA, 25 bp, Homo sapien
gggagaggcagagcgtgttcaactc

SEQ ID NO: 4124185 - DNA, 25 bp, Homo sapien
tccccgcggccttcgcttttagctc

SEQ ID NO: 4124186 - DNA, 25 bp, Homo sapien
taaggaatggaagcccagactgcct

SEQ ID NO: 4124187 - DNA, 25 bp, Homo sapien
taatggatcaaacccactgggagag

SEQ ID NO: 4124188 - DNA, 25 bp, Homo sapien
taggtgctcatagcgtttggccagc

SEQ ID NO: 4124189 - DNA, 25 bp, Homo sapien
tgcagcggacgtcggaaaacgagac

SEQ ID NO: 4124190 - DNA, 25 bp, Homo sapien
gcctgaactcccgtgctcaaataat

SEQ ID NO: 4124191 - DNA, 25 bp, Homo sapien
gaggctgcctcagccttttaaatag

SEQ ID NO: 4124192 - DNA, 25 bp, Homo sapien
caaataatcctcttaccttgaactc

SEQ ID NO: 4124193 - DNA, 25 bp, Homo sapien
gattacaggaaacgggccgccacca

SEQ ID NO: 4124194 - DNA, 25 bp, Homo sapien
atgagatggagtacaagcagtggct

SEQ ID NO: 4124195 - DNA, 25 bp, Homo sapien
ctttaacacaagcatggatagcagc

SEQ ID NO: 4124196 - DNA, 25 bp, Homo sapien
ggctgtgcactggtctagatctaca

SEQ ID NO: 4124197 - DNA, 25 bp, Homo sapien
cacgggcctgctgtggaccttagta

SEQ ID NO: 4124198 - DNA, 25 bp, Homo sapien
tttttgccagatttcttaattccac

SEQ ID NO: 4124199 - DNA, 25 bp, Homo sapien
caaaagatgttatggcagggaatag

SEQ ID NO: 4124200 - DNA, 25 bp, Homo sapien
gcaaaagatgttatggcagggaata

SEQ ID NO: 4124201 - DNA, 25 bp, Homo sapien
aaaagatgttatggcagggaataga

SEQ ID NO: 4124202 - DNA, 25 bp, Homo sapien
taggaatgacttagtgaaaacaact

SEQ ID NO: 4124203 - DNA, 25 bp, Homo sapien
cacagttatggtaggaatgacttag

SEQ ID NO: 4124204 - DNA, 25 bp, Homo sapien
tgatacaaagtttagggtagaacaa

SEQ ID NO: 4124205 - DNA, 25 bp, Homo sapien
aacaactaaagagatgatgagccac

SEQ ID NO: 4124206 - DNA, 25 bp, Homo sapien
cggagaactggaccaaccgtccgcg

SEQ ID NO: 4124207 - DNA, 25 bp, Homo sapien
cgccgcttgcctccgccgcgagtgc

SEQ ID NO: 4124208 - DNA, 25 bp, Homo sapien
gagaactggaccaaccgtccgcgcg

SEQ ID NO: 4124209 - DNA, 25 bp, Homo sapien
gcttgcctccgccgcgagtgccccg

SEQ ID NO: 4124210 - DNA, 25 bp, Homo sapien
aagtatccgacagcgccgagctaga

SEQ ID NO: 4124211 - DNA, 25 bp, Homo sapien
cccaagtatccgacagcgccgagct

SEQ ID NO: 4124212 - DNA, 25 bp, Homo sapien
tccgacagcgccgagctagacttgc

SEQ ID NO: 4124213 - DNA, 25 bp, Homo sapien
atccgacagcgccgagctagacttg

SEQ ID NO: 4124214 - DNA, 25 bp, Homo sapien
ctcttgctgcctggcgcggaggtcc

SEQ ID NO: 4124215 - DNA, 25 bp, Homo sapien
ccgggggctcgctccgcctcttgct

SEQ ID NO: 4124216 - DNA, 25 bp, Homo sapien
cgcctcttgctgcctggcgcggagg

SEQ ID NO: 4124217 - DNA, 25 bp, Homo sapien
gccgggggctcgctccgcctcttgc

SEQ ID NO: 4124218 - DNA, 25 bp, Homo sapien
tgcggagaagccccgggcccgcttg

SEQ ID NO: 4124219 - DNA, 25 bp, Homo sapien
ctgcggagaagccccgggcccgctt

SEQ ID NO: 4124220 - DNA, 25 bp, Homo sapien
cgcgagggtgtcaagctcctccagg

SEQ ID NO: 4124221 - DNA, 25 bp, Homo sapien
tcctccaggtcgtcggcagtgaagt

SEQ ID NO: 4124222 - DNA, 25 bp, Homo sapien
gagccgcggccggacattggctcag

SEQ ID NO: 4124223 - DNA, 25 bp, Homo sapien
ccatgcgcgccgaacgggtcgtcag

SEQ ID NO: 4124224 - DNA, 25 bp, Homo sapien
aacttgtcacaagaatgggtcccca

SEQ ID NO: 4124225 - DNA, 25 bp, Homo sapien
gaccttctggaagacaaccgctgct

SEQ ID NO: 4124226 - DNA, 25 bp, Homo sapien
caaatcggctgtttgacctggctaa

SEQ ID NO: 4124227 - DNA, 25 bp, Homo sapien
ttgacaactccctccgagcaaaagg

SEQ ID NO: 4124228 - DNA, 25 bp, Homo sapien
gccatctaataatctgtggacctta

SEQ ID NO: 4124229 - DNA, 25 bp, Homo sapien
ccatctaataatctgtggaccttat

SEQ ID NO: 4124230 - DNA, 25 bp, Homo sapien
tgtgcctgaagtacctctaattcga

SEQ ID NO: 4124231 - DNA, 25 bp, Homo sapien
tctttgtattgtgcctgaagtacct

SEQ ID NO: 4124232 - DNA, 25 bp, Homo sapien
gaagtacctctaattcgaaattatc

SEQ ID NO: 4124233 - DNA, 25 bp, Homo sapien
tgtattgtgcctgaagtacctctaa

SEQ ID NO: 4124234 - DNA, 25 bp, Homo sapien
ttccgtctgatgtagtgagtctcgc

SEQ ID NO: 4124235 - DNA, 25 bp, Homo sapien
gaacggattccgtctgatgtagtga

SEQ ID NO: 4124236 - DNA, 25 bp, Homo sapien
tagtgagtctcgcaaaattttaatt

SEQ ID NO: 4124237 - DNA, 25 bp, Homo sapien
ctgttcctctagaacggattccgtc

SEQ ID NO: 4124238 - DNA, 25 bp, Homo sapien
gaaacagagggagcagccagtttat

SEQ ID NO: 4124239 - DNA, 25 bp, Homo sapien
ctttaaactggagttcagactgcaa

SEQ ID NO: 4124240 - DNA, 25 bp, Homo sapien
cagtttatttgctcgttcactggtc

SEQ ID NO: 4124241 - DNA, 25 bp, Homo sapien
ggagctttgtccttaattcattcat

SEQ ID NO: 4124242 - DNA, 25 bp, Homo sapien
cagggattttgatccaaattgttga

SEQ ID NO: 4124243 - DNA, 25 bp, Homo sapien
taattccagggattttgatccaaat

SEQ ID NO: 4124244 - DNA, 25 bp, Homo sapien
gatccactgttactggctaattcca

SEQ ID NO: 4124245 - DNA, 25 bp, Homo sapien
ggcatgatccactgttactggctaa

SEQ ID NO: 4124246 - DNA, 25 bp, Homo sapien
caccagaggcttgtatcctgactcc

SEQ ID NO: 4124247 - DNA, 25 bp, Homo sapien
ctggctttataaccacagaagggtt

SEQ ID NO: 4124248 - DNA, 25 bp, Homo sapien
tgtatcctgactccgtctggcaggg

SEQ ID NO: 4124249 - DNA, 25 bp, Homo sapien
gggaagggacatgttagcactaaaa

SEQ ID NO: 4124250 - DNA, 25 bp, Homo sapien
ttgttttatggagtcacctctcaga

SEQ ID NO: 4124251 - DNA, 25 bp, Homo sapien
gttttatggagtcacctctcagact

SEQ ID NO: 4124252 - DNA, 25 bp, Homo sapien
tgttttatggagtcacctctcagac

SEQ ID NO: 4124253 - DNA, 25 bp, Homo sapien
ttttatggagtcacctctcagactg

SEQ ID NO: 4124254 - DNA, 25 bp, Homo sapien
gaagacaagatgactctagaaggtt

SEQ ID NO: 4124255 - DNA, 25 bp, Homo sapien
gcagaagacaagatgactctagaag

SEQ ID NO: 4124256 - DNA, 25 bp, Homo sapien
ctgcagaagacaagatgactctaga

SEQ ID NO: 4124257 - DNA, 25 bp, Homo sapien
cagaagacaagatgactctagaagg

SEQ ID NO: 4124258 - DNA, 25 bp, Homo sapien
tagggatgaccctgggatcaaaggc

SEQ ID NO: 4124259 - DNA, 25 bp, Homo sapien
gaactactactcaggaggtggcaaa

SEQ ID NO: 4124260 - DNA, 25 bp, Homo sapien
tgccagcaggagactcagaactact

SEQ ID NO: 4124261 - DNA, 25 bp, Homo sapien
tggcaaaggcttagggatgaccctg

SEQ ID NO: 4124262 - DNA, 25 bp, Homo sapien
aatgtgtcggtgagtccccaggtgc

SEQ ID NO: 4124263 - DNA, 25 bp, Homo sapien
gctgggtctccatcacgtgagcact

SEQ ID NO: 4124264 - DNA, 25 bp, Homo sapien
tcattccgggcaaccagattcagtc

SEQ ID NO: 4124265 - DNA, 25 bp, Homo sapien
catcataagaacctgtggtcctgag

SEQ ID NO: 4124266 - DNA, 25 bp, Homo sapien
taatagggagacgactgctccgctg

SEQ ID NO: 4124267 - DNA, 25 bp, Homo sapien
agaatgctaagtgcagtcacagaga

SEQ ID NO: 4124268 - DNA, 25 bp, Homo sapien
gctccgctgtggcacaccaggtgct

SEQ ID NO: 4124269 - DNA, 25 bp, Homo sapien
gggttggtctctaccccagagctca

SEQ ID NO: 4124270 - DNA, 25 bp, Homo sapien
ccccttagggctgaggtcatatctc

SEQ ID NO: 4124271 - DNA, 25 bp, Homo sapien
ttggtcatcagcaaccccccttagg

SEQ ID NO: 4124272 - DNA, 25 bp, Homo sapien
gagaaagccaacaggtgaagaagca

SEQ ID NO: 4124273 - DNA, 25 bp, Homo sapien
agggctgaggtcatatctccatcac

SEQ ID NO: 4124274 - DNA, 25 bp, Homo sapien
cacaggaagtgttttcggctaattt

SEQ ID NO: 4124275 - DNA, 25 bp, Homo sapien
ccaaaaccttaaggcactgggtcag

SEQ ID NO: 4124276 - DNA, 25 bp, Homo sapien
aaatcacaggaagtgttttcggcta

SEQ ID NO: 4124277 - DNA, 25 bp, Homo sapien
gaagtgttttcggctaatttcacca

SEQ ID NO: 4124278 - DNA, 25 bp, Homo sapien
cacagtgttcattcgctaggttcac

SEQ ID NO: 4124279 - DNA, 25 bp, Homo sapien
ggccaccccagatgcatgctaaaga

SEQ ID NO: 4124280 - DNA, 25 bp, Homo sapien
tcccaagggaggaatttatgatcac

SEQ ID NO: 4124281 - DNA, 25 bp, Homo sapien
tgatgtgtggtcttcaccttaccca

SEQ ID NO: 4124282 - DNA, 25 bp, Homo sapien
tgggctggttgtgttcacagttctc

SEQ ID NO: 4124283 - DNA, 25 bp, Homo sapien
tgtgttcacagttctccccaatctt

SEQ ID NO: 4124284 - DNA, 25 bp, Homo sapien
gctggttgtgttcacagttctcccc

SEQ ID NO: 4124285 - DNA, 25 bp, Homo sapien
ggttgtgttcacagttctccccaat

SEQ ID NO: 4124286 - DNA, 25 bp, Homo sapien
cagtggaatcattccaacatagaaa

SEQ ID NO: 4124287 - DNA, 25 bp, Homo sapien
cagccagtggaatcattccaacata

SEQ ID NO: 4124288 - DNA, 25 bp, Homo sapien
gccagtggaatcattccaacataga

SEQ ID NO: 4124289 - DNA, 25 bp, Homo sapien
agccagtggaatcattccaacatag

SEQ ID NO: 4124290 - DNA, 25 bp, Homo sapien
acttttatgtacaccacagtggttt

SEQ ID NO: 4124291 - DNA, 25 bp, Homo sapien
ccacttttatgtacaccacagtggt

SEQ ID NO: 4124292 - DNA, 25 bp, Homo sapien
cttttatgtacaccacagtggtttc

SEQ ID NO: 4124293 - DNA, 25 bp, Homo sapien
cacttttatgtacaccacagtggtt

SEQ ID NO: 4124294 - DNA, 25 bp, Homo sapien
tttggcagcacttggaacacacact

SEQ ID NO: 4124295 - DNA, 25 bp, Homo sapien
acagccagcagcacgctaggcaggg

SEQ ID NO: 4124296 - DNA, 25 bp, Homo sapien
tgccagctggtcgtggtccgccagc

SEQ ID NO: 4124297 - DNA, 25 bp, Homo sapien
tctctgggctgaggcactttggcag

SEQ ID NO: 4124298 - DNA, 25 bp, Homo sapien
cactctgtcaggccgtgatgtgatg

SEQ ID NO: 4124299 - DNA, 25 bp, Homo sapien
ccactctgtcaggccgtgatgtgat

SEQ ID NO: 4124300 - DNA, 25 bp, Homo sapien
ctgtcaggccgtgatgtgatgtaca

SEQ ID NO: 4124301 - DNA, 25 bp, Homo sapien
ctctgtcaggccgtgatgtgatgta

SEQ ID NO: 4124302 - DNA, 25 bp, Homo sapien
tgcacaccaagcttagccaggagcc

SEQ ID NO: 4124303 - DNA, 25 bp, Homo sapien
gctctgcacaccaagcttagccagg

SEQ ID NO: 4124304 - DNA, 25 bp, Homo sapien
tctgcacaccaagcttagccaggag

SEQ ID NO: 4124305 - DNA, 25 bp, Homo sapien
acaccaagcttagccaggagccaca

SEQ ID NO: 4124306 - DNA, 25 bp, Homo sapien
gaagccctcggatgagcatgctgac

SEQ ID NO: 4124307 - DNA, 25 bp, Homo sapien
tccacgcagtgcatcatgaagagct

SEQ ID NO: 4124308 - DNA, 25 bp, Homo sapien
aagagcttgtccttctgcgataggc

SEQ ID NO: 4124309 - DNA, 25 bp, Homo sapien
gtcaaactgatgcaggacctccacg

SEQ ID NO: 4124310 - DNA, 25 bp, Homo sapien
cggtttccgcggcacagaggtcatc

SEQ ID NO: 4124311 - DNA, 25 bp, Homo sapien
ttccgcggcacagaggtcatccagg

SEQ ID NO: 4124312 - DNA, 25 bp, Homo sapien
ccacatcggtttccgcggcacagag

SEQ ID NO: 4124313 - DNA, 25 bp, Homo sapien
ggtcttccacatcggtttccgcggc

SEQ ID NO: 4124314 - DNA, 25 bp, Homo sapien
ttcctgctggtcactgctttaatca

SEQ ID NO: 4124315 - DNA, 25 bp, Homo sapien
gccacacaatggtttcttcccatgg

SEQ ID NO: 4124316 - DNA, 25 bp, Homo sapien
ctccgccaaacagatcagactcagg

SEQ ID NO: 4124317 - DNA, 25 bp, Homo sapien
gttaccatggggacgggctcagcaa

SEQ ID NO: 4124318 - DNA, 25 bp, Homo sapien
accagctcccggtcttacacactgc

SEQ ID NO: 4124319 - DNA, 25 bp, Homo sapien
ccctgctgcggccctttcatgccca

SEQ ID NO: 4124320 - DNA, 25 bp, Homo sapien
ccagctcccggtcttacacactgct

SEQ ID NO: 4124321 - DNA, 25 bp, Homo sapien
cctgctgcggccctttcatgcccac

SEQ ID NO: 4124322 - DNA, 25 bp, Homo sapien
ggcctgctggtggcacaatgcaccg

SEQ ID NO: 4124323 - DNA, 25 bp, Homo sapien
ggggccatcataccagtgacaggca

SEQ ID NO: 4124324 - DNA, 25 bp, Homo sapien
tgcaccggggccatcataccagtga

SEQ ID NO: 4124325 - DNA, 25 bp, Homo sapien
cctgctggtggcacaatgcaccggg

SEQ ID NO: 4124326 - DNA, 25 bp, Homo sapien
gaaacttggcgtgggcccgcctaca

SEQ ID NO: 4124327 - DNA, 25 bp, Homo sapien
agcagtggcgggaagtgaaacttgg

SEQ ID NO: 4124328 - DNA, 25 bp, Homo sapien
gaagtgaaacttggcgtgggcccgc

SEQ ID NO: 4124329 - DNA, 25 bp, Homo sapien
gcctacaggcccacgtgagccaggc

SEQ ID NO: 4124330 - DNA, 25 bp, Homo sapien
ggcaggcaggcagtagtgactcggc

SEQ ID NO: 4124331 - DNA, 25 bp, Homo sapien
aggcaggcaggcagtagtgactcgg

SEQ ID NO: 4124332 - DNA, 25 bp, Homo sapien
ccagcacattcgactgtctgagagg

SEQ ID NO: 4124333 - DNA, 25 bp, Homo sapien
cacattcgactgtctgagagggtct

SEQ ID NO: 4124334 - DNA, 25 bp, Homo sapien
tgaggtggtttccttagtgggacca

SEQ ID NO: 4124335 - DNA, 25 bp, Homo sapien
tttccttagtgggaccagcacattc

SEQ ID NO: 4124336 - DNA, 25 bp, Homo sapien
cctgccctgtctgcgagctccaggg

SEQ ID NO: 4124337 - DNA, 25 bp, Homo sapien
tgtgtgagtgcccagtgttaagatc

SEQ ID NO: 4124338 - DNA, 25 bp, Homo sapien
cctgtctgcgagctccagggcccat

SEQ ID NO: 4124339 - DNA, 25 bp, Homo sapien
gagtgcccagtgttaagatccgaag

SEQ ID NO: 4124340 - DNA, 25 bp, Homo sapien
tccatgtcgaaaaagatgagggtct

SEQ ID NO: 4124341 - DNA, 25 bp, Homo sapien
cagtggcctccatgtcgaaaaagat

SEQ ID NO: 4124342 - DNA, 25 bp, Homo sapien
tggcctccatgtcgaaaaagatgag

SEQ ID NO: 4124343 - DNA, 25 bp, Homo sapien
agccagtggcctccatgtcgaaaaa

SEQ ID NO: 4124344 - DNA, 25 bp, Homo sapien
agcaggcacagctccgtgaccttgg

SEQ ID NO: 4124345 - DNA, 25 bp, Homo sapien
agccagcaggcacagctccgtgacc

SEQ ID NO: 4124346 - DNA, 25 bp, Homo sapien
gcaggcacagctccgtgaccttggg

SEQ ID NO: 4124347 - DNA, 25 bp, Homo sapien
ccagcaggcacagctccgtgacctt

SEQ ID NO: 4124348 - DNA, 25 bp, Homo sapien
tcaaaacattgacgcccatgcgctg

SEQ ID NO: 4124349 - DNA, 25 bp, Homo sapien
taccacacgcggtggtggaggaact

SEQ ID NO: 4124350 - DNA, 25 bp, Homo sapien
ggtcaccattgtgtgccaccaggca

SEQ ID NO: 4124351 - DNA, 25 bp, Homo sapien
acacacagggagagcttgtctacca

SEQ ID NO: 4124352 - DNA, 25 bp, Homo sapien
gcagtgatgctatccacacagaagg

SEQ ID NO: 4124353 - DNA, 25 bp, Homo sapien
agtgatgctatccacacagaaggca

SEQ ID NO: 4124354 - DNA, 25 bp, Homo sapien
ttcagcgcagtgatgctatccacac

SEQ ID NO: 4124355 - DNA, 25 bp, Homo sapien
tgaggggctgcttgctcgctccagg

SEQ ID NO: 4124356 - DNA, 25 bp, Homo sapien
gggactgcccatacaggcgagtgta

SEQ ID NO: 4124357 - DNA, 25 bp, Homo sapien
catacaggcgagtgtagatgctgcc

SEQ ID NO: 4124358 - DNA, 25 bp, Homo sapien
cctaggctgtagctcttccttgggc

SEQ ID NO: 4124359 - DNA, 25 bp, Homo sapien
tcaccctcagccgtgtgcgagtctg

SEQ ID NO: 4124360 - DNA, 25 bp, Homo sapien
gccgaaaggcctggcgtgagcatcc

SEQ ID NO: 4124361 - DNA, 25 bp, Homo sapien
aaggcctggcgtgagcatccaccca

SEQ ID NO: 4124362 - DNA, 25 bp, Homo sapien
gaaaggcctggcgtgagcatccacc

SEQ ID NO: 4124363 - DNA, 25 bp, Homo sapien
tgccgaaaggcctggcgtgagcatc

SEQ ID NO: 4124364 - DNA, 25 bp, Homo sapien
caggtgtggccagggatagtccata

SEQ ID NO: 4124365 - DNA, 25 bp, Homo sapien
ggaagatccttggtacccctgctct

SEQ ID NO: 4124366 - DNA, 25 bp, Homo sapien
tccaaggctgggactagtgttcctg

SEQ ID NO: 4124367 - DNA, 25 bp, Homo sapien
tccatacagtgtggctactgccaag

SEQ ID NO: 4124368 - DNA, 25 bp, Homo sapien
tttattcgtcagattttccttcttg

SEQ ID NO: 4124369 - DNA, 25 bp, Homo sapien
tctttattcgtcagattttccttct

SEQ ID NO: 4124370 - DNA, 25 bp, Homo sapien
tattcgtcagattttccttcttggc

SEQ ID NO: 4124371 - DNA, 25 bp, Homo sapien
gtctttattcgtcagattttccttc

SEQ ID NO: 4124372 - DNA, 25 bp, Homo sapien
tcagagatggacaacctggcaactg

SEQ ID NO: 4124373 - DNA, 25 bp, Homo sapien
tctggcccagacatgaatacctcgt

SEQ ID NO: 4124374 - DNA, 25 bp, Homo sapien
gtttctgagtctagggtctgtacac

SEQ ID NO: 4124375 - DNA, 25 bp, Homo sapien
tcttctccagcttaccctagggtga

SEQ ID NO: 4124376 - DNA, 25 bp, Homo sapien
tgtgcaggcgcggttccttacgccc

SEQ ID NO: 4124377 - DNA, 25 bp, Homo sapien
atggatgccccgaaggcggccctct

SEQ ID NO: 4124378 - DNA, 25 bp, Homo sapien
ttacaacccggcctacatggatgcc

SEQ ID NO: 4124379 - DNA, 25 bp, Homo sapien
ccgaaggcggccctctgagcattcc

SEQ ID NO: 4124380 - DNA, 25 bp, Homo sapien
tgcaccttgaaaatagcgctgccaa

SEQ ID NO: 4124381 - DNA, 25 bp, Homo sapien
aaatagcgctgccaagcatgatggc

SEQ ID NO: 4124382 - DNA, 25 bp, Homo sapien
gcaacctggttccggcctgtgcact

SEQ ID NO: 4124383 - DNA, 25 bp, Homo sapien
cggaggtggcggcaacctggttccg

SEQ ID NO: 4124384 - DNA, 25 bp, Homo sapien
gtccgcccgcccagccatgactgcg

SEQ ID NO: 4124385 - DNA, 25 bp, Homo sapien
gcggatcctgttgccgttgctgttg

SEQ ID NO: 4124386 - DNA, 25 bp, Homo sapien
cgctgcctctccaacgagccgggca

SEQ ID NO: 4124387 - DNA, 25 bp, Homo sapien
tgccctgggaccgggcagacacttc

SEQ ID NO: 4124388 - DNA, 25 bp, Homo sapien
ccggcatttgtggagtgtctactga

SEQ ID NO: 4124389 - DNA, 25 bp, Homo sapien
tgtctactgagtgccaaggtctgcg

SEQ ID NO: 4124390 - DNA, 25 bp, Homo sapien
ggaagaatgactcaacatccctgat

SEQ ID NO: 4124391 - DNA, 25 bp, Homo sapien
ctctgagctggcgactgggcctgta

SEQ ID NO: 4124392 - DNA, 25 bp, Homo sapien
gctaagagatgtccaaggcggagcc

SEQ ID NO: 4124393 - DNA, 25 bp, Homo sapien
catttgttagccatagtgggttccc

SEQ ID NO: 4124394 - DNA, 25 bp, Homo sapien
cctttgggacattaggactgcagcc

SEQ ID NO: 4124395 - DNA, 25 bp, Homo sapien
ctggactggatgcattacgaggact

SEQ ID NO: 4124396 - DNA, 25 bp, Homo sapien
aggctgaggcgaaagaataacttaa

SEQ ID NO: 4124397 - DNA, 25 bp, Homo sapien
tgaggcgaaagaataacttaagccc

SEQ ID NO: 4124398 - DNA, 25 bp, Homo sapien
gctgaggcgaaagaataacttaagc

SEQ ID NO: 4124399 - DNA, 25 bp, Homo sapien
aggcgaaagaataacttaagcccag

SEQ ID NO: 4124400 - DNA, 25 bp, Homo sapien
caccagtgtggtagcttttgacctt

SEQ ID NO: 4124401 - DNA, 25 bp, Homo sapien
ttttgaccttatagtgacccagtgc

SEQ ID NO: 4124402 - DNA, 25 bp, Homo sapien
tgtgtttctcacagggtcaacctgg

SEQ ID NO: 4124403 - DNA, 25 bp, Homo sapien
ctggtgacccggtaagatgcccctg

SEQ ID NO: 4124404 - DNA, 25 bp, Homo sapien
gaggcgctttgagagccacaggacc

SEQ ID NO: 4124405 - DNA, 25 bp, Homo sapien
taggtgggacaagtgctgctgactc

SEQ ID NO: 4124406 - DNA, 25 bp, Homo sapien
gtgagtagaggtgccctaaagcccc

SEQ ID NO: 4124407 - DNA, 25 bp, Homo sapien
tctggactcaaaggagacaaggtag

SEQ ID NO: 4124408 - DNA, 25 bp, Homo sapien
gactacaaccggatccgtagcggca

SEQ ID NO: 4124409 - DNA, 25 bp, Homo sapien
ttctggctgcgcttctaggcgggaa

SEQ ID NO: 4124410 - DNA, 25 bp, Homo sapien
agcacttcggctcctctaacctgtg

SEQ ID NO: 4124411 - DNA, 25 bp, Homo sapien
taggcgggaagcctatgtaagcaag

SEQ ID NO: 4124412 - DNA, 25 bp, Homo sapien
gatgccagtgtggtacgtgagatct

SEQ ID NO: 4124413 - DNA, 25 bp, Homo sapien
ccaagtacatctatgaccagtgccc

SEQ ID NO: 4124414 - DNA, 25 bp, Homo sapien
aagtacatctatgaccagtgcccag

SEQ ID NO: 4124415 - DNA, 25 bp, Homo sapien
gtgtggtacgtgagatctgctccaa

SEQ ID NO: 4124416 - DNA, 25 bp, Homo sapien
tggctgaatgggaaagccggattgc

SEQ ID NO: 4124417 - DNA, 25 bp, Homo sapien
ggctgaatgggaaagccggattgcg

SEQ ID NO: 4124418 - DNA, 25 bp, Homo sapien
gctgaatgggaaagccggattgcgg

SEQ ID NO: 4124419 - DNA, 25 bp, Homo sapien
cctggctgaatgggaaagccggatt

SEQ ID NO: 4124420 - DNA, 25 bp, Homo sapien
cagtcttcctcctaacatggttgaa

SEQ ID NO: 4124421 - DNA, 25 bp, Homo sapien
taccttggtcccctacatggtctgg

SEQ ID NO: 4124422 - DNA, 25 bp, Homo sapien
acagacgaggttctggctccacgca

SEQ ID NO: 4124423 - DNA, 25 bp, Homo sapien
taatctgttgttgacggtgccatac

SEQ ID NO: 4124424 - DNA, 25 bp, Homo sapien
ggagctaaatcccaccagccaggac

SEQ ID NO: 4124425 - DNA, 25 bp, Homo sapien
tctccttaccgagaaggaccccagc

SEQ ID NO: 4124426 - DNA, 25 bp, Homo sapien
cttccctgactggagctaaatccca

SEQ ID NO: 4124427 - DNA, 25 bp, Homo sapien
cagcttcctgggagattagaaattc

SEQ ID NO: 4124428 - DNA, 25 bp, Homo sapien
gccttgagtcccgtttaacagcaga

SEQ ID NO: 4124429 - DNA, 25 bp, Homo sapien
aacagcagatccagaagaccttgag

SEQ ID NO: 4124430 - DNA, 25 bp, Homo sapien
agagtaggcgtcctctaaccacggg

SEQ ID NO: 4124431 - DNA, 25 bp, Homo sapien
ccaggccgaaggtcagccttgagtc

SEQ ID NO: 4124432 - DNA, 25 bp, Homo sapien
gctgtccagaactgaagactttaaa

SEQ ID NO: 4124433 - DNA, 25 bp, Homo sapien
tcaagacccagaatgtaggtgccac

SEQ ID NO: 4124434 - DNA, 25 bp, Homo sapien
gcaggaagtgactccgttccactcc

SEQ ID NO: 4124435 - DNA, 25 bp, Homo sapien
aaatgactgttacgaccctgttcac

SEQ ID NO: 4124436 - DNA, 25 bp, Homo sapien
ctcaataaagatggcggcaacatct

SEQ ID NO: 4124437 - DNA, 25 bp, Homo sapien
cgatgggttgtaccaccgtgtttcg

SEQ ID NO: 4124438 - DNA, 25 bp, Homo sapien
cctcagagctgccatgcgcgatggg

SEQ ID NO: 4124439 - DNA, 25 bp, Homo sapien
atggcggcaacatcttcggtcctca

SEQ ID NO: 4124440 - DNA, 25 bp, Homo sapien
cgattggagtgctccgcgttcaccc

SEQ ID NO: 4124441 - DNA, 25 bp, Homo sapien
attggagtgctccgcgttcacccct

SEQ ID NO: 4124442 - DNA, 25 bp, Homo sapien
gattggagtgctccgcgttcacccc

SEQ ID NO: 4124443 - DNA, 25 bp, Homo sapien
gagagggaacaactggacacctgtt

SEQ ID NO: 4124444 - DNA, 25 bp, Homo sapien
ggaggtcctcagattcgtagacagg

SEQ ID NO: 4124445 - DNA, 25 bp, Homo sapien
taagtgcctctgcagatcttccacc

SEQ ID NO: 4124446 - DNA, 25 bp, Homo sapien
tgcctgaccttggtagccacaaggg

SEQ ID NO: 4124447 - DNA, 25 bp, Homo sapien
agaaagcgctggtgctgtcaaaacc

SEQ ID NO: 4124448 - DNA, 25 bp, Homo sapien
cccaggttgcgaaggtgactcagac

SEQ ID NO: 4124449 - DNA, 25 bp, Homo sapien
tcagacgcctcctttgggactccaa

SEQ ID NO: 4124450 - DNA, 25 bp, Homo sapien
tcttatgcaagaaggcgtcccaggt

SEQ ID NO: 4124451 - DNA, 25 bp, Homo sapien
cagtctccaagacctaggatgccca

SEQ ID NO: 4124452 - DNA, 25 bp, Homo sapien
caaaaggagtgttagctgggaccag

SEQ ID NO: 4124453 - DNA, 25 bp, Homo sapien
ggaccagcgccagccctattggtga

SEQ ID NO: 4124454 - DNA, 25 bp, Homo sapien
catggagagtgatccgcaatcaatc

SEQ ID NO: 4124455 - DNA, 25 bp, Homo sapien
cctggtcttctgatcgctccatctg

SEQ ID NO: 4124456 - DNA, 25 bp, Homo sapien
tctgatcgctccatctgccgcccag

SEQ ID NO: 4124457 - DNA, 25 bp, Homo sapien
gtcctgggtggacctctagttggga

SEQ ID NO: 4124458 - DNA, 25 bp, Homo sapien
tcctgggtggacctctagttgggag

SEQ ID NO: 4124459 - DNA, 25 bp, Homo sapien
aagttgcatcgaatccatatatcaa

SEQ ID NO: 4124460 - DNA, 25 bp, Homo sapien
tgcatcgaatccatatatcaatttg

SEQ ID NO: 4124461 - DNA, 25 bp, Homo sapien
gatttttaactgaagttgcatcgaa

SEQ ID NO: 4124462 - DNA, 25 bp, Homo sapien
cgaatccatatatcaatttgggaaa

SEQ ID NO: 4124463 - DNA, 25 bp, Homo sapien
tttaatctttgctttcacgcttgtg

SEQ ID NO: 4124464 - DNA, 25 bp, Homo sapien
ttaatctttgctttcacgcttgtga

SEQ ID NO: 4124465 - DNA, 25 bp, Homo sapien
tgctgaaaacagagggcagttatcc

SEQ ID NO: 4124466 - DNA, 25 bp, Homo sapien
gaggctctcagaagttgaagcagca

SEQ ID NO: 4124467 - DNA, 25 bp, Homo sapien
cactgacactgacttctggtcatga

SEQ ID NO: 4124468 - DNA, 25 bp, Homo sapien
gtttccacacatcagcaatcactga

SEQ ID NO: 4124469 - DNA, 25 bp, Homo sapien
aaagcgggatcttggagacaggcca

SEQ ID NO: 4124470 - DNA, 25 bp, Homo sapien
ggaatatgcaagctaaagcccctct

SEQ ID NO: 4124471 - DNA, 25 bp, Homo sapien
cactgagaaagccaatgaccgaatc

SEQ ID NO: 4124472 - DNA, 25 bp, Homo sapien
tactgcgacgcatcctgaatgagga

SEQ ID NO: 4124473 - DNA, 25 bp, Homo sapien
aagtggatctggcagggcttgccac

SEQ ID NO: 4124474 - DNA, 25 bp, Homo sapien
gccagctgtggagtgtttagtaagt

SEQ ID NO: 4124475 - DNA, 25 bp, Homo sapien
taacatcccacatggaatcaactgc

SEQ ID NO: 4124476 - DNA, 25 bp, Homo sapien
caagaggttgtgatctcaggaccgg

SEQ ID NO: 4124477 - DNA, 25 bp, Homo sapien
tctcattgacatcactgtgcggcac

SEQ ID NO: 4124478 - DNA, 25 bp, Homo sapien
tcactgtgcggcacatcgcagacct

SEQ ID NO: 4124479 - DNA, 25 bp, Homo sapien
cgcagacctgtcaccaggagacaag

SEQ ID NO: 4124480 - DNA, 25 bp, Homo sapien
cacatcgcagacctgtcaccaggag

SEQ ID NO: 4124481 - DNA, 25 bp, Homo sapien
ggatgcttcttaaccctcaggcaaa

SEQ ID NO: 4124482 - DNA, 25 bp, Homo sapien
gggcctctggcaacatagagactaa

SEQ ID NO: 4124483 - DNA, 25 bp, Homo sapien
tcagccagtcgtttgtaaggcgctc

SEQ ID NO: 4124484 - DNA, 25 bp, Homo sapien
tgtgacgtgagactgcaaagaccaa

SEQ ID NO: 4124485 - DNA, 25 bp, Homo sapien
gaactgtcactaacctcatggaggg

SEQ ID NO: 4124486 - DNA, 25 bp, Homo sapien
taaaaccatttagcccaccttgagc

SEQ ID NO: 4124487 - DNA, 25 bp, Homo sapien
caccttgagcaaagggtagattccg

SEQ ID NO: 4124488 - DNA, 25 bp, Homo sapien
gcattattgtgctacctcaaaggta

SEQ ID NO: 4124489 - DNA, 25 bp, Homo sapien
gcttttgccacggacagtgtgacca

SEQ ID NO: 4124490 - DNA, 25 bp, Homo sapien
gaaaacaggtcttgcccttagcaga

SEQ ID NO: 4124491 - DNA, 25 bp, Homo sapien
taggatatagccattaccacggtgc

SEQ ID NO: 4124492 - DNA, 25 bp, Homo sapien
gaggtccagccccagaacttgtaag

SEQ ID NO: 4124493 - DNA, 25 bp, Homo sapien
gagggttgctatcactttgtccagc

SEQ ID NO: 4124494 - DNA, 25 bp, Homo sapien
tccagagttgttgtgtagctttgcc

SEQ ID NO: 4124495 - DNA, 25 bp, Homo sapien
tacatttataaggagccagggtctg

SEQ ID NO: 4124496 - DNA, 25 bp, Homo sapien
tgcagttgcctctactagctgatgg

SEQ ID NO: 4124497 - DNA, 25 bp, Homo sapien
gctggtgtcccaaggcgtaatctca

SEQ ID NO: 4124498 - DNA, 25 bp, Homo sapien
taggcagtttatgtgaccaaccaga

SEQ ID NO: 4124499 - DNA, 25 bp, Homo sapien
agacaggcatgcaggttctttagcc

SEQ ID NO: 4124500 - DNA, 25 bp, Homo sapien
tctcacactatgaggaacagctggt

SEQ ID NO: 4124501 - DNA, 25 bp, Homo sapien
aagtgactcagaacaagcggcttcc

SEQ ID NO: 4124502 - DNA, 25 bp, Homo sapien
taacacgtcagttgcaagccatcct

SEQ ID NO: 4124503 - DNA, 25 bp, Homo sapien
ttatacagtattcaacgcacgtgga

SEQ ID NO: 4124504 - DNA, 25 bp, Homo sapien
tccagtcagtgtgggtaacacgtca

SEQ ID NO: 4124505 - DNA, 25 bp, Homo sapien
ccaagttgcatatgtcagtaatgat

SEQ ID NO: 4124506 - DNA, 25 bp, Homo sapien
ttggggttcatccaagttgcatatg

SEQ ID NO: 4124507 - DNA, 25 bp, Homo sapien
ggctggtgatcattccatcttggcc

SEQ ID NO: 4124508 - DNA, 25 bp, Homo sapien
gcatatgtcagtaatgattcctttt

SEQ ID NO: 4124509 - DNA, 25 bp, Homo sapien
cagaaactagaagaggtacctccta

SEQ ID NO: 4124510 - DNA, 25 bp, Homo sapien
cacagttgtgtttacaaagttctca

SEQ ID NO: 4124511 - DNA, 25 bp, Homo sapien
caatatgtacggagcattatgtcta

SEQ ID NO: 4124512 - DNA, 25 bp, Homo sapien
ttgctgtctgtagaacacagttgtg

SEQ ID NO: 4124513 - DNA, 25 bp, Homo sapien
gtgtagtggcgggatcttggttcat

SEQ ID NO: 4124514 - DNA, 25 bp, Homo sapien
tagtggcgggatcttggttcattgc

SEQ ID NO: 4124515 - DNA, 25 bp, Homo sapien
catgcgccaccacacttgggtaatt

SEQ ID NO: 4124516 - DNA, 25 bp, Homo sapien
aacctctgccttctggttcaagcaa

SEQ ID NO: 4124517 - DNA, 25 bp, Homo sapien
taattccctggattccctccgtgag

SEQ ID NO: 4124518 - DNA, 25 bp, Homo sapien
cggaaacgcagagccggccaaagag

SEQ ID NO: 4124519 - DNA, 25 bp, Homo sapien
gggtcatctagtggcgcaagcgcac

SEQ ID NO: 4124520 - DNA, 25 bp, Homo sapien
gtggcgtgcgtcacaaccaggacgc

SEQ ID NO: 4124521 - DNA, 25 bp, Homo sapien
ccttcatgggtagaccgttcattac

SEQ ID NO: 4124522 - DNA, 25 bp, Homo sapien
tcaggaccaggcgagaggcactaat

SEQ ID NO: 4124523 - DNA, 25 bp, Homo sapien
gcgagaggcactaatcggtcccctt

SEQ ID NO: 4124524 - DNA, 25 bp, Homo sapien
taatcggtccccttcatgggtagac

SEQ ID NO: 4124525 - DNA, 25 bp, Homo sapien
cagagacctgacagactcctgagtt

SEQ ID NO: 4124526 - DNA, 25 bp, Homo sapien
cactgatgtgctcgtatgcttctgc

SEQ ID NO: 4124527 - DNA, 25 bp, Homo sapien
tgagttattccaccattccacctgg

SEQ ID NO: 4124528 - DNA, 25 bp, Homo sapien
gctagcttgaatgtcacgccggaaa

SEQ ID NO: 4124529 - DNA, 25 bp, Homo sapien
ctcaaattatgatctcattcaaacg

SEQ ID NO: 4124530 - DNA, 25 bp, Homo sapien
gatctcattcaaacgcctacttcct

SEQ ID NO: 4124531 - DNA, 25 bp, Homo sapien
tatgatctcattcaaacgcctactt

SEQ ID NO: 4124532 - DNA, 25 bp, Homo sapien
ttcaaacgcctacttcctacaaggc

SEQ ID NO: 4124533 - DNA, 25 bp, Homo sapien
gcctgtcccctcacaaagttgatgg

SEQ ID NO: 4124534 - DNA, 25 bp, Homo sapien
tgtgcaagacgttgactgcctgctg

SEQ ID NO: 4124535 - DNA, 25 bp, Homo sapien
caagtgaggacaagccagagattca

SEQ ID NO: 4124536 - DNA, 25 bp, Homo sapien
tacccatgaggaatatctgagcccc

SEQ ID NO: 4124537 - DNA, 25 bp, Homo sapien
tattttcaaccagatcaccaggagc

SEQ ID NO: 4124538 - DNA, 25 bp, Homo sapien
ggagtagcctaattttctgggagca

SEQ ID NO: 4124539 - DNA, 25 bp, Homo sapien
tctgctgggataagtgagaaagccc

SEQ ID NO: 4124540 - DNA, 25 bp, Homo sapien
tggatatggacttgaggcccacctc

SEQ ID NO: 4124541 - DNA, 25 bp, Homo sapien
attcttatcaatttaagggatctta

SEQ ID NO: 4124542 - DNA, 25 bp, Homo sapien
acatcctgcaccgtgtataacttag

SEQ ID NO: 4124543 - DNA, 25 bp, Homo sapien
tataacttagtgtgtcattttgaaa

SEQ ID NO: 4124544 - DNA, 25 bp, Homo sapien
gcaccgtgtataacttagtgtgtca

SEQ ID NO: 4124545 - DNA, 25 bp, Homo sapien
cagtgtgtccactagcactctaggg

SEQ ID NO: 4124546 - DNA, 25 bp, Homo sapien
caaggttcctatttggcctctgttg

SEQ ID NO: 4124547 - DNA, 25 bp, Homo sapien
tacagctaggtggaggtagaaatca

SEQ ID NO: 4124548 - DNA, 25 bp, Homo sapien
tgctaagtaagtgtgggagttccag

SEQ ID NO: 4124549 - DNA, 25 bp, Homo sapien
tgctcaggctaacttcgaactcctg

SEQ ID NO: 4124550 - DNA, 25 bp, Homo sapien
ggctcaagcattcctcctgccttgg

SEQ ID NO: 4124551 - DNA, 25 bp, Homo sapien
attcctcctgccttggcctcccaaa

SEQ ID NO: 4124552 - DNA, 25 bp, Homo sapien
catgttgctcaggctaacttcgaac

SEQ ID NO: 4124553 - DNA, 25 bp, Homo sapien
tctcggccgctatctggtcagaggg

SEQ ID NO: 4124554 - DNA, 25 bp, Homo sapien
tcactgtttgtactccgggatcggg

SEQ ID NO: 4124555 - DNA, 25 bp, Homo sapien
tgaaacttagcgctctgacccagag

SEQ ID NO: 4124556 - DNA, 25 bp, Homo sapien
gagaagacatcctggcgtcagtgga

SEQ ID NO: 4124557 - DNA, 25 bp, Homo sapien
atgctcggacaacgtgccggcgacg

SEQ ID NO: 4124558 - DNA, 25 bp, Homo sapien
aaaaaggcagacacacgctgggcgc

SEQ ID NO: 4124559 - DNA, 25 bp, Homo sapien
gaaaaaaggcagacacacgctgggc

SEQ ID NO: 4124560 - DNA, 25 bp, Homo sapien
gcccggccgctgacggcgggtaatg

SEQ ID NO: 4124561 - DNA, 25 bp, Homo sapien
gagaatcactccaaccagggaggca

SEQ ID NO: 4124562 - DNA, 25 bp, Homo sapien
gaatcactccaaccagggaggcaga

SEQ ID NO: 4124563 - DNA, 25 bp, Homo sapien
ccagctactcggaaggctgaggcag

SEQ ID NO: 4124564 - DNA, 25 bp, Homo sapien
ggtcaggagttcgagcacctgtaat

SEQ ID NO: 4124565 - DNA, 25 bp, Homo sapien
cttggagatctctcaggcagatgtc

SEQ ID NO: 4124566 - DNA, 25 bp, Homo sapien
ggagatctctcaggcagatgtcacc

SEQ ID NO: 4124567 - DNA, 25 bp, Homo sapien
gtaattcttggagatctctcaggca

SEQ ID NO: 4124568 - DNA, 25 bp, Homo sapien
ttcttggagatctctcaggcagatg

SEQ ID NO: 4124569 - DNA, 25 bp, Homo sapien
ctcttctgtatggtagagccacata

SEQ ID NO: 4124570 - DNA, 25 bp, Homo sapien
cttttaacaaactcttctgtatggt

SEQ ID NO: 4124571 - DNA, 25 bp, Homo sapien
gacttttaacaaactcttctgtatg

SEQ ID NO: 4124572 - DNA, 25 bp, Homo sapien
cttctgtatggtagagccacataat

SEQ ID NO: 4124573 - DNA, 25 bp, Homo sapien
tcacccagtctgagatataaaaaca

SEQ ID NO: 4124574 - DNA, 25 bp, Homo sapien
tgcgttggccttacaaaacgctggg

SEQ ID NO: 4124575 - DNA, 25 bp, Homo sapien
tatggagtactgagacatagtatca

SEQ ID NO: 4124576 - DNA, 25 bp, Homo sapien
gacactcacgtctaccaaaaggaaa

SEQ ID NO: 4124577 - DNA, 25 bp, Homo sapien
cctgggcaacagagcgagactcaat

SEQ ID NO: 4124578 - DNA, 25 bp, Homo sapien
agagattgcaccactgcactccagc

SEQ ID NO: 4124579 - DNA, 25 bp, Homo sapien
gaactgcttgaactcgggagacgga

SEQ ID NO: 4124580 - DNA, 25 bp, Homo sapien
ggttgcagtgagcagagattgcacc

SEQ ID NO: 4124581 - DNA, 25 bp, Homo sapien
attagctaggcatgatggcatgcac

SEQ ID NO: 4124582 - DNA, 25 bp, Homo sapien
aattagctaggcatgatggcatgca

SEQ ID NO: 4124583 - DNA, 25 bp, Homo sapien
aacatggcaaaatcccatctctact

SEQ ID NO: 4124584 - DNA, 25 bp, Homo sapien
catctctactaaaaatacaaaaatt

SEQ ID NO: 4124585 - DNA, 25 bp, Homo sapien
ccaggagattgaggccagcctagcc

SEQ ID NO: 4124586 - DNA, 25 bp, Homo sapien
tacaaaaattaggctgggcgcagtg

SEQ ID NO: 4124587 - DNA, 25 bp, Homo sapien
agtgaaactccattggccgggtgcg

SEQ ID NO: 4124588 - DNA, 25 bp, Homo sapien
gaaaagcccgcaaacagcgaaatgt

SEQ ID NO: 4124589 - DNA, 25 bp, Homo sapien
tcatgccccgttagtattgatacag

SEQ ID NO: 4124590 - DNA, 25 bp, Homo sapien
ttaagggagaagcacatccccacag

SEQ ID NO: 4124591 - DNA, 25 bp, Homo sapien
ttagcatccagccaagttgcagatc

SEQ ID NO: 4124592 - DNA, 25 bp, Homo sapien
aaaactaccgctttctcaaatgcat

SEQ ID NO: 4124593 - DNA, 25 bp, Homo sapien
gccaagttgcagatcaggaaagcag

SEQ ID NO: 4124594 - DNA, 25 bp, Homo sapien
cccaaaactaccgctttctcaaatg

SEQ ID NO: 4124595 - DNA, 25 bp, Homo sapien
aagcaagtgaactggtactcctcgg

SEQ ID NO: 4124596 - DNA, 25 bp, Homo sapien
gcaagtgaactggtactcctcggga

SEQ ID NO: 4124597 - DNA, 25 bp, Homo sapien
caagcaagtgaactggtactcctcg

SEQ ID NO: 4124598 - DNA, 25 bp, Homo sapien
caagtgaactggtactcctcgggat

SEQ ID NO: 4124599 - DNA, 25 bp, Homo sapien
tactaatttgggaatctgaggacct

SEQ ID NO: 4124600 - DNA, 25 bp, Homo sapien
ggttgacatcatgccaaggtgccct

SEQ ID NO: 4124601 - DNA, 25 bp, Homo sapien
cttcctgaaacgtgcaaagttgtgc

SEQ ID NO: 4124602 - DNA, 25 bp, Homo sapien
ggcctaaggtacaagacatccaaag

SEQ ID NO: 4124603 - DNA, 25 bp, Homo sapien
aaaagtgagcaatagggacaggcgc

SEQ ID NO: 4124604 - DNA, 25 bp, Homo sapien
tataatgcaatgtctaccagggcag

SEQ ID NO: 4124605 - DNA, 25 bp, Homo sapien
tagatagaggcatgcaaagacagct

SEQ ID NO: 4124606 - DNA, 25 bp, Homo sapien
taacggccagctatttgaaacgcag

SEQ ID NO: 4124607 - DNA, 25 bp, Homo sapien
gcaaggttatctacagactcctgga

SEQ ID NO: 4124608 - DNA, 25 bp, Homo sapien
tgtgcatttattggcctgggcttag

SEQ ID NO: 4124609 - DNA, 25 bp, Homo sapien
cagggagggattcatgtaaacaagg

SEQ ID NO: 4124610 - DNA, 25 bp, Homo sapien
caatcctctatttccgggttggtgg

SEQ ID NO: 4124611 - DNA, 25 bp, Homo sapien
ggcaaaggcatgtgcagccaaccat

SEQ ID NO: 4124612 - DNA, 25 bp, Homo sapien
cagatcagagtccacggtcttttca

SEQ ID NO: 4124613 - DNA, 25 bp, Homo sapien
tctggtcctccagacaactgttgat

SEQ ID NO: 4124614 - DNA, 25 bp, Homo sapien
catctttatttggaggtcagctggc

SEQ ID NO: 4124615 - DNA, 25 bp, Homo sapien
gccacttcgtggtccaatcactttt

SEQ ID NO: 4124616 - DNA, 25 bp, Homo sapien
tcagcctgccacttcgtggtccaat

SEQ ID NO: 4124617 - DNA, 25 bp, Homo sapien
tacttgccaactgcctgaaatcttt

SEQ ID NO: 4124618 - DNA, 25 bp, Homo sapien
tttaaggctacatgaatgggtcttc

SEQ ID NO: 4124619 - DNA, 25 bp, Homo sapien
cagctgatggcagtgagcatcaacg

SEQ ID NO: 4124620 - DNA, 25 bp, Homo sapien
agctgatggcagtgagcatcaacgg

SEQ ID NO: 4124621 - DNA, 25 bp, Homo sapien
gctgatggcagtgagcatcaacggc

SEQ ID NO: 4124622 - DNA, 25 bp, Homo sapien
tgatcctcctgcagcacgggagttt

SEQ ID NO: 4124623 - DNA, 25 bp, Homo sapien
tctgtttccaacctacgtcagttta

SEQ ID NO: 4124624 - DNA, 25 bp, Homo sapien
ctctgtttccaacctacgtcagttt

SEQ ID NO: 4124625 - DNA, 25 bp, Homo sapien
ccttccaaggtaagtggcatctgac

SEQ ID NO: 4124626 - DNA, 25 bp, Homo sapien
ttttccttccaaggtaagtggcatc

SEQ ID NO: 4124627 - DNA, 25 bp, Homo sapien
ggtaagtggcatctgacccgtgcat

SEQ ID NO: 4124628 - DNA, 25 bp, Homo sapien
tccaaggtaagtggcatctgacccg

SEQ ID NO: 4124629 - DNA, 25 bp, Homo sapien
tataagtttagcaactgaatgagat

SEQ ID NO: 4124630 - DNA, 25 bp, Homo sapien
ttaactaatataagtttagcaactg

SEQ ID NO: 4124631 - DNA, 25 bp, Homo sapien
ctaatataagtttagcaactgaatg

SEQ ID NO: 4124632 - DNA, 25 bp, Homo sapien
taagtttagcaactgaatgagatac

SEQ ID NO: 4124633 - DNA, 25 bp, Homo sapien
tggattaggctgaactcgagcctca

SEQ ID NO: 4124634 - DNA, 25 bp, Homo sapien
tgatggattaggctgaactcgagcc

SEQ ID NO: 4124635 - DNA, 25 bp, Homo sapien
gattaggctgaactcgagcctcaac

SEQ ID NO: 4124636 - DNA, 25 bp, Homo sapien
tttgatggattaggctgaactcgag

SEQ ID NO: 4124637 - DNA, 25 bp, Homo sapien
cacgccgtccttgacgagaactgag

SEQ ID NO: 4124638 - DNA, 25 bp, Homo sapien
acgccgtccttgacgagaactgagc

SEQ ID NO: 4124639 - DNA, 25 bp, Homo sapien
gccgtccttgacgagaactgagcag

SEQ ID NO: 4124640 - DNA, 25 bp, Homo sapien
cgccgtccttgacgagaactgagca

SEQ ID NO: 4124641 - DNA, 25 bp, Homo sapien
gatggggccaggtgcgatagctcat

SEQ ID NO: 4124642 - DNA, 25 bp, Homo sapien
caacctgatggggccaggtgcgata

SEQ ID NO: 4124643 - DNA, 25 bp, Homo sapien
tgttgaacaaaaacaacctgatggg

SEQ ID NO: 4124644 - DNA, 25 bp, Homo sapien
acaaaaacaacctgatggggccagg

SEQ ID NO: 4124645 - DNA, 25 bp, Homo sapien
tcctctggtgtacggagtggacagt

SEQ ID NO: 4124646 - DNA, 25 bp, Homo sapien
aagtcctctggtgtacggagtggac

SEQ ID NO: 4124647 - DNA, 25 bp, Homo sapien
tctggtgtacggagtggacagtcct

SEQ ID NO: 4124648 - DNA, 25 bp, Homo sapien
ctctggtgtacggagtggacagtcc

SEQ ID NO: 4124649 - DNA, 25 bp, Homo sapien
gaagacctcgttgcaccgattgcac

SEQ ID NO: 4124650 - DNA, 25 bp, Homo sapien
aagacctcgttgcaccgattgcact

SEQ ID NO: 4124651 - DNA, 25 bp, Homo sapien
cagaagacctcgttgcaccgattgc

SEQ ID NO: 4124652 - DNA, 25 bp, Homo sapien
agaagacctcgttgcaccgattgca

SEQ ID NO: 4124653 - DNA, 25 bp, Homo sapien
acagctgttctgttggctcagagac

SEQ ID NO: 4124654 - DNA, 25 bp, Homo sapien
cagggctgctcagcactcacactca

SEQ ID NO: 4124655 - DNA, 25 bp, Homo sapien
catggagcaacagcagtggtgcttt

SEQ ID NO: 4124656 - DNA, 25 bp, Homo sapien
tccagtgccgccctcacatggagca

SEQ ID NO: 4124657 - DNA, 25 bp, Homo sapien
caacttaagcctttgtaagacatgc

SEQ ID NO: 4124658 - DNA, 25 bp, Homo sapien
tcactgtactgcaacgtggacaact

SEQ ID NO: 4124659 - DNA, 25 bp, Homo sapien
caggtgtagtgctatgtgtctgtag

SEQ ID NO: 4124660 - DNA, 25 bp, Homo sapien
gctctaacacgcacaaataaaatat

SEQ ID NO: 4124661 - DNA, 25 bp, Homo sapien
agtcagggtcccatgttcaaaattt

SEQ ID NO: 4124662 - DNA, 25 bp, Homo sapien
aagtcagggtcccatgttcaaaatt

SEQ ID NO: 4124663 - DNA, 25 bp, Homo sapien
cacttcgtgagccatttccggattg

SEQ ID NO: 4124664 - DNA, 25 bp, Homo sapien
cgtgatacatctgacgacacttgaa

SEQ ID NO: 4124665 - DNA, 25 bp, Homo sapien
aatgtagttggctgtttcagagtcg

SEQ ID NO: 4124666 - DNA, 25 bp, Homo sapien
tgtgggtgcgtgatacatctgacga

SEQ ID NO: 4124667 - DNA, 25 bp, Homo sapien
cctataataaactgctacgagctgc

SEQ ID NO: 4124668 - DNA, 25 bp, Homo sapien
tctcagatggcaaatctccaaggca

SEQ ID NO: 4124669 - DNA, 25 bp, Homo sapien
actgctacgagctgccaactctgtg

SEQ ID NO: 4124670 - DNA, 25 bp, Homo sapien
gggctctgggtattctgctctcaga

SEQ ID NO: 4124671 - DNA, 25 bp, Homo sapien
tcacttaaatgtggcaggtcgctga

SEQ ID NO: 4124672 - DNA, 25 bp, Homo sapien
ggaggagcacctcacttaaatgtgg

SEQ ID NO: 4124673 - DNA, 25 bp, Homo sapien
acagaagggtgccattaggctcaca

SEQ ID NO: 4124674 - DNA, 25 bp, Homo sapien
tgtgcccagttgctcatggtgtgag

SEQ ID NO: 4124675 - DNA, 25 bp, Homo sapien
ccattcttctcaatgcagatgttgc

SEQ ID NO: 4124676 - DNA, 25 bp, Homo sapien
tcttctcaatgcagatgttgcactt

SEQ ID NO: 4124677 - DNA, 25 bp, Homo sapien
caatgcagatgttgcacttgggaca

SEQ ID NO: 4124678 - DNA, 25 bp, Homo sapien
catgtgattgcagcctccattcttc

SEQ ID NO: 4124679 - DNA, 25 bp, Homo sapien
tgggccttacacaccaagcttggaa

SEQ ID NO: 4124680 - DNA, 25 bp, Homo sapien
atagtaacggagacccaaccacaag

SEQ ID NO: 4124681 - DNA, 25 bp, Homo sapien
catggcagaagtactcacttaaata

SEQ ID NO: 4124682 - DNA, 25 bp, Homo sapien
caaccacaagaaagtgccactgggc

SEQ ID NO: 4124683 - DNA, 25 bp, Homo sapien
tacccatggcctatcttcgtttggc

SEQ ID NO: 4124684 - DNA, 25 bp, Homo sapien
gaagaaatatgccactacccatggc

SEQ ID NO: 4124685 - DNA, 25 bp, Homo sapien
gcattgttctaagtgtatgatacac

SEQ ID NO: 4124686 - DNA, 25 bp, Homo sapien
gctgggatgtttgtcattattcttt

SEQ ID NO: 4124687 - DNA, 25 bp, Homo sapien
gaggccgacctgactgtcttaaacg

SEQ ID NO: 4124688 - DNA, 25 bp, Homo sapien
gaggaactagtccaactgaggccga

SEQ ID NO: 4124689 - DNA, 25 bp, Homo sapien
tgaacacaacttcccaagggtgcct

SEQ ID NO: 4124690 - DNA, 25 bp, Homo sapien
tctttcccgaaggaatgtgcacctc

SEQ ID NO: 4124691 - DNA, 25 bp, Homo sapien
tccaatctcctagacacatccagca

SEQ ID NO: 4124692 - DNA, 25 bp, Homo sapien
tgtaacgactgcactcatagtattc

SEQ ID NO: 4124693 - DNA, 25 bp, Homo sapien
taacgactgcactcatagtattcac

SEQ ID NO: 4124694 - DNA, 25 bp, Homo sapien
cttgtaacgactgcactcatagtat

SEQ ID NO: 4124695 - DNA, 25 bp, Homo sapien
ggtgcagaggtctacacaggagttc

SEQ ID NO: 4124696 - DNA, 25 bp, Homo sapien
acaggagtcccatgaaggtgcagag

SEQ ID NO: 4124697 - DNA, 25 bp, Homo sapien
aggagttcaggatagacaccttgct

SEQ ID NO: 4124698 - DNA, 25 bp, Homo sapien
gatagacaccttgctggcaggacat

SEQ ID NO: 4124699 - DNA, 25 bp, Homo sapien
ccatgtccccagattgttcatgacc

SEQ ID NO: 4124700 - DNA, 25 bp, Homo sapien
ccagattgttcatgaccctctcctg

SEQ ID NO: 4124701 - DNA, 25 bp, Homo sapien
tgttcatgaccctctcctgaatctt

SEQ ID NO: 4124702 - DNA, 25 bp, Homo sapien
tgtccccagattgttcatgaccctc

SEQ ID NO: 4124703 - DNA, 25 bp, Homo sapien
tgggtccttaatgggcacagcacat

SEQ ID NO: 4124704 - DNA, 25 bp, Homo sapien
aagtgctctagttttccctgcaggc

SEQ ID NO: 4124705 - DNA, 25 bp, Homo sapien
gcaacactcttataaatcccctgga

SEQ ID NO: 4124706 - DNA, 25 bp, Homo sapien
tatcagaggtctgtgcctgacggag

SEQ ID NO: 4124707 - DNA, 25 bp, Homo sapien
taggtgtattgcagggtgtatcgac

SEQ ID NO: 4124708 - DNA, 25 bp, Homo sapien
aggtgtattgcagggtgtatcgaca

SEQ ID NO: 4124709 - DNA, 25 bp, Homo sapien
catgtaatatgcatatgggtaggtg

SEQ ID NO: 4124710 - DNA, 25 bp, Homo sapien
tatgcatatgggtaggtgtattgca

SEQ ID NO: 4124711 - DNA, 25 bp, Homo sapien
agcaggagggtcaaaaggtgagtgg

SEQ ID NO: 4124712 - DNA, 25 bp, Homo sapien
agagcaggagggtcaaaaggtgagt

SEQ ID NO: 4124713 - DNA, 25 bp, Homo sapien
ctgtataggcagagcaggagggtca

SEQ ID NO: 4124714 - DNA, 25 bp, Homo sapien
gcagagcaggagggtcaaaaggtga

SEQ ID NO: 4124715 - DNA, 25 bp, Homo sapien
tcagcctccagctgagcctgctggt

SEQ ID NO: 4124716 - DNA, 25 bp, Homo sapien
ctcagcctccagctgagcctgctgg

SEQ ID NO: 4124717 - DNA, 25 bp, Homo sapien
ccagctgagcctgctggtattcaaa

SEQ ID NO: 4124718 - DNA, 25 bp, Homo sapien
gcctccagctgagcctgctggtatt

SEQ ID NO: 4124719 - DNA, 25 bp, Homo sapien
cacgctccactttccatgagaggtt

SEQ ID NO: 4124720 - DNA, 25 bp, Homo sapien
tctgcacgctccactttccatgaga

SEQ ID NO: 4124721 - DNA, 25 bp, Homo sapien
cctctgtcatagctgtctgcacgct

SEQ ID NO: 4124722 - DNA, 25 bp, Homo sapien
tgtcatagctgtctgcacgctccac

SEQ ID NO: 4124723 - DNA, 25 bp, Homo sapien
atccaagaggacagtaggcacttac

SEQ ID NO: 4124724 - DNA, 25 bp, Homo sapien
tagaatccaagaggacagtaggcac

SEQ ID NO: 4124725 - DNA, 25 bp, Homo sapien
tatagaatccaagaggacagtaggc

SEQ ID NO: 4124726 - DNA, 25 bp, Homo sapien
ctgcaatatagaatccaagaggaca

SEQ ID NO: 4124727 - DNA, 25 bp, Homo sapien
aggagtagccaaagccacaaacacc

SEQ ID NO: 4124728 - DNA, 25 bp, Homo sapien
ctgggagcaaggagtagccaaagcc

SEQ ID NO: 4124729 - DNA, 25 bp, Homo sapien
caaagccacaaacaccctccaggac

SEQ ID NO: 4124730 - DNA, 25 bp, Homo sapien
cagagaaacaaggtgtgtgcttgca

SEQ ID NO: 4124731 - DNA, 25 bp, Homo sapien
ctcctccgctgctccgctatatgca

SEQ ID NO: 4124732 - DNA, 25 bp, Homo sapien
tccgctgctccgctatatgcatctg

SEQ ID NO: 4124733 - DNA, 25 bp, Homo sapien
gctgctccgctatatgcatctggtt

SEQ ID NO: 4124734 - DNA, 25 bp, Homo sapien
tcctccgctgctccgctatatgcat

SEQ ID NO: 4124735 - DNA, 25 bp, Homo sapien
tgcagtatggcagccgggagacctt

SEQ ID NO: 4124736 - DNA, 25 bp, Homo sapien
aaaagggctctgtgttatcctatag

SEQ ID NO: 4124737 - DNA, 25 bp, Homo sapien
tcaactaagaggtgttgccagtgtc

SEQ ID NO: 4124738 - DNA, 25 bp, Homo sapien
ttcaacatggcctctaccctggtag

SEQ ID NO: 4124739 - DNA, 25 bp, Homo sapien
taaggcaggaggcatgctgtgaccc

SEQ ID NO: 4124740 - DNA, 25 bp, Homo sapien
acagacattttgaggtgggtaggca

SEQ ID NO: 4124741 - DNA, 25 bp, Homo sapien
gactgtctccgtactgccacggtaa

SEQ ID NO: 4124742 - DNA, 25 bp, Homo sapien
caactctggccaaacgtgaatatgg

SEQ ID NO: 4124743 - DNA, 25 bp, Homo sapien
tttaggagacaaaaggcaacactgt

SEQ ID NO: 4124744 - DNA, 25 bp, Homo sapien
aggcccaaccccattctgctgtggg

SEQ ID NO: 4124745 - DNA, 25 bp, Homo sapien
tcccttcaaaagtagatccctatct

SEQ ID NO: 4124746 - DNA, 25 bp, Homo sapien
tgggctctagcctcagtagccagat

SEQ ID NO: 4124747 - DNA, 25 bp, Homo sapien
gccagaaagtccagtgccctaggaa

SEQ ID NO: 4124748 - DNA, 25 bp, Homo sapien
tgctcagagctataccacttgaata

SEQ ID NO: 4124749 - DNA, 25 bp, Homo sapien
gaagggctatcctgaattctgaccc

SEQ ID NO: 4124750 - DNA, 25 bp, Homo sapien
caagacagtgtcaggtttggccaaa

SEQ ID NO: 4124751 - DNA, 25 bp, Homo sapien
tgttaacaaacgacagccactgagg

SEQ ID NO: 4124752 - DNA, 25 bp, Homo sapien
tagtacaggatctcggaccacaaac

SEQ ID NO: 4124753 - DNA, 25 bp, Homo sapien
ttttcaatggcccacaggaccaggt

SEQ ID NO: 4124754 - DNA, 25 bp, Homo sapien
ttcaggacaggtaggacaccaggca

SEQ ID NO: 4124755 - DNA, 25 bp, Homo sapien
taagcggcgatagggtaggacccac

SEQ ID NO: 4124756 - DNA, 25 bp, Homo sapien
tacactagtgggagcttctcggtgc

SEQ ID NO: 4124757 - DNA, 25 bp, Homo sapien
gcctccgggaaaagtatcgtctgca

SEQ ID NO: 4124758 - DNA, 25 bp, Homo sapien
gatgactcaacagtgcggcatttgg

SEQ ID NO: 4124759 - DNA, 25 bp, Homo sapien
aagccaaggtcccaagcgtagacgc

SEQ ID NO: 4124760 - DNA, 25 bp, Homo sapien
tacactctccaagtcagaagccaag

SEQ ID NO: 4124761 - DNA, 25 bp, Homo sapien
tcccaagcgtagacgcggacaagag

SEQ ID NO: 4124762 - DNA, 25 bp, Homo sapien
ttcccaagctgggttgccgtcgggc

SEQ ID NO: 4124763 - DNA, 25 bp, Homo sapien
ggcacccaggtcgcgcgcgcgccca

SEQ ID NO: 4124764 - DNA, 25 bp, Homo sapien
agtcgcccggacaacggccgccagg

SEQ ID NO: 4124765 - DNA, 25 bp, Homo sapien
gcgctgcgcagtcgcccggacaacg

SEQ ID NO: 4124766 - DNA, 25 bp, Homo sapien
cccgcgctgcgcagtcgcccggaca

SEQ ID NO: 4124767 - DNA, 25 bp, Homo sapien
aagtaggcgcgcgagcagatgccgc

SEQ ID NO: 4124768 - DNA, 25 bp, Homo sapien
ttgcacagcggacgcaccggtgcgt

SEQ ID NO: 4124769 - DNA, 25 bp, Homo sapien
tctcaggccgctggcctgtcaccgc

SEQ ID NO: 4124770 - DNA, 25 bp, Homo sapien
cgccgcctgagcctggcagtggtct

SEQ ID NO: 4124771 - DNA, 25 bp, Homo sapien
ccaggtacaggtgcacgaacaccat

SEQ ID NO: 4124772 - DNA, 25 bp, Homo sapien
agcagcgccagcacgttacccaggt

SEQ ID NO: 4124773 - DNA, 25 bp, Homo sapien
ctttcgtcgccgttgctgtagtgca

SEQ ID NO: 4124774 - DNA, 25 bp, Homo sapien
ctgtagtgcacgaagagcagcagcg

SEQ ID NO: 4124775 - DNA, 25 bp, Homo sapien
ctaaggaaaaggcgcacagcgggca

SEQ ID NO: 4124776 - DNA, 25 bp, Homo sapien
gctgcccaagaagggccaagtcgcc

SEQ ID NO: 4124777 - DNA, 25 bp, Homo sapien
ggagagcgacagcaggcgagtgagt

SEQ ID NO: 4124778 - DNA, 25 bp, Homo sapien
gacccgggctgagcgccggtcctct

SEQ ID NO: 4124779 - DNA, 25 bp, Homo sapien
ctgagggttcggatgaagtgatccc

SEQ ID NO: 4124780 - DNA, 25 bp, Homo sapien
gaagtgatccctgtcggtgaccagc

SEQ ID NO: 4124781 - DNA, 25 bp, Homo sapien
cctgtcggtgaccagctggacctta

SEQ ID NO: 4124782 - DNA, 25 bp, Homo sapien
tgaccagctggaccttacgctcgtg

SEQ ID NO: 4124783 - DNA, 25 bp, Homo sapien
tgaagtaaccgtgtcagcctggcca

SEQ ID NO: 4124784 - DNA, 25 bp, Homo sapien
caaatatgtttgtcacggaggccag

SEQ ID NO: 4124785 - DNA, 25 bp, Homo sapien
tggagtcaccctagaaagctttgcc

SEQ ID NO: 4124786 - DNA, 25 bp, Homo sapien
tcaaaatagaggtcacgtggtcaca

SEQ ID NO: 4124787 - DNA, 25 bp, Homo sapien
gaatctatagcaggtccactcttct

SEQ ID NO: 4124788 - DNA, 25 bp, Homo sapien
gcaggtccactcttcttgggccctg

SEQ ID NO: 4124789 - DNA, 25 bp, Homo sapien
tatagcaggtccactcttcttgggc

SEQ ID NO: 4124790 - DNA, 25 bp, Homo sapien
cagaatctatagcaggtccactctt

SEQ ID NO: 4124791 - DNA, 25 bp, Homo sapien
gcatgaggtgcatgcccattcccca

SEQ ID NO: 4124792 - DNA, 25 bp, Homo sapien
tgccacgacattggctacacagatg

SEQ ID NO: 4124793 - DNA, 25 bp, Homo sapien
gggctgcatgaggtgcatgcccatt

SEQ ID NO: 4124794 - DNA, 25 bp, Homo sapien
aagccatggccctatgccacgacat

SEQ ID NO: 4124795 - DNA, 25 bp, Homo sapien
cctgggtgcaggaacagccctataa

SEQ ID NO: 4124796 - DNA, 25 bp, Homo sapien
ggagctgtgcaaacccctgcaggat

SEQ ID NO: 4124797 - DNA, 25 bp, Homo sapien
cctcagttcattaaggccaaggcac

SEQ ID NO: 4124798 - DNA, 25 bp, Homo sapien
tgccagtaatctgcaagcccagtgg

SEQ ID NO: 4124799 - DNA, 25 bp, Homo sapien
gaggccaggccccattaattcaacc

SEQ ID NO: 4124800 - DNA, 25 bp, Homo sapien
gtgttccagaaaccatgctcatgac

SEQ ID NO: 4124801 - DNA, 25 bp, Homo sapien
gaccagattcagctactaggagcag

SEQ ID NO: 4124802 - DNA, 25 bp, Homo sapien
tctaagaggaaacccaagcacagag

SEQ ID NO: 4124803 - DNA, 25 bp, Homo sapien
ggactgaaggctagagagtgatcct

SEQ ID NO: 4124804 - DNA, 25 bp, Homo sapien
tgaaggctagagagtgatcctgaag

SEQ ID NO: 4124805 - DNA, 25 bp, Homo sapien
aaatatttaaagtggggagatggtg

SEQ ID NO: 4124806 - DNA, 25 bp, Homo sapien
gattgctactttttactgggtataa

SEQ ID NO: 4124807 - DNA, 25 bp, Homo sapien
caagattgagttgtcctgcaaaggc

SEQ ID NO: 4124808 - DNA, 25 bp, Homo sapien
tggcgttggaaatgtgggacctctc

SEQ ID NO: 4124809 - DNA, 25 bp, Homo sapien
tggaggattttacagaccccttgat

SEQ ID NO: 4124810 - DNA, 25 bp, Homo sapien
gggtactgcatgtccctcagtggcc

SEQ ID NO: 4124811 - DNA, 25 bp, Homo sapien
tgcgccagatggatgatgagccgac

SEQ ID NO: 4124812 - DNA, 25 bp, Homo sapien
catactcttcagtaggcaggatctg

SEQ ID NO: 4124813 - DNA, 25 bp, Homo sapien
ctgaaggtgcccatcacggttctgg

SEQ ID NO: 4124814 - DNA, 25 bp, Homo sapien
agctggctgacctgcatagtgctca

SEQ ID NO: 4124815 - DNA, 25 bp, Homo sapien
gaaaggtgattctgggcactcccac

SEQ ID NO: 4124816 - DNA, 25 bp, Homo sapien
tatctgacttttgggaccaggcctg

SEQ ID NO: 4124817 - DNA, 25 bp, Homo sapien
gctacagaggtgcatccctccaaaa

SEQ ID NO: 4124818 - DNA, 25 bp, Homo sapien
ggttcccagggtagccaagagctct

SEQ ID NO: 4124819 - DNA, 25 bp, Homo sapien
cagagtgaaggacaggcctgtgtcc

SEQ ID NO: 4124820 - DNA, 25 bp, Homo sapien
tgtgtcccactcagatactccgggt

SEQ ID NO: 4124821 - DNA, 25 bp, Homo sapien
gagacctggttagggcatgaccacc

SEQ ID NO: 4124822 - DNA, 25 bp, Homo sapien
tgaccaccagatccctcagaaagac

SEQ ID NO: 4124823 - DNA, 25 bp, Homo sapien
ggtcaagaggcgtaggccatttgca

SEQ ID NO: 4124824 - DNA, 25 bp, Homo sapien
aggtgagggcatggatgaggacaca

SEQ ID NO: 4124825 - DNA, 25 bp, Homo sapien
cattgggccaaagtgagtgcaggta

SEQ ID NO: 4124826 - DNA, 25 bp, Homo sapien
ggtagaaaggtacagagcatctgag

SEQ ID NO: 4124827 - DNA, 25 bp, Homo sapien
cttgatcgcggcgtacatctcctga

SEQ ID NO: 4124828 - DNA, 25 bp, Homo sapien
ggtcagccttgatcgcggcgtacat

SEQ ID NO: 4124829 - DNA, 25 bp, Homo sapien
atcagggtcagccttgatcgcggcg

SEQ ID NO: 4124830 - DNA, 25 bp, Homo sapien
gcggcgtacatctcctgaatgctct

SEQ ID NO: 4124831 - DNA, 25 bp, Homo sapien
catacatacgccagggtgcaagcag

SEQ ID NO: 4124832 - DNA, 25 bp, Homo sapien
tcatcctgggtggaacctacttcgc

SEQ ID NO: 4124833 - DNA, 25 bp, Homo sapien
gatctcacttagaccagggaagctg

SEQ ID NO: 4124834 - DNA, 25 bp, Homo sapien
gcttcggcatgactccaggtggaca

SEQ ID NO: 4124835 - DNA, 25 bp, Homo sapien
ttggagaactcctgcagactcagca

SEQ ID NO: 4124836 - DNA, 25 bp, Homo sapien
tgccttgtggctcctcatgtacttg

SEQ ID NO: 4124837 - DNA, 25 bp, Homo sapien
ggtatggtggctgttccgcaccagc

SEQ ID NO: 4124838 - DNA, 25 bp, Homo sapien
tgtggaagtcccgaaggtccatgtt

SEQ ID NO: 4124839 - DNA, 25 bp, Homo sapien
taattgcctgtctttcagtgggtcc

SEQ ID NO: 4124840 - DNA, 25 bp, Homo sapien
gccccaggcaaggtggtgatctgaa

SEQ ID NO: 4124841 - DNA, 25 bp, Homo sapien
tggaagtcccttaagccatctcaga

SEQ ID NO: 4124842 - DNA, 25 bp, Homo sapien
tcttggccccagacaaggacttctg

SEQ ID NO: 4124843 - DNA, 25 bp, Homo sapien
ccatatcgaacaacctgcagcggct

SEQ ID NO: 4124844 - DNA, 25 bp, Homo sapien
tgagctccacgatctcaggcgacag

SEQ ID NO: 4124845 - DNA, 25 bp, Homo sapien
taccagcttggtatgggagcagatg

SEQ ID NO: 4124846 - DNA, 25 bp, Homo sapien
tacagactcgttggctaccagcttg

SEQ ID NO: 4124847 - DNA, 25 bp, Homo sapien
gctgtgcctgtgtcatgggtgttcc

SEQ ID NO: 4124848 - DNA, 25 bp, Homo sapien
catgccaaggggcacgcccacagtg

SEQ ID NO: 4124849 - DNA, 25 bp, Homo sapien
ggtgttcctggtctgaggattgaag

SEQ ID NO: 4124850 - DNA, 25 bp, Homo sapien
cgggataacccagtgatctcctggc

SEQ ID NO: 4124851 - DNA, 25 bp, Homo sapien
tgaccagtagccacccctttccagc

SEQ ID NO: 4124852 - DNA, 25 bp, Homo sapien
acgatgaccagtagccacccctttc

SEQ ID NO: 4124853 - DNA, 25 bp, Homo sapien
tcacgatgaccagtagccacccctt

SEQ ID NO: 4124854 - DNA, 25 bp, Homo sapien
atgaccagtagccacccctttccag

SEQ ID NO: 4124855 - DNA, 25 bp, Homo sapien
tagttaaatgccatggccctgagca

SEQ ID NO: 4124856 - DNA, 25 bp, Homo sapien
caggacagactaggatgggagacaa

SEQ ID NO: 4124857 - DNA, 25 bp, Homo sapien
aatcaagatcaacacctggaggaat

SEQ ID NO: 4124858 - DNA, 25 bp, Homo sapien
gcaatggttttttggccaagatcac

SEQ ID NO: 4124859 - DNA, 25 bp, Homo sapien
ggtccccagttgtggatgctcccag

SEQ ID NO: 4124860 - DNA, 25 bp, Homo sapien
ccccaccagtgacgttgttcaaata

SEQ ID NO: 4124861 - DNA, 25 bp, Homo sapien
ccagtgacgttgttcaaataaaaca

SEQ ID NO: 4124862 - DNA, 25 bp, Homo sapien
tacagggaaaacagtctcgccccca

SEQ ID NO: 4124863 - DNA, 25 bp, Homo sapien
catttcatcgtaggttctgttatct

SEQ ID NO: 4124864 - DNA, 25 bp, Homo sapien
caaggaataatttgggcccacatcc

SEQ ID NO: 4124865 - DNA, 25 bp, Homo sapien
gcccacatccttagacctggagagg

SEQ ID NO: 4124866 - DNA, 25 bp, Homo sapien
tgtacttcacttgtctaagcccctg

SEQ ID NO: 4124867 - DNA, 25 bp, Homo sapien
cctgccagcccacaagagtaatagc

SEQ ID NO: 4124868 - DNA, 25 bp, Homo sapien
gggcttgacacgcaggtttcccttg

SEQ ID NO: 4124869 - DNA, 25 bp, Homo sapien
caggtagttgtaccagaagactgct

SEQ ID NO: 4124870 - DNA, 25 bp, Homo sapien
cgtgtgtcacggaggtccacgtcat

SEQ ID NO: 4124871 - DNA, 25 bp, Homo sapien
cagaagactgctgtgccctgttggg

SEQ ID NO: 4124872 - DNA, 25 bp, Homo sapien
ctaaggatggcctttgggaggcacc

SEQ ID NO: 4124873 - DNA, 25 bp, Homo sapien
gaaacagccctccattgtggcagac

SEQ ID NO: 4124874 - DNA, 25 bp, Homo sapien
ctgctaaagtcactaaggatggcct

SEQ ID NO: 4124875 - DNA, 25 bp, Homo sapien
acagccctccattgtggcagacggg

SEQ ID NO: 4124876 - DNA, 25 bp, Homo sapien
tatgcattccttgtgtagcaaacac

SEQ ID NO: 4124877 - DNA, 25 bp, Homo sapien
tagcaaacacccagacctaaagctt

SEQ ID NO: 4124878 - DNA, 25 bp, Homo sapien
cagagcttggcctcataggcaccaa

SEQ ID NO: 4124879 - DNA, 25 bp, Homo sapien
taggcaccaagagcatgaccaaggt

SEQ ID NO: 4124880 - DNA, 25 bp, Homo sapien
caaggcgggccatctcctgttggaa

SEQ ID NO: 4124881 - DNA, 25 bp, Homo sapien
ggcaatccacttggtgccgcgcgtg

SEQ ID NO: 4124882 - DNA, 25 bp, Homo sapien
gggtccacattaatccagttgttgg

SEQ ID NO: 4124883 - DNA, 25 bp, Homo sapien
cccgtgcagcgagtagtcgtctacg

SEQ ID NO: 4124884 - DNA, 25 bp, Homo sapien
gggcaagacattggccagaccttta

SEQ ID NO: 4124885 - DNA, 25 bp, Homo sapien
acagccggacccctgatcttgggca

SEQ ID NO: 4124886 - DNA, 25 bp, Homo sapien
gggcagatggagtcagtacacaata

SEQ ID NO: 4124887 - DNA, 25 bp, Homo sapien
aatataggaactgcgccgtatcgcg

SEQ ID NO: 4124888 - DNA, 25 bp, Homo sapien
ctctgtttcgccgacccggagtttg

SEQ ID NO: 4124889 - DNA, 25 bp, Homo sapien
tatcgcggactctgtttcgccgacc

SEQ ID NO: 4124890 - DNA, 25 bp, Homo sapien
gcacctatcgcggactctgtttcgc

SEQ ID NO: 4124891 - DNA, 25 bp, Homo sapien
cgctgcacctatcgcggactctgtt

SEQ ID NO: 4124892 - DNA, 25 bp, Homo sapien
aggtagcagagaccagggcgcccgc

SEQ ID NO: 4124893 - DNA, 25 bp, Homo sapien
ctacaggtagcagagaccagggcgc

SEQ ID NO: 4124894 - DNA, 25 bp, Homo sapien
gtagcagagaccagggcgcccgcgg

SEQ ID NO: 4124895 - DNA, 25 bp, Homo sapien
acaggtagcagagaccagggcgccc

SEQ ID NO: 4124896 - DNA, 25 bp, Homo sapien
gcgctgcccatcaacagcgccctca

SEQ ID NO: 4124897 - DNA, 25 bp, Homo sapien
ggcagccacggctaagaagggagct

SEQ ID NO: 4124898 - DNA, 25 bp, Homo sapien
gaactctcgcgagaacgagccttcc

SEQ ID NO: 4124899 - DNA, 25 bp, Homo sapien
gaagggagctgaactctcgcgagaa

SEQ ID NO: 4124900 - DNA, 25 bp, Homo sapien
gtataagctccgaggttgcccgcgg

SEQ ID NO: 4124901 - DNA, 25 bp, Homo sapien
cactccagacccgtcactgggagga

SEQ ID NO: 4124902 - DNA, 25 bp, Homo sapien
gcggccaaacgtagtcctcgagagc

SEQ ID NO: 4124903 - DNA, 25 bp, Homo sapien
caaacgtagtcctcgagagcgtcca

SEQ ID NO: 4124904 - DNA, 25 bp, Homo sapien
aggcgtgcctcaagccaagcctcac

SEQ ID NO: 4124905 - DNA, 25 bp, Homo sapien
ttcaggttggccctcgtccccgcca

SEQ ID NO: 4124906 - DNA, 25 bp, Homo sapien
tcccttcccacctccgatcggcctc

SEQ ID NO: 4124907 - DNA, 25 bp, Homo sapien
cccacctccgatcggcctcaacctg

SEQ ID NO: 4124908 - DNA, 25 bp, Homo sapien
tcaggacccttatacaactcagcag

SEQ ID NO: 4124909 - DNA, 25 bp, Homo sapien
ccaacatgggtcattagtggcttca

SEQ ID NO: 4124910 - DNA, 25 bp, Homo sapien
ggagggacctccacacctgatttcc

SEQ ID NO: 4124911 - DNA, 25 bp, Homo sapien
tggtggcaactcactcaaggcctga

SEQ ID NO: 4124912 - DNA, 25 bp, Homo sapien
aaagaaaatccttggtctcggccag

SEQ ID NO: 4124913 - DNA, 25 bp, Homo sapien
ccatgtcagagctaggtacctaact

SEQ ID NO: 4124914 - DNA, 25 bp, Homo sapien
cttagaaaatccttggtctcggccg

SEQ ID NO: 4124915 - DNA, 25 bp, Homo sapien
cagggaaacttctcggcatgtagcc

SEQ ID NO: 4124916 - DNA, 25 bp, Homo sapien
tgcatcaggacacacaatcctgcag

SEQ ID NO: 4124917 - DNA, 25 bp, Homo sapien
tccaagtcaaggtctccattaggct

SEQ ID NO: 4124918 - DNA, 25 bp, Homo sapien
gcactcgctttatcatccgcagatg

SEQ ID NO: 4124919 - DNA, 25 bp, Homo sapien
cccggaagccatggataagatagtg

SEQ ID NO: 4124920 - DNA, 25 bp, Homo sapien
ctgtacaccaggacatcgggaccct

SEQ ID NO: 4124921 - DNA, 25 bp, Homo sapien
agctcccagaagtggccctgtcccc

SEQ ID NO: 4124922 - DNA, 25 bp, Homo sapien
acaactcggagtcccttgcttccaa

SEQ ID NO: 4124923 - DNA, 25 bp, Homo sapien
tttcacaactcggagtcccttgctt

SEQ ID NO: 4124924 - DNA, 25 bp, Homo sapien
tccacaggccagagcgccaaagctc

SEQ ID NO: 4124925 - DNA, 25 bp, Homo sapien
agcgtgcatcccaaatccagtcaga

SEQ ID NO: 4124926 - DNA, 25 bp, Homo sapien
tacagggtcatatagcaccactgag

SEQ ID NO: 4124927 - DNA, 25 bp, Homo sapien
tagcaccactgagttgtggcccagg

SEQ ID NO: 4124928 - DNA, 25 bp, Homo sapien
ggcacctcttgcaggatgcacccta

SEQ ID NO: 4124929 - DNA, 25 bp, Homo sapien
gcagttgctgggtaccagaccaaga

SEQ ID NO: 4124930 - DNA, 25 bp, Homo sapien
accagaccaagagctggttggaaac

SEQ ID NO: 4124931 - DNA, 25 bp, Homo sapien
cttccaggcgtctccaatcaggcag

SEQ ID NO: 4124932 - DNA, 25 bp, Homo sapien
gcacctgccactatggtcagctcct

SEQ ID NO: 4124933 - DNA, 25 bp, Homo sapien
catgcccactgattcgtcggtcagg

SEQ ID NO: 4124934 - DNA, 25 bp, Homo sapien
cgtcggtcaggtgctacaggtttgt

SEQ ID NO: 4124935 - DNA, 25 bp, Homo sapien
aagatgatgcccacatgcccactga

SEQ ID NO: 4124936 - DNA, 25 bp, Homo sapien
tgctgaagatgatgcccacatgccc

SEQ ID NO: 4124937 - DNA, 25 bp, Homo sapien
caccttccagatacgaacgcttcgg

SEQ ID NO: 4124938 - DNA, 25 bp, Homo sapien
gcagcaggtaccgacaacgttcctt

SEQ ID NO: 4124939 - DNA, 25 bp, Homo sapien
tacctggcctactacgggacttgaa

SEQ ID NO: 4124940 - DNA, 25 bp, Homo sapien
aggaaacagggtctggtccacagca

SEQ ID NO: 4124941 - DNA, 25 bp, Homo sapien
ggcccaacccagtgaaagcattccc

SEQ ID NO: 4124942 - DNA, 25 bp, Homo sapien
gtggtatacacatagccaccatggc

SEQ ID NO: 4124943 - DNA, 25 bp, Homo sapien
tgactgaggtcacaccctgcttccc

SEQ ID NO: 4124944 - DNA, 25 bp, Homo sapien
ctactaccactacccactacaggtg

SEQ ID NO: 4124945 - DNA, 25 bp, Homo sapien
caaactcattggcatggaaacccag

SEQ ID NO: 4124946 - DNA, 25 bp, Homo sapien
tagccagttcatgcctcgacaggac

SEQ ID NO: 4124947 - DNA, 25 bp, Homo sapien
aggataaccatgctcccatcgggca

SEQ ID NO: 4124948 - DNA, 25 bp, Homo sapien
tggccgtctcgtacaaacagctggt

SEQ ID NO: 4124949 - DNA, 25 bp, Homo sapien
gtatcagagaatgcccacgaacggt

SEQ ID NO: 4124950 - DNA, 25 bp, Homo sapien
gatgtgcagcttctcgtgtgaccga

SEQ ID NO: 4124951 - DNA, 25 bp, Homo sapien
gaagctgggcactccatattcaggc

SEQ ID NO: 4124952 - DNA, 25 bp, Homo sapien
tcacaatgtcagtcaagtcgggccc

SEQ ID NO: 4124953 - DNA, 25 bp, Homo sapien
taaccatgatgctgaagcagtgcat

SEQ ID NO: 4124954 - DNA, 25 bp, Homo sapien
tccggagtaaccatgatgctgaagc

SEQ ID NO: 4124955 - DNA, 25 bp, Homo sapien
gatgctgaagcagtgcatctcagcc

SEQ ID NO: 4124956 - DNA, 25 bp, Homo sapien
gggtccggagtaaccatgatgctga

SEQ ID NO: 4124957 - DNA, 25 bp, Homo sapien
ctagccggtgggacgaaaggtgcat

SEQ ID NO: 4124958 - DNA, 25 bp, Homo sapien
tccgatgccgattgcgttgccggtc

SEQ ID NO: 4124959 - DNA, 25 bp, Homo sapien
tctaccttaaccatccgatgccgat

SEQ ID NO: 4124960 - DNA, 25 bp, Homo sapien
ttgcgttgccggtcccaatactcat

SEQ ID NO: 4124961 - DNA, 25 bp, Homo sapien
taaccatccgatgccgattgcgttg

SEQ ID NO: 4124962 - DNA, 25 bp, Homo sapien
acatgcagctgtcaggtggagcctg

SEQ ID NO: 4124963 - DNA, 25 bp, Homo sapien
caccctgcccaggagcatatattac

SEQ ID NO: 4124964 - DNA, 25 bp, Homo sapien
tgcatgacccataccacaccctgcc

SEQ ID NO: 4124965 - DNA, 25 bp, Homo sapien
caagcctgggagcatctgcatgacc

SEQ ID NO: 4124966 - DNA, 25 bp, Homo sapien
gccaaggccgggctggtcaagttca

SEQ ID NO: 4124967 - DNA, 25 bp, Homo sapien
cacaagggggccaaggccgggctgg

SEQ ID NO: 4124968 - DNA, 25 bp, Homo sapien
ccgggctggtcaagttcacacacag

SEQ ID NO: 4124969 - DNA, 25 bp, Homo sapien
gccccatcactacaggctgcagcca

SEQ ID NO: 4124970 - DNA, 25 bp, Homo sapien
ggggtggcccagctcagaacgcatc

SEQ ID NO: 4124971 - DNA, 25 bp, Homo sapien
cagaacgcatcctagacaaccttac

SEQ ID NO: 4124972 - DNA, 25 bp, Homo sapien
agaacgcatcctagacaaccttact

SEQ ID NO: 4124973 - DNA, 25 bp, Homo sapien
gtggcccagctcagaacgcatccta

SEQ ID NO: 4124974 - DNA, 25 bp, Homo sapien
cctcgtgtgtaaaggagtggacctt

SEQ ID NO: 4124975 - DNA, 25 bp, Homo sapien
tctggttgggtgcctcgtgtgtaaa

SEQ ID NO: 4124976 - DNA, 25 bp, Homo sapien
ggtggaaggtttcagcaaggagctg

SEQ ID NO: 4124977 - DNA, 25 bp, Homo sapien
gaggacacatcgcttatggtggaag

SEQ ID NO: 4124978 - DNA, 25 bp, Homo sapien
cagtggagtcatggtctagcatggt

SEQ ID NO: 4124979 - DNA, 25 bp, Homo sapien
tagggaagcccaggatccactggag

SEQ ID NO: 4124980 - DNA, 25 bp, Homo sapien
caggctgccatcagtagctgcgctg

SEQ ID NO: 4124981 - DNA, 25 bp, Homo sapien
gaaagccaggctgccatcagtagct

SEQ ID NO: 4124982 - DNA, 25 bp, Homo sapien
tcatgaaggtgggttcaccatgccc

SEQ ID NO: 4124983 - DNA, 25 bp, Homo sapien
tctccacagcaagcacgaagacatg

SEQ ID NO: 4124984 - DNA, 25 bp, Homo sapien
ccgttgatcaatggaggctgagacc

SEQ ID NO: 4124985 - DNA, 25 bp, Homo sapien
gcttaggatcttgaggcctgtcaca

SEQ ID NO: 4124986 - DNA, 25 bp, Homo sapien
atgctgagcatgggcacagacagcc

SEQ ID NO: 4124987 - DNA, 25 bp, Homo sapien
gaggtgctccatactggcctggcta

SEQ ID NO: 4124988 - DNA, 25 bp, Homo sapien
cacagaggctccaatacctgggaat

SEQ ID NO: 4124989 - DNA, 25 bp, Homo sapien
tgagccacatttaaggccacagagg

SEQ ID NO: 4124990 - DNA, 25 bp, Homo sapien
tttggtcagatgttcgtccgcctgc

SEQ ID NO: 4124991 - DNA, 25 bp, Homo sapien
actacaaccgggtacacatcctggg

SEQ ID NO: 4124992 - DNA, 25 bp, Homo sapien
gctcctactacaaccgggtacacat

SEQ ID NO: 4124993 - DNA, 25 bp, Homo sapien
ttcagctcctactacaaccgggtac

SEQ ID NO: 4124994 - DNA, 25 bp, Homo sapien
gacgtgcagagaggtatagggtaaa

SEQ ID NO: 4124995 - DNA, 25 bp, Homo sapien
cacaagagcaaagagatgggccagt

SEQ ID NO: 4124996 - DNA, 25 bp, Homo sapien
gcacaagagcaaagagatgggccag

SEQ ID NO: 4124997 - DNA, 25 bp, Homo sapien
tgctaatgacgggaggacactgtcc

SEQ ID NO: 4124998 - DNA, 25 bp, Homo sapien
caactgtctgggtaggacctgaagc

SEQ ID NO: 4124999 - DNA, 25 bp, Homo sapien
tgcgggatccgcacatgctgacctt

SEQ ID NO: 4125000 - DNA, 25 bp, Homo sapien
tgcaagaggctctatggcattggcc

SEQ ID NO: 4125001 - DNA, 25 bp, Homo sapien
cgttgagtgggcacccgagaagcca

SEQ ID NO: 4125002 - DNA, 25 bp, Homo sapien
ccgttgagtgggcacccgagaagcc

SEQ ID NO: 4125003 - DNA, 25 bp, Homo sapien
tcccgttgagtgggcacccgagaag

SEQ ID NO: 4125004 - DNA, 25 bp, Homo sapien
gttgagtgggcacccgagaagccat

SEQ ID NO: 4125005 - DNA, 25 bp, Homo sapien
tagacgtgggagagccgaggctggt

SEQ ID NO: 4125006 - DNA, 25 bp, Homo sapien
ctcagttcctctcagttgcgccctc

SEQ ID NO: 4125007 - DNA, 25 bp, Homo sapien
gctggaggtgatgggtgtagacgtg

SEQ ID NO: 4125008 - DNA, 25 bp, Homo sapien
cagttgcgccctcaggctggaggtg

SEQ ID NO: 4125009 - DNA, 25 bp, Homo sapien
cgtcttgatccaagtcaagggccta

SEQ ID NO: 4125010 - DNA, 25 bp, Homo sapien
ggaacattgtcgctttcgctacccg

SEQ ID NO: 4125011 - DNA, 25 bp, Homo sapien
gtttgggcatctcggcacgccggct

SEQ ID NO: 4125012 - DNA, 25 bp, Homo sapien
ttgtcctcgttcactctgctcgcgt

SEQ ID NO: 4125013 - DNA, 25 bp, Homo sapien
ccaggcggtgggtgccagacttcta

SEQ ID NO: 4125014 - DNA, 25 bp, Homo sapien
tctagcccctaattccagcctttgg

SEQ ID NO: 4125015 - DNA, 25 bp, Homo sapien
ttctccggctagacgcggaagcacg

SEQ ID NO: 4125016 - DNA, 25 bp, Homo sapien
cagccggctcaagtttctccggcta

SEQ ID NO: 4125017 - DNA, 25 bp, Homo sapien
cagcaggcgagtgtcctcagtctta

SEQ ID NO: 4125018 - DNA, 25 bp, Homo sapien
ccgggctctcagctattaagccgcg

SEQ ID NO: 4125019 - DNA, 25 bp, Homo sapien
ctcagtcttaggaggccgagttccc

SEQ ID NO: 4125020 - DNA, 25 bp, Homo sapien
ggcgaagtcgtcaccggcgccgtta

SEQ ID NO: 4125021 - DNA, 25 bp, Homo sapien
cgagggtcgcgctcggtacaagcta

SEQ ID NO: 4125022 - DNA, 25 bp, Homo sapien
ggcggacagcgcagcgagggtcgcg

SEQ ID NO: 4125023 - DNA, 25 bp, Homo sapien
cagggaagctcaacgggcggacagc

SEQ ID NO: 4125024 - DNA, 25 bp, Homo sapien
tacaagctacgtagcgcgagagcgg

SEQ ID NO: 4125025 - DNA, 25 bp, Homo sapien
gctgggctggcagtcgccggcccta

SEQ ID NO: 4125026 - DNA, 25 bp, Homo sapien
ggctggatggtcgagggcgcggggt

SEQ ID NO: 4125027 - DNA, 25 bp, Homo sapien
tgggctggcagtcgccggccctagg

SEQ ID NO: 4125028 - DNA, 25 bp, Homo sapien
ggccctagggggctggatggtcgag

SEQ ID NO: 4125029 - DNA, 25 bp, Homo sapien
atacagctcgtcatccgccggcgag

SEQ ID NO: 4125030 - DNA, 25 bp, Homo sapien
cggcctcgcgttgcagcagagagat

SEQ ID NO: 4125031 - DNA, 25 bp, Homo sapien
cgttgcagcagagagatgcgcgtcc

SEQ ID NO: 4125032 - DNA, 25 bp, Homo sapien
gatgcgcgtccgctgatacagctcg

SEQ ID NO: 4125033 - DNA, 25 bp, Homo sapien
aagccgcggctgttgtagctgtcga

SEQ ID NO: 4125034 - DNA, 25 bp, Homo sapien
ctgcaccaccgagtgcgggagcaga

SEQ ID NO: 4125035 - DNA, 25 bp, Homo sapien
tttccgtttatcatgaagccgcggc

SEQ ID NO: 4125036 - DNA, 25 bp, Homo sapien
gccgagcacgcggtttccgtttatc

SEQ ID NO: 4125037 - DNA, 25 bp, Homo sapien
caagtttgcagggaccaagcagggt

SEQ ID NO: 4125038 - DNA, 25 bp, Homo sapien
agggtgagggcctgtgactctgggc

SEQ ID NO: 4125039 - DNA, 25 bp, Homo sapien
tcagtttccacactgcgggccagga

SEQ ID NO: 4125040 - DNA, 25 bp, Homo sapien
taatacgacaaatccacgcagcctc

SEQ ID NO: 4125041 - DNA, 25 bp, Homo sapien
tcttcggtgatgtcctggtgggatc

SEQ ID NO: 4125042 - DNA, 25 bp, Homo sapien
ggaaaagctgtcttcggtgatgtcc

SEQ ID NO: 4125043 - DNA, 25 bp, Homo sapien
agctgtcttcggtgatgtcctggtg

SEQ ID NO: 4125044 - DNA, 25 bp, Homo sapien
cggtgatgtcctggtgggatcccac

SEQ ID NO: 4125045 - DNA, 25 bp, Homo sapien
gtgggtgtggctagtctacagttct

SEQ ID NO: 4125046 - DNA, 25 bp, Homo sapien
aagggtgggtgtggctagtctacag

SEQ ID NO: 4125047 - DNA, 25 bp, Homo sapien
tagtctacagttctgttgagaggct

SEQ ID NO: 4125048 - DNA, 25 bp, Homo sapien
tgtggctagtctacagttctgttga

SEQ ID NO: 4125049 - DNA, 25 bp, Homo sapien
ggactgcagcctctcggtccggtct

SEQ ID NO: 4125050 - DNA, 25 bp, Homo sapien
cagcctctcggtccggtctccagtc

SEQ ID NO: 4125051 - DNA, 25 bp, Homo sapien
ctcatggcttgaagcacctgggact

SEQ ID NO: 4125052 - DNA, 25 bp, Homo sapien
atgccccgctgcctcatggcttgaa

SEQ ID NO: 4125053 - DNA, 25 bp, Homo sapien
cgcagcatgccccagtcccgggact

SEQ ID NO: 4125054 - DNA, 25 bp, Homo sapien
agcatgccccagtcccgggactcac

SEQ ID NO: 4125055 - DNA, 25 bp, Homo sapien
cagcatcagcctgtctagcgccagg

SEQ ID NO: 4125056 - DNA, 25 bp, Homo sapien
tcagcctgtctagcgccaggcctgt

SEQ ID NO: 4125057 - DNA, 25 bp, Homo sapien
aaagatgtaagtgaagtccctcctg

SEQ ID NO: 4125058 - DNA, 25 bp, Homo sapien
gttactcggccttcatgacacagga

SEQ ID NO: 4125059 - DNA, 25 bp, Homo sapien
tcattgagcagcttggcccaaagat

SEQ ID NO: 4125060 - DNA, 25 bp, Homo sapien
gatgagagcagctccagttactcgg

SEQ ID NO: 4125061 - DNA, 25 bp, Homo sapien
tgcagtcagcaggtcagttcctggc

SEQ ID NO: 4125062 - DNA, 25 bp, Homo sapien
tgaggtcctctcaaatctgcatgtg

SEQ ID NO: 4125063 - DNA, 25 bp, Homo sapien
aaacatactgcttcccgacttctga

SEQ ID NO: 4125064 - DNA, 25 bp, Homo sapien
tctgcatgtgagcaagtaggtctac

SEQ ID NO: 4125065 - DNA, 25 bp, Homo sapien
catagcttggccatataggaccagg

SEQ ID NO: 4125066 - DNA, 25 bp, Homo sapien
tgggactggcatacacagggcatcc

SEQ ID NO: 4125067 - DNA, 25 bp, Homo sapien
taaatgtgctccatggacctggaag

SEQ ID NO: 4125068 - DNA, 25 bp, Homo sapien
ggtcaaagaacaagccctgggactg

SEQ ID NO: 4125069 - DNA, 25 bp, Homo sapien
tacttcttttccgatgggatccggc

SEQ ID NO: 4125070 - DNA, 25 bp, Homo sapien
gggatccggctaaagaaatatcgcg

SEQ ID NO: 4125071 - DNA, 25 bp, Homo sapien
aaatatcgcggtatgggttctctcg

SEQ ID NO: 4125072 - DNA, 25 bp, Homo sapien
tctgtccgcagtcatgatgggctct

SEQ ID NO: 4125073 - DNA, 25 bp, Homo sapien
tataggctggacttgctcgcccagg

SEQ ID NO: 4125074 - DNA, 25 bp, Homo sapien
cagcgcagcaagaagggtaagtcct

SEQ ID NO: 4125075 - DNA, 25 bp, Homo sapien
ttccatagtgtaagagggtgctccc

SEQ ID NO: 4125076 - DNA, 25 bp, Homo sapien
gaatatactttgatagggcccacag

SEQ ID NO: 4125077 - DNA, 25 bp, Homo sapien
tggccatggccgactacctgattag

SEQ ID NO: 4125078 - DNA, 25 bp, Homo sapien
tgttaattgaactggccgaggtcct

SEQ ID NO: 4125079 - DNA, 25 bp, Homo sapien
gatcattagcaagcgctcctgggaa

SEQ ID NO: 4125080 - DNA, 25 bp, Homo sapien
tcagtagtgcttggaatctcaggcc

SEQ ID NO: 4125081 - DNA, 25 bp, Homo sapien
tcttactctagttgtttattaagaa

SEQ ID NO: 4125082 - DNA, 25 bp, Homo sapien
gaatgacaagcacgtcttttcaaca

SEQ ID NO: 4125083 - DNA, 25 bp, Homo sapien
tactctagttgtttattaagaatga

SEQ ID NO: 4125084 - DNA, 25 bp, Homo sapien
agaatgacaagcacgtcttttcaac

SEQ ID NO: 4125085 - DNA, 25 bp, Homo sapien
tcatatgtcctagaaagttgctggc

SEQ ID NO: 4125086 - DNA, 25 bp, Homo sapien
tcttcataaacctgctgcggcagac

SEQ ID NO: 4125087 - DNA, 25 bp, Homo sapien
gatggaattaatgatggatggaccc

SEQ ID NO: 4125088 - DNA, 25 bp, Homo sapien
ggtgtagttacgaagcctttcaggc

SEQ ID NO: 4125089 - DNA, 25 bp, Homo sapien
aaaatgccagaaaagtggtgtctcc

SEQ ID NO: 4125090 - DNA, 25 bp, Homo sapien
gaacagattggcacccattgggagt

SEQ ID NO: 4125091 - DNA, 25 bp, Homo sapien
aagagtgggctgtgtctaaaatgca

SEQ ID NO: 4125092 - DNA, 25 bp, Homo sapien
gaattcaagcctagtaacaagcagt

SEQ ID NO: 4125093 - DNA, 25 bp, Homo sapien
taaatttccccatggattcacaggc

SEQ ID NO: 4125094 - DNA, 25 bp, Homo sapien
gctgctgttggcatggaaactacat

SEQ ID NO: 4125095 - DNA, 25 bp, Homo sapien
cactgtagggaagtagacattctcc

SEQ ID NO: 4125096 - DNA, 25 bp, Homo sapien
ggcagaaaagtgcagcatcaattca

SEQ ID NO: 4125097 - DNA, 25 bp, Homo sapien
tcctcttccttaccacgcctggcca

SEQ ID NO: 4125098 - DNA, 25 bp, Homo sapien
ggccccgctttctcataagattaaa

SEQ ID NO: 4125099 - DNA, 25 bp, Homo sapien
ctggccccgctttctcataagatta

SEQ ID NO: 4125100 - DNA, 25 bp, Homo sapien
acctggccccgctttctcataagat

SEQ ID NO: 4125101 - DNA, 25 bp, Homo sapien
gatagcttcatatgactgaggcttc

SEQ ID NO: 4125102 - DNA, 25 bp, Homo sapien
ctggcccaaatatttgatctttgct

SEQ ID NO: 4125103 - DNA, 25 bp, Homo sapien
tttggtactgggtttaggtgtgata

SEQ ID NO: 4125104 - DNA, 25 bp, Homo sapien
taggtgtgatagcttcatatgactg

SEQ ID NO: 4125105 - DNA, 25 bp, Homo sapien
ctactgcagtatggaagttttgacc

SEQ ID NO: 4125106 - DNA, 25 bp, Homo sapien
tccacagacaggattctactactgc

SEQ ID NO: 4125107 - DNA, 25 bp, Homo sapien
tgtggctatccacagacaggattct

SEQ ID NO: 4125108 - DNA, 25 bp, Homo sapien
ggattctactactgcagtatggaag

SEQ ID NO: 4125109 - DNA, 25 bp, Homo sapien
tgtgcgctccggaagggaattcgct

SEQ ID NO: 4125110 - DNA, 25 bp, Homo sapien
tagaaggcccttgagtggtacctgc

SEQ ID NO: 4125111 - DNA, 25 bp, Homo sapien
gagattgcccgttctcctcgaagaa

SEQ ID NO: 4125112 - DNA, 25 bp, Homo sapien
gaagaatgccgttacttgaggccca

SEQ ID NO: 4125113 - DNA, 25 bp, Homo sapien
gagccgaaaacgttcctgggctagc

SEQ ID NO: 4125114 - DNA, 25 bp, Homo sapien
ccctggagagttcggggcggctccg

SEQ ID NO: 4125115 - DNA, 25 bp, Homo sapien
ggcgggcgggccactaccgctgggc

SEQ ID NO: 4125116 - DNA, 25 bp, Homo sapien
tagcgcaccccgccctgtggatggg

SEQ ID NO: 4125117 - DNA, 25 bp, Homo sapien
gagaaaaccctgtcggtcttggagc

SEQ ID NO: 4125118 - DNA, 25 bp, Homo sapien
ttatcgcgagaggagcaatcggctc

SEQ ID NO: 4125119 - DNA, 25 bp, Homo sapien
gctcctattggctgtgagggttgaa

SEQ ID NO: 4125120 - DNA, 25 bp, Homo sapien
ttgaatgtaagatggcgcccaggga

SEQ ID NO: 4125121 - DNA, 25 bp, Homo sapien
ccttggaccccatcgacactgtgga

SEQ ID NO: 4125122 - DNA, 25 bp, Homo sapien
tatgtgcggagtcaccccttggacc

SEQ ID NO: 4125123 - DNA, 25 bp, Homo sapien
ccatcgacactgtggacttcgagcg

SEQ ID NO: 4125124 - DNA, 25 bp, Homo sapien
ttcgagcgggaatgtggcgtgggtg

SEQ ID NO: 4125125 - DNA, 25 bp, Homo sapien
caggaggccagactatccttggagt

SEQ ID NO: 4125126 - DNA, 25 bp, Homo sapien
taacttttcaggaggccagactatc

SEQ ID NO: 4125127 - DNA, 25 bp, Homo sapien
ttttcaggaggccagactatccttg

SEQ ID NO: 4125128 - DNA, 25 bp, Homo sapien
aacttttcaggaggccagactatcc

SEQ ID NO: 4125129 - DNA, 25 bp, Homo sapien
cgactcagggatacccggcgtctct

SEQ ID NO: 4125130 - DNA, 25 bp, Homo sapien
catagccagtaagaagatccacact

SEQ ID NO: 4125131 - DNA, 25 bp, Homo sapien
attgacaaagctaccgggatcctgt

SEQ ID NO: 4125132 - DNA, 25 bp, Homo sapien
tgttatatggcttggcctcccgact

SEQ ID NO: 4125133 - DNA, 25 bp, Homo sapien
tagtttccggtgtctctgcaatggc

SEQ ID NO: 4125134 - DNA, 25 bp, Homo sapien
gagacgctcaagaactcggctctga

SEQ ID NO: 4125135 - DNA, 25 bp, Homo sapien
cattggtcagcgagtgaatgccgac

SEQ ID NO: 4125136 - DNA, 25 bp, Homo sapien
ttccaggtccgtggcaaatatctcc

SEQ ID NO: 4125137 - DNA, 25 bp, Homo sapien
tagacttagtgactgtgatccacca

SEQ ID NO: 4125138 - DNA, 25 bp, Homo sapien
caggatctcaatatagccaagggac

SEQ ID NO: 4125139 - DNA, 25 bp, Homo sapien
tgagagaccctgaaagtgccctagt

SEQ ID NO: 4125140 - DNA, 25 bp, Homo sapien
tatatgaagcactggagctgacagc

SEQ ID NO: 4125141 - DNA, 25 bp, Homo sapien
ctccagtgctgcgtgatttgattct

SEQ ID NO: 4125142 - DNA, 25 bp, Homo sapien
acttcttgtcagcttggacccctga

SEQ ID NO: 4125143 - DNA, 25 bp, Homo sapien
gaggtggattagcaggtccctggct

SEQ ID NO: 4125144 - DNA, 25 bp, Homo sapien
caattcttctgacccgcattataaa

SEQ ID NO: 4125145 - DNA, 25 bp, Homo sapien
tgattgagccagagcagtgcacctt

SEQ ID NO: 4125146 - DNA, 25 bp, Homo sapien
gcctctgcagggatggaaacttcct

SEQ ID NO: 4125147 - DNA, 25 bp, Homo sapien
cacgtgtacgtgaaggagatctgca

SEQ ID NO: 4125148 - DNA, 25 bp, Homo sapien
caagagtacttttccgtgagcagga

SEQ ID NO: 4125149 - DNA, 25 bp, Homo sapien
atctgtggtcagtaaccccgcgctg

SEQ ID NO: 4125150 - DNA, 25 bp, Homo sapien
cgccggtggcaggtgtcattaaaga

SEQ ID NO: 4125151 - DNA, 25 bp, Homo sapien
tgacctgtagaagggtatcctgcca

SEQ ID NO: 4125152 - DNA, 25 bp, Homo sapien
aggccggctcgggtctctaaacagc

SEQ ID NO: 4125153 - DNA, 25 bp, Homo sapien
tgcgatcctggcacgtactgtagga

SEQ ID NO: 4125154 - DNA, 25 bp, Homo sapien
tactgtaggagatgtgcgtcgtgcc

SEQ ID NO: 4125155 - DNA, 25 bp, Homo sapien
cctggcagatgtggatgcgatcctg

SEQ ID NO: 4125156 - DNA, 25 bp, Homo sapien
aaatggtggccacacgggtgctaga

SEQ ID NO: 4125157 - DNA, 25 bp, Homo sapien
catggaaggggtttctgtttgcaca

SEQ ID NO: 4125158 - DNA, 25 bp, Homo sapien
tggaaggggtttctgtttgcacagc

SEQ ID NO: 4125159 - DNA, 25 bp, Homo sapien
atggaaggggtttctgtttgcacag

SEQ ID NO: 4125160 - DNA, 25 bp, Homo sapien
tacttgtcacctcaatgtgctgcca

SEQ ID NO: 4125161 - DNA, 25 bp, Homo sapien
ccttgttacttgtcacctcaatgtg

SEQ ID NO: 4125162 - DNA, 25 bp, Homo sapien
tgttacttgtcacctcaatgtgctg

SEQ ID NO: 4125163 - DNA, 25 bp, Homo sapien
cttgtcacctcaatgtgctgccact

SEQ ID NO: 4125164 - DNA, 25 bp, Homo sapien
agaatttagcgtccgacctcgggca

SEQ ID NO: 4125165 - DNA, 25 bp, Homo sapien
cagggcgtgccgatctacggtcata

SEQ ID NO: 4125166 - DNA, 25 bp, Homo sapien
gacactgggcctgacagaatttagc

SEQ ID NO: 4125167 - DNA, 25 bp, Homo sapien
gcggcgagcgacacaacacgtgtat

SEQ ID NO: 4125168 - DNA, 25 bp, Homo sapien
cgcctccgttgacgcgggatctggc

SEQ ID NO: 4125169 - DNA, 25 bp, Homo sapien
ttccgcctccgttgacgcgggatct

SEQ ID NO: 4125170 - DNA, 25 bp, Homo sapien
gatgctgccagggtacggggtccgc

SEQ ID NO: 4125171 - DNA, 25 bp, Homo sapien
cgttccgcctccgttgacgcgggat

SEQ ID NO: 4125172 - DNA, 25 bp, Homo sapien
tccttacaacatcctgggggccatt

SEQ ID NO: 4125173 - DNA, 25 bp, Homo sapien
tccccacgcctgctgtcaggggtca

SEQ ID NO: 4125174 - DNA, 25 bp, Homo sapien
ttacaacatcctgggggccattcca

SEQ ID NO: 4125175 - DNA, 25 bp, Homo sapien
gtccccacgcctgctgtcaggggtc

SEQ ID NO: 4125176 - DNA, 25 bp, Homo sapien
ggccacaagaggtatatgaccagtc

SEQ ID NO: 4125177 - DNA, 25 bp, Homo sapien
cagggccacaagaggtatatgacca

SEQ ID NO: 4125178 - DNA, 25 bp, Homo sapien
gccacaagaggtatatgaccagtcc

SEQ ID NO: 4125179 - DNA, 25 bp, Homo sapien
gggccacaagaggtatatgaccagt

SEQ ID NO: 4125180 - DNA, 25 bp, Homo sapien
tgctcagactgtaggcctcactggg

SEQ ID NO: 4125181 - DNA, 25 bp, Homo sapien
ggaggcatgacagggcctcatcttg

SEQ ID NO: 4125182 - DNA, 25 bp, Homo sapien
cagtggcaggccatgctgtctgctc

SEQ ID NO: 4125183 - DNA, 25 bp, Homo sapien
gttcactgccagtggcaggccatgc

SEQ ID NO: 4125184 - DNA, 25 bp, Homo sapien
ctacagcagctaccgggctctggac

SEQ ID NO: 4125185 - DNA, 25 bp, Homo sapien
tgcttgcccagaactaccgcagctg

SEQ ID NO: 4125186 - DNA, 25 bp, Homo sapien
cagcggccctcatccatcaggaagg

SEQ ID NO: 4125187 - DNA, 25 bp, Homo sapien
catgtccagtgtctcagcagtgtcc

SEQ ID NO: 4125188 - DNA, 25 bp, Homo sapien
ctgaagtgccttccttgggaggcca

SEQ ID NO: 4125189 - DNA, 25 bp, Homo sapien
agtgccttccttgggaggccactca

SEQ ID NO: 4125190 - DNA, 25 bp, Homo sapien
gtgccttccttgggaggccactcac

SEQ ID NO: 4125191 - DNA, 25 bp, Homo sapien
gaagtgccttccttgggaggccact

SEQ ID NO: 4125192 - DNA, 25 bp, Homo sapien
tcatcctgggatcggcttgggctct

SEQ ID NO: 4125193 - DNA, 25 bp, Homo sapien
gcagttaatagaaggcagcagctca

SEQ ID NO: 4125194 - DNA, 25 bp, Homo sapien
tgacagctgccctggtaagtcctgg

SEQ ID NO: 4125195 - DNA, 25 bp, Homo sapien
tataaccctgggagtcattaggcca

SEQ ID NO: 4125196 - DNA, 25 bp, Homo sapien
gagggtagcgaaagccagcagtccc

SEQ ID NO: 4125197 - DNA, 25 bp, Homo sapien
ccaggacatagatcttgttcccgtg

SEQ ID NO: 4125198 - DNA, 25 bp, Homo sapien
tcttgttcccgtgcaggaaggtgga

SEQ ID NO: 4125199 - DNA, 25 bp, Homo sapien
ctcatacacacgtacctgggcctgg

SEQ ID NO: 4125200 - DNA, 25 bp, Homo sapien
tatcccagccaacctatgaggatga

SEQ ID NO: 4125201 - DNA, 25 bp, Homo sapien
ggactgagcctgatccctatcccag

SEQ ID NO: 4125202 - DNA, 25 bp, Homo sapien
catggatcaccccaacaaagcttct

SEQ ID NO: 4125203 - DNA, 25 bp, Homo sapien
ggctccttgctcactaggttgctaa

SEQ ID NO: 4125204 - DNA, 25 bp, Homo sapien
gatgccgggtccatgtacgggcctc

SEQ ID NO: 4125205 - DNA, 25 bp, Homo sapien
aaaggcttcaaaagcagtcaccggg

SEQ ID NO: 4125206 - DNA, 25 bp, Homo sapien
aggccacccaggctaaagacgctgc

SEQ ID NO: 4125207 - DNA, 25 bp, Homo sapien
taaagacgctgccttcagccatggc

SEQ ID NO: 4125208 - DNA, 25 bp, Homo sapien
tagtcatgtacacactatgcccctc

SEQ ID NO: 4125209 - DNA, 25 bp, Homo sapien
gatctagtcatgtacacactatgcc

SEQ ID NO: 4125210 - DNA, 25 bp, Homo sapien
ggtcagatctagtcatgtacacact

SEQ ID NO: 4125211 - DNA, 25 bp, Homo sapien
caggagaggggaggtcagatctagt

SEQ ID NO: 4125212 - DNA, 25 bp, Homo sapien
caagggacccaaccacaaagtctgc

SEQ ID NO: 4125213 - DNA, 25 bp, Homo sapien
caggctgcggggcaatttggtccag

SEQ ID NO: 4125214 - DNA, 25 bp, Homo sapien
caaagtctgccctcttatccctcat

SEQ ID NO: 4125215 - DNA, 25 bp, Homo sapien
cttatccctcatgcgcaggctgcgg

SEQ ID NO: 4125216 - DNA, 25 bp, Homo sapien
cagtagttatcaccccaggatgagc

SEQ ID NO: 4125217 - DNA, 25 bp, Homo sapien
tagacccttgctggtgcttgacaga

SEQ ID NO: 4125218 - DNA, 25 bp, Homo sapien
tcatagatagggaaaagagctcaca

SEQ ID NO: 4125219 - DNA, 25 bp, Homo sapien
taagcccagagaatagcccagtagt

SEQ ID NO: 4125220 - DNA, 25 bp, Homo sapien
gagcccaaaggacatggctggtttc

SEQ ID NO: 4125221 - DNA, 25 bp, Homo sapien
tgcaaggctaaagctctccacagag

SEQ ID NO: 4125222 - DNA, 25 bp, Homo sapien
ccaataacaaacagccggggcccag

SEQ ID NO: 4125223 - DNA, 25 bp, Homo sapien
accccatcacgcagacacagtgcct

SEQ ID NO: 4125224 - DNA, 25 bp, Homo sapien
tccaaggtcatacaaccagcagtgt

SEQ ID NO: 4125225 - DNA, 25 bp, Homo sapien
cccagttggatggaaggcctagtag

SEQ ID NO: 4125226 - DNA, 25 bp, Homo sapien
cagcagtgtagagggctcaaagcca

SEQ ID NO: 4125227 - DNA, 25 bp, Homo sapien
taggcctggtcaactccagatagga

SEQ ID NO: 4125228 - DNA, 25 bp, Homo sapien
ttctctgagatgtcagatctttccc

SEQ ID NO: 4125229 - DNA, 25 bp, Homo sapien
ctttcttctctgagatgtcagatct

SEQ ID NO: 4125230 - DNA, 25 bp, Homo sapien
tcttctctgagatgtcagatctttc

SEQ ID NO: 4125231 - DNA, 25 bp, Homo sapien
tttcttctctgagatgtcagatctt

SEQ ID NO: 4125232 - DNA, 25 bp, Homo sapien
tttagaggactttggagatgaagga

SEQ ID NO: 4125233 - DNA, 25 bp, Homo sapien
cagtttagaggactttggagatgaa

SEQ ID NO: 4125234 - DNA, 25 bp, Homo sapien
aggactttggagatgaaggaaaagc

SEQ ID NO: 4125235 - DNA, 25 bp, Homo sapien
ttagaggactttggagatgaaggaa

SEQ ID NO: 4125236 - DNA, 25 bp, Homo sapien
gaggcgggaggatcgtttgaacctg

SEQ ID NO: 4125237 - DNA, 25 bp, Homo sapien
cgagatcgcgtcactacactccagc

SEQ ID NO: 4125238 - DNA, 25 bp, Homo sapien
gcctgggcgacagaatgagaccctg

SEQ ID NO: 4125239 - DNA, 25 bp, Homo sapien
ctgggaggtagaggttgcagtgagc

SEQ ID NO: 4125240 - DNA, 25 bp, Homo sapien
aggcaagaaatcttctgaggtttct

SEQ ID NO: 4125241 - DNA, 25 bp, Homo sapien
ggaggcaagaaatcttctgaggttt

SEQ ID NO: 4125242 - DNA, 25 bp, Homo sapien
gaggcaagaaatcttctgaggtttc

SEQ ID NO: 4125243 - DNA, 25 bp, Homo sapien
aaggaggcaagaaatcttctgaggt

SEQ ID NO: 4125244 - DNA, 25 bp, Homo sapien
gatgatacttgggtggtctgagcaa

SEQ ID NO: 4125245 - DNA, 25 bp, Homo sapien
cagatggggacatcgaaccgggccc

SEQ ID NO: 4125246 - DNA, 25 bp, Homo sapien
caggaatggcaaggcgccacctgtg

SEQ ID NO: 4125247 - DNA, 25 bp, Homo sapien
aggcggagcagctggcacgagaggc

SEQ ID NO: 4125248 - DNA, 25 bp, Homo sapien
tctcaaccgcgctgattgtgggccc

SEQ ID NO: 4125249 - DNA, 25 bp, Homo sapien
tcttctgaccaatagggattccgtc

SEQ ID NO: 4125250 - DNA, 25 bp, Homo sapien
cgacaggcagctaacggttttaact

SEQ ID NO: 4125251 - DNA, 25 bp, Homo sapien
ttaactgtcctaacggcaactcgcg

SEQ ID NO: 4125252 - DNA, 25 bp, Homo sapien
cctgcgaatcggatgaaaactgctc

SEQ ID NO: 4125253 - DNA, 25 bp, Homo sapien
gataagcgcggaagtgaagcctcct

SEQ ID NO: 4125254 - DNA, 25 bp, Homo sapien
tcttgaggctgcgatgtgaggccct

SEQ ID NO: 4125255 - DNA, 25 bp, Homo sapien
catcgccatagggaaagaaagggca

SEQ ID NO: 4125256 - DNA, 25 bp, Homo sapien
tgggtcaaattagcaaaatatggct

SEQ ID NO: 4125257 - DNA, 25 bp, Homo sapien
tttccatggacattggttgcgggtg

SEQ ID NO: 4125258 - DNA, 25 bp, Homo sapien
tctctgaccttgagtcctagggcag

SEQ ID NO: 4125259 - DNA, 25 bp, Homo sapien
tctcaggatggaaagcaaactctct

SEQ ID NO: 4125260 - DNA, 25 bp, Homo sapien
tgatattccagacattaaaattcat

SEQ ID NO: 4125261 - DNA, 25 bp, Homo sapien
ctctttgatattccagacattaaaa

SEQ ID NO: 4125262 - DNA, 25 bp, Homo sapien
tttgatattccagacattaaaattc

SEQ ID NO: 4125263 - DNA, 25 bp, Homo sapien
tctttgatattccagacattaaaat

SEQ ID NO: 4125264 - DNA, 25 bp, Homo sapien
cagagcctgaaggaatactgagcat

SEQ ID NO: 4125265 - DNA, 25 bp, Homo sapien
ccagagcctgaaggaatactgagca

SEQ ID NO: 4125266 - DNA, 25 bp, Homo sapien
ctcgcttgctctcggagcttccttg

SEQ ID NO: 4125267 - DNA, 25 bp, Homo sapien
tctgggctagccgaggtcagagcca

SEQ ID NO: 4125268 - DNA, 25 bp, Homo sapien
gagaggcacgggcagaaaccagggc

SEQ ID NO: 4125269 - DNA, 25 bp, Homo sapien
cctctctgggctagccgaggtcaga

SEQ ID NO: 4125270 - DNA, 25 bp, Homo sapien
attccagttggatgacttcttgttc

SEQ ID NO: 4125271 - DNA, 25 bp, Homo sapien
gaatgtctcaagtgggcaccaaagt

SEQ ID NO: 4125272 - DNA, 25 bp, Homo sapien
ccagatagttctgttgtgactgttt

SEQ ID NO: 4125273 - DNA, 25 bp, Homo sapien
caagggtgctgatagggtttctgaa

SEQ ID NO: 4125274 - DNA, 25 bp, Homo sapien
ctggtactttgtgaaaatgctaggt

SEQ ID NO: 4125275 - DNA, 25 bp, Homo sapien
tggtactttgtgaaaatgctaggtt

SEQ ID NO: 4125276 - DNA, 25 bp, Homo sapien
catcttttatatctcctccgaacag

SEQ ID NO: 4125277 - DNA, 25 bp, Homo sapien
tgtcacatttgtcttttgccctttt

SEQ ID NO: 4125278 - DNA, 25 bp, Homo sapien
ctgtcacatttgtcttttgcccttt

SEQ ID NO: 4125279 - DNA, 25 bp, Homo sapien
cacatttgtcttttgcccttttctt

SEQ ID NO: 4125280 - DNA, 25 bp, Homo sapien
gtcacatttgtcttttgcccttttc

SEQ ID NO: 4125281 - DNA, 25 bp, Homo sapien
gagaatgctttctctaacattagaa

SEQ ID NO: 4125282 - DNA, 25 bp, Homo sapien
ctctaacattagaaacaaagttgta

SEQ ID NO: 4125283 - DNA, 25 bp, Homo sapien
cctgagaatgctttctctaacatta

SEQ ID NO: 4125284 - DNA, 25 bp, Homo sapien
agaaacaaagttgtatagagtctca

SEQ ID NO: 4125285 - DNA, 25 bp, Homo sapien
aaatagattggcttcttgaactgag

SEQ ID NO: 4125286 - DNA, 25 bp, Homo sapien
ggcttcttgaactgagatggtcctc

SEQ ID NO: 4125287 - DNA, 25 bp, Homo sapien
tagattggcttcttgaactgagatg

SEQ ID NO: 4125288 - DNA, 25 bp, Homo sapien
cagtctccaaagaatccaaaataga

SEQ ID NO: 4125289 - DNA, 25 bp, Homo sapien
gatacctcaaacatgaggcactcac

SEQ ID NO: 4125290 - DNA, 25 bp, Homo sapien
gctgatacctcaaacatgaggcact

SEQ ID NO: 4125291 - DNA, 25 bp, Homo sapien
tctgctgatacctcaaacatgaggc

SEQ ID NO: 4125292 - DNA, 25 bp, Homo sapien
tgccctctgctgatacctcaaacat

SEQ ID NO: 4125293 - DNA, 25 bp, Homo sapien
tatagacagcacaggcagcaatttg

SEQ ID NO: 4125294 - DNA, 25 bp, Homo sapien
tgccctgaggcaacatggttaccag

SEQ ID NO: 4125295 - DNA, 25 bp, Homo sapien
ggcagtgagatgagaaacctagcag

SEQ ID NO: 4125296 - DNA, 25 bp, Homo sapien
catcatgggaccagagcattgtcac

SEQ ID NO: 4125297 - DNA, 25 bp, Homo sapien
ggcctgctccatgttgcctttgtcc

SEQ ID NO: 4125298 - DNA, 25 bp, Homo sapien
tgcctttgtcctggactgcctcaaa

SEQ ID NO: 4125299 - DNA, 25 bp, Homo sapien
catgttgcctttgtcctggactgcc

SEQ ID NO: 4125300 - DNA, 25 bp, Homo sapien
ttctgggcctgtatagtctcttgta

SEQ ID NO: 4125301 - DNA, 25 bp, Homo sapien
caaaggtggcgacgtctgagaagca

SEQ ID NO: 4125302 - DNA, 25 bp, Homo sapien
tcttcagctctgctaggacactggg

SEQ ID NO: 4125303 - DNA, 25 bp, Homo sapien
tgtagggagcccataccaggattcc

SEQ ID NO: 4125304 - DNA, 25 bp, Homo sapien
gaattcctgactctgctgagcaact

SEQ ID NO: 4125305 - DNA, 25 bp, Homo sapien
tgtcactgggaatcttatggcctgg

SEQ ID NO: 4125306 - DNA, 25 bp, Homo sapien
cctgggacgctggaaccatggttct

SEQ ID NO: 4125307 - DNA, 25 bp, Homo sapien
tatctccaatgatgtgagctgtgag

SEQ ID NO: 4125308 - DNA, 25 bp, Homo sapien
aacagcccagttcttgcagttagtc

SEQ ID NO: 4125309 - DNA, 25 bp, Homo sapien
cctcccagaatagggcagactggtt

SEQ ID NO: 4125310 - DNA, 25 bp, Homo sapien
caccaaatgttcacgtgggtcacac

SEQ ID NO: 4125311 - DNA, 25 bp, Homo sapien
tggctatgagcctgcctctgtgggc

SEQ ID NO: 4125312 - DNA, 25 bp, Homo sapien
tcttattgggcatgactgttcctcc

SEQ ID NO: 4125313 - DNA, 25 bp, Homo sapien
gaacatccgagattgaggtcactga

SEQ ID NO: 4125314 - DNA, 25 bp, Homo sapien
gaggtcactgaaccagctcatctgg

SEQ ID NO: 4125315 - DNA, 25 bp, Homo sapien
gggtctctgaacatccgagattgag

SEQ ID NO: 4125316 - DNA, 25 bp, Homo sapien
ctgcctccttgcatagaggggtctc

SEQ ID NO: 4125317 - DNA, 25 bp, Homo sapien
ctgagaccaataaatcaactgtgga

SEQ ID NO: 4125318 - DNA, 25 bp, Homo sapien
tgttggccagcccaaatgtcctgca

SEQ ID NO: 4125319 - DNA, 25 bp, Homo sapien
gttggccagcccaaatgtcctgcaa

SEQ ID NO: 4125320 - DNA, 25 bp, Homo sapien
gaccctgggtacttggcaggcttca

SEQ ID NO: 4125321 - DNA, 25 bp, Homo sapien
cttcagggactttctgctgttggcc

SEQ ID NO: 4125322 - DNA, 25 bp, Homo sapien
tttcgccaaagtacaggcaccctgc

SEQ ID NO: 4125323 - DNA, 25 bp, Homo sapien
tgagagcccttctgctacacagtat

SEQ ID NO: 4125324 - DNA, 25 bp, Homo sapien
cacagtattccataaggaggcctgc

SEQ ID NO: 4125325 - DNA, 25 bp, Homo sapien
caccgcaacagttttatgagagccc

SEQ ID NO: 4125326 - DNA, 25 bp, Homo sapien
gggtgtcctgtaatatgtctactga

SEQ ID NO: 4125327 - DNA, 25 bp, Homo sapien
gaaagccaaagtcccatataagccc

SEQ ID NO: 4125328 - DNA, 25 bp, Homo sapien
gaaaaatggcttgtgagcagtgata

SEQ ID NO: 4125329 - DNA, 25 bp, Homo sapien
tcacaagaagatttagggtgtcctg

SEQ ID NO: 4125330 - DNA, 25 bp, Homo sapien
tgtcatttactgtactggcttggaa

SEQ ID NO: 4125331 - DNA, 25 bp, Homo sapien
agtggtccactcagcggccccagtg

SEQ ID NO: 4125332 - DNA, 25 bp, Homo sapien
tggaaactatccatcccatgaggat

SEQ ID NO: 4125333 - DNA, 25 bp, Homo sapien
tgtgagagccttaggaactaaaaag

SEQ ID NO: 4125334 - DNA, 25 bp, Homo sapien
tgccacaggtgtcccgggaaaattc

SEQ ID NO: 4125335 - DNA, 25 bp, Homo sapien
ggttgctgtgattgcccatggctcc

SEQ ID NO: 4125336 - DNA, 25 bp, Homo sapien
gatttctagatacagaccccgctgg

SEQ ID NO: 4125337 - DNA, 25 bp, Homo sapien
cctatagtcagtctgggaagggcta

SEQ ID NO: 4125338 - DNA, 25 bp, Homo sapien
tcatggaacactgagtcactctaac

SEQ ID NO: 4125339 - DNA, 25 bp, Homo sapien
gaatttcttaactcacggcaggatc

SEQ ID NO: 4125340 - DNA, 25 bp, Homo sapien
ttgaacagagttctcaataagaagg

SEQ ID NO: 4125341 - DNA, 25 bp, Homo sapien
aagaacaaaggctcctgctttggca

SEQ ID NO: 4125342 - DNA, 25 bp, Homo sapien
ttgattgttccagggacatgcttgg

SEQ ID NO: 4125343 - DNA, 25 bp, Homo sapien
ctgggtagccacatacagttccagg

SEQ ID NO: 4125344 - DNA, 25 bp, Homo sapien
ccctgggtagccacatacagttcca

SEQ ID NO: 4125345 - DNA, 25 bp, Homo sapien
gagccaaagatgttgattgttccag

SEQ ID NO: 4125346 - DNA, 25 bp, Homo sapien
tcaggagatcaagaggtcaggagat

SEQ ID NO: 4125347 - DNA, 25 bp, Homo sapien
tgtctctattgaaaatacgaaaaaa

SEQ ID NO: 4125348 - DNA, 25 bp, Homo sapien
caagaccatcctggctaacacggtg

SEQ ID NO: 4125349 - DNA, 25 bp, Homo sapien
aaaccctgtctctattgaaaatacg

SEQ ID NO: 4125350 - DNA, 25 bp, Homo sapien
tctatacagtgagcagatacacgct

SEQ ID NO: 4125351 - DNA, 25 bp, Homo sapien
gaacttcccgccttcgtcatctgag

SEQ ID NO: 4125352 - DNA, 25 bp, Homo sapien
tcaggtttttaaggagctaggacca

SEQ ID NO: 4125353 - DNA, 25 bp, Homo sapien
catgccagtcccagattagcaggga

SEQ ID NO: 4125354 - DNA, 25 bp, Homo sapien
gagtagagacgggaatgagggccca

SEQ ID NO: 4125355 - DNA, 25 bp, Homo sapien
agggagaatacaggctctccctggc

SEQ ID NO: 4125356 - DNA, 25 bp, Homo sapien
aggaatgagggagaatacaggctct

SEQ ID NO: 4125357 - DNA, 25 bp, Homo sapien
tacctggagtagagacgggaatgag

SEQ ID NO: 4125358 - DNA, 25 bp, Homo sapien
gaaaaacaggtctcaaaacagtgcc

SEQ ID NO: 4125359 - DNA, 25 bp, Homo sapien
aatgttagacaaatccagacgtggg

SEQ ID NO: 4125360 - DNA, 25 bp, Homo sapien
gagaaaggcctaactaacagctgag

SEQ ID NO: 4125361 - DNA, 25 bp, Homo sapien
gaactatggcatggttagaccctgg

SEQ ID NO: 4125362 - DNA, 25 bp, Homo sapien
aaggagttagatctgaaactgtgag

SEQ ID NO: 4125363 - DNA, 25 bp, Homo sapien
aagactgagggtagtataagaagag

SEQ ID NO: 4125364 - DNA, 25 bp, Homo sapien
aaagactgagggtagtataagaaga

SEQ ID NO: 4125365 - DNA, 25 bp, Homo sapien
aactgtgagtagtcgattgagataa

SEQ ID NO: 4125366 - DNA, 25 bp, Homo sapien
ccaagtgaagtatagtataagaagt

SEQ ID NO: 4125367 - DNA, 25 bp, Homo sapien
aagtatagtataagaagtggggaag

SEQ ID NO: 4125368 - DNA, 25 bp, Homo sapien
aagaccaagtgaagtatagtataag

SEQ ID NO: 4125369 - DNA, 25 bp, Homo sapien
gaccaagtgaagtatagtataagaa

SEQ ID NO: 4125370 - DNA, 25 bp, Homo sapien
gcccacctcctgagctaataagagg

SEQ ID NO: 4125371 - DNA, 25 bp, Homo sapien
tctgctgtgtctcttagtgttcttt

SEQ ID NO: 4125372 - DNA, 25 bp, Homo sapien
ttgatgttcaatatacccagtaccc

SEQ ID NO: 4125373 - DNA, 25 bp, Homo sapien
acttgggtagggactgaggcgaaag

SEQ ID NO: 4125374 - DNA, 25 bp, Homo sapien
tgagagccaggacaaccatgtacat

SEQ ID NO: 4125375 - DNA, 25 bp, Homo sapien
cactaaatgcttgggcctgaaagga

SEQ ID NO: 4125376 - DNA, 25 bp, Homo sapien
gaatgcctgcttttacacaatccct

SEQ ID NO: 4125377 - DNA, 25 bp, Homo sapien
ttgaaaacgaattgaaccacatgtg

SEQ ID NO: 4125378 - DNA, 25 bp, Homo sapien
cttctggcagatggcgggttcctcc

SEQ ID NO: 4125379 - DNA, 25 bp, Homo sapien
tgactgcagccattgaccgggcctt

SEQ ID NO: 4125380 - DNA, 25 bp, Homo sapien
cattttggcacctgaaagagagtct

SEQ ID NO: 4125381 - DNA, 25 bp, Homo sapien
tctgtgccccgagagaaaacctcta

SEQ ID NO: 4125382 - DNA, 25 bp, Homo sapien
tctgaccttcaacctaatccgtggg

SEQ ID NO: 4125383 - DNA, 25 bp, Homo sapien
cacgcgcatgcgatgaccgttggat

SEQ ID NO: 4125384 - DNA, 25 bp, Homo sapien
agtacataaaactgcccggtgctgt

SEQ ID NO: 4125385 - DNA, 25 bp, Homo sapien
ttagccgggaaagggctccagttca

SEQ ID NO: 4125386 - DNA, 25 bp, Homo sapien
tgtctgatggatcccgaagaatgga

SEQ ID NO: 4125387 - DNA, 25 bp, Homo sapien
cacaggcgctgagtatggagcagcc

SEQ ID NO: 4125388 - DNA, 25 bp, Homo sapien
tctccccgctaaggaagatatctag

SEQ ID NO: 4125389 - DNA, 25 bp, Homo sapien
tccctcgctatgtgcactgatatgg

SEQ ID NO: 4125390 - DNA, 25 bp, Homo sapien
gtgtgaactggccttgggcaccttc

SEQ ID NO: 4125391 - DNA, 25 bp, Homo sapien
cattgggcctacagttggaacttca

SEQ ID NO: 4125392 - DNA, 25 bp, Homo sapien
cagtcaatgctatagtgaggaaact

SEQ ID NO: 4125393 - DNA, 25 bp, Homo sapien
gaaagccaccgttgctgctattgtg

SEQ ID NO: 4125394 - DNA, 25 bp, Homo sapien
gtgcatgccacccatgcacagccaa

SEQ ID NO: 4125395 - DNA, 25 bp, Homo sapien
atagaagaaaattagcccggtgcag

SEQ ID NO: 4125396 - DNA, 25 bp, Homo sapien
caggtgcggtggctggccaacatgc

SEQ ID NO: 4125397 - DNA, 25 bp, Homo sapien
tgccacccatgcacagccaattttt

SEQ ID NO: 4125398 - DNA, 25 bp, Homo sapien
tggtctccggtgtgtcgcaacgatg

SEQ ID NO: 4125399 - DNA, 25 bp, Homo sapien
gaaaataccacctcgagatgggtgc

SEQ ID NO: 4125400 - DNA, 25 bp, Homo sapien
gctcttcgagaagtgcgaggtgaac

SEQ ID NO: 4125401 - DNA, 25 bp, Homo sapien
gagcctgacatcgaagccctgctgt

SEQ ID NO: 4125402 - DNA, 25 bp, Homo sapien
tatcgagaatgtggcgtccctctga

SEQ ID NO: 4125403 - DNA, 25 bp, Homo sapien
gcttcccgtgcaaccagtttgggca

SEQ ID NO: 4125404 - DNA, 25 bp, Homo sapien
acggtccgggactacacccagatga

SEQ ID NO: 4125405 - DNA, 25 bp, Homo sapien
acccagatgaacgagctgcagcggc

SEQ ID NO: 4125406 - DNA, 25 bp, Homo sapien
caaagtgtctaattgcctcaggcgt

SEQ ID NO: 4125407 - DNA, 25 bp, Homo sapien
gccagacgggttggacatcgttaat

SEQ ID NO: 4125408 - DNA, 25 bp, Homo sapien
tagagcagtgtcaaaaggaccctgg

SEQ ID NO: 4125409 - DNA, 25 bp, Homo sapien
tagagccagatgcttaagtccaggt

SEQ ID NO: 4125410 - DNA, 25 bp, Homo sapien
aaattccttgaattagcgcctggtg

SEQ ID NO: 4125411 - DNA, 25 bp, Homo sapien
tgttacggagtaaagccctgaagtg

SEQ ID NO: 4125412 - DNA, 25 bp, Homo sapien
cacaccaggcgctaattcaaggaat

SEQ ID NO: 4125413 - DNA, 25 bp, Homo sapien
taggaattggtttcacgcctgaggc

SEQ ID NO: 4125414 - DNA, 25 bp, Homo sapien
cgcctgaggcaattagacactttgg

SEQ ID NO: 4125415 - DNA, 25 bp, Homo sapien
cagggtccttttgacactgctctaa

SEQ ID NO: 4125416 - DNA, 25 bp, Homo sapien
tctcatgggtggcactcagtctctc

SEQ ID NO: 4125417 - DNA, 25 bp, Homo sapien
tattaacgatgtccaacccgtctgg

SEQ ID NO: 4125418 - DNA, 25 bp, Homo sapien
tatcatcattaaggtagggacaacc

SEQ ID NO: 4125419 - DNA, 25 bp, Homo sapien
aatcttagctcagctccttgggcca

SEQ ID NO: 4125420 - DNA, 25 bp, Homo sapien
gctcaatatcttggagcaaccccag

SEQ ID NO: 4125421 - DNA, 25 bp, Homo sapien
gaatacgtgctctttctctgtcctg

SEQ ID NO: 4125422 - DNA, 25 bp, Homo sapien
tgatctaagtgaaccaacggcatgg

SEQ ID NO: 4125423 - DNA, 25 bp, Homo sapien
tccttgggccagcatgaccttaaac

SEQ ID NO: 4125424 - DNA, 25 bp, Homo sapien
ccatgccgttggttcacttagatca

SEQ ID NO: 4125425 - DNA, 25 bp, Homo sapien
gggttgctccaagatattgagccac

SEQ ID NO: 4125426 - DNA, 25 bp, Homo sapien
tggttgtccctaccttaatgatgat

SEQ ID NO: 4125427 - DNA, 25 bp, Homo sapien
gcccaaggagctgagctaagattga

SEQ ID NO: 4125428 - DNA, 25 bp, Homo sapien
tttaaggtcatgctggcccaaggag

SEQ ID NO: 4125429 - DNA, 25 bp, Homo sapien
gagaaagagcacgtattccatgccg

SEQ ID NO: 4125430 - DNA, 25 bp, Homo sapien
taatgacgacaacatccttgaccca

SEQ ID NO: 4125431 - DNA, 25 bp, Homo sapien
atcttcagcacaaacctaaagcaag

SEQ ID NO: 4125432 - DNA, 25 bp, Homo sapien
ggtttcacagaatgtcaggttagca

SEQ ID NO: 4125433 - DNA, 25 bp, Homo sapien
gggctgcagcacaagtttattaata

SEQ ID NO: 4125434 - DNA, 25 bp, Homo sapien
gttttttcaagcctggtttcacaga

SEQ ID NO: 4125435 - DNA, 25 bp, Homo sapien
gaatgtcaggttagcattcttcagt

SEQ ID NO: 4125436 - DNA, 25 bp, Homo sapien
tgggtcaaggatgttgtcgtcatta

SEQ ID NO: 4125437 - DNA, 25 bp, Homo sapien
tattaataaacttgtgctgcagccc

SEQ ID NO: 4125438 - DNA, 25 bp, Homo sapien
cttgctttaggtttgtgctgaagat

SEQ ID NO: 4125439 - DNA, 25 bp, Homo sapien
actgaagaatgctaacctgacattc

SEQ ID NO: 4125440 - DNA, 25 bp, Homo sapien
tgctaacctgacattctgtgaaacc

SEQ ID NO: 4125441 - DNA, 25 bp, Homo sapien
gacattctgtgaaaccaggcttgaa

SEQ ID NO: 4125442 - DNA, 25 bp, Homo sapien
tagttctcaaacactgtgggcacat

SEQ ID NO: 4125443 - DNA, 25 bp, Homo sapien
agcaagcatgtctttccacaggctc

SEQ ID NO: 4125444 - DNA, 25 bp, Homo sapien
tgagcaagcatgtctttccacaggc

SEQ ID NO: 4125445 - DNA, 25 bp, Homo sapien
ggtccttgctgaagactatgagcaa

SEQ ID NO: 4125446 - DNA, 25 bp, Homo sapien
tctcaaacactgtgggcacatacac

SEQ ID NO: 4125447 - DNA, 25 bp, Homo sapien
acactgtgggcacatacacctctgg

SEQ ID NO: 4125448 - DNA, 25 bp, Homo sapien
tgtatgtgcccacagtgtttgagaa

SEQ ID NO: 4125449 - DNA, 25 bp, Homo sapien
gcctgtggaaagacatgcttgctca

SEQ ID NO: 4125450 - DNA, 25 bp, Homo sapien
ttgctcatagtcttcagcaaggacc

SEQ ID NO: 4125451 - DNA, 25 bp, Homo sapien
tgtgcccacagtgtttgagaactat

SEQ ID NO: 4125452 - DNA, 25 bp, Homo sapien
ccagaggtgtatgtgcccacagtgt

SEQ ID NO: 4125453 - DNA, 25 bp, Homo sapien
gagcctgtggaaagacatgcttgct

SEQ ID NO: 4125454 - DNA, 25 bp, Homo sapien
caggatctcttgcaaggttgaaatc

SEQ ID NO: 4125455 - DNA, 25 bp, Homo sapien
agagtggaaccttgtctcaaactct

SEQ ID NO: 4125456 - DNA, 25 bp, Homo sapien
ctcttgcaaggttgaaatcataaag

SEQ ID NO: 4125457 - DNA, 25 bp, Homo sapien
tcaaactcttatgactcaactacaa

SEQ ID NO: 4125458 - DNA, 25 bp, Homo sapien
aaaaagcagcttaggttggtggtct

SEQ ID NO: 4125459 - DNA, 25 bp, Homo sapien
tggctcaggatctcttgcaaggttg

SEQ ID NO: 4125460 - DNA, 25 bp, Homo sapien
ctttatgatttcaaccttgcaagag

SEQ ID NO: 4125461 - DNA, 25 bp, Homo sapien
caaccttgcaagagatcctgagcca

SEQ ID NO: 4125462 - DNA, 25 bp, Homo sapien
agagtttgagacaaggttccactct

SEQ ID NO: 4125463 - DNA, 25 bp, Homo sapien
tgtagttgagtcataagagtttgag

SEQ ID NO: 4125464 - DNA, 25 bp, Homo sapien
cagaccaccaacctaagctgctttt

SEQ ID NO: 4125465 - DNA, 25 bp, Homo sapien
gatttcaaccttgcaagagatcctg

SEQ ID NO: 4125466 - DNA, 25 bp, Homo sapien
gaaaaagagtcatgacacttcttac

SEQ ID NO: 4125467 - DNA, 25 bp, Homo sapien
tgtcattaatagactaattcctctg

SEQ ID NO: 4125468 - DNA, 25 bp, Homo sapien
tgaacagactcaggagctctgttct

SEQ ID NO: 4125469 - DNA, 25 bp, Homo sapien
catgacacttcttacttcttacagc

SEQ ID NO: 4125470 - DNA, 25 bp, Homo sapien
cagaattccaatagctaacaactta

SEQ ID NO: 4125471 - DNA, 25 bp, Homo sapien
gatattgacaccatcctaacacagt

SEQ ID NO: 4125472 - DNA, 25 bp, Homo sapien
agaacagagctcctgagtctgttca

SEQ ID NO: 4125473 - DNA, 25 bp, Homo sapien
gctgtaagaagtaagaagtgtcatg

SEQ ID NO: 4125474 - DNA, 25 bp, Homo sapien
taagttgttagctattggaattctg

SEQ ID NO: 4125475 - DNA, 25 bp, Homo sapien
cactgtgttaggatggtgtcaatat

SEQ ID NO: 4125476 - DNA, 25 bp, Homo sapien
gaagtaagaagtgtcatgactcttt

SEQ ID NO: 4125477 - DNA, 25 bp, Homo sapien
cagaggaattagtctattaatgaca

SEQ ID NO: 4125478 - DNA, 25 bp, Homo sapien
tggttaactggatagggatgagaaa

SEQ ID NO: 4125479 - DNA, 25 bp, Homo sapien
agagccttggcagggcacgaaaagt

SEQ ID NO: 4125480 - DNA, 25 bp, Homo sapien
ccttggcagggcacgaaaagtgatt

SEQ ID NO: 4125481 - DNA, 25 bp, Homo sapien
tagggatgagaaaactatggcaagg

SEQ ID NO: 4125482 - DNA, 25 bp, Homo sapien
cacgaaaagtgattgagtggttaac

SEQ ID NO: 4125483 - DNA, 25 bp, Homo sapien
agaaaactatggcaagggtatgagg

SEQ ID NO: 4125484 - DNA, 25 bp, Homo sapien
caatcacttttcgtgccctgccaag

SEQ ID NO: 4125485 - DNA, 25 bp, Homo sapien
acttttcgtgccctgccaaggctct

SEQ ID NO: 4125486 - DNA, 25 bp, Homo sapien
gttaaccactcaatcacttttcgtg

SEQ ID NO: 4125487 - DNA, 25 bp, Homo sapien
tcatacccttgccatagttttctca

SEQ ID NO: 4125488 - DNA, 25 bp, Homo sapien
tatccagttaaccactcaatcactt

SEQ ID NO: 4125489 - DNA, 25 bp, Homo sapien
tagttttctcatccctatccagtta

SEQ ID NO: 4125490 - DNA, 25 bp, Homo sapien
aaaccaaaacttgtcatattctagg

SEQ ID NO: 4125491 - DNA, 25 bp, Homo sapien
gtcatattctaggaagccaagcaaa

SEQ ID NO: 4125492 - DNA, 25 bp, Homo sapien
caaaacttgtcatattctaggaagc

SEQ ID NO: 4125493 - DNA, 25 bp, Homo sapien
ttgtcatattctaggaagccaagca

SEQ ID NO: 4125494 - DNA, 25 bp, Homo sapien
aaacttgtcatattctaggaagcca

SEQ ID NO: 4125495 - DNA, 25 bp, Homo sapien
gtattacttgggcacaagagttaga

SEQ ID NO: 4125496 - DNA, 25 bp, Homo sapien
tctaactcttgtgcccaagtaatac

SEQ ID NO: 4125497 - DNA, 25 bp, Homo sapien
tcctagaatatgacaagttttggtt

SEQ ID NO: 4125498 - DNA, 25 bp, Homo sapien
tttgcttggcttcctagaatatgac

SEQ ID NO: 4125499 - DNA, 25 bp, Homo sapien
tggcttcctagaatatgacaagttt

SEQ ID NO: 4125500 - DNA, 25 bp, Homo sapien
tgcttggcttcctagaatatgacaa

SEQ ID NO: 4125501 - DNA, 25 bp, Homo sapien
gcttcctagaatatgacaagttttg

SEQ ID NO: 4125502 - DNA, 25 bp, Homo sapien
gcacaggagactaccgggcgcgctt

SEQ ID NO: 4125503 - DNA, 25 bp, Homo sapien
tacccctaagcgttcaatacaatct

SEQ ID NO: 4125504 - DNA, 25 bp, Homo sapien
tatggccgtagatcatacccctaag

SEQ ID NO: 4125505 - DNA, 25 bp, Homo sapien
gcaaaatggagttgtaaagagtttc

SEQ ID NO: 4125506 - DNA, 25 bp, Homo sapien
tacttacacagtctccaacaagtct

SEQ ID NO: 4125507 - DNA, 25 bp, Homo sapien
cagtgattgtcgtttctcgttaaac

SEQ ID NO: 4125508 - DNA, 25 bp, Homo sapien
gaagcgcgcccggtagtctcctgtg

SEQ ID NO: 4125509 - DNA, 25 bp, Homo sapien
cttgttggagactgtgtaagtaagt

SEQ ID NO: 4125510 - DNA, 25 bp, Homo sapien
gaaactctttacaactccattttgc

SEQ ID NO: 4125511 - DNA, 25 bp, Homo sapien
tttaacgagaaacgacaatcactgt

SEQ ID NO: 4125512 - DNA, 25 bp, Homo sapien
ttcttttaatgcagacttgttggag

SEQ ID NO: 4125513 - DNA, 25 bp, Homo sapien
cgcttaggggtatgatctacggcca

SEQ ID NO: 4125514 - DNA, 25 bp, Homo sapien
aacgaatccgagtccagcctcttcg

SEQ ID NO: 4125515 - DNA, 25 bp, Homo sapien
ggcaacgaatccgagtccagcctct

SEQ ID NO: 4125516 - DNA, 25 bp, Homo sapien
gacgccggtccgcgagtcgcaaact

SEQ ID NO: 4125517 - DNA, 25 bp, Homo sapien
ccgagtccagcctcttcgcgccggg

SEQ ID NO: 4125518 - DNA, 25 bp, Homo sapien
gcaacgaatccgagtccagcctctt

SEQ ID NO: 4125519 - DNA, 25 bp, Homo sapien
tcaggcaacgaatccgagtccagcc

SEQ ID NO: 4125520 - DNA, 25 bp, Homo sapien
gctggactcggattcgttgcctgag

SEQ ID NO: 4125521 - DNA, 25 bp, Homo sapien
cgaagaggctggactcggattcgtt

SEQ ID NO: 4125522 - DNA, 25 bp, Homo sapien
gagtttgcgactcgcggaccggcgt

SEQ ID NO: 4125523 - DNA, 25 bp, Homo sapien
cccggcgcgaagaggctggactcgg

SEQ ID NO: 4125524 - DNA, 25 bp, Homo sapien
aagaggctggactcggattcgttgc

SEQ ID NO: 4125525 - DNA, 25 bp, Homo sapien
ggctggactcggattcgttgcctga

SEQ ID NO: 4125526 - DNA, 25 bp, Homo sapien
ttgcttaagggatgagtgactccgg

SEQ ID NO: 4125527 - DNA, 25 bp, Homo sapien
gaggagtattaaaaccgcgcacgcg

SEQ ID NO: 4125528 - DNA, 25 bp, Homo sapien
cgttagtgcgcacgcgtaaacccag

SEQ ID NO: 4125529 - DNA, 25 bp, Homo sapien
tacttcgcgtgcgtgaagagttggc

SEQ ID NO: 4125530 - DNA, 25 bp, Homo sapien
tcaccgtagtccccaccacgcacgc

SEQ ID NO: 4125531 - DNA, 25 bp, Homo sapien
tgtcaccgtagtccccaccacgcac

SEQ ID NO: 4125532 - DNA, 25 bp, Homo sapien
tactgtcaccgtagtccccaccacg

SEQ ID NO: 4125533 - DNA, 25 bp, Homo sapien
ggtactgtcaccgtagtccccacca

SEQ ID NO: 4125534 - DNA, 25 bp, Homo sapien
cagctggatgcccaggagacttaac

SEQ ID NO: 4125535 - DNA, 25 bp, Homo sapien
caacccggtcactgtattcccgtag

SEQ ID NO: 4125536 - DNA, 25 bp, Homo sapien
gtcacgcgcatgtcctgcgcctccc

SEQ ID NO: 4125537 - DNA, 25 bp, Homo sapien
agcagcttgaagagggtcacgcgca

SEQ ID NO: 4125538 - DNA, 25 bp, Homo sapien
ccacggaggttcgtaggaagcctca

SEQ ID NO: 4125539 - DNA, 25 bp, Homo sapien
cacggaggttcgtaggaagcctcac

SEQ ID NO: 4125540 - DNA, 25 bp, Homo sapien
gaacccaatggtacagtcgggagag

SEQ ID NO: 4125541 - DNA, 25 bp, Homo sapien
aggtcagatgcgttcagggtagtaa

SEQ ID NO: 4125542 - DNA, 25 bp, Homo sapien
gccgtgaaccaatgttaagttctga

SEQ ID NO: 4125543 - DNA, 25 bp, Homo sapien
cttgcaggatagtggggaacccaat

SEQ ID NO: 4125544 - DNA, 25 bp, Homo sapien
tattgtttggtgaagtctggtgagg

SEQ ID NO: 4125545 - DNA, 25 bp, Homo sapien
ctgagcaggcatcagcccaggtcag

SEQ ID NO: 4125546 - DNA, 25 bp, Homo sapien
tagagaccactggtattgtttggtg

SEQ ID NO: 4125547 - DNA, 25 bp, Homo sapien
tctgagcaggcatcagcccaggtca

SEQ ID NO: 4125548 - DNA, 25 bp, Homo sapien
aatgcgtggagccatcaggcgtgga

SEQ ID NO: 4125549 - DNA, 25 bp, Homo sapien
caggcgtggatccattctgaccacc

SEQ ID NO: 4125550 - DNA, 25 bp, Homo sapien
cgtggagccatcaggcgtggatcca

SEQ ID NO: 4125551 - DNA, 25 bp, Homo sapien
gagccatcaggcgtggatccattct

SEQ ID NO: 4125552 - DNA, 25 bp, Homo sapien
ggtgtcaccctaacttgaagcctga

SEQ ID NO: 4125553 - DNA, 25 bp, Homo sapien
taagctggtgggcttaaagcctgag

SEQ ID NO: 4125554 - DNA, 25 bp, Homo sapien
gacttgaagcttgctgcaaaggcca

SEQ ID NO: 4125555 - DNA, 25 bp, Homo sapien
tgaagcctgagctctacgtgcagac

SEQ ID NO: 4125556 - DNA, 25 bp, Homo sapien
gcgtatgccaccatgcccagctaat

SEQ ID NO: 4125557 - DNA, 25 bp, Homo sapien
agacagagtctcactctgatgccca

SEQ ID NO: 4125558 - DNA, 25 bp, Homo sapien
ctgatgcccagtctggagtgcagtg

SEQ ID NO: 4125559 - DNA, 25 bp, Homo sapien
catgcccggcctgttattttttttg

SEQ ID NO: 4125560 - DNA, 25 bp, Homo sapien
gagagtggttattccatgggcagaa

SEQ ID NO: 4125561 - DNA, 25 bp, Homo sapien
cacataacaatctagacctctctgc

SEQ ID NO: 4125562 - DNA, 25 bp, Homo sapien
ctgagctaggctcagtaaggtcaca

SEQ ID NO: 4125563 - DNA, 25 bp, Homo sapien
agaagagagagtggttattccatgg

SEQ ID NO: 4125564 - DNA, 25 bp, Homo sapien
attctctgtgggttttgagaggttc

SEQ ID NO: 4125565 - DNA, 25 bp, Homo sapien
tctctgtgggttttgagaggttcgt

SEQ ID NO: 4125566 - DNA, 25 bp, Homo sapien
ctctgtgggttttgagaggttcgtt

SEQ ID NO: 4125567 - DNA, 25 bp, Homo sapien
ttattctctgtgggttttgagaggt

SEQ ID NO: 4125568 - DNA, 25 bp, Homo sapien
agccagcagacccagtgatgccctt

SEQ ID NO: 4125569 - DNA, 25 bp, Homo sapien
gtgatgcccttggagaccctctgct

SEQ ID NO: 4125570 - DNA, 25 bp, Homo sapien
ccccggcagttgtccctgaggtctg

SEQ ID NO: 4125571 - DNA, 25 bp, Homo sapien
agtagcagaacccagtgtagaagcc

SEQ ID NO: 4125572 - DNA, 25 bp, Homo sapien
ggtgagggagcaggcttaagaggca

SEQ ID NO: 4125573 - DNA, 25 bp, Homo sapien
gggtgagggagcaggcttaagaggc

SEQ ID NO: 4125574 - DNA, 25 bp, Homo sapien
ggcactgggtactccctgctaccaa

SEQ ID NO: 4125575 - DNA, 25 bp, Homo sapien
cccagccctgtaggcactgggtact

SEQ ID NO: 4125576 - DNA, 25 bp, Homo sapien
cagtggtggataggaggctacccca

SEQ ID NO: 4125577 - DNA, 25 bp, Homo sapien
tcctgagttatcacccctgagagag

SEQ ID NO: 4125578 - DNA, 25 bp, Homo sapien
gatggtcttcccaacccagaggctt

SEQ ID NO: 4125579 - DNA, 25 bp, Homo sapien
gattcagaaaactcagggcctagga

SEQ ID NO: 4125580 - DNA, 25 bp, Homo sapien
ctgcctggttcttgaaggtagagaa

SEQ ID NO: 4125581 - DNA, 25 bp, Homo sapien
catctttggaaactcccctggccta

SEQ ID NO: 4125582 - DNA, 25 bp, Homo sapien
gagcctgtgacgtgcatttgtacca

SEQ ID NO: 4125583 - DNA, 25 bp, Homo sapien
agggctacagtgctttcaggtactg

SEQ ID NO: 4125584 - DNA, 25 bp, Homo sapien
ccagatggaagtatgatatccaaca

SEQ ID NO: 4125585 - DNA, 25 bp, Homo sapien
cctcagtacagctgcaattccaggg

SEQ ID NO: 4125586 - DNA, 25 bp, Homo sapien
gcccctctaccacaaagatggctta

SEQ ID NO: 4125587 - DNA, 25 bp, Homo sapien
ggcccagcagatggaaacagaagta

SEQ ID NO: 4125588 - DNA, 25 bp, Homo sapien
gcacttccgtgtttaataagccaca

SEQ ID NO: 4125589 - DNA, 25 bp, Homo sapien
cctggggtgaaatgtgagatcctga

SEQ ID NO: 4125590 - DNA, 25 bp, Homo sapien
ggggtgaaatgtgagatcctgactc

SEQ ID NO: 4125591 - DNA, 25 bp, Homo sapien
aagccacatcctcagttgagcctgg

SEQ ID NO: 4125592 - DNA, 25 bp, Homo sapien
tagagcctggagtagcccaagcaaa

SEQ ID NO: 4125593 - DNA, 25 bp, Homo sapien
tatgtgccctgcgagtacagtcgtc

SEQ ID NO: 4125594 - DNA, 25 bp, Homo sapien
gccgagctgctatggacttccctgg

SEQ ID NO: 4125595 - DNA, 25 bp, Homo sapien
catcctgaacatggagggtaccaag

SEQ ID NO: 4125596 - DNA, 25 bp, Homo sapien
gagggccacctgtatgtggtgtcca

SEQ ID NO: 4125597 - DNA, 25 bp, Homo sapien
tgtaaccaatacttctgagggccac

SEQ ID NO: 4125598 - DNA, 25 bp, Homo sapien
tcttagatgacttgattgtaaccaa

SEQ ID NO: 4125599 - DNA, 25 bp, Homo sapien
tgtatgtggtgtccaacgctggctg

SEQ ID NO: 4125600 - DNA, 25 bp, Homo sapien
agaactttgaccctctggagacagg

SEQ ID NO: 4125601 - DNA, 25 bp, Homo sapien
attgcccgagctgccctgaagagtc

SEQ ID NO: 4125602 - DNA, 25 bp, Homo sapien
cctagctttgttctgggcagcccaa

SEQ ID NO: 4125603 - DNA, 25 bp, Homo sapien
tcagatcctttgctccggagagaga

SEQ ID NO: 4125604 - DNA, 25 bp, Homo sapien
gtgctggcattacagacagatgtaa

SEQ ID NO: 4125605 - DNA, 25 bp, Homo sapien
ccactgcacccagcctacgttttct

SEQ ID NO: 4125606 - DNA, 25 bp, Homo sapien
gctggcattacagacagatgtaagc

SEQ ID NO: 4125607 - DNA, 25 bp, Homo sapien
actgcacccagcctacgttttctac

SEQ ID NO: 4125608 - DNA, 25 bp, Homo sapien
tggatccaacactttccagtgtttc

SEQ ID NO: 4125609 - DNA, 25 bp, Homo sapien
ggatccaacactttccagtgtttca

SEQ ID NO: 4125610 - DNA, 25 bp, Homo sapien
gatccaacactttccagtgtttcag

SEQ ID NO: 4125611 - DNA, 25 bp, Homo sapien
gcaacgtgtcgaaaccccgcctctg

SEQ ID NO: 4125612 - DNA, 25 bp, Homo sapien
tccaaacctcattcacagagacaag

SEQ ID NO: 4125613 - DNA, 25 bp, Homo sapien
aggggctaggtgctgtgctcccgcc

SEQ ID NO: 4125614 - DNA, 25 bp, Homo sapien
tatacttcagtgtctcggctccaaa

SEQ ID NO: 4125615 - DNA, 25 bp, Homo sapien
gcggccggagcctagcaaccgcctg

SEQ ID NO: 4125616 - DNA, 25 bp, Homo sapien
cctgacacgcgagtgttgcagccaa

SEQ ID NO: 4125617 - DNA, 25 bp, Homo sapien
gtgttgcagccaatccagcggccag

SEQ ID NO: 4125618 - DNA, 25 bp, Homo sapien
tgagagggcgctgagcgcaagggcg

SEQ ID NO: 4125619 - DNA, 25 bp, Homo sapien
cgccgcagccttcgcgcgagcacgt

SEQ ID NO: 4125620 - DNA, 25 bp, Homo sapien
gccgcagccttcgcgcgagcacgta

SEQ ID NO: 4125621 - DNA, 25 bp, Homo sapien
ccgcagccttcgcgcgagcacgtac

SEQ ID NO: 4125622 - DNA, 25 bp, Homo sapien
gcggcaggtgttcgctcctcctggc

SEQ ID NO: 4125623 - DNA, 25 bp, Homo sapien
cgctccccggggattcggcgcgaag

SEQ ID NO: 4125624 - DNA, 25 bp, Homo sapien
ctccccggggattcggcgcgaagct

SEQ ID NO: 4125625 - DNA, 25 bp, Homo sapien
aggaccgcggcaggtgttcgctcct

SEQ ID NO: 4125626 - DNA, 25 bp, Homo sapien
gccccgggccgaacagcgagcagca

SEQ ID NO: 4125627 - DNA, 25 bp, Homo sapien
ccacaaggacgtccgcggccgtgtc

SEQ ID NO: 4125628 - DNA, 25 bp, Homo sapien
gcagcaggtgttccgcggaaggctc

SEQ ID NO: 4125629 - DNA, 25 bp, Homo sapien
gcacagcggatagggcgggcggtgc

SEQ ID NO: 4125630 - DNA, 25 bp, Homo sapien
ggctgctttaaaagccttatcttcc

SEQ ID NO: 4125631 - DNA, 25 bp, Homo sapien
gccttatcttcctggagagcagtgg

SEQ ID NO: 4125632 - DNA, 25 bp, Homo sapien
ccttatcttcctggagagcagtggc

SEQ ID NO: 4125633 - DNA, 25 bp, Homo sapien
cttctagtgctaggctgctttaaaa

SEQ ID NO: 4125634 - DNA, 25 bp, Homo sapien
tgttgtcctactgaagacagggtct

SEQ ID NO: 4125635 - DNA, 25 bp, Homo sapien
aaccgtctgtcctaggccagtgcag

SEQ ID NO: 4125636 - DNA, 25 bp, Homo sapien
tagacagtcgtgtgcctaggcaaag

SEQ ID NO: 4125637 - DNA, 25 bp, Homo sapien
gtgcagccatctgggatagacagtc

SEQ ID NO: 4125638 - DNA, 25 bp, Homo sapien
tgtctgctatctgcggacacatgac

SEQ ID NO: 4125639 - DNA, 25 bp, Homo sapien
acttaagctgtctgctatctgcgga

SEQ ID NO: 4125640 - DNA, 25 bp, Homo sapien
tatctgcggacacatgacgacatgg

SEQ ID NO: 4125641 - DNA, 25 bp, Homo sapien
caggaacttaagctgtctgctatct

SEQ ID NO: 4125642 - DNA, 25 bp, Homo sapien
gagcaattccagtggttcagtcaca

SEQ ID NO: 4125643 - DNA, 25 bp, Homo sapien
tactgtcaaaaacatctaccccgag

SEQ ID NO: 4125644 - DNA, 25 bp, Homo sapien
taccccgagttggatcaagcctctt

SEQ ID NO: 4125645 - DNA, 25 bp, Homo sapien
tcagtcacatactatcctccaggag

SEQ ID NO: 4125646 - DNA, 25 bp, Homo sapien
tgctccatcccggagcacacagagc

SEQ ID NO: 4125647 - DNA, 25 bp, Homo sapien
ctaagtaaggaagcaagtgacttgg

SEQ ID NO: 4125648 - DNA, 25 bp, Homo sapien
caagtttgctcaagtcgatagtctt

SEQ ID NO: 4125649 - DNA, 25 bp, Homo sapien
ggtccaagtttgctcaagtcgatag

SEQ ID NO: 4125650 - DNA, 25 bp, Homo sapien
caggtccaagtttgctcaagtcgat

SEQ ID NO: 4125651 - DNA, 25 bp, Homo sapien
tccaagtttgctcaagtcgatagtc

SEQ ID NO: 4125652 - DNA, 25 bp, Homo sapien
catggatgcctcaagctggttttcc

SEQ ID NO: 4125653 - DNA, 25 bp, Homo sapien
gacgacagccgtgccatcaggaatg

SEQ ID NO: 4125654 - DNA, 25 bp, Homo sapien
caaatctgttggaatggtcactcga

SEQ ID NO: 4125655 - DNA, 25 bp, Homo sapien
tccactggaggcaatcaaatctgtt

SEQ ID NO: 4125656 - DNA, 25 bp, Homo sapien
ggtgatgccctcagaataggaacaa

SEQ ID NO: 4125657 - DNA, 25 bp, Homo sapien
taaaggctattacatggtgatgccc

SEQ ID NO: 4125658 - DNA, 25 bp, Homo sapien
gaactgagctcagaattggtgaagc

SEQ ID NO: 4125659 - DNA, 25 bp, Homo sapien
aacctttccctatacacgtgacaga

SEQ ID NO: 4125660 - DNA, 25 bp, Homo sapien
tctgagatagaaagtaagtctagca

SEQ ID NO: 4125661 - DNA, 25 bp, Homo sapien
ggcagatccacaaaaagttccaaag

SEQ ID NO: 4125662 - DNA, 25 bp, Homo sapien
tgacccacaaagtgcatcccaaaac

SEQ ID NO: 4125663 - DNA, 25 bp, Homo sapien
gaaaagcctataaccagcttctgaa

SEQ ID NO: 4125664 - DNA, 25 bp, Homo sapien
taaactgtaggtgccgacaactgcc

SEQ ID NO: 4125665 - DNA, 25 bp, Homo sapien
tctgacacccgagtaggctggatgg

SEQ ID NO: 4125666 - DNA, 25 bp, Homo sapien
tagacctcgatggagaacacactgg

SEQ ID NO: 4125667 - DNA, 25 bp, Homo sapien
gatgtcattcaacaccagtgccggg

SEQ ID NO: 4125668 - DNA, 25 bp, Homo sapien
aaggtgggacatagggaggaggtga

SEQ ID NO: 4125669 - DNA, 25 bp, Homo sapien
taaggtgggacatagggaggaggtg

SEQ ID NO: 4125670 - DNA, 25 bp, Homo sapien
aggtgggacatagggaggaggtgac

SEQ ID NO: 4125671 - DNA, 25 bp, Homo sapien
tgtgctaggtcaggtgtcggctccc

SEQ ID NO: 4125672 - DNA, 25 bp, Homo sapien
aaagtccccaaagtctctccagctg

SEQ ID NO: 4125673 - DNA, 25 bp, Homo sapien
tgttaaaggcaaaacgcagagagcc

SEQ ID NO: 4125674 - DNA, 25 bp, Homo sapien
gcactgcctgcgagttcattcatgg

SEQ ID NO: 4125675 - DNA, 25 bp, Homo sapien
agcaccagggacttggcgtgagcca

SEQ ID NO: 4125676 - DNA, 25 bp, Homo sapien
acaccctgggagcttatttttagca

SEQ ID NO: 4125677 - DNA, 25 bp, Homo sapien
gggtatcagagcaaccaagttgacg

SEQ ID NO: 4125678 - DNA, 25 bp, Homo sapien
tgataaaaaatactgtcccttggtc

SEQ ID NO: 4125679 - DNA, 25 bp, Homo sapien
tggtcgtgggccactagtgtacatg

SEQ ID NO: 4125680 - DNA, 25 bp, Homo sapien
catggaaatgaagaccccttggtcg

SEQ ID NO: 4125681 - DNA, 25 bp, Homo sapien
gagcaccaaagttgggggccacagc

SEQ ID NO: 4125682 - DNA, 25 bp, Homo sapien
tcttggagtccctttttcatggaaa

SEQ ID NO: 4125683 - DNA, 25 bp, Homo sapien
gatgtggtggagacctttgacctcc

SEQ ID NO: 4125684 - DNA, 25 bp, Homo sapien
tttccagtagttcaggcccaaggcc

SEQ ID NO: 4125685 - DNA, 25 bp, Homo sapien
tggactgttaggacaaagcggccaa

SEQ ID NO: 4125686 - DNA, 25 bp, Homo sapien
tattatgaactattgctggcactcc

SEQ ID NO: 4125687 - DNA, 25 bp, Homo sapien
caaagccctcacctggaacattggg

SEQ ID NO: 4125688 - DNA, 25 bp, Homo sapien
gacggacggatgttctgctaaaaaa

SEQ ID NO: 4125689 - DNA, 25 bp, Homo sapien
tccacaggaggagaatcgaagcaga

SEQ ID NO: 4125690 - DNA, 25 bp, Homo sapien
caagcaaagccgtcagttccatgga

SEQ ID NO: 4125691 - DNA, 25 bp, Homo sapien
gtttgctgactggggtctcggtagc

SEQ ID NO: 4125692 - DNA, 25 bp, Homo sapien
tcttattgcctgctcgcttcccttg

SEQ ID NO: 4125693 - DNA, 25 bp, Homo sapien
tcgcccctcttattgcctgctcgct

SEQ ID NO: 4125694 - DNA, 25 bp, Homo sapien
ccagactcgcccctcttattgcctg

SEQ ID NO: 4125695 - DNA, 25 bp, Homo sapien
attcgtctcctagccctgcatgatc

SEQ ID NO: 4125696 - DNA, 25 bp, Homo sapien
ttggcacattcgtctcctagccctg

SEQ ID NO: 4125697 - DNA, 25 bp, Homo sapien
acattcgtctcctagccctgcatga

SEQ ID NO: 4125698 - DNA, 25 bp, Homo sapien
acagggttggcacattcgtctccta

SEQ ID NO: 4125699 - DNA, 25 bp, Homo sapien
tgtctgactggtcctatcccctggg

SEQ ID NO: 4125700 - DNA, 25 bp, Homo sapien
cctggtgacaaagggcacagcacag

SEQ ID NO: 4125701 - DNA, 25 bp, Homo sapien
ttaattagctctacccagcctgcag

SEQ ID NO: 4125702 - DNA, 25 bp, Homo sapien
tttgaggagcatccccaggaacatg

SEQ ID NO: 4125703 - DNA, 25 bp, Homo sapien
ctcaggattgtctgccgtggtggct

SEQ ID NO: 4125704 - DNA, 25 bp, Homo sapien
ggtttctgcccgctactcaggattg

SEQ ID NO: 4125705 - DNA, 25 bp, Homo sapien
tgtgggagaatatttcctaggagcc

SEQ ID NO: 4125706 - DNA, 25 bp, Homo sapien
tcatctctgacgtcataaatcatga

SEQ ID NO: 4125707 - DNA, 25 bp, Homo sapien
tgccgccgccatctcccagctcggc

SEQ ID NO: 4125708 - DNA, 25 bp, Homo sapien
cgctgccgccgccatctcccagctc

SEQ ID NO: 4125709 - DNA, 25 bp, Homo sapien
ctcacactctcggcgccgccgctgc

SEQ ID NO: 4125710 - DNA, 25 bp, Homo sapien
gccgccgccatctcccagctcggct

SEQ ID NO: 4125711 - DNA, 25 bp, Homo sapien
cggggtcggggtcgcgctgcgcccg

SEQ ID NO: 4125712 - DNA, 25 bp, Homo sapien
ggcggggtcggggtcgcgctgcgcc

SEQ ID NO: 4125713 - DNA, 25 bp, Homo sapien
gcgggcggggtcggggtcgcgctgc

SEQ ID NO: 4125714 - DNA, 25 bp, Homo sapien
cgggcggggtcggggtcgcgctgcg

SEQ ID NO: 4125715 - DNA, 25 bp, Homo sapien
tgctgaaggcggctttcctgcgccg

SEQ ID NO: 4125716 - DNA, 25 bp, Homo sapien
tcccgccgcggggagctgtccgcca

SEQ ID NO: 4125717 - DNA, 25 bp, Homo sapien
tggtaccgcggtcgaccgcgctgct

SEQ ID NO: 4125718 - DNA, 25 bp, Homo sapien
caccggccggtgctgaaggcggctt

SEQ ID NO: 4125719 - DNA, 25 bp, Homo sapien
cacctcttggtgtccagtgggcaat

SEQ ID NO: 4125720 - DNA, 25 bp, Homo sapien
cagacagggaggacgttttccatcc

SEQ ID NO: 4125721 - DNA, 25 bp, Homo sapien
gattacagccactaaatgcccaagg

SEQ ID NO: 4125722 - DNA, 25 bp, Homo sapien
tattgttgggcctaaataagcacct

SEQ ID NO: 4125723 - DNA, 25 bp, Homo sapien
cggactttgacattggaggagatct

SEQ ID NO: 4125724 - DNA, 25 bp, Homo sapien
ctttgacattggaggagatctggcc

SEQ ID NO: 4125725 - DNA, 25 bp, Homo sapien
attggaggagatctggcctgagccc

SEQ ID NO: 4125726 - DNA, 25 bp, Homo sapien
tgacattggaggagatctggcctga

SEQ ID NO: 4125727 - DNA, 25 bp, Homo sapien
gccatgctcttattcaggtctctcc

SEQ ID NO: 4125728 - DNA, 25 bp, Homo sapien
tagcaagagctatatgtggccacca

SEQ ID NO: 4125729 - DNA, 25 bp, Homo sapien
catgtggcgtttacctttgatcttc

SEQ ID NO: 4125730 - DNA, 25 bp, Homo sapien
gaaagagaccagtaggtatacagta

SEQ ID NO: 4125731 - DNA, 25 bp, Homo sapien
tatacagtagtggttcatgtggcgt

SEQ ID NO: 4125732 - DNA, 25 bp, Homo sapien
cttcttcagcaagacaaccagagtt

SEQ ID NO: 4125733 - DNA, 25 bp, Homo sapien
tcagcaagacaaccagagtttgagt

SEQ ID NO: 4125734 - DNA, 25 bp, Homo sapien
gtttgagtccaacccctcagggcca

SEQ ID NO: 4125735 - DNA, 25 bp, Homo sapien
tcttcagcaagacaaccagagtttg

SEQ ID NO: 4125736 - DNA, 25 bp, Homo sapien
gcccttgtctctcgggggctctcat

SEQ ID NO: 4125737 - DNA, 25 bp, Homo sapien
ccaggagtggtagcagaagcctgct

SEQ ID NO: 4125738 - DNA, 25 bp, Homo sapien
tgcttcggagttggggaagctgctc

SEQ ID NO: 4125739 - DNA, 25 bp, Homo sapien
tgctctctggttacccaggggttcc

SEQ ID NO: 4125740 - DNA, 25 bp, Homo sapien
tgagggacggagtagggtgatgtgg

SEQ ID NO: 4125741 - DNA, 25 bp, Homo sapien
agggggaccgccctgatctctgtgt

SEQ ID NO: 4125742 - DNA, 25 bp, Homo sapien
gacactgagggggaccgccctgatc

SEQ ID NO: 4125743 - DNA, 25 bp, Homo sapien
tgctgcctctgtccggtgacactga

SEQ ID NO: 4125744 - DNA, 25 bp, Homo sapien
tggggttgaacccacactggttgca

SEQ ID NO: 4125745 - DNA, 25 bp, Homo sapien
tcttgcatatgggacacagcgtgct

SEQ ID NO: 4125746 - DNA, 25 bp, Homo sapien
tcgacgtgaggtccgaagtcttgca

SEQ ID NO: 4125747 - DNA, 25 bp, Homo sapien
accttgttgtgacactgggtgcagg

SEQ ID NO: 4125748 - DNA, 25 bp, Homo sapien
gaatctcacacttacctctcacaaa

SEQ ID NO: 4125749 - DNA, 25 bp, Homo sapien
cctcatggcatatatagaccctgac

SEQ ID NO: 4125750 - DNA, 25 bp, Homo sapien
tcacgagcatgcacgcctcttcagg

SEQ ID NO: 4125751 - DNA, 25 bp, Homo sapien
caggagcaactccaaaggcactgag

SEQ ID NO: 4125752 - DNA, 25 bp, Homo sapien
ggccactcctagcacaggcaggagc

SEQ ID NO: 4125753 - DNA, 25 bp, Homo sapien
ccaaggccactcctagcacaggcag

SEQ ID NO: 4125754 - DNA, 25 bp, Homo sapien
gccaaggccactcctagcacaggca

SEQ ID NO: 4125755 - DNA, 25 bp, Homo sapien
tcgcctgggttagcagtgacgcgcc

SEQ ID NO: 4125756 - DNA, 25 bp, Homo sapien
cggcatggtctttggcttggcagca

SEQ ID NO: 4125757 - DNA, 25 bp, Homo sapien
aggttgcacacctggagcctgcagg

SEQ ID NO: 4125758 - DNA, 25 bp, Homo sapien
caaggccgaagagcttaccagtgag

SEQ ID NO: 4125759 - DNA, 25 bp, Homo sapien
agtagccgcttggtttggcagttca

SEQ ID NO: 4125760 - DNA, 25 bp, Homo sapien
gtggcttcggcatgggctcagcttt

SEQ ID NO: 4125761 - DNA, 25 bp, Homo sapien
cactctttactttaggagtcgcagg

SEQ ID NO: 4125762 - DNA, 25 bp, Homo sapien
gtcttgctgggttcagaagccctga

SEQ ID NO: 4125763 - DNA, 25 bp, Homo sapien
gcttctggaacagccttgacgacag

SEQ ID NO: 4125764 - DNA, 25 bp, Homo sapien
ttgacgacaggggtggcaggttcag

SEQ ID NO: 4125765 - DNA, 25 bp, Homo sapien
gggcttctggaacagccttgacgac

SEQ ID NO: 4125766 - DNA, 25 bp, Homo sapien
ttctggaacagccttgacgacaggg

SEQ ID NO: 4125767 - DNA, 25 bp, Homo sapien
tgacacggacatcgggaataactcg

SEQ ID NO: 4125768 - DNA, 25 bp, Homo sapien
gtcatatatcctcgtggcagcccag

SEQ ID NO: 4125769 - DNA, 25 bp, Homo sapien
ttgatattcgaaggagcccaggccc

SEQ ID NO: 4125770 - DNA, 25 bp, Homo sapien
tcaatggtcttgaagcgacggagcc

SEQ ID NO: 4125771 - DNA, 25 bp, Homo sapien
gcttgcaaagtaggaatatgcccgg

SEQ ID NO: 4125772 - DNA, 25 bp, Homo sapien
aagtaggaatatgcccgggaaggct

SEQ ID NO: 4125773 - DNA, 25 bp, Homo sapien
ctggagcttgcaaagtaggaatatg

SEQ ID NO: 4125774 - DNA, 25 bp, Homo sapien
tgcaaagtaggaatatgcccgggaa

SEQ ID NO: 4125775 - DNA, 25 bp, Homo sapien
tacggaggtctaccactgcagtgcc

SEQ ID NO: 4125776 - DNA, 25 bp, Homo sapien
taccctgggctaccataggtgatgg

SEQ ID NO: 4125777 - DNA, 25 bp, Homo sapien
gcaagagaggtgaggtccatgccct

SEQ ID NO: 4125778 - DNA, 25 bp, Homo sapien
gttgagccatgaacacagacgaggc

SEQ ID NO: 4125779 - DNA, 25 bp, Homo sapien
tgacgcaggtccgtgactgagccat

SEQ ID NO: 4125780 - DNA, 25 bp, Homo sapien
caaagcccaggctgtaggagtgctt

SEQ ID NO: 4125781 - DNA, 25 bp, Homo sapien
gctgaggtccatagccgagtctcgt

SEQ ID NO: 4125782 - DNA, 25 bp, Homo sapien
ggcatggtagttgaggccagcctca

SEQ ID NO: 4125783 - DNA, 25 bp, Homo sapien
gcgcacatgcgactgatttcacggg

SEQ ID NO: 4125784 - DNA, 25 bp, Homo sapien
gatagtcgagtagatcatgccatca

SEQ ID NO: 4125785 - DNA, 25 bp, Homo sapien
catactggtccatggagttgagggc

SEQ ID NO: 4125786 - DNA, 25 bp, Homo sapien
tgttcgacactgagctatagcgccg

SEQ ID NO: 4125787 - DNA, 25 bp, Homo sapien
cacgtgtcagactggtgagtggcac

SEQ ID NO: 4125788 - DNA, 25 bp, Homo sapien
ggctgtgattccaccagatgcgtaa

SEQ ID NO: 4125789 - DNA, 25 bp, Homo sapien
gcaggtttccccagatagacaggcc

SEQ ID NO: 4125790 - DNA, 25 bp, Homo sapien
gatagcggtacagccctgtgggtcc

SEQ ID NO: 4125791 - DNA, 25 bp, Homo sapien
tgcttcctctttctcgaaccctggc

SEQ ID NO: 4125792 - DNA, 25 bp, Homo sapien
gcagctccacacgttcccgctctag

SEQ ID NO: 4125793 - DNA, 25 bp, Homo sapien
tcttgcagccgaagttgtcgcagct

SEQ ID NO: 4125794 - DNA, 25 bp, Homo sapien
ttctcgaaccctggccggctgaggg

SEQ ID NO: 4125795 - DNA, 25 bp, Homo sapien
tgagcctggcgttcctcttgctgct

SEQ ID NO: 4125796 - DNA, 25 bp, Homo sapien
gctgctgcgctagctgttcccgctg

SEQ ID NO: 4125797 - DNA, 25 bp, Homo sapien
gacgctgctgcgctagctgttcccg

SEQ ID NO: 4125798 - DNA, 25 bp, Homo sapien
cccgctgcagtgcaaattgagcctg

SEQ ID NO: 4125799 - DNA, 25 bp, Homo sapien
catggagtgccgcttcttgatgcca

SEQ ID NO: 4125800 - DNA, 25 bp, Homo sapien
cagtggcatcgtgcttgctgtcaga

SEQ ID NO: 4125801 - DNA, 25 bp, Homo sapien
tcagtcccagactctagctcacagg

SEQ ID NO: 4125802 - DNA, 25 bp, Homo sapien
tctggcgccgatatgtacctgacga

SEQ ID NO: 4125803 - DNA, 25 bp, Homo sapien
gcaggctctttcagatgtgcaccag

SEQ ID NO: 4125804 - DNA, 25 bp, Homo sapien
ctgcaggctctttcagatgtgcacc

SEQ ID NO: 4125805 - DNA, 25 bp, Homo sapien
gaaggggtccagactagaagtgaga

SEQ ID NO: 4125806 - DNA, 25 bp, Homo sapien
actagaagtgagagctgaagaggcc

SEQ ID NO: 4125807 - DNA, 25 bp, Homo sapien
ctgagacagagggaagggtgggcag

SEQ ID NO: 4125808 - DNA, 25 bp, Homo sapien
cactgtatgcagaaggtgcccggga

SEQ ID NO: 4125809 - DNA, 25 bp, Homo sapien
gactctttgcgttgtgtgataccca

SEQ ID NO: 4125810 - DNA, 25 bp, Homo sapien
ggaatccgttctgagttggcccacc

SEQ ID NO: 4125811 - DNA, 25 bp, Homo sapien
gataggtagtcacgatgctcgccaa

SEQ ID NO: 4125812 - DNA, 25 bp, Homo sapien
tgtgggcaggtatccccgccgggag

SEQ ID NO: 4125813 - DNA, 25 bp, Homo sapien
ggatgtagccctcctcacgcttata

SEQ ID NO: 4125814 - DNA, 25 bp, Homo sapien
tgttcctggacatcaggcatggagt

SEQ ID NO: 4125815 - DNA, 25 bp, Homo sapien
tcacgcttatatgcgtgggcccgag

SEQ ID NO: 4125816 - DNA, 25 bp, Homo sapien
ttcgctgtcggaaaccacgcaatgg

SEQ ID NO: 4125817 - DNA, 25 bp, Homo sapien
gaataccatcaacccccgggctagc

SEQ ID NO: 4125818 - DNA, 25 bp, Homo sapien
ataccatcaacccccgggctagccg

SEQ ID NO: 4125819 - DNA, 25 bp, Homo sapien
agaataccatcaacccccgggctag

SEQ ID NO: 4125820 - DNA, 25 bp, Homo sapien
accatcaacccccgggctagccgca

SEQ ID NO: 4125821 - DNA, 25 bp, Homo sapien
aggaaactgcatggcccccgtggtg

SEQ ID NO: 4125822 - DNA, 25 bp, Homo sapien
cgtggtcaccgtgccggtgttcctt

SEQ ID NO: 4125823 - DNA, 25 bp, Homo sapien
ggcatcccggggcttatcaaaccag

SEQ ID NO: 4125824 - DNA, 25 bp, Homo sapien
tcgtagtcatggtagctgtgcctgg

SEQ ID NO: 4125825 - DNA, 25 bp, Homo sapien
tcccgagcgtgtggtttggcagcac

SEQ ID NO: 4125826 - DNA, 25 bp, Homo sapien
gcccttcttgctgtcagaggcatga

SEQ ID NO: 4125827 - DNA, 25 bp, Homo sapien
cacgggatggctgtgagtactcagc

SEQ ID NO: 4125828 - DNA, 25 bp, Homo sapien
ccttcttcggcatagctggagcaga

SEQ ID NO: 4125829 - DNA, 25 bp, Homo sapien
gtgtctgtggctggcgtgatgctgc

SEQ ID NO: 4125830 - DNA, 25 bp, Homo sapien
tctgtggctggcgtgatgctgcccc

SEQ ID NO: 4125831 - DNA, 25 bp, Homo sapien
gctgtgtctgtggctggcgtgatgc

SEQ ID NO: 4125832 - DNA, 25 bp, Homo sapien
ctgtgtctgtggctggcgtgatgct

SEQ ID NO: 4125833 - DNA, 25 bp, Homo sapien
tgagccccgggtggttggctggctc

SEQ ID NO: 4125834 - DNA, 25 bp, Homo sapien
tggctctgttgctgcagccgagcct

SEQ ID NO: 4125835 - DNA, 25 bp, Homo sapien
ccctttagagccatttgtctgttct

SEQ ID NO: 4125836 - DNA, 25 bp, Homo sapien
gctttggctgtccctttagagccat

SEQ ID NO: 4125837 - DNA, 25 bp, Homo sapien
cccatcggcacctggctggccggcg

SEQ ID NO: 4125838 - DNA, 25 bp, Homo sapien
cttccgtcagtttgccagcttgctc

SEQ ID NO: 4125839 - DNA, 25 bp, Homo sapien
gaggatcttggagaacacgctctcc

SEQ ID NO: 4125840 - DNA, 25 bp, Homo sapien
gctgccccgccagggaggatcttgg

SEQ ID NO: 4125841 - DNA, 25 bp, Homo sapien
aattttttgccaaaagcagagacag

SEQ ID NO: 4125842 - DNA, 25 bp, Homo sapien
cagaatgaggaaaattttttgccaa

SEQ ID NO: 4125843 - DNA, 25 bp, Homo sapien
aaattttttgccaaaagcagagaca

SEQ ID NO: 4125844 - DNA, 25 bp, Homo sapien
tcaccagaatgaggaaaattttttg

SEQ ID NO: 4125845 - DNA, 25 bp, Homo sapien
ctgactccagagatttttccacagc

SEQ ID NO: 4125846 - DNA, 25 bp, Homo sapien
tgcggggtagagggctgctgggccc

SEQ ID NO: 4125847 - DNA, 25 bp, Homo sapien
tagagggctgctgggcccatcgcag

SEQ ID NO: 4125848 - DNA, 25 bp, Homo sapien
ctgcggggtagagggctgctgggcc

SEQ ID NO: 4125849 - DNA, 25 bp, Homo sapien
gggtagagggctgctgggcccatcg

SEQ ID NO: 4125850 - DNA, 25 bp, Homo sapien
tgtgaggtgcagttagccgtgctgg

SEQ ID NO: 4125851 - DNA, 25 bp, Homo sapien
tccttcaggatgactttgaactcag

SEQ ID NO: 4125852 - DNA, 25 bp, Homo sapien
gcccagcacatagacttcaagttgt

SEQ ID NO: 4125853 - DNA, 25 bp, Homo sapien
gctcttctccaagggtgccacctga

SEQ ID NO: 4125854 - DNA, 25 bp, Homo sapien
caaggtaggtactgtcatgaatcca

SEQ ID NO: 4125855 - DNA, 25 bp, Homo sapien
tcaggagagggatactcacggcagc

SEQ ID NO: 4125856 - DNA, 25 bp, Homo sapien
tcagccatctgcctgtgctagcggc

SEQ ID NO: 4125857 - DNA, 25 bp, Homo sapien
catgtggcaggacgcagaacaaagc

SEQ ID NO: 4125858 - DNA, 25 bp, Homo sapien
aaacttctggcatctcggagggagg

SEQ ID NO: 4125859 - DNA, 25 bp, Homo sapien
aagtacggcaagacaccatggtggc

SEQ ID NO: 4125860 - DNA, 25 bp, Homo sapien
tgtgtataacgcacgggaagcctgg

SEQ ID NO: 4125861 - DNA, 25 bp, Homo sapien
aattgcacagtaaacagaggcgggc

SEQ ID NO: 4125862 - DNA, 25 bp, Homo sapien
agcaaggcagagaggtgtagggctt

SEQ ID NO: 4125863 - DNA, 25 bp, Homo sapien
tggcagccggtgagagtttgggggt

SEQ ID NO: 4125864 - DNA, 25 bp, Homo sapien
agggggcagcacttgttcactgcct

SEQ ID NO: 4125865 - DNA, 25 bp, Homo sapien
ggaaggcctaaggtctggcagccgg

SEQ ID NO: 4125866 - DNA, 25 bp, Homo sapien
agggtagaagggcctacgagagaag

SEQ ID NO: 4125867 - DNA, 25 bp, Homo sapien
ggagggtagaagggcctacgagaga

SEQ ID NO: 4125868 - DNA, 25 bp, Homo sapien
ggcgttggatctcggaggagagggg

SEQ ID NO: 4125869 - DNA, 25 bp, Homo sapien
gaggcgttggatctcggaggagagg

SEQ ID NO: 4125870 - DNA, 25 bp, Homo sapien
cgggccttgacggtgagaggacccg

SEQ ID NO: 4125871 - DNA, 25 bp, Homo sapien
acccggcctgggagcgagaagtcct

SEQ ID NO: 4125872 - DNA, 25 bp, Homo sapien
tcgccaggggcggactagccaagtg

SEQ ID NO: 4125873 - DNA, 25 bp, Homo sapien
tgggtgaggaccgttggcagggggc

SEQ ID NO: 4125874 - DNA, 25 bp, Homo sapien
ctcgcgcccggaagtgaggcttccg

SEQ ID NO: 4125875 - DNA, 25 bp, Homo sapien
gggcgaggcggggcgtgctcgcgcc

SEQ ID NO: 4125876 - DNA, 25 bp, Homo sapien
gcgtgctcgcgcccggaagtgaggc

SEQ ID NO: 4125877 - DNA, 25 bp, Homo sapien
cctgccctgcggcaatctgtgaggg

SEQ ID NO: 4125878 - DNA, 25 bp, Homo sapien
tgcagggaccacggggaccgcgggc

SEQ ID NO: 4125879 - DNA, 25 bp, Homo sapien
tgcgcaggggacacaccagggtcag

SEQ ID NO: 4125880 - DNA, 25 bp, Homo sapien
gcaggggacacaccagggtcaggcc

SEQ ID NO: 4125881 - DNA, 25 bp, Homo sapien
ggacacaccagggtcaggcccggcc

SEQ ID NO: 4125882 - DNA, 25 bp, Homo sapien
aggggacacaccagggtcaggcccg

SEQ ID NO: 4125883 - DNA, 25 bp, Homo sapien
cagtgtgcaccgtccggtattggcc

SEQ ID NO: 4125884 - DNA, 25 bp, Homo sapien
ggctaaggccccgatacagagccgc

SEQ ID NO: 4125885 - DNA, 25 bp, Homo sapien
gtactgcgtggtgacctccgggccc

SEQ ID NO: 4125886 - DNA, 25 bp, Homo sapien
ggctggcggctaaggccccgataca

SEQ ID NO: 4125887 - DNA, 25 bp, Homo sapien
aatgttctccatgcgttccaggtcc

SEQ ID NO: 4125888 - DNA, 25 bp, Homo sapien
acaccactgagtccccgtcatggaa

SEQ ID NO: 4125889 - DNA, 25 bp, Homo sapien
aacaccaggtattggcggcagaatc

SEQ ID NO: 4125890 - DNA, 25 bp, Homo sapien
ttggcggcagaatcgaatgttctcc

SEQ ID NO: 4125891 - DNA, 25 bp, Homo sapien
aaaaggcttgcattgcggacggctg

SEQ ID NO: 4125892 - DNA, 25 bp, Homo sapien
ccaggctgagtttggagcaagcttc

SEQ ID NO: 4125893 - DNA, 25 bp, Homo sapien
gagagattcttgaggctctggcccc

SEQ ID NO: 4125894 - DNA, 25 bp, Homo sapien
cagaaactgaatgagctcccaaggg

SEQ ID NO: 4125895 - DNA, 25 bp, Homo sapien
agccttgcgcagcacagctttcatg

SEQ ID NO: 4125896 - DNA, 25 bp, Homo sapien
cagccttgcgcagcacagctttcat

SEQ ID NO: 4125897 - DNA, 25 bp, Homo sapien
gcctccagccttgcgcagcacagct

SEQ ID NO: 4125898 - DNA, 25 bp, Homo sapien
tccagccttgcgcagcacagctttc

SEQ ID NO: 4125899 - DNA, 25 bp, Homo sapien
ccagcgctgacaggttgaagctctt

SEQ ID NO: 4125900 - DNA, 25 bp, Homo sapien
aacaggcccatgtttctccagcgct

SEQ ID NO: 4125901 - DNA, 25 bp, Homo sapien
ttgaagctcttgagcttccggttct

SEQ ID NO: 4125902 - DNA, 25 bp, Homo sapien
tttctccagcgctgacaggttgaag

SEQ ID NO: 4125903 - DNA, 25 bp, Homo sapien
ctgggtgcagggagggccaatcagg

SEQ ID NO: 4125904 - DNA, 25 bp, Homo sapien
ggtgcagggagggccaatcaggggg

SEQ ID NO: 4125905 - DNA, 25 bp, Homo sapien
tgcagggagggccaatcaggggggg

SEQ ID NO: 4125906 - DNA, 25 bp, Homo sapien
tgggtgcagggagggccaatcaggg

SEQ ID NO: 4125907 - DNA, 25 bp, Homo sapien
tgtgtctccgagtgcgaccaggaca

SEQ ID NO: 4125908 - DNA, 25 bp, Homo sapien
ctctgccacatacaacaagtgtgtc

SEQ ID NO: 4125909 - DNA, 25 bp, Homo sapien
ggcactgacgtccaaggctttggtc

SEQ ID NO: 4125910 - DNA, 25 bp, Homo sapien
tttggtctgaaagaaggactcggcc

SEQ ID NO: 4125911 - DNA, 25 bp, Homo sapien
gaacacaagatactcaatgcccagc

SEQ ID NO: 4125912 - DNA, 25 bp, Homo sapien
gccctgccgggccttcgtggattga

SEQ ID NO: 4125913 - DNA, 25 bp, Homo sapien
cctgtctataggacctgctctgctt

SEQ ID NO: 4125914 - DNA, 25 bp, Homo sapien
gcccagcctgtctataggacctgct

SEQ ID NO: 4125915 - DNA, 25 bp, Homo sapien
gaccccctcaagcacagagatgttg

SEQ ID NO: 4125916 - DNA, 25 bp, Homo sapien
tcgacatccagcacgcagagcacag

SEQ ID NO: 4125917 - DNA, 25 bp, Homo sapien
cacagagatgttgccactctcgaca

SEQ ID NO: 4125918 - DNA, 25 bp, Homo sapien
gatgttgccactctcgacatccagc

SEQ ID NO: 4125919 - DNA, 25 bp, Homo sapien
agctcaagaagggtcccagactcca

SEQ ID NO: 4125920 - DNA, 25 bp, Homo sapien
caggggggacacaggctgttgctgc

SEQ ID NO: 4125921 - DNA, 25 bp, Homo sapien
gggtggtagctcaagaagggtccca

SEQ ID NO: 4125922 - DNA, 25 bp, Homo sapien
tgtaaacaggatcaaagggcaggag

SEQ ID NO: 4125923 - DNA, 25 bp, Homo sapien
ctgcgattggtgcaaaagcggatgc

SEQ ID NO: 4125924 - DNA, 25 bp, Homo sapien
gatgcccaaccggaagggctcatgc

SEQ ID NO: 4125925 - DNA, 25 bp, Homo sapien
tgcaaaagcggatgcccaaccggaa

SEQ ID NO: 4125926 - DNA, 25 bp, Homo sapien
aaccggaagggctcatgccaccagc

SEQ ID NO: 4125927 - DNA, 25 bp, Homo sapien
accacgagacagacactcagtctca

SEQ ID NO: 4125928 - DNA, 25 bp, Homo sapien
gacagacactcagtctcaaggccag

SEQ ID NO: 4125929 - DNA, 25 bp, Homo sapien
agacagacactcagtctcaaggcca

SEQ ID NO: 4125930 - DNA, 25 bp, Homo sapien
gatgaggtccacataatacagggct

SEQ ID NO: 4125931 - DNA, 25 bp, Homo sapien
ccccgatgaggtccacataatacag

SEQ ID NO: 4125932 - DNA, 25 bp, Homo sapien
ccgatgaggtccacataatacaggg

SEQ ID NO: 4125933 - DNA, 25 bp, Homo sapien
atgaggtccacataatacagggctg

SEQ ID NO: 4125934 - DNA, 25 bp, Homo sapien
tagacaatgcgacattggtctgggc

SEQ ID NO: 4125935 - DNA, 25 bp, Homo sapien
acagccagggagtcatccgagagga

SEQ ID NO: 4125936 - DNA, 25 bp, Homo sapien
tgcaggtagacaatgcgacattggt

SEQ ID NO: 4125937 - DNA, 25 bp, Homo sapien
atcagagatgggtactgcaggtaga

SEQ ID NO: 4125938 - DNA, 25 bp, Homo sapien
actgaggtaaccttggtataccagt

SEQ ID NO: 4125939 - DNA, 25 bp, Homo sapien
gctgccgaggcacaacatctaccac

SEQ ID NO: 4125940 - DNA, 25 bp, Homo sapien
taccaccactgaggtaaccttggta

SEQ ID NO: 4125941 - DNA, 25 bp, Homo sapien
acatctaccaccactgaggtaacct

SEQ ID NO: 4125942 - DNA, 25 bp, Homo sapien
gcagaaggctgcagtagatcccaga

SEQ ID NO: 4125943 - DNA, 25 bp, Homo sapien
gctgagccgagtcaaagaccactct

SEQ ID NO: 4125944 - DNA, 25 bp, Homo sapien
gctgcagtagatcccagagaagttc

SEQ ID NO: 4125945 - DNA, 25 bp, Homo sapien
ctgcgctgagccgagtcaaagacca

SEQ ID NO: 4125946 - DNA, 25 bp, Homo sapien
cagctgtgagggaggtcacagtgcc

SEQ ID NO: 4125947 - DNA, 25 bp, Homo sapien
gctgtgagggaggtcacagtgccca

SEQ ID NO: 4125948 - DNA, 25 bp, Homo sapien
ctgtgagggaggtcacagtgcccac

SEQ ID NO: 4125949 - DNA, 25 bp, Homo sapien
agctgtgagggaggtcacagtgccc

SEQ ID NO: 4125950 - DNA, 25 bp, Homo sapien
ctttgtggaggagcggatacagtca

SEQ ID NO: 4125951 - DNA, 25 bp, Homo sapien
caggcacccaaggtttgcagagcga

SEQ ID NO: 4125952 - DNA, 25 bp, Homo sapien
tgccccacatgttggagctccagtc

SEQ ID NO: 4125953 - DNA, 25 bp, Homo sapien
ggtggaggactcaaaacacatttca

SEQ ID NO: 4125954 - DNA, 25 bp, Homo sapien
accatgaggtcctggtcaattgtga

SEQ ID NO: 4125955 - DNA, 25 bp, Homo sapien
tcctggtcaattgtgagcaacttcc

SEQ ID NO: 4125956 - DNA, 25 bp, Homo sapien
gaggtcctggtcaattgtgagcaac

SEQ ID NO: 4125957 - DNA, 25 bp, Homo sapien
ggtcaattgtgagcaacttccagct

SEQ ID NO: 4125958 - DNA, 25 bp, Homo sapien
aatgtgtcataggtggcctggctgc

SEQ ID NO: 4125959 - DNA, 25 bp, Homo sapien
aaggggaaagaatgtgtcataggtg

SEQ ID NO: 4125960 - DNA, 25 bp, Homo sapien
gaatgtgtcataggtggcctggctg

SEQ ID NO: 4125961 - DNA, 25 bp, Homo sapien
ctgcagaaggcaggaacccaacttt

SEQ ID NO: 4125962 - DNA, 25 bp, Homo sapien
gcacccggatgccccagtggatgtc

SEQ ID NO: 4125963 - DNA, 25 bp, Homo sapien
acccggatgccccagtggatgtcgg

SEQ ID NO: 4125964 - DNA, 25 bp, Homo sapien
gatgtcgggaatgggctcggcctcc

SEQ ID NO: 4125965 - DNA, 25 bp, Homo sapien
cccagtggatgtcgggaatgggctc

SEQ ID NO: 4125966 - DNA, 25 bp, Homo sapien
ggtagtccacaccatgacacatgga

SEQ ID NO: 4125967 - DNA, 25 bp, Homo sapien
gatgatttggcctggtgaagcccag

SEQ ID NO: 4125968 - DNA, 25 bp, Homo sapien
tagcaaaggtcaccgcagaggcttt

SEQ ID NO: 4125969 - DNA, 25 bp, Homo sapien
ccaggtgatatccagagcaggcgct

SEQ ID NO: 4125970 - DNA, 25 bp, Homo sapien
ccatgggcacttgggtcttatctgg

SEQ ID NO: 4125971 - DNA, 25 bp, Homo sapien
gctgcagcaggattgcttcaaagtc

SEQ ID NO: 4125972 - DNA, 25 bp, Homo sapien
agcaggattgcttcaaagtcaaggc

SEQ ID NO: 4125973 - DNA, 25 bp, Homo sapien
gggcatgaccaccatgggcacttgg

SEQ ID NO: 4125974 - DNA, 25 bp, Homo sapien
aagggctcttaacgccagatgccta

SEQ ID NO: 4125975 - DNA, 25 bp, Homo sapien
gagggcaagggctcttaacgccaga

SEQ ID NO: 4125976 - DNA, 25 bp, Homo sapien
gtgaaagggccagctaggaagaggg

SEQ ID NO: 4125977 - DNA, 25 bp, Homo sapien
ctgcagacagggagcggagggtgaa

SEQ ID NO: 4125978 - DNA, 25 bp, Homo sapien
tagtagtaccgcaaagcccatcttg

SEQ ID NO: 4125979 - DNA, 25 bp, Homo sapien
ctagtagtaccgcaaagcccatctt

SEQ ID NO: 4125980 - DNA, 25 bp, Homo sapien
gtgacaaaggatgaatggggccccc

SEQ ID NO: 4125981 - DNA, 25 bp, Homo sapien
gcagtgacaaaggatgaatggggcc

SEQ ID NO: 4125982 - DNA, 25 bp, Homo sapien
cactgtagtcctaacagaactgtgg

SEQ ID NO: 4125983 - DNA, 25 bp, Homo sapien
tagtggttactaggtctaggctaga

SEQ ID NO: 4125984 - DNA, 25 bp, Homo sapien
tcctggagactagagtggcacccat

SEQ ID NO: 4125985 - DNA, 25 bp, Homo sapien
tggcacccatggtacttatacaaac

SEQ ID NO: 4125986 - DNA, 25 bp, Homo sapien
cccacattgcctgggagggagagga

SEQ ID NO: 4125987 - DNA, 25 bp, Homo sapien
aaagcccgtggagccacgatagttc

SEQ ID NO: 4125988 - DNA, 25 bp, Homo sapien
ctggacatccttcacatcctggtgg

SEQ ID NO: 4125989 - DNA, 25 bp, Homo sapien
tgctgtcctggccaaagcccgtgga

SEQ ID NO: 4125990 - DNA, 25 bp, Homo sapien
tcagggatgtcagtggagcccaaca

SEQ ID NO: 4125991 - DNA, 25 bp, Homo sapien
catggcttgcatcaaagtgttcctc

SEQ ID NO: 4125992 - DNA, 25 bp, Homo sapien
tactgaccaatcaagtggcaggaaa

SEQ ID NO: 4125993 - DNA, 25 bp, Homo sapien
ggaaccacccataagggccacatgg

SEQ ID NO: 4125994 - DNA, 25 bp, Homo sapien
ctgagggatgtatctgatgggcgat

SEQ ID NO: 4125995 - DNA, 25 bp, Homo sapien
agcatctcagcccacacgctgaggt

SEQ ID NO: 4125996 - DNA, 25 bp, Homo sapien
ggatgtatctgatgggcgatttgtc

SEQ ID NO: 4125997 - DNA, 25 bp, Homo sapien
ctgatgggcgatttgtccagcatct

SEQ ID NO: 4125998 - DNA, 25 bp, Homo sapien
gtcttgagggcacggtaatactcca

SEQ ID NO: 4125999 - DNA, 25 bp, Homo sapien
cctggcccaacatcagtaacagtgg

SEQ ID NO: 4126000 - DNA, 25 bp, Homo sapien
gaacaggcacattccgggtcttgag

SEQ ID NO: 4126001 - DNA, 25 bp, Homo sapien
tgcttgaagggcacacgccggtcct

SEQ ID NO: 4126002 - DNA, 25 bp, Homo sapien
tagggattagtcagcaacatttaag

SEQ ID NO: 4126003 - DNA, 25 bp, Homo sapien
tgtagggattagtcagcaacattta

SEQ ID NO: 4126004 - DNA, 25 bp, Homo sapien
ctgtagggattagtcagcaacattt

SEQ ID NO: 4126005 - DNA, 25 bp, Homo sapien
cagcaacatttaaggttggagggtc

SEQ ID NO: 4126006 - DNA, 25 bp, Homo sapien
ctgcccaagtgtgtgcgtagccaga

SEQ ID NO: 4126007 - DNA, 25 bp, Homo sapien
gtgcgtagccagagcacagcattca

SEQ ID NO: 4126008 - DNA, 25 bp, Homo sapien
ccacctctgataatgcgtgggtgct

SEQ ID NO: 4126009 - DNA, 25 bp, Homo sapien
ggtgcttttgggatagagcaggagc

SEQ ID NO: 4126010 - DNA, 25 bp, Homo sapien
tcctcaagagcgaagtgtggcacag

SEQ ID NO: 4126011 - DNA, 25 bp, Homo sapien
gagctcctcaagagcgaagtgtggc

SEQ ID NO: 4126012 - DNA, 25 bp, Homo sapien
ggctgatcagctcatgcagaatggc

SEQ ID NO: 4126013 - DNA, 25 bp, Homo sapien
cacattcctctgcccacgcatccgt

SEQ ID NO: 4126014 - DNA, 25 bp, Homo sapien
attcctctgcccacgcatccgtgga

SEQ ID NO: 4126015 - DNA, 25 bp, Homo sapien
acattcctctgcccacgcatccgtg

SEQ ID NO: 4126016 - DNA, 25 bp, Homo sapien
cattcctctgcccacgcatccgtgg

SEQ ID NO: 4126017 - DNA, 25 bp, Homo sapien
cagtgactccttgctagggctcggg

SEQ ID NO: 4126018 - DNA, 25 bp, Homo sapien
catactcttgggaagggtggtacag

SEQ ID NO: 4126019 - DNA, 25 bp, Homo sapien
tacttttgcccatgggtgccgtgga

SEQ ID NO: 4126020 - DNA, 25 bp, Homo sapien
caaccaaggcaatgtccctgggact

SEQ ID NO: 4126021 - DNA, 25 bp, Homo sapien
gctggccagctgtcttcacgcgtgt

SEQ ID NO: 4126022 - DNA, 25 bp, Homo sapien
tggactggattcacaaggtcatgag

SEQ ID NO: 4126023 - DNA, 25 bp, Homo sapien
accgagtatgcgcaaggtcccgctg

SEQ ID NO: 4126024 - DNA, 25 bp, Homo sapien
gggttaggcccagccttgatgccat

SEQ ID NO: 4126025 - DNA, 25 bp, Homo sapien
cacttctggcggctgagatgagcga

SEQ ID NO: 4126026 - DNA, 25 bp, Homo sapien
ctgggatgacacttctggcggctga

SEQ ID NO: 4126027 - DNA, 25 bp, Homo sapien
gatgacacttctggcggctgagatg

SEQ ID NO: 4126028 - DNA, 25 bp, Homo sapien
ccctgggatgacacttctggcggct

SEQ ID NO: 4126029 - DNA, 25 bp, Homo sapien
tccgttcagggccaaatcacgcgca

SEQ ID NO: 4126030 - DNA, 25 bp, Homo sapien
cttggctacggcgtccgttcagggc

SEQ ID NO: 4126031 - DNA, 25 bp, Homo sapien
caacctcttggctacggcgtccgtt

SEQ ID NO: 4126032 - DNA, 25 bp, Homo sapien
ctacggcgtccgttcagggccaaat

SEQ ID NO: 4126033 - DNA, 25 bp, Homo sapien
accagcttccgctcggagtttcgca

SEQ ID NO: 4126034 - DNA, 25 bp, Homo sapien
ggaatagccggaacccgccaggctc

SEQ ID NO: 4126035 - DNA, 25 bp, Homo sapien
ccagaccagcttccgctcggagttt

SEQ ID NO: 4126036 - DNA, 25 bp, Homo sapien
gaatagccggaacccgccaggctca

SEQ ID NO: 4126037 - DNA, 25 bp, Homo sapien
tccgggagtcagttgctgaggaccc

SEQ ID NO: 4126038 - DNA, 25 bp, Homo sapien
acccaggtgagaggcggaccttgtc

SEQ ID NO: 4126039 - DNA, 25 bp, Homo sapien
catttgatgagcagaccttccagac

SEQ ID NO: 4126040 - DNA, 25 bp, Homo sapien
gggtatccggactcagaactgaacc

SEQ ID NO: 4126041 - DNA, 25 bp, Homo sapien
acagagcctgtctactcagggccag

SEQ ID NO: 4126042 - DNA, 25 bp, Homo sapien
acacagagcctgtctactcagggcc

SEQ ID NO: 4126043 - DNA, 25 bp, Homo sapien
cacagagcctgtctactcagggcca

SEQ ID NO: 4126044 - DNA, 25 bp, Homo sapien
atctctcatgggcagccagtggtcc

SEQ ID NO: 4126045 - DNA, 25 bp, Homo sapien
tcatctctcatgggcagccagtggt

SEQ ID NO: 4126046 - DNA, 25 bp, Homo sapien
ccttcatctctcatgggcagccagt

SEQ ID NO: 4126047 - DNA, 25 bp, Homo sapien
ttcatctctcatgggcagccagtgg

SEQ ID NO: 4126048 - DNA, 25 bp, Homo sapien
catctgaggtcagcctatagctctt

SEQ ID NO: 4126049 - DNA, 25 bp, Homo sapien
tcagcatctgaggtcagcctatagc

SEQ ID NO: 4126050 - DNA, 25 bp, Homo sapien
cctatagctcttgcgggagaaagac

SEQ ID NO: 4126051 - DNA, 25 bp, Homo sapien
ggagaaagacatgccggcccccttg

SEQ ID NO: 4126052 - DNA, 25 bp, Homo sapien
gatgcggttcaggtagtcattcagc

SEQ ID NO: 4126053 - DNA, 25 bp, Homo sapien
tgcggttcaggtagtcattcagcag

SEQ ID NO: 4126054 - DNA, 25 bp, Homo sapien
cggttcaggtagtcattcagcagct

SEQ ID NO: 4126055 - DNA, 25 bp, Homo sapien
aaagatgcggttcaggtagtcattc

SEQ ID NO: 4126056 - DNA, 25 bp, Homo sapien
ctttttggatctcctaggtcccagt

SEQ ID NO: 4126057 - DNA, 25 bp, Homo sapien
ttggatctcctaggtcccagttcag

SEQ ID NO: 4126058 - DNA, 25 bp, Homo sapien
cactgactgacagccctaccacctg

SEQ ID NO: 4126059 - DNA, 25 bp, Homo sapien
cagttcagggccctgaatacccaca

SEQ ID NO: 4126060 - DNA, 25 bp, Homo sapien
gtagcaactggtccaaatgttctgg

SEQ ID NO: 4126061 - DNA, 25 bp, Homo sapien
tagcaactggtccaaatgttctggc

SEQ ID NO: 4126062 - DNA, 25 bp, Homo sapien
agcaactggtccaaatgttctggca

SEQ ID NO: 4126063 - DNA, 25 bp, Homo sapien
gcctgtgtggtccaggaccacagtg

SEQ ID NO: 4126064 - DNA, 25 bp, Homo sapien
aagcccctcaaagccgcctgtgtgg

SEQ ID NO: 4126065 - DNA, 25 bp, Homo sapien
aggagaagcccctcaaagccgcctg

SEQ ID NO: 4126066 - DNA, 25 bp, Homo sapien
tgggccaagccgcccttcaacctgt

SEQ ID NO: 4126067 - DNA, 25 bp, Homo sapien
tgtacacgcatgtggtagagcggat

SEQ ID NO: 4126068 - DNA, 25 bp, Homo sapien
tagagcggatggtgccaaagttgct

SEQ ID NO: 4126069 - DNA, 25 bp, Homo sapien
cggatggtgccaaagttgctgtgtc

SEQ ID NO: 4126070 - DNA, 25 bp, Homo sapien
ctttgtacacgcatgtggtagagcg

SEQ ID NO: 4126071 - DNA, 25 bp, Homo sapien
gatgaggacctcgtagagccatttc

SEQ ID NO: 4126072 - DNA, 25 bp, Homo sapien
ttgaagcggcagctgatggtgcacc

SEQ ID NO: 4126073 - DNA, 25 bp, Homo sapien
ggtgcaccagccgatctgcatgagc

SEQ ID NO: 4126074 - DNA, 25 bp, Homo sapien
cctgggaggagatgaggacctcgta

SEQ ID NO: 4126075 - DNA, 25 bp, Homo sapien
cttgccataattcgttgtggtcaca

SEQ ID NO: 4126076 - DNA, 25 bp, Homo sapien
taggagttgtgtgtatctccaaccc

SEQ ID NO: 4126077 - DNA, 25 bp, Homo sapien
gcgcacgcggttgccatcataggca

SEQ ID NO: 4126078 - DNA, 25 bp, Homo sapien
cacattccacttgcgcacgcggttg

SEQ ID NO: 4126079 - DNA, 25 bp, Homo sapien
aggcagctcacgatgtcccccgctg

SEQ ID NO: 4126080 - DNA, 25 bp, Homo sapien
ggcagctcacgatgtcccccgctgc

SEQ ID NO: 4126081 - DNA, 25 bp, Homo sapien
tcatccaggtcaatcaggcagctca

SEQ ID NO: 4126082 - DNA, 25 bp, Homo sapien
ccatcatccaggtcaatcaggcagc

SEQ ID NO: 4126083 - DNA, 25 bp, Homo sapien
ggcagtgcccagtgatacaccgttc

SEQ ID NO: 4126084 - DNA, 25 bp, Homo sapien
cgcagaggacggctgccaaagttga

SEQ ID NO: 4126085 - DNA, 25 bp, Homo sapien
aaggccacggactccttgaaagaga

SEQ ID NO: 4126086 - DNA, 25 bp, Homo sapien
agttgaaggccacggactccttgaa

SEQ ID NO: 4126087 - DNA, 25 bp, Homo sapien
ctgatggctgggaagtaggccatac

SEQ ID NO: 4126088 - DNA, 25 bp, Homo sapien
cagagttaagccagcaacgccttat

SEQ ID NO: 4126089 - DNA, 25 bp, Homo sapien
gccagagttaagccagcaacgcctt

SEQ ID NO: 4126090 - DNA, 25 bp, Homo sapien
ccagagttaagccagcaacgcctta

SEQ ID NO: 4126091 - DNA, 25 bp, Homo sapien
actcagcactgcccggaagcagccc

SEQ ID NO: 4126092 - DNA, 25 bp, Homo sapien
caacctctgtgcccgcaccaggtca

SEQ ID NO: 4126093 - DNA, 25 bp, Homo sapien
cagcactgcccggaagcagcccagc

SEQ ID NO: 4126094 - DNA, 25 bp, Homo sapien
agcaacctctgtgcccgcaccaggt

SEQ ID NO: 4126095 - DNA, 25 bp, Homo sapien
cagaagcggtgcaaagtgatggaag

SEQ ID NO: 4126096 - DNA, 25 bp, Homo sapien
gcaaccgccacttggagctctcctt

SEQ ID NO: 4126097 - DNA, 25 bp, Homo sapien
gggctggccccgcaaccgccacttg

SEQ ID NO: 4126098 - DNA, 25 bp, Homo sapien
ctctccttgtccaacagccgcccct

SEQ ID NO: 4126099 - DNA, 25 bp, Homo sapien
tggtggccttccactctggtcaagg

SEQ ID NO: 4126100 - DNA, 25 bp, Homo sapien
gccttccactctggtcaaggcaccc

SEQ ID NO: 4126101 - DNA, 25 bp, Homo sapien
ctggtgaggtggtggccttccactc

SEQ ID NO: 4126102 - DNA, 25 bp, Homo sapien
aggtggtggccttccactctggtca

SEQ ID NO: 4126103 - DNA, 25 bp, Homo sapien
tgcaccacggactgtgcctgtgtgg

SEQ ID NO: 4126104 - DNA, 25 bp, Homo sapien
tccacgatgcccagcaagaagctca

SEQ ID NO: 4126105 - DNA, 25 bp, Homo sapien
ttctccacgatgcccagcaagaagc

SEQ ID NO: 4126106 - DNA, 25 bp, Homo sapien
ggacctggtgcaccacggactgtgc

SEQ ID NO: 4126107 - DNA, 25 bp, Homo sapien
tgaggcaatcttgtacctcgtagtc

SEQ ID NO: 4126108 - DNA, 25 bp, Homo sapien
gacaatgggtgagaatcggtacagc

SEQ ID NO: 4126109 - DNA, 25 bp, Homo sapien
gacatcatcaactgcttgaggcaat

SEQ ID NO: 4126110 - DNA, 25 bp, Homo sapien
gagaatcggtacagccgaagcagag

SEQ ID NO: 4126111 - DNA, 25 bp, Homo sapien
taagcagaaacttgcgggacttctc

SEQ ID NO: 4126112 - DNA, 25 bp, Homo sapien
catgcctcaggatggcgatagtgag

SEQ ID NO: 4126113 - DNA, 25 bp, Homo sapien
aggacattgctaagcagaaacttgc

SEQ ID NO: 4126114 - DNA, 25 bp, Homo sapien
atggcgatagtgagccgcaggtaat

SEQ ID NO: 4126115 - DNA, 25 bp, Homo sapien
ggcctgccaggcagcaaggaaagga

SEQ ID NO: 4126116 - DNA, 25 bp, Homo sapien
ctgccaggcagcaaggaaaggatac

SEQ ID NO: 4126117 - DNA, 25 bp, Homo sapien
ccatgtctggcctgccaggcagcaa

SEQ ID NO: 4126118 - DNA, 25 bp, Homo sapien
tgtctggcctgccaggcagcaagga

SEQ ID NO: 4126119 - DNA, 25 bp, Homo sapien
tgatgtaaaagaagacgacggagcg

SEQ ID NO: 4126120 - DNA, 25 bp, Homo sapien
taaaagaagacgacggagcggagca

SEQ ID NO: 4126121 - DNA, 25 bp, Homo sapien
gacgacggagcggagcacgtcgaag

SEQ ID NO: 4126122 - DNA, 25 bp, Homo sapien
tcttgatgtaaaagaagacgacgga

SEQ ID NO: 4126123 - DNA, 25 bp, Homo sapien
ccgctgacagccccgttcgtaggct

SEQ ID NO: 4126124 - DNA, 25 bp, Homo sapien
agccgctcctctgcggtctcctcct

SEQ ID NO: 4126125 - DNA, 25 bp, Homo sapien
ccgttcgtaggctcgccgccgcagc

SEQ ID NO: 4126126 - DNA, 25 bp, Homo sapien
ccttcatctccgtgctctctttgcc

SEQ ID NO: 4126127 - DNA, 25 bp, Homo sapien
aagtcccacctagacatgggcacct

SEQ ID NO: 4126128 - DNA, 25 bp, Homo sapien
ctaccccgtgcccaaggcgggctga

SEQ ID NO: 4126129 - DNA, 25 bp, Homo sapien
ggtcaggtgaggaacatggccctca

SEQ ID NO: 4126130 - DNA, 25 bp, Homo sapien
cacctccaagcaccctcatgtgcac

SEQ ID NO: 4126131 - DNA, 25 bp, Homo sapien
ttcaggatctggacctgtagttctt

SEQ ID NO: 4126132 - DNA, 25 bp, Homo sapien
cttcaggatctggacctgtagttct

SEQ ID NO: 4126133 - DNA, 25 bp, Homo sapien
tcaggatctggacctgtagttcttc

SEQ ID NO: 4126134 - DNA, 25 bp, Homo sapien
ggtcaggaagatatacctagaagct

SEQ ID NO: 4126135 - DNA, 25 bp, Homo sapien
ctcctgcagaaacttgcgaaacttg

SEQ ID NO: 4126136 - DNA, 25 bp, Homo sapien
cttggtcaggaagatatacctagaa

SEQ ID NO: 4126137 - DNA, 25 bp, Homo sapien
gaaacttgcgaaacttggtcaggaa

SEQ ID NO: 4126138 - DNA, 25 bp, Homo sapien
atcccaatagtagcgcagggcagag

SEQ ID NO: 4126139 - DNA, 25 bp, Homo sapien
agagatcagccggtgtaagaagcag

SEQ ID NO: 4126140 - DNA, 25 bp, Homo sapien
taagaagcagaccatgtactcaggg

SEQ ID NO: 4126141 - DNA, 25 bp, Homo sapien
ggaagccttgtattcatcccaatag

SEQ ID NO: 4126142 - DNA, 25 bp, Homo sapien
accttgccattatagaagacctggg

SEQ ID NO: 4126143 - DNA, 25 bp, Homo sapien
caccttgccattatagaagacctgg

SEQ ID NO: 4126144 - DNA, 25 bp, Homo sapien
ccttgccattatagaagacctgggg

SEQ ID NO: 4126145 - DNA, 25 bp, Homo sapien
tcccggcccacaggcctgtacacac

SEQ ID NO: 4126146 - DNA, 25 bp, Homo sapien
ctggccccagaactgctcccggccc

SEQ ID NO: 4126147 - DNA, 25 bp, Homo sapien
tgctcccggcccacaggcctgtaca

SEQ ID NO: 4126148 - DNA, 25 bp, Homo sapien
agaactgctcccggcccacaggcct

SEQ ID NO: 4126149 - DNA, 25 bp, Homo sapien
gtcgatcacaatgttggctttggaa

SEQ ID NO: 4126150 - DNA, 25 bp, Homo sapien
catcctcatctaggtcatccatggc

SEQ ID NO: 4126151 - DNA, 25 bp, Homo sapien
catccatggcggttgactggagctc

SEQ ID NO: 4126152 - DNA, 25 bp, Homo sapien
gagctccagtgggtcgatcacaatg

SEQ ID NO: 4126153 - DNA, 25 bp, Homo sapien
aaccctttgcctgcatggagcggga

SEQ ID NO: 4126154 - DNA, 25 bp, Homo sapien
ggatgagacccctgcccataagata

SEQ ID NO: 4126155 - DNA, 25 bp, Homo sapien
gagggagggtccatgcctccaccca

SEQ ID NO: 4126156 - DNA, 25 bp, Homo sapien
tgcagtgaagaaaggcggccaggac

SEQ ID NO: 4126157 - DNA, 25 bp, Homo sapien
gctcagcgtgcggaccttcactttc

SEQ ID NO: 4126158 - DNA, 25 bp, Homo sapien
tgtgctgaggaagcggttggctcgg

SEQ ID NO: 4126159 - DNA, 25 bp, Homo sapien
tcatgaggctcacagccgctgtgct

SEQ ID NO: 4126160 - DNA, 25 bp, Homo sapien
ggcccaaagttggagaactgagcca

SEQ ID NO: 4126161 - DNA, 25 bp, Homo sapien
ggttgtacatcatgaccgccccatc

SEQ ID NO: 4126162 - DNA, 25 bp, Homo sapien
caggacttccagcagcgagttctcg

SEQ ID NO: 4126163 - DNA, 25 bp, Homo sapien
tacgctgaggttgtacatcatgacc

SEQ ID NO: 4126164 - DNA, 25 bp, Homo sapien
tggtgtacgctgaggttgtacatca

SEQ ID NO: 4126165 - DNA, 25 bp, Homo sapien
gtcagcaggtcagactgaggcagca

SEQ ID NO: 4126166 - DNA, 25 bp, Homo sapien
tacacagcatgggaccacatgtcca

SEQ ID NO: 4126167 - DNA, 25 bp, Homo sapien
tgcgggcccatgtgcacacaggaat

SEQ ID NO: 4126168 - DNA, 25 bp, Homo sapien
tgctcccatgcacggtcttgaacag

SEQ ID NO: 4126169 - DNA, 25 bp, Homo sapien
tctgtgtccctcagagccatagcgt

SEQ ID NO: 4126170 - DNA, 25 bp, Homo sapien
gcaccggcggagcttgtcctctgtg

SEQ ID NO: 4126171 - DNA, 25 bp, Homo sapien
cagagccatagcgtattcattgaca

SEQ ID NO: 4126172 - DNA, 25 bp, Homo sapien
tcattgacatcatcggagacaccca

SEQ ID NO: 4126173 - DNA, 25 bp, Homo sapien
tgcaggcagcctaggaagggccctc

SEQ ID NO: 4126174 - DNA, 25 bp, Homo sapien
gccccatacccaggtccaccctgat

SEQ ID NO: 4126175 - DNA, 25 bp, Homo sapien
caaggggaaaggaggacaatcaaga

SEQ ID NO: 4126176 - DNA, 25 bp, Homo sapien
gacaatcaagacatggccccatacc

SEQ ID NO: 4126177 - DNA, 25 bp, Homo sapien
acccaggcaagacggcggctcaggt

SEQ ID NO: 4126178 - DNA, 25 bp, Homo sapien
ctgggagtagacagtggcatggacc

SEQ ID NO: 4126179 - DNA, 25 bp, Homo sapien
gctcttggtcaactctgcaaggatg

SEQ ID NO: 4126180 - DNA, 25 bp, Homo sapien
ttggtcaactctgcaaggatgtcct

SEQ ID NO: 4126181 - DNA, 25 bp, Homo sapien
ttgttcctcgaaggacaggtctatg

SEQ ID NO: 4126182 - DNA, 25 bp, Homo sapien
agaaactgcgcttcctcagtccaca

SEQ ID NO: 4126183 - DNA, 25 bp, Homo sapien
gtctatgaggcgaactggaggtcca

SEQ ID NO: 4126184 - DNA, 25 bp, Homo sapien
cagacagacagagtttgttcctcga

SEQ ID NO: 4126185 - DNA, 25 bp, Homo sapien
gggcaagggtcttgagaagacagtg

SEQ ID NO: 4126186 - DNA, 25 bp, Homo sapien
aatagtgtatgattcttcctagatg

SEQ ID NO: 4126187 - DNA, 25 bp, Homo sapien
gattcttcctagatgaggtgcttag

SEQ ID NO: 4126188 - DNA, 25 bp, Homo sapien
tgctaaagccatacacaaaagaaca

SEQ ID NO: 4126189 - DNA, 25 bp, Homo sapien
ggacattatgctaaagccatacaca

SEQ ID NO: 4126190 - DNA, 25 bp, Homo sapien
cagcagccagtagatgtccagcatc

SEQ ID NO: 4126191 - DNA, 25 bp, Homo sapien
gatcaccgtgctcaatggtccgcag

SEQ ID NO: 4126192 - DNA, 25 bp, Homo sapien
gatggccacgctcaggtagaactcg

SEQ ID NO: 4126193 - DNA, 25 bp, Homo sapien
tagaactcgggcatgaaggcaaaga

SEQ ID NO: 4126194 - DNA, 25 bp, Homo sapien
ccaggttcggatgtggaccctagca

SEQ ID NO: 4126195 - DNA, 25 bp, Homo sapien
tcattggtggctgtgcaagggctaa

SEQ ID NO: 4126196 - DNA, 25 bp, Homo sapien
ttgtttgctgcagggtgaaccacag

SEQ ID NO: 4126197 - DNA, 25 bp, Homo sapien
cacagaagtgtgttgctgggccaca

SEQ ID NO: 4126198 - DNA, 25 bp, Homo sapien
tgggaagtgagacgtgtcggctggg

SEQ ID NO: 4126199 - DNA, 25 bp, Homo sapien
ggaagtgagacgtgtcggctgggag

SEQ ID NO: 4126200 - DNA, 25 bp, Homo sapien
aagtgagacgtgtcggctgggagtg

SEQ ID NO: 4126201 - DNA, 25 bp, Homo sapien
gtgggaagtgagacgtgtcggctgg

SEQ ID NO: 4126202 - DNA, 25 bp, Homo sapien
cgtcggcaaagtgtttggcgagaat

SEQ ID NO: 4126203 - DNA, 25 bp, Homo sapien
cagtgcccacaatgcgtgcgtcggc

SEQ ID NO: 4126204 - DNA, 25 bp, Homo sapien
aagtgtttggcgagaatggcagcca

SEQ ID NO: 4126205 - DNA, 25 bp, Homo sapien
caatgcgtgcgtcggcaaagtgttt

SEQ ID NO: 4126206 - DNA, 25 bp, Homo sapien
tgctcctcggggattcgctccacag

SEQ ID NO: 4126207 - DNA, 25 bp, Homo sapien
cagggagtgtgggtagcacacgtag

SEQ ID NO: 4126208 - DNA, 25 bp, Homo sapien
ggagtgtgggtagcacacgtagctg

SEQ ID NO: 4126209 - DNA, 25 bp, Homo sapien
tgtgggtagcacacgtagctggcca

SEQ ID NO: 4126210 - DNA, 25 bp, Homo sapien
ttgtggccagggtgtgtgcccccca

SEQ ID NO: 4126211 - DNA, 25 bp, Homo sapien
tgggcatggtgcttgtggccagggt

SEQ ID NO: 4126212 - DNA, 25 bp, Homo sapien
ggtgcttgtggccagggtgtgtgcc

SEQ ID NO: 4126213 - DNA, 25 bp, Homo sapien
ctgggcatggtgcttgtggccaggg

SEQ ID NO: 4126214 - DNA, 25 bp, Homo sapien
gaggttcctcaccatggcgatacgc

SEQ ID NO: 4126215 - DNA, 25 bp, Homo sapien
ggcgccaggaggttcctcaccatgg

SEQ ID NO: 4126216 - DNA, 25 bp, Homo sapien
ctcatagggcgccaggaggttcctc

SEQ ID NO: 4126217 - DNA, 25 bp, Homo sapien
cagggccgctgctcatagggcgcca

SEQ ID NO: 4126218 - DNA, 25 bp, Homo sapien
tgtatagcggtacccgaagccacag

SEQ ID NO: 4126219 - DNA, 25 bp, Homo sapien
tgtggcagccgtgtatagcggtacc

SEQ ID NO: 4126220 - DNA, 25 bp, Homo sapien
gaggctgggcaaattggcgtcctca

SEQ ID NO: 4126221 - DNA, 25 bp, Homo sapien
caaattggcgtcctcaagtttggtt

SEQ ID NO: 4126222 - DNA, 25 bp, Homo sapien
ctgcctgtttgcctctgtcctcgcc

SEQ ID NO: 4126223 - DNA, 25 bp, Homo sapien
tgcctgtttgcctctgtcctcgccc

SEQ ID NO: 4126224 - DNA, 25 bp, Homo sapien
gcctgtttgcctctgtcctcgccca

SEQ ID NO: 4126225 - DNA, 25 bp, Homo sapien
cccagttgagctgattgaggacgct

SEQ ID NO: 4126226 - DNA, 25 bp, Homo sapien
gaagctgggtgccacatcaggaccc

SEQ ID NO: 4126227 - DNA, 25 bp, Homo sapien
ctgctgtaggaggtccgccatgtgc

SEQ ID NO: 4126228 - DNA, 25 bp, Homo sapien
ccaatgaattcagagaaggcccagt

SEQ ID NO: 4126229 - DNA, 25 bp, Homo sapien
ggccgggtccagtcaaggaatatct

SEQ ID NO: 4126230 - DNA, 25 bp, Homo sapien
tgagctgccggctgtccacaaagtt

SEQ ID NO: 4126231 - DNA, 25 bp, Homo sapien
aggaatatctcaggcaccagtgtga

SEQ ID NO: 4126232 - DNA, 25 bp, Homo sapien
cagcatctcagaggtaggccgggtc

SEQ ID NO: 4126233 - DNA, 25 bp, Homo sapien
ctgtcacccggttcagcacctggtt

SEQ ID NO: 4126234 - DNA, 25 bp, Homo sapien
caggcagccgtagggtgaccacacg

SEQ ID NO: 4126235 - DNA, 25 bp, Homo sapien
agctgtcacccggttcagcacctgg

SEQ ID NO: 4126236 - DNA, 25 bp, Homo sapien
tgaccacacgatcaaacaggttcct

SEQ ID NO: 4126237 - DNA, 25 bp, Homo sapien
aatgggatagtggtccacgctctct

SEQ ID NO: 4126238 - DNA, 25 bp, Homo sapien
caccagaatgggatagtggtccacg

SEQ ID NO: 4126239 - DNA, 25 bp, Homo sapien
cagaatgggatagtggtccacgctc

SEQ ID NO: 4126240 - DNA, 25 bp, Homo sapien
ctgccaccagaatgggatagtggtc

SEQ ID NO: 4126241 - DNA, 25 bp, Homo sapien
accgccagacgcacccagccgcaag

SEQ ID NO: 4126242 - DNA, 25 bp, Homo sapien
tccaagagctgagcgcacagtcctc

SEQ ID NO: 4126243 - DNA, 25 bp, Homo sapien
ctgttcgccccaccctgccgctgct

SEQ ID NO: 4126244 - DNA, 25 bp, Homo sapien
acagtcctcagtactcagcaccaca

SEQ ID NO: 4126245 - DNA, 25 bp, Homo sapien
tacaggagcagcatgcgggactctt

SEQ ID NO: 4126246 - DNA, 25 bp, Homo sapien
catgcgcattgcctgggtttcgccg

SEQ ID NO: 4126247 - DNA, 25 bp, Homo sapien
tggccataggcaacgtacaggagca

SEQ ID NO: 4126248 - DNA, 25 bp, Homo sapien
tgaggctttactgcaacaccagcgt

SEQ ID NO: 4126249 - DNA, 25 bp, Homo sapien
tatttaggagccgatcaggaactcg

SEQ ID NO: 4126250 - DNA, 25 bp, Homo sapien
tcacaacctgggaaccggagagtag

SEQ ID NO: 4126251 - DNA, 25 bp, Homo sapien
ttgctccccatctggcggtcatgcg

SEQ ID NO: 4126252 - DNA, 25 bp, Homo sapien
ccattgggcacaaagggatgtagcc

SEQ ID NO: 4126253 - DNA, 25 bp, Homo sapien
ggtaccactttaagaaggctcaggc

SEQ ID NO: 4126254 - DNA, 25 bp, Homo sapien
tcaggcgaaccaccttaagatagtg

SEQ ID NO: 4126255 - DNA, 25 bp, Homo sapien
gcctgccccataatattatcagtcc

SEQ ID NO: 4126256 - DNA, 25 bp, Homo sapien
cagcagcttggagacattcttccag

SEQ ID NO: 4126257 - DNA, 25 bp, Homo sapien
ccaggagcactgatgtggcttgctc

SEQ ID NO: 4126258 - DNA, 25 bp, Homo sapien
gagatagcatattgagcgtagctgg

SEQ ID NO: 4126259 - DNA, 25 bp, Homo sapien
catattgagcgtagctggaagcagg

SEQ ID NO: 4126260 - DNA, 25 bp, Homo sapien
cagggagaagcgcttccggtcaggg

SEQ ID NO: 4126261 - DNA, 25 bp, Homo sapien
cagatgcagaggtcaggtgcgccag

SEQ ID NO: 4126262 - DNA, 25 bp, Homo sapien
catctgttccacttgggccagctca

SEQ ID NO: 4126263 - DNA, 25 bp, Homo sapien
ccagctcatcggcactgatataatc

SEQ ID NO: 4126264 - DNA, 25 bp, Homo sapien
ggtcaggtgcgccagcatctgttcc

SEQ ID NO: 4126265 - DNA, 25 bp, Homo sapien
tgggctggagttggatgcctggcta

SEQ ID NO: 4126266 - DNA, 25 bp, Homo sapien
ttggatgcctggctatgtggatgtc

SEQ ID NO: 4126267 - DNA, 25 bp, Homo sapien
tgtggatgtccgttgtgcctgtgta

SEQ ID NO: 4126268 - DNA, 25 bp, Homo sapien
ctggctatgtggatgtccgttgtgc

SEQ ID NO: 4126269 - DNA, 25 bp, Homo sapien
agatggggcagaggtcctcctcact

SEQ ID NO: 4126270 - DNA, 25 bp, Homo sapien
cagatggggcagaggtcctcctcac

SEQ ID NO: 4126271 - DNA, 25 bp, Homo sapien
catcaggtgctggttgatacaggct

SEQ ID NO: 4126272 - DNA, 25 bp, Homo sapien
tgcagaagaagcagtccttgttgtt

SEQ ID NO: 4126273 - DNA, 25 bp, Homo sapien
ccttgttgttcatcaggtgctggtt

SEQ ID NO: 4126274 - DNA, 25 bp, Homo sapien
cagaagaagcagtccttgttgttca

SEQ ID NO: 4126275 - DNA, 25 bp, Homo sapien
ggtagtactcgtattggctcccttc

SEQ ID NO: 4126276 - DNA, 25 bp, Homo sapien
gaggtagtactcgtattggctccct

SEQ ID NO: 4126277 - DNA, 25 bp, Homo sapien
ctgaggaggtagtactcgtattggc

SEQ ID NO: 4126278 - DNA, 25 bp, Homo sapien
gaggaggtagtactcgtattggctc

SEQ ID NO: 4126279 - DNA, 25 bp, Homo sapien
gctctgggttcaaaggtggaggttc

SEQ ID NO: 4126280 - DNA, 25 bp, Homo sapien
agcctggctctgggttcaaaggtgg

SEQ ID NO: 4126281 - DNA, 25 bp, Homo sapien
tctgggttcaaaggtggaggttcca

SEQ ID NO: 4126282 - DNA, 25 bp, Homo sapien
cctggctctgggttcaaaggtggag

SEQ ID NO: 4126283 - DNA, 25 bp, Homo sapien
tgggatacaggagaagggcaaaggg

SEQ ID NO: 4126284 - DNA, 25 bp, Homo sapien
ggatacaggagaagggcaaagggag

SEQ ID NO: 4126285 - DNA, 25 bp, Homo sapien
gggatacaggagaagggcaaaggga

SEQ ID NO: 4126286 - DNA, 25 bp, Homo sapien
gtgggatacaggagaagggcaaagg

SEQ ID NO: 4126287 - DNA, 25 bp, Homo sapien
accaatgaggatacaggcaggcaag

SEQ ID NO: 4126288 - DNA, 25 bp, Homo sapien
ctcaggcacaattagggccatggct

SEQ ID NO: 4126289 - DNA, 25 bp, Homo sapien
aaagtcaagctcaggcacaattagg

SEQ ID NO: 4126290 - DNA, 25 bp, Homo sapien
ggctcccaccaatgaggatacaggc

SEQ ID NO: 4126291 - DNA, 25 bp, Homo sapien
ggaataataatttaatgctcactgt

SEQ ID NO: 4126292 - DNA, 25 bp, Homo sapien
gcctgacacatcagaagaccctgga

SEQ ID NO: 4126293 - DNA, 25 bp, Homo sapien
tgttggacacctgccttctcatgtg

SEQ ID NO: 4126294 - DNA, 25 bp, Homo sapien
agccccggttttcccatcagcaagg

SEQ ID NO: 4126295 - DNA, 25 bp, Homo sapien
gccagagcctcgtatcatcatgtga

SEQ ID NO: 4126296 - DNA, 25 bp, Homo sapien
tgtctttgtgaaaatcccgtggccc

SEQ ID NO: 4126297 - DNA, 25 bp, Homo sapien
cgtttgctttggaccttgcgtgcgg

SEQ ID NO: 4126298 - DNA, 25 bp, Homo sapien
aactgtaagccctcgcgttctggga

SEQ ID NO: 4126299 - DNA, 25 bp, Homo sapien
taaagccgctagaaacggaggcgag

SEQ ID NO: 4126300 - DNA, 25 bp, Homo sapien
taagggctccttgatggatgccatc

SEQ ID NO: 4126301 - DNA, 25 bp, Homo sapien
ggcagtagcccttcattagtgtaga

SEQ ID NO: 4126302 - DNA, 25 bp, Homo sapien
tgtagatagtcattccctggtaggg

SEQ ID NO: 4126303 - DNA, 25 bp, Homo sapien
ttttcctggcactacaaagagtggg

SEQ ID NO: 4126304 - DNA, 25 bp, Homo sapien
cgaattctgtcatgtggccaacata

SEQ ID NO: 4126305 - DNA, 25 bp, Homo sapien
ttatttgctgacttcgaattctgtc

SEQ ID NO: 4126306 - DNA, 25 bp, Homo sapien
tgtccttgttattgtggctattctc

SEQ ID NO: 4126307 - DNA, 25 bp, Homo sapien
tctcatttgggtgcatttaaaccta

SEQ ID NO: 4126308 - DNA, 25 bp, Homo sapien
ccagaaacctaatgtgtgagaccag

SEQ ID NO: 4126309 - DNA, 25 bp, Homo sapien
tgattcagggatggctcgcatgtac

SEQ ID NO: 4126310 - DNA, 25 bp, Homo sapien
gagtcagagtttaccattcatgcca

SEQ ID NO: 4126311 - DNA, 25 bp, Homo sapien
cagttgtaaatgtgctaggtgagac

SEQ ID NO: 4126312 - DNA, 25 bp, Homo sapien
cagacgtgctgtggtagttactgtc

SEQ ID NO: 4126313 - DNA, 25 bp, Homo sapien
ggctcccagggatacaacgaatgct

SEQ ID NO: 4126314 - DNA, 25 bp, Homo sapien
aatttacagagaactacggctccca

SEQ ID NO: 4126315 - DNA, 25 bp, Homo sapien
gaatgctccaccaatatgaaactgc

SEQ ID NO: 4126316 - DNA, 25 bp, Homo sapien
cacacctggacttcattgggattct

SEQ ID NO: 4126317 - DNA, 25 bp, Homo sapien
tatagttgactcttgtacagtgtgg

SEQ ID NO: 4126318 - DNA, 25 bp, Homo sapien
gactccctcagagcttaattattag

SEQ ID NO: 4126319 - DNA, 25 bp, Homo sapien
ggattcttgaatgtatatagttgac

SEQ ID NO: 4126320 - DNA, 25 bp, Homo sapien
atagtgcagtggtgcaggttgctca

SEQ ID NO: 4126321 - DNA, 25 bp, Homo sapien
ggctatagtgcagtggtgcaggttg

SEQ ID NO: 4126322 - DNA, 25 bp, Homo sapien
ctatagtgcagtggtgcaggttgct

SEQ ID NO: 4126323 - DNA, 25 bp, Homo sapien
agtgattctcatgcctcagccttcc

SEQ ID NO: 4126324 - DNA, 25 bp, Homo sapien
tagtagttagcaactcccttagtct

SEQ ID NO: 4126325 - DNA, 25 bp, Homo sapien
gacttatatatgttatcctactgcc

SEQ ID NO: 4126326 - DNA, 25 bp, Homo sapien
tcctactgccttttggaggtttctg

SEQ ID NO: 4126327 - DNA, 25 bp, Homo sapien
cccttagtctttatctggaaatgtc

SEQ ID NO: 4126328 - DNA, 25 bp, Homo sapien
gccgagactactggtatgagccagt

SEQ ID NO: 4126329 - DNA, 25 bp, Homo sapien
agtagccgagactactggtatgagc

SEQ ID NO: 4126330 - DNA, 25 bp, Homo sapien
tagccgagactactggtatgagcca

SEQ ID NO: 4126331 - DNA, 25 bp, Homo sapien
gtagccgagactactggtatgagcc

SEQ ID NO: 4126332 - DNA, 25 bp, Homo sapien
tttctagcaaggcttgaagtcaggt

SEQ ID NO: 4126333 - DNA, 25 bp, Homo sapien
tacaggtgagctctgcacaccttgg

SEQ ID NO: 4126334 - DNA, 25 bp, Homo sapien
gaatacgggtgtgatcaagactcca

SEQ ID NO: 4126335 - DNA, 25 bp, Homo sapien
caacggaggtctcagcatatttgcc

SEQ ID NO: 4126336 - DNA, 25 bp, Homo sapien
cgcaagtgtatgacaagacgccgcc

SEQ ID NO: 4126337 - DNA, 25 bp, Homo sapien
ggcgctccggcctcgtagtagccag

SEQ ID NO: 4126338 - DNA, 25 bp, Homo sapien
gctgagattccctgtgtgtgcgcaa

SEQ ID NO: 4126339 - DNA, 25 bp, Homo sapien
aagacgccgccggtaccgcacgagg

SEQ ID NO: 4126340 - DNA, 25 bp, Homo sapien
tgggaaggatctggagcttttgcac

SEQ ID NO: 4126341 - DNA, 25 bp, Homo sapien
gcactgcagcaaacatggaagtgca

SEQ ID NO: 4126342 - DNA, 25 bp, Homo sapien
gcacccggcccatatgtaccatatt

SEQ ID NO: 4126343 - DNA, 25 bp, Homo sapien
tcccatcaaacttcagggcaatttg

SEQ ID NO: 4126344 - DNA, 25 bp, Homo sapien
ttggagaatcaaggaggcttcctgt

SEQ ID NO: 4126345 - DNA, 25 bp, Homo sapien
gctggtgtccagtgttggagaatca

SEQ ID NO: 4126346 - DNA, 25 bp, Homo sapien
ctggtattgccttagggaagctggt

SEQ ID NO: 4126347 - DNA, 25 bp, Homo sapien
tcctgtgcatttgagtcagagttga

SEQ ID NO: 4126348 - DNA, 25 bp, Homo sapien
cctgtactcttgctcgtactttgcc

SEQ ID NO: 4126349 - DNA, 25 bp, Homo sapien
tactcttgctcgtactttgccccag

SEQ ID NO: 4126350 - DNA, 25 bp, Homo sapien
tcccatctcttaaactcaggttagg

SEQ ID NO: 4126351 - DNA, 25 bp, Homo sapien
aaactcaggttagggcccagagcct

SEQ ID NO: 4126352 - DNA, 25 bp, Homo sapien
catttacccctattcctgacttctg

SEQ ID NO: 4126353 - DNA, 25 bp, Homo sapien
cctccactggaaagctttcctgctc

SEQ ID NO: 4126354 - DNA, 25 bp, Homo sapien
gccctccactggaaagctttcctgc

SEQ ID NO: 4126355 - DNA, 25 bp, Homo sapien
attcctgacttctgccctccactgg

SEQ ID NO: 4126356 - DNA, 25 bp, Homo sapien
ccaagtaggtgggtgacgaactgat

SEQ ID NO: 4126357 - DNA, 25 bp, Homo sapien
cacccaagattagatgacaatgccc

SEQ ID NO: 4126358 - DNA, 25 bp, Homo sapien
cgaactgatattgaggagggctact

SEQ ID NO: 4126359 - DNA, 25 bp, Homo sapien
ccagaggtctttagattagggtcag

SEQ ID NO: 4126360 - DNA, 25 bp, Homo sapien
gggctgagttctttcaagatctgct

SEQ ID NO: 4126361 - DNA, 25 bp, Homo sapien
aaacaaacatgtaggtaatggccag

SEQ ID NO: 4126362 - DNA, 25 bp, Homo sapien
ggggctgagttctttcaagatctgc

SEQ ID NO: 4126363 - DNA, 25 bp, Homo sapien
caaacatgtaggtaatggccaggca

SEQ ID NO: 4126364 - DNA, 25 bp, Homo sapien
cccaccgaacctactagctcctctt

SEQ ID NO: 4126365 - DNA, 25 bp, Homo sapien
ccccaccgaacctactagctcctct

SEQ ID NO: 4126366 - DNA, 25 bp, Homo sapien
gctggctaaggaagctgtcaagccg

SEQ ID NO: 4126367 - DNA, 25 bp, Homo sapien
cccagcggagctggctaaggaagct

SEQ ID NO: 4126368 - DNA, 25 bp, Homo sapien
aaggaagctgtcaagccgagcgctg

SEQ ID NO: 4126369 - DNA, 25 bp, Homo sapien
cagttcccagcggagctggctaagg

SEQ ID NO: 4126370 - DNA, 25 bp, Homo sapien
ctgagtcctcttccaaggcacccga

SEQ ID NO: 4126371 - DNA, 25 bp, Homo sapien
cacatctgggccagtttgggaggtt

SEQ ID NO: 4126372 - DNA, 25 bp, Homo sapien
ggccagtttgggaggttggctgcag

SEQ ID NO: 4126373 - DNA, 25 bp, Homo sapien
gagtcctcttccaaggcacccgagg

SEQ ID NO: 4126374 - DNA, 25 bp, Homo sapien
gacatccgcaggcagttcaggttct

SEQ ID NO: 4126375 - DNA, 25 bp, Homo sapien
gactgcgacccctgttcagtagggc

SEQ ID NO: 4126376 - DNA, 25 bp, Homo sapien
gaggtgggcatgacagccgctttcc

SEQ ID NO: 4126377 - DNA, 25 bp, Homo sapien
gagctgcaaagcgtgagacatccgc

SEQ ID NO: 4126378 - DNA, 25 bp, Homo sapien
tattgtcccaggctggagggcaggg

SEQ ID NO: 4126379 - DNA, 25 bp, Homo sapien
aaaggcttttattgtcccaggctgg

SEQ ID NO: 4126380 - DNA, 25 bp, Homo sapien
aaaaggcttttattgtcccaggctg

SEQ ID NO: 4126381 - DNA, 25 bp, Homo sapien
ttttattgtcccaggctggagggca

SEQ ID NO: 4126382 - DNA, 25 bp, Homo sapien
agggtgacgacgaggacactgcctt

SEQ ID NO: 4126383 - DNA, 25 bp, Homo sapien
agccctgcattgtaagcccacagta

SEQ ID NO: 4126384 - DNA, 25 bp, Homo sapien
caccctgtcacctagctcaatggag

SEQ ID NO: 4126385 - DNA, 25 bp, Homo sapien
tatgagctgtgacaaggcagccacc

SEQ ID NO: 4126386 - DNA, 25 bp, Homo sapien
atgcggccggatggtcacctgaaaa

SEQ ID NO: 4126387 - DNA, 25 bp, Homo sapien
tcagccctgctctatgcggccggat

SEQ ID NO: 4126388 - DNA, 25 bp, Homo sapien
ggtgaggatcctgctgcacggctca

SEQ ID NO: 4126389 - DNA, 25 bp, Homo sapien
gttgagggtgaggatcctgctgcac

SEQ ID NO: 4126390 - DNA, 25 bp, Homo sapien
gagtcgctgctggctcatcttcagg

SEQ ID NO: 4126391 - DNA, 25 bp, Homo sapien
cagcctgagaggaccctggagtcgc

SEQ ID NO: 4126392 - DNA, 25 bp, Homo sapien
ggagtcgctgctggctcatcttcag

SEQ ID NO: 4126393 - DNA, 25 bp, Homo sapien
ctcggtggccggacaaaattcatcc

SEQ ID NO: 4126394 - DNA, 25 bp, Homo sapien
cttcgatgggctcggtggccggaca

SEQ ID NO: 4126395 - DNA, 25 bp, Homo sapien
aaggacaggcttcgatgggctcggt

SEQ ID NO: 4126396 - DNA, 25 bp, Homo sapien
taggtaaggacaggcttcgatgggc

SEQ ID NO: 4126397 - DNA, 25 bp, Homo sapien
cccttgatcacatttaccacacctg

SEQ ID NO: 4126398 - DNA, 25 bp, Homo sapien
tggcactggacgcaaggtcttgccc

SEQ ID NO: 4126399 - DNA, 25 bp, Homo sapien
accacacctggcactggacgcaagg

SEQ ID NO: 4126400 - DNA, 25 bp, Homo sapien
ggacgcaaggtcttgcccatggcca

SEQ ID NO: 4126401 - DNA, 25 bp, Homo sapien
gctgagcgctaagcgccagtgtaca

SEQ ID NO: 4126402 - DNA, 25 bp, Homo sapien
acaggccgctgagaaaaaggcgcca

SEQ ID NO: 4126403 - DNA, 25 bp, Homo sapien
ccctcgggtcggctgagcgctaagc

SEQ ID NO: 4126404 - DNA, 25 bp, Homo sapien
tccaagggccggaagagtcggatgg

SEQ ID NO: 4126405 - DNA, 25 bp, Homo sapien
tctgctttggaaaaggagtgtcttt

SEQ ID NO: 4126406 - DNA, 25 bp, Homo sapien
ctcagggcacagtatcaaccctgca

SEQ ID NO: 4126407 - DNA, 25 bp, Homo sapien
gggcacagtatcaaccctgcactgg

SEQ ID NO: 4126408 - DNA, 25 bp, Homo sapien
tctccgggtgtttattcatttcctg

SEQ ID NO: 4126409 - DNA, 25 bp, Homo sapien
ccttcaggctcagtgcaggagtggc

SEQ ID NO: 4126410 - DNA, 25 bp, Homo sapien
tgcgcaagacttagacatgccctag

SEQ ID NO: 4126411 - DNA, 25 bp, Homo sapien
tctgtggatgctaccgcaggttcct

SEQ ID NO: 4126412 - DNA, 25 bp, Homo sapien
tggcctgtgtgttcttgcgcaagac

SEQ ID NO: 4126413 - DNA, 25 bp, Homo sapien
tctatgtgccgtcagagttgagaac

SEQ ID NO: 4126414 - DNA, 25 bp, Homo sapien
gaaacaattagtgcgacttttgcgc

SEQ ID NO: 4126415 - DNA, 25 bp, Homo sapien
gaaatgaactgctagctggctcgga

SEQ ID NO: 4126416 - DNA, 25 bp, Homo sapien
tggctgggcccactaatgacattta

SEQ ID NO: 4126417 - DNA, 25 bp, Homo sapien
taccacaaaggcgccgcgccgctgc

SEQ ID NO: 4126418 - DNA, 25 bp, Homo sapien
ctaggcggcgaagcctccacggccc

SEQ ID NO: 4126419 - DNA, 25 bp, Homo sapien
cggacaccggaacttcctccgcgcg

SEQ ID NO: 4126420 - DNA, 25 bp, Homo sapien
tcggcccgctgggagatgaagtaca

SEQ ID NO: 4126421 - DNA, 25 bp, Homo sapien
cttggtcttcttcccgagcgaggcc

SEQ ID NO: 4126422 - DNA, 25 bp, Homo sapien
cctgtctgctggctattccctggca

SEQ ID NO: 4126423 - DNA, 25 bp, Homo sapien
cacagctttcaggctgcgcgggcct

SEQ ID NO: 4126424 - DNA, 25 bp, Homo sapien
ctgcgatgtctagagcgggcctgtc

SEQ ID NO: 4126425 - DNA, 25 bp, Homo sapien
tccgaagagtaggagcacagagccg

SEQ ID NO: 4126426 - DNA, 25 bp, Homo sapien
tacgtgctaagcacaagagctccct

SEQ ID NO: 4126427 - DNA, 25 bp, Homo sapien
accggtaatctactgccgcgccggg

SEQ ID NO: 4126428 - DNA, 25 bp, Homo sapien
cagcccgcttacagctccgaagagt

SEQ ID NO: 4126429 - DNA, 25 bp, Homo sapien
gcaaaaaatacaattacgctcacgg

SEQ ID NO: 4126430 - DNA, 25 bp, Homo sapien
caaagttgaacccattcgcctaacg

SEQ ID NO: 4126431 - DNA, 25 bp, Homo sapien
tccttcattgcctaacgggcgcaga

SEQ ID NO: 4126432 - DNA, 25 bp, Homo sapien
ccttgtgtctgtccaagtctgagga

SEQ ID NO: 4126433 - DNA, 25 bp, Homo sapien
tagaaatactataacagggccgggc

SEQ ID NO: 4126434 - DNA, 25 bp, Homo sapien
tgttttagaaatactataacagggc

SEQ ID NO: 4126435 - DNA, 25 bp, Homo sapien
gttagggctaacaggagcatgccac

SEQ ID NO: 4126436 - DNA, 25 bp, Homo sapien
gagtagttagggctaacaggagcat

SEQ ID NO: 4126437 - DNA, 25 bp, Homo sapien
tcctgagtagttagggctaacagga

SEQ ID NO: 4126438 - DNA, 25 bp, Homo sapien
tatctccccttactacaacctctac

SEQ ID NO: 4126439 - DNA, 25 bp, Homo sapien
catgccctccctggttacagagttt

SEQ ID NO: 4126440 - DNA, 25 bp, Homo sapien
ggtattgcttgtactacattgtgaa

SEQ ID NO: 4126441 - DNA, 25 bp, Homo sapien
ccatgccctccctggttacagagtt

SEQ ID NO: 4126442 - DNA, 25 bp, Homo sapien
tcagaaatagtggtattgcttgtac

SEQ ID NO: 4126443 - DNA, 25 bp, Homo sapien
cagctaagagcatcaaggagacacc

SEQ ID NO: 4126444 - DNA, 25 bp, Homo sapien
caggaattgcacctctagcagcaca

SEQ ID NO: 4126445 - DNA, 25 bp, Homo sapien
gaattagtggctgctagaagcaccc

SEQ ID NO: 4126446 - DNA, 25 bp, Homo sapien
gaagcaagggttactctgaccgcct

SEQ ID NO: 4126447 - DNA, 25 bp, Homo sapien
ctaccaaattctggttatagcagta

SEQ ID NO: 4126448 - DNA, 25 bp, Homo sapien
tttctaccaaattctggttatagca

SEQ ID NO: 4126449 - DNA, 25 bp, Homo sapien
taccaaattctggttatagcagtac

SEQ ID NO: 4126450 - DNA, 25 bp, Homo sapien
tctaccaaattctggttatagcagt

SEQ ID NO: 4126451 - DNA, 25 bp, Homo sapien
ccagttctgttagcaggtcgagaat

SEQ ID NO: 4126452 - DNA, 25 bp, Homo sapien
ttctgttagcaggtcgagaatcccc

SEQ ID NO: 4126453 - DNA, 25 bp, Homo sapien
gttctgttagcaggtcgagaatccc

SEQ ID NO: 4126454 - DNA, 25 bp, Homo sapien
tagcaggtcgagaatccccccacat

SEQ ID NO: 4126455 - DNA, 25 bp, Homo sapien
tcaatattcaaatttgagaacttac

SEQ ID NO: 4126456 - DNA, 25 bp, Homo sapien
atactggcaatttcaatattcaaat

SEQ ID NO: 4126457 - DNA, 25 bp, Homo sapien
catttataattaaaatactggcaat

SEQ ID NO: 4126458 - DNA, 25 bp, Homo sapien
ggcgaaaatgttacacatttataat

SEQ ID NO: 4126459 - DNA, 25 bp, Homo sapien
ggcatgctgggtattcaggctcaca

SEQ ID NO: 4126460 - DNA, 25 bp, Homo sapien
gctatgtgacaaaacatttggcatg

SEQ ID NO: 4126461 - DNA, 25 bp, Homo sapien
tgacaaaacatttggcatgctgggt

SEQ ID NO: 4126462 - DNA, 25 bp, Homo sapien
tcaggctcacaatcattttcgaaat

SEQ ID NO: 4126463 - DNA, 25 bp, Homo sapien
tccatgaagagccagttcgtaaaca

SEQ ID NO: 4126464 - DNA, 25 bp, Homo sapien
tctgaatgcttacctaaaccacgtt

SEQ ID NO: 4126465 - DNA, 25 bp, Homo sapien
cccattgatctagatgagaggtcag

SEQ ID NO: 4126466 - DNA, 25 bp, Homo sapien
catatcggattttgtgggttataca

SEQ ID NO: 4126467 - DNA, 25 bp, Homo sapien
tctgaccagaacacatccaacatgg

SEQ ID NO: 4126468 - DNA, 25 bp, Homo sapien
cgcccgccctagatgttcttcttag

SEQ ID NO: 4126469 - DNA, 25 bp, Homo sapien
tatacagacgaatcaagaaaccatt

SEQ ID NO: 4126470 - DNA, 25 bp, Homo sapien
aacttactgtagcagggttcttaga

SEQ ID NO: 4126471 - DNA, 25 bp, Homo sapien
cagccagggaacttaagaattccaa

SEQ ID NO: 4126472 - DNA, 25 bp, Homo sapien
caggaggtatctttctcacgctgca

SEQ ID NO: 4126473 - DNA, 25 bp, Homo sapien
ctgcatccagcggtaacattcaaaa

SEQ ID NO: 4126474 - DNA, 25 bp, Homo sapien
tgcaacagggaaaatccgcaatacc

SEQ ID NO: 4126475 - DNA, 25 bp, Homo sapien
gctattttaagacgaagtggcggag

SEQ ID NO: 4126476 - DNA, 25 bp, Homo sapien
agtcaacacaaggttttcaacatga

SEQ ID NO: 4126477 - DNA, 25 bp, Homo sapien
tcaacatgactgctgcagaaaaagc

SEQ ID NO: 4126478 - DNA, 25 bp, Homo sapien
tatgctcccatttcagaacacgagg

SEQ ID NO: 4126479 - DNA, 25 bp, Homo sapien
cagtgttattcatattgtccagaga

SEQ ID NO: 4126480 - DNA, 25 bp, Homo sapien
gagtttgaaatctacacaccagcat

SEQ ID NO: 4126481 - DNA, 25 bp, Homo sapien
gcagagttctgtaacaaggtcctag

SEQ ID NO: 4126482 - DNA, 25 bp, Homo sapien
tattcatattgtccagagagtttga

SEQ ID NO: 4126483 - DNA, 25 bp, Homo sapien
cccgaatgcccctggaaatcaaagg

SEQ ID NO: 4126484 - DNA, 25 bp, Homo sapien
tatcccgaaaatccccagaatgtat

SEQ ID NO: 4126485 - DNA, 25 bp, Homo sapien
gaatgtatgtccctacccctgaagt

SEQ ID NO: 4126486 - DNA, 25 bp, Homo sapien
tcgatagtcaccatgcggtccgtct

SEQ ID NO: 4126487 - DNA, 25 bp, Homo sapien
aatctaaatcataagtgccccggcc

SEQ ID NO: 4126488 - DNA, 25 bp, Homo sapien
gaagtcaacagcgtgagcatccctg

SEQ ID NO: 4126489 - DNA, 25 bp, Homo sapien
taaaatctgcatgggatccatcccg

SEQ ID NO: 4126490 - DNA, 25 bp, Homo sapien
gaatgtggcgtatccctgtccctaa

SEQ ID NO: 4126491 - DNA, 25 bp, Homo sapien
ttgggccggtcctataatcttgatc

SEQ ID NO: 4126492 - DNA, 25 bp, Homo sapien
tcacttgggccggtcctataatctt

SEQ ID NO: 4126493 - DNA, 25 bp, Homo sapien
cacttaatcgaataagcctgctggg

SEQ ID NO: 4126494 - DNA, 25 bp, Homo sapien
tgtggcatcttcaggtaccccactt

SEQ ID NO: 4126495 - DNA, 25 bp, Homo sapien
ctcaggtacataggaaaagcagggc

SEQ ID NO: 4126496 - DNA, 25 bp, Homo sapien
ttctcaggtacataggaaaagcagg

SEQ ID NO: 4126497 - DNA, 25 bp, Homo sapien
ctccagtctggagtaccctgtctca

SEQ ID NO: 4126498 - DNA, 25 bp, Homo sapien
tcaggtacataggaaaagcagggcc

SEQ ID NO: 4126499 - DNA, 25 bp, Homo sapien
gcaagttctttacaggcatgccatc

SEQ ID NO: 4126500 - DNA, 25 bp, Homo sapien
tgcaagttctttacaggcatgccat

SEQ ID NO: 4126501 - DNA, 25 bp, Homo sapien
tcaggagtccgaaaagcattaagaa

SEQ ID NO: 4126502 - DNA, 25 bp, Homo sapien
acaggcatgccatcaggagtccgaa

SEQ ID NO: 4126503 - DNA, 25 bp, Homo sapien
ttcccaaagaaagcatgtataaggc

SEQ ID NO: 4126504 - DNA, 25 bp, Homo sapien
tccagcctgtaaattctaccttgag

SEQ ID NO: 4126505 - DNA, 25 bp, Homo sapien
tatcccatgataaactgctaatagt

SEQ ID NO: 4126506 - DNA, 25 bp, Homo sapien
ttctaacagctaccacaatcggcaa

SEQ ID NO: 4126507 - DNA, 25 bp, Homo sapien
tatgtaagacctaagctgcactgct

SEQ ID NO: 4126508 - DNA, 25 bp, Homo sapien
gaaaagctcagtgtggctacagcaa

SEQ ID NO: 4126509 - DNA, 25 bp, Homo sapien
tgaatgagatcaaacagccaagggt

SEQ ID NO: 4126510 - DNA, 25 bp, Homo sapien
tccaagtgaagatgaaggccctaag

SEQ ID NO: 4126511 - DNA, 25 bp, Homo sapien
cctccttatggtagtgtatatatcc

SEQ ID NO: 4126512 - DNA, 25 bp, Homo sapien
catccatgttgttaggtgcatgagt

SEQ ID NO: 4126513 - DNA, 25 bp, Homo sapien
tatactagagtttgtctagtcacca

SEQ ID NO: 4126514 - DNA, 25 bp, Homo sapien
tcatccaacttgtagcatacatcag

SEQ ID NO: 4126515 - DNA, 25 bp, Homo sapien
aataaagatactctcagccgggcat

SEQ ID NO: 4126516 - DNA, 25 bp, Homo sapien
ggtggctcacgtctgtaattccagc

SEQ ID NO: 4126517 - DNA, 25 bp, Homo sapien
aaggtgggcagatcacctgaggtca

SEQ ID NO: 4126518 - DNA, 25 bp, Homo sapien
tgtaattccagcactttgggaggcc

SEQ ID NO: 4126519 - DNA, 25 bp, Homo sapien
aggaggcagagactgtagtgagctg

SEQ ID NO: 4126520 - DNA, 25 bp, Homo sapien
caggaggcagagactgtagtgagct

SEQ ID NO: 4126521 - DNA, 25 bp, Homo sapien
aggccagccaaagcgtccatccact

SEQ ID NO: 4126522 - DNA, 25 bp, Homo sapien
atgaccaaattaacccttgttccag

SEQ ID NO: 4126523 - DNA, 25 bp, Homo sapien
cccaggtcattccaaaaatgaccaa

SEQ ID NO: 4126524 - DNA, 25 bp, Homo sapien
caagactagcccagccctattagtg

SEQ ID NO: 4126525 - DNA, 25 bp, Homo sapien
gcaagaaacatggaaccaggcaaaa

SEQ ID NO: 4126526 - DNA, 25 bp, Homo sapien
ctagtcctaagaaggcttatattta

SEQ ID NO: 4126527 - DNA, 25 bp, Homo sapien
cactgcaagggtagagaatgtaacc

SEQ ID NO: 4126528 - DNA, 25 bp, Homo sapien
ggtatattgacaaagtagtgcaacc

SEQ ID NO: 4126529 - DNA, 25 bp, Homo sapien
caaagtgctcctgatcattaaaaac

SEQ ID NO: 4126530 - DNA, 25 bp, Homo sapien
aacaaaatcagttgagtcccacaaa

SEQ ID NO: 4126531 - DNA, 25 bp, Homo sapien
cattatctttgatgaccgggcgtgg

SEQ ID NO: 4126532 - DNA, 25 bp, Homo sapien
aacaaggaatcccacagcaaaatca

SEQ ID NO: 4126533 - DNA, 25 bp, Homo sapien
tacagccatgtgctgcttaactaca

SEQ ID NO: 4126534 - DNA, 25 bp, Homo sapien
ttttgtggccgaagagtaacaggct

SEQ ID NO: 4126535 - DNA, 25 bp, Homo sapien
caaatgccgttgtgtctcaattgcc

SEQ ID NO: 4126536 - DNA, 25 bp, Homo sapien
ttccttatagcacttgtcctccagg

SEQ ID NO: 4126537 - DNA, 25 bp, Homo sapien
ggcttgcatttaagggccataaggt

SEQ ID NO: 4126538 - DNA, 25 bp, Homo sapien
tgcatttaagggccataaggtatga

SEQ ID NO: 4126539 - DNA, 25 bp, Homo sapien
cctccagcgctgcaacagatcactt

SEQ ID NO: 4126540 - DNA, 25 bp, Homo sapien
catttaagggccataaggtatgaaa

SEQ ID NO: 4126541 - DNA, 25 bp, Homo sapien
caaacaggtgtactctctagtgtgt

SEQ ID NO: 4126542 - DNA, 25 bp, Homo sapien
tagctgcccggatgaaaaacataga

SEQ ID NO: 4126543 - DNA, 25 bp, Homo sapien
caagactcatggttgtgccataagg

SEQ ID NO: 4126544 - DNA, 25 bp, Homo sapien
gaacatatcaatggagtacccaggt

SEQ ID NO: 4126545 - DNA, 25 bp, Homo sapien
tatccccaggctatgctaatagtca

SEQ ID NO: 4126546 - DNA, 25 bp, Homo sapien
tttggataccacaggaggcttctgg

SEQ ID NO: 4126547 - DNA, 25 bp, Homo sapien
gactgaggcaactattctgtttgga

SEQ ID NO: 4126548 - DNA, 25 bp, Homo sapien
taatagtcaccacttttcaagcaga

SEQ ID NO: 4126549 - DNA, 25 bp, Homo sapien
tggggacagcatttaaatacagacg

SEQ ID NO: 4126550 - DNA, 25 bp, Homo sapien
ggggacagcatttaaatacagacgg

SEQ ID NO: 4126551 - DNA, 25 bp, Homo sapien
cacgcagacatagccatagtcgtaa

SEQ ID NO: 4126552 - DNA, 25 bp, Homo sapien
ctggttggcctccatgcatccgatg

SEQ ID NO: 4126553 - DNA, 25 bp, Homo sapien
gcctccatgcatccgatggcatctt

SEQ ID NO: 4126554 - DNA, 25 bp, Homo sapien
gagtgaaaactccacgcagacatag

SEQ ID NO: 4126555 - DNA, 25 bp, Homo sapien
gattttcctcacaaccgatggttgg

SEQ ID NO: 4126556 - DNA, 25 bp, Homo sapien
tccaaaagcaactgggctctagctt

SEQ ID NO: 4126557 - DNA, 25 bp, Homo sapien
tatgctccacagatagacttcttgt

SEQ ID NO: 4126558 - DNA, 25 bp, Homo sapien
ccagcatcatttgaccgaagtataa

SEQ ID NO: 4126559 - DNA, 25 bp, Homo sapien
taacagcttgatctaggcaccagga

SEQ ID NO: 4126560 - DNA, 25 bp, Homo sapien
gccaagcagatcgtggtgactcaga

SEQ ID NO: 4126561 - DNA, 25 bp, Homo sapien
ttataagcttgagccatagtgcccg

SEQ ID NO: 4126562 - DNA, 25 bp, Homo sapien
gctgctgcctaagtgataccctgat

SEQ ID NO: 4126563 - DNA, 25 bp, Homo sapien
tccaaatagctgggacaataggcat

SEQ ID NO: 4126564 - DNA, 25 bp, Homo sapien
cctcccactttagccttccaaatag

SEQ ID NO: 4126565 - DNA, 25 bp, Homo sapien
ctttgacctcccaggctcaagcaat

SEQ ID NO: 4126566 - DNA, 25 bp, Homo sapien
gtgccactacacccagctaattttt

SEQ ID NO: 4126567 - DNA, 25 bp, Homo sapien
tctgtctagaaatcccgagaggtcc

SEQ ID NO: 4126568 - DNA, 25 bp, Homo sapien
tcatgacaggtgttagcccaactct

SEQ ID NO: 4126569 - DNA, 25 bp, Homo sapien
cgagaggtcctgaacaaaagcacta

SEQ ID NO: 4126570 - DNA, 25 bp, Homo sapien
tcccaagaggtggataaggagccag

SEQ ID NO: 4126571 - DNA, 25 bp, Homo sapien
gagtccaggagcaaaaggccagcct

SEQ ID NO: 4126572 - DNA, 25 bp, Homo sapien
atctcatctgtacctcccctctacc

SEQ ID NO: 4126573 - DNA, 25 bp, Homo sapien
ttccagaactttgtgagtctgaggc

SEQ ID NO: 4126574 - DNA, 25 bp, Homo sapien
cacagtgagatctcatctgtacctc

SEQ ID NO: 4126575 - DNA, 25 bp, Homo sapien
gcaagaggaaagaacaaacaggtgg

SEQ ID NO: 4126576 - DNA, 25 bp, Homo sapien
tagaggaatgagactacatagagaa

SEQ ID NO: 4126577 - DNA, 25 bp, Homo sapien
cacggacaataaaaagttcagtggt

SEQ ID NO: 4126578 - DNA, 25 bp, Homo sapien
gaaaagagggtttctagggcaatga

SEQ ID NO: 4126579 - DNA, 25 bp, Homo sapien
ggcgtggtgacatgagcctataatc

SEQ ID NO: 4126580 - DNA, 25 bp, Homo sapien
aagaagaaaaactaaatcattatct

SEQ ID NO: 4126581 - DNA, 25 bp, Homo sapien
acctaagatcgggagttcgcgacca

SEQ ID NO: 4126582 - DNA, 25 bp, Homo sapien
gaagaaaaactaaatcattatcttc

SEQ ID NO: 4126583 - DNA, 25 bp, Homo sapien
tattcagcgaatatactcattttca

SEQ ID NO: 4126584 - DNA, 25 bp, Homo sapien
ggataaattcttgggaaaactcatc

SEQ ID NO: 4126585 - DNA, 25 bp, Homo sapien
caggagctaagactttataaaagca

SEQ ID NO: 4126586 - DNA, 25 bp, Homo sapien
gaggaagaacgtgaaagattctgag

SEQ ID NO: 4126587 - DNA, 25 bp, Homo sapien
ggtattagaactcagtgactacctg

SEQ ID NO: 4126588 - DNA, 25 bp, Homo sapien
attacataaggctcaaaagaaagtc

SEQ ID NO: 4126589 - DNA, 25 bp, Homo sapien
gaacaaatcgcagttacacacaaga

SEQ ID NO: 4126590 - DNA, 25 bp, Homo sapien
aagaaagtcaaaagactctgtggta

SEQ ID NO: 4126591 - DNA, 25 bp, Homo sapien
aggcagcaatcaatgaaaacttgaa

SEQ ID NO: 4126592 - DNA, 25 bp, Homo sapien
tatgtaggcagcaatcaatgaaaac

SEQ ID NO: 4126593 - DNA, 25 bp, Homo sapien
tgtaggcagcaatcaatgaaaactt

SEQ ID NO: 4126594 - DNA, 25 bp, Homo sapien
gtaggcagcaatcaatgaaaacttg

SEQ ID NO: 4126595 - DNA, 25 bp, Homo sapien
cctggaagacggcgagattccgtct

SEQ ID NO: 4126596 - DNA, 25 bp, Homo sapien
ctggaagacggcgagattccgtctc

SEQ ID NO: 4126597 - DNA, 25 bp, Homo sapien
agcctggaagacggcgagattccgt

SEQ ID NO: 4126598 - DNA, 25 bp, Homo sapien
tatcagagcctagcaaataaggagg

SEQ ID NO: 4126599 - DNA, 25 bp, Homo sapien
gaatatatggctagctccatcaaag

SEQ ID NO: 4126600 - DNA, 25 bp, Homo sapien
aaaagatcactagggcttatgaaga

SEQ ID NO: 4126601 - DNA, 25 bp, Homo sapien
tagctcatcatatgttgccaggtcc

SEQ ID NO: 4126602 - DNA, 25 bp, Homo sapien
aagtcattccattcactacattcca

SEQ ID NO: 4126603 - DNA, 25 bp, Homo sapien
ttccattcactacattccagagtaa

SEQ ID NO: 4126604 - DNA, 25 bp, Homo sapien
cattccattcactacattccagagt

SEQ ID NO: 4126605 - DNA, 25 bp, Homo sapien
tccaagtcattccattcactacatt

SEQ ID NO: 4126606 - DNA, 25 bp, Homo sapien
taatgcaaggcatcaacttctcaca

SEQ ID NO: 4126607 - DNA, 25 bp, Homo sapien
catgccaaaccggtatgattccttt

SEQ ID NO: 4126608 - DNA, 25 bp, Homo sapien
gctgctctacatcctaagggaccct

SEQ ID NO: 4126609 - DNA, 25 bp, Homo sapien
taagtctacataccaccacaagaag

SEQ ID NO: 4126610 - DNA, 25 bp, Homo sapien
tcctagcctatgttagaagccatag

SEQ ID NO: 4126611 - DNA, 25 bp, Homo sapien
aaagggacaaagaagctgagcctgc

SEQ ID NO: 4126612 - DNA, 25 bp, Homo sapien
gatatatcagtactgttccttagaa

SEQ ID NO: 4126613 - DNA, 25 bp, Homo sapien
aactgcccttgctatagactggaat

SEQ ID NO: 4126614 - DNA, 25 bp, Homo sapien
taaaaagggagaccctgctgggcgc

SEQ ID NO: 4126615 - DNA, 25 bp, Homo sapien
catgcctgtaatcccagcactttgg

SEQ ID NO: 4126616 - DNA, 25 bp, Homo sapien
agtggctcatgcctgtaatcccagc

SEQ ID NO: 4126617 - DNA, 25 bp, Homo sapien
gcctgtaatcccagcactttgggag

SEQ ID NO: 4126618 - DNA, 25 bp, Homo sapien
catccagtttattaaaaggcatctc

SEQ ID NO: 4126619 - DNA, 25 bp, Homo sapien
atccagtttattaaaaggcatctct

SEQ ID NO: 4126620 - DNA, 25 bp, Homo sapien
ttaaaaggcatctcttgtagtttgt

SEQ ID NO: 4126621 - DNA, 25 bp, Homo sapien
aaaggcatctcttgtagtttgtagg

SEQ ID NO: 4126622 - DNA, 25 bp, Homo sapien
gtcactaactatatccctgctggag

SEQ ID NO: 4126623 - DNA, 25 bp, Homo sapien
tgatcagacctgtatgccttggcaa

SEQ ID NO: 4126624 - DNA, 25 bp, Homo sapien
gatcatgtgctacaaaggcatagcc

SEQ ID NO: 4126625 - DNA, 25 bp, Homo sapien
cagacgtaacccttggatgccttta

SEQ ID NO: 4126626 - DNA, 25 bp, Homo sapien
ggcagacagggcattcaacaaattc

SEQ ID NO: 4126627 - DNA, 25 bp, Homo sapien
cagggatccgtagtcttggaggtaa

SEQ ID NO: 4126628 - DNA, 25 bp, Homo sapien
ggtaattccatgaacttggctccag

SEQ ID NO: 4126629 - DNA, 25 bp, Homo sapien
tccaggaacatagaaagaacagtgc

SEQ ID NO: 4126630 - DNA, 25 bp, Homo sapien
agcgcccagccgtggatgtccattc

SEQ ID NO: 4126631 - DNA, 25 bp, Homo sapien
taagctactcaagcaaaggagtcat

SEQ ID NO: 4126632 - DNA, 25 bp, Homo sapien
ctctcgagtagcttgtattttagca

SEQ ID NO: 4126633 - DNA, 25 bp, Homo sapien
tatctattagagtatcttcacacat

SEQ ID NO: 4126634 - DNA, 25 bp, Homo sapien
gaatgggtaggatgatgcaatcacc

SEQ ID NO: 4126635 - DNA, 25 bp, Homo sapien
tagttagacataggacagtgaccac

SEQ ID NO: 4126636 - DNA, 25 bp, Homo sapien
aacatcactgttgaagggtagccaa

SEQ ID NO: 4126637 - DNA, 25 bp, Homo sapien
gcaactcagatataccaagcacagg

SEQ ID NO: 4126638 - DNA, 25 bp, Homo sapien
tgtgtccggcctaagatgaacccct

SEQ ID NO: 4126639 - DNA, 25 bp, Homo sapien
gcatggactgtaggctgagttccct

SEQ ID NO: 4126640 - DNA, 25 bp, Homo sapien
aaccccttctaagcccagagacagg

SEQ ID NO: 4126641 - DNA, 25 bp, Homo sapien
atctttaagagcatggactgtaggc

SEQ ID NO: 4126642 - DNA, 25 bp, Homo sapien
tcaagctccaccaatgcaggaagtt

SEQ ID NO: 4126643 - DNA, 25 bp, Homo sapien
caggctctgtatgcagggaaggatc

SEQ ID NO: 4126644 - DNA, 25 bp, Homo sapien
ggaaggaccactctatcaagctcca

SEQ ID NO: 4126645 - DNA, 25 bp, Homo sapien
gaagttagtcaagatgaagcgcccc

SEQ ID NO: 4126646 - DNA, 25 bp, Homo sapien
cagtattagggacaggtaatctggc

SEQ ID NO: 4126647 - DNA, 25 bp, Homo sapien
gcttctgctcagtattagggacagg

SEQ ID NO: 4126648 - DNA, 25 bp, Homo sapien
tgctcagtattagggacaggtaatc

SEQ ID NO: 4126649 - DNA, 25 bp, Homo sapien
cagcttctgctcagtattagggaca

SEQ ID NO: 4126650 - DNA, 25 bp, Homo sapien
tgtgttcattctccgccctctaggg

SEQ ID NO: 4126651 - DNA, 25 bp, Homo sapien
gctctgagttatacaagccatttct

SEQ ID NO: 4126652 - DNA, 25 bp, Homo sapien
actctggaactagcccctgcgctgt

SEQ ID NO: 4126653 - DNA, 25 bp, Homo sapien
ttctttgcaattggacctcagtttc

SEQ ID NO: 4126654 - DNA, 25 bp, Homo sapien
ctggcttggagcctatagagtgagc

SEQ ID NO: 4126655 - DNA, 25 bp, Homo sapien
cggcggcggtatcactctggcttgg

SEQ ID NO: 4126656 - DNA, 25 bp, Homo sapien
tagccctgagatctgaggagcaacc

SEQ ID NO: 4126657 - DNA, 25 bp, Homo sapien
cattggcaagtaagcctttgggaaa

SEQ ID NO: 4126658 - DNA, 25 bp, Homo sapien
ggcttgatacatactccagggtaac

SEQ ID NO: 4126659 - DNA, 25 bp, Homo sapien
tcgtttgcagtaccaaaaatccagg

SEQ ID NO: 4126660 - DNA, 25 bp, Homo sapien
aaatccaggcttgatacatactcca

SEQ ID NO: 4126661 - DNA, 25 bp, Homo sapien
catactccagggtaacttctttgtc

SEQ ID NO: 4126662 - DNA, 25 bp, Homo sapien
gaatgaacaggaagatcggtgccca

SEQ ID NO: 4126663 - DNA, 25 bp, Homo sapien
atgaacaggaagatcggtgcccacc

SEQ ID NO: 4126664 - DNA, 25 bp, Homo sapien
gcagaatgaacaggaagatcggtgc

SEQ ID NO: 4126665 - DNA, 25 bp, Homo sapien
caggaagatcggtgcccaccaatgt

SEQ ID NO: 4126666 - DNA, 25 bp, Homo sapien
caatggtgctggtatggatgttttc

SEQ ID NO: 4126667 - DNA, 25 bp, Homo sapien
tgggttcaggttccttatcagctgg

SEQ ID NO: 4126668 - DNA, 25 bp, Homo sapien
gatgtcctaagcgtgactcttggcc

SEQ ID NO: 4126669 - DNA, 25 bp, Homo sapien
tctcggtctcttcggaaagttggcc

SEQ ID NO: 4126670 - DNA, 25 bp, Homo sapien
ttttgctctctccatcctggcgtgt

SEQ ID NO: 4126671 - DNA, 25 bp, Homo sapien
tttgctctctccatcctggcgtgtc

SEQ ID NO: 4126672 - DNA, 25 bp, Homo sapien
tctctccatcctggcgtgtctctcc

SEQ ID NO: 4126673 - DNA, 25 bp, Homo sapien
tgctctctccatcctggcgtgtctc

SEQ ID NO: 4126674 - DNA, 25 bp, Homo sapien
ggccatctatgctccattgtgatga

SEQ ID NO: 4126675 - DNA, 25 bp, Homo sapien
tagctcccggacataacattggcca

SEQ ID NO: 4126676 - DNA, 25 bp, Homo sapien
cagggtactggaaagcagatagctc

SEQ ID NO: 4126677 - DNA, 25 bp, Homo sapien
cagacagcaatggcctctgtcatca

SEQ ID NO: 4126678 - DNA, 25 bp, Homo sapien
atcatgccttactgcattcatatag

SEQ ID NO: 4126679 - DNA, 25 bp, Homo sapien
agaaatctaaaatcatgccttactg

SEQ ID NO: 4126680 - DNA, 25 bp, Homo sapien
taaaatcatgccttactgcattcat

SEQ ID NO: 4126681 - DNA, 25 bp, Homo sapien
gccttactgcattcatatagcaatt

SEQ ID NO: 4126682 - DNA, 25 bp, Homo sapien
tttttactatagatgctactagcaa

SEQ ID NO: 4126683 - DNA, 25 bp, Homo sapien
attttttactatagatgctactagc

SEQ ID NO: 4126684 - DNA, 25 bp, Homo sapien
ttttttactatagatgctactagca

SEQ ID NO: 4126685 - DNA, 25 bp, Homo sapien
agtaaggcggacatagggctccagc

SEQ ID NO: 4126686 - DNA, 25 bp, Homo sapien
catgggagtcgaggtcaataaagcc

SEQ ID NO: 4126687 - DNA, 25 bp, Homo sapien
tgttcttgatgatacggacgttggc

SEQ ID NO: 4126688 - DNA, 25 bp, Homo sapien
gaacgatagatacgctttagcatga

SEQ ID NO: 4126689 - DNA, 25 bp, Homo sapien
taggccaatccaaggtggaggaaac

SEQ ID NO: 4126690 - DNA, 25 bp, Homo sapien
tgtctctaggccaatccaaggtgga

SEQ ID NO: 4126691 - DNA, 25 bp, Homo sapien
ccaatccaaggtggaggaaactcac

SEQ ID NO: 4126692 - DNA, 25 bp, Homo sapien
ttagccatctgtctctaggccaatc

SEQ ID NO: 4126693 - DNA, 25 bp, Homo sapien
tagaaccagacacacttgaacccag

SEQ ID NO: 4126694 - DNA, 25 bp, Homo sapien
tgaacccagagacagaaaatgccag

SEQ ID NO: 4126695 - DNA, 25 bp, Homo sapien
tgtcagttctggcataaacttcaga

SEQ ID NO: 4126696 - DNA, 25 bp, Homo sapien
taagagcatactggcagaaacaggc

SEQ ID NO: 4126697 - DNA, 25 bp, Homo sapien
cggatcaaggttctgtaagatcttc

SEQ ID NO: 4126698 - DNA, 25 bp, Homo sapien
gccaggtttacagctaccatcttcc

SEQ ID NO: 4126699 - DNA, 25 bp, Homo sapien
tgtaagatcttcaccacacgaagag

SEQ ID NO: 4126700 - DNA, 25 bp, Homo sapien
tcttcccatcaatgctaaatggcgg

SEQ ID NO: 4126701 - DNA, 25 bp, Homo sapien
caaaaacacaagtgggggcagcaca

SEQ ID NO: 4126702 - DNA, 25 bp, Homo sapien
gggcagcacaagagatcctcaccct

SEQ ID NO: 4126703 - DNA, 25 bp, Homo sapien
ctcaaaaacacaagtgggggcagca

SEQ ID NO: 4126704 - DNA, 25 bp, Homo sapien
gggggcagcacaagagatcctcacc

SEQ ID NO: 4126705 - DNA, 25 bp, Homo sapien
ccattaagtggagggtgctagagca

SEQ ID NO: 4126706 - DNA, 25 bp, Homo sapien
gatatgccccatattggtaagcctg

SEQ ID NO: 4126707 - DNA, 25 bp, Homo sapien
gccaagtggtggagcaaaacagcca

SEQ ID NO: 4126708 - DNA, 25 bp, Homo sapien
ggaatagagatatgtgctaccacgc

SEQ ID NO: 4126709 - DNA, 25 bp, Homo sapien
agcaggttgggtggtccagacactc

SEQ ID NO: 4126710 - DNA, 25 bp, Homo sapien
agcaagcaggttgggtggtccagac

SEQ ID NO: 4126711 - DNA, 25 bp, Homo sapien
ctagacagcaagcaggttgggtggt

SEQ ID NO: 4126712 - DNA, 25 bp, Homo sapien
tagacagcaagcaggttgggtggtc

SEQ ID NO: 4126713 - DNA, 25 bp, Homo sapien
tagtaatgcatgtggtcagaatggt

SEQ ID NO: 4126714 - DNA, 25 bp, Homo sapien
ctgatagtaatgcatgtggtcagaa

SEQ ID NO: 4126715 - DNA, 25 bp, Homo sapien
atgcatgtggtcagaatggtcccca

SEQ ID NO: 4126716 - DNA, 25 bp, Homo sapien
aatgcatgtggtcagaatggtcccc

SEQ ID NO: 4126717 - DNA, 25 bp, Homo sapien
gccacctcccctcctatctcggaaa

SEQ ID NO: 4126718 - DNA, 25 bp, Homo sapien
gtccttgtcgatttgtatctgaaga

SEQ ID NO: 4126719 - DNA, 25 bp, Homo sapien
tgtccttgtcgatttgtatctgaag

SEQ ID NO: 4126720 - DNA, 25 bp, Homo sapien
ctcccctcctatctcggaaatattt

SEQ ID NO: 4126721 - DNA, 25 bp, Homo sapien
aaggtaacaagatcagagccaatgt

SEQ ID NO: 4126722 - DNA, 25 bp, Homo sapien
ctaaaggtaacaagatcagagccaa

SEQ ID NO: 4126723 - DNA, 25 bp, Homo sapien
ggtaacaagatcagagccaatgtta

SEQ ID NO: 4126724 - DNA, 25 bp, Homo sapien
taacaagatcagagccaatgttagt

SEQ ID NO: 4126725 - DNA, 25 bp, Homo sapien
gtcataatagtagccagtagcagaa

SEQ ID NO: 4126726 - DNA, 25 bp, Homo sapien
gaatcatatatgtagcagtcagatg

SEQ ID NO: 4126727 - DNA, 25 bp, Homo sapien
tattggggtcataataagttcctgc

SEQ ID NO: 4126728 - DNA, 25 bp, Homo sapien
taagttcctgccaaggggtcataat

SEQ ID NO: 4126729 - DNA, 25 bp, Homo sapien
catgcaatgagcatccagagaatcc

SEQ ID NO: 4126730 - DNA, 25 bp, Homo sapien
gtttcagtttcccagcaattccagg

SEQ ID NO: 4126731 - DNA, 25 bp, Homo sapien
tcttacctgtattgccacaaggcac

SEQ ID NO: 4126732 - DNA, 25 bp, Homo sapien
caattccaggtctaaggcgcacagt

SEQ ID NO: 4126733 - DNA, 25 bp, Homo sapien
ttcctcaggtaatccaggatcctgg

SEQ ID NO: 4126734 - DNA, 25 bp, Homo sapien
tcttcctcaggtaatccaggatcct

SEQ ID NO: 4126735 - DNA, 25 bp, Homo sapien
cttcttcctcaggtaatccaggatc

SEQ ID NO: 4126736 - DNA, 25 bp, Homo sapien
tcctcaggtaatccaggatcctggg

SEQ ID NO: 4126737 - DNA, 25 bp, Homo sapien
tctccttgccatctcttttagacat

SEQ ID NO: 4126738 - DNA, 25 bp, Homo sapien
ccttgccatctcttttagacatttc

SEQ ID NO: 4126739 - DNA, 25 bp, Homo sapien
tttctccttgccatctcttttagac

SEQ ID NO: 4126740 - DNA, 25 bp, Homo sapien
tccttgccatctcttttagacattt

SEQ ID NO: 4126741 - DNA, 25 bp, Homo sapien
cacttgcaaacatagatatcctctg

SEQ ID NO: 4126742 - DNA, 25 bp, Homo sapien
gatatcctctgttcgtacctccaac

SEQ ID NO: 4126743 - DNA, 25 bp, Homo sapien
ttaataactatgtggcaaaagacag

SEQ ID NO: 4126744 - DNA, 25 bp, Homo sapien
tgttcgtacctccaacattttaata

SEQ ID NO: 4126745 - DNA, 25 bp, Homo sapien
cagtataagattagaaagaggcgag

SEQ ID NO: 4126746 - DNA, 25 bp, Homo sapien
aaagaggcgagcaaggtgggtcttg

SEQ ID NO: 4126747 - DNA, 25 bp, Homo sapien
tcatagggagtaatttaaaagaaga

SEQ ID NO: 4126748 - DNA, 25 bp, Homo sapien
tgaaaatgtgtcatagggagtaatt

SEQ ID NO: 4126749 - DNA, 25 bp, Homo sapien
caggggcttcttaaagacgtcttct

SEQ ID NO: 4126750 - DNA, 25 bp, Homo sapien
gcaggggcttcttaaagacgtcttc

SEQ ID NO: 4126751 - DNA, 25 bp, Homo sapien
gcttcttaaagacgtcttctgcagg

SEQ ID NO: 4126752 - DNA, 25 bp, Homo sapien
tccatattcacccaagaggccgatc

SEQ ID NO: 4126753 - DNA, 25 bp, Homo sapien
gacagctgctggtgtttgatcagaa

SEQ ID NO: 4126754 - DNA, 25 bp, Homo sapien
ccagtcagtgagtttgtcttcttca

SEQ ID NO: 4126755 - DNA, 25 bp, Homo sapien
gccgatcagtgggtttaccacttta

SEQ ID NO: 4126756 - DNA, 25 bp, Homo sapien
tcatataaatgggaatactacaggg

SEQ ID NO: 4126757 - DNA, 25 bp, Homo sapien
caatgtatgtcggtttaacatccca

SEQ ID NO: 4126758 - DNA, 25 bp, Homo sapien
gaaatttcaatgtgtcagtctgaca

SEQ ID NO: 4126759 - DNA, 25 bp, Homo sapien
tagtctgttccagggattatcagga

SEQ ID NO: 4126760 - DNA, 25 bp, Homo sapien
cccagggttccaagagactgctctg

SEQ ID NO: 4126761 - DNA, 25 bp, Homo sapien
gagagttgcaaattcctcacgcatg

SEQ ID NO: 4126762 - DNA, 25 bp, Homo sapien
gaagtggtggttctttgtagcagac

SEQ ID NO: 4126763 - DNA, 25 bp, Homo sapien
tcacgcatggctctactacacaagc

SEQ ID NO: 4126764 - DNA, 25 bp, Homo sapien
tgtgggcacaccagtgaagaaaacc

SEQ ID NO: 4126765 - DNA, 25 bp, Homo sapien
taagttgaaaatcatgggacagagg

SEQ ID NO: 4126766 - DNA, 25 bp, Homo sapien
aatccctaactggtcttgtcatgca

SEQ ID NO: 4126767 - DNA, 25 bp, Homo sapien
tataggtctaagaaacaatggtcct

SEQ ID NO: 4126768 - DNA, 25 bp, Homo sapien
gataggctagctcctgctcagactg

SEQ ID NO: 4126769 - DNA, 25 bp, Homo sapien
gctcagactgttttatcttccggtg

SEQ ID NO: 4126770 - DNA, 25 bp, Homo sapien
tcctttccagataggctagctcctg

SEQ ID NO: 4126771 - DNA, 25 bp, Homo sapien
cagactgttttatcttccggtggat

SEQ ID NO: 4126772 - DNA, 25 bp, Homo sapien
gtagctcacttggtaactcctggaa

SEQ ID NO: 4126773 - DNA, 25 bp, Homo sapien
aataagttggcacgcttggttccgc

SEQ ID NO: 4126774 - DNA, 25 bp, Homo sapien
tctctaacagtcctccataggtgga

SEQ ID NO: 4126775 - DNA, 25 bp, Homo sapien
cttataaggagggatcagcacagcc

SEQ ID NO: 4126776 - DNA, 25 bp, Homo sapien
agtcaaaagactggagcttttccct

SEQ ID NO: 4126777 - DNA, 25 bp, Homo sapien
gagtcaaaagactggagcttttccc

SEQ ID NO: 4126778 - DNA, 25 bp, Homo sapien
tgtcgatatcttctttatcaacaag

SEQ ID NO: 4126779 - DNA, 25 bp, Homo sapien
agtagcctgttggacacagcctcct

SEQ ID NO: 4126780 - DNA, 25 bp, Homo sapien
gcctcctttgctgctagtgtcgata

SEQ ID NO: 4126781 - DNA, 25 bp, Homo sapien
gccagtagcctgttggacacagcct

SEQ ID NO: 4126782 - DNA, 25 bp, Homo sapien
cggtaagtctcgttggactgtcttt

SEQ ID NO: 4126783 - DNA, 25 bp, Homo sapien
gactcttcgaacagcatctcggtaa

SEQ ID NO: 4126784 - DNA, 25 bp, Homo sapien
cagcatctcggtaagtctcgttgga

SEQ ID NO: 4126785 - DNA, 25 bp, Homo sapien
tatatcgagcaaacatgactcttcg

SEQ ID NO: 4126786 - DNA, 25 bp, Homo sapien
aaagttctagcagcaagaacagtaa

SEQ ID NO: 4126787 - DNA, 25 bp, Homo sapien
gttgtatcccatggaacttgtctcc

SEQ ID NO: 4126788 - DNA, 25 bp, Homo sapien
aaacaagagggaggttgtatcccat

SEQ ID NO: 4126789 - DNA, 25 bp, Homo sapien
ttaaaaaagttctagcagcaagaac

SEQ ID NO: 4126790 - DNA, 25 bp, Homo sapien
cagaacctccaacaaggttcggcgg

SEQ ID NO: 4126791 - DNA, 25 bp, Homo sapien
cccaaggagagaccgaagcagcagt

SEQ ID NO: 4126792 - DNA, 25 bp, Homo sapien
cagtagcggttctgcgccccagaac

SEQ ID NO: 4126793 - DNA, 25 bp, Homo sapien
ggttcggcggctacacaaaatggcg

SEQ ID NO: 4126794 - DNA, 25 bp, Homo sapien
tcccactgaagatttagcacacagc

SEQ ID NO: 4126795 - DNA, 25 bp, Homo sapien
cccactgaagatttagcacacagct

SEQ ID NO: 4126796 - DNA, 25 bp, Homo sapien
cactgaagatttagcacacagctcc

SEQ ID NO: 4126797 - DNA, 25 bp, Homo sapien
ccactgaagatttagcacacagctc

SEQ ID NO: 4126798 - DNA, 25 bp, Homo sapien
cattcattgattgcttaccacagcc

SEQ ID NO: 4126799 - DNA, 25 bp, Homo sapien
tttcttcatgtaacacacagtccca

SEQ ID NO: 4126800 - DNA, 25 bp, Homo sapien
ctggatcatcttgctattcagggaa

SEQ ID NO: 4126801 - DNA, 25 bp, Homo sapien
taattttccactaattctttggctc

SEQ ID NO: 4126802 - DNA, 25 bp, Homo sapien
tggactgtcatagtctcggtagtca

SEQ ID NO: 4126803 - DNA, 25 bp, Homo sapien
cacggtcatccctgtctatgatgga

SEQ ID NO: 4126804 - DNA, 25 bp, Homo sapien
tcgggattcacgctcatcacggtca

SEQ ID NO: 4126805 - DNA, 25 bp, Homo sapien
ttgtaatctgagtccctccgcctgc

SEQ ID NO: 4126806 - DNA, 25 bp, Homo sapien
tgggtgacaagactaaaaagctgtc

SEQ ID NO: 4126807 - DNA, 25 bp, Homo sapien
gggtgacaagactaaaaagctgtct

SEQ ID NO: 4126808 - DNA, 25 bp, Homo sapien
tctccctctcgtcactgatgtcatg

SEQ ID NO: 4126809 - DNA, 25 bp, Homo sapien
tagccatcttcggatcggtcactgt

SEQ ID NO: 4126810 - DNA, 25 bp, Homo sapien
gatgtcatgcctatagtcgtgctca

SEQ ID NO: 4126811 - DNA, 25 bp, Homo sapien
gaaggccgcgcagcatgatggtctt

SEQ ID NO: 4126812 - DNA, 25 bp, Homo sapien
tgactgctggttataactgtcattt

SEQ ID NO: 4126813 - DNA, 25 bp, Homo sapien
aataatggtagaagctcaaagttca

SEQ ID NO: 4126814 - DNA, 25 bp, Homo sapien
aatggtagaagctcaaagttcattg

SEQ ID NO: 4126815 - DNA, 25 bp, Homo sapien
atggtagaagctcaaagttcattgt

SEQ ID NO: 4126816 - DNA, 25 bp, Homo sapien
taatggtagaagctcaaagttcatt

SEQ ID NO: 4126817 - DNA, 25 bp, Homo sapien
gaagctctgcccgatagatcaggct

SEQ ID NO: 4126818 - DNA, 25 bp, Homo sapien
tacactaagactctaattggccagt

SEQ ID NO: 4126819 - DNA, 25 bp, Homo sapien
ggctttacatacaggcgtctccaag

SEQ ID NO: 4126820 - DNA, 25 bp, Homo sapien
gaatgagccgtcctttttaacaagc

SEQ ID NO: 4126821 - DNA, 25 bp, Homo sapien
tagcatctaacatgtacagtgtagc

SEQ ID NO: 4126822 - DNA, 25 bp, Homo sapien
tgagttaccatactcggcctctgac

SEQ ID NO: 4126823 - DNA, 25 bp, Homo sapien
aacccaaagctacgggaatccaatg

SEQ ID NO: 4126824 - DNA, 25 bp, Homo sapien
gatccatagctctgtgtcactgtag

SEQ ID NO: 4126825 - DNA, 25 bp, Homo sapien
agagctcttaggcagacctctttca

SEQ ID NO: 4126826 - DNA, 25 bp, Homo sapien
ttcaagagctcttaggcagacctct

SEQ ID NO: 4126827 - DNA, 25 bp, Homo sapien
taaccttcaagagctcttaggcaga

SEQ ID NO: 4126828 - DNA, 25 bp, Homo sapien
ccttcaagagctcttaggcagacct

SEQ ID NO: 4126829 - DNA, 25 bp, Homo sapien
ggtctccatctcttgggctcaggta

SEQ ID NO: 4126830 - DNA, 25 bp, Homo sapien
catctcttgggctcaggtaatccac

SEQ ID NO: 4126831 - DNA, 25 bp, Homo sapien
agccaccgcaccaggccaggtaaac

SEQ ID NO: 4126832 - DNA, 25 bp, Homo sapien
gccaccgcaccaggccaggtaaaca

SEQ ID NO: 4126833 - DNA, 25 bp, Homo sapien
taaaagaggcagtggatgcgtcact

SEQ ID NO: 4126834 - DNA, 25 bp, Homo sapien
tacaatgggctattgcaccactgca

SEQ ID NO: 4126835 - DNA, 25 bp, Homo sapien
tacccaagcatgatggtatacacct

SEQ ID NO: 4126836 - DNA, 25 bp, Homo sapien
cactgtgccctgaagtacgcctaat

SEQ ID NO: 4126837 - DNA, 25 bp, Homo sapien
ttctgcaggatagtacagtggctca

SEQ ID NO: 4126838 - DNA, 25 bp, Homo sapien
aatgcctggccgcaattaatttctg

SEQ ID NO: 4126839 - DNA, 25 bp, Homo sapien
gcaagatgagcgcttgagcacagga

SEQ ID NO: 4126840 - DNA, 25 bp, Homo sapien
tccttgcttgtggtatgatgtctca

SEQ ID NO: 4126841 - DNA, 25 bp, Homo sapien
tgccagcctcccatatcattacatg

SEQ ID NO: 4126842 - DNA, 25 bp, Homo sapien
aaattaatgcattataacagcactg

SEQ ID NO: 4126843 - DNA, 25 bp, Homo sapien
tatcttctatcaccaaaatgcaatt

SEQ ID NO: 4126844 - DNA, 25 bp, Homo sapien
taaatgttgcatgggaatttccctc

SEQ ID NO: 4126845 - DNA, 25 bp, Homo sapien
agcttttgccacacactattcccca

SEQ ID NO: 4126846 - DNA, 25 bp, Homo sapien
aagcttttgccacacactattcccc

SEQ ID NO: 4126847 - DNA, 25 bp, Homo sapien
gctgagggccttcgaaggactccat

SEQ ID NO: 4126848 - DNA, 25 bp, Homo sapien
tccgcaggctgagggccttcgaagg

SEQ ID NO: 4126849 - DNA, 25 bp, Homo sapien
ttcatcagcctcacatccgcaggct

SEQ ID NO: 4126850 - DNA, 25 bp, Homo sapien
atcagcctcacatccgcaggctgag

SEQ ID NO: 4126851 - DNA, 25 bp, Homo sapien
tcaggatgttctttagggactgagg

SEQ ID NO: 4126852 - DNA, 25 bp, Homo sapien
caagccgcctgaactaaatgccact

SEQ ID NO: 4126853 - DNA, 25 bp, Homo sapien
gtaaccatgcaaccgactatagtca

SEQ ID NO: 4126854 - DNA, 25 bp, Homo sapien
gattccacgcttaaagtaaccatgc

SEQ ID NO: 4126855 - DNA, 25 bp, Homo sapien
gccaattgggaagcagctttacaaa

SEQ ID NO: 4126856 - DNA, 25 bp, Homo sapien
ataacaggtgaatctctctcccact

SEQ ID NO: 4126857 - DNA, 25 bp, Homo sapien
tgcttcaacactgcgtgacaaagcc

SEQ ID NO: 4126858 - DNA, 25 bp, Homo sapien
ttgtgttagtcagttcctttataac

SEQ ID NO: 4126859 - DNA, 25 bp, Homo sapien
gacagcattcagatatagacgggat

SEQ ID NO: 4126860 - DNA, 25 bp, Homo sapien
cagcattcagatatagacgggatac

SEQ ID NO: 4126861 - DNA, 25 bp, Homo sapien
ctagagacagcattcagatatagac

SEQ ID NO: 4126862 - DNA, 25 bp, Homo sapien
gagacagcattcagatatagacggg

SEQ ID NO: 4126863 - DNA, 25 bp, Homo sapien
cacgaaggcgaaaccacggcttaca

SEQ ID NO: 4126864 - DNA, 25 bp, Homo sapien
gcaagtgataaaactccacgaaggc

SEQ ID NO: 4126865 - DNA, 25 bp, Homo sapien
ttgcaagtgataaaactccacgaag

SEQ ID NO: 4126866 - DNA, 25 bp, Homo sapien
ctccacgaaggcgaaaccacggctt

SEQ ID NO: 4126867 - DNA, 25 bp, Homo sapien
tgaagaccggtctgagcagttacgc

SEQ ID NO: 4126868 - DNA, 25 bp, Homo sapien
tgaatagatcatcccactaggaggg

SEQ ID NO: 4126869 - DNA, 25 bp, Homo sapien
tagattagacagctgcaggacacca

SEQ ID NO: 4126870 - DNA, 25 bp, Homo sapien
tcaagagggactattctgaatgcca

SEQ ID NO: 4126871 - DNA, 25 bp, Homo sapien
cccatccttatgcaaagtaaaagcc

SEQ ID NO: 4126872 - DNA, 25 bp, Homo sapien
cccccatccttatgcaaagtaaaag

SEQ ID NO: 4126873 - DNA, 25 bp, Homo sapien
catccttatgcaaagtaaaagcctt

SEQ ID NO: 4126874 - DNA, 25 bp, Homo sapien
cagtcccccatccttatgcaaagta

SEQ ID NO: 4126875 - DNA, 25 bp, Homo sapien
ttttgcccttagcatggtgtccttg

SEQ ID NO: 4126876 - DNA, 25 bp, Homo sapien
ccagggcagagcacacttcggaaaa

SEQ ID NO: 4126877 - DNA, 25 bp, Homo sapien
actaaacgctgacttgcaccaggcc

SEQ ID NO: 4126878 - DNA, 25 bp, Homo sapien
tgcggagtaaaggtaaacggagtca

SEQ ID NO: 4126879 - DNA, 25 bp, Homo sapien
tctccagcggagacagaagtcctaa

SEQ ID NO: 4126880 - DNA, 25 bp, Homo sapien
taggtctgggattgctataatgcat

SEQ ID NO: 4126881 - DNA, 25 bp, Homo sapien
tgcattgcaatgtgctttccttgaa

SEQ ID NO: 4126882 - DNA, 25 bp, Homo sapien
gccaatcttcaaacttaggtctggg

SEQ ID NO: 4126883 - DNA, 25 bp, Homo sapien
gcaatgtgctttccttgaatcacca

SEQ ID NO: 4126884 - DNA, 25 bp, Homo sapien
ttttgtctatttgggaagaacatat

SEQ ID NO: 4126885 - DNA, 25 bp, Homo sapien
agttttgtctatttgggaagaacat

SEQ ID NO: 4126886 - DNA, 25 bp, Homo sapien
gagttttgtctatttgggaagaaca

SEQ ID NO: 4126887 - DNA, 25 bp, Homo sapien
gttttgtctatttgggaagaacata

SEQ ID NO: 4126888 - DNA, 25 bp, Homo sapien
cccattattatcaagccgaggaaag

SEQ ID NO: 4126889 - DNA, 25 bp, Homo sapien
tgaaaactctacagcaagccactgg

SEQ ID NO: 4126890 - DNA, 25 bp, Homo sapien
tatttctcacattaggccaggcttt

SEQ ID NO: 4126891 - DNA, 25 bp, Homo sapien
gagactacgccaaaaactgagagct

SEQ ID NO: 4126892 - DNA, 25 bp, Homo sapien
ccacatcggaagcattttagtcttt

SEQ ID NO: 4126893 - DNA, 25 bp, Homo sapien
tctgctccacatcggaagcatttta

SEQ ID NO: 4126894 - DNA, 25 bp, Homo sapien
ctccacatcggaagcattttagtct

SEQ ID NO: 4126895 - DNA, 25 bp, Homo sapien
cttgtctgctccacatcggaagcat

SEQ ID NO: 4126896 - DNA, 25 bp, Homo sapien
tgtgacttggttaacgcagaatgca

SEQ ID NO: 4126897 - DNA, 25 bp, Homo sapien
ctaaagaaaggcagatgcagaatgc

SEQ ID NO: 4126898 - DNA, 25 bp, Homo sapien
tgacactaccctgcactaaagaaag

SEQ ID NO: 4126899 - DNA, 25 bp, Homo sapien
catttgtgcctatagtaaaacctca

SEQ ID NO: 4126900 - DNA, 25 bp, Homo sapien
ccgactctgtggttccaggaggcac

SEQ ID NO: 4126901 - DNA, 25 bp, Homo sapien
cacagtagtaatccacagactgaac

SEQ ID NO: 4126902 - DNA, 25 bp, Homo sapien
tatcacagtagtaatccacagactg

SEQ ID NO: 4126903 - DNA, 25 bp, Homo sapien
acagactgaaccgactctgtggttc

SEQ ID NO: 4126904 - DNA, 25 bp, Homo sapien
ccatctcctgacaactgaggtcaat

SEQ ID NO: 4126905 - DNA, 25 bp, Homo sapien
tctcctgacaactgaggtcaatttt

SEQ ID NO: 4126906 - DNA, 25 bp, Homo sapien
accaaaagatcgtgtatgaacttac

SEQ ID NO: 4126907 - DNA, 25 bp, Homo sapien
tgaagaccaaaagatcgtgtatgaa

SEQ ID NO: 4126908 - DNA, 25 bp, Homo sapien
taaagacgcgtaaggagacagtgct

SEQ ID NO: 4126909 - DNA, 25 bp, Homo sapien
gaggacagctgcacaaatgcgaagc

SEQ ID NO: 4126910 - DNA, 25 bp, Homo sapien
tatgaggcggatgttattgacagct

SEQ ID NO: 4126911 - DNA, 25 bp, Homo sapien
aatgcgaagcctctgttctgctggg

SEQ ID NO: 4126912 - DNA, 25 bp, Homo sapien
tgcaaaatcaaccccaatagttttg

SEQ ID NO: 4126913 - DNA, 25 bp, Homo sapien
gcaaaatcaaccccaatagttttgc

SEQ ID NO: 4126914 - DNA, 25 bp, Homo sapien
gactctgtaatatctgaagcagctg

SEQ ID NO: 4126915 - DNA, 25 bp, Homo sapien
tctgtaatatctgaagcagctgaga

SEQ ID NO: 4126916 - DNA, 25 bp, Homo sapien
ggttaccatctgagaggaccaagtc

SEQ ID NO: 4126917 - DNA, 25 bp, Homo sapien
agcagcagcaatagccgtactagct

SEQ ID NO: 4126918 - DNA, 25 bp, Homo sapien
agaaagcgctgacgcggttaccatc

SEQ ID NO: 4126919 - DNA, 25 bp, Homo sapien
caatagccgtactagctacagagaa

SEQ ID NO: 4126920 - DNA, 25 bp, Homo sapien
catagccatcttgacctggttgcag

SEQ ID NO: 4126921 - DNA, 25 bp, Homo sapien
ttgggcatagccatcttgacctggt

SEQ ID NO: 4126922 - DNA, 25 bp, Homo sapien
gccatcttgacctggttgcagataa

SEQ ID NO: 4126923 - DNA, 25 bp, Homo sapien
gcatattgggcatagccatcttgac

SEQ ID NO: 4126924 - DNA, 25 bp, Homo sapien
agattccaatcctccagcttgttgt

SEQ ID NO: 4126925 - DNA, 25 bp, Homo sapien
gattccaatcctccagcttgttgtt

SEQ ID NO: 4126926 - DNA, 25 bp, Homo sapien
gcagatgatgcatcagattccaatc

SEQ ID NO: 4126927 - DNA, 25 bp, Homo sapien
gatgcatcagattccaatcctccag

SEQ ID NO: 4126928 - DNA, 25 bp, Homo sapien
ctacagccgctgaggtggtggtcac

SEQ ID NO: 4126929 - DNA, 25 bp, Homo sapien
tctgggacactacagccgctgaggt

SEQ ID NO: 4126930 - DNA, 25 bp, Homo sapien
gccaggtggattggaggtttgatta

SEQ ID NO: 4126931 - DNA, 25 bp, Homo sapien
tgaggactctgggacactacagccg

SEQ ID NO: 4126932 - DNA, 25 bp, Homo sapien
taagagagctaaatcactgcaatca

SEQ ID NO: 4126933 - DNA, 25 bp, Homo sapien
ggaggaagggctcccctgacagaca

SEQ ID NO: 4126934 - DNA, 25 bp, Homo sapien
aggcaatccctcagcaaaacacatg

SEQ ID NO: 4126935 - DNA, 25 bp, Homo sapien
gacacactgtagcaataatctaagg

SEQ ID NO: 4126936 - DNA, 25 bp, Homo sapien
caggaactacaccagtaggggaagc

SEQ ID NO: 4126937 - DNA, 25 bp, Homo sapien
gtgctagtgctaggctgtgcttcct

SEQ ID NO: 4126938 - DNA, 25 bp, Homo sapien
actacaccagtaggggaagcggctg

SEQ ID NO: 4126939 - DNA, 25 bp, Homo sapien
ggcctgtgtacttgtgctagtgcta

SEQ ID NO: 4126940 - DNA, 25 bp, Homo sapien
gccctgttgtcggatcatagtaata

SEQ ID NO: 4126941 - DNA, 25 bp, Homo sapien
gtaatatcctgaagattcatcatac

SEQ ID NO: 4126942 - DNA, 25 bp, Homo sapien
ggtcataatagagccctgttgtcgg

SEQ ID NO: 4126943 - DNA, 25 bp, Homo sapien
tcatactggtaagtggacgtgtcag

SEQ ID NO: 4126944 - DNA, 25 bp, Homo sapien
tagttactggaggagagtacagaat

SEQ ID NO: 4126945 - DNA, 25 bp, Homo sapien
ggtctttccataaattgtaacttga

SEQ ID NO: 4126946 - DNA, 25 bp, Homo sapien
tgttctgagattagacagtggtgac

SEQ ID NO: 4126947 - DNA, 25 bp, Homo sapien
taaaatttctagctaggtctttcca

SEQ ID NO: 4126948 - DNA, 25 bp, Homo sapien
gttctatatatacagctcccggtca

SEQ ID NO: 4126949 - DNA, 25 bp, Homo sapien
gacacaacttctaaggccaccaaag

SEQ ID NO: 4126950 - DNA, 25 bp, Homo sapien
ggcctgcttaggcacgtcacacaca

SEQ ID NO: 4126951 - DNA, 25 bp, Homo sapien
gaaaccacaacctatcaatgccaag

SEQ ID NO: 4126952 - DNA, 25 bp, Homo sapien
agtggcgcgacattcgcttactgcc

SEQ ID NO: 4126953 - DNA, 25 bp, Homo sapien
gcgcgacattcgcttactgccagct

SEQ ID NO: 4126954 - DNA, 25 bp, Homo sapien
tggcgcgacattcgcttactgccag

SEQ ID NO: 4126955 - DNA, 25 bp, Homo sapien
gtgcagtggcgcgacattcgcttac

SEQ ID NO: 4126956 - DNA, 25 bp, Homo sapien
gaagggacccaagctcagcaggaat

SEQ ID NO: 4126957 - DNA, 25 bp, Homo sapien
gaggtgtcacatatcctctcctcta

SEQ ID NO: 4126958 - DNA, 25 bp, Homo sapien
ttttccagtcgctcactctatctgc

SEQ ID NO: 4126959 - DNA, 25 bp, Homo sapien
gggtgtaaacactagcacagagctg

SEQ ID NO: 4126960 - DNA, 25 bp, Homo sapien
gtgggcgtgtcatggagttcagaca

SEQ ID NO: 4126961 - DNA, 25 bp, Homo sapien
atgacaacagctcatcattgggccc

SEQ ID NO: 4126962 - DNA, 25 bp, Homo sapien
ggagttcagacatctgccatgacaa

SEQ ID NO: 4126963 - DNA, 25 bp, Homo sapien
tagaatccattggataccaggcaac

SEQ ID NO: 4126964 - DNA, 25 bp, Homo sapien
gagggcacccaaagagcaatttgtc

SEQ ID NO: 4126965 - DNA, 25 bp, Homo sapien
cactctgttccacagactatttaca

SEQ ID NO: 4126966 - DNA, 25 bp, Homo sapien
taatccctgggcctacctagagggc

SEQ ID NO: 4126967 - DNA, 25 bp, Homo sapien
tgttccacagactatttacataaac

SEQ ID NO: 4126968 - DNA, 25 bp, Homo sapien
tggactagtgatatttcctgcccag

SEQ ID NO: 4126969 - DNA, 25 bp, Homo sapien
tgggcacaccttggtataagtaaag

SEQ ID NO: 4126970 - DNA, 25 bp, Homo sapien
gtcagtcgattacatattttgtcaa

SEQ ID NO: 4126971 - DNA, 25 bp, Homo sapien
tgatgaaccacctagcaaagaggtg

SEQ ID NO: 4126972 - DNA, 25 bp, Homo sapien
agtaaaggtactgctgggtcaagga

SEQ ID NO: 4126973 - DNA, 25 bp, Homo sapien
ctgcagctggcacgtaggtctcttt

SEQ ID NO: 4126974 - DNA, 25 bp, Homo sapien
gctgggtcaaggaattatagtagta

SEQ ID NO: 4126975 - DNA, 25 bp, Homo sapien
actgctggtgggagctagactctgc

SEQ ID NO: 4126976 - DNA, 25 bp, Homo sapien
ctttctgcttattcaaactcttagc

SEQ ID NO: 4126977 - DNA, 25 bp, Homo sapien
tcttccctcaaggaattgacaggct

SEQ ID NO: 4126978 - DNA, 25 bp, Homo sapien
gctgcagcagattctctcctttctt

SEQ ID NO: 4126979 - DNA, 25 bp, Homo sapien
gagagcaaagccagcgtctgctgca

SEQ ID NO: 4126980 - DNA, 25 bp, Homo sapien
catcatgacatactggccattcctg

SEQ ID NO: 4126981 - DNA, 25 bp, Homo sapien
tttaggtaagttcccatcatgacat

SEQ ID NO: 4126982 - DNA, 25 bp, Homo sapien
cagaggacaagccatgagactcaag

SEQ ID NO: 4126983 - DNA, 25 bp, Homo sapien
gccatgagactcaagttttaggtaa

SEQ ID NO: 4126984 - DNA, 25 bp, Homo sapien
cctcatctccatttcgcaccaattc

SEQ ID NO: 4126985 - DNA, 25 bp, Homo sapien
atctccatttcgcaccaattctggg

SEQ ID NO: 4126986 - DNA, 25 bp, Homo sapien
tcatctccatttcgcaccaattctg

SEQ ID NO: 4126987 - DNA, 25 bp, Homo sapien
catctccatttcgcaccaattctgg

SEQ ID NO: 4126988 - DNA, 25 bp, Homo sapien
tgagtgactattttcaaaccactga

SEQ ID NO: 4126989 - DNA, 25 bp, Homo sapien
tggtatgatccccaaaaagtgcagt

SEQ ID NO: 4126990 - DNA, 25 bp, Homo sapien
agtgactattttcaaaccactgacc

SEQ ID NO: 4126991 - DNA, 25 bp, Homo sapien
atggtatgatccccaaaaagtgcag

SEQ ID NO: 4126992 - DNA, 25 bp, Homo sapien
tacaataggaagatggcggtggcta

SEQ ID NO: 4126993 - DNA, 25 bp, Homo sapien
ctgcgtggagcagtcaggtccttga

SEQ ID NO: 4126994 - DNA, 25 bp, Homo sapien
tccttgagtgctaggcctgacagcc

SEQ ID NO: 4126995 - DNA, 25 bp, Homo sapien
gaatcacattttgtcaactgcgtgg

SEQ ID NO: 4126996 - DNA, 25 bp, Homo sapien
tctttgttcgggaactggcgccggc

SEQ ID NO: 4126997 - DNA, 25 bp, Homo sapien
tcactgtcaccactgtaagcagcaa

SEQ ID NO: 4126998 - DNA, 25 bp, Homo sapien
gctggtgcctgactagggcatcttt

SEQ ID NO: 4126999 - DNA, 25 bp, Homo sapien
agacaggccatcttcttccagtcag

SEQ ID NO: 4127000 - DNA, 25 bp, Homo sapien
cagatcagctcagaagcatggccac

SEQ ID NO: 4127001 - DNA, 25 bp, Homo sapien
ctcagatcagctcagaagcatggcc

SEQ ID NO: 4127002 - DNA, 25 bp, Homo sapien
cctcagatcagctcagaagcatggc

SEQ ID NO: 4127003 - DNA, 25 bp, Homo sapien
tcagatcagctcagaagcatggcca

SEQ ID NO: 4127004 - DNA, 25 bp, Homo sapien
tcagcctggatcgtcgatagatgtc

SEQ ID NO: 4127005 - DNA, 25 bp, Homo sapien
gctcagcctggatcgtcgatagatg

SEQ ID NO: 4127006 - DNA, 25 bp, Homo sapien
tcgctcagcctggatcgtcgataga

SEQ ID NO: 4127007 - DNA, 25 bp, Homo sapien
tgctcgctcagcctggatcgtcgat

SEQ ID NO: 4127008 - DNA, 25 bp, Homo sapien
gggatctggaactaaatgctacaaa

SEQ ID NO: 4127009 - DNA, 25 bp, Homo sapien
gaggctgggtctaggctacatgaac

SEQ ID NO: 4127010 - DNA, 25 bp, Homo sapien
ctacaatggtcagatgacaagggta

SEQ ID NO: 4127011 - DNA, 25 bp, Homo sapien
gacaagggtatgacaaatcctccta

SEQ ID NO: 4127012 - DNA, 25 bp, Homo sapien
agccttaactacaaacacttcagaa

SEQ ID NO: 4127013 - DNA, 25 bp, Homo sapien
aaagccttaactacaaacacttcag

SEQ ID NO: 4127014 - DNA, 25 bp, Homo sapien
gggaggtggaaccatagatagtagg

SEQ ID NO: 4127015 - DNA, 25 bp, Homo sapien
aggtggaaccatagatagtagggca

SEQ ID NO: 4127016 - DNA, 25 bp, Homo sapien
cttccagagacctgttcagcagtcg

SEQ ID NO: 4127017 - DNA, 25 bp, Homo sapien
gcttccagagacctgttcagcagtc

SEQ ID NO: 4127018 - DNA, 25 bp, Homo sapien
caacctgtaaccgtctaatgcacct

SEQ ID NO: 4127019 - DNA, 25 bp, Homo sapien
tcacagacttcaacctgtaaccgtc

SEQ ID NO: 4127020 - DNA, 25 bp, Homo sapien
gacttcaacctgtaaccgtctaatg

SEQ ID NO: 4127021 - DNA, 25 bp, Homo sapien
taaccgtctaatgcacctattcaaa

SEQ ID NO: 4127022 - DNA, 25 bp, Homo sapien
tggaatgccgtacttctcccgtctt

SEQ ID NO: 4127023 - DNA, 25 bp, Homo sapien
acagtgccggcatcaaactgcttct

SEQ ID NO: 4127024 - DNA, 25 bp, Homo sapien
ctgcttcttgcgcttgggctctgga

SEQ ID NO: 4127025 - DNA, 25 bp, Homo sapien
tctgcagctcggtctcggtatttca

SEQ ID NO: 4127026 - DNA, 25 bp, Homo sapien
taaaacagccagggccccagcttac

SEQ ID NO: 4127027 - DNA, 25 bp, Homo sapien
cttaaaacagccagggccccagctt

SEQ ID NO: 4127028 - DNA, 25 bp, Homo sapien
ttaaaacagccagggccccagctta

SEQ ID NO: 4127029 - DNA, 25 bp, Homo sapien
tcaatgggagccgtaatgccttgac

SEQ ID NO: 4127030 - DNA, 25 bp, Homo sapien
aatgccttgacactttcgtcccaag

SEQ ID NO: 4127031 - DNA, 25 bp, Homo sapien
catctttggtgggttgctcgtaatt

SEQ ID NO: 4127032 - DNA, 25 bp, Homo sapien
catcttgttgccaatgttactgtgg

SEQ ID NO: 4127033 - DNA, 25 bp, Homo sapien
taaaatgggctacggaacacaggca

SEQ ID NO: 4127034 - DNA, 25 bp, Homo sapien
tgatctcatctctggaaccggcctg

SEQ ID NO: 4127035 - DNA, 25 bp, Homo sapien
tacaagagtctgacctaagctgtgc

SEQ ID NO: 4127036 - DNA, 25 bp, Homo sapien
taagcctggcaaacatcaagacctg

SEQ ID NO: 4127037 - DNA, 25 bp, Homo sapien
gggcaaacatggctttccggacagc

SEQ ID NO: 4127038 - DNA, 25 bp, Homo sapien
aaaccatatgcgctgcctttggctc

SEQ ID NO: 4127039 - DNA, 25 bp, Homo sapien
gccagctccctttagccgaacttga

SEQ ID NO: 4127040 - DNA, 25 bp, Homo sapien
catctttgtaggaatcggcgcccga

SEQ ID NO: 4127041 - DNA, 25 bp, Homo sapien
cagcgaattcgggagatggaccact

SEQ ID NO: 4127042 - DNA, 25 bp, Homo sapien
gcatgcccttaaagagacaggcggt

SEQ ID NO: 4127043 - DNA, 25 bp, Homo sapien
attcaccaggcaacccacataaggg

SEQ ID NO: 4127044 - DNA, 25 bp, Homo sapien
gctgatggaccacaacataggctac

SEQ ID NO: 4127045 - DNA, 25 bp, Homo sapien
ataggaaaggccacgctggtgttga

SEQ ID NO: 4127046 - DNA, 25 bp, Homo sapien
ttgacaacagatgccgtggtccaca

SEQ ID NO: 4127047 - DNA, 25 bp, Homo sapien
gaaaggccacgctggtgttgacaac

SEQ ID NO: 4127048 - DNA, 25 bp, Homo sapien
tggtgttgacaacagatgccgtggt

SEQ ID NO: 4127049 - DNA, 25 bp, Homo sapien
tcacagcatctcaacatcacacagg

SEQ ID NO: 4127050 - DNA, 25 bp, Homo sapien
tgagaggattgcactactctcacag

SEQ ID NO: 4127051 - DNA, 25 bp, Homo sapien
ggattgcactactctcacagcatct

SEQ ID NO: 4127052 - DNA, 25 bp, Homo sapien
cacagcatctcaacatcacacagga

SEQ ID NO: 4127053 - DNA, 25 bp, Homo sapien
tggaggctccttctagttcagtaag

SEQ ID NO: 4127054 - DNA, 25 bp, Homo sapien
tcaaagccttgcacgttgtagcagc

SEQ ID NO: 4127055 - DNA, 25 bp, Homo sapien
taagagcaccgttcaaattcaagat

SEQ ID NO: 4127056 - DNA, 25 bp, Homo sapien
caggccgggatgctcatctgggctt

SEQ ID NO: 4127057 - DNA, 25 bp, Homo sapien
gacaggatgcatctacctgcctgtc

SEQ ID NO: 4127058 - DNA, 25 bp, Homo sapien
agacaggatgcatctacctgcctgt

SEQ ID NO: 4127059 - DNA, 25 bp, Homo sapien
tgcagatgaggactgggcagtgcat

SEQ ID NO: 4127060 - DNA, 25 bp, Homo sapien
tgaggactgggcagtgcatggcatc

SEQ ID NO: 4127061 - DNA, 25 bp, Homo sapien
ggactgggcagtgcatggcatctgg

SEQ ID NO: 4127062 - DNA, 25 bp, Homo sapien
gcagtgcatggcatctggggctcca

SEQ ID NO: 4127063 - DNA, 25 bp, Homo sapien
aacaaatcatctggtctctgggaca

SEQ ID NO: 4127064 - DNA, 25 bp, Homo sapien
tcagagttacagcaatgctcagcgt

SEQ ID NO: 4127065 - DNA, 25 bp, Homo sapien
tgtagctatagggtcttggcccgtg

SEQ ID NO: 4127066 - DNA, 25 bp, Homo sapien
ggagaatccgactgctagagacaag

SEQ ID NO: 4127067 - DNA, 25 bp, Homo sapien
taagggcctggatgaccttattggg

SEQ ID NO: 4127068 - DNA, 25 bp, Homo sapien
cattgtgtacccatttaatagaggg

SEQ ID NO: 4127069 - DNA, 25 bp, Homo sapien
cgagaccttgaggagtaagggcctg

SEQ ID NO: 4127070 - DNA, 25 bp, Homo sapien
taggacccccttgaatgttggactg

SEQ ID NO: 4127071 - DNA, 25 bp, Homo sapien
ccttccgcgtccctcattcccactc

SEQ ID NO: 4127072 - DNA, 25 bp, Homo sapien
ctcattcccactcgccgccggccgt

SEQ ID NO: 4127073 - DNA, 25 bp, Homo sapien
cgtgcccctggtcccgtgcgtgggc

SEQ ID NO: 4127074 - DNA, 25 bp, Homo sapien
cggctggcaccgccggaccttcccg

SEQ ID NO: 4127075 - DNA, 25 bp, Homo sapien
cattcaactccctggcgagaagggc

SEQ ID NO: 4127076 - DNA, 25 bp, Homo sapien
actccctggcgagaagggctgcagc

SEQ ID NO: 4127077 - DNA, 25 bp, Homo sapien
cagggagcaacgagcctgcgctcac

SEQ ID NO: 4127078 - DNA, 25 bp, Homo sapien
ccgggcattcaactccctggcgaga

SEQ ID NO: 4127079 - DNA, 25 bp, Homo sapien
gccgcggttcgttcgctcgctctgg

SEQ ID NO: 4127080 - DNA, 25 bp, Homo sapien
ggttcgttcgctcgctctggtctcg

SEQ ID NO: 4127081 - DNA, 25 bp, Homo sapien
tcgttcgctcgctctggtctcgcgg

SEQ ID NO: 4127082 - DNA, 25 bp, Homo sapien
cggaccgccgcggttcgttcgctcg

SEQ ID NO: 4127083 - DNA, 25 bp, Homo sapien
ggcggcggcacggagcggctcccgt

SEQ ID NO: 4127084 - DNA, 25 bp, Homo sapien
ggcacggagcggctcccgttgggcc

SEQ ID NO: 4127085 - DNA, 25 bp, Homo sapien
tgggccggtccgcgctagcggcccc

SEQ ID NO: 4127086 - DNA, 25 bp, Homo sapien
cacggagcggctcccgttgggccgg

SEQ ID NO: 4127087 - DNA, 25 bp, Homo sapien
atccatacgccgccccgtaggtaag

SEQ ID NO: 4127088 - DNA, 25 bp, Homo sapien
tccaggacaggtaagaatcccaccc

SEQ ID NO: 4127089 - DNA, 25 bp, Homo sapien
gccttgttgcccctatgtccgcggg

SEQ ID NO: 4127090 - DNA, 25 bp, Homo sapien
cacttctgcggagttgcagtgccgc

SEQ ID NO: 4127091 - DNA, 25 bp, Homo sapien
cacttccgggcctggctccttcgga

SEQ ID NO: 4127092 - DNA, 25 bp, Homo sapien
cccacttccgggcctggctccttcg

SEQ ID NO: 4127093 - DNA, 25 bp, Homo sapien
acttccgggcctggctccttcggag

SEQ ID NO: 4127094 - DNA, 25 bp, Homo sapien
ctccccacttccgggcctggctcct

SEQ ID NO: 4127095 - DNA, 25 bp, Homo sapien
acaggtcttctcccagtacagagaa

SEQ ID NO: 4127096 - DNA, 25 bp, Homo sapien
cagagaaacctggacctgattatta

SEQ ID NO: 4127097 - DNA, 25 bp, Homo sapien
tctcccctgcatctgtggccaataa

SEQ ID NO: 4127098 - DNA, 25 bp, Homo sapien
ggaacagatagggtgcatccctgcc

SEQ ID NO: 4127099 - DNA, 25 bp, Homo sapien
gggcccaggaagcaggctccactct

SEQ ID NO: 4127100 - DNA, 25 bp, Homo sapien
tagggcccaggaagcaggctccact

SEQ ID NO: 4127101 - DNA, 25 bp, Homo sapien
agggcccaggaagcaggctccactc

SEQ ID NO: 4127102 - DNA, 25 bp, Homo sapien
ctagggcccaggaagcaggctccac

SEQ ID NO: 4127103 - DNA, 25 bp, Homo sapien
gatggccaggccccggtcagtaggg

SEQ ID NO: 4127104 - DNA, 25 bp, Homo sapien
gccaggccccggtcagtagggaagc

SEQ ID NO: 4127105 - DNA, 25 bp, Homo sapien
ccccggtcagtagggaagcccagag

SEQ ID NO: 4127106 - DNA, 25 bp, Homo sapien
cagagaagaagaccggcgacaagca

SEQ ID NO: 4127107 - DNA, 25 bp, Homo sapien
gaatgagagccggacccggggcgtg

SEQ ID NO: 4127108 - DNA, 25 bp, Homo sapien
ctttgaatgagagccggacccgggg

SEQ ID NO: 4127109 - DNA, 25 bp, Homo sapien
ttgaatgagagccggacccggggcg

SEQ ID NO: 4127110 - DNA, 25 bp, Homo sapien
atgagagccggacccggggcgtggc

SEQ ID NO: 4127111 - DNA, 25 bp, Homo sapien
gctttggattcagaccatagccttc

SEQ ID NO: 4127112 - DNA, 25 bp, Homo sapien
tttggattcagaccatagccttctg

SEQ ID NO: 4127113 - DNA, 25 bp, Homo sapien
tggattcagaccatagccttctggc

SEQ ID NO: 4127114 - DNA, 25 bp, Homo sapien
gattcagaccatagccttctggcat

SEQ ID NO: 4127115 - DNA, 25 bp, Homo sapien
ggtcatgtcctaaggccaatcccca

SEQ ID NO: 4127116 - DNA, 25 bp, Homo sapien
cctggtcatgtcctaaggccaatcc

SEQ ID NO: 4127117 - DNA, 25 bp, Homo sapien
gtcatgtcctaaggccaatccccac

SEQ ID NO: 4127118 - DNA, 25 bp, Homo sapien
tggtcatgtcctaaggccaatcccc

SEQ ID NO: 4127119 - DNA, 25 bp, Homo sapien
gccacgggatatggcgtcaatggct

SEQ ID NO: 4127120 - DNA, 25 bp, Homo sapien
gtcacaggacgtgacgctttggtca

SEQ ID NO: 4127121 - DNA, 25 bp, Homo sapien
aggtgactcgctccccgtggacagg

SEQ ID NO: 4127122 - DNA, 25 bp, Homo sapien
aatggctctggtgtcacaggacgtg

SEQ ID NO: 4127123 - DNA, 25 bp, Homo sapien
acctgtcccgcacctgttgttgggc

SEQ ID NO: 4127124 - DNA, 25 bp, Homo sapien
ggccgctcacccgcctggctgctca

SEQ ID NO: 4127125 - DNA, 25 bp, Homo sapien
tgttgttgggccactcggagtcccc

SEQ ID NO: 4127126 - DNA, 25 bp, Homo sapien
ctggccgctcacccgcctggctgct

SEQ ID NO: 4127127 - DNA, 25 bp, Homo sapien
cagggacgccgagggatcaaagggc

SEQ ID NO: 4127128 - DNA, 25 bp, Homo sapien
ttggccaaccgctgggacgcaggga

SEQ ID NO: 4127129 - DNA, 25 bp, Homo sapien
aaagggccgatcctgcctggcgatg

SEQ ID NO: 4127130 - DNA, 25 bp, Homo sapien
gccgagggatcaaagggccgatcct

SEQ ID NO: 4127131 - DNA, 25 bp, Homo sapien
tggtgcacagcaaggtcctcacttg

SEQ ID NO: 4127132 - DNA, 25 bp, Homo sapien
ctggtgcacagcaaggtcctcactt

SEQ ID NO: 4127133 - DNA, 25 bp, Homo sapien
gtgcacagcaaggtcctcacttggt

SEQ ID NO: 4127134 - DNA, 25 bp, Homo sapien
ggtgcacagcaaggtcctcacttgg

SEQ ID NO: 4127135 - DNA, 25 bp, Homo sapien
gctgcccaccaggcagagggcacag

SEQ ID NO: 4127136 - DNA, 25 bp, Homo sapien
cctggctgcccaccaggcagagggc

SEQ ID NO: 4127137 - DNA, 25 bp, Homo sapien
ctggctgcccaccaggcagagggca

SEQ ID NO: 4127138 - DNA, 25 bp, Homo sapien
tggctgcccaccaggcagagggcac

SEQ ID NO: 4127139 - DNA, 25 bp, Homo sapien
cgtccttgagcaagattcggtagtc

SEQ ID NO: 4127140 - DNA, 25 bp, Homo sapien
atgcggtcgtggtcctcgtccttga

SEQ ID NO: 4127141 - DNA, 25 bp, Homo sapien
ttgctgcccacgtacatgcggtcgt

SEQ ID NO: 4127142 - DNA, 25 bp, Homo sapien
tcgcggttgatgtcgtgcaggtcca

SEQ ID NO: 4127143 - DNA, 25 bp, Homo sapien
acgtcccacatcagggccagccctt

SEQ ID NO: 4127144 - DNA, 25 bp, Homo sapien
cacgtcccacatcagggccagccct

SEQ ID NO: 4127145 - DNA, 25 bp, Homo sapien
gtcccacatcagggccagcccttac

SEQ ID NO: 4127146 - DNA, 25 bp, Homo sapien
cccacgtcccacatcagggccagcc

SEQ ID NO: 4127147 - DNA, 25 bp, Homo sapien
cacgcattcctcgatgcgctgtggg

SEQ ID NO: 4127148 - DNA, 25 bp, Homo sapien
tccttgcctgagagcacgcattcct

SEQ ID NO: 4127149 - DNA, 25 bp, Homo sapien
tgagagcacgcattcctcgatgcgc

SEQ ID NO: 4127150 - DNA, 25 bp, Homo sapien
tgcctgagagcacgcattcctcgat

SEQ ID NO: 4127151 - DNA, 25 bp, Homo sapien
gattcccccttcccacctgtggatc

SEQ ID NO: 4127152 - DNA, 25 bp, Homo sapien
tgtggattcccccttcccacctgtg

SEQ ID NO: 4127153 - DNA, 25 bp, Homo sapien
cctgtggattcccccttcccacctg

SEQ ID NO: 4127154 - DNA, 25 bp, Homo sapien
tcccccttcccacctgtggatccca

SEQ ID NO: 4127155 - DNA, 25 bp, Homo sapien
gggttgtaggcacctgtcccgcaca

SEQ ID NO: 4127156 - DNA, 25 bp, Homo sapien
tacaggtgtgttcggttccagggct

SEQ ID NO: 4127157 - DNA, 25 bp, Homo sapien
ggatgagcctgacgaagttcccaca

SEQ ID NO: 4127158 - DNA, 25 bp, Homo sapien
ggcgtccgcggttcacataggtgca

SEQ ID NO: 4127159 - DNA, 25 bp, Homo sapien
gggcatcgggcggagggcaccatcc

SEQ ID NO: 4127160 - DNA, 25 bp, Homo sapien
tgccgcggcctctgaccgcctgagt

SEQ ID NO: 4127161 - DNA, 25 bp, Homo sapien
gcctctgaccgcctgagtctgggtc

SEQ ID NO: 4127162 - DNA, 25 bp, Homo sapien
ggcggagggcaccatccgtggctct

SEQ ID NO: 4127163 - DNA, 25 bp, Homo sapien
gggatcgtacggacacttgcccttc

SEQ ID NO: 4127164 - DNA, 25 bp, Homo sapien
gactcgagtcgctcaggctccaggt

SEQ ID NO: 4127165 - DNA, 25 bp, Homo sapien
tccagcttgggatcgtacggacact

SEQ ID NO: 4127166 - DNA, 25 bp, Homo sapien
tgatgagggccgatgctgtgtccag

SEQ ID NO: 4127167 - DNA, 25 bp, Homo sapien
gatgtacacaccagcatagagctcc

SEQ ID NO: 4127168 - DNA, 25 bp, Homo sapien
ggctgcatcagtgcccataaaatcg

SEQ ID NO: 4127169 - DNA, 25 bp, Homo sapien
tgatccgtgcgcatggctgtctgct

SEQ ID NO: 4127170 - DNA, 25 bp, Homo sapien
cagccaccgggagttgtactgatcc

SEQ ID NO: 4127171 - DNA, 25 bp, Homo sapien
tcatcattgcgctccgcactgtcag

SEQ ID NO: 4127172 - DNA, 25 bp, Homo sapien
tgccgaccgctcacggaagaagaag

SEQ ID NO: 4127173 - DNA, 25 bp, Homo sapien
gaagtaaagcttatcatcattgcgc

SEQ ID NO: 4127174 - DNA, 25 bp, Homo sapien
caaatgcgcccgatgcgggcgtaca

SEQ ID NO: 4127175 - DNA, 25 bp, Homo sapien
gagctcatcaaagtgagtctcaatg

SEQ ID NO: 4127176 - DNA, 25 bp, Homo sapien
gggacagagcagacgagccgcgcct

SEQ ID NO: 4127177 - DNA, 25 bp, Homo sapien
ggcaacagtgaccaccgtcatcgtt

SEQ ID NO: 4127178 - DNA, 25 bp, Homo sapien
aatgccatcctcgcccgggacagag

SEQ ID NO: 4127179 - DNA, 25 bp, Homo sapien
taaagacagcgtaaatgacagggtt

SEQ ID NO: 4127180 - DNA, 25 bp, Homo sapien
cctgggtctgctggacaaacacgtc

SEQ ID NO: 4127181 - DNA, 25 bp, Homo sapien
tgggtctgctggacaaacacgtcct

SEQ ID NO: 4127182 - DNA, 25 bp, Homo sapien
acagcgtaaatgacagggttcctca

SEQ ID NO: 4127183 - DNA, 25 bp, Homo sapien
catggagtagacacacacggcagag

SEQ ID NO: 4127184 - DNA, 25 bp, Homo sapien
catgcgaatatcagccatggagtag

SEQ ID NO: 4127185 - DNA, 25 bp, Homo sapien
aagggcccgttgaagaccatgcgaa

SEQ ID NO: 4127186 - DNA, 25 bp, Homo sapien
cctgagaagggcatccactggtagt

SEQ ID NO: 4127187 - DNA, 25 bp, Homo sapien
tccacggcaatagtggtaaggcggt

SEQ ID NO: 4127188 - DNA, 25 bp, Homo sapien
tccttggtggacttcatagatggcg

SEQ ID NO: 4127189 - DNA, 25 bp, Homo sapien
tacacggcctggtacatgagtgggt

SEQ ID NO: 4127190 - DNA, 25 bp, Homo sapien
tagatggcgtgaaggttccaccagg

SEQ ID NO: 4127191 - DNA, 25 bp, Homo sapien
ctccagcatgagctcctccaactcc

SEQ ID NO: 4127192 - DNA, 25 bp, Homo sapien
catccttgggcagcacaatgacctt

SEQ ID NO: 4127193 - DNA, 25 bp, Homo sapien
tgggcagcacaatgaccttctgcac

SEQ ID NO: 4127194 - DNA, 25 bp, Homo sapien
caactcctggtcatccttgggcagc

SEQ ID NO: 4127195 - DNA, 25 bp, Homo sapien
tcatggtcttgacgggtgctggatc

SEQ ID NO: 4127196 - DNA, 25 bp, Homo sapien
gatggtcatggtcttgacgggtgct

SEQ ID NO: 4127197 - DNA, 25 bp, Homo sapien
gaagagatggtcatggtcttgacgg

SEQ ID NO: 4127198 - DNA, 25 bp, Homo sapien
tggtcatggtcttgacgggtgctgg

SEQ ID NO: 4127199 - DNA, 25 bp, Homo sapien
gcaaagggtagggccttgtcagttc

SEQ ID NO: 4127200 - DNA, 25 bp, Homo sapien
tggggcaaagggtagggccttgtca

SEQ ID NO: 4127201 - DNA, 25 bp, Homo sapien
ctcaggtgtgtgacacccacggctg

SEQ ID NO: 4127202 - DNA, 25 bp, Homo sapien
catacgcctggcagcggtgcaggct

SEQ ID NO: 4127203 - DNA, 25 bp, Homo sapien
cggctgacgccacgtagagttgttg

SEQ ID NO: 4127204 - DNA, 25 bp, Homo sapien
aggatgctgtatagcgggagcaggc

SEQ ID NO: 4127205 - DNA, 25 bp, Homo sapien
gagttgaacccacggcactgcctga

SEQ ID NO: 4127206 - DNA, 25 bp, Homo sapien
cctgatggggtttccgtgccggacg

SEQ ID NO: 4127207 - DNA, 25 bp, Homo sapien
cattggagttgaacccacggcactg

SEQ ID NO: 4127208 - DNA, 25 bp, Homo sapien
tgaacccacggcactgcctgatggg

SEQ ID NO: 4127209 - DNA, 25 bp, Homo sapien
tgcgtggacttctgcagtgtgagca

SEQ ID NO: 4127210 - DNA, 25 bp, Homo sapien
ggccctgtgagcagcttcgtgggct

SEQ ID NO: 4127211 - DNA, 25 bp, Homo sapien
agcttcgtgggctgcgtggacttct

SEQ ID NO: 4127212 - DNA, 25 bp, Homo sapien
ttctgcagtgtgagcagcaccccac

SEQ ID NO: 4127213 - DNA, 25 bp, Homo sapien
atgtagtgctctgtgttgatggggc

SEQ ID NO: 4127214 - DNA, 25 bp, Homo sapien
caatgtagtgctctgtgttgatggg

SEQ ID NO: 4127215 - DNA, 25 bp, Homo sapien
gtagtgctctgtgttgatggggcaa

SEQ ID NO: 4127216 - DNA, 25 bp, Homo sapien
tgtagtgctctgtgttgatggggca

SEQ ID NO: 4127217 - DNA, 25 bp, Homo sapien
ggcaggcaccgaggggcacccactc

SEQ ID NO: 4127218 - DNA, 25 bp, Homo sapien
ttcggggcaggcaccgaggggcacc

SEQ ID NO: 4127219 - DNA, 25 bp, Homo sapien
cggggcaggcaccgaggggcaccca

SEQ ID NO: 4127220 - DNA, 25 bp, Homo sapien
cttcggggcaggcaccgaggggcac

SEQ ID NO: 4127221 - DNA, 25 bp, Homo sapien
tgagaggggttgagcaaaagcagca

SEQ ID NO: 4127222 - DNA, 25 bp, Homo sapien
aggggttgagcaaaagcagcatcac

SEQ ID NO: 4127223 - DNA, 25 bp, Homo sapien
ctttagagtgagaggggttgagcaa

SEQ ID NO: 4127224 - DNA, 25 bp, Homo sapien
agaggggttgagcaaaagcagcatc

SEQ ID NO: 4127225 - DNA, 25 bp, Homo sapien
ctctcggcgccggtcaccaggatct

SEQ ID NO: 4127226 - DNA, 25 bp, Homo sapien
gctggcactcaaggaaggctgcgct

SEQ ID NO: 4127227 - DNA, 25 bp, Homo sapien
aacagccacttaacagtggcttggg

SEQ ID NO: 4127228 - DNA, 25 bp, Homo sapien
gcacagactccacggcattcttgtt

SEQ ID NO: 4127229 - DNA, 25 bp, Homo sapien
tgagctgcagtgcacggagcaacaa

SEQ ID NO: 4127230 - DNA, 25 bp, Homo sapien
cagcagctgggctaactcctggtaa

SEQ ID NO: 4127231 - DNA, 25 bp, Homo sapien
catgcagctgcactcgtgtgacgac

SEQ ID NO: 4127232 - DNA, 25 bp, Homo sapien
taaccctggcagtactggtggatga

SEQ ID NO: 4127233 - DNA, 25 bp, Homo sapien
cactgaggcaggctatattcaaccc

SEQ ID NO: 4127234 - DNA, 25 bp, Homo sapien
catcagaaaaggtggacagtccgtg

SEQ ID NO: 4127235 - DNA, 25 bp, Homo sapien
tctgccgtctctgaccagcatgggt

SEQ ID NO: 4127236 - DNA, 25 bp, Homo sapien
cctgtagatcttggcggaggctgtc

SEQ ID NO: 4127237 - DNA, 25 bp, Homo sapien
cagcagcaggcgaagggacagagtg

SEQ ID NO: 4127238 - DNA, 25 bp, Homo sapien
cagcttcacggttcgagcatccttc

SEQ ID NO: 4127239 - DNA, 25 bp, Homo sapien
cacggttcgagcatccttctcagcg

SEQ ID NO: 4127240 - DNA, 25 bp, Homo sapien
ttcacggttcgagcatccttctcag

SEQ ID NO: 4127241 - DNA, 25 bp, Homo sapien
gttcgagcatccttctcagcgtcct

SEQ ID NO: 4127242 - DNA, 25 bp, Homo sapien
ctgaaggggtgcaggtgtctccagg

SEQ ID NO: 4127243 - DNA, 25 bp, Homo sapien
aaggggtgcaggtgtctccaggagg

SEQ ID NO: 4127244 - DNA, 25 bp, Homo sapien
gggtgcaggtgtctccaggaggctc

SEQ ID NO: 4127245 - DNA, 25 bp, Homo sapien
ggggtgcaggtgtctccaggaggct

SEQ ID NO: 4127246 - DNA, 25 bp, Homo sapien
gacatcctgaagtcacaaggtttgc

SEQ ID NO: 4127247 - DNA, 25 bp, Homo sapien
tctggtaccgcaagcactgggttat

SEQ ID NO: 4127248 - DNA, 25 bp, Homo sapien
tcaacgacctcaactgttctgggac

SEQ ID NO: 4127249 - DNA, 25 bp, Homo sapien
aagaaatcccggagcgtcatcgcca

SEQ ID NO: 4127250 - DNA, 25 bp, Homo sapien
ggtgctcttcccggactcaccggca

SEQ ID NO: 4127251 - DNA, 25 bp, Homo sapien
gatggtgctcttcccggactcaccg

SEQ ID NO: 4127252 - DNA, 25 bp, Homo sapien
ttcatctgcttgacgatggtgctct

SEQ ID NO: 4127253 - DNA, 25 bp, Homo sapien
gacgatggtgctcttcccggactca

SEQ ID NO: 4127254 - DNA, 25 bp, Homo sapien
tcatggcgcgtacgatggccaggat

SEQ ID NO: 4127255 - DNA, 25 bp, Homo sapien
agcgagtacccgtcctggtggataa

SEQ ID NO: 4127256 - DNA, 25 bp, Homo sapien
caacgtgttgccgtagatgatggcg

SEQ ID NO: 4127257 - DNA, 25 bp, Homo sapien
tgatggcgataaactcgaggcactc

SEQ ID NO: 4127258 - DNA, 25 bp, Homo sapien
caaaacaggcctggataccggagtc

SEQ ID NO: 4127259 - DNA, 25 bp, Homo sapien
gagtccttccacagccgctggatga

SEQ ID NO: 4127260 - DNA, 25 bp, Homo sapien
tcgttgagctggtactccgaggcgc

SEQ ID NO: 4127261 - DNA, 25 bp, Homo sapien
cctcctcgatagtgtctgccatgtg

SEQ ID NO: 4127262 - DNA, 25 bp, Homo sapien
gatgatgccagtggtcttgactcgc

SEQ ID NO: 4127263 - DNA, 25 bp, Homo sapien
ttgaaggagaactgcgtctcgatga

SEQ ID NO: 4127264 - DNA, 25 bp, Homo sapien
cggaagttgagatccttgaaggaga

SEQ ID NO: 4127265 - DNA, 25 bp, Homo sapien
gtcttgactcgcgagcgcagcacgt

SEQ ID NO: 4127266 - DNA, 25 bp, Homo sapien
cgtaggcgctcagcgccgcgatgaa

SEQ ID NO: 4127267 - DNA, 25 bp, Homo sapien
tagcaccatgtcgtaggcgctcagc

SEQ ID NO: 4127268 - DNA, 25 bp, Homo sapien
ctcagcgccgcgatgaagatgatgc

SEQ ID NO: 4127269 - DNA, 25 bp, Homo sapien
gtcctccactagcaccatgtcgtag

SEQ ID NO: 4127270 - DNA, 25 bp, Homo sapien
aggccgcccgggacaggcatcccct

SEQ ID NO: 4127271 - DNA, 25 bp, Homo sapien
atgggcctgctgaacgcctccgggc

SEQ ID NO: 4127272 - DNA, 25 bp, Homo sapien
gcccagcgcgcggtctccgcctcca

SEQ ID NO: 4127273 - DNA, 25 bp, Homo sapien
gggcttcccgctcagctggctctca

SEQ ID NO: 4127274 - DNA, 25 bp, Homo sapien
atcgtagtccgggaaacagatgctg

SEQ ID NO: 4127275 - DNA, 25 bp, Homo sapien
cagatgctgaggtgcgccttcttga

SEQ ID NO: 4127276 - DNA, 25 bp, Homo sapien
tcgtggcgaagtagcggtggttgca

SEQ ID NO: 4127277 - DNA, 25 bp, Homo sapien
gctgttgaacaggtgcaggctctcg

SEQ ID NO: 4127278 - DNA, 25 bp, Homo sapien
tcggtgacagcgtcgaagacaaatt

SEQ ID NO: 4127279 - DNA, 25 bp, Homo sapien
aactgcaccttgatgtagttgccgg

SEQ ID NO: 4127280 - DNA, 25 bp, Homo sapien
tagttgccggcgtcctcgtaggtgt

SEQ ID NO: 4127281 - DNA, 25 bp, Homo sapien
catgttgagctcgaggaactgcacc

SEQ ID NO: 4127282 - DNA, 25 bp, Homo sapien
tgagtcaccgtgagcttcagctgcc

SEQ ID NO: 4127283 - DNA, 25 bp, Homo sapien
gtagacccttttgggcacagccagg

SEQ ID NO: 4127284 - DNA, 25 bp, Homo sapien
tattggccatagctggtgtcaacag

SEQ ID NO: 4127285 - DNA, 25 bp, Homo sapien
tgtgagtcctagaggccagtgcagc

SEQ ID NO: 4127286 - DNA, 25 bp, Homo sapien
ggatgtggggacatgggcctttgtc

SEQ ID NO: 4127287 - DNA, 25 bp, Homo sapien
aagcaaagatttggtgctggatgag

SEQ ID NO: 4127288 - DNA, 25 bp, Homo sapien
gcctttgtccctgatagttcagcca

SEQ ID NO: 4127289 - DNA, 25 bp, Homo sapien
tccctgatagttcagccatggctct

SEQ ID NO: 4127290 - DNA, 25 bp, Homo sapien
tgatgcaaaggtttattgctgagtc

SEQ ID NO: 4127291 - DNA, 25 bp, Homo sapien
ggagtgcaaattgtgccccggcctt

SEQ ID NO: 4127292 - DNA, 25 bp, Homo sapien
ttgccagacggaagctccttgtccc

SEQ ID NO: 4127293 - DNA, 25 bp, Homo sapien
tgctgagtctgtgcgtctagctgag

SEQ ID NO: 4127294 - DNA, 25 bp, Homo sapien
gcaattatgttcctgcctcgagggc

SEQ ID NO: 4127295 - DNA, 25 bp, Homo sapien
tcaactcccgtgaaaagccatgagt

SEQ ID NO: 4127296 - DNA, 25 bp, Homo sapien
actatacaccggcaagtggctgaga

SEQ ID NO: 4127297 - DNA, 25 bp, Homo sapien
gacccacacatctgaggcacttaga

SEQ ID NO: 4127298 - DNA, 25 bp, Homo sapien
ctcaaggtcacctgggatatgggtg

SEQ ID NO: 4127299 - DNA, 25 bp, Homo sapien
ggtcacctgggatatgggtgttggg

SEQ ID NO: 4127300 - DNA, 25 bp, Homo sapien
aaggtcacctgggatatgggtgttg

SEQ ID NO: 4127301 - DNA, 25 bp, Homo sapien
gtgttggggtcctcaatctagactg

SEQ ID NO: 4127302 - DNA, 25 bp, Homo sapien
tcccggctgaactcggctgcaacag

SEQ ID NO: 4127303 - DNA, 25 bp, Homo sapien
ggttgggaacgtgcggcgctccgct

SEQ ID NO: 4127304 - DNA, 25 bp, Homo sapien
cctcgcggttgggaacgtgcggcgc

SEQ ID NO: 4127305 - DNA, 25 bp, Homo sapien
gggccggtgcggttcgctctgctcc

SEQ ID NO: 4127306 - DNA, 25 bp, Homo sapien
cccgattcccctgtgcgggtgggat

SEQ ID NO: 4127307 - DNA, 25 bp, Homo sapien
cgggtcaggacggtagaggagagct

SEQ ID NO: 4127308 - DNA, 25 bp, Homo sapien
gagctgcccagagcccggctacgga

SEQ ID NO: 4127309 - DNA, 25 bp, Homo sapien
tggacagtagggctcggcccacccg

SEQ ID NO: 4127310 - DNA, 25 bp, Homo sapien
ctgctccaagtgaggcctggcccct

SEQ ID NO: 4127311 - DNA, 25 bp, Homo sapien
caagtgaggcctggcccctggccat

SEQ ID NO: 4127312 - DNA, 25 bp, Homo sapien
tgctccaagtgaggcctggcccctg

SEQ ID NO: 4127313 - DNA, 25 bp, Homo sapien
tccaagtgaggcctggcccctggcc

SEQ ID NO: 4127314 - DNA, 25 bp, Homo sapien
gccagtacataatgcacttcttaca

SEQ ID NO: 4127315 - DNA, 25 bp, Homo sapien
tcctaggacgttctgatgggacacc

SEQ ID NO: 4127316 - DNA, 25 bp, Homo sapien
caggcaagcccttagggtctcggtt

SEQ ID NO: 4127317 - DNA, 25 bp, Homo sapien
caccatctgtgaagtgacggtcatc

SEQ ID NO: 4127318 - DNA, 25 bp, Homo sapien
atccacacatgcagctctgcctact

SEQ ID NO: 4127319 - DNA, 25 bp, Homo sapien
cacacatgcagctctgcctactgcc

SEQ ID NO: 4127320 - DNA, 25 bp, Homo sapien
cctactgcctccctgggatctgctg

SEQ ID NO: 4127321 - DNA, 25 bp, Homo sapien
cacatgcagctctgcctactgcctc

SEQ ID NO: 4127322 - DNA, 25 bp, Homo sapien
gaggcctgcagccatagcacacctc

SEQ ID NO: 4127323 - DNA, 25 bp, Homo sapien
acacctcccagatggtcactcgggg

SEQ ID NO: 4127324 - DNA, 25 bp, Homo sapien
gcctgcagccatagcacacctccca

SEQ ID NO: 4127325 - DNA, 25 bp, Homo sapien
acctcccagatggtcactcggggca

SEQ ID NO: 4127326 - DNA, 25 bp, Homo sapien
gcagagcagccggtccctctggtta

SEQ ID NO: 4127327 - DNA, 25 bp, Homo sapien
ctgcagagcagccggtccctctggt

SEQ ID NO: 4127328 - DNA, 25 bp, Homo sapien
agagcagccggtccctctggttagc

SEQ ID NO: 4127329 - DNA, 25 bp, Homo sapien
ttacttgggcctacggcctagcctc

SEQ ID NO: 4127330 - DNA, 25 bp, Homo sapien
ccaccaggagcactggtctcacacc

SEQ ID NO: 4127331 - DNA, 25 bp, Homo sapien
accaccaggagcactggtctcacac

SEQ ID NO: 4127332 - DNA, 25 bp, Homo sapien
ctgagtgtttgccattgggcaccag

SEQ ID NO: 4127333 - DNA, 25 bp, Homo sapien
gtgtttgccattgggcaccagctcc

SEQ ID NO: 4127334 - DNA, 25 bp, Homo sapien
cgggagcagcccctctgagtgtttg

SEQ ID NO: 4127335 - DNA, 25 bp, Homo sapien
gagcagcccctctgagtgtttgcca

SEQ ID NO: 4127336 - DNA, 25 bp, Homo sapien
tgtaggaagctcttgccctccatac

SEQ ID NO: 4127337 - DNA, 25 bp, Homo sapien
tgggacttttctgtaggaagctctt

SEQ ID NO: 4127338 - DNA, 25 bp, Homo sapien
acttttctgtaggaagctcttgccc

SEQ ID NO: 4127339 - DNA, 25 bp, Homo sapien
ggacttttctgtaggaagctcttgc

SEQ ID NO: 4127340 - DNA, 25 bp, Homo sapien
gttgaacactgacatcccgaatgat

SEQ ID NO: 4127341 - DNA, 25 bp, Homo sapien
gacatcccgaatgatgtcttcccct

SEQ ID NO: 4127342 - DNA, 25 bp, Homo sapien
aatgcccgtattggccatggcatag

SEQ ID NO: 4127343 - DNA, 25 bp, Homo sapien
aggaaaaggataatgcccgtattgg

SEQ ID NO: 4127344 - DNA, 25 bp, Homo sapien
ctgggacagggaactggcgggtcct

SEQ ID NO: 4127345 - DNA, 25 bp, Homo sapien
ctgggaggtcatgattggtggcttg

SEQ ID NO: 4127346 - DNA, 25 bp, Homo sapien
ggtggcttgcttagggcccctatct

SEQ ID NO: 4127347 - DNA, 25 bp, Homo sapien
tagtgtaagaagtgcccacccactg

SEQ ID NO: 4127348 - DNA, 25 bp, Homo sapien
actggggggctaccgtggctggcag

SEQ ID NO: 4127349 - DNA, 25 bp, Homo sapien
ccactggggggctaccgtggctggc

SEQ ID NO: 4127350 - DNA, 25 bp, Homo sapien
tggggggctaccgtggctggcagag

SEQ ID NO: 4127351 - DNA, 25 bp, Homo sapien
gggggctaccgtggctggcagaggg

SEQ ID NO: 4127352 - DNA, 25 bp, Homo sapien
ggagagcaaggcgacagctgtcaac

SEQ ID NO: 4127353 - DNA, 25 bp, Homo sapien
gagcaaggcgacagctgtcaacagg

SEQ ID NO: 4127354 - DNA, 25 bp, Homo sapien
cacgacccctgaggacttgagtagc

SEQ ID NO: 4127355 - DNA, 25 bp, Homo sapien
cccctgaggacttgagtagcaggtg

SEQ ID NO: 4127356 - DNA, 25 bp, Homo sapien
ctccgatgttctggagcgtgatggc

SEQ ID NO: 4127357 - DNA, 25 bp, Homo sapien
ggtctgtatgacaagtggcagctca

SEQ ID NO: 4127358 - DNA, 25 bp, Homo sapien
cctccaggttcaggaaggtctgtat

SEQ ID NO: 4127359 - DNA, 25 bp, Homo sapien
caagtggcagctcagacttgatgat

SEQ ID NO: 4127360 - DNA, 25 bp, Homo sapien
caggttcaggaaggtctgtatgaca

SEQ ID NO: 4127361 - DNA, 25 bp, Homo sapien
gtagttcccgttcatgtaccagtcc

SEQ ID NO: 4127362 - DNA, 25 bp, Homo sapien
agagacaaggattaccaggtagttc

SEQ ID NO: 4127363 - DNA, 25 bp, Homo sapien
gattaccaggtagttcccgttcatg

SEQ ID NO: 4127364 - DNA, 25 bp, Homo sapien
taccaggtagttcccgttcatgtac

SEQ ID NO: 4127365 - DNA, 25 bp, Homo sapien
cagctaagagagaagccgctggagt

SEQ ID NO: 4127366 - DNA, 25 bp, Homo sapien
aagccgctggagtagcccaggtagc

SEQ ID NO: 4127367 - DNA, 25 bp, Homo sapien
acaccatgcagctaagagagaagcc

SEQ ID NO: 4127368 - DNA, 25 bp, Homo sapien
gcaattaggaagaacaccatgcagc

SEQ ID NO: 4127369 - DNA, 25 bp, Homo sapien
gctgaagcctcaggctcgacctgca

SEQ ID NO: 4127370 - DNA, 25 bp, Homo sapien
agttgagcgtgaagtagctgggagt

SEQ ID NO: 4127371 - DNA, 25 bp, Homo sapien
cagtgggcagggcacgtggaacttt

SEQ ID NO: 4127372 - DNA, 25 bp, Homo sapien
tctccacgtggctgaagttgcctgt

SEQ ID NO: 4127373 - DNA, 25 bp, Homo sapien
tgtcaaggcagtctgccactctcat

SEQ ID NO: 4127374 - DNA, 25 bp, Homo sapien
gggctgtgtcaaggcagtctgccac

SEQ ID NO: 4127375 - DNA, 25 bp, Homo sapien
gctgtgtcaaggcagtctgccactc

SEQ ID NO: 4127376 - DNA, 25 bp, Homo sapien
aacacggggctgtgtcaaggcagtc

SEQ ID NO: 4127377 - DNA, 25 bp, Homo sapien
cttgagctcagtatagatgggcagc

SEQ ID NO: 4127378 - DNA, 25 bp, Homo sapien
ggtggcagacgaaggcgaaggccat

SEQ ID NO: 4127379 - DNA, 25 bp, Homo sapien
tccttgagctcagtatagatgggca

SEQ ID NO: 4127380 - DNA, 25 bp, Homo sapien
tcggggtggcagacgaaggcgaagg

SEQ ID NO: 4127381 - DNA, 25 bp, Homo sapien
aagtacatgatgtacatgacagcga

SEQ ID NO: 4127382 - DNA, 25 bp, Homo sapien
atggacaggttggagatgtgctgca

SEQ ID NO: 4127383 - DNA, 25 bp, Homo sapien
agaaggtgaggtagccgaagagggc

SEQ ID NO: 4127384 - DNA, 25 bp, Homo sapien
tacatgacagcgatggacaggttgg

SEQ ID NO: 4127385 - DNA, 25 bp, Homo sapien
gatctgagctgcctaggggacccca

SEQ ID NO: 4127386 - DNA, 25 bp, Homo sapien
cacgcctcggtatggagggcaccat

SEQ ID NO: 4127387 - DNA, 25 bp, Homo sapien
ggattggcatgcagactcacctcca

SEQ ID NO: 4127388 - DNA, 25 bp, Homo sapien
ctccacagcggcaaggcacagccag

SEQ ID NO: 4127389 - DNA, 25 bp, Homo sapien
cgggaacagaacgatgggcactgtg

SEQ ID NO: 4127390 - DNA, 25 bp, Homo sapien
acaggatcaggacgtcaaacgggtc

SEQ ID NO: 4127391 - DNA, 25 bp, Homo sapien
gacgtcaaacgggtccaccttgctg

SEQ ID NO: 4127392 - DNA, 25 bp, Homo sapien
gtgactgctgtcagcacggccacgc

SEQ ID NO: 4127393 - DNA, 25 bp, Homo sapien
caataagcacatgccgcagccagct

SEQ ID NO: 4127394 - DNA, 25 bp, Homo sapien
gaactcctggtttggaaacagcatc

SEQ ID NO: 4127395 - DNA, 25 bp, Homo sapien
caggccaacggcaataagcacatgc

SEQ ID NO: 4127396 - DNA, 25 bp, Homo sapien
gttgatacaagtgagcaggccaacg

SEQ ID NO: 4127397 - DNA, 25 bp, Homo sapien
gcttccacagcagggccagaccctc

SEQ ID NO: 4127398 - DNA, 25 bp, Homo sapien
cctgcttccacagcagggccagacc

SEQ ID NO: 4127399 - DNA, 25 bp, Homo sapien
ttccacagcagggccagaccctcac

SEQ ID NO: 4127400 - DNA, 25 bp, Homo sapien
tgcttccacagcagggccagaccct

SEQ ID NO: 4127401 - DNA, 25 bp, Homo sapien
gattcggaagtagaagatggcaggg

SEQ ID NO: 4127402 - DNA, 25 bp, Homo sapien
ttgcaggctccttctccgtgggcat

SEQ ID NO: 4127403 - DNA, 25 bp, Homo sapien
tcggaagtagaagatggcagggaag

SEQ ID NO: 4127404 - DNA, 25 bp, Homo sapien
ttcggaagtagaagatggcagggaa

SEQ ID NO: 4127405 - DNA, 25 bp, Homo sapien
caagaagccaagcatagcaaaacac

SEQ ID NO: 4127406 - DNA, 25 bp, Homo sapien
caagctcatggtcatcagcaagaag

SEQ ID NO: 4127407 - DNA, 25 bp, Homo sapien
atgatgaagctcaagctcatggtca

SEQ ID NO: 4127408 - DNA, 25 bp, Homo sapien
catggtcatcagcaagaagccaagc

SEQ ID NO: 4127409 - DNA, 25 bp, Homo sapien
tcaacccgtgagaaagcaggtctgt

SEQ ID NO: 4127410 - DNA, 25 bp, Homo sapien
ccagggaccatggagaccaagaata

SEQ ID NO: 4127411 - DNA, 25 bp, Homo sapien
gagaagagtatccaagggcccagga

SEQ ID NO: 4127412 - DNA, 25 bp, Homo sapien
gataaaaagatcagcccaacagggc

SEQ ID NO: 4127413 - DNA, 25 bp, Homo sapien
gactgtcctggagcatcaaggctcg

SEQ ID NO: 4127414 - DNA, 25 bp, Homo sapien
cacagcagagattagacggtgatgt

SEQ ID NO: 4127415 - DNA, 25 bp, Homo sapien
tcctgagggcggagtagctccgcat

SEQ ID NO: 4127416 - DNA, 25 bp, Homo sapien
tcaatggcggacatagtcaatggcg

SEQ ID NO: 4127417 - DNA, 25 bp, Homo sapien
gagttcctatcgagcagtagccctg

SEQ ID NO: 4127418 - DNA, 25 bp, Homo sapien
gaagagttcatggtacaacctgcca

SEQ ID NO: 4127419 - DNA, 25 bp, Homo sapien
tcaacagggtgacactagagccact

SEQ ID NO: 4127420 - DNA, 25 bp, Homo sapien
tcatcagtgaggtacatcgtgggca

SEQ ID NO: 4127421 - DNA, 25 bp, Homo sapien
gaagggctagcgagaaaattaaggc

SEQ ID NO: 4127422 - DNA, 25 bp, Homo sapien
catgcaaaggtagggtggtaggtct

SEQ ID NO: 4127423 - DNA, 25 bp, Homo sapien
agaacagtgcggaagaatattgcaa

SEQ ID NO: 4127424 - DNA, 25 bp, Homo sapien
acagtgcggaagaatattgcaagaa

SEQ ID NO: 4127425 - DNA, 25 bp, Homo sapien
ggcccaatagtagcgatttctgtaa

SEQ ID NO: 4127426 - DNA, 25 bp, Homo sapien
tctgtaaggctttatgattgtcccc

SEQ ID NO: 4127427 - DNA, 25 bp, Homo sapien
actggcactccaaccatctggcttg

SEQ ID NO: 4127428 - DNA, 25 bp, Homo sapien
actattctggtcgtgggtctctccc

SEQ ID NO: 4127429 - DNA, 25 bp, Homo sapien
tcgggtcggcagttccgagcgactg

SEQ ID NO: 4127430 - DNA, 25 bp, Homo sapien
cggcagttccgagcgactgcgggag

SEQ ID NO: 4127431 - DNA, 25 bp, Homo sapien
ctgcgggaagcactcgggtcggcag

SEQ ID NO: 4127432 - DNA, 25 bp, Homo sapien
gcgggaagcactcgggtcggcagtt

SEQ ID NO: 4127433 - DNA, 25 bp, Homo sapien
gcccgacccactccgctcccaccac

SEQ ID NO: 4127434 - DNA, 25 bp, Homo sapien
cgcccgacccactccgctcccacca

SEQ ID NO: 4127435 - DNA, 25 bp, Homo sapien
tcttgtcgatcatcttagagcgctc

SEQ ID NO: 4127436 - DNA, 25 bp, Homo sapien
ggttcttgtcgatcatcttagagcg

SEQ ID NO: 4127437 - DNA, 25 bp, Homo sapien
tcgatcatcttagagcgctcggccg

SEQ ID NO: 4127438 - DNA, 25 bp, Homo sapien
tcccgcaggttcttgtcgatcatct

SEQ ID NO: 4127439 - DNA, 25 bp, Homo sapien
aagtccttgtctggggattcgagct

SEQ ID NO: 4127440 - DNA, 25 bp, Homo sapien
gatcccagtgcgggacgcggcctca

SEQ ID NO: 4127441 - DNA, 25 bp, Homo sapien
ttcgagctgggaatcaaggatccca

SEQ ID NO: 4127442 - DNA, 25 bp, Homo sapien
aaggatcccagtgcgggacgcggcc

SEQ ID NO: 4127443 - DNA, 25 bp, Homo sapien
cttgggtcagagtgcacaggtggag

SEQ ID NO: 4127444 - DNA, 25 bp, Homo sapien
gggtttcgggagtgatgcctgcaga

SEQ ID NO: 4127445 - DNA, 25 bp, Homo sapien
cacaggtggaggatacagattccag

SEQ ID NO: 4127446 - DNA, 25 bp, Homo sapien
caagagcagtttcccactcgagagg

SEQ ID NO: 4127447 - DNA, 25 bp, Homo sapien
ggacccttctggtgtcgggacacaa

SEQ ID NO: 4127448 - DNA, 25 bp, Homo sapien
tacatgctgttcctcggccacaggt

SEQ ID NO: 4127449 - DNA, 25 bp, Homo sapien
tgggagccctatgacagttctgaag

SEQ ID NO: 4127450 - DNA, 25 bp, Homo sapien
ggtccagcacgaaaagccctgcttt

SEQ ID NO: 4127451 - DNA, 25 bp, Homo sapien
gggaggagttaccaggtctcacttg

SEQ ID NO: 4127452 - DNA, 25 bp, Homo sapien
aaagtgctaagccagaccctgcacc

SEQ ID NO: 4127453 - DNA, 25 bp, Homo sapien
gcccatttcacagagtaagcaaagg

SEQ ID NO: 4127454 - DNA, 25 bp, Homo sapien
tttcacagagtaagcaaaggccaga

SEQ ID NO: 4127455 - DNA, 25 bp, Homo sapien
tcaagctcgactgtggctactgcag

SEQ ID NO: 4127456 - DNA, 25 bp, Homo sapien
ctcagcaggagttccgcacagggtg

SEQ ID NO: 4127457 - DNA, 25 bp, Homo sapien
gaaggaagaatacaaagccactctg

SEQ ID NO: 4127458 - DNA, 25 bp, Homo sapien
tactgcagtgtcagagacagcagcc

SEQ ID NO: 4127459 - DNA, 25 bp, Homo sapien
ttctcccagccacaacttcctgtgg

SEQ ID NO: 4127460 - DNA, 25 bp, Homo sapien
ctcccgccagcgtccttctcccagc

SEQ ID NO: 4127461 - DNA, 25 bp, Homo sapien
acaacttcctgtggccaaagaaggg

SEQ ID NO: 4127462 - DNA, 25 bp, Homo sapien
gaatccttctcgaaggcaccacctt

SEQ ID NO: 4127463 - DNA, 25 bp, Homo sapien
agaaggaggtccagacttgccacag

SEQ ID NO: 4127464 - DNA, 25 bp, Homo sapien
tgaagagcaatggacagcggctaac

SEQ ID NO: 4127465 - DNA, 25 bp, Homo sapien
acttgatgcttagtccaggccccag

SEQ ID NO: 4127466 - DNA, 25 bp, Homo sapien
gacaacgctgtctccttctgagaga

SEQ ID NO: 4127467 - DNA, 25 bp, Homo sapien
ccagtcacagccaggatggggggaa

SEQ ID NO: 4127468 - DNA, 25 bp, Homo sapien
cttccccactggctcctccagagca

SEQ ID NO: 4127469 - DNA, 25 bp, Homo sapien
ggaggaagaaccaggagccagtcac

SEQ ID NO: 4127470 - DNA, 25 bp, Homo sapien
ggaagaaccaggagccagtcacagc

SEQ ID NO: 4127471 - DNA, 25 bp, Homo sapien
aggaaagcctcacagcgatgcctga

SEQ ID NO: 4127472 - DNA, 25 bp, Homo sapien
tccccattgggctgtgcatggcaaa

SEQ ID NO: 4127473 - DNA, 25 bp, Homo sapien
tgctttagcccctgggcactacagg

SEQ ID NO: 4127474 - DNA, 25 bp, Homo sapien
gacatacaaatgtgcaggccctggg

SEQ ID NO: 4127475 - DNA, 25 bp, Homo sapien
tgaggtcacagggttagagtcccct

SEQ ID NO: 4127476 - DNA, 25 bp, Homo sapien
tgtctgcagtgctcaacaagcggca

SEQ ID NO: 4127477 - DNA, 25 bp, Homo sapien
agtacctggtactgcagcggagcca

SEQ ID NO: 4127478 - DNA, 25 bp, Homo sapien
tcctagagctgtcctaagtacctgg

SEQ ID NO: 4127479 - DNA, 25 bp, Homo sapien
tctgggagacctgcggcgtatctca

SEQ ID NO: 4127480 - DNA, 25 bp, Homo sapien
taacacacacgcgtactgactcatg

SEQ ID NO: 4127481 - DNA, 25 bp, Homo sapien
ggagacctacagtgtaacacacacg

SEQ ID NO: 4127482 - DNA, 25 bp, Homo sapien
gctagaaggctagaatctaggagac

SEQ ID NO: 4127483 - DNA, 25 bp, Homo sapien
aagcaggagcacagcgtcacacttc

SEQ ID NO: 4127484 - DNA, 25 bp, Homo sapien
agcaggagcacagcgtcacacttca

SEQ ID NO: 4127485 - DNA, 25 bp, Homo sapien
tctccccacactgagccttagcaac

SEQ ID NO: 4127486 - DNA, 25 bp, Homo sapien
ccacactgagccttagcaaccaggg

SEQ ID NO: 4127487 - DNA, 25 bp, Homo sapien
aacagggtagcagcccttcttctcc

SEQ ID NO: 4127488 - DNA, 25 bp, Homo sapien
ccaacagggtagcagcccttcttct

SEQ ID NO: 4127489 - DNA, 25 bp, Homo sapien
gcatgccaatatggtgccctgggca

SEQ ID NO: 4127490 - DNA, 25 bp, Homo sapien
gtgcatgccaatatggtgccctggg

SEQ ID NO: 4127491 - DNA, 25 bp, Homo sapien
catgccaatatggtgccctgggcag

SEQ ID NO: 4127492 - DNA, 25 bp, Homo sapien
tgcatgccaatatggtgccctgggc

SEQ ID NO: 4127493 - DNA, 25 bp, Homo sapien
gcagttgagctaccaggaatgcagc

SEQ ID NO: 4127494 - DNA, 25 bp, Homo sapien
taacctagagcacctgtgccccatg

SEQ ID NO: 4127495 - DNA, 25 bp, Homo sapien
gccacagtggtcaaggtaacctaga

SEQ ID NO: 4127496 - DNA, 25 bp, Homo sapien
catgaaggagccaccctgttctcac

SEQ ID NO: 4127497 - DNA, 25 bp, Homo sapien
tgcttgacgatggtgctcttccctg

SEQ ID NO: 4127498 - DNA, 25 bp, Homo sapien
ttcatctgcttgacgatggtgctct

SEQ ID NO: 4127499 - DNA, 25 bp, Homo sapien
tcatctgcttgacgatggtgctctt

SEQ ID NO: 4127500 - DNA, 25 bp, Homo sapien
ttgacgatggtgctcttccctgact

SEQ ID NO: 4127501 - DNA, 25 bp, Homo sapien
gattctgggcctggctaagactggc

SEQ ID NO: 4127502 - DNA, 25 bp, Homo sapien
gaaggttagtgtcccctgggcactg

SEQ ID NO: 4127503 - DNA, 25 bp, Homo sapien
ctgggcactgggagttcccacggct

SEQ ID NO: 4127504 - DNA, 25 bp, Homo sapien
gtttgagcactgcctctggaataca

SEQ ID NO: 4127505 - DNA, 25 bp, Homo sapien
ctcctcggagtagccatcctcgtgg

SEQ ID NO: 4127506 - DNA, 25 bp, Homo sapien
ggagtagccatcctcgtggatgatc

SEQ ID NO: 4127507 - DNA, 25 bp, Homo sapien
gttgctgtagacaaccgcccggtac

SEQ ID NO: 4127508 - DNA, 25 bp, Homo sapien
ggtcggcaaagtcgatctgcaggtt

SEQ ID NO: 4127509 - DNA, 25 bp, Homo sapien
agagggtggggcggagggcacatac

SEQ ID NO: 4127510 - DNA, 25 bp, Homo sapien
ttacttttttctgtgacggagtcta

SEQ ID NO: 4127511 - DNA, 25 bp, Homo sapien
gagagggtggggcggagggcacata

SEQ ID NO: 4127512 - DNA, 25 bp, Homo sapien
cttttttctgtgacggagtctagct

SEQ ID NO: 4127513 - DNA, 25 bp, Homo sapien
tgagctggtattcccttgagcggcc

SEQ ID NO: 4127514 - DNA, 25 bp, Homo sapien
cagtgcaaatagctgcctggcgtcg

SEQ ID NO: 4127515 - DNA, 25 bp, Homo sapien
cgccttgctcctcggcggtgcagga

SEQ ID NO: 4127516 - DNA, 25 bp, Homo sapien
cagagcctccggatgacgccggaca

SEQ ID NO: 4127517 - DNA, 25 bp, Homo sapien
gcctcggacaggatccaggatgttg

SEQ ID NO: 4127518 - DNA, 25 bp, Homo sapien
ctgcctcggacaggatccaggatgt

SEQ ID NO: 4127519 - DNA, 25 bp, Homo sapien
tgcctcggacaggatccaggatgtt

SEQ ID NO: 4127520 - DNA, 25 bp, Homo sapien
ctcggacaggatccaggatgttgga

SEQ ID NO: 4127521 - DNA, 25 bp, Homo sapien
gcctggcctaggcacagcccttgtt

SEQ ID NO: 4127522 - DNA, 25 bp, Homo sapien
cgcctggcctaggcacagcccttgt

SEQ ID NO: 4127523 - DNA, 25 bp, Homo sapien
gcgcctggcctaggcacagcccttg

SEQ ID NO: 4127524 - DNA, 25 bp, Homo sapien
tgcgcctggcctaggcacagccctt

SEQ ID NO: 4127525 - DNA, 25 bp, Homo sapien
tacgcgggtccgtagcacatcttgc

SEQ ID NO: 4127526 - DNA, 25 bp, Homo sapien
cacgatccccgtggtctttacgcgg

SEQ ID NO: 4127527 - DNA, 25 bp, Homo sapien
gaagtgtgtctccacgatccccgtg

SEQ ID NO: 4127528 - DNA, 25 bp, Homo sapien
gtcactctgtgcaatacgctccagg

SEQ ID NO: 4127529 - DNA, 25 bp, Homo sapien
taccttctggaatcatccacacttg

SEQ ID NO: 4127530 - DNA, 25 bp, Homo sapien
cgtggatcctgactgctggttcact

SEQ ID NO: 4127531 - DNA, 25 bp, Homo sapien
gctggttcactaggtggtgaggatg

SEQ ID NO: 4127532 - DNA, 25 bp, Homo sapien
cagagtagggcagctaccttctgga

SEQ ID NO: 4127533 - DNA, 25 bp, Homo sapien
gatatagatcaccttagttccagga

SEQ ID NO: 4127534 - DNA, 25 bp, Homo sapien
cagatatagatcaccttagttccag

SEQ ID NO: 4127535 - DNA, 25 bp, Homo sapien
tatagatcaccttagttccaggaag

SEQ ID NO: 4127536 - DNA, 25 bp, Homo sapien
ctgcagatatagatcaccttagttc

SEQ ID NO: 4127537 - DNA, 25 bp, Homo sapien
cttcttccgctcagaccgctgacca

SEQ ID NO: 4127538 - DNA, 25 bp, Homo sapien
gcaccaagtcataggcgctcaaggc

SEQ ID NO: 4127539 - DNA, 25 bp, Homo sapien
caaggctacgcagaagatgatggct

SEQ ID NO: 4127540 - DNA, 25 bp, Homo sapien
cataggcgctcaaggctacgcagaa

SEQ ID NO: 4127541 - DNA, 25 bp, Homo sapien
gcttcatgctctcatgcatgcggtt

SEQ ID NO: 4127542 - DNA, 25 bp, Homo sapien
cagatgctatcgaatagcttcatgc

SEQ ID NO: 4127543 - DNA, 25 bp, Homo sapien
cgaatagcttcatgctctcatgcat

SEQ ID NO: 4127544 - DNA, 25 bp, Homo sapien
gttgttgcagatgctatcgaatagc

SEQ ID NO: 4127545 - DNA, 25 bp, Homo sapien
tggaggccctatccccacagtcccc

SEQ ID NO: 4127546 - DNA, 25 bp, Homo sapien
tgggacaagaagcaaccctctggag

SEQ ID NO: 4127547 - DNA, 25 bp, Homo sapien
gaagcaaccctctggaggccctatc

SEQ ID NO: 4127548 - DNA, 25 bp, Homo sapien
ggacaagaagcaaccctctggaggc

SEQ ID NO: 4127549 - DNA, 25 bp, Homo sapien
gggggagagaaaatgaagacttgtg

SEQ ID NO: 4127550 - DNA, 25 bp, Homo sapien
tgggggagagaaaatgaagacttgt

SEQ ID NO: 4127551 - DNA, 25 bp, Homo sapien
ctgggggagagaaaatgaagacttg

SEQ ID NO: 4127552 - DNA, 25 bp, Homo sapien
actgcacgttcttggtgtcggtggc

SEQ ID NO: 4127553 - DNA, 25 bp, Homo sapien
tgatgacatcggtgacggcgtcaaa

SEQ ID NO: 4127554 - DNA, 25 bp, Homo sapien
ggcgtcaaacacgaactgcacgttc

SEQ ID NO: 4127555 - DNA, 25 bp, Homo sapien
cggtgacggcgtcaaacacgaactg

SEQ ID NO: 4127556 - DNA, 25 bp, Homo sapien
tccaggcccgcttagttcttcccca

SEQ ID NO: 4127557 - DNA, 25 bp, Homo sapien
ttgacctcctgattcacaccctggg

SEQ ID NO: 4127558 - DNA, 25 bp, Homo sapien
gcacctcactcacttgacctcctga

SEQ ID NO: 4127559 - DNA, 25 bp, Homo sapien
ctcactcacttgacctcctgattca

SEQ ID NO: 4127560 - DNA, 25 bp, Homo sapien
tcacttgacctcctgattcacaccc

SEQ ID NO: 4127561 - DNA, 25 bp, Homo sapien
gtggcactgggagagtcatccccac

SEQ ID NO: 4127562 - DNA, 25 bp, Homo sapien
gacgctcagacaagtcagagggcaa

SEQ ID NO: 4127563 - DNA, 25 bp, Homo sapien
acagttgccgcccaggagccagttt

SEQ ID NO: 4127564 - DNA, 25 bp, Homo sapien
ggaggtgagatttctccagggaaca

SEQ ID NO: 4127565 - DNA, 25 bp, Homo sapien
gacaatgacccttctctatttttcc

SEQ ID NO: 4127566 - DNA, 25 bp, Homo sapien
aaagcagagcatggatcgggaagca

SEQ ID NO: 4127567 - DNA, 25 bp, Homo sapien
tctcccgcctccctagacaatgacc

SEQ ID NO: 4127568 - DNA, 25 bp, Homo sapien
tccctagacaatgacccttctctat

SEQ ID NO: 4127569 - DNA, 25 bp, Homo sapien
ttgtctggaacagcccttggaaccc

SEQ ID NO: 4127570 - DNA, 25 bp, Homo sapien
tgtaaacacgcagacacactcaagg

SEQ ID NO: 4127571 - DNA, 25 bp, Homo sapien
tttccaggaatggtggcgtctcacg

SEQ ID NO: 4127572 - DNA, 25 bp, Homo sapien
taccagcatctcagacaagggcagg

SEQ ID NO: 4127573 - DNA, 25 bp, Homo sapien
tagtatggccacctgtcactaccct

SEQ ID NO: 4127574 - DNA, 25 bp, Homo sapien
gggcagggaactttctgaatatgtc

SEQ ID NO: 4127575 - DNA, 25 bp, Homo sapien
gcaaccatcacatggtagtatggcc

SEQ ID NO: 4127576 - DNA, 25 bp, Homo sapien
cttcaggtttggcggcggccctctg

SEQ ID NO: 4127577 - DNA, 25 bp, Homo sapien
gaaacgcgcgggcccttcccacagc

SEQ ID NO: 4127578 - DNA, 25 bp, Homo sapien
cagaaacgcgcgggcccttcccaca

SEQ ID NO: 4127579 - DNA, 25 bp, Homo sapien
agaaacgcgcgggcccttcccacag

SEQ ID NO: 4127580 - DNA, 25 bp, Homo sapien
aggcgcctcgatggcactcagggcc

SEQ ID NO: 4127581 - DNA, 25 bp, Homo sapien
ggagaaggtccaggcgcctcgatgg

SEQ ID NO: 4127582 - DNA, 25 bp, Homo sapien
agggcccgccccacaagcatcacca

SEQ ID NO: 4127583 - DNA, 25 bp, Homo sapien
cagtcgaggccagcctttccgcgag

SEQ ID NO: 4127584 - DNA, 25 bp, Homo sapien
ggcggccggaggcggatgcgccaac

SEQ ID NO: 4127585 - DNA, 25 bp, Homo sapien
cggccggaggcggatgcgccaacgc

SEQ ID NO: 4127586 - DNA, 25 bp, Homo sapien
aggcggatgcgccaacgccggagcc

SEQ ID NO: 4127587 - DNA, 25 bp, Homo sapien
ccggaggcggatgcgccaacgccgg

SEQ ID NO: 4127588 - DNA, 25 bp, Homo sapien
cactggcaggtgtgcggggacgggg

SEQ ID NO: 4127589 - DNA, 25 bp, Homo sapien
gtcccgggtctctggctcaaccctc

SEQ ID NO: 4127590 - DNA, 25 bp, Homo sapien
gtctctggctcaaccctccaaccct

SEQ ID NO: 4127591 - DNA, 25 bp, Homo sapien
gacggggtcccgggtctctggctca

SEQ ID NO: 4127592 - DNA, 25 bp, Homo sapien
tctccgtgtcgtcggccctcgcagg

SEQ ID NO: 4127593 - DNA, 25 bp, Homo sapien
ctgggttgggcgcaggatcctgttc

SEQ ID NO: 4127594 - DNA, 25 bp, Homo sapien
aggatcctgttctccgtgtcgtcgg

SEQ ID NO: 4127595 - DNA, 25 bp, Homo sapien
gttctccgtgtcgtcggccctcgca

SEQ ID NO: 4127596 - DNA, 25 bp, Homo sapien
tgggcctctgaaagaaggcggggac

SEQ ID NO: 4127597 - DNA, 25 bp, Homo sapien
gcctgggcctctgaaagaaggcggg

SEQ ID NO: 4127598 - DNA, 25 bp, Homo sapien
aggcctgggcctctgaaagaaggcg

SEQ ID NO: 4127599 - DNA, 25 bp, Homo sapien
caggcctgggcctctgaaagaaggc

SEQ ID NO: 4127600 - DNA, 25 bp, Homo sapien
cacaaggctgaattgacaggccgcc

SEQ ID NO: 4127601 - DNA, 25 bp, Homo sapien
tgatgaatggttgaggtccagcctg

SEQ ID NO: 4127602 - DNA, 25 bp, Homo sapien
caggtggaggcctagctgtctgcac

SEQ ID NO: 4127603 - DNA, 25 bp, Homo sapien
gacaatggagccttatgccctggaa

SEQ ID NO: 4127604 - DNA, 25 bp, Homo sapien
ctgcagttctccatgcgtggagaca

SEQ ID NO: 4127605 - DNA, 25 bp, Homo sapien
gcccagctctgcatgtcctgctaag

SEQ ID NO: 4127606 - DNA, 25 bp, Homo sapien
gcagttctccatgcgtggagacaga

SEQ ID NO: 4127607 - DNA, 25 bp, Homo sapien
gcatgtcctgctaagggtcctgggc

SEQ ID NO: 4127608 - DNA, 25 bp, Homo sapien
caattatttcaagtgggccaggccc

SEQ ID NO: 4127609 - DNA, 25 bp, Homo sapien
tgggaggcagatcaacttcatggca

SEQ ID NO: 4127610 - DNA, 25 bp, Homo sapien
caccacatcagtagccggagcaatt

SEQ ID NO: 4127611 - DNA, 25 bp, Homo sapien
tatgccactgaccaggcagctggag

SEQ ID NO: 4127612 - DNA, 25 bp, Homo sapien
aagactttgcttgcgctgtgccctc

SEQ ID NO: 4127613 - DNA, 25 bp, Homo sapien
ttgtcacctgctggacttctcaccg

SEQ ID NO: 4127614 - DNA, 25 bp, Homo sapien
gcttggtgtagcttccagtactcca

SEQ ID NO: 4127615 - DNA, 25 bp, Homo sapien
gccacaggaccactctgaagcttgg

SEQ ID NO: 4127616 - DNA, 25 bp, Homo sapien
tcccttctgagggccctgtcagaac

SEQ ID NO: 4127617 - DNA, 25 bp, Homo sapien
cccttctgagggccctgtcagaact

SEQ ID NO: 4127618 - DNA, 25 bp, Homo sapien
tgtggggaaagataatggggagctc

SEQ ID NO: 4127619 - DNA, 25 bp, Homo sapien
gataatggggagctcagctgccacc

SEQ ID NO: 4127620 - DNA, 25 bp, Homo sapien
cagctgccacctcagttcccaggga

SEQ ID NO: 4127621 - DNA, 25 bp, Homo sapien
ctccctccacaggtggggagctgtg

SEQ ID NO: 4127622 - DNA, 25 bp, Homo sapien
ccaggcgggagtggaatgggcacaa

SEQ ID NO: 4127623 - DNA, 25 bp, Homo sapien
tagagggcggatcgggtgaccgggc

SEQ ID NO: 4127624 - DNA, 25 bp, Homo sapien
tagaggtcttccaggccaacactgg

SEQ ID NO: 4127625 - DNA, 25 bp, Homo sapien
tctgacggctcctttaagaagcagc

SEQ ID NO: 4127626 - DNA, 25 bp, Homo sapien
tgccaagtgcaatgagcaaaacaag

SEQ ID NO: 4127627 - DNA, 25 bp, Homo sapien
aatcagatggatgcagagggtgcca

SEQ ID NO: 4127628 - DNA, 25 bp, Homo sapien
gagggatactgggagacatagacaa

SEQ ID NO: 4127629 - DNA, 25 bp, Homo sapien
agagtgccaacaaggaatcagatgg

SEQ ID NO: 4127630 - DNA, 25 bp, Homo sapien
gaagaggagtcagcagtgagggcga

SEQ ID NO: 4127631 - DNA, 25 bp, Homo sapien
cgcctggccacaatcacagacacac

SEQ ID NO: 4127632 - DNA, 25 bp, Homo sapien
agtccccagggatcagattacagcc

SEQ ID NO: 4127633 - DNA, 25 bp, Homo sapien
tggggggtcgcattccacttccgaa

SEQ ID NO: 4127634 - DNA, 25 bp, Homo sapien
gtgtgtgtggaggagccttgagctg

SEQ ID NO: 4127635 - DNA, 25 bp, Homo sapien
ggcccgggatcacggcggcagcccc

SEQ ID NO: 4127636 - DNA, 25 bp, Homo sapien
aaggagagccgaaggcgtgggggct

SEQ ID NO: 4127637 - DNA, 25 bp, Homo sapien
gaaggagagccgaaggcgtgggggc

SEQ ID NO: 4127638 - DNA, 25 bp, Homo sapien
gccaggcccgggatcacggcggcag

SEQ ID NO: 4127639 - DNA, 25 bp, Homo sapien
ggacactgctgatgactcgccagcc

SEQ ID NO: 4127640 - DNA, 25 bp, Homo sapien
gacactgctgatgactcgccagcca

SEQ ID NO: 4127641 - DNA, 25 bp, Homo sapien
acactgctgatgactcgccagccat

SEQ ID NO: 4127642 - DNA, 25 bp, Homo sapien
agcaggttcgctccaggctgaaagt

SEQ ID NO: 4127643 - DNA, 25 bp, Homo sapien
cacccacaaacaggcgtccacgctc

SEQ ID NO: 4127644 - DNA, 25 bp, Homo sapien
gcctggtagcagcaggttcgctcca

SEQ ID NO: 4127645 - DNA, 25 bp, Homo sapien
ttgtccaggttgagggaggccacat

SEQ ID NO: 4127646 - DNA, 25 bp, Homo sapien
cccagttgcactcctctcgccattc

SEQ ID NO: 4127647 - DNA, 25 bp, Homo sapien
ttgcactcctctcgccattccacag

SEQ ID NO: 4127648 - DNA, 25 bp, Homo sapien
agttgcactcctctcgccattccac

SEQ ID NO: 4127649 - DNA, 25 bp, Homo sapien
cagttgcactcctctcgccattcca

SEQ ID NO: 4127650 - DNA, 25 bp, Homo sapien
tcagcccaggcaagtactaacatgg

SEQ ID NO: 4127651 - DNA, 25 bp, Homo sapien
ccaggcctcacgagggtgggtgtct

SEQ ID NO: 4127652 - DNA, 25 bp, Homo sapien
tactaacatgggctacagggacctg

SEQ ID NO: 4127653 - DNA, 25 bp, Homo sapien
tgcaaagcctcccatgactcagagg

SEQ ID NO: 4127654 - DNA, 25 bp, Homo sapien
gcggttgtaggcatgcagcaacttc

SEQ ID NO: 4127655 - DNA, 25 bp, Homo sapien
ggcatgcagcaacttcacgaagttc

SEQ ID NO: 4127656 - DNA, 25 bp, Homo sapien
gtggaaggctcccgtgccacaggcc

SEQ ID NO: 4127657 - DNA, 25 bp, Homo sapien
cacaggccagcaaatgggtgcggtt

SEQ ID NO: 4127658 - DNA, 25 bp, Homo sapien
gaggtgtggcaagttgtgactacca

SEQ ID NO: 4127659 - DNA, 25 bp, Homo sapien
tggcaagttgtgactaccaggccct

SEQ ID NO: 4127660 - DNA, 25 bp, Homo sapien
gtgtggcaagttgtgactaccaggc

SEQ ID NO: 4127661 - DNA, 25 bp, Homo sapien
gcaagttgtgactaccaggcccttc

SEQ ID NO: 4127662 - DNA, 25 bp, Homo sapien
agcccgatgcctggggtcataagga

SEQ ID NO: 4127663 - DNA, 25 bp, Homo sapien
ctgggtccagccggaggacgggctc

SEQ ID NO: 4127664 - DNA, 25 bp, Homo sapien
tgcctggggtcataaggactcttcc

SEQ ID NO: 4127665 - DNA, 25 bp, Homo sapien
agcacggaggcagcccgatgcctgg

SEQ ID NO: 4127666 - DNA, 25 bp, Homo sapien
gtaaagtctcgtcccatgaggtctg

SEQ ID NO: 4127667 - DNA, 25 bp, Homo sapien
tggacgttgccctaggctgcgaaag

SEQ ID NO: 4127668 - DNA, 25 bp, Homo sapien
agtcgtgtggctctgttcggagact

SEQ ID NO: 4127669 - DNA, 25 bp, Homo sapien
atgaggtctgctgccacccctgagt

SEQ ID NO: 4127670 - DNA, 25 bp, Homo sapien
aactcaaagaggtcacggtcatacc

SEQ ID NO: 4127671 - DNA, 25 bp, Homo sapien
gagattacagtcagagcctaccacc

SEQ ID NO: 4127672 - DNA, 25 bp, Homo sapien
tgacgccagtgcctgattaaggagg

SEQ ID NO: 4127673 - DNA, 25 bp, Homo sapien
tgctcacttactttatgggccttgc

SEQ ID NO: 4127674 - DNA, 25 bp, Homo sapien
ggcacagcacccgggatcacagtgt

SEQ ID NO: 4127675 - DNA, 25 bp, Homo sapien
tccccttcccgtagtgcgggcacag

SEQ ID NO: 4127676 - DNA, 25 bp, Homo sapien
agttggcgctctgcgcggaccgaat

SEQ ID NO: 4127677 - DNA, 25 bp, Homo sapien
aacctctagcaccatgtccagttgg

SEQ ID NO: 4127678 - DNA, 25 bp, Homo sapien
ctggccttgcctcctgatgcgagac

SEQ ID NO: 4127679 - DNA, 25 bp, Homo sapien
ggaggcatgggtcagcgggtcctgg

SEQ ID NO: 4127680 - DNA, 25 bp, Homo sapien
tggccttgcctcctgatgcgagacc

SEQ ID NO: 4127681 - DNA, 25 bp, Homo sapien
gcaggaggcatgggtcagcgggtcc

SEQ ID NO: 4127682 - DNA, 25 bp, Homo sapien
gaagtagattttgtcgtcgtctggg

SEQ ID NO: 4127683 - DNA, 25 bp, Homo sapien
ggcagatctggccaacgcgggacac

SEQ ID NO: 4127684 - DNA, 25 bp, Homo sapien
ggttctcgctctccgggatccaaaa

SEQ ID NO: 4127685 - DNA, 25 bp, Homo sapien
taccgccgtctcacgaaagaagaag

SEQ ID NO: 4127686 - DNA, 25 bp, Homo sapien
agggcgagaccagggcaggcaaagg

SEQ ID NO: 4127687 - DNA, 25 bp, Homo sapien
gggcagggtcgccgggtgtggccca

SEQ ID NO: 4127688 - DNA, 25 bp, Homo sapien
ctgccgggacgatcaaaggggatga

SEQ ID NO: 4127689 - DNA, 25 bp, Homo sapien
tcaaaggggatgagggcgagaccag

SEQ ID NO: 4127690 - DNA, 25 bp, Homo sapien
tcgacgccgggcaccgagcacacca

SEQ ID NO: 4127691 - DNA, 25 bp, Homo sapien
tcaggaacgtcgtccacttgttgac

SEQ ID NO: 4127692 - DNA, 25 bp, Homo sapien
atcgaagtgggtgtcgccctcgacg

SEQ ID NO: 4127693 - DNA, 25 bp, Homo sapien
agctgatcgaagtgggtgtcgccct

SEQ ID NO: 4127694 - DNA, 25 bp, Homo sapien
ggctcccggagtctgcgccgctgcc

SEQ ID NO: 4127695 - DNA, 25 bp, Homo sapien
aaccccatacccactcccgcactca

SEQ ID NO: 4127696 - DNA, 25 bp, Homo sapien
ccaaccccatacccactcccgcact

SEQ ID NO: 4127697 - DNA, 25 bp, Homo sapien
ctcccggagtctgcgccgctgcccc

SEQ ID NO: 4127698 - DNA, 25 bp, Homo sapien
ctagctggggtagggcgcacagccc

SEQ ID NO: 4127699 - DNA, 25 bp, Homo sapien
agctggggtagggcgcacagccccg

SEQ ID NO: 4127700 - DNA, 25 bp, Homo sapien
tagctggggtagggcgcacagcccc

SEQ ID NO: 4127701 - DNA, 25 bp, Homo sapien
tggtcccgcgaggacaacagaaaca

SEQ ID NO: 4127702 - DNA, 25 bp, Homo sapien
ctggacgtggagaagacggcataga

SEQ ID NO: 4127703 - DNA, 25 bp, Homo sapien
gacgtggagaagacggcatagagca

SEQ ID NO: 4127704 - DNA, 25 bp, Homo sapien
gtccggtggtcccgcgaggacaaca

SEQ ID NO: 4127705 - DNA, 25 bp, Homo sapien
tatgacacccactggtgcatgggcc

SEQ ID NO: 4127706 - DNA, 25 bp, Homo sapien
gggacgcgaccctggtatgacaccc

SEQ ID NO: 4127707 - DNA, 25 bp, Homo sapien
cccggcgcacgtcgttcatgctgta

SEQ ID NO: 4127708 - DNA, 25 bp, Homo sapien
cgcacaccgcagagccctggaagat

SEQ ID NO: 4127709 - DNA, 25 bp, Homo sapien
aagtgggttgtagcagaagtccctg

SEQ ID NO: 4127710 - DNA, 25 bp, Homo sapien
ccttgaggctttgaagtgggttgta

SEQ ID NO: 4127711 - DNA, 25 bp, Homo sapien
tgaagtgggttgtagcagaagtccc

SEQ ID NO: 4127712 - DNA, 25 bp, Homo sapien
tttgaagtgggttgtagcagaagtc

SEQ ID NO: 4127713 - DNA, 25 bp, Homo sapien
aagaagaccccaggccaagttctca

SEQ ID NO: 4127714 - DNA, 25 bp, Homo sapien
ccttgccctaggaagtcagaggcgg

SEQ ID NO: 4127715 - DNA, 25 bp, Homo sapien
aattagagaggagatcagccttgcc

SEQ ID NO: 4127716 - DNA, 25 bp, Homo sapien
tcagaggcgggaaacaagccttgtc

SEQ ID NO: 4127717 - DNA, 25 bp, Homo sapien
aactgaaggtgccaaaggtcttgct

SEQ ID NO: 4127718 - DNA, 25 bp, Homo sapien
tcatagtgtccgtcagcggctgcaa

SEQ ID NO: 4127719 - DNA, 25 bp, Homo sapien
gagtgaaggtgtaattggctccaac

SEQ ID NO: 4127720 - DNA, 25 bp, Homo sapien
cccggtccgcggcaatttgagtgaa

SEQ ID NO: 4127721 - DNA, 25 bp, Homo sapien
gggctagtgtctcctcgcctttgag

SEQ ID NO: 4127722 - DNA, 25 bp, Homo sapien
gcctttgaggcgtctaccctcagca

SEQ ID NO: 4127723 - DNA, 25 bp, Homo sapien
gggtaatgaccattggtgctcccgg

SEQ ID NO: 4127724 - DNA, 25 bp, Homo sapien
cctcagcatgtttgggttgtgaaga

SEQ ID NO: 4127725 - DNA, 25 bp, Homo sapien
cccttggggaccgagatcaccttca

SEQ ID NO: 4127726 - DNA, 25 bp, Homo sapien
tgcccttggggaccgagatcacctt

SEQ ID NO: 4127727 - DNA, 25 bp, Homo sapien
cttggggaccgagatcaccttcagc

SEQ ID NO: 4127728 - DNA, 25 bp, Homo sapien
ccttggggaccgagatcaccttcag

SEQ ID NO: 4127729 - DNA, 25 bp, Homo sapien
ccgggcgactgggggtgaggcctca

SEQ ID NO: 4127730 - DNA, 25 bp, Homo sapien
ctgagagggaggaggggcgacgggg

SEQ ID NO: 4127731 - DNA, 25 bp, Homo sapien
cgggcgactgggggtgaggcctcac

SEQ ID NO: 4127732 - DNA, 25 bp, Homo sapien
agaaatttgcatgctggtgacagcg

SEQ ID NO: 4127733 - DNA, 25 bp, Homo sapien
cttggaagaaatttgcatgctggtg

SEQ ID NO: 4127734 - DNA, 25 bp, Homo sapien
aaatttgcatgctggtgacagcggc

SEQ ID NO: 4127735 - DNA, 25 bp, Homo sapien
cctcttggaagaaatttgcatgctg

SEQ ID NO: 4127736 - DNA, 25 bp, Homo sapien
gaggtcttacgcctcaggtcacaca

SEQ ID NO: 4127737 - DNA, 25 bp, Homo sapien
tcttccactcgacagatgggaacac

SEQ ID NO: 4127738 - DNA, 25 bp, Homo sapien
aagccagagcctgtactcaaacccg

SEQ ID NO: 4127739 - DNA, 25 bp, Homo sapien
tcccatcggtcagggatcccttctt

SEQ ID NO: 4127740 - DNA, 25 bp, Homo sapien
agacagcattcggtgcagacgcggc

SEQ ID NO: 4127741 - DNA, 25 bp, Homo sapien
tccgcgaggctacgtacagctggtg

SEQ ID NO: 4127742 - DNA, 25 bp, Homo sapien
cagcgcagcggtgcaacgcgatctg

SEQ ID NO: 4127743 - DNA, 25 bp, Homo sapien
tggaagcgcgtgcacgcgaccccgt

SEQ ID NO: 4127744 - DNA, 25 bp, Homo sapien
tgctggggtcgccattccttacgtc

SEQ ID NO: 4127745 - DNA, 25 bp, Homo sapien
gagcacaacgtgctggggtcgccat

SEQ ID NO: 4127746 - DNA, 25 bp, Homo sapien
ctccggagcacaacgtgctggggtc

SEQ ID NO: 4127747 - DNA, 25 bp, Homo sapien
cattccttacgtcttgccgccggaa

SEQ ID NO: 4127748 - DNA, 25 bp, Homo sapien
gccctccacgccgaacaccttgtgt

SEQ ID NO: 4127749 - DNA, 25 bp, Homo sapien
ctccacgcgcgcctgcagcgagcgg

SEQ ID NO: 4127750 - DNA, 25 bp, Homo sapien
cacactccagaaaggcgctgctgcc

SEQ ID NO: 4127751 - DNA, 25 bp, Homo sapien
tgcgcgctggaaagtccactccacg

SEQ ID NO: 4127752 - DNA, 25 bp, Homo sapien
gaagcaaagagtcattgggagccga

SEQ ID NO: 4127753 - DNA, 25 bp, Homo sapien
tgcaggtgagggaccaaactggaca

SEQ ID NO: 4127754 - DNA, 25 bp, Homo sapien
gggcgggtcttctccttgattcagg

SEQ ID NO: 4127755 - DNA, 25 bp, Homo sapien
ttcaagggagaatccgaaagaggcg

SEQ ID NO: 4127756 - DNA, 25 bp, Homo sapien
acaggcgacgcagcggttgcgtaaa

SEQ ID NO: 4127757 - DNA, 25 bp, Homo sapien
gcggcgcacaagtacacgcccgagt

SEQ ID NO: 4127758 - DNA, 25 bp, Homo sapien
agcctgcgcagcagtagtccccggg

SEQ ID NO: 4127759 - DNA, 25 bp, Homo sapien
ttgcgtaaagccctgctcgacggcg

SEQ ID NO: 4127760 - DNA, 25 bp, Homo sapien
tcggcccgcgccagtcgttcggcct

SEQ ID NO: 4127761 - DNA, 25 bp, Homo sapien
gttcggcctgcgtagcactcaacac

SEQ ID NO: 4127762 - DNA, 25 bp, Homo sapien
cagtcgttcggcctgcgtagcactc

SEQ ID NO: 4127763 - DNA, 25 bp, Homo sapien
cgcgccagtcgttcggcctgcgtag

SEQ ID NO: 4127764 - DNA, 25 bp, Homo sapien
ggcacatgcgcagggagttcgcgct

SEQ ID NO: 4127765 - DNA, 25 bp, Homo sapien
cgggcggcacatgcgcagggagttc

SEQ ID NO: 4127766 - DNA, 25 bp, Homo sapien
cacatgcgcagggagttcgcgctgc

SEQ ID NO: 4127767 - DNA, 25 bp, Homo sapien
gcggcacatgcgcagggagttcgcg

SEQ ID NO: 4127768 - DNA, 25 bp, Homo sapien
ttacggccctttctccgcgactcca

SEQ ID NO: 4127769 - DNA, 25 bp, Homo sapien
gctgcgcggcccccgctcagcgcga

SEQ ID NO: 4127770 - DNA, 25 bp, Homo sapien
ctcagcgcgaggctcaggggcgtgg

SEQ ID NO: 4127771 - DNA, 25 bp, Homo sapien
acggccctttctccgcgactccagg

SEQ ID NO: 4127772 - DNA, 25 bp, Homo sapien
cactgctcactacccaaggaggtgg

SEQ ID NO: 4127773 - DNA, 25 bp, Homo sapien
tgttaataaataagcccgcgcagct

SEQ ID NO: 4127774 - DNA, 25 bp, Homo sapien
gttggtgtctccatcggccggtgac

SEQ ID NO: 4127775 - DNA, 25 bp, Homo sapien
tactttagtacagtcggcctgcctc

SEQ ID NO: 4127776 - DNA, 25 bp, Homo sapien
aagaccacatagcaaggccgaggac

SEQ ID NO: 4127777 - DNA, 25 bp, Homo sapien
tggccggaaccacctttaatcctca

SEQ ID NO: 4127778 - DNA, 25 bp, Homo sapien
accgctagtaaggtgcccaagacca

SEQ ID NO: 4127779 - DNA, 25 bp, Homo sapien
ggcaaccttggacaggagaaactcg

SEQ ID NO: 4127780 - DNA, 25 bp, Homo sapien
cgtgtcactattcccaaaggcccta

SEQ ID NO: 4127781 - DNA, 25 bp, Homo sapien
gaacctgttcagtcacgcggaacca

SEQ ID NO: 4127782 - DNA, 25 bp, Homo sapien
tattatgcacaatgtaccctgcgtg

SEQ ID NO: 4127783 - DNA, 25 bp, Homo sapien
aaaggccctacagaacctgttcagt

SEQ ID NO: 4127784 - DNA, 25 bp, Homo sapien
gatgcgcatcactgcttaccttgaa

SEQ ID NO: 4127785 - DNA, 25 bp, Homo sapien
caacaagcttgttaccacctcaggg

SEQ ID NO: 4127786 - DNA, 25 bp, Homo sapien
tctgtggttggatccctgtgccctt

SEQ ID NO: 4127787 - DNA, 25 bp, Homo sapien
gtcttgtcagcgaactcaaatgcca

SEQ ID NO: 4127788 - DNA, 25 bp, Homo sapien
gtctcctcaggcatggcaagcagtg

SEQ ID NO: 4127789 - DNA, 25 bp, Homo sapien
cttgggtctcctcaggcatggcaag

SEQ ID NO: 4127790 - DNA, 25 bp, Homo sapien
tgggtctcctcaggcatggcaagca

SEQ ID NO: 4127791 - DNA, 25 bp, Homo sapien
ggcagtcgggggccaatgatggcat

SEQ ID NO: 4127792 - DNA, 25 bp, Homo sapien
ctgataacagtagggaagagcattg

SEQ ID NO: 4127793 - DNA, 25 bp, Homo sapien
ctggaagctgataacagtagggaag

SEQ ID NO: 4127794 - DNA, 25 bp, Homo sapien
gggacacctccagataggagcaagg

SEQ ID NO: 4127795 - DNA, 25 bp, Homo sapien
tggccttgcactctgggactgtcat

SEQ ID NO: 4127796 - DNA, 25 bp, Homo sapien
taggtcgctgatggactccacctgg

SEQ ID NO: 4127797 - DNA, 25 bp, Homo sapien
tggactccacctggtgcaggcatac

SEQ ID NO: 4127798 - DNA, 25 bp, Homo sapien
ctccactatgtaggtcgctgatgga

SEQ ID NO: 4127799 - DNA, 25 bp, Homo sapien
ggcatacctcatgcacgtggttggg

SEQ ID NO: 4127800 - DNA, 25 bp, Homo sapien
tgacggcggcaaaacgcccagcagc

SEQ ID NO: 4127801 - DNA, 25 bp, Homo sapien
ccacggtcgtgcctcttcagttaga

SEQ ID NO: 4127802 - DNA, 25 bp, Homo sapien
ttcagttagataggggcgcagtgtg

SEQ ID NO: 4127803 - DNA, 25 bp, Homo sapien
agcagctcatcccacggtcgtgcct

SEQ ID NO: 4127804 - DNA, 25 bp, Homo sapien
agacagccaggagtgcgagcactag

SEQ ID NO: 4127805 - DNA, 25 bp, Homo sapien
gcagcaggaaccctcctcgtctgta

SEQ ID NO: 4127806 - DNA, 25 bp, Homo sapien
gaaccctcctcgtctgtacacaggg

SEQ ID NO: 4127807 - DNA, 25 bp, Homo sapien
acagccaggagtgcgagcactaggc

SEQ ID NO: 4127808 - DNA, 25 bp, Homo sapien
caagcggagtttgagtagtgtctcc

SEQ ID NO: 4127809 - DNA, 25 bp, Homo sapien
gcttgggcctcactggagttgagcc

SEQ ID NO: 4127810 - DNA, 25 bp, Homo sapien
agtgtctcctcctgcgtgcggagcg

SEQ ID NO: 4127811 - DNA, 25 bp, Homo sapien
aggatgcgcagggattcactctgca

SEQ ID NO: 4127812 - DNA, 25 bp, Homo sapien
gggaggcagccattaagttaacaac

SEQ ID NO: 4127813 - DNA, 25 bp, Homo sapien
tctcaggccaggctaaatatgtgcc

SEQ ID NO: 4127814 - DNA, 25 bp, Homo sapien
tagacttcagaacctgccatctggg

SEQ ID NO: 4127815 - DNA, 25 bp, Homo sapien
gaacggtcagccttctgtggtctta

SEQ ID NO: 4127816 - DNA, 25 bp, Homo sapien
aaagtgtgaacctgcggatcgctgc

SEQ ID NO: 4127817 - DNA, 25 bp, Homo sapien
cagtaacaagtaccgtgccaaggct

SEQ ID NO: 4127818 - DNA, 25 bp, Homo sapien
cggatctacgctgccttcaaggaag

SEQ ID NO: 4127819 - DNA, 25 bp, Homo sapien
gatcgctgccggtgaaaccattgca

SEQ ID NO: 4127820 - DNA, 25 bp, Homo sapien
gcacgacccctgaatctgctgagag

SEQ ID NO: 4127821 - DNA, 25 bp, Homo sapien
tcaaatgtcgatgctaccctggctg

SEQ ID NO: 4127822 - DNA, 25 bp, Homo sapien
tgattggccacacactgagttgcac

SEQ ID NO: 4127823 - DNA, 25 bp, Homo sapien
tattgagaacctaatgcactctggg

SEQ ID NO: 4127824 - DNA, 25 bp, Homo sapien
tcttaggcatgtaggaccctgcagg

SEQ ID NO: 4127825 - DNA, 25 bp, Homo sapien
agttgggccgacattgaccacctgc

SEQ ID NO: 4127826 - DNA, 25 bp, Homo sapien
gtgaaccccagctgcgacctgtggg

SEQ ID NO: 4127827 - DNA, 25 bp, Homo sapien
acttccgctgccagtgctacttggg

SEQ ID NO: 4127828 - DNA, 25 bp, Homo sapien
tctacctggacgagacacttgcttc

SEQ ID NO: 4127829 - DNA, 25 bp, Homo sapien
cgccatggccgcaactttgtgagct

SEQ ID NO: 4127830 - DNA, 25 bp, Homo sapien
tgatgttgaggtggcccgcaatgac

SEQ ID NO: 4127831 - DNA, 25 bp, Homo sapien
ttcaggaggcccttcgtgtggctcg

SEQ ID NO: 4127832 - DNA, 25 bp, Homo sapien
ccgggctcccaaaggacctcagaga

SEQ ID NO: 4127833 - DNA, 25 bp, Homo sapien
gatctcagggatgactgtcccgccc

SEQ ID NO: 4127834 - DNA, 25 bp, Homo sapien
actgggcagaaaaggacgggatctc

SEQ ID NO: 4127835 - DNA, 25 bp, Homo sapien
gccgggctgccaggataacgactgc

SEQ ID NO: 4127836 - DNA, 25 bp, Homo sapien
ctgccagtctttcggaggtttgaac

SEQ ID NO: 4127837 - DNA, 25 bp, Homo sapien
tatccagcctggacttgcagttctg

SEQ ID NO: 4127838 - DNA, 25 bp, Homo sapien
gcagattctctactaggcttaggct

SEQ ID NO: 4127839 - DNA, 25 bp, Homo sapien
caaggctagggcaggatcaccatat

SEQ ID NO: 4127840 - DNA, 25 bp, Homo sapien
ttcagcaagcaaggctcggcccact

SEQ ID NO: 4127841 - DNA, 25 bp, Homo sapien
tgcctgcggacaccatgggagaatg

SEQ ID NO: 4127842 - DNA, 25 bp, Homo sapien
catgggagaatgagctcaggctgct

SEQ ID NO: 4127843 - DNA, 25 bp, Homo sapien
ggcccactagtattgcccctgctgt

SEQ ID NO: 4127844 - DNA, 25 bp, Homo sapien
tgggatctcgcaacgcatgctggga

SEQ ID NO: 4127845 - DNA, 25 bp, Homo sapien
cactctgaaagtctccctagggaag

SEQ ID NO: 4127846 - DNA, 25 bp, Homo sapien
aaaatagaagccagatgggcacccg

SEQ ID NO: 4127847 - DNA, 25 bp, Homo sapien
gcttgcgaagtcctgctaggcctga

SEQ ID NO: 4127848 - DNA, 25 bp, Homo sapien
cccaacactttggttgggctaggtg

SEQ ID NO: 4127849 - DNA, 25 bp, Homo sapien
agttgagtgtagacccctgggcttg

SEQ ID NO: 4127850 - DNA, 25 bp, Homo sapien
gggctagccacggaggtgcacacct

SEQ ID NO: 4127851 - DNA, 25 bp, Homo sapien
aaaggaagccaagtacggtggctca

SEQ ID NO: 4127852 - DNA, 25 bp, Homo sapien
cagtcagtcctgagccattttccac

SEQ ID NO: 4127853 - DNA, 25 bp, Homo sapien
gatttccgcgttcgaatgctcctgc

SEQ ID NO: 4127854 - DNA, 25 bp, Homo sapien
gctatgactaaagccgaccgagcag

SEQ ID NO: 4127855 - DNA, 25 bp, Homo sapien
ggttgaacacggaaaaagcagctgt

SEQ ID NO: 4127856 - DNA, 25 bp, Homo sapien
gaccgagcagtttggactagcacct

SEQ ID NO: 4127857 - DNA, 25 bp, Homo sapien
cccaggtggccaacattagagtccg

SEQ ID NO: 4127858 - DNA, 25 bp, Homo sapien
tagagatccaactgttgagcaggcc

SEQ ID NO: 4127859 - DNA, 25 bp, Homo sapien
ggcctctctgcagattgcaagttca

SEQ ID NO: 4127860 - DNA, 25 bp, Homo sapien
cccactgagataggtcgggcctgcg

SEQ ID NO: 4127861 - DNA, 25 bp, Homo sapien
cccacccagtgggtaggccaagtgt

SEQ ID NO: 4127862 - DNA, 25 bp, Homo sapien
acccagtgggtaggccaagtgtgtt

SEQ ID NO: 4127863 - DNA, 25 bp, Homo sapien
gatgtggggaccctcttcctctagc

SEQ ID NO: 4127864 - DNA, 25 bp, Homo sapien
ttcagcaaaccggaccaggagggcc

SEQ ID NO: 4127865 - DNA, 25 bp, Homo sapien
gaatgtgacagcatccccaccccgg

SEQ ID NO: 4127866 - DNA, 25 bp, Homo sapien
gggtccgtcgtccccgaatgtgaca

SEQ ID NO: 4127867 - DNA, 25 bp, Homo sapien
tgtcccagactttggcaccgtcggg

SEQ ID NO: 4127868 - DNA, 25 bp, Homo sapien
ggaccccggcctcgatatgggagac

SEQ ID NO: 4127869 - DNA, 25 bp, Homo sapien
gattggcaagcttgcgtgccccagc

SEQ ID NO: 4127870 - DNA, 25 bp, Homo sapien
agccgctttacttccgggtgcgacg

SEQ ID NO: 4127871 - DNA, 25 bp, Homo sapien
gatctgatgcggtggtttcctccaa

SEQ ID NO: 4127872 - DNA, 25 bp, Homo sapien
caggcctcgaggctgtctctgacaa

SEQ ID NO: 4127873 - DNA, 25 bp, Homo sapien
tctgaactggtaccaatcgctggcc

SEQ ID NO: 4127874 - DNA, 25 bp, Homo sapien
tgcggtcccagttacagcgtgaatc

SEQ ID NO: 4127875 - DNA, 25 bp, Homo sapien
gaaattgtagttccctgctgcggtc

SEQ ID NO: 4127876 - DNA, 25 bp, Homo sapien
ttccaggtaggaggcgcaaagccat

SEQ ID NO: 4127877 - DNA, 25 bp, Homo sapien
ccaggatctcaggtgcccactgttc

SEQ ID NO: 4127878 - DNA, 25 bp, Homo sapien
ctgaaagcatagtagcgtgggccag

SEQ ID NO: 4127879 - DNA, 25 bp, Homo sapien
tgaaagcatagtagcgtgggccagg

SEQ ID NO: 4127880 - DNA, 25 bp, Homo sapien
aggatctcaggtgcccactgttcac

SEQ ID NO: 4127881 - DNA, 25 bp, Homo sapien
cgtcagccgtgctagtggttgtagc

SEQ ID NO: 4127882 - DNA, 25 bp, Homo sapien
cgcagagctcggtagatgtgtgact

SEQ ID NO: 4127883 - DNA, 25 bp, Homo sapien
ccagggccacaaggtgggcggcagc

SEQ ID NO: 4127884 - DNA, 25 bp, Homo sapien
gcagcgccagaagcagtacgcagag

SEQ ID NO: 4127885 - DNA, 25 bp, Homo sapien
cagccacaaagatggtaaagcccag

SEQ ID NO: 4127886 - DNA, 25 bp, Homo sapien
tcatcgctccagcacagaattccct

SEQ ID NO: 4127887 - DNA, 25 bp, Homo sapien
gcctgttcccggaagtcccactgcc

SEQ ID NO: 4127888 - DNA, 25 bp, Homo sapien
tccagcacagaattccctcaaccag

SEQ ID NO: 4127889 - DNA, 25 bp, Homo sapien
attccctcaaccagccaggcctgtt

SEQ ID NO: 4127890 - DNA, 25 bp, Homo sapien
ttcttgctctgcaacaagctgaccc

SEQ ID NO: 4127891 - DNA, 25 bp, Homo sapien
tcctggatcagaggccatgctttgc

SEQ ID NO: 4127892 - DNA, 25 bp, Homo sapien
gccataccaatccttaagggttgag

SEQ ID NO: 4127893 - DNA, 25 bp, Homo sapien
caaaccaggaattctgtgtgccctg

SEQ ID NO: 4127894 - DNA, 25 bp, Homo sapien
aagacataagcaccgggtgccagga

SEQ ID NO: 4127895 - DNA, 25 bp, Homo sapien
acataagcaccgggtgccaggagaa

SEQ ID NO: 4127896 - DNA, 25 bp, Homo sapien
caaagacataagcaccgggtgccag

SEQ ID NO: 4127897 - DNA, 25 bp, Homo sapien
agccaaagacataagcaccgggtgc

SEQ ID NO: 4127898 - DNA, 25 bp, Homo sapien
cacatgggtgcactgtttcagggaa

SEQ ID NO: 4127899 - DNA, 25 bp, Homo sapien
tcagggaaagttaggtgcatcacca

SEQ ID NO: 4127900 - DNA, 25 bp, Homo sapien
cccatctgggatgatatatgtgccc

SEQ ID NO: 4127901 - DNA, 25 bp, Homo sapien
tatgtaacccttagctgccagtgag

SEQ ID NO: 4127902 - DNA, 25 bp, Homo sapien
cctttccgtgagagggagtgcagca

SEQ ID NO: 4127903 - DNA, 25 bp, Homo sapien
gtgcagcagcgaactctcaggagaa

SEQ ID NO: 4127904 - DNA, 25 bp, Homo sapien
agtgcctcggtcatcaggaaggaga

SEQ ID NO: 4127905 - DNA, 25 bp, Homo sapien
ccatgccgcgtaaccaggtgggctt

SEQ ID NO: 4127906 - DNA, 25 bp, Homo sapien
ggttcataatgaccaagctggtgag

SEQ ID NO: 4127907 - DNA, 25 bp, Homo sapien
gtgaggacagggcataatacagcca

SEQ ID NO: 4127908 - DNA, 25 bp, Homo sapien
cagggcataatacagccaggtacca

SEQ ID NO: 4127909 - DNA, 25 bp, Homo sapien
gcattgctcacctggttcataatga

SEQ ID NO: 4127910 - DNA, 25 bp, Homo sapien
atggttggatcctcttgcggtatag

SEQ ID NO: 4127911 - DNA, 25 bp, Homo sapien
aaatccaggcttcccctaggctggg

SEQ ID NO: 4127912 - DNA, 25 bp, Homo sapien
caactgtcccagtgcctgaggtgtc

SEQ ID NO: 4127913 - DNA, 25 bp, Homo sapien
catgaggagcaggaattcacacacg

SEQ ID NO: 4127914 - DNA, 25 bp, Homo sapien
cagctgagagagttcaacaggtccc

SEQ ID NO: 4127915 - DNA, 25 bp, Homo sapien
tggggggtccccatcttgcccagct

SEQ ID NO: 4127916 - DNA, 25 bp, Homo sapien
atttgtgtgctaggagagcttcagc

SEQ ID NO: 4127917 - DNA, 25 bp, Homo sapien
cattcacagctacagctctagggcc

SEQ ID NO: 4127918 - DNA, 25 bp, Homo sapien
gccagggcccggagtggcctgggag

SEQ ID NO: 4127919 - DNA, 25 bp, Homo sapien
tctgaaactggttgccgagagccct

SEQ ID NO: 4127920 - DNA, 25 bp, Homo sapien
ggcggtgactgcttctggaccagaa

SEQ ID NO: 4127921 - DNA, 25 bp, Homo sapien
taagaatgtacatcagctggcagcc

SEQ ID NO: 4127922 - DNA, 25 bp, Homo sapien
cagggcacctgactgctctgaggag

SEQ ID NO: 4127923 - DNA, 25 bp, Homo sapien
ggtttgctggcgaacttggtgcaca

SEQ ID NO: 4127924 - DNA, 25 bp, Homo sapien
caagctaggagcatactggtcgagt

SEQ ID NO: 4127925 - DNA, 25 bp, Homo sapien
tcaagacgccgagcggagaaggtac

SEQ ID NO: 4127926 - DNA, 25 bp, Homo sapien
ccatctgttgaggtgttcgctgtac

SEQ ID NO: 4127927 - DNA, 25 bp, Homo sapien
gacctttgcgatcttctcatgtgga

SEQ ID NO: 4127928 - DNA, 25 bp, Homo sapien
gaatcctctcaagcttaggccctag

SEQ ID NO: 4127929 - DNA, 25 bp, Homo sapien
tctctgcgcactgacctggctgagt

SEQ ID NO: 4127930 - DNA, 25 bp, Homo sapien
tgccgggagctatgagtgagcacct

SEQ ID NO: 4127931 - DNA, 25 bp, Homo sapien
tgaagaccatggtagcccaggtccc

SEQ ID NO: 4127932 - DNA, 25 bp, Homo sapien
ccagttataataggtgccaggccct

SEQ ID NO: 4127933 - DNA, 25 bp, Homo sapien
aagacagttggccaagacctcagag

SEQ ID NO: 4127934 - DNA, 25 bp, Homo sapien
gagtcccacttagtgctctgcaggg

SEQ ID NO: 4127935 - DNA, 25 bp, Homo sapien
tcatcgactgcggaaactgctccag

SEQ ID NO: 4127936 - DNA, 25 bp, Homo sapien
agagaagtagggcatggcatcgtcc

SEQ ID NO: 4127937 - DNA, 25 bp, Homo sapien
cagctggttccaagcaggtaggtag

SEQ ID NO: 4127938 - DNA, 25 bp, Homo sapien
gagcagctgcgtcatgaaacagacc

SEQ ID NO: 4127939 - DNA, 25 bp, Homo sapien
agtggcagtccacgcccctctctcc

SEQ ID NO: 4127940 - DNA, 25 bp, Homo sapien
tgggggtgacctagggcgaggggca

SEQ ID NO: 4127941 - DNA, 25 bp, Homo sapien
gggtgacctagggcgaggggcagca

SEQ ID NO: 4127942 - DNA, 25 bp, Homo sapien
gcagtggcagtccacgcccctctct

SEQ ID NO: 4127943 - DNA, 25 bp, Homo sapien
tcaaaccagaaccatcagtgggacc

SEQ ID NO: 4127944 - DNA, 25 bp, Homo sapien
catcagtgggaccaggtgaggatca

SEQ ID NO: 4127945 - DNA, 25 bp, Homo sapien
ccagaaccatcagtgggaccaggtg

SEQ ID NO: 4127946 - DNA, 25 bp, Homo sapien
ctgtcaaaccagaaccatcagtggg

SEQ ID NO: 4127947 - DNA, 25 bp, Homo sapien
cattgatgatggaggattcctggtg

SEQ ID NO: 4127948 - DNA, 25 bp, Homo sapien
gggtgctccagggcagctgaggact

SEQ ID NO: 4127949 - DNA, 25 bp, Homo sapien
cagtctgcctcttgggtgctccagg

SEQ ID NO: 4127950 - DNA, 25 bp, Homo sapien
ttgggtgctccagggcagctgagga

SEQ ID NO: 4127951 - DNA, 25 bp, Homo sapien
tcttgggtgctccagggcagctgag

SEQ ID NO: 4127952 - DNA, 25 bp, Homo sapien
catcacgcagcagctggtagagcgt

SEQ ID NO: 4127953 - DNA, 25 bp, Homo sapien
tccaagcagtgtgagtgcctggcag

SEQ ID NO: 4127954 - DNA, 25 bp, Homo sapien
gggaccaggatctcaacacgtaggc

SEQ ID NO: 4127955 - DNA, 25 bp, Homo sapien
tgcacaacctgatcttggacacggg

SEQ ID NO: 4127956 - DNA, 25 bp, Homo sapien
tgcacttctgcccctactgtcagcc

SEQ ID NO: 4127957 - DNA, 25 bp, Homo sapien
gcacttctgcccctactgtcagccc

SEQ ID NO: 4127958 - DNA, 25 bp, Homo sapien
aatgtctgctcaaggccgaagcagc

SEQ ID NO: 4127959 - DNA, 25 bp, Homo sapien
aaatgtctgctcaaggccgaagcag

SEQ ID NO: 4127960 - DNA, 25 bp, Homo sapien
catgtgagggccacaaagtcgctga

SEQ ID NO: 4127961 - DNA, 25 bp, Homo sapien
ccgtcatgcatgtagcaggcactgt

SEQ ID NO: 4127962 - DNA, 25 bp, Homo sapien
aagtcgctgaggtggccgtcatgca

SEQ ID NO: 4127963 - DNA, 25 bp, Homo sapien
gattcttttggtccctgactgtgga

SEQ ID NO: 4127964 - DNA, 25 bp, Homo sapien
tgggttcgtgtatttcattagcggt

SEQ ID NO: 4127965 - DNA, 25 bp, Homo sapien
atttcattagcggtcacctggatgg

SEQ ID NO: 4127966 - DNA, 25 bp, Homo sapien
tctccaatgggttcgtgtatttcat

SEQ ID NO: 4127967 - DNA, 25 bp, Homo sapien
tcgtgtatttcattagcggtcacct

SEQ ID NO: 4127968 - DNA, 25 bp, Homo sapien
gctgattgcctctgtgccaatttgc

SEQ ID NO: 4127969 - DNA, 25 bp, Homo sapien
ctgattgcctctgtgccaatttgca

SEQ ID NO: 4127970 - DNA, 25 bp, Homo sapien
cttttagagtcaggctgattgcctc

SEQ ID NO: 4127971 - DNA, 25 bp, Homo sapien
cagcttttagagtcaggctgattgc

SEQ ID NO: 4127972 - DNA, 25 bp, Homo sapien
tgagtgatcactgtgcgcctgagcc

SEQ ID NO: 4127973 - DNA, 25 bp, Homo sapien
actgtgcgcctgagcctctttgcag

SEQ ID NO: 4127974 - DNA, 25 bp, Homo sapien
cagatgttggagtttattatcccat

SEQ ID NO: 4127975 - DNA, 25 bp, Homo sapien
cccatcgggccagcgttttgtagag

SEQ ID NO: 4127976 - DNA, 25 bp, Homo sapien
aagagatagtgcacgttcagagcgg

SEQ ID NO: 4127977 - DNA, 25 bp, Homo sapien
agagatagtgcacgttcagagcggt

SEQ ID NO: 4127978 - DNA, 25 bp, Homo sapien
ccagctacacctttccctggaatgt

SEQ ID NO: 4127979 - DNA, 25 bp, Homo sapien
ccctggaatgtcttctctgaccttc

SEQ ID NO: 4127980 - DNA, 25 bp, Homo sapien
agctacacctttccctggaatgtct

SEQ ID NO: 4127981 - DNA, 25 bp, Homo sapien
ttccctggaatgtcttctctgacct

SEQ ID NO: 4127982 - DNA, 25 bp, Homo sapien
tcctctgccgggaaggtacacaatc

SEQ ID NO: 4127983 - DNA, 25 bp, Homo sapien
ctctgccgggaaggtacacaatctg

SEQ ID NO: 4127984 - DNA, 25 bp, Homo sapien
tgctcctctgccgggaaggtacaca

SEQ ID NO: 4127985 - DNA, 25 bp, Homo sapien
ctcctctgccgggaaggtacacaat

SEQ ID NO: 4127986 - DNA, 25 bp, Homo sapien
gtggaagcccagggcaccatcgcct

SEQ ID NO: 4127987 - DNA, 25 bp, Homo sapien
agggagcccttgacagagctagaag

SEQ ID NO: 4127988 - DNA, 25 bp, Homo sapien
ctgctggaggttgccgacagacgat

SEQ ID NO: 4127989 - DNA, 25 bp, Homo sapien
gagctagaagtgcaggcctccctcc

SEQ ID NO: 4127990 - DNA, 25 bp, Homo sapien
gccctgatccagtcagggtgtggca

SEQ ID NO: 4127991 - DNA, 25 bp, Homo sapien
tggatgtgaccttggttggattctg

SEQ ID NO: 4127992 - DNA, 25 bp, Homo sapien
ccagtcagggtgtggcattctggat

SEQ ID NO: 4127993 - DNA, 25 bp, Homo sapien
gatgtgaccttggttggattctgga

SEQ ID NO: 4127994 - DNA, 25 bp, Homo sapien
ggaagatcagtcgttttcgtgatgt

SEQ ID NO: 4127995 - DNA, 25 bp, Homo sapien
cgttttcgtgatgtttccagatcct

SEQ ID NO: 4127996 - DNA, 25 bp, Homo sapien
agcaggaagatcagtcgttttcgtg

SEQ ID NO: 4127997 - DNA, 25 bp, Homo sapien
cagtcgttttcgtgatgtttccaga

SEQ ID NO: 4127998 - DNA, 25 bp, Homo sapien
agcatcatcagggctcatggtgagg

SEQ ID NO: 4127999 - DNA, 25 bp, Homo sapien
ctgatagcatcatcagggctcatgg

SEQ ID NO: 4128000 - DNA, 25 bp, Homo sapien
catcatcagggctcatggtgaggtc

SEQ ID NO: 4128001 - DNA, 25 bp, Homo sapien
ctctgatagcatcatcagggctcat

SEQ ID NO: 4128002 - DNA, 25 bp, Homo sapien
tccgagcagttctggcgaggaatta

SEQ ID NO: 4128003 - DNA, 25 bp, Homo sapien
tccaatttcacgtccgagcagttct

SEQ ID NO: 4128004 - DNA, 25 bp, Homo sapien
cagttctggcgaggaattagcagct

SEQ ID NO: 4128005 - DNA, 25 bp, Homo sapien
tttcacgtccgagcagttctggcga

SEQ ID NO: 4128006 - DNA, 25 bp, Homo sapien
tgcggtggggtgtgacgtcggcggg

SEQ ID NO: 4128007 - DNA, 25 bp, Homo sapien
cgtcggcgggcgtcttgcggatgtg

SEQ ID NO: 4128008 - DNA, 25 bp, Homo sapien
cacccgtgacatcggccagtgtggc

SEQ ID NO: 4128009 - DNA, 25 bp, Homo sapien
aggacacccgtgacatcggccagtg

SEQ ID NO: 4128010 - DNA, 25 bp, Homo sapien
gattgaaaaattgctttcccaggcc

SEQ ID NO: 4128011 - DNA, 25 bp, Homo sapien
taaactgctaatctcccgggctgag

SEQ ID NO: 4128012 - DNA, 25 bp, Homo sapien
aaggcaaggcctcgaagtggaaatc

SEQ ID NO: 4128013 - DNA, 25 bp, Homo sapien
gcttcagcggtattagtgtttgcag

SEQ ID NO: 4128014 - DNA, 25 bp, Homo sapien
aaatgcctccggtgcttgtccgcat

SEQ ID NO: 4128015 - DNA, 25 bp, Homo sapien
atgagtgagcgccaccaaatgcctc

SEQ ID NO: 4128016 - DNA, 25 bp, Homo sapien
ccccagagagcggagtgattatgcc

SEQ ID NO: 4128017 - DNA, 25 bp, Homo sapien
tcattaggatgtttctgagctcgtg

SEQ ID NO: 4128018 - DNA, 25 bp, Homo sapien
catattactttgactggtcctggcg

SEQ ID NO: 4128019 - DNA, 25 bp, Homo sapien
gagaagaaataaaagtccatgtgcc

SEQ ID NO: 4128020 - DNA, 25 bp, Homo sapien
tgtgccggtcgcaggcatattactt

SEQ ID NO: 4128021 - DNA, 25 bp, Homo sapien
aaatatttatctctccacgccgcag

SEQ ID NO: 4128022 - DNA, 25 bp, Homo sapien
ctatggccctgcctgtctggcgccc

SEQ ID NO: 4128023 - DNA, 25 bp, Homo sapien
tggccctgcctgtctggcgccccat

SEQ ID NO: 4128024 - DNA, 25 bp, Homo sapien
tatggccctgcctgtctggcgcccc

SEQ ID NO: 4128025 - DNA, 25 bp, Homo sapien
gactatggccctgcctgtctggcgc

SEQ ID NO: 4128026 - DNA, 25 bp, Homo sapien
atgccttgggctgcccagacctcat

SEQ ID NO: 4128027 - DNA, 25 bp, Homo sapien
catgccttgggctgcccagacctca

SEQ ID NO: 4128028 - DNA, 25 bp, Homo sapien
ctcagcaccctccatagaaagggat

SEQ ID NO: 4128029 - DNA, 25 bp, Homo sapien
cttgtggagacctcagcaaggaggc

SEQ ID NO: 4128030 - DNA, 25 bp, Homo sapien
tgccacctcatctgcataactgtca

SEQ ID NO: 4128031 - DNA, 25 bp, Homo sapien
tcctttcctgtaaccggtgcttgtg

SEQ ID NO: 4128032 - DNA, 25 bp, Homo sapien
agtaggcattgagctgactgcgacc

SEQ ID NO: 4128033 - DNA, 25 bp, Homo sapien
aggagtaggcattgagctgactgcg

SEQ ID NO: 4128034 - DNA, 25 bp, Homo sapien
taggcattgagctgactgcgacccc

SEQ ID NO: 4128035 - DNA, 25 bp, Homo sapien
ctctgtgccgggtcatggggccctt

SEQ ID NO: 4128036 - DNA, 25 bp, Homo sapien
ccatcactgttacccgtgactgagc

SEQ ID NO: 4128037 - DNA, 25 bp, Homo sapien
cagccatcactgttacccgtgactg

SEQ ID NO: 4128038 - DNA, 25 bp, Homo sapien
gccatcactgttacccgtgactgag

SEQ ID NO: 4128039 - DNA, 25 bp, Homo sapien
cccagccatcactgttacccgtgac

SEQ ID NO: 4128040 - DNA, 25 bp, Homo sapien
tggcttggtgtccccggtcctggtc

SEQ ID NO: 4128041 - DNA, 25 bp, Homo sapien
gctgttggcttggtgtccccggtcc

SEQ ID NO: 4128042 - DNA, 25 bp, Homo sapien
tcaggctgttggcttggtgtccccg

SEQ ID NO: 4128043 - DNA, 25 bp, Homo sapien
tgttggcttggtgtccccggtcctg

SEQ ID NO: 4128044 - DNA, 25 bp, Homo sapien
caggcacctccttttggtcagctgt

SEQ ID NO: 4128045 - DNA, 25 bp, Homo sapien
tcccctggactccatctttatcagg

SEQ ID NO: 4128046 - DNA, 25 bp, Homo sapien
gttcccctggactccatctttatca

SEQ ID NO: 4128047 - DNA, 25 bp, Homo sapien
atcaggcacctccttttggtcagct

SEQ ID NO: 4128048 - DNA, 25 bp, Homo sapien
tcttccgcatatatcatctccagca

SEQ ID NO: 4128049 - DNA, 25 bp, Homo sapien
aaacaagccgctcctgaaccaggac

SEQ ID NO: 4128050 - DNA, 25 bp, Homo sapien
ggccccacatgtctttgggcttcca

SEQ ID NO: 4128051 - DNA, 25 bp, Homo sapien
cagggatcccggtgatccagtgcag

SEQ ID NO: 4128052 - DNA, 25 bp, Homo sapien
ggacagaaggggcctgtcgtaagca

SEQ ID NO: 4128053 - DNA, 25 bp, Homo sapien
ctgggggacagaaggggcctgtcgt

SEQ ID NO: 4128054 - DNA, 25 bp, Homo sapien
tgggggacagaaggggcctgtcgta

SEQ ID NO: 4128055 - DNA, 25 bp, Homo sapien
gggacagaaggggcctgtcgtaagc

SEQ ID NO: 4128056 - DNA, 25 bp, Homo sapien
cacttgatgcagcagccctgtgggc

SEQ ID NO: 4128057 - DNA, 25 bp, Homo sapien
cttgatgcagcagccctgtgggcag

SEQ ID NO: 4128058 - DNA, 25 bp, Homo sapien
acttgatgcagcagccctgtgggca

SEQ ID NO: 4128059 - DNA, 25 bp, Homo sapien
ctgggccagcacgatgtgcgatact

SEQ ID NO: 4128060 - DNA, 25 bp, Homo sapien
agcacgatgtgcgatactcatcctg

SEQ ID NO: 4128061 - DNA, 25 bp, Homo sapien
cttgttgcagacgatggtgttgggt

SEQ ID NO: 4128062 - DNA, 25 bp, Homo sapien
tgcgatactcatcctgcctgctctg

SEQ ID NO: 4128063 - DNA, 25 bp, Homo sapien
gacagcaacgacagcaccctcagga

SEQ ID NO: 4128064 - DNA, 25 bp, Homo sapien
gcattgacagcaacgacagcaccct

SEQ ID NO: 4128065 - DNA, 25 bp, Homo sapien
attgacagcaacgacagcaccctca

SEQ ID NO: 4128066 - DNA, 25 bp, Homo sapien
agcattgacagcaacgacagcaccc

SEQ ID NO: 4128067 - DNA, 25 bp, Homo sapien
tgaggggcacccagtcggttctgga

SEQ ID NO: 4128068 - DNA, 25 bp, Homo sapien
cccagtcggttctggacttggaaga

SEQ ID NO: 4128069 - DNA, 25 bp, Homo sapien
cggttctggacttggaagagaccca

SEQ ID NO: 4128070 - DNA, 25 bp, Homo sapien
cacccagtcggttctggacttggaa

SEQ ID NO: 4128071 - DNA, 25 bp, Homo sapien
gggctgcagaagaagatggccccat

SEQ ID NO: 4128072 - DNA, 25 bp, Homo sapien
cagttcttggtaccaacttcaggct

SEQ ID NO: 4128073 - DNA, 25 bp, Homo sapien
acagttcttggtaccaacttcaggc

SEQ ID NO: 4128074 - DNA, 25 bp, Homo sapien
cacagttcttggtaccaacttcagg

SEQ ID NO: 4128075 - DNA, 25 bp, Homo sapien
ccattctgtgggtgtggccgtcgct

SEQ ID NO: 4128076 - DNA, 25 bp, Homo sapien
caggccaggatgttgcagcctctgc

SEQ ID NO: 4128077 - DNA, 25 bp, Homo sapien
aggacctgggttgcaggccaggatg

SEQ ID NO: 4128078 - DNA, 25 bp, Homo sapien
gccgtcgctgtgacagatgtggcac

SEQ ID NO: 4128079 - DNA, 25 bp, Homo sapien
caagcagtttctgtacgctcaaccg

SEQ ID NO: 4128080 - DNA, 25 bp, Homo sapien
tctgtacgctcaaccgtgagcttgg

SEQ ID NO: 4128081 - DNA, 25 bp, Homo sapien
ccaatctccaagagttgcattcagg

SEQ ID NO: 4128082 - DNA, 25 bp, Homo sapien
gctgcccttgagagccaagtctgct

SEQ ID NO: 4128083 - DNA, 25 bp, Homo sapien
aaaagaacaagaagtatgtagacat

SEQ ID NO: 4128084 - DNA, 25 bp, Homo sapien
ccagagttgctgagaaaagaacaag

SEQ ID NO: 4128085 - DNA, 25 bp, Homo sapien
aagaacaagaagtatgtagacatca

SEQ ID NO: 4128086 - DNA, 25 bp, Homo sapien
aggccagagttgctgagaaaagaac

SEQ ID NO: 4128087 - DNA, 25 bp, Homo sapien
tggcaactcctccaggtgttgggac

SEQ ID NO: 4128088 - DNA, 25 bp, Homo sapien
tggacctcagttgcgccttctataa

SEQ ID NO: 4128089 - DNA, 25 bp, Homo sapien
gcagcgtctcgcaaagtgtgtcttg

SEQ ID NO: 4128090 - DNA, 25 bp, Homo sapien
tctataaaatactcggcagcgtctc

SEQ ID NO: 4128091 - DNA, 25 bp, Homo sapien
agcagggatttggctccagcccaag

SEQ ID NO: 4128092 - DNA, 25 bp, Homo sapien
aaccaggccgggaggtgtgtgggcg

SEQ ID NO: 4128093 - DNA, 25 bp, Homo sapien
cagcccaaggggattgctccgagct

SEQ ID NO: 4128094 - DNA, 25 bp, Homo sapien
ttgctccgagctggcgtttaggaac

SEQ ID NO: 4128095 - DNA, 25 bp, Homo sapien
attccactccctctacgctcgcagg

SEQ ID NO: 4128096 - DNA, 25 bp, Homo sapien
gctgtgaattccactccctctacgc

SEQ ID NO: 4128097 - DNA, 25 bp, Homo sapien
catacaggaaagtgcggggatgtgt

SEQ ID NO: 4128098 - DNA, 25 bp, Homo sapien
tctacgctcgcaggcctgcatacag

SEQ ID NO: 4128099 - DNA, 25 bp, Homo sapien
ttcctatcgctggtgggttcctccc

SEQ ID NO: 4128100 - DNA, 25 bp, Homo sapien
actggacgcccggacgtgcgtggcc

SEQ ID NO: 4128101 - DNA, 25 bp, Homo sapien
tagcccagcttcagtgttcctatcg

SEQ ID NO: 4128102 - DNA, 25 bp, Homo sapien
gggcggacgccgtagcccagcttca

SEQ ID NO: 4128103 - DNA, 25 bp, Homo sapien
ctgcctgaaaggctgccccacccac

SEQ ID NO: 4128104 - DNA, 25 bp, Homo sapien
aggcggttgcagtcgaaacaccccg

SEQ ID NO: 4128105 - DNA, 25 bp, Homo sapien
tgcagtcgaaacaccccgttccgat

SEQ ID NO: 4128106 - DNA, 25 bp, Homo sapien
ggtctccaggcggttgcagtcgaaa

SEQ ID NO: 4128107 - DNA, 25 bp, Homo sapien
tccaggcggttgcagtcgaaacacc

SEQ ID NO: 4128108 - DNA, 25 bp, Homo sapien
tatgaatatccaaggcctgggaggc

SEQ ID NO: 4128109 - DNA, 25 bp, Homo sapien
taatccgggacatcagcgtaaacca

SEQ ID NO: 4128110 - DNA, 25 bp, Homo sapien
tgaacccagttcaagcaggcggaag

SEQ ID NO: 4128111 - DNA, 25 bp, Homo sapien
cattgttaacgacccagatgaggcc

SEQ ID NO: 4128112 - DNA, 25 bp, Homo sapien
tcttcacatttttagctggagtggg

SEQ ID NO: 4128113 - DNA, 25 bp, Homo sapien
tcacatttttagctggagtgggctg

SEQ ID NO: 4128114 - DNA, 25 bp, Homo sapien
cacatttttagctggagtgggctga

SEQ ID NO: 4128115 - DNA, 25 bp, Homo sapien
tggagtgggctgagcccatagctca

SEQ ID NO: 4128116 - DNA, 25 bp, Homo sapien
aggtgagccttgtatgacacccccc

SEQ ID NO: 4128117 - DNA, 25 bp, Homo sapien
tagagccttacccacctatttgatc

SEQ ID NO: 4128118 - DNA, 25 bp, Homo sapien
ccttctaccaatacattgcctgaga

SEQ ID NO: 4128119 - DNA, 25 bp, Homo sapien
cctgagaatagttgtgctcttgctc

SEQ ID NO: 4128120 - DNA, 25 bp, Homo sapien
ccaaaatggctctggtcctcagata

SEQ ID NO: 4128121 - DNA, 25 bp, Homo sapien
cacaagctctggtgccccaaaatgg

SEQ ID NO: 4128122 - DNA, 25 bp, Homo sapien
agatggagaggtcacaagctctggt

SEQ ID NO: 4128123 - DNA, 25 bp, Homo sapien
cccaagtctgctttatgatgtcagc

SEQ ID NO: 4128124 - DNA, 25 bp, Homo sapien
gggcccacagcattcggccccaaag

SEQ ID NO: 4128125 - DNA, 25 bp, Homo sapien
aggagggcccacagcattcggcccc

SEQ ID NO: 4128126 - DNA, 25 bp, Homo sapien
gcccacagcattcggccccaaagct

SEQ ID NO: 4128127 - DNA, 25 bp, Homo sapien
ggcactggataacccagccagaggt

SEQ ID NO: 4128128 - DNA, 25 bp, Homo sapien
tcagggatacccctcttctcaaaga

SEQ ID NO: 4128129 - DNA, 25 bp, Homo sapien
ctcttctcaaagaccccagtccagt

SEQ ID NO: 4128130 - DNA, 25 bp, Homo sapien
accccagtccagtggctgaccagtt

SEQ ID NO: 4128131 - DNA, 25 bp, Homo sapien
tggattcccgggcctcagggatacc

SEQ ID NO: 4128132 - DNA, 25 bp, Homo sapien
tggctccaaggacatgagccacgat

SEQ ID NO: 4128133 - DNA, 25 bp, Homo sapien
ccaaggacatgagccacgatgtact

SEQ ID NO: 4128134 - DNA, 25 bp, Homo sapien
tgttttggctccaaggacatgagcc

SEQ ID NO: 4128135 - DNA, 25 bp, Homo sapien
gctccaaggacatgagccacgatgt

SEQ ID NO: 4128136 - DNA, 25 bp, Homo sapien
cacagagaatataagtggctggctc

SEQ ID NO: 4128137 - DNA, 25 bp, Homo sapien
tatgtggataatgcctgcccagcac

SEQ ID NO: 4128138 - DNA, 25 bp, Homo sapien
caggcttccaggtgtctatcccaga

SEQ ID NO: 4128139 - DNA, 25 bp, Homo sapien
tgtgccaggcgctaagacgttcctt

SEQ ID NO: 4128140 - DNA, 25 bp, Homo sapien
gctcccggatacactgtagttgctg

SEQ ID NO: 4128141 - DNA, 25 bp, Homo sapien
agaggtcaagggctgggtccaaagt

SEQ ID NO: 4128142 - DNA, 25 bp, Homo sapien
tgggtccaaagtgccggcctcaggc

SEQ ID NO: 4128143 - DNA, 25 bp, Homo sapien
ctctgcaatcgacggctactcagct

SEQ ID NO: 4128144 - DNA, 25 bp, Homo sapien
tgggtggtcatcagggacagagcta

SEQ ID NO: 4128145 - DNA, 25 bp, Homo sapien
gggtggtcatcagggacagagctag

SEQ ID NO: 4128146 - DNA, 25 bp, Homo sapien
ccatccttaggctgagcccctggaa

SEQ ID NO: 4128147 - DNA, 25 bp, Homo sapien
tccaaggatgtactgcaccggcatc

SEQ ID NO: 4128148 - DNA, 25 bp, Homo sapien
ctggaagtcccactctccaaggatg

SEQ ID NO: 4128149 - DNA, 25 bp, Homo sapien
tttctggccgaggaataaacactgg

SEQ ID NO: 4128150 - DNA, 25 bp, Homo sapien
tctaaccagcagtggagtgggacac

SEQ ID NO: 4128151 - DNA, 25 bp, Homo sapien
agtagccaggcatgagacaaggaaa

SEQ ID NO: 4128152 - DNA, 25 bp, Homo sapien
aaatttttctaaccagcagtggagt

SEQ ID NO: 4128153 - DNA, 25 bp, Homo sapien
accagcagtggagtgggacacctga

SEQ ID NO: 4128154 - DNA, 25 bp, Homo sapien
ctggcagcaggaggacattttcaga

SEQ ID NO: 4128155 - DNA, 25 bp, Homo sapien
gcaggaggacattttcagacactgt

SEQ ID NO: 4128156 - DNA, 25 bp, Homo sapien
gcagcaggaggacattttcagacac

SEQ ID NO: 4128157 - DNA, 25 bp, Homo sapien
aggaggacattttcagacactgtca

SEQ ID NO: 4128158 - DNA, 25 bp, Homo sapien
agcatgggacctctgggccacctct

SEQ ID NO: 4128159 - DNA, 25 bp, Homo sapien
acagcatgggacctctgggccacct

SEQ ID NO: 4128160 - DNA, 25 bp, Homo sapien
gagatggctcctgatccgcagccca

SEQ ID NO: 4128161 - DNA, 25 bp, Homo sapien
agggagatggctcctgatccgcagc

SEQ ID NO: 4128162 - DNA, 25 bp, Homo sapien
gagatagcagcttcccgcttatcca

SEQ ID NO: 4128163 - DNA, 25 bp, Homo sapien
gcttcccgcttatccacagcaatga

SEQ ID NO: 4128164 - DNA, 25 bp, Homo sapien
cagagagatagcagcttcccgctta

SEQ ID NO: 4128165 - DNA, 25 bp, Homo sapien
gggtcagagagatagcagcttcccg

SEQ ID NO: 4128166 - DNA, 25 bp, Homo sapien
tatagtcaacccttcttggactggc

SEQ ID NO: 4128167 - DNA, 25 bp, Homo sapien
ttcctccttcttgggagtagaaatc

SEQ ID NO: 4128168 - DNA, 25 bp, Homo sapien
caagaatgaggtcttatagtcaacc

SEQ ID NO: 4128169 - DNA, 25 bp, Homo sapien
ttggactggcaagatactcactgcc

SEQ ID NO: 4128170 - DNA, 25 bp, Homo sapien
tccaaatcctgtcctgcaaccgaag

SEQ ID NO: 4128171 - DNA, 25 bp, Homo sapien
aggtcatgtcgaggtggatgatcca

SEQ ID NO: 4128172 - DNA, 25 bp, Homo sapien
tgtcgaggtggatgatccaaatcct

SEQ ID NO: 4128173 - DNA, 25 bp, Homo sapien
gatccaaatcctgtcctgcaaccga

SEQ ID NO: 4128174 - DNA, 25 bp, Homo sapien
aattcctgatggctctgactactgg

SEQ ID NO: 4128175 - DNA, 25 bp, Homo sapien
gccttatagccaacatggactgaga

SEQ ID NO: 4128176 - DNA, 25 bp, Homo sapien
tcaaggatcccacgggtaaggcaat

SEQ ID NO: 4128177 - DNA, 25 bp, Homo sapien
gagacactgtaaaggctatagctga

SEQ ID NO: 4128178 - DNA, 25 bp, Homo sapien
gagggttgctgacaatcaggtccat

SEQ ID NO: 4128179 - DNA, 25 bp, Homo sapien
gggcatgagtgtctccccacaggct

SEQ ID NO: 4128180 - DNA, 25 bp, Homo sapien
gatggcctggcacaaagctagcctg

SEQ ID NO: 4128181 - DNA, 25 bp, Homo sapien
catctactgagcaccctgtatgagc

SEQ ID NO: 4128182 - DNA, 25 bp, Homo sapien
tctcagcccctgtgtaagagcagga

SEQ ID NO: 4128183 - DNA, 25 bp, Homo sapien
gagaaaggggtatctgaaatgcatg

SEQ ID NO: 4128184 - DNA, 25 bp, Homo sapien
tgagaaaggggtatctgaaatgcat

SEQ ID NO: 4128185 - DNA, 25 bp, Homo sapien
gaaaggcaaagcagtgggaggtgac

SEQ ID NO: 4128186 - DNA, 25 bp, Homo sapien
aaaggcaaagcagtgggaggtgaca

SEQ ID NO: 4128187 - DNA, 25 bp, Homo sapien
ctgaaaggcaaagcagtgggaggtg

SEQ ID NO: 4128188 - DNA, 25 bp, Homo sapien
aggcaaagcagtgggaggtgacagc

SEQ ID NO: 4128189 - DNA, 25 bp, Homo sapien
cagaatgtgggtaatgatgtccatg

SEQ ID NO: 4128190 - DNA, 25 bp, Homo sapien
gggtaatgatgtccatgccctcctc

SEQ ID NO: 4128191 - DNA, 25 bp, Homo sapien
aatgtgggtaatgatgtccatgccc

SEQ ID NO: 4128192 - DNA, 25 bp, Homo sapien
tgtgggtaatgatgtccatgccctc

SEQ ID NO: 4128193 - DNA, 25 bp, Homo sapien
cagagtctttcaggagccggggtgc

SEQ ID NO: 4128194 - DNA, 25 bp, Homo sapien
ccagagtctttcaggagccggggtg

SEQ ID NO: 4128195 - DNA, 25 bp, Homo sapien
aggtctggcgcctgcccttctgggc

SEQ ID NO: 4128196 - DNA, 25 bp, Homo sapien
gggcctgcccagtacacattaggag

SEQ ID NO: 4128197 - DNA, 25 bp, Homo sapien
gcttgggctggcgaggtgagggtcc

SEQ ID NO: 4128198 - DNA, 25 bp, Homo sapien
ctcagcaggacaggtctggcgcctg

SEQ ID NO: 4128199 - DNA, 25 bp, Homo sapien
gtcaggccggctctgaagccagctg

SEQ ID NO: 4128200 - DNA, 25 bp, Homo sapien
cacaagattaaggtacaggtcaggc

SEQ ID NO: 4128201 - DNA, 25 bp, Homo sapien
gccagctgctgacaagctccgggtg

SEQ ID NO: 4128202 - DNA, 25 bp, Homo sapien
tccctgcgcacagccacaagattaa

SEQ ID NO: 4128203 - DNA, 25 bp, Homo sapien
catgctacagggctaaagggggcta

SEQ ID NO: 4128204 - DNA, 25 bp, Homo sapien
caggaagtgggaacagcacactctc

SEQ ID NO: 4128205 - DNA, 25 bp, Homo sapien
cagcatgctacagggctaaaggggg

SEQ ID NO: 4128206 - DNA, 25 bp, Homo sapien
gaacaggaagtgggaacagcacact

SEQ ID NO: 4128207 - DNA, 25 bp, Homo sapien
tccttgagccaaaacgcagatgagc

SEQ ID NO: 4128208 - DNA, 25 bp, Homo sapien
ccatggtatccaaggccaggagtga

SEQ ID NO: 4128209 - DNA, 25 bp, Homo sapien
ttaaatgaacgtggatgtgcgaccc

SEQ ID NO: 4128210 - DNA, 25 bp, Homo sapien
gaattgtgtacgcatgcacccaggg

SEQ ID NO: 4128211 - DNA, 25 bp, Homo sapien
tgatgacagcctactcagagcactg

SEQ ID NO: 4128212 - DNA, 25 bp, Homo sapien
taaggcagctgtatgagacccatgg

SEQ ID NO: 4128213 - DNA, 25 bp, Homo sapien
gaagaagtggattgtttgcaccgcc

SEQ ID NO: 4128214 - DNA, 25 bp, Homo sapien
catcgagagtactgcacaaaggctg

SEQ ID NO: 4128215 - DNA, 25 bp, Homo sapien
acttgggtatgccagatccacaggg

SEQ ID NO: 4128216 - DNA, 25 bp, Homo sapien
tttactgaacttgggtatgccagat

SEQ ID NO: 4128217 - DNA, 25 bp, Homo sapien
tacagaaggtgccagcagaggtatg

SEQ ID NO: 4128218 - DNA, 25 bp, Homo sapien
tctgaaggcatggtacagaaggtgc

SEQ ID NO: 4128219 - DNA, 25 bp, Homo sapien
taatgaccggaatacatgggctgcc

SEQ ID NO: 4128220 - DNA, 25 bp, Homo sapien
tgctcaacttgaatggctgcctggg

SEQ ID NO: 4128221 - DNA, 25 bp, Homo sapien
gatgtgggccacatgggaagtccca

SEQ ID NO: 4128222 - DNA, 25 bp, Homo sapien
tgaggaggagatcaggtcactgtcc

SEQ ID NO: 4128223 - DNA, 25 bp, Homo sapien
aggtttaggtgattaagacactgcc

SEQ ID NO: 4128224 - DNA, 25 bp, Homo sapien
tttggggggtcactgttcagcctac

SEQ ID NO: 4128225 - DNA, 25 bp, Homo sapien
cattttgctatgtgaaggtaatata

SEQ ID NO: 4128226 - DNA, 25 bp, Homo sapien
tatagtcacatgttaaggtttaggt

SEQ ID NO: 4128227 - DNA, 25 bp, Homo sapien
gttgagaaccccagggatagcccca

SEQ ID NO: 4128228 - DNA, 25 bp, Homo sapien
tgcagtacctgcaacccagagagta

SEQ ID NO: 4128229 - DNA, 25 bp, Homo sapien
gccaggcccattagctcaaagtcag

SEQ ID NO: 4128230 - DNA, 25 bp, Homo sapien
tcagtaggcgtgtgttacagcagca

SEQ ID NO: 4128231 - DNA, 25 bp, Homo sapien
tccagagtcctttagtacccctgga

SEQ ID NO: 4128232 - DNA, 25 bp, Homo sapien
tctccagagtcctttagtacccctg

SEQ ID NO: 4128233 - DNA, 25 bp, Homo sapien
ggtgtctccagagtcctttagtacc

SEQ ID NO: 4128234 - DNA, 25 bp, Homo sapien
tgtctccagagtcctttagtacccc

SEQ ID NO: 4128235 - DNA, 25 bp, Homo sapien
cgcagacctagtacaagagggagca

SEQ ID NO: 4128236 - DNA, 25 bp, Homo sapien
gaatccctgggtttagtagctacat

SEQ ID NO: 4128237 - DNA, 25 bp, Homo sapien
gaacagcagagggacttggacgcct

SEQ ID NO: 4128238 - DNA, 25 bp, Homo sapien
tagtcaaatggacaccaatggcagc

SEQ ID NO: 4128239 - DNA, 25 bp, Homo sapien
caagggtccacaagcccaggtaact

SEQ ID NO: 4128240 - DNA, 25 bp, Homo sapien
gcccaggtaacttctgcgctaagct

SEQ ID NO: 4128241 - DNA, 25 bp, Homo sapien
tgctccaagggtccacaagcccagg

SEQ ID NO: 4128242 - DNA, 25 bp, Homo sapien
ggtccacaagcccaggtaacttctg

SEQ ID NO: 4128243 - DNA, 25 bp, Homo sapien
tatgaccacgtgtgtgcagcacctg

SEQ ID NO: 4128244 - DNA, 25 bp, Homo sapien
tagtttacacactgcagatgcccgg

SEQ ID NO: 4128245 - DNA, 25 bp, Homo sapien
gaaacagtggctttcagtgcgggcc

SEQ ID NO: 4128246 - DNA, 25 bp, Homo sapien
caatcaaagagactgcaaggtgggc

SEQ ID NO: 4128247 - DNA, 25 bp, Homo sapien
gactctggcagaggctctgtttcct

SEQ ID NO: 4128248 - DNA, 25 bp, Homo sapien
caggtggtgactctggcagaggctc

SEQ ID NO: 4128249 - DNA, 25 bp, Homo sapien
ctggcagaggctctgtttcctcttc

SEQ ID NO: 4128250 - DNA, 25 bp, Homo sapien
tggtgactctggcagaggctctgtt

SEQ ID NO: 4128251 - DNA, 25 bp, Homo sapien
ctctgcccttggagggcgcacagga

SEQ ID NO: 4128252 - DNA, 25 bp, Homo sapien
cttggagggcgcacaggaccttgtt

SEQ ID NO: 4128253 - DNA, 25 bp, Homo sapien
ccagctttgcctcgggcacagtgct

SEQ ID NO: 4128254 - DNA, 25 bp, Homo sapien
aagctggaatagcaaactccacggg

SEQ ID NO: 4128255 - DNA, 25 bp, Homo sapien
ttctccaccgtagtgcaacccaatg

SEQ ID NO: 4128256 - DNA, 25 bp, Homo sapien
tatgcaggcatcaccgggccatcat

SEQ ID NO: 4128257 - DNA, 25 bp, Homo sapien
gacgtgggtcccctaaattcagcat

SEQ ID NO: 4128258 - DNA, 25 bp, Homo sapien
catcactctgtaggaactgcggttc

SEQ ID NO: 4128259 - DNA, 25 bp, Homo sapien
cagcagtatcaatcccaggtgtgga

SEQ ID NO: 4128260 - DNA, 25 bp, Homo sapien
gaggaaagagagtcaccccagaaat

SEQ ID NO: 4128261 - DNA, 25 bp, Homo sapien
ttgtgatacactctaaggaacaggc

SEQ ID NO: 4128262 - DNA, 25 bp, Homo sapien
taagagtcctttagagcacctgccc

SEQ ID NO: 4128263 - DNA, 25 bp, Homo sapien
gagacaaaggccagttagactgcct

SEQ ID NO: 4128264 - DNA, 25 bp, Homo sapien
tagactgcctgcagggtgactgccc

SEQ ID NO: 4128265 - DNA, 25 bp, Homo sapien
atatttgggctagcggagaggccca

SEQ ID NO: 4128266 - DNA, 25 bp, Homo sapien
tttcatgtacagagccctcaatggg

SEQ ID NO: 4128267 - DNA, 25 bp, Homo sapien
tccctgtggaaagcccatcctgaga

SEQ ID NO: 4128268 - DNA, 25 bp, Homo sapien
gggaggatggacaactacaataggt

SEQ ID NO: 4128269 - DNA, 25 bp, Homo sapien
tggtagtccagagaccccaactctg

SEQ ID NO: 4128270 - DNA, 25 bp, Homo sapien
ctggtactgacccacccgtctgtga

SEQ ID NO: 4128271 - DNA, 25 bp, Homo sapien
cctctgggtagcttcagccccgggt

SEQ ID NO: 4128272 - DNA, 25 bp, Homo sapien
tcagcgtcgcgattggtcagctcgc

SEQ ID NO: 4128273 - DNA, 25 bp, Homo sapien
tccaccttcagcgtcgcgattggtc

SEQ ID NO: 4128274 - DNA, 25 bp, Homo sapien
gggtccacgcgctgctattggccct

SEQ ID NO: 4128275 - DNA, 25 bp, Homo sapien
cagtggacccactcatttctggaac

SEQ ID NO: 4128276 - DNA, 25 bp, Homo sapien
aaacgttcttgtctggatctttctg

SEQ ID NO: 4128277 - DNA, 25 bp, Homo sapien
ggtctgcctgattcgaaaagttggg

SEQ ID NO: 4128278 - DNA, 25 bp, Homo sapien
gtgaccgccggcttgacctcagtgg

SEQ ID NO: 4128279 - DNA, 25 bp, Homo sapien
ccgcataacgggagcaacaccagtt

SEQ ID NO: 4128280 - DNA, 25 bp, Homo sapien
gggctgtcttctgtccgcataacgg

SEQ ID NO: 4128281 - DNA, 25 bp, Homo sapien
cagttgtagaggatcaaatgcagca

SEQ ID NO: 4128282 - DNA, 25 bp, Homo sapien
gcaacaccagttgtagaggatcaaa

SEQ ID NO: 4128283 - DNA, 25 bp, Homo sapien
tcaccagcacccatagaggaagtag

SEQ ID NO: 4128284 - DNA, 25 bp, Homo sapien
cactgaggaccttaaagctggatgt

SEQ ID NO: 4128285 - DNA, 25 bp, Homo sapien
gatgtctaggagtcggcagatcacc

SEQ ID NO: 4128286 - DNA, 25 bp, Homo sapien
tgccagctgggagatctaagttata

SEQ ID NO: 4128287 - DNA, 25 bp, Homo sapien
gaaactactcacttagcccaggaaa

SEQ ID NO: 4128288 - DNA, 25 bp, Homo sapien
catcggagagatgccttgaaactac

SEQ ID NO: 4128289 - DNA, 25 bp, Homo sapien
taaccagtgtccatgcttccacagg

SEQ ID NO: 4128290 - DNA, 25 bp, Homo sapien
tgagcgagacttttgggaaggcact

SEQ ID NO: 4128291 - DNA, 25 bp, Homo sapien
tggggccccgctaggtcagccttaa

SEQ ID NO: 4128292 - DNA, 25 bp, Homo sapien
tcatcccaacttggggccccgctag

SEQ ID NO: 4128293 - DNA, 25 bp, Homo sapien
taggtcagccttaaagggccaggcg

SEQ ID NO: 4128294 - DNA, 25 bp, Homo sapien
caacttggggccccgctaggtcagc

SEQ ID NO: 4128295 - DNA, 25 bp, Homo sapien
gcagaaatcccagggccgagagtcg

SEQ ID NO: 4128296 - DNA, 25 bp, Homo sapien
ggccgcagaaatcccagggccgaga

SEQ ID NO: 4128297 - DNA, 25 bp, Homo sapien
agctggcggccgcagaaatcccagg

SEQ ID NO: 4128298 - DNA, 25 bp, Homo sapien
aatcccagggccgagagtcgcgctg

SEQ ID NO: 4128299 - DNA, 25 bp, Homo sapien
cgggcgcctaatggccgcgaggtcc

SEQ ID NO: 4128300 - DNA, 25 bp, Homo sapien
gcccgggcacgtgtcaagaagggaa

SEQ ID NO: 4128301 - DNA, 25 bp, Homo sapien
cctaatggccgcgaggtccccggag

SEQ ID NO: 4128302 - DNA, 25 bp, Homo sapien
gggccgggcgcctaatggccgcgag

SEQ ID NO: 4128303 - DNA, 25 bp, Homo sapien
gtgcagcaaggggcggtggtcgcgc

SEQ ID NO: 4128304 - DNA, 25 bp, Homo sapien
tgcagcaaggggcggtggtcgcgcg

SEQ ID NO: 4128305 - DNA, 25 bp, Homo sapien
gaagagtgagtcccgcccagacttt

SEQ ID NO: 4128306 - DNA, 25 bp, Homo sapien
acttttccaacacaccccagccttg

SEQ ID NO: 4128307 - DNA, 25 bp, Homo sapien
gtgagtcccgcccagacttttccaa

SEQ ID NO: 4128308 - DNA, 25 bp, Homo sapien
cagccttggagcctctgaactgggc

SEQ ID NO: 4128309 - DNA, 25 bp, Homo sapien
ccgcggggcgctcagaggcggcccc

SEQ ID NO: 4128310 - DNA, 25 bp, Homo sapien
gcggggcgctcagaggcggccccag

SEQ ID NO: 4128311 - DNA, 25 bp, Homo sapien
ggcccccgcggggcgctcagaggcg

SEQ ID NO: 4128312 - DNA, 25 bp, Homo sapien
ccccgcggggcgctcagaggcggcc

SEQ ID NO: 4128313 - DNA, 25 bp, Homo sapien
cgatggaagcactccagcactttgc

SEQ ID NO: 4128314 - DNA, 25 bp, Homo sapien
cagcacctgcttggacaactggtag

SEQ ID NO: 4128315 - DNA, 25 bp, Homo sapien
tcactgcgtacttcttgggctcccg

SEQ ID NO: 4128316 - DNA, 25 bp, Homo sapien
caactggtagtcgtcggtcactgcg

SEQ ID NO: 4128317 - DNA, 25 bp, Homo sapien
tcacaggcttccgctgtggaccctc

SEQ ID NO: 4128318 - DNA, 25 bp, Homo sapien
acaggcttccgctgtggaccctcca

SEQ ID NO: 4128319 - DNA, 25 bp, Homo sapien
cacaggcttccgctgtggaccctcc

SEQ ID NO: 4128320 - DNA, 25 bp, Homo sapien
tgcagacaatatgggggccgccaga

SEQ ID NO: 4128321 - DNA, 25 bp, Homo sapien
ccgccagaagcctgccagtgatggt

SEQ ID NO: 4128322 - DNA, 25 bp, Homo sapien
tgatgaggagacagcgcttgccatg

SEQ ID NO: 4128323 - DNA, 25 bp, Homo sapien
tgccatggtgcatgttctcatacac

SEQ ID NO: 4128324 - DNA, 25 bp, Homo sapien
gagtagaaatcacactcagggaggc

SEQ ID NO: 4128325 - DNA, 25 bp, Homo sapien
gggaatgtccttatggccaactcca

SEQ ID NO: 4128326 - DNA, 25 bp, Homo sapien
caaagaaagcccctagaagcgtggc

SEQ ID NO: 4128327 - DNA, 25 bp, Homo sapien
ggcacccagatctgctacctgaaaa

SEQ ID NO: 4128328 - DNA, 25 bp, Homo sapien
gactgtgagggcttgggtactccca

SEQ ID NO: 4128329 - DNA, 25 bp, Homo sapien
caaatctgaagaactggctaaccgg

SEQ ID NO: 4128330 - DNA, 25 bp, Homo sapien
cctgggatccacgtttcatgagcgc

SEQ ID NO: 4128331 - DNA, 25 bp, Homo sapien
catgagcgctgttgtgtgatcctgg

SEQ ID NO: 4128332 - DNA, 25 bp, Homo sapien
ccctgccccaaatcataggcccagg

SEQ ID NO: 4128333 - DNA, 25 bp, Homo sapien
tgcacatcatcctacccttgcccct

SEQ ID NO: 4128334 - DNA, 25 bp, Homo sapien
cccctgccccaaatcataggcccag

SEQ ID NO: 4128335 - DNA, 25 bp, Homo sapien
catcatcctacccttgcccctgccc

SEQ ID NO: 4128336 - DNA, 25 bp, Homo sapien
ctgaatcctgctgaacaactcacca

SEQ ID NO: 4128337 - DNA, 25 bp, Homo sapien
tgaaagcctggtcgccacgctcctg

SEQ ID NO: 4128338 - DNA, 25 bp, Homo sapien
tcagtgaaagcctggtcgccacgct

SEQ ID NO: 4128339 - DNA, 25 bp, Homo sapien
gctgaacaactcaccaccttccatg

SEQ ID NO: 4128340 - DNA, 25 bp, Homo sapien
cttgacatctcggtgggcaatgtta

SEQ ID NO: 4128341 - DNA, 25 bp, Homo sapien
ccaatatcccgcattatctctgcag

SEQ ID NO: 4128342 - DNA, 25 bp, Homo sapien
gggcaatgttatggctgtgcagaaa

SEQ ID NO: 4128343 - DNA, 25 bp, Homo sapien
ctggatggcagtgccaatatcccgc

SEQ ID NO: 4128344 - DNA, 25 bp, Homo sapien
tgaggcctggcacattgcatccaca

SEQ ID NO: 4128345 - DNA, 25 bp, Homo sapien
gaatcccagtgcagcaactacacag

SEQ ID NO: 4128346 - DNA, 25 bp, Homo sapien
taatggcacttatctcacaaggctg

SEQ ID NO: 4128347 - DNA, 25 bp, Homo sapien
tccacacaaaatttcttgctgaaca

SEQ ID NO: 4128348 - DNA, 25 bp, Homo sapien
tagatgtgtagagtaggttttcagg

SEQ ID NO: 4128349 - DNA, 25 bp, Homo sapien
caaaatcggtgagcttaagcactgc

SEQ ID NO: 4128350 - DNA, 25 bp, Homo sapien
cacataatagggagtatagcagggt

SEQ ID NO: 4128351 - DNA, 25 bp, Homo sapien
taagcactgcgtctttctccttaga

SEQ ID NO: 4128352 - DNA, 25 bp, Homo sapien
tccgtcccaagctgatggcagcctt

SEQ ID NO: 4128353 - DNA, 25 bp, Homo sapien
tgggctccgtcccaagctgatggca

SEQ ID NO: 4128354 - DNA, 25 bp, Homo sapien
cgcggttgggctccgtcccaagctg

SEQ ID NO: 4128355 - DNA, 25 bp, Homo sapien
ccgtcccaagctgatggcagccttt

SEQ ID NO: 4128356 - DNA, 25 bp, Homo sapien
cacatgacttgtcatacttctctgg

SEQ ID NO: 4128357 - DNA, 25 bp, Homo sapien
cttctctggacccaggacctcaggg

SEQ ID NO: 4128358 - DNA, 25 bp, Homo sapien
gatgtacatgatgacacccagggac

SEQ ID NO: 4128359 - DNA, 25 bp, Homo sapien
gaccacatgtcacatgacttgtcat

SEQ ID NO: 4128360 - DNA, 25 bp, Homo sapien
cctggcccgtgttggagtagaaggg

SEQ ID NO: 4128361 - DNA, 25 bp, Homo sapien
cagagacttctgaccactcaggatt

SEQ ID NO: 4128362 - DNA, 25 bp, Homo sapien
cctcagagacttctgaccactcagg

SEQ ID NO: 4128363 - DNA, 25 bp, Homo sapien
ggaagccgtactggcccaggcgaat

SEQ ID NO: 4128364 - DNA, 25 bp, Homo sapien
gaactgagtgatggtcagcctctct

SEQ ID NO: 4128365 - DNA, 25 bp, Homo sapien
gttgatccaggggtggttcatgaac

SEQ ID NO: 4128366 - DNA, 25 bp, Homo sapien
tgagtgatggtcagcctctctgtgg

SEQ ID NO: 4128367 - DNA, 25 bp, Homo sapien
caacaggaggcggatcagctgcttg

SEQ ID NO: 4128368 - DNA, 25 bp, Homo sapien
tgccatgggaggaggaggggctcac

SEQ ID NO: 4128369 - DNA, 25 bp, Homo sapien
ctgccatgggaggaggaggggctca

SEQ ID NO: 4128370 - DNA, 25 bp, Homo sapien
ccgtggattagaaactggaggcacc

SEQ ID NO: 4128371 - DNA, 25 bp, Homo sapien
tggattagaaactggaggcacctgg

SEQ ID NO: 4128372 - DNA, 25 bp, Homo sapien
cccacgcccgtggattagaaactgg

SEQ ID NO: 4128373 - DNA, 25 bp, Homo sapien
tggaaggagccccacgcccgtggat

SEQ ID NO: 4128374 - DNA, 25 bp, Homo sapien
cttgacttcgtcccagtggtctttg

SEQ ID NO: 4128375 - DNA, 25 bp, Homo sapien
tgcagcactcgggccgtgtggagtg

SEQ ID NO: 4128376 - DNA, 25 bp, Homo sapien
gggtctgtggcactaccatcgattg

SEQ ID NO: 4128377 - DNA, 25 bp, Homo sapien
tcgggccgtgtggagtggggtctgt

SEQ ID NO: 4128378 - DNA, 25 bp, Homo sapien
tacccgcatagtggccaaggcactg

SEQ ID NO: 4128379 - DNA, 25 bp, Homo sapien
cctcttgttgaggagccggttgtta

SEQ ID NO: 4128380 - DNA, 25 bp, Homo sapien
gccggttgttagaggtcttcaggtc

SEQ ID NO: 4128381 - DNA, 25 bp, Homo sapien
tcttcacctggtcgtagtctacccg

SEQ ID NO: 4128382 - DNA, 25 bp, Homo sapien
gctttcctgcctgagatctggtgag

SEQ ID NO: 4128383 - DNA, 25 bp, Homo sapien
tgagaaatcagcctccccaaggcag

SEQ ID NO: 4128384 - DNA, 25 bp, Homo sapien
cacttgtcaggcagtatcaggcact

SEQ ID NO: 4128385 - DNA, 25 bp, Homo sapien
taatgggaagccacttagctctgct

SEQ ID NO: 4128386 - DNA, 25 bp, Homo sapien
ggtgaaatcactagtgggtctgaga

SEQ ID NO: 4128387 - DNA, 25 bp, Homo sapien
tggccttggagttagcatggcatgc

SEQ ID NO: 4128388 - DNA, 25 bp, Homo sapien
catggcatgcttatcaggcctgagg

SEQ ID NO: 4128389 - DNA, 25 bp, Homo sapien
cctttctaggcctggcgaggactct

SEQ ID NO: 4128390 - DNA, 25 bp, Homo sapien
caggtacactggatgcttggcagcc

SEQ ID NO: 4128391 - DNA, 25 bp, Homo sapien
gaaatgaaaccccatgggtgaggaa

SEQ ID NO: 4128392 - DNA, 25 bp, Homo sapien
gaatttatctggctaccctcctgga

SEQ ID NO: 4128393 - DNA, 25 bp, Homo sapien
accttgaggtgaactccctgtctga

SEQ ID NO: 4128394 - DNA, 25 bp, Homo sapien
gctggctgctcagtatgacaaaacg

SEQ ID NO: 4128395 - DNA, 25 bp, Homo sapien
taaagaaagtttcaagcaggcttgg

SEQ ID NO: 4128396 - DNA, 25 bp, Homo sapien
acccactagggatgcaaaggctcgg

SEQ ID NO: 4128397 - DNA, 25 bp, Homo sapien
cttggaagcatggagacccctgcag

SEQ ID NO: 4128398 - DNA, 25 bp, Homo sapien
ccagctagaccagatcagggaaggg

SEQ ID NO: 4128399 - DNA, 25 bp, Homo sapien
ctctgcagggaagcactctgacttt

SEQ ID NO: 4128400 - DNA, 25 bp, Homo sapien
ctgtgtgactcagacccaacatctg

SEQ ID NO: 4128401 - DNA, 25 bp, Homo sapien
aactctttgggcagggatagccttc

SEQ ID NO: 4128402 - DNA, 25 bp, Homo sapien
gtcattcatccttggctgagtgtcc

SEQ ID NO: 4128403 - DNA, 25 bp, Homo sapien
tcattcatccttggctgagtgtccc

SEQ ID NO: 4128404 - DNA, 25 bp, Homo sapien
ttcatccttggctgagtgtcccctt

SEQ ID NO: 4128405 - DNA, 25 bp, Homo sapien
attcatccttggctgagtgtcccct

SEQ ID NO: 4128406 - DNA, 25 bp, Homo sapien
tgtggagcagtatcactcaaggagc

SEQ ID NO: 4128407 - DNA, 25 bp, Homo sapien
cacaactggtgctggcttaagaatg

SEQ ID NO: 4128408 - DNA, 25 bp, Homo sapien
cgctcaggcaggttttcaaggtgga

SEQ ID NO: 4128409 - DNA, 25 bp, Homo sapien
tctaaccaagggtgggcatgagcca

SEQ ID NO: 4128410 - DNA, 25 bp, Homo sapien
cgctgttcttagagtccatcacaga

SEQ ID NO: 4128411 - DNA, 25 bp, Homo sapien
gccctggcgctgttcttagagtcca

SEQ ID NO: 4128412 - DNA, 25 bp, Homo sapien
tgaggcatggacatttcggcagctc

SEQ ID NO: 4128413 - DNA, 25 bp, Homo sapien
aaactgaggcatggacatttcggca

SEQ ID NO: 4128414 - DNA, 25 bp, Homo sapien
ggcaacactctagcagtcaccttgg

SEQ ID NO: 4128415 - DNA, 25 bp, Homo sapien
ttccactgaaacgtccatgccaagg

SEQ ID NO: 4128416 - DNA, 25 bp, Homo sapien
gcactggcaaccctgtactctggag

SEQ ID NO: 4128417 - DNA, 25 bp, Homo sapien
gatgtctcccaaagctgtgccacaa

SEQ ID NO: 4128418 - DNA, 25 bp, Homo sapien
gctttcttctatgtgtcggtctcca

SEQ ID NO: 4128419 - DNA, 25 bp, Homo sapien
gttaattcaagacagtatttagcat

SEQ ID NO: 4128420 - DNA, 25 bp, Homo sapien
gcatttgctcctggggtatgaactg

SEQ ID NO: 4128421 - DNA, 25 bp, Homo sapien
tcagcttactgtaagtcccgcctcc

SEQ ID NO: 4128422 - DNA, 25 bp, Homo sapien
gctgccaaggcatagatctgtttca

SEQ ID NO: 4128423 - DNA, 25 bp, Homo sapien
ctccctagagccacagggtcctcag

SEQ ID NO: 4128424 - DNA, 25 bp, Homo sapien
ctcagctgccaaggcatagatctgt

SEQ ID NO: 4128425 - DNA, 25 bp, Homo sapien
tctccctagagccacagggtcctca

SEQ ID NO: 4128426 - DNA, 25 bp, Homo sapien
aaacgttctgatgtcaaaaagcaca

SEQ ID NO: 4128427 - DNA, 25 bp, Homo sapien
ccaaatcaggacagaggtaatttct

SEQ ID NO: 4128428 - DNA, 25 bp, Homo sapien
ggcctctgcatagccaaatggtgaa

SEQ ID NO: 4128429 - DNA, 25 bp, Homo sapien
ttattgctacaatacaaacaggccc

SEQ ID NO: 4128430 - DNA, 25 bp, Homo sapien
gatgtggcacttctggatgggctct

SEQ ID NO: 4128431 - DNA, 25 bp, Homo sapien
ttaattcgtggagactgatgtggca

SEQ ID NO: 4128432 - DNA, 25 bp, Homo sapien
cagagatggctgacacaattagagc

SEQ ID NO: 4128433 - DNA, 25 bp, Homo sapien
tgaataagccccaccatgagaagca

SEQ ID NO: 4128434 - DNA, 25 bp, Homo sapien
gagattgcagcgaaccaagattgct

SEQ ID NO: 4128435 - DNA, 25 bp, Homo sapien
cggagctagtttccttcatggcaga

SEQ ID NO: 4128436 - DNA, 25 bp, Homo sapien
tggttagtaaaacgtctgcggagct

SEQ ID NO: 4128437 - DNA, 25 bp, Homo sapien
ttaacacaaaggctgtacacagtgg

SEQ ID NO: 4128438 - DNA, 25 bp, Homo sapien
tggataagtggcacacgatgctcat

SEQ ID NO: 4128439 - DNA, 25 bp, Homo sapien
gaggctcttgctactgaagtcggca

SEQ ID NO: 4128440 - DNA, 25 bp, Homo sapien
gatactggccctctacaaagctcga

SEQ ID NO: 4128441 - DNA, 25 bp, Homo sapien
taaggagccagccagtctgatgact

SEQ ID NO: 4128442 - DNA, 25 bp, Homo sapien
aaaaagataaacatgatagagcaat

SEQ ID NO: 4128443 - DNA, 25 bp, Homo sapien
aacaaagtatgcaaacagtttcact

SEQ ID NO: 4128444 - DNA, 25 bp, Homo sapien
tatgcaaacagtttcacttatcatg

SEQ ID NO: 4128445 - DNA, 25 bp, Homo sapien
cattgcaatgtcttattgagtagct

SEQ ID NO: 4128446 - DNA, 25 bp, Homo sapien
tccctgccgcgcaggggctcgcgct

SEQ ID NO: 4128447 - DNA, 25 bp, Homo sapien
gcgggctcgcaggacgcccgcgcat

SEQ ID NO: 4128448 - DNA, 25 bp, Homo sapien
cgcgcatgcgccactccctgccgcg

SEQ ID NO: 4128449 - DNA, 25 bp, Homo sapien
cgctgctcccgtgccgccgcttgct

SEQ ID NO: 4128450 - DNA, 25 bp, Homo sapien
aggccgtccgggatgccgccgccac

SEQ ID NO: 4128451 - DNA, 25 bp, Homo sapien
cgccacgtctggaccgcgaggctcc

SEQ ID NO: 4128452 - DNA, 25 bp, Homo sapien
ccccgccacgtctggaccgcgaggc

SEQ ID NO: 4128453 - DNA, 25 bp, Homo sapien
ggcggcgcgggcgaaggctcgccac

SEQ ID NO: 4128454 - DNA, 25 bp, Homo sapien
cggcgaccgggcgacaacgcggcgg

SEQ ID NO: 4128455 - DNA, 25 bp, Homo sapien
gggcccggctgtggcgcaccgcgag

SEQ ID NO: 4128456 - DNA, 25 bp, Homo sapien
ggcgcggcgaccgggcgacaacgcg

SEQ ID NO: 4128457 - DNA, 25 bp, Homo sapien
gtggcgcaccgcgagtcgaggcggg

SEQ ID NO: 4128458 - DNA, 25 bp, Homo sapien
tacgccgtatttctcctcctccgtg

SEQ ID NO: 4128459 - DNA, 25 bp, Homo sapien
ctacgccgtatttctcctcctccgt

SEQ ID NO: 4128460 - DNA, 25 bp, Homo sapien
catgtataacttcacccacgatcaa

SEQ ID NO: 4128461 - DNA, 25 bp, Homo sapien
tgcccttattagactgaggaggttc

SEQ ID NO: 4128462 - DNA, 25 bp, Homo sapien
taaatgatgagcctacgttgacaca

SEQ ID NO: 4128463 - DNA, 25 bp, Homo sapien
tttcccaagcttaggagagaaacat

SEQ ID NO: 4128464 - DNA, 25 bp, Homo sapien
accaattagcatttttaaacactga

SEQ ID NO: 4128465 - DNA, 25 bp, Homo sapien
aaggataaacacaccaattagcatt

SEQ ID NO: 4128466 - DNA, 25 bp, Homo sapien
ctagaaaagcaaggataaacacacc

SEQ ID NO: 4128467 - DNA, 25 bp, Homo sapien
ttagcatttttaaacactgagacat

SEQ ID NO: 4128468 - DNA, 25 bp, Homo sapien
ctatttctaagaccaacccttgagg

SEQ ID NO: 4128469 - DNA, 25 bp, Homo sapien
gacagatcctcgaaagctgcatatc

SEQ ID NO: 4128470 - DNA, 25 bp, Homo sapien
caacccttgagggacagatcctcga

SEQ ID NO: 4128471 - DNA, 25 bp, Homo sapien
gaatctggactgtttctcctatttc

SEQ ID NO: 4128472 - DNA, 25 bp, Homo sapien
ggttgctcctatagaccagctccaa

SEQ ID NO: 4128473 - DNA, 25 bp, Homo sapien
tcctatagaccagctccaacgcatg

SEQ ID NO: 4128474 - DNA, 25 bp, Homo sapien
catccaacaggttgctcctatagac

SEQ ID NO: 4128475 - DNA, 25 bp, Homo sapien
ccaacgcatgccctctggcaagttt

SEQ ID NO: 4128476 - DNA, 25 bp, Homo sapien
gttgcctgtgggccactcatcaaag

SEQ ID NO: 4128477 - DNA, 25 bp, Homo sapien
gagttgcctgtgggccactcatcaa

SEQ ID NO: 4128478 - DNA, 25 bp, Homo sapien
ttgcctgtgggccactcatcaaagg

SEQ ID NO: 4128479 - DNA, 25 bp, Homo sapien
gcctgtgggccactcatcaaaggcc

SEQ ID NO: 4128480 - DNA, 25 bp, Homo sapien
catttggcttctttgttgaaactcc

SEQ ID NO: 4128481 - DNA, 25 bp, Homo sapien
gcttctttgttgaaactcctctgta

SEQ ID NO: 4128482 - DNA, 25 bp, Homo sapien
tttgttgaaactcctctgtaccaac

SEQ ID NO: 4128483 - DNA, 25 bp, Homo sapien
cttcacatttggcttctttgttgaa

SEQ ID NO: 4128484 - DNA, 25 bp, Homo sapien
gaaccagagccacaaaagacagcca

SEQ ID NO: 4128485 - DNA, 25 bp, Homo sapien
gccacaaaagacagccacattatct

SEQ ID NO: 4128486 - DNA, 25 bp, Homo sapien
gagccacaaaagacagccacattat

SEQ ID NO: 4128487 - DNA, 25 bp, Homo sapien
tagaaccagagccacaaaagacagc

SEQ ID NO: 4128488 - DNA, 25 bp, Homo sapien
gaatcttcaagtggaaccacagttt

SEQ ID NO: 4128489 - DNA, 25 bp, Homo sapien
caactgtttccacaaacttgcccat

SEQ ID NO: 4128490 - DNA, 25 bp, Homo sapien
cacatacaactgtttccacaaactt

SEQ ID NO: 4128491 - DNA, 25 bp, Homo sapien
tacaactgtttccacaaacttgccc

SEQ ID NO: 4128492 - DNA, 25 bp, Homo sapien
catacaactgtttccacaaacttgc

SEQ ID NO: 4128493 - DNA, 25 bp, Homo sapien
aacttgtcgaatttgttctatgaac

SEQ ID NO: 4128494 - DNA, 25 bp, Homo sapien
tagtttcttacagtagagcaggagc

SEQ ID NO: 4128495 - DNA, 25 bp, Homo sapien
tgaacatgtttgactgaaaagaatc

SEQ ID NO: 4128496 - DNA, 25 bp, Homo sapien
taggacttaaagcatacatttccct

SEQ ID NO: 4128497 - DNA, 25 bp, Homo sapien
ggttttctagaatttgacctattca

SEQ ID NO: 4128498 - DNA, 25 bp, Homo sapien
tgatatcaaggtaatagcagcctca

SEQ ID NO: 4128499 - DNA, 25 bp, Homo sapien
ctcctcatccattttctagaagact

SEQ ID NO: 4128500 - DNA, 25 bp, Homo sapien
aactagtgttatttatttgcctgga

SEQ ID NO: 4128501 - DNA, 25 bp, Homo sapien
ttgataggaaacaactacaaagctt

SEQ ID NO: 4128502 - DNA, 25 bp, Homo sapien
ccatgtttaagttgataggaaacaa

SEQ ID NO: 4128503 - DNA, 25 bp, Homo sapien
aagttgataggaaacaactacaaag

SEQ ID NO: 4128504 - DNA, 25 bp, Homo sapien
catgtttaagttgataggaaacaac

SEQ ID NO: 4128505 - DNA, 25 bp, Homo sapien
ctacagtgaagctaaagtgctcaaa

SEQ ID NO: 4128506 - DNA, 25 bp, Homo sapien
tttaaacaacatgacaaccctggaa

SEQ ID NO: 4128507 - DNA, 25 bp, Homo sapien
tgtgcacttagccactatatgatat

SEQ ID NO: 4128508 - DNA, 25 bp, Homo sapien
gctcaaaatcatgcagctagcaaat

SEQ ID NO: 4128509 - DNA, 25 bp, Homo sapien
aatgtaaatctacggaaacagcaga

SEQ ID NO: 4128510 - DNA, 25 bp, Homo sapien
gccctactttgtaaattgactgaag

SEQ ID NO: 4128511 - DNA, 25 bp, Homo sapien
ggatgtggtgatagtagccctactt

SEQ ID NO: 4128512 - DNA, 25 bp, Homo sapien
cggcaaatgggaatgacagatcttt

SEQ ID NO: 4128513 - DNA, 25 bp, Homo sapien
ccaggagtttaccatactaacatcc

SEQ ID NO: 4128514 - DNA, 25 bp, Homo sapien
taacatccatgttagtgcagacacc

SEQ ID NO: 4128515 - DNA, 25 bp, Homo sapien
cctgggcttgtaccctttccttcag

SEQ ID NO: 4128516 - DNA, 25 bp, Homo sapien
ctcccaggagtttaccatactaaca

SEQ ID NO: 4128517 - DNA, 25 bp, Homo sapien
gatcaacaaaaaagatagaccacta

SEQ ID NO: 4128518 - DNA, 25 bp, Homo sapien
caacaaaaaagatagaccactagca

SEQ ID NO: 4128519 - DNA, 25 bp, Homo sapien
tcaacaaaaaagatagaccactagc

SEQ ID NO: 4128520 - DNA, 25 bp, Homo sapien
cactagcaagactaataaagaaaaa

SEQ ID NO: 4128521 - DNA, 25 bp, Homo sapien
atctccaatattgggataacatttc

SEQ ID NO: 4128522 - DNA, 25 bp, Homo sapien
tctcttataatgtggagggcagcaa

SEQ ID NO: 4128523 - DNA, 25 bp, Homo sapien
gcaaaacattcatgagagatccacc

SEQ ID NO: 4128524 - DNA, 25 bp, Homo sapien
acagccagagatggcgcaagagagc

SEQ ID NO: 4128525 - DNA, 25 bp, Homo sapien
aggtagaagcctttggcaacttcca

SEQ ID NO: 4128526 - DNA, 25 bp, Homo sapien
agaagcctttggcaacttccaggtt

SEQ ID NO: 4128527 - DNA, 25 bp, Homo sapien
gtagaagcctttggcaacttccagg

SEQ ID NO: 4128528 - DNA, 25 bp, Homo sapien
ggtagaagcctttggcaacttccag

SEQ ID NO: 4128529 - DNA, 25 bp, Homo sapien
gatcctgagtcaggtgaccagacag

SEQ ID NO: 4128530 - DNA, 25 bp, Homo sapien
gacagtagctgccttcgcaggtcaa

SEQ ID NO: 4128531 - DNA, 25 bp, Homo sapien
gtgatgtgccgcttaacctcccgca

SEQ ID NO: 4128532 - DNA, 25 bp, Homo sapien
cattcatcacatggcgtagtttgta

SEQ ID NO: 4128533 - DNA, 25 bp, Homo sapien
tgtttgatattggacctccctgggt

SEQ ID NO: 4128534 - DNA, 25 bp, Homo sapien
tccctgggtagagcctttgtactga

SEQ ID NO: 4128535 - DNA, 25 bp, Homo sapien
taaatatttagtgggacgctttcaa

SEQ ID NO: 4128536 - DNA, 25 bp, Homo sapien
catctggtgatacctgattgtccat

SEQ ID NO: 4128537 - DNA, 25 bp, Homo sapien
cttcaaagtccttccgaggcaccag

SEQ ID NO: 4128538 - DNA, 25 bp, Homo sapien
catcttatagagatctgagacacta

SEQ ID NO: 4128539 - DNA, 25 bp, Homo sapien
ctggtccgagtccactacttcaaag

SEQ ID NO: 4128540 - DNA, 25 bp, Homo sapien
gacactaatctggtccgagtccact

SEQ ID NO: 4128541 - DNA, 25 bp, Homo sapien
gaacacaattgcttgggtatgctag

SEQ ID NO: 4128542 - DNA, 25 bp, Homo sapien
tgtaatcttgattagtcgacccaac

SEQ ID NO: 4128543 - DNA, 25 bp, Homo sapien
ccttaggtccttgtccaggcaacat

SEQ ID NO: 4128544 - DNA, 25 bp, Homo sapien
caggcaacatacttggtaccctcta

SEQ ID NO: 4128545 - DNA, 25 bp, Homo sapien
cagtgcgtggtgttggtaaacgaaa

SEQ ID NO: 4128546 - DNA, 25 bp, Homo sapien
aatggttgtggcagtggaagtttcc

SEQ ID NO: 4128547 - DNA, 25 bp, Homo sapien
catttagaagtaaaccctggccagg

SEQ ID NO: 4128548 - DNA, 25 bp, Homo sapien
gaccctagaggtatggtaccacact

SEQ ID NO: 4128549 - DNA, 25 bp, Homo sapien
gctttgctgtacactctgccggcta

SEQ ID NO: 4128550 - DNA, 25 bp, Homo sapien
gctgtacactctgccggctagataa

SEQ ID NO: 4128551 - DNA, 25 bp, Homo sapien
tttgctgtacactctgccggctaga

SEQ ID NO: 4128552 - DNA, 25 bp, Homo sapien
gtgctttgctgtacactctgccggc

SEQ ID NO: 4128553 - DNA, 25 bp, Homo sapien
cggtatcttccccaatagtattgta

SEQ ID NO: 4128554 - DNA, 25 bp, Homo sapien
tggcatccgacatgtttccccatga

SEQ ID NO: 4128555 - DNA, 25 bp, Homo sapien
gaagtgatgtggcactggcatccga

SEQ ID NO: 4128556 - DNA, 25 bp, Homo sapien
tccccatgacgtgggcgcattgtat

SEQ ID NO: 4128557 - DNA, 25 bp, Homo sapien
aaatagatgcatccttttctctctg

SEQ ID NO: 4128558 - DNA, 25 bp, Homo sapien
gatagccaagactcgattttgagct

SEQ ID NO: 4128559 - DNA, 25 bp, Homo sapien
tgagcttctatgtggaaaaagtcat

SEQ ID NO: 4128560 - DNA, 25 bp, Homo sapien
tctgtgaggtggtgatagccaagac

SEQ ID NO: 4128561 - DNA, 25 bp, Homo sapien
gtgcttcaaaaccactgtagccaga

SEQ ID NO: 4128562 - DNA, 25 bp, Homo sapien
tggcagagccaaacacagtgcttca

SEQ ID NO: 4128563 - DNA, 25 bp, Homo sapien
caccaggatgtttggacttggcaga

SEQ ID NO: 4128564 - DNA, 25 bp, Homo sapien
actctgggaagggcatctctgacag

SEQ ID NO: 4128565 - DNA, 25 bp, Homo sapien
ttatccgaagatttactaccaactg

SEQ ID NO: 4128566 - DNA, 25 bp, Homo sapien
tctttatccgaagatttactaccaa

SEQ ID NO: 4128567 - DNA, 25 bp, Homo sapien
ctctttatccgaagatttactacca

SEQ ID NO: 4128568 - DNA, 25 bp, Homo sapien
atccgaagatttactaccaactgta

SEQ ID NO: 4128569 - DNA, 25 bp, Homo sapien
tgggttcctcggcccaccattcttg

SEQ ID NO: 4128570 - DNA, 25 bp, Homo sapien
aaaaagggcacacattcgttctatc

SEQ ID NO: 4128571 - DNA, 25 bp, Homo sapien
cacacattcgttctatcttctctgg

SEQ ID NO: 4128572 - DNA, 25 bp, Homo sapien
gggcacacattcgttctatcttctc

SEQ ID NO: 4128573 - DNA, 25 bp, Homo sapien
taaaagctatccctgtgaaagtggt

SEQ ID NO: 4128574 - DNA, 25 bp, Homo sapien
aaaagctatccctgtgaaagtggtt

SEQ ID NO: 4128575 - DNA, 25 bp, Homo sapien
gagcattatcaataaaagctatccc

SEQ ID NO: 4128576 - DNA, 25 bp, Homo sapien
cagccttgtcctctgggtcaagcga

SEQ ID NO: 4128577 - DNA, 25 bp, Homo sapien
ggtcaagcgattctcccacctcagc

SEQ ID NO: 4128578 - DNA, 25 bp, Homo sapien
actgcagccttgtcctctgggtcaa

SEQ ID NO: 4128579 - DNA, 25 bp, Homo sapien
tgcagccttgtcctctgggtcaagc

SEQ ID NO: 4128580 - DNA, 25 bp, Homo sapien
tcacatgggcaacgatatacaaatc

SEQ ID NO: 4128581 - DNA, 25 bp, Homo sapien
ctattcggatcacatgggcaacgat

SEQ ID NO: 4128582 - DNA, 25 bp, Homo sapien
gggcaacgatatacaaatctctctt

SEQ ID NO: 4128583 - DNA, 25 bp, Homo sapien
ttcggatcacatgggcaacgatata

SEQ ID NO: 4128584 - DNA, 25 bp, Homo sapien
catgtgaatgggtaaggtgaacagt

SEQ ID NO: 4128585 - DNA, 25 bp, Homo sapien
tcatgtgaatgggtaaggtgaacag

SEQ ID NO: 4128586 - DNA, 25 bp, Homo sapien
agtcatgtgaatgggtaaggtgaac

SEQ ID NO: 4128587 - DNA, 25 bp, Homo sapien
tgtgaatgggtaaggtgaacagtac

SEQ ID NO: 4128588 - DNA, 25 bp, Homo sapien
cagccatatggtcgcctgtagtgca

SEQ ID NO: 4128589 - DNA, 25 bp, Homo sapien
tctgtgagtgactgtaggacatcca

SEQ ID NO: 4128590 - DNA, 25 bp, Homo sapien
gacatccaagatgcttaggaccgca

SEQ ID NO: 4128591 - DNA, 25 bp, Homo sapien
cctttctttgagtcgttcaggagca

SEQ ID NO: 4128592 - DNA, 25 bp, Homo sapien
gtgctgggatgtcttatgctacaaa

SEQ ID NO: 4128593 - DNA, 25 bp, Homo sapien
tgtgtccacaaggtttgagcactac

SEQ ID NO: 4128594 - DNA, 25 bp, Homo sapien
actactactctcaagggcagtgctg

SEQ ID NO: 4128595 - DNA, 25 bp, Homo sapien
ggatgtcttatgctacaaatcatta

SEQ ID NO: 4128596 - DNA, 25 bp, Homo sapien
tctcctgagggctagattcactgtg

SEQ ID NO: 4128597 - DNA, 25 bp, Homo sapien
tatacagcagaatagtggccttggc

SEQ ID NO: 4128598 - DNA, 25 bp, Homo sapien
gtggtgccttcccatacacaagtga

SEQ ID NO: 4128599 - DNA, 25 bp, Homo sapien
taagtacagcatgccctgtgcctgc

SEQ ID NO: 4128600 - DNA, 25 bp, Homo sapien
ggatgaaataggaccttatctgaca

SEQ ID NO: 4128601 - DNA, 25 bp, Homo sapien
gctccttgacattgggtcttagcag

SEQ ID NO: 4128602 - DNA, 25 bp, Homo sapien
taaagaactcatataactgaattgc

SEQ ID NO: 4128603 - DNA, 25 bp, Homo sapien
ttttgagatatgacaacagatacac

SEQ ID NO: 4128604 - DNA, 25 bp, Homo sapien
taagcaacttgtcccatacaaggga

SEQ ID NO: 4128605 - DNA, 25 bp, Homo sapien
gaaattagccagttagagacacaaa

SEQ ID NO: 4128606 - DNA, 25 bp, Homo sapien
tgaacaaaagctgaggaggctcatc

SEQ ID NO: 4128607 - DNA, 25 bp, Homo sapien
tcataggagagataaggacatccag

SEQ ID NO: 4128608 - DNA, 25 bp, Homo sapien
tcttcctcgtatgacttagcagaca

SEQ ID NO: 4128609 - DNA, 25 bp, Homo sapien
gttgcacatgttcaaacaatgcatg

SEQ ID NO: 4128610 - DNA, 25 bp, Homo sapien
tactgaggctacagatagtggcaac

SEQ ID NO: 4128611 - DNA, 25 bp, Homo sapien
tagagcagttctatggtcacagact

SEQ ID NO: 4128612 - DNA, 25 bp, Homo sapien
taactgatatggataggctttctcc

SEQ ID NO: 4128613 - DNA, 25 bp, Homo sapien
tctgtagagcctgtgatatggtatc

SEQ ID NO: 4128614 - DNA, 25 bp, Homo sapien
ttacagcagcttttgaactatatgg

SEQ ID NO: 4128615 - DNA, 25 bp, Homo sapien
ggttaacaagaagtatgatagccca

SEQ ID NO: 4128616 - DNA, 25 bp, Homo sapien
tattaggatgactatggtattccac

SEQ ID NO: 4128617 - DNA, 25 bp, Homo sapien
taattgagaatgagggcaaatggca

SEQ ID NO: 4128618 - DNA, 25 bp, Homo sapien
tcagctagggagatctatgatatcc

SEQ ID NO: 4128619 - DNA, 25 bp, Homo sapien
cacctttggatgactggtatgatgc

SEQ ID NO: 4128620 - DNA, 25 bp, Homo sapien
taatcggccaggtaccataccaagg

SEQ ID NO: 4128621 - DNA, 25 bp, Homo sapien
tatgctagctctactgggaaggcac

SEQ ID NO: 4128622 - DNA, 25 bp, Homo sapien
agagagactaaaacccttgcccgag

SEQ ID NO: 4128623 - DNA, 25 bp, Homo sapien
tacactcaatagcacctccaggatg

SEQ ID NO: 4128624 - DNA, 25 bp, Homo sapien
gagctaagaagcaagtaaggcatgg

SEQ ID NO: 4128625 - DNA, 25 bp, Homo sapien
gccagagctaagaagcaagtaaggc

SEQ ID NO: 4128626 - DNA, 25 bp, Homo sapien
agctaagaagcaagtaaggcatggg

SEQ ID NO: 4128627 - DNA, 25 bp, Homo sapien
cagagctaagaagcaagtaaggcat

SEQ ID NO: 4128628 - DNA, 25 bp, Homo sapien
taaaggtcaattcccggagaactgc

SEQ ID NO: 4128629 - DNA, 25 bp, Homo sapien
ggaattccttatcctagtacagaca

SEQ ID NO: 4128630 - DNA, 25 bp, Homo sapien
catttgacacttagggagttcccac

SEQ ID NO: 4128631 - DNA, 25 bp, Homo sapien
ggagaactgcaaccacgtaaccatt

SEQ ID NO: 4128632 - DNA, 25 bp, Homo sapien
ttggcactggactttcggatgatgt

SEQ ID NO: 4128633 - DNA, 25 bp, Homo sapien
ggcactggactttcggatgatgttc

SEQ ID NO: 4128634 - DNA, 25 bp, Homo sapien
cgctgggggcagagtacttggcact

SEQ ID NO: 4128635 - DNA, 25 bp, Homo sapien
actggactttcggatgatgttctcg

SEQ ID NO: 4128636 - DNA, 25 bp, Homo sapien
atcaggaaatcccaattttcttgta

SEQ ID NO: 4128637 - DNA, 25 bp, Homo sapien
ttttcttgtaattgccaatccccta

SEQ ID NO: 4128638 - DNA, 25 bp, Homo sapien
tggcataatgacatcaggaaatccc

SEQ ID NO: 4128639 - DNA, 25 bp, Homo sapien
taaatatcatgggattttctctccg

SEQ ID NO: 4128640 - DNA, 25 bp, Homo sapien
catgaagtctccctagcatttagag

SEQ ID NO: 4128641 - DNA, 25 bp, Homo sapien
gaagtgtcctgtggcagtcattacc

SEQ ID NO: 4128642 - DNA, 25 bp, Homo sapien
tcatgacaggatggtagaagtgtcc

SEQ ID NO: 4128643 - DNA, 25 bp, Homo sapien
tatgagtagaagacgaaggctgtgt

SEQ ID NO: 4128644 - DNA, 25 bp, Homo sapien
cttcaagatttctccatctgcataa

SEQ ID NO: 4128645 - DNA, 25 bp, Homo sapien
catacatggtcacttcaatattctt

SEQ ID NO: 4128646 - DNA, 25 bp, Homo sapien
tccatctgcataaagcacatacatg

SEQ ID NO: 4128647 - DNA, 25 bp, Homo sapien
tccagggttaggtacaggtcattgc

SEQ ID NO: 4128648 - DNA, 25 bp, Homo sapien
tctgaactcaaagcgcaggtgggag

SEQ ID NO: 4128649 - DNA, 25 bp, Homo sapien
tctccccagcgaggactattactgt

SEQ ID NO: 4128650 - DNA, 25 bp, Homo sapien
gaactcctatttggctctcctgaac

SEQ ID NO: 4128651 - DNA, 25 bp, Homo sapien
ggactattactgtggtagaggacaa

SEQ ID NO: 4128652 - DNA, 25 bp, Homo sapien
cttgtacacataaagctcgtgaata

SEQ ID NO: 4128653 - DNA, 25 bp, Homo sapien
aaagctcgtgaatatcatctgagag

SEQ ID NO: 4128654 - DNA, 25 bp, Homo sapien
catctgagagggtggtgccatcatc

SEQ ID NO: 4128655 - DNA, 25 bp, Homo sapien
gaatgcaaagccaaagagtttcttt

SEQ ID NO: 4128656 - DNA, 25 bp, Homo sapien
tattagggcagccattgtagtcctc

SEQ ID NO: 4128657 - DNA, 25 bp, Homo sapien
gaaagactctttggtgctgcgctgg

SEQ ID NO: 4128658 - DNA, 25 bp, Homo sapien
caggcccaggtacagagcatggtta

SEQ ID NO: 4128659 - DNA, 25 bp, Homo sapien
ctgagtggagatgaagaaagactct

SEQ ID NO: 4128660 - DNA, 25 bp, Homo sapien
gcagccgccctagtacatccatgat

SEQ ID NO: 4128661 - DNA, 25 bp, Homo sapien
ctagtacatccatgatccggtcggg

SEQ ID NO: 4128662 - DNA, 25 bp, Homo sapien
cttaacaatttcctccccactgaca

SEQ ID NO: 4128663 - DNA, 25 bp, Homo sapien
tgacatgccgcagccgccctagtac

SEQ ID NO: 4128664 - DNA, 25 bp, Homo sapien
tctctgtattatcatccaaaatcac

SEQ ID NO: 4128665 - DNA, 25 bp, Homo sapien
acaggccgtacttctctgtattatc

SEQ ID NO: 4128666 - DNA, 25 bp, Homo sapien
aatcacaaagagtgtatctaagatg

SEQ ID NO: 4128667 - DNA, 25 bp, Homo sapien
aaaaccaacaggccgtacttctctg

SEQ ID NO: 4128668 - DNA, 25 bp, Homo sapien
catcacaggtcgaaagtgaaaatac

SEQ ID NO: 4128669 - DNA, 25 bp, Homo sapien
ctcggagcaggttgatgatgaacac

SEQ ID NO: 4128670 - DNA, 25 bp, Homo sapien
gtgaaaatacttgatgtctcggagc

SEQ ID NO: 4128671 - DNA, 25 bp, Homo sapien
aagtgcttctggatatacgtgtcca

SEQ ID NO: 4128672 - DNA, 25 bp, Homo sapien
tataccacttcaaacagcggatgag

SEQ ID NO: 4128673 - DNA, 25 bp, Homo sapien
gcttcttgaatgtggtcctgtcgaa

SEQ ID NO: 4128674 - DNA, 25 bp, Homo sapien
tgtggtcctgtcgaatcagttctgc

SEQ ID NO: 4128675 - DNA, 25 bp, Homo sapien
aatcagttctgctgagcagtccata

SEQ ID NO: 4128676 - DNA, 25 bp, Homo sapien
aggtaaaaggagataaggttatgag

SEQ ID NO: 4128677 - DNA, 25 bp, Homo sapien
taaggttatgagtggaaagatatat

SEQ ID NO: 4128678 - DNA, 25 bp, Homo sapien
gcttttgatactggaatgagaagta

SEQ ID NO: 4128679 - DNA, 25 bp, Homo sapien
tcatagcttttgatactggaatgag

SEQ ID NO: 4128680 - DNA, 25 bp, Homo sapien
cttcttcaatagaacttttcttaag

SEQ ID NO: 4128681 - DNA, 25 bp, Homo sapien
ttcaatagaacttttcttaaggtca

SEQ ID NO: 4128682 - DNA, 25 bp, Homo sapien
aatagaacttttcttaaggtcatgc

SEQ ID NO: 4128683 - DNA, 25 bp, Homo sapien
tagaacttttcttaaggtcatgctt

SEQ ID NO: 4128684 - DNA, 25 bp, Homo sapien
cctcttgaagttttggatcagcacc

SEQ ID NO: 4128685 - DNA, 25 bp, Homo sapien
ctcttgaagttttggatcagcacca

SEQ ID NO: 4128686 - DNA, 25 bp, Homo sapien
gatgcaggaaggatcggcaattacg

SEQ ID NO: 4128687 - DNA, 25 bp, Homo sapien
gaaggatcggcaattacgtggagca

SEQ ID NO: 4128688 - DNA, 25 bp, Homo sapien
aagccccggaagatgcaggaaggat

SEQ ID NO: 4128689 - DNA, 25 bp, Homo sapien
tgtcatatgcccaagccccggaaga

SEQ ID NO: 4128690 - DNA, 25 bp, Homo sapien
gactgagcacaaaccggatggactg

SEQ ID NO: 4128691 - DNA, 25 bp, Homo sapien
caagtggctcgtgagtacaggatcc

SEQ ID NO: 4128692 - DNA, 25 bp, Homo sapien
gatccgtgactgtacaatgaacttg

SEQ ID NO: 4128693 - DNA, 25 bp, Homo sapien
tgaacttgaaaaggtactccaaggc

SEQ ID NO: 4128694 - DNA, 25 bp, Homo sapien
gaaagaggaacccagcatcaaagct

SEQ ID NO: 4128695 - DNA, 25 bp, Homo sapien
atcaaagcttccctgcagtgtgcga

SEQ ID NO: 4128696 - DNA, 25 bp, Homo sapien
gaggaacccagcatcaaagcttccc

SEQ ID NO: 4128697 - DNA, 25 bp, Homo sapien
caaagcttccctgcagtgtgcgaac

SEQ ID NO: 4128698 - DNA, 25 bp, Homo sapien
tgaatgactggacatgagagaggct

SEQ ID NO: 4128699 - DNA, 25 bp, Homo sapien
gactgaatgactggacatgagagag

SEQ ID NO: 4128700 - DNA, 25 bp, Homo sapien
ctggcagtgactgaatgactggaca

SEQ ID NO: 4128701 - DNA, 25 bp, Homo sapien
cagtgactgaatgactggacatgag

SEQ ID NO: 4128702 - DNA, 25 bp, Homo sapien
tgtcctggcaatggactgcagcttg

SEQ ID NO: 4128703 - DNA, 25 bp, Homo sapien
agcttgaccacgtccattgactgcc

SEQ ID NO: 4128704 - DNA, 25 bp, Homo sapien
gaaaacaggcggctatccactgtcc

SEQ ID NO: 4128705 - DNA, 25 bp, Homo sapien
tctgccacctcttgcacggtgaaca

SEQ ID NO: 4128706 - DNA, 25 bp, Homo sapien
ctagcaatatcatacgctggcagag

SEQ ID NO: 4128707 - DNA, 25 bp, Homo sapien
aacagttcctggtggaaaaaagatg

SEQ ID NO: 4128708 - DNA, 25 bp, Homo sapien
tggtggcagctttactactactagc

SEQ ID NO: 4128709 - DNA, 25 bp, Homo sapien
aaaagatgactttcttggtggcagc

SEQ ID NO: 4128710 - DNA, 25 bp, Homo sapien
agagagctggtcttgacgatggaga

SEQ ID NO: 4128711 - DNA, 25 bp, Homo sapien
aagatgctgccaagaatccctgagc

SEQ ID NO: 4128712 - DNA, 25 bp, Homo sapien
caagaatccctgagcaaattagcag

SEQ ID NO: 4128713 - DNA, 25 bp, Homo sapien
agaaccacaggaagcaggatgcggc

SEQ ID NO: 4128714 - DNA, 25 bp, Homo sapien
tgtcccctgctcgaacaaaatatac

SEQ ID NO: 4128715 - DNA, 25 bp, Homo sapien
caatacaaccttgggctatgagtag

SEQ ID NO: 4128716 - DNA, 25 bp, Homo sapien
tgccaagtcttacctggagccaaga

SEQ ID NO: 4128717 - DNA, 25 bp, Homo sapien
tatattcttatcacctggcaactgc

SEQ ID NO: 4128718 - DNA, 25 bp, Homo sapien
agtagtcttctggattcccaacacc

SEQ ID NO: 4128719 - DNA, 25 bp, Homo sapien
gctgaagtacagctggcagcactta

SEQ ID NO: 4128720 - DNA, 25 bp, Homo sapien
gagagcacaccattagcagcaagcc

SEQ ID NO: 4128721 - DNA, 25 bp, Homo sapien
gcagcacttactaggtcagccacat

SEQ ID NO: 4128722 - DNA, 25 bp, Homo sapien
gagcgtgcgatttgctcatgatggt

SEQ ID NO: 4128723 - DNA, 25 bp, Homo sapien
agagtctgcaagagcacgtccagga

SEQ ID NO: 4128724 - DNA, 25 bp, Homo sapien
gagtctgcaagagcacgtccaggag

SEQ ID NO: 4128725 - DNA, 25 bp, Homo sapien
cgcctcctgagcgtgcgatttgctc

SEQ ID NO: 4128726 - DNA, 25 bp, Homo sapien
cggctgtgcactgcgggcaccgctg

SEQ ID NO: 4128727 - DNA, 25 bp, Homo sapien
tcggctgtgcactgcgggcaccgct

SEQ ID NO: 4128728 - DNA, 25 bp, Homo sapien
cacgctgtagcttggcttgctccag

SEQ ID NO: 4128729 - DNA, 25 bp, Homo sapien
tccctagcacgctgtagcttggctt

SEQ ID NO: 4128730 - DNA, 25 bp, Homo sapien
tgctctccctagcacgctgtagctt

SEQ ID NO: 4128731 - DNA, 25 bp, Homo sapien
tagcacgctgtagcttggcttgctc

SEQ ID NO: 4128732 - DNA, 25 bp, Homo sapien
ctggcggagcagtgagagaaggcag

SEQ ID NO: 4128733 - DNA, 25 bp, Homo sapien
tgagagaaggcaggacacatactcg

SEQ ID NO: 4128734 - DNA, 25 bp, Homo sapien
agagaaggcaggacacatactcgcc

SEQ ID NO: 4128735 - DNA, 25 bp, Homo sapien
agtgagagaaggcaggacacatact

SEQ ID NO: 4128736 - DNA, 25 bp, Homo sapien
caggaggtgctggaaatgggtgtca

SEQ ID NO: 4128737 - DNA, 25 bp, Homo sapien
aggaggtgctggaaatgggtgtcac

SEQ ID NO: 4128738 - DNA, 25 bp, Homo sapien
ggcacatgatcacagggccgctaat

SEQ ID NO: 4128739 - DNA, 25 bp, Homo sapien
ttggcagtgttacgagggtccagct

SEQ ID NO: 4128740 - DNA, 25 bp, Homo sapien
aggaaaacttggcagtgttacgagg

SEQ ID NO: 4128741 - DNA, 25 bp, Homo sapien
cacagggccgctaatagtcaaggaa

SEQ ID NO: 4128742 - DNA, 25 bp, Homo sapien
tttatagttgtcagtatacatgcag

SEQ ID NO: 4128743 - DNA, 25 bp, Homo sapien
aatccataaacatgagatatctgtc

SEQ ID NO: 4128744 - DNA, 25 bp, Homo sapien
tgctttagggattataaacatctta

SEQ ID NO: 4128745 - DNA, 25 bp, Homo sapien
gtcagtatacatgcagatctttaac

SEQ ID NO: 4128746 - DNA, 25 bp, Homo sapien
cgccagagacccaatcttaaacttt

SEQ ID NO: 4128747 - DNA, 25 bp, Homo sapien
tcccttggggaaaagtgagctctcg

SEQ ID NO: 4128748 - DNA, 25 bp, Homo sapien
tctttataaactaatcagcctcagg

SEQ ID NO: 4128749 - DNA, 25 bp, Homo sapien
ttttcagacattagaattgtaagcc

SEQ ID NO: 4128750 - DNA, 25 bp, Homo sapien
tcctcaataggccactcctggccgc

SEQ ID NO: 4128751 - DNA, 25 bp, Homo sapien
cctcaataggccactcctggccgcc

SEQ ID NO: 4128752 - DNA, 25 bp, Homo sapien
ctcaataggccactcctggccgcca

SEQ ID NO: 4128753 - DNA, 25 bp, Homo sapien
ctcctcaataggccactcctggccg

SEQ ID NO: 4128754 - DNA, 25 bp, Homo sapien
aggaaagctgatgtgagacaccacc

SEQ ID NO: 4128755 - DNA, 25 bp, Homo sapien
atccagtcccgagggaagacactca

SEQ ID NO: 4128756 - DNA, 25 bp, Homo sapien
ttccggaacacgcaaaaaatcttca

SEQ ID NO: 4128757 - DNA, 25 bp, Homo sapien
ttgcttgtgagcagtctcattacca

SEQ ID NO: 4128758 - DNA, 25 bp, Homo sapien
cggaacacgcaaaaaatcttcagca

SEQ ID NO: 4128759 - DNA, 25 bp, Homo sapien
agaggacaggtactggacagtagtg

SEQ ID NO: 4128760 - DNA, 25 bp, Homo sapien
cagaggacaggtactggacagtagt

SEQ ID NO: 4128761 - DNA, 25 bp, Homo sapien
gaggacaggtactggacagtagtga

SEQ ID NO: 4128762 - DNA, 25 bp, Homo sapien
ccttttggctgaggtgataatttct

SEQ ID NO: 4128763 - DNA, 25 bp, Homo sapien
taatttctagctgaaggcttggctg

SEQ ID NO: 4128764 - DNA, 25 bp, Homo sapien
ctgccaggctaaagtaagaattcca

SEQ ID NO: 4128765 - DNA, 25 bp, Homo sapien
gatttatgaatagaactgccaggct

SEQ ID NO: 4128766 - DNA, 25 bp, Homo sapien
cacatgctgaacagttcataggcca

SEQ ID NO: 4128767 - DNA, 25 bp, Homo sapien
taggccatcattacacgcatgtccc

SEQ ID NO: 4128768 - DNA, 25 bp, Homo sapien
gttcataggccatcattacacgcat

SEQ ID NO: 4128769 - DNA, 25 bp, Homo sapien
aattctgccacatgctgaacagttc

SEQ ID NO: 4128770 - DNA, 25 bp, Homo sapien
tgtgggaccagtgtcacacccagaa

SEQ ID NO: 4128771 - DNA, 25 bp, Homo sapien
catgatattccgtacttctggctgt

SEQ ID NO: 4128772 - DNA, 25 bp, Homo sapien
cagaaaaggaccaatcattcccgga

SEQ ID NO: 4128773 - DNA, 25 bp, Homo sapien
catcatgtcatgaaagatgggaatc

SEQ ID NO: 4128774 - DNA, 25 bp, Homo sapien
aagagctccctgtagctctcgtcac

SEQ ID NO: 4128775 - DNA, 25 bp, Homo sapien
cctttcccttctgacaccatgctgt

SEQ ID NO: 4128776 - DNA, 25 bp, Homo sapien
catgctgtccagcttgtcaatcaac

SEQ ID NO: 4128777 - DNA, 25 bp, Homo sapien
agcttgtcaatcaactcggcctcca

SEQ ID NO: 4128778 - DNA, 25 bp, Homo sapien
gactgtctttatcactgcccagagc

SEQ ID NO: 4128779 - DNA, 25 bp, Homo sapien
actgagggataagcctgactttgcc

SEQ ID NO: 4128780 - DNA, 25 bp, Homo sapien
tgaagcagtagttgaacaagagccc

SEQ ID NO: 4128781 - DNA, 25 bp, Homo sapien
tagttgaacaagagcccactgaggg

SEQ ID NO: 4128782 - DNA, 25 bp, Homo sapien
ttctcttctgttctaaaggagtagt

SEQ ID NO: 4128783 - DNA, 25 bp, Homo sapien
tctcttctgttctaaaggagtagtt

SEQ ID NO: 4128784 - DNA, 25 bp, Homo sapien
agcaaagataaggaggttactgaac

SEQ ID NO: 4128785 - DNA, 25 bp, Homo sapien
ggaggttactgaactggcagcaaca

SEQ ID NO: 4128786 - DNA, 25 bp, Homo sapien
tactgaactggcagcaacaaatgaa

SEQ ID NO: 4128787 - DNA, 25 bp, Homo sapien
aagataaggaggttactgaactggc

SEQ ID NO: 4128788 - DNA, 25 bp, Homo sapien
ctggggtagggcccaaacagctggg

SEQ ID NO: 4128789 - DNA, 25 bp, Homo sapien
gcaaacacaattcatgagccttctc

SEQ ID NO: 4128790 - DNA, 25 bp, Homo sapien
aagcaaacacaattcatgagccttc

SEQ ID NO: 4128791 - DNA, 25 bp, Homo sapien
agcaaacacaattcatgagccttct

SEQ ID NO: 4128792 - DNA, 25 bp, Homo sapien
cggtctcgcgccatgtttcttgttc

SEQ ID NO: 4128793 - DNA, 25 bp, Homo sapien
aagacgttccatgaggcgggtgact

SEQ ID NO: 4128794 - DNA, 25 bp, Homo sapien
caagaagacgttccatgaggcgggt

SEQ ID NO: 4128795 - DNA, 25 bp, Homo sapien
aggtcacaaaggaaatgccggtctc

SEQ ID NO: 4128796 - DNA, 25 bp, Homo sapien
aaaaggcaccttcagccatcacctg

SEQ ID NO: 4128797 - DNA, 25 bp, Homo sapien
ccaggctcccaaaaggcaccttcag

SEQ ID NO: 4128798 - DNA, 25 bp, Homo sapien
ggcaccttcagccatcacctgaacc

SEQ ID NO: 4128799 - DNA, 25 bp, Homo sapien
tcccaaaaggcaccttcagccatca

SEQ ID NO: 4128800 - DNA, 25 bp, Homo sapien
gttaacagtgcagcctatcttctta

SEQ ID NO: 4128801 - DNA, 25 bp, Homo sapien
aacagtgcagcctatcttcttattc

SEQ ID NO: 4128802 - DNA, 25 bp, Homo sapien
ggttaacagtgcagcctatcttctt

SEQ ID NO: 4128803 - DNA, 25 bp, Homo sapien
taacagtgcagcctatcttcttatt

SEQ ID NO: 4128804 - DNA, 25 bp, Homo sapien
gaagccatagccaagctctgggcag

SEQ ID NO: 4128805 - DNA, 25 bp, Homo sapien
ctgtggaagccatagccaagctctg

SEQ ID NO: 4128806 - DNA, 25 bp, Homo sapien
tgggcagctggccatagccgtgggt

SEQ ID NO: 4128807 - DNA, 25 bp, Homo sapien
gtggaagccatagccaagctctggg

SEQ ID NO: 4128808 - DNA, 25 bp, Homo sapien
gcctgcaagtgcatgtcacaaagct

SEQ ID NO: 4128809 - DNA, 25 bp, Homo sapien
tcacaaagcttatggatgtagcgga

SEQ ID NO: 4128810 - DNA, 25 bp, Homo sapien
ttcttccttgttaatctcagatttg

SEQ ID NO: 4128811 - DNA, 25 bp, Homo sapien
ctgtgtagttttcggcctgcaagtg

SEQ ID NO: 4128812 - DNA, 25 bp, Homo sapien
cagtaaaggagcagggtaaatgcgg

SEQ ID NO: 4128813 - DNA, 25 bp, Homo sapien
ctctgtctgcgatgggtagtggagg

SEQ ID NO: 4128814 - DNA, 25 bp, Homo sapien
taaaggagcagggtaaatgcggcct

SEQ ID NO: 4128815 - DNA, 25 bp, Homo sapien
tagtggaggaattcccgtagtggcc

SEQ ID NO: 4128816 - DNA, 25 bp, Homo sapien
tgaagtagtgaatgatcttccggca

SEQ ID NO: 4128817 - DNA, 25 bp, Homo sapien
ttgaagtagtgaatgatcttccggc

SEQ ID NO: 4128818 - DNA, 25 bp, Homo sapien
gaagtagtgaatgatcttccggcac

SEQ ID NO: 4128819 - DNA, 25 bp, Homo sapien
aggactggttaatctcacctaatag

SEQ ID NO: 4128820 - DNA, 25 bp, Homo sapien
ttttcccatagcatctgggttttgc

SEQ ID NO: 4128821 - DNA, 25 bp, Homo sapien
tccttgcccttctcttgttgccaag

SEQ ID NO: 4128822 - DNA, 25 bp, Homo sapien
ggttaatctcacctaatagtttcat

SEQ ID NO: 4128823 - DNA, 25 bp, Homo sapien
tggcagcttcatgggggctagctaa

SEQ ID NO: 4128824 - DNA, 25 bp, Homo sapien
gggggctagctaagtttacagctga

SEQ ID NO: 4128825 - DNA, 25 bp, Homo sapien
tacagctgagttgtatacagacttc

SEQ ID NO: 4128826 - DNA, 25 bp, Homo sapien
gtttacagctgagttgtatacagac

SEQ ID NO: 4128827 - DNA, 25 bp, Homo sapien
acagtgggatcccaaactcccagct

SEQ ID NO: 4128828 - DNA, 25 bp, Homo sapien
tgcacagtgggatcccaaactccca

SEQ ID NO: 4128829 - DNA, 25 bp, Homo sapien
atcatagaggctctcgtactgacac

SEQ ID NO: 4128830 - DNA, 25 bp, Homo sapien
aggctctcgtactgacacgccagct

SEQ ID NO: 4128831 - DNA, 25 bp, Homo sapien
gagaaaggtcttcaggttggcttga

SEQ ID NO: 4128832 - DNA, 25 bp, Homo sapien
ctgtgaatgagaaaggtcttcaggt

SEQ ID NO: 4128833 - DNA, 25 bp, Homo sapien
aaaggtcttcaggttggcttgactg

SEQ ID NO: 4128834 - DNA, 25 bp, Homo sapien
gaatgagaaaggtcttcaggttggc

SEQ ID NO: 4128835 - DNA, 25 bp, Homo sapien
cgaaagaactcaggctccaggcgtt

SEQ ID NO: 4128836 - DNA, 25 bp, Homo sapien
gcgttgctgctccataatgttgtca

SEQ ID NO: 4128837 - DNA, 25 bp, Homo sapien
tgtcatagtagctggcctccatttt

SEQ ID NO: 4128838 - DNA, 25 bp, Homo sapien
ccatagaagccgacccgaaagaact

SEQ ID NO: 4128839 - DNA, 25 bp, Homo sapien
catggccacggcacacgtattcttt

SEQ ID NO: 4128840 - DNA, 25 bp, Homo sapien
ggccacggcacacgtattctttgtt

SEQ ID NO: 4128841 - DNA, 25 bp, Homo sapien
tagtcatggccacggcacacgtatt

SEQ ID NO: 4128842 - DNA, 25 bp, Homo sapien
ctctcgtagtcatggccacggcaca

SEQ ID NO: 4128843 - DNA, 25 bp, Homo sapien
gcactgtaggatggcgtcatcagga

SEQ ID NO: 4128844 - DNA, 25 bp, Homo sapien
atggcgacagcctgcggaaactcac

SEQ ID NO: 4128845 - DNA, 25 bp, Homo sapien
ggcatcgcactgtaggatggcgtca

SEQ ID NO: 4128846 - DNA, 25 bp, Homo sapien
ctgggcatcgcactgtaggatggcg

SEQ ID NO: 4128847 - DNA, 25 bp, Homo sapien
aaacacagacttgccagagctgggc

SEQ ID NO: 4128848 - DNA, 25 bp, Homo sapien
gaaggagaaacacagacttgccaga

SEQ ID NO: 4128849 - DNA, 25 bp, Homo sapien
gagaaacacagacttgccagagctg

SEQ ID NO: 4128850 - DNA, 25 bp, Homo sapien
agtgaaggagaaacacagacttgcc

SEQ ID NO: 4128851 - DNA, 25 bp, Homo sapien
cataatctggaatgggcgtcactgc

SEQ ID NO: 4128852 - DNA, 25 bp, Homo sapien
tgttgacgcgatagaagctcttgac

SEQ ID NO: 4128853 - DNA, 25 bp, Homo sapien
tcataccggaacttcctcacattgt

SEQ ID NO: 4128854 - DNA, 25 bp, Homo sapien
gctcttgactcgatctggtacccta

SEQ ID NO: 4128855 - DNA, 25 bp, Homo sapien
agggtcagtgtggtacgttcaatcc

SEQ ID NO: 4128856 - DNA, 25 bp, Homo sapien
cctctccacttcaaaccaccgagag

SEQ ID NO: 4128857 - DNA, 25 bp, Homo sapien
ggtcagtgtggtacgttcaatccac

SEQ ID NO: 4128858 - DNA, 25 bp, Homo sapien
ctctccacttcaaaccaccgagaga

SEQ ID NO: 4128859 - DNA, 25 bp, Homo sapien
tgcacctgcttgtgttgatactggc

SEQ ID NO: 4128860 - DNA, 25 bp, Homo sapien
tggctgatcagggagcgtagctcct

SEQ ID NO: 4128861 - DNA, 25 bp, Homo sapien
cattcaggcacatgcttagcaggtt

SEQ ID NO: 4128862 - DNA, 25 bp, Homo sapien
tagcaggttaatgttgccatgcacc

SEQ ID NO: 4128863 - DNA, 25 bp, Homo sapien
gggtgcttgttgatgtaatctttat

SEQ ID NO: 4128864 - DNA, 25 bp, Homo sapien
ggttcccaagccctccaagacatac

SEQ ID NO: 4128865 - DNA, 25 bp, Homo sapien
tgctggttcccaagccctccaagac

SEQ ID NO: 4128866 - DNA, 25 bp, Homo sapien
tggctgctggttcccaagccctcca

SEQ ID NO: 4128867 - DNA, 25 bp, Homo sapien
ctggctgctggttcccaagccctcc

SEQ ID NO: 4128868 - DNA, 25 bp, Homo sapien
aattagcttcttatgcagaggccgc

SEQ ID NO: 4128869 - DNA, 25 bp, Homo sapien
catctggaactgatcaattagcttc

SEQ ID NO: 4128870 - DNA, 25 bp, Homo sapien
tgggtgcacaaacttctcatgaact

SEQ ID NO: 4128871 - DNA, 25 bp, Homo sapien
atggtagagactggcccgcatcatc

SEQ ID NO: 4128872 - DNA, 25 bp, Homo sapien
gacggagatgaccagaacctgcagc

SEQ ID NO: 4128873 - DNA, 25 bp, Homo sapien
catatcccttaagatctgggagcca

SEQ ID NO: 4128874 - DNA, 25 bp, Homo sapien
ttttgctcatgacaacctcgtgcag

SEQ ID NO: 4128875 - DNA, 25 bp, Homo sapien
gtttaagtagtgcaacctccctcag

SEQ ID NO: 4128876 - DNA, 25 bp, Homo sapien
tcatagagagtaaagaataaataag

SEQ ID NO: 4128877 - DNA, 25 bp, Homo sapien
catagagagtaaagaataaataagt

SEQ ID NO: 4128878 - DNA, 25 bp, Homo sapien
cttcatagagagtaaagaataaata

SEQ ID NO: 4128879 - DNA, 25 bp, Homo sapien
tagagagtaaagaataaataagtaa

SEQ ID NO: 4128880 - DNA, 25 bp, Homo sapien
tcttgatgctctccggactcatggg

SEQ ID NO: 4128881 - DNA, 25 bp, Homo sapien
ctgtgccggtgggtcatcttgatgc

SEQ ID NO: 4128882 - DNA, 25 bp, Homo sapien
ggacttagcttatccaaacctggaa

SEQ ID NO: 4128883 - DNA, 25 bp, Homo sapien
ctggtgcctgaacatgcaggactta

SEQ ID NO: 4128884 - DNA, 25 bp, Homo sapien
atgaatggcggcctgtgcccatcaa

SEQ ID NO: 4128885 - DNA, 25 bp, Homo sapien
gcggcctgtgcccatcaagttcatg

SEQ ID NO: 4128886 - DNA, 25 bp, Homo sapien
gatgatgaatggcggcctgtgccca

SEQ ID NO: 4128887 - DNA, 25 bp, Homo sapien
gagaggatgatgaatggcggcctgt

SEQ ID NO: 4128888 - DNA, 25 bp, Homo sapien
cagcatcaccatgtttcctgcttca

SEQ ID NO: 4128889 - DNA, 25 bp, Homo sapien
gccgtcacccagcatcaccatgttt

SEQ ID NO: 4128890 - DNA, 25 bp, Homo sapien
ggagccgtcacccagcatcaccatg

SEQ ID NO: 4128891 - DNA, 25 bp, Homo sapien
tcacccagcatcaccatgtttcctg

SEQ ID NO: 4128892 - DNA, 25 bp, Homo sapien
tgctgagtgagtggaactcaggctg

SEQ ID NO: 4128893 - DNA, 25 bp, Homo sapien
ggatggtgctgagtgagtggaactc

SEQ ID NO: 4128894 - DNA, 25 bp, Homo sapien
tggaaggggcagaggtaatcatctg

SEQ ID NO: 4128895 - DNA, 25 bp, Homo sapien
ggacagaacagagacgttggtgact

SEQ ID NO: 4128896 - DNA, 25 bp, Homo sapien
taactttttccacagttggtctgag

SEQ ID NO: 4128897 - DNA, 25 bp, Homo sapien
actttttccacagttggtctgagtg

SEQ ID NO: 4128898 - DNA, 25 bp, Homo sapien
gtaactttttccacagttggtctga

SEQ ID NO: 4128899 - DNA, 25 bp, Homo sapien
tttttccacagttggtctgagtgat

SEQ ID NO: 4128900 - DNA, 25 bp, Homo sapien
catttcacgggcatggcggtactta

SEQ ID NO: 4128901 - DNA, 25 bp, Homo sapien
cactgcttgggcggtcccggtatgt

SEQ ID NO: 4128902 - DNA, 25 bp, Homo sapien
aggatggctgctggatacatggcac

SEQ ID NO: 4128903 - DNA, 25 bp, Homo sapien
gtcccggtatgtgggcagcaacaac

SEQ ID NO: 4128904 - DNA, 25 bp, Homo sapien
tactcacgcctacactctgtctgga

SEQ ID NO: 4128905 - DNA, 25 bp, Homo sapien
tgctggtcctcaggttcactgcact

SEQ ID NO: 4128906 - DNA, 25 bp, Homo sapien
agaagcccagcggccttttgcggga

SEQ ID NO: 4128907 - DNA, 25 bp, Homo sapien
gaaggacagatagctacatgagcaa

SEQ ID NO: 4128908 - DNA, 25 bp, Homo sapien
tgtttagggatgacgagtccaggat

SEQ ID NO: 4128909 - DNA, 25 bp, Homo sapien
tagactgtttagggatgacgagtcc

SEQ ID NO: 4128910 - DNA, 25 bp, Homo sapien
actgtttagggatgacgagtccagg

SEQ ID NO: 4128911 - DNA, 25 bp, Homo sapien
gactgtttagggatgacgagtccag

SEQ ID NO: 4128912 - DNA, 25 bp, Homo sapien
ggctccgaccacttgctggaacagg

SEQ ID NO: 4128913 - DNA, 25 bp, Homo sapien
gacagattgggatcactgcagggtt

SEQ ID NO: 4128914 - DNA, 25 bp, Homo sapien
tcactgcagggtttgcaggctccga

SEQ ID NO: 4128915 - DNA, 25 bp, Homo sapien
aacagggctcgctggaaattcggcg

SEQ ID NO: 4128916 - DNA, 25 bp, Homo sapien
tgagcaaaggcggagcataacagtg

SEQ ID NO: 4128917 - DNA, 25 bp, Homo sapien
tagatggagcagctaggcagagaac

SEQ ID NO: 4128918 - DNA, 25 bp, Homo sapien
gacagcacatagcactcgatgaaca

SEQ ID NO: 4128919 - DNA, 25 bp, Homo sapien
gaggtatgtcctccatgatgagcaa

SEQ ID NO: 4128920 - DNA, 25 bp, Homo sapien
tggcctgaggccgccagtgcatagc

SEQ ID NO: 4128921 - DNA, 25 bp, Homo sapien
gcaggctcacctgatctgggagtca

SEQ ID NO: 4128922 - DNA, 25 bp, Homo sapien
agtgcatagcccatggtcctgaagg

SEQ ID NO: 4128923 - DNA, 25 bp, Homo sapien
gcatagcccatggtcctgaaggcag

SEQ ID NO: 4128924 - DNA, 25 bp, Homo sapien
ggccaggatgcgccccatatgggca

SEQ ID NO: 4128925 - DNA, 25 bp, Homo sapien
gatgcgccccatatgggcagacagg

SEQ ID NO: 4128926 - DNA, 25 bp, Homo sapien
ttgggctccgctatccagactccag

SEQ ID NO: 4128927 - DNA, 25 bp, Homo sapien
ggcctcttgggctccgctatccaga

SEQ ID NO: 4128928 - DNA, 25 bp, Homo sapien
ctgctaggcgatgagacagtctggt

SEQ ID NO: 4128929 - DNA, 25 bp, Homo sapien
tctggttgggatggccttcctgagc

SEQ ID NO: 4128930 - DNA, 25 bp, Homo sapien
taacctgctgtactcggaaacctca

SEQ ID NO: 4128931 - DNA, 25 bp, Homo sapien
tcagagtctgtggaacaggcctcag

SEQ ID NO: 4128932 - DNA, 25 bp, Homo sapien
aaggcgtcaaagtgtagggagtaat

SEQ ID NO: 4128933 - DNA, 25 bp, Homo sapien
tggaaggcgtcaaagtgtagggagt

SEQ ID NO: 4128934 - DNA, 25 bp, Homo sapien
agggctgggggggtatcacccagag

SEQ ID NO: 4128935 - DNA, 25 bp, Homo sapien
tggtggaaggcgtcaaagtgtaggg

SEQ ID NO: 4128936 - DNA, 25 bp, Homo sapien
ccccaagggtggttctagagcagac

SEQ ID NO: 4128937 - DNA, 25 bp, Homo sapien
tttgcagacaagctaacaggtagga

SEQ ID NO: 4128938 - DNA, 25 bp, Homo sapien
ggatactgacataaaggctgggtca

SEQ ID NO: 4128939 - DNA, 25 bp, Homo sapien
tagctagcgaactacagtgtgttga

SEQ ID NO: 4128940 - DNA, 25 bp, Homo sapien
cttgtgggggaggctgggatagggt

SEQ ID NO: 4128941 - DNA, 25 bp, Homo sapien
tgtgggggaggctgggatagggtgg

SEQ ID NO: 4128942 - DNA, 25 bp, Homo sapien
gaggctgggatagggtggagaggag

SEQ ID NO: 4128943 - DNA, 25 bp, Homo sapien
gggaggctgggatagggtggagagg

SEQ ID NO: 4128944 - DNA, 25 bp, Homo sapien
caaagttactctcactcaaggagga

SEQ ID NO: 4128945 - DNA, 25 bp, Homo sapien
tagggtggctcaagatcttcgtcag

SEQ ID NO: 4128946 - DNA, 25 bp, Homo sapien
cctccgaggagtgcccaaagttact

SEQ ID NO: 4128947 - DNA, 25 bp, Homo sapien
catggagtccatggtgtcagtgcga

SEQ ID NO: 4128948 - DNA, 25 bp, Homo sapien
tcacggcagtagaacggagacttgg

SEQ ID NO: 4128949 - DNA, 25 bp, Homo sapien
ttttcagacctggagtgattggcaa

SEQ ID NO: 4128950 - DNA, 25 bp, Homo sapien
tacatggcaacacatgagttcacgg

SEQ ID NO: 4128951 - DNA, 25 bp, Homo sapien
caagctgcttactgagggcggcatc

SEQ ID NO: 4128952 - DNA, 25 bp, Homo sapien
atttctccatgtagctccacatggt

SEQ ID NO: 4128953 - DNA, 25 bp, Homo sapien
tttctccatgtagctccacatggtc

SEQ ID NO: 4128954 - DNA, 25 bp, Homo sapien
ggcaaagtgattctgtctgtgcaat

SEQ ID NO: 4128955 - DNA, 25 bp, Homo sapien
tgcagtgtggcaaagtgattctgtc

SEQ ID NO: 4128956 - DNA, 25 bp, Homo sapien
tagtgcaatttccattcggtgcatc

SEQ ID NO: 4128957 - DNA, 25 bp, Homo sapien
gtgacatgtctatatggtccttgca

SEQ ID NO: 4128958 - DNA, 25 bp, Homo sapien
gaagaggtccttagtgcaatttcca

SEQ ID NO: 4128959 - DNA, 25 bp, Homo sapien
ttgcaatccctgaatgcaaccatga

SEQ ID NO: 4128960 - DNA, 25 bp, Homo sapien
tatgtgatgactgccttgtccaggg

SEQ ID NO: 4128961 - DNA, 25 bp, Homo sapien
gaaagctttgaggatttccggcgcc

SEQ ID NO: 4128962 - DNA, 25 bp, Homo sapien
gggagataacccttgcagatccagt

SEQ ID NO: 4128963 - DNA, 25 bp, Homo sapien
gaacctggtggtatcagaagggacc

SEQ ID NO: 4128964 - DNA, 25 bp, Homo sapien
actctagaccgtggagggaagcgcc

SEQ ID NO: 4128965 - DNA, 25 bp, Homo sapien
gggaggtgcccttacaagctctgaa

SEQ ID NO: 4128966 - DNA, 25 bp, Homo sapien
ggagcccgccgtgcataggctgata

SEQ ID NO: 4128967 - DNA, 25 bp, Homo sapien
tcttctttcattcgcgtgggcaacg

SEQ ID NO: 4128968 - DNA, 25 bp, Homo sapien
tggtccaggagccgcgagcccagac

SEQ ID NO: 4128969 - DNA, 25 bp, Homo sapien
cctagacagttgtcggccgctgatt

SEQ ID NO: 4128970 - DNA, 25 bp, Homo sapien
ccgctgattgaacccgggctggccg

SEQ ID NO: 4128971 - DNA, 25 bp, Homo sapien
ggtgtctgagccctagacagttgtc

SEQ ID NO: 4128972 - DNA, 25 bp, Homo sapien
agtcccggccgcgcgccgtagctcc

SEQ ID NO: 4128973 - DNA, 25 bp, Homo sapien
caagtcccggccgcgcgccgtagct

SEQ ID NO: 4128974 - DNA, 25 bp, Homo sapien
cggccgcgcgccgtagctccccatt

SEQ ID NO: 4128975 - DNA, 25 bp, Homo sapien
ctccaagtcccggccgcgcgccgta

SEQ ID NO: 4128976 - DNA, 25 bp, Homo sapien
tgccgccgccgaccgactgaaccgc

SEQ ID NO: 4128977 - DNA, 25 bp, Homo sapien
gccgccgccgaccgactgaaccgca

SEQ ID NO: 4128978 - DNA, 25 bp, Homo sapien
ccgccgccgaccgactgaaccgcac

SEQ ID NO: 4128979 - DNA, 25 bp, Homo sapien
cttcgcagtcgcccggccgcagcgc

SEQ ID NO: 4128980 - DNA, 25 bp, Homo sapien
agcacgctcagagccagcgccaccg

SEQ ID NO: 4128981 - DNA, 25 bp, Homo sapien
gcagcacgctcagagccagcgccac

SEQ ID NO: 4128982 - DNA, 25 bp, Homo sapien
gcgcccggctgcccggcagcacgct

SEQ ID NO: 4128983 - DNA, 25 bp, Homo sapien
ttcgtgatcccaacagacagggcgc

SEQ ID NO: 4128984 - DNA, 25 bp, Homo sapien
tcgtcggaccaatgttttctaggcc

SEQ ID NO: 4128985 - DNA, 25 bp, Homo sapien
caagaaagatttactagggcgggcg

SEQ ID NO: 4128986 - DNA, 25 bp, Homo sapien
catggtgaacacgtgtccttgagac

SEQ ID NO: 4128987 - DNA, 25 bp, Homo sapien
tgcttcccggcagaactttataagt

SEQ ID NO: 4128988 - DNA, 25 bp, Homo sapien
ggtgagaatgtgacatctctgtctt

SEQ ID NO: 4128989 - DNA, 25 bp, Homo sapien
tataagttcgttttcaatagtggct

SEQ ID NO: 4128990 - DNA, 25 bp, Homo sapien
tctctgtctttgaggtcctggtaaa

SEQ ID NO: 4128991 - DNA, 25 bp, Homo sapien
ggcccacagcggcatttttcggtgc

SEQ ID NO: 4128992 - DNA, 25 bp, Homo sapien
ttttcggtgccctgcctgtactggt

SEQ ID NO: 4128993 - DNA, 25 bp, Homo sapien
cctgtactggtagtcagattcagcc

SEQ ID NO: 4128994 - DNA, 25 bp, Homo sapien
cagattcagccagtgtaaaccctgg

SEQ ID NO: 4128995 - DNA, 25 bp, Homo sapien
caggatttcaccactttgcccaggc

SEQ ID NO: 4128996 - DNA, 25 bp, Homo sapien
cctaaaaatttttttgtgcagacag

SEQ ID NO: 4128997 - DNA, 25 bp, Homo sapien
ctagcctaaaaatttttttgtgcag

SEQ ID NO: 4128998 - DNA, 25 bp, Homo sapien
acaggatttcaccactttgcccagg

SEQ ID NO: 4128999 - DNA, 25 bp, Homo sapien
acatactgacaccttgaaacatcat

SEQ ID NO: 4129000 - DNA, 25 bp, Homo sapien
ccttcaggaggtgcttgagagccat

SEQ ID NO: 4129001 - DNA, 25 bp, Homo sapien
gagcaataaaggacaatggccttca

SEQ ID NO: 4129002 - DNA, 25 bp, Homo sapien
catctcctccaaacatactgacacc

SEQ ID NO: 4129003 - DNA, 25 bp, Homo sapien
tgatacctcattgatgattttggtg

SEQ ID NO: 4129004 - DNA, 25 bp, Homo sapien
ctcacagatcttctccacagggatg

SEQ ID NO: 4129005 - DNA, 25 bp, Homo sapien
tggtgggccagaggctttgatacct

SEQ ID NO: 4129006 - DNA, 25 bp, Homo sapien
catacttaagctcacatatctggct

SEQ ID NO: 4129007 - DNA, 25 bp, Homo sapien
ccctactggtttcagaggaagagac

SEQ ID NO: 4129008 - DNA, 25 bp, Homo sapien
gacacatttacaggcatgtcagtgc

SEQ ID NO: 4129009 - DNA, 25 bp, Homo sapien
gagtatgtcactccctgaacggcca

SEQ ID NO: 4129010 - DNA, 25 bp, Homo sapien
tatgcagcgtgaacaaggataggga

SEQ ID NO: 4129011 - DNA, 25 bp, Homo sapien
cactgtgctcaggtcgatctgcttg

SEQ ID NO: 4129012 - DNA, 25 bp, Homo sapien
gacttttctgcacagcctttgcatg

SEQ ID NO: 4129013 - DNA, 25 bp, Homo sapien
tcttccggatgtagtcagacttttc

SEQ ID NO: 4129014 - DNA, 25 bp, Homo sapien
acaaatcggtccgtgcactggctgc

SEQ ID NO: 4129015 - DNA, 25 bp, Homo sapien
tactgtagggccagcatcatcagga

SEQ ID NO: 4129016 - DNA, 25 bp, Homo sapien
gctccaggcttcacatctgatacag

SEQ ID NO: 4129017 - DNA, 25 bp, Homo sapien
tgaagtcctagagtacaccagcaac

SEQ ID NO: 4129018 - DNA, 25 bp, Homo sapien
aaaaggctgttttgggagtaagcag

SEQ ID NO: 4129019 - DNA, 25 bp, Homo sapien
cccattttggtattcactataattc

SEQ ID NO: 4129020 - DNA, 25 bp, Homo sapien
cattttggtattcactataattctg

SEQ ID NO: 4129021 - DNA, 25 bp, Homo sapien
ttttggtattcactataattctgca

SEQ ID NO: 4129022 - DNA, 25 bp, Homo sapien
ccccattttggtattcactataatt

SEQ ID NO: 4129023 - DNA, 25 bp, Homo sapien
gacgacctaacgctttgtgctccca

SEQ ID NO: 4129024 - DNA, 25 bp, Homo sapien
gccgatgcttgaggctacgcggagt

SEQ ID NO: 4129025 - DNA, 25 bp, Homo sapien
cagccgtgctttgccgctctgggtc

SEQ ID NO: 4129026 - DNA, 25 bp, Homo sapien
tacgcggagtgtagtgaaccctgag

SEQ ID NO: 4129027 - DNA, 25 bp, Homo sapien
gcggcccgtaggtttctcacagcgg

SEQ ID NO: 4129028 - DNA, 25 bp, Homo sapien
gcgggcggcccgtaggtttctcaca

SEQ ID NO: 4129029 - DNA, 25 bp, Homo sapien
cgggcggcccgtaggtttctcacag

SEQ ID NO: 4129030 - DNA, 25 bp, Homo sapien
gcccgtaggtttctcacagcggcgg

SEQ ID NO: 4129031 - DNA, 25 bp, Homo sapien
ctcccgcggacgcttggcggacgat

SEQ ID NO: 4129032 - DNA, 25 bp, Homo sapien
gagccgcgcccgctcgggctagagt

SEQ ID NO: 4129033 - DNA, 25 bp, Homo sapien
ttggcggacgatgacgagccgcgcc

SEQ ID NO: 4129034 - DNA, 25 bp, Homo sapien
gctcgggctagagtctcgctcgctc

SEQ ID NO: 4129035 - DNA, 25 bp, Homo sapien
ggtttgtcgcgggcccgcgctggaa

SEQ ID NO: 4129036 - DNA, 25 bp, Homo sapien
tcgcgcggtgattcgcgtccccggt

SEQ ID NO: 4129037 - DNA, 25 bp, Homo sapien
tgccgcggccgtcgcgatgcccgcc

SEQ ID NO: 4129038 - DNA, 25 bp, Homo sapien
gaggagcgcccgctactcgcgcggt

SEQ ID NO: 4129039 - DNA, 25 bp, Homo sapien
cggaaattcacgtaggccacacggc

SEQ ID NO: 4129040 - DNA, 25 bp, Homo sapien
agcaacgtcttgtactcaggcgcgg

SEQ ID NO: 4129041 - DNA, 25 bp, Homo sapien
cccagctcaggcgtgtgcgacaggc

SEQ ID NO: 4129042 - DNA, 25 bp, Homo sapien
gatctcgccgaagcgcttgaactgg

SEQ ID NO: 4129043 - DNA, 25 bp, Homo sapien
cttcgccgactgctcccgccgccgc

SEQ ID NO: 4129044 - DNA, 25 bp, Homo sapien
gctcccgccgccgccacgcaggtac

SEQ ID NO: 4129045 - DNA, 25 bp, Homo sapien
ctgctcccgccgccgccacgcaggt

SEQ ID NO: 4129046 - DNA, 25 bp, Homo sapien
gactgctcccgccgccgccacgcag

SEQ ID NO: 4129047 - DNA, 25 bp, Homo sapien
tgtagcgggaggtagccgagcgggt

SEQ ID NO: 4129048 - DNA, 25 bp, Homo sapien
tactggtagcctccgtgtagcggga

SEQ ID NO: 4129049 - DNA, 25 bp, Homo sapien
acagcgagcgctgcttgtactggta

SEQ ID NO: 4129050 - DNA, 25 bp, Homo sapien
ggaggcgtggaagcggcggcgctgc

SEQ ID NO: 4129051 - DNA, 25 bp, Homo sapien
ggtcgtcgtacagcccgtagtagtc

SEQ ID NO: 4129052 - DNA, 25 bp, Homo sapien
cataggggcgcccacggtcgtcgta

SEQ ID NO: 4129053 - DNA, 25 bp, Homo sapien
ccacggtcgtcgtacagcccgtagt

SEQ ID NO: 4129054 - DNA, 25 bp, Homo sapien
cagctgggtagccataggggcgccc

SEQ ID NO: 4129055 - DNA, 25 bp, Homo sapien
cagtgacgtgttaggtcccaggcca

SEQ ID NO: 4129056 - DNA, 25 bp, Homo sapien
ccaatgaagaggttgcgcgtggccc

SEQ ID NO: 4129057 - DNA, 25 bp, Homo sapien
aatggtccgaatgctcccaaagcgg

SEQ ID NO: 4129058 - DNA, 25 bp, Homo sapien
caagctctcgtactgaatataggca

SEQ ID NO: 4129059 - DNA, 25 bp, Homo sapien
caaaaaagtccggtctcggtctgag

SEQ ID NO: 4129060 - DNA, 25 bp, Homo sapien
tcaaggctgtttcggcggtcagagc

SEQ ID NO: 4129061 - DNA, 25 bp, Homo sapien
tgctttggcaaaatccacgcggagc

SEQ ID NO: 4129062 - DNA, 25 bp, Homo sapien
ccgggtgtatccatctgtgagcagc

SEQ ID NO: 4129063 - DNA, 25 bp, Homo sapien
gcttgcccaatgtccttagtgctga

SEQ ID NO: 4129064 - DNA, 25 bp, Homo sapien
tgtgacctcgtcaagcttgggctgg

SEQ ID NO: 4129065 - DNA, 25 bp, Homo sapien
ctaagaggaccgcatagccgttggg

SEQ ID NO: 4129066 - DNA, 25 bp, Homo sapien
tgcagaccgggctctactgtgggca

SEQ ID NO: 4129067 - DNA, 25 bp, Homo sapien
tacacagctgctgaaggctacctgc

SEQ ID NO: 4129068 - DNA, 25 bp, Homo sapien
tttgtgacacaaacatgacgctggg

SEQ ID NO: 4129069 - DNA, 25 bp, Homo sapien
tactcaggcttgtgtggcagcgtcc

SEQ ID NO: 4129070 - DNA, 25 bp, Homo sapien
tctctaggtatgactggacacgggc

SEQ ID NO: 4129071 - DNA, 25 bp, Homo sapien
gagccccagcctctaatctcaggtg

SEQ ID NO: 4129072 - DNA, 25 bp, Homo sapien
tagctccggtaagggagcagacctg

SEQ ID NO: 4129073 - DNA, 25 bp, Homo sapien
taatctcaggtgtcactcatgctac

SEQ ID NO: 4129074 - DNA, 25 bp, Homo sapien
tgtcactcatgctaccttatcctag

SEQ ID NO: 4129075 - DNA, 25 bp, Homo sapien
caactgacttgcttaggtacctggc

SEQ ID NO: 4129076 - DNA, 25 bp, Homo sapien
gaaagatacttcagaggcccctaaa

SEQ ID NO: 4129077 - DNA, 25 bp, Homo sapien
tcggagtcacttaggaggcagcatg

SEQ ID NO: 4129078 - DNA, 25 bp, Homo sapien
tctaccagggctgaaaatcggagtc

SEQ ID NO: 4129079 - DNA, 25 bp, Homo sapien
tgaggacgtctcagagtggacttca

SEQ ID NO: 4129080 - DNA, 25 bp, Homo sapien
taatggatcacaacttgaggacgtc

SEQ ID NO: 4129081 - DNA, 25 bp, Homo sapien
gatggtggtgctcccaaaataagag

SEQ ID NO: 4129082 - DNA, 25 bp, Homo sapien
aggttcgcagggtcagcaaacagca

SEQ ID NO: 4129083 - DNA, 25 bp, Homo sapien
tgcccatcaccacacccagcaaatt

SEQ ID NO: 4129084 - DNA, 25 bp, Homo sapien
ttacctcgtgatctgcccgcctcag

SEQ ID NO: 4129085 - DNA, 25 bp, Homo sapien
tacctcgtgatctgcccgcctcagc

SEQ ID NO: 4129086 - DNA, 25 bp, Homo sapien
ggtgcccatcaccacacccagcaaa

SEQ ID NO: 4129087 - DNA, 25 bp, Homo sapien
cggagggagcttatgccagttgacc

SEQ ID NO: 4129088 - DNA, 25 bp, Homo sapien
caggagtgggtagcatgcttcctcc

SEQ ID NO: 4129089 - DNA, 25 bp, Homo sapien
tcagggttggttgagatccagagca

SEQ ID NO: 4129090 - DNA, 25 bp, Homo sapien
aaagtgtctgtggtaacagggtctc

SEQ ID NO: 4129091 - DNA, 25 bp, Homo sapien
ttacaagataactagaaagggtata

SEQ ID NO: 4129092 - DNA, 25 bp, Homo sapien
gataactagaaagggtataaataca

SEQ ID NO: 4129093 - DNA, 25 bp, Homo sapien
tacaagataactagaaagggtataa

SEQ ID NO: 4129094 - DNA, 25 bp, Homo sapien
caagataactagaaagggtataaat

SEQ ID NO: 4129095 - DNA, 25 bp, Homo sapien
catgcctggtttgtcattgggattt

SEQ ID NO: 4129096 - DNA, 25 bp, Homo sapien
tagaccacgttggaatgtattacca

SEQ ID NO: 4129097 - DNA, 25 bp, Homo sapien
catacaagtcttgtgtttgtgcctt

SEQ ID NO: 4129098 - DNA, 25 bp, Homo sapien
tgatactaacccttctaatccatga

SEQ ID NO: 4129099 - DNA, 25 bp, Homo sapien
actgaagacacagggtacagggcca

SEQ ID NO: 4129100 - DNA, 25 bp, Homo sapien
ggcatagtcattcaggccttagact

SEQ ID NO: 4129101 - DNA, 25 bp, Homo sapien
tgcattctccgcagcactgaagaca

SEQ ID NO: 4129102 - DNA, 25 bp, Homo sapien
gcaagggctcgggaatcctaactta

SEQ ID NO: 4129103 - DNA, 25 bp, Homo sapien
gacagggatacaaggctcttgggtt

SEQ ID NO: 4129104 - DNA, 25 bp, Homo sapien
gatacaaggctcttgggttccaggc

SEQ ID NO: 4129105 - DNA, 25 bp, Homo sapien
gacttctgggaatagcagccttcat

SEQ ID NO: 4129106 - DNA, 25 bp, Homo sapien
ctggacagggatacaaggctcttgg

SEQ ID NO: 4129107 - DNA, 25 bp, Homo sapien
gtccacaggatttggtctgttcttg

SEQ ID NO: 4129108 - DNA, 25 bp, Homo sapien
caaaagtccacaggatttggtctgt

SEQ ID NO: 4129109 - DNA, 25 bp, Homo sapien
gccaaaagtccacaggatttggtct

SEQ ID NO: 4129110 - DNA, 25 bp, Homo sapien
ctgttcttgccttcatgaaatgtaa

SEQ ID NO: 4129111 - DNA, 25 bp, Homo sapien
ctggctccatagagcagacagcaga

SEQ ID NO: 4129112 - DNA, 25 bp, Homo sapien
gctggctccatagagcagacagcag

SEQ ID NO: 4129113 - DNA, 25 bp, Homo sapien
tttctcatgtcactaaagtaggagc

SEQ ID NO: 4129114 - DNA, 25 bp, Homo sapien
ttctcatgtcactaaagtaggagcc

SEQ ID NO: 4129115 - DNA, 25 bp, Homo sapien
gccagagctagctcccctggtgatg

SEQ ID NO: 4129116 - DNA, 25 bp, Homo sapien
ttagctgggactctccgggtgacac

SEQ ID NO: 4129117 - DNA, 25 bp, Homo sapien
tactcatttggcctcttagctggga

SEQ ID NO: 4129118 - DNA, 25 bp, Homo sapien
tgaaacaggttcacatgaaagcccc

SEQ ID NO: 4129119 - DNA, 25 bp, Homo sapien
tcatgggttagaaagcagcacagtc

SEQ ID NO: 4129120 - DNA, 25 bp, Homo sapien
aagcgtcggtctccaccggcggcgg

SEQ ID NO: 4129121 - DNA, 25 bp, Homo sapien
ccaagcgtcggtctccaccggcggc

SEQ ID NO: 4129122 - DNA, 25 bp, Homo sapien
ggccaagcgtcggtctccaccggcg

SEQ ID NO: 4129123 - DNA, 25 bp, Homo sapien
ctggccaagcgtcggtctccaccgg

SEQ ID NO: 4129124 - DNA, 25 bp, Homo sapien
cggctgaggcgggaagcagccggcc

SEQ ID NO: 4129125 - DNA, 25 bp, Homo sapien
ggccgagggacctcacgttcagctt

SEQ ID NO: 4129126 - DNA, 25 bp, Homo sapien
ttcagcttcgcccgcctaggcaaag

SEQ ID NO: 4129127 - DNA, 25 bp, Homo sapien
ctaggcaaagtctgcggcggcggag

SEQ ID NO: 4129128 - DNA, 25 bp, Homo sapien
tcactcctgtgataagttccttgcc

SEQ ID NO: 4129129 - DNA, 25 bp, Homo sapien
ctgtgataagttccttgcctgaaaa

SEQ ID NO: 4129130 - DNA, 25 bp, Homo sapien
aaaaccactcctcgtcagggtgcat

SEQ ID NO: 4129131 - DNA, 25 bp, Homo sapien
cctgaaaaccactcctcgtcagggt

SEQ ID NO: 4129132 - DNA, 25 bp, Homo sapien
taagaattggactgaaaacgcctgg

SEQ ID NO: 4129133 - DNA, 25 bp, Homo sapien
tctacgtgggaacaaactcatccag

SEQ ID NO: 4129134 - DNA, 25 bp, Homo sapien
gacttggagtaagaaaggtccacac

SEQ ID NO: 4129135 - DNA, 25 bp, Homo sapien
tgttcagccaccaatatagtcagcc

SEQ ID NO: 4129136 - DNA, 25 bp, Homo sapien
gataatacttctagtgaagacaatg

SEQ ID NO: 4129137 - DNA, 25 bp, Homo sapien
caaattcattgaagatggataatac

SEQ ID NO: 4129138 - DNA, 25 bp, Homo sapien
ttcattgaagatggataatacttct

SEQ ID NO: 4129139 - DNA, 25 bp, Homo sapien
tcacagggagacagtgtacaggcca

SEQ ID NO: 4129140 - DNA, 25 bp, Homo sapien
ggtacaatgattctgatactgtttt

SEQ ID NO: 4129141 - DNA, 25 bp, Homo sapien
tttgcgtactgtctttcaatgatat

SEQ ID NO: 4129142 - DNA, 25 bp, Homo sapien
acttttgcctgaataatacatacag

SEQ ID NO: 4129143 - DNA, 25 bp, Homo sapien
cctcagagttggagtttgcgtactg

SEQ ID NO: 4129144 - DNA, 25 bp, Homo sapien
aaaagataatgtttacaataatgag

SEQ ID NO: 4129145 - DNA, 25 bp, Homo sapien
aaagataatgtttacaataatgaga

SEQ ID NO: 4129146 - DNA, 25 bp, Homo sapien
tcactgctcgttgagacatacacca

SEQ ID NO: 4129147 - DNA, 25 bp, Homo sapien
ccataccagcatgaactcacagtga

SEQ ID NO: 4129148 - DNA, 25 bp, Homo sapien
caagggacagcactccaagtgatca

SEQ ID NO: 4129149 - DNA, 25 bp, Homo sapien
gataagcaacgccttcatgctccca

SEQ ID NO: 4129150 - DNA, 25 bp, Homo sapien
atacacagagagatagacagcaaaa

SEQ ID NO: 4129151 - DNA, 25 bp, Homo sapien
gactttcaaacagactgagccttac

SEQ ID NO: 4129152 - DNA, 25 bp, Homo sapien
ttatttttgcccaagatatatacac

SEQ ID NO: 4129153 - DNA, 25 bp, Homo sapien
aatgactttcaaacagactgagcct

SEQ ID NO: 4129154 - DNA, 25 bp, Homo sapien
tgcctttagcaacctggaaaaacaa

SEQ ID NO: 4129155 - DNA, 25 bp, Homo sapien
tagttgtctagataccctgtggccc

SEQ ID NO: 4129156 - DNA, 25 bp, Homo sapien
tggcctgcagaagatcagacaatac

SEQ ID NO: 4129157 - DNA, 25 bp, Homo sapien
agcactcagagcagtaaatggcctg

SEQ ID NO: 4129158 - DNA, 25 bp, Homo sapien
ttaaaatatgccaacaacagcctgg

SEQ ID NO: 4129159 - DNA, 25 bp, Homo sapien
tgtctagatctagctttaaaatatg

SEQ ID NO: 4129160 - DNA, 25 bp, Homo sapien
tcttattaattaaacactcagtgtc

SEQ ID NO: 4129161 - DNA, 25 bp, Homo sapien
tacaggcgtgtaattaataagaaca

SEQ ID NO: 4129162 - DNA, 25 bp, Homo sapien
cccctattatatttgagccagtttc

SEQ ID NO: 4129163 - DNA, 25 bp, Homo sapien
acatgcactacatgctcctgcaaag

SEQ ID NO: 4129164 - DNA, 25 bp, Homo sapien
ctgacttcaggagtgtgatgaacaa

SEQ ID NO: 4129165 - DNA, 25 bp, Homo sapien
ttgttctaatctcaggtctagacac

SEQ ID NO: 4129166 - DNA, 25 bp, Homo sapien
gaaagagccaacagggtcaacagac

SEQ ID NO: 4129167 - DNA, 25 bp, Homo sapien
tcaacccaggccatgtgagattccc

SEQ ID NO: 4129168 - DNA, 25 bp, Homo sapien
taaaagctgcatcaacctaggttgg

SEQ ID NO: 4129169 - DNA, 25 bp, Homo sapien
caaactgaatgtacaaacgcacgag

SEQ ID NO: 4129170 - DNA, 25 bp, Homo sapien
gaacttcctacttggtaccttggca

SEQ ID NO: 4129171 - DNA, 25 bp, Homo sapien
tctaacgagttggacaagaacttcc

SEQ ID NO: 4129172 - DNA, 25 bp, Homo sapien
tggcagttaagagaccctgcaactt

SEQ ID NO: 4129173 - DNA, 25 bp, Homo sapien
tatcccactgcgaaacatgtagaaa

SEQ ID NO: 4129174 - DNA, 25 bp, Homo sapien
gatatgacgtactgaaaaggcctct

SEQ ID NO: 4129175 - DNA, 25 bp, Homo sapien
gattcagaaaagcaccactcacata

SEQ ID NO: 4129176 - DNA, 25 bp, Homo sapien
tactgtagcaactggagtttactct

SEQ ID NO: 4129177 - DNA, 25 bp, Homo sapien
tacaaacacctttagtgctgctgct

SEQ ID NO: 4129178 - DNA, 25 bp, Homo sapien
ggctgcagcctggaattaaacccca

SEQ ID NO: 4129179 - DNA, 25 bp, Homo sapien
gacaggatgaggagctaatcctccc

SEQ ID NO: 4129180 - DNA, 25 bp, Homo sapien
cctggtaccctactgctcaaggata

SEQ ID NO: 4129181 - DNA, 25 bp, Homo sapien
catcctagagcagttaagagtacca

SEQ ID NO: 4129182 - DNA, 25 bp, Homo sapien
aaatgcattatttaaggttgacaat

SEQ ID NO: 4129183 - DNA, 25 bp, Homo sapien
actccatacttaatcatatcctctg

SEQ ID NO: 4129184 - DNA, 25 bp, Homo sapien
tacttaatcatatcctctgaaatgc

SEQ ID NO: 4129185 - DNA, 25 bp, Homo sapien
ggttgacaatttgaataaacaccaa

SEQ ID NO: 4129186 - DNA, 25 bp, Homo sapien
tctctggaaggctctaagcatgatc

SEQ ID NO: 4129187 - DNA, 25 bp, Homo sapien
aaggctctaagcatgatcaatgaca

SEQ ID NO: 4129188 - DNA, 25 bp, Homo sapien
ggaaggctctaagcatgatcaatga

SEQ ID NO: 4129189 - DNA, 25 bp, Homo sapien
tctggaaggctctaagcatgatcaa

SEQ ID NO: 4129190 - DNA, 25 bp, Homo sapien
ccttctgtgtatgtaggatgttacc

SEQ ID NO: 4129191 - DNA, 25 bp, Homo sapien
agctaaagcagggatgacagtttga

SEQ ID NO: 4129192 - DNA, 25 bp, Homo sapien
tatgagaagcccgtgtgacagacac

SEQ ID NO: 4129193 - DNA, 25 bp, Homo sapien
gacctatgagtcctgtgtctttcca

SEQ ID NO: 4129194 - DNA, 25 bp, Homo sapien
gctaccacttatcagagttttggca

SEQ ID NO: 4129195 - DNA, 25 bp, Homo sapien
cacttatcagagttttggcatagta

SEQ ID NO: 4129196 - DNA, 25 bp, Homo sapien
ctttattaaaacacatgccttcctt

SEQ ID NO: 4129197 - DNA, 25 bp, Homo sapien
aaagaagctaccacttatcagagtt

SEQ ID NO: 4129198 - DNA, 25 bp, Homo sapien
cattaccgactcatggtccactgca

SEQ ID NO: 4129199 - DNA, 25 bp, Homo sapien
ggctcccagaggtcctcagtgggca

SEQ ID NO: 4129200 - DNA, 25 bp, Homo sapien
tgggcattaccgactcatggtccac

SEQ ID NO: 4129201 - DNA, 25 bp, Homo sapien
cctcagtgggcattaccgactcatg

SEQ ID NO: 4129202 - DNA, 25 bp, Homo sapien
gtccgggtccaggtctggatcgctc

SEQ ID NO: 4129203 - DNA, 25 bp, Homo sapien
gtctggatcgctccctgaggcagat

SEQ ID NO: 4129204 - DNA, 25 bp, Homo sapien
ctccctgaggcagattcgtctgaca

SEQ ID NO: 4129205 - DNA, 25 bp, Homo sapien
gggtccaggtctggatcgctccctg

SEQ ID NO: 4129206 - DNA, 25 bp, Homo sapien
tcctcctcctcttccgcatcctcca

SEQ ID NO: 4129207 - DNA, 25 bp, Homo sapien
ctgtcacactcctccactgccacct

SEQ ID NO: 4129208 - DNA, 25 bp, Homo sapien
ctcctcttccgcatcctccagctcc

SEQ ID NO: 4129209 - DNA, 25 bp, Homo sapien
ctcctcctcttccgcatcctccagc

SEQ ID NO: 4129210 - DNA, 25 bp, Homo sapien
atccagcaggtcttcttcatcatcc

SEQ ID NO: 4129211 - DNA, 25 bp, Homo sapien
catccagcaggtcttcttcatcatc

SEQ ID NO: 4129212 - DNA, 25 bp, Homo sapien
gagcacagcaggacatagggcctaa

SEQ ID NO: 4129213 - DNA, 25 bp, Homo sapien
cacagcaggacatagggcctaatgg

SEQ ID NO: 4129214 - DNA, 25 bp, Homo sapien
taatggaacgtttgtttatcactct

SEQ ID NO: 4129215 - DNA, 25 bp, Homo sapien
ggcctaatggaacgtttgtttatca

SEQ ID NO: 4129216 - DNA, 25 bp, Homo sapien
gccctgctagagaggaaccccattg

SEQ ID NO: 4129217 - DNA, 25 bp, Homo sapien
aactactccagtcactcctgcagga

SEQ ID NO: 4129218 - DNA, 25 bp, Homo sapien
gagggttggcagaacaactattgcc

SEQ ID NO: 4129219 - DNA, 25 bp, Homo sapien
tgtattcccagtcatgtccaaggcc

SEQ ID NO: 4129220 - DNA, 25 bp, Homo sapien
agcttggtatggcctcctccttgtc

SEQ ID NO: 4129221 - DNA, 25 bp, Homo sapien
gcttggtatggcctcctccttgtca

SEQ ID NO: 4129222 - DNA, 25 bp, Homo sapien
cttggtatggcctcctccttgtcat

SEQ ID NO: 4129223 - DNA, 25 bp, Homo sapien
gaatcagggaattgtgagtatccat

SEQ ID NO: 4129224 - DNA, 25 bp, Homo sapien
ggctgaatcagggaattgtgagtat

SEQ ID NO: 4129225 - DNA, 25 bp, Homo sapien
actcactggctgaatcagggaattg

SEQ ID NO: 4129226 - DNA, 25 bp, Homo sapien
cactggctgaatcagggaattgtga

SEQ ID NO: 4129227 - DNA, 25 bp, Homo sapien
cctcggaggctaggttcttgccttg

SEQ ID NO: 4129228 - DNA, 25 bp, Homo sapien
ggtcctcggaggctaggttcttgcc

SEQ ID NO: 4129229 - DNA, 25 bp, Homo sapien
gttcttgccttggtggcgcctaagc

SEQ ID NO: 4129230 - DNA, 25 bp, Homo sapien
gtggcgcctaagctgctctgaaggc

SEQ ID NO: 4129231 - DNA, 25 bp, Homo sapien
gaataggggctgcataatctttcct

SEQ ID NO: 4129232 - DNA, 25 bp, Homo sapien
agggaggaactccagcggaacagta

SEQ ID NO: 4129233 - DNA, 25 bp, Homo sapien
gctccaattgatcctcccggagtag

SEQ ID NO: 4129234 - DNA, 25 bp, Homo sapien
tgtgctgctttggtaacaggctcca

SEQ ID NO: 4129235 - DNA, 25 bp, Homo sapien
aatgacttcctgggccaagacccga

SEQ ID NO: 4129236 - DNA, 25 bp, Homo sapien
ttcctgggccaagacccgaggaggc

SEQ ID NO: 4129237 - DNA, 25 bp, Homo sapien
tcacttgcccttaaagcaatttcct

SEQ ID NO: 4129238 - DNA, 25 bp, Homo sapien
cagttggggaccgtcacttgccctt

SEQ ID NO: 4129239 - DNA, 25 bp, Homo sapien
caaaaatccagggagtgaagataat

SEQ ID NO: 4129240 - DNA, 25 bp, Homo sapien
cacagggaaattagtcaaagccaca

SEQ ID NO: 4129241 - DNA, 25 bp, Homo sapien
tagccgatctcagcatgaacaccag

SEQ ID NO: 4129242 - DNA, 25 bp, Homo sapien
agggaggcacctggtttgatcttac

SEQ ID NO: 4129243 - DNA, 25 bp, Homo sapien
tgaggtttcacagcccgtgccaact

SEQ ID NO: 4129244 - DNA, 25 bp, Homo sapien
cgcccaagggcgtcacgctggttta

SEQ ID NO: 4129245 - DNA, 25 bp, Homo sapien
gacatcattgacatgggtgccaccc

SEQ ID NO: 4129246 - DNA, 25 bp, Homo sapien
cacgctggtttaagacatcattgac

SEQ ID NO: 4129247 - DNA, 25 bp, Homo sapien
gacccatgctgtgggccagaataca

SEQ ID NO: 4129248 - DNA, 25 bp, Homo sapien
ttggctggcgtgtggcggaagagga

SEQ ID NO: 4129249 - DNA, 25 bp, Homo sapien
gaagaggacgtcgatgaaagagatc

SEQ ID NO: 4129250 - DNA, 25 bp, Homo sapien
gactccactaggttatcgtaaagga

SEQ ID NO: 4129251 - DNA, 25 bp, Homo sapien
tcttcaggcttgttgtcagccggga

SEQ ID NO: 4129252 - DNA, 25 bp, Homo sapien
tgtcagccgggagggcttcaggagg

SEQ ID NO: 4129253 - DNA, 25 bp, Homo sapien
cttgttgtcagccgggagggcttca

SEQ ID NO: 4129254 - DNA, 25 bp, Homo sapien
agccacatgttgaactctgccagcc

SEQ ID NO: 4129255 - DNA, 25 bp, Homo sapien
tgctgccgatcttcctcatctagat

SEQ ID NO: 4129256 - DNA, 25 bp, Homo sapien
caatcagccatcactttagcacgag

SEQ ID NO: 4129257 - DNA, 25 bp, Homo sapien
tcaatgatgactgggtgagaacgct

SEQ ID NO: 4129258 - DNA, 25 bp, Homo sapien
ggttttcttcggtctacctgtggca

SEQ ID NO: 4129259 - DNA, 25 bp, Homo sapien
gaggatccggagtcagagggtgaca

SEQ ID NO: 4129260 - DNA, 25 bp, Homo sapien
ataatatgagaagtaggggtgcacc

SEQ ID NO: 4129261 - DNA, 25 bp, Homo sapien
acagggcctgctcttagtcaataat

SEQ ID NO: 4129262 - DNA, 25 bp, Homo sapien
tagggagggaagaggatccggagtc

SEQ ID NO: 4129263 - DNA, 25 bp, Homo sapien
cgagagcggatattcttcagagcct

SEQ ID NO: 4129264 - DNA, 25 bp, Homo sapien
aaacatgttgctgaactcctgccgg

SEQ ID NO: 4129265 - DNA, 25 bp, Homo sapien
gttgttttgcagagggtacccagtc

SEQ ID NO: 4129266 - DNA, 25 bp, Homo sapien
ccagggcggcataaagccttctcaa

SEQ ID NO: 4129267 - DNA, 25 bp, Homo sapien
ctgtgtatacaaatctcgctggatc

SEQ ID NO: 4129268 - DNA, 25 bp, Homo sapien
gaagcgatccatgaactgtgtatac

SEQ ID NO: 4129269 - DNA, 25 bp, Homo sapien
ctgctaccacagtcccggaagcgat

SEQ ID NO: 4129270 - DNA, 25 bp, Homo sapien
tcgctggatcttggagagccgcaca

SEQ ID NO: 4129271 - DNA, 25 bp, Homo sapien
aacattccaagggtgtcccagggag

SEQ ID NO: 4129272 - DNA, 25 bp, Homo sapien
aatggcagcatgcataccaggagcc

SEQ ID NO: 4129273 - DNA, 25 bp, Homo sapien
tatgctagcagtcaaaaacgctgcc

SEQ ID NO: 4129274 - DNA, 25 bp, Homo sapien
gaagtcaatgaaacaggtccctcaa

SEQ ID NO: 4129275 - DNA, 25 bp, Homo sapien
gcttcatacagcacatcagggtgat

SEQ ID NO: 4129276 - DNA, 25 bp, Homo sapien
caatgttgttgcctcgctcctggaa

SEQ ID NO: 4129277 - DNA, 25 bp, Homo sapien
ggttgaagccaacgccctgtaggaa

SEQ ID NO: 4129278 - DNA, 25 bp, Homo sapien
tattggttgcctctcccatcgagga

SEQ ID NO: 4129279 - DNA, 25 bp, Homo sapien
ttctaggactccagtctggtaatta

SEQ ID NO: 4129280 - DNA, 25 bp, Homo sapien
tggtaattagtcagaaggtccttgg

SEQ ID NO: 4129281 - DNA, 25 bp, Homo sapien
ttcacactttcctcaatcaggtgga

SEQ ID NO: 4129282 - DNA, 25 bp, Homo sapien
tggaaaagcagtaccatcttgggag

SEQ ID NO: 4129283 - DNA, 25 bp, Homo sapien
aattcctcgatgagagccaaggtgg

SEQ ID NO: 4129284 - DNA, 25 bp, Homo sapien
caggtggacagggtacttctcgttt

SEQ ID NO: 4129285 - DNA, 25 bp, Homo sapien
ttgcccctcggtaccaggtggacag

SEQ ID NO: 4129286 - DNA, 25 bp, Homo sapien
ggaagtagctgatgtttcgaaccca

SEQ ID NO: 4129287 - DNA, 25 bp, Homo sapien
caaggcttcaagaacaacgcaacaa

SEQ ID NO: 4129288 - DNA, 25 bp, Homo sapien
aagaacaacgcaacaatgaactcac

SEQ ID NO: 4129289 - DNA, 25 bp, Homo sapien
cttgccaaggcttcaagaacaacgc

SEQ ID NO: 4129290 - DNA, 25 bp, Homo sapien
ggcttcaagaacaacgcaacaatga

SEQ ID NO: 4129291 - DNA, 25 bp, Homo sapien
gatcattgaactgattaataagccg

SEQ ID NO: 4129292 - DNA, 25 bp, Homo sapien
tgaggttgctgggatcattgaactg

SEQ ID NO: 4129293 - DNA, 25 bp, Homo sapien
tgaactgattaataagccgctccct

SEQ ID NO: 4129294 - DNA, 25 bp, Homo sapien
ataagccgctccctctcaaaggcag

SEQ ID NO: 4129295 - DNA, 25 bp, Homo sapien
gtatacccgacatactgcctgggca

SEQ ID NO: 4129296 - DNA, 25 bp, Homo sapien
acaaggcgatagatgtaacagggct

SEQ ID NO: 4129297 - DNA, 25 bp, Homo sapien
cctgcttggaaatctgacggtcata

SEQ ID NO: 4129298 - DNA, 25 bp, Homo sapien
tttctggccataacggtatacccga

SEQ ID NO: 4129299 - DNA, 25 bp, Homo sapien
ccacctctttccgtgtgaagttcag

SEQ ID NO: 4129300 - DNA, 25 bp, Homo sapien
cagcattggatttagatcatccacc

SEQ ID NO: 4129301 - DNA, 25 bp, Homo sapien
ggatttagatcatccaccacccgat

SEQ ID NO: 4129302 - DNA, 25 bp, Homo sapien
gtgagggtacttcagacaggccagt

SEQ ID NO: 4129303 - DNA, 25 bp, Homo sapien
tgatcgctggcagggtaatactgcg

SEQ ID NO: 4129304 - DNA, 25 bp, Homo sapien
taatactgcgcatacgatgggcggg

SEQ ID NO: 4129305 - DNA, 25 bp, Homo sapien
gcaatgactcatgctcgaaaggctc

SEQ ID NO: 4129306 - DNA, 25 bp, Homo sapien
gatcctttcggttcaagagcaatga

SEQ ID NO: 4129307 - DNA, 25 bp, Homo sapien
tgatgctattcctttctgtagtttt

SEQ ID NO: 4129308 - DNA, 25 bp, Homo sapien
ttggtgttgatgtcctttctgttga

SEQ ID NO: 4129309 - DNA, 25 bp, Homo sapien
ggtgttgatgtcctttctgttgatg

SEQ ID NO: 4129310 - DNA, 25 bp, Homo sapien
caaaccctgtttgcctgagtatcac

SEQ ID NO: 4129311 - DNA, 25 bp, Homo sapien
cttcctcccaatgggacatgccggg

SEQ ID NO: 4129312 - DNA, 25 bp, Homo sapien
aggacgaacactggccacaggcttt

SEQ ID NO: 4129313 - DNA, 25 bp, Homo sapien
ttcatcacccttcaaagttggctgc

SEQ ID NO: 4129314 - DNA, 25 bp, Homo sapien
gggtggactgcacaggacgaacact

SEQ ID NO: 4129315 - DNA, 25 bp, Homo sapien
actcctgcacgctgcaagtagttga

SEQ ID NO: 4129316 - DNA, 25 bp, Homo sapien
aaagttcatggatggatttgtgctg

SEQ ID NO: 4129317 - DNA, 25 bp, Homo sapien
tcctgcacgctgcaagtagttgatg

SEQ ID NO: 4129318 - DNA, 25 bp, Homo sapien
ggaaagttcatggatggatttgtgc

SEQ ID NO: 4129319 - DNA, 25 bp, Homo sapien
ttttgtcccacggatgatgtggatg

SEQ ID NO: 4129320 - DNA, 25 bp, Homo sapien
tgctctcaccagcattaattcttgc

SEQ ID NO: 4129321 - DNA, 25 bp, Homo sapien
gtcccacggatgatgtggatgctct

SEQ ID NO: 4129322 - DNA, 25 bp, Homo sapien
gatgctctcaccagcattaattctt

SEQ ID NO: 4129323 - DNA, 25 bp, Homo sapien
gttgcccggacagcaaagatccgtc

SEQ ID NO: 4129324 - DNA, 25 bp, Homo sapien
gcagccatccgaccatcttcaggaa

SEQ ID NO: 4129325 - DNA, 25 bp, Homo sapien
ccatcactggtacggatgtacgtcc

SEQ ID NO: 4129326 - DNA, 25 bp, Homo sapien
tttggtttgccagttgcccggacag

SEQ ID NO: 4129327 - DNA, 25 bp, Homo sapien
gatgtctgaacaacatcacccagtc

SEQ ID NO: 4129328 - DNA, 25 bp, Homo sapien
caaaatgaatcctacgagataaggg

SEQ ID NO: 4129329 - DNA, 25 bp, Homo sapien
gaaataggtctatctatgacaaggc

SEQ ID NO: 4129330 - DNA, 25 bp, Homo sapien
ctttttctggcagtaagagacagtc

SEQ ID NO: 4129331 - DNA, 25 bp, Homo sapien
ccctagtcgaggctcagttccgaga

SEQ ID NO: 4129332 - DNA, 25 bp, Homo sapien
gtctgccgttgcttgtggactcgca

SEQ ID NO: 4129333 - DNA, 25 bp, Homo sapien
caactttcgcttgtggccccttaag

SEQ ID NO: 4129334 - DNA, 25 bp, Homo sapien
gactcgcaagaaggtccctgggaac

SEQ ID NO: 4129335 - DNA, 25 bp, Homo sapien
tcattggagctgaacccaacctcgg

SEQ ID NO: 4129336 - DNA, 25 bp, Homo sapien
aaaaggcgcaaacatcctcggctcg

SEQ ID NO: 4129337 - DNA, 25 bp, Homo sapien
tcactggaaacaccaggcgggcatc

SEQ ID NO: 4129338 - DNA, 25 bp, Homo sapien
gaatagctgggtagtatccctggca

SEQ ID NO: 4129339 - DNA, 25 bp, Homo sapien
tgggatgtgcgcttctacactcaga

SEQ ID NO: 4129340 - DNA, 25 bp, Homo sapien
tgccaagtgtcctattctcaaaagg

SEQ ID NO: 4129341 - DNA, 25 bp, Homo sapien
agcaagcagacagcataagcaaggc

SEQ ID NO: 4129342 - DNA, 25 bp, Homo sapien
taagtcacctagtaaggcagctctc

SEQ ID NO: 4129343 - DNA, 25 bp, Homo sapien
agaccccacttcacatgggatcaca

SEQ ID NO: 4129344 - DNA, 25 bp, Homo sapien
aagaccccacttcacatgggatcac

SEQ ID NO: 4129345 - DNA, 25 bp, Homo sapien
tatgcttaaggactagacgaccctc

SEQ ID NO: 4129346 - DNA, 25 bp, Homo sapien
cctgcccagtaaggagggagccatg

SEQ ID NO: 4129347 - DNA, 25 bp, Homo sapien
tgggatgacctgactaagctgcctt

SEQ ID NO: 4129348 - DNA, 25 bp, Homo sapien
tctgctaaggccctccaaagatgga

SEQ ID NO: 4129349 - DNA, 25 bp, Homo sapien
caactttgggagtgatggtcctacc

SEQ ID NO: 4129350 - DNA, 25 bp, Homo sapien
tttgaatagactcacacagagggcc

SEQ ID NO: 4129351 - DNA, 25 bp, Homo sapien
gaagttggacactgcctgctcaaga

SEQ ID NO: 4129352 - DNA, 25 bp, Homo sapien
tacgtcatagaaacagccagttgcc

SEQ ID NO: 4129353 - DNA, 25 bp, Homo sapien
gcatttcctttgacacaaggagcag

SEQ ID NO: 4129354 - DNA, 25 bp, Homo sapien
agcatttcctttgacacaaggagca

SEQ ID NO: 4129355 - DNA, 25 bp, Homo sapien
catttcctttgacacaaggagcagc

SEQ ID NO: 4129356 - DNA, 25 bp, Homo sapien
ctggcccaggctcgggtacgggagg

SEQ ID NO: 4129357 - DNA, 25 bp, Homo sapien
gggcatctgggttggcaggagcacc

SEQ ID NO: 4129358 - DNA, 25 bp, Homo sapien
agcctggcccaggctcgggtacggg

SEQ ID NO: 4129359 - DNA, 25 bp, Homo sapien
cctggcccaggctcgggtacgggag

SEQ ID NO: 4129360 - DNA, 25 bp, Homo sapien
gcaggcggctcagggttcggttacg

SEQ ID NO: 4129361 - DNA, 25 bp, Homo sapien
ttcggttacggagcctgcgcgcgcc

SEQ ID NO: 4129362 - DNA, 25 bp, Homo sapien
cgcccgctgcggacgccgatccgcg

SEQ ID NO: 4129363 - DNA, 25 bp, Homo sapien
ccgatccgcgcaggcggctcagggt

SEQ ID NO: 4129364 - DNA, 25 bp, Homo sapien
acgccccagtgggtatgcctctcct

SEQ ID NO: 4129365 - DNA, 25 bp, Homo sapien
ccccagtgggtatgcctctcctctg

SEQ ID NO: 4129366 - DNA, 25 bp, Homo sapien
ctacgccccagtgggtatgcctctc

SEQ ID NO: 4129367 - DNA, 25 bp, Homo sapien
gccccagtgggtatgcctctcctct

SEQ ID NO: 4129368 - DNA, 25 bp, Homo sapien
tgtgggcaagacaagatgcaaagag

SEQ ID NO: 4129369 - DNA, 25 bp, Homo sapien
aagacaagatgcaaagagcggcccg

SEQ ID NO: 4129370 - DNA, 25 bp, Homo sapien
acacggagagtcctgaggtcgcgcc

SEQ ID NO: 4129371 - DNA, 25 bp, Homo sapien
tgaggtcgcgccagggcggacaggg

SEQ ID NO: 4129372 - DNA, 25 bp, Homo sapien
gggctgccccaaggtcgcatccagg

SEQ ID NO: 4129373 - DNA, 25 bp, Homo sapien
taggggctgccccaaggtcgcatcc

SEQ ID NO: 4129374 - DNA, 25 bp, Homo sapien
tgggctgcccggaagagtaggggct

SEQ ID NO: 4129375 - DNA, 25 bp, Homo sapien
atgccctgcaccggtggccgcggaa

SEQ ID NO: 4129376 - DNA, 25 bp, Homo sapien
ggcggagttaaaacgcgactcgcgc

SEQ ID NO: 4129377 - DNA, 25 bp, Homo sapien
cttaaaggacgctaaagtttgcagc

SEQ ID NO: 4129378 - DNA, 25 bp, Homo sapien
ccacgcacgtctgtaacttaaagga

SEQ ID NO: 4129379 - DNA, 25 bp, Homo sapien
gacgctaaagtttgcagcccaggct

SEQ ID NO: 4129380 - DNA, 25 bp, Homo sapien
taaacttcggtgctagcagagggcg

SEQ ID NO: 4129381 - DNA, 25 bp, Homo sapien
gctgaccttgggcagactgcgccct

SEQ ID NO: 4129382 - DNA, 25 bp, Homo sapien
tccaatcacacttggcgcccagaaa

SEQ ID NO: 4129383 - DNA, 25 bp, Homo sapien
tcttcgctagagctctggtcacgcc

SEQ ID NO: 4129384 - DNA, 25 bp, Homo sapien
tgagccaaccatcatgccctgatta

SEQ ID NO: 4129385 - DNA, 25 bp, Homo sapien
cctgattaccgtcctcagggaaagc

SEQ ID NO: 4129386 - DNA, 25 bp, Homo sapien
aaagcaccctcgtcccattctcaaa

SEQ ID NO: 4129387 - DNA, 25 bp, Homo sapien
ccaggaaataaccactgagccaacc

SEQ ID NO: 4129388 - DNA, 25 bp, Homo sapien
gggccgagcgctccagtgctgggag

SEQ ID NO: 4129389 - DNA, 25 bp, Homo sapien
ctggcatccagtgcggcaggggccg

SEQ ID NO: 4129390 - DNA, 25 bp, Homo sapien
catccagtgcggcaggggccgagcg

SEQ ID NO: 4129391 - DNA, 25 bp, Homo sapien
cacttttagtaactgctggcatcca

SEQ ID NO: 4129392 - DNA, 25 bp, Homo sapien
gggtctcagagccttggtcggcacg

SEQ ID NO: 4129393 - DNA, 25 bp, Homo sapien
cggcacgtggagaggtaacgtgaat

SEQ ID NO: 4129394 - DNA, 25 bp, Homo sapien
tctcagagccttggtcggcacgtgg

SEQ ID NO: 4129395 - DNA, 25 bp, Homo sapien
ctcagagccttggtcggcacgtgga

SEQ ID NO: 4129396 - DNA, 25 bp, Homo sapien
gcacacagtatttgctcacaaagag

SEQ ID NO: 4129397 - DNA, 25 bp, Homo sapien
tctgtgcttctacccatcagtatct

SEQ ID NO: 4129398 - DNA, 25 bp, Homo sapien
gaaattgaggtgttgcccactagtc

SEQ ID NO: 4129399 - DNA, 25 bp, Homo sapien
tgctgggtgttgattttacgctaaa

SEQ ID NO: 4129400 - DNA, 25 bp, Homo sapien
aaccagaggaaagaccagagcaaag

SEQ ID NO: 4129401 - DNA, 25 bp, Homo sapien
ccagaggaaagaccagagcaaagcg

SEQ ID NO: 4129402 - DNA, 25 bp, Homo sapien
cagaaccagaggaaagaccagagca

SEQ ID NO: 4129403 - DNA, 25 bp, Homo sapien
ccatccagaaccagaggaaagacca

SEQ ID NO: 4129404 - DNA, 25 bp, Homo sapien
ggagaggaggctggtagcctactct

SEQ ID NO: 4129405 - DNA, 25 bp, Homo sapien
ggatccccaacactgcacctcaagg

SEQ ID NO: 4129406 - DNA, 25 bp, Homo sapien
tccccaacactgcacctcaaggcag

SEQ ID NO: 4129407 - DNA, 25 bp, Homo sapien
tctggatccccaacactgcacctca

SEQ ID NO: 4129408 - DNA, 25 bp, Homo sapien
gctctggatccccaacactgcacct

SEQ ID NO: 4129409 - DNA, 25 bp, Homo sapien
accatagagccccatgtggaacttg

SEQ ID NO: 4129410 - DNA, 25 bp, Homo sapien
tcatagtagacagcgatggagcgga

SEQ ID NO: 4129411 - DNA, 25 bp, Homo sapien
agctctcagtgaaaagccgcccagt

SEQ ID NO: 4129412 - DNA, 25 bp, Homo sapien
caatcaggcccagtagtagcaggtc

SEQ ID NO: 4129413 - DNA, 25 bp, Homo sapien
gcaggttctggctcctgtcactctg

SEQ ID NO: 4129414 - DNA, 25 bp, Homo sapien
agagaagcaggttctggctcctgtc

SEQ ID NO: 4129415 - DNA, 25 bp, Homo sapien
caggttctggctcctgtcactctgg

SEQ ID NO: 4129416 - DNA, 25 bp, Homo sapien
gaagcaggttctggctcctgtcact

SEQ ID NO: 4129417 - DNA, 25 bp, Homo sapien
cttgaagaggaatggcccacactcc

SEQ ID NO: 4129418 - DNA, 25 bp, Homo sapien
tggcccacactccatgaatgctggg

SEQ ID NO: 4129419 - DNA, 25 bp, Homo sapien
ggaatggcccacactccatgaatgc

SEQ ID NO: 4129420 - DNA, 25 bp, Homo sapien
gaggaatggcccacactccatgaat

SEQ ID NO: 4129421 - DNA, 25 bp, Homo sapien
caggcctctaggcaaaaaggtccag

SEQ ID NO: 4129422 - DNA, 25 bp, Homo sapien
gaatgaatgctgcaaggcccagtac

SEQ ID NO: 4129423 - DNA, 25 bp, Homo sapien
tctctagatggtggaactgccctac

SEQ ID NO: 4129424 - DNA, 25 bp, Homo sapien
aaacttcacgagagcttagcctggg

SEQ ID NO: 4129425 - DNA, 25 bp, Homo sapien
caaggctcttttggagtggcccaca

SEQ ID NO: 4129426 - DNA, 25 bp, Homo sapien
acacggcgggtagccagccagatgg

SEQ ID NO: 4129427 - DNA, 25 bp, Homo sapien
tgcccacggcacatcggcacttatc

SEQ ID NO: 4129428 - DNA, 25 bp, Homo sapien
tccaaggcaggatggacacggcggg

SEQ ID NO: 4129429 - DNA, 25 bp, Homo sapien
cacatcggcacttatcagggggcac

SEQ ID NO: 4129430 - DNA, 25 bp, Homo sapien
tgaggtctggaacccaagaagtctc

SEQ ID NO: 4129431 - DNA, 25 bp, Homo sapien
ctttggtggctgagttgctcaccac

SEQ ID NO: 4129432 - DNA, 25 bp, Homo sapien
gaggtgacgtcaaaaccaggcaact

SEQ ID NO: 4129433 - DNA, 25 bp, Homo sapien
aacttgtgaagctgtcaggggccgg

SEQ ID NO: 4129434 - DNA, 25 bp, Homo sapien
tttgttccccaagacgcaaggtcag

SEQ ID NO: 4129435 - DNA, 25 bp, Homo sapien
actgcaggctgtgaccagcaaacag

SEQ ID NO: 4129436 - DNA, 25 bp, Homo sapien
aaagctgtcggtgctagaagagtga

SEQ ID NO: 4129437 - DNA, 25 bp, Homo sapien
aaagaagggtgtacacacgcgcacg

SEQ ID NO: 4129438 - DNA, 25 bp, Homo sapien
gggcctctcgccgtgaacttcaggt

SEQ ID NO: 4129439 - DNA, 25 bp, Homo sapien
ggcagagttccagcatctatagcag

SEQ ID NO: 4129440 - DNA, 25 bp, Homo sapien
tcacacagtacgcatggattccagg

SEQ ID NO: 4129441 - DNA, 25 bp, Homo sapien
gaatcccgagagtcctgacaagtgc

SEQ ID NO: 4129442 - DNA, 25 bp, Homo sapien
agtggtctcctcctgtactagaggc

SEQ ID NO: 4129443 - DNA, 25 bp, Homo sapien
gcaggtttgcaatttcaagcaagct

SEQ ID NO: 4129444 - DNA, 25 bp, Homo sapien
ccctggacactcattaagactggtg

SEQ ID NO: 4129445 - DNA, 25 bp, Homo sapien
cttccagaagatacccctttcctgg

SEQ ID NO: 4129446 - DNA, 25 bp, Homo sapien
tacacgcttttctccaatttgatgg

SEQ ID NO: 4129447 - DNA, 25 bp, Homo sapien
ttaagcccctggtaagacagtccca

SEQ ID NO: 4129448 - DNA, 25 bp, Homo sapien
ggaggctcaaaccattttacaaaga

SEQ ID NO: 4129449 - DNA, 25 bp, Homo sapien
cacaggctcactatattcggtgacc

SEQ ID NO: 4129450 - DNA, 25 bp, Homo sapien
gacacctgggttgtaaaactcacag

SEQ ID NO: 4129451 - DNA, 25 bp, Homo sapien
tcctcaggatcgagaacagacatgt

SEQ ID NO: 4129452 - DNA, 25 bp, Homo sapien
caggaaagggtctgagtacagctcc

SEQ ID NO: 4129453 - DNA, 25 bp, Homo sapien
caggcagaactactccaggtgaagc

SEQ ID NO: 4129454 - DNA, 25 bp, Homo sapien
ggccaggctgtttcgagcttcctca

SEQ ID NO: 4129455 - DNA, 25 bp, Homo sapien
cacaagcggttctgtgcccactgga

SEQ ID NO: 4129456 - DNA, 25 bp, Homo sapien
gacaagtgcctctctttggagctcc

SEQ ID NO: 4129457 - DNA, 25 bp, Homo sapien
gtgtggactcagacccaccgactga

SEQ ID NO: 4129458 - DNA, 25 bp, Homo sapien
ctggctttgattaggactctatgac

SEQ ID NO: 4129459 - DNA, 25 bp, Homo sapien
tgaccacagatttcacattcctgct

SEQ ID NO: 4129460 - DNA, 25 bp, Homo sapien
tagctggttcctccatgcgcagaac

SEQ ID NO: 4129461 - DNA, 25 bp, Homo sapien
tctatgacgcctcctagctggttcc

SEQ ID NO: 4129462 - DNA, 25 bp, Homo sapien
gtctggactcagctaccgctccatc

SEQ ID NO: 4129463 - DNA, 25 bp, Homo sapien
actcagctaccgctccatcccttga

SEQ ID NO: 4129464 - DNA, 25 bp, Homo sapien
catcccttgaccttggggcaccttc

SEQ ID NO: 4129465 - DNA, 25 bp, Homo sapien
tggactcagctaccgctccatccct

SEQ ID NO: 4129466 - DNA, 25 bp, Homo sapien
aattgatgacaagttctcagcctct

SEQ ID NO: 4129467 - DNA, 25 bp, Homo sapien
tctcagcctcttggttccagcccca

SEQ ID NO: 4129468 - DNA, 25 bp, Homo sapien
cctccaactgtgactaccagggttg

SEQ ID NO: 4129469 - DNA, 25 bp, Homo sapien
tcccgagcatatcccaaattgatga

SEQ ID NO: 4129470 - DNA, 25 bp, Homo sapien
gacttgatctgaagcccagcctgga

SEQ ID NO: 4129471 - DNA, 25 bp, Homo sapien
aagcctgggaatagaaccgcctctg

SEQ ID NO: 4129472 - DNA, 25 bp, Homo sapien
caagaggcccgataaggtgcctgca

SEQ ID NO: 4129473 - DNA, 25 bp, Homo sapien
taagccagcccttgagatccaggga

SEQ ID NO: 4129474 - DNA, 25 bp, Homo sapien
gcagcttgtctgtgtagtcaaggac

SEQ ID NO: 4129475 - DNA, 25 bp, Homo sapien
tcctgctcacaagctgacaaactgg

SEQ ID NO: 4129476 - DNA, 25 bp, Homo sapien
ctgatgattatccagcagcaggaag

SEQ ID NO: 4129477 - DNA, 25 bp, Homo sapien
caggaaggctgctcgtacagatgga

SEQ ID NO: 4129478 - DNA, 25 bp, Homo sapien
cacacaatttacacctctattcatc

SEQ ID NO: 4129479 - DNA, 25 bp, Homo sapien
cacaatttacacctctattcatctc

SEQ ID NO: 4129480 - DNA, 25 bp, Homo sapien
tcatctccctggcacgacgcaggcc

SEQ ID NO: 4129481 - DNA, 25 bp, Homo sapien
cctggcacgacgcaggccctggctt

SEQ ID NO: 4129482 - DNA, 25 bp, Homo sapien
gggaggcagctctgcggctgttctg

SEQ ID NO: 4129483 - DNA, 25 bp, Homo sapien
gttctgcgcatctgcttcctccgga

SEQ ID NO: 4129484 - DNA, 25 bp, Homo sapien
ggagagcccggctctgaagttgcct

SEQ ID NO: 4129485 - DNA, 25 bp, Homo sapien
tctgcggctgttctgcgcatctgct

SEQ ID NO: 4129486 - DNA, 25 bp, Homo sapien
cctggtagatctccagccgaggata

SEQ ID NO: 4129487 - DNA, 25 bp, Homo sapien
cctgccgtgccagtgggcacatgaa

SEQ ID NO: 4129488 - DNA, 25 bp, Homo sapien
gaggataggcacacagcttccgctc

SEQ ID NO: 4129489 - DNA, 25 bp, Homo sapien
tgaaatggatctggtcttcctggta

SEQ ID NO: 4129490 - DNA, 25 bp, Homo sapien
tctgccgggcactaccaggcagaag

SEQ ID NO: 4129491 - DNA, 25 bp, Homo sapien
gagctgtaccccatggaggtaatta

SEQ ID NO: 4129492 - DNA, 25 bp, Homo sapien
ccatggaggtaattaagtggcagat

SEQ ID NO: 4129493 - DNA, 25 bp, Homo sapien
gcactgaagagtgtctgccgggcac

SEQ ID NO: 4129494 - DNA, 25 bp, Homo sapien
tgggcagaccccttggccccaacac

SEQ ID NO: 4129495 - DNA, 25 bp, Homo sapien
ggcagaccccttggccccaacacca

SEQ ID NO: 4129496 - DNA, 25 bp, Homo sapien
gtgggcagaccccttggccccaaca

SEQ ID NO: 4129497 - DNA, 25 bp, Homo sapien
cgagtcccgctggggtgtcaggaca

SEQ ID NO: 4129498 - DNA, 25 bp, Homo sapien
tggtgggcaaacaccgagtcccgct

SEQ ID NO: 4129499 - DNA, 25 bp, Homo sapien
ggtgggcaaacaccgagtcccgctg

SEQ ID NO: 4129500 - DNA, 25 bp, Homo sapien
gcccctggagacatatatacacttc

SEQ ID NO: 4129501 - DNA, 25 bp, Homo sapien
gacagtttctccctggccctattaa

SEQ ID NO: 4129502 - DNA, 25 bp, Homo sapien
gggaccccaggtataggaatgtgcc

SEQ ID NO: 4129503 - DNA, 25 bp, Homo sapien
aaactgtatgttctgtctgcccacc

SEQ ID NO: 4129504 - DNA, 25 bp, Homo sapien
ggagagggtcagctgtcaaacatca

SEQ ID NO: 4129505 - DNA, 25 bp, Homo sapien
tatgcctgggtcgaccctgagaaac

SEQ ID NO: 4129506 - DNA, 25 bp, Homo sapien
gagaaatactcaaccagctgcaagg

SEQ ID NO: 4129507 - DNA, 25 bp, Homo sapien
ggtacacaccaagtcccagttgagg

SEQ ID NO: 4129508 - DNA, 25 bp, Homo sapien
ctgccctctaccctgactggggctg

SEQ ID NO: 4129509 - DNA, 25 bp, Homo sapien
ctcgtgtcactcattgtgtcagctc

SEQ ID NO: 4129510 - DNA, 25 bp, Homo sapien
ccagagccacttggtagtccccagg

SEQ ID NO: 4129511 - DNA, 25 bp, Homo sapien
ctggcacctgactcgctgtagctgt

SEQ ID NO: 4129512 - DNA, 25 bp, Homo sapien
tagctgtgctcgctgcgggtgtcac

SEQ ID NO: 4129513 - DNA, 25 bp, Homo sapien
gagaaggcttagcaagaggcctgga

SEQ ID NO: 4129514 - DNA, 25 bp, Homo sapien
gggctggtgcagaaaatagtccctg

SEQ ID NO: 4129515 - DNA, 25 bp, Homo sapien
ggagaaggcttagcaagaggcctgg

SEQ ID NO: 4129516 - DNA, 25 bp, Homo sapien
tttattctgggtcctggaagctcca

SEQ ID NO: 4129517 - DNA, 25 bp, Homo sapien
ctttattctgggtcctggaagctcc

SEQ ID NO: 4129518 - DNA, 25 bp, Homo sapien
attggctttattctgggtcctggaa

SEQ ID NO: 4129519 - DNA, 25 bp, Homo sapien
ggctttattctgggtcctggaagct

SEQ ID NO: 4129520 - DNA, 25 bp, Homo sapien
tctggcgcggagagaatcggagtgg

SEQ ID NO: 4129521 - DNA, 25 bp, Homo sapien
cgcggagagaatcggagtggagcgg

SEQ ID NO: 4129522 - DNA, 25 bp, Homo sapien
ggctctggcgcggagagaatcggag

SEQ ID NO: 4129523 - DNA, 25 bp, Homo sapien
cgctggctctggcgcggagagaatc

SEQ ID NO: 4129524 - DNA, 25 bp, Homo sapien
gaatagagacactaagccctgggaa

SEQ ID NO: 4129525 - DNA, 25 bp, Homo sapien
ttcaaagggtgtccaagaacagcac

SEQ ID NO: 4129526 - DNA, 25 bp, Homo sapien
tggtcaagtcgcaagtctcccagag

SEQ ID NO: 4129527 - DNA, 25 bp, Homo sapien
tatgtcacagtcacaaactcagagg

SEQ ID NO: 4129528 - DNA, 25 bp, Homo sapien
gtaggaaccgccaataacaccagtg

SEQ ID NO: 4129529 - DNA, 25 bp, Homo sapien
caccatgggtcgcataagagccgtc

SEQ ID NO: 4129530 - DNA, 25 bp, Homo sapien
caactgtcgaggatgtgtgcaccca

SEQ ID NO: 4129531 - DNA, 25 bp, Homo sapien
tgcggtccagtgcaaaaagcatggc

SEQ ID NO: 4129532 - DNA, 25 bp, Homo sapien
tgggccatggcgtacactgcattga

SEQ ID NO: 4129533 - DNA, 25 bp, Homo sapien
cgggcatcctcagaacgggtgaaca

SEQ ID NO: 4129534 - DNA, 25 bp, Homo sapien
ctgtgcgggcaaagtagtcatagcg

SEQ ID NO: 4129535 - DNA, 25 bp, Homo sapien
acaaagtccttgtagaggcggcgcc

SEQ ID NO: 4129536 - DNA, 25 bp, Homo sapien
ccaatggacactggccaacaccatt

SEQ ID NO: 4129537 - DNA, 25 bp, Homo sapien
aatggacactggccaacaccattac

SEQ ID NO: 4129538 - DNA, 25 bp, Homo sapien
caatggacactggccaacaccatta

SEQ ID NO: 4129539 - DNA, 25 bp, Homo sapien
gaccctcaaaatggcgggaccaggc

SEQ ID NO: 4129540 - DNA, 25 bp, Homo sapien
ggaccaggccagaggtctactctct

SEQ ID NO: 4129541 - DNA, 25 bp, Homo sapien
tcagccgtagcttcagttggagtcc

SEQ ID NO: 4129542 - DNA, 25 bp, Homo sapien
ggagtcctctctgcctagcatcctt

SEQ ID NO: 4129543 - DNA, 25 bp, Homo sapien
agccagactgattctaactcttggt

SEQ ID NO: 4129544 - DNA, 25 bp, Homo sapien
cagactgattctaactcttggtgct

SEQ ID NO: 4129545 - DNA, 25 bp, Homo sapien
gactgattctaactcttggtgctgc

SEQ ID NO: 4129546 - DNA, 25 bp, Homo sapien
actgattctaactcttggtgctgcc

SEQ ID NO: 4129547 - DNA, 25 bp, Homo sapien
gcagaagacatgcttaaggccccat

SEQ ID NO: 4129548 - DNA, 25 bp, Homo sapien
gatttcaggagactttcaggtcacc

SEQ ID NO: 4129549 - DNA, 25 bp, Homo sapien
tttccctgaagctaggagcagtgcc

SEQ ID NO: 4129550 - DNA, 25 bp, Homo sapien
tcatcctggtgcaaactgaatccca

SEQ ID NO: 4129551 - DNA, 25 bp, Homo sapien
taaggtacacactgccgtggatggc

SEQ ID NO: 4129552 - DNA, 25 bp, Homo sapien
caatcagcgcaagtgaattcgtcca

SEQ ID NO: 4129553 - DNA, 25 bp, Homo sapien
tccaatcggtactcatagggctggc

SEQ ID NO: 4129554 - DNA, 25 bp, Homo sapien
caccttctggtagcgatagcgccca

SEQ ID NO: 4129555 - DNA, 25 bp, Homo sapien
taaccacgttcttctgcggctggaa

SEQ ID NO: 4129556 - DNA, 25 bp, Homo sapien
tgcccggtggctaaccacgttcttc

SEQ ID NO: 4129557 - DNA, 25 bp, Homo sapien
agccaagcaccacggagccgctgag

SEQ ID NO: 4129558 - DNA, 25 bp, Homo sapien
gactgacacgcacatggtggtggtc

SEQ ID NO: 4129559 - DNA, 25 bp, Homo sapien
gatgacgttgtcgagtccaccacct

SEQ ID NO: 4129560 - DNA, 25 bp, Homo sapien
tcaaagcgatgacgttgtcgagtcc

SEQ ID NO: 4129561 - DNA, 25 bp, Homo sapien
aacagtggggacaaactgggagcca

SEQ ID NO: 4129562 - DNA, 25 bp, Homo sapien
cctcacggccattgcaaacagtggg

SEQ ID NO: 4129563 - DNA, 25 bp, Homo sapien
cagagtgaaccctggcttgctcctc

SEQ ID NO: 4129564 - DNA, 25 bp, Homo sapien
taaaccacaggacaaactactgtgc

SEQ ID NO: 4129565 - DNA, 25 bp, Homo sapien
cagctacaagggcagttagtggcca

SEQ ID NO: 4129566 - DNA, 25 bp, Homo sapien
agcacctttgctggttaggactggg

SEQ ID NO: 4129567 - DNA, 25 bp, Homo sapien
ctcttggggcctagggtaacatagc

SEQ ID NO: 4129568 - DNA, 25 bp, Homo sapien
gcctagggtaacatagcccattttc

SEQ ID NO: 4129569 - DNA, 25 bp, Homo sapien
taacatagcccattttcaggttctc

SEQ ID NO: 4129570 - DNA, 25 bp, Homo sapien
tctaattcatccatggggtatacca

SEQ ID NO: 4129571 - DNA, 25 bp, Homo sapien
caggcccagcagagggtgagacagc

SEQ ID NO: 4129572 - DNA, 25 bp, Homo sapien
ctaaggcaggcccagcagagggtga

SEQ ID NO: 4129573 - DNA, 25 bp, Homo sapien
aggcaggcccagcagagggtgagac

SEQ ID NO: 4129574 - DNA, 25 bp, Homo sapien
gcaggcccagcagagggtgagacag

SEQ ID NO: 4129575 - DNA, 25 bp, Homo sapien
catgcaagagtaggcatggctccca

SEQ ID NO: 4129576 - DNA, 25 bp, Homo sapien
cattttcctaactaatggacccatg

SEQ ID NO: 4129577 - DNA, 25 bp, Homo sapien
gactgcacttgcctagccagtatcc

SEQ ID NO: 4129578 - DNA, 25 bp, Homo sapien
agtagcaatatctccagcctggtag

SEQ ID NO: 4129579 - DNA, 25 bp, Homo sapien
tcagaagatgagtcagcacagccac

SEQ ID NO: 4129580 - DNA, 25 bp, Homo sapien
ccagctggggtacaaatgtctttga

SEQ ID NO: 4129581 - DNA, 25 bp, Homo sapien
gactgctctcctgtcgcagtcagaa

SEQ ID NO: 4129582 - DNA, 25 bp, Homo sapien
ctgcctgatcccgaccactgaaaag

SEQ ID NO: 4129583 - DNA, 25 bp, Homo sapien
tagaggtctccattatactcaggtc

SEQ ID NO: 4129584 - DNA, 25 bp, Homo sapien
gtctgtacttctctagccaccactg

SEQ ID NO: 4129585 - DNA, 25 bp, Homo sapien
cctttagtgcccatgattagaggct

SEQ ID NO: 4129586 - DNA, 25 bp, Homo sapien
gaatgcccatgacttgcagtagttg

SEQ ID NO: 4129587 - DNA, 25 bp, Homo sapien
tatgctttggcgaacatggccatcc

SEQ ID NO: 4129588 - DNA, 25 bp, Homo sapien
acatcttccattatgctttggcgaa

SEQ ID NO: 4129589 - DNA, 25 bp, Homo sapien
ccatttgtttcaacagtgcggtttc

SEQ ID NO: 4129590 - DNA, 25 bp, Homo sapien
ttcaacagtgcggtttcatcaacat

SEQ ID NO: 4129591 - DNA, 25 bp, Homo sapien
ttccaaccttgagggcctgttctga

SEQ ID NO: 4129592 - DNA, 25 bp, Homo sapien
accttgagggcctgttctgacttac

SEQ ID NO: 4129593 - DNA, 25 bp, Homo sapien
ccaaccttgagggcctgttctgact

SEQ ID NO: 4129594 - DNA, 25 bp, Homo sapien
aaccttgagggcctgttctgactta

SEQ ID NO: 4129595 - DNA, 25 bp, Homo sapien
ggcctgggatattcttggtttatgg

SEQ ID NO: 4129596 - DNA, 25 bp, Homo sapien
agctttgaatacaacgactatgtcc

SEQ ID NO: 4129597 - DNA, 25 bp, Homo sapien
tagcaacacctttcactcacaaacg

SEQ ID NO: 4129598 - DNA, 25 bp, Homo sapien
ttggtttatggtggttgttcctgag

SEQ ID NO: 4129599 - DNA, 25 bp, Homo sapien
ctgaatgatcaaagctctgagggtc

SEQ ID NO: 4129600 - DNA, 25 bp, Homo sapien
gtagtgtgcattgcaccagcgtgcc

SEQ ID NO: 4129601 - DNA, 25 bp, Homo sapien
aagctctgagggtcacgtgcagtag

SEQ ID NO: 4129602 - DNA, 25 bp, Homo sapien
ggtcacgtgcagtagtgtgcattgc

SEQ ID NO: 4129603 - DNA, 25 bp, Homo sapien
agagctccagtgctgcccgctgcct

SEQ ID NO: 4129604 - DNA, 25 bp, Homo sapien
cagcgttgagcaaacgacagtaacg

SEQ ID NO: 4129605 - DNA, 25 bp, Homo sapien
ctggatgatgcggacagcgttgagc

SEQ ID NO: 4129606 - DNA, 25 bp, Homo sapien
gatgatgcggacagcgttgagcaaa

SEQ ID NO: 4129607 - DNA, 25 bp, Homo sapien
tgcggacagcgttgagcaaacgaca

SEQ ID NO: 4129608 - DNA, 25 bp, Homo sapien
tggaaaaagccacgggtatggcaac

SEQ ID NO: 4129609 - DNA, 25 bp, Homo sapien
tcagctggcttgttgtgagctcgta

SEQ ID NO: 4129610 - DNA, 25 bp, Homo sapien
tcccaggaagatgtcaagctcaagg

SEQ ID NO: 4129611 - DNA, 25 bp, Homo sapien
tgagctcgtagctgccatggaaaaa

SEQ ID NO: 4129612 - DNA, 25 bp, Homo sapien
caaagtggcacgtgcaatgtcaagg

SEQ ID NO: 4129613 - DNA, 25 bp, Homo sapien
tctggatcacctgtactggacttac

SEQ ID NO: 4129614 - DNA, 25 bp, Homo sapien
tgtggagcgccatatcaggtctgga

SEQ ID NO: 4129615 - DNA, 25 bp, Homo sapien
tggaggcaatacatagcagagtaac

SEQ ID NO: 4129616 - DNA, 25 bp, Homo sapien
catggaccgctgcaccactgtgtaa

SEQ ID NO: 4129617 - DNA, 25 bp, Homo sapien
tctgggtagctgctcttcaagcctg

SEQ ID NO: 4129618 - DNA, 25 bp, Homo sapien
tactggatcccacgtgttgcaggca

SEQ ID NO: 4129619 - DNA, 25 bp, Homo sapien
tatcctgtccatggcttagcaacat

SEQ ID NO: 4129620 - DNA, 25 bp, Homo sapien
atggtattggaagtcatcttgtagc

SEQ ID NO: 4129621 - DNA, 25 bp, Homo sapien
ttgtagcttcagaacatcaaggaaa

SEQ ID NO: 4129622 - DNA, 25 bp, Homo sapien
cttgtagcttcagaacatcaaggaa

SEQ ID NO: 4129623 - DNA, 25 bp, Homo sapien
tattggaagtcatcttgtagcttca

SEQ ID NO: 4129624 - DNA, 25 bp, Homo sapien
atccttgacaaacatttatgcaaaa

SEQ ID NO: 4129625 - DNA, 25 bp, Homo sapien
aatatccttgacaaacatttatgca

SEQ ID NO: 4129626 - DNA, 25 bp, Homo sapien
atatccttgacaaacatttatgcaa

SEQ ID NO: 4129627 - DNA, 25 bp, Homo sapien
tatccttgacaaacatttatgcaaa

SEQ ID NO: 4129628 - DNA, 25 bp, Homo sapien
aaaataaagcgcaggacaagaagga

SEQ ID NO: 4129629 - DNA, 25 bp, Homo sapien
acaaaataaagcgcaggacaagaag

SEQ ID NO: 4129630 - DNA, 25 bp, Homo sapien
caaaataaagcgcaggacaagaagg

SEQ ID NO: 4129631 - DNA, 25 bp, Homo sapien
cctgttgacttccttgggcaactct

SEQ ID NO: 4129632 - DNA, 25 bp, Homo sapien
tcctgttgacttccttgggcaactc

SEQ ID NO: 4129633 - DNA, 25 bp, Homo sapien
tgatgtcacaaaggcaactatgacc

SEQ ID NO: 4129634 - DNA, 25 bp, Homo sapien
atgtcacaaaggcaactatgaccag

SEQ ID NO: 4129635 - DNA, 25 bp, Homo sapien
gtcacaaaggcaactatgaccaggg

SEQ ID NO: 4129636 - DNA, 25 bp, Homo sapien
cgtgatgtcacaaaggcaactatga

SEQ ID NO: 4129637 - DNA, 25 bp, Homo sapien
ggtttggagcagtggttcaggtgat

SEQ ID NO: 4129638 - DNA, 25 bp, Homo sapien
gcagtggttcaggtgatcatctccc

SEQ ID NO: 4129639 - DNA, 25 bp, Homo sapien
tcaggtgatcatctccctctggttg

SEQ ID NO: 4129640 - DNA, 25 bp, Homo sapien
tgatcatctccctctggttgctgtt

SEQ ID NO: 4129641 - DNA, 25 bp, Homo sapien
gtcctaagaagtggcctggtgcttt

SEQ ID NO: 4129642 - DNA, 25 bp, Homo sapien
agcctgactgcaaagtccccacagg

SEQ ID NO: 4129643 - DNA, 25 bp, Homo sapien
ctgcaatcggaatatgggtgtgggg

SEQ ID NO: 4129644 - DNA, 25 bp, Homo sapien
gaggaccagcctgactgcaaagtcc

SEQ ID NO: 4129645 - DNA, 25 bp, Homo sapien
ttctgccgcctctgtctttctactg

SEQ ID NO: 4129646 - DNA, 25 bp, Homo sapien
tgctgagccagagatggatctccat

SEQ ID NO: 4129647 - DNA, 25 bp, Homo sapien
aatgctgagccagagatggatctcc

SEQ ID NO: 4129648 - DNA, 25 bp, Homo sapien
actcagttcaccaaggagagggagg

SEQ ID NO: 4129649 - DNA, 25 bp, Homo sapien
cttactcagttcaccaaggagaggg

SEQ ID NO: 4129650 - DNA, 25 bp, Homo sapien
ctctaaagaatcagccctctccctg

SEQ ID NO: 4129651 - DNA, 25 bp, Homo sapien
cctcatctatgaaatcgggatatgt

SEQ ID NO: 4129652 - DNA, 25 bp, Homo sapien
tgaatttatcaccatcaagcacagg

SEQ ID NO: 4129653 - DNA, 25 bp, Homo sapien
tctctaaagaatcagccctctccct

SEQ ID NO: 4129654 - DNA, 25 bp, Homo sapien
tgtgatgcagttgtgcaagaagcaa

SEQ ID NO: 4129655 - DNA, 25 bp, Homo sapien
ctgtgatgcagttgtgcaagaagca

SEQ ID NO: 4129656 - DNA, 25 bp, Homo sapien
ctggatctgcccagctgccttcacc

SEQ ID NO: 4129657 - DNA, 25 bp, Homo sapien
atctgcccagctgccttcacccttt

SEQ ID NO: 4129658 - DNA, 25 bp, Homo sapien
ctgcccagctgccttcacccttttt

SEQ ID NO: 4129659 - DNA, 25 bp, Homo sapien
ggatctgcccagctgccttcaccct

SEQ ID NO: 4129660 - DNA, 25 bp, Homo sapien
gcaccaggaccccacgccaccaggc

SEQ ID NO: 4129661 - DNA, 25 bp, Homo sapien
cgcaccaggaccccacgccaccagg

SEQ ID NO: 4129662 - DNA, 25 bp, Homo sapien
tgacgtagaccctcaacagggcctg

SEQ ID NO: 4129663 - DNA, 25 bp, Homo sapien
tgctcctggatgacgtagaccctca

SEQ ID NO: 4129664 - DNA, 25 bp, Homo sapien
tgccgccgctgacggatccgtctct

SEQ ID NO: 4129665 - DNA, 25 bp, Homo sapien
ggactggagcttgaccgtcgcctgc

SEQ ID NO: 4129666 - DNA, 25 bp, Homo sapien
gcacatttggcggtaacattgccgg

SEQ ID NO: 4129667 - DNA, 25 bp, Homo sapien
catttggcggtaacattgccggcac

SEQ ID NO: 4129668 - DNA, 25 bp, Homo sapien
tttggcggtaacattgccggcactg

SEQ ID NO: 4129669 - DNA, 25 bp, Homo sapien
cattgcacatttggcggtaacattg

SEQ ID NO: 4129670 - DNA, 25 bp, Homo sapien
tggctgctttgaagggattgcatat

SEQ ID NO: 4129671 - DNA, 25 bp, Homo sapien
ggctgctttgaagggattgcatatt

SEQ ID NO: 4129672 - DNA, 25 bp, Homo sapien
ctggctgctttgaagggattgcata

SEQ ID NO: 4129673 - DNA, 25 bp, Homo sapien
gctttgaagggattgcatattggac

SEQ ID NO: 4129674 - DNA, 25 bp, Homo sapien
attagggtagtgcagcctgttctcc

SEQ ID NO: 4129675 - DNA, 25 bp, Homo sapien
cagacatttattagggtagtgcagc

SEQ ID NO: 4129676 - DNA, 25 bp, Homo sapien
catttattagggtagtgcagcctgt

SEQ ID NO: 4129677 - DNA, 25 bp, Homo sapien
tttattagggtagtgcagcctgttc

SEQ ID NO: 4129678 - DNA, 25 bp, Homo sapien
aacttagtttatcctacatccaact

SEQ ID NO: 4129679 - DNA, 25 bp, Homo sapien
tcaacacagtacttcgcctctggtc

SEQ ID NO: 4129680 - DNA, 25 bp, Homo sapien
aagaagtgtgcagggatttctcccc

SEQ ID NO: 4129681 - DNA, 25 bp, Homo sapien
gtacttcgcctctggtcaccaagaa

SEQ ID NO: 4129682 - DNA, 25 bp, Homo sapien
caggttgtctatccattcacccatt

SEQ ID NO: 4129683 - DNA, 25 bp, Homo sapien
tgtgatatgcatgtaccacaggttg

SEQ ID NO: 4129684 - DNA, 25 bp, Homo sapien
tcttaactttgtctcaagcaaactc

SEQ ID NO: 4129685 - DNA, 25 bp, Homo sapien
ctttttatagctgaagagtagtctg

SEQ ID NO: 4129686 - DNA, 25 bp, Homo sapien
aagaaaatgacaccagaagatgatt

SEQ ID NO: 4129687 - DNA, 25 bp, Homo sapien
aaaatgacaccagaagatgattcaa

SEQ ID NO: 4129688 - DNA, 25 bp, Homo sapien
aatgacaccagaagatgattcaaat

SEQ ID NO: 4129689 - DNA, 25 bp, Homo sapien
gaaaatgacaccagaagatgattca

SEQ ID NO: 4129690 - DNA, 25 bp, Homo sapien
aggagcccttatgacccagaattcc

SEQ ID NO: 4129691 - DNA, 25 bp, Homo sapien
cgctagttgatctgtcttacaagaa

SEQ ID NO: 4129692 - DNA, 25 bp, Homo sapien
tggaaccagaagacaattgaacagc

SEQ ID NO: 4129693 - DNA, 25 bp, Homo sapien
gacagagataattcatcgctagttg

SEQ ID NO: 4129694 - DNA, 25 bp, Homo sapien
tgctgaacgggttccccaggaggaa

SEQ ID NO: 4129695 - DNA, 25 bp, Homo sapien
ggtgtgctgaacgggttccccagga

SEQ ID NO: 4129696 - DNA, 25 bp, Homo sapien
tggtgtgctgaacgggttccccagg

SEQ ID NO: 4129697 - DNA, 25 bp, Homo sapien
tgtgctgaacgggttccccaggagg

SEQ ID NO: 4129698 - DNA, 25 bp, Homo sapien
catggttgtgtttgtgtggcatttt

SEQ ID NO: 4129699 - DNA, 25 bp, Homo sapien
tggcattttcgaagcactgccccac

SEQ ID NO: 4129700 - DNA, 25 bp, Homo sapien
tgtttgtgtggcattttcgaagcac

SEQ ID NO: 4129701 - DNA, 25 bp, Homo sapien
tgtggcattttcgaagcactgcccc

SEQ ID NO: 4129702 - DNA, 25 bp, Homo sapien
catctgtttcagtagagctaaatac

SEQ ID NO: 4129703 - DNA, 25 bp, Homo sapien
ccctcatctgtttcagtagagctaa

SEQ ID NO: 4129704 - DNA, 25 bp, Homo sapien
ttccctcatctgtttcagtagagct

SEQ ID NO: 4129705 - DNA, 25 bp, Homo sapien
ctcatctgtttcagtagagctaaat

SEQ ID NO: 4129706 - DNA, 25 bp, Homo sapien
ggcctgtccttagatggttcattag

SEQ ID NO: 4129707 - DNA, 25 bp, Homo sapien
cctgtccttagatggttcattagcc

SEQ ID NO: 4129708 - DNA, 25 bp, Homo sapien
ccttagatggttcattagccctgat

SEQ ID NO: 4129709 - DNA, 25 bp, Homo sapien
tgtccttagatggttcattagccct

SEQ ID NO: 4129710 - DNA, 25 bp, Homo sapien
cacctaatagatctggccatgtctc

SEQ ID NO: 4129711 - DNA, 25 bp, Homo sapien
tcctggtccacctaatagatctggc

SEQ ID NO: 4129712 - DNA, 25 bp, Homo sapien
ggtccacctaatagatctggccatg

SEQ ID NO: 4129713 - DNA, 25 bp, Homo sapien
cctaatagatctggccatgtctctt

SEQ ID NO: 4129714 - DNA, 25 bp, Homo sapien
tctgcaatgtcttccattcaatgct

SEQ ID NO: 4129715 - DNA, 25 bp, Homo sapien
tcttctgcaatgtcttccattcaat

SEQ ID NO: 4129716 - DNA, 25 bp, Homo sapien
gctttcttcaacatcctcaattata

SEQ ID NO: 4129717 - DNA, 25 bp, Homo sapien
cttcaacatcctcaattataaccaa

SEQ ID NO: 4129718 - DNA, 25 bp, Homo sapien
tttacagctgcttttgttcttattc

SEQ ID NO: 4129719 - DNA, 25 bp, Homo sapien
acagctgcttttgttcttattctaa

SEQ ID NO: 4129720 - DNA, 25 bp, Homo sapien
ctggatctttacagctgcttttgtt

SEQ ID NO: 4129721 - DNA, 25 bp, Homo sapien
ctgcttttgttcttattctaagttt

SEQ ID NO: 4129722 - DNA, 25 bp, Homo sapien
tgagcacctggcagtatcgccagcg

SEQ ID NO: 4129723 - DNA, 25 bp, Homo sapien
tgccctctctctggttgcgtaggcg

SEQ ID NO: 4129724 - DNA, 25 bp, Homo sapien
agagcgcaggtctggcagttgtggc

SEQ ID NO: 4129725 - DNA, 25 bp, Homo sapien
cagtggccctggatgatgtagatgg

SEQ ID NO: 4129726 - DNA, 25 bp, Homo sapien
cctttaatagggacagtagacacag

SEQ ID NO: 4129727 - DNA, 25 bp, Homo sapien
caggttagacctttaatagggacag

SEQ ID NO: 4129728 - DNA, 25 bp, Homo sapien
tagggacagtagacacagtgccctt

SEQ ID NO: 4129729 - DNA, 25 bp, Homo sapien
agtagacacagtgcccttcttgcca

SEQ ID NO: 4129730 - DNA, 25 bp, Homo sapien
tggtgtaaattattcaactcggaaa

SEQ ID NO: 4129731 - DNA, 25 bp, Homo sapien
tgaagaccatgcctcatggttgttg

SEQ ID NO: 4129732 - DNA, 25 bp, Homo sapien
cattgggaaattagtccagttgata

SEQ ID NO: 4129733 - DNA, 25 bp, Homo sapien
gttgcgtgatccaaaccagatccca

SEQ ID NO: 4129734 - DNA, 25 bp, Homo sapien
atggttcactcctgctagggaaacc

SEQ ID NO: 4129735 - DNA, 25 bp, Homo sapien
ttcagtctgggatggttcactcctg

SEQ ID NO: 4129736 - DNA, 25 bp, Homo sapien
ctccattttcagtctgggatggttc

SEQ ID NO: 4129737 - DNA, 25 bp, Homo sapien
cctgctagggaaacctggtggtgcc

SEQ ID NO: 4129738 - DNA, 25 bp, Homo sapien
tgatgggaaatactaggcatgtcac

SEQ ID NO: 4129739 - DNA, 25 bp, Homo sapien
tcacaagtcagctgtgaggaatcag

SEQ ID NO: 4129740 - DNA, 25 bp, Homo sapien
caggaggtcattgtttgagataatg

SEQ ID NO: 4129741 - DNA, 25 bp, Homo sapien
gaatgaccaggtctgctatatctgt

SEQ ID NO: 4129742 - DNA, 25 bp, Homo sapien
ccctcagggcttggatcattcagtg

SEQ ID NO: 4129743 - DNA, 25 bp, Homo sapien
catgtggtgtgtccgccagcgttac

SEQ ID NO: 4129744 - DNA, 25 bp, Homo sapien
ccttcctagcataccctgagtgtgt

SEQ ID NO: 4129745 - DNA, 25 bp, Homo sapien
tctatgtgcagcaggaatgggcagc

SEQ ID NO: 4129746 - DNA, 25 bp, Homo sapien
tgtgatcccggaccatatagggctg

SEQ ID NO: 4129747 - DNA, 25 bp, Homo sapien
tgacttggcacctagcagtgggaga

SEQ ID NO: 4129748 - DNA, 25 bp, Homo sapien
tcatggatcccaggtagatggcagc

SEQ ID NO: 4129749 - DNA, 25 bp, Homo sapien
gacaccacttcttcagcggatggga

SEQ ID NO: 4129750 - DNA, 25 bp, Homo sapien
tactggtccctcctagaacaatgct

SEQ ID NO: 4129751 - DNA, 25 bp, Homo sapien
tcatgggctaacatctgcttcaacg

SEQ ID NO: 4129752 - DNA, 25 bp, Homo sapien
tgtggctccctacattggtctgacg

SEQ ID NO: 4129753 - DNA, 25 bp, Homo sapien
gatggtctatgccaccaaggatgcc

SEQ ID NO: 4129754 - DNA, 25 bp, Homo sapien
cccattgcggctgccagggaagtga

SEQ ID NO: 4129755 - DNA, 25 bp, Homo sapien
aataaatacacccattgcggctgcc

SEQ ID NO: 4129756 - DNA, 25 bp, Homo sapien
ggtattccctgctagactccaattg

SEQ ID NO: 4129757 - DNA, 25 bp, Homo sapien
tcgctgttggttgtagcatatgtag

SEQ ID NO: 4129758 - DNA, 25 bp, Homo sapien
tttccaacacgtgagtgacttggga

SEQ ID NO: 4129759 - DNA, 25 bp, Homo sapien
ctttgatatttccaacacgtgagtg

SEQ ID NO: 4129760 - DNA, 25 bp, Homo sapien
gatatttccaacacgtgagtgactt

SEQ ID NO: 4129761 - DNA, 25 bp, Homo sapien
agtctttgatatttccaacacgtga

SEQ ID NO: 4129762 - DNA, 25 bp, Homo sapien
cggcaacagcggctgctcgtaagcg

SEQ ID NO: 4129763 - DNA, 25 bp, Homo sapien
gcagcatgtcggcaacagcggctgc

SEQ ID NO: 4129764 - DNA, 25 bp, Homo sapien
gcaagcggcggcgaaaggtgagcat

SEQ ID NO: 4129765 - DNA, 25 bp, Homo sapien
tggtgggcagcatgtcggcaacagc

SEQ ID NO: 4129766 - DNA, 25 bp, Homo sapien
ggagctgggagggttcagctgccac

SEQ ID NO: 4129767 - DNA, 25 bp, Homo sapien
cggggtcttgccaggcggctgggga

SEQ ID NO: 4129768 - DNA, 25 bp, Homo sapien
ctggggagctgggagggttcagctg

SEQ ID NO: 4129769 - DNA, 25 bp, Homo sapien
ggggagctgggagggttcagctgcc

SEQ ID NO: 4129770 - DNA, 25 bp, Homo sapien
gagaattcccaacaatcgccagagg

SEQ ID NO: 4129771 - DNA, 25 bp, Homo sapien
cgggtggacactcgatctggcatat

SEQ ID NO: 4129772 - DNA, 25 bp, Homo sapien
tagacatcggctatttggccaccag

SEQ ID NO: 4129773 - DNA, 25 bp, Homo sapien
tagcaactctccatgagcctcaggc

SEQ ID NO: 4129774 - DNA, 25 bp, Homo sapien
ccctgtgtcagctagttcagccctg

SEQ ID NO: 4129775 - DNA, 25 bp, Homo sapien
cctccccctgtgtcagctagttcag

SEQ ID NO: 4129776 - DNA, 25 bp, Homo sapien
tccccctgtgtcagctagttcagcc

SEQ ID NO: 4129777 - DNA, 25 bp, Homo sapien
cctggcatggttgccgggccgagtc

SEQ ID NO: 4129778 - DNA, 25 bp, Homo sapien
tgcaaggttaggactctgtccagtc

SEQ ID NO: 4129779 - DNA, 25 bp, Homo sapien
gtgcaaggttaggactctgtccagt

SEQ ID NO: 4129780 - DNA, 25 bp, Homo sapien
caaggttaggactctgtccagtctg

SEQ ID NO: 4129781 - DNA, 25 bp, Homo sapien
gcaaggttaggactctgtccagtct

SEQ ID NO: 4129782 - DNA, 25 bp, Homo sapien
gggcacagagaggcccttaggcctc

SEQ ID NO: 4129783 - DNA, 25 bp, Homo sapien
gcacagagaggcccttaggcctcca

SEQ ID NO: 4129784 - DNA, 25 bp, Homo sapien
ggcacagagaggcccttaggcctcc

SEQ ID NO: 4129785 - DNA, 25 bp, Homo sapien
cggattatgcgcttctctgcgggta

SEQ ID NO: 4129786 - DNA, 25 bp, Homo sapien
gcttctctgcgggtatggccttgag

SEQ ID NO: 4129787 - DNA, 25 bp, Homo sapien
ggacatgttggatccacgcggatta

SEQ ID NO: 4129788 - DNA, 25 bp, Homo sapien
tcagtctgtacccagggcttcggct

SEQ ID NO: 4129789 - DNA, 25 bp, Homo sapien
tgttgttgttctcgatgttggtctg

SEQ ID NO: 4129790 - DNA, 25 bp, Homo sapien
gggtgcagttgtagtcctcatacac

SEQ ID NO: 4129791 - DNA, 25 bp, Homo sapien
agggtgcagttgtagtcctcataca

SEQ ID NO: 4129792 - DNA, 25 bp, Homo sapien
catcctctgcctgtacttcgataag

SEQ ID NO: 4129793 - DNA, 25 bp, Homo sapien
gagacacaaagtggtcccgctctgc

SEQ ID NO: 4129794 - DNA, 25 bp, Homo sapien
ttcgataagtgtgtacttgcccggg

SEQ ID NO: 4129795 - DNA, 25 bp, Homo sapien
ccttgtgaagtggttgatctttgac

SEQ ID NO: 4129796 - DNA, 25 bp, Homo sapien
tagagggcacatgtgggcaggagca

SEQ ID NO: 4129797 - DNA, 25 bp, Homo sapien
gaagatagagggcacatgtgggcag

SEQ ID NO: 4129798 - DNA, 25 bp, Homo sapien
gcagagcccaaccagcgggaactct

SEQ ID NO: 4129799 - DNA, 25 bp, Homo sapien
accagcgggaactctccaacgagtc

SEQ ID NO: 4129800 - DNA, 25 bp, Homo sapien
gtgttcttgaacatctccttgctga

SEQ ID NO: 4129801 - DNA, 25 bp, Homo sapien
gggctgcacccgcttagtcacagtc

SEQ ID NO: 4129802 - DNA, 25 bp, Homo sapien
aagatgttagtgatgagcttctgcg

SEQ ID NO: 4129803 - DNA, 25 bp, Homo sapien
atgagcttctgcgtggctgggtcca

SEQ ID NO: 4129804 - DNA, 25 bp, Homo sapien
ggacaggggagtggggagactcagc

SEQ ID NO: 4129805 - DNA, 25 bp, Homo sapien
ccctgaggcccctgccaccctgcct

SEQ ID NO: 4129806 - DNA, 25 bp, Homo sapien
acagccctgccaccctgaggcccct

SEQ ID NO: 4129807 - DNA, 25 bp, Homo sapien
gggagtggggagactcagccccaca

SEQ ID NO: 4129808 - DNA, 25 bp, Homo sapien
aatctgttgcttgctcagctttccc

SEQ ID NO: 4129809 - DNA, 25 bp, Homo sapien
aaggcctcgaaaccccgtgcaatct

SEQ ID NO: 4129810 - DNA, 25 bp, Homo sapien
ggtgtaaaagtgtgaggacagctcc

SEQ ID NO: 4129811 - DNA, 25 bp, Homo sapien
tgtggccgaagttgtgcgggatgac

SEQ ID NO: 4129812 - DNA, 25 bp, Homo sapien
tgagaagctggtagtctcggtccag

SEQ ID NO: 4129813 - DNA, 25 bp, Homo sapien
cttgtactcaggtgctccagagtct

SEQ ID NO: 4129814 - DNA, 25 bp, Homo sapien
tggcacttgagaagctggtagtctc

SEQ ID NO: 4129815 - DNA, 25 bp, Homo sapien
tgggccagctcgatgtccgccagca

SEQ ID NO: 4129816 - DNA, 25 bp, Homo sapien
tcttggtttactttccagatgtgtt

SEQ ID NO: 4129817 - DNA, 25 bp, Homo sapien
ctgccagtctgttctaagtaggtct

SEQ ID NO: 4129818 - DNA, 25 bp, Homo sapien
gctgccagtctgttctaagtaggtc

SEQ ID NO: 4129819 - DNA, 25 bp, Homo sapien
atgtgttgaagtgtagggcacctgt

SEQ ID NO: 4129820 - DNA, 25 bp, Homo sapien
agcagcttccgattacccagtttgg

SEQ ID NO: 4129821 - DNA, 25 bp, Homo sapien
tgatgcggagcccactagtgaggat

SEQ ID NO: 4129822 - DNA, 25 bp, Homo sapien
ttctctgaggcaaagtagatgccct

SEQ ID NO: 4129823 - DNA, 25 bp, Homo sapien
tgccaacacgcccaccagaatgtgg

SEQ ID NO: 4129824 - DNA, 25 bp, Homo sapien
agggaggcaccggtgggcagctcag

SEQ ID NO: 4129825 - DNA, 25 bp, Homo sapien
ctctctgctgcgatgttattccttc

SEQ ID NO: 4129826 - DNA, 25 bp, Homo sapien
gctgcgatgttattccttctggctt

SEQ ID NO: 4129827 - DNA, 25 bp, Homo sapien
gcccctctctgctgcgatgttattc

SEQ ID NO: 4129828 - DNA, 25 bp, Homo sapien
gaacatgtagccgacatggtgggcc

SEQ ID NO: 4129829 - DNA, 25 bp, Homo sapien
aagccaggaggtgggctcttcaagc

SEQ ID NO: 4129830 - DNA, 25 bp, Homo sapien
ggttgtccgtgttgatatggtgctc

SEQ ID NO: 4129831 - DNA, 25 bp, Homo sapien
gcctcgggcaatgacactgtcgaag

SEQ ID NO: 4129832 - DNA, 25 bp, Homo sapien
tctccttgggctgtacagcttctga

SEQ ID NO: 4129833 - DNA, 25 bp, Homo sapien
ctctccttgggctgtacagcttctg

SEQ ID NO: 4129834 - DNA, 25 bp, Homo sapien
ggccatccagctccaactcagtgtc

SEQ ID NO: 4129835 - DNA, 25 bp, Homo sapien
caccaccacttgctggccatccagc

SEQ ID NO: 4129836 - DNA, 25 bp, Homo sapien
ggccctggggcaccaccacttgctg

SEQ ID NO: 4129837 - DNA, 25 bp, Homo sapien
ccatccagctccaactcagtgtcct

SEQ ID NO: 4129838 - DNA, 25 bp, Homo sapien
tgaggtactcgctctgggagaatgt

SEQ ID NO: 4129839 - DNA, 25 bp, Homo sapien
gacctccagcaggtagcgcaggcga

SEQ ID NO: 4129840 - DNA, 25 bp, Homo sapien
tcctggtagatgaggtactcgctct

SEQ ID NO: 4129841 - DNA, 25 bp, Homo sapien
ctccagcaggtagcgcaggcgacac

SEQ ID NO: 4129842 - DNA, 25 bp, Homo sapien
actgggcagatgtgtcaaagaatac

SEQ ID NO: 4129843 - DNA, 25 bp, Homo sapien
gttaggaggcataagttcagggatc

SEQ ID NO: 4129844 - DNA, 25 bp, Homo sapien
aaaacatgggtgaacccggtgcaca

SEQ ID NO: 4129845 - DNA, 25 bp, Homo sapien
caggatgattgaagatcacagtcca

SEQ ID NO: 4129846 - DNA, 25 bp, Homo sapien
aatgatcgggacacggaagggacct

SEQ ID NO: 4129847 - DNA, 25 bp, Homo sapien
tgacacctcagtaccaaggagcaca

SEQ ID NO: 4129848 - DNA, 25 bp, Homo sapien
ggctgattcccggttcgtacgagat

SEQ ID NO: 4129849 - DNA, 25 bp, Homo sapien
ggaaggacttaaaagcaatgacacc

SEQ ID NO: 4129850 - DNA, 25 bp, Homo sapien
ctctgatgttgccacacacggctgg

SEQ ID NO: 4129851 - DNA, 25 bp, Homo sapien
gatggtactggctgtcactctgatg

SEQ ID NO: 4129852 - DNA, 25 bp, Homo sapien
caactcagcccctgtcggagatggt

SEQ ID NO: 4129853 - DNA, 25 bp, Homo sapien
cagcccctgtcggagatggtactgg

SEQ ID NO: 4129854 - DNA, 25 bp, Homo sapien
aggtggctccgacgcccaggctgcc

SEQ ID NO: 4129855 - DNA, 25 bp, Homo sapien
cccaggaggtggctccgacgcccag

SEQ ID NO: 4129856 - DNA, 25 bp, Homo sapien
gctccgacgcccaggctgccatcct

SEQ ID NO: 4129857 - DNA, 25 bp, Homo sapien
ggaggtggctccgacgcccaggctg

SEQ ID NO: 4129858 - DNA, 25 bp, Homo sapien
aggcttcaccctgcgctgggatgta

SEQ ID NO: 4129859 - DNA, 25 bp, Homo sapien
tcaggcttcaccctgcgctgggatg

SEQ ID NO: 4129860 - DNA, 25 bp, Homo sapien
cttcaccctgcgctgggatgtagat

SEQ ID NO: 4129861 - DNA, 25 bp, Homo sapien
tcaccctgcgctgggatgtagatgg

SEQ ID NO: 4129862 - DNA, 25 bp, Homo sapien
aggtccacgacgcacaggtgcgcca

SEQ ID NO: 4129863 - DNA, 25 bp, Homo sapien
caacgagcctgcgacttctgaggcg

SEQ ID NO: 4129864 - DNA, 25 bp, Homo sapien
tctgaggcgttcagccctgtggagt

SEQ ID NO: 4129865 - DNA, 25 bp, Homo sapien
caggtagagcgcgtcgcgcagtccc

SEQ ID NO: 4129866 - DNA, 25 bp, Homo sapien
agggcagcgcgacgcgccaccacga

SEQ ID NO: 4129867 - DNA, 25 bp, Homo sapien
aagatgccgccgtaggcgccgagca

SEQ ID NO: 4129868 - DNA, 25 bp, Homo sapien
ccagagagtccgagcggagtcggga

SEQ ID NO: 4129869 - DNA, 25 bp, Homo sapien
ccagccaggaccgagcagcgagcag

SEQ ID NO: 4129870 - DNA, 25 bp, Homo sapien
agaggcggcccagtgccaagcgcac

SEQ ID NO: 4129871 - DNA, 25 bp, Homo sapien
gcgcagccataaggcagccagcagg

SEQ ID NO: 4129872 - DNA, 25 bp, Homo sapien
cggagcggcggcaagatggaaaggc

SEQ ID NO: 4129873 - DNA, 25 bp, Homo sapien
taggcgacccaggtgacagccgctt

SEQ ID NO: 4129874 - DNA, 25 bp, Homo sapien
tctctggaggcattgcaagagtgcc

SEQ ID NO: 4129875 - DNA, 25 bp, Homo sapien
tcagaagggcctacggcagggccct

SEQ ID NO: 4129876 - DNA, 25 bp, Homo sapien
tgccaactcgggggtctgttctgga

SEQ ID NO: 4129877 - DNA, 25 bp, Homo sapien
ctggaggcattgcaagagtgcccgc

SEQ ID NO: 4129878 - DNA, 25 bp, Homo sapien
aagggtcggcctatgcacagtgcta

SEQ ID NO: 4129879 - DNA, 25 bp, Homo sapien
cagtgctatgcagtgttgggcccag

SEQ ID NO: 4129880 - DNA, 25 bp, Homo sapien
gaataaatattctcagcgaccagga

SEQ ID NO: 4129881 - DNA, 25 bp, Homo sapien
tttgactggaatgaactggctgggc

SEQ ID NO: 4129882 - DNA, 25 bp, Homo sapien
ctaacgcccagacgcatggatgcac

SEQ ID NO: 4129883 - DNA, 25 bp, Homo sapien
gcagccaggagactccctagtgccc

SEQ ID NO: 4129884 - DNA, 25 bp, Homo sapien
ctctgtgcttggatacagggagcag

SEQ ID NO: 4129885 - DNA, 25 bp, Homo sapien
ctaccctgcctccatctatgggagt

SEQ ID NO: 4129886 - DNA, 25 bp, Homo sapien
ggcggcctacactgccaagatggca

SEQ ID NO: 4129887 - DNA, 25 bp, Homo sapien
ggcctcaagcccatgcccttcttgg

SEQ ID NO: 4129888 - DNA, 25 bp, Homo sapien
ttctcgccacccctgacggccctgc

SEQ ID NO: 4129889 - DNA, 25 bp, Homo sapien
ttcatcggcctcaagcccatgccct

SEQ ID NO: 4129890 - DNA, 25 bp, Homo sapien
caaatatgacccttcgcttgagggc

SEQ ID NO: 4129891 - DNA, 25 bp, Homo sapien
ccttttgcaaggcttagggtgtggc

SEQ ID NO: 4129892 - DNA, 25 bp, Homo sapien
tgagggcaactgcataggtacatct

SEQ ID NO: 4129893 - DNA, 25 bp, Homo sapien
tccttaggccccagatacatacatg

SEQ ID NO: 4129894 - DNA, 25 bp, Homo sapien
tggttttgaaccacaggcccttcac

SEQ ID NO: 4129895 - DNA, 25 bp, Homo sapien
gcagaacctgggtacactgcacagg

SEQ ID NO: 4129896 - DNA, 25 bp, Homo sapien
catggtattcgcttctcctccgaga

SEQ ID NO: 4129897 - DNA, 25 bp, Homo sapien
tgtggcccctcatcatcgtggtttt

SEQ ID NO: 4129898 - DNA, 25 bp, Homo sapien
ttcccatatttcagatcaagaagct

SEQ ID NO: 4129899 - DNA, 25 bp, Homo sapien
gagctagcgagccagaaccgtagtc

SEQ ID NO: 4129900 - DNA, 25 bp, Homo sapien
gtagtccgcggaagcaacctgaccg

SEQ ID NO: 4129901 - DNA, 25 bp, Homo sapien
cctgaccgcgaggtcaacgcgttgg

SEQ ID NO: 4129902 - DNA, 25 bp, Homo sapien
ccccaggtggcagcgcgttgagcac

SEQ ID NO: 4129903 - DNA, 25 bp, Homo sapien
cagaggcctcgttgtgtaaatgcca

SEQ ID NO: 4129904 - DNA, 25 bp, Homo sapien
cgcacagggttgtcctaggttctta

SEQ ID NO: 4129905 - DNA, 25 bp, Homo sapien
taaggacgggtcaagcctcagaaca

SEQ ID NO: 4129906 - DNA, 25 bp, Homo sapien
ctcagaacagtgtccggagcagagg

SEQ ID NO: 4129907 - DNA, 25 bp, Homo sapien
ggcggaaccagcagccgcacagcgc

SEQ ID NO: 4129908 - DNA, 25 bp, Homo sapien
cgggcccaacgggatgagcgggcgg

SEQ ID NO: 4129909 - DNA, 25 bp, Homo sapien
aggcggaaccagcagccgcacagcg

SEQ ID NO: 4129910 - DNA, 25 bp, Homo sapien
caacgggatgagcgggcgggccccg

SEQ ID NO: 4129911 - DNA, 25 bp, Homo sapien
taggaaattgtagtggacctgcagc

SEQ ID NO: 4129912 - DNA, 25 bp, Homo sapien
gggtgcccgcagtactaggaaattg

SEQ ID NO: 4129913 - DNA, 25 bp, Homo sapien
ccgggcgcgagggacatttccttgc

SEQ ID NO: 4129914 - DNA, 25 bp, Homo sapien
tcagacgcgcgtctctaactgggcg

SEQ ID NO: 4129915 - DNA, 25 bp, Homo sapien
ggactgtgacattggggtctcccca

SEQ ID NO: 4129916 - DNA, 25 bp, Homo sapien
cagtaggagcatgagcagcagactc

SEQ ID NO: 4129917 - DNA, 25 bp, Homo sapien
cagcagggctacctgggaccggctc

SEQ ID NO: 4129918 - DNA, 25 bp, Homo sapien
ttgagtgggagcacctcgcggtaaa

SEQ ID NO: 4129919 - DNA, 25 bp, Homo sapien
ctgtgacagtagctgcagtgtgccc

SEQ ID NO: 4129920 - DNA, 25 bp, Homo sapien
tgtgacagtagctgcagtgtgccca

SEQ ID NO: 4129921 - DNA, 25 bp, Homo sapien
gctgctcccacgtgtgagagttaaa

SEQ ID NO: 4129922 - DNA, 25 bp, Homo sapien
gtgagagttaaaggcctttccatga

SEQ ID NO: 4129923 - DNA, 25 bp, Homo sapien
aggaacagcagcaggtaccagctga

SEQ ID NO: 4129924 - DNA, 25 bp, Homo sapien
ctaggaacagcagcaggtaccagct

SEQ ID NO: 4129925 - DNA, 25 bp, Homo sapien
aacagcagcaggtaccagctgaggg

SEQ ID NO: 4129926 - DNA, 25 bp, Homo sapien
agcagcaggtaccagctgaggggca

SEQ ID NO: 4129927 - DNA, 25 bp, Homo sapien
tggtggcctcgcatcaggaagggca

SEQ ID NO: 4129928 - DNA, 25 bp, Homo sapien
aggtgggtgcgatgggcacaaatcc

SEQ ID NO: 4129929 - DNA, 25 bp, Homo sapien
gggctcaccaacacggcattctgta

SEQ ID NO: 4129930 - DNA, 25 bp, Homo sapien
gggcatagtggccactcagcgaggg

SEQ ID NO: 4129931 - DNA, 25 bp, Homo sapien
aggacctttgagatccttctcccag

SEQ ID NO: 4129932 - DNA, 25 bp, Homo sapien
ccatgtccctccaagtaagacttga

SEQ ID NO: 4129933 - DNA, 25 bp, Homo sapien
caagtaagacttgagtcctgaaccc

SEQ ID NO: 4129934 - DNA, 25 bp, Homo sapien
cctccaagtaagacttgagtcctga

SEQ ID NO: 4129935 - DNA, 25 bp, Homo sapien
cagctctccatacaggataagggtt

SEQ ID NO: 4129936 - DNA, 25 bp, Homo sapien
gcggagctgccgcagtgactctcga

SEQ ID NO: 4129937 - DNA, 25 bp, Homo sapien
gactctcgagccaggatgtggtcca

SEQ ID NO: 4129938 - DNA, 25 bp, Homo sapien
gggcaggtggcggagctgccgcagt

SEQ ID NO: 4129939 - DNA, 25 bp, Homo sapien
cttgcggcttgtggaggtaacaggc

SEQ ID NO: 4129940 - DNA, 25 bp, Homo sapien
acaaggtggaagtcttgcggcttgt

SEQ ID NO: 4129941 - DNA, 25 bp, Homo sapien
catggcctgcattgcgtagcttcac

SEQ ID NO: 4129942 - DNA, 25 bp, Homo sapien
aggacaaggtggaagtcttgcggct

SEQ ID NO: 4129943 - DNA, 25 bp, Homo sapien
ctggctgggtctgaccccagctggc

SEQ ID NO: 4129944 - DNA, 25 bp, Homo sapien
ttttattgtgtctgtgagatgaaat

SEQ ID NO: 4129945 - DNA, 25 bp, Homo sapien
tattgtgtctgtgagatgaaatgag

SEQ ID NO: 4129946 - DNA, 25 bp, Homo sapien
gaggagtcctggctgggtctgaccc

SEQ ID NO: 4129947 - DNA, 25 bp, Homo sapien
catggacaagagcacgtgtgacggt

SEQ ID NO: 4129948 - DNA, 25 bp, Homo sapien
tactggaggattagatccggatccc

SEQ ID NO: 4129949 - DNA, 25 bp, Homo sapien
tcgggcctcagcgagattactggag

SEQ ID NO: 4129950 - DNA, 25 bp, Homo sapien
gacggtttaagcgtgccactgcgtg

SEQ ID NO: 4129951 - DNA, 25 bp, Homo sapien
ggcaaagtgaatggctaactacccc

SEQ ID NO: 4129952 - DNA, 25 bp, Homo sapien
tgaagtttgtgctcagaatgcccac

SEQ ID NO: 4129953 - DNA, 25 bp, Homo sapien
ggttcaaggacagctcatagagtag

SEQ ID NO: 4129954 - DNA, 25 bp, Homo sapien
caagaccctggaaatggtgagctcc

SEQ ID NO: 4129955 - DNA, 25 bp, Homo sapien
gtactggcggaagagcgtcaccgat

SEQ ID NO: 4129956 - DNA, 25 bp, Homo sapien
gcttgggctggacagtgcggatacg

SEQ ID NO: 4129957 - DNA, 25 bp, Homo sapien
gagcgtcaccgatgggtgctcctcc

SEQ ID NO: 4129958 - DNA, 25 bp, Homo sapien
tggacagtgcggatacgcaggtact

SEQ ID NO: 4129959 - DNA, 25 bp, Homo sapien
ttcctccctaacctggagggactgc

SEQ ID NO: 4129960 - DNA, 25 bp, Homo sapien
tggaggctggtttagagcacagtcc

SEQ ID NO: 4129961 - DNA, 25 bp, Homo sapien
tgtggcctttgtccagccccagtgg

SEQ ID NO: 4129962 - DNA, 25 bp, Homo sapien
ccaagcttgactccctaagggctgt

SEQ ID NO: 4129963 - DNA, 25 bp, Homo sapien
ggcgggctgtctcctcaaagaaagc

SEQ ID NO: 4129964 - DNA, 25 bp, Homo sapien
gctgtctcctcaaagaaagccacag

SEQ ID NO: 4129965 - DNA, 25 bp, Homo sapien
ctggcgggctgtctcctcaaagaaa

SEQ ID NO: 4129966 - DNA, 25 bp, Homo sapien
aggcccagctggcgggctgtctcct

SEQ ID NO: 4129967 - DNA, 25 bp, Homo sapien
cggtcaccacatagccaggtgccac

SEQ ID NO: 4129968 - DNA, 25 bp, Homo sapien
aacacggtcaccacatagccaggtg

SEQ ID NO: 4129969 - DNA, 25 bp, Homo sapien
acggtcaccacatagccaggtgcca

SEQ ID NO: 4129970 - DNA, 25 bp, Homo sapien
acacggtcaccacatagccaggtgc

SEQ ID NO: 4129971 - DNA, 25 bp, Homo sapien
ttgaagacaggcaccacatccgtgt

SEQ ID NO: 4129972 - DNA, 25 bp, Homo sapien
aagacaggcaccacatccgtgtggg

SEQ ID NO: 4129973 - DNA, 25 bp, Homo sapien
tgaagacaggcaccacatccgtgtg

SEQ ID NO: 4129974 - DNA, 25 bp, Homo sapien
gaagacaggcaccacatccgtgtgg

SEQ ID NO: 4129975 - DNA, 25 bp, Homo sapien
ctcaaaggggtcgtgactccaatgt

SEQ ID NO: 4129976 - DNA, 25 bp, Homo sapien
caaaggggtcgtgactccaatgttc

SEQ ID NO: 4129977 - DNA, 25 bp, Homo sapien
gaaggcctcaaaggggtcgtgactc

SEQ ID NO: 4129978 - DNA, 25 bp, Homo sapien
ggcctcaaaggggtcgtgactccaa

SEQ ID NO: 4129979 - DNA, 25 bp, Homo sapien
gctgacgcacttcatgtcctgggca

SEQ ID NO: 4129980 - DNA, 25 bp, Homo sapien
tgggcacccctggcatagatgtagc

SEQ ID NO: 4129981 - DNA, 25 bp, Homo sapien
tgacgcacttcatgtcctgggcacc

SEQ ID NO: 4129982 - DNA, 25 bp, Homo sapien
gatgctgacgcacttcatgtcctgg

SEQ ID NO: 4129983 - DNA, 25 bp, Homo sapien
ctgagggggcataagccaggtgctg

SEQ ID NO: 4129984 - DNA, 25 bp, Homo sapien
catgtggatggttctggggaaccgg

SEQ ID NO: 4129985 - DNA, 25 bp, Homo sapien
acaaaggtcatgtggatggttctgg

SEQ ID NO: 4129986 - DNA, 25 bp, Homo sapien
gaaccggtggccctccaccttcagc

SEQ ID NO: 4129987 - DNA, 25 bp, Homo sapien
aggcacaaaggtcatgtggatggtt

SEQ ID NO: 4129988 - DNA, 25 bp, Homo sapien
aggccgctgcacgaacagctccatg

SEQ ID NO: 4129989 - DNA, 25 bp, Homo sapien
gcgtggaactcaggccgctgcacga

SEQ ID NO: 4129990 - DNA, 25 bp, Homo sapien
gggcaaagcctgccctcagggcgtg

SEQ ID NO: 4129991 - DNA, 25 bp, Homo sapien
cctcagggcgtggaactcaggccgc

SEQ ID NO: 4129992 - DNA, 25 bp, Homo sapien
ggactccgctcactataaaagacag

SEQ ID NO: 4129993 - DNA, 25 bp, Homo sapien
ccagggactccgctcactataaaag

SEQ ID NO: 4129994 - DNA, 25 bp, Homo sapien
cagtgaaggcatcagtgggattggc

SEQ ID NO: 4129995 - DNA, 25 bp, Homo sapien
tgaaggcatcagtgggattggctat

SEQ ID NO: 4129996 - DNA, 25 bp, Homo sapien
ggaaggcagtgtcttcagcctgagg

SEQ ID NO: 4129997 - DNA, 25 bp, Homo sapien
gggaaggcagtgtcttcagcctgag

SEQ ID NO: 4129998 - DNA, 25 bp, Homo sapien
gaaggcagtgtcttcagcctgaggg

SEQ ID NO: 4129999 - DNA, 25 bp, Homo sapien
aaggcagtgtcttcagcctgagggg

SEQ ID NO: 4130000 - DNA, 25 bp, Homo sapien
ctcccagtgctggtaacccgcaccc

SEQ ID NO: 4130001 - DNA, 25 bp, Homo sapien
tccatgaagcgtgaggcatggcctg

SEQ ID NO: 4130002 - DNA, 25 bp, Homo sapien
ctccatgaagcgtgaggcatggcct

SEQ ID NO: 4130003 - DNA, 25 bp, Homo sapien
tcccggaatgccaggatggagttta

SEQ ID NO: 4130004 - DNA, 25 bp, Homo sapien
ctcccggaatgccaggatggagttt

SEQ ID NO: 4130005 - DNA, 25 bp, Homo sapien
gactctatcctctgtggtaccgcct

SEQ ID NO: 4130006 - DNA, 25 bp, Homo sapien
taaaagaggtggctcagactctatc

SEQ ID NO: 4130007 - DNA, 25 bp, Homo sapien
agcaacagataaaagaggtggctca

SEQ ID NO: 4130008 - DNA, 25 bp, Homo sapien
cagggtagcggcagcaacagataaa

SEQ ID NO: 4130009 - DNA, 25 bp, Homo sapien
acacggaagtcaaagctggcgctca

SEQ ID NO: 4130010 - DNA, 25 bp, Homo sapien
aggtatcacgttataggccacgcca

SEQ ID NO: 4130011 - DNA, 25 bp, Homo sapien
accctctagcttagtcaggttcacg

SEQ ID NO: 4130012 - DNA, 25 bp, Homo sapien
ttgaagtccacatccggtgccacac

SEQ ID NO: 4130013 - DNA, 25 bp, Homo sapien
actctagggtgaccccctcgccagc

SEQ ID NO: 4130014 - DNA, 25 bp, Homo sapien
ctgagcaaactctagggtgaccccc

SEQ ID NO: 4130015 - DNA, 25 bp, Homo sapien
tgaccccctcgccagctgcctggca

SEQ ID NO: 4130016 - DNA, 25 bp, Homo sapien
gagcaaactctagggtgaccccctc

SEQ ID NO: 4130017 - DNA, 25 bp, Homo sapien
tatctccccgtttcaccatacaagg

SEQ ID NO: 4130018 - DNA, 25 bp, Homo sapien
cccacagtggcctctacaatgaatg

SEQ ID NO: 4130019 - DNA, 25 bp, Homo sapien
aatgcttgttggaataaaatgtgtc

SEQ ID NO: 4130020 - DNA, 25 bp, Homo sapien
tccactgttgcacacttgggtctcc

SEQ ID NO: 4130021 - DNA, 25 bp, Homo sapien
gacatctgggtagccagtccagcca

SEQ ID NO: 4130022 - DNA, 25 bp, Homo sapien
ttcccatagagtgggctgtgcctag

SEQ ID NO: 4130023 - DNA, 25 bp, Homo sapien
caggaagaatggcaggatcaggaca

SEQ ID NO: 4130024 - DNA, 25 bp, Homo sapien
cctcaaatgtcctaggtctgggacc

SEQ ID NO: 4130025 - DNA, 25 bp, Homo sapien
aagggtttgagtcatcagtaggtgt

SEQ ID NO: 4130026 - DNA, 25 bp, Homo sapien
ggtttgagtcatcagtaggtgtcac

SEQ ID NO: 4130027 - DNA, 25 bp, Homo sapien
gggtttgagtcatcagtaggtgtca

SEQ ID NO: 4130028 - DNA, 25 bp, Homo sapien
taggtgtcacttgggggtgcatcca

SEQ ID NO: 4130029 - DNA, 25 bp, Homo sapien
tgcagacccggctaaaagctgccca

SEQ ID NO: 4130030 - DNA, 25 bp, Homo sapien
tatccttgcagacccggctaaaagc

SEQ ID NO: 4130031 - DNA, 25 bp, Homo sapien
atatccttgcagacccggctaaaag

SEQ ID NO: 4130032 - DNA, 25 bp, Homo sapien
ccttgcagacccggctaaaagctgc

SEQ ID NO: 4130033 - DNA, 25 bp, Homo sapien
agaaagcgaagaattgaaggggcaa

SEQ ID NO: 4130034 - DNA, 25 bp, Homo sapien
gggagggagaaagcgaagaattgaa

SEQ ID NO: 4130035 - DNA, 25 bp, Homo sapien
agggagaaagcgaagaattgaaggg

SEQ ID NO: 4130036 - DNA, 25 bp, Homo sapien
aaagcgaagaattgaaggggcaaag

SEQ ID NO: 4130037 - DNA, 25 bp, Homo sapien
gcggatatagcggttgtcagtggca

SEQ ID NO: 4130038 - DNA, 25 bp, Homo sapien
ggatatagcggttgtcagtggcagc

SEQ ID NO: 4130039 - DNA, 25 bp, Homo sapien
cgcgcggatatagcggttgtcagtg

SEQ ID NO: 4130040 - DNA, 25 bp, Homo sapien
atatagcggttgtcagtggcagcag

SEQ ID NO: 4130041 - DNA, 25 bp, Homo sapien
acaggtgtgcggttcatgggtgaga

SEQ ID NO: 4130042 - DNA, 25 bp, Homo sapien
tatatatgtccaccccacggaggaa

SEQ ID NO: 4130043 - DNA, 25 bp, Homo sapien
catgcagccgttcatcgtggtcgtg

SEQ ID NO: 4130044 - DNA, 25 bp, Homo sapien
cacggaggaacacagcctcatgcag

SEQ ID NO: 4130045 - DNA, 25 bp, Homo sapien
tggcactggttgggatggaagcccc

SEQ ID NO: 4130046 - DNA, 25 bp, Homo sapien
ccttggcactggttgggatggaagc

SEQ ID NO: 4130047 - DNA, 25 bp, Homo sapien
cttggcactggttgggatggaagcc

SEQ ID NO: 4130048 - DNA, 25 bp, Homo sapien
tccttggcactggttgggatggaag

SEQ ID NO: 4130049 - DNA, 25 bp, Homo sapien
gtccttgtgttagtacttcagagac

SEQ ID NO: 4130050 - DNA, 25 bp, Homo sapien
tgtccttgtgttagtacttcagaga

SEQ ID NO: 4130051 - DNA, 25 bp, Homo sapien
aggccaaggccaaggatcaaaccaa

SEQ ID NO: 4130052 - DNA, 25 bp, Homo sapien
caggctgtgccggccaaaggccaag

SEQ ID NO: 4130053 - DNA, 25 bp, Homo sapien
gggctcaggctgtgccggccaaagg

SEQ ID NO: 4130054 - DNA, 25 bp, Homo sapien
ctgtgccggccaaaggccaaggcca

SEQ ID NO: 4130055 - DNA, 25 bp, Homo sapien
ccgatcacaaagatacgaatctctt

SEQ ID NO: 4130056 - DNA, 25 bp, Homo sapien
cacaaagatacgaatctcttaaggg

SEQ ID NO: 4130057 - DNA, 25 bp, Homo sapien
aagaaaccccgatcacaaagatacg

SEQ ID NO: 4130058 - DNA, 25 bp, Homo sapien
gaaaccccgatcacaaagatacgaa

SEQ ID NO: 4130059 - DNA, 25 bp, Homo sapien
gaacaggacatgagaccagacctga

SEQ ID NO: 4130060 - DNA, 25 bp, Homo sapien
gggcataacacccactctgctctga

SEQ ID NO: 4130061 - DNA, 25 bp, Homo sapien
aacacggcttgcattctggtgccct

SEQ ID NO: 4130062 - DNA, 25 bp, Homo sapien
tttgcagttgcatccagttatcaga

SEQ ID NO: 4130063 - DNA, 25 bp, Homo sapien
aatgctgcagaacattgaataagct

SEQ ID NO: 4130064 - DNA, 25 bp, Homo sapien
aagagcattctaaaagcagtgtagc

SEQ ID NO: 4130065 - DNA, 25 bp, Homo sapien
aaatttatttccttgcttcatgaga

SEQ ID NO: 4130066 - DNA, 25 bp, Homo sapien
agcagtgtagccagcatacaatcac

SEQ ID NO: 4130067 - DNA, 25 bp, Homo sapien
gccctgcgggacaggatcagtctgt

SEQ ID NO: 4130068 - DNA, 25 bp, Homo sapien
tgcttgaatgctggccgcagatggc

SEQ ID NO: 4130069 - DNA, 25 bp, Homo sapien
ctgctatcgcagctgcttgaatgct

SEQ ID NO: 4130070 - DNA, 25 bp, Homo sapien
cgcagatggcgtgggcgacggccca

SEQ ID NO: 4130071 - DNA, 25 bp, Homo sapien
tgactcgtacatgacctcagcagga

SEQ ID NO: 4130072 - DNA, 25 bp, Homo sapien
catgcagcctgggtcatcgagacac

SEQ ID NO: 4130073 - DNA, 25 bp, Homo sapien
caggagctggttgtaggctgcatcc

SEQ ID NO: 4130074 - DNA, 25 bp, Homo sapien
tgctttgagccgtgactcgtacatg

SEQ ID NO: 4130075 - DNA, 25 bp, Homo sapien
tccagctggggttctggtgcctcct

SEQ ID NO: 4130076 - DNA, 25 bp, Homo sapien
ccagctggggttctggtgcctcctc

SEQ ID NO: 4130077 - DNA, 25 bp, Homo sapien
cctccagctggggttctggtgcctc

SEQ ID NO: 4130078 - DNA, 25 bp, Homo sapien
gtcctccagctggggttctggtgcc

SEQ ID NO: 4130079 - DNA, 25 bp, Homo sapien
agaagccagagggcctgatatggga

SEQ ID NO: 4130080 - DNA, 25 bp, Homo sapien
gccagagggcctgatatgggagcca

SEQ ID NO: 4130081 - DNA, 25 bp, Homo sapien
agggcctgatatgggagccagcttt

SEQ ID NO: 4130082 - DNA, 25 bp, Homo sapien
cagagggcctgatatgggagccagc

SEQ ID NO: 4130083 - DNA, 25 bp, Homo sapien
cctctgtgtcagaatggatgtgtct

SEQ ID NO: 4130084 - DNA, 25 bp, Homo sapien
tctgtgtcagaatggatgtgtctgg

SEQ ID NO: 4130085 - DNA, 25 bp, Homo sapien
ctccctctgtgtcagaatggatgtg

SEQ ID NO: 4130086 - DNA, 25 bp, Homo sapien
cagaatggatgtgtctgggacacca

SEQ ID NO: 4130087 - DNA, 25 bp, Homo sapien
ccgagggaagctcggtgatgtcaca

SEQ ID NO: 4130088 - DNA, 25 bp, Homo sapien
acatgcccgagggaagctcggtgat

SEQ ID NO: 4130089 - DNA, 25 bp, Homo sapien
gggaacatgcccgagggaagctcgg

SEQ ID NO: 4130090 - DNA, 25 bp, Homo sapien
cagggagggaacatgcccgagggaa

SEQ ID NO: 4130091 - DNA, 25 bp, Homo sapien
cccatgtggagcgtggaagaatcct

SEQ ID NO: 4130092 - DNA, 25 bp, Homo sapien
ctaacactcccatgtggagcgtgga

SEQ ID NO: 4130093 - DNA, 25 bp, Homo sapien
tggaagaatcctgccgctcagccgg

SEQ ID NO: 4130094 - DNA, 25 bp, Homo sapien
ttgctgcatcctcgacaagggggcg

SEQ ID NO: 4130095 - DNA, 25 bp, Homo sapien
aaaatgagtcgtgtccgataagggc

SEQ ID NO: 4130096 - DNA, 25 bp, Homo sapien
tatatatcccgaaccaacaacggga

SEQ ID NO: 4130097 - DNA, 25 bp, Homo sapien
gtgctgtcgacaggcatcctagtgc

SEQ ID NO: 4130098 - DNA, 25 bp, Homo sapien
ttagactaatcaaggtgccccgcag

SEQ ID NO: 4130099 - DNA, 25 bp, Homo sapien
ccaaatgcgttttgcacatgtgtga

SEQ ID NO: 4130100 - DNA, 25 bp, Homo sapien
acccttggcccagtctgacttagct

SEQ ID NO: 4130101 - DNA, 25 bp, Homo sapien
ctctgcattcgcctgtgatgactgc

SEQ ID NO: 4130102 - DNA, 25 bp, Homo sapien
caggcagtagcattagccctctggg

SEQ ID NO: 4130103 - DNA, 25 bp, Homo sapien
ttttcacacattctcacagatctct

SEQ ID NO: 4130104 - DNA, 25 bp, Homo sapien
tccttgttagaggacgccctctcct

SEQ ID NO: 4130105 - DNA, 25 bp, Homo sapien
agggtgtatcccccactacaggagt

SEQ ID NO: 4130106 - DNA, 25 bp, Homo sapien
gcttttcacacattctcacagatct

SEQ ID NO: 4130107 - DNA, 25 bp, Homo sapien
aatcaagctttggaccagttcctgg

SEQ ID NO: 4130108 - DNA, 25 bp, Homo sapien
gagtgagatagtccagctcttggcc

SEQ ID NO: 4130109 - DNA, 25 bp, Homo sapien
gatgcttttgtttattacagtttca

SEQ ID NO: 4130110 - DNA, 25 bp, Homo sapien
gaagggtgagtgagatagtccagct

SEQ ID NO: 4130111 - DNA, 25 bp, Homo sapien
gtcttggtttgtgcatacagcatct

SEQ ID NO: 4130112 - DNA, 25 bp, Homo sapien
catacagcatctcctacatgcccaa

SEQ ID NO: 4130113 - DNA, 25 bp, Homo sapien
gctactgccagctatcttgggccag

SEQ ID NO: 4130114 - DNA, 25 bp, Homo sapien
actgccagctatcttgggccaggca

SEQ ID NO: 4130115 - DNA, 25 bp, Homo sapien
ctagctactgccagctatcttgggc

SEQ ID NO: 4130116 - DNA, 25 bp, Homo sapien
tactgccagctatcttgggccaggc

SEQ ID NO: 4130117 - DNA, 25 bp, Homo sapien
aactggttccgaggatgttcattac

SEQ ID NO: 4130118 - DNA, 25 bp, Homo sapien
tccagctgggggtagaaatccgtag

SEQ ID NO: 4130119 - DNA, 25 bp, Homo sapien
acccaactggttccgaggatgttca

SEQ ID NO: 4130120 - DNA, 25 bp, Homo sapien
tggttccgaggatgttcattactga

SEQ ID NO: 4130121 - DNA, 25 bp, Homo sapien
tttaatttctcaggcggaacgagtg

SEQ ID NO: 4130122 - DNA, 25 bp, Homo sapien
cttctcctttaattgcggtgggcgg

SEQ ID NO: 4130123 - DNA, 25 bp, Homo sapien
tctgcttccagtcgtcgggcaaaaa

SEQ ID NO: 4130124 - DNA, 25 bp, Homo sapien
cccgcgttgctattggtggccgttg

SEQ ID NO: 4130125 - DNA, 25 bp, Homo sapien
actgtctccaggaatcgcatggcag

SEQ ID NO: 4130126 - DNA, 25 bp, Homo sapien
actgcttggaaactggtcccaggga

SEQ ID NO: 4130127 - DNA, 25 bp, Homo sapien
gacccatgggtccattgaatcactg

SEQ ID NO: 4130128 - DNA, 25 bp, Homo sapien
ggaatcgcatggcagcgccagtcat

SEQ ID NO: 4130129 - DNA, 25 bp, Homo sapien
ccctcgtttccttgcagctgagctg

SEQ ID NO: 4130130 - DNA, 25 bp, Homo sapien
aggatgactcatcagagggggcctt

SEQ ID NO: 4130131 - DNA, 25 bp, Homo sapien
gaatgaccccctcgtttccttgcag

SEQ ID NO: 4130132 - DNA, 25 bp, Homo sapien
gtcacctgaatgaccccctcgtttc

SEQ ID NO: 4130133 - DNA, 25 bp, Homo sapien
tgtgtggcattcgaaccttccctgg

SEQ ID NO: 4130134 - DNA, 25 bp, Homo sapien
tggcattcgaaccttccctggtcac

SEQ ID NO: 4130135 - DNA, 25 bp, Homo sapien
tgtggcattcgaaccttccctggtc

SEQ ID NO: 4130136 - DNA, 25 bp, Homo sapien
ctgtgtggcattcgaaccttccctg

SEQ ID NO: 4130137 - DNA, 25 bp, Homo sapien
ttgactatgcgcctcacaggaatgc

SEQ ID NO: 4130138 - DNA, 25 bp, Homo sapien
aactcccagcacttcccactgccta

SEQ ID NO: 4130139 - DNA, 25 bp, Homo sapien
aatgttgactatgcgcctcacagga

SEQ ID NO: 4130140 - DNA, 25 bp, Homo sapien
agcacttcccactgcctacagagca

SEQ ID NO: 4130141 - DNA, 25 bp, Homo sapien
gaccccgataagcttgcaaggcatc

SEQ ID NO: 4130142 - DNA, 25 bp, Homo sapien
tgcccacagtgaccccgataagctt

SEQ ID NO: 4130143 - DNA, 25 bp, Homo sapien
agtgaccccgataagcttgcaaggc

SEQ ID NO: 4130144 - DNA, 25 bp, Homo sapien
cacagtgaccccgataagcttgcaa

SEQ ID NO: 4130145 - DNA, 25 bp, Homo sapien
tcacaccggggtccactgggactgt

SEQ ID NO: 4130146 - DNA, 25 bp, Homo sapien
tccaggttcctctttgctgagctac

SEQ ID NO: 4130147 - DNA, 25 bp, Homo sapien
taacggccatcagcccactcagcct

SEQ ID NO: 4130148 - DNA, 25 bp, Homo sapien
ctaacggccatcagcccactcagcc

SEQ ID NO: 4130149 - DNA, 25 bp, Homo sapien
agcctccaggttcctctttgctgag

SEQ ID NO: 4130150 - DNA, 25 bp, Homo sapien
ttgtcaagaccctcggaccaagctg

SEQ ID NO: 4130151 - DNA, 25 bp, Homo sapien
caagctgcccaaggggctactggtg

SEQ ID NO: 4130152 - DNA, 25 bp, Homo sapien
tccacctccttgtcaagaccctcgg

SEQ ID NO: 4130153 - DNA, 25 bp, Homo sapien
gaccaagctgcccaaggggctactg

SEQ ID NO: 4130154 - DNA, 25 bp, Homo sapien
gcaccccttctgcccggacacaagg

SEQ ID NO: 4130155 - DNA, 25 bp, Homo sapien
cagcaccccttctgcccggacacaa

SEQ ID NO: 4130156 - DNA, 25 bp, Homo sapien
agcaccccttctgcccggacacaag

SEQ ID NO: 4130157 - DNA, 25 bp, Homo sapien
ccagcaccccttctgcccggacaca

SEQ ID NO: 4130158 - DNA, 25 bp, Homo sapien
ggtggattcctccatgcttgtcatc

SEQ ID NO: 4130159 - DNA, 25 bp, Homo sapien
caagcccctgcatgtggatcaggca

SEQ ID NO: 4130160 - DNA, 25 bp, Homo sapien
gctgagccctctcctatggccggct

SEQ ID NO: 4130161 - DNA, 25 bp, Homo sapien
ggaaggatcaggctagctataaggg

SEQ ID NO: 4130162 - DNA, 25 bp, Homo sapien
ggtagggcatggtactggtgttagc

SEQ ID NO: 4130163 - DNA, 25 bp, Homo sapien
tagggcatggtactggtgttagcaa

SEQ ID NO: 4130164 - DNA, 25 bp, Homo sapien
ttggtagggcatggtactggtgtta

SEQ ID NO: 4130165 - DNA, 25 bp, Homo sapien
ggcatggtactggtgttagcaagtt

SEQ ID NO: 4130166 - DNA, 25 bp, Homo sapien
ttggtacagcgtctcatggaagagg

SEQ ID NO: 4130167 - DNA, 25 bp, Homo sapien
cttgcccagagctacgatgcgatga

SEQ ID NO: 4130168 - DNA, 25 bp, Homo sapien
aagaggatgacacccttgatgcagg

SEQ ID NO: 4130169 - DNA, 25 bp, Homo sapien
tgatgctcacaacattgcccttgga

SEQ ID NO: 4130170 - DNA, 25 bp, Homo sapien
acagcgctcagacagcccatccagc

SEQ ID NO: 4130171 - DNA, 25 bp, Homo sapien
cacttggcaaagtgggctccatcct

SEQ ID NO: 4130172 - DNA, 25 bp, Homo sapien
gtgggctccatccttcttgtatggg

SEQ ID NO: 4130173 - DNA, 25 bp, Homo sapien
gtctcaccatttgccctttccaggg

SEQ ID NO: 4130174 - DNA, 25 bp, Homo sapien
tattccccagagtgtagtgcttgtg

SEQ ID NO: 4130175 - DNA, 25 bp, Homo sapien
ctggcccagttgtgatccttctagg

SEQ ID NO: 4130176 - DNA, 25 bp, Homo sapien
tcagtgatgagtctgggtgggccct

SEQ ID NO: 4130177 - DNA, 25 bp, Homo sapien
tctaggccgcttattccccagagtg

SEQ ID NO: 4130178 - DNA, 25 bp, Homo sapien
gaggttgatggacacttccttgctc

SEQ ID NO: 4130179 - DNA, 25 bp, Homo sapien
tgaggttgatggacacttccttgct

SEQ ID NO: 4130180 - DNA, 25 bp, Homo sapien
tgcgccttgggcgctgccttcttct

SEQ ID NO: 4130181 - DNA, 25 bp, Homo sapien
ttcttgggctctgcggatatcggtg

SEQ ID NO: 4130182 - DNA, 25 bp, Homo sapien
ggcagagaggcccacttcttgggct

SEQ ID NO: 4130183 - DNA, 25 bp, Homo sapien
cgcatgcgccttgggcgctgccttc

SEQ ID NO: 4130184 - DNA, 25 bp, Homo sapien
gctcgttgcccttgtccgggagcag

SEQ ID NO: 4130185 - DNA, 25 bp, Homo sapien
gcactcaagtcgagaagtccaaacg

SEQ ID NO: 4130186 - DNA, 25 bp, Homo sapien
gaagtccaaacgaaacgctcgttgc

SEQ ID NO: 4130187 - DNA, 25 bp, Homo sapien
aggcgggcactcaagtcgagaagtc

SEQ ID NO: 4130188 - DNA, 25 bp, Homo sapien
tgacccgcggtcgaggtctcgagaa

SEQ ID NO: 4130189 - DNA, 25 bp, Homo sapien
gataaacgctgacctcaaggcggcg

SEQ ID NO: 4130190 - DNA, 25 bp, Homo sapien
tgaggcggccgtctaggcaaaagat

SEQ ID NO: 4130191 - DNA, 25 bp, Homo sapien
agaaagaaggcagtcctccggcagt

SEQ ID NO: 4130192 - DNA, 25 bp, Homo sapien
gtccagcagggtcccgagtccctga

SEQ ID NO: 4130193 - DNA, 25 bp, Homo sapien
tccgtggtcgtgtccccacagcggg

SEQ ID NO: 4130194 - DNA, 25 bp, Homo sapien
aagcaaggattcctccgtggtcgtg

SEQ ID NO: 4130195 - DNA, 25 bp, Homo sapien
ccacagcgggaagaactgggcataa

SEQ ID NO: 4130196 - DNA, 25 bp, Homo sapien
gcagggaagactcttagggatcctg

SEQ ID NO: 4130197 - DNA, 25 bp, Homo sapien
ggcagggaagactcttagggatcct

SEQ ID NO: 4130198 - DNA, 25 bp, Homo sapien
cagggaagactcttagggatcctga

SEQ ID NO: 4130199 - DNA, 25 bp, Homo sapien
ccagaggtttcttagggagatgcac

SEQ ID NO: 4130200 - DNA, 25 bp, Homo sapien
caaaaatgcctaaggacagcactga

SEQ ID NO: 4130201 - DNA, 25 bp, Homo sapien
attctccagcgctacacaaaggcac

SEQ ID NO: 4130202 - DNA, 25 bp, Homo sapien
ggattcaggtgtcaaccgcagttta

SEQ ID NO: 4130203 - DNA, 25 bp, Homo sapien
atgggcagcggcgaacaacactctc

SEQ ID NO: 4130204 - DNA, 25 bp, Homo sapien
tactgctgcagtggacaatgcccga

SEQ ID NO: 4130205 - DNA, 25 bp, Homo sapien
gatctgttggtagtgtactgctgca

SEQ ID NO: 4130206 - DNA, 25 bp, Homo sapien
catagaacaacagagatttgcctgc

SEQ ID NO: 4130207 - DNA, 25 bp, Homo sapien
aaacctgtaatgtgcaacactggcc

SEQ ID NO: 4130208 - DNA, 25 bp, Homo sapien
gacactaacgtgcaatccaaaaacc

SEQ ID NO: 4130209 - DNA, 25 bp, Homo sapien
tatttatgtgaacgaggcactgagg

SEQ ID NO: 4130210 - DNA, 25 bp, Homo sapien
tagtctaccaatgagcacaaacacc

SEQ ID NO: 4130211 - DNA, 25 bp, Homo sapien
agttgcctcttaaacccacagtatt

SEQ ID NO: 4130212 - DNA, 25 bp, Homo sapien
cagtatttctcgtcataaatccaaa

SEQ ID NO: 4130213 - DNA, 25 bp, Homo sapien
taactggcacattccagttgcctct

SEQ ID NO: 4130214 - DNA, 25 bp, Homo sapien
aggaaacaatgcgtctatgaagagt

SEQ ID NO: 4130215 - DNA, 25 bp, Homo sapien
ttcctcacggcattcatttcctgca

SEQ ID NO: 4130216 - DNA, 25 bp, Homo sapien
cctgaagctcaagactggctttgca

SEQ ID NO: 4130217 - DNA, 25 bp, Homo sapien
tgcctctctgattcatctgtgctgc

SEQ ID NO: 4130218 - DNA, 25 bp, Homo sapien
tcaggagtctgttggaccttggcct

SEQ ID NO: 4130219 - DNA, 25 bp, Homo sapien
gtcccttgactgtctatcttgaaga

SEQ ID NO: 4130220 - DNA, 25 bp, Homo sapien
gaaagtcccactttcgcaatacagt

SEQ ID NO: 4130221 - DNA, 25 bp, Homo sapien
tgactgtctatcttgaagaccttcc

SEQ ID NO: 4130222 - DNA, 25 bp, Homo sapien
ctttcgcaatacagtcccttgactg

SEQ ID NO: 4130223 - DNA, 25 bp, Homo sapien
ttggcaagttatcttgaagaagatg

SEQ ID NO: 4130224 - DNA, 25 bp, Homo sapien
ggtctttgcttttgcatgatgtcct

SEQ ID NO: 4130225 - DNA, 25 bp, Homo sapien
tgggatcccctccatcggttttcac

SEQ ID NO: 4130226 - DNA, 25 bp, Homo sapien
tccatcggttttcacactaaccaca

SEQ ID NO: 4130227 - DNA, 25 bp, Homo sapien
gagggagtctgaatagtcatctgcc

SEQ ID NO: 4130228 - DNA, 25 bp, Homo sapien
aagaaacgatcatactgaaaagtgg

SEQ ID NO: 4130229 - DNA, 25 bp, Homo sapien
tgctcgccggttcacagttttaaaa

SEQ ID NO: 4130230 - DNA, 25 bp, Homo sapien
aaaaactcgataggtgtggtcattc

SEQ ID NO: 4130231 - DNA, 25 bp, Homo sapien
acacacccgtgggtggcgactcatt

SEQ ID NO: 4130232 - DNA, 25 bp, Homo sapien
gggtggcgactcattcctaggtagt

SEQ ID NO: 4130233 - DNA, 25 bp, Homo sapien
actcattcctaggtagtcattactg

SEQ ID NO: 4130234 - DNA, 25 bp, Homo sapien
cccgtgggtggcgactcattcctag

SEQ ID NO: 4130235 - DNA, 25 bp, Homo sapien
acaagagtgcggcatctttcccatg

SEQ ID NO: 4130236 - DNA, 25 bp, Homo sapien
cccagcaccatgttgtttcaaagtg

SEQ ID NO: 4130237 - DNA, 25 bp, Homo sapien
gtcattggccacaaagcacgaggaa

SEQ ID NO: 4130238 - DNA, 25 bp, Homo sapien
gctcccgctctaagtccacatggaa

SEQ ID NO: 4130239 - DNA, 25 bp, Homo sapien
tatttattgccatgtgcatcgaaga

SEQ ID NO: 4130240 - DNA, 25 bp, Homo sapien
gctatttattgccatgtgcatcgaa

SEQ ID NO: 4130241 - DNA, 25 bp, Homo sapien
tgctatttattgccatgtgcatcga

SEQ ID NO: 4130242 - DNA, 25 bp, Homo sapien
ctatttattgccatgtgcatcgaag

SEQ ID NO: 4130243 - DNA, 25 bp, Homo sapien
gaagatgtactttggcactcggctg

SEQ ID NO: 4130244 - DNA, 25 bp, Homo sapien
ctgaggtggctgacatcattgtggc

SEQ ID NO: 4130245 - DNA, 25 bp, Homo sapien
cggctgtttcgaatcccttggatca

SEQ ID NO: 4130246 - DNA, 25 bp, Homo sapien
gggtcagatctttgcagcagttctc

SEQ ID NO: 4130247 - DNA, 25 bp, Homo sapien
ttgctccaaactcatgggccacatc

SEQ ID NO: 4130248 - DNA, 25 bp, Homo sapien
catccacgaaggtgattgctccaaa

SEQ ID NO: 4130249 - DNA, 25 bp, Homo sapien
cctccgcctcgagccccataaagcc

SEQ ID NO: 4130250 - DNA, 25 bp, Homo sapien
agccccactgcgtggacctcatcca

SEQ ID NO: 4130251 - DNA, 25 bp, Homo sapien
cacacaactagtgaggtggcagggc

SEQ ID NO: 4130252 - DNA, 25 bp, Homo sapien
taattaagaacagcctgaggcacag

SEQ ID NO: 4130253 - DNA, 25 bp, Homo sapien
tggcaggcacggagttcagcacttc

SEQ ID NO: 4130254 - DNA, 25 bp, Homo sapien
taggttctcataccccttgacagtg

SEQ ID NO: 4130255 - DNA, 25 bp, Homo sapien
aggatccgcacagactccagggctc

SEQ ID NO: 4130256 - DNA, 25 bp, Homo sapien
agccagcagcataggaccgtacggt

SEQ ID NO: 4130257 - DNA, 25 bp, Homo sapien
cagagaactcgtgctggcgatgtac

SEQ ID NO: 4130258 - DNA, 25 bp, Homo sapien
tctcatgagtttgacgttgcgctgg

SEQ ID NO: 4130259 - DNA, 25 bp, Homo sapien
gctggggcagtggacaacagggagg

SEQ ID NO: 4130260 - DNA, 25 bp, Homo sapien
ggggcagtggacaacagggaggccg

SEQ ID NO: 4130261 - DNA, 25 bp, Homo sapien
cgcacagggatgatgtggctggggc

SEQ ID NO: 4130262 - DNA, 25 bp, Homo sapien
gcagtggacaacagggaggccggca

SEQ ID NO: 4130263 - DNA, 25 bp, Homo sapien
gattgcttgcacgtagatgttatgt

SEQ ID NO: 4130264 - DNA, 25 bp, Homo sapien
gatgttatgtctgctcattagttca

SEQ ID NO: 4130265 - DNA, 25 bp, Homo sapien
caccgtagggtaattgattgcttgc

SEQ ID NO: 4130266 - DNA, 25 bp, Homo sapien
gggcaatccgtaggagctcttctcc

SEQ ID NO: 4130267 - DNA, 25 bp, Homo sapien
ctgcaaagacagctttatgcaactc

SEQ ID NO: 4130268 - DNA, 25 bp, Homo sapien
gctttatgcaactcctcagtgaggc

SEQ ID NO: 4130269 - DNA, 25 bp, Homo sapien
aaagacagctttatgcaactcctca

SEQ ID NO: 4130270 - DNA, 25 bp, Homo sapien
gacagctttatgcaactcctcagtg

SEQ ID NO: 4130271 - DNA, 25 bp, Homo sapien
gggttttgaaccatttgagggcatg

SEQ ID NO: 4130272 - DNA, 25 bp, Homo sapien
tagggttttgaaccatttgagggca

SEQ ID NO: 4130273 - DNA, 25 bp, Homo sapien
tgaaccatttgagggcatgcttagt

SEQ ID NO: 4130274 - DNA, 25 bp, Homo sapien
gttttgaaccatttgagggcatgct

SEQ ID NO: 4130275 - DNA, 25 bp, Homo sapien
cttcagccacgtagacaagggggca

SEQ ID NO: 4130276 - DNA, 25 bp, Homo sapien
tggaaacactgagcggattcccagg

SEQ ID NO: 4130277 - DNA, 25 bp, Homo sapien
gtcattactgtgcatccttcagcca

SEQ ID NO: 4130278 - DNA, 25 bp, Homo sapien
caccctcttgatgtgaatcagacaa

SEQ ID NO: 4130279 - DNA, 25 bp, Homo sapien
tcacaggcctgtagggaagaagctg

SEQ ID NO: 4130280 - DNA, 25 bp, Homo sapien
tgccacgtgacagtttaaacccagc

SEQ ID NO: 4130281 - DNA, 25 bp, Homo sapien
tggtaagtgagctatatctctactg

SEQ ID NO: 4130282 - DNA, 25 bp, Homo sapien
cccagagttgggcttgatttcacag

SEQ ID NO: 4130283 - DNA, 25 bp, Homo sapien
gatgagccttgcagacatgatgctg

SEQ ID NO: 4130284 - DNA, 25 bp, Homo sapien
ccacttagacacaaggtccagaaaa

SEQ ID NO: 4130285 - DNA, 25 bp, Homo sapien
gacacaaaggagcacaggcggtatg

SEQ ID NO: 4130286 - DNA, 25 bp, Homo sapien
gagacagaaagagccgtggttgaca

SEQ ID NO: 4130287 - DNA, 25 bp, Homo sapien
taccaacttgctcaagcctgagaaa

SEQ ID NO: 4130288 - DNA, 25 bp, Homo sapien
cacttgcttccatgtgactagcaga

SEQ ID NO: 4130289 - DNA, 25 bp, Homo sapien
ctcctgcagaagttgcactcagctg

SEQ ID NO: 4130290 - DNA, 25 bp, Homo sapien
gagcagataccaacttgctcaagcc

SEQ ID NO: 4130291 - DNA, 25 bp, Homo sapien
tctggatatgataatggcctggggt

SEQ ID NO: 4130292 - DNA, 25 bp, Homo sapien
catataaagacaactctgaagacca

SEQ ID NO: 4130293 - DNA, 25 bp, Homo sapien
aagacaactctgaagaccatctgga

SEQ ID NO: 4130294 - DNA, 25 bp, Homo sapien
ttaagtgaaataattgaggtcatgc

SEQ ID NO: 4130295 - DNA, 25 bp, Homo sapien
ttaagcaagaatttatttccaggac

SEQ ID NO: 4130296 - DNA, 25 bp, Homo sapien
gaaaacacagctgccgtttctagag

SEQ ID NO: 4130297 - DNA, 25 bp, Homo sapien
ggagtgtgactcagccgagctctga

SEQ ID NO: 4130298 - DNA, 25 bp, Homo sapien
ggtgccagcccaactctgtacagag

SEQ ID NO: 4130299 - DNA, 25 bp, Homo sapien
tttctagagctacgagaagggaggc

SEQ ID NO: 4130300 - DNA, 25 bp, Homo sapien
gggattacaagtgcgcaccatcacg

SEQ ID NO: 4130301 - DNA, 25 bp, Homo sapien
ggattacaagtgcgcaccatcacgc

SEQ ID NO: 4130302 - DNA, 25 bp, Homo sapien
attacaagtgcgcaccatcacgcct

SEQ ID NO: 4130303 - DNA, 25 bp, Homo sapien
ctgggattacaagtgcgcaccatca

SEQ ID NO: 4130304 - DNA, 25 bp, Homo sapien
tggagggttgcttttgccctactcc

SEQ ID NO: 4130305 - DNA, 25 bp, Homo sapien
gcagcccttggagggttgcttttgc

SEQ ID NO: 4130306 - DNA, 25 bp, Homo sapien
gctgtagatccctgttatctgctca

SEQ ID NO: 4130307 - DNA, 25 bp, Homo sapien
gggaagtctatgctgccgtcctctt

SEQ ID NO: 4130308 - DNA, 25 bp, Homo sapien
caggagaatgcccaggggctacaca

SEQ ID NO: 4130309 - DNA, 25 bp, Homo sapien
tggccctgttgagagggtgacatgg

SEQ ID NO: 4130310 - DNA, 25 bp, Homo sapien
tcaactgcaagcaggccagtgggcc

SEQ ID NO: 4130311 - DNA, 25 bp, Homo sapien
cagagacataatggaggcaaaggag

SEQ ID NO: 4130312 - DNA, 25 bp, Homo sapien
gcttggggcgcacagatcgggcgcg

SEQ ID NO: 4130313 - DNA, 25 bp, Homo sapien
cacgcacgctcggtcacacgcaggc

SEQ ID NO: 4130314 - DNA, 25 bp, Homo sapien
ctgccacagaggaacgcgctggcgt

SEQ ID NO: 4130315 - DNA, 25 bp, Homo sapien
accgtgatcagggcgcacagacaca

SEQ ID NO: 4130316 - DNA, 25 bp, Homo sapien
tgttctagaaggcaagctgcagggc

SEQ ID NO: 4130317 - DNA, 25 bp, Homo sapien
tgtgcccagcaggtagtaagtatac

SEQ ID NO: 4130318 - DNA, 25 bp, Homo sapien
cagtggttagcagatgacataggcc

SEQ ID NO: 4130319 - DNA, 25 bp, Homo sapien
gacatttttacagggcacatgacct

SEQ ID NO: 4130320 - DNA, 25 bp, Homo sapien
tgcccgcggagcgcggggcgctagg

SEQ ID NO: 4130321 - DNA, 25 bp, Homo sapien
ggagcgcggggcgctagggctgggc

SEQ ID NO: 4130322 - DNA, 25 bp, Homo sapien
gccggcggacatggcgcggcggcag

SEQ ID NO: 4130323 - DNA, 25 bp, Homo sapien
cagccggcggacatggcgcggcggc

SEQ ID NO: 4130324 - DNA, 25 bp, Homo sapien
tcggcgtagcctgcattccagggta

SEQ ID NO: 4130325 - DNA, 25 bp, Homo sapien
ttccagggtagcgtgcgtcctcgtg

SEQ ID NO: 4130326 - DNA, 25 bp, Homo sapien
tagcctgcattccagggtagcgtgc

SEQ ID NO: 4130327 - DNA, 25 bp, Homo sapien
ggccgggagtctgggcggcgcgagg

SEQ ID NO: 4130328 - DNA, 25 bp, Homo sapien
ctaggcgggcgcaggacccgaagcg

SEQ ID NO: 4130329 - DNA, 25 bp, Homo sapien
aggcgggcgcaggacccgaagcggg

SEQ ID NO: 4130330 - DNA, 25 bp, Homo sapien
gcaggacccgaagcgggttcaggcc

SEQ ID NO: 4130331 - DNA, 25 bp, Homo sapien
ggcgcaggacccgaagcgggttcag

SEQ ID NO: 4130332 - DNA, 25 bp, Homo sapien
cgggatgaccgggaagttgtcagga

SEQ ID NO: 4130333 - DNA, 25 bp, Homo sapien
tctctgagggggaggtcggaatccc

SEQ ID NO: 4130334 - DNA, 25 bp, Homo sapien
caggattcggaggtgagggcaagaa

SEQ ID NO: 4130335 - DNA, 25 bp, Homo sapien
caaggaaaacgctgggtcgggatga

SEQ ID NO: 4130336 - DNA, 25 bp, Homo sapien
tctctgggcctcatcttggaagccc

SEQ ID NO: 4130337 - DNA, 25 bp, Homo sapien
gagtctctgggcctcatcttggaag

SEQ ID NO: 4130338 - DNA, 25 bp, Homo sapien
tctgggcctcatcttggaagcccct

SEQ ID NO: 4130339 - DNA, 25 bp, Homo sapien
tgggcctcatcttggaagcccctgg

SEQ ID NO: 4130340 - DNA, 25 bp, Homo sapien
tccaaagccccgaatgctggaactc

SEQ ID NO: 4130341 - DNA, 25 bp, Homo sapien
agcgcaggtcatacccagggtgaga

SEQ ID NO: 4130342 - DNA, 25 bp, Homo sapien
aaatctccaaagccccgaatgctgg

SEQ ID NO: 4130343 - DNA, 25 bp, Homo sapien
cctgtcccatacagcgcaggtcata

SEQ ID NO: 4130344 - DNA, 25 bp, Homo sapien
gaaatggtaagcgaccctccaggga

SEQ ID NO: 4130345 - DNA, 25 bp, Homo sapien
ctgaggccgggaaatggtaagcgac

SEQ ID NO: 4130346 - DNA, 25 bp, Homo sapien
gggacacacctatgtccccatgggc

SEQ ID NO: 4130347 - DNA, 25 bp, Homo sapien
cagggacacacctatgtccccatgg

SEQ ID NO: 4130348 - DNA, 25 bp, Homo sapien
cccaaactcacatctccggatgcac

SEQ ID NO: 4130349 - DNA, 25 bp, Homo sapien
cacaggcggcttgatcctcattgaa

SEQ ID NO: 4130350 - DNA, 25 bp, Homo sapien
ggcggcttgatcctcattgaattca

SEQ ID NO: 4130351 - DNA, 25 bp, Homo sapien
ggcttgatcctcattgaattcagat

SEQ ID NO: 4130352 - DNA, 25 bp, Homo sapien
cagtgcccagtaatggcctgtcagg

SEQ ID NO: 4130353 - DNA, 25 bp, Homo sapien
gcaagcaggagtgcagggtgttggc

SEQ ID NO: 4130354 - DNA, 25 bp, Homo sapien
aggaccgccgtgcccatcgaacagt

SEQ ID NO: 4130355 - DNA, 25 bp, Homo sapien
agctgccggcgcaagcaggagtgca

SEQ ID NO: 4130356 - DNA, 25 bp, Homo sapien
tccaatgccccgatcaccaagtctt

SEQ ID NO: 4130357 - DNA, 25 bp, Homo sapien
agatgcagcggccattgaggtgcat

SEQ ID NO: 4130358 - DNA, 25 bp, Homo sapien
tcctccacaaactgagggtcactgg

SEQ ID NO: 4130359 - DNA, 25 bp, Homo sapien
acattcctgaaaggcactctccaat

SEQ ID NO: 4130360 - DNA, 25 bp, Homo sapien
ccagctcccgcccgatcacctcatc

SEQ ID NO: 4130361 - DNA, 25 bp, Homo sapien
aggcctccagctcccgcccgatcac

SEQ ID NO: 4130362 - DNA, 25 bp, Homo sapien
ctccagctcccgcccgatcacctca

SEQ ID NO: 4130363 - DNA, 25 bp, Homo sapien
gcctccagctcccgcccgatcacct

SEQ ID NO: 4130364 - DNA, 25 bp, Homo sapien
agcattggccatgtacagctttccc

SEQ ID NO: 4130365 - DNA, 25 bp, Homo sapien
cagcattggccatgtacagctttcc

SEQ ID NO: 4130366 - DNA, 25 bp, Homo sapien
tcagtctctggggtgaactcgaagc

SEQ ID NO: 4130367 - DNA, 25 bp, Homo sapien
tgctggatccgctgccgctcagtct

SEQ ID NO: 4130368 - DNA, 25 bp, Homo sapien
ggtgaactcgaagctcagtggccgt

SEQ ID NO: 4130369 - DNA, 25 bp, Homo sapien
agtggccgtatctcatctctccgca

SEQ ID NO: 4130370 - DNA, 25 bp, Homo sapien
cctccatgctgccaagggcacctac

SEQ ID NO: 4130371 - DNA, 25 bp, Homo sapien
ggacccaggagttggagcttcacag

SEQ ID NO: 4130372 - DNA, 25 bp, Homo sapien
ccaggagttggagcttcacagcctc

SEQ ID NO: 4130373 - DNA, 25 bp, Homo sapien
ggagttggagcttcacagcctccat

SEQ ID NO: 4130374 - DNA, 25 bp, Homo sapien
gaggctgcgctcaggtcatactcct

SEQ ID NO: 4130375 - DNA, 25 bp, Homo sapien
tcaggtcatactccttcttatggcc

SEQ ID NO: 4130376 - DNA, 25 bp, Homo sapien
gggaggctgcgctcaggtcatactc

SEQ ID NO: 4130377 - DNA, 25 bp, Homo sapien
tgcgctcaggtcatactccttctta

SEQ ID NO: 4130378 - DNA, 25 bp, Homo sapien
cgagggaactccagtcgggtgaact

SEQ ID NO: 4130379 - DNA, 25 bp, Homo sapien
tgtggtgatccctgaacaaaacctt

SEQ ID NO: 4130380 - DNA, 25 bp, Homo sapien
ccagtcgggtgaactcaccagccag

SEQ ID NO: 4130381 - DNA, 25 bp, Homo sapien
cagccactcatgtggtgatccctga

SEQ ID NO: 4130382 - DNA, 25 bp, Homo sapien
caggccatacggctgggcctggatc

SEQ ID NO: 4130383 - DNA, 25 bp, Homo sapien
acagtgccaccctgccaaggtggag

SEQ ID NO: 4130384 - DNA, 25 bp, Homo sapien
cctcacagtgccaccctgccaaggt

SEQ ID NO: 4130385 - DNA, 25 bp, Homo sapien
agccagcatcaacccaagccctgtg

SEQ ID NO: 4130386 - DNA, 25 bp, Homo sapien
cgatttctccacacgtttgtagctc

SEQ ID NO: 4130387 - DNA, 25 bp, Homo sapien
ggtacttgagatccgatttctccac

SEQ ID NO: 4130388 - DNA, 25 bp, Homo sapien
ttgagatccgatttctccacacgtt

SEQ ID NO: 4130389 - DNA, 25 bp, Homo sapien
cagtgggtacttgagatccgatttc

SEQ ID NO: 4130390 - DNA, 25 bp, Homo sapien
gaaagtgaggtgtgaggcgatggca

SEQ ID NO: 4130391 - DNA, 25 bp, Homo sapien
aggtgtgaggcgatggcaaacagct

SEQ ID NO: 4130392 - DNA, 25 bp, Homo sapien
ctccagcaaatgcacaagtaccagg

SEQ ID NO: 4130393 - DNA, 25 bp, Homo sapien
ccagcaaatgcacaagtaccaggcc

SEQ ID NO: 4130394 - DNA, 25 bp, Homo sapien
gacagccagtgttcctagtaaccga

SEQ ID NO: 4130395 - DNA, 25 bp, Homo sapien
cagccagtgttcctagtaaccgagc

SEQ ID NO: 4130396 - DNA, 25 bp, Homo sapien
acagccagtgttcctagtaaccgag

SEQ ID NO: 4130397 - DNA, 25 bp, Homo sapien
ttgccatgacaaccacatcatcctc

SEQ ID NO: 4130398 - DNA, 25 bp, Homo sapien
tggacagtacatcccagagtccatc

SEQ ID NO: 4130399 - DNA, 25 bp, Homo sapien
ccatgccacctgctcgttggacagt

SEQ ID NO: 4130400 - DNA, 25 bp, Homo sapien
tgctcgttggacagtacatcccaga

SEQ ID NO: 4130401 - DNA, 25 bp, Homo sapien
ctcttggttcccagggaggaagctc

SEQ ID NO: 4130402 - DNA, 25 bp, Homo sapien
tcctcttggttcccagggaggaagc

SEQ ID NO: 4130403 - DNA, 25 bp, Homo sapien
tgtgggtcctcttggttcccaggga

SEQ ID NO: 4130404 - DNA, 25 bp, Homo sapien
ctgtgtgggtcctcttggttcccag

SEQ ID NO: 4130405 - DNA, 25 bp, Homo sapien
tgggcttgctgctggcaccaaccca

SEQ ID NO: 4130406 - DNA, 25 bp, Homo sapien
gggcttgctgctggcaccaacccag

SEQ ID NO: 4130407 - DNA, 25 bp, Homo sapien
gcttgctgctggcaccaacccaggc

SEQ ID NO: 4130408 - DNA, 25 bp, Homo sapien
ggcttgctgctggcaccaacccagg

SEQ ID NO: 4130409 - DNA, 25 bp, Homo sapien
ccaagcaagcagcaagtctgggagg

SEQ ID NO: 4130410 - DNA, 25 bp, Homo sapien
ggagaactcactgcacaaggctgga

SEQ ID NO: 4130411 - DNA, 25 bp, Homo sapien
gacccaagcaatgcagtccgactgt

SEQ ID NO: 4130412 - DNA, 25 bp, Homo sapien
caaggccagaccttaggagaactca

SEQ ID NO: 4130413 - DNA, 25 bp, Homo sapien
actgtgcaagggaatcacgaacaca

SEQ ID NO: 4130414 - DNA, 25 bp, Homo sapien
cgaacacagagacgtcatcgtagga

SEQ ID NO: 4130415 - DNA, 25 bp, Homo sapien
cagcatctgggccagctttgagaac

SEQ ID NO: 4130416 - DNA, 25 bp, Homo sapien
gagacgtcatcgtaggacacctgcc

SEQ ID NO: 4130417 - DNA, 25 bp, Homo sapien
gcaaccagttaagaggcaggctact

SEQ ID NO: 4130418 - DNA, 25 bp, Homo sapien
ttatcaccgcaaaaggcaggacctg

SEQ ID NO: 4130419 - DNA, 25 bp, Homo sapien
cttggtcacactggagggatgccca

SEQ ID NO: 4130420 - DNA, 25 bp, Homo sapien
ggatctaaacatgggctagctaccc

SEQ ID NO: 4130421 - DNA, 25 bp, Homo sapien
tgcgacctgttggatattcttcttg

SEQ ID NO: 4130422 - DNA, 25 bp, Homo sapien
acctgttggatattcttcttggctg

SEQ ID NO: 4130423 - DNA, 25 bp, Homo sapien
cgacctgttggatattcttcttggc

SEQ ID NO: 4130424 - DNA, 25 bp, Homo sapien
ctctgcgacctgttggatattcttc

SEQ ID NO: 4130425 - DNA, 25 bp, Homo sapien
aagaatcaagtttgccacccaaatg

SEQ ID NO: 4130426 - DNA, 25 bp, Homo sapien
tcccgttgtaattataattactgct

SEQ ID NO: 4130427 - DNA, 25 bp, Homo sapien
tggtgttaaatgttccccctagaca

SEQ ID NO: 4130428 - DNA, 25 bp, Homo sapien
tggtgtgtttacatagtcgttattc

SEQ ID NO: 4130429 - DNA, 25 bp, Homo sapien
caccaagcattacttagcagcagga

SEQ ID NO: 4130430 - DNA, 25 bp, Homo sapien
tctgaaagtgcaagaggcgtacacc

SEQ ID NO: 4130431 - DNA, 25 bp, Homo sapien
ggatgccacccactgtatagttctg

SEQ ID NO: 4130432 - DNA, 25 bp, Homo sapien
ttaattgttattgcccacccctggc

SEQ ID NO: 4130433 - DNA, 25 bp, Homo sapien
atgtcttgttactgggtctccctgt

SEQ ID NO: 4130434 - DNA, 25 bp, Homo sapien
tcgtgtgaggctaggtggttgggca

SEQ ID NO: 4130435 - DNA, 25 bp, Homo sapien
cctgtgtacttgtggcattatccac

SEQ ID NO: 4130436 - DNA, 25 bp, Homo sapien
attatccacaaccatcatgtttctt

SEQ ID NO: 4130437 - DNA, 25 bp, Homo sapien
aaagtagctgtgttggatggtaaac

SEQ ID NO: 4130438 - DNA, 25 bp, Homo sapien
gacttttgccagtgcgtgttccaac

SEQ ID NO: 4130439 - DNA, 25 bp, Homo sapien
aggcccgattacctgtttgcaattc

SEQ ID NO: 4130440 - DNA, 25 bp, Homo sapien
tttgcaattcaaccccaagttcatg

SEQ ID NO: 4130441 - DNA, 25 bp, Homo sapien
ctcttagggcctcatgcatctgcag

SEQ ID NO: 4130442 - DNA, 25 bp, Homo sapien
taattttcgctgcaggtgtcaactc

SEQ ID NO: 4130443 - DNA, 25 bp, Homo sapien
ggttattccacgtatggttgtggca

SEQ ID NO: 4130444 - DNA, 25 bp, Homo sapien
tgttcttttgatccagaagggttaa

SEQ ID NO: 4130445 - DNA, 25 bp, Homo sapien
tctcttgataagaccattcgactct

SEQ ID NO: 4130446 - DNA, 25 bp, Homo sapien
tgggtctcttgataagaccattcga

SEQ ID NO: 4130447 - DNA, 25 bp, Homo sapien
gactctgggatctccggtctcctaa

SEQ ID NO: 4130448 - DNA, 25 bp, Homo sapien
taagaccattcgactctgggatctc

SEQ ID NO: 4130449 - DNA, 25 bp, Homo sapien
ccattagttaatggaccatttgggt

SEQ ID NO: 4130450 - DNA, 25 bp, Homo sapien
tagagggtgtggagtagtatttcat

SEQ ID NO: 4130451 - DNA, 25 bp, Homo sapien
gtttgtccatccattagttaatgga

SEQ ID NO: 4130452 - DNA, 25 bp, Homo sapien
tcttattatagctatgctagagggt

SEQ ID NO: 4130453 - DNA, 25 bp, Homo sapien
tctcgagtagcgacgacgactccat

SEQ ID NO: 4130454 - DNA, 25 bp, Homo sapien
ggtcatctcgagtagcgacgacgac

SEQ ID NO: 4130455 - DNA, 25 bp, Homo sapien
atctcgagtagcgacgacgactcca

SEQ ID NO: 4130456 - DNA, 25 bp, Homo sapien
tcatctcgagtagcgacgacgactc

SEQ ID NO: 4130457 - DNA, 25 bp, Homo sapien
gtcttgctctaatgcccagtgcagt

SEQ ID NO: 4130458 - DNA, 25 bp, Homo sapien
gattcactcttgactgcagctttct

SEQ ID NO: 4130459 - DNA, 25 bp, Homo sapien
tgattcactcttgactgcagctttc

SEQ ID NO: 4130460 - DNA, 25 bp, Homo sapien
attcactcttgactgcagctttctc

SEQ ID NO: 4130461 - DNA, 25 bp, Homo sapien
tctggagccagattaagtaattccc

SEQ ID NO: 4130462 - DNA, 25 bp, Homo sapien
cagattaagtaattcccgctcctct

SEQ ID NO: 4130463 - DNA, 25 bp, Homo sapien
ccatgggccaccaaatacagctctg

SEQ ID NO: 4130464 - DNA, 25 bp, Homo sapien
accatgggccaccaaatacagctct

SEQ ID NO: 4130465 - DNA, 25 bp, Homo sapien
gctccggccgcggtgcccagcgctg

SEQ ID NO: 4130466 - DNA, 25 bp, Homo sapien
ccgcggtgcccagcgctggagaacg

SEQ ID NO: 4130467 - DNA, 25 bp, Homo sapien
cagcccacagctccggccgcggtgc

SEQ ID NO: 4130468 - DNA, 25 bp, Homo sapien
tgcccagcgctggagaacggaagta

SEQ ID NO: 4130469 - DNA, 25 bp, Homo sapien
ttactcgtccttggagaccagccct

SEQ ID NO: 4130470 - DNA, 25 bp, Homo sapien
acaactgaggcccttgcaaggcaaa

SEQ ID NO: 4130471 - DNA, 25 bp, Homo sapien
gcagctgcaggatcttactcgtcct

SEQ ID NO: 4130472 - DNA, 25 bp, Homo sapien
gaggcccttgcaaggcaaaagacag

SEQ ID NO: 4130473 - DNA, 25 bp, Homo sapien
ctgctctcagcactgcctggcaccc

SEQ ID NO: 4130474 - DNA, 25 bp, Homo sapien
tctcagcactgcctggcacccatgg

SEQ ID NO: 4130475 - DNA, 25 bp, Homo sapien
gccccactgctctcagcactgcctg

SEQ ID NO: 4130476 - DNA, 25 bp, Homo sapien
tcagcactgcctggcacccatggct

SEQ ID NO: 4130477 - DNA, 25 bp, Homo sapien
gatccccttgggaacgctgatcacg

SEQ ID NO: 4130478 - DNA, 25 bp, Homo sapien
gaggttttgcctcagctgaaagttc

SEQ ID NO: 4130479 - DNA, 25 bp, Homo sapien
gtccaaggatagtgcccggtgcagc

SEQ ID NO: 4130480 - DNA, 25 bp, Homo sapien
gctgatcacgccctgcacaagatgc

SEQ ID NO: 4130481 - DNA, 25 bp, Homo sapien
tgcttgccggcacgctccatggcag

SEQ ID NO: 4130482 - DNA, 25 bp, Homo sapien
acctggacacggctatgtggcttca

SEQ ID NO: 4130483 - DNA, 25 bp, Homo sapien
catcgcggtccgggaggttgtcctc

SEQ ID NO: 4130484 - DNA, 25 bp, Homo sapien
gggaggttgtcctccgcaccctcga

SEQ ID NO: 4130485 - DNA, 25 bp, Homo sapien
agtgcagcccgcagcgcatcgcggt

SEQ ID NO: 4130486 - DNA, 25 bp, Homo sapien
tgtgtacagtcaccacatcctggcc

SEQ ID NO: 4130487 - DNA, 25 bp, Homo sapien
gactctacggatgtgtcaggccctg

SEQ ID NO: 4130488 - DNA, 25 bp, Homo sapien
taggcaccggaagaactaactactc

SEQ ID NO: 4130489 - DNA, 25 bp, Homo sapien
agacctgatctctcgaagacctgag

SEQ ID NO: 4130490 - DNA, 25 bp, Homo sapien
tcaagacaatgagggtatcaggtag

SEQ ID NO: 4130491 - DNA, 25 bp, Homo sapien
gacaatgagggtatcaggtagaggg

SEQ ID NO: 4130492 - DNA, 25 bp, Homo sapien
ctcaagacaatgagggtatcaggta

SEQ ID NO: 4130493 - DNA, 25 bp, Homo sapien
aagacaatgagggtatcaggtagag

SEQ ID NO: 4130494 - DNA, 25 bp, Homo sapien
ccagcagtctagtgagtgtctgctt

SEQ ID NO: 4130495 - DNA, 25 bp, Homo sapien
tgccagcagtctagtgagtgtctgc

SEQ ID NO: 4130496 - DNA, 25 bp, Homo sapien
gccagcagtctagtgagtgtctgct

SEQ ID NO: 4130497 - DNA, 25 bp, Homo sapien
cagcagtctagtgagtgtctgcttc

SEQ ID NO: 4130498 - DNA, 25 bp, Homo sapien
gccttccgaatggtgttcaactcct

SEQ ID NO: 4130499 - DNA, 25 bp, Homo sapien
cagggccttccgaatggtgttcaac

SEQ ID NO: 4130500 - DNA, 25 bp, Homo sapien
ctgggacagggccttccgaatggtg

SEQ ID NO: 4130501 - DNA, 25 bp, Homo sapien
ggacagggccttccgaatggtgttc

SEQ ID NO: 4130502 - DNA, 25 bp, Homo sapien
agtcggcccgagacagcacagtctt

SEQ ID NO: 4130503 - DNA, 25 bp, Homo sapien
cacggtggggccactggcaatcacc

SEQ ID NO: 4130504 - DNA, 25 bp, Homo sapien
cagtcttcacagaacgtggcagggc

SEQ ID NO: 4130505 - DNA, 25 bp, Homo sapien
ggatatgcaggcaatcttgcacatt

SEQ ID NO: 4130506 - DNA, 25 bp, Homo sapien
agcctggtagcccagtgcctcggcc

SEQ ID NO: 4130507 - DNA, 25 bp, Homo sapien
gctagcgccagcacattagagccaa

SEQ ID NO: 4130508 - DNA, 25 bp, Homo sapien
ctcagctagcgccagcacattagag

SEQ ID NO: 4130509 - DNA, 25 bp, Homo sapien
cagcacattagagccaatgatcaca

SEQ ID NO: 4130510 - DNA, 25 bp, Homo sapien
taggaaggtggctatgtccaggccc

SEQ ID NO: 4130511 - DNA, 25 bp, Homo sapien
catgggccagcagcccgtagaactg

SEQ ID NO: 4130512 - DNA, 25 bp, Homo sapien
cagcagaagaaggtatgtgagtcat

SEQ ID NO: 4130513 - DNA, 25 bp, Homo sapien
gtagaactgggccatactttttaca

SEQ ID NO: 4130514 - DNA, 25 bp, Homo sapien
tccctgtgtgcagcaggtgtgcccc

SEQ ID NO: 4130515 - DNA, 25 bp, Homo sapien
catccctgtgtgcagcaggtgtgcc

SEQ ID NO: 4130516 - DNA, 25 bp, Homo sapien
cctgtgtgcagcaggtgtgccccac

SEQ ID NO: 4130517 - DNA, 25 bp, Homo sapien
ctgtcatccctgtgtgcagcaggtg

SEQ ID NO: 4130518 - DNA, 25 bp, Homo sapien
ccgcaggaacaagaggtgggtgtcc

SEQ ID NO: 4130519 - DNA, 25 bp, Homo sapien
cgcaggaacaagaggtgggtgtcca

SEQ ID NO: 4130520 - DNA, 25 bp, Homo sapien
gcaggaacaagaggtgggtgtccat

SEQ ID NO: 4130521 - DNA, 25 bp, Homo sapien
ggccgcaggaacaagaggtgggtgt

SEQ ID NO: 4130522 - DNA, 25 bp, Homo sapien
cttgcccttgtaggcctcctctgaa

SEQ ID NO: 4130523 - DNA, 25 bp, Homo sapien
ttgcccttgtaggcctcctctgaac

SEQ ID NO: 4130524 - DNA, 25 bp, Homo sapien
aaggcttagagaggccctgaggacc

SEQ ID NO: 4130525 - DNA, 25 bp, Homo sapien
tggaagggaatagatatagagcaga

SEQ ID NO: 4130526 - DNA, 25 bp, Homo sapien
tgagtggaaggtgacagttaaccaa

SEQ ID NO: 4130527 - DNA, 25 bp, Homo sapien
ggtgacagttaaccaaacagccaag

SEQ ID NO: 4130528 - DNA, 25 bp, Homo sapien
tgaactggccgaggggcttgtcctc

SEQ ID NO: 4130529 - DNA, 25 bp, Homo sapien
tgaggggctcaagagagaggctgcc

SEQ ID NO: 4130530 - DNA, 25 bp, Homo sapien
cagaaagaaacagggtgaggggctc

SEQ ID NO: 4130531 - DNA, 25 bp, Homo sapien
aagggagaagcacgggaacgctgaa

SEQ ID NO: 4130532 - DNA, 25 bp, Homo sapien
caggccctggtactgtggctgcagc

SEQ ID NO: 4130533 - DNA, 25 bp, Homo sapien
tatgcgaggcacatcctgcacgtac

SEQ ID NO: 4130534 - DNA, 25 bp, Homo sapien
tgggcacaggctcccgttatgcgag

SEQ ID NO: 4130535 - DNA, 25 bp, Homo sapien
ctgcacgtacccagcccagtagagg

SEQ ID NO: 4130536 - DNA, 25 bp, Homo sapien
tcacgcacatcaaagctgtcaggag

SEQ ID NO: 4130537 - DNA, 25 bp, Homo sapien
cacatcaaagctgtcaggagccaag

SEQ ID NO: 4130538 - DNA, 25 bp, Homo sapien
tctctgctcacgcacatcaaagctg

SEQ ID NO: 4130539 - DNA, 25 bp, Homo sapien
tgctcacgcacatcaaagctgtcag

SEQ ID NO: 4130540 - DNA, 25 bp, Homo sapien
ctcaaaaggaggcaggacagtggca

SEQ ID NO: 4130541 - DNA, 25 bp, Homo sapien
tcatgaactgtctgcaagctaggct

SEQ ID NO: 4130542 - DNA, 25 bp, Homo sapien
gctacatgtagacgctgccagagga

SEQ ID NO: 4130543 - DNA, 25 bp, Homo sapien
tctaacgggttaggctcacagacca

SEQ ID NO: 4130544 - DNA, 25 bp, Homo sapien
ctggaatgtgctggggctactccca

SEQ ID NO: 4130545 - DNA, 25 bp, Homo sapien
ctgtgaccctcacaagtgcctgtgc

SEQ ID NO: 4130546 - DNA, 25 bp, Homo sapien
ggggttggcggctggctggaatgtg

SEQ ID NO: 4130547 - DNA, 25 bp, Homo sapien
ctgactctgactgggctgctgctat

SEQ ID NO: 4130548 - DNA, 25 bp, Homo sapien
ctgtcacagcagcacttggcagcag

SEQ ID NO: 4130549 - DNA, 25 bp, Homo sapien
cgagctgacttccccaggcagtgcc

SEQ ID NO: 4130550 - DNA, 25 bp, Homo sapien
caggcagtgcccttgcctgtcacag

SEQ ID NO: 4130551 - DNA, 25 bp, Homo sapien
agcagcacttggcagcaggagggca

SEQ ID NO: 4130552 - DNA, 25 bp, Homo sapien
gtgaacgaacgctcacacagactca

SEQ ID NO: 4130553 - DNA, 25 bp, Homo sapien
aacttctgtgcctttgagtgtaaga

SEQ ID NO: 4130554 - DNA, 25 bp, Homo sapien
caaataacgtgctctgggagtctga

SEQ ID NO: 4130555 - DNA, 25 bp, Homo sapien
ctttgagtgtaagaggaggctgaac

SEQ ID NO: 4130556 - DNA, 25 bp, Homo sapien
tgtcagggaccggtatggaagcctc

SEQ ID NO: 4130557 - DNA, 25 bp, Homo sapien
tcacggagctgtagggagagtccca

SEQ ID NO: 4130558 - DNA, 25 bp, Homo sapien
ggtgcagaaagaacgcagccctgtg

SEQ ID NO: 4130559 - DNA, 25 bp, Homo sapien
gaccagctggtcaggtggactccat

SEQ ID NO: 4130560 - DNA, 25 bp, Homo sapien
caggtgcacatgatcacacccgcct

SEQ ID NO: 4130561 - DNA, 25 bp, Homo sapien
aaatactgtacgtgctaattggctg

SEQ ID NO: 4130562 - DNA, 25 bp, Homo sapien
tacgtgctaattggctgaaatctct

SEQ ID NO: 4130563 - DNA, 25 bp, Homo sapien
tgtcccctgggcttcacttgggtgg

SEQ ID NO: 4130564 - DNA, 25 bp, Homo sapien
ttaagtaaatactgtacgtgctaat

SEQ ID NO: 4130565 - DNA, 25 bp, Homo sapien
caggatgtaggtgacgcccatgaga

SEQ ID NO: 4130566 - DNA, 25 bp, Homo sapien
catgaagtgcgttgtaaacctagca

SEQ ID NO: 4130567 - DNA, 25 bp, Homo sapien
agatggaagcatgaagtgcgttgta

SEQ ID NO: 4130568 - DNA, 25 bp, Homo sapien
gaagcatgaagtgcgttgtaaacct

SEQ ID NO: 4130569 - DNA, 25 bp, Homo sapien
tgctgtcctttactgggtcttgctg

SEQ ID NO: 4130570 - DNA, 25 bp, Homo sapien
ggtgctgtcctttactgggtcttgc

SEQ ID NO: 4130571 - DNA, 25 bp, Homo sapien
ttggtgctgtcctttactgggtctt

SEQ ID NO: 4130572 - DNA, 25 bp, Homo sapien
tggtgctgtcctttactgggtcttg

SEQ ID NO: 4130573 - DNA, 25 bp, Homo sapien
gccatttgctcatgtgcttaagcca

SEQ ID NO: 4130574 - DNA, 25 bp, Homo sapien
ctcatctcgacagtgtctcccttgg

SEQ ID NO: 4130575 - DNA, 25 bp, Homo sapien
cttagaataaagtccacaggcctta

SEQ ID NO: 4130576 - DNA, 25 bp, Homo sapien
atcctctctcatctcgacagtgtct

SEQ ID NO: 4130577 - DNA, 25 bp, Homo sapien
ctcggggaggatggtcaccactgtc

SEQ ID NO: 4130578 - DNA, 25 bp, Homo sapien
aaagaattcctccttgacacaagcg

SEQ ID NO: 4130579 - DNA, 25 bp, Homo sapien
tctgggcattcctttgcccctgttg

SEQ ID NO: 4130580 - DNA, 25 bp, Homo sapien
cacggcattgcctgaatggctgccc

SEQ ID NO: 4130581 - DNA, 25 bp, Homo sapien
cactgatagttgctagagtctcagt

SEQ ID NO: 4130582 - DNA, 25 bp, Homo sapien
cttttgcgccagacactgatagttg

SEQ ID NO: 4130583 - DNA, 25 bp, Homo sapien
actggactgtccatcaacagggccc

SEQ ID NO: 4130584 - DNA, 25 bp, Homo sapien
agtttccctgtttatggaagaactg

SEQ ID NO: 4130585 - DNA, 25 bp, Homo sapien
tcctgggccaaagcgccagatggca

SEQ ID NO: 4130586 - DNA, 25 bp, Homo sapien
gggccaaagcgccagatggcaggct

SEQ ID NO: 4130587 - DNA, 25 bp, Homo sapien
cttcctgggccaaagcgccagatgg

SEQ ID NO: 4130588 - DNA, 25 bp, Homo sapien
gccaaagcgccagatggcaggctct

SEQ ID NO: 4130589 - DNA, 25 bp, Homo sapien
ggagcagcggcccaagggggggatg

SEQ ID NO: 4130590 - DNA, 25 bp, Homo sapien
ctccatctgagggtgcaggatgctg

SEQ ID NO: 4130591 - DNA, 25 bp, Homo sapien
cagcggcccaagggggggatgcctg

SEQ ID NO: 4130592 - DNA, 25 bp, Homo sapien
atgctgaggctctgcgctccaggag

SEQ ID NO: 4130593 - DNA, 25 bp, Homo sapien
gtccaggaaagacccatagaaatga

SEQ ID NO: 4130594 - DNA, 25 bp, Homo sapien
ctgcccatgcgtcagtccaggaaag

SEQ ID NO: 4130595 - DNA, 25 bp, Homo sapien
agccctgcccatgcgtcagtccagg

SEQ ID NO: 4130596 - DNA, 25 bp, Homo sapien
agcagccctgcccatgcgtcagtcc

SEQ ID NO: 4130597 - DNA, 25 bp, Homo sapien
tccacttcgcccctcttcaagggcg

SEQ ID NO: 4130598 - DNA, 25 bp, Homo sapien
gtcgggggtgctgcttttaccagca

SEQ ID NO: 4130599 - DNA, 25 bp, Homo sapien
tcgcccctcttcaagggcgggctgt

SEQ ID NO: 4130600 - DNA, 25 bp, Homo sapien
gcgggctgtggatatgactgcctcc

SEQ ID NO: 4130601 - DNA, 25 bp, Homo sapien
gtgatggtcactgctgtttctccca

SEQ ID NO: 4130602 - DNA, 25 bp, Homo sapien
tgtgatggtcactgctgtttctccc

SEQ ID NO: 4130603 - DNA, 25 bp, Homo sapien
catgtgatggtcactgctgtttctc

SEQ ID NO: 4130604 - DNA, 25 bp, Homo sapien
tgatggtcactgctgtttctcccaa

SEQ ID NO: 4130605 - DNA, 25 bp, Homo sapien
gacctgatggtggtgcaacctttcc

SEQ ID NO: 4130606 - DNA, 25 bp, Homo sapien
caagacctgatggtggtgcaacctt

SEQ ID NO: 4130607 - DNA, 25 bp, Homo sapien
ccttcaagacctgatggtggtgcaa

SEQ ID NO: 4130608 - DNA, 25 bp, Homo sapien
tgatggtggtgcaacctttcctgaa

SEQ ID NO: 4130609 - DNA, 25 bp, Homo sapien
gaagaaacacgtcagaatgtccgct

SEQ ID NO: 4130610 - DNA, 25 bp, Homo sapien
tttaagccacagctgcgggacagct

SEQ ID NO: 4130611 - DNA, 25 bp, Homo sapien
cagactgtccttagttgacgtggcc

SEQ ID NO: 4130612 - DNA, 25 bp, Homo sapien
attgcacggtgactccactcaggcc

SEQ ID NO: 4130613 - DNA, 25 bp, Homo sapien
gaggagcaagcccttgcaaagccac

SEQ ID NO: 4130614 - DNA, 25 bp, Homo sapien
aagaaattggacaagggtatggtga

SEQ ID NO: 4130615 - DNA, 25 bp, Homo sapien
gccactgttgcttttggctacctca

SEQ ID NO: 4130616 - DNA, 25 bp, Homo sapien
ccacggagaatccttgggcaggaga

SEQ ID NO: 4130617 - DNA, 25 bp, Homo sapien
agcagatgccgccagggtgcatgca

SEQ ID NO: 4130618 - DNA, 25 bp, Homo sapien
atgccgccagggtgcatgcacatcc

SEQ ID NO: 4130619 - DNA, 25 bp, Homo sapien
cctcccgtcttatgcaaagggagca

SEQ ID NO: 4130620 - DNA, 25 bp, Homo sapien
gggagcagcagatgccgccagggtg

SEQ ID NO: 4130621 - DNA, 25 bp, Homo sapien
cagagtcagatcagctcaggaaacg

SEQ ID NO: 4130622 - DNA, 25 bp, Homo sapien
ggctctcagagtcagatcagctcag

SEQ ID NO: 4130623 - DNA, 25 bp, Homo sapien
tcagatcagctcaggaaacgtatac

SEQ ID NO: 4130624 - DNA, 25 bp, Homo sapien
tctcagagtcagatcagctcaggaa

SEQ ID NO: 4130625 - DNA, 25 bp, Homo sapien
gtctgatcctggaagaatcttcccc

SEQ ID NO: 4130626 - DNA, 25 bp, Homo sapien
ggctggaggatttcccaacccatag

SEQ ID NO: 4130627 - DNA, 25 bp, Homo sapien
ccttcccaggctatagcctttactg

SEQ ID NO: 4130628 - DNA, 25 bp, Homo sapien
cgggttatactctaggcccctgtgg

SEQ ID NO: 4130629 - DNA, 25 bp, Homo sapien
atgtcggagtagaacccacgctgct

SEQ ID NO: 4130630 - DNA, 25 bp, Homo sapien
gagtagaacccacgctgcttcatca

SEQ ID NO: 4130631 - DNA, 25 bp, Homo sapien
cacgctgcttcatcagcgggtactt

SEQ ID NO: 4130632 - DNA, 25 bp, Homo sapien
ccagggctgaggatgtcggagtaga

SEQ ID NO: 4130633 - DNA, 25 bp, Homo sapien
gaacttgtcaaggtcagcctgccgc

SEQ ID NO: 4130634 - DNA, 25 bp, Homo sapien
tcattcgggggccacgacatacctc

SEQ ID NO: 4130635 - DNA, 25 bp, Homo sapien
ttctggctcattcgggggccacgac

SEQ ID NO: 4130636 - DNA, 25 bp, Homo sapien
agcctgccgcaggaggttctggctc

SEQ ID NO: 4130637 - DNA, 25 bp, Homo sapien
tcacacagccctcctgagcactgac

SEQ ID NO: 4130638 - DNA, 25 bp, Homo sapien
cccactcacacagccctcctgagca

SEQ ID NO: 4130639 - DNA, 25 bp, Homo sapien
gggacccactcacacagccctcctg

SEQ ID NO: 4130640 - DNA, 25 bp, Homo sapien
actcacacagccctcctgagcactg

SEQ ID NO: 4130641 - DNA, 25 bp, Homo sapien
taagtgcgcaaatgtacatgctcgt

SEQ ID NO: 4130642 - DNA, 25 bp, Homo sapien
ggccagaccctcagataagtgcgca

SEQ ID NO: 4130643 - DNA, 25 bp, Homo sapien
gtgagactgttggaaacaataggcc

SEQ ID NO: 4130644 - DNA, 25 bp, Homo sapien
acatgctcgtgatgttttctaaggc

SEQ ID NO: 4130645 - DNA, 25 bp, Homo sapien
tcaacaagggagagtgttaccactg

SEQ ID NO: 4130646 - DNA, 25 bp, Homo sapien
tcaagccaggtgttgagttcaacaa

SEQ ID NO: 4130647 - DNA, 25 bp, Homo sapien
tcctggatactgtgggtggctccac

SEQ ID NO: 4130648 - DNA, 25 bp, Homo sapien
tgtgggaagctcaaagcttgcctgt

SEQ ID NO: 4130649 - DNA, 25 bp, Homo sapien
ggaagtcttcaggaacctcaaagct

SEQ ID NO: 4130650 - DNA, 25 bp, Homo sapien
gggaagtcagtctgggcgagcagcc

SEQ ID NO: 4130651 - DNA, 25 bp, Homo sapien
tctcaatcttgcgaggatgctggcc

SEQ ID NO: 4130652 - DNA, 25 bp, Homo sapien
tggtggacccgatgcactgctgctc

SEQ ID NO: 4130653 - DNA, 25 bp, Homo sapien
tctgccatgaggattatcacctggt

SEQ ID NO: 4130654 - DNA, 25 bp, Homo sapien
gatctaaacacttgtgcacaggctc

SEQ ID NO: 4130655 - DNA, 25 bp, Homo sapien
tgtggccgagagacccctctggagc

SEQ ID NO: 4130656 - DNA, 25 bp, Homo sapien
caccaaagggctagaagattcgatc

SEQ ID NO: 4130657 - DNA, 25 bp, Homo sapien
caggatggcttggctcgtgtgaggt

SEQ ID NO: 4130658 - DNA, 25 bp, Homo sapien
ggatggcttggctcgtgtgaggtgg

SEQ ID NO: 4130659 - DNA, 25 bp, Homo sapien
ggctcgtgtgaggtggctccatggg

SEQ ID NO: 4130660 - DNA, 25 bp, Homo sapien
gcttggctcgtgtgaggtggctcca

SEQ ID NO: 4130661 - DNA, 25 bp, Homo sapien
caggtgcctgggcatgagcttgttg

SEQ ID NO: 4130662 - DNA, 25 bp, Homo sapien
gtcatggccctgttcgatggtttgg

SEQ ID NO: 4130663 - DNA, 25 bp, Homo sapien
tcatggccctgttcgatggtttggg

SEQ ID NO: 4130664 - DNA, 25 bp, Homo sapien
tgttggagtcgatgccctggctgaa

SEQ ID NO: 4130665 - DNA, 25 bp, Homo sapien
gttcctattgttgacctgccctgtt

SEQ ID NO: 4130666 - DNA, 25 bp, Homo sapien
tctcaaccatctgtggaagcccggc

SEQ ID NO: 4130667 - DNA, 25 bp, Homo sapien
catctaggatgctcaaagtacctgg

SEQ ID NO: 4130668 - DNA, 25 bp, Homo sapien
agatctgactcctgagcgtccactg

SEQ ID NO: 4130669 - DNA, 25 bp, Homo sapien
tcagggaggatactccacagtccag

SEQ ID NO: 4130670 - DNA, 25 bp, Homo sapien
gcccatgggtggcacggaggccgag

SEQ ID NO: 4130671 - DNA, 25 bp, Homo sapien
ctggtcagggaggatactccacagt

SEQ ID NO: 4130672 - DNA, 25 bp, Homo sapien
agggaggatactccacagtccagct

SEQ ID NO: 4130673 - DNA, 25 bp, Homo sapien
gctgtcaggaggtagcccttagcta

SEQ ID NO: 4130674 - DNA, 25 bp, Homo sapien
cacagcatctggttgggtgaaaccc

SEQ ID NO: 4130675 - DNA, 25 bp, Homo sapien
cagctttacctccttacagggacca

SEQ ID NO: 4130676 - DNA, 25 bp, Homo sapien
caacttggaactggtgagattcggg

SEQ ID NO: 4130677 - DNA, 25 bp, Homo sapien
ccatgttgatccactctctgggagt

SEQ ID NO: 4130678 - DNA, 25 bp, Homo sapien
gatccactctctgggagtccggcag

SEQ ID NO: 4130679 - DNA, 25 bp, Homo sapien
gggagtccggcagtcaaagtcctca

SEQ ID NO: 4130680 - DNA, 25 bp, Homo sapien
ggctccaagcccatgttgatccact

SEQ ID NO: 4130681 - DNA, 25 bp, Homo sapien
tactggaatgagatagtgtccccac

SEQ ID NO: 4130682 - DNA, 25 bp, Homo sapien
cctgggcagattattgacaaggcca

SEQ ID NO: 4130683 - DNA, 25 bp, Homo sapien
gagtggaattgtgcccctcgtgcat

SEQ ID NO: 4130684 - DNA, 25 bp, Homo sapien
caaaagtgaaagctgagaggccatg

SEQ ID NO: 4130685 - DNA, 25 bp, Homo sapien
aatgggagagcctccacagccgctg

SEQ ID NO: 4130686 - DNA, 25 bp, Homo sapien
ggaaatgggagagcctccacagccg

SEQ ID NO: 4130687 - DNA, 25 bp, Homo sapien
aaatgggagagcctccacagccgct

SEQ ID NO: 4130688 - DNA, 25 bp, Homo sapien
gaaatgggagagcctccacagccgc

SEQ ID NO: 4130689 - DNA, 25 bp, Homo sapien
ccgtgcaggccgagatgtcagctgc

SEQ ID NO: 4130690 - DNA, 25 bp, Homo sapien
ctaggatgttgcatcgacacccagc

SEQ ID NO: 4130691 - DNA, 25 bp, Homo sapien
acccagccgtgcaggccgagatgtc

SEQ ID NO: 4130692 - DNA, 25 bp, Homo sapien
gttgcatcgacacccagccgtgcag

SEQ ID NO: 4130693 - DNA, 25 bp, Homo sapien
gactcactgggcaggcttaaaacca

SEQ ID NO: 4130694 - DNA, 25 bp, Homo sapien
ccttgtctcggctcaactcagatga

SEQ ID NO: 4130695 - DNA, 25 bp, Homo sapien
agaaaacaagaggtccccagcagag

SEQ ID NO: 4130696 - DNA, 25 bp, Homo sapien
cacctgttgacaccagctagctgag

SEQ ID NO: 4130697 - DNA, 25 bp, Homo sapien
ctgaaacaggaggagaaactccacc

SEQ ID NO: 4130698 - DNA, 25 bp, Homo sapien
acaggaggagaaactccaccagtgc

SEQ ID NO: 4130699 - DNA, 25 bp, Homo sapien
aaactccaccagtgccccccgccat

SEQ ID NO: 4130700 - DNA, 25 bp, Homo sapien
gagaaactccaccagtgccccccgc

SEQ ID NO: 4130701 - DNA, 25 bp, Homo sapien
gcttcttctcctcgtcgtagtccag

SEQ ID NO: 4130702 - DNA, 25 bp, Homo sapien
cctttctcgtctgtcttgtgtacca

SEQ ID NO: 4130703 - DNA, 25 bp, Homo sapien
ggacgccgacctcgcaccatttgta

SEQ ID NO: 4130704 - DNA, 25 bp, Homo sapien
tgtgtaccaggtatagcttcttctc

SEQ ID NO: 4130705 - DNA, 25 bp, Homo sapien
ctgacagacctgaaggggtggcctt

SEQ ID NO: 4130706 - DNA, 25 bp, Homo sapien
tgacagacctgaaggggtggccttc

SEQ ID NO: 4130707 - DNA, 25 bp, Homo sapien
tttgcgcatccgaggcgtgctcagg

SEQ ID NO: 4130708 - DNA, 25 bp, Homo sapien
caagggtcctcagcgcagaagagaa

SEQ ID NO: 4130709 - DNA, 25 bp, Homo sapien
cgttgtgcgaacatgcaagggtcct

SEQ ID NO: 4130710 - DNA, 25 bp, Homo sapien
cagtgcttccgtgttcttgcgcagg

SEQ ID NO: 4130711 - DNA, 25 bp, Homo sapien
gttgtgctactgcactgtggcgtgg

SEQ ID NO: 4130712 - DNA, 25 bp, Homo sapien
tgttgtgctactgcactgtggcgtg

SEQ ID NO: 4130713 - DNA, 25 bp, Homo sapien
tgattgttgtgctactgcactgtgg

SEQ ID NO: 4130714 - DNA, 25 bp, Homo sapien
attgttgtgctactgcactgtggcg

SEQ ID NO: 4130715 - DNA, 25 bp, Homo sapien
tcttgttcatgctgcgctcatagtc

SEQ ID NO: 4130716 - DNA, 25 bp, Homo sapien
aagactgctgaggtgctctagaacc

SEQ ID NO: 4130717 - DNA, 25 bp, Homo sapien
tggaagagacaacgtggtcaaagtt

SEQ ID NO: 4130718 - DNA, 25 bp, Homo sapien
gagggtgacgtaggagaaggtctcg

SEQ ID NO: 4130719 - DNA, 25 bp, Homo sapien
cagggcagacaatcctggaggggaa

SEQ ID NO: 4130720 - DNA, 25 bp, Homo sapien
tggatggccatggagcccatcttgg

SEQ ID NO: 4130721 - DNA, 25 bp, Homo sapien
gccatggagcccatcttggtccagt

SEQ ID NO: 4130722 - DNA, 25 bp, Homo sapien
gatggccatggagcccatcttggtc

SEQ ID NO: 4130723 - DNA, 25 bp, Homo sapien
acctctggccgtgtgagcagggaca

SEQ ID NO: 4130724 - DNA, 25 bp, Homo sapien
tgactggatctgctcaaattcctcc

SEQ ID NO: 4130725 - DNA, 25 bp, Homo sapien
tggcggtcaccttgttgcactcggc

SEQ ID NO: 4130726 - DNA, 25 bp, Homo sapien
tacttggagaggctcgagtggaaca

SEQ ID NO: 4130727 - DNA, 25 bp, Homo sapien
cagttccaagggtctgccctgcgtt

SEQ ID NO: 4130728 - DNA, 25 bp, Homo sapien
tgcctgccagttccaagggtctgcc

SEQ ID NO: 4130729 - DNA, 25 bp, Homo sapien
tgccagttccaagggtctgccctgc

SEQ ID NO: 4130730 - DNA, 25 bp, Homo sapien
ttccaagggtctgccctgcgtttgc

SEQ ID NO: 4130731 - DNA, 25 bp, Homo sapien
tcgtagaggttgtaccagcccttgc

SEQ ID NO: 4130732 - DNA, 25 bp, Homo sapien
agaagctggcaagtgagtcctgcac

SEQ ID NO: 4130733 - DNA, 25 bp, Homo sapien
ggctgttaattaagtcgtcacccca

SEQ ID NO: 4130734 - DNA, 25 bp, Homo sapien
tgagcacgctgcaacaggtgtcgct

SEQ ID NO: 4130735 - DNA, 25 bp, Homo sapien
ccatgatgaacaggggattcttccg

SEQ ID NO: 4130736 - DNA, 25 bp, Homo sapien
atgcccttgtcgaagaggttcagca

SEQ ID NO: 4130737 - DNA, 25 bp, Homo sapien
tccagtggggtgctatagtgcaccc

SEQ ID NO: 4130738 - DNA, 25 bp, Homo sapien
ccaggatgcccttgtcgaagaggtt

SEQ ID NO: 4130739 - DNA, 25 bp, Homo sapien
tgagaaaggaggcaatgtcattgtt

SEQ ID NO: 4130740 - DNA, 25 bp, Homo sapien
gatcatggccttggacacggcactg

SEQ ID NO: 4130741 - DNA, 25 bp, Homo sapien
caggtactttcggtactccttggcg

SEQ ID NO: 4130742 - DNA, 25 bp, Homo sapien
cactggcaatggtggcccgtagctc

SEQ ID NO: 4130743 - DNA, 25 bp, Homo sapien
cctccgacgtgcatgggcacacgta

SEQ ID NO: 4130744 - DNA, 25 bp, Homo sapien
aaggatgtccagcacggaagtggcc

SEQ ID NO: 4130745 - DNA, 25 bp, Homo sapien
cctccttatgcaggttcttggcaag

SEQ ID NO: 4130746 - DNA, 25 bp, Homo sapien
cttgcgtttcttggacaggctctgc

SEQ ID NO: 4130747 - DNA, 25 bp, Homo sapien
tcggtgttgatgtagaaaggcccaa

SEQ ID NO: 4130748 - DNA, 25 bp, Homo sapien
cagcatctcccgacaggtaactgtc

SEQ ID NO: 4130749 - DNA, 25 bp, Homo sapien
caccacaacatcctgcggcgctttc

SEQ ID NO: 4130750 - DNA, 25 bp, Homo sapien
acaggtaactgtcccctccaccaca

SEQ ID NO: 4130751 - DNA, 25 bp, Homo sapien
aacatcctgcggcgctttccaagag

SEQ ID NO: 4130752 - DNA, 25 bp, Homo sapien
ctggggagggcagcatgctgctccc

SEQ ID NO: 4130753 - DNA, 25 bp, Homo sapien
gaggaggcgctggggagggcagcat

SEQ ID NO: 4130754 - DNA, 25 bp, Homo sapien
ggagggcagcatgctgctcccttgc

SEQ ID NO: 4130755 - DNA, 25 bp, Homo sapien
gggagggcagcatgctgctcccttg

SEQ ID NO: 4130756 - DNA, 25 bp, Homo sapien
ccttcatccactctcgcagctcagc

SEQ ID NO: 4130757 - DNA, 25 bp, Homo sapien
tgatgctgcggaactcctcgcagat

SEQ ID NO: 4130758 - DNA, 25 bp, Homo sapien
ttgcggctgatgctgcggaactcct

SEQ ID NO: 4130759 - DNA, 25 bp, Homo sapien
ttctcatagatcttgcggctgatgc

SEQ ID NO: 4130760 - DNA, 25 bp, Homo sapien
gtcattgaagtcatctgagctgagg

SEQ ID NO: 4130761 - DNA, 25 bp, Homo sapien
tgagctgaggttgtagaggaattca

SEQ ID NO: 4130762 - DNA, 25 bp, Homo sapien
gaattcatccatgacctggtagtca

SEQ ID NO: 4130763 - DNA, 25 bp, Homo sapien
ttgtcattgaagtcatctgagctga

SEQ ID NO: 4130764 - DNA, 25 bp, Homo sapien
tagaaggccagttgctggcaatcca

SEQ ID NO: 4130765 - DNA, 25 bp, Homo sapien
tgcccaaggatcttagaaggccagt

SEQ ID NO: 4130766 - DNA, 25 bp, Homo sapien
tgatccatgatctggattttgcgga

SEQ ID NO: 4130767 - DNA, 25 bp, Homo sapien
tggattttgcggaacttctcctcat

SEQ ID NO: 4130768 - DNA, 25 bp, Homo sapien
cgttggcgatctcgtgtgcacgtga

SEQ ID NO: 4130769 - DNA, 25 bp, Homo sapien
cacgtgaaatctccacatggatgga

SEQ ID NO: 4130770 - DNA, 25 bp, Homo sapien
tcgcggttgttgtagagcatggcca

SEQ ID NO: 4130771 - DNA, 25 bp, Homo sapien
gcaagctgaagatgcgctcgcggtt

SEQ ID NO: 4130772 - DNA, 25 bp, Homo sapien
gtccttaaactgcttcacgcacttg

SEQ ID NO: 4130773 - DNA, 25 bp, Homo sapien
gaccagcgcagccagtcagacgctg

SEQ ID NO: 4130774 - DNA, 25 bp, Homo sapien
tcttgaaggcttcaaccacgttctt

SEQ ID NO: 4130775 - DNA, 25 bp, Homo sapien
cacgcacttgtgcatggtcttgaag

SEQ ID NO: 4130776 - DNA, 25 bp, Homo sapien
gccttgggcctgacattgatgttga

SEQ ID NO: 4130777 - DNA, 25 bp, Homo sapien
ttggacagtgtctcccagtgccgga

SEQ ID NO: 4130778 - DNA, 25 bp, Homo sapien
tcatctccaggcagcgagcaaaggt

SEQ ID NO: 4130779 - DNA, 25 bp, Homo sapien
tggtttgaactcctcgatgcgggcc

SEQ ID NO: 4130780 - DNA, 25 bp, Homo sapien
attaactcacttaatagaatgcatc

SEQ ID NO: 4130781 - DNA, 25 bp, Homo sapien
ttaactcacttaatagaatgcatct

SEQ ID NO: 4130782 - DNA, 25 bp, Homo sapien
taactcacttaatagaatgcatctc

SEQ ID NO: 4130783 - DNA, 25 bp, Homo sapien
tagaatgcatctcaacccctgggcc

SEQ ID NO: 4130784 - DNA, 25 bp, Homo sapien
cccaggagttgatgcgctgctcaaa

SEQ ID NO: 4130785 - DNA, 25 bp, Homo sapien
tattctgggtcatgacgatgtggtc

SEQ ID NO: 4130786 - DNA, 25 bp, Homo sapien
cttcaggatgtaggtgtctgtcgcc

SEQ ID NO: 4130787 - DNA, 25 bp, Homo sapien
cgatgtggtcgtccagcagctgtga

SEQ ID NO: 4130788 - DNA, 25 bp, Homo sapien
tgggggagcgatgagggaaggactg

SEQ ID NO: 4130789 - DNA, 25 bp, Homo sapien
aagtgggggagcgatgagggaagga

SEQ ID NO: 4130790 - DNA, 25 bp, Homo sapien
tctgaagtgggggagcgatgaggga

SEQ ID NO: 4130791 - DNA, 25 bp, Homo sapien
ggctctctgaagtgggggagcgatg

SEQ ID NO: 4130792 - DNA, 25 bp, Homo sapien
gttgccctcctctgaatgcagtagg

SEQ ID NO: 4130793 - DNA, 25 bp, Homo sapien
tggagagcccatcctagttgccctc

SEQ ID NO: 4130794 - DNA, 25 bp, Homo sapien
tgcctcatccagtagctgaacctca

SEQ ID NO: 4130795 - DNA, 25 bp, Homo sapien
tcatggatggagagcccatcctagt

SEQ ID NO: 4130796 - DNA, 25 bp, Homo sapien
gcagctatcagggaggcccggggaa

SEQ ID NO: 4130797 - DNA, 25 bp, Homo sapien
gaggcccggggaaggggatatcaca

SEQ ID NO: 4130798 - DNA, 25 bp, Homo sapien
ccttcgccggaggtctctgagcagc

SEQ ID NO: 4130799 - DNA, 25 bp, Homo sapien
tgcttctggccttcgccggaggtct

SEQ ID NO: 4130800 - DNA, 25 bp, Homo sapien
cctcagagctaaagatgggctccag

SEQ ID NO: 4130801 - DNA, 25 bp, Homo sapien
tggtagcgcttgctctccacaggca

SEQ ID NO: 4130802 - DNA, 25 bp, Homo sapien
cagatccgctccatggtctggtagc

SEQ ID NO: 4130803 - DNA, 25 bp, Homo sapien
gagccaggaccgctgacagttcagc

SEQ ID NO: 4130804 - DNA, 25 bp, Homo sapien
cgtaggcattcttcatgatcttctt

SEQ ID NO: 4130805 - DNA, 25 bp, Homo sapien
ccggttctcgtaggcattcttcatg

SEQ ID NO: 4130806 - DNA, 25 bp, Homo sapien
tctcgtaggcattcttcatgatctt

SEQ ID NO: 4130807 - DNA, 25 bp, Homo sapien
ctcccggttctcgtaggcattcttc

SEQ ID NO: 4130808 - DNA, 25 bp, Homo sapien
catggtccaggtagcaagataggct

SEQ ID NO: 4130809 - DNA, 25 bp, Homo sapien
cccgggccatgcacagaaatgggca

SEQ ID NO: 4130810 - DNA, 25 bp, Homo sapien
agcaagataggctcatcccagagca

SEQ ID NO: 4130811 - DNA, 25 bp, Homo sapien
catgcacagaaatgggcagtgagca

SEQ ID NO: 4130812 - DNA, 25 bp, Homo sapien
agatactcgctgaggcccttctgca

SEQ ID NO: 4130813 - DNA, 25 bp, Homo sapien
tctcaggtcggaacacacattgatc

SEQ ID NO: 4130814 - DNA, 25 bp, Homo sapien
tcttggtctccagatactcgctgag

SEQ ID NO: 4130815 - DNA, 25 bp, Homo sapien
ggtccagaatcttgttgcagtcccg

SEQ ID NO: 4130816 - DNA, 25 bp, Homo sapien
ttgtctgcgacaagatctctagtag

SEQ ID NO: 4130817 - DNA, 25 bp, Homo sapien
aagcacttgcgcaggtgtggctgca

SEQ ID NO: 4130818 - DNA, 25 bp, Homo sapien
ccgagcgatgttctcgaagcacttg

SEQ ID NO: 4130819 - DNA, 25 bp, Homo sapien
tgcgacaagatctctagtagttcat

SEQ ID NO: 4130820 - DNA, 25 bp, Homo sapien
tggagaagcacaactgtacctcctc

SEQ ID NO: 4130821 - DNA, 25 bp, Homo sapien
tcaatgatgtcgtgcacactggcct

SEQ ID NO: 4130822 - DNA, 25 bp, Homo sapien
gggtaggccctgatggccttctcaa

SEQ ID NO: 4130823 - DNA, 25 bp, Homo sapien
gcagccagtcctccacgttgctgga

SEQ ID NO: 4130824 - DNA, 25 bp, Homo sapien
ggaacagttggcttctgaggttgcc

SEQ ID NO: 4130825 - DNA, 25 bp, Homo sapien
ggccaggccagttcagaacccactg

SEQ ID NO: 4130826 - DNA, 25 bp, Homo sapien
cagttcagaacccactgggtcctgg

SEQ ID NO: 4130827 - DNA, 25 bp, Homo sapien
tggcttctgaggttgccggcctcca

SEQ ID NO: 4130828 - DNA, 25 bp, Homo sapien
gattagcttgctcaccacgtccttg

SEQ ID NO: 4130829 - DNA, 25 bp, Homo sapien
caatgacgattagcgctgacagcac

SEQ ID NO: 4130830 - DNA, 25 bp, Homo sapien
tggaagtcattcacgctgaccacgt

SEQ ID NO: 4130831 - DNA, 25 bp, Homo sapien
ccttggcatggacctcaatgacgat

SEQ ID NO: 4130832 - DNA, 25 bp, Homo sapien
gtactcatagccatagatgaactca

SEQ ID NO: 4130833 - DNA, 25 bp, Homo sapien
gcacggatatacaggtcattatttg

SEQ ID NO: 4130834 - DNA, 25 bp, Homo sapien
caggtcattatttgtccagtagtac

SEQ ID NO: 4130835 - DNA, 25 bp, Homo sapien
catagatgaactcagcattcacagc

SEQ ID NO: 4130836 - DNA, 25 bp, Homo sapien
gagctccggtcagtgtcaggtagca

SEQ ID NO: 4130837 - DNA, 25 bp, Homo sapien
gagcagttgaacacaacggtctgta

SEQ ID NO: 4130838 - DNA, 25 bp, Homo sapien
catggccatgaagtcgagctggtca

SEQ ID NO: 4130839 - DNA, 25 bp, Homo sapien
acacaacggtctgtatggccaaggc

SEQ ID NO: 4130840 - DNA, 25 bp, Homo sapien
tgtcgatgcgattgaactcgtcgaa

SEQ ID NO: 4130841 - DNA, 25 bp, Homo sapien
atgtcgatgcgattgaactcgtcga

SEQ ID NO: 4130842 - DNA, 25 bp, Homo sapien
gtcgatgcgattgaactcgtcgaag

SEQ ID NO: 4130843 - DNA, 25 bp, Homo sapien
gatggcaccagtgggatctccacac

SEQ ID NO: 4130844 - DNA, 25 bp, Homo sapien
catggtgataaacactgcgcaggat

SEQ ID NO: 4130845 - DNA, 25 bp, Homo sapien
gtagcccgggttcatggtgataaac

SEQ ID NO: 4130846 - DNA, 25 bp, Homo sapien
ataaacactgcgcaggatggcacca

SEQ ID NO: 4130847 - DNA, 25 bp, Homo sapien
gtgtccttgcataagtggcttagca

SEQ ID NO: 4130848 - DNA, 25 bp, Homo sapien
catctctgaactcaggctagagctc

SEQ ID NO: 4130849 - DNA, 25 bp, Homo sapien
gcataagtggcttagcatctctgaa

SEQ ID NO: 4130850 - DNA, 25 bp, Homo sapien
tggcttagcatctctgaactcaggc

SEQ ID NO: 4130851 - DNA, 25 bp, Homo sapien
accatcatggccacgggtcggaaga

SEQ ID NO: 4130852 - DNA, 25 bp, Homo sapien
ccatcatggccacgggtcggaagag

SEQ ID NO: 4130853 - DNA, 25 bp, Homo sapien
gaaccatcatggccacgggtcggaa

SEQ ID NO: 4130854 - DNA, 25 bp, Homo sapien
tggaaccatcatggccacgggtcgg

SEQ ID NO: 4130855 - DNA, 25 bp, Homo sapien
agccaaaggaatagagggagatctc

SEQ ID NO: 4130856 - DNA, 25 bp, Homo sapien
gccaaaggaatagagggagatctca

SEQ ID NO: 4130857 - DNA, 25 bp, Homo sapien
attaaagccaaaggaatagagggag

SEQ ID NO: 4130858 - DNA, 25 bp, Homo sapien
taaagccaaaggaatagagggagat

SEQ ID NO: 4130859 - DNA, 25 bp, Homo sapien
ctcattcatgctggggttttctcgc

SEQ ID NO: 4130860 - DNA, 25 bp, Homo sapien
gatcacagttttcacggctctcatc

SEQ ID NO: 4130861 - DNA, 25 bp, Homo sapien
ggctctcatcccgaagtcatagtga

SEQ ID NO: 4130862 - DNA, 25 bp, Homo sapien
gcttgaggttcccagcagccgagat

SEQ ID NO: 4130863 - DNA, 25 bp, Homo sapien
ctcatccaggatgccgtagtccgtg

SEQ ID NO: 4130864 - DNA, 25 bp, Homo sapien
caggaacttgggcacgttcacatca

SEQ ID NO: 4130865 - DNA, 25 bp, Homo sapien
gtcggacacgatgccagagaagagc

SEQ ID NO: 4130866 - DNA, 25 bp, Homo sapien
gttcacatcacggatggcccggagg

SEQ ID NO: 4130867 - DNA, 25 bp, Homo sapien
atggccagcccctccacgaacactc

SEQ ID NO: 4130868 - DNA, 25 bp, Homo sapien
ctggactccaaggtggccatggcca

SEQ ID NO: 4130869 - DNA, 25 bp, Homo sapien
ctccacgaacactcagggcccgagg

SEQ ID NO: 4130870 - DNA, 25 bp, Homo sapien
acgaacactcagggcccgaggctca

SEQ ID NO: 4130871 - DNA, 25 bp, Homo sapien
gacgagcatgaggccgtgtcgtacc

SEQ ID NO: 4130872 - DNA, 25 bp, Homo sapien
gtcgtaccaccgtggtctcgtagag

SEQ ID NO: 4130873 - DNA, 25 bp, Homo sapien
atgaggccgtgtcgtaccaccgtgg

SEQ ID NO: 4130874 - DNA, 25 bp, Homo sapien
aggccgtgtcgtaccaccgtggtct

SEQ ID NO: 4130875 - DNA, 25 bp, Homo sapien
ccactatccggacactggctgccaa

SEQ ID NO: 4130876 - DNA, 25 bp, Homo sapien
cccactatccggacactggctgcca

SEQ ID NO: 4130877 - DNA, 25 bp, Homo sapien
aggcccactatccggacactggctg

SEQ ID NO: 4130878 - DNA, 25 bp, Homo sapien
gcccactatccggacactggctgcc

SEQ ID NO: 4130879 - DNA, 25 bp, Homo sapien
ctgggagacggaccgcctgagagtg

SEQ ID NO: 4130880 - DNA, 25 bp, Homo sapien
gagacggaccgcctgagagtgaggc

SEQ ID NO: 4130881 - DNA, 25 bp, Homo sapien
gaccgcctgagagtgaggctcccag

SEQ ID NO: 4130882 - DNA, 25 bp, Homo sapien
acggaccgcctgagagtgaggctcc

SEQ ID NO: 4130883 - DNA, 25 bp, Homo sapien
ccctttcagtgacgtcatggcagct

SEQ ID NO: 4130884 - DNA, 25 bp, Homo sapien
ggaggtcaaactccccgtacagctg

SEQ ID NO: 4130885 - DNA, 25 bp, Homo sapien
tgccaccactgatggatggctgccc

SEQ ID NO: 4130886 - DNA, 25 bp, Homo sapien
tagttgacagcctcgtacatgccac

SEQ ID NO: 4130887 - DNA, 25 bp, Homo sapien
caatgtctggttacgctgaggcctg

SEQ ID NO: 4130888 - DNA, 25 bp, Homo sapien
cctacctacataagagactggagtg

SEQ ID NO: 4130889 - DNA, 25 bp, Homo sapien
gataactgatcactcttgaggctcc

SEQ ID NO: 4130890 - DNA, 25 bp, Homo sapien
gaactggagactcttgcctggagaa

SEQ ID NO: 4130891 - DNA, 25 bp, Homo sapien
agatggcatccaccggcccatcgaa

SEQ ID NO: 4130892 - DNA, 25 bp, Homo sapien
ggcccatcgaacatgtaccacttct

SEQ ID NO: 4130893 - DNA, 25 bp, Homo sapien
cccgcccggatgaacgaggagaata

SEQ ID NO: 4130894 - DNA, 25 bp, Homo sapien
gcttgatgatctccccagagctgag

SEQ ID NO: 4130895 - DNA, 25 bp, Homo sapien
gccttggaggagagtgggcaggtgg

SEQ ID NO: 4130896 - DNA, 25 bp, Homo sapien
cttggaggagagtgggcaggtggac

SEQ ID NO: 4130897 - DNA, 25 bp, Homo sapien
ccagccttggaggagagtgggcagg

SEQ ID NO: 4130898 - DNA, 25 bp, Homo sapien
tgggcaggtggacaggtaggtgcac

SEQ ID NO: 4130899 - DNA, 25 bp, Homo sapien
tgacaaagagggccttgaaatgctc

SEQ ID NO: 4130900 - DNA, 25 bp, Homo sapien
gcactcgatgaagggcatgagcccc

SEQ ID NO: 4130901 - DNA, 25 bp, Homo sapien
gtacaccatgccacagcgggagact

SEQ ID NO: 4130902 - DNA, 25 bp, Homo sapien
ggtcttgcacctcgaacatcatggt

SEQ ID NO: 4130903 - DNA, 25 bp, Homo sapien
cactgaggaccgaacgaaggagatg

SEQ ID NO: 4130904 - DNA, 25 bp, Homo sapien
ccttcactgaggaccgaacgaagga

SEQ ID NO: 4130905 - DNA, 25 bp, Homo sapien
ttgcagttggttgaggcgatcacct

SEQ ID NO: 4130906 - DNA, 25 bp, Homo sapien
tgaggaggctcatggtcaggttgca

SEQ ID NO: 4130907 - DNA, 25 bp, Homo sapien
gatcaactctacgatgcgactcagc

SEQ ID NO: 4130908 - DNA, 25 bp, Homo sapien
ggagaagatgaaccagggctcgatc

SEQ ID NO: 4130909 - DNA, 25 bp, Homo sapien
ccacgctccagatcagggagaagat

SEQ ID NO: 4130910 - DNA, 25 bp, Homo sapien
cagtggctgaaactggtgcggccac

SEQ ID NO: 4130911 - DNA, 25 bp, Homo sapien
ctgttcgttctccatcttgagcctt

SEQ ID NO: 4130912 - DNA, 25 bp, Homo sapien
tgttcgttctccatcttgagcctta

SEQ ID NO: 4130913 - DNA, 25 bp, Homo sapien
gttcgttctccatcttgagccttag

SEQ ID NO: 4130914 - DNA, 25 bp, Homo sapien
ttcatcctcactgtcgttggtgcca

SEQ ID NO: 4130915 - DNA, 25 bp, Homo sapien
ttggtgccactgatgcccgcgtcct

SEQ ID NO: 4130916 - DNA, 25 bp, Homo sapien
tgtcgttggtgccactgatgcccgc

SEQ ID NO: 4130917 - DNA, 25 bp, Homo sapien
gcgtcctccagcctgtaatcgaaca

SEQ ID NO: 4130918 - DNA, 25 bp, Homo sapien
ttgcagtagttggtgtctggtacca

SEQ ID NO: 4130919 - DNA, 25 bp, Homo sapien
cggtgtccatggtgggcacaatgat

SEQ ID NO: 4130920 - DNA, 25 bp, Homo sapien
tctggtaccatggtgaatggagctg

SEQ ID NO: 4130921 - DNA, 25 bp, Homo sapien
tccagtaaatgggacatctgcacgg

SEQ ID NO: 4130922 - DNA, 25 bp, Homo sapien
tctggttggctgaagtgcgggctga

SEQ ID NO: 4130923 - DNA, 25 bp, Homo sapien
tgcctgttggcccaatgcacagcac

SEQ ID NO: 4130924 - DNA, 25 bp, Homo sapien
gaagtggctgatgtaatccagtgcc

SEQ ID NO: 4130925 - DNA, 25 bp, Homo sapien
cttgtcagagatggtgagcgtcttc

SEQ ID NO: 4130926 - DNA, 25 bp, Homo sapien
gacagcagctggatcggccaggctg

SEQ ID NO: 4130927 - DNA, 25 bp, Homo sapien
caggagcataatttggtggagaggt

SEQ ID NO: 4130928 - DNA, 25 bp, Homo sapien
gatcggccaggctgggaggatgcag

SEQ ID NO: 4130929 - DNA, 25 bp, Homo sapien
tgggacagcagctggatcggccagg

SEQ ID NO: 4130930 - DNA, 25 bp, Homo sapien
ctgggcccattggggggctgtcagc

SEQ ID NO: 4130931 - DNA, 25 bp, Homo sapien
gcccattggggggctgtcagctccc

SEQ ID NO: 4130932 - DNA, 25 bp, Homo sapien
tgggcccattggggggctgtcagct

SEQ ID NO: 4130933 - DNA, 25 bp, Homo sapien
ggcccattggggggctgtcagctcc

SEQ ID NO: 4130934 - DNA, 25 bp, Homo sapien
ctttgtaggaatttttgatacaggg

SEQ ID NO: 4130935 - DNA, 25 bp, Homo sapien
cactcgctgactggctttgtaggaa

SEQ ID NO: 4130936 - DNA, 25 bp, Homo sapien
cagggccctgtccaagggcacagcc

SEQ ID NO: 4130937 - DNA, 25 bp, Homo sapien
agggcgagcacccactcgctgactg

SEQ ID NO: 4130938 - DNA, 25 bp, Homo sapien
gcccttgctaaattttagcctcctc

SEQ ID NO: 4130939 - DNA, 25 bp, Homo sapien
agtctgagctccctcaaagtgagtc

SEQ ID NO: 4130940 - DNA, 25 bp, Homo sapien
cctcatccttgttctgagtgtcctg

SEQ ID NO: 4130941 - DNA, 25 bp, Homo sapien
aaattgctagatgccttgacccacc

SEQ ID NO: 4130942 - DNA, 25 bp, Homo sapien
cgatgaagaagataaagttgcgccc

SEQ ID NO: 4130943 - DNA, 25 bp, Homo sapien
agaagataaagttgcgccccagagg

SEQ ID NO: 4130944 - DNA, 25 bp, Homo sapien
gatgaagaagataaagttgcgcccc

SEQ ID NO: 4130945 - DNA, 25 bp, Homo sapien
gaagaagataaagttgcgccccaga

SEQ ID NO: 4130946 - DNA, 25 bp, Homo sapien
aatgatcttgcggtcgtaccagccg

SEQ ID NO: 4130947 - DNA, 25 bp, Homo sapien
cactggcgcaacagctcgatgggtg

SEQ ID NO: 4130948 - DNA, 25 bp, Homo sapien
tcgatgggtggctgtgcaccgtagg

SEQ ID NO: 4130949 - DNA, 25 bp, Homo sapien
tggctgtgcaccgtaggtctccagg

SEQ ID NO: 4130950 - DNA, 25 bp, Homo sapien
tgacggaaatttgctctgattctac

SEQ ID NO: 4130951 - DNA, 25 bp, Homo sapien
gacggaaatttgctctgattctact

SEQ ID NO: 4130952 - DNA, 25 bp, Homo sapien
cctgacggaaatttgctctgattct

SEQ ID NO: 4130953 - DNA, 25 bp, Homo sapien
ctgacggaaatttgctctgattcta

SEQ ID NO: 4130954 - DNA, 25 bp, Homo sapien
ggatggtagtttttgaagttctcta

SEQ ID NO: 4130955 - DNA, 25 bp, Homo sapien
aggatggtagtttttgaagttctct

SEQ ID NO: 4130956 - DNA, 25 bp, Homo sapien
agcagctcgttttaattccttctac

SEQ ID NO: 4130957 - DNA, 25 bp, Homo sapien
aaagcagctcgttttaattccttct

SEQ ID NO: 4130958 - DNA, 25 bp, Homo sapien
taaagcagctcgttttaattccttc

SEQ ID NO: 4130959 - DNA, 25 bp, Homo sapien
cttaaagcagctcgttttaattcct

SEQ ID NO: 4130960 - DNA, 25 bp, Homo sapien
gtgatcacattccaattatgggtga

SEQ ID NO: 4130961 - DNA, 25 bp, Homo sapien
tgggtaaacaggctctgtgatcaca

SEQ ID NO: 4130962 - DNA, 25 bp, Homo sapien
gcaaacatatggactacttctgggt

SEQ ID NO: 4130963 - DNA, 25 bp, Homo sapien
caattatgggtgatatattctacca

SEQ ID NO: 4130964 - DNA, 25 bp, Homo sapien
ttctgctcccgtaggattggaggaa

SEQ ID NO: 4130965 - DNA, 25 bp, Homo sapien
aaggtggtaatattcgaaacatgtt

SEQ ID NO: 4130966 - DNA, 25 bp, Homo sapien
catcttcctctgagtcaaattctgc

SEQ ID NO: 4130967 - DNA, 25 bp, Homo sapien
ggtggtaatattcgaaacatgttaa

SEQ ID NO: 4130968 - DNA, 25 bp, Homo sapien
aattcataaataagtgtagatgaag

SEQ ID NO: 4130969 - DNA, 25 bp, Homo sapien
agaaaaattcataaataagtgtaga

SEQ ID NO: 4130970 - DNA, 25 bp, Homo sapien
gaaaaattcataaataagtgtagat

SEQ ID NO: 4130971 - DNA, 25 bp, Homo sapien
aaaattcataaataagtgtagatga

SEQ ID NO: 4130972 - DNA, 25 bp, Homo sapien
aatatttccagtaactctgctatgc

SEQ ID NO: 4130973 - DNA, 25 bp, Homo sapien
ttcccatagattctgtgaagggtgg

SEQ ID NO: 4130974 - DNA, 25 bp, Homo sapien
gtggtaaggcaaatccattaattat

SEQ ID NO: 4130975 - DNA, 25 bp, Homo sapien
agattctgtgaagggtggttttaag

SEQ ID NO: 4130976 - DNA, 25 bp, Homo sapien
ctgggggtggtagacactcaagaga

SEQ ID NO: 4130977 - DNA, 25 bp, Homo sapien
gggggtggtagacactcaagagatt

SEQ ID NO: 4130978 - DNA, 25 bp, Homo sapien
gggtggtagacactcaagagatttc

SEQ ID NO: 4130979 - DNA, 25 bp, Homo sapien
gtggtagacactcaagagatttcac

SEQ ID NO: 4130980 - DNA, 25 bp, Homo sapien
aaaactgcactccacagtatgccag

SEQ ID NO: 4130981 - DNA, 25 bp, Homo sapien
tgtgggggtgctgtccttttctaaa

SEQ ID NO: 4130982 - DNA, 25 bp, Homo sapien
tctaaaaactgcactccacagtatg

SEQ ID NO: 4130983 - DNA, 25 bp, Homo sapien
cactggttctgtgggggtgctgtcc

SEQ ID NO: 4130984 - DNA, 25 bp, Homo sapien
ctttggccagcatttgagaagtgtc

SEQ ID NO: 4130985 - DNA, 25 bp, Homo sapien
tttggccagcatttgagaagtgtca

SEQ ID NO: 4130986 - DNA, 25 bp, Homo sapien
ttggccagcatttgagaagtgtcat

SEQ ID NO: 4130987 - DNA, 25 bp, Homo sapien
tcttcacaaattctgatggttcaat

SEQ ID NO: 4130988 - DNA, 25 bp, Homo sapien
atttggccaactgccggaagagggg

SEQ ID NO: 4130989 - DNA, 25 bp, Homo sapien
tatgaacagattcagggcgttgtat

SEQ ID NO: 4130990 - DNA, 25 bp, Homo sapien
gcttcttctcgtacttccattttta

SEQ ID NO: 4130991 - DNA, 25 bp, Homo sapien
ccatgcttcttctcgtacttccatt

SEQ ID NO: 4130992 - DNA, 25 bp, Homo sapien
gcttttgttccatctctatgaacag

SEQ ID NO: 4130993 - DNA, 25 bp, Homo sapien
tttcatgtcactctcgtttttagta

SEQ ID NO: 4130994 - DNA, 25 bp, Homo sapien
ttcatgtcactctcgtttttagtac

SEQ ID NO: 4130995 - DNA, 25 bp, Homo sapien
agttcaaaagtactttttattgcag

SEQ ID NO: 4130996 - DNA, 25 bp, Homo sapien
gaagatgcgtttcttgctgacctcg

SEQ ID NO: 4130997 - DNA, 25 bp, Homo sapien
tagttgaagtgacgcatcagccgcg

SEQ ID NO: 4130998 - DNA, 25 bp, Homo sapien
cccatggcacagacaaagttgatgt

SEQ ID NO: 4130999 - DNA, 25 bp, Homo sapien
ccatctcagcgaaagacaggtagtt

SEQ ID NO: 4131000 - DNA, 25 bp, Homo sapien
gcacacgctcccggtagcttttttc

SEQ ID NO: 4131001 - DNA, 25 bp, Homo sapien
cacacgctcccggtagcttttttct

SEQ ID NO: 4131002 - DNA, 25 bp, Homo sapien
cctcaggttgaaggtgtagtgggac

SEQ ID NO: 4131003 - DNA, 25 bp, Homo sapien
tggttgcatacaccatgatggtggc

SEQ ID NO: 4131004 - DNA, 25 bp, Homo sapien
gcatgccttggaagaccttggagag

SEQ ID NO: 4131005 - DNA, 25 bp, Homo sapien
accttggccgggtcagccatgagca

SEQ ID NO: 4131006 - DNA, 25 bp, Homo sapien
cagggcctgtttgggcaggaaggcc

SEQ ID NO: 4131007 - DNA, 25 bp, Homo sapien
ggaagccccactcagggcctgtttg

SEQ ID NO: 4131008 - DNA, 25 bp, Homo sapien
tgggcaggaaggcctgaaattggtg

SEQ ID NO: 4131009 - DNA, 25 bp, Homo sapien
cctgtttgggcaggaaggcctgaaa

SEQ ID NO: 4131010 - DNA, 25 bp, Homo sapien
tgagctcgtaggacttgacatcgga

SEQ ID NO: 4131011 - DNA, 25 bp, Homo sapien
catcggagcctggtgacatgaagtc

SEQ ID NO: 4131012 - DNA, 25 bp, Homo sapien
catgaagtccccgtaaagaatgggc

SEQ ID NO: 4131013 - DNA, 25 bp, Homo sapien
tctcgtgataccacagtcgcagcag

SEQ ID NO: 4131014 - DNA, 25 bp, Homo sapien
tcatggcgtccatgaagaggaccag

SEQ ID NO: 4131015 - DNA, 25 bp, Homo sapien
gtgttgatctggttgtagtcctcta

SEQ ID NO: 4131016 - DNA, 25 bp, Homo sapien
tgcgacagatgtggctcatggcgtc

SEQ ID NO: 4131017 - DNA, 25 bp, Homo sapien
catgaagaggaccagcttcagcttg

SEQ ID NO: 4131018 - DNA, 25 bp, Homo sapien
catgccgtagttcttggatagttca

SEQ ID NO: 4131019 - DNA, 25 bp, Homo sapien
aatctggaagcactcgtactcggcc

SEQ ID NO: 4131020 - DNA, 25 bp, Homo sapien
tctcgccactcggacatgccgtagt

SEQ ID NO: 4131021 - DNA, 25 bp, Homo sapien
ggtaggttctgtaggcccgccttga

SEQ ID NO: 4131022 - DNA, 25 bp, Homo sapien
tatagggccgcatggtgctgacgat

SEQ ID NO: 4131023 - DNA, 25 bp, Homo sapien
cgccctgtgtaagcagccatgaggt

SEQ ID NO: 4131024 - DNA, 25 bp, Homo sapien
gctcgtccgcagtatacagattggg

SEQ ID NO: 4131025 - DNA, 25 bp, Homo sapien
caccatgtggatgttgctgcgcaca

SEQ ID NO: 4131026 - DNA, 25 bp, Homo sapien
ttctgccggccactcgttaaaccag

SEQ ID NO: 4131027 - DNA, 25 bp, Homo sapien
cgttaaaccagtcgatggtacagca

SEQ ID NO: 4131028 - DNA, 25 bp, Homo sapien
aaactgcctcagacgagctcggaag

SEQ ID NO: 4131029 - DNA, 25 bp, Homo sapien
gatctcattgaggaacacggtggcc

SEQ ID NO: 4131030 - DNA, 25 bp, Homo sapien
tatgaagcagctccaagtagctctt

SEQ ID NO: 4131031 - DNA, 25 bp, Homo sapien
cacttcttggacaccgactggtgga

SEQ ID NO: 4131032 - DNA, 25 bp, Homo sapien
tctgccaggtactcgatgcacttct

SEQ ID NO: 4131033 - DNA, 25 bp, Homo sapien
tcacatagttgtggcgggtcagctc

SEQ ID NO: 4131034 - DNA, 25 bp, Homo sapien
gcagctgaccttgtccacggggact

SEQ ID NO: 4131035 - DNA, 25 bp, Homo sapien
ttgtccacggggactcgcctgggcc

SEQ ID NO: 4131036 - DNA, 25 bp, Homo sapien
tgaccttgtccacggggactcgcct

SEQ ID NO: 4131037 - DNA, 25 bp, Homo sapien
agctgaccttgtccacggggactcg

SEQ ID NO: 4131038 - DNA, 25 bp, Homo sapien
tgcatcttggctacatcctcagaag

SEQ ID NO: 4131039 - DNA, 25 bp, Homo sapien
tgctccatggtgagcatggtgtcct

SEQ ID NO: 4131040 - DNA, 25 bp, Homo sapien
catggtgagcatggtgtccttggca

SEQ ID NO: 4131041 - DNA, 25 bp, Homo sapien
ctacatcctcagaagtgcgcagcag

SEQ ID NO: 4131042 - DNA, 25 bp, Homo sapien
ggtccttctgggcatcgtcagcaat

SEQ ID NO: 4131043 - DNA, 25 bp, Homo sapien
gcatcgtcagcaatagcttgtgcct

SEQ ID NO: 4131044 - DNA, 25 bp, Homo sapien
tctgtctgcactgaattccgggtct

SEQ ID NO: 4131045 - DNA, 25 bp, Homo sapien
cgttcttgttgaggttgcgcaggct

SEQ ID NO: 4131046 - DNA, 25 bp, Homo sapien
ttctatgaccagtttcacacccggg

SEQ ID NO: 4131047 - DNA, 25 bp, Homo sapien
ttgccaggctcccagtagtcatcca

SEQ ID NO: 4131048 - DNA, 25 bp, Homo sapien
ttgaagaggctctcaaggaagtggc

SEQ ID NO: 4131049 - DNA, 25 bp, Homo sapien
tgatgcctttcataatgcacacagc

SEQ ID NO: 4131050 - DNA, 25 bp, Homo sapien
ggctttgatcaccacatccccaatg

SEQ ID NO: 4131051 - DNA, 25 bp, Homo sapien
ggccttggccacaaagtggtacttg

SEQ ID NO: 4131052 - DNA, 25 bp, Homo sapien
cagatggaggtgcaagccttggaca

SEQ ID NO: 4131053 - DNA, 25 bp, Homo sapien
tcgatgtacggctggatggctttga

SEQ ID NO: 4131054 - DNA, 25 bp, Homo sapien
ccttcttggtaatgcattcccggta

SEQ ID NO: 4131055 - DNA, 25 bp, Homo sapien
tgcattgtggcgatgccgtcctcca

SEQ ID NO: 4131056 - DNA, 25 bp, Homo sapien
tccacctcacgaaggcgctgttttg

SEQ ID NO: 4131057 - DNA, 25 bp, Homo sapien
cattcccggtacttagcctgcattg

SEQ ID NO: 4131058 - DNA, 25 bp, Homo sapien
ccaccggcgccctggtcctttctgg

SEQ ID NO: 4131059 - DNA, 25 bp, Homo sapien
ctggggctggccctacccactgtgg

SEQ ID NO: 4131060 - DNA, 25 bp, Homo sapien
gtggcacctggggttgccagggagg

SEQ ID NO: 4131061 - DNA, 25 bp, Homo sapien
gggccgggcccgcttgcaggccttg

SEQ ID NO: 4131062 - DNA, 25 bp, Homo sapien
gtggggtgggctctgggaggctggg

SEQ ID NO: 4131063 - DNA, 25 bp, Homo sapien
cagccccgtggggtgggctctggga

SEQ ID NO: 4131064 - DNA, 25 bp, Homo sapien
gggcagccccgtggggtgggctctg

SEQ ID NO: 4131065 - DNA, 25 bp, Homo sapien
ctggaggggcagccccgtggggtgg

SEQ ID NO: 4131066 - DNA, 25 bp, Homo sapien
ccagcgcaccttctcatccgacagc

SEQ ID NO: 4131067 - DNA, 25 bp, Homo sapien
ccaccaggacatcgccggagatgtt

SEQ ID NO: 4131068 - DNA, 25 bp, Homo sapien
gccacaaagccagcggccaccagga

SEQ ID NO: 4131069 - DNA, 25 bp, Homo sapien
tctcatccgacagcccgttgatgag

SEQ ID NO: 4131070 - DNA, 25 bp, Homo sapien
cgtagagcaccgtgcggtactggcc

SEQ ID NO: 4131071 - DNA, 25 bp, Homo sapien
cagcgtcccgattagcgtgggctcg

SEQ ID NO: 4131072 - DNA, 25 bp, Homo sapien
cctgagctgcttgacccagctgtcg

SEQ ID NO: 4131073 - DNA, 25 bp, Homo sapien
cacgatcggatcttcacagggttcc

SEQ ID NO: 4131074 - DNA, 25 bp, Homo sapien
tgtggagagccaggcactggactgg

SEQ ID NO: 4131075 - DNA, 25 bp, Homo sapien
ctggactgggtcagagctttcctgc

SEQ ID NO: 4131076 - DNA, 25 bp, Homo sapien
caggcactggactgggtcagagctt

SEQ ID NO: 4131077 - DNA, 25 bp, Homo sapien
gcactggactgggtcagagctttcc

SEQ ID NO: 4131078 - DNA, 25 bp, Homo sapien
gatgaccccgttctccactgacagt

SEQ ID NO: 4131079 - DNA, 25 bp, Homo sapien
aactggttgatgaccccgttctcca

SEQ ID NO: 4131080 - DNA, 25 bp, Homo sapien
gatccatttgttggcctggctctga

SEQ ID NO: 4131081 - DNA, 25 bp, Homo sapien
gttcttgatccatttgttggcctgg

SEQ ID NO: 4131082 - DNA, 25 bp, Homo sapien
gttctccatgctgcgcaggaagtcg

SEQ ID NO: 4131083 - DNA, 25 bp, Homo sapien
agtcgcggtcactcaacttgaacac

SEQ ID NO: 4131084 - DNA, 25 bp, Homo sapien
gccaaagcggatggcgttctccatg

SEQ ID NO: 4131085 - DNA, 25 bp, Homo sapien
ctccagggctgggtctagctcctcg

SEQ ID NO: 4131086 - DNA, 25 bp, Homo sapien
tcatggtaggggatcaccgtgtccc

SEQ ID NO: 4131087 - DNA, 25 bp, Homo sapien
agcttcagcaccgtgtttccctgct

SEQ ID NO: 4131088 - DNA, 25 bp, Homo sapien
tttggtggagatctcgggcgtgtag

SEQ ID NO: 4131089 - DNA, 25 bp, Homo sapien
agttgatgagggtgagtttggtgga

SEQ ID NO: 4131090 - DNA, 25 bp, Homo sapien
tcctggcgcatcttggcattactga

SEQ ID NO: 4131091 - DNA, 25 bp, Homo sapien
ttgatgagttccatgtcatctacag

SEQ ID NO: 4131092 - DNA, 25 bp, Homo sapien
tccaggtcgggtcgctcctctgcca

SEQ ID NO: 4131093 - DNA, 25 bp, Homo sapien
gggttgccctcggaggagctgagcc

SEQ ID NO: 4131094 - DNA, 25 bp, Homo sapien
gatgttgagaaaccactcaagggag

SEQ ID NO: 4131095 - DNA, 25 bp, Homo sapien
tactccatgcgcgtcaggtcgatgt

SEQ ID NO: 4131096 - DNA, 25 bp, Homo sapien
acgttggccaggtcggacacacaga

SEQ ID NO: 4131097 - DNA, 25 bp, Homo sapien
ctctctctgagttggcgatgcccga

SEQ ID NO: 4131098 - DNA, 25 bp, Homo sapien
gcttctcaaagaggctgcggcagac

SEQ ID NO: 4131099 - DNA, 25 bp, Homo sapien
gattttgccctcgttcatcatgatg

SEQ ID NO: 4131100 - DNA, 25 bp, Homo sapien
cggttgatgttggagatgcgcttct

SEQ ID NO: 4131101 - DNA, 25 bp, Homo sapien
acgttgctgtagaggctgtaggtca

SEQ ID NO: 4131102 - DNA, 25 bp, Homo sapien
gatgacccggaattctgagaggtgc

SEQ ID NO: 4131103 - DNA, 25 bp, Homo sapien
tccggtgccggattctcagtcatga

SEQ ID NO: 4131104 - DNA, 25 bp, Homo sapien
gagtgctaggatgtctcgccaagcc

SEQ ID NO: 4131105 - DNA, 25 bp, Homo sapien
gctcaaggctgtcgaagatgacccg

SEQ ID NO: 4131106 - DNA, 25 bp, Homo sapien
gggattcggccagccggacagctgg

SEQ ID NO: 4131107 - DNA, 25 bp, Homo sapien
gttggtggccccagggattcggcca

SEQ ID NO: 4131108 - DNA, 25 bp, Homo sapien
cagggattcggccagccggacagct

SEQ ID NO: 4131109 - DNA, 25 bp, Homo sapien
tcggccagccggacagctggggaga

SEQ ID NO: 4131110 - DNA, 25 bp, Homo sapien
ggaactggtctaggtactggtccca

SEQ ID NO: 4131111 - DNA, 25 bp, Homo sapien
tgtccccacgcaggcagcggaggac

SEQ ID NO: 4131112 - DNA, 25 bp, Homo sapien
cagcggaggactagcagcttctgga

SEQ ID NO: 4131113 - DNA, 25 bp, Homo sapien
gtctaggtactggtcccagatgcca

SEQ ID NO: 4131114 - DNA, 25 bp, Homo sapien
acaaagtcctgcatggcgttggtaa

SEQ ID NO: 4131115 - DNA, 25 bp, Homo sapien
caaagtcctgcatggcgttggtaac

SEQ ID NO: 4131116 - DNA, 25 bp, Homo sapien
ctggggttcaatgaagcgtggctcc

SEQ ID NO: 4131117 - DNA, 25 bp, Homo sapien
aagcgtggctccaggttggtggcca

SEQ ID NO: 4131118 - DNA, 25 bp, Homo sapien
ggcagggggagatgctgagaccacc

SEQ ID NO: 4131119 - DNA, 25 bp, Homo sapien
ctgtgccgggtgacagcacaaagat

SEQ ID NO: 4131120 - DNA, 25 bp, Homo sapien
gccgggtgacagcacaaagatgagg

SEQ ID NO: 4131121 - DNA, 25 bp, Homo sapien
tgccgggtgacagcacaaagatgag

SEQ ID NO: 4131122 - DNA, 25 bp, Homo sapien
tgtgccgggtgacagcacaaagatg

SEQ ID NO: 4131123 - DNA, 25 bp, Homo sapien
gcaaacttgtagaggtcggcagcag

SEQ ID NO: 4131124 - DNA, 25 bp, Homo sapien
ttcttcggcaaacttgtagaggtcg

SEQ ID NO: 4131125 - DNA, 25 bp, Homo sapien
tggcagagagctttttggagaactt

SEQ ID NO: 4131126 - DNA, 25 bp, Homo sapien
acttcatttcttcggcaaacttgta

SEQ ID NO: 4131127 - DNA, 25 bp, Homo sapien
cctctctatggagctgcgcatcatg

SEQ ID NO: 4131128 - DNA, 25 bp, Homo sapien
tgtgctcgatgaggcgttctagggc

SEQ ID NO: 4131129 - DNA, 25 bp, Homo sapien
tggagctgcgcatcatggcttctgc

SEQ ID NO: 4131130 - DNA, 25 bp, Homo sapien
ttctagggctggcatccagcttggt

SEQ ID NO: 4131131 - DNA, 25 bp, Homo sapien
tggccatggctccacgtgagcattg

SEQ ID NO: 4131132 - DNA, 25 bp, Homo sapien
gctccacgtgagcattgagacccat

SEQ ID NO: 4131133 - DNA, 25 bp, Homo sapien
tatctggtggccaccctgacaccag

SEQ ID NO: 4131134 - DNA, 25 bp, Homo sapien
gcattgagacccatatctggtggcc

SEQ ID NO: 4131135 - DNA, 25 bp, Homo sapien
tcaccaaggctactataggacttca

SEQ ID NO: 4131136 - DNA, 25 bp, Homo sapien
gagccgttctgcaggatggacactg

SEQ ID NO: 4131137 - DNA, 25 bp, Homo sapien
ccgcgtggcggctcaatggtcatct

SEQ ID NO: 4131138 - DNA, 25 bp, Homo sapien
agcaggttggccctgacaccgcgtg

SEQ ID NO: 4131139 - DNA, 25 bp, Homo sapien
gacagcagcagagacttgaactcca

SEQ ID NO: 4131140 - DNA, 25 bp, Homo sapien
aaacttatggcgctccagggcgttc

SEQ ID NO: 4131141 - DNA, 25 bp, Homo sapien
gatctccatccgtgaactcataggg

SEQ ID NO: 4131142 - DNA, 25 bp, Homo sapien
gctgatgcagatgcgcagatctcca

SEQ ID NO: 4131143 - DNA, 25 bp, Homo sapien
atctggtggtagatgcccgaggcgc

SEQ ID NO: 4131144 - DNA, 25 bp, Homo sapien
gagcacgtcagggttgtagaagtcc

SEQ ID NO: 4131145 - DNA, 25 bp, Homo sapien
gatgttcatgatgcagcgccggtcc

SEQ ID NO: 4131146 - DNA, 25 bp, Homo sapien
cgtaattgatctcccctgccgtgta

SEQ ID NO: 4131147 - DNA, 25 bp, Homo sapien
cattgtcatgcaggccaaagatctc

SEQ ID NO: 4131148 - DNA, 25 bp, Homo sapien
cccaggagggcgaacgtctcgttct

SEQ ID NO: 4131149 - DNA, 25 bp, Homo sapien
tctgggcaaaggtgatgttggcatt

SEQ ID NO: 4131150 - DNA, 25 bp, Homo sapien
atgatttgggttgcagctggatgat

SEQ ID NO: 4131151 - DNA, 25 bp, Homo sapien
tgcaagttgataggctcaggcacct

SEQ ID NO: 4131152 - DNA, 25 bp, Homo sapien
gaatgttttgggtgacgtcctccac

SEQ ID NO: 4131153 - DNA, 25 bp, Homo sapien
cattgattcctcatacagcactggg

SEQ ID NO: 4131154 - DNA, 25 bp, Homo sapien
ggtacttggccatcacccattgcaa

SEQ ID NO: 4131155 - DNA, 25 bp, Homo sapien
tctctacagtccagtggccgctgac

SEQ ID NO: 4131156 - DNA, 25 bp, Homo sapien
tcatttctctacagtccagtggccg

SEQ ID NO: 4131157 - DNA, 25 bp, Homo sapien
gttagaggatgtgtagcacttggca

SEQ ID NO: 4131158 - DNA, 25 bp, Homo sapien
cctggcccatagtaacccctgttgt

SEQ ID NO: 4131159 - DNA, 25 bp, Homo sapien
gacttggatagcttacggaacattt

SEQ ID NO: 4131160 - DNA, 25 bp, Homo sapien
agtagctatgctccgcagctcaagg

SEQ ID NO: 4131161 - DNA, 25 bp, Homo sapien
ggcaaaacatagaggctaagagcag

SEQ ID NO: 4131162 - DNA, 25 bp, Homo sapien
gggtcacagtttactcgtctacaaa

SEQ ID NO: 4131163 - DNA, 25 bp, Homo sapien
gaagacagctgggatgccatcttgg

SEQ ID NO: 4131164 - DNA, 25 bp, Homo sapien
gaagaagaatccactgatccagaag

SEQ ID NO: 4131165 - DNA, 25 bp, Homo sapien
gatgggtaggccttggcactccaga

SEQ ID NO: 4131166 - DNA, 25 bp, Homo sapien
tccaggcgttgcagcaggtccatga

SEQ ID NO: 4131167 - DNA, 25 bp, Homo sapien
tgacctggccctggctgtgcccaga

SEQ ID NO: 4131168 - DNA, 25 bp, Homo sapien
ctgacctggccctggctgtgcccag

SEQ ID NO: 4131169 - DNA, 25 bp, Homo sapien
gacctggccctggctgtgcccagac

SEQ ID NO: 4131170 - DNA, 25 bp, Homo sapien
tcctgggactcatggcctcttctgg

SEQ ID NO: 4131171 - DNA, 25 bp, Homo sapien
ggatttctgatggacccagcccaga

SEQ ID NO: 4131172 - DNA, 25 bp, Homo sapien
ccagaatctgggttaggaggcacaa

SEQ ID NO: 4131173 - DNA, 25 bp, Homo sapien
tctgagagagctgcctaatgctgcc

SEQ ID NO: 4131174 - DNA, 25 bp, Homo sapien
taatccatggatatagcaccctact

SEQ ID NO: 4131175 - DNA, 25 bp, Homo sapien
atccatggatatagcaccctacttg

SEQ ID NO: 4131176 - DNA, 25 bp, Homo sapien
gaataatccatggatatagcaccct

SEQ ID NO: 4131177 - DNA, 25 bp, Homo sapien
ccatggatatagcaccctacttggg

SEQ ID NO: 4131178 - DNA, 25 bp, Homo sapien
cagctggaaggcctctggatcccag

SEQ ID NO: 4131179 - DNA, 25 bp, Homo sapien
gtgttggcaagagccagataacggc

SEQ ID NO: 4131180 - DNA, 25 bp, Homo sapien
cacaggtaaaagtcctggtcctggg

SEQ ID NO: 4131181 - DNA, 25 bp, Homo sapien
ccagataacggccatctctgtgtac

SEQ ID NO: 4131182 - DNA, 25 bp, Homo sapien
ccatagtgtaggctcccatcccagg

SEQ ID NO: 4131183 - DNA, 25 bp, Homo sapien
ccgcccatagtgtaggctcccatcc

SEQ ID NO: 4131184 - DNA, 25 bp, Homo sapien
gcccatagtgtaggctcccatccca

SEQ ID NO: 4131185 - DNA, 25 bp, Homo sapien
ccccgcccatagtgtaggctcccat

SEQ ID NO: 4131186 - DNA, 25 bp, Homo sapien
agagtgtcctgtggttgatagtgtt

SEQ ID NO: 4131187 - DNA, 25 bp, Homo sapien
ccacgctttatccagtgtcgctggg

SEQ ID NO: 4131188 - DNA, 25 bp, Homo sapien
gctggggctgatgggtggggatctc

SEQ ID NO: 4131189 - DNA, 25 bp, Homo sapien
acagatgagggccacaccacgcttt

SEQ ID NO: 4131190 - DNA, 25 bp, Homo sapien
tggggatctccacagcaatgacata

SEQ ID NO: 4131191 - DNA, 25 bp, Homo sapien
aattcagctttaatggccccagccc

SEQ ID NO: 4131192 - DNA, 25 bp, Homo sapien
aaaattcagctttaatggccccagc

SEQ ID NO: 4131193 - DNA, 25 bp, Homo sapien
ttcagctttaatggccccagccctt

SEQ ID NO: 4131194 - DNA, 25 bp, Homo sapien
aaattcagctttaatggccccagcc

SEQ ID NO: 4131195 - DNA, 25 bp, Homo sapien
tgcgggatcatgacttagagcttgc

SEQ ID NO: 4131196 - DNA, 25 bp, Homo sapien
gggagcacccttgcaggattctcta

SEQ ID NO: 4131197 - DNA, 25 bp, Homo sapien
caagctagtggtgaagcctccaggc

SEQ ID NO: 4131198 - DNA, 25 bp, Homo sapien
tcttggagatcctactggaggtcct

SEQ ID NO: 4131199 - DNA, 25 bp, Homo sapien
tctgacatgggaggcctaaacaggg

SEQ ID NO: 4131200 - DNA, 25 bp, Homo sapien
tgtaaagggccgctgttaccacagg

SEQ ID NO: 4131201 - DNA, 25 bp, Homo sapien
gagccacccgctaatgtctgacatg

SEQ ID NO: 4131202 - DNA, 25 bp, Homo sapien
gagagcagtccttccctaaagaaag

SEQ ID NO: 4131203 - DNA, 25 bp, Homo sapien
agggcgccgctgtactggagcttta

SEQ ID NO: 4131204 - DNA, 25 bp, Homo sapien
gactatgaccttcgggaatcgcggc

SEQ ID NO: 4131205 - DNA, 25 bp, Homo sapien
ttgacacaggccgtggtagctacct

SEQ ID NO: 4131206 - DNA, 25 bp, Homo sapien
gcggcgacgcctaccgttagtagaa

SEQ ID NO: 4131207 - DNA, 25 bp, Homo sapien
gacccgccgccgcaagaatgattta

SEQ ID NO: 4131208 - DNA, 25 bp, Homo sapien
ggacgcccctcgaaacgattatcaa

SEQ ID NO: 4131209 - DNA, 25 bp, Homo sapien
aatacgtgtcggtgtggtcacaacc

SEQ ID NO: 4131210 - DNA, 25 bp, Homo sapien
ggcttaaggagcatcccgcggatgc

SEQ ID NO: 4131211 - DNA, 25 bp, Homo sapien
tcgctgggccaagacgttccttgag

SEQ ID NO: 4131212 - DNA, 25 bp, Homo sapien
cagttctttgcatcgctgggccaag

SEQ ID NO: 4131213 - DNA, 25 bp, Homo sapien
ccttgagtaggattctgtgcacaca

SEQ ID NO: 4131214 - DNA, 25 bp, Homo sapien
tgtgcacacactgctagttacaaga

SEQ ID NO: 4131215 - DNA, 25 bp, Homo sapien
gggctaccccgaccatccagcaata

SEQ ID NO: 4131216 - DNA, 25 bp, Homo sapien
tgcggagcagttcccagttactggg

SEQ ID NO: 4131217 - DNA, 25 bp, Homo sapien
cagttactggggctaccccgaccat

SEQ ID NO: 4131218 - DNA, 25 bp, Homo sapien
gggtccacgtgagcggactgcggag

SEQ ID NO: 4131219 - DNA, 25 bp, Homo sapien
catctgagccgagtacaatagccaa

SEQ ID NO: 4131220 - DNA, 25 bp, Homo sapien
tcaattcttttcacctaggctcagg

SEQ ID NO: 4131221 - DNA, 25 bp, Homo sapien
gaaaatccaccgctgtgaagcaagg

SEQ ID NO: 4131222 - DNA, 25 bp, Homo sapien
gccactgagatatggtctgtaccca

SEQ ID NO: 4131223 - DNA, 25 bp, Homo sapien
cagagaggtttaagtatcctgccca

SEQ ID NO: 4131224 - DNA, 25 bp, Homo sapien
tcaagttccccagggtcaaggcaat

SEQ ID NO: 4131225 - DNA, 25 bp, Homo sapien
cctgcccaaggtaagagttagtaag

SEQ ID NO: 4131226 - DNA, 25 bp, Homo sapien
caaacacgccatgcagtaggtacca

SEQ ID NO: 4131227 - DNA, 25 bp, Homo sapien
aattcttctatactattgtgaggac

SEQ ID NO: 4131228 - DNA, 25 bp, Homo sapien
tcttgaattcttctatactattgtg

SEQ ID NO: 4131229 - DNA, 25 bp, Homo sapien
attgtgaggacaatacaggctcttc

SEQ ID NO: 4131230 - DNA, 25 bp, Homo sapien
tctatactattgtgaggacaataca

SEQ ID NO: 4131231 - DNA, 25 bp, Homo sapien
cattccttcttttcttttacagtct

SEQ ID NO: 4131232 - DNA, 25 bp, Homo sapien
caatctctggcattccttcttttct

SEQ ID NO: 4131233 - DNA, 25 bp, Homo sapien
ctcaatctctggcattccttctttt

SEQ ID NO: 4131234 - DNA, 25 bp, Homo sapien
ccttcttttcttttacagtcttcat

SEQ ID NO: 4131235 - DNA, 25 bp, Homo sapien
tcttctgccaactactctgaatctc

SEQ ID NO: 4131236 - DNA, 25 bp, Homo sapien
tgaatgaatgcaagagcaaaccctc

SEQ ID NO: 4131237 - DNA, 25 bp, Homo sapien
ggtggtaccacctttacaaagcata

SEQ ID NO: 4131238 - DNA, 25 bp, Homo sapien
tgtactgcctatgttgactgaatga

SEQ ID NO: 4131239 - DNA, 25 bp, Homo sapien
tgagttatttgagggcaggaaccgg

SEQ ID NO: 4131240 - DNA, 25 bp, Homo sapien
ttgagggcaggaaccggattgtaag

SEQ ID NO: 4131241 - DNA, 25 bp, Homo sapien
agggcaggaaccggattgtaagcat

SEQ ID NO: 4131242 - DNA, 25 bp, Homo sapien
ttatttgagggcaggaaccggattg

SEQ ID NO: 4131243 - DNA, 25 bp, Homo sapien
gatcttgttgataacctttttaaca

SEQ ID NO: 4131244 - DNA, 25 bp, Homo sapien
tacaagagaaataagaagcacaagg

SEQ ID NO: 4131245 - DNA, 25 bp, Homo sapien
ctttggggatcttgttgataacctt

SEQ ID NO: 4131246 - DNA, 25 bp, Homo sapien
ataagaagcacaaggtgttctttgg

SEQ ID NO: 4131247 - DNA, 25 bp, Homo sapien
cctctgggttaccctcctagtcttg

SEQ ID NO: 4131248 - DNA, 25 bp, Homo sapien
caggccctgaagacggtttcctctg

SEQ ID NO: 4131249 - DNA, 25 bp, Homo sapien
ctgggttaccctcctagtcttggca

SEQ ID NO: 4131250 - DNA, 25 bp, Homo sapien
aggccctgaagacggtttcctctgg

SEQ ID NO: 4131251 - DNA, 25 bp, Homo sapien
cattcctctaagtcaggaaggagta

SEQ ID NO: 4131252 - DNA, 25 bp, Homo sapien
gaagcaagtatactgccccacacag

SEQ ID NO: 4131253 - DNA, 25 bp, Homo sapien
gagaggacacccagaatttggctca

SEQ ID NO: 4131254 - DNA, 25 bp, Homo sapien
ggctcaaattgaccattaagaatgg

SEQ ID NO: 4131255 - DNA, 25 bp, Homo sapien
aaataatgcacgctgatattgtctt

SEQ ID NO: 4131256 - DNA, 25 bp, Homo sapien
aagacagaaataatgcacgctgata

SEQ ID NO: 4131257 - DNA, 25 bp, Homo sapien
gacagaaataatgcacgctgatatt

SEQ ID NO: 4131258 - DNA, 25 bp, Homo sapien
cagaaataatgcacgctgatattgt

SEQ ID NO: 4131259 - DNA, 25 bp, Homo sapien
aaagccataggatattcaaagcaaa

SEQ ID NO: 4131260 - DNA, 25 bp, Homo sapien
gtcagtacaccaaaagccataggat

SEQ ID NO: 4131261 - DNA, 25 bp, Homo sapien
taacagagaacagtcagtacaccaa

SEQ ID NO: 4131262 - DNA, 25 bp, Homo sapien
tgaggatgaatgtaacagagaacag

SEQ ID NO: 4131263 - DNA, 25 bp, Homo sapien
ttcaagagatcctcctgcctcggcc

SEQ ID NO: 4131264 - DNA, 25 bp, Homo sapien
gtcttgaactcctgggttcaagaga

SEQ ID NO: 4131265 - DNA, 25 bp, Homo sapien
tgtagagacaaggttgcccaggctg

SEQ ID NO: 4131266 - DNA, 25 bp, Homo sapien
acaggcgtgagccactgcacccagc

SEQ ID NO: 4131267 - DNA, 25 bp, Homo sapien
ttcatgcaaccgaatactaccaagt

SEQ ID NO: 4131268 - DNA, 25 bp, Homo sapien
tacgtctagtgggattgactggaaa

SEQ ID NO: 4131269 - DNA, 25 bp, Homo sapien
gctatgaatgcatgcaacaacatgg

SEQ ID NO: 4131270 - DNA, 25 bp, Homo sapien
aaataatccatagatcagaacagtg

SEQ ID NO: 4131271 - DNA, 25 bp, Homo sapien
tacaaccgctttggacagtgatgtg

SEQ ID NO: 4131272 - DNA, 25 bp, Homo sapien
gatgtggcaacctcacataaagtta

SEQ ID NO: 4131273 - DNA, 25 bp, Homo sapien
caactggacttcttataaattgctg

SEQ ID NO: 4131274 - DNA, 25 bp, Homo sapien
caaagttccggcaagaatactgtgc

SEQ ID NO: 4131275 - DNA, 25 bp, Homo sapien
tgcatagggaatcctgtaacaaggc

SEQ ID NO: 4131276 - DNA, 25 bp, Homo sapien
taaactgggctccattacaattaca

SEQ ID NO: 4131277 - DNA, 25 bp, Homo sapien
tatccagatccacagatatatggtc

SEQ ID NO: 4131278 - DNA, 25 bp, Homo sapien
aaggcaagccaaagactaggaagaa

SEQ ID NO: 4131279 - DNA, 25 bp, Homo sapien
cctctgaggcagcttactagataag

SEQ ID NO: 4131280 - DNA, 25 bp, Homo sapien
gggctgcctcctttttgatgtcttc

SEQ ID NO: 4131281 - DNA, 25 bp, Homo sapien
ctctgaggcagcttactagataaga

SEQ ID NO: 4131282 - DNA, 25 bp, Homo sapien
tctgaggcagcttactagataagat

SEQ ID NO: 4131283 - DNA, 25 bp, Homo sapien
tccctttttcttgcacacaaagcag

SEQ ID NO: 4131284 - DNA, 25 bp, Homo sapien
attgtgaaaggcaacccctttcttg

SEQ ID NO: 4131285 - DNA, 25 bp, Homo sapien
ctccctttttcttgcacacaaagca

SEQ ID NO: 4131286 - DNA, 25 bp, Homo sapien
gctccctttttcttgcacacaaagc

SEQ ID NO: 4131287 - DNA, 25 bp, Homo sapien
tcattgatgtagtttcccaatggcc

SEQ ID NO: 4131288 - DNA, 25 bp, Homo sapien
ttgatgtagtttcccaatggcccgc

SEQ ID NO: 4131289 - DNA, 25 bp, Homo sapien
gtttgtcattgatgtagtttcccaa

SEQ ID NO: 4131290 - DNA, 25 bp, Homo sapien
tgtcattgatgtagtttcccaatgg

SEQ ID NO: 4131291 - DNA, 25 bp, Homo sapien
caacactctgttgggataagtcttc

SEQ ID NO: 4131292 - DNA, 25 bp, Homo sapien
ccacatgcccatgttggatgttctg

SEQ ID NO: 4131293 - DNA, 25 bp, Homo sapien
taagtcttcacaacataagatgcag

SEQ ID NO: 4131294 - DNA, 25 bp, Homo sapien
tgttgggcgatgtttgtcacaaaat

SEQ ID NO: 4131295 - DNA, 25 bp, Homo sapien
gtatgcacttgcggtggtagatggc

SEQ ID NO: 4131296 - DNA, 25 bp, Homo sapien
gcacttgcggtggtagatggcttga

SEQ ID NO: 4131297 - DNA, 25 bp, Homo sapien
ctgtatgcacttgcggtggtagatg

SEQ ID NO: 4131298 - DNA, 25 bp, Homo sapien
atgcacttgcggtggtagatggctt

SEQ ID NO: 4131299 - DNA, 25 bp, Homo sapien
caccctcacccctacaaagaggatg

SEQ ID NO: 4131300 - DNA, 25 bp, Homo sapien
accctcacccctacaaagaggatgt

SEQ ID NO: 4131301 - DNA, 25 bp, Homo sapien
ccctcacccctacaaagaggatgtt

SEQ ID NO: 4131302 - DNA, 25 bp, Homo sapien
cctcacccctacaaagaggatgttg

SEQ ID NO: 4131303 - DNA, 25 bp, Homo sapien
gaaactcttttcgattgttacactg

SEQ ID NO: 4131304 - DNA, 25 bp, Homo sapien
cactgtggacatttgaagaaatgct

SEQ ID NO: 4131305 - DNA, 25 bp, Homo sapien
cttttcgattgttacactgtggaca

SEQ ID NO: 4131306 - DNA, 25 bp, Homo sapien
gaggaaactcttttcgattgttaca

SEQ ID NO: 4131307 - DNA, 25 bp, Homo sapien
tgataattgaaaagcactccctcct

SEQ ID NO: 4131308 - DNA, 25 bp, Homo sapien
tctagaaatctaggcaacccactcc

SEQ ID NO: 4131309 - DNA, 25 bp, Homo sapien
ggtgaaacttttgtccatcagggag

SEQ ID NO: 4131310 - DNA, 25 bp, Homo sapien
gcaggttccttagttccactctgga

SEQ ID NO: 4131311 - DNA, 25 bp, Homo sapien
gaaagcccctggctcgagttcccag

SEQ ID NO: 4131312 - DNA, 25 bp, Homo sapien
cagtgctgatagcgctgatataagt

SEQ ID NO: 4131313 - DNA, 25 bp, Homo sapien
agaaagcccctggctcgagttccca

SEQ ID NO: 4131314 - DNA, 25 bp, Homo sapien
cacagtgctgatagcgctgatataa

SEQ ID NO: 4131315 - DNA, 25 bp, Homo sapien
cacacaagtgagtcgggctggtcaa

SEQ ID NO: 4131316 - DNA, 25 bp, Homo sapien
catcagtcgtaaccccttgaaaggt

SEQ ID NO: 4131317 - DNA, 25 bp, Homo sapien
catgcttggatgtttgctatgggcc

SEQ ID NO: 4131318 - DNA, 25 bp, Homo sapien
tctaagatagcactgatgagagctc

SEQ ID NO: 4131319 - DNA, 25 bp, Homo sapien
gttccgtgggatccgcatgtagcac

SEQ ID NO: 4131320 - DNA, 25 bp, Homo sapien
ggttccgtgggatccgcatgtagca

SEQ ID NO: 4131321 - DNA, 25 bp, Homo sapien
ctgtgggttccgtgggatccgcatg

SEQ ID NO: 4131322 - DNA, 25 bp, Homo sapien
tgggttccgtgggatccgcatgtag

SEQ ID NO: 4131323 - DNA, 25 bp, Homo sapien
tgtggctgcagcaggtgaacactcc

SEQ ID NO: 4131324 - DNA, 25 bp, Homo sapien
ctgtggctgcagcaggtgaacactc

SEQ ID NO: 4131325 - DNA, 25 bp, Homo sapien
gctgcagcaggtgaacactcctcac

SEQ ID NO: 4131326 - DNA, 25 bp, Homo sapien
tggctgcagcaggtgaacactcctc

SEQ ID NO: 4131327 - DNA, 25 bp, Homo sapien
ttgctctgaggccggcccatccctc

SEQ ID NO: 4131328 - DNA, 25 bp, Homo sapien
aggcaccacaagtccctacagcccc

SEQ ID NO: 4131329 - DNA, 25 bp, Homo sapien
tcccaggcaccacaagtccctacag

SEQ ID NO: 4131330 - DNA, 25 bp, Homo sapien
ctttcccaggcaccacaagtcccta

SEQ ID NO: 4131331 - DNA, 25 bp, Homo sapien
gaaggttctggccaatcagtccaag

SEQ ID NO: 4131332 - DNA, 25 bp, Homo sapien
tcctgccacgagaggactctggctt

SEQ ID NO: 4131333 - DNA, 25 bp, Homo sapien
gattctgacacccttggacctccag

SEQ ID NO: 4131334 - DNA, 25 bp, Homo sapien
tcagtccaagaaaggcccggattct

SEQ ID NO: 4131335 - DNA, 25 bp, Homo sapien
gcttcataccctattgtgtgggaca

SEQ ID NO: 4131336 - DNA, 25 bp, Homo sapien
tgtagccataaacgcatttccttgt

SEQ ID NO: 4131337 - DNA, 25 bp, Homo sapien
tttgcttggctcatagtctcactgc

SEQ ID NO: 4131338 - DNA, 25 bp, Homo sapien
tccttgttggcatctggactgctcc

SEQ ID NO: 4131339 - DNA, 25 bp, Homo sapien
ggcatcttgcagtgtcagaaagtaa

SEQ ID NO: 4131340 - DNA, 25 bp, Homo sapien
tatccctaagtgaactgatttgtcc

SEQ ID NO: 4131341 - DNA, 25 bp, Homo sapien
gatttgtcccagctcctaagttatg

SEQ ID NO: 4131342 - DNA, 25 bp, Homo sapien
tacattgtaacccaaagtccaggag

SEQ ID NO: 4131343 - DNA, 25 bp, Homo sapien
tctgtagaatctcactcactttggg

SEQ ID NO: 4131344 - DNA, 25 bp, Homo sapien
cagagaaagggacccaagctgagaa

SEQ ID NO: 4131345 - DNA, 25 bp, Homo sapien
gatggcactaacgtgacctcgtcct

SEQ ID NO: 4131346 - DNA, 25 bp, Homo sapien
aagctcagacaagggccacgtgtgc

SEQ ID NO: 4131347 - DNA, 25 bp, Homo sapien
ggcgagagtgattctgggccagttc

SEQ ID NO: 4131348 - DNA, 25 bp, Homo sapien
ggagcagggcgagagtgattctggg

SEQ ID NO: 4131349 - DNA, 25 bp, Homo sapien
gcagggcgagagtgattctgggcca

SEQ ID NO: 4131350 - DNA, 25 bp, Homo sapien
cgccggagcagggcgagagtgattc

SEQ ID NO: 4131351 - DNA, 25 bp, Homo sapien
gcagcagggggcggggtcaacgtcc

SEQ ID NO: 4131352 - DNA, 25 bp, Homo sapien
ctagcagcagcagggggcggggtca

SEQ ID NO: 4131353 - DNA, 25 bp, Homo sapien
agcagcagcagggggcggggtcaac

SEQ ID NO: 4131354 - DNA, 25 bp, Homo sapien
cagcagcagggggcggggtcaacgt

SEQ ID NO: 4131355 - DNA, 25 bp, Homo sapien
cgccgccaccgccgcccggcgcaga

SEQ ID NO: 4131356 - DNA, 25 bp, Homo sapien
ttcgggtctccgccgccaccgccgc

SEQ ID NO: 4131357 - DNA, 25 bp, Homo sapien
tccgccgccaccgccgcccggcgca

SEQ ID NO: 4131358 - DNA, 25 bp, Homo sapien
tctccgccgccaccgccgcccggcg

SEQ ID NO: 4131359 - DNA, 25 bp, Homo sapien
tcgggcccgaaggtgcgcgcggtcg

SEQ ID NO: 4131360 - DNA, 25 bp, Homo sapien
tccacaagctccgagcccacgacgc

SEQ ID NO: 4131361 - DNA, 25 bp, Homo sapien
gcgcgcttccttggccggctcggct

SEQ ID NO: 4131362 - DNA, 25 bp, Homo sapien
cgctcgggcccgaaggtgcgcgcgg

SEQ ID NO: 4131363 - DNA, 25 bp, Homo sapien
gctttactgtccactcatggctgcc

SEQ ID NO: 4131364 - DNA, 25 bp, Homo sapien
tcgctgtagcggtgctttactgtcc

SEQ ID NO: 4131365 - DNA, 25 bp, Homo sapien
tcatgcaggtcatggaagtcgctgt

SEQ ID NO: 4131366 - DNA, 25 bp, Homo sapien
tcatggaagtcgctgtagcggtgct

SEQ ID NO: 4131367 - DNA, 25 bp, Homo sapien
ggccagtactctgggggtcacgcca

SEQ ID NO: 4131368 - DNA, 25 bp, Homo sapien
ccaattatctttttgggcggaagca

SEQ ID NO: 4131369 - DNA, 25 bp, Homo sapien
aaaatgcaagaagtgggccagtact

SEQ ID NO: 4131370 - DNA, 25 bp, Homo sapien
ttttgggcggaagcagatttttatc

SEQ ID NO: 4131371 - DNA, 25 bp, Homo sapien
tttgcaggcacaggtgaaaacccga

SEQ ID NO: 4131372 - DNA, 25 bp, Homo sapien
tcccctggtttgctgcctcaagttt

SEQ ID NO: 4131373 - DNA, 25 bp, Homo sapien
tacggcaaatctgtcaactaacatg

SEQ ID NO: 4131374 - DNA, 25 bp, Homo sapien
ggccacaatgcattcctaaccaggg

SEQ ID NO: 4131375 - DNA, 25 bp, Homo sapien
gaaggacattctcggctgggcacca

SEQ ID NO: 4131376 - DNA, 25 bp, Homo sapien
tttttgaaggacattctcggctggg

SEQ ID NO: 4131377 - DNA, 25 bp, Homo sapien
atttttttgaaggacattctcggct

SEQ ID NO: 4131378 - DNA, 25 bp, Homo sapien
ttgaaggacattctcggctgggcac

SEQ ID NO: 4131379 - DNA, 25 bp, Homo sapien
tgtacttcgcaatcctccctgctgt

SEQ ID NO: 4131380 - DNA, 25 bp, Homo sapien
aagggttccccacgatcagtactga

SEQ ID NO: 4131381 - DNA, 25 bp, Homo sapien
tcagatcgcctggagccaagcaggt

SEQ ID NO: 4131382 - DNA, 25 bp, Homo sapien
aaacctcattttcaacggcacactt

SEQ ID NO: 4131383 - DNA, 25 bp, Homo sapien
gagccacagctttaagggaccggca

SEQ ID NO: 4131384 - DNA, 25 bp, Homo sapien
tatacagcacgagaataactcctcc

SEQ ID NO: 4131385 - DNA, 25 bp, Homo sapien
cctgtatcccgtggacaaaaagcaa

SEQ ID NO: 4131386 - DNA, 25 bp, Homo sapien
gaaattcagtttatatacagcacga

SEQ ID NO: 4131387 - DNA, 25 bp, Homo sapien
gccagtgccgcggtgatgccattta

SEQ ID NO: 4131388 - DNA, 25 bp, Homo sapien
ttcagccagtgccgcggtgatgcca

SEQ ID NO: 4131389 - DNA, 25 bp, Homo sapien
cagtgccgcggtgatgccatttatc

SEQ ID NO: 4131390 - DNA, 25 bp, Homo sapien
gtgccgcggtgatgccatttatctc

SEQ ID NO: 4131391 - DNA, 25 bp, Homo sapien
tgaagtccaggatgtgcccgaggtc

SEQ ID NO: 4131392 - DNA, 25 bp, Homo sapien
ttggcatccccactggcgcacgtgg

SEQ ID NO: 4131393 - DNA, 25 bp, Homo sapien
tccgtgacggcatacagctgcaggg

SEQ ID NO: 4131394 - DNA, 25 bp, Homo sapien
tacttaaggcgacaggtgaagtcca

SEQ ID NO: 4131395 - DNA, 25 bp, Homo sapien
tgaatattgataggtcgaacggcag

SEQ ID NO: 4131396 - DNA, 25 bp, Homo sapien
attgataggtcgaacggcaggagct

SEQ ID NO: 4131397 - DNA, 25 bp, Homo sapien
aatattgataggtcgaacggcagga

SEQ ID NO: 4131398 - DNA, 25 bp, Homo sapien
tattgataggtcgaacggcaggagc

SEQ ID NO: 4131399 - DNA, 25 bp, Homo sapien
tctgatgtgcttagcatcacagtga

SEQ ID NO: 4131400 - DNA, 25 bp, Homo sapien
catcgaggttgctgagaagcggaca

SEQ ID NO: 4131401 - DNA, 25 bp, Homo sapien
gaagcggacactcagcgtggctaag

SEQ ID NO: 4131402 - DNA, 25 bp, Homo sapien
ctaaggtgggcttcgatgcgaccag

SEQ ID NO: 4131403 - DNA, 25 bp, Homo sapien
cagatgtgaactaaagtgtcccagg

SEQ ID NO: 4131404 - DNA, 25 bp, Homo sapien
gcctctgaatactgatagacatagc

SEQ ID NO: 4131405 - DNA, 25 bp, Homo sapien
atccttagtggtggagaccacagcc

SEQ ID NO: 4131406 - DNA, 25 bp, Homo sapien
caggcaggatataggtgaagcttac

SEQ ID NO: 4131407 - DNA, 25 bp, Homo sapien
cattagcaagatgtaatccataaaa

SEQ ID NO: 4131408 - DNA, 25 bp, Homo sapien
tttctgctgctcacatataaacaac

SEQ ID NO: 4131409 - DNA, 25 bp, Homo sapien
tgccttttctatacccagggaaaga

SEQ ID NO: 4131410 - DNA, 25 bp, Homo sapien
cataatattagccactacatgcctt

SEQ ID NO: 4131411 - DNA, 25 bp, Homo sapien
cacagcgcctagccgttttttcttt

SEQ ID NO: 4131412 - DNA, 25 bp, Homo sapien
ccacagcgcctagccgttttttctt

SEQ ID NO: 4131413 - DNA, 25 bp, Homo sapien
caaactcgcaggcacaagcaaatcc

SEQ ID NO: 4131414 - DNA, 25 bp, Homo sapien
actcgcaggcacaagcaaatcctcc

SEQ ID NO: 4131415 - DNA, 25 bp, Homo sapien
ctgaggcttcaggaacaaggacttc

SEQ ID NO: 4131416 - DNA, 25 bp, Homo sapien
cgatctcggagacgctgttgtggct

SEQ ID NO: 4131417 - DNA, 25 bp, Homo sapien
ggatgacggcagtcacagggccttc

SEQ ID NO: 4131418 - DNA, 25 bp, Homo sapien
tcaagcgtggtcaatgcctgccaag

SEQ ID NO: 4131419 - DNA, 25 bp, Homo sapien
cagggccttctagggttgtgccttc

SEQ ID NO: 4131420 - DNA, 25 bp, Homo sapien
acaaccagcaatccattgtgactca

SEQ ID NO: 4131421 - DNA, 25 bp, Homo sapien
tgcagattgtccacaaccagcaatc

SEQ ID NO: 4131422 - DNA, 25 bp, Homo sapien
ttgtccacaaccagcaatccattgt

SEQ ID NO: 4131423 - DNA, 25 bp, Homo sapien
aaccagcaatccattgtgactcagg

SEQ ID NO: 4131424 - DNA, 25 bp, Homo sapien
tcaggacggaggtgcatcatcatgc

SEQ ID NO: 4131425 - DNA, 25 bp, Homo sapien
cactaatggcaggatgggccttcca

SEQ ID NO: 4131426 - DNA, 25 bp, Homo sapien
gatcctaaagcgaagacagcaaccc

SEQ ID NO: 4131427 - DNA, 25 bp, Homo sapien
gaacagcgtaaagtggctcaggtca

SEQ ID NO: 4131428 - DNA, 25 bp, Homo sapien
tcccggagatccaggttgaccagtg

SEQ ID NO: 4131429 - DNA, 25 bp, Homo sapien
caggtccagatgcacaaggttatac

SEQ ID NO: 4131430 - DNA, 25 bp, Homo sapien
tgttcgatcctgttgtcccggagat

SEQ ID NO: 4131431 - DNA, 25 bp, Homo sapien
tgcaggccactcagactctctagga

SEQ ID NO: 4131432 - DNA, 25 bp, Homo sapien
ctgcaaggtatgagttccatcccct

SEQ ID NO: 4131433 - DNA, 25 bp, Homo sapien
gcaacacgccaacacgtttcatggt

SEQ ID NO: 4131434 - DNA, 25 bp, Homo sapien
tttggtcccttctcttaacacttca

SEQ ID NO: 4131435 - DNA, 25 bp, Homo sapien
tatgagttccatcccctttggtccc

SEQ ID NO: 4131436 - DNA, 25 bp, Homo sapien
gcagagacacgtgctccagacacgg

SEQ ID NO: 4131437 - DNA, 25 bp, Homo sapien
acgtgctccagacacgggaggctgc

SEQ ID NO: 4131438 - DNA, 25 bp, Homo sapien
gggaggctgcctatgctccggacct

SEQ ID NO: 4131439 - DNA, 25 bp, Homo sapien
ctccagacacgggaggctgcctatg

SEQ ID NO: 4131440 - DNA, 25 bp, Homo sapien
ctctgaggccctctctccgaactga

SEQ ID NO: 4131441 - DNA, 25 bp, Homo sapien
gccctctctccgaactgagccagca

SEQ ID NO: 4131442 - DNA, 25 bp, Homo sapien
tctgaggccctctctccgaactgag

SEQ ID NO: 4131443 - DNA, 25 bp, Homo sapien
gaggccctctctccgaactgagcca

SEQ ID NO: 4131444 - DNA, 25 bp, Homo sapien
cagacttgactgcatcccgaaggtc

SEQ ID NO: 4131445 - DNA, 25 bp, Homo sapien
acttgactgcatcccgaaggtctcc

SEQ ID NO: 4131446 - DNA, 25 bp, Homo sapien
tgcagacttgactgcatcccgaagg

SEQ ID NO: 4131447 - DNA, 25 bp, Homo sapien
gacttgactgcatcccgaaggtctc

SEQ ID NO: 4131448 - DNA, 25 bp, Homo sapien
tcagtttggacttgacctccttggc

SEQ ID NO: 4131449 - DNA, 25 bp, Homo sapien
aggcagatgcgggagccacagtggg

SEQ ID NO: 4131450 - DNA, 25 bp, Homo sapien
agatgcgggagccacagtgggaggg

SEQ ID NO: 4131451 - DNA, 25 bp, Homo sapien
gcagatgcgggagccacagtgggag

SEQ ID NO: 4131452 - DNA, 25 bp, Homo sapien
tgcgggagccacagtgggaggggag

SEQ ID NO: 4131453 - DNA, 25 bp, Homo sapien
tcttggccccacaaacatggtgttc

SEQ ID NO: 4131454 - DNA, 25 bp, Homo sapien
aaagcaagcttttccctgcacaggg

SEQ ID NO: 4131455 - DNA, 25 bp, Homo sapien
gcatcagagcaattgggagtcctca

SEQ ID NO: 4131456 - DNA, 25 bp, Homo sapien
ttcgggctccagacagtaaagtcac

SEQ ID NO: 4131457 - DNA, 25 bp, Homo sapien
gggccgggccagcagacacgctcat

SEQ ID NO: 4131458 - DNA, 25 bp, Homo sapien
tgagacctgcttcactcactcatct

SEQ ID NO: 4131459 - DNA, 25 bp, Homo sapien
cgagcctcggctccactcgggacgg

SEQ ID NO: 4131460 - DNA, 25 bp, Homo sapien
ctttcctgcgtgtcccgagcctcgg

SEQ ID NO: 4131461 - DNA, 25 bp, Homo sapien
tacagtcatatggtacctccacagg

SEQ ID NO: 4131462 - DNA, 25 bp, Homo sapien
tttaagaggtgcaaatctggaggcc

SEQ ID NO: 4131463 - DNA, 25 bp, Homo sapien
gcagaggcttctccgacaatgtggg

SEQ ID NO: 4131464 - DNA, 25 bp, Homo sapien
gcaaaatgggcaatcatcctggcac

SEQ ID NO: 4131465 - DNA, 25 bp, Homo sapien
gagtgccagttccttcgcaagcagg

SEQ ID NO: 4131466 - DNA, 25 bp, Homo sapien
cctggctggacaatcaactctggcg

SEQ ID NO: 4131467 - DNA, 25 bp, Homo sapien
tcagcggatagagcggagacatcag

SEQ ID NO: 4131468 - DNA, 25 bp, Homo sapien
gaccgtggcctgtacaaacaagtgg

SEQ ID NO: 4131469 - DNA, 25 bp, Homo sapien
ggggcacagtctgggtcatcttgaa

SEQ ID NO: 4131470 - DNA, 25 bp, Homo sapien
cacagtctgggtcatcttgaacccc

SEQ ID NO: 4131471 - DNA, 25 bp, Homo sapien
catcctcccgcatggctccaagctc

SEQ ID NO: 4131472 - DNA, 25 bp, Homo sapien
ctcctccagcacatggctcatcctc

SEQ ID NO: 4131473 - DNA, 25 bp, Homo sapien
ttcccagacggtgactagacatgac

SEQ ID NO: 4131474 - DNA, 25 bp, Homo sapien
gactcatagatacacagggcacggg

SEQ ID NO: 4131475 - DNA, 25 bp, Homo sapien
tatgaacgtagcctatctggacctg

SEQ ID NO: 4131476 - DNA, 25 bp, Homo sapien
ggaggtacatccatcaagagcctga

SEQ ID NO: 4131477 - DNA, 25 bp, Homo sapien
gccagatcccaaaacccagccacat

SEQ ID NO: 4131478 - DNA, 25 bp, Homo sapien
gggagagcggctgttcaacaagtgg

SEQ ID NO: 4131479 - DNA, 25 bp, Homo sapien
tgactgcttatctaatctcagggca

SEQ ID NO: 4131480 - DNA, 25 bp, Homo sapien
tggcgggggttagccagatcccaaa

SEQ ID NO: 4131481 - DNA, 25 bp, Homo sapien
ctgtcccgcagggatggactccaag

SEQ ID NO: 4131482 - DNA, 25 bp, Homo sapien
cagaacatccctgggcaatgggctg

SEQ ID NO: 4131483 - DNA, 25 bp, Homo sapien
ggcctcctcctgaacgaacatgatt

SEQ ID NO: 4131484 - DNA, 25 bp, Homo sapien
gagtcagactgtcagtggacgagag

SEQ ID NO: 4131485 - DNA, 25 bp, Homo sapien
cacgtcccttaaatcatcggaagct

SEQ ID NO: 4131486 - DNA, 25 bp, Homo sapien
cctggcacgtcccttaaatcatcgg

SEQ ID NO: 4131487 - DNA, 25 bp, Homo sapien
ggcacgtcccttaaatcatcggaag

SEQ ID NO: 4131488 - DNA, 25 bp, Homo sapien
cgtcccttaaatcatcggaagctgc

SEQ ID NO: 4131489 - DNA, 25 bp, Homo sapien
tggcctgccggatcagtgtgctcag

SEQ ID NO: 4131490 - DNA, 25 bp, Homo sapien
tggacctccggctcggcatgttctg

SEQ ID NO: 4131491 - DNA, 25 bp, Homo sapien
aagtcctgattggtggccgtgtagc

SEQ ID NO: 4131492 - DNA, 25 bp, Homo sapien
gttggcagcctcgatccaggcaggc

SEQ ID NO: 4131493 - DNA, 25 bp, Homo sapien
tgcacatggatcaggaagcaccaca

SEQ ID NO: 4131494 - DNA, 25 bp, Homo sapien
gccccatttcaaagtagcggttctc

SEQ ID NO: 4131495 - DNA, 25 bp, Homo sapien
gcgaactggcggatactgccctgca

SEQ ID NO: 4131496 - DNA, 25 bp, Homo sapien
aagtagcggttctcagccacgtcct

SEQ ID NO: 4131497 - DNA, 25 bp, Homo sapien
tgaagagcgtgttctcactgtgccg

SEQ ID NO: 4131498 - DNA, 25 bp, Homo sapien
gatgttgcctgagtagtccccggcg

SEQ ID NO: 4131499 - DNA, 25 bp, Homo sapien
tgtagacgcgcaggaagtggaactt

SEQ ID NO: 4131500 - DNA, 25 bp, Homo sapien
tgaggtcgccatgcgggaagcaaaa

SEQ ID NO: 4131501 - DNA, 25 bp, Homo sapien
tggccatccgcaaaggagccctggg

SEQ ID NO: 4131502 - DNA, 25 bp, Homo sapien
ggctggccatccgcaaaggagccct

SEQ ID NO: 4131503 - DNA, 25 bp, Homo sapien
gccctgcgctcggcaggctggccat

SEQ ID NO: 4131504 - DNA, 25 bp, Homo sapien
caggctggccatccgcaaaggagcc

SEQ ID NO: 4131505 - DNA, 25 bp, Homo sapien
gaaaaacaccatattaacagcggac

SEQ ID NO: 4131506 - DNA, 25 bp, Homo sapien
acagcggaccccaaatgaagattca

SEQ ID NO: 4131507 - DNA, 25 bp, Homo sapien
tcgcatgtgcagcttcagagtgagg

SEQ ID NO: 4131508 - DNA, 25 bp, Homo sapien
tgtgcatcacacatcacctctgggt

SEQ ID NO: 4131509 - DNA, 25 bp, Homo sapien
ggagcttccactggcgtctcctctg

SEQ ID NO: 4131510 - DNA, 25 bp, Homo sapien
aagctgaagttgaggcctctgctgg

SEQ ID NO: 4131511 - DNA, 25 bp, Homo sapien
gacctcctggggacgctggtcattg

SEQ ID NO: 4131512 - DNA, 25 bp, Homo sapien
ggccggagtcttcgctgggcctgag

SEQ ID NO: 4131513 - DNA, 25 bp, Homo sapien
caagtgcgaggggatctgattctcc

SEQ ID NO: 4131514 - DNA, 25 bp, Homo sapien
tctcctccgaggtggcctggatgag

SEQ ID NO: 4131515 - DNA, 25 bp, Homo sapien
ggcgacgtgccggagcgacgggcag

SEQ ID NO: 4131516 - DNA, 25 bp, Homo sapien
gtgccggagcgacgggcaggcaggc

SEQ ID NO: 4131517 - DNA, 25 bp, Homo sapien
agctcgatgatggcgctgccccgca

SEQ ID NO: 4131518 - DNA, 25 bp, Homo sapien
gagctcgatgatggcgctgccccgc

SEQ ID NO: 4131519 - DNA, 25 bp, Homo sapien
aggctgacctgaagccaagcttggc

SEQ ID NO: 4131520 - DNA, 25 bp, Homo sapien
aagcttggcctcgccctcaggactg

SEQ ID NO: 4131521 - DNA, 25 bp, Homo sapien
ggctgacctgaagccaagcttggcc

SEQ ID NO: 4131522 - DNA, 25 bp, Homo sapien
ggccgtgccatagctggcacccaca

SEQ ID NO: 4131523 - DNA, 25 bp, Homo sapien
agacggggggcctcctgtcagctcc

SEQ ID NO: 4131524 - DNA, 25 bp, Homo sapien
ctgaagacggggggcctcctgtcag

SEQ ID NO: 4131525 - DNA, 25 bp, Homo sapien
tgaagacggggggcctcctgtcagc

SEQ ID NO: 4131526 - DNA, 25 bp, Homo sapien
aagacggggggcctcctgtcagctc

SEQ ID NO: 4131527 - DNA, 25 bp, Homo sapien
gggtctggtagaacaccaccgagga

SEQ ID NO: 4131528 - DNA, 25 bp, Homo sapien
gaggccgtcgtggagcacaaagtac

SEQ ID NO: 4131529 - DNA, 25 bp, Homo sapien
gctctgagaagtagcggcggaggcc

SEQ ID NO: 4131530 - DNA, 25 bp, Homo sapien
tggagagcagcacgcaggcagtcac

SEQ ID NO: 4131531 - DNA, 25 bp, Homo sapien
aaagccccacattgactgactgcag

SEQ ID NO: 4131532 - DNA, 25 bp, Homo sapien
gactgactgcaggtcactaagcttt

SEQ ID NO: 4131533 - DNA, 25 bp, Homo sapien
ctaagctttagcacgaagcactggg

SEQ ID NO: 4131534 - DNA, 25 bp, Homo sapien
ccgtcagccggaaatgctggtcgaa

SEQ ID NO: 4131535 - DNA, 25 bp, Homo sapien
ttgccgcacaccctacctcctgctc

SEQ ID NO: 4131536 - DNA, 25 bp, Homo sapien
agtcagaaacatcctgcccgagacc

SEQ ID NO: 4131537 - DNA, 25 bp, Homo sapien
actctgcttctgtccgggccagcgc

SEQ ID NO: 4131538 - DNA, 25 bp, Homo sapien
ttctgtccgggccagcgcttgccgc

SEQ ID NO: 4131539 - DNA, 25 bp, Homo sapien
gacagagacattaggcaaagagctt

SEQ ID NO: 4131540 - DNA, 25 bp, Homo sapien
ggccggaagagctgaggcatttttc

SEQ ID NO: 4131541 - DNA, 25 bp, Homo sapien
agtccctagcaagcctcagcccaga

SEQ ID NO: 4131542 - DNA, 25 bp, Homo sapien
tccttcaggccggaagagctgaggc

SEQ ID NO: 4131543 - DNA, 25 bp, Homo sapien
aagcagtgcgtcaggtagctgtccc

SEQ ID NO: 4131544 - DNA, 25 bp, Homo sapien
gacagcacgaccatgaggtgctgga

SEQ ID NO: 4131545 - DNA, 25 bp, Homo sapien
gtccttgtcaacaggctccggcgag

SEQ ID NO: 4131546 - DNA, 25 bp, Homo sapien
tgttcccaaactcggagtagaagtc

SEQ ID NO: 4131547 - DNA, 25 bp, Homo sapien
taaaaccctggccagctaagtgaga

SEQ ID NO: 4131548 - DNA, 25 bp, Homo sapien
tctgccatcgaaaagccccacataa

SEQ ID NO: 4131549 - DNA, 25 bp, Homo sapien
gagtggagactctgccatcgaaaag

SEQ ID NO: 4131550 - DNA, 25 bp, Homo sapien
catgacgtctgtccaggcagcctgt

SEQ ID NO: 4131551 - DNA, 25 bp, Homo sapien
gcagtgggtagtggacacagtcctc

SEQ ID NO: 4131552 - DNA, 25 bp, Homo sapien
tctttggcaaactcgggcagtgggt

SEQ ID NO: 4131553 - DNA, 25 bp, Homo sapien
ggctcagccatcttttgggccacag

SEQ ID NO: 4131554 - DNA, 25 bp, Homo sapien
taaacttgacgcgactagagtggat

SEQ ID NO: 4131555 - DNA, 25 bp, Homo sapien
tgcacgtcatcgaagacgagggtga

SEQ ID NO: 4131556 - DNA, 25 bp, Homo sapien
gtaggtctggtagcccatgagcact

SEQ ID NO: 4131557 - DNA, 25 bp, Homo sapien
catgaggtcatgaccttgcacgtca

SEQ ID NO: 4131558 - DNA, 25 bp, Homo sapien
cctgcgggtaggtctggtagcccat

SEQ ID NO: 4131559 - DNA, 25 bp, Homo sapien
acacctgccactggacttcacggcc

SEQ ID NO: 4131560 - DNA, 25 bp, Homo sapien
aaacacctgccactggacttcacgg

SEQ ID NO: 4131561 - DNA, 25 bp, Homo sapien
acctgccactggacttcacggccct

SEQ ID NO: 4131562 - DNA, 25 bp, Homo sapien
gccctggctggctctagccgggcca

SEQ ID NO: 4131563 - DNA, 25 bp, Homo sapien
tcccactggcgagccaacagcgaga

SEQ ID NO: 4131564 - DNA, 25 bp, Homo sapien
cgagccaacagcgagatgagcttct

SEQ ID NO: 4131565 - DNA, 25 bp, Homo sapien
actggcgagccaacagcgagatgag

SEQ ID NO: 4131566 - DNA, 25 bp, Homo sapien
aacagcgagatgagcttctctctgc

SEQ ID NO: 4131567 - DNA, 25 bp, Homo sapien
gccggtgagctcgacaggcagctca

SEQ ID NO: 4131568 - DNA, 25 bp, Homo sapien
ccggtgagctcgacaggcagctcac

SEQ ID NO: 4131569 - DNA, 25 bp, Homo sapien
tagccggtgagctcgacaggcagct

SEQ ID NO: 4131570 - DNA, 25 bp, Homo sapien
ctagccggtgagctcgacaggcagc

SEQ ID NO: 4131571 - DNA, 25 bp, Homo sapien
gtgttaacaacggtcccacaacagc

SEQ ID NO: 4131572 - DNA, 25 bp, Homo sapien
gcgaggacagtcaaattaaggtacc

SEQ ID NO: 4131573 - DNA, 25 bp, Homo sapien
cagacacgacactggtgtgcacggc

SEQ ID NO: 4131574 - DNA, 25 bp, Homo sapien
ccccagtaggcgtcaggctggacac

SEQ ID NO: 4131575 - DNA, 25 bp, Homo sapien
cagcaacaaaggactggactcgaca

SEQ ID NO: 4131576 - DNA, 25 bp, Homo sapien
acagcaacaaaggactggactcgac

SEQ ID NO: 4131577 - DNA, 25 bp, Homo sapien
ttattggaatagagaatacaggcag

SEQ ID NO: 4131578 - DNA, 25 bp, Homo sapien
gctctcccacttgtctggatcaggg

SEQ ID NO: 4131579 - DNA, 25 bp, Homo sapien
tgtgcattctgctaccagcctcagg

SEQ ID NO: 4131580 - DNA, 25 bp, Homo sapien
gcagcaggaatcacgcttggtgctg

SEQ ID NO: 4131581 - DNA, 25 bp, Homo sapien
gacagagtcggggcgtagggaatga

SEQ ID NO: 4131582 - DNA, 25 bp, Homo sapien
caggacagagtcggggcgtagggaa

SEQ ID NO: 4131583 - DNA, 25 bp, Homo sapien
agagtcggggcgtagggaatgagct

SEQ ID NO: 4131584 - DNA, 25 bp, Homo sapien
cagagtcggggcgtagggaatgagc

SEQ ID NO: 4131585 - DNA, 25 bp, Homo sapien
cgaagctgaagcctgccaggcagaa

SEQ ID NO: 4131586 - DNA, 25 bp, Homo sapien
ccctgacgaagctgaagcctgccag

SEQ ID NO: 4131587 - DNA, 25 bp, Homo sapien
gacgaagctgaagcctgccaggcag

SEQ ID NO: 4131588 - DNA, 25 bp, Homo sapien
ctgccccctgacgaagctgaagcct

SEQ ID NO: 4131589 - DNA, 25 bp, Homo sapien
ggtgatcacatcttcaacccccagg

SEQ ID NO: 4131590 - DNA, 25 bp, Homo sapien
caggtgagggccacataagacctgg

SEQ ID NO: 4131591 - DNA, 25 bp, Homo sapien
aacccccaggtgagggccacataag

SEQ ID NO: 4131592 - DNA, 25 bp, Homo sapien
ttgccccacgtgaatctgtagtcct

SEQ ID NO: 4131593 - DNA, 25 bp, Homo sapien
gagacacgaagtgtgaagtctttgg

SEQ ID NO: 4131594 - DNA, 25 bp, Homo sapien
tcccaagctgggacctggttcatgg

SEQ ID NO: 4131595 - DNA, 25 bp, Homo sapien
aggctgagagcccagaatctaaacc

SEQ ID NO: 4131596 - DNA, 25 bp, Homo sapien
ggatgaaattctcccaagctgggac

SEQ ID NO: 4131597 - DNA, 25 bp, Homo sapien
caccgcgcccggccggccagtttgt

SEQ ID NO: 4131598 - DNA, 25 bp, Homo sapien
cagtttgttttaaattggccctctg

SEQ ID NO: 4131599 - DNA, 25 bp, Homo sapien
ttgttttaaattggccctctggctg

SEQ ID NO: 4131600 - DNA, 25 bp, Homo sapien
tctggctgctgcatggagaatacag

SEQ ID NO: 4131601 - DNA, 25 bp, Homo sapien
caaacgtggttttcacatcacagcc

SEQ ID NO: 4131602 - DNA, 25 bp, Homo sapien
cctgggttatctgatccgggagctc

SEQ ID NO: 4131603 - DNA, 25 bp, Homo sapien
agggacacgtctgcttcttgatggc

SEQ ID NO: 4131604 - DNA, 25 bp, Homo sapien
ggtgcagggtacatgagtgacaaac

SEQ ID NO: 4131605 - DNA, 25 bp, Homo sapien
gcaggccttctgcaccacttgcttc

SEQ ID NO: 4131606 - DNA, 25 bp, Homo sapien
ttgcttccggcacttccgtctgcag

SEQ ID NO: 4131607 - DNA, 25 bp, Homo sapien
agagccccccagctgtacttcgtag

SEQ ID NO: 4131608 - DNA, 25 bp, Homo sapien
tgcagccgctcatggacaccataga

SEQ ID NO: 4131609 - DNA, 25 bp, Homo sapien
agcaggtcccgtggccattgcatgg

SEQ ID NO: 4131610 - DNA, 25 bp, Homo sapien
tggccattgcatggggtctcagcgc

SEQ ID NO: 4131611 - DNA, 25 bp, Homo sapien
catccaagcaggtcccgtggccatt

SEQ ID NO: 4131612 - DNA, 25 bp, Homo sapien
gtccatgccatccaagcaggtcccg

SEQ ID NO: 4131613 - DNA, 25 bp, Homo sapien
cctggcaggctgagccgcggaagtt

SEQ ID NO: 4131614 - DNA, 25 bp, Homo sapien
ccgattggcagtcaggcccgaaccg

SEQ ID NO: 4131615 - DNA, 25 bp, Homo sapien
ttggcagtcaggcccgaaccggttg

SEQ ID NO: 4131616 - DNA, 25 bp, Homo sapien
gattggcagtcaggcccgaaccggt

SEQ ID NO: 4131617 - DNA, 25 bp, Homo sapien
ccccacgtggcccatggttgcacac

SEQ ID NO: 4131618 - DNA, 25 bp, Homo sapien
tccatccccacgtggcccatggttg

SEQ ID NO: 4131619 - DNA, 25 bp, Homo sapien
gttgcacactccgtgcacacagctg

SEQ ID NO: 4131620 - DNA, 25 bp, Homo sapien
gggccagtgtatccagcaaagcaca

SEQ ID NO: 4131621 - DNA, 25 bp, Homo sapien
cctctgcggagcactgggtgttctg

SEQ ID NO: 4131622 - DNA, 25 bp, Homo sapien
tgttctggggacagcgcagctcctg

SEQ ID NO: 4131623 - DNA, 25 bp, Homo sapien
gagcctctgcggagcactgggtgtt

SEQ ID NO: 4131624 - DNA, 25 bp, Homo sapien
gtgttctggggacagcgcagctcct

SEQ ID NO: 4131625 - DNA, 25 bp, Homo sapien
gggctcaccgagcactgggccagca

SEQ ID NO: 4131626 - DNA, 25 bp, Homo sapien
ggggctcaccgagcactgggccagc

SEQ ID NO: 4131627 - DNA, 25 bp, Homo sapien
catcccatcgccatggtagttctca

SEQ ID NO: 4131628 - DNA, 25 bp, Homo sapien
tcccatcgccatggtagttctcagg

SEQ ID NO: 4131629 - DNA, 25 bp, Homo sapien
atcccatcgccatggtagttctcag

SEQ ID NO: 4131630 - DNA, 25 bp, Homo sapien
ctggcccggcttctggtacacacac

SEQ ID NO: 4131631 - DNA, 25 bp, Homo sapien
ggttgtcagtgcatgggtccttggg

SEQ ID NO: 4131632 - DNA, 25 bp, Homo sapien
aaggttgtcagtgcatgggtccttg

SEQ ID NO: 4131633 - DNA, 25 bp, Homo sapien
caaggttgtcagtgcatgggtcctt

SEQ ID NO: 4131634 - DNA, 25 bp, Homo sapien
cagaagcgttgctgttgatgctgac

SEQ ID NO: 4131635 - DNA, 25 bp, Homo sapien
tggtcttcccatcagcggtcacctg

SEQ ID NO: 4131636 - DNA, 25 bp, Homo sapien
cctggcaagtggcagaccggtcgca

SEQ ID NO: 4131637 - DNA, 25 bp, Homo sapien
cagcccgcagaagcgttgctgttga

SEQ ID NO: 4131638 - DNA, 25 bp, Homo sapien
ccatcatggccacggcgaccctcag

SEQ ID NO: 4131639 - DNA, 25 bp, Homo sapien
agcaggtgtccgtagcaggcacgcc

SEQ ID NO: 4131640 - DNA, 25 bp, Homo sapien
ggaacacccggcctgtctgcgtggc

SEQ ID NO: 4131641 - DNA, 25 bp, Homo sapien
gctgcaggaacacccggcctgtctg

SEQ ID NO: 4131642 - DNA, 25 bp, Homo sapien
ccagcacggtgaaagggcccgctgt

SEQ ID NO: 4131643 - DNA, 25 bp, Homo sapien
aggagaaggaggagacggatggcac

SEQ ID NO: 4131644 - DNA, 25 bp, Homo sapien
ccgctgtggtaaggatttcccggca

SEQ ID NO: 4131645 - DNA, 25 bp, Homo sapien
tgtggtaaggatttcccggcagccc

SEQ ID NO: 4131646 - DNA, 25 bp, Homo sapien
tgacggtgatctcctgcccggccag

SEQ ID NO: 4131647 - DNA, 25 bp, Homo sapien
gaattggttaaaggtgacggtgatc

SEQ ID NO: 4131648 - DNA, 25 bp, Homo sapien
cagcgtccaccaccttcgtgtttgt

SEQ ID NO: 4131649 - DNA, 25 bp, Homo sapien
tgtttgttgggtccttgtgtcctcc

SEQ ID NO: 4131650 - DNA, 25 bp, Homo sapien
tggaagacgccattagctgctatgt

SEQ ID NO: 4131651 - DNA, 25 bp, Homo sapien
accgcaggccagtgaccacgtggaa

SEQ ID NO: 4131652 - DNA, 25 bp, Homo sapien
gctgctatgttgttggccttgtaga

SEQ ID NO: 4131653 - DNA, 25 bp, Homo sapien
ccttgtagatgttgaacgtctgctg

SEQ ID NO: 4131654 - DNA, 25 bp, Homo sapien
aggcgaggatctgtccgatagttct

SEQ ID NO: 4131655 - DNA, 25 bp, Homo sapien
ggatggtttcaaagcggctgaaggc

SEQ ID NO: 4131656 - DNA, 25 bp, Homo sapien
gatggtttcaaagcggctgaaggcc

SEQ ID NO: 4131657 - DNA, 25 bp, Homo sapien
ggtagaggcgaggatctgtccgata

SEQ ID NO: 4131658 - DNA, 25 bp, Homo sapien
gcaaagactgtgaagggcccaggtc

SEQ ID NO: 4131659 - DNA, 25 bp, Homo sapien
tgaagggcccaggtccgtccaggat

SEQ ID NO: 4131660 - DNA, 25 bp, Homo sapien
gatcaggcggccgtcacgcaagctg

SEQ ID NO: 4131661 - DNA, 25 bp, Homo sapien
cacagcctcattgcttggggcaaag

SEQ ID NO: 4131662 - DNA, 25 bp, Homo sapien
tgtagatgtggtaccgcaccaactc

SEQ ID NO: 4131663 - DNA, 25 bp, Homo sapien
gccaggacctggttcgccatggtga

SEQ ID NO: 4131664 - DNA, 25 bp, Homo sapien
tggagatgagcttctcaacggtcag

SEQ ID NO: 4131665 - DNA, 25 bp, Homo sapien
catggtgaggatccgacccttggag

SEQ ID NO: 4131666 - DNA, 25 bp, Homo sapien
aggatccgacccttggagatgagct

SEQ ID NO: 4131667 - DNA, 25 bp, Homo sapien
atcacgtctaccctctgcagcggga

SEQ ID NO: 4131668 - DNA, 25 bp, Homo sapien
gctgctcctcgctgcagtgcttggg

SEQ ID NO: 4131669 - DNA, 25 bp, Homo sapien
aggatgccgtccagcatgtggatca

SEQ ID NO: 4131670 - DNA, 25 bp, Homo sapien
gatcacaccattggcggccatcacg

SEQ ID NO: 4131671 - DNA, 25 bp, Homo sapien
ttggggggacacgtgctggtgttca

SEQ ID NO: 4131672 - DNA, 25 bp, Homo sapien
ttcacactgttggggggacacgtgc

SEQ ID NO: 4131673 - DNA, 25 bp, Homo sapien
ctggtgttcagggcttggcagtcca

SEQ ID NO: 4131674 - DNA, 25 bp, Homo sapien
gtgttcagggcttggcagtccacac

SEQ ID NO: 4131675 - DNA, 25 bp, Homo sapien
atggtttggttgcagtagctggcac

SEQ ID NO: 4131676 - DNA, 25 bp, Homo sapien
tgggtcatggatgtagacacactcc

SEQ ID NO: 4131677 - DNA, 25 bp, Homo sapien
acattgagccccgttgggtcatgga

SEQ ID NO: 4131678 - DNA, 25 bp, Homo sapien
catgatggtttggttgcagtagctg

SEQ ID NO: 4131679 - DNA, 25 bp, Homo sapien
ctgcgtgcagtcaggcccgaaaaaa

SEQ ID NO: 4131680 - DNA, 25 bp, Homo sapien
gacactgcgtgcagtcaggcccgaa

SEQ ID NO: 4131681 - DNA, 25 bp, Homo sapien
tgcctttgccatagcaggggttgga

SEQ ID NO: 4131682 - DNA, 25 bp, Homo sapien
gcccgaaaaaacctttgcagcagcc

SEQ ID NO: 4131683 - DNA, 25 bp, Homo sapien
ctcaccccaggagaggatgggactc

SEQ ID NO: 4131684 - DNA, 25 bp, Homo sapien
caccccaggagaggatgggactcac

SEQ ID NO: 4131685 - DNA, 25 bp, Homo sapien
tcaccccaggagaggatgggactca

SEQ ID NO: 4131686 - DNA, 25 bp, Homo sapien
agacacacagccagtcactggccaa

SEQ ID NO: 4131687 - DNA, 25 bp, Homo sapien
caactttccactgcatagatatgag

SEQ ID NO: 4131688 - DNA, 25 bp, Homo sapien
ataatttgatccaactttccactgc

SEQ ID NO: 4131689 - DNA, 25 bp, Homo sapien
gccaaccggtgaaggagtccttgtg

SEQ ID NO: 4131690 - DNA, 25 bp, Homo sapien
agcagatgtggcaggcgatgccctt

SEQ ID NO: 4131691 - DNA, 25 bp, Homo sapien
tctccatgcttgtttgggttcgagc

SEQ ID NO: 4131692 - DNA, 25 bp, Homo sapien
ccatgcttgtttgggttcgagcaga

SEQ ID NO: 4131693 - DNA, 25 bp, Homo sapien
cccttgtagtctgggaagcagaggc

SEQ ID NO: 4131694 - DNA, 25 bp, Homo sapien
ttttctccctaggaggtggcctgag

SEQ ID NO: 4131695 - DNA, 25 bp, Homo sapien
agacccatctttaggcagacgtttt

SEQ ID NO: 4131696 - DNA, 25 bp, Homo sapien
gggcttcgtttcccttcttgagagc

SEQ ID NO: 4131697 - DNA, 25 bp, Homo sapien
tgcagaaccggccactgaagccagg

SEQ ID NO: 4131698 - DNA, 25 bp, Homo sapien
cctgggcggttgtcgcagagaccat

SEQ ID NO: 4131699 - DNA, 25 bp, Homo sapien
ccccatggactcgttgcagaaccgg

SEQ ID NO: 4131700 - DNA, 25 bp, Homo sapien
ctggctaacacagcgggcatgcagg

SEQ ID NO: 4131701 - DNA, 25 bp, Homo sapien
ggttgctaggtgtgcaggagaagcc

SEQ ID NO: 4131702 - DNA, 25 bp, Homo sapien
gttgctaggtgtgcaggagaagcca

SEQ ID NO: 4131703 - DNA, 25 bp, Homo sapien
gggttgctaggtgtgcaggagaagc

SEQ ID NO: 4131704 - DNA, 25 bp, Homo sapien
ttgctaggtgtgcaggagaagccat

SEQ ID NO: 4131705 - DNA, 25 bp, Homo sapien
acactcgtcaatagccacacagacg

SEQ ID NO: 4131706 - DNA, 25 bp, Homo sapien
tcaatagccacacagacgcggccat

SEQ ID NO: 4131707 - DNA, 25 bp, Homo sapien
tgcccggggcccacatagctgcaga

SEQ ID NO: 4131708 - DNA, 25 bp, Homo sapien
gggcccacatagctgcagagggcat

SEQ ID NO: 4131709 - DNA, 25 bp, Homo sapien
agccgccattgcctgcccggcaggg

SEQ ID NO: 4131710 - DNA, 25 bp, Homo sapien
cccggcaaagcccagcttgcaggtg

SEQ ID NO: 4131711 - DNA, 25 bp, Homo sapien
aagcccagcttgcaggtgcatcggc

SEQ ID NO: 4131712 - DNA, 25 bp, Homo sapien
gggctgcactggtagccatccccgg

SEQ ID NO: 4131713 - DNA, 25 bp, Homo sapien
gggcacgtgcagacccgctgacctc

SEQ ID NO: 4131714 - DNA, 25 bp, Homo sapien
aggggggcacgtgcagacccgctga

SEQ ID NO: 4131715 - DNA, 25 bp, Homo sapien
aagccaggggggcacgtgcagaccc

SEQ ID NO: 4131716 - DNA, 25 bp, Homo sapien
gaagatgtctccataacagctgaag

SEQ ID NO: 4131717 - DNA, 25 bp, Homo sapien
cttaagccattggtagaagatggag

SEQ ID NO: 4131718 - DNA, 25 bp, Homo sapien
ttaagccattggtagaagatggaga

SEQ ID NO: 4131719 - DNA, 25 bp, Homo sapien
aagccattggtagaagatggagaag

SEQ ID NO: 4131720 - DNA, 25 bp, Homo sapien
taagccattggtagaagatggagaa

SEQ ID NO: 4131721 - DNA, 25 bp, Homo sapien
cggcggtcggcaggaagcgtgatgc

SEQ ID NO: 4131722 - DNA, 25 bp, Homo sapien
gggctcagctgacggactgcagcct

SEQ ID NO: 4131723 - DNA, 25 bp, Homo sapien
aggttcggcagcgtccttggctgca

SEQ ID NO: 4131724 - DNA, 25 bp, Homo sapien
cagaaagctcggtcctcggggctca

SEQ ID NO: 4131725 - DNA, 25 bp, Homo sapien
cccactaatgttgcgaatctcccag

SEQ ID NO: 4131726 - DNA, 25 bp, Homo sapien
aatgttgcgaatctcccagcgtgtg

SEQ ID NO: 4131727 - DNA, 25 bp, Homo sapien
cactaatgttgcgaatctcccagcg

SEQ ID NO: 4131728 - DNA, 25 bp, Homo sapien
tgttgcgaatctcccagcgtgtggt

SEQ ID NO: 4131729 - DNA, 25 bp, Homo sapien
ggtccccttttctgcccagagttca

SEQ ID NO: 4131730 - DNA, 25 bp, Homo sapien
cttttctgcccagagttcaccacat

SEQ ID NO: 4131731 - DNA, 25 bp, Homo sapien
cccttttctgcccagagttcaccac

SEQ ID NO: 4131732 - DNA, 25 bp, Homo sapien
ctggtccccttttctgcccagagtt

SEQ ID NO: 4131733 - DNA, 25 bp, Homo sapien
atccacgctggcattctgcacccag

SEQ ID NO: 4131734 - DNA, 25 bp, Homo sapien
cacatccacgctggcattctgcacc

SEQ ID NO: 4131735 - DNA, 25 bp, Homo sapien
ctggctgaggatgtgtaggacaccg

SEQ ID NO: 4131736 - DNA, 25 bp, Homo sapien
gctgaggatgtgtaggacaccgttg

SEQ ID NO: 4131737 - DNA, 25 bp, Homo sapien
cacatcccctcgggggggcagtaag

SEQ ID NO: 4131738 - DNA, 25 bp, Homo sapien
tgcagcaacccctgcccaccgggca

SEQ ID NO: 4131739 - DNA, 25 bp, Homo sapien
ctgcagcaattcccggaagaggctg

SEQ ID NO: 4131740 - DNA, 25 bp, Homo sapien
gaggctgaaggcaggcaccaagtcc

SEQ ID NO: 4131741 - DNA, 25 bp, Homo sapien
ctggggcacagtgtcccccgagcag

SEQ ID NO: 4131742 - DNA, 25 bp, Homo sapien
ctcaatctggggcaccaacccatgg

SEQ ID NO: 4131743 - DNA, 25 bp, Homo sapien
caatctggggcaccaacccatggtg

SEQ ID NO: 4131744 - DNA, 25 bp, Homo sapien
atggtgtaggcagtggcagcctcaa

SEQ ID NO: 4131745 - DNA, 25 bp, Homo sapien
gcacaaagatggtgtaggcagtggc

SEQ ID NO: 4131746 - DNA, 25 bp, Homo sapien
ctggccactgtggttgtagaagacg

SEQ ID NO: 4131747 - DNA, 25 bp, Homo sapien
caggaccacatggtgccgcactgtg

SEQ ID NO: 4131748 - DNA, 25 bp, Homo sapien
ttgtagaagacgatccagtgggcag

SEQ ID NO: 4131749 - DNA, 25 bp, Homo sapien
gagggagttgcggtgtccacccttc

SEQ ID NO: 4131750 - DNA, 25 bp, Homo sapien
gcagcgacttgagcccaccgtcagg

SEQ ID NO: 4131751 - DNA, 25 bp, Homo sapien
tccagtggcacatggttcacctcag

SEQ ID NO: 4131752 - DNA, 25 bp, Homo sapien
ccccgacagaccaatcagcgagcgg

SEQ ID NO: 4131753 - DNA, 25 bp, Homo sapien
tggctatgcaggcagcgacttgagc

SEQ ID NO: 4131754 - DNA, 25 bp, Homo sapien
agccctgagtgcagcggaatctcct

SEQ ID NO: 4131755 - DNA, 25 bp, Homo sapien
gaatctcctggtgcagtttacacat

SEQ ID NO: 4131756 - DNA, 25 bp, Homo sapien
gcagcggaatctcctggtgcagttt

SEQ ID NO: 4131757 - DNA, 25 bp, Homo sapien
tgagtgcagcggaatctcctggtgc

SEQ ID NO: 4131758 - DNA, 25 bp, Homo sapien
gaaggagaagccagatcggtagaca

SEQ ID NO: 4131759 - DNA, 25 bp, Homo sapien
atgtgtaagagcagccccgggagaa

SEQ ID NO: 4131760 - DNA, 25 bp, Homo sapien
tggcacatgtgtaagagcagccccg

SEQ ID NO: 4131761 - DNA, 25 bp, Homo sapien
agccagatcggtagacacagctctt

SEQ ID NO: 4131762 - DNA, 25 bp, Homo sapien
ggacaggcttggggtgggggcttca

SEQ ID NO: 4131763 - DNA, 25 bp, Homo sapien
gacaggcttggggtgggggcttcag

SEQ ID NO: 4131764 - DNA, 25 bp, Homo sapien
ctggacaggcttggggtgggggctt

SEQ ID NO: 4131765 - DNA, 25 bp, Homo sapien
ctctggacaggcttggggtgggggc

SEQ ID NO: 4131766 - DNA, 25 bp, Homo sapien
ggcatggctcacacagcgtgccaaa

SEQ ID NO: 4131767 - DNA, 25 bp, Homo sapien
ccgttccatggaagccctcgtggca

SEQ ID NO: 4131768 - DNA, 25 bp, Homo sapien
tccggtgcagttgggcccgtagcgg

SEQ ID NO: 4131769 - DNA, 25 bp, Homo sapien
acctcacaggccgttccatggaagc

SEQ ID NO: 4131770 - DNA, 25 bp, Homo sapien
gcctccatcctgtcccggctggggt

SEQ ID NO: 4131771 - DNA, 25 bp, Homo sapien
cctccatcctgtcccggctggggtc

SEQ ID NO: 4131772 - DNA, 25 bp, Homo sapien
ctgcagtggtataaaggaggatagg

SEQ ID NO: 4131773 - DNA, 25 bp, Homo sapien
cagtggtataaaggaggataggagt

SEQ ID NO: 4131774 - DNA, 25 bp, Homo sapien
agcccacgttacagacacagcttcc

SEQ ID NO: 4131775 - DNA, 25 bp, Homo sapien
gccctgccagcccacgttacagaca

SEQ ID NO: 4131776 - DNA, 25 bp, Homo sapien
gacacagcttccgtccccttgcagc

SEQ ID NO: 4131777 - DNA, 25 bp, Homo sapien
ctgccagcccacgttacagacacag

SEQ ID NO: 4131778 - DNA, 25 bp, Homo sapien
cattggggtcgcacttcctagggca

SEQ ID NO: 4131779 - DNA, 25 bp, Homo sapien
gcattggggtcgcacttcctagggc

SEQ ID NO: 4131780 - DNA, 25 bp, Homo sapien
ttggggtcgcacttcctagggcact

SEQ ID NO: 4131781 - DNA, 25 bp, Homo sapien
ttggcattggggtcgcacttcctag

SEQ ID NO: 4131782 - DNA, 25 bp, Homo sapien
cattgccggagtatcccgcagcaca

SEQ ID NO: 4131783 - DNA, 25 bp, Homo sapien
cggagtatcccgcagcacaggcgca

SEQ ID NO: 4131784 - DNA, 25 bp, Homo sapien
atgccattgccggagtatcccgcag

SEQ ID NO: 4131785 - DNA, 25 bp, Homo sapien
agtatcccgcagcacaggcgcaggt

SEQ ID NO: 4131786 - DNA, 25 bp, Homo sapien
ggctgggcctagaggaagtgaaggg

SEQ ID NO: 4131787 - DNA, 25 bp, Homo sapien
aggagggcgtgagagaaaggaaaag

SEQ ID NO: 4131788 - DNA, 25 bp, Homo sapien
atcctggcaggtgcatgtccgctgc

SEQ ID NO: 4131789 - DNA, 25 bp, Homo sapien
tccccgtcgcccatgtagccatcct

SEQ ID NO: 4131790 - DNA, 25 bp, Homo sapien
gtcgcccatgtagccatcctggcag

SEQ ID NO: 4131791 - DNA, 25 bp, Homo sapien
ggtgcatgtccgctgcccaggtgcc

SEQ ID NO: 4131792 - DNA, 25 bp, Homo sapien
cactcggcgtgaatgtggcagcccc

SEQ ID NO: 4131793 - DNA, 25 bp, Homo sapien
ccagtggggatgcactcggcgtgaa

SEQ ID NO: 4131794 - DNA, 25 bp, Homo sapien
atgcactcggcgtgaatgtggcagc

SEQ ID NO: 4131795 - DNA, 25 bp, Homo sapien
tggcagcccccgtggtggatgagac

SEQ ID NO: 4131796 - DNA, 25 bp, Homo sapien
gagggcatggcatgatgccccatgt

SEQ ID NO: 4131797 - DNA, 25 bp, Homo sapien
ctgaagggaggccccatcctgtgag

SEQ ID NO: 4131798 - DNA, 25 bp, Homo sapien
gcatggcatgatgccccatgtccaa

SEQ ID NO: 4131799 - DNA, 25 bp, Homo sapien
agggaggccccatcctgtgagggca

SEQ ID NO: 4131800 - DNA, 25 bp, Homo sapien
gccagcaccctgggtaaaagggtca

SEQ ID NO: 4131801 - DNA, 25 bp, Homo sapien
tccccagtcttgatcagtggggctg

SEQ ID NO: 4131802 - DNA, 25 bp, Homo sapien
ccaggagctcgcaggtccggatgcc

SEQ ID NO: 4131803 - DNA, 25 bp, Homo sapien
taaccctcacggcagctgcaggaga

SEQ ID NO: 4131804 - DNA, 25 bp, Homo sapien
ggtccggatgccatccccgctgtaa

SEQ ID NO: 4131805 - DNA, 25 bp, Homo sapien
gctgtaaccctcacggcagctgcag

SEQ ID NO: 4131806 - DNA, 25 bp, Homo sapien
atcccctgtgcttttgcaggtggca

SEQ ID NO: 4131807 - DNA, 25 bp, Homo sapien
caggtgaggccgtcccccacggtgt

SEQ ID NO: 4131808 - DNA, 25 bp, Homo sapien
ttgcaggtggcatatgggctgcatc

SEQ ID NO: 4131809 - DNA, 25 bp, Homo sapien
ctgtgtcgcaggtacatgtcctctg

SEQ ID NO: 4131810 - DNA, 25 bp, Homo sapien
gggcacagccaagaccagatcaggg

SEQ ID NO: 4131811 - DNA, 25 bp, Homo sapien
gggtcaggcccaggtacaatcaggg

SEQ ID NO: 4131812 - DNA, 25 bp, Homo sapien
ccaagaccatgggtcaggcccatgg

SEQ ID NO: 4131813 - DNA, 25 bp, Homo sapien
ggtcagggctagtttcatgggtcat

SEQ ID NO: 4131814 - DNA, 25 bp, Homo sapien
cagatttggggcggcccccattcag

SEQ ID NO: 4131815 - DNA, 25 bp, Homo sapien
gggcgagggtcagctcagatttggg

SEQ ID NO: 4131816 - DNA, 25 bp, Homo sapien
tggggcggcccccattcagggcctg

SEQ ID NO: 4131817 - DNA, 25 bp, Homo sapien
gggggcgagggtcagctcagatttg

SEQ ID NO: 4131818 - DNA, 25 bp, Homo sapien
tgaggcatgcttatccctcaggagc

SEQ ID NO: 4131819 - DNA, 25 bp, Homo sapien
gaggcatgcttatccctcaggagct

SEQ ID NO: 4131820 - DNA, 25 bp, Homo sapien
atgaggcatgcttatccctcaggag

SEQ ID NO: 4131821 - DNA, 25 bp, Homo sapien
cagcaacagcatgagtggaatggga

SEQ ID NO: 4131822 - DNA, 25 bp, Homo sapien
agaggggtgggacttgcaggtcaca

SEQ ID NO: 4131823 - DNA, 25 bp, Homo sapien
aagcctgaggcgtccatggatctcc

SEQ ID NO: 4131824 - DNA, 25 bp, Homo sapien
gaagacctggactcagagagaacaa

SEQ ID NO: 4131825 - DNA, 25 bp, Homo sapien
cggcacgaagatggtgaaaggccca

SEQ ID NO: 4131826 - DNA, 25 bp, Homo sapien
cattagatctgcgtgcggcacgaag

SEQ ID NO: 4131827 - DNA, 25 bp, Homo sapien
gtgaaaggcccatcgcccttgagct

SEQ ID NO: 4131828 - DNA, 25 bp, Homo sapien
ctgcgacaggttgctcattagatct

SEQ ID NO: 4131829 - DNA, 25 bp, Homo sapien
caaccacgtggtagcgaaacaccag

SEQ ID NO: 4131830 - DNA, 25 bp, Homo sapien
cctgagagggccgtggcgtacccct

SEQ ID NO: 4131831 - DNA, 25 bp, Homo sapien
atgcgcacgaatccgggccagctca

SEQ ID NO: 4131832 - DNA, 25 bp, Homo sapien
ccgacagccaaccacgtggtagcga

SEQ ID NO: 4131833 - DNA, 25 bp, Homo sapien
gcctgaggtggaggttgaacctggg

SEQ ID NO: 4131834 - DNA, 25 bp, Homo sapien
tcggggcctgaggtggaggttgaac

SEQ ID NO: 4131835 - DNA, 25 bp, Homo sapien
ctatcggggcctgaggtggaggttg

SEQ ID NO: 4131836 - DNA, 25 bp, Homo sapien
gggcctgaggtggaggttgaacctg

SEQ ID NO: 4131837 - DNA, 25 bp, Homo sapien
gatgaagcagataggtggggtgctc

SEQ ID NO: 4131838 - DNA, 25 bp, Homo sapien
aagcagataggtggggtgctcggaa

SEQ ID NO: 4131839 - DNA, 25 bp, Homo sapien
gggcacggggctgatgaagcagata

SEQ ID NO: 4131840 - DNA, 25 bp, Homo sapien
cggggcacggggctgatgaagcaga

SEQ ID NO: 4131841 - DNA, 25 bp, Homo sapien
gttcacggcctcatggtcgctgctc

SEQ ID NO: 4131842 - DNA, 25 bp, Homo sapien
cagcaggacacggtcaatgaagtgc

SEQ ID NO: 4131843 - DNA, 25 bp, Homo sapien
cctcgggatgggagcatcatcaggc

SEQ ID NO: 4131844 - DNA, 25 bp, Homo sapien
caccacgcgcgcgaagtcattgagg

SEQ ID NO: 4131845 - DNA, 25 bp, Homo sapien
ggccaggcgggaagggaggatccca

SEQ ID NO: 4131846 - DNA, 25 bp, Homo sapien
taggccaggcgggaagggaggatcc

SEQ ID NO: 4131847 - DNA, 25 bp, Homo sapien
ctaggccaggcgggaagggaggatc

SEQ ID NO: 4131848 - DNA, 25 bp, Homo sapien
caggcgggaagggaggatcccaggc

SEQ ID NO: 4131849 - DNA, 25 bp, Homo sapien
aagccctgggcggcggcggtgacat

SEQ ID NO: 4131850 - DNA, 25 bp, Homo sapien
cttgtaaccgaagccctgggcggcg

SEQ ID NO: 4131851 - DNA, 25 bp, Homo sapien
gccctgggcggcggcggtgacattt

SEQ ID NO: 4131852 - DNA, 25 bp, Homo sapien
cgaagccctgggcggcggcggtgac

SEQ ID NO: 4131853 - DNA, 25 bp, Homo sapien
catgtgtgtccacaatgacaggccc

SEQ ID NO: 4131854 - DNA, 25 bp, Homo sapien
tccacaatgacaggcccacacggga

SEQ ID NO: 4131855 - DNA, 25 bp, Homo sapien
gtgtgtccacaatgacaggcccaca

SEQ ID NO: 4131856 - DNA, 25 bp, Homo sapien
gtgcatgtgtgtccacaatgacagg

SEQ ID NO: 4131857 - DNA, 25 bp, Homo sapien
gcacacatctcaactgtgcacactg

SEQ ID NO: 4131858 - DNA, 25 bp, Homo sapien
gtgctcaacctggggtgcacatgca

SEQ ID NO: 4131859 - DNA, 25 bp, Homo sapien
ctgcccagtcagagactagttagca

SEQ ID NO: 4131860 - DNA, 25 bp, Homo sapien
acacgggacagtgtgcacacaggtg

SEQ ID NO: 4131861 - DNA, 25 bp, Homo sapien
ctatgggatgcctctcgaagcaggg

SEQ ID NO: 4131862 - DNA, 25 bp, Homo sapien
cacagcattgtgaagggcctatggg

SEQ ID NO: 4131863 - DNA, 25 bp, Homo sapien
cagaatggctgctagcttgtcacgg

SEQ ID NO: 4131864 - DNA, 25 bp, Homo sapien
gacattgcgaatcatgtggccccgc

SEQ ID NO: 4131865 - DNA, 25 bp, Homo sapien
gagtcatggttggaggtggaaaggc

SEQ ID NO: 4131866 - DNA, 25 bp, Homo sapien
caagtggagtcatggttggaggtgg

SEQ ID NO: 4131867 - DNA, 25 bp, Homo sapien
ctgagcaagtggagtcatggttgga

SEQ ID NO: 4131868 - DNA, 25 bp, Homo sapien
ctgcaggcagtgaagaccaaggttg

SEQ ID NO: 4131869 - DNA, 25 bp, Homo sapien
caggttgggcaggtcagatgccaag

SEQ ID NO: 4131870 - DNA, 25 bp, Homo sapien
ggttgggcaggtcagatgccaaggc

SEQ ID NO: 4131871 - DNA, 25 bp, Homo sapien
gttcgaagtgggcccaggttgggca

SEQ ID NO: 4131872 - DNA, 25 bp, Homo sapien
cgaagtgggcccaggttgggcaggt

SEQ ID NO: 4131873 - DNA, 25 bp, Homo sapien
gcccgcgttcggctgcaggagaaag

SEQ ID NO: 4131874 - DNA, 25 bp, Homo sapien
cccgcgttcggctgcaggagaaaga

SEQ ID NO: 4131875 - DNA, 25 bp, Homo sapien
ggcccgcgttcggctgcaggagaaa

SEQ ID NO: 4131876 - DNA, 25 bp, Homo sapien
agcagctggtcgatgccataggcca

SEQ ID NO: 4131877 - DNA, 25 bp, Homo sapien
ccctcaaagggcaagtgccgctgca

SEQ ID NO: 4131878 - DNA, 25 bp, Homo sapien
ggccgggtctcaaagtggtcacagc

SEQ ID NO: 4131879 - DNA, 25 bp, Homo sapien
tgcacaatgcgagcatcatcctcac

SEQ ID NO: 4131880 - DNA, 25 bp, Homo sapien
acaccacaggcggggtgggcttctg

SEQ ID NO: 4131881 - DNA, 25 bp, Homo sapien
cggggtgggcttctgcccgtctgcc

SEQ ID NO: 4131882 - DNA, 25 bp, Homo sapien
ccaatacagcaaagtcaggtggatg

SEQ ID NO: 4131883 - DNA, 25 bp, Homo sapien
gaagggagggaggccaatacagcaa

SEQ ID NO: 4131884 - DNA, 25 bp, Homo sapien
ctcctgtgacccctcaggacagggt

SEQ ID NO: 4131885 - DNA, 25 bp, Homo sapien
tgctcctgtgacccctcaggacagg

SEQ ID NO: 4131886 - DNA, 25 bp, Homo sapien
aggacagggtggctccagcccacag

SEQ ID NO: 4131887 - DNA, 25 bp, Homo sapien
ccagcccacagatgctgcaggtgtt

SEQ ID NO: 4131888 - DNA, 25 bp, Homo sapien
gagtcaggccgcagttgggtggttc

SEQ ID NO: 4131889 - DNA, 25 bp, Homo sapien
ggagtcaggccgcagttgggtggtt

SEQ ID NO: 4131890 - DNA, 25 bp, Homo sapien
aggagtcaggccgcagttgggtggt

SEQ ID NO: 4131891 - DNA, 25 bp, Homo sapien
aaggagtcaggccgcagttgggtgg

SEQ ID NO: 4131892 - DNA, 25 bp, Homo sapien
actcactgccatagtgaccagggca

SEQ ID NO: 4131893 - DNA, 25 bp, Homo sapien
tggtgacacaattgcggtggcagcc

SEQ ID NO: 4131894 - DNA, 25 bp, Homo sapien
tgcgtaatcccaaagagtgcagcgg

SEQ ID NO: 4131895 - DNA, 25 bp, Homo sapien
gaacttcgggtagaagcgccagcag

SEQ ID NO: 4131896 - DNA, 25 bp, Homo sapien
tggacgccccaacactctctcaagg

SEQ ID NO: 4131897 - DNA, 25 bp, Homo sapien
ctctctcaaggacaatggccagagc

SEQ ID NO: 4131898 - DNA, 25 bp, Homo sapien
aaggacaatggccagagctgtgcct

SEQ ID NO: 4131899 - DNA, 25 bp, Homo sapien
aatggccagagctgtgccttggctc

SEQ ID NO: 4131900 - DNA, 25 bp, Homo sapien
cacggtcactacaagggctgctggg

SEQ ID NO: 4131901 - DNA, 25 bp, Homo sapien
ccaggagcacagagttcacaggctg

SEQ ID NO: 4131902 - DNA, 25 bp, Homo sapien
gcaaaacctgaacggcacagacact

SEQ ID NO: 4131903 - DNA, 25 bp, Homo sapien
acacgccacggtcactacaagggct

SEQ ID NO: 4131904 - DNA, 25 bp, Homo sapien
agttgcacctcacagcgtggcccag

SEQ ID NO: 4131905 - DNA, 25 bp, Homo sapien
ccccaaggccctcatcacagcggcc

SEQ ID NO: 4131906 - DNA, 25 bp, Homo sapien
gccctcatcacagcggccatgcaca

SEQ ID NO: 4131907 - DNA, 25 bp, Homo sapien
gttgcacctcacagcgtggcccagt

SEQ ID NO: 4131908 - DNA, 25 bp, Homo sapien
cccagaaccaggttagtagttgcct

SEQ ID NO: 4131909 - DNA, 25 bp, Homo sapien
cccacccttggtgcctttactgatg

SEQ ID NO: 4131910 - DNA, 25 bp, Homo sapien
ggtgcctttactgatgtgtgcacat

SEQ ID NO: 4131911 - DNA, 25 bp, Homo sapien
cagaaccaggttagtagttgccttc

SEQ ID NO: 4131912 - DNA, 25 bp, Homo sapien
cgggtgcacagggtggggtacacac

SEQ ID NO: 4131913 - DNA, 25 bp, Homo sapien
gtgcacagggtggggtacacacagg

SEQ ID NO: 4131914 - DNA, 25 bp, Homo sapien
ggtgcacagggtggggtacacacag

SEQ ID NO: 4131915 - DNA, 25 bp, Homo sapien
ctcgggtgcacagggtggggtacac

SEQ ID NO: 4131916 - DNA, 25 bp, Homo sapien
cccttcatagcccaggctgcactca

SEQ ID NO: 4131917 - DNA, 25 bp, Homo sapien
cacacacggccatccccttcatagc

SEQ ID NO: 4131918 - DNA, 25 bp, Homo sapien
cacggccatccccttcatagcccag

SEQ ID NO: 4131919 - DNA, 25 bp, Homo sapien
gccatccccttcatagcccaggctg

SEQ ID NO: 4131920 - DNA, 25 bp, Homo sapien
ggagtggttggacctagtgactgca

SEQ ID NO: 4131921 - DNA, 25 bp, Homo sapien
agggagggagtggttggacctagtg

SEQ ID NO: 4131922 - DNA, 25 bp, Homo sapien
gtggttggacctagtgactgcaggg

SEQ ID NO: 4131923 - DNA, 25 bp, Homo sapien
tccatgtccccgcccatctgcttac

SEQ ID NO: 4131924 - DNA, 25 bp, Homo sapien
tgctcaagcagttggcgtgctcgct

SEQ ID NO: 4131925 - DNA, 25 bp, Homo sapien
atcaccctcgtagtcgggcaggcag

SEQ ID NO: 4131926 - DNA, 25 bp, Homo sapien
caggcaggtacaagtgaccattgtt

SEQ ID NO: 4131927 - DNA, 25 bp, Homo sapien
gaccattgttcctacctggctacag

SEQ ID NO: 4131928 - DNA, 25 bp, Homo sapien
cccttcagaggtcggaagttctgcc

SEQ ID NO: 4131929 - DNA, 25 bp, Homo sapien
cttcacccttcagaggtcggaagtt

SEQ ID NO: 4131930 - DNA, 25 bp, Homo sapien
tggctactcggttcccccacctgct

SEQ ID NO: 4131931 - DNA, 25 bp, Homo sapien
agagcagtgggcgcccttcaccctt

SEQ ID NO: 4131932 - DNA, 25 bp, Homo sapien
tacgtagcctgcgtggcactcacag

SEQ ID NO: 4131933 - DNA, 25 bp, Homo sapien
caagcagcggtccacaggtggttcc

SEQ ID NO: 4131934 - DNA, 25 bp, Homo sapien
agacactgcagtccatcgcctacgt

SEQ ID NO: 4131935 - DNA, 25 bp, Homo sapien
cctggaagtgcaggtcagtgcacat

SEQ ID NO: 4131936 - DNA, 25 bp, Homo sapien
aaggacggctccctgtgcttcgcat

SEQ ID NO: 4131937 - DNA, 25 bp, Homo sapien
tcagcctccgaaaagttcagaccat

SEQ ID NO: 4131938 - DNA, 25 bp, Homo sapien
ctggaggtggaaaacgccagcccgt

SEQ ID NO: 4131939 - DNA, 25 bp, Homo sapien
ttcagaccataagggccgctggtgg

SEQ ID NO: 4131940 - DNA, 25 bp, Homo sapien
tctgagaggttcttgcgggcaccca

SEQ ID NO: 4131941 - DNA, 25 bp, Homo sapien
agtaggcatcccagcgttctgagag

SEQ ID NO: 4131942 - DNA, 25 bp, Homo sapien
cttgcacacggaagcagtaggcatc

SEQ ID NO: 4131943 - DNA, 25 bp, Homo sapien
acagtccgccacagggaaaaccaca

SEQ ID NO: 4131944 - DNA, 25 bp, Homo sapien
gaaaagcaggtcagtggctcagcag

SEQ ID NO: 4131945 - DNA, 25 bp, Homo sapien
aaaagcaggtcagtggctcagcaga

SEQ ID NO: 4131946 - DNA, 25 bp, Homo sapien
aagcaggtcagtggctcagcagatt

SEQ ID NO: 4131947 - DNA, 25 bp, Homo sapien
aggaaaagcaggtcagtggctcagc

SEQ ID NO: 4131948 - DNA, 25 bp, Homo sapien
agcttcccattgcacgtgctgatcc

SEQ ID NO: 4131949 - DNA, 25 bp, Homo sapien
agccatttcggcatcggcaggccac

SEQ ID NO: 4131950 - DNA, 25 bp, Homo sapien
ttcccattgcacgtgctgatcccgt

SEQ ID NO: 4131951 - DNA, 25 bp, Homo sapien
ccatttcggcatcggcaggccacat

SEQ ID NO: 4131952 - DNA, 25 bp, Homo sapien
tggcattggcatagcccaatagcat

SEQ ID NO: 4131953 - DNA, 25 bp, Homo sapien
tcattgacagggacgaagagtgtct

SEQ ID NO: 4131954 - DNA, 25 bp, Homo sapien
gtcttatacgtgagctcatcatcca

SEQ ID NO: 4131955 - DNA, 25 bp, Homo sapien
gaccccgctgggtggcattggcata

SEQ ID NO: 4131956 - DNA, 25 bp, Homo sapien
agagcaaggcctgttggcctgggcc

SEQ ID NO: 4131957 - DNA, 25 bp, Homo sapien
gcagagcaaggcctgttggcctggg

SEQ ID NO: 4131958 - DNA, 25 bp, Homo sapien
cagagcaaggcctgttggcctgggc

SEQ ID NO: 4131959 - DNA, 25 bp, Homo sapien
gcgttggaggcatgcagctccaagt

SEQ ID NO: 4131960 - DNA, 25 bp, Homo sapien
tggcgttggaggcatgcagctccaa

SEQ ID NO: 4131961 - DNA, 25 bp, Homo sapien
ggcgttggaggcatgcagctccaag

SEQ ID NO: 4131962 - DNA, 25 bp, Homo sapien
ggtggcgttggaggcatgcagctcc

SEQ ID NO: 4131963 - DNA, 25 bp, Homo sapien
aggctgaggcctgagtgggccggaa

SEQ ID NO: 4131964 - DNA, 25 bp, Homo sapien
cagggcctgcgtcactgatgatgag

SEQ ID NO: 4131965 - DNA, 25 bp, Homo sapien
gtcagggcctgcgtcactgatgatg

SEQ ID NO: 4131966 - DNA, 25 bp, Homo sapien
ttgtcagggcctgcgtcactgatga

SEQ ID NO: 4131967 - DNA, 25 bp, Homo sapien
ccagggccaacagggtgggacagtg

SEQ ID NO: 4131968 - DNA, 25 bp, Homo sapien
cagggccaacagggtgggacagtgg

SEQ ID NO: 4131969 - DNA, 25 bp, Homo sapien
ggccaacagggtgggacagtggcca

SEQ ID NO: 4131970 - DNA, 25 bp, Homo sapien
gggccaacagggtgggacagtggcc

SEQ ID NO: 4131971 - DNA, 25 bp, Homo sapien
tgaaggccatgatgtcccacacaat

SEQ ID NO: 4131972 - DNA, 25 bp, Homo sapien
tacggctaaccacaactgtccctgg

SEQ ID NO: 4131973 - DNA, 25 bp, Homo sapien
ccagagcatggatgatgccattgaa

SEQ ID NO: 4131974 - DNA, 25 bp, Homo sapien
ccacacaatgatacggctaaccaca

SEQ ID NO: 4131975 - DNA, 25 bp, Homo sapien
ctacaaacaaacagggagagtgttg

SEQ ID NO: 4131976 - DNA, 25 bp, Homo sapien
acaaacagggagagtgttgacctgg

SEQ ID NO: 4131977 - DNA, 25 bp, Homo sapien
gagtgttgacctggcgggagctgtc

SEQ ID NO: 4131978 - DNA, 25 bp, Homo sapien
ttgacctggcgggagctgtcccacc

SEQ ID NO: 4131979 - DNA, 25 bp, Homo sapien
gcctcgggcacggaggtagagagct

SEQ ID NO: 4131980 - DNA, 25 bp, Homo sapien
aaagcccatgggcttgcctcgggca

SEQ ID NO: 4131981 - DNA, 25 bp, Homo sapien
gcctgccgccacaggtggggcttca

SEQ ID NO: 4131982 - DNA, 25 bp, Homo sapien
ggaggtagagagctccggccaccaa

SEQ ID NO: 4131983 - DNA, 25 bp, Homo sapien
cacaaaaggtgtcgctgccaaagac

SEQ ID NO: 4131984 - DNA, 25 bp, Homo sapien
tcgaagggttcacaaaaggtgtcgc

SEQ ID NO: 4131985 - DNA, 25 bp, Homo sapien
cggtgagaagtcgtcatcagcatca

SEQ ID NO: 4131986 - DNA, 25 bp, Homo sapien
tcccttcttgccacggtgagaagtc

SEQ ID NO: 4131987 - DNA, 25 bp, Homo sapien
aagagcagggttggtggtggagggt

SEQ ID NO: 4131988 - DNA, 25 bp, Homo sapien
ctgtgaggatcctctgggtgtcagg

SEQ ID NO: 4131989 - DNA, 25 bp, Homo sapien
tgtgaggatcctctgggtgtcaggg

SEQ ID NO: 4131990 - DNA, 25 bp, Homo sapien
tcacttgactgtgaggatcctctgg

SEQ ID NO: 4131991 - DNA, 25 bp, Homo sapien
cacttgactgtgaggatcctctggg

SEQ ID NO: 4131992 - DNA, 25 bp, Homo sapien
gcaataaaagtggtctcctccctgt

SEQ ID NO: 4131993 - DNA, 25 bp, Homo sapien
caagcaataaaagtggtctcctccc

SEQ ID NO: 4131994 - DNA, 25 bp, Homo sapien
cccagacaagcaataaaagtggtct

SEQ ID NO: 4131995 - DNA, 25 bp, Homo sapien
gtgcatgcttctgctttcagcccca

SEQ ID NO: 4131996 - DNA, 25 bp, Homo sapien
cgctgagggcacctttattgtctgg

SEQ ID NO: 4131997 - DNA, 25 bp, Homo sapien
gctgagggcacctttattgtctggg

SEQ ID NO: 4131998 - DNA, 25 bp, Homo sapien
cacagcctggtatgcgtgcgggctc

SEQ ID NO: 4131999 - DNA, 25 bp, Homo sapien
cagtggagtttcgaatgtacacaca

SEQ ID NO: 4132000 - DNA, 25 bp, Homo sapien
cactgtaggtcttcaatcaaggttc

SEQ ID NO: 4132001 - DNA, 25 bp, Homo sapien
gaaagcctgtcgacgttgctagaaa

SEQ ID NO: 4132002 - DNA, 25 bp, Homo sapien
actcgagcccatcctacggcctcaa

SEQ ID NO: 4132003 - DNA, 25 bp, Homo sapien
cacactcgagcccatcctacggcct

SEQ ID NO: 4132004 - DNA, 25 bp, Homo sapien
gccctggggacaccgccacactcga

SEQ ID NO: 4132005 - DNA, 25 bp, Homo sapien
gagcccatcctacggcctcaatcct

SEQ ID NO: 4132006 - DNA, 25 bp, Homo sapien
caaaaatctaagtaagcgccccgtg

SEQ ID NO: 4132007 - DNA, 25 bp, Homo sapien
cagttccacaggcacttgtaggcgc

SEQ ID NO: 4132008 - DNA, 25 bp, Homo sapien
tcggagacgtgattggtgcctagac

SEQ ID NO: 4132009 - DNA, 25 bp, Homo sapien
cacaaccctggagcatagtaactga

SEQ ID NO: 4132010 - DNA, 25 bp, Homo sapien
aagcgaggcggatccgccaatcaga

SEQ ID NO: 4132011 - DNA, 25 bp, Homo sapien
gaactgggcgccgaccttctaaagc

SEQ ID NO: 4132012 - DNA, 25 bp, Homo sapien
ccaatcagactgcagcgggggcgtg

SEQ ID NO: 4132013 - DNA, 25 bp, Homo sapien
gggcgtgcagctccgccaatcagag

SEQ ID NO: 4132014 - DNA, 25 bp, Homo sapien
gagagggatatgacggaactaagca

SEQ ID NO: 4132015 - DNA, 25 bp, Homo sapien
tgggagactagcgagcgccgtcctc

SEQ ID NO: 4132016 - DNA, 25 bp, Homo sapien
gttctcgccgtgtaccgcgacctgg

SEQ ID NO: 4132017 - DNA, 25 bp, Homo sapien
taagcactggatcgcccggacgcag

SEQ ID NO: 4132018 - DNA, 25 bp, Homo sapien
ctggcccacgcgcactttaatcatg

SEQ ID NO: 4132019 - DNA, 25 bp, Homo sapien
catcgttcctcccaggacaaaaaag

SEQ ID NO: 4132020 - DNA, 25 bp, Homo sapien
cggtagatgccaaatcgctgcttcc

SEQ ID NO: 4132021 - DNA, 25 bp, Homo sapien
gggcaggaaccggtagatgccaaat

SEQ ID NO: 4132022 - DNA, 25 bp, Homo sapien
taaccaatagtctaggtctgtcacc

SEQ ID NO: 4132023 - DNA, 25 bp, Homo sapien
gaggagatcagtttccttgttccag

SEQ ID NO: 4132024 - DNA, 25 bp, Homo sapien
tgttttaagatgtccctcacttcct

SEQ ID NO: 4132025 - DNA, 25 bp, Homo sapien
gctttgccagacctttgactcgcca

SEQ ID NO: 4132026 - DNA, 25 bp, Homo sapien
ctgaggcttttctacggtagacatc

SEQ ID NO: 4132027 - DNA, 25 bp, Homo sapien
tgaggcttttctacggtagacatca

SEQ ID NO: 4132028 - DNA, 25 bp, Homo sapien
tctgaggcttttctacggtagacat

SEQ ID NO: 4132029 - DNA, 25 bp, Homo sapien
gaggcttttctacggtagacatcat

SEQ ID NO: 4132030 - DNA, 25 bp, Homo sapien
ttcatattgactttattgactgctg

SEQ ID NO: 4132031 - DNA, 25 bp, Homo sapien
aaattcatattgactttattgactg

SEQ ID NO: 4132032 - DNA, 25 bp, Homo sapien
aaaaattcatattgactttattgac

SEQ ID NO: 4132033 - DNA, 25 bp, Homo sapien
aattcatattgactttattgactgc

SEQ ID NO: 4132034 - DNA, 25 bp, Homo sapien
gcatcctgattgatccttgaattgt

SEQ ID NO: 4132035 - DNA, 25 bp, Homo sapien
ccagcagtgacttgggaagtactca

SEQ ID NO: 4132036 - DNA, 25 bp, Homo sapien
tgcagctgataaaggacaagctgtg

SEQ ID NO: 4132037 - DNA, 25 bp, Homo sapien
catggactagattcatcgagtgagt

SEQ ID NO: 4132038 - DNA, 25 bp, Homo sapien
ctagagtagtgtgaaacctgttgcc

SEQ ID NO: 4132039 - DNA, 25 bp, Homo sapien
ttaacttgaggataccctatggcct

SEQ ID NO: 4132040 - DNA, 25 bp, Homo sapien
catgagaatacgatgaaccaccgtc

SEQ ID NO: 4132041 - DNA, 25 bp, Homo sapien
gaatcctagatgacacaactgggca

SEQ ID NO: 4132042 - DNA, 25 bp, Homo sapien
aaaatttatgccctgtagtttacag

SEQ ID NO: 4132043 - DNA, 25 bp, Homo sapien
agttggtggtactgcaattcttttc

SEQ ID NO: 4132044 - DNA, 25 bp, Homo sapien
tgctgggatcatacttactgcagtc

SEQ ID NO: 4132045 - DNA, 25 bp, Homo sapien
gctgggatcatacttactgcagtct

SEQ ID NO: 4132046 - DNA, 25 bp, Homo sapien
aaatccctgtggttctgttctcctg

SEQ ID NO: 4132047 - DNA, 25 bp, Homo sapien
tttaggatagtaccggcatctgtgc

SEQ ID NO: 4132048 - DNA, 25 bp, Homo sapien
gtggcccaggtgtctttaacatctt

SEQ ID NO: 4132049 - DNA, 25 bp, Homo sapien
tgtgcccctgagcatattttgaaca

SEQ ID NO: 4132050 - DNA, 25 bp, Homo sapien
agtatagcccacttcaaatagcttg

SEQ ID NO: 4132051 - DNA, 25 bp, Homo sapien
gtgaggaaagcatgtaagcagtata

SEQ ID NO: 4132052 - DNA, 25 bp, Homo sapien
aaattggagaattactgagggcgga

SEQ ID NO: 4132053 - DNA, 25 bp, Homo sapien
gggcagaaatgcaggttgaaattaa

SEQ ID NO: 4132054 - DNA, 25 bp, Homo sapien
cctcaggctggcagtcaaggaattc

SEQ ID NO: 4132055 - DNA, 25 bp, Homo sapien
caagccctgatttcatgctgacaag

SEQ ID NO: 4132056 - DNA, 25 bp, Homo sapien
cagggctcgggctgcattaacacag

SEQ ID NO: 4132057 - DNA, 25 bp, Homo sapien
tcagactgcagactgaagtgcccca

SEQ ID NO: 4132058 - DNA, 25 bp, Homo sapien
ttccctaaagcagtgcagcaccggc

SEQ ID NO: 4132059 - DNA, 25 bp, Homo sapien
ggcatcactagacaggccctaatta

SEQ ID NO: 4132060 - DNA, 25 bp, Homo sapien
gatataagatttgaggtcagccatc

SEQ ID NO: 4132061 - DNA, 25 bp, Homo sapien
tcccttaaggtctggatgagacttc

SEQ ID NO: 4132062 - DNA, 25 bp, Homo sapien
tcataattggttgtatatgtagact

SEQ ID NO: 4132063 - DNA, 25 bp, Homo sapien
ctttttacttgttgccatggaactg

SEQ ID NO: 4132064 - DNA, 25 bp, Homo sapien
gttatattaagttgactttatcaaa

SEQ ID NO: 4132065 - DNA, 25 bp, Homo sapien
ttttgcatatgtttccttcgtttaa

SEQ ID NO: 4132066 - DNA, 25 bp, Homo sapien
catgtcttgtgcattcagcaggtgg

SEQ ID NO: 4132067 - DNA, 25 bp, Homo sapien
caggaggcacccgtggcccattgtg

SEQ ID NO: 4132068 - DNA, 25 bp, Homo sapien
agcacttgtgcccttgtgcacctgg

SEQ ID NO: 4132069 - DNA, 25 bp, Homo sapien
gaatccaaaggttgtcagcagcagg

SEQ ID NO: 4132070 - DNA, 25 bp, Homo sapien
tccacctttgcagggcccagttgat

SEQ ID NO: 4132071 - DNA, 25 bp, Homo sapien
tcaaggcatgatgggtggctatccg

SEQ ID NO: 4132072 - DNA, 25 bp, Homo sapien
tgaaatttgttgtgtccttcaaggc

SEQ ID NO: 4132073 - DNA, 25 bp, Homo sapien
gttgcatgttaatgatgcatgtctg

SEQ ID NO: 4132074 - DNA, 25 bp, Homo sapien
tgatctaacaaatctcataatcgcc

SEQ ID NO: 4132075 - DNA, 25 bp, Homo sapien
agttgcactcgccaaagcacatctg

SEQ ID NO: 4132076 - DNA, 25 bp, Homo sapien
cagtgtaactgatgttgatctaaca

SEQ ID NO: 4132077 - DNA, 25 bp, Homo sapien
taatcgcctgctctattccatggcc

SEQ ID NO: 4132078 - DNA, 25 bp, Homo sapien
gagctcccggctctggagatgcaga

SEQ ID NO: 4132079 - DNA, 25 bp, Homo sapien
caagaaaccctgtatggtgggagct

SEQ ID NO: 4132080 - DNA, 25 bp, Homo sapien
tagcaggatgtattctacggcccag

SEQ ID NO: 4132081 - DNA, 25 bp, Homo sapien
gaaacatgatcattggagctcccgg

SEQ ID NO: 4132082 - DNA, 25 bp, Homo sapien
gcctcctctgtccttatcaagggga

SEQ ID NO: 4132083 - DNA, 25 bp, Homo sapien
cctctgtccttatcaaggggagtgc

SEQ ID NO: 4132084 - DNA, 25 bp, Homo sapien
tctgtccttatcaaggggagtgcta

SEQ ID NO: 4132085 - DNA, 25 bp, Homo sapien
tcctctgtccttatcaaggggagtg

SEQ ID NO: 4132086 - DNA, 25 bp, Homo sapien
tcatcatgaacgtctcaggaagaaa

SEQ ID NO: 4132087 - DNA, 25 bp, Homo sapien
ccaatgacaaatgcttagttctgtt

SEQ ID NO: 4132088 - DNA, 25 bp, Homo sapien
tgttttcatcatgaacgtctcagga

SEQ ID NO: 4132089 - DNA, 25 bp, Homo sapien
atcatgaacgtctcaggaagaaaac

SEQ ID NO: 4132090 - DNA, 25 bp, Homo sapien
tagatcttgaccttcaaaaagatta

SEQ ID NO: 4132091 - DNA, 25 bp, Homo sapien
tattagatcttgaccttcaaaaaga

SEQ ID NO: 4132092 - DNA, 25 bp, Homo sapien
agatcttgaccttcaaaaagattat

SEQ ID NO: 4132093 - DNA, 25 bp, Homo sapien
ttagatcttgaccttcaaaaagatt

SEQ ID NO: 4132094 - DNA, 25 bp, Homo sapien
tggagtgccatcgattgtttcaagc

SEQ ID NO: 4132095 - DNA, 25 bp, Homo sapien
tccaccgcctaggatgctgttgcaa

SEQ ID NO: 4132096 - DNA, 25 bp, Homo sapien
tcggcagctgaaccaacacttgaag

SEQ ID NO: 4132097 - DNA, 25 bp, Homo sapien
ggtgcatatcacatagggcctcaga

SEQ ID NO: 4132098 - DNA, 25 bp, Homo sapien
tgttaggtcatgatacgtgccgtag

SEQ ID NO: 4132099 - DNA, 25 bp, Homo sapien
cttgaataagtaaagtgtatagtat

SEQ ID NO: 4132100 - DNA, 25 bp, Homo sapien
gatacgtgccgtagaaaaaatagag

SEQ ID NO: 4132101 - DNA, 25 bp, Homo sapien
tttctagtgtgaagacaaacaacat

SEQ ID NO: 4132102 - DNA, 25 bp, Homo sapien
ccaatgtagttagataaacaaaagc

SEQ ID NO: 4132103 - DNA, 25 bp, Homo sapien
gggcttactgttctagtgttactta

SEQ ID NO: 4132104 - DNA, 25 bp, Homo sapien
tacacactggacaaaggggcttact

SEQ ID NO: 4132105 - DNA, 25 bp, Homo sapien
tttgaaattagccaatgtagttaga

SEQ ID NO: 4132106 - DNA, 25 bp, Homo sapien
ccgcgcccagccacaatcctacaat

SEQ ID NO: 4132107 - DNA, 25 bp, Homo sapien
caccgcgcccagccacaatcctaca

SEQ ID NO: 4132108 - DNA, 25 bp, Homo sapien
accgcgcccagccacaatcctacaa

SEQ ID NO: 4132109 - DNA, 25 bp, Homo sapien
tattaaaattcgtgatgaactctgc

SEQ ID NO: 4132110 - DNA, 25 bp, Homo sapien
gatactcttgatgctgttataggac

SEQ ID NO: 4132111 - DNA, 25 bp, Homo sapien
gattcttctttcaccggcactcagc

SEQ ID NO: 4132112 - DNA, 25 bp, Homo sapien
tattagagtagacgcaatgagatgg

SEQ ID NO: 4132113 - DNA, 25 bp, Homo sapien
tcgaagtcacatgatggccaacaag

SEQ ID NO: 4132114 - DNA, 25 bp, Homo sapien
taatgcctgtacatacaatgagccg

SEQ ID NO: 4132115 - DNA, 25 bp, Homo sapien
aatgagccggagtctttgatctaca

SEQ ID NO: 4132116 - DNA, 25 bp, Homo sapien
gcttgaaacacgcagagacctggag

SEQ ID NO: 4132117 - DNA, 25 bp, Homo sapien
tggcatgatcaactcgaacctctgg

SEQ ID NO: 4132118 - DNA, 25 bp, Homo sapien
tgttgcgtaagctggcatgatcaac

SEQ ID NO: 4132119 - DNA, 25 bp, Homo sapien
ctgctctgttgcgtaagctggcatg

SEQ ID NO: 4132120 - DNA, 25 bp, Homo sapien
gcatgatcaactcgaacctctgggc

SEQ ID NO: 4132121 - DNA, 25 bp, Homo sapien
tttaggtcagcgtacacaagtagag

SEQ ID NO: 4132122 - DNA, 25 bp, Homo sapien
gctttcgtatggttctgaggtcaga

SEQ ID NO: 4132123 - DNA, 25 bp, Homo sapien
caagtagagttagttgtccgtagtc

SEQ ID NO: 4132124 - DNA, 25 bp, Homo sapien
catctcggttatcagctcgactgct

SEQ ID NO: 4132125 - DNA, 25 bp, Homo sapien
cacatagagaagcagatgaggtgct

SEQ ID NO: 4132126 - DNA, 25 bp, Homo sapien
tggcccacctagcaaatgatcataa

SEQ ID NO: 4132127 - DNA, 25 bp, Homo sapien
tagaaggttaattgtcctctgtccc

SEQ ID NO: 4132128 - DNA, 25 bp, Homo sapien
catataggttgggaaactctaggcc

SEQ ID NO: 4132129 - DNA, 25 bp, Homo sapien
tgcgcgggcacgcagtgtcgcgcgg

SEQ ID NO: 4132130 - DNA, 25 bp, Homo sapien
gtaaagtgcgtcaccgcctctctgc

SEQ ID NO: 4132131 - DNA, 25 bp, Homo sapien
tcgcgcggagcagggatcgcttggc

SEQ ID NO: 4132132 - DNA, 25 bp, Homo sapien
acgcacttacgctgccgccgtaaag

SEQ ID NO: 4132133 - DNA, 25 bp, Homo sapien
cacgtgtgaactgaagccactgacg

SEQ ID NO: 4132134 - DNA, 25 bp, Homo sapien
gcgccacgtgtgaactgaagccact

SEQ ID NO: 4132135 - DNA, 25 bp, Homo sapien
ctggcgccacgtgtgaactgaagcc

SEQ ID NO: 4132136 - DNA, 25 bp, Homo sapien
gtgtgaactgaagccactgacgagc

SEQ ID NO: 4132137 - DNA, 25 bp, Homo sapien
gaaggaagcacaaacacatcaacct

SEQ ID NO: 4132138 - DNA, 25 bp, Homo sapien
aaggaagcacaaacacatcaacctg

SEQ ID NO: 4132139 - DNA, 25 bp, Homo sapien
tagaaggaagcacaaacacatcaac

SEQ ID NO: 4132140 - DNA, 25 bp, Homo sapien
gtagaaggaagcacaaacacatcaa

SEQ ID NO: 4132141 - DNA, 25 bp, Homo sapien
aagccgtagccgtagaagagcgtcg

SEQ ID NO: 4132142 - DNA, 25 bp, Homo sapien
agcaacttccagacgtgggtccctc

SEQ ID NO: 4132143 - DNA, 25 bp, Homo sapien
agagacaaagccgtagccgtagaag

SEQ ID NO: 4132144 - DNA, 25 bp, Homo sapien
aagagcgtcgtggtggctgcagcaa

SEQ ID NO: 4132145 - DNA, 25 bp, Homo sapien
cacgtggccacggaaagaaaatatt

SEQ ID NO: 4132146 - DNA, 25 bp, Homo sapien
aaatattgggcctcaaacctggctc

SEQ ID NO: 4132147 - DNA, 25 bp, Homo sapien
tgagcccgcgcggttaacatgatcg

SEQ ID NO: 4132148 - DNA, 25 bp, Homo sapien
cttcgttccgcagaatgagcccgcg

SEQ ID NO: 4132149 - DNA, 25 bp, Homo sapien
cagcacgaatcataaggcaggagag

SEQ ID NO: 4132150 - DNA, 25 bp, Homo sapien
cgttaagtctaatgcgaaatgccta

SEQ ID NO: 4132151 - DNA, 25 bp, Homo sapien
tagaatgggatcatacacaacagcg

SEQ ID NO: 4132152 - DNA, 25 bp, Homo sapien
tatgagacacaaaacgacaaccact

SEQ ID NO: 4132153 - DNA, 25 bp, Homo sapien
ttttataccgcttatggcaggtcat

SEQ ID NO: 4132154 - DNA, 25 bp, Homo sapien
ttggattttataccgcttatggcag

SEQ ID NO: 4132155 - DNA, 25 bp, Homo sapien
gattttataccgcttatggcaggtc

SEQ ID NO: 4132156 - DNA, 25 bp, Homo sapien
tttggattttataccgcttatggca

SEQ ID NO: 4132157 - DNA, 25 bp, Homo sapien
ttaattttcgatgatgttctcgaac

SEQ ID NO: 4132158 - DNA, 25 bp, Homo sapien
gcttccctaagaagagcctccttaa

SEQ ID NO: 4132159 - DNA, 25 bp, Homo sapien
tccttagctcagcttccctaagaag

SEQ ID NO: 4132160 - DNA, 25 bp, Homo sapien
tcttgtgaccccgctttttagcctc

SEQ ID NO: 4132161 - DNA, 25 bp, Homo sapien
cacatttgatggcttaatatcagga

SEQ ID NO: 4132162 - DNA, 25 bp, Homo sapien
tttgatggcttaatatcaggattag

SEQ ID NO: 4132163 - DNA, 25 bp, Homo sapien
tatcaggattagtttcaagttttct

SEQ ID NO: 4132164 - DNA, 25 bp, Homo sapien
ttttccataggttccacatttgatg

SEQ ID NO: 4132165 - DNA, 25 bp, Homo sapien
aagttcttggcagtacagcttcttt

SEQ ID NO: 4132166 - DNA, 25 bp, Homo sapien
ttctgtttgcccgacttggctttgt

SEQ ID NO: 4132167 - DNA, 25 bp, Homo sapien
tgtttgcccgacttggctttgttct

SEQ ID NO: 4132168 - DNA, 25 bp, Homo sapien
ttgaattctgtttgcccgacttggc

SEQ ID NO: 4132169 - DNA, 25 bp, Homo sapien
actaatgtcgtactaggcttaatac

SEQ ID NO: 4132170 - DNA, 25 bp, Homo sapien
aatctgtacagcaaacccctatgac

SEQ ID NO: 4132171 - DNA, 25 bp, Homo sapien
ctgtacagcaaacccctatgacgca

SEQ ID NO: 4132172 - DNA, 25 bp, Homo sapien
ctgggtgatgaaataatctgtacag

SEQ ID NO: 4132173 - DNA, 25 bp, Homo sapien
taaatcatgcttacaggcagaacca

SEQ ID NO: 4132174 - DNA, 25 bp, Homo sapien
gcataagctagagtcgagtcacgaa

SEQ ID NO: 4132175 - DNA, 25 bp, Homo sapien
tcaggtaaacatagcaggaaaggca

SEQ ID NO: 4132176 - DNA, 25 bp, Homo sapien
ttagagacctttagcctgacactgc

SEQ ID NO: 4132177 - DNA, 25 bp, Homo sapien
tctggcatccaacacctctaggaca

SEQ ID NO: 4132178 - DNA, 25 bp, Homo sapien
tgaggacatctgcaaccaagaggat

SEQ ID NO: 4132179 - DNA, 25 bp, Homo sapien
atggcctcttctacctgaggacatc

SEQ ID NO: 4132180 - DNA, 25 bp, Homo sapien
cctctaggacaacatcggaggcttc

SEQ ID NO: 4132181 - DNA, 25 bp, Homo sapien
tctctggcaaagtgcacgtactctg

SEQ ID NO: 4132182 - DNA, 25 bp, Homo sapien
tgagtcagttgtaaaagtcacctgg

SEQ ID NO: 4132183 - DNA, 25 bp, Homo sapien
gaactaatacccgacattgtgtagg

SEQ ID NO: 4132184 - DNA, 25 bp, Homo sapien
gaaatatactacacaataagctggg

SEQ ID NO: 4132185 - DNA, 25 bp, Homo sapien
atggggtttcgccgtgttggccagg

SEQ ID NO: 4132186 - DNA, 25 bp, Homo sapien
gggactacaagtgcccatcatcatg

SEQ ID NO: 4132187 - DNA, 25 bp, Homo sapien
actacaagtgcccatcatcatgccc

SEQ ID NO: 4132188 - DNA, 25 bp, Homo sapien
ggctaatatttgtattttagtagag

SEQ ID NO: 4132189 - DNA, 25 bp, Homo sapien
tagaaataagacatttgcggccagg

SEQ ID NO: 4132190 - DNA, 25 bp, Homo sapien
aataagacatttgcggccaggcacg

SEQ ID NO: 4132191 - DNA, 25 bp, Homo sapien
aattagaaataagacatttgcggcc

SEQ ID NO: 4132192 - DNA, 25 bp, Homo sapien
gcaattagaaataagacatttgcgg

SEQ ID NO: 4132193 - DNA, 25 bp, Homo sapien
cttcaaataatttagccagctctcc

SEQ ID NO: 4132194 - DNA, 25 bp, Homo sapien
tctgaacaccactgttggcaattct

SEQ ID NO: 4132195 - DNA, 25 bp, Homo sapien
gaggctctgaacaccactgttggca

SEQ ID NO: 4132196 - DNA, 25 bp, Homo sapien
tggttttgttgaggctctgaacacc

SEQ ID NO: 4132197 - DNA, 25 bp, Homo sapien
cagctcttaagataactacattgcc

SEQ ID NO: 4132198 - DNA, 25 bp, Homo sapien
taaatcaagattttgtacactcatc

SEQ ID NO: 4132199 - DNA, 25 bp, Homo sapien
cagatgatctctggctgaaatcaga

SEQ ID NO: 4132200 - DNA, 25 bp, Homo sapien
gaattattctggcaacttacctgat

SEQ ID NO: 4132201 - DNA, 25 bp, Homo sapien
caattactccaacccgaatggcttt

SEQ ID NO: 4132202 - DNA, 25 bp, Homo sapien
cagacttcacttctgaatggagcag

SEQ ID NO: 4132203 - DNA, 25 bp, Homo sapien
ttcacttctgaatggagcagcattc

SEQ ID NO: 4132204 - DNA, 25 bp, Homo sapien
caacccgaatggctttgctgcaagt

SEQ ID NO: 4132205 - DNA, 25 bp, Homo sapien
acttggagagctggctaaacttctt

SEQ ID NO: 4132206 - DNA, 25 bp, Homo sapien
gagctggctaaacttcttaactatt

SEQ ID NO: 4132207 - DNA, 25 bp, Homo sapien
taaaaagtaatgaactgaaactcac

SEQ ID NO: 4132208 - DNA, 25 bp, Homo sapien
gagagctggctaaacttcttaacta

SEQ ID NO: 4132209 - DNA, 25 bp, Homo sapien
cttgtaagccccatggatacaccaa

SEQ ID NO: 4132210 - DNA, 25 bp, Homo sapien
gccccatggatacaccaacattaca

SEQ ID NO: 4132211 - DNA, 25 bp, Homo sapien
catggatacaccaacattacacatc

SEQ ID NO: 4132212 - DNA, 25 bp, Homo sapien
taagccccatggatacaccaacatt

SEQ ID NO: 4132213 - DNA, 25 bp, Homo sapien
tggcagcctccatcggttttactac

SEQ ID NO: 4132214 - DNA, 25 bp, Homo sapien
taagtggagatacgatgaagctcgg

SEQ ID NO: 4132215 - DNA, 25 bp, Homo sapien
tacttcaatacttgctggacttcgc

SEQ ID NO: 4132216 - DNA, 25 bp, Homo sapien
gacttcgcagagcaagcgcagagga

SEQ ID NO: 4132217 - DNA, 25 bp, Homo sapien
gagctcatgagaaggggtcctttta

SEQ ID NO: 4132218 - DNA, 25 bp, Homo sapien
agctcatgagaaggggtccttttac

SEQ ID NO: 4132219 - DNA, 25 bp, Homo sapien
tgtagcctgggacagtatatttcag

SEQ ID NO: 4132220 - DNA, 25 bp, Homo sapien
ttttggtgcatacctcttctctgag

SEQ ID NO: 4132221 - DNA, 25 bp, Homo sapien
ttggcagcaccttcaacatttggga

SEQ ID NO: 4132222 - DNA, 25 bp, Homo sapien
tccacctttttggtgcatacctctt

SEQ ID NO: 4132223 - DNA, 25 bp, Homo sapien
agatgtgtcaaaagaaggtttattc

SEQ ID NO: 4132224 - DNA, 25 bp, Homo sapien
ttctagtggtcaccaaaatgccaac

SEQ ID NO: 4132225 - DNA, 25 bp, Homo sapien
aaaaataagatgtgtcaaaagaagg

SEQ ID NO: 4132226 - DNA, 25 bp, Homo sapien
tgtcaaaagaaggtttattctagtg

SEQ ID NO: 4132227 - DNA, 25 bp, Homo sapien
tgtctaccacaatactctcattaaa

SEQ ID NO: 4132228 - DNA, 25 bp, Homo sapien
gggatggcaatagtaagctaatgag

SEQ ID NO: 4132229 - DNA, 25 bp, Homo sapien
gattgaagccgcttttcatgtctac

SEQ ID NO: 4132230 - DNA, 25 bp, Homo sapien
gatggcaatagtaagctaatgaggc

SEQ ID NO: 4132231 - DNA, 25 bp, Homo sapien
tgatgaagacagcagcgacacacaa

SEQ ID NO: 4132232 - DNA, 25 bp, Homo sapien
caggtaagagctccactggcctgtc

SEQ ID NO: 4132233 - DNA, 25 bp, Homo sapien
gacagcagcgacacacaattctcac

SEQ ID NO: 4132234 - DNA, 25 bp, Homo sapien
aaagcaagcccatgtaaacaggtaa

SEQ ID NO: 4132235 - DNA, 25 bp, Homo sapien
aaggatgctattggccaaatgaggg

SEQ ID NO: 4132236 - DNA, 25 bp, Homo sapien
agactggaaaaggatgctattggcc

SEQ ID NO: 4132237 - DNA, 25 bp, Homo sapien
catcaacagtttcctggtcactgtc

SEQ ID NO: 4132238 - DNA, 25 bp, Homo sapien
tattccatttgtcagaccggaagac

SEQ ID NO: 4132239 - DNA, 25 bp, Homo sapien
cagttttaactcatggaggacacac

SEQ ID NO: 4132240 - DNA, 25 bp, Homo sapien
taacgggatgtgcaaaattaaggct

SEQ ID NO: 4132241 - DNA, 25 bp, Homo sapien
aactctttggaggtacatataacgg

SEQ ID NO: 4132242 - DNA, 25 bp, Homo sapien
aattaaggctaatggatcacaagcc

SEQ ID NO: 4132243 - DNA, 25 bp, Homo sapien
cagcaaacatgcctgagctgttttc

SEQ ID NO: 4132244 - DNA, 25 bp, Homo sapien
cttctgcagcaaacatgcctgagct

SEQ ID NO: 4132245 - DNA, 25 bp, Homo sapien
tctcttctgcagcaaacatgcctga

SEQ ID NO: 4132246 - DNA, 25 bp, Homo sapien
ccctgtctcttctgcagcaaacatg

SEQ ID NO: 4132247 - DNA, 25 bp, Homo sapien
aagtaaaagtgattctataccatgc

SEQ ID NO: 4132248 - DNA, 25 bp, Homo sapien
gctgcttcgttagaaccccttttgc

SEQ ID NO: 4132249 - DNA, 25 bp, Homo sapien
tataccatgctgcttcgttagaacc

SEQ ID NO: 4132250 - DNA, 25 bp, Homo sapien
agtgattctataccatgctgcttcg

SEQ ID NO: 4132251 - DNA, 25 bp, Homo sapien
aagtcataagcatcatcctcttcaa

SEQ ID NO: 4132252 - DNA, 25 bp, Homo sapien
tactgaagtcataagcatcatcctc

SEQ ID NO: 4132253 - DNA, 25 bp, Homo sapien
taatctgtactgaagtcataagcat

SEQ ID NO: 4132254 - DNA, 25 bp, Homo sapien
gataaaagaccttgtagactgttca

SEQ ID NO: 4132255 - DNA, 25 bp, Homo sapien
ttttattccagataactacttccac

SEQ ID NO: 4132256 - DNA, 25 bp, Homo sapien
ttattccagataactacttccactc

SEQ ID NO: 4132257 - DNA, 25 bp, Homo sapien
acagtttagcagtctgcttaaaatg

SEQ ID NO: 4132258 - DNA, 25 bp, Homo sapien
tattccagataactacttccactca

SEQ ID NO: 4132259 - DNA, 25 bp, Homo sapien
gcacaatttcacatggcgcaacgat

SEQ ID NO: 4132260 - DNA, 25 bp, Homo sapien
aatgcctatcggtagcaagccatgg

SEQ ID NO: 4132261 - DNA, 25 bp, Homo sapien
aagtcctggaagatagcatgcgtgg

SEQ ID NO: 4132262 - DNA, 25 bp, Homo sapien
taggtaaagatgacaaactgccctg

SEQ ID NO: 4132263 - DNA, 25 bp, Homo sapien
ttttgttgcaaacctgacggaatgg

SEQ ID NO: 4132264 - DNA, 25 bp, Homo sapien
taactggcctagctgtgaaaaactg

SEQ ID NO: 4132265 - DNA, 25 bp, Homo sapien
tactaaagttgtcatccgtggagca

SEQ ID NO: 4132266 - DNA, 25 bp, Homo sapien
taacagggaactctcaaggcaacgg

SEQ ID NO: 4132267 - DNA, 25 bp, Homo sapien
attctaggcactcccgggacagggt

SEQ ID NO: 4132268 - DNA, 25 bp, Homo sapien
caggttatgtattctgggttggcca

SEQ ID NO: 4132269 - DNA, 25 bp, Homo sapien
cacaaacagtggaattctaggcact

SEQ ID NO: 4132270 - DNA, 25 bp, Homo sapien
gatgcccacgttttggagagaaacc

SEQ ID NO: 4132271 - DNA, 25 bp, Homo sapien
tctcatccgcgtagaaagtccctca

SEQ ID NO: 4132272 - DNA, 25 bp, Homo sapien
ccgatagaggccagccaaaggttca

SEQ ID NO: 4132273 - DNA, 25 bp, Homo sapien
cattgtggccggctttactgaccct

SEQ ID NO: 4132274 - DNA, 25 bp, Homo sapien
taggcggcatccacaacagagagaa

SEQ ID NO: 4132275 - DNA, 25 bp, Homo sapien
catcgcctgcagtaagggcggccgc

SEQ ID NO: 4132276 - DNA, 25 bp, Homo sapien
tccatcgcctgcagtaagggcggcc

SEQ ID NO: 4132277 - DNA, 25 bp, Homo sapien
ctccatcgcctgcagtaagggcggc

SEQ ID NO: 4132278 - DNA, 25 bp, Homo sapien
ccatcgcctgcagtaagggcggccg

SEQ ID NO: 4132279 - DNA, 25 bp, Homo sapien
agcgtgcagggaacgcgggcggcca

SEQ ID NO: 4132280 - DNA, 25 bp, Homo sapien
cctgcggcgcgggcgctgagctggc

SEQ ID NO: 4132281 - DNA, 25 bp, Homo sapien
gggcggccagacaacgggctgggct

SEQ ID NO: 4132282 - DNA, 25 bp, Homo sapien
gctgccacggagctagagggcaagt

SEQ ID NO: 4132283 - DNA, 25 bp, Homo sapien
ccccgcggcgcctgcttggcgcgac

SEQ ID NO: 4132284 - DNA, 25 bp, Homo sapien
ggcgcctgcttggcgcgacgctcta

SEQ ID NO: 4132285 - DNA, 25 bp, Homo sapien
cttggcgcgacgctctagcggttac

SEQ ID NO: 4132286 - DNA, 25 bp, Homo sapien
cctgcttggcgcgacgctctagcgg

SEQ ID NO: 4132287 - DNA, 25 bp, Homo sapien
catcgctaggcgacgtgcgcttttg

SEQ ID NO: 4132288 - DNA, 25 bp, Homo sapien
gtccttgacagtacttgcgcggccc

SEQ ID NO: 4132289 - DNA, 25 bp, Homo sapien
gaagtgttcgccgtcagtgctgttg

SEQ ID NO: 4132290 - DNA, 25 bp, Homo sapien
ccgtcccgaaaactgtccttgacag

SEQ ID NO: 4132291 - DNA, 25 bp, Homo sapien
gcgcgggtggcaggctgcgaggcga

SEQ ID NO: 4132292 - DNA, 25 bp, Homo sapien
ttctaagcccgggagagcgatggcg

SEQ ID NO: 4132293 - DNA, 25 bp, Homo sapien
gtaaggtctggcactgcgcgtcagt

SEQ ID NO: 4132294 - DNA, 25 bp, Homo sapien
ggcgaccgagacttaaggaccgtga

SEQ ID NO: 4132295 - DNA, 25 bp, Homo sapien
cgtgggcagcgagctcagatgctcc

SEQ ID NO: 4132296 - DNA, 25 bp, Homo sapien
gtgggcagcgagctcagatgctcca

SEQ ID NO: 4132297 - DNA, 25 bp, Homo sapien
tgcgtgggcagcgagctcagatgct

SEQ ID NO: 4132298 - DNA, 25 bp, Homo sapien
ctgcgtgggcagcgagctcagatgc

SEQ ID NO: 4132299 - DNA, 25 bp, Homo sapien
ccaggcacaagaacggcgtgcagag

SEQ ID NO: 4132300 - DNA, 25 bp, Homo sapien
catccgggcccggaacagcgcagca

SEQ ID NO: 4132301 - DNA, 25 bp, Homo sapien
caagaacggcgtgcagaggtccccg

SEQ ID NO: 4132302 - DNA, 25 bp, Homo sapien
cgggtcggtgctccaacatgggctt

SEQ ID NO: 4132303 - DNA, 25 bp, Homo sapien
caggaggcaattcgggaaagagggt

SEQ ID NO: 4132304 - DNA, 25 bp, Homo sapien
aggaggcaattcgggaaagagggtg

SEQ ID NO: 4132305 - DNA, 25 bp, Homo sapien
gaggcaattcgggaaagagggtgga

SEQ ID NO: 4132306 - DNA, 25 bp, Homo sapien
agattctcgcggagtagaagagaag

SEQ ID NO: 4132307 - DNA, 25 bp, Homo sapien
acaggagattctcgcggagtagaag

SEQ ID NO: 4132308 - DNA, 25 bp, Homo sapien
ggagattctcgcggagtagaagaga

SEQ ID NO: 4132309 - DNA, 25 bp, Homo sapien
ggacaggagattctcgcggagtaga

SEQ ID NO: 4132310 - DNA, 25 bp, Homo sapien
tgacctcacaactctggcacagggt

SEQ ID NO: 4132311 - DNA, 25 bp, Homo sapien
agaattggttccaccgccgagaaca

SEQ ID NO: 4132312 - DNA, 25 bp, Homo sapien
ggcacagggtaaccccaacatcagg

SEQ ID NO: 4132313 - DNA, 25 bp, Homo sapien
taagggcctgggcaagatattaaat

SEQ ID NO: 4132314 - DNA, 25 bp, Homo sapien
ttcagctagcttctggcccttgtaa

SEQ ID NO: 4132315 - DNA, 25 bp, Homo sapien
cagctagcttctggcccttgtaatc

SEQ ID NO: 4132316 - DNA, 25 bp, Homo sapien
tcagctagcttctggcccttgtaat

SEQ ID NO: 4132317 - DNA, 25 bp, Homo sapien
gttcagctagcttctggcccttgta

SEQ ID NO: 4132318 - DNA, 25 bp, Homo sapien
gtatattaaacacactcaaactgag

SEQ ID NO: 4132319 - DNA, 25 bp, Homo sapien
taaacacactcaaactgagggttgg

SEQ ID NO: 4132320 - DNA, 25 bp, Homo sapien
tagagacaaatgaagtatattaaac

SEQ ID NO: 4132321 - DNA, 25 bp, Homo sapien
gaggcgggggcggagattaaatgta

SEQ ID NO: 4132322 - DNA, 25 bp, Homo sapien
aacatgaaaaagcaaatccggccat

SEQ ID NO: 4132323 - DNA, 25 bp, Homo sapien
ctgttcagccacgtacccgtagata

SEQ ID NO: 4132324 - DNA, 25 bp, Homo sapien
gcaaatccggccataactatataga

SEQ ID NO: 4132325 - DNA, 25 bp, Homo sapien
tatagacagtccacccgaactgttc

SEQ ID NO: 4132326 - DNA, 25 bp, Homo sapien
agattattagccagagtagccgcca

SEQ ID NO: 4132327 - DNA, 25 bp, Homo sapien
gctttgggtctcactactgagtagg

SEQ ID NO: 4132328 - DNA, 25 bp, Homo sapien
tgaagggacaacgtgagcaccatga

SEQ ID NO: 4132329 - DNA, 25 bp, Homo sapien
gtagccgccaaaggaaataagctgt

SEQ ID NO: 4132330 - DNA, 25 bp, Homo sapien
atgatgatgggaacaggctcactgc

SEQ ID NO: 4132331 - DNA, 25 bp, Homo sapien
cactgcctatacaaatggctttaag

SEQ ID NO: 4132332 - DNA, 25 bp, Homo sapien
gatgatgggaacaggctcactgcct

SEQ ID NO: 4132333 - DNA, 25 bp, Homo sapien
tgggaacaggctcactgcctataca

SEQ ID NO: 4132334 - DNA, 25 bp, Homo sapien
aatcattacgtataatgccaggttc

SEQ ID NO: 4132335 - DNA, 25 bp, Homo sapien
gccaggttcccaaatgactcctatg

SEQ ID NO: 4132336 - DNA, 25 bp, Homo sapien
tcattacgtataatgccaggttccc

SEQ ID NO: 4132337 - DNA, 25 bp, Homo sapien
caaatgactcctatgctgagggaac

SEQ ID NO: 4132338 - DNA, 25 bp, Homo sapien
tgccggcgatagatgggccatggag

SEQ ID NO: 4132339 - DNA, 25 bp, Homo sapien
acttgagaggatgccggcgatagat

SEQ ID NO: 4132340 - DNA, 25 bp, Homo sapien
ccacttgagaggatgccggcgatag

SEQ ID NO: 4132341 - DNA, 25 bp, Homo sapien
gaggatgccggcgatagatgggcca

SEQ ID NO: 4132342 - DNA, 25 bp, Homo sapien
ctgtgcttgattcttgaacaggtaa

SEQ ID NO: 4132343 - DNA, 25 bp, Homo sapien
tcttgtcgtctgtgcttgattcttg

SEQ ID NO: 4132344 - DNA, 25 bp, Homo sapien
caattatttttagcatgcctcttaa

SEQ ID NO: 4132345 - DNA, 25 bp, Homo sapien
ccctggtttcttgtcgtctgtgctt

SEQ ID NO: 4132346 - DNA, 25 bp, Homo sapien
cagctgtgccataagagcattaggt

SEQ ID NO: 4132347 - DNA, 25 bp, Homo sapien
gaactaaatctatacacagctgtgc

SEQ ID NO: 4132348 - DNA, 25 bp, Homo sapien
gaaagcaatttagctcatctcacag

SEQ ID NO: 4132349 - DNA, 25 bp, Homo sapien
cccaactgggctagaaatgaagtat

SEQ ID NO: 4132350 - DNA, 25 bp, Homo sapien
ttaaaatggttaactcataatgaat

SEQ ID NO: 4132351 - DNA, 25 bp, Homo sapien
aaatggttaactcataatgaattat

SEQ ID NO: 4132352 - DNA, 25 bp, Homo sapien
aatggttaactcataatgaattata

SEQ ID NO: 4132353 - DNA, 25 bp, Homo sapien
taaaatggttaactcataatgaatt

SEQ ID NO: 4132354 - DNA, 25 bp, Homo sapien
gaaatgttttatatggtagccacta

SEQ ID NO: 4132355 - DNA, 25 bp, Homo sapien
taaatagacgtgtctagtggcacca

SEQ ID NO: 4132356 - DNA, 25 bp, Homo sapien
tattgaacctttgaatcatggctag

SEQ ID NO: 4132357 - DNA, 25 bp, Homo sapien
caaagtccccgttctcatggaacta

SEQ ID NO: 4132358 - DNA, 25 bp, Homo sapien
gatttccacagacttacaaagctaa

SEQ ID NO: 4132359 - DNA, 25 bp, Homo sapien
cgttattcaaatggccttataggca

SEQ ID NO: 4132360 - DNA, 25 bp, Homo sapien
tatacctttggccacagttcagaga

SEQ ID NO: 4132361 - DNA, 25 bp, Homo sapien
tgtccttgctctggctacactgcag

SEQ ID NO: 4132362 - DNA, 25 bp, Homo sapien
aatgtattggtataaagtaggtatt

SEQ ID NO: 4132363 - DNA, 25 bp, Homo sapien
gtgcatgttttggaaatccacatcg

SEQ ID NO: 4132364 - DNA, 25 bp, Homo sapien
aaatccacatcgttctggagagtca

SEQ ID NO: 4132365 - DNA, 25 bp, Homo sapien
tctggagagtcatcagttttactta

SEQ ID NO: 4132366 - DNA, 25 bp, Homo sapien
taatttttagtctggacagttgggc

SEQ ID NO: 4132367 - DNA, 25 bp, Homo sapien
cggtttggtgagcatgagtgactcc

SEQ ID NO: 4132368 - DNA, 25 bp, Homo sapien
cagttgggcctggtgttatgagatc

SEQ ID NO: 4132369 - DNA, 25 bp, Homo sapien
cagagagagcttcatacgacgtcag

SEQ ID NO: 4132370 - DNA, 25 bp, Homo sapien
gacagtcactacgtttgtaaggctt

SEQ ID NO: 4132371 - DNA, 25 bp, Homo sapien
tgtgacagtcactacgtttgtaagg

SEQ ID NO: 4132372 - DNA, 25 bp, Homo sapien
cttgtgacagtcactacgtttgtaa

SEQ ID NO: 4132373 - DNA, 25 bp, Homo sapien
acaccttgtgacagtcactacgttt

SEQ ID NO: 4132374 - DNA, 25 bp, Homo sapien
cgtgcaattgaccaaagaccttgcc

SEQ ID NO: 4132375 - DNA, 25 bp, Homo sapien
tttgatgccgtgcaattgaccaaag

SEQ ID NO: 4132376 - DNA, 25 bp, Homo sapien
tgttgagtgagggaaaatttgtgcc

SEQ ID NO: 4132377 - DNA, 25 bp, Homo sapien
tatgacttctctgttgagtgaggga

SEQ ID NO: 4132378 - DNA, 25 bp, Homo sapien
gattcaccttgccacatgaattaca

SEQ ID NO: 4132379 - DNA, 25 bp, Homo sapien
tgccgcattcactatatttgtaaag

SEQ ID NO: 4132380 - DNA, 25 bp, Homo sapien
gatgggccataagtcctgaatgctt

SEQ ID NO: 4132381 - DNA, 25 bp, Homo sapien
tatctgatggttgattaggtataac

SEQ ID NO: 4132382 - DNA, 25 bp, Homo sapien
ggccaacgtggtgagtggtgaaaac

SEQ ID NO: 4132383 - DNA, 25 bp, Homo sapien
ccaacgtggtgagtggtgaaaactc

SEQ ID NO: 4132384 - DNA, 25 bp, Homo sapien
caacgtggtgagtggtgaaaactca

SEQ ID NO: 4132385 - DNA, 25 bp, Homo sapien
acgtggtgagtggtgaaaactcatc

SEQ ID NO: 4132386 - DNA, 25 bp, Homo sapien
tatcacgggtaaaatcacttcaatg

SEQ ID NO: 4132387 - DNA, 25 bp, Homo sapien
tagttgttgcatctaagactggttc

SEQ ID NO: 4132388 - DNA, 25 bp, Homo sapien
gactggttcaagtatcacattctgg

SEQ ID NO: 4132389 - DNA, 25 bp, Homo sapien
tatgagtgaactgggatatcacggg

SEQ ID NO: 4132390 - DNA, 25 bp, Homo sapien
tgatgtagggacaccatctggtggc

SEQ ID NO: 4132391 - DNA, 25 bp, Homo sapien
gttatttcactaatagaggctgcct

SEQ ID NO: 4132392 - DNA, 25 bp, Homo sapien
tctggtggctaaatgggtaattact

SEQ ID NO: 4132393 - DNA, 25 bp, Homo sapien
taacagtctcacattaagagcaagc

SEQ ID NO: 4132394 - DNA, 25 bp, Homo sapien
gaagctggatcgacatgacagtgta

SEQ ID NO: 4132395 - DNA, 25 bp, Homo sapien
agagaagctggatcgacatgacagt

SEQ ID NO: 4132396 - DNA, 25 bp, Homo sapien
gctggatcgacatgacagtgtacat

SEQ ID NO: 4132397 - DNA, 25 bp, Homo sapien
ctgtcttctggcctttgtagaagag

SEQ ID NO: 4132398 - DNA, 25 bp, Homo sapien
gcctgcaggatgaggagagatacca

SEQ ID NO: 4132399 - DNA, 25 bp, Homo sapien
taccaggtacatgcacaacagcagc

SEQ ID NO: 4132400 - DNA, 25 bp, Homo sapien
gacctgcctgtagccgagcccaggg

SEQ ID NO: 4132401 - DNA, 25 bp, Homo sapien
tcgctgctcttggacctgcctgtag

SEQ ID NO: 4132402 - DNA, 25 bp, Homo sapien
tgacaacatagtgggcgaagcgaga

SEQ ID NO: 4132403 - DNA, 25 bp, Homo sapien
gatttccaggtcgaaggccacttcc

SEQ ID NO: 4132404 - DNA, 25 bp, Homo sapien
cgaagcgagaggtgactttgcagtt

SEQ ID NO: 4132405 - DNA, 25 bp, Homo sapien
gcagttgactttcaaactccggatg

SEQ ID NO: 4132406 - DNA, 25 bp, Homo sapien
gagatagctgctttccggtactgct

SEQ ID NO: 4132407 - DNA, 25 bp, Homo sapien
tatgtctccgataaatgcgtttcca

SEQ ID NO: 4132408 - DNA, 25 bp, Homo sapien
gcagtcaccttgtcctttatgtctc

SEQ ID NO: 4132409 - DNA, 25 bp, Homo sapien
ttccggtactgcttccatgcagtca

SEQ ID NO: 4132410 - DNA, 25 bp, Homo sapien
ctcttcagcacttcctcataagtca

SEQ ID NO: 4132411 - DNA, 25 bp, Homo sapien
agctgaaacgtgaccttgctctggg

SEQ ID NO: 4132412 - DNA, 25 bp, Homo sapien
tgggcttgactttgatgacaatttc

SEQ ID NO: 4132413 - DNA, 25 bp, Homo sapien
gaattgctccatagttctccccgag

SEQ ID NO: 4132414 - DNA, 25 bp, Homo sapien
tgctcaaccagtgttgggagccatg

SEQ ID NO: 4132415 - DNA, 25 bp, Homo sapien
gaagagcacatcagagctcaccctg

SEQ ID NO: 4132416 - DNA, 25 bp, Homo sapien
gcaaaccgaagctcagagataaaga

SEQ ID NO: 4132417 - DNA, 25 bp, Homo sapien
ccccgtctagcagatgagcaaaccg

SEQ ID NO: 4132418 - DNA, 25 bp, Homo sapien
ctgcaacattgaagcaaattatttt

SEQ ID NO: 4132419 - DNA, 25 bp, Homo sapien
cagttccttcggcaggaaagaggcc

SEQ ID NO: 4132420 - DNA, 25 bp, Homo sapien
tttcctgagaaggacttcttgatag

SEQ ID NO: 4132421 - DNA, 25 bp, Homo sapien
ggcatccagcttgctgatcccctgg

SEQ ID NO: 4132422 - DNA, 25 bp, Homo sapien
gacttcttgatagtttgggctgcca

SEQ ID NO: 4132423 - DNA, 25 bp, Homo sapien
ctggaaccgtcgagagtgtgagcca

SEQ ID NO: 4132424 - DNA, 25 bp, Homo sapien
tggaaccgtcgagagtgtgagccat

SEQ ID NO: 4132425 - DNA, 25 bp, Homo sapien
cccgttcagtaaggatgtagagcat

SEQ ID NO: 4132426 - DNA, 25 bp, Homo sapien
gactgacatcgtaggtcaccttgaa

SEQ ID NO: 4132427 - DNA, 25 bp, Homo sapien
aggaggtcgcagatcttgtctcgac

SEQ ID NO: 4132428 - DNA, 25 bp, Homo sapien
acggtgggacggaacagcacatgac

SEQ ID NO: 4132429 - DNA, 25 bp, Homo sapien
ttgttcatgtttgtcaggttttggg

SEQ ID NO: 4132430 - DNA, 25 bp, Homo sapien
aaaaccacgttcttgttcatgtttg

SEQ ID NO: 4132431 - DNA, 25 bp, Homo sapien
atcacaaaaaccacgttcttgttca

SEQ ID NO: 4132432 - DNA, 25 bp, Homo sapien
cacgttcttgttcatgtttgtcagg

SEQ ID NO: 4132433 - DNA, 25 bp, Homo sapien
tgcttgtaggttggcctcagatgct

SEQ ID NO: 4132434 - DNA, 25 bp, Homo sapien
gattgtactcgagtcccaaaaagaa

SEQ ID NO: 4132435 - DNA, 25 bp, Homo sapien
cgcacaaagtcttgagctgcttgta

SEQ ID NO: 4132436 - DNA, 25 bp, Homo sapien
cagcgagcccttccacgattgtact

SEQ ID NO: 4132437 - DNA, 25 bp, Homo sapien
gtgggatcgccatctgtcaacatga

SEQ ID NO: 4132438 - DNA, 25 bp, Homo sapien
aagatctcaattccccggagcaaac

SEQ ID NO: 4132439 - DNA, 25 bp, Homo sapien
tgatgagtattgaggcatggttgct

SEQ ID NO: 4132440 - DNA, 25 bp, Homo sapien
gctttcctgaacttggttcaagatc

SEQ ID NO: 4132441 - DNA, 25 bp, Homo sapien
ccccggatggcgttgcggacgttct

SEQ ID NO: 4132442 - DNA, 25 bp, Homo sapien
catggacatgacctccagaaagtta

SEQ ID NO: 4132443 - DNA, 25 bp, Homo sapien
tgaggatttgggaacggtccgtcac

SEQ ID NO: 4132444 - DNA, 25 bp, Homo sapien
cattgtggccgaaacccaggttgta

SEQ ID NO: 4132445 - DNA, 25 bp, Homo sapien
tactgtttatggtggttctgggtca

SEQ ID NO: 4132446 - DNA, 25 bp, Homo sapien
tttgttgtcagcaatgcgcccggcc

SEQ ID NO: 4132447 - DNA, 25 bp, Homo sapien
tcctgggggtactgcaaatccacat

SEQ ID NO: 4132448 - DNA, 25 bp, Homo sapien
tctctgagccttcgtagtactgttt

SEQ ID NO: 4132449 - DNA, 25 bp, Homo sapien
cgctcgacgtggttctccagcatgt

SEQ ID NO: 4132450 - DNA, 25 bp, Homo sapien
gcccagaggcgctcgacgtggttct

SEQ ID NO: 4132451 - DNA, 25 bp, Homo sapien
tgtggccacgctctcggagcagttt

SEQ ID NO: 4132452 - DNA, 25 bp, Homo sapien
ccactaggcaggttatactgaattc

SEQ ID NO: 4132453 - DNA, 25 bp, Homo sapien
tcagtggggtcacaaacccatagtc

SEQ ID NO: 4132454 - DNA, 25 bp, Homo sapien
caaacccatagtccagcgacatctg

SEQ ID NO: 4132455 - DNA, 25 bp, Homo sapien
tgggcttcaggccgtcctggtccgc

SEQ ID NO: 4132456 - DNA, 25 bp, Homo sapien
cctctgagggcttgtcgatggtggg

SEQ ID NO: 4132457 - DNA, 25 bp, Homo sapien
gcagggatgtccactcaacatcaca

SEQ ID NO: 4132458 - DNA, 25 bp, Homo sapien
ccaccaagcagggatgtccactcaa

SEQ ID NO: 4132459 - DNA, 25 bp, Homo sapien
ccaagcagggatgtccactcaacat

SEQ ID NO: 4132460 - DNA, 25 bp, Homo sapien
ggatgtccactcaacatcacatgcc

SEQ ID NO: 4132461 - DNA, 25 bp, Homo sapien
ccggtcactcggtctggcagccgct

SEQ ID NO: 4132462 - DNA, 25 bp, Homo sapien
ggcagccgctgggtattggagctgg

SEQ ID NO: 4132463 - DNA, 25 bp, Homo sapien
ccgctgggtattggagctggaatga

SEQ ID NO: 4132464 - DNA, 25 bp, Homo sapien
aatgagtaggagaaggctgcaaggc

SEQ ID NO: 4132465 - DNA, 25 bp, Homo sapien
gtaccaggctcaggataacaccagg

SEQ ID NO: 4132466 - DNA, 25 bp, Homo sapien
ggcacgtggatgatgaagtgagggt

SEQ ID NO: 4132467 - DNA, 25 bp, Homo sapien
caccaggctcctcattgatgttgaa

SEQ ID NO: 4132468 - DNA, 25 bp, Homo sapien
tgtgttggggtcctgtaccaggctc

SEQ ID NO: 4132469 - DNA, 25 bp, Homo sapien
ggttcagcgtaatgttctgaggagt

SEQ ID NO: 4132470 - DNA, 25 bp, Homo sapien
cgtggcagggtttgcgattcccagc

SEQ ID NO: 4132471 - DNA, 25 bp, Homo sapien
gcccgaagtacgtgccgtcatgctg

SEQ ID NO: 4132472 - DNA, 25 bp, Homo sapien
gaggagtcacttccaactgaaagtc

SEQ ID NO: 4132473 - DNA, 25 bp, Homo sapien
tgcagactcagcagagtcctgggcc

SEQ ID NO: 4132474 - DNA, 25 bp, Homo sapien
gtctgacatgtctgcacaggccaca

SEQ ID NO: 4132475 - DNA, 25 bp, Homo sapien
gaggacatatccagtaaccaaggga

SEQ ID NO: 4132476 - DNA, 25 bp, Homo sapien
tgggagcacagttgccatgcagctg

SEQ ID NO: 4132477 - DNA, 25 bp, Homo sapien
gtcatgagacaatgcagactaagac

SEQ ID NO: 4132478 - DNA, 25 bp, Homo sapien
tgaatgaacgaattagtaaaggaag

SEQ ID NO: 4132479 - DNA, 25 bp, Homo sapien
cgtgttctgtgactcccactcatca

SEQ ID NO: 4132480 - DNA, 25 bp, Homo sapien
cccagcattgctctggtgcttggca

SEQ ID NO: 4132481 - DNA, 25 bp, Homo sapien
ttgtcatctgggacccaacccttat

SEQ ID NO: 4132482 - DNA, 25 bp, Homo sapien
ctgcccttgtcatctgggacccaac

SEQ ID NO: 4132483 - DNA, 25 bp, Homo sapien
cccttgtcatctgggacccaaccct

SEQ ID NO: 4132484 - DNA, 25 bp, Homo sapien
cttgtcatctgggacccaaccctta

SEQ ID NO: 4132485 - DNA, 25 bp, Homo sapien
gcagcccgtgcgtccgggctgacat

SEQ ID NO: 4132486 - DNA, 25 bp, Homo sapien
ggctgacatccgatgactgtccagc

SEQ ID NO: 4132487 - DNA, 25 bp, Homo sapien
aaggtgccaccgtcgtccacagaca

SEQ ID NO: 4132488 - DNA, 25 bp, Homo sapien
cacactcggtgcaaaacaacctcaa

SEQ ID NO: 4132489 - DNA, 25 bp, Homo sapien
ggtcccacatgtcctctggcttcaa

SEQ ID NO: 4132490 - DNA, 25 bp, Homo sapien
cggtggccccaggtcccacatgtcc

SEQ ID NO: 4132491 - DNA, 25 bp, Homo sapien
gccccaggtcccacatgtcctctgg

SEQ ID NO: 4132492 - DNA, 25 bp, Homo sapien
tctggcttcaacacccttccccaca

SEQ ID NO: 4132493 - DNA, 25 bp, Homo sapien
gcctgggtggatgtcagacacttca

SEQ ID NO: 4132494 - DNA, 25 bp, Homo sapien
tggatgtcagacacttcaaaaccga

SEQ ID NO: 4132495 - DNA, 25 bp, Homo sapien
tgtcagacacttcaaaaccgatggg

SEQ ID NO: 4132496 - DNA, 25 bp, Homo sapien
agcctgggtggatgtcagacacttc

SEQ ID NO: 4132497 - DNA, 25 bp, Homo sapien
tggtgaccgtgagccggcggttcct

SEQ ID NO: 4132498 - DNA, 25 bp, Homo sapien
gtgaccgtgagccggcggttcctca

SEQ ID NO: 4132499 - DNA, 25 bp, Homo sapien
tgaccgtgagccggcggttcctcac

SEQ ID NO: 4132500 - DNA, 25 bp, Homo sapien
ctggtgaccgtgagccggcggttcc

SEQ ID NO: 4132501 - DNA, 25 bp, Homo sapien
cattgttgtgaatgaaccagcagga

SEQ ID NO: 4132502 - DNA, 25 bp, Homo sapien
catgccacgggtccttgctgtagtc

SEQ ID NO: 4132503 - DNA, 25 bp, Homo sapien
cagtgtaggcaccatcgatgagtcc

SEQ ID NO: 4132504 - DNA, 25 bp, Homo sapien
tccagccccattgttgtgaatgaac

SEQ ID NO: 4132505 - DNA, 25 bp, Homo sapien
tgaggtgctttgacacaaggaacca

SEQ ID NO: 4132506 - DNA, 25 bp, Homo sapien
caaggaaccagcttagtcaaggagg

SEQ ID NO: 4132507 - DNA, 25 bp, Homo sapien
ggacacggcctctctttaatggaag

SEQ ID NO: 4132508 - DNA, 25 bp, Homo sapien
gtcaaggaggtacagcctcagcagc

SEQ ID NO: 4132509 - DNA, 25 bp, Homo sapien
agccaagatgagacagggccaccat

SEQ ID NO: 4132510 - DNA, 25 bp, Homo sapien
aagctggagagcagagccaagatga

SEQ ID NO: 4132511 - DNA, 25 bp, Homo sapien
cccaagcagccgaaaggggcttctc

SEQ ID NO: 4132512 - DNA, 25 bp, Homo sapien
caagcagccgaaaggggcttctcgg

SEQ ID NO: 4132513 - DNA, 25 bp, Homo sapien
tgagcaaaacgggaggtcaccttgg

SEQ ID NO: 4132514 - DNA, 25 bp, Homo sapien
gtgtctgcacggttgacggctctca

SEQ ID NO: 4132515 - DNA, 25 bp, Homo sapien
caccttggagttgattttggtactg

SEQ ID NO: 4132516 - DNA, 25 bp, Homo sapien
tttggtactgtagacctcgatgcca

SEQ ID NO: 4132517 - DNA, 25 bp, Homo sapien
cagaccccctgttcccgagcccaga

SEQ ID NO: 4132518 - DNA, 25 bp, Homo sapien
tgggccagaccccctgttcccgagc

SEQ ID NO: 4132519 - DNA, 25 bp, Homo sapien
gaccccctgttcccgagcccagagc

SEQ ID NO: 4132520 - DNA, 25 bp, Homo sapien
gccagaccccctgttcccgagccca

SEQ ID NO: 4132521 - DNA, 25 bp, Homo sapien
cttgacattcccagggtaggtaaca

SEQ ID NO: 4132522 - DNA, 25 bp, Homo sapien
cagggtaggtaacaccgtcgatggt

SEQ ID NO: 4132523 - DNA, 25 bp, Homo sapien
ctgggacacagccttttcatactgc

SEQ ID NO: 4132524 - DNA, 25 bp, Homo sapien
cttgccctgggacacagccttttca

SEQ ID NO: 4132525 - DNA, 25 bp, Homo sapien
ctgcagccacgttgaccgagactgt

SEQ ID NO: 4132526 - DNA, 25 bp, Homo sapien
ctcgaaggtgactttgctgcctgca

SEQ ID NO: 4132527 - DNA, 25 bp, Homo sapien
cgttgaccgagactgtgaacttctc

SEQ ID NO: 4132528 - DNA, 25 bp, Homo sapien
cagctcctcgtaggttagctcgaag

SEQ ID NO: 4132529 - DNA, 25 bp, Homo sapien
ggaccttgaggtacatctcgtactt

SEQ ID NO: 4132530 - DNA, 25 bp, Homo sapien
accttgaggtacatctcgtacttgc

SEQ ID NO: 4132531 - DNA, 25 bp, Homo sapien
ttgcttaggctggaccttgaggtac

SEQ ID NO: 4132532 - DNA, 25 bp, Homo sapien
caaagtgtttgaccagttgcttagg

SEQ ID NO: 4132533 - DNA, 25 bp, Homo sapien
cgcttcccaggaggtcgttggtgat

SEQ ID NO: 4132534 - DNA, 25 bp, Homo sapien
atgaaagaggcctcagcatccagca

SEQ ID NO: 4132535 - DNA, 25 bp, Homo sapien
aaggacttggtgagggcgcttccca

SEQ ID NO: 4132536 - DNA, 25 bp, Homo sapien
gattccctgaggctcgaagatgtct

SEQ ID NO: 4132537 - DNA, 25 bp, Homo sapien
cacccattagcccaggctaccttgg

SEQ ID NO: 4132538 - DNA, 25 bp, Homo sapien
tggagctcagcactgagaagctact

SEQ ID NO: 4132539 - DNA, 25 bp, Homo sapien
tttcttggcctcacacacccattag

SEQ ID NO: 4132540 - DNA, 25 bp, Homo sapien
ctgagtgtgtgctcctcgggcctcg

SEQ ID NO: 4132541 - DNA, 25 bp, Homo sapien
tgcacgttgccaggagattctctgt

SEQ ID NO: 4132542 - DNA, 25 bp, Homo sapien
tctgttcacgtcataggtgatagtg

SEQ ID NO: 4132543 - DNA, 25 bp, Homo sapien
tacaggttgggcatgaacgctgttg

SEQ ID NO: 4132544 - DNA, 25 bp, Homo sapien
cgctgttggtctaagctgggcttga

SEQ ID NO: 4132545 - DNA, 25 bp, Homo sapien
gaagtgcacgaagtagccattgact

SEQ ID NO: 4132546 - DNA, 25 bp, Homo sapien
cgttcttaggcaccactggaaggcc

SEQ ID NO: 4132547 - DNA, 25 bp, Homo sapien
gctctaatttccgaccagccatgga

SEQ ID NO: 4132548 - DNA, 25 bp, Homo sapien
aaggccttgaggtgcaaagaagtgc

SEQ ID NO: 4132549 - DNA, 25 bp, Homo sapien
tggacacatctccactgaacaggat

SEQ ID NO: 4132550 - DNA, 25 bp, Homo sapien
ggcgtggcctggactaagtgctctt

SEQ ID NO: 4132551 - DNA, 25 bp, Homo sapien
tcctcttgcatatcttccaggattc

SEQ ID NO: 4132552 - DNA, 25 bp, Homo sapien
tcctggaggttctcgggcgtggcct

SEQ ID NO: 4132553 - DNA, 25 bp, Homo sapien
ttcctttatcctccatgctcttcac

SEQ ID NO: 4132554 - DNA, 25 bp, Homo sapien
tcagcatactgatgcccctcagcag

SEQ ID NO: 4132555 - DNA, 25 bp, Homo sapien
agcagcccgtcattgatgttggtca

SEQ ID NO: 4132556 - DNA, 25 bp, Homo sapien
ctcagcagcccgtcattgatgttgg

SEQ ID NO: 4132557 - DNA, 25 bp, Homo sapien
ctcctctcgggccttgttcagcata

SEQ ID NO: 4132558 - DNA, 25 bp, Homo sapien
tgcaactgcaaatcggcatcagagt

SEQ ID NO: 4132559 - DNA, 25 bp, Homo sapien
agagtcctcataaatgcgccgggca

SEQ ID NO: 4132560 - DNA, 25 bp, Homo sapien
ggcattccgcacattctcttggatt

SEQ ID NO: 4132561 - DNA, 25 bp, Homo sapien
aattcagattgttgccaaagcccag

SEQ ID NO: 4132562 - DNA, 25 bp, Homo sapien
tgaggtccaggatagcgttctcggg

SEQ ID NO: 4132563 - DNA, 25 bp, Homo sapien
tctccacacccgtcagcagtgggtt

SEQ ID NO: 4132564 - DNA, 25 bp, Homo sapien
gttctcggggtactccatctccaca

SEQ ID NO: 4132565 - DNA, 25 bp, Homo sapien
ctcagagccatcgtagaagtgctgg

SEQ ID NO: 4132566 - DNA, 25 bp, Homo sapien
cagagccgctcaatgtaattcccga

SEQ ID NO: 4132567 - DNA, 25 bp, Homo sapien
taattcccgaagatgtagtcccgct

SEQ ID NO: 4132568 - DNA, 25 bp, Homo sapien
atgtagtcccgctcctgcagggcct

SEQ ID NO: 4132569 - DNA, 25 bp, Homo sapien
cagctgctcaatggtgaggtaggcc

SEQ ID NO: 4132570 - DNA, 25 bp, Homo sapien
cagtggagtcacaaagtgatacttg

SEQ ID NO: 4132571 - DNA, 25 bp, Homo sapien
cctcgttgtcctcaggcttggtcac

SEQ ID NO: 4132572 - DNA, 25 bp, Homo sapien
cccaggcttgtcggcaatggccctc

SEQ ID NO: 4132573 - DNA, 25 bp, Homo sapien
ggtcagtggagtcacaaagtgatac

SEQ ID NO: 4132574 - DNA, 25 bp, Homo sapien
cttccctttagaggtgcagaggctc

SEQ ID NO: 4132575 - DNA, 25 bp, Homo sapien
ctgggtgtcccctggaactaggagt

SEQ ID NO: 4132576 - DNA, 25 bp, Homo sapien
aaatgcattagaagccatagggcac

SEQ ID NO: 4132577 - DNA, 25 bp, Homo sapien
cagaccctgtacctagttgcagtgg

SEQ ID NO: 4132578 - DNA, 25 bp, Homo sapien
tgtgattttaacgttggcgcagggc

SEQ ID NO: 4132579 - DNA, 25 bp, Homo sapien
cacagaggactgtgatccccagcaa

SEQ ID NO: 4132580 - DNA, 25 bp, Homo sapien
taggctttggaaatcgggcacgtcc

SEQ ID NO: 4132581 - DNA, 25 bp, Homo sapien
caaatgtgccagtccaaatggaggt

SEQ ID NO: 4132582 - DNA, 25 bp, Homo sapien
tcaggtaggacatggcggggctcac

SEQ ID NO: 4132583 - DNA, 25 bp, Homo sapien
gacatggcggggctcaccggtgtgg

SEQ ID NO: 4132584 - DNA, 25 bp, Homo sapien
gtaggacatggcggggctcaccggt

SEQ ID NO: 4132585 - DNA, 25 bp, Homo sapien
aggacatggcggggctcaccggtgt

SEQ ID NO: 4132586 - DNA, 25 bp, Homo sapien
gagagggctgagctaagcaagtggc

SEQ ID NO: 4132587 - DNA, 25 bp, Homo sapien
cccatcccggagagctgagtgagta

SEQ ID NO: 4132588 - DNA, 25 bp, Homo sapien
tctcctcagggcacattgtccatct

SEQ ID NO: 4132589 - DNA, 25 bp, Homo sapien
cataggagttcagcttatgcccctc

SEQ ID NO: 4132590 - DNA, 25 bp, Homo sapien
catagtagtaggggttttgaggagg

SEQ ID NO: 4132591 - DNA, 25 bp, Homo sapien
gggttttgaggaggctggtagctgg

SEQ ID NO: 4132592 - DNA, 25 bp, Homo sapien
taggggttttgaggaggctggtagc

SEQ ID NO: 4132593 - DNA, 25 bp, Homo sapien
agtagtaggggttttgaggaggctg

SEQ ID NO: 4132594 - DNA, 25 bp, Homo sapien
gcatcctgaataaggcgcagcactg

SEQ ID NO: 4132595 - DNA, 25 bp, Homo sapien
tgcctggggcttcatcgatgttgaa

SEQ ID NO: 4132596 - DNA, 25 bp, Homo sapien
gtgactgcatcctgaataaggcgca

SEQ ID NO: 4132597 - DNA, 25 bp, Homo sapien
agggcatcgtctttctccggaattt

SEQ ID NO: 4132598 - DNA, 25 bp, Homo sapien
gctgaaagtgctcggcacggccctg

SEQ ID NO: 4132599 - DNA, 25 bp, Homo sapien
agcattggcgatgcccagttttcca

SEQ ID NO: 4132600 - DNA, 25 bp, Homo sapien
gtgatcttctccgttgtcacctcca

SEQ ID NO: 4132601 - DNA, 25 bp, Homo sapien
tgcctctcttgtcgccagtgatctg

SEQ ID NO: 4132602 - DNA, 25 bp, Homo sapien
tctgtgctgacatccggtgactgtc

SEQ ID NO: 4132603 - DNA, 25 bp, Homo sapien
caggatgtttcttccacacctggtg

SEQ ID NO: 4132604 - DNA, 25 bp, Homo sapien
gtagaagcctagaaagtcacggtgg

SEQ ID NO: 4132605 - DNA, 25 bp, Homo sapien
gtgactgtccaccacgtagaagcct

SEQ ID NO: 4132606 - DNA, 25 bp, Homo sapien
cggatgtcagacactttaaagtcaa

SEQ ID NO: 4132607 - DNA, 25 bp, Homo sapien
gatgtcagacactttaaagtcaaag

SEQ ID NO: 4132608 - DNA, 25 bp, Homo sapien
ggatgtcagacactttaaagtcaaa

SEQ ID NO: 4132609 - DNA, 25 bp, Homo sapien
gacaatgtagtcagtgtggacacca

SEQ ID NO: 4132610 - DNA, 25 bp, Homo sapien
aatcagcccttctccgttgttgtgg

SEQ ID NO: 4132611 - DNA, 25 bp, Homo sapien
tcgtgccgatgctggcatcctttct

SEQ ID NO: 4132612 - DNA, 25 bp, Homo sapien
tgtggacgaaccagcagacaacctt

SEQ ID NO: 4132613 - DNA, 25 bp, Homo sapien
cagatgccataaaatccgggccatc

SEQ ID NO: 4132614 - DNA, 25 bp, Homo sapien
tccagatgccataaaatccgggcca

SEQ ID NO: 4132615 - DNA, 25 bp, Homo sapien
gttccagatgccataaaatccgggc

SEQ ID NO: 4132616 - DNA, 25 bp, Homo sapien
gatgccataaaatccgggccatcca

SEQ ID NO: 4132617 - DNA, 25 bp, Homo sapien
tgtgggtcccagttgcctgttccct

SEQ ID NO: 4132618 - DNA, 25 bp, Homo sapien
cagctgtgtcagtggagaggcccaa

SEQ ID NO: 4132619 - DNA, 25 bp, Homo sapien
tcatgaaggcatgtagaggctggca

SEQ ID NO: 4132620 - DNA, 25 bp, Homo sapien
taaagttctagtccaaccaactctg

SEQ ID NO: 4132621 - DNA, 25 bp, Homo sapien
ccagacaaagtgaccatcggcctgt

SEQ ID NO: 4132622 - DNA, 25 bp, Homo sapien
cagccacgttggagggacccttggt

SEQ ID NO: 4132623 - DNA, 25 bp, Homo sapien
tgaagatgaccatggacaagacggg

SEQ ID NO: 4132624 - DNA, 25 bp, Homo sapien
tgactactgaggttctgtgcacacg

SEQ ID NO: 4132625 - DNA, 25 bp, Homo sapien
gggtagcaagattaaacacaagcgc

SEQ ID NO: 4132626 - DNA, 25 bp, Homo sapien
cccctgggagattcagcctattcac

SEQ ID NO: 4132627 - DNA, 25 bp, Homo sapien
aagtgaagccgggtctcctgtctcc

SEQ ID NO: 4132628 - DNA, 25 bp, Homo sapien
cattgcacctacgatatagtccagg

SEQ ID NO: 4132629 - DNA, 25 bp, Homo sapien
ccagaataacgtgcgggaagctgta

SEQ ID NO: 4132630 - DNA, 25 bp, Homo sapien
tccagaataacgtgcgggaagctgt

SEQ ID NO: 4132631 - DNA, 25 bp, Homo sapien
gaataacgtgcgggaagctgtaagt

SEQ ID NO: 4132632 - DNA, 25 bp, Homo sapien
gcatccagaataacgtgcgggaagc

SEQ ID NO: 4132633 - DNA, 25 bp, Homo sapien
tgcgtgttcctcagggaccaacatc

SEQ ID NO: 4132634 - DNA, 25 bp, Homo sapien
caccgatggcgaccccactgtgggt

SEQ ID NO: 4132635 - DNA, 25 bp, Homo sapien
gctgcccgaagggagtgtctcactc

SEQ ID NO: 4132636 - DNA, 25 bp, Homo sapien
ctgcccgtgactccaggacgtgctg

SEQ ID NO: 4132637 - DNA, 25 bp, Homo sapien
cttccctcttttgatggttgtcagg

SEQ ID NO: 4132638 - DNA, 25 bp, Homo sapien
cttttgatggttgtcaggtttatga

SEQ ID NO: 4132639 - DNA, 25 bp, Homo sapien
gttgtcaggtttatgatgtctgaac

SEQ ID NO: 4132640 - DNA, 25 bp, Homo sapien
gatggttgtcaggtttatgatgtct

SEQ ID NO: 4132641 - DNA, 25 bp, Homo sapien
ggacttatggtctgacttgccacaa

SEQ ID NO: 4132642 - DNA, 25 bp, Homo sapien
tagaagtcagacctatgcaaggaaa

SEQ ID NO: 4132643 - DNA, 25 bp, Homo sapien
tacttcgtgaaacattagcagctct

SEQ ID NO: 4132644 - DNA, 25 bp, Homo sapien
agaagtttcacacgcttgcagctaa

SEQ ID NO: 4132645 - DNA, 25 bp, Homo sapien
tagctgaagagtggtggtttttccc

SEQ ID NO: 4132646 - DNA, 25 bp, Homo sapien
gacaggacggtcattccctcatggc

SEQ ID NO: 4132647 - DNA, 25 bp, Homo sapien
caaaccctgggttatatagatctca

SEQ ID NO: 4132648 - DNA, 25 bp, Homo sapien
ggtttgaacaacctgtgcctgcagc

SEQ ID NO: 4132649 - DNA, 25 bp, Homo sapien
cggaagcgctccaaatcccattgtt

SEQ ID NO: 4132650 - DNA, 25 bp, Homo sapien
cacagatgaacgctagatgaagagg

SEQ ID NO: 4132651 - DNA, 25 bp, Homo sapien
aaattccatgaggtttaggtgctcg

SEQ ID NO: 4132652 - DNA, 25 bp, Homo sapien
tatctaggagcccactaagacttcc

SEQ ID NO: 4132653 - DNA, 25 bp, Homo sapien
gatcaaaggtgctcctatatgtggc

SEQ ID NO: 4132654 - DNA, 25 bp, Homo sapien
tgtaggtcacgctgattctcccaca

SEQ ID NO: 4132655 - DNA, 25 bp, Homo sapien
ttgctacattggctcaaatctctga

SEQ ID NO: 4132656 - DNA, 25 bp, Homo sapien
taaaagcaatgtgaattccttgatc

SEQ ID NO: 4132657 - DNA, 25 bp, Homo sapien
tgagaaatgcagactccacggccat

SEQ ID NO: 4132658 - DNA, 25 bp, Homo sapien
ctctgagaaatgcagactccacggc

SEQ ID NO: 4132659 - DNA, 25 bp, Homo sapien
ctgagaaatgcagactccacggcca

SEQ ID NO: 4132660 - DNA, 25 bp, Homo sapien
tctgagaaatgcagactccacggcc

SEQ ID NO: 4132661 - DNA, 25 bp, Homo sapien
tcaggtgtgcgaagctaagtctcct

SEQ ID NO: 4132662 - DNA, 25 bp, Homo sapien
tgtgcgaagctaagtctcctgcagg

SEQ ID NO: 4132663 - DNA, 25 bp, Homo sapien
ctgattgggactctcttgatgcaca

SEQ ID NO: 4132664 - DNA, 25 bp, Homo sapien
tgaagagcacgtcagaaggatgcgt

SEQ ID NO: 4132665 - DNA, 25 bp, Homo sapien
caatgctacgggaaaggaagtgcga

SEQ ID NO: 4132666 - DNA, 25 bp, Homo sapien
tcctgtccctagaatgtgctgagac

SEQ ID NO: 4132667 - DNA, 25 bp, Homo sapien
gctgtgagcactcccactgggtttt

SEQ ID NO: 4132668 - DNA, 25 bp, Homo sapien
gcctttgaattgcatgtgggagtca

SEQ ID NO: 4132669 - DNA, 25 bp, Homo sapien
ccttgtgtcttgcaggacagccagg

SEQ ID NO: 4132670 - DNA, 25 bp, Homo sapien
tgtgtggtccttcttagtgtaggtc

SEQ ID NO: 4132671 - DNA, 25 bp, Homo sapien
ccttcttagtgtaggtctaaggcag

SEQ ID NO: 4132672 - DNA, 25 bp, Homo sapien
taggtctaaggcagcatccttgtgt

SEQ ID NO: 4132673 - DNA, 25 bp, Homo sapien
tatgccctgaccctcagtccaagcc

SEQ ID NO: 4132674 - DNA, 25 bp, Homo sapien
ttgtatgttacaagtctgctcttcc

SEQ ID NO: 4132675 - DNA, 25 bp, Homo sapien
gaggcagcccgttgtatgttacaag

SEQ ID NO: 4132676 - DNA, 25 bp, Homo sapien
gtgtctgaggcagcccgttgtatgt

SEQ ID NO: 4132677 - DNA, 25 bp, Homo sapien
tggctacccttcacttgccagggct

SEQ ID NO: 4132678 - DNA, 25 bp, Homo sapien
tgaagaggattgtagaagcctgaac

SEQ ID NO: 4132679 - DNA, 25 bp, Homo sapien
agaggattgtagaagcctgaacaca

SEQ ID NO: 4132680 - DNA, 25 bp, Homo sapien
gcaggcaattccagtatagcgtgaa

SEQ ID NO: 4132681 - DNA, 25 bp, Homo sapien
ccagtatagcgtgaagaggattgta

SEQ ID NO: 4132682 - DNA, 25 bp, Homo sapien
tattggatgtttccttgacgaagag

SEQ ID NO: 4132683 - DNA, 25 bp, Homo sapien
gagactggtccccagtccttgaggg

SEQ ID NO: 4132684 - DNA, 25 bp, Homo sapien
gtgccaagcccgctattggatgttt

SEQ ID NO: 4132685 - DNA, 25 bp, Homo sapien
ccttgacgaagagctgagactggtc

SEQ ID NO: 4132686 - DNA, 25 bp, Homo sapien
cagtttgtgaatttctcagcaaact

SEQ ID NO: 4132687 - DNA, 25 bp, Homo sapien
atttctcagcaaactcatatttgct

SEQ ID NO: 4132688 - DNA, 25 bp, Homo sapien
tcagtttgtgaatttctcagcaaac

SEQ ID NO: 4132689 - DNA, 25 bp, Homo sapien
gtgaatttctcagcaaactcatatt

SEQ ID NO: 4132690 - DNA, 25 bp, Homo sapien
ggaagtacatctgcgagccatttgg

SEQ ID NO: 4132691 - DNA, 25 bp, Homo sapien
tttgtcctgggctattagtcctccg

SEQ ID NO: 4132692 - DNA, 25 bp, Homo sapien
gccaggctcccctgacgagggtccc

SEQ ID NO: 4132693 - DNA, 25 bp, Homo sapien
cgtccttctcagtctggcggagctg

SEQ ID NO: 4132694 - DNA, 25 bp, Homo sapien
cacggccagtacttgtggagagttt

SEQ ID NO: 4132695 - DNA, 25 bp, Homo sapien
ggattccgcccctgatctctgaaga

SEQ ID NO: 4132696 - DNA, 25 bp, Homo sapien
gattttctgtatttgcccacggcca

SEQ ID NO: 4132697 - DNA, 25 bp, Homo sapien
tctgtgagccttaaggattcctcca

SEQ ID NO: 4132698 - DNA, 25 bp, Homo sapien
tactaacttgttggaactgatgcac

SEQ ID NO: 4132699 - DNA, 25 bp, Homo sapien
ggctggttccagcactgtccttagg

SEQ ID NO: 4132700 - DNA, 25 bp, Homo sapien
tgaagacaatcagaggcctgccagg

SEQ ID NO: 4132701 - DNA, 25 bp, Homo sapien
ggaaggcattttggccagagtaaat

SEQ ID NO: 4132702 - DNA, 25 bp, Homo sapien
tataagtggagctggaatagtcctg

SEQ ID NO: 4132703 - DNA, 25 bp, Homo sapien
gggcctgcaggtatcagcttgctct

SEQ ID NO: 4132704 - DNA, 25 bp, Homo sapien
aacaaagaataacctaggctgctgg

SEQ ID NO: 4132705 - DNA, 25 bp, Homo sapien
tgtgcacagaagtggatcacctgct

SEQ ID NO: 4132706 - DNA, 25 bp, Homo sapien
tatcttatcaagtcaaatacagtgg

SEQ ID NO: 4132707 - DNA, 25 bp, Homo sapien
aatacagtggcctattgggtcaacc

SEQ ID NO: 4132708 - DNA, 25 bp, Homo sapien
tgcccagcttaggtgcattctaaaa

SEQ ID NO: 4132709 - DNA, 25 bp, Homo sapien
tcaactgagatggatttgccctgtg

SEQ ID NO: 4132710 - DNA, 25 bp, Homo sapien
gcaagagcagatcaactcacctgag

SEQ ID NO: 4132711 - DNA, 25 bp, Homo sapien
caagagcagatcaactcacctgagg

SEQ ID NO: 4132712 - DNA, 25 bp, Homo sapien
taatacaggcattgctcaagcaaac

SEQ ID NO: 4132713 - DNA, 25 bp, Homo sapien
tatgtgtgcctatagaaatacgtag

SEQ ID NO: 4132714 - DNA, 25 bp, Homo sapien
tcatcaccccagcatgaactttatg

SEQ ID NO: 4132715 - DNA, 25 bp, Homo sapien
tcttcctgaccacgttaaaggtatc

SEQ ID NO: 4132716 - DNA, 25 bp, Homo sapien
agatggcgaggagcagaaccagcgt

SEQ ID NO: 4132717 - DNA, 25 bp, Homo sapien
tctttctgaactgccgagatggcga

SEQ ID NO: 4132718 - DNA, 25 bp, Homo sapien
cagaaccagtccattggcccaggtg

SEQ ID NO: 4132719 - DNA, 25 bp, Homo sapien
agcagaaccagcgtggcacgagcag

SEQ ID NO: 4132720 - DNA, 25 bp, Homo sapien
catgtcctcgggcgtccccggctta

SEQ ID NO: 4132721 - DNA, 25 bp, Homo sapien
gcatgtcctcgggcgtccccggctt

SEQ ID NO: 4132722 - DNA, 25 bp, Homo sapien
cctcgggcgtccccggcttacgcat

SEQ ID NO: 4132723 - DNA, 25 bp, Homo sapien
tcctcgggcgtccccggcttacgca

SEQ ID NO: 4132724 - DNA, 25 bp, Homo sapien
tactgggcccttgatcagcagacgc

SEQ ID NO: 4132725 - DNA, 25 bp, Homo sapien
cttgcaccagaacaggccgctgttg

SEQ ID NO: 4132726 - DNA, 25 bp, Homo sapien
agcagccagtcgtgaggtccttggg

SEQ ID NO: 4132727 - DNA, 25 bp, Homo sapien
ctggatctccatgacggcctttgta

SEQ ID NO: 4132728 - DNA, 25 bp, Homo sapien
gttccaggagcccttggtggtctgc

SEQ ID NO: 4132729 - DNA, 25 bp, Homo sapien
cgtagggttccaggagcccttggtg

SEQ ID NO: 4132730 - DNA, 25 bp, Homo sapien
tcacgtagggttccaggagcccttg

SEQ ID NO: 4132731 - DNA, 25 bp, Homo sapien
ggttccaggagcccttggtggtctg

SEQ ID NO: 4132732 - DNA, 25 bp, Homo sapien
tcagtcaggacccatgtgctacttt

SEQ ID NO: 4132733 - DNA, 25 bp, Homo sapien
gtcaggacccatgtgctactttccc

SEQ ID NO: 4132734 - DNA, 25 bp, Homo sapien
ggttcagtcaggacccatgtgctac

SEQ ID NO: 4132735 - DNA, 25 bp, Homo sapien
gagggttcagtcaggacccatgtgc

SEQ ID NO: 4132736 - DNA, 25 bp, Homo sapien
tgagtttgcatgacatcacctagga

SEQ ID NO: 4132737 - DNA, 25 bp, Homo sapien
gaagaaaatcctctgagaagtggca

SEQ ID NO: 4132738 - DNA, 25 bp, Homo sapien
ggacaagagcagtaccagtgagtta

SEQ ID NO: 4132739 - DNA, 25 bp, Homo sapien
gaaatgccatatgaaggcaagcctc

SEQ ID NO: 4132740 - DNA, 25 bp, Homo sapien
tcacagacttaagtacgcctttaaa

SEQ ID NO: 4132741 - DNA, 25 bp, Homo sapien
cattatggccagttgaaagttactg

SEQ ID NO: 4132742 - DNA, 25 bp, Homo sapien
ttaaacagggatacacatacatagt

SEQ ID NO: 4132743 - DNA, 25 bp, Homo sapien
aatgagattgcttttaataggcatt

SEQ ID NO: 4132744 - DNA, 25 bp, Homo sapien
ccactctcctgtaaatcctttcctg

SEQ ID NO: 4132745 - DNA, 25 bp, Homo sapien
caacccactctcctgtaaatccttt

SEQ ID NO: 4132746 - DNA, 25 bp, Homo sapien
actctcctgtaaatcctttcctgcc

SEQ ID NO: 4132747 - DNA, 25 bp, Homo sapien
tctcctgtaaatcctttcctgccat

SEQ ID NO: 4132748 - DNA, 25 bp, Homo sapien
tcaacagagaagagcttcaaatgac

SEQ ID NO: 4132749 - DNA, 25 bp, Homo sapien
gaagagcttcaaatgactttctttg

SEQ ID NO: 4132750 - DNA, 25 bp, Homo sapien
tcaatcaacagagaagagcttcaaa

SEQ ID NO: 4132751 - DNA, 25 bp, Homo sapien
ttgttgtcaggctccattctcagga

SEQ ID NO: 4132752 - DNA, 25 bp, Homo sapien
gcaattactaaaatgcctcaggagt

SEQ ID NO: 4132753 - DNA, 25 bp, Homo sapien
tttggaatgacaacatgagctggga

SEQ ID NO: 4132754 - DNA, 25 bp, Homo sapien
tgtgggacagtcacacatttggaat

SEQ ID NO: 4132755 - DNA, 25 bp, Homo sapien
tatttgctcagtagtaaggctgccc

SEQ ID NO: 4132756 - DNA, 25 bp, Homo sapien
tcctgcggaagcctagagacatcgg

SEQ ID NO: 4132757 - DNA, 25 bp, Homo sapien
cctttcaggtctcagagggagcgcc

SEQ ID NO: 4132758 - DNA, 25 bp, Homo sapien
tgtctacaacccgaggtgaggcgca

SEQ ID NO: 4132759 - DNA, 25 bp, Homo sapien
gaagactcaagatttacagggcgcc

SEQ ID NO: 4132760 - DNA, 25 bp, Homo sapien
ggctctggcgtaactgatgccataa

SEQ ID NO: 4132761 - DNA, 25 bp, Homo sapien
gcaggaccaacaagtgcttctgctc

SEQ ID NO: 4132762 - DNA, 25 bp, Homo sapien
ttttggagaccttggccgcccagaa

SEQ ID NO: 4132763 - DNA, 25 bp, Homo sapien
aagtgaagcggctcatgctgaagaa

SEQ ID NO: 4132764 - DNA, 25 bp, Homo sapien
taagcaacctcagtttcattagctg

SEQ ID NO: 4132765 - DNA, 25 bp, Homo sapien
tgaaggctgtgttgctaataaggac

SEQ ID NO: 4132766 - DNA, 25 bp, Homo sapien
ccaattaggagacatggatatggcc

SEQ ID NO: 4132767 - DNA, 25 bp, Homo sapien
caaatactgggtggcgtaagcaacc

SEQ ID NO: 4132768 - DNA, 25 bp, Homo sapien
gcccaggtcaaggtctttagcatct

SEQ ID NO: 4132769 - DNA, 25 bp, Homo sapien
ggctgcccaggtcaaggtctttagc

SEQ ID NO: 4132770 - DNA, 25 bp, Homo sapien
ccaggtcaaggtctttagcatctca

SEQ ID NO: 4132771 - DNA, 25 bp, Homo sapien
cacagtccaggggggtgggaaggct

SEQ ID NO: 4132772 - DNA, 25 bp, Homo sapien
tggccttagactcccctggacaggc

SEQ ID NO: 4132773 - DNA, 25 bp, Homo sapien
tggacaggccccgtgatgttctagc

SEQ ID NO: 4132774 - DNA, 25 bp, Homo sapien
tcctctgtggccttagactcccctg

SEQ ID NO: 4132775 - DNA, 25 bp, Homo sapien
ggccccgtgatgttctagcttcttc

SEQ ID NO: 4132776 - DNA, 25 bp, Homo sapien
ccagggccctcttggaccaggctgg

SEQ ID NO: 4132777 - DNA, 25 bp, Homo sapien
ggaagttttgacagcgtctttccac

SEQ ID NO: 4132778 - DNA, 25 bp, Homo sapien
agcgtctttccacataagaccaagg

SEQ ID NO: 4132779 - DNA, 25 bp, Homo sapien
tctttccacataagaccaaggcttt

SEQ ID NO: 4132780 - DNA, 25 bp, Homo sapien
accaccccagcggaagttttgacag

SEQ ID NO: 4132781 - DNA, 25 bp, Homo sapien
tgagggccgggtacacagcaggtac

SEQ ID NO: 4132782 - DNA, 25 bp, Homo sapien
gagacagcactcagcaaccttagtg

SEQ ID NO: 4132783 - DNA, 25 bp, Homo sapien
ttgacatcgctgtgcccagagacag

SEQ ID NO: 4132784 - DNA, 25 bp, Homo sapien
ggtttcctgtgttgacatcgctgtg

SEQ ID NO: 4132785 - DNA, 25 bp, Homo sapien
tcaggaagacctgagctcgcccatt

SEQ ID NO: 4132786 - DNA, 25 bp, Homo sapien
tgagctcgcccattccttggatgga

SEQ ID NO: 4132787 - DNA, 25 bp, Homo sapien
tgggtgtgagggtcgtccagggcac

SEQ ID NO: 4132788 - DNA, 25 bp, Homo sapien
agccggcctcctagtgggaacctct

SEQ ID NO: 4132789 - DNA, 25 bp, Homo sapien
gaggacagctcaccaaacccagctt

SEQ ID NO: 4132790 - DNA, 25 bp, Homo sapien
ccagcttggcccatgggaaacagtg

SEQ ID NO: 4132791 - DNA, 25 bp, Homo sapien
cttggcccatgggaaacagtgtagg

SEQ ID NO: 4132792 - DNA, 25 bp, Homo sapien
tttcctttcgctccctggcctgagg

SEQ ID NO: 4132793 - DNA, 25 bp, Homo sapien
atgtgggctacagccgcctcgggct

SEQ ID NO: 4132794 - DNA, 25 bp, Homo sapien
tgggatgggccaagcggccagtgag

SEQ ID NO: 4132795 - DNA, 25 bp, Homo sapien
cgccgcggcacacggaagtgcgagg

SEQ ID NO: 4132796 - DNA, 25 bp, Homo sapien
gttgcaggggcaggcgccaagggtc

SEQ ID NO: 4132797 - DNA, 25 bp, Homo sapien
aggaaacagctgagccgggaggcac

SEQ ID NO: 4132798 - DNA, 25 bp, Homo sapien
aaacagctgagccgggaggcaccgc

SEQ ID NO: 4132799 - DNA, 25 bp, Homo sapien
gggaggcaccgccaaacaggctctc

SEQ ID NO: 4132800 - DNA, 25 bp, Homo sapien
aacaggaggaaacagctgagccggg

SEQ ID NO: 4132801 - DNA, 25 bp, Homo sapien
tcctgcttgtccttagtcctggctc

SEQ ID NO: 4132802 - DNA, 25 bp, Homo sapien
acgcaccaaccaccaggagaaacgg

SEQ ID NO: 4132803 - DNA, 25 bp, Homo sapien
tcccgctgctgctacaacgcaccaa

SEQ ID NO: 4132804 - DNA, 25 bp, Homo sapien
tacaacgcaccaaccaccaggagaa

SEQ ID NO: 4132805 - DNA, 25 bp, Homo sapien
tgcgtaacagccagtagggttggct

SEQ ID NO: 4132806 - DNA, 25 bp, Homo sapien
agacctataggtgcgtaacagccag

SEQ ID NO: 4132807 - DNA, 25 bp, Homo sapien
taggtgcgtaacagccagtagggtt

SEQ ID NO: 4132808 - DNA, 25 bp, Homo sapien
tataggtgcgtaacagccagtaggg

SEQ ID NO: 4132809 - DNA, 25 bp, Homo sapien
aggcacatcactgggcaggcctccg

SEQ ID NO: 4132810 - DNA, 25 bp, Homo sapien
ggtcaggcacatcactgggcaggcc

SEQ ID NO: 4132811 - DNA, 25 bp, Homo sapien
caaagtctaaagtgtgtaagggaag

SEQ ID NO: 4132812 - DNA, 25 bp, Homo sapien
ccctgaggctatggtggaggttgaa

SEQ ID NO: 4132813 - DNA, 25 bp, Homo sapien
agcttgtgtggggtagggcctcctt

SEQ ID NO: 4132814 - DNA, 25 bp, Homo sapien
gcacaggcctcgagtcaccagccag

SEQ ID NO: 4132815 - DNA, 25 bp, Homo sapien
ttgtgtggggtagggcctccttgga

SEQ ID NO: 4132816 - DNA, 25 bp, Homo sapien
ccaccaggcacaggcctcgagtcac

SEQ ID NO: 4132817 - DNA, 25 bp, Homo sapien
agtatgtgtgctgcacatccacacg

SEQ ID NO: 4132818 - DNA, 25 bp, Homo sapien
cagagcgaccttgggtttggagctc

SEQ ID NO: 4132819 - DNA, 25 bp, Homo sapien
cagcagacaagtatgtgtgctgcac

SEQ ID NO: 4132820 - DNA, 25 bp, Homo sapien
tcaaggtgatcagagcgaccttggg

SEQ ID NO: 4132821 - DNA, 25 bp, Homo sapien
agctgctgctcacatttagaagcca

SEQ ID NO: 4132822 - DNA, 25 bp, Homo sapien
agcagctgctgctcacatttagaag

SEQ ID NO: 4132823 - DNA, 25 bp, Homo sapien
cagagcagctgctgctcacatttag

SEQ ID NO: 4132824 - DNA, 25 bp, Homo sapien
gagcagctgctgctcacatttagaa

SEQ ID NO: 4132825 - DNA, 25 bp, Homo sapien
gccctccagctctctcaggccacac

SEQ ID NO: 4132826 - DNA, 25 bp, Homo sapien
ggccctccagctctctcaggccaca

SEQ ID NO: 4132827 - DNA, 25 bp, Homo sapien
ccaagggtggccctccagctctctc

SEQ ID NO: 4132828 - DNA, 25 bp, Homo sapien
agggtggccctccagctctctcagg

SEQ ID NO: 4132829 - DNA, 25 bp, Homo sapien
ccagccaccaacccttggggcccag

SEQ ID NO: 4132830 - DNA, 25 bp, Homo sapien
cagccaccaacccttggggcccagc

SEQ ID NO: 4132831 - DNA, 25 bp, Homo sapien
gtccaggcagccctctgaggccagc

SEQ ID NO: 4132832 - DNA, 25 bp, Homo sapien
tgcagcccagcccagtgagtccagg

SEQ ID NO: 4132833 - DNA, 25 bp, Homo sapien
cagcccagcccagtgagtccaggca

SEQ ID NO: 4132834 - DNA, 25 bp, Homo sapien
gcccagcccagtgagtccaggcagc

SEQ ID NO: 4132835 - DNA, 25 bp, Homo sapien
aggcgatgcgcaggaacggcgccat

SEQ ID NO: 4132836 - DNA, 25 bp, Homo sapien
gagcccagctcataggagttgaagg

SEQ ID NO: 4132837 - DNA, 25 bp, Homo sapien
gttgaaggcgatgcgcaggaacggc

SEQ ID NO: 4132838 - DNA, 25 bp, Homo sapien
cagaagggctggttcgcctcgtcct

SEQ ID NO: 4132839 - DNA, 25 bp, Homo sapien
cttctgcaccagtgttttcccacgc

SEQ ID NO: 4132840 - DNA, 25 bp, Homo sapien
ggtcggcttcttctgcaccagtgtt

SEQ ID NO: 4132841 - DNA, 25 bp, Homo sapien
gcttcttctgcaccagtgttttccc

SEQ ID NO: 4132842 - DNA, 25 bp, Homo sapien
ttcttctgcaccagtgttttcccac

SEQ ID NO: 4132843 - DNA, 25 bp, Homo sapien
ttagcacaatctggatgacgcgccc

SEQ ID NO: 4132844 - DNA, 25 bp, Homo sapien
tgttcttcttgcagcgctcggccag

SEQ ID NO: 4132845 - DNA, 25 bp, Homo sapien
tgggcatcgaacgtcgacttccact

SEQ ID NO: 4132846 - DNA, 25 bp, Homo sapien
acgcgcccctcatagatgtgggcat

SEQ ID NO: 4132847 - DNA, 25 bp, Homo sapien
tactgaacagacatcaacaccttgg

SEQ ID NO: 4132848 - DNA, 25 bp, Homo sapien
atactgaacagacatcaacaccttg

SEQ ID NO: 4132849 - DNA, 25 bp, Homo sapien
cctcactgcgcatagactgtttgca

SEQ ID NO: 4132850 - DNA, 25 bp, Homo sapien
cagaacagaaggtgggttgcccaaa

SEQ ID NO: 4132851 - DNA, 25 bp, Homo sapien
tcatcgttgggaacttggcctcgtc
